United States Patent Application Publication US 2018/0305689 A1 - sequence listing, part 147

SEQ ID NO: 2066439 - RNA, 19 nt, Artificial Sequence
  Description of Artificial Sequence: Synthetic oligonucleotide
  Antisense strand to SEQ ID NO: 2066438
acuacuaugcaccuuuacu

SEQ ID NO: 2066440 - RNA, 19 nt, Artificial Sequence
  Description of Artificial Sequence: Synthetic oligonucleotide
  Sense strand starting at position 1397 of SEQ ID NO: 1881719
cuguuaguauaucuugaaa

SEQ ID NO: 2066441 - RNA, 19 nt, Artificial Sequence
  Description of Artificial Sequence: Synthetic oligonucleotide
  Antisense strand to SEQ ID NO: 2066440
uuucaagauauacuaacag

SEQ ID NO: 2066442 - RNA, 19 nt, Artificial Sequence
  Description of Artificial Sequence: Synthetic oligonucleotide
  Sense strand starting at position 1410 of SEQ ID NO: 1881719
uugaaauaauggucaucac

SEQ ID NO: 2066443 - RNA, 19 nt, Artificial Sequence
  Description of Artificial Sequence: Synthetic oligonucleotide
  Antisense strand to SEQ ID NO: 2066442
gugaugaccauuauuucaa

SEQ ID NO: 2066444 - RNA, 19 nt, Artificial Sequence
  Description of Artificial Sequence: Synthetic oligonucleotide
  Sense strand starting at position 1516 of SEQ ID NO: 1881719
caggaaucaugugauuucu

SEQ ID NO: 2066445 - RNA, 19 nt, Artificial Sequence
  Description of Artificial Sequence: Synthetic oligonucleotide
  Antisense strand to SEQ ID NO: 2066444
agaaaucacaugauuccug

SEQ ID NO: 2066446 - RNA, 19 nt, Artificial Sequence
  Description of Artificial Sequence: Synthetic oligonucleotide
  Sense strand starting at position 2947 of SEQ ID NO: 1881719
ucaaucauugucuggagaa

SEQ ID NO: 2066447 - RNA, 19 nt, Artificial Sequence
  Description of Artificial Sequence: Synthetic oligonucleotide
  Antisense strand to SEQ ID NO: 2066446
uucuccagacaaugauuga

SEQ ID NO: 2066448 - RNA, 19 nt, Artificial Sequence
  Description of Artificial Sequence: Synthetic oligonucleotide
  Sense strand starting at position 2968 of SEQ ID NO: 1881719
aagauaccgucagauuuaa

SEQ ID NO: 2066449 - RNA, 19 nt, Artificial Sequence
  Description of Artificial Sequence: Synthetic oligonucleotide
  Antisense strand to SEQ ID NO: 2066448
uuaaaucugacgguaucuu

SEQ ID NO: 2066450 - RNA, 19 nt, Artificial Sequence
  Description of Artificial Sequence: Synthetic oligonucleotide
  Sense strand starting at position 3030 of SEQ ID NO: 1881719
aaagcuggauugucaaaca

SEQ ID NO: 2066451 - RNA, 19 nt, Artificial Sequence
  Description of Artificial Sequence: Synthetic oligonucleotide
  Antisense strand to SEQ ID NO: 2066450
uguuugacaauccagcuuu

SEQ ID NO: 2066452 - RNA, 19 nt, Artificial Sequence
  Description of Artificial Sequence: Synthetic oligonucleotide
  Sense strand starting at position 3080 of SEQ ID NO: 1881719
aguaacaucucuuuaaguu

SEQ ID NO: 2066453 - RNA, 19 nt, Artificial Sequence
  Description of Artificial Sequence: Synthetic oligonucleotide
  Antisense strand to SEQ ID NO: 2066452
aacuuaaagagauguuacu

SEQ ID NO: 2066454 - RNA, 19 nt, Artificial Sequence
  Description of Artificial Sequence: Synthetic oligonucleotide
  Sense strand starting at position 3081 of SEQ ID NO: 1881719
guaacaucucuuuaaguuu

SEQ ID NO: 2066455 - RNA, 19 nt, Artificial Sequence
  Description of Artificial Sequence: Synthetic oligonucleotide
  Antisense strand to SEQ ID NO: 2066454
aaacuuaaagagauguuac

SEQ ID NO: 2066456 - RNA, 19 nt, Artificial Sequence
  Description of Artificial Sequence: Synthetic oligonucleotide
  Sense strand starting at position 3327 of SEQ ID NO: 1881719
caugguauucuaugguaug

SEQ ID NO: 2066457 - RNA, 19 nt, Artificial Sequence
  Description of Artificial Sequence: Synthetic oligonucleotide
  Antisense strand to SEQ ID NO: 2066456
cauaccauagaauaccaug

SEQ ID NO: 2066458 - RNA, 19 nt, Artificial Sequence
  Description of Artificial Sequence: Synthetic oligonucleotide
  Sense strand starting at position 3347 of SEQ ID NO: 1881719
acacaucuacagugauuau

SEQ ID NO: 2066459 - RNA, 19 nt, Artificial Sequence
  Description of Artificial Sequence: Synthetic oligonucleotide
  Antisense strand to SEQ ID NO: 2066458
auaaucacuguagaugugu

SEQ ID NO: 2066460 - RNA, 19 nt, Artificial Sequence
  Description of Artificial Sequence: Synthetic oligonucleotide
  Sense strand starting at position 3382 of SEQ ID NO: 1881719
cuguguuguaaauagguga

SEQ ID NO: 2066461 - RNA, 19 nt, Artificial Sequence
  Description of Artificial Sequence: Synthetic oligonucleotide
  Antisense strand to SEQ ID NO: 2066460
ucaccuauuuacaacacag

SEQ ID NO: 2066462 - RNA, 19 nt, Artificial Sequence
  Description of Artificial Sequence: Synthetic oligonucleotide
  Sense strand starting at position 3389 of SEQ ID NO: 1881719
guaaauaggugacugcuau

SEQ ID NO: 2066463 - RNA, 19 nt, Artificial Sequence
  Description of Artificial Sequence: Synthetic oligonucleotide
  Antisense strand to SEQ ID NO: 2066462
auagcagucaccuauuuac

SEQ ID NO: 2066464 - RNA, 19 nt, Artificial Sequence
  Description of Artificial Sequence: Synthetic oligonucleotide
  Sense strand starting at position 3390 of SEQ ID NO: 1881719
uaaauaggugacugcuaua

SEQ ID NO: 2066465 - RNA, 19 nt, Artificial Sequence
  Description of Artificial Sequence: Synthetic oligonucleotide
  Antisense strand to SEQ ID NO: 2066464
uauagcagucaccuauuua

SEQ ID NO: 2066466 - RNA, 19 nt, Artificial Sequence
  Description of Artificial Sequence: Synthetic oligonucleotide
  Sense strand starting at position 3395 of SEQ ID NO: 1881719
aggugacugcuauaacucu

SEQ ID NO: 2066467 - RNA, 19 nt, Artificial Sequence
  Description of Artificial Sequence: Synthetic oligonucleotide
  Antisense strand to SEQ ID NO: 2066466
agaguuauagcagucaccu

SEQ ID NO: 2066468 - RNA, 19 nt, Artificial Sequence
  Description of Artificial Sequence: Synthetic oligonucleotide
  Sense strand starting at position 3455 of SEQ ID NO: 1881719
agccaugcugaugauuaaa

SEQ ID NO: 2066469 - RNA, 19 nt, Artificial Sequence
  Description of Artificial Sequence: Synthetic oligonucleotide
  Antisense strand to SEQ ID NO: 2066468
uuuaaucaucagcauggcu

SEQ ID NO: 2066470 - RNA, 19 nt, Artificial Sequence
  Description of Artificial Sequence: Synthetic oligonucleotide
  Sense strand starting at position 3457 of SEQ ID NO: 1881719
ccaugcugaugauuaaaua

SEQ ID NO: 2066471 - RNA, 19 nt, Artificial Sequence
  Description of Artificial Sequence: Synthetic oligonucleotide
  Antisense strand to SEQ ID NO: 2066470
uauuuaaucaucagcaugg

SEQ ID NO: 2066472 - RNA, 19 nt, Artificial Sequence
  Description of Artificial Sequence: Synthetic oligonucleotide
  Sense strand starting at position 3509 of SEQ ID NO: 1881719
ccuaguuaguggucauauu

SEQ ID NO: 2066473 - RNA, 19 nt, Artificial Sequence
  Description of Artificial Sequence: Synthetic oligonucleotide
  Antisense strand to SEQ ID NO: 2066472
aauaugaccacuaacuagg

SEQ ID NO: 2066474 - RNA, 19 nt, Artificial Sequence
  Description of Artificial Sequence: Synthetic oligonucleotide
  Sense strand starting at position 3517 of SEQ ID NO: 1881719
guggucauauuauugccua

SEQ ID NO: 2066475 - RNA, 19 nt, Artificial Sequence
  Description of Artificial Sequence: Synthetic oligonucleotide
  Antisense strand to SEQ ID NO: 2066474
uaggcaauaauaugaccac

SEQ ID NO: 2066476 - RNA, 19 nt, Artificial Sequence
  Description of Artificial Sequence: Synthetic oligonucleotide
  Sense strand starting at position 3576 of SEQ ID NO: 1881719
ugauuuaccuuguuugcau

SEQ ID NO: 2066477 - RNA, 19 nt, Artificial Sequence
  Description of Artificial Sequence: Synthetic oligonucleotide
  Antisense strand to SEQ ID NO: 2066476
augcaaacaagguaaauca

SEQ ID NO: 2066478 - RNA, 19 nt, Artificial Sequence
  Description of Artificial Sequence: Synthetic oligonucleotide
  Sense strand starting at position 3695 of SEQ ID NO: 1881719
agaggaaugucaggauaaa

SEQ ID NO: 2066479 - RNA, 19 nt, Artificial Sequence
  Description of Artificial Sequence: Synthetic oligonucleotide
  Antisense strand to SEQ ID NO: 2066478
uuuauccugacauuccucu

SEQ ID NO: 2066480 - RNA, 19 nt, Artificial Sequence
  Description of Artificial Sequence: Synthetic oligonucleotide
  Sense strand starting at position 3718 of SEQ ID NO: 1881719
augguauaaucaguaugua

SEQ ID NO: 2066481 - RNA, 19 nt, Artificial Sequence
  Description of Artificial Sequence: Synthetic oligonucleotide
  Antisense strand to SEQ ID NO: 2066480
uacauacugauuauaccau

SEQ ID NO: 2066482 - RNA, 19 nt, Artificial Sequence
  Description of Artificial Sequence: Synthetic oligonucleotide
  Sense strand starting at position 3719 of SEQ ID NO: 1881719
ugguauaaucaguauguau

SEQ ID NO: 2066483 - RNA, 19 nt, Artificial Sequence
  Description of Artificial Sequence: Synthetic oligonucleotide
  Antisense strand to SEQ ID NO: 2066482
auacauacugauuauacca

SEQ ID NO: 2066484 - RNA, 19 nt, Artificial Sequence
  Description of Artificial Sequence: Synthetic oligonucleotide
  Sense strand starting at position 3721 of SEQ ID NO: 1881719
guauaaucaguauguauca

SEQ ID NO: 2066485 - RNA, 19 nt, Artificial Sequence
  Description of Artificial Sequence: Synthetic oligonucleotide
  Antisense strand to SEQ ID NO: 2066484
ugauacauacugauuauac

SEQ ID NO: 2066486 - RNA, 19 nt, Artificial Sequence
  Description of Artificial Sequence: Synthetic oligonucleotide
  Sense strand starting at position 3732 of SEQ ID NO: 1881719
auguaucauuugggacuga

SEQ ID NO: 2066487 - RNA, 19 nt, Artificial Sequence
  Description of Artificial Sequence: Synthetic oligonucleotide
  Antisense strand to SEQ ID NO: 2066486
ucagucccaaaugauacau

SEQ ID NO: 2066488 - RNA, 19 nt, Artificial Sequence
  Description of Artificial Sequence: Synthetic oligonucleotide
  Sense strand starting at position 3733 of SEQ ID NO: 1881719
uguaucauuugggacugaa

SEQ ID NO: 2066489 - RNA, 19 nt, Artificial Sequence
  Description of Artificial Sequence: Synthetic oligonucleotide
  Antisense strand to SEQ ID NO: 2066488
uucagucccaaaugauaca

SEQ ID NO: 2066490 - RNA, 19 nt, Artificial Sequence
  Description of Artificial Sequence: Synthetic oligonucleotide
  Sense strand starting at position 144 of SEQ ID NO: 1881720
auccuaguguuauuuguaa

SEQ ID NO: 2066491 - RNA, 19 nt, Artificial Sequence
  Description of Artificial Sequence: Synthetic oligonucleotide
  Antisense strand to SEQ ID NO: 2066490
uuacaaauaacacuaggau

SEQ ID NO: 2066492 - RNA, 19 nt, Artificial Sequence
  Description of Artificial Sequence: Synthetic oligonucleotide
  Sense strand starting at position 158 of SEQ ID NO: 1881720
uguaauaaacauugugaca

SEQ ID NO: 2066493 - RNA, 19 nt, Artificial Sequence
  Description of Artificial Sequence: Synthetic oligonucleotide
  Antisense strand to SEQ ID NO: 2066492
ugucacaauguuuauuaca

SEQ ID NO: 2066494 - RNA, 19 nt, Artificial Sequence
  Description of Artificial Sequence: Synthetic oligonucleotide
  Sense strand starting at position 235 of SEQ ID NO: 1881720
guaaauacuguauacaugu

SEQ ID NO: 2066495 - RNA, 19 nt, Artificial Sequence
  Description of Artificial Sequence: Synthetic oligonucleotide
  Antisense strand to SEQ ID NO: 2066494
acauguauacaguauuuac

SEQ ID NO: 2066496 - RNA, 19 nt, Artificial Sequence
  Description of Artificial Sequence: Synthetic oligonucleotide
  Sense strand starting at position 679 of SEQ ID NO: 1881720
cagcuaguucuaugcagag

SEQ ID NO: 2066497 - RNA, 19 nt, Artificial Sequence
  Description of Artificial Sequence: Synthetic oligonucleotide
  Antisense strand to SEQ ID NO: 2066496
cucugcauagaacuagcug

SEQ ID NO: 2066498 - RNA, 19 nt, Artificial Sequence
  Description of Artificial Sequence: Synthetic oligonucleotide
  Sense strand starting at position 683 of SEQ ID NO: 1881720
uaguucuaugcagagccaa

SEQ ID NO: 2066499 - RNA, 19 nt, Artificial Sequence
  Description of Artificial Sequence: Synthetic oligonucleotide
  Antisense strand to SEQ ID NO: 2066498
uuggcucugcauagaacua

SEQ ID NO: 2066500 - RNA, 19 nt, Artificial Sequence
  Description of Artificial Sequence: Synthetic oligonucleotide
  Sense strand starting at position 691 of SEQ ID NO: 1881720
ugcagagccaaauguagaa

SEQ ID NO: 2066501 - RNA, 19 nt, Artificial Sequence
  Description of Artificial Sequence: Synthetic oligonucleotide
  Antisense strand to SEQ ID NO: 2066500
uucuacauuuggcucugca

SEQ ID NO: 2066502 - RNA, 19 nt, Artificial Sequence
  Description of Artificial Sequence: Synthetic oligonucleotide
  Sense strand starting at position 918 of SEQ ID NO: 1881720
acagaauacuggcuucuca

SEQ ID NO: 2066503 - RNA, 19 nt, Artificial Sequence
  Description of Artificial Sequence: Synthetic oligonucleotide
  Antisense strand to SEQ ID NO: 2066502
ugagaagccaguauucugu

SEQ ID NO: 2066504 - RNA, 19 nt, Artificial Sequence
  Description of Artificial Sequence: Synthetic oligonucleotide
  Sense strand starting at position 973 of SEQ ID NO: 1881720
uuggaacugugccucaauu

SEQ ID NO: 2066505 - RNA, 19 nt, Artificial Sequence
  Description of Artificial Sequence: Synthetic oligonucleotide
  Antisense strand to SEQ ID NO: 2066504
aauugaggcacaguuccaa

SEQ ID NO: 2066506 - RNA, 19 nt, Artificial Sequence
  Description of Artificial Sequence: Synthetic oligonucleotide
  Sense strand starting at position 1011 of SEQ ID NO: 1881720
aagugaaacccgcaacguu

SEQ ID NO: 2066507 - RNA, 19 nt, Artificial Sequence
  Description of Artificial Sequence: Synthetic oligonucleotide
  Antisense strand to SEQ ID NO: 2066506
aacguugcggguuucacuu

SEQ ID NO: 2066508 - RNA, 19 nt, Artificial Sequence
  Description of Artificial Sequence: Synthetic oligonucleotide
  Sense strand starting at position 1037 of SEQ ID NO: 1881720
guccguuucgcugauuucu

SEQ ID NO: 2066509 - RNA, 19 nt, Artificial Sequence
  Description of Artificial Sequence: Synthetic oligonucleotide
  Antisense strand to SEQ ID NO: 2066508
agaaaucagcgaaacggac

SEQ ID NO: 2066510 - RNA, 19 nt, Artificial Sequence
  Description of Artificial Sequence: Synthetic oligonucleotide
  Sense strand starting at position 1045 of SEQ ID NO: 1881720
cgcugauuucuggguaaau

SEQ ID NO: 2066511 - RNA, 19 nt, Artificial Sequence
  Description of Artificial Sequence: Synthetic oligonucleotide
  Antisense strand to SEQ ID NO: 2066510
auuuacccagaaaucagcg

SEQ ID NO: 2066512 - RNA, 19 nt, Artificial Sequence
  Description of Artificial Sequence: Synthetic oligonucleotide
  Sense strand starting at position 1404 of SEQ ID NO: 1881720
cugagauccugguuaggaa

SEQ ID NO: 2066513 - RNA, 19 nt, Artificial Sequence
  Description of Artificial Sequence: Synthetic oligonucleotide
  Antisense strand to SEQ ID NO: 2066512
uuccuaaccaggaucucag

SEQ ID NO: 2066514 - RNA, 19 nt, Artificial Sequence
  Description of Artificial Sequence: Synthetic oligonucleotide
  Sense strand starting at position 2124 of SEQ ID NO: 1881720
gaaguuaagucucuauaga

SEQ ID NO: 2066515 - RNA, 19 nt, Artificial Sequence
  Description of Artificial Sequence: Synthetic oligonucleotide
  Antisense strand to SEQ ID NO: 2066514
ucuauagagacuuaacuuc

SEQ ID NO: 2066516 - RNA, 19 nt, Artificial Sequence
  Description of Artificial Sequence: Synthetic oligonucleotide
  Sense strand starting at position 2330 of SEQ ID NO: 1881720
agaguuuagcuccaggaug

SEQ ID NO: 2066517 - RNA, 19 nt, Artificial Sequence
  Description of Artificial Sequence: Synthetic oligonucleotide
  Antisense strand to SEQ ID NO: 2066516
cauccuggagcuaaacucu

SEQ ID NO: 2066518 - RNA, 19 nt, Artificial Sequence
  Description of Artificial Sequence: Synthetic oligonucleotide
  Sense strand starting at position 2366 of SEQ ID NO: 1881720
aucccucagguuuggauaa

SEQ ID NO: 2066519 - RNA, 19 nt, Artificial Sequence
  Description of Artificial Sequence: Synthetic oligonucleotide
  Antisense strand to SEQ ID NO: 2066518
uuauccaaaccugagggau

SEQ ID NO: 2066520 - RNA, 19 nt, Artificial Sequence
  Description of Artificial Sequence: Synthetic oligonucleotide
  Sense strand starting at position 2420 of SEQ ID NO: 1881720
agagucauugagcacucua

SEQ ID NO: 2066521 - RNA, 19 nt, Artificial Sequence
  Description of Artificial Sequence: Synthetic oligonucleotide
  Antisense strand to SEQ ID NO: 2066520
uagagugcucaaugacucu

SEQ ID NO: 2066522 - RNA, 19 nt, Artificial Sequence
  Description of Artificial Sequence: Synthetic oligonucleotide
  Sense strand starting at position 2455 of SEQ ID NO: 1881720
ugaauucucuaauugggac

SEQ ID NO: 2066523 - RNA, 19 nt, Artificial Sequence
  Description of Artificial Sequence: Synthetic oligonucleotide
  Antisense strand to SEQ ID NO: 2066522
gucccaauuagagaauuca

SEQ ID NO: 2066524 - RNA, 19 nt, Artificial Sequence
  Description of Artificial Sequence: Synthetic oligonucleotide
  Sense strand starting at position 2470 of SEQ ID NO: 1881720
ggacuuucuugaccuaguu

SEQ ID NO: 2066525 - RNA, 19 nt, Artificial Sequence
  Description of Artificial Sequence: Synthetic oligonucleotide
  Antisense strand to SEQ ID NO: 2066524
aacuaggucaagaaagucc

SEQ ID NO: 2066526 - RNA, 19 nt, Artificial Sequence
  Description of Artificial Sequence: Synthetic oligonucleotide
  Sense strand starting at position 2508 of SEQ ID NO: 1881720
uguauucugcuacagaaac

SEQ ID NO: 2066527 - RNA, 19 nt, Artificial Sequence
  Description of Artificial Sequence: Synthetic oligonucleotide
  Antisense strand to SEQ ID NO: 2066526
guuucuguagcagaauaca

SEQ ID NO: 2066528 - RNA, 19 nt, Artificial Sequence
  Description of Artificial Sequence: Synthetic oligonucleotide
  Sense strand starting at position 2717 of SEQ ID NO: 1881720
aucugugaacacugcauau

SEQ ID NO: 2066529 - RNA, 19 nt, Artificial Sequence
  Description of Artificial Sequence: Synthetic oligonucleotide
  Antisense strand to SEQ ID NO: 2066528
auaugcaguguucacagau

SEQ ID NO: 2066530 - RNA, 19 nt, Artificial Sequence
  Description of Artificial Sequence: Synthetic oligonucleotide
  Sense strand starting at position 2719 of SEQ ID NO: 1881720
cugugaacacugcauauau

SEQ ID NO: 2066531 - RNA, 19 nt, Artificial Sequence
  Description of Artificial Sequence: Synthetic oligonucleotide
  Antisense strand to SEQ ID NO: 2066530
auauaugcaguguucacag

SEQ ID NO: 2066532 - RNA, 19 nt, Artificial Sequence
  Description of Artificial Sequence: Synthetic oligonucleotide
  Sense strand starting at position 2891 of SEQ ID NO: 1881720
gguauaacauguuauuuga

SEQ ID NO: 2066533 - RNA, 19 nt, Artificial Sequence
  Description of Artificial Sequence: Synthetic oligonucleotide
  Antisense strand to SEQ ID NO: 2066532
ucaaauaacauguuauacc

SEQ ID NO: 2066534 - RNA, 19 nt, Artificial Sequence
  Description of Artificial Sequence: Synthetic oligonucleotide
  Sense strand starting at position 2901 of SEQ ID NO: 1881720
guuauuugauuggaguaga

SEQ ID NO: 2066535 - RNA, 19 nt, Artificial Sequence
  Description of Artificial Sequence: Synthetic oligonucleotide
  Antisense strand to SEQ ID NO: 2066534
ucuacuccaaucaaauaac

SEQ ID NO: 2066536 - RNA, 19 nt, Artificial Sequence
  Description of Artificial Sequence: Synthetic oligonucleotide
  Sense strand starting at position 2912 of SEQ ID NO: 1881720
ggaguagaauaauaauuuc

SEQ ID NO: 2066537 - RNA, 19 nt, Artificial Sequence
  Description of Artificial Sequence: Synthetic oligonucleotide
  Antisense strand to SEQ ID NO: 2066536
gaaauuauuauucuacucc

SEQ ID NO: 2066538 - RNA, 19 nt, Artificial Sequence
  Description of Artificial Sequence: Synthetic oligonucleotide
  Sense strand starting at position 3146 of SEQ ID NO: 1881720
ucagauaaauuagagguaa

SEQ ID NO: 2066539 - RNA, 19 nt, Artificial Sequence
  Description of Artificial Sequence: Synthetic oligonucleotide
  Antisense strand to SEQ ID NO: 2066538
uuaccucuaauuuaucuga

SEQ ID NO: 2066540 - RNA, 19 nt, Artificial Sequence
  Description of Artificial Sequence: Synthetic oligonucleotide
  Sense strand starting at position 3179 of SEQ ID NO: 1881720
cugugagcaccuuaauuag

SEQ ID NO: 2066541 - RNA, 19 nt, Artificial Sequence
  Description of Artificial Sequence: Synthetic oligonucleotide
  Antisense strand to SEQ ID NO: 2066540
cuaauuaaggugcucacag

SEQ ID NO: 2066542 - RNA, 19 nt, Artificial Sequence
  Description of Artificial Sequence: Synthetic oligonucleotide
  Sense strand starting at position 3276 of SEQ ID NO: 1881720
ucauguauuuaguacaaug

SEQ ID NO: 2066543 - RNA, 19 nt, Artificial Sequence
  Description of Artificial Sequence: Synthetic oligonucleotide
  Antisense strand to SEQ ID NO: 2066542
cauuguacuaaauacauga

SEQ ID NO: 2066544 - RNA, 19 nt, Artificial Sequence
  Description of Artificial Sequence: Synthetic oligonucleotide
  Sense strand starting at position 3379 of SEQ ID NO: 1881720
gaauguggauuaguauguu

SEQ ID NO: 2066545 - RNA, 19 nt, Artificial Sequence
  Description of Artificial Sequence: Synthetic oligonucleotide
  Antisense strand to SEQ ID NO: 2066544
aacauacuaauccacauuc

SEQ ID NO: 2066546 - RNA, 19 nt, Artificial Sequence
  Description of Artificial Sequence: Synthetic oligonucleotide
  Sense strand starting at position 3446 of SEQ ID NO: 1881720
uaggguaaugguuaagcaa

SEQ ID NO: 2066547 - RNA, 19 nt, Artificial Sequence
  Description of Artificial Sequence: Synthetic oligonucleotide
  Antisense strand to SEQ ID NO: 2066546
uugcuuaaccauuacccua

SEQ ID NO: 2066548 - RNA, 19 nt, Artificial Sequence
  Description of Artificial Sequence: Synthetic oligonucleotide
  Sense strand starting at position 3449 of SEQ ID NO: 1881720
gguaaugguuaagcaaaua

SEQ ID NO: 2066549 - RNA, 19 nt, Artificial Sequence
  Description of Artificial Sequence: Synthetic oligonucleotide
  Antisense strand to SEQ ID NO: 2066548
uauuugcuuaaccauuacc

SEQ ID NO: 2066550 - RNA, 19 nt, Artificial Sequence
  Description of Artificial Sequence: Synthetic oligonucleotide
  Sense strand starting at position 3469 of SEQ ID NO: 1881720
ugaaauguugcacacuaaa

SEQ ID NO: 2066551 - RNA, 19 nt, Artificial Sequence
  Description of Artificial Sequence: Synthetic oligonucleotide
  Antisense strand to SEQ ID NO: 2066550
uuuagugugcaacauuuca

SEQ ID NO: 2066552 - RNA, 19 nt, Artificial Sequence
  Description of Artificial Sequence: Synthetic oligonucleotide
  Sense strand starting at position 3491 of SEQ ID NO: 1881720
cuuguuguuguagaauaua

SEQ ID NO: 2066553 - RNA, 19 nt, Artificial Sequence
  Description of Artificial Sequence: Synthetic oligonucleotide
  Antisense strand to SEQ ID NO: 2066552
uauauucuacaacaacaag

SEQ ID NO: 2066554 - RNA, 19 nt, Artificial Sequence
  Description of Artificial Sequence: Synthetic oligonucleotide
  Sense strand starting at position 3494 of SEQ ID NO: 1881720
guuguuguagaauauauac

SEQ ID NO: 2066555 - RNA, 19 nt, Artificial Sequence
  Description of Artificial Sequence: Synthetic oligonucleotide
  Antisense strand to SEQ ID NO: 2066554
guauauauucuacaacaac

SEQ ID NO: 2066556 - RNA, 19 nt, Artificial Sequence
  Description of Artificial Sequence: Synthetic oligonucleotide
  Sense strand starting at position 3556 of SEQ ID NO: 1881720
uuguauacacuguguuaaa

SEQ ID NO: 2066557 - RNA, 19 nt, Artificial Sequence
  Description of Artificial Sequence: Synthetic oligonucleotide
  Antisense strand to SEQ ID NO: 2066556
uuuaacacaguguauacaa

SEQ ID NO: 2066558 - RNA, 19 nt, Artificial Sequence
  Description of Artificial Sequence: Synthetic oligonucleotide
  Sense strand starting at position 3557 of SEQ ID NO: 1881720
uguauacacuguguuaaau

SEQ ID NO: 2066559 - RNA, 19 nt, Artificial Sequence
  Description of Artificial Sequence: Synthetic oligonucleotide
  Antisense strand to SEQ ID NO: 2066558
auuuaacacaguguauaca

SEQ ID NO: 2066560 - RNA, 19 nt, Artificial Sequence
  Description of Artificial Sequence: Synthetic oligonucleotide
  Sense strand starting at position 3582 of SEQ ID NO: 1881720
augugaacccaagguauaa

SEQ ID NO: 2066561 - RNA, 19 nt, Artificial Sequence
  Description of Artificial Sequence: Synthetic oligonucleotide
  Antisense strand to SEQ ID NO: 2066560
uuauaccuuggguucacau

SEQ ID NO: 2066562 - RNA, 19 nt, Artificial Sequence
  Description of Artificial Sequence: Synthetic oligonucleotide
  Sense strand starting at position 3594 of SEQ ID NO: 1881720
gguauaauuguggguuauu

SEQ ID NO: 2066563 - RNA, 19 nt, Artificial Sequence
  Description of Artificial Sequence: Synthetic oligonucleotide
  Antisense strand to SEQ ID NO: 2066562
aauaacccacaauuauacc

SEQ ID NO: 2066564 - RNA, 19 nt, Artificial Sequence
  Description of Artificial Sequence: Synthetic oligonucleotide
  Sense strand starting at position 3777 of SEQ ID NO: 1881720
gguccagugagagguaauu

SEQ ID NO: 2066565 - RNA, 19 nt, Artificial Sequence
  Description of Artificial Sequence: Synthetic oligonucleotide
  Antisense strand to SEQ ID NO: 2066564
aauuaccucucacuggacc

SEQ ID NO: 2066566 - RNA, 19 nt, Artificial Sequence
  Description of Artificial Sequence: Synthetic oligonucleotide
  Sense strand starting at position 3809 of SEQ ID NO: 1881720
aggucuuuccuguacuauu

SEQ ID NO: 2066567 - RNA, 19 nt, Artificial Sequence
  Description of Artificial Sequence: Synthetic oligonucleotide
  Antisense strand to SEQ ID NO: 2066566
aauaguacaggaaagaccu

SEQ ID NO: 2066568 - RNA, 19 nt, Artificial Sequence
  Description of Artificial Sequence: Synthetic oligonucleotide
  Sense strand starting at position 3893 of SEQ ID NO: 1881720
gcuugcugccgcccauaua

SEQ ID NO: 2066569 - RNA, 19 nt, Artificial Sequence
  Description of Artificial Sequence: Synthetic oligonucleotide
  Antisense strand to SEQ ID NO: 2066568
uauaugggcggcagcaagc

SEQ ID NO: 2066570 - RNA, 19 nt, Artificial Sequence
  Description of Artificial Sequence: Synthetic oligonucleotide
  Sense strand starting at position 31 of SEQ ID NO: 1881721
ggcuauaagccagacuuga

SEQ ID NO: 2066571 - RNA, 19 nt, Artificial Sequence
  Description of Artificial Sequence: Synthetic oligonucleotide
  Antisense strand to SEQ ID NO: 2066570
ucaagucuggcuuauagcc

SEQ ID NO: 2066572 - RNA, 19 nt, Artificial Sequence
  Description of Artificial Sequence: Synthetic oligonucleotide
  Sense strand starting at position 39 of SEQ ID NO: 1881721
gccagacuugaaggaaauc

SEQ ID NO: 2066573 - RNA, 19 nt, Artificial Sequence
  Description of Artificial Sequence: Synthetic oligonucleotide
  Antisense strand to SEQ ID NO: 2066572
gauuuccuucaagucuggc

SEQ ID NO: 2066574 - RNA, 19 nt, Artificial Sequence
  Description of Artificial Sequence: Synthetic oligonucleotide
  Sense strand starting at position 448 of SEQ ID NO: 1881721
ugguuaggauuugauuacu

SEQ ID NO: 2066575 - RNA, 19 nt, Artificial Sequence
  Description of Artificial Sequence: Synthetic oligonucleotide
  Antisense strand to SEQ ID NO: 2066574
aguaaucaaauccuaacca

SEQ ID NO: 2066576 - RNA, 19 nt, Artificial Sequence
  Description of Artificial Sequence: Synthetic oligonucleotide
  Sense strand starting at position 454 of SEQ ID NO: 1881721
ggauuugauuacuaacuga

SEQ ID NO: 2066577 - RNA, 19 nt, Artificial Sequence
  Description of Artificial Sequence: Synthetic oligonucleotide
  Antisense strand to SEQ ID NO: 2066576
ucaguuaguaaucaaaucc

SEQ ID NO: 2066578 - RNA, 19 nt, Artificial Sequence
  Description of Artificial Sequence: Synthetic oligonucleotide
  Sense strand starting at position 469 of SEQ ID NO: 1881721
cugacagcuuccguaauuu

SEQ ID NO: 2066579 - RNA, 19 nt, Artificial Sequence
  Description of Artificial Sequence: Synthetic oligonucleotide
  Antisense strand to SEQ ID NO: 2066578
aaauuacggaagcugucag

SEQ ID NO: 2066580 - RNA, 19 nt, Artificial Sequence
  Description of Artificial Sequence: Synthetic oligonucleotide
  Sense strand starting at position 480 of SEQ ID NO: 1881721
cguaauuucuguccuugau

SEQ ID NO: 2066581 - RNA, 19 nt, Artificial Sequence
  Description of Artificial Sequence: Synthetic oligonucleotide
  Antisense strand to SEQ ID NO: 2066580
aucaaggacagaaauuacg

SEQ ID NO: 2066582 - RNA, 19 nt, Artificial Sequence
  Description of Artificial Sequence: Synthetic oligonucleotide
  Sense strand starting at position 550 of SEQ ID NO: 1881721
auagaauguugugcuucua

SEQ ID NO: 2066583 - RNA, 19 nt, Artificial Sequence
  Description of Artificial Sequence: Synthetic oligonucleotide
  Antisense strand to SEQ ID NO: 2066582
uagaagcacaacauucuau

SEQ ID NO: 2066584 - RNA, 19 nt, Artificial Sequence
  Description of Artificial Sequence: Synthetic oligonucleotide
  Sense strand starting at position 670 of SEQ ID NO: 1881721
ucgagucccuacucaaaug

SEQ ID NO: 2066585 - RNA, 19 nt, Artificial Sequence
  Description of Artificial Sequence: Synthetic oligonucleotide
  Antisense strand to SEQ ID NO: 2066584
cauuugaguagggacucga

SEQ ID NO: 2066586 - RNA, 19 nt, Artificial Sequence
  Description of Artificial Sequence: Synthetic oligonucleotide
  Sense strand starting at position 755 of SEQ ID NO: 1881721
uuugguuggucuccauuua

SEQ ID NO: 2066587 - RNA, 19 nt, Artificial Sequence
  Description of Artificial Sequence: Synthetic oligonucleotide
  Antisense strand to SEQ ID NO: 2066586
uaaauggagaccaaccaaa

SEQ ID NO: 2066588 - RNA, 19 nt, Artificial Sequence
  Description of Artificial Sequence: Synthetic oligonucleotide
  Sense strand starting at position 857 of SEQ ID NO: 1881721
aggaaauauuaacacaaag

SEQ ID NO: 2066589 - RNA, 19 nt, Artificial Sequence
  Description of Artificial Sequence: Synthetic oligonucleotide
  Antisense strand to SEQ ID NO: 2066588
cuuuguguuaauauuuccu

SEQ ID NO: 2066590 - RNA, 19 nt, Artificial Sequence
  Description of Artificial Sequence: Synthetic oligonucleotide
  Sense strand starting at position 1041 of SEQ ID NO: 1881721
guagaagugguuugcuacu

SEQ ID NO: 2066591 - RNA, 19 nt, Artificial Sequence
  Description of Artificial Sequence: Synthetic oligonucleotide
  Antisense strand to SEQ ID NO: 2066590
aguagcaaaccacuucuac

SEQ ID NO: 2066592 - RNA, 19 nt, Artificial Sequence
  Description of Artificial Sequence: Synthetic oligonucleotide
  Sense strand starting at position 1043 of SEQ ID NO: 1881721
agaagugguuugcuacuua

SEQ ID NO: 2066593 - RNA, 19 nt, Artificial Sequence
  Description of Artificial Sequence: Synthetic oligonucleotide
  Antisense strand to SEQ ID NO: 2066592
uaaguagcaaaccacuucu

SEQ ID NO: 2066594 - RNA, 19 nt, Artificial Sequence
  Description of Artificial Sequence: Synthetic oligonucleotide
  Sense strand starting at position 1263 of SEQ ID NO: 1881721
gcuggaauuugaggcauua

SEQ ID NO: 2066595 - RNA, 19 nt, Artificial Sequence
  Description of Artificial Sequence: Synthetic oligonucleotide
  Antisense strand to SEQ ID NO: 2066594
uaaugccucaaauuccagc

SEQ ID NO: 2066596 - RNA, 19 nt, Artificial Sequence
  Description of Artificial Sequence: Synthetic oligonucleotide
  Sense strand starting at position 1314 of SEQ ID NO: 1881721
aaauccaguuugggauuua

SEQ ID NO: 2066597 - RNA, 19 nt, Artificial Sequence
  Description of Artificial Sequence: Synthetic oligonucleotide
  Antisense strand to SEQ ID NO: 2066596
uaaaucccaaacuggauuu

SEQ ID NO: 2066598 - RNA, 19 nt, Artificial Sequence
  Description of Artificial Sequence: Synthetic oligonucleotide
  Sense strand starting at position 1315 of SEQ ID NO: 1881721
aauccaguuugggauuuau

SEQ ID NO: 2066599 - RNA, 19 nt, Artificial Sequence
  Description of Artificial Sequence: Synthetic oligonucleotide
  Antisense strand to SEQ ID NO: 2066598
auaaaucccaaacuggauu

SEQ ID NO: 2066600 - RNA, 19 nt, Artificial Sequence
  Description of Artificial Sequence: Synthetic oligonucleotide
  Sense strand starting at position 1472 of SEQ ID NO: 1881721
ccauuaggguugguugaga

SEQ ID NO: 2066601 - RNA, 19 nt, Artificial Sequence
  Description of Artificial Sequence: Synthetic oligonucleotide
  Antisense strand to SEQ ID NO: 2066600
ucucaaccaacccuaaugg

SEQ ID NO: 2066602 - RNA, 19 nt, Artificial Sequence
  Description of Artificial Sequence: Synthetic oligonucleotide
  Sense strand starting at position 1477 of SEQ ID NO: 1881721
aggguugguugagaaagga

SEQ ID NO: 2066603 - RNA, 19 nt, Artificial Sequence
  Description of Artificial Sequence: Synthetic oligonucleotide
  Antisense strand to SEQ ID NO: 2066602
uccuuucucaaccaacccu

SEQ ID NO: 2066604 - RNA, 19 nt, Artificial Sequence
  Description of Artificial Sequence: Synthetic oligonucleotide
  Sense strand starting at position 1496 of SEQ ID NO: 1881721
cuuugaagcuauggaauaa

SEQ ID NO: 2066605 - RNA, 19 nt, Artificial Sequence
  Description of Artificial Sequence: Synthetic oligonucleotide
  Antisense strand to SEQ ID NO: 2066604
uuauuccauagcuucaaag

SEQ ID NO: 2066606 - RNA, 19 nt, Artificial Sequence
  Description of Artificial Sequence: Synthetic oligonucleotide
  Sense strand starting at position 1693 of SEQ ID NO: 1881721
aauauaagaugugagcauu

SEQ ID NO: 2066607 - RNA, 19 nt, Artificial Sequence
  Description of Artificial Sequence: Synthetic oligonucleotide
  Antisense strand to SEQ ID NO: 2066606
aaugcucacaucuuauauu

SEQ ID NO: 2066608 - RNA, 19 nt, Artificial Sequence
  Description of Artificial Sequence: Synthetic oligonucleotide
  Sense strand starting at position 1728 of SEQ ID NO: 1881721
agagguguccagugugguu

SEQ ID NO: 2066609 - RNA, 19 nt, Artificial Sequence
  Description of Artificial Sequence: Synthetic oligonucleotide
  Antisense strand to SEQ ID NO: 2066608
aaccacacuggacaccucu

SEQ ID NO: 2066610 - RNA, 19 nt, Artificial Sequence
  Description of Artificial Sequence: Synthetic oligonucleotide
  Sense strand starting at position 1735 of SEQ ID NO: 1881721
uccagugugguuggacuaa

SEQ ID NO: 2066611 - RNA, 19 nt, Artificial Sequence
  Description of Artificial Sequence: Synthetic oligonucleotide
  Antisense strand to SEQ ID NO: 2066610
uuaguccaaccacacugga

SEQ ID NO: 2066612 - RNA, 19 nt, Artificial Sequence
  Description of Artificial Sequence: Synthetic oligonucleotide
  Sense strand starting at position 1880 of SEQ ID NO: 1881721
gauggcagguguccuuaga

SEQ ID NO: 2066613 - RNA, 19 nt, Artificial Sequence
  Description of Artificial Sequence: Synthetic oligonucleotide
  Antisense strand to SEQ ID NO: 2066612
ucuaaggacaccugccauc

SEQ ID NO: 2066614 - RNA, 19 nt, Artificial Sequence
  Description of Artificial Sequence: Synthetic oligonucleotide
  Sense strand starting at position 2621 of SEQ ID NO: 1881721
uacuaagucccagauagug

SEQ ID NO: 2066615 - RNA, 19 nt, Artificial Sequence
  Description of Artificial Sequence: Synthetic oligonucleotide
  Antisense strand to SEQ ID NO: 2066614
cacuaucugggacuuagua

SEQ ID NO: 2066616 - RNA, 19 nt, Artificial Sequence
  Description of Artificial Sequence: Synthetic oligonucleotide
  Sense strand starting at position 2623 of SEQ ID NO: 1881721
cuaagucccagauaguguu

SEQ ID NO: 2066617 - RNA, 19 nt, Artificial Sequence
  Description of Artificial Sequence: Synthetic oligonucleotide
  Antisense strand to SEQ ID NO: 2066616
aacacuaucugggacuuag

SEQ ID NO: 2066618 - RNA, 19 nt, Artificial Sequence
  Description of Artificial Sequence: Synthetic oligonucleotide
  Sense strand starting at position 2633 of SEQ ID NO: 1881721
gauaguguuucguugcuga

SEQ ID NO: 2066619 - RNA, 19 nt, Artificial Sequence
  Description of Artificial Sequence: Synthetic oligonucleotide
  Antisense strand to SEQ ID NO: 2066618
ucagcaacgaaacacuauc

SEQ ID NO: 2066620 - RNA, 19 nt, Artificial Sequence
  Description of Artificial Sequence: Synthetic oligonucleotide
  Sense strand starting at position 2636 of SEQ ID NO: 1881721
aguguuucguugcugaaga

SEQ ID NO: 2066621 - RNA, 19 nt, Artificial Sequence
  Description of Artificial Sequence: Synthetic oligonucleotide
  Antisense strand to SEQ ID NO: 2066620
ucuucagcaacgaaacacu

SEQ ID NO: 2066622 - RNA, 19 nt, Artificial Sequence
  Description of Artificial Sequence: Synthetic oligonucleotide
  Sense strand starting at position 2638 of SEQ ID NO: 1881721
uguuucguugcugaagaca

SEQ ID NO: 2066623 - RNA, 19 nt, Artificial Sequence
  Description of Artificial Sequence: Synthetic oligonucleotide
  Antisense strand to SEQ ID NO: 2066622
ugucuucagcaacgaaaca

SEQ ID NO: 2066624 - RNA, 19 nt, Artificial Sequence
  Description of Artificial Sequence: Synthetic oligonucleotide
  Sense strand starting at position 2779 of SEQ ID NO: 1881721
uagugauauuuggauacau

SEQ ID NO: 2066625 - RNA, 19 nt, Artificial Sequence
  Description of Artificial Sequence: Synthetic oligonucleotide
  Antisense strand to SEQ ID NO: 2066624
auguauccaaauaucacua

SEQ ID NO: 2066626 - RNA, 19 nt, Artificial Sequence
  Description of Artificial Sequence: Synthetic oligonucleotide
  Sense strand starting at position 2854 of SEQ ID NO: 1881721
ucauuacuuuguguugaga

SEQ ID NO: 2066627 - RNA, 19 nt, Artificial Sequence
  Description of Artificial Sequence: Synthetic oligonucleotide
  Antisense strand to SEQ ID NO: 2066626
ucucaacacaaaguaauga

SEQ ID NO: 2066628 - RNA, 19 nt, Artificial Sequence
  Description of Artificial Sequence: Synthetic oligonucleotide
  Sense strand starting at position 2857 of SEQ ID NO: 1881721
uuacuuuguguugagaaca

SEQ ID NO: 2066629 - RNA, 19 nt, Artificial Sequence
  Description of Artificial Sequence: Synthetic oligonucleotide
  Antisense strand to SEQ ID NO: 2066628
uguucucaacacaaaguaa

SEQ ID NO: 2066630 - RNA, 19 nt, Artificial Sequence
  Description of Artificial Sequence: Synthetic oligonucleotide
  Sense strand starting at position 3215 of SEQ ID NO: 1881721
gugcucgaccuuuauaaua

SEQ ID NO: 2066631 - RNA, 19 nt, Artificial Sequence
  Description of Artificial Sequence: Synthetic oligonucleotide
  Antisense strand to SEQ ID NO: 2066630
uauuauaaaggucgagcac

SEQ ID NO: 2066632 - RNA, 19 nt, Artificial Sequence
  Description of Artificial Sequence: Synthetic oligonucleotide
  Sense strand starting at position 3241 of SEQ ID NO: 1881721
guuaauugucggcacccua

SEQ ID NO: 2066633 - RNA, 19 nt, Artificial Sequence
  Description of Artificial Sequence: Synthetic oligonucleotide
  Antisense strand to SEQ ID NO: 2066632
uagggugccgacaauuaac

SEQ ID NO: 2066634 - RNA, 19 nt, Artificial Sequence
  Description of Artificial Sequence: Synthetic oligonucleotide
  Sense strand starting at position 3373 of SEQ ID NO: 1881721
cucauuacuucugugagaa

SEQ ID NO: 2066635 - RNA, 19 nt, Artificial Sequence
  Description of Artificial Sequence: Synthetic oligonucleotide
  Antisense strand to SEQ ID NO: 2066634
uucucacagaaguaaugag

SEQ ID NO: 2066636 - RNA, 19 nt, Artificial Sequence
  Description of Artificial Sequence: Synthetic oligonucleotide
  Sense strand starting at position 3374 of SEQ ID NO: 1881721
ucauuacuucugugagaaa

SEQ ID NO: 2066637 - RNA, 19 nt, Artificial Sequence
  Description of Artificial Sequence: Synthetic oligonucleotide
  Antisense strand to SEQ ID NO: 2066636
uuucucacagaaguaauga

SEQ ID NO: 2066638 - RNA, 19 nt, Artificial Sequence
  Description of Artificial Sequence: Synthetic oligonucleotide
  Sense strand starting at position 3377 of SEQ ID NO: 1881721
uuacuucugugagaaauaa

SEQ ID NO: 2066639 - RNA, 19 nt, Artificial Sequence
  Description of Artificial Sequence: Synthetic oligonucleotide
  Antisense strand to SEQ ID NO: 2066638
uuauuucucacagaaguaa

SEQ ID NO: 2066640 - RNA, 19 nt, Artificial Sequence
  Description of Artificial Sequence: Synthetic oligonucleotide
  Sense strand starting at position 3500 of SEQ ID NO: 1881721
gcucaagaguuugagagga

SEQ ID NO: 2066641 - RNA, 19 nt, Artificial Sequence
  Description of Artificial Sequence: Synthetic oligonucleotide
  Antisense strand to SEQ ID NO: 2066640
uccucucaaacucuugagc

SEQ ID NO: 2066642 - RNA, 19 nt, Artificial Sequence
  Description of Artificial Sequence: Synthetic oligonucleotide
  Sense strand starting at position 3576 of SEQ ID NO: 1881721
uggccauugagcugagauu

SEQ ID NO: 2066643 - RNA, 19 nt, Artificial Sequence
  Description of Artificial Sequence: Synthetic oligonucleotide
  Antisense strand to SEQ ID NO: 2066642
aaucucagcucaauggcca

SEQ ID NO: 2066644 - RNA, 19 nt, Artificial Sequence
  Description of Artificial Sequence: Synthetic oligonucleotide
  Sense strand starting at position 3976 of SEQ ID NO: 1881721
uucuuaugccuguguguca

SEQ ID NO: 2066645 - RNA, 19 nt, Artificial Sequence
  Description of Artificial Sequence: Synthetic oligonucleotide
  Antisense strand to SEQ ID NO: 2066644
ugacacacaggcauaagaa

SEQ ID NO: 2066646 - RNA, 19 nt, Artificial Sequence
  Description of Artificial Sequence: Synthetic oligonucleotide
  Sense strand starting at position 3977 of SEQ ID NO: 1881721
ucuuaugccugugugucaa

SEQ ID NO: 2066647 - RNA, 19 nt, Artificial Sequence
  Description of Artificial Sequence: Synthetic oligonucleotide
  Antisense strand to SEQ ID NO: 2066646
uugacacacaggcauaaga

SEQ ID NO: 2066648 - RNA, 19 nt, Artificial Sequence
  Description of Artificial Sequence: Synthetic oligonucleotide
  Sense strand starting at position 3979 of SEQ ID NO: 1881721
uuaugccugugugucaaau

SEQ ID NO: 2066649 - RNA, 19 nt, Artificial Sequence
  Description of Artificial Sequence: Synthetic oligonucleotide
  Antisense strand to SEQ ID NO: 2066648
auuugacacacaggcauaa

SEQ ID NO: 2066650 - RNA, 19 nt, Artificial Sequence
  Description of Artificial Sequence: Synthetic oligonucleotide
  Sense strand starting at position 52 of SEQ ID NO: 1881722
ugguuaggauuugauuacu

SEQ ID NO: 2066651 - RNA, 19 nt, Artificial Sequence
  Description of Artificial Sequence: Synthetic oligonucleotide
  Antisense strand to SEQ ID NO: 2066650
aguaaucaaauccuaacca

SEQ ID NO: 2066652 - RNA, 19 nt, Artificial Sequence
  Description of Artificial Sequence: Synthetic oligonucleotide
  Sense strand starting at position 58 of SEQ ID NO: 1881722
ggauuugauuacuaacuga

SEQ ID NO: 2066653 - RNA, 19 nt, Artificial Sequence
  Description of Artificial Sequence: Synthetic oligonucleotide
  Antisense strand to SEQ ID NO: 2066652
ucaguuaguaaucaaaucc

SEQ ID NO: 2066654 - RNA, 19 nt, Artificial Sequence
  Description of Artificial Sequence: Synthetic oligonucleotide
  Sense strand starting at position 73 of SEQ ID NO: 1881722
cugacagcuuccguaauuu

SEQ ID NO: 2066655 - RNA, 19 nt, Artificial Sequence
  Description of Artificial Sequence: Synthetic oligonucleotide
  Antisense strand to SEQ ID NO: 2066654
aaauuacggaagcugucag

SEQ ID NO: 2066656 - RNA, 19 nt, Artificial Sequence
  Description of Artificial Sequence: Synthetic oligonucleotide
  Sense strand starting at position 84 of SEQ ID NO: 1881722
cguaauuucuguccuugau

SEQ ID NO: 2066657 - RNA, 19 nt, Artificial Sequence
  Description of Artificial Sequence: Synthetic oligonucleotide
  Antisense strand to SEQ ID NO: 2066656
aucaaggacagaaauuacg

SEQ ID NO: 2066658 - RNA, 19 nt, Artificial Sequence
  Description of Artificial Sequence: Synthetic oligonucleotide
  Sense strand starting at position 154 of SEQ ID NO: 1881722
auagaauguugugcuucua

SEQ ID NO: 2066659 - RNA, 19 nt, Artificial Sequence
  Description of Artificial Sequence: Synthetic oligonucleotide
  Antisense strand to SEQ ID NO: 2066658
uagaagcacaacauucuau

SEQ ID NO: 2066660 - RNA, 19 nt, Artificial Sequence
  Description of Artificial Sequence: Synthetic oligonucleotide
  Sense strand starting at position 274 of SEQ ID NO: 1881722
ucgagucccuacucaaaug

SEQ ID NO: 2066661 - RNA, 19 nt, Artificial Sequence
  Description of Artificial Sequence: Synthetic oligonucleotide
  Antisense strand to SEQ ID NO: 2066660
cauuugaguagggacucga

SEQ ID NO: 2066662 - RNA, 19 nt, Artificial Sequence
  Description of Artificial Sequence: Synthetic oligonucleotide
  Sense strand starting at position 359 of SEQ ID NO: 1881722
uuugguuggucuccauuua

SEQ ID NO: 2066663 - RNA, 19 nt, Artificial Sequence
  Description of Artificial Sequence: Synthetic oligonucleotide
  Antisense strand to SEQ ID NO: 2066662
uaaauggagaccaaccaaa

SEQ ID NO: 2066664 - RNA, 19 nt, Artificial Sequence
  Description of Artificial Sequence: Synthetic oligonucleotide
  Sense strand starting at position 461 of SEQ ID NO: 1881722
aggaaauauuaacacaaag

SEQ ID NO: 2066665 - RNA, 19 nt, Artificial Sequence
  Description of Artificial Sequence: Synthetic oligonucleotide
  Antisense strand to SEQ ID NO: 2066664
cuuuguguuaauauuuccu

SEQ ID NO: 2066666 - RNA, 19 nt, Artificial Sequence
  Description of Artificial Sequence: Synthetic oligonucleotide
  Sense strand starting at position 647 of SEQ ID NO: 1881722
agaagugguuugcuacuua

SEQ ID NO: 2066667 - RNA, 19 nt, Artificial Sequence
  Description of Artificial Sequence: Synthetic oligonucleotide
  Antisense strand to SEQ ID NO: 2066666
uaaguagcaaaccacuucu

SEQ ID NO: 2066668 - RNA, 19 nt, Artificial Sequence
  Description of Artificial Sequence: Synthetic oligonucleotide
  Sense strand starting at position 918 of SEQ ID NO: 1881722
aaauccaguuugggauuua

SEQ ID NO: 2066669 - RNA, 19 nt, Artificial Sequence
  Description of Artificial Sequence: Synthetic oligonucleotide
  Antisense strand to SEQ ID NO: 2066668
uaaaucccaaacuggauuu

SEQ ID NO: 2066670 - RNA, 19 nt, Artificial Sequence
  Description of Artificial Sequence: Synthetic oligonucleotide
  Sense strand starting at position 919 of SEQ ID NO: 1881722
aauccaguuugggauuuau

SEQ ID NO: 2066671 - RNA, 19 nt, Artificial Sequence
  Description of Artificial Sequence: Synthetic oligonucleotide
  Antisense strand to SEQ ID NO: 2066670
auaaaucccaaacuggauu

SEQ ID NO: 2066672 - RNA, 19 nt, Artificial Sequence
  Description of Artificial Sequence: Synthetic oligonucleotide
  Sense strand starting at position 1076 of SEQ ID NO: 1881722
ccauuaggguugguugaga

SEQ ID NO: 2066673 - RNA, 19 nt, Artificial Sequence
  Description of Artificial Sequence: Synthetic oligonucleotide
  Antisense strand to SEQ ID NO: 2066672
ucucaaccaacccuaaugg

SEQ ID NO: 2066674 - RNA, 19 nt, Artificial Sequence
  Description of Artificial Sequence: Synthetic oligonucleotide
  Sense strand starting at position 1339 of SEQ ID NO: 1881722
uccagugugguuggacuaa

SEQ ID NO: 2066675 - RNA, 19 nt, Artificial Sequence
  Description of Artificial Sequence: Synthetic oligonucleotide
  Antisense strand to SEQ ID NO: 2066674
uuaguccaaccacacugga

SEQ ID NO: 2066676 - RNA, 19 nt, Artificial Sequence
  Description of Artificial Sequence: Synthetic oligonucleotide
  Sense strand starting at position 1484 of SEQ ID NO: 1881722
gauggcagguguccuuaga

SEQ ID NO: 2066677 - RNA, 19 nt, Artificial Sequence
  Description of Artificial Sequence: Synthetic oligonucleotide
  Antisense strand to SEQ ID NO: 2066676
ucuaaggacaccugccauc

SEQ ID NO: 2066678 - RNA, 19 nt, Artificial Sequence
  Description of Artificial Sequence: Synthetic oligonucleotide
  Sense strand starting at position 2225 of SEQ ID NO: 1881722
uacuaagucccagauagug

SEQ ID NO: 2066679 - RNA, 19 nt, Artificial Sequence
  Description of Artificial Sequence: Synthetic oligonucleotide
  Antisense strand to SEQ ID NO: 2066678
cacuaucugggacuuagua

SEQ ID NO: 2066680 - RNA, 19 nt, Artificial Sequence
  Description of Artificial Sequence: Synthetic oligonucleotide
  Sense strand starting at position 2227 of SEQ ID NO: 1881722
cuaagucccagauaguguu

SEQ ID NO: 2066681 - RNA, 19 nt, Artificial Sequence
  Description of Artificial Sequence: Synthetic oligonucleotide
  Antisense strand to SEQ ID NO: 2066680
aacacuaucugggacuuag

SEQ ID NO: 2066682 - RNA, 19 nt, Artificial Sequence
  Description of Artificial Sequence: Synthetic oligonucleotide
  Sense strand starting at position 2242 of SEQ ID NO: 1881722
uguuucguugcugaagaca

SEQ ID NO: 2066683 - RNA, 19 nt, Artificial Sequence
  Description of Artificial Sequence: Synthetic oligonucleotide
  Antisense strand to SEQ ID NO: 2066682
ugucuucagcaacgaaaca

SEQ ID NO: 2066684 - RNA, 19 nt, Artificial Sequence
  Description of Artificial Sequence: Synthetic oligonucleotide
  Sense strand starting at position 2383 of SEQ ID NO: 1881722
uagugauauuuggauacau

SEQ ID NO: 2066685 - RNA, 19 nt, Artificial Sequence
  Description of Artificial Sequence: Synthetic oligonucleotide
  Antisense strand to SEQ ID NO: 2066684
auguauccaaauaucacua

SEQ ID NO: 2066686 - RNA, 19 nt, Artificial Sequence
  Description of Artificial Sequence: Synthetic oligonucleotide
  Sense strand starting at position 2458 of SEQ ID NO: 1881722
ucauuacuuuguguugaga

SEQ ID NO: 2066687 - RNA, 19 nt, Artificial Sequence
  Description of Artificial Sequence: Synthetic oligonucleotide
  Antisense strand to SEQ ID NO: 2066686
ucucaacacaaaguaauga

SEQ ID NO: 2066688 - RNA, 19 nt, Artificial Sequence
  Description of Artificial Sequence: Synthetic oligonucleotide
  Sense strand starting at position 2461 of SEQ ID NO: 1881722
uuacuuuguguugagaaca

SEQ ID NO: 2066689 - RNA, 19 nt, Artificial Sequence
  Description of Artificial Sequence: Synthetic oligonucleotide
  Antisense strand to SEQ ID NO: 2066688
uguucucaacacaaaguaa

SEQ ID NO: 2066690 - RNA, 19 nt, Artificial Sequence
  Description of Artificial Sequence: Synthetic oligonucleotide
  Sense strand starting at position 2819 of SEQ ID NO: 1881722
gugcucgaccuuuauaaua

SEQ ID NO: 2066691 - RNA, 19 nt, Artificial Sequence
  Description of Artificial Sequence: Synthetic oligonucleotide
  Antisense strand to SEQ ID NO: 2066690
uauuauaaaggucgagcac

SEQ ID NO: 2066692 - RNA, 19 nt, Artificial Sequence
  Description of Artificial Sequence: Synthetic oligonucleotide
  Sense strand starting at position 2845 of SEQ ID NO: 1881722
guuaauugucggcacccua

SEQ ID NO: 2066693 - RNA, 19 nt, Artificial Sequence
  Description of Artificial Sequence: Synthetic oligonucleotide
  Antisense strand to SEQ ID NO: 2066692
uagggugccgacaauuaac

SEQ ID NO: 2066694 - RNA, 19 nt, Artificial Sequence
  Description of Artificial Sequence: Synthetic oligonucleotide
  Sense strand starting at position 2977 of SEQ ID NO: 1881722
cucauuacuucugugagaa

SEQ ID NO: 2066695 - RNA, 19 nt, Artificial Sequence
  Description of Artificial Sequence: Synthetic oligonucleotide
  Antisense strand to SEQ ID NO: 2066694
uucucacagaaguaaugag

SEQ ID NO: 2066696 - RNA, 19 nt, Artificial Sequence
  Description of Artificial Sequence: Synthetic oligonucleotide
  Sense strand starting at position 2978 of SEQ ID NO: 1881722
ucauuacuucugugagaaa

SEQ ID NO: 2066697 - RNA, 19 nt, Artificial Sequence
  Description of Artificial Sequence: Synthetic oligonucleotide
  Antisense strand to SEQ ID NO: 2066696
uuucucacagaaguaauga

SEQ ID NO: 2066698 - RNA, 19 nt, Artificial Sequence
  Description of Artificial Sequence: Synthetic oligonucleotide
  Sense strand starting at position 3180 of SEQ ID NO: 1881722
uggccauugagcugagauu

SEQ ID NO: 2066699 - RNA, 19 nt, Artificial Sequence
  Description of Artificial Sequence: Synthetic oligonucleotide
  Antisense strand to SEQ ID NO: 2066698
aaucucagcucaauggcca

SEQ ID NO: 2066700 - RNA, 19 nt, Artificial Sequence
  Description of Artificial Sequence: Synthetic oligonucleotide
  Sense strand starting at position 3589 of SEQ ID NO: 1881722
cugugugucaaaugauucu

SEQ ID NO: 2066701 - RNA, 19 nt, Artificial Sequence
  Description of Artificial Sequence: Synthetic oligonucleotide
  Antisense strand to SEQ ID NO: 2066700
agaaucauuugacacacag

SEQ ID NO: 2066702 - RNA, 19 nt, Artificial Sequence
  Description of Artificial Sequence: Synthetic oligonucleotide
  Sense strand starting at position 3596 of SEQ ID NO: 1881722
ucaaaugauucugugacau

SEQ ID NO: 2066703 - RNA, 19 nt, Artificial Sequence
  Description of Artificial Sequence: Synthetic oligonucleotide
  Antisense strand to SEQ ID NO: 2066702
augucacagaaucauuuga

SEQ ID NO: 2066704 - RNA, 19 nt, Artificial Sequence
  Description of Artificial Sequence: Synthetic oligonucleotide
  Sense strand starting at position 3608 of SEQ ID NO: 1881722
gugacauguugccuuauca

SEQ ID NO: 2066705 - RNA, 19 nt, Artificial Sequence
  Description of Artificial Sequence: Synthetic oligonucleotide
  Antisense strand to SEQ ID NO: 2066704
ugauaaggcaacaugucac

SEQ ID NO: 2066706 - RNA, 19 nt, Artificial Sequence
  Description of Artificial Sequence: Synthetic oligonucleotide
  Sense strand starting at position 3616 of SEQ ID NO: 1881722
uugccuuaucaguaagggu

SEQ ID NO: 2066707 - RNA, 19 nt, Artificial Sequence
  Description of Artificial Sequence: Synthetic oligonucleotide
  Antisense strand to SEQ ID NO: 2066706
acccuuacugauaaggcaa

SEQ ID NO: 2066708 - RNA, 19 nt, Artificial Sequence
  Description of Artificial Sequence: Synthetic oligonucleotide
  Sense strand starting at position 3674 of SEQ ID NO: 1881722
gagauaauuuaguauaagg

SEQ ID NO: 2066709 - RNA, 19 nt, Artificial Sequence
  Description of Artificial Sequence: Synthetic oligonucleotide
  Antisense strand to SEQ ID NO: 2066708
ccuuauacuaaauuaucuc

SEQ ID NO: 2066710 - RNA, 19 nt, Artificial Sequence
  Description of Artificial Sequence: Synthetic oligonucleotide
  Sense strand starting at position 3684 of SEQ ID NO: 1881722
aguauaaggaauuggcuaa

SEQ ID NO: 2066711 - RNA, 19 nt, Artificial Sequence
  Description of Artificial Sequence: Synthetic oligonucleotide
  Antisense strand to SEQ ID NO: 2066710
uuagccaauuccuuauacu

SEQ ID NO: 2066712 - RNA, 19 nt, Artificial Sequence
  Description of Artificial Sequence: Synthetic oligonucleotide
  Sense strand starting at position 3685 of SEQ ID NO: 1881722
guauaaggaauuggcuaau

SEQ ID NO: 2066713 - RNA, 19 nt, Artificial Sequence
  Description of Artificial Sequence: Synthetic oligonucleotide
  Antisense strand to SEQ ID NO: 2066712
auuagccaauuccuuauac

SEQ ID NO: 2066714 - RNA, 19 nt, Artificial Sequence
  Description of Artificial Sequence: Synthetic oligonucleotide
  Sense strand starting at position 3691 of SEQ ID NO: 1881722
ggaauuggcuaauccagua

SEQ ID NO: 2066715 - RNA, 19 nt, Artificial Sequence
  Description of Artificial Sequence: Synthetic oligonucleotide
  Antisense strand to SEQ ID NO: 2066714
uacuggauuagccaauucc

SEQ ID NO: 2066716 - RNA, 19 nt, Artificial Sequence
  Description of Artificial Sequence: Synthetic oligonucleotide
  Sense strand starting at position 3696 of SEQ ID NO: 1881722
uggcuaauccaguagggau

SEQ ID NO: 2066717 - RNA, 19 nt, Artificial Sequence
  Description of Artificial Sequence: Synthetic oligonucleotide
  Antisense strand to SEQ ID NO: 2066716
aucccuacuggauuagcca

SEQ ID NO: 2066718 - RNA, 19 nt, Artificial Sequence
  Description of Artificial Sequence: Synthetic oligonucleotide
  Sense strand starting at position 3698 of SEQ ID NO: 1881722
gcuaauccaguagggauaa

SEQ ID NO: 2066719 - RNA, 19 nt, Artificial Sequence
  Description of Artificial Sequence: Synthetic oligonucleotide
  Antisense strand to SEQ ID NO: 2066718
uuaucccuacuggauuagc

SEQ ID NO: 2066720 - RNA, 19 nt, Artificial Sequence
  Description of Artificial Sequence: Synthetic oligonucleotide
  Sense strand starting at position 3775 of SEQ ID NO: 1881722
gcaucaugccucgaucuag

SEQ ID NO: 2066721 - RNA, 19 nt, Artificial Sequence
  Description of Artificial Sequence: Synthetic oligonucleotide
  Antisense strand to SEQ ID NO: 2066720
cuagaucgaggcaugaugc

SEQ ID NO: 2066722 - RNA, 19 nt, Artificial Sequence
  Description of Artificial Sequence: Synthetic oligonucleotide
  Sense strand starting at position 3801 of SEQ ID NO: 1881722
aacggauuagguugggauu

SEQ ID NO: 2066723 - RNA, 19 nt, Artificial Sequence
  Description of Artificial Sequence: Synthetic oligonucleotide
  Antisense strand to SEQ ID NO: 2066722
aaucccaaccuaauccguu

SEQ ID NO: 2066724 - RNA, 19 nt, Artificial Sequence
  Description of Artificial Sequence: Synthetic oligonucleotide
  Sense strand starting at position 3812 of SEQ ID NO: 1881722
uugggauucucagaacuag

SEQ ID NO: 2066725 - RNA, 19 nt, Artificial Sequence
  Description of Artificial Sequence: Synthetic oligonucleotide
  Antisense strand to SEQ ID NO: 2066724
cuaguucugagaaucccaa

SEQ ID NO: 2066726 - RNA, 19 nt, Artificial Sequence
  Description of Artificial Sequence: Synthetic oligonucleotide
  Sense strand starting at position 3905 of SEQ ID NO: 1881722
gcucuaagaguguguggaa

SEQ ID NO: 2066727 - RNA, 19 nt, Artificial Sequence
  Description of Artificial Sequence: Synthetic oligonucleotide
  Antisense strand to SEQ ID NO: 2066726
uuccacacacucuuagagc

SEQ ID NO: 2066728 - RNA, 19 nt, Artificial Sequence
  Description of Artificial Sequence: Synthetic oligonucleotide
  Sense strand starting at position 3906 of SEQ ID NO: 1881722
cucuaagaguguguggaaa

SEQ ID NO: 2066729 - RNA, 19 nt, Artificial Sequence
  Description of Artificial Sequence: Synthetic oligonucleotide
  Antisense strand to SEQ ID NO: 2066728
uuuccacacacucuuagag

SEQ ID NO: 2066730 - RNA, 19 nt, Artificial Sequence
  Description of Artificial Sequence: Synthetic oligonucleotide
  Sense strand starting at position 248 of SEQ ID NO: 1881723
ugaugugagcuguaaucau

SEQ ID NO: 2066731 - RNA, 19 nt, Artificial Sequence
  Description of Artificial Sequence: Synthetic oligonucleotide
  Antisense strand to SEQ ID NO: 2066730
augauuacagcucacauca

SEQ ID NO: 2066732 - RNA, 19 nt, Artificial Sequence
  Description of Artificial Sequence: Synthetic oligonucleotide
  Sense strand starting at position 428 of SEQ ID NO: 1881723
guuagauuguccuucuaug

SEQ ID NO: 2066733 - RNA, 19 nt, Artificial Sequence
  Description of Artificial Sequence: Synthetic oligonucleotide
  Antisense strand to SEQ ID NO: 2066732
cauagaaggacaaucuaac

SEQ ID NO: 2066734 - RNA, 19 nt, Artificial Sequence
  Description of Artificial Sequence: Synthetic oligonucleotide
  Sense strand starting at position 481 of SEQ ID NO: 1881723
uucuaaagaucagagaaau

SEQ ID NO: 2066735 - RNA, 19 nt, Artificial Sequence
  Description of Artificial Sequence: Synthetic oligonucleotide
  Antisense strand to SEQ ID NO: 2066734
auuucucugaucuuuagaa

SEQ ID NO: 2066736 - RNA, 19 nt, Artificial Sequence
  Description of Artificial Sequence: Synthetic oligonucleotide
  Sense strand starting at position 549 of SEQ ID NO: 1881723
ugaugacuccaaugaacuu

SEQ ID NO: 2066737 - RNA, 19 nt, Artificial Sequence
  Description of Artificial Sequence: Synthetic oligonucleotide
  Antisense strand to SEQ ID NO: 2066736
aaguucauuggagucauca

SEQ ID NO: 2066738 - RNA, 19 nt, Artificial Sequence
  Description of Artificial Sequence: Synthetic oligonucleotide
  Sense strand starting at position 556 of SEQ ID NO: 1881723
uccaaugaacuuugcagua

SEQ ID NO: 2066739 - RNA, 19 nt, Artificial Sequence
  Description of Artificial Sequence: Synthetic oligonucleotide
  Antisense strand to SEQ ID NO: 2066738
uacugcaaaguucauugga

SEQ ID NO: 2066740 - RNA, 19 nt, Artificial Sequence
  Description of Artificial Sequence: Synthetic oligonucleotide
  Sense strand starting at position 591 of SEQ ID NO: 1881723
aaagaugacuuacuuguga

SEQ ID NO: 2066741 - RNA, 19 nt, Artificial Sequence
  Description of Artificial Sequence: Synthetic oligonucleotide
  Antisense strand to SEQ ID NO: 2066740
ucacaaguaagucaucuuu

SEQ ID NO: 2066742 - RNA, 19 nt, Artificial Sequence
  Description of Artificial Sequence: Synthetic oligonucleotide
  Sense strand starting at position 708 of SEQ ID NO: 1881723
auaugaugauuguugcaua

SEQ ID NO: 2066743 - RNA, 19 nt, Artificial Sequence
  Description of Artificial Sequence: Synthetic oligonucleotide
  Antisense strand to SEQ ID NO: 2066742
uaugcaacaaucaucauau

SEQ ID NO: 2066744 - RNA, 19 nt, Artificial Sequence
  Description of Artificial Sequence: Synthetic oligonucleotide
  Sense strand starting at position 943 of SEQ ID NO: 1881723
gggugagacugugucucua

SEQ ID NO: 2066745 - RNA, 19 nt, Artificial Sequence
  Description of Artificial Sequence: Synthetic oligonucleotide
  Antisense strand to SEQ ID NO: 2066744
uagagacacagucucaccc

SEQ ID NO: 2066746 - RNA, 19 nt, Artificial Sequence
  Description of Artificial Sequence: Synthetic oligonucleotide
  Sense strand starting at position 947 of SEQ ID NO: 1881723
gagacugugucucuacaag

SEQ ID NO: 2066747 - RNA, 19 nt, Artificial Sequence
  Description of Artificial Sequence: Synthetic oligonucleotide
  Antisense strand to SEQ ID NO: 2066746
cuuguagagacacagucuc

SEQ ID NO: 2066748 - RNA, 19 nt, Artificial Sequence
  Description of Artificial Sequence: Synthetic oligonucleotide
  Sense strand starting at position 1051 of SEQ ID NO: 1881723
gggagugagcugugaucac

SEQ ID NO: 2066749 - RNA, 19 nt, Artificial Sequence
  Description of Artificial Sequence: Synthetic oligonucleotide
  Antisense strand to SEQ ID NO: 2066748
gugaucacagcucacuccc

SEQ ID NO: 2066750 - RNA, 19 nt, Artificial Sequence
  Description of Artificial Sequence: Synthetic oligonucleotide
  Sense strand starting at position 1486 of SEQ ID NO: 1881723
gcuguaagccuguacagaa

SEQ ID NO: 2066751 - RNA, 19 nt, Artificial Sequence
  Description of Artificial Sequence: Synthetic oligonucleotide
  Antisense strand to SEQ ID NO: 2066750
uucuguacaggcuuacagc

SEQ ID NO: 2066752 - RNA, 19 nt, Artificial Sequence
  Description of Artificial Sequence: Synthetic oligonucleotide
  Sense strand starting at position 1499 of SEQ ID NO: 1881723
acagaauuacaguguaaga

SEQ ID NO: 2066753 - RNA, 19 nt, Artificial Sequence
  Description of Artificial Sequence: Synthetic oligonucleotide
  Antisense strand to SEQ ID NO: 2066752
ucuuacacuguaauucugu

SEQ ID NO: 2066754 - RNA, 19 nt, Artificial Sequence
  Description of Artificial Sequence: Synthetic oligonucleotide
  Sense strand starting at position 1727 of SEQ ID NO: 1881723
aguggaaugguuggugauu

SEQ ID NO: 2066755 - RNA, 19 nt, Artificial Sequence
  Description of Artificial Sequence: Synthetic oligonucleotide
  Antisense strand to SEQ ID NO: 2066754
aaucaccaaccauuccacu

SEQ ID NO: 2066756 - RNA, 19 nt, Artificial Sequence
  Description of Artificial Sequence: Synthetic oligonucleotide
  Sense strand starting at position 1728 of SEQ ID NO: 1881723
guggaaugguuggugauua

SEQ ID NO: 2066757 - RNA, 19 nt, Artificial Sequence
  Description of Artificial Sequence: Synthetic oligonucleotide
  Antisense strand to SEQ ID NO: 2066756
uaaucaccaaccauuccac

SEQ ID NO: 2066758 - RNA, 19 nt, Artificial Sequence
  Description of Artificial Sequence: Synthetic oligonucleotide
  Sense strand starting at position 1738 of SEQ ID NO: 1881723
uggugauuauaggcugaca

SEQ ID NO: 2066759 - RNA, 19 nt, Artificial Sequence
  Description of Artificial Sequence: Synthetic oligonucleotide
  Antisense strand to SEQ ID NO: 2066758
ugucagccuauaaucacca

SEQ ID NO: 2066760 - RNA, 19 nt, Artificial Sequence
  Description of Artificial Sequence: Synthetic oligonucleotide
  Sense strand starting at position 1740 of SEQ ID NO: 1881723
gugauuauaggcugacaaa

SEQ ID NO: 2066761 - RNA, 19 nt, Artificial Sequence
  Description of Artificial Sequence: Synthetic oligonucleotide
  Antisense strand to SEQ ID NO: 2066760
uuugucagccuauaaucac

SEQ ID NO: 2066762 - RNA, 19 nt, Artificial Sequence
  Description of Artificial Sequence: Synthetic oligonucleotide
  Sense strand starting at position 1907 of SEQ ID NO: 1881723
agcauuccacagugguaaa

SEQ ID NO: 2066763 - RNA, 19 nt, Artificial Sequence
  Description of Artificial Sequence: Synthetic oligonucleotide
  Antisense strand to SEQ ID NO: 2066762
uuuaccacuguggaaugcu

SEQ ID NO: 2066764 - RNA, 19 nt, Artificial Sequence
  Description of Artificial Sequence: Synthetic oligonucleotide
  Sense strand starting at position 1959 of SEQ ID NO: 1881723
acauacugucugggacuuu

SEQ ID NO: 2066765 - RNA, 19 nt, Artificial Sequence
  Description of Artificial Sequence: Synthetic oligonucleotide
  Antisense strand to SEQ ID NO: 2066764
aaagucccagacaguaugu

SEQ ID NO: 2066766 - RNA, 19 nt, Artificial Sequence
  Description of Artificial Sequence: Synthetic oligonucleotide
  Sense strand starting at position 2033 of SEQ ID NO: 1881723
uggguaugugguuagggua

SEQ ID NO: 2066767 - RNA, 19 nt, Artificial Sequence
  Description of Artificial Sequence: Synthetic oligonucleotide
  Antisense strand to SEQ ID NO: 2066766
uacccuaaccacauaccca

SEQ ID NO: 2066768 - RNA, 19 nt, Artificial Sequence
  Description of Artificial Sequence: Synthetic oligonucleotide
  Sense strand starting at position 2054 of SEQ ID NO: 1881723
auuacaucguaggucuaua

SEQ ID NO: 2066769 - RNA, 19 nt, Artificial Sequence
  Description of Artificial Sequence: Synthetic oligonucleotide
  Antisense strand to SEQ ID NO: 2066768
uauagaccuacgauguaau

SEQ ID NO: 2066770 - RNA, 19 nt, Artificial Sequence
  Description of Artificial Sequence: Synthetic oligonucleotide
  Sense strand starting at position 2184 of SEQ ID NO: 1881723
ugugaauuaguguaauggu

SEQ ID NO: 2066771 - RNA, 19 nt, Artificial Sequence
  Description of Artificial Sequence: Synthetic oligonucleotide
  Antisense strand to SEQ ID NO: 2066770
accauuacacuaauucaca

SEQ ID NO: 2066772 - RNA, 19 nt, Artificial Sequence
  Description of Artificial Sequence: Synthetic oligonucleotide
  Sense strand starting at position 2260 of SEQ ID NO: 1881723
auaacaauguggcugugaa

SEQ ID NO: 2066773 - RNA, 19 nt, Artificial Sequence
  Description of Artificial Sequence: Synthetic oligonucleotide
  Antisense strand to SEQ ID NO: 2066772
uucacagccacauuguuau

SEQ ID NO: 2066774 - RNA, 19 nt, Artificial Sequence
  Description of Artificial Sequence: Synthetic oligonucleotide
  Sense strand starting at position 2261 of SEQ ID NO: 1881723
uaacaauguggcugugaag

SEQ ID NO: 2066775 - RNA, 19 nt, Artificial Sequence
  Description of Artificial Sequence: Synthetic oligonucleotide
  Antisense strand to SEQ ID NO: 2066774
cuucacagccacauuguua

SEQ ID NO: 2066776 - RNA, 19 nt, Artificial Sequence
  Description of Artificial Sequence: Synthetic oligonucleotide
  Sense strand starting at position 2355 of SEQ ID NO: 1881723
ggccucaucuaauuaguua

SEQ ID NO: 2066777 - RNA, 19 nt, Artificial Sequence
  Description of Artificial Sequence: Synthetic oligonucleotide
  Antisense strand to SEQ ID NO: 2066776
uaacuaauuagaugaggcc

SEQ ID NO: 2066778 - RNA, 19 nt, Artificial Sequence
  Description of Artificial Sequence: Synthetic oligonucleotide
  Sense strand starting at position 2599 of SEQ ID NO: 1881723
uauaguaagugccucugaa

SEQ ID NO: 2066779 - RNA, 19 nt, Artificial Sequence
  Description of Artificial Sequence: Synthetic oligonucleotide
  Antisense strand to SEQ ID NO: 2066778
uucagaggcacuuacuaua

SEQ ID NO: 2066780 - RNA, 19 nt, Artificial Sequence
  Description of Artificial Sequence: Synthetic oligonucleotide
  Sense strand starting at position 2708 of SEQ ID NO: 1881723
ggcagcucccuugaaacau

SEQ ID NO: 2066781 - RNA, 19 nt, Artificial Sequence
  Description of Artificial Sequence: Synthetic oligonucleotide
  Antisense strand to SEQ ID NO: 2066780
auguuucaagggagcugcc

SEQ ID NO: 2066782 - RNA, 19 nt, Artificial Sequence
  Description of Artificial Sequence: Synthetic oligonucleotide
  Sense strand starting at position 2773 of SEQ ID NO: 1881723
auccuucugcugggaacuu

SEQ ID NO: 2066783 - RNA, 19 nt, Artificial Sequence
  Description of Artificial Sequence: Synthetic oligonucleotide
  Antisense strand to SEQ ID NO: 2066782
aaguucccagcagaaggau

SEQ ID NO: 2066784 - RNA, 19 nt, Artificial Sequence
  Description of Artificial Sequence: Synthetic oligonucleotide
  Sense strand starting at position 2813 of SEQ ID NO: 1881723
cacacugggccaugaagau

SEQ ID NO: 2066785 - RNA, 19 nt, Artificial Sequence
  Description of Artificial Sequence: Synthetic oligonucleotide
  Antisense strand to SEQ ID NO: 2066784
aucuucauggcccagugug

SEQ ID NO: 2066786 - RNA, 19 nt, Artificial Sequence
  Description of Artificial Sequence: Synthetic oligonucleotide
  Sense strand starting at position 2903 of SEQ ID NO: 1881723
cugaacugccucuaaugaa

SEQ ID NO: 2066787 - RNA, 19 nt, Artificial Sequence
  Description of Artificial Sequence: Synthetic oligonucleotide
  Antisense strand to SEQ ID NO: 2066786
uucauuagaggcaguucag

SEQ ID NO: 2066788 - RNA, 19 nt, Artificial Sequence
  Description of Artificial Sequence: Synthetic oligonucleotide
  Sense strand starting at position 2977 of SEQ ID NO: 1881723
aguggaguauaauccuaau

SEQ ID NO: 2066789 - RNA, 19 nt, Artificial Sequence
  Description of Artificial Sequence: Synthetic oligonucleotide
  Antisense strand to SEQ ID NO: 2066788
auuaggauuauacuccacu

SEQ ID NO: 2066790 - RNA, 19 nt, Artificial Sequence
  Description of Artificial Sequence: Synthetic oligonucleotide
  Sense strand starting at position 2980 of SEQ ID NO: 1881723
ggaguauaauccuaauuug

SEQ ID NO: 2066791 - RNA, 19 nt, Artificial Sequence
  Description of Artificial Sequence: Synthetic oligonucleotide
  Antisense strand to SEQ ID NO: 2066790
caaauuaggauuauacucc

SEQ ID NO: 2066792 - RNA, 19 nt, Artificial Sequence
  Description of Artificial Sequence: Synthetic oligonucleotide
  Sense strand starting at position 3287 of SEQ ID NO: 1881723
ugguguaguccacaaggga

SEQ ID NO: 2066793 - RNA, 19 nt, Artificial Sequence
  Description of Artificial Sequence: Synthetic oligonucleotide
  Antisense strand to SEQ ID NO: 2066792
ucccuuguggacuacacca

SEQ ID NO: 2066794 - RNA, 19 nt, Artificial Sequence
  Description of Artificial Sequence: Synthetic oligonucleotide
  Sense strand starting at position 3303 of SEQ ID NO: 1881723
ggaagauacugagagagga

SEQ ID NO: 2066795 - RNA, 19 nt, Artificial Sequence
  Description of Artificial Sequence: Synthetic oligonucleotide
  Antisense strand to SEQ ID NO: 2066794
uccucucucaguaucuucc

SEQ ID NO: 2066796 - RNA, 19 nt, Artificial Sequence
  Description of Artificial Sequence: Synthetic oligonucleotide
  Sense strand starting at position 3435 of SEQ ID NO: 1881723
gguggccuugacuaagaca

SEQ ID NO: 2066797 - RNA, 19 nt, Artificial Sequence
  Description of Artificial Sequence: Synthetic oligonucleotide
  Antisense strand to SEQ ID NO: 2066796
ugucuuagucaaggccacc

SEQ ID NO: 2066798 - RNA, 19 nt, Artificial Sequence
  Description of Artificial Sequence: Synthetic oligonucleotide
  Sense strand starting at position 3485 of SEQ ID NO: 1881723
ccagaugacuugcccagau

SEQ ID NO: 2066799 - RNA, 19 nt, Artificial Sequence
  Description of Artificial Sequence: Synthetic oligonucleotide
  Antisense strand to SEQ ID NO: 2066798
aucugggcaagucaucugg

SEQ ID NO: 2066800 - RNA, 19 nt, Artificial Sequence
  Description of Artificial Sequence: Synthetic oligonucleotide
  Sense strand starting at position 3489 of SEQ ID NO: 1881723
augacuugcccagauacuu

SEQ ID NO: 2066801 - RNA, 19 nt, Artificial Sequence
  Description of Artificial Sequence: Synthetic oligonucleotide
  Antisense strand to SEQ ID NO: 2066800
aaguaucugggcaagucau

SEQ ID NO: 2066802 - RNA, 19 nt, Artificial Sequence
  Description of Artificial Sequence: Synthetic oligonucleotide
  Sense strand starting at position 3658 of SEQ ID NO: 1881723
ccucaccgguucuuauaaa

SEQ ID NO: 2066803 - RNA, 19 nt, Artificial Sequence
  Description of Artificial Sequence: Synthetic oligonucleotide
  Antisense strand to SEQ ID NO: 2066802
uuuauaagaaccggugagg

SEQ ID NO: 2066804 - RNA, 19 nt, Artificial Sequence
  Description of Artificial Sequence: Synthetic oligonucleotide
  Sense strand starting at position 3803 of SEQ ID NO: 1881723
uuucuuggucaugagacga

SEQ ID NO: 2066805 - RNA, 19 nt, Artificial Sequence
  Description of Artificial Sequence: Synthetic oligonucleotide
  Antisense strand to SEQ ID NO: 2066804
ucgucucaugaccaagaaa

SEQ ID NO: 2066806 - RNA, 19 nt, Artificial Sequence
  Description of Artificial Sequence: Synthetic oligonucleotide
  Sense strand starting at position 3807 of SEQ ID NO: 1881723
uuggucaugagacgaagaa

SEQ ID NO: 2066807 - RNA, 19 nt, Artificial Sequence
  Description of Artificial Sequence: Synthetic oligonucleotide
  Antisense strand to SEQ ID NO: 2066806
uucuucgucucaugaccaa

SEQ ID NO: 2066808 - RNA, 19 nt, Artificial Sequence
  Description of Artificial Sequence: Synthetic oligonucleotide
  Sense strand starting at position 3819 of SEQ ID NO: 1881723
cgaagaacuccaggugaua

SEQ ID NO: 2066809 - RNA, 19 nt, Artificial Sequence
  Description of Artificial Sequence: Synthetic oligonucleotide
  Antisense strand to SEQ ID NO: 2066808
uaucaccuggaguucuucg

SEQ ID NO: 2066810 - RNA, 19 nt, Artificial Sequence
  Description of Artificial Sequence: Synthetic oligonucleotide
  Sense strand starting at position 161 of SEQ ID NO: 1881724
gauaguggugauggucaaa

SEQ ID NO: 2066811 - RNA, 19 nt, Artificial Sequence
  Description of Artificial Sequence: Synthetic oligonucleotide
  Antisense strand to SEQ ID NO: 2066810
uuugaccaucaccacuauc

SEQ ID NO: 2066812 - RNA, 19 nt, Artificial Sequence
  Description of Artificial Sequence: Synthetic oligonucleotide
  Sense strand starting at position 164 of SEQ ID NO: 1881724
aguggugauggucaaacaa

SEQ ID NO: 2066813 - RNA, 19 nt, Artificial Sequence
  Description of Artificial Sequence: Synthetic oligonucleotide
  Antisense strand to SEQ ID NO: 2066812
uuguuugaccaucaccacu

SEQ ID NO: 2066814 - RNA, 19 nt, Artificial Sequence
  Description of Artificial Sequence: Synthetic oligonucleotide
  Sense strand starting at position 348 of SEQ ID NO: 1881724
aggucaaagcuuuauaaau

SEQ ID NO: 2066815 - RNA, 19 nt, Artificial Sequence
  Description of Artificial Sequence: Synthetic oligonucleotide
  Antisense strand to SEQ ID NO: 2066814
auuuauaaagcuuugaccu

SEQ ID NO: 2066816 - RNA, 19 nt, Artificial Sequence
  Description of Artificial Sequence: Synthetic oligonucleotide
  Sense strand starting at position 394 of SEQ ID NO: 1881724
ugggucuuuguacaggaaa

SEQ ID NO: 2066817 - RNA, 19 nt, Artificial Sequence
  Description of Artificial Sequence: Synthetic oligonucleotide
  Antisense strand to SEQ ID NO: 2066816
uuuccuguacaaagaccca

SEQ ID NO: 2066818 - RNA, 19 nt, Artificial Sequence
  Description of Artificial Sequence: Synthetic oligonucleotide
  Sense strand starting at position 396 of SEQ ID NO: 1881724
ggucuuuguacaggaaaga

SEQ ID NO: 2066819 - RNA, 19 nt, Artificial Sequence
  Description of Artificial Sequence: Synthetic oligonucleotide
  Antisense strand to SEQ ID NO: 2066818
ucuuuccuguacaaagacc

SEQ ID NO: 2066820 - RNA, 19 nt, Artificial Sequence
  Description of Artificial Sequence: Synthetic oligonucleotide
  Sense strand starting at position 467 of SEQ ID NO: 1881724
auguguaaucaagauugug

SEQ ID NO: 2066821 - RNA, 19 nt, Artificial Sequence
  Description of Artificial Sequence: Synthetic oligonucleotide
  Antisense strand to SEQ ID NO: 2066820
cacaaucuugauuacacau

SEQ ID NO: 2066822 - RNA, 19 nt, Artificial Sequence
  Description of Artificial Sequence: Synthetic oligonucleotide
  Sense strand starting at position 490 of SEQ ID NO: 1881724
cuauucuaggcugauccaa

SEQ ID NO: 2066823 - RNA, 19 nt, Artificial Sequence
  Description of Artificial Sequence: Synthetic oligonucleotide
  Antisense strand to SEQ ID NO: 2066822
uuggaucagccuagaauag

SEQ ID NO: 2066824 - RNA, 19 nt, Artificial Sequence
  Description of Artificial Sequence: Synthetic oligonucleotide
  Sense strand starting at position 693 of SEQ ID NO: 1881724
agguuauaguacuugagau

SEQ ID NO: 2066825 - RNA, 19 nt, Artificial Sequence
  Description of Artificial Sequence: Synthetic oligonucleotide
  Antisense strand to SEQ ID NO: 2066824
aucucaaguacuauaaccu

SEQ ID NO: 2066826 - RNA, 19 nt, Artificial Sequence
  Description of Artificial Sequence: Synthetic oligonucleotide
  Sense strand starting at position 694 of SEQ ID NO: 1881724
gguuauaguacuugagaug

SEQ ID NO: 2066827 - RNA, 19 nt, Artificial Sequence
  Description of Artificial Sequence: Synthetic oligonucleotide
  Antisense strand to SEQ ID NO: 2066826
caucucaaguacuauaacc

SEQ ID NO: 2066828 - RNA, 19 nt, Artificial Sequence
  Description of Artificial Sequence: Synthetic oligonucleotide
  Sense strand starting at position 852 of SEQ ID NO: 1881724
ugagaagggcuugagucau

SEQ ID NO: 2066829 - RNA, 19 nt, Artificial Sequence
  Description of Artificial Sequence: Synthetic oligonucleotide
  Antisense strand to SEQ ID NO: 2066828
augacucaagcccuucuca

SEQ ID NO: 2066830 - RNA, 19 nt, Artificial Sequence
  Description of Artificial Sequence: Synthetic oligonucleotide
  Sense strand starting at position 860 of SEQ ID NO: 1881724
gcuugagucauuguugcuu

SEQ ID NO: 2066831 - RNA, 19 nt, Artificial Sequence
  Description of Artificial Sequence: Synthetic oligonucleotide
  Antisense strand to SEQ ID NO: 2066830
aagcaacaaugacucaagc

SEQ ID NO: 2066832 - RNA, 19 nt, Artificial Sequence
  Description of Artificial Sequence: Synthetic oligonucleotide
  Sense strand starting at position 918 of SEQ ID NO: 1881724
guagucagccucuagaaac

SEQ ID NO: 2066833 - RNA, 19 nt, Artificial Sequence
  Description of Artificial Sequence: Synthetic oligonucleotide
  Antisense strand to SEQ ID NO: 2066832
guuucuagaggcugacuac

SEQ ID NO: 2066834 - RNA, 19 nt, Artificial Sequence
  Description of Artificial Sequence: Synthetic oligonucleotide
  Sense strand starting at position 995 of SEQ ID NO: 1881724
agcacaacuccauggaacu

SEQ ID NO: 2066835 - RNA, 19 nt, Artificial Sequence
  Description of Artificial Sequence: Synthetic oligonucleotide
  Antisense strand to SEQ ID NO: 2066834
aguuccauggaguugugcu

SEQ ID NO: 2066836 - RNA, 19 nt, Artificial Sequence
  Description of Artificial Sequence: Synthetic oligonucleotide
  Sense strand starting at position 1008 of SEQ ID NO: 1881724
ggaacugaacucugucaaa

SEQ ID NO: 2066837 - RNA, 19 nt, Artificial Sequence
  Description of Artificial Sequence: Synthetic oligonucleotide
  Antisense strand to SEQ ID NO: 2066836
uuugacagaguucaguucc

SEQ ID NO: 2066838 - RNA, 19 nt, Artificial Sequence
  Description of Artificial Sequence: Synthetic oligonucleotide
  Sense strand starting at position 1029 of SEQ ID NO: 1881724
auuggauucuaagugauca

SEQ ID NO: 2066839 - RNA, 19 nt, Artificial Sequence
  Description of Artificial Sequence: Synthetic oligonucleotide
  Antisense strand to SEQ ID NO: 2066838
ugaucacuuagaauccaau

SEQ ID NO: 2066840 - RNA, 19 nt, Artificial Sequence
  Description of Artificial Sequence: Synthetic oligonucleotide
  Sense strand starting at position 1030 of SEQ ID NO: 1881724
uuggauucuaagugaucag

SEQ ID NO: 2066841 - RNA, 19 nt, Artificial Sequence
  Description of Artificial Sequence: Synthetic oligonucleotide
  Antisense strand to SEQ ID NO: 2066840
cugaucacuuagaauccaa

SEQ ID NO: 2066842 - RNA, 19 nt, Artificial Sequence
  Description of Artificial Sequence: Synthetic oligonucleotide
  Sense strand starting at position 1161 of SEQ ID NO: 1881724
ccuuuagaacugggcaaua

SEQ ID NO: 2066843 - RNA, 19 nt, Artificial Sequence
  Description of Artificial Sequence: Synthetic oligonucleotide
  Antisense strand to SEQ ID NO: 2066842
uauugcccaguucuaaagg

SEQ ID NO: 2066844 - RNA, 19 nt, Artificial Sequence
  Description of Artificial Sequence: Synthetic oligonucleotide
  Sense strand starting at position 1718 of SEQ ID NO: 1881724
ggucaagacagcuaaggua

SEQ ID NO: 2066845 - RNA, 19 nt, Artificial Sequence
  Description of Artificial Sequence: Synthetic oligonucleotide
  Antisense strand to SEQ ID NO: 2066844
uaccuuagcugucuugacc

SEQ ID NO: 2066846 - RNA, 19 nt, Artificial Sequence
  Description of Artificial Sequence: Synthetic oligonucleotide
  Sense strand starting at position 1832 of SEQ ID NO: 1881724
ucugaaauauugcugacaa

SEQ ID NO: 2066847 - RNA, 19 nt, Artificial Sequence
  Description of Artificial Sequence: Synthetic oligonucleotide
  Antisense strand to SEQ ID NO: 2066846
uugucagcaauauuucaga

SEQ ID NO: 2066848 - RNA, 19 nt, Artificial Sequence
  Description of Artificial Sequence: Synthetic oligonucleotide
  Sense strand starting at position 1900 of SEQ ID NO: 1881724
ucuauaaacuuaguggaua

SEQ ID NO: 2066849 - RNA, 19 nt, Artificial Sequence
  Description of Artificial Sequence: Synthetic oligonucleotide
  Antisense strand to SEQ ID NO: 2066848
uauccacuaaguuuauaga

SEQ ID NO: 2066850 - RNA, 19 nt, Artificial Sequence
  Description of Artificial Sequence: Synthetic oligonucleotide
  Sense strand starting at position 2511 of SEQ ID NO: 1881724
uuccuauacucauugagag

SEQ ID NO: 2066851 - RNA, 19 nt, Artificial Sequence
  Description of Artificial Sequence: Synthetic oligonucleotide
  Antisense strand to SEQ ID NO: 2066850
cucucaaugaguauaggaa

SEQ ID NO: 2066852 - RNA, 19 nt, Artificial Sequence
  Description of Artificial Sequence: Synthetic oligonucleotide
  Sense strand starting at position 2512 of SEQ ID NO: 1881724
uccuauacucauugagaga

SEQ ID NO: 2066853 - RNA, 19 nt, Artificial Sequence
  Description of Artificial Sequence: Synthetic oligonucleotide
  Antisense strand to SEQ ID NO: 2066852
ucucucaaugaguauagga

SEQ ID NO: 2066854 - RNA, 19 nt, Artificial Sequence
  Description of Artificial Sequence: Synthetic oligonucleotide
  Sense strand starting at position 2537 of SEQ ID NO: 1881724
ugguaaauauugguuaaca

SEQ ID NO: 2066855 - RNA, 19 nt, Artificial Sequence
  Description of Artificial Sequence: Synthetic oligonucleotide
  Antisense strand to SEQ ID NO: 2066854
uguuaaccaauauuuacca

SEQ ID NO: 2066856 - RNA, 19 nt, Artificial Sequence
  Description of Artificial Sequence: Synthetic oligonucleotide
  Sense strand starting at position 2538 of SEQ ID NO: 1881724
gguaaauauugguuaacag

SEQ ID NO: 2066857 - RNA, 19 nt, Artificial Sequence
  Description of Artificial Sequence: Synthetic oligonucleotide
  Antisense strand to SEQ ID NO: 2066856
cuguuaaccaauauuuacc

SEQ ID NO: 2066858 - RNA, 19 nt, Artificial Sequence
  Description of Artificial Sequence: Synthetic oligonucleotide
  Sense strand starting at position 2574 of SEQ ID NO: 1881724
uugcauauaccugggauca

SEQ ID NO: 2066859 - RNA, 19 nt, Artificial Sequence
  Description of Artificial Sequence: Synthetic oligonucleotide
  Antisense strand to SEQ ID NO: 2066858
ugaucccagguauaugcaa

SEQ ID NO: 2066860 - RNA, 19 nt, Artificial Sequence
  Description of Artificial Sequence: Synthetic oligonucleotide
  Sense strand starting at position 2575 of SEQ ID NO: 1881724
ugcauauaccugggaucaa

SEQ ID NO: 2066861 - RNA, 19 nt, Artificial Sequence
  Description of Artificial Sequence: Synthetic oligonucleotide
  Antisense strand to SEQ ID NO: 2066860
uugaucccagguauaugca

SEQ ID NO: 2066862 - RNA, 19 nt, Artificial Sequence
  Description of Artificial Sequence: Synthetic oligonucleotide
  Sense strand starting at position 2805 of SEQ ID NO: 1881724
cugauucucaggcaagagu

SEQ ID NO: 2066863 - RNA, 19 nt, Artificial Sequence
  Description of Artificial Sequence: Synthetic oligonucleotide
  Antisense strand to SEQ ID NO: 2066862
acucuugccugagaaucag

SEQ ID NO: 2066864 - RNA, 19 nt, Artificial Sequence
  Description of Artificial Sequence: Synthetic oligonucleotide
  Sense strand starting at position 3055 of SEQ ID NO: 1881724
uugaguugaacuggauuga

SEQ ID NO: 2066865 - RNA, 19 nt, Artificial Sequence
  Description of Artificial Sequence: Synthetic oligonucleotide
  Antisense strand to SEQ ID NO: 2066864
ucaauccaguucaacucaa

SEQ ID NO: 2066866 - RNA, 19 nt, Artificial Sequence
  Description of Artificial Sequence: Synthetic oligonucleotide
  Sense strand starting at position 3069 of SEQ ID NO: 1881724
auugacuguuuaguagaua

SEQ ID NO: 2066867 - RNA, 19 nt, Artificial Sequence
  Description of Artificial Sequence: Synthetic oligonucleotide
  Antisense strand to SEQ ID NO: 2066866
uaucuacuaaacagucaau

SEQ ID NO: 2066868 - RNA, 19 nt, Artificial Sequence
  Description of Artificial Sequence: Synthetic oligonucleotide
  Sense strand starting at position 3072 of SEQ ID NO: 1881724
gacuguuuaguagauauac

SEQ ID NO: 2066869 - RNA, 19 nt, Artificial Sequence
  Description of Artificial Sequence: Synthetic oligonucleotide
  Antisense strand to SEQ ID NO: 2066868
guauaucuacuaaacaguc

SEQ ID NO: 2066870 - RNA, 19 nt, Artificial Sequence
  Description of Artificial Sequence: Synthetic oligonucleotide
  Sense strand starting at position 3347 of SEQ ID NO: 1881724
ugagauccuuuggcuaaua

SEQ ID NO: 2066871 - RNA, 19 nt, Artificial Sequence
  Description of Artificial Sequence: Synthetic oligonucleotide
  Antisense strand to SEQ ID NO: 2066870
uauuagccaaaggaucuca

SEQ ID NO: 2066872 - RNA, 19 nt, Artificial Sequence
  Description of Artificial Sequence: Synthetic oligonucleotide
  Sense strand starting at position 3349 of SEQ ID NO: 1881724
agauccuuuggcuaauaua

SEQ ID NO: 2066873 - RNA, 19 nt, Artificial Sequence
  Description of Artificial Sequence: Synthetic oligonucleotide
  Antisense strand to SEQ ID NO: 2066872
uauauuagccaaaggaucu

SEQ ID NO: 2066874 - RNA, 19 nt, Artificial Sequence
  Description of Artificial Sequence: Synthetic oligonucleotide
  Sense strand starting at position 3385 of SEQ ID NO: 1881724
ugcagcauccaauacagau

SEQ ID NO: 2066875 - RNA, 19 nt, Artificial Sequence
  Description of Artificial Sequence: Synthetic oligonucleotide
  Antisense strand to SEQ ID NO: 2066874
aucuguauuggaugcugca

SEQ ID NO: 2066876 - RNA, 19 nt, Artificial Sequence
  Description of Artificial Sequence: Synthetic oligonucleotide
  Sense strand starting at position 3412 of SEQ ID NO: 1881724
gccacugcugucuugcaga

SEQ ID NO: 2066877 - RNA, 19 nt, Artificial Sequence
  Description of Artificial Sequence: Synthetic oligonucleotide
  Antisense strand to SEQ ID NO: 2066876
ucugcaagacagcaguggc

SEQ ID NO: 2066878 - RNA, 19 nt, Artificial Sequence
  Description of Artificial Sequence: Synthetic oligonucleotide
  Sense strand starting at position 3448 of SEQ ID NO: 1881724
ucauuauugugaucaugga

SEQ ID NO: 2066879 - RNA, 19 nt, Artificial Sequence
  Description of Artificial Sequence: Synthetic oligonucleotide
  Antisense strand to SEQ ID NO: 2066878
uccaugaucacaauaauga

SEQ ID NO: 2066880 - RNA, 19 nt, Artificial Sequence
  Description of Artificial Sequence: Synthetic oligonucleotide
  Sense strand starting at position 3452 of SEQ ID NO: 1881724
uauugugaucauggaauau

SEQ ID NO: 2066881 - RNA, 19 nt, Artificial Sequence
  Description of Artificial Sequence: Synthetic oligonucleotide
  Antisense strand to SEQ ID NO: 2066880
auauuccaugaucacaaua

SEQ ID NO: 2066882 - RNA, 19 nt, Artificial Sequence
  Description of Artificial Sequence: Synthetic oligonucleotide
  Sense strand starting at position 3635 of SEQ ID NO: 1881724
uggcaauugagcuauauug

SEQ ID NO: 2066883 - RNA, 19 nt, Artificial Sequence
  Description of Artificial Sequence: Synthetic oligonucleotide
  Antisense strand to SEQ ID NO: 2066882
caauauagcucaauugcca

SEQ ID NO: 2066884 - RNA, 19 nt, Artificial Sequence
  Description of Artificial Sequence: Synthetic oligonucleotide
  Sense strand starting at position 3637 of SEQ ID NO: 1881724
gcaauugagcuauauugaa

SEQ ID NO: 2066885 - RNA, 19 nt, Artificial Sequence
  Description of Artificial Sequence: Synthetic oligonucleotide
  Antisense strand to SEQ ID NO: 2066884
uucaauauagcucaauugc

SEQ ID NO: 2066886 - RNA, 19 nt, Artificial Sequence
  Description of Artificial Sequence: Synthetic oligonucleotide
  Sense strand starting at position 3650 of SEQ ID NO: 1881724
auugaaaguucccuaguga

SEQ ID NO: 2066887 - RNA, 19 nt, Artificial Sequence
  Description of Artificial Sequence: Synthetic oligonucleotide
  Antisense strand to SEQ ID NO: 2066886
ucacuagggaacuuucaau

SEQ ID NO: 2066888 - RNA, 19 nt, Artificial Sequence
  Description of Artificial Sequence: Synthetic oligonucleotide
  Sense strand starting at position 3651 of SEQ ID NO: 1881724
uugaaaguucccuagugau

SEQ ID NO: 2066889 - RNA, 19 nt, Artificial Sequence
  Description of Artificial Sequence: Synthetic oligonucleotide
  Antisense strand to SEQ ID NO: 2066888
aucacuagggaacuuucaa

SEQ ID NO: 2066890 - RNA, 19 nt, Artificial Sequence
  Description of Artificial Sequence: Synthetic oligonucleotide
  Sense strand starting at position 134 of SEQ ID NO: 1881725
acugauuaaugucuggauu

SEQ ID NO: 2066891 - RNA, 19 nt, Artificial Sequence
  Description of Artificial Sequence: Synthetic oligonucleotide
  Antisense strand to SEQ ID NO: 2066890
aauccagacauuaaucagu

SEQ ID NO: 2066892 - RNA, 19 nt, Artificial Sequence
  Description of Artificial Sequence: Synthetic oligonucleotide
  Sense strand starting at position 135 of SEQ ID NO: 1881725
cugauuaaugucuggauua

SEQ ID NO: 2066893 - RNA, 19 nt, Artificial Sequence
  Description of Artificial Sequence: Synthetic oligonucleotide
  Antisense strand to SEQ ID NO: 2066892
uaauccagacauuaaucag

SEQ ID NO: 2066894 - RNA, 19 nt, Artificial Sequence
  Description of Artificial Sequence: Synthetic oligonucleotide
  Sense strand starting at position 230 of SEQ ID NO: 1881725
aagaaagcuguauggaaau

SEQ ID NO: 2066895 - RNA, 19 nt, Artificial Sequence
  Description of Artificial Sequence: Synthetic oligonucleotide
  Antisense strand to SEQ ID NO: 2066894
auuuccauacagcuuucuu

SEQ ID NO: 2066896 - RNA, 19 nt, Artificial Sequence
  Description of Artificial Sequence: Synthetic oligonucleotide
  Sense strand starting at position 265 of SEQ ID NO: 1881725
gcaagaaguggcuacaguu

SEQ ID NO: 2066897 - RNA, 19 nt, Artificial Sequence
  Description of Artificial Sequence: Synthetic oligonucleotide
  Antisense strand to SEQ ID NO: 2066896
aacuguagccacuucuugc

SEQ ID NO: 2066898 - RNA, 19 nt, Artificial Sequence
  Description of Artificial Sequence: Synthetic oligonucleotide
  Sense strand starting at position 737 of SEQ ID NO: 1881725
aucgacauuuacuauauga

SEQ ID NO: 2066899 - RNA, 19 nt, Artificial Sequence
  Description of Artificial Sequence: Synthetic oligonucleotide
  Antisense strand to SEQ ID NO: 2066898
ucauauaguaaaugucgau

SEQ ID NO: 2066900 - RNA, 19 nt, Artificial Sequence
  Description of Artificial Sequence: Synthetic oligonucleotide
  Sense strand starting at position 795 of SEQ ID NO: 1881725
uuuggagucuggcuuaaua

SEQ ID NO: 2066901 - RNA, 19 nt, Artificial Sequence
  Description of Artificial Sequence: Synthetic oligonucleotide
  Antisense strand to SEQ ID NO: 2066900
uauuaagccagacuccaaa

SEQ ID NO: 2066902 - RNA, 19 nt, Artificial Sequence
  Description of Artificial Sequence: Synthetic oligonucleotide
  Sense strand starting at position 797 of SEQ ID NO: 1881725
uggagucuggcuuaauaga

SEQ ID NO: 2066903 - RNA, 19 nt, Artificial Sequence
  Description of Artificial Sequence: Synthetic oligonucleotide
  Antisense strand to SEQ ID NO: 2066902
ucuauuaagccagacucca

SEQ ID NO: 2066904 - RNA, 19 nt, Artificial Sequence
  Description of Artificial Sequence: Synthetic oligonucleotide
  Sense strand starting at position 828 of SEQ ID NO: 1881725
ugcauuuacuccguugcaa

SEQ ID NO: 2066905 - RNA, 19 nt, Artificial Sequence
  Description of Artificial Sequence: Synthetic oligonucleotide
  Antisense strand to SEQ ID NO: 2066904
uugcaacggaguaaaugca

SEQ ID NO: 2066906 - RNA, 19 nt, Artificial Sequence
  Description of Artificial Sequence: Synthetic oligonucleotide
  Sense strand starting at position 982 of SEQ ID NO: 1881725
gugcuuccucuuuaugaaa

SEQ ID NO: 2066907 - RNA, 19 nt, Artificial Sequence
  Description of Artificial Sequence: Synthetic oligonucleotide
  Antisense strand to SEQ ID NO: 2066906
uuucauaaagaggaagcac

SEQ ID NO: 2066908 - RNA, 19 nt, Artificial Sequence
  Description of Artificial Sequence: Synthetic oligonucleotide
  Sense strand starting at position 1094 of SEQ ID NO: 1881725
aggcugaguccgggaggau

SEQ ID NO: 2066909 - RNA, 19 nt, Artificial Sequence
  Description of Artificial Sequence: Synthetic oligonucleotide
  Antisense strand to SEQ ID NO: 2066908
auccucccggacucagccu

SEQ ID NO: 2066910 - RNA, 19 nt, Artificial Sequence
  Description of Artificial Sequence: Synthetic oligonucleotide
  Sense strand starting at position 1250 of SEQ ID NO: 1881725
gaaacucauugauugaguu

SEQ ID NO: 2066911 - RNA, 19 nt, Artificial Sequence
  Description of Artificial Sequence: Synthetic oligonucleotide
  Antisense strand to SEQ ID NO: 2066910
aacucaaucaaugaguuuc

SEQ ID NO: 2066912 - RNA, 19 nt, Artificial Sequence
  Description of Artificial Sequence: Synthetic oligonucleotide
  Sense strand starting at position 1254 of SEQ ID NO: 1881725
cucauugauugaguuguca

SEQ ID NO: 2066913 - RNA, 19 nt, Artificial Sequence
  Description of Artificial Sequence: Synthetic oligonucleotide
  Antisense strand to SEQ ID NO: 2066912
ugacaacucaaucaaugag

SEQ ID NO: 2066914 - RNA, 19 nt, Artificial Sequence
  Description of Artificial Sequence: Synthetic oligonucleotide
  Sense strand starting at position 1287 of SEQ ID NO: 1881725
ggcucaagacgguacaauu

SEQ ID NO: 2066915 - RNA, 19 nt, Artificial Sequence
  Description of Artificial Sequence: Synthetic oligonucleotide
  Antisense strand to SEQ ID NO: 2066914
aauuguaccgucuugagcc

SEQ ID NO: 2066916 - RNA, 19 nt, Artificial Sequence
  Description of Artificial Sequence: Synthetic oligonucleotide
  Sense strand starting at position 1327 of SEQ ID NO: 1881725
aagagaauccagcggcauu

SEQ ID NO: 2066917 - RNA, 19 nt, Artificial Sequence
  Description of Artificial Sequence: Synthetic oligonucleotide
  Antisense strand to SEQ ID NO: 2066916
aaugccgcuggauucucuu

SEQ ID NO: 2066918 - RNA, 19 nt, Artificial Sequence
  Description of Artificial Sequence: Synthetic oligonucleotide
  Sense strand starting at position 1328 of SEQ ID NO: 1881725
agagaauccagcggcauua

SEQ ID NO: 2066919 - RNA, 19 nt, Artificial Sequence
  Description of Artificial Sequence: Synthetic oligonucleotide
  Antisense strand to SEQ ID NO: 2066918
uaaugccgcuggauucucu

SEQ ID NO: 2066920 - RNA, 19 nt, Artificial Sequence
  Description of Artificial Sequence: Synthetic oligonucleotide
  Sense strand starting at position 1533 of SEQ ID NO: 1881725
gcacgcgucagcucacuua

SEQ ID NO: 2066921 - RNA, 19 nt, Artificial Sequence
  Description of Artificial Sequence: Synthetic oligonucleotide
  Antisense strand to SEQ ID NO: 2066920
uaagugagcugacgcgugc

SEQ ID NO: 2066922 - RNA, 19 nt, Artificial Sequence
  Description of Artificial Sequence: Synthetic oligonucleotide
  Sense strand starting at position 1572 of SEQ ID NO: 1881725
ggaggaugcuggcuucacu

SEQ ID NO: 2066923 - RNA, 19 nt, Artificial Sequence
  Description of Artificial Sequence: Synthetic oligonucleotide
  Antisense strand to SEQ ID NO: 2066922
agugaagccagcauccucc

SEQ ID NO: 2066924 - RNA, 19 nt, Artificial Sequence
  Description of Artificial Sequence: Synthetic oligonucleotide
  Sense strand starting at position 1601 of SEQ ID NO: 1881725
gugacugaagguuggagaa

SEQ ID NO: 2066925 - RNA, 19 nt, Artificial Sequence
  Description of Artificial Sequence: Synthetic oligonucleotide
  Antisense strand to SEQ ID NO: 2066924
uucuccaaccuucagucac

SEQ ID NO: 2066926 - RNA, 19 nt, Artificial Sequence
  Description of Artificial Sequence: Synthetic oligonucleotide
  Sense strand starting at position 2617 of SEQ ID NO: 1881725
ggcggcuuugugaggucau

SEQ ID NO: 2066927 - RNA, 19 nt, Artificial Sequence
  Description of Artificial Sequence: Synthetic oligonucleotide
  Antisense strand to SEQ ID NO: 2066926
augaccucacaaagccgcc

SEQ ID NO: 2066928 - RNA, 19 nt, Artificial Sequence
  Description of Artificial Sequence: Synthetic oligonucleotide
  Sense strand starting at position 2634 of SEQ ID NO: 1881725
augaguucgccgucacuac

SEQ ID NO: 2066929 - RNA, 19 nt, Artificial Sequence
  Description of Artificial Sequence: Synthetic oligonucleotide
  Antisense strand to SEQ ID NO: 2066928
guagugacggcgaacucau

SEQ ID NO: 2066930 - RNA, 19 nt, Artificial Sequence
  Description of Artificial Sequence: Synthetic oligonucleotide
  Sense strand starting at position 2714 of SEQ ID NO: 1881725
accauauuugccuguucua

SEQ ID NO: 2066931 - RNA, 19 nt, Artificial Sequence
  Description of Artificial Sequence: Synthetic oligonucleotide
  Antisense strand to SEQ ID NO: 2066930
uagaacaggcaaauauggu

SEQ ID NO: 2066932 - RNA, 19 nt, Artificial Sequence
  Description of Artificial Sequence: Synthetic oligonucleotide
  Sense strand starting at position 2837 of SEQ ID NO: 1881725
acggguuuaggguaaucuu

SEQ ID NO: 2066933 - RNA, 19 nt, Artificial Sequence
  Description of Artificial Sequence: Synthetic oligonucleotide
  Antisense strand to SEQ ID NO: 2066932
aagauuacccuaaacccgu

SEQ ID NO: 2066934 - RNA, 19 nt, Artificial Sequence
  Description of Artificial Sequence: Synthetic oligonucleotide
  Sense strand starting at position 2846 of SEQ ID NO: 1881725
ggguaaucuuucgcaaaca

SEQ ID NO: 2066935 - RNA, 19 nt, Artificial Sequence
  Description of Artificial Sequence: Synthetic oligonucleotide
  Antisense strand to SEQ ID NO: 2066934
uguuugcgaaagauuaccc

SEQ ID NO: 2066936 - RNA, 19 nt, Artificial Sequence
  Description of Artificial Sequence: Synthetic oligonucleotide
  Sense strand starting at position 2887 of SEQ ID NO: 1881725
acuuucuguucccugauca

SEQ ID NO: 2066937 - RNA, 19 nt, Artificial Sequence
  Description of Artificial Sequence: Synthetic oligonucleotide
  Antisense strand to SEQ ID NO: 2066936
ugaucagggaacagaaagu

SEQ ID NO: 2066938 - RNA, 19 nt, Artificial Sequence
  Description of Artificial Sequence: Synthetic oligonucleotide
  Sense strand starting at position 2977 of SEQ ID NO: 1881725
cucagaaugcaugacucau

SEQ ID NO: 2066939 - RNA, 19 nt, Artificial Sequence
  Description of Artificial Sequence: Synthetic oligonucleotide
  Antisense strand to SEQ ID NO: 2066938
augagucaugcauucugag

SEQ ID NO: 2066940 - RNA, 19 nt, Artificial Sequence
  Description of Artificial Sequence: Synthetic oligonucleotide
  Sense strand starting at position 3116 of SEQ ID NO: 1881725
caaggagguaucuagguuu

SEQ ID NO: 2066941 - RNA, 19 nt, Artificial Sequence
  Description of Artificial Sequence: Synthetic oligonucleotide
  Antisense strand to SEQ ID NO: 2066940
aaaccuagauaccuccuug

SEQ ID NO: 2066942 - RNA, 19 nt, Artificial Sequence
  Description of Artificial Sequence: Synthetic oligonucleotide
  Sense strand starting at position 3317 of SEQ ID NO: 1881725
gaaugaauguagucaugca

SEQ ID NO: 2066943 - RNA, 19 nt, Artificial Sequence
  Description of Artificial Sequence: Synthetic oligonucleotide
  Antisense strand to SEQ ID NO: 2066942
ugcaugacuacauucauuc

SEQ ID NO: 2066944 - RNA, 19 nt, Artificial Sequence
  Description of Artificial Sequence: Synthetic oligonucleotide
  Sense strand starting at position 3346 of SEQ ID NO: 1881725
acaguuagcagaggauacu

SEQ ID NO: 2066945 - RNA, 19 nt, Artificial Sequence
  Description of Artificial Sequence: Synthetic oligonucleotide
  Antisense strand to SEQ ID NO: 2066944
aguauccucugcuaacugu

SEQ ID NO: 2066946 - RNA, 19 nt, Artificial Sequence
  Description of Artificial Sequence: Synthetic oligonucleotide
  Sense strand starting at position 3396 of SEQ ID NO: 1881725
auacacucgcccuauugau

SEQ ID NO: 2066947 - RNA, 19 nt, Artificial Sequence
  Description of Artificial Sequence: Synthetic oligonucleotide
  Antisense strand to SEQ ID NO: 2066946
aucaauagggcgaguguau

SEQ ID NO: 2066948 - RNA, 19 nt, Artificial Sequence
  Description of Artificial Sequence: Synthetic oligonucleotide
  Sense strand starting at position 3453 of SEQ ID NO: 1881725
guuagaguaauaugaugua

SEQ ID NO: 2066949 - RNA, 19 nt, Artificial Sequence
  Description of Artificial Sequence: Synthetic oligonucleotide
  Antisense strand to SEQ ID NO: 2066948
uacaucauauuacucuaac

SEQ ID NO: 2066950 - RNA, 19 nt, Artificial Sequence
  Description of Artificial Sequence: Synthetic oligonucleotide
  Sense strand starting at position 3548 of SEQ ID NO: 1881725
aaagaauguggucaguucu

SEQ ID NO: 2066951 - RNA, 19 nt, Artificial Sequence
  Description of Artificial Sequence: Synthetic oligonucleotide
  Antisense strand to SEQ ID NO: 2066950
agaacugaccacauucuuu

SEQ ID NO: 2066952 - RNA, 19 nt, Artificial Sequence
  Description of Artificial Sequence: Synthetic oligonucleotide
  Sense strand starting at position 3558 of SEQ ID NO: 1881725
gucaguucuaccugaggac

SEQ ID NO: 2066953 - RNA, 19 nt, Artificial Sequence
  Description of Artificial Sequence: Synthetic oligonucleotide
  Antisense strand to SEQ ID NO: 2066952
guccucagguagaacugac

SEQ ID NO: 2066954 - RNA, 19 nt, Artificial Sequence
  Description of Artificial Sequence: Synthetic oligonucleotide
  Sense strand starting at position 3623 of SEQ ID NO: 1881725
agaggauuaguugguucca

SEQ ID NO: 2066955 - RNA, 19 nt, Artificial Sequence
  Description of Artificial Sequence: Synthetic oligonucleotide
  Antisense strand to SEQ ID NO: 2066954
uggaaccaacuaauccucu

SEQ ID NO: 2066956 - RNA, 19 nt, Artificial Sequence
  Description of Artificial Sequence: Synthetic oligonucleotide
  Sense strand starting at position 3625 of SEQ ID NO: 1881725
aggauuaguugguuccagu

SEQ ID NO: 2066957 - RNA, 19 nt, Artificial Sequence
  Description of Artificial Sequence: Synthetic oligonucleotide
  Antisense strand to SEQ ID NO: 2066956
acuggaaccaacuaauccu

SEQ ID NO: 2066958 - RNA, 19 nt, Artificial Sequence
  Description of Artificial Sequence: Synthetic oligonucleotide
  Sense strand starting at position 3665 of SEQ ID NO: 1881725
agagaauaguaugcgcuaa

SEQ ID NO: 2066959 - RNA, 19 nt, Artificial Sequence
  Description of Artificial Sequence: Synthetic oligonucleotide
  Antisense strand to SEQ ID NO: 2066958
uuagcgcauacuauucucu

SEQ ID NO: 2066960 - RNA, 19 nt, Artificial Sequence
  Description of Artificial Sequence: Synthetic oligonucleotide
  Sense strand starting at position 3694 of SEQ ID NO: 1881725
uagguaacagucugacaua

SEQ ID NO: 2066961 - RNA, 19 nt, Artificial Sequence
  Description of Artificial Sequence: Synthetic oligonucleotide
  Antisense strand to SEQ ID NO: 2066960
uaugucagacuguuaccua

SEQ ID NO: 2066962 - RNA, 19 nt, Artificial Sequence
  Description of Artificial Sequence: Synthetic oligonucleotide
  Sense strand starting at position 3784 of SEQ ID NO: 1881725
aagggcuuuguguaucauu

SEQ ID NO: 2066963 - RNA, 19 nt, Artificial Sequence
  Description of Artificial Sequence: Synthetic oligonucleotide
  Antisense strand to SEQ ID NO: 2066962
aaugauacacaaagcccuu

SEQ ID NO: 2066964 - RNA, 19 nt, Artificial Sequence
  Description of Artificial Sequence: Synthetic oligonucleotide
  Sense strand starting at position 3831 of SEQ ID NO: 1881725
gucagauguuaucugguag

SEQ ID NO: 2066965 - RNA, 19 nt, Artificial Sequence
  Description of Artificial Sequence: Synthetic oligonucleotide
  Antisense strand to SEQ ID NO: 2066964
cuaccagauaacaucugac

SEQ ID NO: 2066966 - RNA, 19 nt, Artificial Sequence
  Description of Artificial Sequence: Synthetic oligonucleotide
  Sense strand starting at position 3832 of SEQ ID NO: 1881725
ucagauguuaucugguaga

SEQ ID NO: 2066967 - RNA, 19 nt, Artificial Sequence
  Description of Artificial Sequence: Synthetic oligonucleotide
  Antisense strand to SEQ ID NO: 2066966
ucuaccagauaacaucuga

SEQ ID NO: 2066968 - RNA, 19 nt, Artificial Sequence
  Description of Artificial Sequence: Synthetic oligonucleotide
  Sense strand starting at position 3888 of SEQ ID NO: 1881725
gucugaacccugcaacuau

SEQ ID NO: 2066969 - RNA, 19 nt, Artificial Sequence
  Description of Artificial Sequence: Synthetic oligonucleotide
  Antisense strand to SEQ ID NO: 2066968
auaguugcaggguucagac

SEQ ID NO: 2066970 - RNA, 19 nt, Artificial Sequence
  Description of Artificial Sequence: Synthetic oligonucleotide
  Sense strand starting at position 56 of SEQ ID NO: 1881726
caguauggucccuacauga

SEQ ID NO: 2066971 - RNA, 19 nt, Artificial Sequence
  Description of Artificial Sequence: Synthetic oligonucleotide
  Antisense strand to SEQ ID NO: 2066970
ucauguagggaccauacug

SEQ ID NO: 2066972 - RNA, 19 nt, Artificial Sequence
  Description of Artificial Sequence: Synthetic oligonucleotide
  Sense strand starting at position 205 of SEQ ID NO: 1881726
gguccuaucaguggaucua

SEQ ID NO: 2066973 - RNA, 19 nt, Artificial Sequence
  Description of Artificial Sequence: Synthetic oligonucleotide
  Antisense strand to SEQ ID NO: 2066972
uagauccacugauaggacc

SEQ ID NO: 2066974 - RNA, 19 nt, Artificial Sequence
  Description of Artificial Sequence: Synthetic oligonucleotide
  Sense strand starting at position 265 of SEQ ID NO: 1881726
augaaagucccauaagcau

SEQ ID NO: 2066975 - RNA, 19 nt, Artificial Sequence
  Description of Artificial Sequence: Synthetic oligonucleotide
  Antisense strand to SEQ ID NO: 2066974
augcuuaugggacuuucau

SEQ ID NO: 2066976 - RNA, 19 nt, Artificial Sequence
  Description of Artificial Sequence: Synthetic oligonucleotide
  Sense strand starting at position 342 of SEQ ID NO: 1881726
gacccauaugcgugaaaca

SEQ ID NO: 2066977 - RNA, 19 nt, Artificial Sequence
  Description of Artificial Sequence: Synthetic oligonucleotide
  Antisense strand to SEQ ID NO: 2066976
uguuucacgcauauggguc

SEQ ID NO: 2066978 - RNA, 19 nt, Artificial Sequence
  Description of Artificial Sequence: Synthetic oligonucleotide
  Sense strand starting at position 343 of SEQ ID NO: 1881726
acccauaugcgugaaacau

SEQ ID NO: 2066979 - RNA, 19 nt, Artificial Sequence
  Description of Artificial Sequence: Synthetic oligonucleotide
  Antisense strand to SEQ ID NO: 2066978
auguuucacgcauaugggu

SEQ ID NO: 2066980 - RNA, 19 nt, Artificial Sequence
  Description of Artificial Sequence: Synthetic oligonucleotide
  Sense strand starting at position 351 of SEQ ID NO: 1881726
gcgugaaacauaggaaaug

SEQ ID NO: 2066981 - RNA, 19 nt, Artificial Sequence
  Description of Artificial Sequence: Synthetic oligonucleotide
  Antisense strand to SEQ ID NO: 2066980
cauuuccuauguuucacgc

SEQ ID NO: 2066982 - RNA, 19 nt, Artificial Sequence
  Description of Artificial Sequence: Synthetic oligonucleotide
  Sense strand starting at position 409 of SEQ ID NO: 1881726
aagacugcucggcaaggua

SEQ ID NO: 2066983 - RNA, 19 nt, Artificial Sequence
  Description of Artificial Sequence: Synthetic oligonucleotide
  Antisense strand to SEQ ID NO: 2066982
uaccuugccgagcagucuu

SEQ ID NO: 2066984 - RNA, 19 nt, Artificial Sequence
  Description of Artificial Sequence: Synthetic oligonucleotide
  Sense strand starting at position 424 of SEQ ID NO: 1881726
gguaucaaugauuguaggu

SEQ ID NO: 2066985 - RNA, 19 nt, Artificial Sequence
  Description of Artificial Sequence: Synthetic oligonucleotide
  Antisense strand to SEQ ID NO: 2066984
accuacaaucauugauacc

SEQ ID NO: 2066986 - RNA, 19 nt, Artificial Sequence
  Description of Artificial Sequence: Synthetic oligonucleotide
  Sense strand starting at position 429 of SEQ ID NO: 1881726
caaugauuguaggugguaa

SEQ ID NO: 2066987 - RNA, 19 nt, Artificial Sequence
  Description of Artificial Sequence: Synthetic oligonucleotide
  Antisense strand to SEQ ID NO: 2066986
uuaccaccuacaaucauug

SEQ ID NO: 2066988 - RNA, 19 nt, Artificial Sequence
  Description of Artificial Sequence: Synthetic oligonucleotide
  Sense strand starting at position 430 of SEQ ID NO: 1881726
aaugauuguaggugguaag

SEQ ID NO: 2066989 - RNA, 19 nt, Artificial Sequence
  Description of Artificial Sequence: Synthetic oligonucleotide
  Antisense strand to SEQ ID NO: 2066988
cuuaccaccuacaaucauu

SEQ ID NO: 2066990 - RNA, 19 nt, Artificial Sequence
  Description of Artificial Sequence: Synthetic oligonucleotide
  Sense strand starting at position 431 of SEQ ID NO: 1881726
augauuguaggugguaaga

SEQ ID NO: 2066991 - RNA, 19 nt, Artificial Sequence
  Description of Artificial Sequence: Synthetic oligonucleotide
  Antisense strand to SEQ ID NO: 2066990
ucuuaccaccuacaaucau

SEQ ID NO: 2066992 - RNA, 19 nt, Artificial Sequence
  Description of Artificial Sequence: Synthetic oligonucleotide
  Sense strand starting at position 555 of SEQ ID NO: 1881726
aagggugaaucuucccaca

SEQ ID NO: 2066993 - RNA, 19 nt, Artificial Sequence
  Description of Artificial Sequence: Synthetic oligonucleotide
  Antisense strand to SEQ ID NO: 2066992
ugugggaagauucacccuu

SEQ ID NO: 2066994 - RNA, 19 nt, Artificial Sequence
  Description of Artificial Sequence: Synthetic oligonucleotide
  Sense strand starting at position 557 of SEQ ID NO: 1881726
gggugaaucuucccacaua

SEQ ID NO: 2066995 - RNA, 19 nt, Artificial Sequence
  Description of Artificial Sequence: Synthetic oligonucleotide
  Antisense strand to SEQ ID NO: 2066994
uaugugggaagauucaccc

SEQ ID NO: 2066996 - RNA, 19 nt, Artificial Sequence
  Description of Artificial Sequence: Synthetic oligonucleotide
  Sense strand starting at position 904 of SEQ ID NO: 1881726
guggcuccucaauaacuau

SEQ ID NO: 2066997 - RNA, 19 nt, Artificial Sequence
  Description of Artificial Sequence: Synthetic oligonucleotide
  Antisense strand to SEQ ID NO: 2066996
auaguuauugaggagccac

SEQ ID NO: 2066998 - RNA, 19 nt, Artificial Sequence
  Description of Artificial Sequence: Synthetic oligonucleotide
  Sense strand starting at position 922 of SEQ ID NO: 1881726
uuuaaugcuccacauggga

SEQ ID NO: 2066999 - RNA, 19 nt, Artificial Sequence
  Description of Artificial Sequence: Synthetic oligonucleotide
  Antisense strand to SEQ ID NO: 2066998
ucccauguggagcauuaaa

SEQ ID NO: 2067000 - RNA, 19 nt, Artificial Sequence
  Description of Artificial Sequence: Synthetic oligonucleotide
  Sense strand starting at position 1067 of SEQ ID NO: 1881726
caaguauuagagcagcagu

SEQ ID NO: 2067001 - RNA, 19 nt, Artificial Sequence
  Description of Artificial Sequence: Synthetic oligonucleotide
  Antisense strand to SEQ ID NO: 2067000
acugcugcucuaauacuug

SEQ ID NO: 2067002 - RNA, 19 nt, Artificial Sequence
  Description of Artificial Sequence: Synthetic oligonucleotide
  Sense strand starting at position 1070 of SEQ ID NO: 1881726
guauuagagcagcaguaau

SEQ ID NO: 2067003 - RNA, 19 nt, Artificial Sequence
  Description of Artificial Sequence: Synthetic oligonucleotide
  Antisense strand to SEQ ID NO: 2067002
auuacugcugcucuaauac

SEQ ID NO: 2067004 - RNA, 19 nt, Artificial Sequence
  Description of Artificial Sequence: Synthetic oligonucleotide
  Sense strand starting at position 1183 of SEQ ID NO: 1881726
ccauucugugcaggaggaa

SEQ ID NO: 2067005 - RNA, 19 nt, Artificial Sequence
  Description of Artificial Sequence: Synthetic oligonucleotide
  Antisense strand to SEQ ID NO: 2067004
uuccuccugcacagaaugg

SEQ ID NO: 2067006 - RNA, 19 nt, Artificial Sequence
  Description of Artificial Sequence: Synthetic oligonucleotide
  Sense strand starting at position 1272 of SEQ ID NO: 1881726
acugcacucuaggcagauu

SEQ ID NO: 2067007 - RNA, 19 nt, Artificial Sequence
  Description of Artificial Sequence: Synthetic oligonucleotide
  Antisense strand to SEQ ID NO: 2067006
aaucugccuagagugcagu

SEQ ID NO: 2067008 - RNA, 19 nt, Artificial Sequence
  Description of Artificial Sequence: Synthetic oligonucleotide
  Sense strand starting at position 1361 of SEQ ID NO: 1881726
augugucacccacagaaca

SEQ ID NO: 2067009 - RNA, 19 nt, Artificial Sequence
  Description of Artificial Sequence: Synthetic oligonucleotide
  Antisense strand to SEQ ID NO: 2067008
uguucugugggugacacau

SEQ ID NO: 2067010 - RNA, 19 nt, Artificial Sequence
  Description of Artificial Sequence: Synthetic oligonucleotide
  Sense strand starting at position 1527 of SEQ ID NO: 1881726
guguccuuugcugaucaca

SEQ ID NO: 2067011 - RNA, 19 nt, Artificial Sequence
  Description of Artificial Sequence: Synthetic oligonucleotide
  Antisense strand to SEQ ID NO: 2067010
ugugaucagcaaaggacac

SEQ ID NO: 2067012 - RNA, 19 nt, Artificial Sequence
  Description of Artificial Sequence: Synthetic oligonucleotide
  Sense strand starting at position 1589 of SEQ ID NO: 1881726
uagaaauucuguucugcug

SEQ ID NO: 2067013 - RNA, 19 nt, Artificial Sequence
  Description of Artificial Sequence: Synthetic oligonucleotide
  Antisense strand to SEQ ID NO: 2067012
cagcagaacagaauuucua

SEQ ID NO: 2067014 - RNA, 19 nt, Artificial Sequence
  Description of Artificial Sequence: Synthetic oligonucleotide
  Sense strand starting at position 1723 of SEQ ID NO: 1881726
gucccucuggcauauugua

SEQ ID NO: 2067015 - RNA, 19 nt, Artificial Sequence
  Description of Artificial Sequence: Synthetic oligonucleotide
  Antisense strand to SEQ ID NO: 2067014
uacaauaugccagagggac

SEQ ID NO: 2067016 - RNA, 19 nt, Artificial Sequence
  Description of Artificial Sequence: Synthetic oligonucleotide
  Sense strand starting at position 2056 of SEQ ID NO: 1881726
gggacugucugaguccuau

SEQ ID NO: 2067017 - RNA, 19 nt, Artificial Sequence
  Description of Artificial Sequence: Synthetic oligonucleotide
  Antisense strand to SEQ ID NO: 2067016
auaggacucagacaguccc

SEQ ID NO: 2067018 - RNA, 19 nt, Artificial Sequence
  Description of Artificial Sequence: Synthetic oligonucleotide
  Sense strand starting at position 2164 of SEQ ID NO: 1881726
agcgaguuuguugagggaa

SEQ ID NO: 2067019 - RNA, 19 nt, Artificial Sequence
  Description of Artificial Sequence: Synthetic oligonucleotide
  Antisense strand to SEQ ID NO: 2067018
uucccucaacaaacucgcu

SEQ ID NO: 2067020 - RNA, 19 nt, Artificial Sequence
  Description of Artificial Sequence: Synthetic oligonucleotide
  Sense strand starting at position 2167 of SEQ ID NO: 1881726
gaguuuguugagggaauac

SEQ ID NO: 2067021 - RNA, 19 nt, Artificial Sequence
  Description of Artificial Sequence: Synthetic oligonucleotide
  Antisense strand to SEQ ID NO: 2067020
guauucccucaacaaacuc

SEQ ID NO: 2067022 - RNA, 19 nt, Artificial Sequence
  Description of Artificial Sequence: Synthetic oligonucleotide
  Sense strand starting at position 2467 of SEQ ID NO: 1881726
cucugaaacuucuuguaag

SEQ ID NO: 2067023 - RNA, 19 nt, Artificial Sequence
  Description of Artificial Sequence: Synthetic oligonucleotide
  Antisense strand to SEQ ID NO: 2067022
cuuacaagaaguuucagag

SEQ ID NO: 2067024 - RNA, 19 nt, Artificial Sequence
  Description of Artificial Sequence: Synthetic oligonucleotide
  Sense strand starting at position 2602 of SEQ ID NO: 1881726
agcugaguguauccaaaug

SEQ ID NO: 2067025 - RNA, 19 nt, Artificial Sequence
  Description of Artificial Sequence: Synthetic oligonucleotide
  Antisense strand to SEQ ID NO: 2067024
cauuuggauacacucagcu

SEQ ID NO: 2067026 - RNA, 19 nt, Artificial Sequence
  Description of Artificial Sequence: Synthetic oligonucleotide
  Sense strand starting at position 2777 of SEQ ID NO: 1881726
guuagaacaccuuggccau

SEQ ID NO: 2067027 - RNA, 19 nt, Artificial Sequence
  Description of Artificial Sequence: Synthetic oligonucleotide
  Antisense strand to SEQ ID NO: 2067026
auggccaagguguucuaac

SEQ ID NO: 2067028 - RNA, 19 nt, Artificial Sequence
  Description of Artificial Sequence: Synthetic oligonucleotide
  Sense strand starting at position 2859 of SEQ ID NO: 1881726
cuuguuaaacacuggcuaa

SEQ ID NO: 2067029 - RNA, 19 nt, Artificial Sequence
  Description of Artificial Sequence: Synthetic oligonucleotide
  Antisense strand to SEQ ID NO: 2067028
uuagccaguguuuaacaag

SEQ ID NO: 2067030 - RNA, 19 nt, Artificial Sequence
  Description of Artificial Sequence: Synthetic oligonucleotide
  Sense strand starting at position 2944 of SEQ ID NO: 1881726
agagccuuuccuuaagcaa

SEQ ID NO: 2067031 - RNA, 19 nt, Artificial Sequence
  Description of Artificial Sequence: Synthetic oligonucleotide
  Antisense strand to SEQ ID NO: 2067030
uugcuuaaggaaaggcucu

SEQ ID NO: 2067032 - RNA, 19 nt, Artificial Sequence
  Description of Artificial Sequence: Synthetic oligonucleotide
  Sense strand starting at position 3110 of SEQ ID NO: 1881726
gcaagcuguaagugauaaa

SEQ ID NO: 2067033 - RNA, 19 nt, Artificial Sequence
  Description of Artificial Sequence: Synthetic oligonucleotide
  Antisense strand to SEQ ID NO: 2067032
uuuaucacuuacagcuugc

SEQ ID NO: 2067034 - RNA, 19 nt, Artificial Sequence
  Description of Artificial Sequence: Synthetic oligonucleotide
  Sense strand starting at position 3123 of SEQ ID NO: 1881726
gauaaauguuagcugaaua

SEQ ID NO: 2067035 - RNA, 19 nt, Artificial Sequence
  Description of Artificial Sequence: Synthetic oligonucleotide
  Antisense strand to SEQ ID NO: 2067034
uauucagcuaacauuuauc

SEQ ID NO: 2067036 - RNA, 19 nt, Artificial Sequence
  Description of Artificial Sequence: Synthetic oligonucleotide
  Sense strand starting at position 3128 of SEQ ID NO: 1881726
auguuagcugaauauauca

SEQ ID NO: 2067037 - RNA, 19 nt, Artificial Sequence
  Description of Artificial Sequence: Synthetic oligonucleotide
  Antisense strand to SEQ ID NO: 2067036
ugauauauucagcuaacau

SEQ ID NO: 2067038 - RNA, 19 nt, Artificial Sequence
  Description of Artificial Sequence: Synthetic oligonucleotide
  Sense strand starting at position 3155 of SEQ ID NO: 1881726
auuccaucagucuggaaau

SEQ ID NO: 2067039 - RNA, 19 nt, Artificial Sequence
  Description of Artificial Sequence: Synthetic oligonucleotide
  Antisense strand to SEQ ID NO: 2067038
auuuccagacugauggaau

SEQ ID NO: 2067040 - RNA, 19 nt, Artificial Sequence
  Description of Artificial Sequence: Synthetic oligonucleotide
  Sense strand starting at position 3157 of SEQ ID NO: 1881726
uccaucagucuggaaaucu

SEQ ID NO: 2067041 - RNA, 19 nt, Artificial Sequence
  Description of Artificial Sequence: Synthetic oligonucleotide
  Antisense strand to SEQ ID NO: 2067040
agauuuccagacugaugga

SEQ ID NO: 2067042 - RNA, 19 nt, Artificial Sequence
  Description of Artificial Sequence: Synthetic oligonucleotide
  Sense strand starting at position 3392 of SEQ ID NO: 1881726
agacaaugaggcugguuaa

SEQ ID NO: 2067043 - RNA, 19 nt, Artificial Sequence
  Description of Artificial Sequence: Synthetic oligonucleotide
  Antisense strand to SEQ ID NO: 2067042
uuaaccagccucauugucu

SEQ ID NO: 2067044 - RNA, 19 nt, Artificial Sequence
  Description of Artificial Sequence: Synthetic oligonucleotide
  Sense strand starting at position 3569 of SEQ ID NO: 1881726
ccuagaaucuuaguguuga

SEQ ID NO: 2067045 - RNA, 19 nt, Artificial Sequence
  Description of Artificial Sequence: Synthetic oligonucleotide
  Antisense strand to SEQ ID NO: 2067044
ucaacacuaagauucuagg

SEQ ID NO: 2067046 - RNA, 19 nt, Artificial Sequence
  Description of Artificial Sequence: Synthetic oligonucleotide
  Sense strand starting at position 3574 of SEQ ID NO: 1881726
aaucuuaguguugaugaca

SEQ ID NO: 2067047 - RNA, 19 nt, Artificial Sequence
  Description of Artificial Sequence: Synthetic oligonucleotide
  Antisense strand to SEQ ID NO: 2067046
ugucaucaacacuaagauu

SEQ ID NO: 2067048 - RNA, 19 nt, Artificial Sequence
  Description of Artificial Sequence: Synthetic oligonucleotide
  Sense strand starting at position 3577 of SEQ ID NO: 1881726
cuuaguguugaugacacaa

SEQ ID NO: 2067049 - RNA, 19 nt, Artificial Sequence
  Description of Artificial Sequence: Synthetic oligonucleotide
  Antisense strand to SEQ ID NO: 2067048
uugugucaucaacacuaag

SEQ ID NO: 2067050 - RNA, 19 nt, Artificial Sequence
  Description of Artificial Sequence: Synthetic oligonucleotide
  Sense strand starting at position 2390 of SEQ ID NO: 1881727
cucuuuaacguagagugaa

SEQ ID NO: 2067051 - RNA, 19 nt, Artificial Sequence
  Description of Artificial Sequence: Synthetic oligonucleotide
  Antisense strand to SEQ ID NO: 2067050
uucacucuacguuaaagag

SEQ ID NO: 2067052 - RNA, 19 nt, Artificial Sequence
  Description of Artificial Sequence: Synthetic oligonucleotide
  Sense strand starting at position 2404 of SEQ ID NO: 1881727
gugaacuaguaccuagaaa

SEQ ID NO: 2067053 - RNA, 19 nt, Artificial Sequence
  Description of Artificial Sequence: Synthetic oligonucleotide
  Antisense strand to SEQ ID NO: 2067052
uuucuagguacuaguucac

SEQ ID NO: 2067054 - RNA, 19 nt, Artificial Sequence
  Description of Artificial Sequence: Synthetic oligonucleotide
  Sense strand starting at position 2427 of SEQ ID NO: 1881727
aaguucugguguuuaauuu

SEQ ID NO: 2067055 - RNA, 19 nt, Artificial Sequence
  Description of Artificial Sequence: Synthetic oligonucleotide
  Antisense strand to SEQ ID NO: 2067054
aaauuaaacaccagaacuu

SEQ ID NO: 2067056 - RNA, 19 nt, Artificial Sequence
  Description of Artificial Sequence: Synthetic oligonucleotide
  Sense strand starting at position 2628 of SEQ ID NO: 1881727
ucauuacauuugcgauuua

SEQ ID NO: 2067057 - RNA, 19 nt, Artificial Sequence
  Description of Artificial Sequence: Synthetic oligonucleotide
  Antisense strand to SEQ ID NO: 2067056
uaaaucgcaaauguaauga

SEQ ID NO: 2067058 - RNA, 19 nt, Artificial Sequence
  Description of Artificial Sequence: Synthetic oligonucleotide
  Sense strand starting at position 2699 of SEQ ID NO: 1881727
auuuauaucuaggaaagac

SEQ ID NO: 2067059 - RNA, 19 nt, Artificial Sequence
  Description of Artificial Sequence: Synthetic oligonucleotide
  Antisense strand to SEQ ID NO: 2067058
gucuuuccuagauauaaau

SEQ ID NO: 2067060 - RNA, 19 nt, Artificial Sequence
  Description of Artificial Sequence: Synthetic oligonucleotide
  Sense strand starting at position 2740 of SEQ ID NO: 1881727
cuugcacucccauaguguu

SEQ ID NO: 2067061 - RNA, 19 nt, Artificial Sequence
  Description of Artificial Sequence: Synthetic oligonucleotide
  Antisense strand to SEQ ID NO: 2067060
aacacuaugggagugcaag

SEQ ID NO: 2067062 - RNA, 19 nt, Artificial Sequence
  Description of Artificial Sequence: Synthetic oligonucleotide
  Sense strand starting at position 2753 of SEQ ID NO: 1881727
aguguucugucccuucuua

SEQ ID NO: 2067063 - RNA, 19 nt, Artificial Sequence
  Description of Artificial Sequence: Synthetic oligonucleotide
  Antisense strand to SEQ ID NO: 2067062
uaagaagggacagaacacu

SEQ ID NO: 2067064 - RNA, 19 nt, Artificial Sequence
  Description of Artificial Sequence: Synthetic oligonucleotide
  Sense strand starting at position 3312 of SEQ ID NO: 1881727
gggauucuuuaagauagau

SEQ ID NO: 2067065 - RNA, 19 nt, Artificial Sequence
  Description of Artificial Sequence: Synthetic oligonucleotide
  Antisense strand to SEQ ID NO: 2067064
aucuaucuuaaagaauccc

SEQ ID NO: 2067066 - RNA, 19 nt, Artificial Sequence
  Description of Artificial Sequence: Synthetic oligonucleotide
  Sense strand starting at position 3325 of SEQ ID NO: 1881727
auagauagcucguuugauc

SEQ ID NO: 2067067 - RNA, 19 nt, Artificial Sequence
  Description of Artificial Sequence: Synthetic oligonucleotide
  Antisense strand to SEQ ID NO: 2067066
gaucaaacgagcuaucuau

SEQ ID NO: 2067068 - RNA, 19 nt, Artificial Sequence
  Description of Artificial Sequence: Synthetic oligonucleotide
  Sense strand starting at position 3333 of SEQ ID NO: 1881727
cucguuugaucucaagaca

SEQ ID NO: 2067069 - RNA, 19 nt, Artificial Sequence
  Description of Artificial Sequence: Synthetic oligonucleotide
  Antisense strand to SEQ ID NO: 2067068
ugucuugagaucaaacgag

SEQ ID NO: 2067070 - RNA, 19 nt, Artificial Sequence
  Description of Artificial Sequence: Synthetic oligonucleotide
  Sense strand starting at position 3336 of SEQ ID NO: 1881727
guuugaucucaagacauuc

SEQ ID NO: 2067071 - RNA, 19 nt, Artificial Sequence
  Description of Artificial Sequence: Synthetic oligonucleotide
  Antisense strand to SEQ ID NO: 2067070
gaaugucuugagaucaaac

SEQ ID NO: 2067072 - RNA, 19 nt, Artificial Sequence
  Description of Artificial Sequence: Synthetic oligonucleotide
  Sense strand starting at position 3346 of SEQ ID NO: 1881727
aagacauucuugugcuaag

SEQ ID NO: 2067073 - RNA, 19 nt, Artificial Sequence
  Description of Artificial Sequence: Synthetic oligonucleotide
  Antisense strand to SEQ ID NO: 2067072
cuuagcacaagaaugucuu

SEQ ID NO: 2067074 - RNA, 19 nt, Artificial Sequence
  Description of Artificial Sequence: Synthetic oligonucleotide
  Sense strand starting at position 3347 of SEQ ID NO: 1881727
agacauucuugugcuaaga

SEQ ID NO: 2067075 - RNA, 19 nt, Artificial Sequence
  Description of Artificial Sequence: Synthetic oligonucleotide
  Antisense strand to SEQ ID NO: 2067074
ucuuagcacaagaaugucu

SEQ ID NO: 2067076 - RNA, 19 nt, Artificial Sequence
  Description of Artificial Sequence: Synthetic oligonucleotide
  Sense strand starting at position 3349 of SEQ ID NO: 1881727
acauucuugugcuaagaaa

SEQ ID NO: 2067077 - RNA, 19 nt, Artificial Sequence
  Description of Artificial Sequence: Synthetic oligonucleotide
  Antisense strand to SEQ ID NO: 2067076
uuucuuagcacaagaaugu

SEQ ID NO: 2067078 - RNA, 19 nt, Artificial Sequence
  Description of Artificial Sequence: Synthetic oligonucleotide
  Sense strand starting at position 3372 of SEQ ID NO: 1881727
gguugaaacugcucaccau

SEQ ID NO: 2067079 - RNA, 19 nt, Artificial Sequence
  Description of Artificial Sequence: Synthetic oligonucleotide
  Antisense strand to SEQ ID NO: 2067078
auggugagcaguuucaacc

SEQ ID NO: 2067080 - RNA, 19 nt, Artificial Sequence
  Description of Artificial Sequence: Synthetic oligonucleotide
  Sense strand starting at position 3403 of SEQ ID NO: 1881727
auccaaauccugugacgaa

SEQ ID NO: 2067081 - RNA, 19 nt, Artificial Sequence
  Description of Artificial Sequence: Synthetic oligonucleotide
  Antisense strand to SEQ ID NO: 2067080
uucgucacaggauuuggau

SEQ ID NO: 2067082 - RNA, 19 nt, Artificial Sequence
  Description of Artificial Sequence: Synthetic oligonucleotide
  Sense strand starting at position 3404 of SEQ ID NO: 1881727
uccaaauccugugacgaac

SEQ ID NO: 2067083 - RNA, 19 nt, Artificial Sequence
  Description of Artificial Sequence: Synthetic oligonucleotide
  Antisense strand to SEQ ID NO: 2067082
guucgucacaggauuugga

SEQ ID NO: 2067084 - RNA, 19 nt, Artificial Sequence
  Description of Artificial Sequence: Synthetic oligonucleotide
  Sense strand starting at position 3436 of SEQ ID NO: 1881727
guggcaacuuuauagauga

SEQ ID NO: 2067085 - RNA, 19 nt, Artificial Sequence
  Description of Artificial Sequence: Synthetic oligonucleotide
  Antisense strand to SEQ ID NO: 2067084
ucaucuauaaaguugccac

SEQ ID NO: 2067086 - RNA, 19 nt, Artificial Sequence
  Description of Artificial Sequence: Synthetic oligonucleotide
  Sense strand starting at position 3438 of SEQ ID NO: 1881727
ggcaacuuuauagaugagu

SEQ ID NO: 2067087 - RNA, 19 nt, Artificial Sequence
  Description of Artificial Sequence: Synthetic oligonucleotide
  Antisense strand to SEQ ID NO: 2067086
acucaucuauaaaguugcc

SEQ ID NO: 2067088 - RNA, 19 nt, Artificial Sequence
  Description of Artificial Sequence: Synthetic oligonucleotide
  Sense strand starting at position 3449 of SEQ ID NO: 1881727
agaugagucugggaggcaa

SEQ ID NO: 2067089 - RNA, 19 nt, Artificial Sequence
  Description of Artificial Sequence: Synthetic oligonucleotide
  Antisense strand to SEQ ID NO: 2067088
uugccucccagacucaucu

SEQ ID NO: 2067090 - RNA, 19 nt, Artificial Sequence
  Description of Artificial Sequence: Synthetic oligonucleotide
  Sense strand starting at position 3461 of SEQ ID NO: 1881727
gaggcaaacucucuggacu

SEQ ID NO: 2067091 - RNA, 19 nt, Artificial Sequence
  Description of Artificial Sequence: Synthetic oligonucleotide
  Antisense strand to SEQ ID NO: 2067090
aguccagagaguuugccuc

SEQ ID NO: 2067092 - RNA, 19 nt, Artificial Sequence
  Description of Artificial Sequence: Synthetic oligonucleotide
  Sense strand starting at position 3462 of SEQ ID NO: 1881727
aggcaaacucucuggacua

SEQ ID NO: 2067093 - RNA, 19 nt, Artificial Sequence
  Description of Artificial Sequence: Synthetic oligonucleotide
  Antisense strand to SEQ ID NO: 2067092
uaguccagagaguuugccu

SEQ ID NO: 2067094 - RNA, 19 nt, Artificial Sequence
  Description of Artificial Sequence: Synthetic oligonucleotide
  Sense strand starting at position 3463 of SEQ ID NO: 1881727
ggcaaacucucuggacuau

SEQ ID NO: 2067095 - RNA, 19 nt, Artificial Sequence
  Description of Artificial Sequence: Synthetic oligonucleotide
  Antisense strand to SEQ ID NO: 2067094
auaguccagagaguuugcc

SEQ ID NO: 2067096 - RNA, 19 nt, Artificial Sequence
  Description of Artificial Sequence: Synthetic oligonucleotide
  Sense strand starting at position 3464 of SEQ ID NO: 1881727
gcaaacucucuggacuaua

SEQ ID NO: 2067097 - RNA, 19 nt, Artificial Sequence
  Description of Artificial Sequence: Synthetic oligonucleotide
  Antisense strand to SEQ ID NO: 2067096
uauaguccagagaguuugc

SEQ ID NO: 2067098 - RNA, 19 nt, Artificial Sequence
  Description of Artificial Sequence: Synthetic oligonucleotide
  Sense strand starting at position 3531 of SEQ ID NO: 1881727
ucauuuguuucucuauggu

SEQ ID NO: 2067099 - RNA, 19 nt, Artificial Sequence
  Description of Artificial Sequence: Synthetic oligonucleotide
  Antisense strand to SEQ ID NO: 2067098
accauagagaaacaaauga

SEQ ID NO: 2067100 - RNA, 19 nt, Artificial Sequence
  Description of Artificial Sequence: Synthetic oligonucleotide
  Sense strand starting at position 3544 of SEQ ID NO: 1881727
uaugguaauucucaugaag

SEQ ID NO: 2067101 - RNA, 19 nt, Artificial Sequence
  Description of Artificial Sequence: Synthetic oligonucleotide
  Antisense strand to SEQ ID NO: 2067100
cuucaugagaauuaccaua

SEQ ID NO: 2067102 - RNA, 19 nt, Artificial Sequence
  Description of Artificial Sequence: Synthetic oligonucleotide
  Sense strand starting at position 3618 of SEQ ID NO: 1881727
guagcaauccauugaguug

SEQ ID NO: 2067103 - RNA, 19 nt, Artificial Sequence
  Description of Artificial Sequence: Synthetic oligonucleotide
  Antisense strand to SEQ ID NO: 2067102
caacucaauggauugcuac

SEQ ID NO: 2067104 - RNA, 19 nt, Artificial Sequence
  Description of Artificial Sequence: Synthetic oligonucleotide
  Sense strand starting at position 3670 of SEQ ID NO: 1881727
acuugugaugcuugacuua

SEQ ID NO: 2067105 - RNA, 19 nt, Artificial Sequence
  Description of Artificial Sequence: Synthetic oligonucleotide
  Antisense strand to SEQ ID NO: 2067104
uaagucaagcaucacaagu

SEQ ID NO: 2067106 - RNA, 19 nt, Artificial Sequence
  Description of Artificial Sequence: Synthetic oligonucleotide
  Sense strand starting at position 3673 of SEQ ID NO: 1881727
ugugaugcuugacuuaauu

SEQ ID NO: 2067107 - RNA, 19 nt, Artificial Sequence
  Description of Artificial Sequence: Synthetic oligonucleotide
  Antisense strand to SEQ ID NO: 2067106
aauuaagucaagcaucaca

SEQ ID NO: 2067108 - RNA, 19 nt, Artificial Sequence
  Description of Artificial Sequence: Synthetic oligonucleotide
  Sense strand starting at position 3711 of SEQ ID NO: 1881727
uguauuucuucccaacugu

SEQ ID NO: 2067109 - RNA, 19 nt, Artificial Sequence
  Description of Artificial Sequence: Synthetic oligonucleotide
  Antisense strand to SEQ ID NO: 2067108
acaguugggaagaaauaca

SEQ ID NO: 2067110 - RNA, 19 nt, Artificial Sequence
  Description of Artificial Sequence: Synthetic oligonucleotide
  Sense strand starting at position 3720 of SEQ ID NO: 1881727
ucccaacugucaguauuau

SEQ ID NO: 2067111 - RNA, 19 nt, Artificial Sequence
  Description of Artificial Sequence: Synthetic oligonucleotide
  Antisense strand to SEQ ID NO: 2067110
auaauacugacaguuggga

SEQ ID NO: 2067112 - RNA, 19 nt, Artificial Sequence
  Description of Artificial Sequence: Synthetic oligonucleotide
  Sense strand starting at position 3729 of SEQ ID NO: 1881727
ucaguauuaugcuccugaa

SEQ ID NO: 2067113 - RNA, 19 nt, Artificial Sequence
  Description of Artificial Sequence: Synthetic oligonucleotide
  Antisense strand to SEQ ID NO: 2067112
uucaggagcauaauacuga

SEQ ID NO: 2067114 - RNA, 19 nt, Artificial Sequence
  Description of Artificial Sequence: Synthetic oligonucleotide
  Sense strand starting at position 3759 of SEQ ID NO: 1881727
gugagaaaguuuguaguug

SEQ ID NO: 2067115 - RNA, 19 nt, Artificial Sequence
  Description of Artificial Sequence: Synthetic oligonucleotide
  Antisense strand to SEQ ID NO: 2067114
caacuacaaacuuucucac

SEQ ID NO: 2067116 - RNA, 19 nt, Artificial Sequence
  Description of Artificial Sequence: Synthetic oligonucleotide
  Sense strand starting at position 3760 of SEQ ID NO: 1881727
ugagaaaguuuguaguuga

SEQ ID NO: 2067117 - RNA, 19 nt, Artificial Sequence
  Description of Artificial Sequence: Synthetic oligonucleotide
  Antisense strand to SEQ ID NO: 2067116
ucaacuacaaacuuucuca

SEQ ID NO: 2067118 - RNA, 19 nt, Artificial Sequence
  Description of Artificial Sequence: Synthetic oligonucleotide
  Sense strand starting at position 3763 of SEQ ID NO: 1881727
gaaaguuuguaguugauaa

SEQ ID NO: 2067119 - RNA, 19 nt, Artificial Sequence
  Description of Artificial Sequence: Synthetic oligonucleotide
  Antisense strand to SEQ ID NO: 2067118
uuaucaacuacaaacuuuc

SEQ ID NO: 2067120 - RNA, 19 nt, Artificial Sequence
  Description of Artificial Sequence: Synthetic oligonucleotide
  Sense strand starting at position 3765 of SEQ ID NO: 1881727
aaguuuguaguugauaaca

SEQ ID NO: 2067121 - RNA, 19 nt, Artificial Sequence
  Description of Artificial Sequence: Synthetic oligonucleotide
  Antisense strand to SEQ ID NO: 2067120
uguuaucaacuacaaacuu

SEQ ID NO: 2067122 - RNA, 19 nt, Artificial Sequence
  Description of Artificial Sequence: Synthetic oligonucleotide
  Sense strand starting at position 3767 of SEQ ID NO: 1881727
guuuguaguugauaacaua

SEQ ID NO: 2067123 - RNA, 19 nt, Artificial Sequence
  Description of Artificial Sequence: Synthetic oligonucleotide
  Antisense strand to SEQ ID NO: 2067122
uauguuaucaacuacaaac

SEQ ID NO: 2067124 - RNA, 19 nt, Artificial Sequence
  Description of Artificial Sequence: Synthetic oligonucleotide
  Sense strand starting at position 3866 of SEQ ID NO: 1881727
aguucuugcuugcugggaa

SEQ ID NO: 2067125 - RNA, 19 nt, Artificial Sequence
  Description of Artificial Sequence: Synthetic oligonucleotide
  Antisense strand to SEQ ID NO: 2067124
uucccagcaagcaagaacu

SEQ ID NO: 2067126 - RNA, 19 nt, Artificial Sequence
  Description of Artificial Sequence: Synthetic oligonucleotide
  Sense strand starting at position 3911 of SEQ ID NO: 1881727
ucaacaaacuguguaguaa

SEQ ID NO: 2067127 - RNA, 19 nt, Artificial Sequence
  Description of Artificial Sequence: Synthetic oligonucleotide
  Antisense strand to SEQ ID NO: 2067126
uuacuacacaguuuguuga

SEQ ID NO: 2067128 - RNA, 19 nt, Artificial Sequence
  Description of Artificial Sequence: Synthetic oligonucleotide
  Sense strand starting at position 3983 of SEQ ID NO: 1881727
ugucauaucuuccaccgau

SEQ ID NO: 2067129 - RNA, 19 nt, Artificial Sequence
  Description of Artificial Sequence: Synthetic oligonucleotide
  Antisense strand to SEQ ID NO: 2067128
aucgguggaagauaugaca

SEQ ID NO: 2067130 - RNA, 19 nt, Artificial Sequence
  Description of Artificial Sequence: Synthetic oligonucleotide
  Sense strand starting at position 43 of SEQ ID NO: 1881728
acgcgaucucgguucgguu

SEQ ID NO: 2067131 - RNA, 19 nt, Artificial Sequence
  Description of Artificial Sequence: Synthetic oligonucleotide
  Antisense strand to SEQ ID NO: 2067130
aaccgaaccgagaucgcgu

SEQ ID NO: 2067132 - RNA, 19 nt, Artificial Sequence
  Description of Artificial Sequence: Synthetic oligonucleotide
  Sense strand starting at position 388 of SEQ ID NO: 1881728
ugccuuaggcaacagaauu

SEQ ID NO: 2067133 - RNA, 19 nt, Artificial Sequence
  Description of Artificial Sequence: Synthetic oligonucleotide
  Antisense strand to SEQ ID NO: 2067132
aauucuguugccuaaggca

SEQ ID NO: 2067134 - RNA, 19 nt, Artificial Sequence
  Description of Artificial Sequence: Synthetic oligonucleotide
  Sense strand starting at position 646 of SEQ ID NO: 1881728
aacgauucuuaagauuugu

SEQ ID NO: 2067135 - RNA, 19 nt, Artificial Sequence
  Description of Artificial Sequence: Synthetic oligonucleotide
  Antisense strand to SEQ ID NO: 2067134
acaaaucuuaagaaucguu

SEQ ID NO: 2067136 - RNA, 19 nt, Artificial Sequence
  Description of Artificial Sequence: Synthetic oligonucleotide
  Sense strand starting at position 738 of SEQ ID NO: 1881728
ggaggauggucacaggauu

SEQ ID NO: 2067137 - RNA, 19 nt, Artificial Sequence
  Description of Artificial Sequence: Synthetic oligonucleotide
  Antisense strand to SEQ ID NO: 2067136
aauccugugaccauccucc

SEQ ID NO: 2067138 - RNA, 19 nt, Artificial Sequence
  Description of Artificial Sequence: Synthetic oligonucleotide
  Sense strand starting at position 767 of SEQ ID NO: 1881728
aauguaauccugugagcug

SEQ ID NO: 2067139 - RNA, 19 nt, Artificial Sequence
  Description of Artificial Sequence: Synthetic oligonucleotide
  Antisense strand to SEQ ID NO: 2067138
cagcucacaggauuacauu

SEQ ID NO: 2067140 - RNA, 19 nt, Artificial Sequence
  Description of Artificial Sequence: Synthetic oligonucleotide
  Sense strand starting at position 976 of SEQ ID NO: 1881728
gcucguuugcaaucacgua

SEQ ID NO: 2067141 - RNA, 19 nt, Artificial Sequence
  Description of Artificial Sequence: Synthetic oligonucleotide
  Antisense strand to SEQ ID NO: 2067140
uacgugauugcaaacgagc

SEQ ID NO: 2067142 - RNA, 19 nt, Artificial Sequence
  Description of Artificial Sequence: Synthetic oligonucleotide
  Sense strand starting at position 1022 of SEQ ID NO: 1881728
ggcccauuuauaugcgguu

SEQ ID NO: 2067143 - RNA, 19 nt, Artificial Sequence
  Description of Artificial Sequence: Synthetic oligonucleotide
  Antisense strand to SEQ ID NO: 2067142
aaccgcauauaaaugggcc

SEQ ID NO: 2067144 - RNA, 19 nt, Artificial Sequence
  Description of Artificial Sequence: Synthetic oligonucleotide
  Sense strand starting at position 1045 of SEQ ID NO: 1881728
aguuuaggucuagggaagu

SEQ ID NO: 2067145 - RNA, 19 nt, Artificial Sequence
  Description of Artificial Sequence: Synthetic oligonucleotide
  Antisense strand to SEQ ID NO: 2067144
acuucccuagaccuaaacu

SEQ ID NO: 2067146 - RNA, 19 nt, Artificial Sequence
  Description of Artificial Sequence: Synthetic oligonucleotide
  Sense strand starting at position 1058 of SEQ ID NO: 1881728
ggaaguuuccaggaagcuu

SEQ ID NO: 2067147 - RNA, 19 nt, Artificial Sequence
  Description of Artificial Sequence: Synthetic oligonucleotide
  Antisense strand to SEQ ID NO: 2067146
aagcuuccuggaaacuucc

SEQ ID NO: 2067148 - RNA, 19 nt, Artificial Sequence
  Description of Artificial Sequence: Synthetic oligonucleotide
  Sense strand starting at position 1340 of SEQ ID NO: 1881728
caaguaaagcgacaaagua

SEQ ID NO: 2067149 - RNA, 19 nt, Artificial Sequence
  Description of Artificial Sequence: Synthetic oligonucleotide
  Antisense strand to SEQ ID NO: 2067148
uacuuugucgcuuuacuug

SEQ ID NO: 2067150 - RNA, 19 nt, Artificial Sequence
  Description of Artificial Sequence: Synthetic oligonucleotide
  Sense strand starting at position 2755 of SEQ ID NO: 1881728
gcacacggcugauuucuua

SEQ ID NO: 2067151 - RNA, 19 nt, Artificial Sequence
  Description of Artificial Sequence: Synthetic oligonucleotide
  Antisense strand to SEQ ID NO: 2067150
uaagaaaucagccgugugc

SEQ ID NO: 2067152 - RNA, 19 nt, Artificial Sequence
  Description of Artificial Sequence: Synthetic oligonucleotide
  Sense strand starting at position 2886 of SEQ ID NO: 1881728
gguagugaccaugaaguuc

SEQ ID NO: 2067153 - RNA, 19 nt, Artificial Sequence
  Description of Artificial Sequence: Synthetic oligonucleotide
  Antisense strand to SEQ ID NO: 2067152
gaacuucauggucacuacc

SEQ ID NO: 2067154 - RNA, 19 nt, Artificial Sequence
  Description of Artificial Sequence: Synthetic oligonucleotide
  Sense strand starting at position 3060 of SEQ ID NO: 1881728
auguuacaguuucuauaag

SEQ ID NO: 2067155 - RNA, 19 nt, Artificial Sequence
  Description of Artificial Sequence: Synthetic oligonucleotide
  Antisense strand to SEQ ID NO: 2067154
cuuauagaaacuguaacau

SEQ ID NO: 2067156 - RNA, 19 nt, Artificial Sequence
  Description of Artificial Sequence: Synthetic oligonucleotide
  Sense strand starting at position 3177 of SEQ ID NO: 1881728
auggaugucuucuugaaua

SEQ ID NO: 2067157 - RNA, 19 nt, Artificial Sequence
  Description of Artificial Sequence: Synthetic oligonucleotide
  Antisense strand to SEQ ID NO: 2067156
uauucaagaagacauccau

SEQ ID NO: 2067158 - RNA, 19 nt, Artificial Sequence
  Description of Artificial Sequence: Synthetic oligonucleotide
  Sense strand starting at position 3308 of SEQ ID NO: 1881728
agccguuauuuccugaagu

SEQ ID NO: 2067159 - RNA, 19 nt, Artificial Sequence
  Description of Artificial Sequence: Synthetic oligonucleotide
  Antisense strand to SEQ ID NO: 2067158
acuucaggaaauaacggcu

SEQ ID NO: 2067160 - RNA, 19 nt, Artificial Sequence
  Description of Artificial Sequence: Synthetic oligonucleotide
  Sense strand starting at position 3331 of SEQ ID NO: 1881728
gcaaauaacuaaguuguga

SEQ ID NO: 2067161 - RNA, 19 nt, Artificial Sequence
  Description of Artificial Sequence: Synthetic oligonucleotide
  Antisense strand to SEQ ID NO: 2067160
ucacaacuuaguuauuugc

SEQ ID NO: 2067162 - RNA, 19 nt, Artificial Sequence
  Description of Artificial Sequence: Synthetic oligonucleotide
  Sense strand starting at position 3342 of SEQ ID NO: 1881728
aguugugaggcugauuaca

SEQ ID NO: 2067163 - RNA, 19 nt, Artificial Sequence
  Description of Artificial Sequence: Synthetic oligonucleotide
  Antisense strand to SEQ ID NO: 2067162
uguaaucagccucacaacu

SEQ ID NO: 2067164 - RNA, 19 nt, Artificial Sequence
  Description of Artificial Sequence: Synthetic oligonucleotide
  Sense strand starting at position 3344 of SEQ ID NO: 1881728
uugugaggcugauuacauc

SEQ ID NO: 2067165 - RNA, 19 nt, Artificial Sequence
  Description of Artificial Sequence: Synthetic oligonucleotide
  Antisense strand to SEQ ID NO: 2067164
gauguaaucagccucacaa

SEQ ID NO: 2067166 - RNA, 19 nt, Artificial Sequence
  Description of Artificial Sequence: Synthetic oligonucleotide
  Sense strand starting at position 3350 of SEQ ID NO: 1881728
ggcugauuacaucauugau

SEQ ID NO: 2067167 - RNA, 19 nt, Artificial Sequence
  Description of Artificial Sequence: Synthetic oligonucleotide
  Antisense strand to SEQ ID NO: 2067166
aucaaugauguaaucagcc

SEQ ID NO: 2067168 - RNA, 19 nt, Artificial Sequence
  Description of Artificial Sequence: Synthetic oligonucleotide
  Sense strand starting at position 3352 of SEQ ID NO: 1881728
cugauuacaucauugauug

SEQ ID NO: 2067169 - RNA, 19 nt, Artificial Sequence
  Description of Artificial Sequence: Synthetic oligonucleotide
  Antisense strand to SEQ ID NO: 2067168
caaucaaugauguaaucag

SEQ ID NO: 2067170 - RNA, 19 nt, Artificial Sequence
  Description of Artificial Sequence: Synthetic oligonucleotide
  Sense strand starting at position 3353 of SEQ ID NO: 1881728
ugauuacaucauugauugu

SEQ ID NO: 2067171 - RNA, 19 nt, Artificial Sequence
  Description of Artificial Sequence: Synthetic oligonucleotide
  Antisense strand to SEQ ID NO: 2067170
acaaucaaugauguaauca

SEQ ID NO: 2067172 - RNA, 19 nt, Artificial Sequence
  Description of Artificial Sequence: Synthetic oligonucleotide
  Sense strand starting at position 3356 of SEQ ID NO: 1881728
uuacaucauugauuguacu

SEQ ID NO: 2067173 - RNA, 19 nt, Artificial Sequence
  Description of Artificial Sequence: Synthetic oligonucleotide
  Antisense strand to SEQ ID NO: 2067172
aguacaaucaaugauguaa

SEQ ID NO: 2067174 - RNA, 19 nt, Artificial Sequence
  Description of Artificial Sequence: Synthetic oligonucleotide
  Sense strand starting at position 3362 of SEQ ID NO: 1881728
cauugauuguacuugagua

SEQ ID NO: 2067175 - RNA, 19 nt, Artificial Sequence
  Description of Artificial Sequence: Synthetic oligonucleotide
  Antisense strand to SEQ ID NO: 2067174
uacucaaguacaaucaaug

SEQ ID NO: 2067176 - RNA, 19 nt, Artificial Sequence
  Description of Artificial Sequence: Synthetic oligonucleotide
  Sense strand starting at position 3364 of SEQ ID NO: 1881728
uugauuguacuugaguacu

SEQ ID NO: 2067177 - RNA, 19 nt, Artificial Sequence
  Description of Artificial Sequence: Synthetic oligonucleotide
  Antisense strand to SEQ ID NO: 2067176
aguacucaaguacaaucaa

SEQ ID NO: 2067178 - RNA, 19 nt, Artificial Sequence
  Description of Artificial Sequence: Synthetic oligonucleotide
  Sense strand starting at position 3366 of SEQ ID NO: 1881728
gauuguacuugaguacuga

SEQ ID NO: 2067179 - RNA, 19 nt, Artificial Sequence
  Description of Artificial Sequence: Synthetic oligonucleotide
  Antisense strand to SEQ ID NO: 2067178
ucaguacucaaguacaauc

SEQ ID NO: 2067180 - RNA, 19 nt, Artificial Sequence
  Description of Artificial Sequence: Synthetic oligonucleotide
  Sense strand starting at position 3367 of SEQ ID NO: 1881728
auuguacuugaguacugaa

SEQ ID NO: 2067181 - RNA, 19 nt, Artificial Sequence
  Description of Artificial Sequence: Synthetic oligonucleotide
  Antisense strand to SEQ ID NO: 2067180
uucaguacucaaguacaau

SEQ ID NO: 2067182 - RNA, 19 nt, Artificial Sequence
  Description of Artificial Sequence: Synthetic oligonucleotide
  Sense strand starting at position 3406 of SEQ ID NO: 1881728
gcauaaaguugaucagaug

SEQ ID NO: 2067183 - RNA, 19 nt, Artificial Sequence
  Description of Artificial Sequence: Synthetic oligonucleotide
  Antisense strand to SEQ ID NO: 2067182
caucugaucaacuuuaugc

SEQ ID NO: 2067184 - RNA, 19 nt, Artificial Sequence
  Description of Artificial Sequence: Synthetic oligonucleotide
  Sense strand starting at position 3457 of SEQ ID NO: 1881728
ggacguagguucuauuuga

SEQ ID NO: 2067185 - RNA, 19 nt, Artificial Sequence
  Description of Artificial Sequence: Synthetic oligonucleotide
  Antisense strand to SEQ ID NO: 2067184
ucaaauagaaccuacgucc

SEQ ID NO: 2067186 - RNA, 19 nt, Artificial Sequence
  Description of Artificial Sequence: Synthetic oligonucleotide
  Sense strand starting at position 3561 of SEQ ID NO: 1881728
uugguuuaguucucaguua

SEQ ID NO: 2067187 - RNA, 19 nt, Artificial Sequence
  Description of Artificial Sequence: Synthetic oligonucleotide
  Antisense strand to SEQ ID NO: 2067186
uaacugagaacuaaaccaa

SEQ ID NO: 2067188 - RNA, 19 nt, Artificial Sequence
  Description of Artificial Sequence: Synthetic oligonucleotide
  Sense strand starting at position 3645 of SEQ ID NO: 1881728
ucucucaacugucuguuua

SEQ ID NO: 2067189 - RNA, 19 nt, Artificial Sequence
  Description of Artificial Sequence: Synthetic oligonucleotide
  Antisense strand to SEQ ID NO: 2067188
uaaacagacaguugagaga

SEQ ID NO: 2067190 - RNA, 19 nt, Artificial Sequence
  Description of Artificial Sequence: Synthetic oligonucleotide
  Sense strand starting at position 3649 of SEQ ID NO: 1881728
ucaacugucuguuuacuua

SEQ ID NO: 2067191 - RNA, 19 nt, Artificial Sequence
  Description of Artificial Sequence: Synthetic oligonucleotide
  Antisense strand to SEQ ID NO: 2067190
uaaguaaacagacaguuga

SEQ ID NO: 2067192 - RNA, 19 nt, Artificial Sequence
  Description of Artificial Sequence: Synthetic oligonucleotide
  Sense strand starting at position 3653 of SEQ ID NO: 1881728
cugucuguuuacuuacuua

SEQ ID NO: 2067193 - RNA, 19 nt, Artificial Sequence
  Description of Artificial Sequence: Synthetic oligonucleotide
  Antisense strand to SEQ ID NO: 2067192
uaaguaaguaaacagacag

SEQ ID NO: 2067194 - RNA, 19 nt, Artificial Sequence
  Description of Artificial Sequence: Synthetic oligonucleotide
  Sense strand starting at position 3657 of SEQ ID NO: 1881728
cuguuuacuuacuuagacu

SEQ ID NO: 2067195 - RNA, 19 nt, Artificial Sequence
  Description of Artificial Sequence: Synthetic oligonucleotide
  Antisense strand to SEQ ID NO: 2067194
agucuaaguaaguaaacag

SEQ ID NO: 2067196 - RNA, 19 nt, Artificial Sequence
  Description of Artificial Sequence: Synthetic oligonucleotide
  Sense strand starting at position 3746 of SEQ ID NO: 1881728
auuucucaguugcaggaaa

SEQ ID NO: 2067197 - RNA, 19 nt, Artificial Sequence
  Description of Artificial Sequence: Synthetic oligonucleotide
  Antisense strand to SEQ ID NO: 2067196
uuuccugcaacugagaaau

SEQ ID NO: 2067198 - RNA, 19 nt, Artificial Sequence
  Description of Artificial Sequence: Synthetic oligonucleotide
  Sense strand starting at position 3790 of SEQ ID NO: 1881728
guuguuugcguggagagga

SEQ ID NO: 2067199 - RNA, 19 nt, Artificial Sequence
  Description of Artificial Sequence: Synthetic oligonucleotide
  Antisense strand to SEQ ID NO: 2067198
uccucuccacgcaaacaac

SEQ ID NO: 2067200 - RNA, 19 nt, Artificial Sequence
  Description of Artificial Sequence: Synthetic oligonucleotide
  Sense strand starting at position 3816 of SEQ ID NO: 1881728
uuguuugaagccuauugau

SEQ ID NO: 2067201 - RNA, 19 nt, Artificial Sequence
  Description of Artificial Sequence: Synthetic oligonucleotide
  Antisense strand to SEQ ID NO: 2067200
aucaauaggcuucaaacaa

SEQ ID NO: 2067202 - RNA, 19 nt, Artificial Sequence
  Description of Artificial Sequence: Synthetic oligonucleotide
  Sense strand starting at position 3825 of SEQ ID NO: 1881728
gccuauugaugagcacaga

SEQ ID NO: 2067203 - RNA, 19 nt, Artificial Sequence
  Description of Artificial Sequence: Synthetic oligonucleotide
  Antisense strand to SEQ ID NO: 2067202
ucugugcucaucaauaggc

SEQ ID NO: 2067204 - RNA, 19 nt, Artificial Sequence
  Description of Artificial Sequence: Synthetic oligonucleotide
  Sense strand starting at position 3838 of SEQ ID NO: 1881728
cacagaucuugagcuugca

SEQ ID NO: 2067205 - RNA, 19 nt, Artificial Sequence
  Description of Artificial Sequence: Synthetic oligonucleotide
  Antisense strand to SEQ ID NO: 2067204
ugcaagcucaagaucugug

SEQ ID NO: 2067206 - RNA, 19 nt, Artificial Sequence
  Description of Artificial Sequence: Synthetic oligonucleotide
  Sense strand starting at position 3841 of SEQ ID NO: 1881728
agaucuugagcuugcagua

SEQ ID NO: 2067207 - RNA, 19 nt, Artificial Sequence
  Description of Artificial Sequence: Synthetic oligonucleotide
  Antisense strand to SEQ ID NO: 2067206
uacugcaagcucaagaucu

SEQ ID NO: 2067208 - RNA, 19 nt, Artificial Sequence
  Description of Artificial Sequence: Synthetic oligonucleotide
  Sense strand starting at position 3846 of SEQ ID NO: 1881728
uugagcuugcaguaucacu

SEQ ID NO: 2067209 - RNA, 19 nt, Artificial Sequence
  Description of Artificial Sequence: Synthetic oligonucleotide
  Antisense strand to SEQ ID NO: 2067208
agugauacugcaagcucaa

SEQ ID NO: 2067210 - RNA, 19 nt, Artificial Sequence
  Description of Artificial Sequence: Synthetic oligonucleotide
  Sense strand starting at position 2 of SEQ ID NO: 1881729
guuaaagcugucuaaaucu

SEQ ID NO: 2067211 - RNA, 19 nt, Artificial Sequence
  Description of Artificial Sequence: Synthetic oligonucleotide
  Antisense strand to SEQ ID NO: 2067210
agauuuagacagcuuuaac

SEQ ID NO: 2067212 - RNA, 19 nt, Artificial Sequence
  Description of Artificial Sequence: Synthetic oligonucleotide
  Sense strand starting at position 11 of SEQ ID NO: 1881729
gucuaaaucuaagcuagag

SEQ ID NO: 2067213 - RNA, 19 nt, Artificial Sequence
  Description of Artificial Sequence: Synthetic oligonucleotide
  Antisense strand to SEQ ID NO: 2067212
cucuagcuuagauuuagac

SEQ ID NO: 2067214 - RNA, 19 nt, Artificial Sequence
  Description of Artificial Sequence: Synthetic oligonucleotide
  Sense strand starting at position 31 of SEQ ID NO: 1881729
cuuuaugauuuacagaagu

SEQ ID NO: 2067215 - RNA, 19 nt, Artificial Sequence
  Description of Artificial Sequence: Synthetic oligonucleotide
  Antisense strand to SEQ ID NO: 2067214
acuucuguaaaucauaaag

SEQ ID NO: 2067216 - RNA, 19 nt, Artificial Sequence
  Description of Artificial Sequence: Synthetic oligonucleotide
  Sense strand starting at position 137 of SEQ ID NO: 1881729
ucauuaagucuagggaagu

SEQ ID NO: 2067217 - RNA, 19 nt, Artificial Sequence
  Description of Artificial Sequence: Synthetic oligonucleotide
  Antisense strand to SEQ ID NO: 2067216
acuucccuagacuuaauga

SEQ ID NO: 2067218 - RNA, 19 nt, Artificial Sequence
  Description of Artificial Sequence: Synthetic oligonucleotide
  Sense strand starting at position 285 of SEQ ID NO: 1881729
gucaauuugcuaugcacaa

SEQ ID NO: 2067219 - RNA, 19 nt, Artificial Sequence
  Description of Artificial Sequence: Synthetic oligonucleotide
  Antisense strand to SEQ ID NO: 2067218
uugugcauagcaaauugac

SEQ ID NO: 2067220 - RNA, 19 nt, Artificial Sequence
  Description of Artificial Sequence: Synthetic oligonucleotide
  Sense strand starting at position 305 of SEQ ID NO: 1881729
uugucaucacuagaccauu

SEQ ID NO: 2067221 - RNA, 19 nt, Artificial Sequence
  Description of Artificial Sequence: Synthetic oligonucleotide
  Antisense strand to SEQ ID NO: 2067220
aauggucuagugaugacaa

SEQ ID NO: 2067222 - RNA, 19 nt, Artificial Sequence
  Description of Artificial Sequence: Synthetic oligonucleotide
  Sense strand starting at position 339 of SEQ ID NO: 1881729
uauggaugguuucccagau

SEQ ID NO: 2067223 - RNA, 19 nt, Artificial Sequence
  Description of Artificial Sequence: Synthetic oligonucleotide
  Antisense strand to SEQ ID NO: 2067222
aucugggaaaccauccaua

SEQ ID NO: 2067224 - RNA, 19 nt, Artificial Sequence
  Description of Artificial Sequence: Synthetic oligonucleotide
  Sense strand starting at position 610 of SEQ ID NO: 1881729
ugauuaugagaaugguuua

SEQ ID NO: 2067225 - RNA, 19 nt, Artificial Sequence
  Description of Artificial Sequence: Synthetic oligonucleotide
  Antisense strand to SEQ ID NO: 2067224
uaaaccauucucauaauca

SEQ ID NO: 2067226 - RNA, 19 nt, Artificial Sequence
  Description of Artificial Sequence: Synthetic oligonucleotide
  Sense strand starting at position 613 of SEQ ID NO: 1881729
uuaugagaaugguuuaggu

SEQ ID NO: 2067227 - RNA, 19 nt, Artificial Sequence
  Description of Artificial Sequence: Synthetic oligonucleotide
  Antisense strand to SEQ ID NO: 2067226
accuaaaccauucucauaa

SEQ ID NO: 2067228 - RNA, 19 nt, Artificial Sequence
  Description of Artificial Sequence: Synthetic oligonucleotide
  Sense strand starting at position 1184 of SEQ ID NO: 1881729
cuuucuuggcaguaaucua

SEQ ID NO: 2067229 - RNA, 19 nt, Artificial Sequence
  Description of Artificial Sequence: Synthetic oligonucleotide
  Antisense strand to SEQ ID NO: 2067228
uagauuacugccaagaaag

SEQ ID NO: 2067230 - RNA, 19 nt, Artificial Sequence
  Description of Artificial Sequence: Synthetic oligonucleotide
  Sense strand starting at position 1268 of SEQ ID NO: 1881729
gcuagagaucacugcaaca

SEQ ID NO: 2067231 - RNA, 19 nt, Artificial Sequence
  Description of Artificial Sequence: Synthetic oligonucleotide
  Antisense strand to SEQ ID NO: 2067230
uguugcagugaucucuagc

SEQ ID NO: 2067232 - RNA, 19 nt, Artificial Sequence
  Description of Artificial Sequence: Synthetic oligonucleotide
  Sense strand starting at position 1321 of SEQ ID NO: 1881729
ggugacaugcaguacaaau

SEQ ID NO: 2067233 - RNA, 19 nt, Artificial Sequence
  Description of Artificial Sequence: Synthetic oligonucleotide
  Antisense strand to SEQ ID NO: 2067232
auuuguacugcaugucacc

SEQ ID NO: 2067234 - RNA, 19 nt, Artificial Sequence
  Description of Artificial Sequence: Synthetic oligonucleotide
  Sense strand starting at position 1483 of SEQ ID NO: 1881729
cugguacuauuagugaaca

SEQ ID NO: 2067235 - RNA, 19 nt, Artificial Sequence
  Description of Artificial Sequence: Synthetic oligonucleotide
  Antisense strand to SEQ ID NO: 2067234
uguucacuaauaguaccag

SEQ ID NO: 2067236 - RNA, 19 nt, Artificial Sequence
  Description of Artificial Sequence: Synthetic oligonucleotide
  Sense strand starting at position 1600 of SEQ ID NO: 1881729
auguaaaucugggcaacca

SEQ ID NO: 2067237 - RNA, 19 nt, Artificial Sequence
  Description of Artificial Sequence: Synthetic oligonucleotide
  Antisense strand to SEQ ID NO: 2067236
ugguugcccagauuuacau

SEQ ID NO: 2067238 - RNA, 19 nt, Artificial Sequence
  Description of Artificial Sequence: Synthetic oligonucleotide
  Sense strand starting at position 1601 of SEQ ID NO: 1881729
uguaaaucugggcaaccaa

SEQ ID NO: 2067239 - RNA, 19 nt, Artificial Sequence
  Description of Artificial Sequence: Synthetic oligonucleotide
  Antisense strand to SEQ ID NO: 2067238
uugguugcccagauuuaca

SEQ ID NO: 2067240 - RNA, 19 nt, Artificial Sequence
  Description of Artificial Sequence: Synthetic oligonucleotide
  Sense strand starting at position 1942 of SEQ ID NO: 1881729
ucugaagagcuccauccuu

SEQ ID NO: 2067241 - RNA, 19 nt, Artificial Sequence
  Description of Artificial Sequence: Synthetic oligonucleotide
  Antisense strand to SEQ ID NO: 2067240
aaggauggagcucuucaga

SEQ ID NO: 2067242 - RNA, 19 nt, Artificial Sequence
  Description of Artificial Sequence: Synthetic oligonucleotide
  Sense strand starting at position 2000 of SEQ ID NO: 1881729
ugugaaggucucuauucca

SEQ ID NO: 2067243 - RNA, 19 nt, Artificial Sequence
  Description of Artificial Sequence: Synthetic oligonucleotide
  Antisense strand to SEQ ID NO: 2067242
uggaauagagaccuucaca

SEQ ID NO: 2067244 - RNA, 19 nt, Artificial Sequence
  Description of Artificial Sequence: Synthetic oligonucleotide
  Sense strand starting at position 2104 of SEQ ID NO: 1881729
gguuccuaaccucaagacu

SEQ ID NO: 2067245 - RNA, 19 nt, Artificial Sequence
  Description of Artificial Sequence: Synthetic oligonucleotide
  Antisense strand to SEQ ID NO: 2067244
agucuugagguuaggaacc

SEQ ID NO: 2067246 - RNA, 19 nt, Artificial Sequence
  Description of Artificial Sequence: Synthetic oligonucleotide
  Sense strand starting at position 2209 of SEQ ID NO: 1881729
agucaacccguuuaacaga

SEQ ID NO: 2067247 - RNA, 19 nt, Artificial Sequence
  Description of Artificial Sequence: Synthetic oligonucleotide
  Antisense strand to SEQ ID NO: 2067246
ucuguuaaacggguugacu

SEQ ID NO: 2067248 - RNA, 19 nt, Artificial Sequence
  Description of Artificial Sequence: Synthetic oligonucleotide
  Sense strand starting at position 2216 of SEQ ID NO: 1881729
ccguuuaacagacagguau

SEQ ID NO: 2067249 - RNA, 19 nt, Artificial Sequence
  Description of Artificial Sequence: Synthetic oligonucleotide
  Antisense strand to SEQ ID NO: 2067248
auaccugucuguuaaacgg

SEQ ID NO: 2067250 - RNA, 19 nt, Artificial Sequence
  Description of Artificial Sequence: Synthetic oligonucleotide
  Sense strand starting at position 2237 of SEQ ID NO: 1881729
auuaaauacgggcauacua

SEQ ID NO: 2067251 - RNA, 19 nt, Artificial Sequence
  Description of Artificial Sequence: Synthetic oligonucleotide
  Antisense strand to SEQ ID NO: 2067250
uaguaugcccguauuuaau

SEQ ID NO: 2067252 - RNA, 19 nt, Artificial Sequence
  Description of Artificial Sequence: Synthetic oligonucleotide
  Sense strand starting at position 2290 of SEQ ID NO: 1881729
auggaacauuguuugccaa

SEQ ID NO: 2067253 - RNA, 19 nt, Artificial Sequence
  Description of Artificial Sequence: Synthetic oligonucleotide
  Antisense strand to SEQ ID NO: 2067252
uuggcaaacaauguuccau

SEQ ID NO: 2067254 - RNA, 19 nt, Artificial Sequence
  Description of Artificial Sequence: Synthetic oligonucleotide
  Sense strand starting at position 2292 of SEQ ID NO: 1881729
ggaacauuguuugccaaga

SEQ ID NO: 2067255 - RNA, 19 nt, Artificial Sequence
  Description of Artificial Sequence: Synthetic oligonucleotide
  Antisense strand to SEQ ID NO: 2067254
ucuuggcaaacaauguucc

SEQ ID NO: 2067256 - RNA, 19 nt, Artificial Sequence
  Description of Artificial Sequence: Synthetic oligonucleotide
  Sense strand starting at position 2293 of SEQ ID NO: 1881729
gaacauuguuugccaagau

SEQ ID NO: 2067257 - RNA, 19 nt, Artificial Sequence
  Description of Artificial Sequence: Synthetic oligonucleotide
  Antisense strand to SEQ ID NO: 2067256
aucuuggcaaacaauguuc

SEQ ID NO: 2067258 - RNA, 19 nt, Artificial Sequence
  Description of Artificial Sequence: Synthetic oligonucleotide
  Sense strand starting at position 2349 of SEQ ID NO: 1881729
gucuguugagaaugguaga

SEQ ID NO: 2067259 - RNA, 19 nt, Artificial Sequence
  Description of Artificial Sequence: Synthetic oligonucleotide
  Antisense strand to SEQ ID NO: 2067258
ucuaccauucucaacagac

SEQ ID NO: 2067260 - RNA, 19 nt, Artificial Sequence
  Description of Artificial Sequence: Synthetic oligonucleotide
  Sense strand starting at position 2548 of SEQ ID NO: 1881729
agacuagcauuugauacaa

SEQ ID NO: 2067261 - RNA, 19 nt, Artificial Sequence
  Description of Artificial Sequence: Synthetic oligonucleotide
  Antisense strand to SEQ ID NO: 2067260
uuguaucaaaugcuagucu

SEQ ID NO: 2067262 - RNA, 19 nt, Artificial Sequence
  Description of Artificial Sequence: Synthetic oligonucleotide
  Sense strand starting at position 2719 of SEQ ID NO: 1881729
gggaguugcaaguaauaga

SEQ ID NO: 2067263 - RNA, 19 nt, Artificial Sequence
  Description of Artificial Sequence: Synthetic oligonucleotide
  Antisense strand to SEQ ID NO: 2067262
ucuauuacuugcaacuccc

SEQ ID NO: 2067264 - RNA, 19 nt, Artificial Sequence
  Description of Artificial Sequence: Synthetic oligonucleotide
  Sense strand starting at position 2773 of SEQ ID NO: 1881729
auuuaaggaucuuaggcaa

SEQ ID NO: 2067265 - RNA, 19 nt, Artificial Sequence
  Description of Artificial Sequence: Synthetic oligonucleotide
  Antisense strand to SEQ ID NO: 2067264
uugccuaagauccuuaaau

SEQ ID NO: 2067266 - RNA, 19 nt, Artificial Sequence
  Description of Artificial Sequence: Synthetic oligonucleotide
  Sense strand starting at position 2938 of SEQ ID NO: 1881729
gcaggaagacuggguugua

SEQ ID NO: 2067267 - RNA, 19 nt, Artificial Sequence
  Description of Artificial Sequence: Synthetic oligonucleotide
  Antisense strand to SEQ ID NO: 2067266
uacaacccagucuuccugc

SEQ ID NO: 2067268 - RNA, 19 nt, Artificial Sequence
  Description of Artificial Sequence: Synthetic oligonucleotide
  Sense strand starting at position 2939 of SEQ ID NO: 1881729
caggaagacuggguuguaa

SEQ ID NO: 2067269 - RNA, 19 nt, Artificial Sequence
  Description of Artificial Sequence: Synthetic oligonucleotide
  Antisense strand to SEQ ID NO: 2067268
uuacaacccagucuuccug

SEQ ID NO: 2067270 - RNA, 19 nt, Artificial Sequence
  Description of Artificial Sequence: Synthetic oligonucleotide
  Sense strand starting at position 2941 of SEQ ID NO: 1881729
ggaagacuggguuguaaug

SEQ ID NO: 2067271 - RNA, 19 nt, Artificial Sequence
  Description of Artificial Sequence: Synthetic oligonucleotide
  Antisense strand to SEQ ID NO: 2067270
cauuacaacccagucuucc

SEQ ID NO: 2067272 - RNA, 19 nt, Artificial Sequence
  Description of Artificial Sequence: Synthetic oligonucleotide
  Sense strand starting at position 3012 of SEQ ID NO: 1881729
ggcuuaggucucgaauaaa

SEQ ID NO: 2067273 - RNA, 19 nt, Artificial Sequence
  Description of Artificial Sequence: Synthetic oligonucleotide
  Antisense strand to SEQ ID NO: 2067272
uuuauucgagaccuaagcc

SEQ ID NO: 2067274 - RNA, 19 nt, Artificial Sequence
  Description of Artificial Sequence: Synthetic oligonucleotide
  Sense strand starting at position 3015 of SEQ ID NO: 1881729
uuaggucucgaauaaauca

SEQ ID NO: 2067275 - RNA, 19 nt, Artificial Sequence
  Description of Artificial Sequence: Synthetic oligonucleotide
  Antisense strand to SEQ ID NO: 2067274
ugauuuauucgagaccuaa

SEQ ID NO: 2067276 - RNA, 19 nt, Artificial Sequence
  Description of Artificial Sequence: Synthetic oligonucleotide
  Sense strand starting at position 3062 of SEQ ID NO: 1881729
aagguuaagugaucaccuu

SEQ ID NO: 2067277 - RNA, 19 nt, Artificial Sequence
  Description of Artificial Sequence: Synthetic oligonucleotide
  Antisense strand to SEQ ID NO: 2067276
aaggugaucacuuaaccuu

SEQ ID NO: 2067278 - RNA, 19 nt, Artificial Sequence
  Description of Artificial Sequence: Synthetic oligonucleotide
  Sense strand starting at position 3068 of SEQ ID NO: 1881729
aagugaucaccuuggauca

SEQ ID NO: 2067279 - RNA, 19 nt, Artificial Sequence
  Description of Artificial Sequence: Synthetic oligonucleotide
  Antisense strand to SEQ ID NO: 2067278
ugauccaaggugaucacuu

SEQ ID NO: 2067280 - RNA, 19 nt, Artificial Sequence
  Description of Artificial Sequence: Synthetic oligonucleotide
  Sense strand starting at position 3069 of SEQ ID NO: 1881729
agugaucaccuuggaucaa

SEQ ID NO: 2067281 - RNA, 19 nt, Artificial Sequence
  Description of Artificial Sequence: Synthetic oligonucleotide
  Antisense strand to SEQ ID NO: 2067280
uugauccaaggugaucacu

SEQ ID NO: 2067282 - RNA, 19 nt, Artificial Sequence
  Description of Artificial Sequence: Synthetic oligonucleotide
  Sense strand starting at position 3095 of SEQ ID NO: 1881729
uggcuagguggucauaaga

SEQ ID NO: 2067283 - RNA, 19 nt, Artificial Sequence
  Description of Artificial Sequence: Synthetic oligonucleotide
  Antisense strand to SEQ ID NO: 2067282
ucuuaugaccaccuagcca

SEQ ID NO: 2067284 - RNA, 19 nt, Artificial Sequence
  Description of Artificial Sequence: Synthetic oligonucleotide
  Sense strand starting at position 3111 of SEQ ID NO: 1881729
agaacauggugucccuaau

SEQ ID NO: 2067285 - RNA, 19 nt, Artificial Sequence
  Description of Artificial Sequence: Synthetic oligonucleotide
  Antisense strand to SEQ ID NO: 2067284
auuagggacaccauguucu

SEQ ID NO: 2067286 - RNA, 19 nt, Artificial Sequence
  Description of Artificial Sequence: Synthetic oligonucleotide
  Sense strand starting at position 3213 of SEQ ID NO: 1881729
gccugaaacugaucucaua

SEQ ID NO: 2067287 - RNA, 19 nt, Artificial Sequence
  Description of Artificial Sequence: Synthetic oligonucleotide
  Antisense strand to SEQ ID NO: 2067286
uaugagaucaguuucaggc

SEQ ID NO: 2067288 - RNA, 19 nt, Artificial Sequence
  Description of Artificial Sequence: Synthetic oligonucleotide
  Sense strand starting at position 3304 of SEQ ID NO: 1881729
ggcccaaaccuugaaucau

SEQ ID NO: 2067289 - RNA, 19 nt, Artificial Sequence
  Description of Artificial Sequence: Synthetic oligonucleotide
  Antisense strand to SEQ ID NO: 2067288
augauucaagguuugggcc

SEQ ID NO: 2067290 - RNA, 19 nt, Artificial Sequence
  Description of Artificial Sequence: Synthetic oligonucleotide
  Sense strand starting at position 54 of SEQ ID NO: 1881730
ccaacuguugaacggauaa

SEQ ID NO: 2067291 - RNA, 19 nt, Artificial Sequence
  Description of Artificial Sequence: Synthetic oligonucleotide
  Antisense strand to SEQ ID NO: 2067290
uuauccguucaacaguugg

SEQ ID NO: 2067292 - RNA, 19 nt, Artificial Sequence
  Description of Artificial Sequence: Synthetic oligonucleotide
  Sense strand starting at position 130 of SEQ ID NO: 1881730
ugauacgugcuauaagaug

SEQ ID NO: 2067293 - RNA, 19 nt, Artificial Sequence
  Description of Artificial Sequence: Synthetic oligonucleotide
  Antisense strand to SEQ ID NO: 2067292
caucuuauagcacguauca

SEQ ID NO: 2067294 - RNA, 19 nt, Artificial Sequence
  Description of Artificial Sequence: Synthetic oligonucleotide
  Sense strand starting at position 136 of SEQ ID NO: 1881730
gugcuauaagauggaugaa

SEQ ID NO: 2067295 - RNA, 19 nt, Artificial Sequence
  Description of Artificial Sequence: Synthetic oligonucleotide
  Antisense strand to SEQ ID NO: 2067294
uucauccaucuuauagcac

SEQ ID NO: 2067296 - RNA, 19 nt, Artificial Sequence
  Description of Artificial Sequence: Synthetic oligonucleotide
  Sense strand starting at position 286 of SEQ ID NO: 1881730
gggaauauuuggaggugcu

SEQ ID NO: 2067297 - RNA, 19 nt, Artificial Sequence
  Description of Artificial Sequence: Synthetic oligonucleotide
  Antisense strand to SEQ ID NO: 2067296
agcaccuccaaauauuccc

SEQ ID NO: 2067298 - RNA, 19 nt, Artificial Sequence
  Description of Artificial Sequence: Synthetic oligonucleotide
  Sense strand starting at position 305 of SEQ ID NO: 1881730
gcuaguaagaaugagguuu

SEQ ID NO: 2067299 - RNA, 19 nt, Artificial Sequence
  Description of Artificial Sequence: Synthetic oligonucleotide
  Antisense strand to SEQ ID NO: 2067298
aaaccucauucuuacuagc

SEQ ID NO: 2067300 - RNA, 19 nt, Artificial Sequence
  Description of Artificial Sequence: Synthetic oligonucleotide
  Sense strand starting at position 346 of SEQ ID NO: 1881730
ucuaauauugauugugacu

SEQ ID NO: 2067301 - RNA, 19 nt, Artificial Sequence
  Description of Artificial Sequence: Synthetic oligonucleotide
  Antisense strand to SEQ ID NO: 2067300
agucacaaucaauauuaga

SEQ ID NO: 2067302 - RNA, 19 nt, Artificial Sequence
  Description of Artificial Sequence: Synthetic oligonucleotide
  Sense strand starting at position 355 of SEQ ID NO: 1881730
gauugugacuguuccacaa

SEQ ID NO: 2067303 - RNA, 19 nt, Artificial Sequence
  Description of Artificial Sequence: Synthetic oligonucleotide
  Antisense strand to SEQ ID NO: 2067302
uuguggaacagucacaauc

SEQ ID NO: 2067304 - RNA, 19 nt, Artificial Sequence
  Description of Artificial Sequence: Synthetic oligonucleotide
  Sense strand starting at position 359 of SEQ ID NO: 1881730
gugacuguuccacaauucu

SEQ ID NO: 2067305 - RNA, 19 nt, Artificial Sequence
  Description of Artificial Sequence: Synthetic oligonucleotide
  Antisense strand to SEQ ID NO: 2067304
agaauuguggaacagucac

SEQ ID NO: 2067306 - RNA, 19 nt, Artificial Sequence
  Description of Artificial Sequence: Synthetic oligonucleotide
  Sense strand starting at position 434 of SEQ ID NO: 1881730
ugagaauuauaucugagua

SEQ ID NO: 2067307 - RNA, 19 nt, Artificial Sequence
  Description of Artificial Sequence: Synthetic oligonucleotide
  Antisense strand to SEQ ID NO: 2067306
uacucagauauaauucuca

SEQ ID NO: 2067308 - RNA, 19 nt, Artificial Sequence
  Description of Artificial Sequence: Synthetic oligonucleotide
  Sense strand starting at position 539 of SEQ ID NO: 1881730
uuaauugguugagcaggaa

SEQ ID NO: 2067309 - RNA, 19 nt, Artificial Sequence
  Description of Artificial Sequence: Synthetic oligonucleotide
  Antisense strand to SEQ ID NO: 2067308
uuccugcucaaccaauuaa

SEQ ID NO: 2067310 - RNA, 19 nt, Artificial Sequence
  Description of Artificial Sequence: Synthetic oligonucleotide
  Sense strand starting at position 868 of SEQ ID NO: 1881730
ccuggauauuuggaauuau

SEQ ID NO: 2067311 - RNA, 19 nt, Artificial Sequence
  Description of Artificial Sequence: Synthetic oligonucleotide
  Antisense strand to SEQ ID NO: 2067310
auaauuccaaauauccagg

SEQ ID NO: 2067312 - RNA, 19 nt, Artificial Sequence
  Description of Artificial Sequence: Synthetic oligonucleotide
  Sense strand starting at position 1218 of SEQ ID NO: 1881730
ggcguauccuauuugacuc

SEQ ID NO: 2067313 - RNA, 19 nt, Artificial Sequence
  Description of Artificial Sequence: Synthetic oligonucleotide
  Antisense strand to SEQ ID NO: 2067312
gagucaaauaggauacgcc

SEQ ID NO: 2067314 - RNA, 19 nt, Artificial Sequence
  Description of Artificial Sequence: Synthetic oligonucleotide
  Sense strand starting at position 1523 of SEQ ID NO: 1881730
caggcuuggccucacaaga

SEQ ID NO: 2067315 - RNA, 19 nt, Artificial Sequence
  Description of Artificial Sequence: Synthetic oligonucleotide
  Antisense strand to SEQ ID NO: 2067314
ucuugugaggccaagccug

SEQ ID NO: 2067316 - RNA, 19 nt, Artificial Sequence
  Description of Artificial Sequence: Synthetic oligonucleotide
  Sense strand starting at position 2158 of SEQ ID NO: 1881730
aguguuuaccucugaauag

SEQ ID NO: 2067317 - RNA, 19 nt, Artificial Sequence
  Description of Artificial Sequence: Synthetic oligonucleotide
  Antisense strand to SEQ ID NO: 2067316
cuauucagagguaaacacu

SEQ ID NO: 2067318 - RNA, 19 nt, Artificial Sequence
  Description of Artificial Sequence: Synthetic oligonucleotide
  Sense strand starting at position 2205 of SEQ ID NO: 1881730
ggagaguuacgcgaaagga

SEQ ID NO: 2067319 - RNA, 19 nt, Artificial Sequence
  Description of Artificial Sequence: Synthetic oligonucleotide
  Antisense strand to SEQ ID NO: 2067318
uccuuucgcguaacucucc

SEQ ID NO: 2067320 - RNA, 19 nt, Artificial Sequence
  Description of Artificial Sequence: Synthetic oligonucleotide
  Sense strand starting at position 2229 of SEQ ID NO: 1881730
ccauuaauuggauggucuu

SEQ ID NO: 2067321 - RNA, 19 nt, Artificial Sequence
  Description of Artificial Sequence: Synthetic oligonucleotide
  Antisense strand to SEQ ID NO: 2067320
aagaccauccaauuaaugg

SEQ ID NO: 2067322 - RNA, 19 nt, Artificial Sequence
  Description of Artificial Sequence: Synthetic oligonucleotide
  Sense strand starting at position 2230 of SEQ ID NO: 1881730
cauuaauuggauggucuua

SEQ ID NO: 2067323 - RNA, 19 nt, Artificial Sequence
  Description of Artificial Sequence: Synthetic oligonucleotide
  Antisense strand to SEQ ID NO: 2067322
uaagaccauccaauuaaug

SEQ ID NO: 2067324 - RNA, 19 nt, Artificial Sequence
  Description of Artificial Sequence: Synthetic oligonucleotide
  Sense strand starting at position 2232 of SEQ ID NO: 1881730
uuaauuggauggucuuauu

SEQ ID NO: 2067325 - RNA, 19 nt, Artificial Sequence
  Description of Artificial Sequence: Synthetic oligonucleotide
  Antisense strand to SEQ ID NO: 2067324
aauaagaccauccaauuaa

SEQ ID NO: 2067326 - RNA, 19 nt, Artificial Sequence
  Description of Artificial Sequence: Synthetic oligonucleotide
  Sense strand starting at position 2311 of SEQ ID NO: 1881730
ggcgucuuccugagcacga

SEQ ID NO: 2067327 - RNA, 19 nt, Artificial Sequence
  Description of Artificial Sequence: Synthetic oligonucleotide
  Antisense strand to SEQ ID NO: 2067326
ucgugcucaggaagacgcc

SEQ ID NO: 2067328 - RNA, 19 nt, Artificial Sequence
  Description of Artificial Sequence: Synthetic oligonucleotide
  Sense strand starting at position 2406 of SEQ ID NO: 1881730
uccgauucuggcuggauuu

SEQ ID NO: 2067329 - RNA, 19 nt, Artificial Sequence
  Description of Artificial Sequence: Synthetic oligonucleotide
  Antisense strand to SEQ ID NO: 2067328
aaauccagccagaaucgga

SEQ ID NO: 2067330 - RNA, 19 nt, Artificial Sequence
  Description of Artificial Sequence: Synthetic oligonucleotide
  Sense strand starting at position 2421 of SEQ ID NO: 1881730
auuugaucauggcagggaa

SEQ ID NO: 2067331 - RNA, 19 nt, Artificial Sequence
  Description of Artificial Sequence: Synthetic oligonucleotide
  Antisense strand to SEQ ID NO: 2067330
uucccugccaugaucaaau

SEQ ID NO: 2067332 - RNA, 19 nt, Artificial Sequence
  Description of Artificial Sequence: Synthetic oligonucleotide
  Sense strand starting at position 2424 of SEQ ID NO: 1881730
ugaucauggcagggaaguu

SEQ ID NO: 2067333 - RNA, 19 nt, Artificial Sequence
  Description of Artificial Sequence: Synthetic oligonucleotide
  Antisense strand to SEQ ID NO: 2067332
aacuucccugccaugauca

SEQ ID NO: 2067334 - RNA, 19 nt, Artificial Sequence
  Description of Artificial Sequence: Synthetic oligonucleotide
  Sense strand starting at position 2425 of SEQ ID NO: 1881730
gaucauggcagggaaguuu

SEQ ID NO: 2067335 - RNA, 19 nt, Artificial Sequence
  Description of Artificial Sequence: Synthetic oligonucleotide
  Antisense strand to SEQ ID NO: 2067334
aaacuucccugccaugauc

SEQ ID NO: 2067336 - RNA, 19 nt, Artificial Sequence
  Description of Artificial Sequence: Synthetic oligonucleotide
  Sense strand starting at position 2473 of SEQ ID NO: 1881730
agaucagucuuaucugaac

SEQ ID NO: 2067337 - RNA, 19 nt, Artificial Sequence
  Description of Artificial Sequence: Synthetic oligonucleotide
  Antisense strand to SEQ ID NO: 2067336
guucagauaagacugaucu

SEQ ID NO: 2067338 - RNA, 19 nt, Artificial Sequence
  Description of Artificial Sequence: Synthetic oligonucleotide
  Sense strand starting at position 2585 of SEQ ID NO: 1881730
ggagcagauuuauggaaag

SEQ ID NO: 2067339 - RNA, 19 nt, Artificial Sequence
  Description of Artificial Sequence: Synthetic oligonucleotide
  Antisense strand to SEQ ID NO: 2067338
cuuuccauaaaucugcucc

SEQ ID NO: 2067340 - RNA, 19 nt, Artificial Sequence
  Description of Artificial Sequence: Synthetic oligonucleotide
  Sense strand starting at position 2733 of SEQ ID NO: 1881730
auguaaaugccagguuaag

SEQ ID NO: 2067341 - RNA, 19 nt, Artificial Sequence
  Description of Artificial Sequence: Synthetic oligonucleotide
  Antisense strand to SEQ ID NO: 2067340
cuuaaccuggcauuuacau

SEQ ID NO: 2067342 - RNA, 19 nt, Artificial Sequence
  Description of Artificial Sequence: Synthetic oligonucleotide
  Sense strand starting at position 2745 of SEQ ID NO: 1881730
gguuaaggaguuuagagua

SEQ ID NO: 2067343 - RNA, 19 nt, Artificial Sequence
  Description of Artificial Sequence: Synthetic oligonucleotide
  Antisense strand to SEQ ID NO: 2067342
uacucuaaacuccuuaacc

SEQ ID NO: 2067344 - RNA, 19 nt, Artificial Sequence
  Description of Artificial Sequence: Synthetic oligonucleotide
  Sense strand starting at position 2750 of SEQ ID NO: 1881730
aggaguuuagaguauguau

SEQ ID NO: 2067345 - RNA, 19 nt, Artificial Sequence
  Description of Artificial Sequence: Synthetic oligonucleotide
  Antisense strand to SEQ ID NO: 2067344
auacauacucuaaacuccu

SEQ ID NO: 2067346 - RNA, 19 nt, Artificial Sequence
  Description of Artificial Sequence: Synthetic oligonucleotide
  Sense strand starting at position 2767 of SEQ ID NO: 1881730
augguaggcuauguauaaa

SEQ ID NO: 2067347 - RNA, 19 nt, Artificial Sequence
  Description of Artificial Sequence: Synthetic oligonucleotide
  Antisense strand to SEQ ID NO: 2067346
uuuauacauagccuaccau

SEQ ID NO: 2067348 - RNA, 19 nt, Artificial Sequence
  Description of Artificial Sequence: Synthetic oligonucleotide
  Sense strand starting at position 2830 of SEQ ID NO: 1881730
ggcugauuccuccaccuaa

SEQ ID NO: 2067349 - RNA, 19 nt, Artificial Sequence
  Description of Artificial Sequence: Synthetic oligonucleotide
  Antisense strand to SEQ ID NO: 2067348
uuagguggaggaaucagcc

SEQ ID NO: 2067350 - RNA, 19 nt, Artificial Sequence
  Description of Artificial Sequence: Synthetic oligonucleotide
  Sense strand starting at position 2862 of SEQ ID NO: 1881730
ugaaccaacucauugugua

SEQ ID NO: 2067351 - RNA, 19 nt, Artificial Sequence
  Description of Artificial Sequence: Synthetic oligonucleotide
  Antisense strand to SEQ ID NO: 2067350
uacacaaugaguugguuca

SEQ ID NO: 2067352 - RNA, 19 nt, Artificial Sequence
  Description of Artificial Sequence: Synthetic oligonucleotide
  Sense strand starting at position 2867 of SEQ ID NO: 1881730
caacucauuguguauguga

SEQ ID NO: 2067353 - RNA, 19 nt, Artificial Sequence
  Description of Artificial Sequence: Synthetic oligonucleotide
  Antisense strand to SEQ ID NO: 2067352
ucacauacacaaugaguug

SEQ ID NO: 2067354 - RNA, 19 nt, Artificial Sequence
  Description of Artificial Sequence: Synthetic oligonucleotide
  Sense strand starting at position 3056 of SEQ ID NO: 1881730
aacguaagacuuuauagca

SEQ ID NO: 2067355 - RNA, 19 nt, Artificial Sequence
  Description of Artificial Sequence: Synthetic oligonucleotide
  Antisense strand to SEQ ID NO: 2067354
ugcuauaaagucuuacguu

SEQ ID NO: 2067356 - RNA, 19 nt, Artificial Sequence
  Description of Artificial Sequence: Synthetic oligonucleotide
  Sense strand starting at position 3074 of SEQ ID NO: 1881730
auauguaacgcacaaggua

SEQ ID NO: 2067357 - RNA, 19 nt, Artificial Sequence
  Description of Artificial Sequence: Synthetic oligonucleotide
  Antisense strand to SEQ ID NO: 2067356
uaccuugugcguuacauau

SEQ ID NO: 2067358 - RNA, 19 nt, Artificial Sequence
  Description of Artificial Sequence: Synthetic oligonucleotide
  Sense strand starting at position 3403 of SEQ ID NO: 1881730
aacuucuuggcugggauua

SEQ ID NO: 2067359 - RNA, 19 nt, Artificial Sequence
  Description of Artificial Sequence: Synthetic oligonucleotide
  Antisense strand to SEQ ID NO: 2067358
uaaucccagccaagaaguu

SEQ ID NO: 2067360 - RNA, 19 nt, Artificial Sequence
  Description of Artificial Sequence: Synthetic oligonucleotide
  Sense strand starting at position 3611 of SEQ ID NO: 1881730
gaagcuuugcaucagagga

SEQ ID NO: 2067361 - RNA, 19 nt, Artificial Sequence
  Description of Artificial Sequence: Synthetic oligonucleotide
  Antisense strand to SEQ ID NO: 2067360
uccucugaugcaaagcuuc

SEQ ID NO: 2067362 - RNA, 19 nt, Artificial Sequence
  Description of Artificial Sequence: Synthetic oligonucleotide
  Sense strand starting at position 3624 of SEQ ID NO: 1881730
agaggaccacgcuaguaau

SEQ ID NO: 2067363 - RNA, 19 nt, Artificial Sequence
  Description of Artificial Sequence: Synthetic oligonucleotide
  Antisense strand to SEQ ID NO: 2067362
auuacuagcgugguccucu

SEQ ID NO: 2067364 - RNA, 19 nt, Artificial Sequence
  Description of Artificial Sequence: Synthetic oligonucleotide
  Sense strand starting at position 3637 of SEQ ID NO: 1881730
aguaauagaaguuguugga

SEQ ID NO: 2067365 - RNA, 19 nt, Artificial Sequence
  Description of Artificial Sequence: Synthetic oligonucleotide
  Antisense strand to SEQ ID NO: 2067364
uccaacaacuucuauuacu

SEQ ID NO: 2067366 - RNA, 19 nt, Artificial Sequence
  Description of Artificial Sequence: Synthetic oligonucleotide
  Sense strand starting at position 3728 of SEQ ID NO: 1881730
uauguuccaugaguuagaa

SEQ ID NO: 2067367 - RNA, 19 nt, Artificial Sequence
  Description of Artificial Sequence: Synthetic oligonucleotide
  Antisense strand to SEQ ID NO: 2067366
uucuaacucauggaacaua

SEQ ID NO: 2067368 - RNA, 19 nt, Artificial Sequence
  Description of Artificial Sequence: Synthetic oligonucleotide
  Sense strand starting at position 3824 of SEQ ID NO: 1881730
guaucaucaucuucuuaga

SEQ ID NO: 2067369 - RNA, 19 nt, Artificial Sequence
  Description of Artificial Sequence: Synthetic oligonucleotide
  Antisense strand to SEQ ID NO: 2067368
ucuaagaagaugaugauac

SEQ ID NO: 2067370 - RNA, 19 nt, Artificial Sequence
  Description of Artificial Sequence: Synthetic oligonucleotide
  Sense strand starting at position 68 of SEQ ID NO: 1881731
aggugacaugacuguuuau

SEQ ID NO: 2067371 - RNA, 19 nt, Artificial Sequence
  Description of Artificial Sequence: Synthetic oligonucleotide
  Antisense strand to SEQ ID NO: 2067370
auaaacagucaugucaccu

SEQ ID NO: 2067372 - RNA, 19 nt, Artificial Sequence
  Description of Artificial Sequence: Synthetic oligonucleotide
  Sense strand starting at position 71 of SEQ ID NO: 1881731
ugacaugacuguuuaugua

SEQ ID NO: 2067373 - RNA, 19 nt, Artificial Sequence
  Description of Artificial Sequence: Synthetic oligonucleotide
  Antisense strand to SEQ ID NO: 2067372
uacauaaacagucauguca

SEQ ID NO: 2067374 - RNA, 19 nt, Artificial Sequence
  Description of Artificial Sequence: Synthetic oligonucleotide
  Sense strand starting at position 116 of SEQ ID NO: 1881731
cagaacuaguaagugauua

SEQ ID NO: 2067375 - RNA, 19 nt, Artificial Sequence
  Description of Artificial Sequence: Synthetic oligonucleotide
  Antisense strand to SEQ ID NO: 2067374
uaaucacuuacuaguucug

SEQ ID NO: 2067376 - RNA, 19 nt, Artificial Sequence
  Description of Artificial Sequence: Synthetic oligonucleotide
  Sense strand starting at position 120 of SEQ ID NO: 1881731
acuaguaagugauuauagu

SEQ ID NO: 2067377 - RNA, 19 nt, Artificial Sequence
  Description of Artificial Sequence: Synthetic oligonucleotide
  Antisense strand to SEQ ID NO: 2067376
acuauaaucacuuacuagu

SEQ ID NO: 2067378 - RNA, 19 nt, Artificial Sequence
  Description of Artificial Sequence: Synthetic oligonucleotide
  Sense strand starting at position 121 of SEQ ID NO: 1881731
cuaguaagugauuauagua

SEQ ID NO: 2067379 - RNA, 19 nt, Artificial Sequence
  Description of Artificial Sequence: Synthetic oligonucleotide
  Antisense strand to SEQ ID NO: 2067378
uacuauaaucacuuacuag

SEQ ID NO: 2067380 - RNA, 19 nt, Artificial Sequence
  Description of Artificial Sequence: Synthetic oligonucleotide
  Sense strand starting at position 671 of SEQ ID NO: 1881731
aagaaugagucuucuaugu

SEQ ID NO: 2067381 - RNA, 19 nt, Artificial Sequence
  Description of Artificial Sequence: Synthetic oligonucleotide
  Antisense strand to SEQ ID NO: 2067380
acauagaagacucauucuu

SEQ ID NO: 2067382 - RNA, 19 nt, Artificial Sequence
  Description of Artificial Sequence: Synthetic oligonucleotide
  Sense strand starting at position 841 of SEQ ID NO: 1881731
cagaaaguaugggcuagaa

SEQ ID NO: 2067383 - RNA, 19 nt, Artificial Sequence
  Description of Artificial Sequence: Synthetic oligonucleotide
  Antisense strand to SEQ ID NO: 2067382
uucuagcccauacuuucug

SEQ ID NO: 2067384 - RNA, 19 nt, Artificial Sequence
  Description of Artificial Sequence: Synthetic oligonucleotide
  Sense strand starting at position 851 of SEQ ID NO: 1881731
gggcuagaagcauagaugu

SEQ ID NO: 2067385 - RNA, 19 nt, Artificial Sequence
  Description of Artificial Sequence: Synthetic oligonucleotide
  Antisense strand to SEQ ID NO: 2067384
acaucuaugcuucuagccc

SEQ ID NO: 2067386 - RNA, 19 nt, Artificial Sequence
  Description of Artificial Sequence: Synthetic oligonucleotide
  Sense strand starting at position 1103 of SEQ ID NO: 1881731
guuucaugagaaugggagu

SEQ ID NO: 2067387 - RNA, 19 nt, Artificial Sequence
  Description of Artificial Sequence: Synthetic oligonucleotide
  Antisense strand to SEQ ID NO: 2067386
acucccauucucaugaaac

SEQ ID NO: 2067388 - RNA, 19 nt, Artificial Sequence
  Description of Artificial Sequence: Synthetic oligonucleotide
  Sense strand starting at position 1290 of SEQ ID NO: 1881731
gauggauaucucuguuaua

SEQ ID NO: 2067389 - RNA, 19 nt, Artificial Sequence
  Description of Artificial Sequence: Synthetic oligonucleotide
  Antisense strand to SEQ ID NO: 2067388
uauaacagagauauccauc

SEQ ID NO: 2067390 - RNA, 19 nt, Artificial Sequence
  Description of Artificial Sequence: Synthetic oligonucleotide
  Sense strand starting at position 1291 of SEQ ID NO: 1881731
auggauaucucuguuauau

SEQ ID NO: 2067391 - RNA, 19 nt, Artificial Sequence
  Description of Artificial Sequence: Synthetic oligonucleotide
  Antisense strand to SEQ ID NO: 2067390
auauaacagagauauccau

SEQ ID NO: 2067392 - RNA, 19 nt, Artificial Sequence
  Description of Artificial Sequence: Synthetic oligonucleotide
  Sense strand starting at position 1394 of SEQ ID NO: 1881731
guuugauucugacuccaaa

SEQ ID NO: 2067393 - RNA, 19 nt, Artificial Sequence
  Description of Artificial Sequence: Synthetic oligonucleotide
  Antisense strand to SEQ ID NO: 2067392
uuuggagucagaaucaaac

SEQ ID NO: 2067394 - RNA, 19 nt, Artificial Sequence
  Description of Artificial Sequence: Synthetic oligonucleotide
  Sense strand starting at position 1468 of SEQ ID NO: 1881731
gugaguaagagguauguaa

SEQ ID NO: 2067395 - RNA, 19 nt, Artificial Sequence
  Description of Artificial Sequence: Synthetic oligonucleotide
  Antisense strand to SEQ ID NO: 2067394
uuacauaccucuuacucac

SEQ ID NO: 2067396 - RNA, 19 nt, Artificial Sequence
  Description of Artificial Sequence: Synthetic oligonucleotide
  Sense strand starting at position 1470 of SEQ ID NO: 1881731
gaguaagagguauguaaga

SEQ ID NO: 2067397 - RNA, 19 nt, Artificial Sequence
  Description of Artificial Sequence: Synthetic oligonucleotide
  Antisense strand to SEQ ID NO: 2067396
ucuuacauaccucuuacuc

SEQ ID NO: 2067398 - RNA, 19 nt, Artificial Sequence
  Description of Artificial Sequence: Synthetic oligonucleotide
  Sense strand starting at position 1545 of SEQ ID NO: 1881731
gagggaggaguuggcuuau

SEQ ID NO: 2067399 - RNA, 19 nt, Artificial Sequence
  Description of Artificial Sequence: Synthetic oligonucleotide
  Antisense strand to SEQ ID NO: 2067398
auaagccaacuccucccuc

SEQ ID NO: 2067400 - RNA, 19 nt, Artificial Sequence
  Description of Artificial Sequence: Synthetic oligonucleotide
  Sense strand starting at position 1842 of SEQ ID NO: 1881731
guuaauucugguuagugag

SEQ ID NO: 2067401 - RNA, 19 nt, Artificial Sequence
  Description of Artificial Sequence: Synthetic oligonucleotide
  Antisense strand to SEQ ID NO: 2067400
cucacuaaccagaauuaac

SEQ ID NO: 2067402 - RNA, 19 nt, Artificial Sequence
  Description of Artificial Sequence: Synthetic oligonucleotide
  Sense strand starting at position 2188 of SEQ ID NO: 1881731
uagcuuggugauuagguau

SEQ ID NO: 2067403 - RNA, 19 nt, Artificial Sequence
  Description of Artificial Sequence: Synthetic oligonucleotide
  Antisense strand to SEQ ID NO: 2067402
auaccuaaucaccaagcua

SEQ ID NO: 2067404 - RNA, 19 nt, Artificial Sequence
  Description of Artificial Sequence: Synthetic oligonucleotide
  Sense strand starting at position 2191 of SEQ ID NO: 1881731
cuuggugauuagguaucua

SEQ ID NO: 2067405 - RNA, 19 nt, Artificial Sequence
  Description of Artificial Sequence: Synthetic oligonucleotide
  Antisense strand to SEQ ID NO: 2067404
uagauaccuaaucaccaag

SEQ ID NO: 2067406 - RNA, 19 nt, Artificial Sequence
  Description of Artificial Sequence: Synthetic oligonucleotide
  Sense strand starting at position 2195 of SEQ ID NO: 1881731
gugauuagguaucuaacag

SEQ ID NO: 2067407 - RNA, 19 nt, Artificial Sequence
  Description of Artificial Sequence: Synthetic oligonucleotide
  Antisense strand to SEQ ID NO: 2067406
cuguuagauaccuaaucac

SEQ ID NO: 2067408 - RNA, 19 nt, Artificial Sequence
  Description of Artificial Sequence: Synthetic oligonucleotide
  Sense strand starting at position 2214 of SEQ ID NO: 1881731
aguagaggacucuggagua

SEQ ID NO: 2067409 - RNA, 19 nt, Artificial Sequence
  Description of Artificial Sequence: Synthetic oligonucleotide
  Antisense strand to SEQ ID NO: 2067408
uacuccagaguccucuacu

SEQ ID NO: 2067410 - RNA, 19 nt, Artificial Sequence
  Description of Artificial Sequence: Synthetic oligonucleotide
  Sense strand starting at position 2352 of SEQ ID NO: 1881731
ucagaucucaguugugaga

SEQ ID NO: 2067411 - RNA, 19 nt, Artificial Sequence
  Description of Artificial Sequence: Synthetic oligonucleotide
  Antisense strand to SEQ ID NO: 2067410
ucucacaacugagaucuga

SEQ ID NO: 2067412 - RNA, 19 nt, Artificial Sequence
  Description of Artificial Sequence: Synthetic oligonucleotide
  Sense strand starting at position 2395 of SEQ ID NO: 1881731
gguuuccaccuagaaugua

SEQ ID NO: 2067413 - RNA, 19 nt, Artificial Sequence
  Description of Artificial Sequence: Synthetic oligonucleotide
  Antisense strand to SEQ ID NO: 2067412
uacauucuagguggaaacc

SEQ ID NO: 2067414 - RNA, 19 nt, Artificial Sequence
  Description of Artificial Sequence: Synthetic oligonucleotide
  Sense strand starting at position 2422 of SEQ ID NO: 1881731
gugagcugccacuaagaga

SEQ ID NO: 2067415 - RNA, 19 nt, Artificial Sequence
  Description of Artificial Sequence: Synthetic oligonucleotide
  Antisense strand to SEQ ID NO: 2067414
ucucuuaguggcagcucac

SEQ ID NO: 2067416 - RNA, 19 nt, Artificial Sequence
  Description of Artificial Sequence: Synthetic oligonucleotide
  Sense strand starting at position 2439 of SEQ ID NO: 1881731
gauggaacucuuggaccuu

SEQ ID NO: 2067417 - RNA, 19 nt, Artificial Sequence
  Description of Artificial Sequence: Synthetic oligonucleotide
  Antisense strand to SEQ ID NO: 2067416
aagguccaagaguuccauc

SEQ ID NO: 2067418 - RNA, 19 nt, Artificial Sequence
  Description of Artificial Sequence: Synthetic oligonucleotide
  Sense strand starting at position 2590 of SEQ ID NO: 1881731
gagguuucugcugaagguu

SEQ ID NO: 2067419 - RNA, 19 nt, Artificial Sequence
  Description of Artificial Sequence: Synthetic oligonucleotide
  Antisense strand to SEQ ID NO: 2067418
aaccuucagcagaaaccuc

SEQ ID NO: 2067420 - RNA, 19 nt, Artificial Sequence
  Description of Artificial Sequence: Synthetic oligonucleotide
  Sense strand starting at position 2606 of SEQ ID NO: 1881731
guuggaucugaaggagucu

SEQ ID NO: 2067421 - RNA, 19 nt, Artificial Sequence
  Description of Artificial Sequence: Synthetic oligonucleotide
  Antisense strand to SEQ ID NO: 2067420
agacuccuucagauccaac

SEQ ID NO: 2067422 - RNA, 19 nt, Artificial Sequence
  Description of Artificial Sequence: Synthetic oligonucleotide
  Sense strand starting at position 2628 of SEQ ID NO: 1881731
gcuaucucccauuaguaug

SEQ ID NO: 2067423 - RNA, 19 nt, Artificial Sequence
  Description of Artificial Sequence: Synthetic oligonucleotide
  Antisense strand to SEQ ID NO: 2067422
cauacuaaugggagauagc

SEQ ID NO: 2067424 - RNA, 19 nt, Artificial Sequence
  Description of Artificial Sequence: Synthetic oligonucleotide
  Sense strand starting at position 2859 of SEQ ID NO: 1881731
uacacugucuggguuugaa

SEQ ID NO: 2067425 - RNA, 19 nt, Artificial Sequence
  Description of Artificial Sequence: Synthetic oligonucleotide
  Antisense strand to SEQ ID NO: 2067424
uucaaacccagacagugua

SEQ ID NO: 2067426 - RNA, 19 nt, Artificial Sequence
  Description of Artificial Sequence: Synthetic oligonucleotide
  Sense strand starting at position 2897 of SEQ ID NO: 1881731
uagcuaugugggcaaauua

SEQ ID NO: 2067427 - RNA, 19 nt, Artificial Sequence
  Description of Artificial Sequence: Synthetic oligonucleotide
  Antisense strand to SEQ ID NO: 2067426
uaauuugcccacauagcua

SEQ ID NO: 2067428 - RNA, 19 nt, Artificial Sequence
  Description of Artificial Sequence: Synthetic oligonucleotide
  Sense strand starting at position 3288 of SEQ ID NO: 1881731
gguuauugucaugaagagu

SEQ ID NO: 2067429 - RNA, 19 nt, Artificial Sequence
  Description of Artificial Sequence: Synthetic oligonucleotide
  Antisense strand to SEQ ID NO: 2067428
acucuucaugacaauaacc

SEQ ID NO: 2067430 - RNA, 19 nt, Artificial Sequence
  Description of Artificial Sequence: Synthetic oligonucleotide
  Sense strand starting at position 3302 of SEQ ID NO: 1881731
agagucagauguuuguaaa

SEQ ID NO: 2067431 - RNA, 19 nt, Artificial Sequence
  Description of Artificial Sequence: Synthetic oligonucleotide
  Antisense strand to SEQ ID NO: 2067430
uuuacaaacaucugacucu

SEQ ID NO: 2067432 - RNA, 19 nt, Artificial Sequence
  Description of Artificial Sequence: Synthetic oligonucleotide
  Sense strand starting at position 3315 of SEQ ID NO: 1881731
uguaaauugcuccauuaga

SEQ ID NO: 2067433 - RNA, 19 nt, Artificial Sequence
  Description of Artificial Sequence: Synthetic oligonucleotide
  Antisense strand to SEQ ID NO: 2067432
ucuaauggagcaauuuaca

SEQ ID NO: 2067434 - RNA, 19 nt, Artificial Sequence
  Description of Artificial Sequence: Synthetic oligonucleotide
  Sense strand starting at position 3329 of SEQ ID NO: 1881731
uuagaauggugcuugacau

SEQ ID NO: 2067435 - RNA, 19 nt, Artificial Sequence
  Description of Artificial Sequence: Synthetic oligonucleotide
  Antisense strand to SEQ ID NO: 2067434
augucaagcaccauucuaa

SEQ ID NO: 2067436 - RNA, 19 nt, Artificial Sequence
  Description of Artificial Sequence: Synthetic oligonucleotide
  Sense strand starting at position 3330 of SEQ ID NO: 1881731
uagaauggugcuugacaua

SEQ ID NO: 2067437 - RNA, 19 nt, Artificial Sequence
  Description of Artificial Sequence: Synthetic oligonucleotide
  Antisense strand to SEQ ID NO: 2067436
uaugucaagcaccauucua

SEQ ID NO: 2067438 - RNA, 19 nt, Artificial Sequence
  Description of Artificial Sequence: Synthetic oligonucleotide
  Sense strand starting at position 3341 of SEQ ID NO: 1881731
uugacauagcacugaauaa

SEQ ID NO: 2067439 - RNA, 19 nt, Artificial Sequence
  Description of Artificial Sequence: Synthetic oligonucleotide
  Antisense strand to SEQ ID NO: 2067438
uuauucagugcuaugucaa

SEQ ID NO: 2067440 - RNA, 19 nt, Artificial Sequence
  Description of Artificial Sequence: Synthetic oligonucleotide
  Sense strand starting at position 3581 of SEQ ID NO: 1881731
uuaaaugcuguguaaauag

SEQ ID NO: 2067441 - RNA, 19 nt, Artificial Sequence
  Description of Artificial Sequence: Synthetic oligonucleotide
  Antisense strand to SEQ ID NO: 2067440
cuauuuacacagcauuuaa

SEQ ID NO: 2067442 - RNA, 19 nt, Artificial Sequence
  Description of Artificial Sequence: Synthetic oligonucleotide
  Sense strand starting at position 3681 of SEQ ID NO: 1881731
uuugcauuuggcugaaucu

SEQ ID NO: 2067443 - RNA, 19 nt, Artificial Sequence
  Description of Artificial Sequence: Synthetic oligonucleotide
  Antisense strand to SEQ ID NO: 2067442
agauucagccaaaugcaaa

SEQ ID NO: 2067444 - RNA, 19 nt, Artificial Sequence
  Description of Artificial Sequence: Synthetic oligonucleotide
  Sense strand starting at position 3693 of SEQ ID NO: 1881731
ugaaucugccaaugcagaa

SEQ ID NO: 2067445 - RNA, 19 nt, Artificial Sequence
  Description of Artificial Sequence: Synthetic oligonucleotide
  Antisense strand to SEQ ID NO: 2067444
uucugcauuggcagauuca

SEQ ID NO: 2067446 - RNA, 19 nt, Artificial Sequence
  Description of Artificial Sequence: Synthetic oligonucleotide
  Sense strand starting at position 3851 of SEQ ID NO: 1881731
gcaggaggaugcuuggaau

SEQ ID NO: 2067447 - RNA, 19 nt, Artificial Sequence
  Description of Artificial Sequence: Synthetic oligonucleotide
  Antisense strand to SEQ ID NO: 2067446
auuccaagcauccuccugc

SEQ ID NO: 2067448 - RNA, 19 nt, Artificial Sequence
  Description of Artificial Sequence: Synthetic oligonucleotide
  Sense strand starting at position 3897 of SEQ ID NO: 1881731
ugagguuagcagggaaaga

SEQ ID NO: 2067449 - RNA, 19 nt, Artificial Sequence
  Description of Artificial Sequence: Synthetic oligonucleotide
  Antisense strand to SEQ ID NO: 2067448
ucuuucccugcuaaccuca

SEQ ID NO: 2067450 - RNA, 19 nt, Artificial Sequence
  Description of Artificial Sequence: Synthetic oligonucleotide
  Sense strand starting at position 73 of SEQ ID NO: 1881732
ggaucaauuagagguugca

SEQ ID NO: 2067451 - RNA, 19 nt, Artificial Sequence
  Description of Artificial Sequence: Synthetic oligonucleotide
  Antisense strand to SEQ ID NO: 2067450
ugcaaccucuaauugaucc

SEQ ID NO: 2067452 - RNA, 19 nt, Artificial Sequence
  Description of Artificial Sequence: Synthetic oligonucleotide
  Sense strand starting at position 287 of SEQ ID NO: 1881732
aggaaagggucagauaaau

SEQ ID NO: 2067453 - RNA, 19 nt, Artificial Sequence
  Description of Artificial Sequence: Synthetic oligonucleotide
  Antisense strand to SEQ ID NO: 2067452
auuuaucugacccuuuccu

SEQ ID NO: 2067454 - RNA, 19 nt, Artificial Sequence
  Description of Artificial Sequence: Synthetic oligonucleotide
  Sense strand starting at position 534 of SEQ ID NO: 1881732
caagaaagcgguggcuaaa

SEQ ID NO: 2067455 - RNA, 19 nt, Artificial Sequence
  Description of Artificial Sequence: Synthetic oligonucleotide
  Antisense strand to SEQ ID NO: 2067454
uuuagccaccgcuuucuug

SEQ ID NO: 2067456 - RNA, 19 nt, Artificial Sequence
  Description of Artificial Sequence: Synthetic oligonucleotide
  Sense strand starting at position 570 of SEQ ID NO: 1881732
ggagccagaucagaagaaa

SEQ ID NO: 2067457 - RNA, 19 nt, Artificial Sequence
  Description of Artificial Sequence: Synthetic oligonucleotide
  Antisense strand to SEQ ID NO: 2067456
uuucuucugaucuggcucc

SEQ ID NO: 2067458 - RNA, 19 nt, Artificial Sequence
  Description of Artificial Sequence: Synthetic oligonucleotide
  Sense strand starting at position 621 of SEQ ID NO: 1881732
gaaauuaguggaggcaacu

SEQ ID NO: 2067459 - RNA, 19 nt, Artificial Sequence
  Description of Artificial Sequence: Synthetic oligonucleotide
  Antisense strand to SEQ ID NO: 2067458
aguugccuccacuaauuuc

SEQ ID NO: 2067460 - RNA, 19 nt, Artificial Sequence
  Description of Artificial Sequence: Synthetic oligonucleotide
  Sense strand starting at position 682 of SEQ ID NO: 1881732
aagauuaguuacguggaga

SEQ ID NO: 2067461 - RNA, 19 nt, Artificial Sequence
  Description of Artificial Sequence: Synthetic oligonucleotide
  Antisense strand to SEQ ID NO: 2067460
ucuccacguaacuaaucuu

SEQ ID NO: 2067462 - RNA, 19 nt, Artificial Sequence
  Description of Artificial Sequence: Synthetic oligonucleotide
  Sense strand starting at position 683 of SEQ ID NO: 1881732
agauuaguuacguggagau

SEQ ID NO: 2067463 - RNA, 19 nt, Artificial Sequence
  Description of Artificial Sequence: Synthetic oligonucleotide
  Antisense strand to SEQ ID NO: 2067462
aucuccacguaacuaaucu

SEQ ID NO: 2067464 - RNA, 19 nt, Artificial Sequence
  Description of Artificial Sequence: Synthetic oligonucleotide
  Sense strand starting at position 959 of SEQ ID NO: 1881732
uguacugccggagacuaau

SEQ ID NO: 2067465 - RNA, 19 nt, Artificial Sequence
  Description of Artificial Sequence: Synthetic oligonucleotide
  Antisense strand to SEQ ID NO: 2067464
auuagucuccggcaguaca

SEQ ID NO: 2067466 - RNA, 19 nt, Artificial Sequence
  Description of Artificial Sequence: Synthetic oligonucleotide
  Sense strand starting at position 1098 of SEQ ID NO: 1881732
agcaguuuggcauaagcua

SEQ ID NO: 2067467 - RNA, 19 nt, Artificial Sequence
  Description of Artificial Sequence: Synthetic oligonucleotide
  Antisense strand to SEQ ID NO: 2067466
uagcuuaugccaaacugcu

SEQ ID NO: 2067468 - RNA, 19 nt, Artificial Sequence
  Description of Artificial Sequence: Synthetic oligonucleotide
  Sense strand starting at position 1124 of SEQ ID NO: 1881732
aaugaaauggccgauguga

SEQ ID NO: 2067469 - RNA, 19 nt, Artificial Sequence
  Description of Artificial Sequence: Synthetic oligonucleotide
  Antisense strand to SEQ ID NO: 2067468
ucacaucggccauuucauu

SEQ ID NO: 2067470 - RNA, 19 nt, Artificial Sequence
  Description of Artificial Sequence: Synthetic oligonucleotide
  Sense strand starting at position 1126 of SEQ ID NO: 1881732
ugaaauggccgaugugaug

SEQ ID NO: 2067471 - RNA, 19 nt, Artificial Sequence
  Description of Artificial Sequence: Synthetic oligonucleotide
  Antisense strand to SEQ ID NO: 2067470
caucacaucggccauuuca

SEQ ID NO: 2067472 - RNA, 19 nt, Artificial Sequence
  Description of Artificial Sequence: Synthetic oligonucleotide
  Sense strand starting at position 1137 of SEQ ID NO: 1881732
augugaugauccucaggga

SEQ ID NO: 2067473 - RNA, 19 nt, Artificial Sequence
  Description of Artificial Sequence: Synthetic oligonucleotide
  Antisense strand to SEQ ID NO: 2067472
ucccugaggaucaucacau

SEQ ID NO: 2067474 - RNA, 19 nt, Artificial Sequence
  Description of Artificial Sequence: Synthetic oligonucleotide
  Sense strand starting at position 1202 of SEQ ID NO: 1881732
ggaugagucuuucuagcua

SEQ ID NO: 2067475 - RNA, 19 nt, Artificial Sequence
  Description of Artificial Sequence: Synthetic oligonucleotide
  Antisense strand to SEQ ID NO: 2067474
uagcuagaaagacucaucc

SEQ ID NO: 2067476 - RNA, 19 nt, Artificial Sequence
  Description of Artificial Sequence: Synthetic oligonucleotide
  Sense strand starting at position 1275 of SEQ ID NO: 1881732
uccggagaucaacguuuau

SEQ ID NO: 2067477 - RNA, 19 nt, Artificial Sequence
  Description of Artificial Sequence: Synthetic oligonucleotide
  Antisense strand to SEQ ID NO: 2067476
auaaacguugaucuccgga

SEQ ID NO: 2067478 - RNA, 19 nt, Artificial Sequence
  Description of Artificial Sequence: Synthetic oligonucleotide
  Sense strand starting at position 2240 of SEQ ID NO: 1881732
cagagccuuccgccguaau

SEQ ID NO: 2067479 - RNA, 19 nt, Artificial Sequence
  Description of Artificial Sequence: Synthetic oligonucleotide
  Antisense strand to SEQ ID NO: 2067478
auuacggcggaaggcucug

SEQ ID NO: 2067480 - RNA, 19 nt, Artificial Sequence
  Description of Artificial Sequence: Synthetic oligonucleotide
  Sense strand starting at position 2242 of SEQ ID NO: 1881732
gagccuuccgccguaaugu

SEQ ID NO: 2067481 - RNA, 19 nt, Artificial Sequence
  Description of Artificial Sequence: Synthetic oligonucleotide
  Antisense strand to SEQ ID NO: 2067480
acauuacggcggaaggcuc

SEQ ID NO: 2067482 - RNA, 19 nt, Artificial Sequence
  Description of Artificial Sequence: Synthetic oligonucleotide
  Sense strand starting at position 2277 of SEQ ID NO: 1881732
cugcgcuuagucucucuua

SEQ ID NO: 2067483 - RNA, 19 nt, Artificial Sequence
  Description of Artificial Sequence: Synthetic oligonucleotide
  Antisense strand to SEQ ID NO: 2067482
uaagagagacuaagcgcag

SEQ ID NO: 2067484 - RNA, 19 nt, Artificial Sequence
  Description of Artificial Sequence: Synthetic oligonucleotide
  Sense strand starting at position 2279 of SEQ ID NO: 1881732
gcgcuuagucucucuuaga

SEQ ID NO: 2067485 - RNA, 19 nt, Artificial Sequence
  Description of Artificial Sequence: Synthetic oligonucleotide
  Antisense strand to SEQ ID NO: 2067484
ucuaagagagacuaagcgc

SEQ ID NO: 2067486 - RNA, 19 nt, Artificial Sequence
  Description of Artificial Sequence: Synthetic oligonucleotide
  Sense strand starting at position 2308 of SEQ ID NO: 1881732
gugcgagcgccucugguua

SEQ ID NO: 2067487 - RNA, 19 nt, Artificial Sequence
  Description of Artificial Sequence: Synthetic oligonucleotide
  Antisense strand to SEQ ID NO: 2067486
uaaccagaggcgcucgcac

SEQ ID NO: 2067488 - RNA, 19 nt, Artificial Sequence
  Description of Artificial Sequence: Synthetic oligonucleotide
  Sense strand starting at position 2637 of SEQ ID NO: 1881732
uuugaaauggacuguuuaa

SEQ ID NO: 2067489 - RNA, 19 nt, Artificial Sequence
  Description of Artificial Sequence: Synthetic oligonucleotide
  Antisense strand to SEQ ID NO: 2067488
uuaaacaguccauuucaaa

SEQ ID NO: 2067490 - RNA, 19 nt, Artificial Sequence
  Description of Artificial Sequence: Synthetic oligonucleotide
  Sense strand starting at position 2669 of SEQ ID NO: 1881732
uggagcuuugagugggcaa

SEQ ID NO: 2067491 - RNA, 19 nt, Artificial Sequence
  Description of Artificial Sequence: Synthetic oligonucleotide
  Antisense strand to SEQ ID NO: 2067490
uugcccacucaaagcucca

SEQ ID NO: 2067492 - RNA, 19 nt, Artificial Sequence
  Description of Artificial Sequence: Synthetic oligonucleotide
  Sense strand starting at position 2671 of SEQ ID NO: 1881732
gagcuuugagugggcaaga

SEQ ID NO: 2067493 - RNA, 19 nt, Artificial Sequence
  Description of Artificial Sequence: Synthetic oligonucleotide
  Antisense strand to SEQ ID NO: 2067492
ucuugcccacucaaagcuc

SEQ ID NO: 2067494 - RNA, 19 nt, Artificial Sequence
  Description of Artificial Sequence: Synthetic oligonucleotide
  Sense strand starting at position 2713 of SEQ ID NO: 1881732
uugaguuaggcuugagaau

SEQ ID NO: 2067495 - RNA, 19 nt, Artificial Sequence
  Description of Artificial Sequence: Synthetic oligonucleotide
  Antisense strand to SEQ ID NO: 2067494
auucucaagccuaacucaa

SEQ ID NO: 2067496 - RNA, 19 nt, Artificial Sequence
  Description of Artificial Sequence: Synthetic oligonucleotide
  Sense strand starting at position 2863 of SEQ ID NO: 1881732
guaaaccuguacucaguaa

SEQ ID NO: 2067497 - RNA, 19 nt, Artificial Sequence
  Description of Artificial Sequence: Synthetic oligonucleotide
  Antisense strand to SEQ ID NO: 2067496
uuacugaguacagguuuac

SEQ ID NO: 2067498 - RNA, 19 nt, Artificial Sequence
  Description of Artificial Sequence: Synthetic oligonucleotide
  Sense strand starting at position 2890 of SEQ ID NO: 1881732
ggaaguuuaucacuaacug

SEQ ID NO: 2067499 - RNA, 19 nt, Artificial Sequence
  Description of Artificial Sequence: Synthetic oligonucleotide
  Antisense strand to SEQ ID NO: 2067498
caguuagugauaaacuucc

SEQ ID NO: 2067500 - RNA, 19 nt, Artificial Sequence
  Description of Artificial Sequence: Synthetic oligonucleotide
  Sense strand starting at position 2930 of SEQ ID NO: 1881732
aaacaaucugugggaaagu

SEQ ID NO: 2067501 - RNA, 19 nt, Artificial Sequence
  Description of Artificial Sequence: Synthetic oligonucleotide
  Antisense strand to SEQ ID NO: 2067500
acuuucccacagauuguuu

SEQ ID NO: 2067502 - RNA, 19 nt, Artificial Sequence
  Description of Artificial Sequence: Synthetic oligonucleotide
  Sense strand starting at position 2949 of SEQ ID NO: 1881732
gggcaaaccuacuuugagu

SEQ ID NO: 2067503 - RNA, 19 nt, Artificial Sequence
  Description of Artificial Sequence: Synthetic oligonucleotide
  Antisense strand to SEQ ID NO: 2067502
acucaaaguagguuugccc

SEQ ID NO: 2067504 - RNA, 19 nt, Artificial Sequence
  Description of Artificial Sequence: Synthetic oligonucleotide
  Sense strand starting at position 2975 of SEQ ID NO: 1881732
agauacaguguuugucaca

SEQ ID NO: 2067505 - RNA, 19 nt, Artificial Sequence
  Description of Artificial Sequence: Synthetic oligonucleotide
  Antisense strand to SEQ ID NO: 2067504
ugugacaaacacuguaucu

SEQ ID NO: 2067506 - RNA, 19 nt, Artificial Sequence
  Description of Artificial Sequence: Synthetic oligonucleotide
  Sense strand starting at position 2982 of SEQ ID NO: 1881732
guguuugucacaggauaau

SEQ ID NO: 2067507 - RNA, 19 nt, Artificial Sequence
  Description of Artificial Sequence: Synthetic oligonucleotide
  Antisense strand to SEQ ID NO: 2067506
auuauccugugacaaacac

SEQ ID NO: 2067508 - RNA, 19 nt, Artificial Sequence
  Description of Artificial Sequence: Synthetic oligonucleotide
  Sense strand starting at position 3193 of SEQ ID NO: 1881732
gcggcuaacuuuguaauuu

SEQ ID NO: 2067509 - RNA, 19 nt, Artificial Sequence
  Description of Artificial Sequence: Synthetic oligonucleotide
  Antisense strand to SEQ ID NO: 2067508
aaauuacaaaguuagccgc

SEQ ID NO: 2067510 - RNA, 19 nt, Artificial Sequence
  Description of Artificial Sequence: Synthetic oligonucleotide
  Sense strand starting at position 3442 of SEQ ID NO: 1881732
aacacauggcguuacagaa

SEQ ID NO: 2067511 - RNA, 19 nt, Artificial Sequence
  Description of Artificial Sequence: Synthetic oligonucleotide
  Antisense strand to SEQ ID NO: 2067510
uucuguaacgccauguguu

SEQ ID NO: 2067512 - RNA, 19 nt, Artificial Sequence
  Description of Artificial Sequence: Synthetic oligonucleotide
  Sense strand starting at position 3501 of SEQ ID NO: 1881732
ucuauuacuguguaaguag

SEQ ID NO: 2067513 - RNA, 19 nt, Artificial Sequence
  Description of Artificial Sequence: Synthetic oligonucleotide
  Antisense strand to SEQ ID NO: 2067512
cuacuuacacaguaauaga

SEQ ID NO: 2067514 - RNA, 19 nt, Artificial Sequence
  Description of Artificial Sequence: Synthetic oligonucleotide
  Sense strand starting at position 3576 of SEQ ID NO: 1881732
cuuaacagcguuuaaucaa

SEQ ID NO: 2067515 - RNA, 19 nt, Artificial Sequence
  Description of Artificial Sequence: Synthetic oligonucleotide
  Antisense strand to SEQ ID NO: 2067514
uugauuaaacgcuguuaag

SEQ ID NO: 2067516 - RNA, 19 nt, Artificial Sequence
  Description of Artificial Sequence: Synthetic oligonucleotide
  Sense strand starting at position 3603 of SEQ ID NO: 1881732
cccaaagaaugaucugcaa

SEQ ID NO: 2067517 - RNA, 19 nt, Artificial Sequence
  Description of Artificial Sequence: Synthetic oligonucleotide
  Antisense strand to SEQ ID NO: 2067516
uugcagaucauucuuuggg

SEQ ID NO: 2067518 - RNA, 19 nt, Artificial Sequence
  Description of Artificial Sequence: Synthetic oligonucleotide
  Sense strand starting at position 3783 of SEQ ID NO: 1881732
ccacuugugauuggccaga

SEQ ID NO: 2067519 - RNA, 19 nt, Artificial Sequence
  Description of Artificial Sequence: Synthetic oligonucleotide
  Antisense strand to SEQ ID NO: 2067518
ucuggccaaucacaagugg

SEQ ID NO: 2067520 - RNA, 19 nt, Artificial Sequence
  Description of Artificial Sequence: Synthetic oligonucleotide
  Sense strand starting at position 3785 of SEQ ID NO: 1881732
acuugugauuggccagaac

SEQ ID NO: 2067521 - RNA, 19 nt, Artificial Sequence
  Description of Artificial Sequence: Synthetic oligonucleotide
  Antisense strand to SEQ ID NO: 2067520
guucuggccaaucacaagu

SEQ ID NO: 2067522 - RNA, 19 nt, Artificial Sequence
  Description of Artificial Sequence: Synthetic oligonucleotide
  Sense strand starting at position 3788 of SEQ ID NO: 1881732
ugugauuggccagaacucu

SEQ ID NO: 2067523 - RNA, 19 nt, Artificial Sequence
  Description of Artificial Sequence: Synthetic oligonucleotide
  Antisense strand to SEQ ID NO: 2067522
agaguucuggccaaucaca

SEQ ID NO: 2067524 - RNA, 19 nt, Artificial Sequence
  Description of Artificial Sequence: Synthetic oligonucleotide
  Sense strand starting at position 3794 of SEQ ID NO: 1881732
uggccagaacucugugauu

SEQ ID NO: 2067525 - RNA, 19 nt, Artificial Sequence
  Description of Artificial Sequence: Synthetic oligonucleotide
  Antisense strand to SEQ ID NO: 2067524
aaucacagaguucuggcca

SEQ ID NO: 2067526 - RNA, 19 nt, Artificial Sequence
  Description of Artificial Sequence: Synthetic oligonucleotide
  Sense strand starting at position 3796 of SEQ ID NO: 1881732
gccagaacucugugauugg

SEQ ID NO: 2067527 - RNA, 19 nt, Artificial Sequence
  Description of Artificial Sequence: Synthetic oligonucleotide
  Antisense strand to SEQ ID NO: 2067526
ccaaucacagaguucuggc

SEQ ID NO: 2067528 - RNA, 19 nt, Artificial Sequence
  Description of Artificial Sequence: Synthetic oligonucleotide
  Sense strand starting at position 3800 of SEQ ID NO: 1881732
gaacucugugauugguaca

SEQ ID NO: 2067529 - RNA, 19 nt, Artificial Sequence
  Description of Artificial Sequence: Synthetic oligonucleotide
  Antisense strand to SEQ ID NO: 2067528
uguaccaaucacagaguuc

SEQ ID NO: 2067530 - RNA, 19 nt, Artificial Sequence
  Description of Artificial Sequence: Synthetic oligonucleotide
  Sense strand starting at position 1 of SEQ ID NO: 1881733
acagaugauucucuggguu

SEQ ID NO: 2067531 - RNA, 19 nt, Artificial Sequence
  Description of Artificial Sequence: Synthetic oligonucleotide
  Antisense strand to SEQ ID NO: 2067530
aacccagagaaucaucugu

SEQ ID NO: 2067532 - RNA, 19 nt, Artificial Sequence
  Description of Artificial Sequence: Synthetic oligonucleotide
  Sense strand starting at position 136 of SEQ ID NO: 1881733
ucugguaguccauacaaca

SEQ ID NO: 2067533 - RNA, 19 nt, Artificial Sequence
  Description of Artificial Sequence: Synthetic oligonucleotide
  Antisense strand to SEQ ID NO: 2067532
uguuguauggacuaccaga

SEQ ID NO: 2067534 - RNA, 19 nt, Artificial Sequence
  Description of Artificial Sequence: Synthetic oligonucleotide
  Sense strand starting at position 291 of SEQ ID NO: 1881733
ugacauguuccucauucua

SEQ ID NO: 2067535 - RNA, 19 nt, Artificial Sequence
  Description of Artificial Sequence: Synthetic oligonucleotide
  Antisense strand to SEQ ID NO: 2067534
uagaaugaggaacauguca

SEQ ID NO: 2067536 - RNA, 19 nt, Artificial Sequence
  Description of Artificial Sequence: Synthetic oligonucleotide
  Sense strand starting at position 301 of SEQ ID NO: 1881733
cucauucuauuugauagga

SEQ ID NO: 2067537 - RNA, 19 nt, Artificial Sequence
  Description of Artificial Sequence: Synthetic oligonucleotide
  Antisense strand to SEQ ID NO: 2067536
uccuaucaaauagaaugag

SEQ ID NO: 2067538 - RNA, 19 nt, Artificial Sequence
  Description of Artificial Sequence: Synthetic oligonucleotide
  Sense strand starting at position 515 of SEQ ID NO: 1881733
agauuaaugccucauucug

SEQ ID NO: 2067539 - RNA, 19 nt, Artificial Sequence
  Description of Artificial Sequence: Synthetic oligonucleotide
  Antisense strand to SEQ ID NO: 2067538
cagaaugaggcauuaaucu

SEQ ID NO: 2067540 - RNA, 19 nt, Artificial Sequence
  Description of Artificial Sequence: Synthetic oligonucleotide
  Sense strand starting at position 534 of SEQ ID NO: 1881733
agaagcuaaucccugaauu

SEQ ID NO: 2067541 - RNA, 19 nt, Artificial Sequence
  Description of Artificial Sequence: Synthetic oligonucleotide
  Antisense strand to SEQ ID NO: 2067540
aauucagggauuagcuucu

SEQ ID NO: 2067542 - RNA, 19 nt, Artificial Sequence
  Description of Artificial Sequence: Synthetic oligonucleotide
  Sense strand starting at position 547 of SEQ ID NO: 1881733
ugaauuaaggcuugaaccu

SEQ ID NO: 2067543 - RNA, 19 nt, Artificial Sequence
  Description of Artificial Sequence: Synthetic oligonucleotide
  Antisense strand to SEQ ID NO: 2067542
agguucaagccuuaauuca

SEQ ID NO: 2067544 - RNA, 19 nt, Artificial Sequence
  Description of Artificial Sequence: Synthetic oligonucleotide
  Sense strand starting at position 829 of SEQ ID NO: 1881733
aucagaaaugcugguaaua

SEQ ID NO: 2067545 - RNA, 19 nt, Artificial Sequence
  Description of Artificial Sequence: Synthetic oligonucleotide
  Antisense strand to SEQ ID NO: 2067544
uauuaccagcauuucugau

SEQ ID NO: 2067546 - RNA, 19 nt, Artificial Sequence
  Description of Artificial Sequence: Synthetic oligonucleotide
  Sense strand starting at position 959 of SEQ ID NO: 1881733
agugaauauucucugucaa

SEQ ID NO: 2067547 - RNA, 19 nt, Artificial Sequence
  Description of Artificial Sequence: Synthetic oligonucleotide
  Antisense strand to SEQ ID NO: 2067546
uugacagagaauauucacu

SEQ ID NO: 2067548 - RNA, 19 nt, Artificial Sequence
  Description of Artificial Sequence: Synthetic oligonucleotide
  Sense strand starting at position 1199 of SEQ ID NO: 1881733
cugaaaguauguucuuaaa

SEQ ID NO: 2067549 - RNA, 19 nt, Artificial Sequence
  Description of Artificial Sequence: Synthetic oligonucleotide
  Antisense strand to SEQ ID NO: 2067548
uuuaagaacauacuuucag

SEQ ID NO: 2067550 - RNA, 19 nt, Artificial Sequence
  Description of Artificial Sequence: Synthetic oligonucleotide
  Sense strand starting at position 1281 of SEQ ID NO: 1881733
uagauagcauguguaaaua

SEQ ID NO: 2067551 - RNA, 19 nt, Artificial Sequence
  Description of Artificial Sequence: Synthetic oligonucleotide
  Antisense strand to SEQ ID NO: 2067550
uauuuacacaugcuaucua

SEQ ID NO: 2067552 - RNA, 19 nt, Artificial Sequence
  Description of Artificial Sequence: Synthetic oligonucleotide
  Sense strand starting at position 1382 of SEQ ID NO: 1881733
aagcaaugacacugugaga

SEQ ID NO: 2067553 - RNA, 19 nt, Artificial Sequence
  Description of Artificial Sequence: Synthetic oligonucleotide
  Antisense strand to SEQ ID NO: 2067552
ucucacagugucauugcuu

SEQ ID NO: 2067554 - RNA, 19 nt, Artificial Sequence
  Description of Artificial Sequence: Synthetic oligonucleotide
  Sense strand starting at position 1425 of SEQ ID NO: 1881733
uuucgaaagcaagaauugu

SEQ ID NO: 2067555 - RNA, 19 nt, Artificial Sequence
  Description of Artificial Sequence: Synthetic oligonucleotide
  Antisense strand to SEQ ID NO: 2067554
acaauucuugcuuucgaaa

SEQ ID NO: 2067556 - RNA, 19 nt, Artificial Sequence
  Description of Artificial Sequence: Synthetic oligonucleotide
  Sense strand starting at position 1791 of SEQ ID NO: 1881733
augucagaacuuuaggcaa

SEQ ID NO: 2067557 - RNA, 19 nt, Artificial Sequence
  Description of Artificial Sequence: Synthetic oligonucleotide
  Antisense strand to SEQ ID NO: 2067556
uugccuaaaguucugacau

SEQ ID NO: 2067558 - RNA, 19 nt, Artificial Sequence
  Description of Artificial Sequence: Synthetic oligonucleotide
  Sense strand starting at position 1830 of SEQ ID NO: 1881733
acauaaugugcugauauaa

SEQ ID NO: 2067559 - RNA, 19 nt, Artificial Sequence
  Description of Artificial Sequence: Synthetic oligonucleotide
  Antisense strand to SEQ ID NO: 2067558
uuauaucagcacauuaugu

SEQ ID NO: 2067560 - RNA, 19 nt, Artificial Sequence
  Description of Artificial Sequence: Synthetic oligonucleotide
  Sense strand starting at position 1841 of SEQ ID NO: 1881733
ugauauaauggcuguugaa

SEQ ID NO: 2067561 - RNA, 19 nt, Artificial Sequence
  Description of Artificial Sequence: Synthetic oligonucleotide
  Antisense strand to SEQ ID NO: 2067560
uucaacagccauuauauca

SEQ ID NO: 2067562 - RNA, 19 nt, Artificial Sequence
  Description of Artificial Sequence: Synthetic oligonucleotide
  Sense strand starting at position 2006 of SEQ ID NO: 1881733
ugaugacagcuauggaucu

SEQ ID NO: 2067563 - RNA, 19 nt, Artificial Sequence
  Description of Artificial Sequence: Synthetic oligonucleotide
  Antisense strand to SEQ ID NO: 2067562
agauccauagcugucauca

SEQ ID NO: 2067564 - RNA, 19 nt, Artificial Sequence
  Description of Artificial Sequence: Synthetic oligonucleotide
  Sense strand starting at position 2234 of SEQ ID NO: 1881733
acagaucagucuuugacaa

SEQ ID NO: 2067565 - RNA, 19 nt, Artificial Sequence
  Description of Artificial Sequence: Synthetic oligonucleotide
  Antisense strand to SEQ ID NO: 2067564
uugucaaagacugaucugu

SEQ ID NO: 2067566 - RNA, 19 nt, Artificial Sequence
  Description of Artificial Sequence: Synthetic oligonucleotide
  Sense strand starting at position 2544 of SEQ ID NO: 1881733
ggugcuaauaaguguauuu

SEQ ID NO: 2067567 - RNA, 19 nt, Artificial Sequence
  Description of Artificial Sequence: Synthetic oligonucleotide
  Antisense strand to SEQ ID NO: 2067566
aaauacacuuauuagcacc

SEQ ID NO: 2067568 - RNA, 19 nt, Artificial Sequence
  Description of Artificial Sequence: Synthetic oligonucleotide
  Sense strand starting at position 2654 of SEQ ID NO: 1881733
agacaagaauuggaaauga

SEQ ID NO: 2067569 - RNA, 19 nt, Artificial Sequence
  Description of Artificial Sequence: Synthetic oligonucleotide
  Antisense strand to SEQ ID NO: 2067568
ucauuuccaauucuugucu

SEQ ID NO: 2067570 - RNA, 19 nt, Artificial Sequence
  Description of Artificial Sequence: Synthetic oligonucleotide
  Sense strand starting at position 2685 of SEQ ID NO: 1881733
auauuagccugaucuauag

SEQ ID NO: 2067571 - RNA, 19 nt, Artificial Sequence
  Description of Artificial Sequence: Synthetic oligonucleotide
  Antisense strand to SEQ ID NO: 2067570
cuauagaucaggcuaauau

SEQ ID NO: 2067572 - RNA, 19 nt, Artificial Sequence
  Description of Artificial Sequence: Synthetic oligonucleotide
  Sense strand starting at position 2802 of SEQ ID NO: 1881733
uuuauauggaucugaguag

SEQ ID NO: 2067573 - RNA, 19 nt, Artificial Sequence
  Description of Artificial Sequence: Synthetic oligonucleotide
  Antisense strand to SEQ ID NO: 2067572
cuacucagauccauauaaa

SEQ ID NO: 2067574 - RNA, 19 nt, Artificial Sequence
  Description of Artificial Sequence: Synthetic oligonucleotide
  Sense strand starting at position 2954 of SEQ ID NO: 1881733
gcacacaaucuaugagaau

SEQ ID NO: 2067575 - RNA, 19 nt, Artificial Sequence
  Description of Artificial Sequence: Synthetic oligonucleotide
  Antisense strand to SEQ ID NO: 2067574
auucucauagauugugugc

SEQ ID NO: 2067576 - RNA, 19 nt, Artificial Sequence
  Description of Artificial Sequence: Synthetic oligonucleotide
  Sense strand starting at position 3096 of SEQ ID NO: 1881733
auaauagcauguucuagaa

SEQ ID NO: 2067577 - RNA, 19 nt, Artificial Sequence
  Description of Artificial Sequence: Synthetic oligonucleotide
  Antisense strand to SEQ ID NO: 2067576
uucuagaacaugcuauuau

SEQ ID NO: 2067578 - RNA, 19 nt, Artificial Sequence
  Description of Artificial Sequence: Synthetic oligonucleotide
  Sense strand starting at position 3119 of SEQ ID NO: 1881733
caacuuauugagugguuga

SEQ ID NO: 2067579 - RNA, 19 nt, Artificial Sequence
  Description of Artificial Sequence: Synthetic oligonucleotide
  Antisense strand to SEQ ID NO: 2067578
ucaaccacucaauaaguug

SEQ ID NO: 2067580 - RNA, 19 nt, Artificial Sequence
  Description of Artificial Sequence: Synthetic oligonucleotide
  Sense strand starting at position 3122 of SEQ ID NO: 1881733
cuuauugagugguugaaac

SEQ ID NO: 2067581 - RNA, 19 nt, Artificial Sequence
  Description of Artificial Sequence: Synthetic oligonucleotide
  Antisense strand to SEQ ID NO: 2067580
guuucaaccacucaauaag

SEQ ID NO: 2067582 - RNA, 19 nt, Artificial Sequence
  Description of Artificial Sequence: Synthetic oligonucleotide
  Sense strand starting at position 3130 of SEQ ID NO: 1881733
gugguugaaacauaggcua

SEQ ID NO: 2067583 - RNA, 19 nt, Artificial Sequence
  Description of Artificial Sequence: Synthetic oligonucleotide
  Antisense strand to SEQ ID NO: 2067582
uagccuauguuucaaccac

SEQ ID NO: 2067584 - RNA, 19 nt, Artificial Sequence
  Description of Artificial Sequence: Synthetic oligonucleotide
  Sense strand starting at position 3132 of SEQ ID NO: 1881733
gguugaaacauaggcuaca

SEQ ID NO: 2067585 - RNA, 19 nt, Artificial Sequence
  Description of Artificial Sequence: Synthetic oligonucleotide
  Antisense strand to SEQ ID NO: 2067584
uguagccuauguuucaacc

SEQ ID NO: 2067586 - RNA, 19 nt, Artificial Sequence
  Description of Artificial Sequence: Synthetic oligonucleotide
  Sense strand starting at position 3133 of SEQ ID NO: 1881733
guugaaacauaggcuacau

SEQ ID NO: 2067587 - RNA, 19 nt, Artificial Sequence
  Description of Artificial Sequence: Synthetic oligonucleotide
  Antisense strand to SEQ ID NO: 2067586
auguagccuauguuucaac

SEQ ID NO: 2067588 - RNA, 19 nt, Artificial Sequence
  Description of Artificial Sequence: Synthetic oligonucleotide
  Sense strand starting at position 3189 of SEQ ID NO: 1881733
cagccagauccugauagua

SEQ ID NO: 2067589 - RNA, 19 nt, Artificial Sequence
  Description of Artificial Sequence: Synthetic oligonucleotide
  Antisense strand to SEQ ID NO: 2067588
uacuaucaggaucuggcug

SEQ ID NO: 2067590 - RNA, 19 nt, Artificial Sequence
  Description of Artificial Sequence: Synthetic oligonucleotide
  Sense strand starting at position 3303 of SEQ ID NO: 1881733
cacagucuaguaggagauu

SEQ ID NO: 2067591 - RNA, 19 nt, Artificial Sequence
  Description of Artificial Sequence: Synthetic oligonucleotide
  Antisense strand to SEQ ID NO: 2067590
aaucuccuacuagacugug

SEQ ID NO: 2067592 - RNA, 19 nt, Artificial Sequence
  Description of Artificial Sequence: Synthetic oligonucleotide
  Sense strand starting at position 3423 of SEQ ID NO: 1881733
gggagugacaccugaacug

SEQ ID NO: 2067593 - RNA, 19 nt, Artificial Sequence
  Description of Artificial Sequence: Synthetic oligonucleotide
  Antisense strand to SEQ ID NO: 2067592
caguucaggugucacuccc

SEQ ID NO: 2067594 - RNA, 19 nt, Artificial Sequence
  Description of Artificial Sequence: Synthetic oligonucleotide
  Sense strand starting at position 3460 of SEQ ID NO: 1881733
ggaagaguaagucaagcuu

SEQ ID NO: 2067595 - RNA, 19 nt, Artificial Sequence
  Description of Artificial Sequence: Synthetic oligonucleotide
  Antisense strand to SEQ ID NO: 2067594
aagcuugacuuacucuucc

SEQ ID NO: 2067596 - RNA, 19 nt, Artificial Sequence
  Description of Artificial Sequence: Synthetic oligonucleotide
  Sense strand starting at position 3560 of SEQ ID NO: 1881733
ggaguuuaagcaggagaua

SEQ ID NO: 2067597 - RNA, 19 nt, Artificial Sequence
  Description of Artificial Sequence: Synthetic oligonucleotide
  Antisense strand to SEQ ID NO: 2067596
uaucuccugcuuaaacucc

SEQ ID NO: 2067598 - RNA, 19 nt, Artificial Sequence
  Description of Artificial Sequence: Synthetic oligonucleotide
  Sense strand starting at position 3615 of SEQ ID NO: 1881733
augcuuguucuugaagaau

SEQ ID NO: 2067599 - RNA, 19 nt, Artificial Sequence
  Description of Artificial Sequence: Synthetic oligonucleotide
  Antisense strand to SEQ ID NO: 2067598
auucuucaagaacaagcau

SEQ ID NO: 2067600 - RNA, 19 nt, Artificial Sequence
  Description of Artificial Sequence: Synthetic oligonucleotide
  Sense strand starting at position 3840 of SEQ ID NO: 1881733
cauuacucugguuagugau

SEQ ID NO: 2067601 - RNA, 19 nt, Artificial Sequence
  Description of Artificial Sequence: Synthetic oligonucleotide
  Antisense strand to SEQ ID NO: 2067600
aucacuaaccagaguaaug

SEQ ID NO: 2067602 - RNA, 19 nt, Artificial Sequence
  Description of Artificial Sequence: Synthetic oligonucleotide
  Sense strand starting at position 3846 of SEQ ID NO: 1881733
ucugguuagugauuucugu

SEQ ID NO: 2067603 - RNA, 19 nt, Artificial Sequence
  Description of Artificial Sequence: Synthetic oligonucleotide
  Antisense strand to SEQ ID NO: 2067602
acagaaaucacuaaccaga

SEQ ID NO: 2067604 - RNA, 19 nt, Artificial Sequence
  Description of Artificial Sequence: Synthetic oligonucleotide
  Sense strand starting at position 3871 of SEQ ID NO: 1881733
gaauguugucuuuagcaga

SEQ ID NO: 2067605 - RNA, 19 nt, Artificial Sequence
  Description of Artificial Sequence: Synthetic oligonucleotide
  Antisense strand to SEQ ID NO: 2067604
ucugcuaaagacaacauuc

SEQ ID NO: 2067606 - RNA, 19 nt, Artificial Sequence
  Description of Artificial Sequence: Synthetic oligonucleotide
  Sense strand starting at position 3876 of SEQ ID NO: 1881733
uugucuuuagcagaugaga

SEQ ID NO: 2067607 - RNA, 19 nt, Artificial Sequence
  Description of Artificial Sequence: Synthetic oligonucleotide
  Antisense strand to SEQ ID NO: 2067606
ucucaucugcuaaagacaa

SEQ ID NO: 2067608 - RNA, 19 nt, Artificial Sequence
  Description of Artificial Sequence: Synthetic oligonucleotide
  Sense strand starting at position 3878 of SEQ ID NO: 1881733
gucuuuagcagaugagaua

SEQ ID NO: 2067609 - RNA, 19 nt, Artificial Sequence
  Description of Artificial Sequence: Synthetic oligonucleotide
  Antisense strand to SEQ ID NO: 2067608
uaucucaucugcuaaagac

SEQ ID NO: 2067610 - RNA, 19 nt, Artificial Sequence
  Description of Artificial Sequence: Synthetic oligonucleotide
  Sense strand starting at position 67 of SEQ ID NO: 1881734
ucugauucugcuugaaaug

SEQ ID NO: 2067611 - RNA, 19 nt, Artificial Sequence
  Description of Artificial Sequence: Synthetic oligonucleotide
  Antisense strand to SEQ ID NO: 2067610
cauuucaagcagaaucaga

SEQ ID NO: 2067612 - RNA, 19 nt, Artificial Sequence
  Description of Artificial Sequence: Synthetic oligonucleotide
  Sense strand starting at position 68 of SEQ ID NO: 1881734
cugauucugcuugaaaugu

SEQ ID NO: 2067613 - RNA, 19 nt, Artificial Sequence
  Description of Artificial Sequence: Synthetic oligonucleotide
  Antisense strand to SEQ ID NO: 2067612
acauuucaagcagaaucag

SEQ ID NO: 2067614 - RNA, 19 nt, Artificial Sequence
  Description of Artificial Sequence: Synthetic oligonucleotide
  Sense strand starting at position 150 of SEQ ID NO: 1881734
gaguaaaugccuuagcaau

SEQ ID NO: 2067615 - RNA, 19 nt, Artificial Sequence
  Description of Artificial Sequence: Synthetic oligonucleotide
  Antisense strand to SEQ ID NO: 2067614
auugcuaaggcauuuacuc

SEQ ID NO: 2067616 - RNA, 19 nt, Artificial Sequence
  Description of Artificial Sequence: Synthetic oligonucleotide
  Sense strand starting at position 251 of SEQ ID NO: 1881734
uuuguaauuucugugugca

SEQ ID NO: 2067617 - RNA, 19 nt, Artificial Sequence
  Description of Artificial Sequence: Synthetic oligonucleotide
  Antisense strand to SEQ ID NO: 2067616
ugcacacagaaauuacaaa

SEQ ID NO: 2067618 - RNA, 19 nt, Artificial Sequence
  Description of Artificial Sequence: Synthetic oligonucleotide
  Sense strand starting at position 252 of SEQ ID NO: 1881734
uuguaauuucugugugcaa

SEQ ID NO: 2067619 - RNA, 19 nt, Artificial Sequence
  Description of Artificial Sequence: Synthetic oligonucleotide
  Antisense strand to SEQ ID NO: 2067618
uugcacacagaaauuacaa

SEQ ID NO: 2067620 - RNA, 19 nt, Artificial Sequence
  Description of Artificial Sequence: Synthetic oligonucleotide
  Sense strand starting at position 253 of SEQ ID NO: 1881734
uguaauuucugugugcaaa

SEQ ID NO: 2067621 - RNA, 19 nt, Artificial Sequence
  Description of Artificial Sequence: Synthetic oligonucleotide
  Antisense strand to SEQ ID NO: 2067620
uuugcacacagaaauuaca

SEQ ID NO: 2067622 - RNA, 19 nt, Artificial Sequence
  Description of Artificial Sequence: Synthetic oligonucleotide
  Sense strand starting at position 254 of SEQ ID NO: 1881734
guaauuucugugugcaaau

SEQ ID NO: 2067623 - RNA, 19 nt, Artificial Sequence
  Description of Artificial Sequence: Synthetic oligonucleotide
  Antisense strand to SEQ ID NO: 2067622
auuugcacacagaaauuac

SEQ ID NO: 2067624 - RNA, 19 nt, Artificial Sequence
  Description of Artificial Sequence: Synthetic oligonucleotide
  Sense strand starting at position 410 of SEQ ID NO: 1881734
agaaacuguccagagcgua

SEQ ID NO: 2067625 - RNA, 19 nt, Artificial Sequence
  Description of Artificial Sequence: Synthetic oligonucleotide
  Antisense strand to SEQ ID NO: 2067624
uacgcucuggacaguuucu

SEQ ID NO: 2067626 - RNA, 19 nt, Artificial Sequence
  Description of Artificial Sequence: Synthetic oligonucleotide
  Sense strand starting at position 423 of SEQ ID NO: 1881734
agcguagaauauuucuguu

SEQ ID NO: 2067627 - RNA, 19 nt, Artificial Sequence
  Description of Artificial Sequence: Synthetic oligonucleotide
  Antisense strand to SEQ ID NO: 2067626
aacagaaauauucuacgcu

SEQ ID NO: 2067628 - RNA, 19 nt, Artificial Sequence
  Description of Artificial Sequence: Synthetic oligonucleotide
  Sense strand starting at position 669 of SEQ ID NO: 1881734
auuagauaugauuggcuaa

SEQ ID NO: 2067629 - RNA, 19 nt, Artificial Sequence
  Description of Artificial Sequence: Synthetic oligonucleotide
  Antisense strand to SEQ ID NO: 2067628
uuagccaaucauaucuaau

SEQ ID NO: 2067630 - RNA, 19 nt, Artificial Sequence
  Description of Artificial Sequence: Synthetic oligonucleotide
  Sense strand starting at position 672 of SEQ ID NO: 1881734
agauaugauuggcuaaauc

SEQ ID NO: 2067631 - RNA, 19 nt, Artificial Sequence
  Description of Artificial Sequence: Synthetic oligonucleotide
  Antisense strand to SEQ ID NO: 2067630
gauuuagccaaucauaucu

SEQ ID NO: 2067632 - RNA, 19 nt, Artificial Sequence
  Description of Artificial Sequence: Synthetic oligonucleotide
  Sense strand starting at position 681 of SEQ ID NO: 1881734
uggcuaaaucuugggaggu

SEQ ID NO: 2067633 - RNA, 19 nt, Artificial Sequence
  Description of Artificial Sequence: Synthetic oligonucleotide
  Antisense strand to SEQ ID NO: 2067632
accucccaagauuuagcca

SEQ ID NO: 2067634 - RNA, 19 nt, Artificial Sequence
  Description of Artificial Sequence: Synthetic oligonucleotide
  Sense strand starting at position 801 of SEQ ID NO: 1881734
cccacaauguuauugugaa

SEQ ID NO: 2067635 - RNA, 19 nt, Artificial Sequence
  Description of Artificial Sequence: Synthetic oligonucleotide
  Antisense strand to SEQ ID NO: 2067634
uucacaauaacauuguggg

SEQ ID NO: 2067636 - RNA, 19 nt, Artificial Sequence
  Description of Artificial Sequence: Synthetic oligonucleotide
  Sense strand starting at position 869 of SEQ ID NO: 1881734
acuauugggcuuugaauga

SEQ ID NO: 2067637 - RNA, 19 nt, Artificial Sequence
  Description of Artificial Sequence: Synthetic oligonucleotide
  Antisense strand to SEQ ID NO: 2067636
ucauucaaagcccaauagu

SEQ ID NO: 2067638 - RNA, 19 nt, Artificial Sequence
  Description of Artificial Sequence: Synthetic oligonucleotide
  Sense strand starting at position 922 of SEQ ID NO: 1881734
gggaguaggagguguuaag

SEQ ID NO: 2067639 - RNA, 19 nt, Artificial Sequence
  Description of Artificial Sequence: Synthetic oligonucleotide
  Antisense strand to SEQ ID NO: 2067638
cuuaacaccuccuacuccc

SEQ ID NO: 2067640 - RNA, 19 nt, Artificial Sequence
  Description of Artificial Sequence: Synthetic oligonucleotide
  Sense strand starting at position 931 of SEQ ID NO: 1881734
agguguuaaguuuaguuaa

SEQ ID NO: 2067641 - RNA, 19 nt, Artificial Sequence
  Description of Artificial Sequence: Synthetic oligonucleotide
  Antisense strand to SEQ ID NO: 2067640
uuaacuaaacuuaacaccu

SEQ ID NO: 2067642 - RNA, 19 nt, Artificial Sequence
  Description of Artificial Sequence: Synthetic oligonucleotide
  Sense strand starting at position 949 of SEQ ID NO: 1881734
agauuauagagguaagcgu

SEQ ID NO: 2067643 - RNA, 19 nt, Artificial Sequence
  Description of Artificial Sequence: Synthetic oligonucleotide
  Antisense strand to SEQ ID NO: 2067642
acgcuuaccucuauaaucu

SEQ ID NO: 2067644 - RNA, 19 nt, Artificial Sequence
  Description of Artificial Sequence: Synthetic oligonucleotide
  Sense strand starting at position 1070 of SEQ ID NO: 1881734
ccuauagaacaaugcagau

SEQ ID NO: 2067645 - RNA, 19 nt, Artificial Sequence
  Description of Artificial Sequence: Synthetic oligonucleotide
  Antisense strand to SEQ ID NO: 2067644
aucugcauuguucuauagg

SEQ ID NO: 2067646 - RNA, 19 nt, Artificial Sequence
  Description of Artificial Sequence: Synthetic oligonucleotide
  Sense strand starting at position 1125 of SEQ ID NO: 1881734
agauuauaacgauagugca

SEQ ID NO: 2067647 - RNA, 19 nt, Artificial Sequence
  Description of Artificial Sequence: Synthetic oligonucleotide
  Antisense strand to SEQ ID NO: 2067646
ugcacuaucguuauaaucu

SEQ ID NO: 2067648 - RNA, 19 nt, Artificial Sequence
  Description of Artificial Sequence: Synthetic oligonucleotide
  Sense strand starting at position 1173 of SEQ ID NO: 1881734
aguguauauuggagggaag

SEQ ID NO: 2067649 - RNA, 19 nt, Artificial Sequence
  Description of Artificial Sequence: Synthetic oligonucleotide
  Antisense strand to SEQ ID NO: 2067648
cuucccuccaauauacacu

SEQ ID NO: 2067650 - RNA, 19 nt, Artificial Sequence
  Description of Artificial Sequence: Synthetic oligonucleotide
  Sense strand starting at position 1338 of SEQ ID NO: 1881734
cuaaacaucuauguuugua

SEQ ID NO: 2067651 - RNA, 19 nt, Artificial Sequence
  Description of Artificial Sequence: Synthetic oligonucleotide
  Antisense strand to SEQ ID NO: 2067650
uacaaacauagauguuuag

SEQ ID NO: 2067652 - RNA, 19 nt, Artificial Sequence
  Description of Artificial Sequence: Synthetic oligonucleotide
  Sense strand starting at position 1766 of SEQ ID NO: 1881734
ccauauuuauaaugggaca

SEQ ID NO: 2067653 - RNA, 19 nt, Artificial Sequence
  Description of Artificial Sequence: Synthetic oligonucleotide
  Antisense strand to SEQ ID NO: 2067652
ugucccauuauaaauaugg

SEQ ID NO: 2067654 - RNA, 19 nt, Artificial Sequence
  Description of Artificial Sequence: Synthetic oligonucleotide
  Sense strand starting at position 2016 of SEQ ID NO: 1881734
ucacuacagcgauaucauc

SEQ ID NO: 2067655 - RNA, 19 nt, Artificial Sequence
  Description of Artificial Sequence: Synthetic oligonucleotide
  Antisense strand to SEQ ID NO: 2067654
gaugauaucgcuguaguga

SEQ ID NO: 2067656 - RNA, 19 nt, Artificial Sequence
  Description of Artificial Sequence: Synthetic oligonucleotide
  Sense strand starting at position 2023 of SEQ ID NO: 1881734
agcgauaucauccucgugu

SEQ ID NO: 2067657 - RNA, 19 nt, Artificial Sequence
  Description of Artificial Sequence: Synthetic oligonucleotide
  Antisense strand to SEQ ID NO: 2067656
acacgaggaugauaucgcu

SEQ ID NO: 2067658 - RNA, 19 nt, Artificial Sequence
  Description of Artificial Sequence: Synthetic oligonucleotide
  Sense strand starting at position 2100 of SEQ ID NO: 1881734
agggauucggguuauucca

SEQ ID NO: 2067659 - RNA, 19 nt, Artificial Sequence
  Description of Artificial Sequence: Synthetic oligonucleotide
  Antisense strand to SEQ ID NO: 2067658
uggaauaacccgaaucccu

SEQ ID NO: 2067660 - RNA, 19 nt, Artificial Sequence
  Description of Artificial Sequence: Synthetic oligonucleotide
  Sense strand starting at position 2102 of SEQ ID NO: 1881734
ggauucggguuauuccaaa

SEQ ID NO: 2067661 - RNA, 19 nt, Artificial Sequence
  Description of Artificial Sequence: Synthetic oligonucleotide
  Antisense strand to SEQ ID NO: 2067660
uuuggaauaacccgaaucc

SEQ ID NO: 2067662 - RNA, 19 nt, Artificial Sequence
  Description of Artificial Sequence: Synthetic oligonucleotide
  Sense strand starting at position 2295 of SEQ ID NO: 1881734
ugaggcuucucuccuaaga

SEQ ID NO: 2067663 - RNA, 19 nt, Artificial Sequence
  Description of Artificial Sequence: Synthetic oligonucleotide
  Antisense strand to SEQ ID NO: 2067662
ucuuaggagagaagccuca

SEQ ID NO: 2067664 - RNA, 19 nt, Artificial Sequence
  Description of Artificial Sequence: Synthetic oligonucleotide
  Sense strand starting at position 2349 of SEQ ID NO: 1881734
auuccaagguagcuuaaau

SEQ ID NO: 2067665 - RNA, 19 nt, Artificial Sequence
  Description of Artificial Sequence: Synthetic oligonucleotide
  Antisense strand to SEQ ID NO: 2067664
auuuaagcuaccuuggaau

SEQ ID NO: 2067666 - RNA, 19 nt, Artificial Sequence
  Description of Artificial Sequence: Synthetic oligonucleotide
  Sense strand starting at position 2365 of SEQ ID NO: 1881734
aauuacuguccuugaggga

SEQ ID NO: 2067667 - RNA, 19 nt, Artificial Sequence
  Description of Artificial Sequence: Synthetic oligonucleotide
  Antisense strand to SEQ ID NO: 2067666
ucccucaaggacaguaauu

SEQ ID NO: 2067668 - RNA, 19 nt, Artificial Sequence
  Description of Artificial Sequence: Synthetic oligonucleotide
  Sense strand starting at position 2699 of SEQ ID NO: 1881734
ccaaguguucuauauguua

SEQ ID NO: 2067669 - RNA, 19 nt, Artificial Sequence
  Description of Artificial Sequence: Synthetic oligonucleotide
  Antisense strand to SEQ ID NO: 2067668
uaacauauagaacacuugg

SEQ ID NO: 2067670 - RNA, 19 nt, Artificial Sequence
  Description of Artificial Sequence: Synthetic oligonucleotide
  Sense strand starting at position 2760 of SEQ ID NO: 1881734
gguauucaugugggaucac

SEQ ID NO: 2067671 - RNA, 19 nt, Artificial Sequence
  Description of Artificial Sequence: Synthetic oligonucleotide
  Antisense strand to SEQ ID NO: 2067670
gugaucccacaugaauacc

SEQ ID NO: 2067672 - RNA, 19 nt, Artificial Sequence
  Description of Artificial Sequence: Synthetic oligonucleotide
  Sense strand starting at position 3271 of SEQ ID NO: 1881734
agccuaagauguuuauaaa

SEQ ID NO: 2067673 - RNA, 19 nt, Artificial Sequence
  Description of Artificial Sequence: Synthetic oligonucleotide
  Antisense strand to SEQ ID NO: 2067672
uuuauaaacaucuuaggcu

SEQ ID NO: 2067674 - RNA, 19 nt, Artificial Sequence
  Description of Artificial Sequence: Synthetic oligonucleotide
  Sense strand starting at position 3272 of SEQ ID NO: 1881734
gccuaagauguuuauaaag

SEQ ID NO: 2067675 - RNA, 19 nt, Artificial Sequence
  Description of Artificial Sequence: Synthetic oligonucleotide
  Antisense strand to SEQ ID NO: 2067674
cuuuauaaacaucuuaggc

SEQ ID NO: 2067676 - RNA, 19 nt, Artificial Sequence
  Description of Artificial Sequence: Synthetic oligonucleotide
  Sense strand starting at position 3344 of SEQ ID NO: 1881734
uggugaucccauggguaua

SEQ ID NO: 2067677 - RNA, 19 nt, Artificial Sequence
  Description of Artificial Sequence: Synthetic oligonucleotide
  Antisense strand to SEQ ID NO: 2067676
uauacccaugggaucacca

SEQ ID NO: 2067678 - RNA, 19 nt, Artificial Sequence
  Description of Artificial Sequence: Synthetic oligonucleotide
  Sense strand starting at position 3558 of SEQ ID NO: 1881734
ggaauaagauggcuaauuc

SEQ ID NO: 2067679 - RNA, 19 nt, Artificial Sequence
  Description of Artificial Sequence: Synthetic oligonucleotide
  Antisense strand to SEQ ID NO: 2067678
gaauuagccaucuuauucc

SEQ ID NO: 2067680 - RNA, 19 nt, Artificial Sequence
  Description of Artificial Sequence: Synthetic oligonucleotide
  Sense strand starting at position 3567 of SEQ ID NO: 1881734
uggcuaauuccagaguuau

SEQ ID NO: 2067681 - RNA, 19 nt, Artificial Sequence
  Description of Artificial Sequence: Synthetic oligonucleotide
  Antisense strand to SEQ ID NO: 2067680
auaacucuggaauuagcca

SEQ ID NO: 2067682 - RNA, 19 nt, Artificial Sequence
  Description of Artificial Sequence: Synthetic oligonucleotide
  Sense strand starting at position 3595 of SEQ ID NO: 1881734
uagauauguuuggcacaua

SEQ ID NO: 2067683 - RNA, 19 nt, Artificial Sequence
  Description of Artificial Sequence: Synthetic oligonucleotide
  Antisense strand to SEQ ID NO: 2067682
uaugugccaaacauaucua

SEQ ID NO: 2067684 - RNA, 19 nt, Artificial Sequence
  Description of Artificial Sequence: Synthetic oligonucleotide
  Sense strand starting at position 3598 of SEQ ID NO: 1881734
auauguuuggcacauaguu

SEQ ID NO: 2067685 - RNA, 19 nt, Artificial Sequence
  Description of Artificial Sequence: Synthetic oligonucleotide
  Antisense strand to SEQ ID NO: 2067684
aacuaugugccaaacauau

SEQ ID NO: 2067686 - RNA, 19 nt, Artificial Sequence
  Description of Artificial Sequence: Synthetic oligonucleotide
  Sense strand starting at position 3684 of SEQ ID NO: 1881734
aaugguaaugcacauugau

SEQ ID NO: 2067687 - RNA, 19 nt, Artificial Sequence
  Description of Artificial Sequence: Synthetic oligonucleotide
  Antisense strand to SEQ ID NO: 2067686
aucaaugugcauuaccauu

SEQ ID NO: 2067688 - RNA, 19 nt, Artificial Sequence
  Description of Artificial Sequence: Synthetic oligonucleotide
  Sense strand starting at position 3687 of SEQ ID NO: 1881734
gguaaugcacauugauaaa

SEQ ID NO: 2067689 - RNA, 19 nt, Artificial Sequence
  Description of Artificial Sequence: Synthetic oligonucleotide
  Antisense strand to SEQ ID NO: 2067688
uuuaucaaugugcauuacc

SEQ ID NO: 2067690 - RNA, 19 nt, Artificial Sequence
  Description of Artificial Sequence: Synthetic oligonucleotide
  Sense strand starting at position 45 of SEQ ID NO: 1881735
agagcauauuccgugagau

SEQ ID NO: 2067691 - RNA, 19 nt, Artificial Sequence
  Description of Artificial Sequence: Synthetic oligonucleotide
  Antisense strand to SEQ ID NO: 2067690
aucucacggaauaugcucu

SEQ ID NO: 2067692 - RNA, 19 nt, Artificial Sequence
  Description of Artificial Sequence: Synthetic oligonucleotide
  Sense strand starting at position 46 of SEQ ID NO: 1881735
gagcauauuccgugagauu

SEQ ID NO: 2067693 - RNA, 19 nt, Artificial Sequence
  Description of Artificial Sequence: Synthetic oligonucleotide
  Antisense strand to SEQ ID NO: 2067692
aaucucacggaauaugcuc

SEQ ID NO: 2067694 - RNA, 19 nt, Artificial Sequence
  Description of Artificial Sequence: Synthetic oligonucleotide
  Sense strand starting at position 47 of SEQ ID NO: 1881735
agcauauuccgugagauuc

SEQ ID NO: 2067695 - RNA, 19 nt, Artificial Sequence
  Description of Artificial Sequence: Synthetic oligonucleotide
  Antisense strand to SEQ ID NO: 2067694
gaaucucacggaauaugcu

SEQ ID NO: 2067696 - RNA, 19 nt, Artificial Sequence
  Description of Artificial Sequence: Synthetic oligonucleotide
  Sense strand starting at position 124 of SEQ ID NO: 1881735
uuuauuaaccaugguugga

SEQ ID NO: 2067697 - RNA, 19 nt, Artificial Sequence
  Description of Artificial Sequence: Synthetic oligonucleotide
  Antisense strand to SEQ ID NO: 2067696
uccaaccaugguuaauaaa

SEQ ID NO: 2067698 - RNA, 19 nt, Artificial Sequence
  Description of Artificial Sequence: Synthetic oligonucleotide
  Sense strand starting at position 138 of SEQ ID NO: 1881735
uuggauggacagugauaug

SEQ ID NO: 2067699 - RNA, 19 nt, Artificial Sequence
  Description of Artificial Sequence: Synthetic oligonucleotide
  Antisense strand to SEQ ID NO: 2067698
cauaucacuguccauccaa

SEQ ID NO: 2067700 - RNA, 19 nt, Artificial Sequence
  Description of Artificial Sequence: Synthetic oligonucleotide
  Sense strand starting at position 141 of SEQ ID NO: 1881735
gauggacagugauaugaaa

SEQ ID NO: 2067701 - RNA, 19 nt, Artificial Sequence
  Description of Artificial Sequence: Synthetic oligonucleotide
  Antisense strand to SEQ ID NO: 2067700
uuucauaucacuguccauc

SEQ ID NO: 2067702 - RNA, 19 nt, Artificial Sequence
  Description of Artificial Sequence: Synthetic oligonucleotide
  Sense strand starting at position 216 of SEQ ID NO: 1881735
acaguuacaugaguguauu

SEQ ID NO: 2067703 - RNA, 19 nt, Artificial Sequence
  Description of Artificial Sequence: Synthetic oligonucleotide
  Antisense strand to SEQ ID NO: 2067702
aauacacucauguaacugu

SEQ ID NO: 2067704 - RNA, 19 nt, Artificial Sequence
  Description of Artificial Sequence: Synthetic oligonucleotide
  Sense strand starting at position 217 of SEQ ID NO: 1881735
caguuacaugaguguauua

SEQ ID NO: 2067705 - RNA, 19 nt, Artificial Sequence
  Description of Artificial Sequence: Synthetic oligonucleotide
  Antisense strand to SEQ ID NO: 2067704
uaauacacucauguaacug

SEQ ID NO: 2067706 - RNA, 19 nt, Artificial Sequence
  Description of Artificial Sequence: Synthetic oligonucleotide
  Sense strand starting at position 219 of SEQ ID NO: 1881735
guuacaugaguguauuaaa

SEQ ID NO: 2067707 - RNA, 19 nt, Artificial Sequence
  Description of Artificial Sequence: Synthetic oligonucleotide
  Antisense strand to SEQ ID NO: 2067706
uuuaauacacucauguaac

SEQ ID NO: 2067708 - RNA, 19 nt, Artificial Sequence
  Description of Artificial Sequence: Synthetic oligonucleotide
  Sense strand starting at position 357 of SEQ ID NO: 1881735
augaacucaguauguuuaa

SEQ ID NO: 2067709 - RNA, 19 nt, Artificial Sequence
  Description of Artificial Sequence: Synthetic oligonucleotide
  Antisense strand to SEQ ID NO: 2067708
uuaaacauacugaguucau

SEQ ID NO: 2067710 - RNA, 19 nt, Artificial Sequence
  Description of Artificial Sequence: Synthetic oligonucleotide
  Sense strand starting at position 608 of SEQ ID NO: 1881735
ucagaagcaguccauauaa

SEQ ID NO: 2067711 - RNA, 19 nt, Artificial Sequence
  Description of Artificial Sequence: Synthetic oligonucleotide
  Antisense strand to SEQ ID NO: 2067710
uuauauggacugcuucuga

SEQ ID NO: 2067712 - RNA, 19 nt, Artificial Sequence
  Description of Artificial Sequence: Synthetic oligonucleotide
  Sense strand starting at position 637 of SEQ ID NO: 1881735
agagcuagccggcgauauu

SEQ ID NO: 2067713 - RNA, 19 nt, Artificial Sequence
  Description of Artificial Sequence: Synthetic oligonucleotide
  Antisense strand to SEQ ID NO: 2067712
aauaucgccggcuagcucu

SEQ ID NO: 2067714 - RNA, 19 nt, Artificial Sequence
  Description of Artificial Sequence: Synthetic oligonucleotide
  Sense strand starting at position 638 of SEQ ID NO: 1881735
gagcuagccggcgauauua

SEQ ID NO: 2067715 - RNA, 19 nt, Artificial Sequence
  Description of Artificial Sequence: Synthetic oligonucleotide
  Antisense strand to SEQ ID NO: 2067714
uaauaucgccggcuagcuc

SEQ ID NO: 2067716 - RNA, 19 nt, Artificial Sequence
  Description of Artificial Sequence: Synthetic oligonucleotide
  Sense strand starting at position 824 of SEQ ID NO: 1881735
ggcacucucucgcuaggaa

SEQ ID NO: 2067717 - RNA, 19 nt, Artificial Sequence
  Description of Artificial Sequence: Synthetic oligonucleotide
  Antisense strand to SEQ ID NO: 2067716
uuccuagcgagagagugcc

SEQ ID NO: 2067718 - RNA, 19 nt, Artificial Sequence
  Description of Artificial Sequence: Synthetic oligonucleotide
  Sense strand starting at position 858 of SEQ ID NO: 1881735
uguguuuggagauaguaac

SEQ ID NO: 2067719 - RNA, 19 nt, Artificial Sequence
  Description of Artificial Sequence: Synthetic oligonucleotide
  Antisense strand to SEQ ID NO: 2067718
guuacuaucuccaaacaca

SEQ ID NO: 2067720 - RNA, 19 nt, Artificial Sequence
  Description of Artificial Sequence: Synthetic oligonucleotide
  Sense strand starting at position 864 of SEQ ID NO: 1881735
uggagauaguaaccuuagu

SEQ ID NO: 2067721 - RNA, 19 nt, Artificial Sequence
  Description of Artificial Sequence: Synthetic oligonucleotide
  Antisense strand to SEQ ID NO: 2067720
acuaagguuacuaucucca

SEQ ID NO: 2067722 - RNA, 19 nt, Artificial Sequence
  Description of Artificial Sequence: Synthetic oligonucleotide
  Sense strand starting at position 869 of SEQ ID NO: 1881735
auaguaaccuuagucaaau

SEQ ID NO: 2067723 - RNA, 19 nt, Artificial Sequence
  Description of Artificial Sequence: Synthetic oligonucleotide
  Antisense strand to SEQ ID NO: 2067722
auuugacuaagguuacuau

SEQ ID NO: 2067724 - RNA, 19 nt, Artificial Sequence
  Description of Artificial Sequence: Synthetic oligonucleotide
  Sense strand starting at position 882 of SEQ ID NO: 1881735
ucaaaugaaucuuccgaag

SEQ ID NO: 2067725 - RNA, 19 nt, Artificial Sequence
  Description of Artificial Sequence: Synthetic oligonucleotide
  Antisense strand to SEQ ID NO: 2067724
cuucggaagauucauuuga

SEQ ID NO: 2067726 - RNA, 19 nt, Artificial Sequence
  Description of Artificial Sequence: Synthetic oligonucleotide
  Sense strand starting at position 884 of SEQ ID NO: 1881735
aaaugaaucuuccgaagag

SEQ ID NO: 2067727 - RNA, 19 nt, Artificial Sequence
  Description of Artificial Sequence: Synthetic oligonucleotide
  Antisense strand to SEQ ID NO: 2067726
cucuucggaagauucauuu

SEQ ID NO: 2067728 - RNA, 19 nt, Artificial Sequence
  Description of Artificial Sequence: Synthetic oligonucleotide
  Sense strand starting at position 885 of SEQ ID NO: 1881735
aaugaaucuuccgaagagu

SEQ ID NO: 2067729 - RNA, 19 nt, Artificial Sequence
  Description of Artificial Sequence: Synthetic oligonucleotide
  Antisense strand to SEQ ID NO: 2067728
acucuucggaagauucauu

SEQ ID NO: 2067730 - RNA, 19 nt, Artificial Sequence
  Description of Artificial Sequence: Synthetic oligonucleotide
  Sense strand starting at position 1279 of SEQ ID NO: 1881735
guguuuaccuucucuggaa

SEQ ID NO: 2067731 - RNA, 19 nt, Artificial Sequence
  Description of Artificial Sequence: Synthetic oligonucleotide
  Antisense strand to SEQ ID NO: 2067730
uuccagagaagguaaacac

SEQ ID NO: 2067732 - RNA, 19 nt, Artificial Sequence
  Description of Artificial Sequence: Synthetic oligonucleotide
  Sense strand starting at position 1281 of SEQ ID NO: 1881735
guuuaccuucucuggaaga

SEQ ID NO: 2067733 - RNA, 19 nt, Artificial Sequence
  Description of Artificial Sequence: Synthetic oligonucleotide
  Antisense strand to SEQ ID NO: 2067732
ucuuccagagaagguaaac

SEQ ID NO: 2067734 - RNA, 19 nt, Artificial Sequence
  Description of Artificial Sequence: Synthetic oligonucleotide
  Sense strand starting at position 1282 of SEQ ID NO: 1881735
uuuaccuucucuggaagau

SEQ ID NO: 2067735 - RNA, 19 nt, Artificial Sequence
  Description of Artificial Sequence: Synthetic oligonucleotide
  Antisense strand to SEQ ID NO: 2067734
aucuuccagagaagguaaa

SEQ ID NO: 2067736 - RNA, 19 nt, Artificial Sequence
  Description of Artificial Sequence: Synthetic oligonucleotide
  Sense strand starting at position 1358 of SEQ ID NO: 1881735
gucauaaggaguuaaguac

SEQ ID NO: 2067737 - RNA, 19 nt, Artificial Sequence
  Description of Artificial Sequence: Synthetic oligonucleotide
  Antisense strand to SEQ ID NO: 2067736
guacuuaacuccuuaugac

SEQ ID NO: 2067738 - RNA, 19 nt, Artificial Sequence
  Description of Artificial Sequence: Synthetic oligonucleotide
  Sense strand starting at position 1593 of SEQ ID NO: 1881735
ggcuuucccuguuccaaua

SEQ ID NO: 2067739 - RNA, 19 nt, Artificial Sequence
  Description of Artificial Sequence: Synthetic oligonucleotide
  Antisense strand to SEQ ID NO: 2067738
uauuggaacagggaaagcc

SEQ ID NO: 2067740 - RNA, 19 nt, Artificial Sequence
  Description of Artificial Sequence: Synthetic oligonucleotide
  Sense strand starting at position 1637 of SEQ ID NO: 1881735
cuuugugucucuuccuuau

SEQ ID NO: 2067741 - RNA, 19 nt, Artificial Sequence
  Description of Artificial Sequence: Synthetic oligonucleotide
  Antisense strand to SEQ ID NO: 2067740
auaaggaagagacacaaag

SEQ ID NO: 2067742 - RNA, 19 nt, Artificial Sequence
  Description of Artificial Sequence: Synthetic oligonucleotide
  Sense strand starting at position 1666 of SEQ ID NO: 1881735
agcucauagucaucugaug

SEQ ID NO: 2067743 - RNA, 19 nt, Artificial Sequence
  Description of Artificial Sequence: Synthetic oligonucleotide
  Antisense strand to SEQ ID NO: 2067742
caucagaugacuaugagcu

SEQ ID NO: 2067744 - RNA, 19 nt, Artificial Sequence
  Description of Artificial Sequence: Synthetic oligonucleotide
  Sense strand starting at position 1677 of SEQ ID NO: 1881735
aucugaugucggcagagau

SEQ ID NO: 2067745 - RNA, 19 nt, Artificial Sequence
  Description of Artificial Sequence: Synthetic oligonucleotide
  Antisense strand to SEQ ID NO: 2067744
aucucugccgacaucagau

SEQ ID NO: 2067746 - RNA, 19 nt, Artificial Sequence
  Description of Artificial Sequence: Synthetic oligonucleotide
  Sense strand starting at position 1687 of SEQ ID NO: 1881735
ggcagagauuugcugcuca

SEQ ID NO: 2067747 - RNA, 19 nt, Artificial Sequence
  Description of Artificial Sequence: Synthetic oligonucleotide
  Antisense strand to SEQ ID NO: 2067746
ugagcagcaaaucucugcc

SEQ ID NO: 2067748 - RNA, 19 nt, Artificial Sequence
  Description of Artificial Sequence: Synthetic oligonucleotide
  Sense strand starting at position 1691 of SEQ ID NO: 1881735
gagauuugcugcucagcuu

SEQ ID NO: 2067749 - RNA, 19 nt, Artificial Sequence
  Description of Artificial Sequence: Synthetic oligonucleotide
  Antisense strand to SEQ ID NO: 2067748
aagcugagcagcaaaucuc

SEQ ID NO: 2067750 - RNA, 19 nt, Artificial Sequence
  Description of Artificial Sequence: Synthetic oligonucleotide
  Sense strand starting at position 1703 of SEQ ID NO: 1881735
ucagcuuuccgcuacuguu

SEQ ID NO: 2067751 - RNA, 19 nt, Artificial Sequence
  Description of Artificial Sequence: Synthetic oligonucleotide
  Antisense strand to SEQ ID NO: 2067750
aacaguagcggaaagcuga

SEQ ID NO: 2067752 - RNA, 19 nt, Artificial Sequence
  Description of Artificial Sequence: Synthetic oligonucleotide
  Sense strand starting at position 2192 of SEQ ID NO: 1881735
agggugaugccgugcagaa

SEQ ID NO: 2067753 - RNA, 19 nt, Artificial Sequence
  Description of Artificial Sequence: Synthetic oligonucleotide
  Antisense strand to SEQ ID NO: 2067752
uucugcacggcaucacccu

SEQ ID NO: 2067754 - RNA, 19 nt, Artificial Sequence
  Description of Artificial Sequence: Synthetic oligonucleotide
  Sense strand starting at position 2205 of SEQ ID NO: 1881735
gcagaaagcucugcuccaa

SEQ ID NO: 2067755 - RNA, 19 nt, Artificial Sequence
  Description of Artificial Sequence: Synthetic oligonucleotide
  Antisense strand to SEQ ID NO: 2067754
uuggagcagagcuuucugc

SEQ ID NO: 2067756 - RNA, 19 nt, Artificial Sequence
  Description of Artificial Sequence: Synthetic oligonucleotide
  Sense strand starting at position 2946 of SEQ ID NO: 1881735
ggaggaugagcuugucuuc

SEQ ID NO: 2067757 - RNA, 19 nt, Artificial Sequence
  Description of Artificial Sequence: Synthetic oligonucleotide
  Antisense strand to SEQ ID NO: 2067756
gaagacaagcucauccucc

SEQ ID NO: 2067758 - RNA, 19 nt, Artificial Sequence
  Description of Artificial Sequence: Synthetic oligonucleotide
  Sense strand starting at position 2956 of SEQ ID NO: 1881735
cuugucuucgggcgagagu

SEQ ID NO: 2067759 - RNA, 19 nt, Artificial Sequence
  Description of Artificial Sequence: Synthetic oligonucleotide
  Antisense strand to SEQ ID NO: 2067758
acucucgcccgaagacaag

SEQ ID NO: 2067760 - RNA, 19 nt, Artificial Sequence
  Description of Artificial Sequence: Synthetic oligonucleotide
  Sense strand starting at position 3112 of SEQ ID NO: 1881735
cggcauaucugagaacaag

SEQ ID NO: 2067761 - RNA, 19 nt, Artificial Sequence
  Description of Artificial Sequence: Synthetic oligonucleotide
  Antisense strand to SEQ ID NO: 2067760
cuuguucucagauaugccg

SEQ ID NO: 2067762 - RNA, 19 nt, Artificial Sequence
  Description of Artificial Sequence: Synthetic oligonucleotide
  Sense strand starting at position 3199 of SEQ ID NO: 1881735
cucuuccuugcgggugaua

SEQ ID NO: 2067763 - RNA, 19 nt, Artificial Sequence
  Description of Artificial Sequence: Synthetic oligonucleotide
  Antisense strand to SEQ ID NO: 2067762
uaucacccgcaaggaagag

SEQ ID NO: 2067764 - RNA, 19 nt, Artificial Sequence
  Description of Artificial Sequence: Synthetic oligonucleotide
  Sense strand starting at position 3745 of SEQ ID NO: 1881735
gcaggugaucucugggaau

SEQ ID NO: 2067765 - RNA, 19 nt, Artificial Sequence
  Description of Artificial Sequence: Synthetic oligonucleotide
  Antisense strand to SEQ ID NO: 2067764
auucccagagaucaccugc

SEQ ID NO: 2067766 - RNA, 19 nt, Artificial Sequence
  Description of Artificial Sequence: Synthetic oligonucleotide
  Sense strand starting at position 3747 of SEQ ID NO: 1881735
aggugaucucugggaauga

SEQ ID NO: 2067767 - RNA, 19 nt, Artificial Sequence
  Description of Artificial Sequence: Synthetic oligonucleotide
  Antisense strand to SEQ ID NO: 2067766
ucauucccagagaucaccu

SEQ ID NO: 2067768 - RNA, 19 nt, Artificial Sequence
  Description of Artificial Sequence: Synthetic oligonucleotide
  Sense strand starting at position 3748 of SEQ ID NO: 1881735
ggugaucucugggaaugac

SEQ ID NO: 2067769 - RNA, 19 nt, Artificial Sequence
  Description of Artificial Sequence: Synthetic oligonucleotide
  Antisense strand to SEQ ID NO: 2067768
gucauucccagagaucacc

SEQ ID NO: 2067770 - RNA, 19 nt, Artificial Sequence
  Description of Artificial Sequence: Synthetic oligonucleotide
  Sense strand starting at position 55 of SEQ ID NO: 1881736
ugcaguuauuaugugaaga

SEQ ID NO: 2067771 - RNA, 19 nt, Artificial Sequence
  Description of Artificial Sequence: Synthetic oligonucleotide
  Antisense strand to SEQ ID NO: 2067770
ucuucacauaauaacugca

SEQ ID NO: 2067772 - RNA, 19 nt, Artificial Sequence
  Description of Artificial Sequence: Synthetic oligonucleotide
  Sense strand starting at position 56 of SEQ ID NO: 1881736
gcaguuauuaugugaagag

SEQ ID NO: 2067773 - RNA, 19 nt, Artificial Sequence
  Description of Artificial Sequence: Synthetic oligonucleotide
  Antisense strand to SEQ ID NO: 2067772
cucuucacauaauaacugc

SEQ ID NO: 2067774 - RNA, 19 nt, Artificial Sequence
  Description of Artificial Sequence: Synthetic oligonucleotide
  Sense strand starting at position 326 of SEQ ID NO: 1881736
ccgagucaauccuuagauc

SEQ ID NO: 2067775 - RNA, 19 nt, Artificial Sequence
  Description of Artificial Sequence: Synthetic oligonucleotide
  Antisense strand to SEQ ID NO: 2067774
gaucuaaggauugacucgg

SEQ ID NO: 2067776 - RNA, 19 nt, Artificial Sequence
  Description of Artificial Sequence: Synthetic oligonucleotide
  Sense strand starting at position 327 of SEQ ID NO: 1881736
cgagucaauccuuagauca

SEQ ID NO: 2067777 - RNA, 19 nt, Artificial Sequence
  Description of Artificial Sequence: Synthetic oligonucleotide
  Antisense strand to SEQ ID NO: 2067776
ugaucuaaggauugacucg

SEQ ID NO: 2067778 - RNA, 19 nt, Artificial Sequence
  Description of Artificial Sequence: Synthetic oligonucleotide
  Sense strand starting at position 338 of SEQ ID NO: 1881736
uuagaucaauguuucugua

SEQ ID NO: 2067779 - RNA, 19 nt, Artificial Sequence
  Description of Artificial Sequence: Synthetic oligonucleotide
  Antisense strand to SEQ ID NO: 2067778
uacagaaacauugaucuaa

SEQ ID NO: 2067780 - RNA, 19 nt, Artificial Sequence
  Description of Artificial Sequence: Synthetic oligonucleotide
  Sense strand starting at position 340 of SEQ ID NO: 1881736
agaucaauguuucuguaau

SEQ ID NO: 2067781 - RNA, 19 nt, Artificial Sequence
  Description of Artificial Sequence: Synthetic oligonucleotide
  Antisense strand to SEQ ID NO: 2067780
auuacagaaacauugaucu

SEQ ID NO: 2067782 - RNA, 19 nt, Artificial Sequence
  Description of Artificial Sequence: Synthetic oligonucleotide
  Sense strand starting at position 575 of SEQ ID NO: 1881736
agcugugaucgccuaguuu

SEQ ID NO: 2067783 - RNA, 19 nt, Artificial Sequence
  Description of Artificial Sequence: Synthetic oligonucleotide
  Antisense strand to SEQ ID NO: 2067782
aaacuaggcgaucacagcu

SEQ ID NO: 2067784 - RNA, 19 nt, Artificial Sequence
  Description of Artificial Sequence: Synthetic oligonucleotide
  Sense strand starting at position 647 of SEQ ID NO: 1881736
cuuguuacaugccugaaau

SEQ ID NO: 2067785 - RNA, 19 nt, Artificial Sequence
  Description of Artificial Sequence: Synthetic oligonucleotide
  Antisense strand to SEQ ID NO: 2067784
auuucaggcauguaacaag

SEQ ID NO: 2067786 - RNA, 19 nt, Artificial Sequence
  Description of Artificial Sequence: Synthetic oligonucleotide
  Sense strand starting at position 648 of SEQ ID NO: 1881736
uuguuacaugccugaaaua

SEQ ID NO: 2067787 - RNA, 19 nt, Artificial Sequence
  Description of Artificial Sequence: Synthetic oligonucleotide
  Antisense strand to SEQ ID NO: 2067786
uauuucaggcauguaacaa

SEQ ID NO: 2067788 - RNA, 19 nt, Artificial Sequence
  Description of Artificial Sequence: Synthetic oligonucleotide
  Sense strand starting at position 649 of SEQ ID NO: 1881736
uguuacaugccugaaauaa

SEQ ID NO: 2067789 - RNA, 19 nt, Artificial Sequence
  Description of Artificial Sequence: Synthetic oligonucleotide
  Antisense strand to SEQ ID NO: 2067788
uuauuucaggcauguaaca

SEQ ID NO: 2067790 - RNA, 19 nt, Artificial Sequence
  Description of Artificial Sequence: Synthetic oligonucleotide
  Sense strand starting at position 771 of SEQ ID NO: 1881736
uaugaagaagcguggguaa

SEQ ID NO: 2067791 - RNA, 19 nt, Artificial Sequence
  Description of Artificial Sequence: Synthetic oligonucleotide
  Antisense strand to SEQ ID NO: 2067790
uuacccacgcuucuucaua

SEQ ID NO: 2067792 - RNA, 19 nt, Artificial Sequence
  Description of Artificial Sequence: Synthetic oligonucleotide
  Sense strand starting at position 773 of SEQ ID NO: 1881736
ugaagaagcguggguaaug

SEQ ID NO: 2067793 - RNA, 19 nt, Artificial Sequence
  Description of Artificial Sequence: Synthetic oligonucleotide
  Antisense strand to SEQ ID NO: 2067792
cauuacccacgcuucuuca

SEQ ID NO: 2067794 - RNA, 19 nt, Artificial Sequence
  Description of Artificial Sequence: Synthetic oligonucleotide
  Sense strand starting at position 866 of SEQ ID NO: 1881736
agcaccauguaauuaaagu

SEQ ID NO: 2067795 - RNA, 19 nt, Artificial Sequence
  Description of Artificial Sequence: Synthetic oligonucleotide
  Antisense strand to SEQ ID NO: 2067794
acuuuaauuacauggugcu

SEQ ID NO: 2067796 - RNA, 19 nt, Artificial Sequence
  Description of Artificial Sequence: Synthetic oligonucleotide
  Sense strand starting at position 923 of SEQ ID NO: 1881736
aggagauucuaguuaaccu

SEQ ID NO: 2067797 - RNA, 19 nt, Artificial Sequence
  Description of Artificial Sequence: Synthetic oligonucleotide
  Antisense strand to SEQ ID NO: 2067796
agguuaacuagaaucuccu

SEQ ID NO: 2067798 - RNA, 19 nt, Artificial Sequence
  Description of Artificial Sequence: Synthetic oligonucleotide
  Sense strand starting at position 936 of SEQ ID NO: 1881736
uaaccuagugggcauaaua

SEQ ID NO: 2067799 - RNA, 19 nt, Artificial Sequence
  Description of Artificial Sequence: Synthetic oligonucleotide
  Antisense strand to SEQ ID NO: 2067798
uauuaugcccacuagguua

SEQ ID NO: 2067800 - RNA, 19 nt, Artificial Sequence
  Description of Artificial Sequence: Synthetic oligonucleotide
  Sense strand starting at position 1068 of SEQ ID NO: 1881736
aucuuagugcuagagcaga

SEQ ID NO: 2067801 - RNA, 19 nt, Artificial Sequence
  Description of Artificial Sequence: Synthetic oligonucleotide
  Antisense strand to SEQ ID NO: 2067800
ucugcucuagcacuaagau

SEQ ID NO: 2067802 - RNA, 19 nt, Artificial Sequence
  Description of Artificial Sequence: Synthetic oligonucleotide
  Sense strand starting at position 1079 of SEQ ID NO: 1881736
agagcagagccuugaaaga

SEQ ID NO: 2067803 - RNA, 19 nt, Artificial Sequence
  Description of Artificial Sequence: Synthetic oligonucleotide
  Antisense strand to SEQ ID NO: 2067802
ucuuucaaggcucugcucu

SEQ ID NO: 2067804 - RNA, 19 nt, Artificial Sequence
  Description of Artificial Sequence: Synthetic oligonucleotide
  Sense strand starting at position 1158 of SEQ ID NO: 1881736
cggauaaugcuauagguga

SEQ ID NO: 2067805 - RNA, 19 nt, Artificial Sequence
  Description of Artificial Sequence: Synthetic oligonucleotide
  Antisense strand to SEQ ID NO: 2067804
ucaccuauagcauuauccg

SEQ ID NO: 2067806 - RNA, 19 nt, Artificial Sequence
  Description of Artificial Sequence: Synthetic oligonucleotide
  Sense strand starting at position 1165 of SEQ ID NO: 1881736
ugcuauaggugagcaacau

SEQ ID NO: 2067807 - RNA, 19 nt, Artificial Sequence
  Description of Artificial Sequence: Synthetic oligonucleotide
  Antisense strand to SEQ ID NO: 2067806
auguugcucaccuauagca

SEQ ID NO: 2067808 - RNA, 19 nt, Artificial Sequence
  Description of Artificial Sequence: Synthetic oligonucleotide
  Sense strand starting at position 1166 of SEQ ID NO: 1881736
gcuauaggugagcaacaua

SEQ ID NO: 2067809 - RNA, 19 nt, Artificial Sequence
  Description of Artificial Sequence: Synthetic oligonucleotide
  Antisense strand to SEQ ID NO: 2067808
uauguugcucaccuauagc

SEQ ID NO: 2067810 - RNA, 19 nt, Artificial Sequence
  Description of Artificial Sequence: Synthetic oligonucleotide
  Sense strand starting at position 1410 of SEQ ID NO: 1881736
uguuauuguguccaacuca

SEQ ID NO: 2067811 - RNA, 19 nt, Artificial Sequence
  Description of Artificial Sequence: Synthetic oligonucleotide
  Antisense strand to SEQ ID NO: 2067810
ugaguuggacacaauaaca

SEQ ID NO: 2067812 - RNA, 19 nt, Artificial Sequence
  Description of Artificial Sequence: Synthetic oligonucleotide
  Sense strand starting at position 1497 of SEQ ID NO: 1881736
guguucugguaaucuaaca

SEQ ID NO: 2067813 - RNA, 19 nt, Artificial Sequence
  Description of Artificial Sequence: Synthetic oligonucleotide
  Antisense strand to SEQ ID NO: 2067812
uguuagauuaccagaacac

SEQ ID NO: 2067814 - RNA, 19 nt, Artificial Sequence
  Description of Artificial Sequence: Synthetic oligonucleotide
  Sense strand starting at position 1699 of SEQ ID NO: 1881736
uguauaacaucuuuaagug

SEQ ID NO: 2067815 - RNA, 19 nt, Artificial Sequence
  Description of Artificial Sequence: Synthetic oligonucleotide
  Antisense strand to SEQ ID NO: 2067814
cacuuaaagauguuauaca

SEQ ID NO: 2067816 - RNA, 19 nt, Artificial Sequence
  Description of Artificial Sequence: Synthetic oligonucleotide
  Sense strand starting at position 1786 of SEQ ID NO: 1881736
ucuucuuaccguuaagacu

SEQ ID NO: 2067817 - RNA, 19 nt, Artificial Sequence
  Description of Artificial Sequence: Synthetic oligonucleotide
  Antisense strand to SEQ ID NO: 2067816
agucuuaacgguaagaaga

SEQ ID NO: 2067818 - RNA, 19 nt, Artificial Sequence
  Description of Artificial Sequence: Synthetic oligonucleotide
  Sense strand starting at position 2415 of SEQ ID NO: 1881736
gccggcuuuccugagggaa

SEQ ID NO: 2067819 - RNA, 19 nt, Artificial Sequence
  Description of Artificial Sequence: Synthetic oligonucleotide
  Antisense strand to SEQ ID NO: 2067818
uucccucaggaaagccggc

SEQ ID NO: 2067820 - RNA, 19 nt, Artificial Sequence
  Description of Artificial Sequence: Synthetic oligonucleotide
  Sense strand starting at position 2534 of SEQ ID NO: 1881736
cgaguucuggucucgguca

SEQ ID NO: 2067821 - RNA, 19 nt, Artificial Sequence
  Description of Artificial Sequence: Synthetic oligonucleotide
  Antisense strand to SEQ ID NO: 2067820
ugaccgagaccagaacucg

SEQ ID NO: 2067822 - RNA, 19 nt, Artificial Sequence
  Description of Artificial Sequence: Synthetic oligonucleotide
  Sense strand starting at position 2716 of SEQ ID NO: 1881736
cuuuguugacuucggaaga

SEQ ID NO: 2067823 - RNA, 19 nt, Artificial Sequence
  Description of Artificial Sequence: Synthetic oligonucleotide
  Antisense strand to SEQ ID NO: 2067822
ucuuccgaagucaacaaag

SEQ ID NO: 2067824 - RNA, 19 nt, Artificial Sequence
  Description of Artificial Sequence: Synthetic oligonucleotide
  Sense strand starting at position 2911 of SEQ ID NO: 1881736
uaaagcaagugguuacauu

SEQ ID NO: 2067825 - RNA, 19 nt, Artificial Sequence
  Description of Artificial Sequence: Synthetic oligonucleotide
  Antisense strand to SEQ ID NO: 2067824
aauguaaccacuugcuuua

SEQ ID NO: 2067826 - RNA, 19 nt, Artificial Sequence
  Description of Artificial Sequence: Synthetic oligonucleotide
  Sense strand starting at position 3004 of SEQ ID NO: 1881736
uuuguaaaccuguagccuu

SEQ ID NO: 2067827 - RNA, 19 nt, Artificial Sequence
  Description of Artificial Sequence: Synthetic oligonucleotide
  Antisense strand to SEQ ID NO: 2067826
aaggcuacagguuuacaaa

SEQ ID NO: 2067828 - RNA, 19 nt, Artificial Sequence
  Description of Artificial Sequence: Synthetic oligonucleotide
  Sense strand starting at position 3064 of SEQ ID NO: 1881736
uguugucugccauugccaa

SEQ ID NO: 2067829 - RNA, 19 nt, Artificial Sequence
  Description of Artificial Sequence: Synthetic oligonucleotide
  Antisense strand to SEQ ID NO: 2067828
uuggcaauggcagacaaca

SEQ ID NO: 2067830 - RNA, 19 nt, Artificial Sequence
  Description of Artificial Sequence: Synthetic oligonucleotide
  Sense strand starting at position 3087 of SEQ ID NO: 1881736
gccagaguggagggauauu

SEQ ID NO: 2067831 - RNA, 19 nt, Artificial Sequence
  Description of Artificial Sequence: Synthetic oligonucleotide
  Antisense strand to SEQ ID NO: 2067830
aauaucccuccacucuggc

SEQ ID NO: 2067832 - RNA, 19 nt, Artificial Sequence
  Description of Artificial Sequence: Synthetic oligonucleotide
  Sense strand starting at position 3179 of SEQ ID NO: 1881736
gaaacauuccagugaggca

SEQ ID NO: 2067833 - RNA, 19 nt, Artificial Sequence
  Description of Artificial Sequence: Synthetic oligonucleotide
  Antisense strand to SEQ ID NO: 2067832
ugccucacuggaauguuuc

SEQ ID NO: 2067834 - RNA, 19 nt, Artificial Sequence
  Description of Artificial Sequence: Synthetic oligonucleotide
  Sense strand starting at position 3722 of SEQ ID NO: 1881736
gguauauuguguaugugug

SEQ ID NO: 2067835 - RNA, 19 nt, Artificial Sequence
  Description of Artificial Sequence: Synthetic oligonucleotide
  Antisense strand to SEQ ID NO: 2067834
cacacauacacaauauacc

SEQ ID NO: 2067836 - RNA, 19 nt, Artificial Sequence
  Description of Artificial Sequence: Synthetic oligonucleotide
  Sense strand starting at position 3750 of SEQ ID NO: 1881736
uuagguaggugaucucuua

SEQ ID NO: 2067837 - RNA, 19 nt, Artificial Sequence
  Description of Artificial Sequence: Synthetic oligonucleotide
  Antisense strand to SEQ ID NO: 2067836
uaagagaucaccuaccuaa

SEQ ID NO: 2067838 - RNA, 19 nt, Artificial Sequence
  Description of Artificial Sequence: Synthetic oligonucleotide
  Sense strand starting at position 3783 of SEQ ID NO: 1881736
ucugauuugccuugguaau

SEQ ID NO: 2067839 - RNA, 19 nt, Artificial Sequence
  Description of Artificial Sequence: Synthetic oligonucleotide
  Antisense strand to SEQ ID NO: 2067838
auuaccaaggcaaaucaga

SEQ ID NO: 2067840 - RNA, 19 nt, Artificial Sequence
  Description of Artificial Sequence: Synthetic oligonucleotide
  Sense strand starting at position 3784 of SEQ ID NO: 1881736
cugauuugccuugguaauu

SEQ ID NO: 2067841 - RNA, 19 nt, Artificial Sequence
  Description of Artificial Sequence: Synthetic oligonucleotide
  Antisense strand to SEQ ID NO: 2067840
aauuaccaaggcaaaucag

SEQ ID NO: 2067842 - RNA, 19 nt, Artificial Sequence
  Description of Artificial Sequence: Synthetic oligonucleotide
  Sense strand starting at position 3789 of SEQ ID NO: 1881736
uugccuugguaauuggaau

SEQ ID NO: 2067843 - RNA, 19 nt, Artificial Sequence
  Description of Artificial Sequence: Synthetic oligonucleotide
  Antisense strand to SEQ ID NO: 2067842
auuccaauuaccaaggcaa

SEQ ID NO: 2067844 - RNA, 19 nt, Artificial Sequence
  Description of Artificial Sequence: Synthetic oligonucleotide
  Sense strand starting at position 3820 of SEQ ID NO: 1881736
uagcuauccguuuaauuag

SEQ ID NO: 2067845 - RNA, 19 nt, Artificial Sequence
  Description of Artificial Sequence: Synthetic oligonucleotide
  Antisense strand to SEQ ID NO: 2067844
cuaauuaaacggauagcua

SEQ ID NO: 2067846 - RNA, 19 nt, Artificial Sequence
  Description of Artificial Sequence: Synthetic oligonucleotide
  Sense strand starting at position 3827 of SEQ ID NO: 1881736
ccguuuaauuagcuagaag

SEQ ID NO: 2067847 - RNA, 19 nt, Artificial Sequence
  Description of Artificial Sequence: Synthetic oligonucleotide
  Antisense strand to SEQ ID NO: 2067846
cuucuagcuaauuaaacgg

SEQ ID NO: 2067848 - RNA, 19 nt, Artificial Sequence
  Description of Artificial Sequence: Synthetic oligonucleotide
  Sense strand starting at position 3828 of SEQ ID NO: 1881736
cguuuaauuagcuagaagc

SEQ ID NO: 2067849 - RNA, 19 nt, Artificial Sequence
  Description of Artificial Sequence: Synthetic oligonucleotide
  Antisense strand to SEQ ID NO: 2067848
gcuucuagcuaauuaaacg

SEQ ID NO: 2067850 - RNA, 19 nt, Artificial Sequence
  Description of Artificial Sequence: Synthetic oligonucleotide
  Sense strand starting at position 516 of SEQ ID NO: 1881737
gagggaaauuuccauguuu

SEQ ID NO: 2067851 - RNA, 19 nt, Artificial Sequence
  Description of Artificial Sequence: Synthetic oligonucleotide
  Antisense strand to SEQ ID NO: 2067850
aaacauggaaauuucccuc

SEQ ID NO: 2067852 - RNA, 19 nt, Artificial Sequence
  Description of Artificial Sequence: Synthetic oligonucleotide
  Sense strand starting at position 645 of SEQ ID NO: 1881737
uguaauuugucuuugucua

SEQ ID NO: 2067853 - RNA, 19 nt, Artificial Sequence
  Description of Artificial Sequence: Synthetic oligonucleotide
  Antisense strand to SEQ ID NO: 2067852
uagacaaagacaaauuaca

SEQ ID NO: 2067854 - RNA, 19 nt, Artificial Sequence
  Description of Artificial Sequence: Synthetic oligonucleotide
  Sense strand starting at position 646 of SEQ ID NO: 1881737
guaauuugucuuugucuaa

SEQ ID NO: 2067855 - RNA, 19 nt, Artificial Sequence
  Description of Artificial Sequence: Synthetic oligonucleotide
  Antisense strand to SEQ ID NO: 2067854
uuagacaaagacaaauuac

SEQ ID NO: 2067856 - RNA, 19 nt, Artificial Sequence
  Description of Artificial Sequence: Synthetic oligonucleotide
  Sense strand starting at position 858 of SEQ ID NO: 1881737
uagaauguuguggaaucuu

SEQ ID NO: 2067857 - RNA, 19 nt, Artificial Sequence
  Description of Artificial Sequence: Synthetic oligonucleotide
  Antisense strand to SEQ ID NO: 2067856
aagauuccacaacauucua

SEQ ID NO: 2067858 - RNA, 19 nt, Artificial Sequence
  Description of Artificial Sequence: Synthetic oligonucleotide
  Sense strand starting at position 961 of SEQ ID NO: 1881737
cuucucuaggccugggauu

SEQ ID NO: 2067859 - RNA, 19 nt, Artificial Sequence
  Description of Artificial Sequence: Synthetic oligonucleotide
  Antisense strand to SEQ ID NO: 2067858
aaucccaggccuagagaag

SEQ ID NO: 2067860 - RNA, 19 nt, Artificial Sequence
  Description of Artificial Sequence: Synthetic oligonucleotide
  Sense strand starting at position 972 of SEQ ID NO: 1881737
cugggauucugaucuguaa

SEQ ID NO: 2067861 - RNA, 19 nt, Artificial Sequence
  Description of Artificial Sequence: Synthetic oligonucleotide
  Antisense strand to SEQ ID NO: 2067860
uuacagaucagaaucccag

SEQ ID NO: 2067862 - RNA, 19 nt, Artificial Sequence
  Description of Artificial Sequence: Synthetic oligonucleotide
  Sense strand starting at position 995 of SEQ ID NO: 1881737
gcacuaauaugagucucuu

SEQ ID NO: 2067863 - RNA, 19 nt, Artificial Sequence
  Description of Artificial Sequence: Synthetic oligonucleotide
  Antisense strand to SEQ ID NO: 2067862
aagagacucauauuagugc

SEQ ID NO: 2067864 - RNA, 19 nt, Artificial Sequence
  Description of Artificial Sequence: Synthetic oligonucleotide
  Sense strand starting at position 1261 of SEQ ID NO: 1881737
cuggcacaauucuuauaga

SEQ ID NO: 2067865 - RNA, 19 nt, Artificial Sequence
  Description of Artificial Sequence: Synthetic oligonucleotide
  Antisense strand to SEQ ID NO: 2067864
ucuauaagaauugugccag

SEQ ID NO: 2067866 - RNA, 19 nt, Artificial Sequence
  Description of Artificial Sequence: Synthetic oligonucleotide
  Sense strand starting at position 1369 of SEQ ID NO: 1881737
agagaacagugguuuccuu

SEQ ID NO: 2067867 - RNA, 19 nt, Artificial Sequence
  Description of Artificial Sequence: Synthetic oligonucleotide
  Antisense strand to SEQ ID NO: 2067866
aaggaaaccacuguucucu

SEQ ID NO: 2067868 - RNA, 19 nt, Artificial Sequence
  Description of Artificial Sequence: Synthetic oligonucleotide
  Sense strand starting at position 1555 of SEQ ID NO: 1881737
gccuucuuugugucuugua

SEQ ID NO: 2067869 - RNA, 19 nt, Artificial Sequence
  Description of Artificial Sequence: Synthetic oligonucleotide
  Antisense strand to SEQ ID NO: 2067868
uacaagacacaaagaaggc

SEQ ID NO: 2067870 - RNA, 19 nt, Artificial Sequence
  Description of Artificial Sequence: Synthetic oligonucleotide
  Sense strand starting at position 1618 of SEQ ID NO: 1881737
ccauuucuuccgcgggagu

SEQ ID NO: 2067871 - RNA, 19 nt, Artificial Sequence
  Description of Artificial Sequence: Synthetic oligonucleotide
  Antisense strand to SEQ ID NO: 2067870
acucccgcggaagaaaugg

SEQ ID NO: 2067872 - RNA, 19 nt, Artificial Sequence
  Description of Artificial Sequence: Synthetic oligonucleotide
  Sense strand starting at position 1620 of SEQ ID NO: 1881737
auuucuuccgcgggaguca

SEQ ID NO: 2067873 - RNA, 19 nt, Artificial Sequence
  Description of Artificial Sequence: Synthetic oligonucleotide
  Antisense strand to SEQ ID NO: 2067872
ugacucccgcggaagaaau

SEQ ID NO: 2067874 - RNA, 19 nt, Artificial Sequence
  Description of Artificial Sequence: Synthetic oligonucleotide
  Sense strand starting at position 1635 of SEQ ID NO: 1881737
gucacauuacaucagcauu

SEQ ID NO: 2067875 - RNA, 19 nt, Artificial Sequence
  Description of Artificial Sequence: Synthetic oligonucleotide
  Antisense strand to SEQ ID NO: 2067874
aaugcugauguaaugugac

SEQ ID NO: 2067876 - RNA, 19 nt, Artificial Sequence
  Description of Artificial Sequence: Synthetic oligonucleotide
  Sense strand starting at position 1766 of SEQ ID NO: 1881737
acgcaaacugcugagagau

SEQ ID NO: 2067877 - RNA, 19 nt, Artificial Sequence
  Description of Artificial Sequence: Synthetic oligonucleotide
  Antisense strand to SEQ ID NO: 2067876
aucucucagcaguuugcgu

SEQ ID NO: 2067878 - RNA, 19 nt, Artificial Sequence
  Description of Artificial Sequence: Synthetic oligonucleotide
  Sense strand starting at position 1866 of SEQ ID NO: 1881737
agacucgagcuuuagagua

SEQ ID NO: 2067879 - RNA, 19 nt, Artificial Sequence
  Description of Artificial Sequence: Synthetic oligonucleotide
  Antisense strand to SEQ ID NO: 2067878
uacucuaaagcucgagucu

SEQ ID NO: 2067880 - RNA, 19 nt, Artificial Sequence
  Description of Artificial Sequence: Synthetic oligonucleotide
  Sense strand starting at position 1874 of SEQ ID NO: 1881737
gcuuuagaguaauugggau

SEQ ID NO: 2067881 - RNA, 19 nt, Artificial Sequence
  Description of Artificial Sequence: Synthetic oligonucleotide
  Antisense strand to SEQ ID NO: 2067880
aucccaauuacucuaaagc

SEQ ID NO: 2067882 - RNA, 19 nt, Artificial Sequence
  Description of Artificial Sequence: Synthetic oligonucleotide
  Sense strand starting at position 1880 of SEQ ID NO: 1881737
gaguaauugggauggugaa

SEQ ID NO: 2067883 - RNA, 19 nt, Artificial Sequence
  Description of Artificial Sequence: Synthetic oligonucleotide
  Antisense strand to SEQ ID NO: 2067882
uucaccaucccaauuacuc

SEQ ID NO: 2067884 - RNA, 19 nt, Artificial Sequence
  Description of Artificial Sequence: Synthetic oligonucleotide
  Sense strand starting at position 1881 of SEQ ID NO: 1881737
aguaauugggauggugaaa

SEQ ID NO: 2067885 - RNA, 19 nt, Artificial Sequence
  Description of Artificial Sequence: Synthetic oligonucleotide
  Antisense strand to SEQ ID NO: 2067884
uuucaccaucccaauuacu

SEQ ID NO: 2067886 - RNA, 19 nt, Artificial Sequence
  Description of Artificial Sequence: Synthetic oligonucleotide
  Sense strand starting at position 1909 of SEQ ID NO: 1881737
uccagaaacuucgcccaaa

SEQ ID NO: 2067887 - RNA, 19 nt, Artificial Sequence
  Description of Artificial Sequence: Synthetic oligonucleotide
  Antisense strand to SEQ ID NO: 2067886
uuugggcgaaguuucugga

SEQ ID NO: 2067888 - RNA, 19 nt, Artificial Sequence
  Description of Artificial Sequence: Synthetic oligonucleotide
  Sense strand starting at position 2557 of SEQ ID NO: 1881737
gcauuuagcgggugacucu

SEQ ID NO: 2067889 - RNA, 19 nt, Artificial Sequence
  Description of Artificial Sequence: Synthetic oligonucleotide
  Antisense strand to SEQ ID NO: 2067888
agagucacccgcuaaaugc

SEQ ID NO: 2067890 - RNA, 19 nt, Artificial Sequence
  Description of Artificial Sequence: Synthetic oligonucleotide
  Sense strand starting at position 3222 of SEQ ID NO: 1881737
gccuuaaauuuggaagaga

SEQ ID NO: 2067891 - RNA, 19 nt, Artificial Sequence
  Description of Artificial Sequence: Synthetic oligonucleotide
  Antisense strand to SEQ ID NO: 2067890
ucucuuccaaauuuaaggc

SEQ ID NO: 2067892 - RNA, 19 nt, Artificial Sequence
  Description of Artificial Sequence: Synthetic oligonucleotide
  Sense strand starting at position 3263 of SEQ ID NO: 1881737
ucccguuauccagggaaau

SEQ ID NO: 2067893 - RNA, 19 nt, Artificial Sequence
  Description of Artificial Sequence: Synthetic oligonucleotide
  Antisense strand to SEQ ID NO: 2067892
auuucccuggauaacggga

SEQ ID NO: 2067894 - RNA, 19 nt, Artificial Sequence
  Description of Artificial Sequence: Synthetic oligonucleotide
  Sense strand starting at position 3264 of SEQ ID NO: 1881737
cccguuauccagggaaauc

SEQ ID NO: 2067895 - RNA, 19 nt, Artificial Sequence
  Description of Artificial Sequence: Synthetic oligonucleotide
  Antisense strand to SEQ ID NO: 2067894
gauuucccuggauaacggg

SEQ ID NO: 2067896 - RNA, 19 nt, Artificial Sequence
  Description of Artificial Sequence: Synthetic oligonucleotide
  Sense strand starting at position 3265 of SEQ ID NO: 1881737
ccguuauccagggaaauca

SEQ ID NO: 2067897 - RNA, 19 nt, Artificial Sequence
  Description of Artificial Sequence: Synthetic oligonucleotide
  Antisense strand to SEQ ID NO: 2067896
ugauuucccuggauaacgg

SEQ ID NO: 2067898 - RNA, 19 nt, Artificial Sequence
  Description of Artificial Sequence: Synthetic oligonucleotide
  Sense strand starting at position 3292 of SEQ ID NO: 1881737
acucaugaguucccucgaa

SEQ ID NO: 2067899 - RNA, 19 nt, Artificial Sequence
  Description of Artificial Sequence: Synthetic oligonucleotide
  Antisense strand to SEQ ID NO: 2067898
uucgagggaacucaugagu

SEQ ID NO: 2067900 - RNA, 19 nt, Artificial Sequence
  Description of Artificial Sequence: Synthetic oligonucleotide
  Sense strand starting at position 3296 of SEQ ID NO: 1881737
augaguucccucgaacuug

SEQ ID NO: 2067901 - RNA, 19 nt, Artificial Sequence
  Description of Artificial Sequence: Synthetic oligonucleotide
  Antisense strand to SEQ ID NO: 2067900
caaguucgagggaacucau

SEQ ID NO: 2067902 - RNA, 19 nt, Artificial Sequence
  Description of Artificial Sequence: Synthetic oligonucleotide
  Sense strand starting at position 3439 of SEQ ID NO: 1881737
ccuaaaucgcagggaaaca

SEQ ID NO: 2067903 - RNA, 19 nt, Artificial Sequence
  Description of Artificial Sequence: Synthetic oligonucleotide
  Antisense strand to SEQ ID NO: 2067902
uguuucccugcgauuuagg

SEQ ID NO: 2067904 - RNA, 19 nt, Artificial Sequence
  Description of Artificial Sequence: Synthetic oligonucleotide
  Sense strand starting at position 3492 of SEQ ID NO: 1881737
gguuucugauggucuuaag

SEQ ID NO: 2067905 - RNA, 19 nt, Artificial Sequence
  Description of Artificial Sequence: Synthetic oligonucleotide
  Antisense strand to SEQ ID NO: 2067904
cuuaagaccaucagaaacc

SEQ ID NO: 2067906 - RNA, 19 nt, Artificial Sequence
  Description of Artificial Sequence: Synthetic oligonucleotide
  Sense strand starting at position 3653 of SEQ ID NO: 1881737
ccuuguagcuaacugaaau

SEQ ID NO: 2067907 - RNA, 19 nt, Artificial Sequence
  Description of Artificial Sequence: Synthetic oligonucleotide
  Antisense strand to SEQ ID NO: 2067906
auuucaguuagcuacaagg

SEQ ID NO: 2067908 - RNA, 19 nt, Artificial Sequence
  Description of Artificial Sequence: Synthetic oligonucleotide
  Sense strand starting at position 3731 of SEQ ID NO: 1881737
ccuacaagugugcauggau

SEQ ID NO: 2067909 - RNA, 19 nt, Artificial Sequence
  Description of Artificial Sequence: Synthetic oligonucleotide
  Antisense strand to SEQ ID NO: 2067908
auccaugcacacuuguagg

SEQ ID NO: 2067910 - RNA, 19 nt, Artificial Sequence
  Description of Artificial Sequence: Synthetic oligonucleotide
  Sense strand starting at position 3734 of SEQ ID NO: 1881737
acaagugugcauggauaga

SEQ ID NO: 2067911 - RNA, 19 nt, Artificial Sequence
  Description of Artificial Sequence: Synthetic oligonucleotide
  Antisense strand to SEQ ID NO: 2067910
ucuauccaugcacacuugu

SEQ ID NO: 2067912 - RNA, 19 nt, Artificial Sequence
  Description of Artificial Sequence: Synthetic oligonucleotide
  Sense strand starting at position 3739 of SEQ ID NO: 1881737
ugugcauggauagauguau

SEQ ID NO: 2067913 - RNA, 19 nt, Artificial Sequence
  Description of Artificial Sequence: Synthetic oligonucleotide
  Antisense strand to SEQ ID NO: 2067912
auacaucuauccaugcaca

SEQ ID NO: 2067914 - RNA, 19 nt, Artificial Sequence
  Description of Artificial Sequence: Synthetic oligonucleotide
  Sense strand starting at position 3788 of SEQ ID NO: 1881737
aaggauagcuaggauauuu

SEQ ID NO: 2067915 - RNA, 19 nt, Artificial Sequence
  Description of Artificial Sequence: Synthetic oligonucleotide
  Antisense strand to SEQ ID NO: 2067914
aaauauccuagcuauccuu

SEQ ID NO: 2067916 - RNA, 19 nt, Artificial Sequence
  Description of Artificial Sequence: Synthetic oligonucleotide
  Sense strand starting at position 3809 of SEQ ID NO: 1881737
agucuugugauguauggaa

SEQ ID NO: 2067917 - RNA, 19 nt, Artificial Sequence
  Description of Artificial Sequence: Synthetic oligonucleotide
  Antisense strand to SEQ ID NO: 2067916
uuccauacaucacaagacu

SEQ ID NO: 2067918 - RNA, 19 nt, Artificial Sequence
  Description of Artificial Sequence: Synthetic oligonucleotide
  Sense strand starting at position 3811 of SEQ ID NO: 1881737
ucuugugauguauggaauc

SEQ ID NO: 2067919 - RNA, 19 nt, Artificial Sequence
  Description of Artificial Sequence: Synthetic oligonucleotide
  Antisense strand to SEQ ID NO: 2067918
gauuccauacaucacaaga

SEQ ID NO: 2067920 - RNA, 19 nt, Artificial Sequence
  Description of Artificial Sequence: Synthetic oligonucleotide
  Sense strand starting at position 3880 of SEQ ID NO: 1881737
cgcugaugugggagugacu

SEQ ID NO: 2067921 - RNA, 19 nt, Artificial Sequence
  Description of Artificial Sequence: Synthetic oligonucleotide
  Antisense strand to SEQ ID NO: 2067920
agucacucccacaucagcg

SEQ ID NO: 2067922 - RNA, 19 nt, Artificial Sequence
  Description of Artificial Sequence: Synthetic oligonucleotide
  Sense strand starting at position 3898 of SEQ ID NO: 1881737
ugaaauuagcuuuagcaaa

SEQ ID NO: 2067923 - RNA, 19 nt, Artificial Sequence
  Description of Artificial Sequence: Synthetic oligonucleotide
  Antisense strand to SEQ ID NO: 2067922
uuugcuaaagcuaauuuca

SEQ ID NO: 2067924 - RNA, 19 nt, Artificial Sequence
  Description of Artificial Sequence: Synthetic oligonucleotide
  Sense strand starting at position 3928 of SEQ ID NO: 1881737
cacucuaaagagugagguu

SEQ ID NO: 2067925 - RNA, 19 nt, Artificial Sequence
  Description of Artificial Sequence: Synthetic oligonucleotide
  Antisense strand to SEQ ID NO: 2067924
aaccucacucuuuagagug

SEQ ID NO: 2067926 - RNA, 19 nt, Artificial Sequence
  Description of Artificial Sequence: Synthetic oligonucleotide
  Sense strand starting at position 3964 of SEQ ID NO: 1881737
aaggcuagguguucuggaa

SEQ ID NO: 2067927 - RNA, 19 nt, Artificial Sequence
  Description of Artificial Sequence: Synthetic oligonucleotide
  Antisense strand to SEQ ID NO: 2067926
uuccagaacaccuagccuu

SEQ ID NO: 2067928 - RNA, 19 nt, Artificial Sequence
  Description of Artificial Sequence: Synthetic oligonucleotide
  Sense strand starting at position 3968 of SEQ ID NO: 1881737
cuagguguucuggaagcau

SEQ ID NO: 2067929 - RNA, 19 nt, Artificial Sequence
  Description of Artificial Sequence: Synthetic oligonucleotide
  Antisense strand to SEQ ID NO: 2067928
augcuuccagaacaccuag

SEQ ID NO: 2067930 - RNA, 19 nt, Artificial Sequence
  Description of Artificial Sequence: Synthetic oligonucleotide
  Sense strand starting at position 400 of SEQ ID NO: 1881738
aguauuaaauagguaccaa

SEQ ID NO: 2067931 - RNA, 19 nt, Artificial Sequence
  Description of Artificial Sequence: Synthetic oligonucleotide
  Antisense strand to SEQ ID NO: 2067930
uugguaccuauuuaauacu

SEQ ID NO: 2067932 - RNA, 19 nt, Artificial Sequence
  Description of Artificial Sequence: Synthetic oligonucleotide
  Sense strand starting at position 865 of SEQ ID NO: 1881738
gguuguuaugaagauucca

SEQ ID NO: 2067933 - RNA, 19 nt, Artificial Sequence
  Description of Artificial Sequence: Synthetic oligonucleotide
  Antisense strand to SEQ ID NO: 2067932
uggaaucuucauaacaacc

SEQ ID NO: 2067934 - RNA, 19 nt, Artificial Sequence
  Description of Artificial Sequence: Synthetic oligonucleotide
  Sense strand starting at position 903 of SEQ ID NO: 1881738
gcacuagucuuccuagacu

SEQ ID NO: 2067935 - RNA, 19 nt, Artificial Sequence
  Description of Artificial Sequence: Synthetic oligonucleotide
  Antisense strand to SEQ ID NO: 2067934
agucuaggaagacuagugc

SEQ ID NO: 2067936 - RNA, 19 nt, Artificial Sequence
  Description of Artificial Sequence: Synthetic oligonucleotide
  Sense strand starting at position 921 of SEQ ID NO: 1881738
uuccgaauuagcugagaua

SEQ ID NO: 2067937 - RNA, 19 nt, Artificial Sequence
  Description of Artificial Sequence: Synthetic oligonucleotide
  Antisense strand to SEQ ID NO: 2067936
uaucucagcuaauucggaa

SEQ ID NO: 2067938 - RNA, 19 nt, Artificial Sequence
  Description of Artificial Sequence: Synthetic oligonucleotide
  Sense strand starting at position 922 of SEQ ID NO: 1881738
uccgaauuagcugagauac

SEQ ID NO: 2067939 - RNA, 19 nt, Artificial Sequence
  Description of Artificial Sequence: Synthetic oligonucleotide
  Antisense strand to SEQ ID NO: 2067938
guaucucagcuaauucgga

SEQ ID NO: 2067940 - RNA, 19 nt, Artificial Sequence
  Description of Artificial Sequence: Synthetic oligonucleotide
  Sense strand starting at position 1011 of SEQ ID NO: 1881738
ggccaucgaugagugaaga

SEQ ID NO: 2067941 - RNA, 19 nt, Artificial Sequence
  Description of Artificial Sequence: Synthetic oligonucleotide
  Antisense strand to SEQ ID NO: 2067940
ucuucacucaucgauggcc

SEQ ID NO: 2067942 - RNA, 19 nt, Artificial Sequence
  Description of Artificial Sequence: Synthetic oligonucleotide
  Sense strand starting at position 1012 of SEQ ID NO: 1881738
gccaucgaugagugaagau

SEQ ID NO: 2067943 - RNA, 19 nt, Artificial Sequence
  Description of Artificial Sequence: Synthetic oligonucleotide
  Antisense strand to SEQ ID NO: 2067942
aucuucacucaucgauggc

SEQ ID NO: 2067944 - RNA, 19 nt, Artificial Sequence
  Description of Artificial Sequence: Synthetic oligonucleotide
  Sense strand starting at position 1021 of SEQ ID NO: 1881738
gagugaagaucugcuuaaa

SEQ ID NO: 2067945 - RNA, 19 nt, Artificial Sequence
  Description of Artificial Sequence: Synthetic oligonucleotide
  Antisense strand to SEQ ID NO: 2067944
uuuaagcagaucuucacuc

SEQ ID NO: 2067946 - RNA, 19 nt, Artificial Sequence
  Description of Artificial Sequence: Synthetic oligonucleotide
  Sense strand starting at position 1067 of SEQ ID NO: 1881738
gauagaucucaaggccaag

SEQ ID NO: 2067947 - RNA, 19 nt, Artificial Sequence
  Description of Artificial Sequence: Synthetic oligonucleotide
  Antisense strand to SEQ ID NO: 2067946
cuuggccuugagaucuauc

SEQ ID NO: 2067948 - RNA, 19 nt, Artificial Sequence
  Description of Artificial Sequence: Synthetic oligonucleotide
  Sense strand starting at position 1145 of SEQ ID NO: 1881738
uugauuauugacugcaugu

SEQ ID NO: 2067949 - RNA, 19 nt, Artificial Sequence
  Description of Artificial Sequence: Synthetic oligonucleotide
  Antisense strand to SEQ ID NO: 2067948
acaugcagucaauaaucaa

SEQ ID NO: 2067950 - RNA, 19 nt, Artificial Sequence
  Description of Artificial Sequence: Synthetic oligonucleotide
  Sense strand starting at position 1294 of SEQ ID NO: 1881738
uggaaaugcucaguuugga

SEQ ID NO: 2067951 - RNA, 19 nt, Artificial Sequence
  Description of Artificial Sequence: Synthetic oligonucleotide
  Antisense strand to SEQ ID NO: 2067950
uccaaacugagcauuucca

SEQ ID NO: 2067952 - RNA, 19 nt, Artificial Sequence
  Description of Artificial Sequence: Synthetic oligonucleotide
  Sense strand starting at position 1310 of SEQ ID NO: 1881738
ggaacuugcugagcuugaa

SEQ ID NO: 2067953 - RNA, 19 nt, Artificial Sequence
  Description of Artificial Sequence: Synthetic oligonucleotide
  Antisense strand to SEQ ID NO: 2067952
uucaagcucagcaaguucc

SEQ ID NO: 2067954 - RNA, 19 nt, Artificial Sequence
  Description of Artificial Sequence: Synthetic oligonucleotide
  Sense strand starting at position 1313 of SEQ ID NO: 1881738
acuugcugagcuugaaaua

SEQ ID NO: 2067955 - RNA, 19 nt, Artificial Sequence
  Description of Artificial Sequence: Synthetic oligonucleotide
  Antisense strand to SEQ ID NO: 2067954
uauuucaagcucagcaagu

SEQ ID NO: 2067956 - RNA, 19 nt, Artificial Sequence
  Description of Artificial Sequence: Synthetic oligonucleotide
  Sense strand starting at position 1478 of SEQ ID NO: 1881738
gagaaccuugcugagcaau

SEQ ID NO: 2067957 - RNA, 19 nt, Artificial Sequence
  Description of Artificial Sequence: Synthetic oligonucleotide
  Antisense strand to SEQ ID NO: 2067956
auugcucagcaagguucuc

SEQ ID NO: 2067958 - RNA, 19 nt, Artificial Sequence
  Description of Artificial Sequence: Synthetic oligonucleotide
  Sense strand starting at position 1480 of SEQ ID NO: 1881738
gaaccuugcugagcaauga

SEQ ID NO: 2067959 - RNA, 19 nt, Artificial Sequence
  Description of Artificial Sequence: Synthetic oligonucleotide
  Antisense strand to SEQ ID NO: 2067958
ucauugcucagcaagguuc

SEQ ID NO: 2067960 - RNA, 19 nt, Artificial Sequence
  Description of Artificial Sequence: Synthetic oligonucleotide
  Sense strand starting at position 1484 of SEQ ID NO: 1881738
cuugcugagcaaugagaca

SEQ ID NO: 2067961 - RNA, 19 nt, Artificial Sequence
  Description of Artificial Sequence: Synthetic oligonucleotide
  Antisense strand to SEQ ID NO: 2067960
ugucucauugcucagcaag

SEQ ID NO: 2067962 - RNA, 19 nt, Artificial Sequence
  Description of Artificial Sequence: Synthetic oligonucleotide
  Sense strand starting at position 2071 of SEQ ID NO: 1881738
gcggguagccgaagacuua

SEQ ID NO: 2067963 - RNA, 19 nt, Artificial Sequence
  Description of Artificial Sequence: Synthetic oligonucleotide
  Antisense strand to SEQ ID NO: 2067962
uaagucuucggcuacccgc

SEQ ID NO: 2067964 - RNA, 19 nt, Artificial Sequence
  Description of Artificial Sequence: Synthetic oligonucleotide
  Sense strand starting at position 2072 of SEQ ID NO: 1881738
cggguagccgaagacuuau

SEQ ID NO: 2067965 - RNA, 19 nt, Artificial Sequence
  Description of Artificial Sequence: Synthetic oligonucleotide
  Antisense strand to SEQ ID NO: 2067964
auaagucuucggcuacccg

SEQ ID NO: 2067966 - RNA, 19 nt, Artificial Sequence
  Description of Artificial Sequence: Synthetic oligonucleotide
  Sense strand starting at position 2081 of SEQ ID NO: 1881738
gaagacuuauguuugguaa

SEQ ID NO: 2067967 - RNA, 19 nt, Artificial Sequence
  Description of Artificial Sequence: Synthetic oligonucleotide
  Antisense strand to SEQ ID NO: 2067966
uuaccaaacauaagucuuc

SEQ ID NO: 2067968 - RNA, 19 nt, Artificial Sequence
  Description of Artificial Sequence: Synthetic oligonucleotide
  Sense strand starting at position 2082 of SEQ ID NO: 1881738
aagacuuauguuugguaaa

SEQ ID NO: 2067969 - RNA, 19 nt, Artificial Sequence
  Description of Artificial Sequence: Synthetic oligonucleotide
  Antisense strand to SEQ ID NO: 2067968
uuuaccaaacauaagucuu

SEQ ID NO: 2067970 - RNA, 19 nt, Artificial Sequence
  Description of Artificial Sequence: Synthetic oligonucleotide
  Sense strand starting at position 2084 of SEQ ID NO: 1881738
gacuuauguuugguaaauu

SEQ ID NO: 2067971 - RNA, 19 nt, Artificial Sequence
  Description of Artificial Sequence: Synthetic oligonucleotide
  Antisense strand to SEQ ID NO: 2067970
aauuuaccaaacauaaguc

SEQ ID NO: 2067972 - RNA, 19 nt, Artificial Sequence
  Description of Artificial Sequence: Synthetic oligonucleotide
  Sense strand starting at position 2150 of SEQ ID NO: 1881738
guguguucuucgaugcgga

SEQ ID NO: 2067973 - RNA, 19 nt, Artificial Sequence
  Description of Artificial Sequence: Synthetic oligonucleotide
  Antisense strand to SEQ ID NO: 2067972
uccgcaucgaagaacacac

SEQ ID NO: 2067974 - RNA, 19 nt, Artificial Sequence
  Description of Artificial Sequence: Synthetic oligonucleotide
  Sense strand starting at position 2152 of SEQ ID NO: 1881738
guguucuucgaugcggauu

SEQ ID NO: 2067975 - RNA, 19 nt, Artificial Sequence
  Description of Artificial Sequence: Synthetic oligonucleotide
  Antisense strand to SEQ ID NO: 2067974
aauccgcaucgaagaacac

SEQ ID NO: 2067976 - RNA, 19 nt, Artificial Sequence
  Description of Artificial Sequence: Synthetic oligonucleotide
  Sense strand starting at position 2202 of SEQ ID NO: 1881738
uggaauggauucucccgua

SEQ ID NO: 2067977 - RNA, 19 nt, Artificial Sequence
  Description of Artificial Sequence: Synthetic oligonucleotide
  Antisense strand to SEQ ID NO: 2067976
uacgggagaauccauucca

SEQ ID NO: 2067978 - RNA, 19 nt, Artificial Sequence
  Description of Artificial Sequence: Synthetic oligonucleotide
  Sense strand starting at position 2395 of SEQ ID NO: 1881738
ggguguccucaagaaaggu

SEQ ID NO: 2067979 - RNA, 19 nt, Artificial Sequence
  Description of Artificial Sequence: Synthetic oligonucleotide
  Antisense strand to SEQ ID NO: 2067978
accuuucuugaggacaccc

SEQ ID NO: 2067980 - RNA, 19 nt, Artificial Sequence
  Description of Artificial Sequence: Synthetic oligonucleotide
  Sense strand starting at position 2472 of SEQ ID NO: 1881738
ccguuuccucucugggaaa

SEQ ID NO: 2067981 - RNA, 19 nt, Artificial Sequence
  Description of Artificial Sequence: Synthetic oligonucleotide
  Antisense strand to SEQ ID NO: 2067980
uuucccagagaggaaacgg

SEQ ID NO: 2067982 - RNA, 19 nt, Artificial Sequence
  Description of Artificial Sequence: Synthetic oligonucleotide
  Sense strand starting at position 2474 of SEQ ID NO: 1881738
guuuccucucugggaaaca

SEQ ID NO: 2067983 - RNA, 19 nt, Artificial Sequence
  Description of Artificial Sequence: Synthetic oligonucleotide
  Antisense strand to SEQ ID NO: 2067982
uguuucccagagaggaaac

SEQ ID NO: 2067984 - RNA, 19 nt, Artificial Sequence
  Description of Artificial Sequence: Synthetic oligonucleotide
  Sense strand starting at position 2645 of SEQ ID NO: 1881738
ucuuaaaucuguuucuagu

SEQ ID NO: 2067985 - RNA, 19 nt, Artificial Sequence
  Description of Artificial Sequence: Synthetic oligonucleotide
  Antisense strand to SEQ ID NO: 2067984
acuagaaacagauuuaaga

SEQ ID NO: 2067986 - RNA, 19 nt, Artificial Sequence
  Description of Artificial Sequence: Synthetic oligonucleotide
  Sense strand starting at position 2689 of SEQ ID NO: 1881738
gggauugcagaauaucugu

SEQ ID NO: 2067987 - RNA, 19 nt, Artificial Sequence
  Description of Artificial Sequence: Synthetic oligonucleotide
  Antisense strand to SEQ ID NO: 2067986
acagauauucugcaauccc

SEQ ID NO: 2067988 - RNA, 19 nt, Artificial Sequence
  Description of Artificial Sequence: Synthetic oligonucleotide
  Sense strand starting at position 2692 of SEQ ID NO: 1881738
auugcagaauaucuguuaa

SEQ ID NO: 2067989 - RNA, 19 nt, Artificial Sequence
  Description of Artificial Sequence: Synthetic oligonucleotide
  Antisense strand to SEQ ID NO: 2067988
uuaacagauauucugcaau

SEQ ID NO: 2067990 - RNA, 19 nt, Artificial Sequence
  Description of Artificial Sequence: Synthetic oligonucleotide
  Sense strand starting at position 2694 of SEQ ID NO: 1881738
ugcagaauaucuguuaaau

SEQ ID NO: 2067991 - RNA, 19 nt, Artificial Sequence
  Description of Artificial Sequence: Synthetic oligonucleotide
  Antisense strand to SEQ ID NO: 2067990
auuuaacagauauucugca

SEQ ID NO: 2067992 - RNA, 19 nt, Artificial Sequence
  Description of Artificial Sequence: Synthetic oligonucleotide
  Sense strand starting at position 2730 of SEQ ID NO: 1881738
uguaaauguugcucaauaa

SEQ ID NO: 2067993 - RNA, 19 nt, Artificial Sequence
  Description of Artificial Sequence: Synthetic oligonucleotide
  Antisense strand to SEQ ID NO: 2067992
uuauugagcaacauuuaca

SEQ ID NO: 2067994 - RNA, 19 nt, Artificial Sequence
  Description of Artificial Sequence: Synthetic oligonucleotide
  Sense strand starting at position 2731 of SEQ ID NO: 1881738
guaaauguugcucaauaag

SEQ ID NO: 2067995 - RNA, 19 nt, Artificial Sequence
  Description of Artificial Sequence: Synthetic oligonucleotide
  Antisense strand to SEQ ID NO: 2067994
cuuauugagcaacauuuac

SEQ ID NO: 2067996 - RNA, 19 nt, Artificial Sequence
  Description of Artificial Sequence: Synthetic oligonucleotide
  Sense strand starting at position 2734 of SEQ ID NO: 1881738
aauguugcucaauaagagu

SEQ ID NO: 2067997 - RNA, 19 nt, Artificial Sequence
  Description of Artificial Sequence: Synthetic oligonucleotide
  Antisense strand to SEQ ID NO: 2067996
acucuuauugagcaacauu

SEQ ID NO: 2067998 - RNA, 19 nt, Artificial Sequence
  Description of Artificial Sequence: Synthetic oligonucleotide
  Sense strand starting at position 3108 of SEQ ID NO: 1881738
aguuaagugaugggaaagu

SEQ ID NO: 2067999 - RNA, 19 nt, Artificial Sequence
  Description of Artificial Sequence: Synthetic oligonucleotide
  Antisense strand to SEQ ID NO: 2067998
acuuucccaucacuuaacu

SEQ ID NO: 2068000 - RNA, 19 nt, Artificial Sequence
  Description of Artificial Sequence: Synthetic oligonucleotide
  Sense strand starting at position 3119 of SEQ ID NO: 1881738
gggaaaguucuaggcaaga

SEQ ID NO: 2068001 - RNA, 19 nt, Artificial Sequence
  Description of Artificial Sequence: Synthetic oligonucleotide
  Antisense strand to SEQ ID NO: 2068000
ucuugccuagaacuuuccc

SEQ ID NO: 2068002 - RNA, 19 nt, Artificial Sequence
  Description of Artificial Sequence: Synthetic oligonucleotide
  Sense strand starting at position 3274 of SEQ ID NO: 1881738
acuaaaucuugacugaagu

SEQ ID NO: 2068003 - RNA, 19 nt, Artificial Sequence
  Description of Artificial Sequence: Synthetic oligonucleotide
  Antisense strand to SEQ ID NO: 2068002
acuucagucaagauuuagu

SEQ ID NO: 2068004 - RNA, 19 nt, Artificial Sequence
  Description of Artificial Sequence: Synthetic oligonucleotide
  Sense strand starting at position 3275 of SEQ ID NO: 1881738
cuaaaucuugacugaaguu

SEQ ID NO: 2068005 - RNA, 19 nt, Artificial Sequence
  Description of Artificial Sequence: Synthetic oligonucleotide
  Antisense strand to SEQ ID NO: 2068004
aacuucagucaagauuuag

SEQ ID NO: 2068006 - RNA, 19 nt, Artificial Sequence
  Description of Artificial Sequence: Synthetic oligonucleotide
  Sense strand starting at position 3341 of SEQ ID NO: 1881738
gggcguuguauuuaguuau

SEQ ID NO: 2068007 - RNA, 19 nt, Artificial Sequence
  Description of Artificial Sequence: Synthetic oligonucleotide
  Antisense strand to SEQ ID NO: 2068006
auaacuaaauacaacgccc

SEQ ID NO: 2068008 - RNA, 19 nt, Artificial Sequence
  Description of Artificial Sequence: Synthetic oligonucleotide
  Sense strand starting at position 3344 of SEQ ID NO: 1881738
cguuguauuuaguuauguu

SEQ ID NO: 2068009 - RNA, 19 nt, Artificial Sequence
  Description of Artificial Sequence: Synthetic oligonucleotide
  Antisense strand to SEQ ID NO: 2068008
aacauaacuaaauacaacg

SEQ ID NO: 2068010 - RNA, 19 nt, Artificial Sequence
  Description of Artificial Sequence: Synthetic oligonucleotide
  Sense strand starting at position 71 of SEQ ID NO: 1881739
gaaagaaccucggagauug

SEQ ID NO: 2068011 - RNA, 19 nt, Artificial Sequence
  Description of Artificial Sequence: Synthetic oligonucleotide
  Antisense strand to SEQ ID NO: 2068010
caaucuccgagguucuuuc

SEQ ID NO: 2068012 - RNA, 19 nt, Artificial Sequence
  Description of Artificial Sequence: Synthetic oligonucleotide
  Sense strand starting at position 79 of SEQ ID NO: 1881739
cucggagauugucuacagu

SEQ ID NO: 2068013 - RNA, 19 nt, Artificial Sequence
  Description of Artificial Sequence: Synthetic oligonucleotide
  Antisense strand to SEQ ID NO: 2068012
acuguagacaaucuccgag

SEQ ID NO: 2068014 - RNA, 19 nt, Artificial Sequence
  Description of Artificial Sequence: Synthetic oligonucleotide
  Sense strand starting at position 196 of SEQ ID NO: 1881739
ugaagagucugauucuacc

SEQ ID NO: 2068015 - RNA, 19 nt, Artificial Sequence
  Description of Artificial Sequence: Synthetic oligonucleotide
  Antisense strand to SEQ ID NO: 2068014
gguagaaucagacucuuca

SEQ ID NO: 2068016 - RNA, 19 nt, Artificial Sequence
  Description of Artificial Sequence: Synthetic oligonucleotide
  Sense strand starting at position 234 of SEQ ID NO: 1881739
ugaggugaauacuaaauag

SEQ ID NO: 2068017 - RNA, 19 nt, Artificial Sequence
  Description of Artificial Sequence: Synthetic oligonucleotide
  Antisense strand to SEQ ID NO: 2068016
cuauuuaguauucaccuca

SEQ ID NO: 2068018 - RNA, 19 nt, Artificial Sequence
  Description of Artificial Sequence: Synthetic oligonucleotide
  Sense strand starting at position 277 of SEQ ID NO: 1881739
ggacuaagauaagugguuu

SEQ ID NO: 2068019 - RNA, 19 nt, Artificial Sequence
  Description of Artificial Sequence: Synthetic oligonucleotide
  Antisense strand to SEQ ID NO: 2068018
aaaccacuuaucuuagucc

SEQ ID NO: 2068020 - RNA, 19 nt, Artificial Sequence
  Description of Artificial Sequence: Synthetic oligonucleotide
  Sense strand starting at position 401 of SEQ ID NO: 1881739
accugugagcuuugcaaga

SEQ ID NO: 2068021 - RNA, 19 nt, Artificial Sequence
  Description of Artificial Sequence: Synthetic oligonucleotide
  Antisense strand to SEQ ID NO: 2068020
ucuugcaaagcucacaggu

SEQ ID NO: 2068022 - RNA, 19 nt, Artificial Sequence
  Description of Artificial Sequence: Synthetic oligonucleotide
  Sense strand starting at position 702 of SEQ ID NO: 1881739
ggccaaaggaauugagucu

SEQ ID NO: 2068023 - RNA, 19 nt, Artificial Sequence
  Description of Artificial Sequence: Synthetic oligonucleotide
  Antisense strand to SEQ ID NO: 2068022
agacucaauuccuuuggcc

SEQ ID NO: 2068024 - RNA, 19 nt, Artificial Sequence
  Description of Artificial Sequence: Synthetic oligonucleotide
  Sense strand starting at position 746 of SEQ ID NO: 1881739
uaggauaacgucugacaca

SEQ ID NO: 2068025 - RNA, 19 nt, Artificial Sequence
  Description of Artificial Sequence: Synthetic oligonucleotide
  Antisense strand to SEQ ID NO: 2068024
ugugucagacguuauccua

SEQ ID NO: 2068026 - RNA, 19 nt, Artificial Sequence
  Description of Artificial Sequence: Synthetic oligonucleotide
  Sense strand starting at position 814 of SEQ ID NO: 1881739
gcagaaagccuacauauac

SEQ ID NO: 2068027 - RNA, 19 nt, Artificial Sequence
  Description of Artificial Sequence: Synthetic oligonucleotide
  Antisense strand to SEQ ID NO: 2068026
guauauguaggcuuucugc

SEQ ID NO: 2068028 - RNA, 19 nt, Artificial Sequence
  Description of Artificial Sequence: Synthetic oligonucleotide
  Sense strand starting at position 1305 of SEQ ID NO: 1881739
uggcuuaugucaccugaug

SEQ ID NO: 2068029 - RNA, 19 nt, Artificial Sequence
  Description of Artificial Sequence: Synthetic oligonucleotide
  Antisense strand to SEQ ID NO: 2068028
caucaggugacauaagcca

SEQ ID NO: 2068030 - RNA, 19 nt, Artificial Sequence
  Description of Artificial Sequence: Synthetic oligonucleotide
  Sense strand starting at position 1350 of SEQ ID NO: 1881739
ccaugauuaugccuggcuu

SEQ ID NO: 2068031 - RNA, 19 nt, Artificial Sequence
  Description of Artificial Sequence: Synthetic oligonucleotide
  Antisense strand to SEQ ID NO: 2068030
aagccaggcauaaucaugg

SEQ ID NO: 2068032 - RNA, 19 nt, Artificial Sequence
  Description of Artificial Sequence: Synthetic oligonucleotide
  Sense strand starting at position 1351 of SEQ ID NO: 1881739
caugauuaugccuggcuuu

SEQ ID NO: 2068033 - RNA, 19 nt, Artificial Sequence
  Description of Artificial Sequence: Synthetic oligonucleotide
  Antisense strand to SEQ ID NO: 2068032
aaagccaggcauaaucaug

SEQ ID NO: 2068034 - RNA, 19 nt, Artificial Sequence
  Description of Artificial Sequence: Synthetic oligonucleotide
  Sense strand starting at position 1429 of SEQ ID NO: 1881739
ggaacugcccuccacauua

SEQ ID NO: 2068035 - RNA, 19 nt, Artificial Sequence
  Description of Artificial Sequence: Synthetic oligonucleotide
  Antisense strand to SEQ ID NO: 2068034
uaauguggagggcaguucc

SEQ ID NO: 2068036 - RNA, 19 nt, Artificial Sequence
  Description of Artificial Sequence: Synthetic oligonucleotide
  Sense strand starting at position 1455 of SEQ ID NO: 1881739
gcaggcuccauagguuaau

SEQ ID NO: 2068037 - RNA, 19 nt, Artificial Sequence
  Description of Artificial Sequence: Synthetic oligonucleotide
  Antisense strand to SEQ ID NO: 2068036
auuaaccuauggagccugc

SEQ ID NO: 2068038 - RNA, 19 nt, Artificial Sequence
  Description of Artificial Sequence: Synthetic oligonucleotide
  Sense strand starting at position 1456 of SEQ ID NO: 1881739
caggcuccauagguuaauu

SEQ ID NO: 2068039 - RNA, 19 nt, Artificial Sequence
  Description of Artificial Sequence: Synthetic oligonucleotide
  Antisense strand to SEQ ID NO: 2068038
aauuaaccuauggagccug

SEQ ID NO: 2068040 - RNA, 19 nt, Artificial Sequence
  Description of Artificial Sequence: Synthetic oligonucleotide
  Sense strand starting at position 2761 of SEQ ID NO: 1881739
gucgucugggcuucuuauu

SEQ ID NO: 2068041 - RNA, 19 nt, Artificial Sequence
  Description of Artificial Sequence: Synthetic oligonucleotide
  Antisense strand to SEQ ID NO: 2068040
aauaagaagcccagacgac

SEQ ID NO: 2068042 - RNA, 19 nt, Artificial Sequence
  Description of Artificial Sequence: Synthetic oligonucleotide
  Sense strand starting at position 2823 of SEQ ID NO: 1881739
ccacuuuccugacuuggau

SEQ ID NO: 2068043 - RNA, 19 nt, Artificial Sequence
  Description of Artificial Sequence: Synthetic oligonucleotide
  Antisense strand to SEQ ID NO: 2068042
auccaagucaggaaagugg

SEQ ID NO: 2068044 - RNA, 19 nt, Artificial Sequence
  Description of Artificial Sequence: Synthetic oligonucleotide
  Sense strand starting at position 2829 of SEQ ID NO: 1881739
uccugacuuggaugagauu

SEQ ID NO: 2068045 - RNA, 19 nt, Artificial Sequence
  Description of Artificial Sequence: Synthetic oligonucleotide
  Antisense strand to SEQ ID NO: 2068044
aaucucauccaagucagga

SEQ ID NO: 2068046 - RNA, 19 nt, Artificial Sequence
  Description of Artificial Sequence: Synthetic oligonucleotide
  Sense strand starting at position 2933 of SEQ ID NO: 1881739
uuuguuuguguuuaagagu

SEQ ID NO: 2068047 - RNA, 19 nt, Artificial Sequence
  Description of Artificial Sequence: Synthetic oligonucleotide
  Antisense strand to SEQ ID NO: 2068046
acucuuaaacacaaacaaa

SEQ ID NO: 2068048 - RNA, 19 nt, Artificial Sequence
  Description of Artificial Sequence: Synthetic oligonucleotide
  Sense strand starting at position 3045 of SEQ ID NO: 1881739
cuaagacugccgugauauc

SEQ ID NO: 2068049 - RNA, 19 nt, Artificial Sequence
  Description of Artificial Sequence: Synthetic oligonucleotide
  Antisense strand to SEQ ID NO: 2068048
gauaucacggcagucuuag

SEQ ID NO: 2068050 - RNA, 19 nt, Artificial Sequence
  Description of Artificial Sequence: Synthetic oligonucleotide
  Sense strand starting at position 3046 of SEQ ID NO: 1881739
uaagacugccgugauaucu

SEQ ID NO: 2068051 - RNA, 19 nt, Artificial Sequence
  Description of Artificial Sequence: Synthetic oligonucleotide
  Antisense strand to SEQ ID NO: 2068050
agauaucacggcagucuua

SEQ ID NO: 2068052 - RNA, 19 nt, Artificial Sequence
  Description of Artificial Sequence: Synthetic oligonucleotide
  Sense strand starting at position 3056 of SEQ ID NO: 1881739
gugauaucuguccgggaug

SEQ ID NO: 2068053 - RNA, 19 nt, Artificial Sequence
  Description of Artificial Sequence: Synthetic oligonucleotide
  Antisense strand to SEQ ID NO: 2068052
caucccggacagauaucac

SEQ ID NO: 2068054 - RNA, 19 nt, Artificial Sequence
  Description of Artificial Sequence: Synthetic oligonucleotide
  Sense strand starting at position 3068 of SEQ ID NO: 1881739
cgggauguccuggaaucca

SEQ ID NO: 2068055 - RNA, 19 nt, Artificial Sequence
  Description of Artificial Sequence: Synthetic oligonucleotide
  Antisense strand to SEQ ID NO: 2068054
uggauuccaggacaucccg

SEQ ID NO: 2068056 - RNA, 19 nt, Artificial Sequence
  Description of Artificial Sequence: Synthetic oligonucleotide
  Sense strand starting at position 3105 of SEQ ID NO: 1881739
acagaauugcucuguuuga

SEQ ID NO: 2068057 - RNA, 19 nt, Artificial Sequence
  Description of Artificial Sequence: Synthetic oligonucleotide
  Antisense strand to SEQ ID NO: 2068056
ucaaacagagcaauucugu

SEQ ID NO: 2068058 - RNA, 19 nt, Artificial Sequence
  Description of Artificial Sequence: Synthetic oligonucleotide
  Sense strand starting at position 3157 of SEQ ID NO: 1881739
gaccauguuugugugagau

SEQ ID NO: 2068059 - RNA, 19 nt, Artificial Sequence
  Description of Artificial Sequence: Synthetic oligonucleotide
  Antisense strand to SEQ ID NO: 2068058
aucucacacaaacaugguc

SEQ ID NO: 2068060 - RNA, 19 nt, Artificial Sequence
  Description of Artificial Sequence: Synthetic oligonucleotide
  Sense strand starting at position 3208 of SEQ ID NO: 1881739
gaagauaacuuaguagggu

SEQ ID NO: 2068061 - RNA, 19 nt, Artificial Sequence
  Description of Artificial Sequence: Synthetic oligonucleotide
  Antisense strand to SEQ ID NO: 2068060
acccuacuaaguuaucuuc

SEQ ID NO: 2068062 - RNA, 19 nt, Artificial Sequence
  Description of Artificial Sequence: Synthetic oligonucleotide
  Sense strand starting at position 3361 of SEQ ID NO: 1881739
ggagaacaguagucuuucu

SEQ ID NO: 2068063 - RNA, 19 nt, Artificial Sequence
  Description of Artificial Sequence: Synthetic oligonucleotide
  Antisense strand to SEQ ID NO: 2068062
agaaagacuacuguucucc

SEQ ID NO: 2068064 - RNA, 19 nt, Artificial Sequence
  Description of Artificial Sequence: Synthetic oligonucleotide
  Sense strand starting at position 3406 of SEQ ID NO: 1881739
cugacugucugcucugaga

SEQ ID NO: 2068065 - RNA, 19 nt, Artificial Sequence
  Description of Artificial Sequence: Synthetic oligonucleotide
  Antisense strand to SEQ ID NO: 2068064
ucucagagcagacagucag

SEQ ID NO: 2068066 - RNA, 19 nt, Artificial Sequence
  Description of Artificial Sequence: Synthetic oligonucleotide
  Sense strand starting at position 3408 of SEQ ID NO: 1881739
gacugucugcucugagaug

SEQ ID NO: 2068067 - RNA, 19 nt, Artificial Sequence
  Description of Artificial Sequence: Synthetic oligonucleotide
  Antisense strand to SEQ ID NO: 2068066
caucucagagcagacaguc

SEQ ID NO: 2068068 - RNA, 19 nt, Artificial Sequence
  Description of Artificial Sequence: Synthetic oligonucleotide
  Sense strand starting at position 3419 of SEQ ID NO: 1881739
cugagaugugcuuauuagu

SEQ ID NO: 2068069 - RNA, 19 nt, Artificial Sequence
  Description of Artificial Sequence: Synthetic oligonucleotide
  Antisense strand to SEQ ID NO: 2068068
acuaauaagcacaucucag

SEQ ID NO: 2068070 - RNA, 19 nt, Artificial Sequence
  Description of Artificial Sequence: Synthetic oligonucleotide
  Sense strand starting at position 3428 of SEQ ID NO: 1881739
gcuuauuaguggccaggau

SEQ ID NO: 2068071 - RNA, 19 nt, Artificial Sequence
  Description of Artificial Sequence: Synthetic oligonucleotide
  Antisense strand to SEQ ID NO: 2068070
auccuggccacuaauaagc

SEQ ID NO: 2068072 - RNA, 19 nt, Artificial Sequence
  Description of Artificial Sequence: Synthetic oligonucleotide
  Sense strand starting at position 3463 of SEQ ID NO: 1881739
gguagacaacccugauuga

SEQ ID NO: 2068073 - RNA, 19 nt, Artificial Sequence
  Description of Artificial Sequence: Synthetic oligonucleotide
  Antisense strand to SEQ ID NO: 2068072
ucaaucaggguugucuacc

SEQ ID NO: 2068074 - RNA, 19 nt, Artificial Sequence
  Description of Artificial Sequence: Synthetic oligonucleotide
  Sense strand starting at position 3565 of SEQ ID NO: 1881739
uguuuacuuccacagcuuu

SEQ ID NO: 2068075 - RNA, 19 nt, Artificial Sequence
  Description of Artificial Sequence: Synthetic oligonucleotide
  Antisense strand to SEQ ID NO: 2068074
aaagcuguggaaguaaaca

SEQ ID NO: 2068076 - RNA, 19 nt, Artificial Sequence
  Description of Artificial Sequence: Synthetic oligonucleotide
  Sense strand starting at position 3614 of SEQ ID NO: 1881739
ccggcuuucuuacugauua

SEQ ID NO: 2068077 - RNA, 19 nt, Artificial Sequence
  Description of Artificial Sequence: Synthetic oligonucleotide
  Antisense strand to SEQ ID NO: 2068076
uaaucaguaagaaagccgg

SEQ ID NO: 2068078 - RNA, 19 nt, Artificial Sequence
  Description of Artificial Sequence: Synthetic oligonucleotide
  Sense strand starting at position 3663 of SEQ ID NO: 1881739
uguuuaauuucuggaaaug

SEQ ID NO: 2068079 - RNA, 19 nt, Artificial Sequence
  Description of Artificial Sequence: Synthetic oligonucleotide
  Antisense strand to SEQ ID NO: 2068078
cauuuccagaaauuaaaca

SEQ ID NO: 2068080 - RNA, 19 nt, Artificial Sequence
  Description of Artificial Sequence: Synthetic oligonucleotide
  Sense strand starting at position 3688 of SEQ ID NO: 1881739
augugugaagcugauguau

SEQ ID NO: 2068081 - RNA, 19 nt, Artificial Sequence
  Description of Artificial Sequence: Synthetic oligonucleotide
  Antisense strand to SEQ ID NO: 2068080
auacaucagcuucacacau

SEQ ID NO: 2068082 - RNA, 19 nt, Artificial Sequence
  Description of Artificial Sequence: Synthetic oligonucleotide
  Sense strand starting at position 3774 of SEQ ID NO: 1881739
gaaggauuauauuccguuu

SEQ ID NO: 2068083 - RNA, 19 nt, Artificial Sequence
  Description of Artificial Sequence: Synthetic oligonucleotide
  Antisense strand to SEQ ID NO: 2068082
aaacggaauauaauccuuc

SEQ ID NO: 2068084 - RNA, 19 nt, Artificial Sequence
  Description of Artificial Sequence: Synthetic oligonucleotide
  Sense strand starting at position 3777 of SEQ ID NO: 1881739
ggauuauauuccguuuaga

SEQ ID NO: 2068085 - RNA, 19 nt, Artificial Sequence
  Description of Artificial Sequence: Synthetic oligonucleotide
  Antisense strand to SEQ ID NO: 2068084
ucuaaacggaauauaaucc

SEQ ID NO: 2068086 - RNA, 19 nt, Artificial Sequence
  Description of Artificial Sequence: Synthetic oligonucleotide
  Sense strand starting at position 3780 of SEQ ID NO: 1881739
uuauauuccguuuagauug

SEQ ID NO: 2068087 - RNA, 19 nt, Artificial Sequence
  Description of Artificial Sequence: Synthetic oligonucleotide
  Antisense strand to SEQ ID NO: 2068086
caaucuaaacggaauauaa

SEQ ID NO: 2068088 - RNA, 19 nt, Artificial Sequence
  Description of Artificial Sequence: Synthetic oligonucleotide
  Sense strand starting at position 3973 of SEQ ID NO: 1881739
ugucucugacagcagaaua

SEQ ID NO: 2068089 - RNA, 19 nt, Artificial Sequence
  Description of Artificial Sequence: Synthetic oligonucleotide
  Antisense strand to SEQ ID NO: 2068088
uauucugcugucagagaca

SEQ ID NO: 2068090 - RNA, 19 nt, Artificial Sequence
  Description of Artificial Sequence: Synthetic oligonucleotide
  Sense strand starting at position 47 of SEQ ID NO: 1881740
guaaguuggagcuacauaa

SEQ ID NO: 2068091 - RNA, 19 nt, Artificial Sequence
  Description of Artificial Sequence: Synthetic oligonucleotide
  Antisense strand to SEQ ID NO: 2068090
uuauguagcuccaacuuac

SEQ ID NO: 2068092 - RNA, 19 nt, Artificial Sequence
  Description of Artificial Sequence: Synthetic oligonucleotide
  Sense strand starting at position 271 of SEQ ID NO: 1881740
gccagugaccucuauauag

SEQ ID NO: 2068093 - RNA, 19 nt, Artificial Sequence
  Description of Artificial Sequence: Synthetic oligonucleotide
  Antisense strand to SEQ ID NO: 2068092
cuauauagaggucacuggc

SEQ ID NO: 2068094 - RNA, 19 nt, Artificial Sequence
  Description of Artificial Sequence: Synthetic oligonucleotide
  Sense strand starting at position 305 of SEQ ID NO: 1881740
uuaauaucugaauguagac

SEQ ID NO: 2068095 - RNA, 19 nt, Artificial Sequence
  Description of Artificial Sequence: Synthetic oligonucleotide
  Antisense strand to SEQ ID NO: 2068094
gucuacauucagauauuaa

SEQ ID NO: 2068096 - RNA, 19 nt, Artificial Sequence
  Description of Artificial Sequence: Synthetic oligonucleotide
  Sense strand starting at position 343 of SEQ ID NO: 1881740
auuguuuaccuagauccau

SEQ ID NO: 2068097 - RNA, 19 nt, Artificial Sequence
  Description of Artificial Sequence: Synthetic oligonucleotide
  Antisense strand to SEQ ID NO: 2068096
auggaucuagguaaacaau

SEQ ID NO: 2068098 - RNA, 19 nt, Artificial Sequence
  Description of Artificial Sequence: Synthetic oligonucleotide
  Sense strand starting at position 486 of SEQ ID NO: 1881740
auauuaguucugugaaaca

SEQ ID NO: 2068099 - RNA, 19 nt, Artificial Sequence
  Description of Artificial Sequence: Synthetic oligonucleotide
  Antisense strand to SEQ ID NO: 2068098
uguuucacagaacuaauau

SEQ ID NO: 2068100 - RNA, 19 nt, Artificial Sequence
  Description of Artificial Sequence: Synthetic oligonucleotide
  Sense strand starting at position 491 of SEQ ID NO: 1881740
aguucugugaaacagucua

SEQ ID NO: 2068101 - RNA, 19 nt, Artificial Sequence
  Description of Artificial Sequence: Synthetic oligonucleotide
  Antisense strand to SEQ ID NO: 2068100
uagacuguuucacagaacu

SEQ ID NO: 2068102 - RNA, 19 nt, Artificial Sequence
  Description of Artificial Sequence: Synthetic oligonucleotide
  Sense strand starting at position 496 of SEQ ID NO: 1881740
ugugaaacagucuaugcau

SEQ ID NO: 2068103 - RNA, 19 nt, Artificial Sequence
  Description of Artificial Sequence: Synthetic oligonucleotide
  Antisense strand to SEQ ID NO: 2068102
augcauagacuguuucaca

SEQ ID NO: 2068104 - RNA, 19 nt, Artificial Sequence
  Description of Artificial Sequence: Synthetic oligonucleotide
  Sense strand starting at position 498 of SEQ ID NO: 1881740
ugaaacagucuaugcauaa

SEQ ID NO: 2068105 - RNA, 19 nt, Artificial Sequence
  Description of Artificial Sequence: Synthetic oligonucleotide
  Antisense strand to SEQ ID NO: 2068104
uuaugcauagacuguuuca

SEQ ID NO: 2068106 - RNA, 19 nt, Artificial Sequence
  Description of Artificial Sequence: Synthetic oligonucleotide
  Sense strand starting at position 499 of SEQ ID NO: 1881740
gaaacagucuaugcauaag

SEQ ID NO: 2068107 - RNA, 19 nt, Artificial Sequence
  Description of Artificial Sequence: Synthetic oligonucleotide
  Antisense strand to SEQ ID NO: 2068106
cuuaugcauagacuguuuc

SEQ ID NO: 2068108 - RNA, 19 nt, Artificial Sequence
  Description of Artificial Sequence: Synthetic oligonucleotide
  Sense strand starting at position 513 of SEQ ID NO: 1881740
auaagaauucguuggaaua

SEQ ID NO: 2068109 - RNA, 19 nt, Artificial Sequence
  Description of Artificial Sequence: Synthetic oligonucleotide
  Antisense strand to SEQ ID NO: 2068108
uauuccaacgaauucuuau

SEQ ID NO: 2068110 - RNA, 19 nt, Artificial Sequence
  Description of Artificial Sequence: Synthetic oligonucleotide
  Sense strand starting at position 514 of SEQ ID NO: 1881740
uaagaauucguuggaauac

SEQ ID NO: 2068111 - RNA, 19 nt, Artificial Sequence
  Description of Artificial Sequence: Synthetic oligonucleotide
  Antisense strand to SEQ ID NO: 2068110
guauuccaacgaauucuua

SEQ ID NO: 2068112 - RNA, 19 nt, Artificial Sequence
  Description of Artificial Sequence: Synthetic oligonucleotide
  Sense strand starting at position 679 of SEQ ID NO: 1881740
ucaguaaagcaaggaaaua

SEQ ID NO: 2068113 - RNA, 19 nt, Artificial Sequence
  Description of Artificial Sequence: Synthetic oligonucleotide
  Antisense strand to SEQ ID NO: 2068112
uauuuccuugcuuuacuga

SEQ ID NO: 2068114 - RNA, 19 nt, Artificial Sequence
  Description of Artificial Sequence: Synthetic oligonucleotide
  Sense strand starting at position 707 of SEQ ID NO: 1881740
caaguagguguauaucagu

SEQ ID NO: 2068115 - RNA, 19 nt, Artificial Sequence
  Description of Artificial Sequence: Synthetic oligonucleotide
  Antisense strand to SEQ ID NO: 2068114
acugauauacaccuacuug

SEQ ID NO: 2068116 - RNA, 19 nt, Artificial Sequence
  Description of Artificial Sequence: Synthetic oligonucleotide
  Sense strand starting at position 713 of SEQ ID NO: 1881740
gguguauaucaguaaagua

SEQ ID NO: 2068117 - RNA, 19 nt, Artificial Sequence
  Description of Artificial Sequence: Synthetic oligonucleotide
  Antisense strand to SEQ ID NO: 2068116
uacuuuacugauauacacc

SEQ ID NO: 2068118 - RNA, 19 nt, Artificial Sequence
  Description of Artificial Sequence: Synthetic oligonucleotide
  Sense strand starting at position 1036 of SEQ ID NO: 1881740
aucucuuaguuauugauga

SEQ ID NO: 2068119 - RNA, 19 nt, Artificial Sequence
  Description of Artificial Sequence: Synthetic oligonucleotide
  Antisense strand to SEQ ID NO: 2068118
ucaucaauaacuaagagau

SEQ ID NO: 2068120 - RNA, 19 nt, Artificial Sequence
  Description of Artificial Sequence: Synthetic oligonucleotide
  Sense strand starting at position 1079 of SEQ ID NO: 1881740
uuaagaaaguagguuaucu

SEQ ID NO: 2068121 - RNA, 19 nt, Artificial Sequence
  Description of Artificial Sequence: Synthetic oligonucleotide
  Antisense strand to SEQ ID NO: 2068120
agauaaccuacuuucuuaa

SEQ ID NO: 2068122 - RNA, 19 nt, Artificial Sequence
  Description of Artificial Sequence: Synthetic oligonucleotide
  Sense strand starting at position 1092 of SEQ ID NO: 1881740
uuaucuuacgcuuagaaca

SEQ ID NO: 2068123 - RNA, 19 nt, Artificial Sequence
  Description of Artificial Sequence: Synthetic oligonucleotide
  Antisense strand to SEQ ID NO: 2068122
uguucuaagcguaagauaa

SEQ ID NO: 2068124 - RNA, 19 nt, Artificial Sequence
  Description of Artificial Sequence: Synthetic oligonucleotide
  Sense strand starting at position 1177 of SEQ ID NO: 1881740
ugucauagacaauguauga

SEQ ID NO: 2068125 - RNA, 19 nt, Artificial Sequence
  Description of Artificial Sequence: Synthetic oligonucleotide
  Antisense strand to SEQ ID NO: 2068124
ucauacauugucuaugaca

SEQ ID NO: 2068126 - RNA, 19 nt, Artificial Sequence
  Description of Artificial Sequence: Synthetic oligonucleotide
  Sense strand starting at position 1291 of SEQ ID NO: 1881740
agucguaauccugaaucca

SEQ ID NO: 2068127 - RNA, 19 nt, Artificial Sequence
  Description of Artificial Sequence: Synthetic oligonucleotide
  Antisense strand to SEQ ID NO: 2068126
uggauucaggauuacgacu

SEQ ID NO: 2068128 - RNA, 19 nt, Artificial Sequence
  Description of Artificial Sequence: Synthetic oligonucleotide
  Sense strand starting at position 1351 of SEQ ID NO: 1881740
ccagaaaggucauucuguc

SEQ ID NO: 2068129 - RNA, 19 nt, Artificial Sequence
  Description of Artificial Sequence: Synthetic oligonucleotide
  Antisense strand to SEQ ID NO: 2068128
gacagaaugaccuuucugg

SEQ ID NO: 2068130 - RNA, 19 nt, Artificial Sequence
  Description of Artificial Sequence: Synthetic oligonucleotide
  Sense strand starting at position 1450 of SEQ ID NO: 1881740
cagaaauucuaagugugag

SEQ ID NO: 2068131 - RNA, 19 nt, Artificial Sequence
  Description of Artificial Sequence: Synthetic oligonucleotide
  Antisense strand to SEQ ID NO: 2068130
cucacacuuagaauuucug

SEQ ID NO: 2068132 - RNA, 19 nt, Artificial Sequence
  Description of Artificial Sequence: Synthetic oligonucleotide
  Sense strand starting at position 1831 of SEQ ID NO: 1881740
ugagcucuucuagaaugac

SEQ ID NO: 2068133 - RNA, 19 nt, Artificial Sequence
  Description of Artificial Sequence: Synthetic oligonucleotide
  Antisense strand to SEQ ID NO: 2068132
gucauucuagaagagcuca

SEQ ID NO: 2068134 - RNA, 19 nt, Artificial Sequence
  Description of Artificial Sequence: Synthetic oligonucleotide
  Sense strand starting at position 2007 of SEQ ID NO: 1881740
uguaguuacuaagcaagga

SEQ ID NO: 2068135 - RNA, 19 nt, Artificial Sequence
  Description of Artificial Sequence: Synthetic oligonucleotide
  Antisense strand to SEQ ID NO: 2068134
uccuugcuuaguaacuaca

SEQ ID NO: 2068136 - RNA, 19 nt, Artificial Sequence
  Description of Artificial Sequence: Synthetic oligonucleotide
  Sense strand starting at position 2102 of SEQ ID NO: 1881740
acauguacugaagguauca

SEQ ID NO: 2068137 - RNA, 19 nt, Artificial Sequence
  Description of Artificial Sequence: Synthetic oligonucleotide
  Antisense strand to SEQ ID NO: 2068136
ugauaccuucaguacaugu

SEQ ID NO: 2068138 - RNA, 19 nt, Artificial Sequence
  Description of Artificial Sequence: Synthetic oligonucleotide
  Sense strand starting at position 2195 of SEQ ID NO: 1881740
uauuaccuggauugaugau

SEQ ID NO: 2068139 - RNA, 19 nt, Artificial Sequence
  Description of Artificial Sequence: Synthetic oligonucleotide
  Antisense strand to SEQ ID NO: 2068138
aucaucaauccagguaaua

SEQ ID NO: 2068140 - RNA, 19 nt, Artificial Sequence
  Description of Artificial Sequence: Synthetic oligonucleotide
  Sense strand starting at position 2307 of SEQ ID NO: 1881740
ggcaucagaugguuuagga

SEQ ID NO: 2068141 - RNA, 19 nt, Artificial Sequence
  Description of Artificial Sequence: Synthetic oligonucleotide
  Antisense strand to SEQ ID NO: 2068140
uccuaaaccaucugaugcc

SEQ ID NO: 2068142 - RNA, 19 nt, Artificial Sequence
  Description of Artificial Sequence: Synthetic oligonucleotide
  Sense strand starting at position 2462 of SEQ ID NO: 1881740
gcacaauugcuuuaauaug

SEQ ID NO: 2068143 - RNA, 19 nt, Artificial Sequence
  Description of Artificial Sequence: Synthetic oligonucleotide
  Antisense strand to SEQ ID NO: 2068142
cauauuaaagcaauugugc

SEQ ID NO: 2068144 - RNA, 19 nt, Artificial Sequence
  Description of Artificial Sequence: Synthetic oligonucleotide
  Sense strand starting at position 2617 of SEQ ID NO: 1881740
gugaguaguggucacagag

SEQ ID NO: 2068145 - RNA, 19 nt, Artificial Sequence
  Description of Artificial Sequence: Synthetic oligonucleotide
  Antisense strand to SEQ ID NO: 2068144
cucugugaccacuacucac

SEQ ID NO: 2068146 - RNA, 19 nt, Artificial Sequence
  Description of Artificial Sequence: Synthetic oligonucleotide
  Sense strand starting at position 2623 of SEQ ID NO: 1881740
aguggucacagagaaaguu

SEQ ID NO: 2068147 - RNA, 19 nt, Artificial Sequence
  Description of Artificial Sequence: Synthetic oligonucleotide
  Antisense strand to SEQ ID NO: 2068146
aacuuucucugugaccacu

SEQ ID NO: 2068148 - RNA, 19 nt, Artificial Sequence
  Description of Artificial Sequence: Synthetic oligonucleotide
  Sense strand starting at position 2810 of SEQ ID NO: 1881740
cacagagugguauguaaag

SEQ ID NO: 2068149 - RNA, 19 nt, Artificial Sequence
  Description of Artificial Sequence: Synthetic oligonucleotide
  Antisense strand to SEQ ID NO: 2068148
cuuuacauaccacucugug

SEQ ID NO: 2068150 - RNA, 19 nt, Artificial Sequence
  Description of Artificial Sequence: Synthetic oligonucleotide
  Sense strand starting at position 2812 of SEQ ID NO: 1881740
cagagugguauguaaaggu

SEQ ID NO: 2068151 - RNA, 19 nt, Artificial Sequence
  Description of Artificial Sequence: Synthetic oligonucleotide
  Antisense strand to SEQ ID NO: 2068150
accuuuacauaccacucug

SEQ ID NO: 2068152 - RNA, 19 nt, Artificial Sequence
  Description of Artificial Sequence: Synthetic oligonucleotide
  Sense strand starting at position 3014 of SEQ ID NO: 1881740
ucuuaauaagcagaaguuu

SEQ ID NO: 2068153 - RNA, 19 nt, Artificial Sequence
  Description of Artificial Sequence: Synthetic oligonucleotide
  Antisense strand to SEQ ID NO: 2068152
aaacuucugcuuauuaaga

SEQ ID NO: 2068154 - RNA, 19 nt, Artificial Sequence
  Description of Artificial Sequence: Synthetic oligonucleotide
  Sense strand starting at position 3091 of SEQ ID NO: 1881740
aucaucuaacuggguuauu

SEQ ID NO: 2068155 - RNA, 19 nt, Artificial Sequence
  Description of Artificial Sequence: Synthetic oligonucleotide
  Antisense strand to SEQ ID NO: 2068154
aauaacccaguuagaugau

SEQ ID NO: 2068156 - RNA, 19 nt, Artificial Sequence
  Description of Artificial Sequence: Synthetic oligonucleotide
  Sense strand starting at position 3135 of SEQ ID NO: 1881740
ucaacaacuguauguagau

SEQ ID NO: 2068157 - RNA, 19 nt, Artificial Sequence
  Description of Artificial Sequence: Synthetic oligonucleotide
  Antisense strand to SEQ ID NO: 2068156
aucuacauacaguuguuga

SEQ ID NO: 2068158 - RNA, 19 nt, Artificial Sequence
  Description of Artificial Sequence: Synthetic oligonucleotide
  Sense strand starting at position 3445 of SEQ ID NO: 1881740
augauaacaccuugguauu

SEQ ID NO: 2068159 - RNA, 19 nt, Artificial Sequence
  Description of Artificial Sequence: Synthetic oligonucleotide
  Antisense strand to SEQ ID NO: 2068158
aauaccaagguguuaucau

SEQ ID NO: 2068160 - RNA, 19 nt, Artificial Sequence
  Description of Artificial Sequence: Synthetic oligonucleotide
  Sense strand starting at position 3446 of SEQ ID NO: 1881740
ugauaacaccuugguauua

SEQ ID NO: 2068161 - RNA, 19 nt, Artificial Sequence
  Description of Artificial Sequence: Synthetic oligonucleotide
  Antisense strand to SEQ ID NO: 2068160
uaauaccaagguguuauca

SEQ ID NO: 2068162 - RNA, 19 nt, Artificial Sequence
  Description of Artificial Sequence: Synthetic oligonucleotide
  Sense strand starting at position 3634 of SEQ ID NO: 1881740
auggauugaugucuaaugu

SEQ ID NO: 2068163 - RNA, 19 nt, Artificial Sequence
  Description of Artificial Sequence: Synthetic oligonucleotide
  Antisense strand to SEQ ID NO: 2068162
acauuagacaucaauccau

SEQ ID NO: 2068164 - RNA, 19 nt, Artificial Sequence
  Description of Artificial Sequence: Synthetic oligonucleotide
  Sense strand starting at position 3635 of SEQ ID NO: 1881740
uggauugaugucuaauguc

SEQ ID NO: 2068165 - RNA, 19 nt, Artificial Sequence
  Description of Artificial Sequence: Synthetic oligonucleotide
  Antisense strand to SEQ ID NO: 2068164
gacauuagacaucaaucca

SEQ ID NO: 2068166 - RNA, 19 nt, Artificial Sequence
  Description of Artificial Sequence: Synthetic oligonucleotide
  Sense strand starting at position 3693 of SEQ ID NO: 1881740
gaugacauguucuuagggu

SEQ ID NO: 2068167 - RNA, 19 nt, Artificial Sequence
  Description of Artificial Sequence: Synthetic oligonucleotide
  Antisense strand to SEQ ID NO: 2068166
acccuaagaacaugucauc

SEQ ID NO: 2068168 - RNA, 19 nt, Artificial Sequence
  Description of Artificial Sequence: Synthetic oligonucleotide
  Sense strand starting at position 3732 of SEQ ID NO: 1881740
ggccauuacugacucauau

SEQ ID NO: 2068169 - RNA, 19 nt, Artificial Sequence
  Description of Artificial Sequence: Synthetic oligonucleotide
  Antisense strand to SEQ ID NO: 2068168
auaugagucaguaauggcc

SEQ ID NO: 2068170 - RNA, 19 nt, Artificial Sequence
  Description of Artificial Sequence: Synthetic oligonucleotide
  Sense strand starting at position 40 of SEQ ID NO: 1881741
guggaacugcaguaacaau

SEQ ID NO: 2068171 - RNA, 19 nt, Artificial Sequence
  Description of Artificial Sequence: Synthetic oligonucleotide
  Antisense strand to SEQ ID NO: 2068170
auuguuacugcaguuccac

SEQ ID NO: 2068172 - RNA, 19 nt, Artificial Sequence
  Description of Artificial Sequence: Synthetic oligonucleotide
  Sense strand starting at position 51 of SEQ ID NO: 1881741
guaacaauauuugguguaa

SEQ ID NO: 2068173 - RNA, 19 nt, Artificial Sequence
  Description of Artificial Sequence: Synthetic oligonucleotide
  Antisense strand to SEQ ID NO: 2068172
uuacaccaaauauuguuac

SEQ ID NO: 2068174 - RNA, 19 nt, Artificial Sequence
  Description of Artificial Sequence: Synthetic oligonucleotide
  Sense strand starting at position 111 of SEQ ID NO: 1881741
gggacagaauucuggugaa

SEQ ID NO: 2068175 - RNA, 19 nt, Artificial Sequence
  Description of Artificial Sequence: Synthetic oligonucleotide
  Antisense strand to SEQ ID NO: 2068174
uucaccagaauucuguccc

SEQ ID NO: 2068176 - RNA, 19 nt, Artificial Sequence
  Description of Artificial Sequence: Synthetic oligonucleotide
  Sense strand starting at position 114 of SEQ ID NO: 1881741
acagaauucuggugaaucu

SEQ ID NO: 2068177 - RNA, 19 nt, Artificial Sequence
  Description of Artificial Sequence: Synthetic oligonucleotide
  Antisense strand to SEQ ID NO: 2068176
agauucaccagaauucugu

SEQ ID NO: 2068178 - RNA, 19 nt, Artificial Sequence
  Description of Artificial Sequence: Synthetic oligonucleotide
  Sense strand starting at position 133 of SEQ ID NO: 1881741
cccuuuggccuauaaggaa

SEQ ID NO: 2068179 - RNA, 19 nt, Artificial Sequence
  Description of Artificial Sequence: Synthetic oligonucleotide
  Antisense strand to SEQ ID NO: 2068178
uuccuuauaggccaaaggg

SEQ ID NO: 2068180 - RNA, 19 nt, Artificial Sequence
  Description of Artificial Sequence: Synthetic oligonucleotide
  Sense strand starting at position 155 of SEQ ID NO: 1881741
agauuuaggcucugacggu

SEQ ID NO: 2068181 - RNA, 19 nt, Artificial Sequence
  Description of Artificial Sequence: Synthetic oligonucleotide
  Antisense strand to SEQ ID NO: 2068180
accgucagagccuaaaucu

SEQ ID NO: 2068182 - RNA, 19 nt, Artificial Sequence
  Description of Artificial Sequence: Synthetic oligonucleotide
  Sense strand starting at position 156 of SEQ ID NO: 1881741
gauuuaggcucugacgguu

SEQ ID NO: 2068183 - RNA, 19 nt, Artificial Sequence
  Description of Artificial Sequence: Synthetic oligonucleotide
  Antisense strand to SEQ ID NO: 2068182
aaccgucagagccuaaauc

SEQ ID NO: 2068184 - RNA, 19 nt, Artificial Sequence
  Description of Artificial Sequence: Synthetic oligonucleotide
  Sense strand starting at position 298 of SEQ ID NO: 1881741
guggauugagcauaguaug

SEQ ID NO: 2068185 - RNA, 19 nt, Artificial Sequence
  Description of Artificial Sequence: Synthetic oligonucleotide
  Antisense strand to SEQ ID NO: 2068184
cauacuaugcucaauccac

SEQ ID NO: 2068186 - RNA, 19 nt, Artificial Sequence
  Description of Artificial Sequence: Synthetic oligonucleotide
  Sense strand starting at position 391 of SEQ ID NO: 1881741
ugagcagaguccugaagag

SEQ ID NO: 2068187 - RNA, 19 nt, Artificial Sequence
  Description of Artificial Sequence: Synthetic oligonucleotide
  Antisense strand to SEQ ID NO: 2068186
cucuucaggacucugcuca

SEQ ID NO: 2068188 - RNA, 19 nt, Artificial Sequence
  Description of Artificial Sequence: Synthetic oligonucleotide
  Sense strand starting at position 478 of SEQ ID NO: 1881741
acuccucgucccuaguaaa

SEQ ID NO: 2068189 - RNA, 19 nt, Artificial Sequence
  Description of Artificial Sequence: Synthetic oligonucleotide
  Antisense strand to SEQ ID NO: 2068188
uuuacuagggacgaggagu

SEQ ID NO: 2068190 - RNA, 19 nt, Artificial Sequence
  Description of Artificial Sequence: Synthetic oligonucleotide
  Sense strand starting at position 510 of SEQ ID NO: 1881741
cuuggucucacugagaguu

SEQ ID NO: 2068191 - RNA, 19 nt, Artificial Sequence
  Description of Artificial Sequence: Synthetic oligonucleotide
  Antisense strand to SEQ ID NO: 2068190
aacucucagugagaccaag

SEQ ID NO: 2068192 - RNA, 19 nt, Artificial Sequence
  Description of Artificial Sequence: Synthetic oligonucleotide
  Sense strand starting at position 512 of SEQ ID NO: 1881741
uggucucacugagaguuua

SEQ ID NO: 2068193 - RNA, 19 nt, Artificial Sequence
  Description of Artificial Sequence: Synthetic oligonucleotide
  Antisense strand to SEQ ID NO: 2068192
uaaacucucagugagacca

SEQ ID NO: 2068194 - RNA, 19 nt, Artificial Sequence
  Description of Artificial Sequence: Synthetic oligonucleotide
  Sense strand starting at position 520 of SEQ ID NO: 1881741
cugagaguuuaccugagug

SEQ ID NO: 2068195 - RNA, 19 nt, Artificial Sequence
  Description of Artificial Sequence: Synthetic oligonucleotide
  Antisense strand to SEQ ID NO: 2068194
cacucagguaaacucucag

SEQ ID NO: 2068196 - RNA, 19 nt, Artificial Sequence
  Description of Artificial Sequence: Synthetic oligonucleotide
  Sense strand starting at position 524 of SEQ ID NO: 1881741
gaguuuaccugagugaaca

SEQ ID NO: 2068197 - RNA, 19 nt, Artificial Sequence
  Description of Artificial Sequence: Synthetic oligonucleotide
  Antisense strand to SEQ ID NO: 2068196
uguucacucagguaaacuc

SEQ ID NO: 2068198 - RNA, 19 nt, Artificial Sequence
  Description of Artificial Sequence: Synthetic oligonucleotide
  Sense strand starting at position 525 of SEQ ID NO: 1881741
aguuuaccugagugaacag

SEQ ID NO: 2068199 - RNA, 19 nt, Artificial Sequence
  Description of Artificial Sequence: Synthetic oligonucleotide
  Antisense strand to SEQ ID NO: 2068198
cuguucacucagguaaacu

SEQ ID NO: 2068200 - RNA, 19 nt, Artificial Sequence
  Description of Artificial Sequence: Synthetic oligonucleotide
  Sense strand starting at position 565 of SEQ ID NO: 1881741
uggguuaacuguuuccacu

SEQ ID NO: 2068201 - RNA, 19 nt, Artificial Sequence
  Description of Artificial Sequence: Synthetic oligonucleotide
  Antisense strand to SEQ ID NO: 2068200
aguggaaacaguuaaccca

SEQ ID NO: 2068202 - RNA, 19 nt, Artificial Sequence
  Description of Artificial Sequence: Synthetic oligonucleotide
  Sense strand starting at position 567 of SEQ ID NO: 1881741
gguuaacuguuuccacuac

SEQ ID NO: 2068203 - RNA, 19 nt, Artificial Sequence
  Description of Artificial Sequence: Synthetic oligonucleotide
  Antisense strand to SEQ ID NO: 2068202
guaguggaaacaguuaacc

SEQ ID NO: 2068204 - RNA, 19 nt, Artificial Sequence
  Description of Artificial Sequence: Synthetic oligonucleotide
  Sense strand starting at position 642 of SEQ ID NO: 1881741
cccagauaccaggguuaca

SEQ ID NO: 2068205 - RNA, 19 nt, Artificial Sequence
  Description of Artificial Sequence: Synthetic oligonucleotide
  Antisense strand to SEQ ID NO: 2068204
uguaacccugguaucuggg

SEQ ID NO: 2068206 - RNA, 19 nt, Artificial Sequence
  Description of Artificial Sequence: Synthetic oligonucleotide
  Sense strand starting at position 713 of SEQ ID NO: 1881741
uucguuaaagcucacuaaa

SEQ ID NO: 2068207 - RNA, 19 nt, Artificial Sequence
  Description of Artificial Sequence: Synthetic oligonucleotide
  Antisense strand to SEQ ID NO: 2068206
uuuagugagcuuuaacgaa

SEQ ID NO: 2068208 - RNA, 19 nt, Artificial Sequence
  Description of Artificial Sequence: Synthetic oligonucleotide
  Sense strand starting at position 715 of SEQ ID NO: 1881741
cguuaaagcucacuaaaug

SEQ ID NO: 2068209 - RNA, 19 nt, Artificial Sequence
  Description of Artificial Sequence: Synthetic oligonucleotide
  Antisense strand to SEQ ID NO: 2068208
cauuuagugagcuuuaacg

SEQ ID NO: 2068210 - RNA, 19 nt, Artificial Sequence
  Description of Artificial Sequence: Synthetic oligonucleotide
  Sense strand starting at position 716 of SEQ ID NO: 1881741
guuaaagcucacuaaauga

SEQ ID NO: 2068211 - RNA, 19 nt, Artificial Sequence
  Description of Artificial Sequence: Synthetic oligonucleotide
  Antisense strand to SEQ ID NO: 2068210
ucauuuagugagcuuuaac

SEQ ID NO: 2068212 - RNA, 19 nt, Artificial Sequence
  Description of Artificial Sequence: Synthetic oligonucleotide
  Sense strand starting at position 763 of SEQ ID NO: 1881741
cugcaagauuuagacauga

SEQ ID NO: 2068213 - RNA, 19 nt, Artificial Sequence
  Description of Artificial Sequence: Synthetic oligonucleotide
  Antisense strand to SEQ ID NO: 2068212
ucaugucuaaaucuugcag

SEQ ID NO: 2068214 - RNA, 19 nt, Artificial Sequence
  Description of Artificial Sequence: Synthetic oligonucleotide
  Sense strand starting at position 500 of SEQ ID NO: 1881743
gccuuaugugacugaucug

SEQ ID NO: 2068215 - RNA, 19 nt, Artificial Sequence
  Description of Artificial Sequence: Synthetic oligonucleotide
  Antisense strand to SEQ ID NO: 2068214
cagaucagucacauaaggc

SEQ ID NO: 2068216 - RNA, 19 nt, Artificial Sequence
  Description of Artificial Sequence: Synthetic oligonucleotide
  Sense strand starting at position 503 of SEQ ID NO: 1881743
uuaugugacugaucugcaa

SEQ ID NO: 2068217 - RNA, 19 nt, Artificial Sequence
  Description of Artificial Sequence: Synthetic oligonucleotide
  Antisense strand to SEQ ID NO: 2068216
uugcagaucagucacauaa

SEQ ID NO: 2068218 - RNA, 19 nt, Artificial Sequence
  Description of Artificial Sequence: Synthetic oligonucleotide
  Sense strand starting at position 527 of SEQ ID NO: 1881743
gagauaauagcauguacca

SEQ ID NO: 2068219 - RNA, 19 nt, Artificial Sequence
  Description of Artificial Sequence: Synthetic oligonucleotide
  Antisense strand to SEQ ID NO: 2068218
ugguacaugcuauuaucuc

SEQ ID NO: 2068220 - RNA, 19 nt, Artificial Sequence
  Description of Artificial Sequence: Synthetic oligonucleotide
  Sense strand starting at position 549 of SEQ ID NO: 1881743
gauaguuaugguggcgauu

SEQ ID NO: 2068221 - RNA, 19 nt, Artificial Sequence
  Description of Artificial Sequence: Synthetic oligonucleotide
  Antisense strand to SEQ ID NO: 2068220
aaucgccaccauaacuauc

SEQ ID NO: 2068222 - RNA, 19 nt, Artificial Sequence
  Description of Artificial Sequence: Synthetic oligonucleotide
  Sense strand starting at position 552 of SEQ ID NO: 1881743
aguuaugguggcgauuaaa

SEQ ID NO: 2068223 - RNA, 19 nt, Artificial Sequence
  Description of Artificial Sequence: Synthetic oligonucleotide
  Antisense strand to SEQ ID NO: 2068222
uuuaaucgccaccauaacu

SEQ ID NO: 2068224 - RNA, 19 nt, Artificial Sequence
  Description of Artificial Sequence: Synthetic oligonucleotide
  Sense strand starting at position 555 of SEQ ID NO: 1881743
uaugguggcgauuaaagga

SEQ ID NO: 2068225 - RNA, 19 nt, Artificial Sequence
  Description of Artificial Sequence: Synthetic oligonucleotide
  Antisense strand to SEQ ID NO: 2068224
uccuuuaaucgccaccaua

SEQ ID NO: 2068226 - RNA, 19 nt, Artificial Sequence
  Description of Artificial Sequence: Synthetic oligonucleotide
  Sense strand starting at position 887 of SEQ ID NO: 1881743
agucaacaagucugucuua

SEQ ID NO: 2068227 - RNA, 19 nt, Artificial Sequence
  Description of Artificial Sequence: Synthetic oligonucleotide
  Antisense strand to SEQ ID NO: 2068226
uaagacagacuuguugacu

SEQ ID NO: 2068228 - RNA, 19 nt, Artificial Sequence
  Description of Artificial Sequence: Synthetic oligonucleotide
  Sense strand starting at position 954 of SEQ ID NO: 1881743
aucuuuacucuugguuaga

SEQ ID NO: 2068229 - RNA, 19 nt, Artificial Sequence
  Description of Artificial Sequence: Synthetic oligonucleotide
  Antisense strand to SEQ ID NO: 2068228
ucuaaccaagaguaaagau

SEQ ID NO: 2068230 - RNA, 19 nt, Artificial Sequence
  Description of Artificial Sequence: Synthetic oligonucleotide
  Sense strand starting at position 955 of SEQ ID NO: 1881743
ucuuuacucuugguuagau

SEQ ID NO: 2068231 - RNA, 19 nt, Artificial Sequence
  Description of Artificial Sequence: Synthetic oligonucleotide
  Antisense strand to SEQ ID NO: 2068230
aucuaaccaagaguaaaga

SEQ ID NO: 2068232 - RNA, 19 nt, Artificial Sequence
  Description of Artificial Sequence: Synthetic oligonucleotide
  Sense strand starting at position 956 of SEQ ID NO: 1881743
cuuuacucuugguuagaua

SEQ ID NO: 2068233 - RNA, 19 nt, Artificial Sequence
  Description of Artificial Sequence: Synthetic oligonucleotide
  Antisense strand to SEQ ID NO: 2068232
uaucuaaccaagaguaaag

SEQ ID NO: 2068234 - RNA, 19 nt, Artificial Sequence
  Description of Artificial Sequence: Synthetic oligonucleotide
  Sense strand starting at position 957 of SEQ ID NO: 1881743
uuuacucuugguuagauaa

SEQ ID NO: 2068235 - RNA, 19 nt, Artificial Sequence
  Description of Artificial Sequence: Synthetic oligonucleotide
  Antisense strand to SEQ ID NO: 2068234
uuaucuaaccaagaguaaa

SEQ ID NO: 2068236 - RNA, 19 nt, Artificial Sequence
  Description of Artificial Sequence: Synthetic oligonucleotide
  Sense strand starting at position 1031 of SEQ ID NO: 1881743
cuaagaauuuaucacgcau

SEQ ID NO: 2068237 - RNA, 19 nt, Artificial Sequence
  Description of Artificial Sequence: Synthetic oligonucleotide
  Antisense strand to SEQ ID NO: 2068236
augcgugauaaauucuuag

SEQ ID NO: 2068238 - RNA, 19 nt, Artificial Sequence
  Description of Artificial Sequence: Synthetic oligonucleotide
  Sense strand starting at position 1069 of SEQ ID NO: 1881743
cuuugaaagcaucgaauug

SEQ ID NO: 2068239 - RNA, 19 nt, Artificial Sequence
  Description of Artificial Sequence: Synthetic oligonucleotide
  Antisense strand to SEQ ID NO: 2068238
caauucgaugcuuucaaag

SEQ ID NO: 2068240 - RNA, 19 nt, Artificial Sequence
  Description of Artificial Sequence: Synthetic oligonucleotide
  Sense strand starting at position 1101 of SEQ ID NO: 1881743
guaacuguuccacacauuc

SEQ ID NO: 2068241 - RNA, 19 nt, Artificial Sequence
  Description of Artificial Sequence: Synthetic oligonucleotide
  Antisense strand to SEQ ID NO: 2068240
gaauguguggaacaguuac

SEQ ID NO: 2068242 - RNA, 19 nt, Artificial Sequence
  Description of Artificial Sequence: Synthetic oligonucleotide
  Sense strand starting at position 1195 of SEQ ID NO: 1881743
cgaccuuuaaugcgggaaa

SEQ ID NO: 2068243 - RNA, 19 nt, Artificial Sequence
  Description of Artificial Sequence: Synthetic oligonucleotide
  Antisense strand to SEQ ID NO: 2068242
uuucccgcauuaaaggucg

SEQ ID NO: 2068244 - RNA, 19 nt, Artificial Sequence
  Description of Artificial Sequence: Synthetic oligonucleotide
  Sense strand starting at position 1197 of SEQ ID NO: 1881743
accuuuaaugcgggaaaug

SEQ ID NO: 2068245 - RNA, 19 nt, Artificial Sequence
  Description of Artificial Sequence: Synthetic oligonucleotide
  Antisense strand to SEQ ID NO: 2068244
cauuucccgcauuaaaggu

SEQ ID NO: 2068246 - RNA, 19 nt, Artificial Sequence
  Description of Artificial Sequence: Synthetic oligonucleotide
  Sense strand starting at position 1198 of SEQ ID NO: 1881743
ccuuuaaugcgggaaaugu

SEQ ID NO: 2068247 - RNA, 19 nt, Artificial Sequence
  Description of Artificial Sequence: Synthetic oligonucleotide
  Antisense strand to SEQ ID NO: 2068246
acauuucccgcauuaaagg

SEQ ID NO: 2068248 - RNA, 19 nt, Artificial Sequence
  Description of Artificial Sequence: Synthetic oligonucleotide
  Sense strand starting at position 1206 of SEQ ID NO: 1881743
gcgggaaaugugcaugauc

SEQ ID NO: 2068249 - RNA, 19 nt, Artificial Sequence
  Description of Artificial Sequence: Synthetic oligonucleotide
  Antisense strand to SEQ ID NO: 2068248
gaucaugcacauuucccgc

SEQ ID NO: 2068250 - RNA, 19 nt, Artificial Sequence
  Description of Artificial Sequence: Synthetic oligonucleotide
  Sense strand starting at position 1209 of SEQ ID NO: 1881743
ggaaaugugcaugauccca

SEQ ID NO: 2068251 - RNA, 19 nt, Artificial Sequence
  Description of Artificial Sequence: Synthetic oligonucleotide
  Antisense strand to SEQ ID NO: 2068250
ugggaucaugcacauuucc

SEQ ID NO: 2068252 - RNA, 19 nt, Artificial Sequence
  Description of Artificial Sequence: Synthetic oligonucleotide
  Sense strand starting at position 2231 of SEQ ID NO: 1881743
gagggaucgcugcaaccuu

SEQ ID NO: 2068253 - RNA, 19 nt, Artificial Sequence
  Description of Artificial Sequence: Synthetic oligonucleotide
  Antisense strand to SEQ ID NO: 2068252
aagguugcagcgaucccuc

SEQ ID NO: 2068254 - RNA, 19 nt, Artificial Sequence
  Description of Artificial Sequence: Synthetic oligonucleotide
  Sense strand starting at position 2238 of SEQ ID NO: 1881743
cgcugcaaccuuuagacua

SEQ ID NO: 2068255 - RNA, 19 nt, Artificial Sequence
  Description of Artificial Sequence: Synthetic oligonucleotide
  Antisense strand to SEQ ID NO: 2068254
uagucuaaagguugcagcg

SEQ ID NO: 2068256 - RNA, 19 nt, Artificial Sequence
  Description of Artificial Sequence: Synthetic oligonucleotide
  Sense strand starting at position 2250 of SEQ ID NO: 1881743
uagacuaaugacuguccga

SEQ ID NO: 2068257 - RNA, 19 nt, Artificial Sequence
  Description of Artificial Sequence: Synthetic oligonucleotide
  Antisense strand to SEQ ID NO: 2068256
ucggacagucauuagucua

SEQ ID NO: 2068258 - RNA, 19 nt, Artificial Sequence
  Description of Artificial Sequence: Synthetic oligonucleotide
  Sense strand starting at position 2253 of SEQ ID NO: 1881743
acuaaugacuguccgaaac

SEQ ID NO: 2068259 - RNA, 19 nt, Artificial Sequence
  Description of Artificial Sequence: Synthetic oligonucleotide
  Antisense strand to SEQ ID NO: 2068258
guuucggacagucauuagu

SEQ ID NO: 2068260 - RNA, 19 nt, Artificial Sequence
  Description of Artificial Sequence: Synthetic oligonucleotide
  Sense strand starting at position 2264 of SEQ ID NO: 1881743
uccgaaacaucgccuccau

SEQ ID NO: 2068261 - RNA, 19 nt, Artificial Sequence
  Description of Artificial Sequence: Synthetic oligonucleotide
  Antisense strand to SEQ ID NO: 2068260
auggaggcgauguuucgga

SEQ ID NO: 2068262 - RNA, 19 nt, Artificial Sequence
  Description of Artificial Sequence: Synthetic oligonucleotide
  Sense strand starting at position 2659 of SEQ ID NO: 1881743
ucuucuugcggucaagaca

SEQ ID NO: 2068263 - RNA, 19 nt, Artificial Sequence
  Description of Artificial Sequence: Synthetic oligonucleotide
  Antisense strand to SEQ ID NO: 2068262
ugucuugaccgcaagaaga

SEQ ID NO: 2068264 - RNA, 19 nt, Artificial Sequence
  Description of Artificial Sequence: Synthetic oligonucleotide
  Sense strand starting at position 2757 of SEQ ID NO: 1881743
gcaauuguguaucuggaga

SEQ ID NO: 2068265 - RNA, 19 nt, Artificial Sequence
  Description of Artificial Sequence: Synthetic oligonucleotide
  Antisense strand to SEQ ID NO: 2068264
ucuccagauacacaauugc

SEQ ID NO: 2068266 - RNA, 19 nt, Artificial Sequence
  Description of Artificial Sequence: Synthetic oligonucleotide
  Sense strand starting at position 2855 of SEQ ID NO: 1881743
accguaauuugcuccgcau

SEQ ID NO: 2068267 - RNA, 19 nt, Artificial Sequence
  Description of Artificial Sequence: Synthetic oligonucleotide
  Antisense strand to SEQ ID NO: 2068266
augcggagcaaauuacggu

SEQ ID NO: 2068268 - RNA, 19 nt, Artificial Sequence
  Description of Artificial Sequence: Synthetic oligonucleotide
  Sense strand starting at position 2919 of SEQ ID NO: 1881743
guaauauuugcaggcccua

SEQ ID NO: 2068269 - RNA, 19 nt, Artificial Sequence
  Description of Artificial Sequence: Synthetic oligonucleotide
  Antisense strand to SEQ ID NO: 2068268
uagggccugcaaauauuac

SEQ ID NO: 2068270 - RNA, 19 nt, Artificial Sequence
  Description of Artificial Sequence: Synthetic oligonucleotide
  Sense strand starting at position 2961 of SEQ ID NO: 1881743
ggaggaggucuccaggguu

SEQ ID NO: 2068271 - RNA, 19 nt, Artificial Sequence
  Description of Artificial Sequence: Synthetic oligonucleotide
  Antisense strand to SEQ ID NO: 2068270
aacccuggagaccuccucc

SEQ ID NO: 2068272 - RNA, 19 nt, Artificial Sequence
  Description of Artificial Sequence: Synthetic oligonucleotide
  Sense strand starting at position 2964 of SEQ ID NO: 1881743
ggaggucuccaggguuauc

SEQ ID NO: 2068273 - RNA, 19 nt, Artificial Sequence
  Description of Artificial Sequence: Synthetic oligonucleotide
  Antisense strand to SEQ ID NO: 2068272
gauaacccuggagaccucc

SEQ ID NO: 2068274 - RNA, 19 nt, Artificial Sequence
  Description of Artificial Sequence: Synthetic oligonucleotide
  Sense strand starting at position 3036 of SEQ ID NO: 1881743
ggacaucacuggguucuga

SEQ ID NO: 2068275 - RNA, 19 nt, Artificial Sequence
  Description of Artificial Sequence: Synthetic oligonucleotide
  Antisense strand to SEQ ID NO: 2068274
ucagaacccagugaugucc

SEQ ID NO: 2068276 - RNA, 19 nt, Artificial Sequence
  Description of Artificial Sequence: Synthetic oligonucleotide
  Sense strand starting at position 3193 of SEQ ID NO: 1881743
gggagcucagauuggagua

SEQ ID NO: 2068277 - RNA, 19 nt, Artificial Sequence
  Description of Artificial Sequence: Synthetic oligonucleotide
  Antisense strand to SEQ ID NO: 2068276
uacuccaaucugagcuccc

SEQ ID NO: 2068278 - RNA, 19 nt, Artificial Sequence
  Description of Artificial Sequence: Synthetic oligonucleotide
  Sense strand starting at position 3194 of SEQ ID NO: 1881743
ggagcucagauuggaguaa

SEQ ID NO: 2068279 - RNA, 19 nt, Artificial Sequence
  Description of Artificial Sequence: Synthetic oligonucleotide
  Antisense strand to SEQ ID NO: 2068278
uuacuccaaucugagcucc

SEQ ID NO: 2068280 - RNA, 19 nt, Artificial Sequence
  Description of Artificial Sequence: Synthetic oligonucleotide
  Sense strand starting at position 3405 of SEQ ID NO: 1881743
uggagaagcccugguguaa

SEQ ID NO: 2068281 - RNA, 19 nt, Artificial Sequence
  Description of Artificial Sequence: Synthetic oligonucleotide
  Antisense strand to SEQ ID NO: 2068280
uuacaccagggcuucucca

SEQ ID NO: 2068282 - RNA, 19 nt, Artificial Sequence
  Description of Artificial Sequence: Synthetic oligonucleotide
  Sense strand starting at position 3626 of SEQ ID NO: 1881743
gagugauagcugcacaggu

SEQ ID NO: 2068283 - RNA, 19 nt, Artificial Sequence
  Description of Artificial Sequence: Synthetic oligonucleotide
  Antisense strand to SEQ ID NO: 2068282
accugugcagcuaucacuc

SEQ ID NO: 2068284 - RNA, 19 nt, Artificial Sequence
  Description of Artificial Sequence: Synthetic oligonucleotide
  Sense strand starting at position 3710 of SEQ ID NO: 1881743
uuuccuuucucugcgagga

SEQ ID NO: 2068285 - RNA, 19 nt, Artificial Sequence
  Description of Artificial Sequence: Synthetic oligonucleotide
  Antisense strand to SEQ ID NO: 2068284
uccucgcagagaaaggaaa

SEQ ID NO: 2068286 - RNA, 19 nt, Artificial Sequence
  Description of Artificial Sequence: Synthetic oligonucleotide
  Sense strand starting at position 3783 of SEQ ID NO: 1881743
cucaguuucucuccuacga

SEQ ID NO: 2068287 - RNA, 19 nt, Artificial Sequence
  Description of Artificial Sequence: Synthetic oligonucleotide
  Antisense strand to SEQ ID NO: 2068286
ucguaggagagaaacugag

SEQ ID NO: 2068288 - RNA, 19 nt, Artificial Sequence
  Description of Artificial Sequence: Synthetic oligonucleotide
  Sense strand starting at position 3799 of SEQ ID NO: 1881743
cgaccaguuccugagggaa

SEQ ID NO: 2068289 - RNA, 19 nt, Artificial Sequence
  Description of Artificial Sequence: Synthetic oligonucleotide
  Antisense strand to SEQ ID NO: 2068288
uucccucaggaacuggucg

SEQ ID NO: 2068290 - RNA, 19 nt, Artificial Sequence
  Description of Artificial Sequence: Synthetic oligonucleotide
  Sense strand starting at position 3807 of SEQ ID NO: 1881743
uccugagggaacugugaau

SEQ ID NO: 2068291 - RNA, 19 nt, Artificial Sequence
  Description of Artificial Sequence: Synthetic oligonucleotide
  Antisense strand to SEQ ID NO: 2068290
auucacaguucccucagga

SEQ ID NO: 2068292 - RNA, 19 nt, Artificial Sequence
  Description of Artificial Sequence: Synthetic oligonucleotide
  Sense strand starting at position 3942 of SEQ ID NO: 1881743
gguuacaccucucugugua

SEQ ID NO: 2068293 - RNA, 19 nt, Artificial Sequence
  Description of Artificial Sequence: Synthetic oligonucleotide
  Antisense strand to SEQ ID NO: 2068292
uacacagagagguguaacc

SEQ ID NO: 2068294 - RNA, 19 nt, Artificial Sequence
  Description of Artificial Sequence: Synthetic oligonucleotide
  Sense strand starting at position 185 of SEQ ID NO: 1881744
ccucccucaguguaaauaa

SEQ ID NO: 2068295 - RNA, 19 nt, Artificial Sequence
  Description of Artificial Sequence: Synthetic oligonucleotide
  Antisense strand to SEQ ID NO: 2068294
uuauuuacacugagggagg

SEQ ID NO: 2068296 - RNA, 19 nt, Artificial Sequence
  Description of Artificial Sequence: Synthetic oligonucleotide
  Sense strand starting at position 363 of SEQ ID NO: 1881744
gugaauauuuaagagucaa

SEQ ID NO: 2068297 - RNA, 19 nt, Artificial Sequence
  Description of Artificial Sequence: Synthetic oligonucleotide
  Antisense strand to SEQ ID NO: 2068296
uugacucuuaaauauucac

SEQ ID NO: 2068298 - RNA, 19 nt, Artificial Sequence
  Description of Artificial Sequence: Synthetic oligonucleotide
  Sense strand starting at position 589 of SEQ ID NO: 1881744
aagaguuguagauguuagu

SEQ ID NO: 2068299 - RNA, 19 nt, Artificial Sequence
  Description of Artificial Sequence: Synthetic oligonucleotide
  Antisense strand to SEQ ID NO: 2068298
acuaacaucuacaacucuu

SEQ ID NO: 2068300 - RNA, 19 nt, Artificial Sequence
  Description of Artificial Sequence: Synthetic oligonucleotide
  Sense strand starting at position 684 of SEQ ID NO: 1881744
uaagguuacuucgugagga

SEQ ID NO: 2068301 - RNA, 19 nt, Artificial Sequence
  Description of Artificial Sequence: Synthetic oligonucleotide
  Antisense strand to SEQ ID NO: 2068300
uccucacgaaguaaccuua

SEQ ID NO: 2068302 - RNA, 19 nt, Artificial Sequence
  Description of Artificial Sequence: Synthetic oligonucleotide
  Sense strand starting at position 686 of SEQ ID NO: 1881744
agguuacuucgugaggauu

SEQ ID NO: 2068303 - RNA, 19 nt, Artificial Sequence
  Description of Artificial Sequence: Synthetic oligonucleotide
  Antisense strand to SEQ ID NO: 2068302
aauccucacgaaguaaccu

SEQ ID NO: 2068304 - RNA, 19 nt, Artificial Sequence
  Description of Artificial Sequence: Synthetic oligonucleotide
  Sense strand starting at position 689 of SEQ ID NO: 1881744
uuacuucgugaggauuaaa

SEQ ID NO: 2068305 - RNA, 19 nt, Artificial Sequence
  Description of Artificial Sequence: Synthetic oligonucleotide
  Antisense strand to SEQ ID NO: 2068304
uuuaauccucacgaaguaa

SEQ ID NO: 2068306 - RNA, 19 nt, Artificial Sequence
  Description of Artificial Sequence: Synthetic oligonucleotide
  Sense strand starting at position 692 of SEQ ID NO: 1881744
cuucgugaggauuaaauau

SEQ ID NO: 2068307 - RNA, 19 nt, Artificial Sequence
  Description of Artificial Sequence: Synthetic oligonucleotide
  Antisense strand to SEQ ID NO: 2068306
auauuuaauccucacgaag

SEQ ID NO: 2068308 - RNA, 19 nt, Artificial Sequence
  Description of Artificial Sequence: Synthetic oligonucleotide
  Sense strand starting at position 905 of SEQ ID NO: 1881744
gcccacauuuggucuguuu

SEQ ID NO: 2068309 - RNA, 19 nt, Artificial Sequence
  Description of Artificial Sequence: Synthetic oligonucleotide
  Antisense strand to SEQ ID NO: 2068308
aaacagaccaaaugugggc

SEQ ID NO: 2068310 - RNA, 19 nt, Artificial Sequence
  Description of Artificial Sequence: Synthetic oligonucleotide
  Sense strand starting at position 916 of SEQ ID NO: 1881744
gucuguuuaagggacuaac

SEQ ID NO: 2068311 - RNA, 19 nt, Artificial Sequence
  Description of Artificial Sequence: Synthetic oligonucleotide
  Antisense strand to SEQ ID NO: 2068310
guuagucccuuaaacagac

SEQ ID NO: 2068312 - RNA, 19 nt, Artificial Sequence
  Description of Artificial Sequence: Synthetic oligonucleotide
  Sense strand starting at position 1076 of SEQ ID NO: 1881744
ccaacuuuguuaucuugga

SEQ ID NO: 2068313 - RNA, 19 nt, Artificial Sequence
  Description of Artificial Sequence: Synthetic oligonucleotide
  Antisense strand to SEQ ID NO: 2068312
uccaagauaacaaaguugg

SEQ ID NO: 2068314 - RNA, 19 nt, Artificial Sequence
  Description of Artificial Sequence: Synthetic oligonucleotide
  Sense strand starting at position 1080 of SEQ ID NO: 1881744
cuuuguuaucuuggaguaa

SEQ ID NO: 2068315 - RNA, 19 nt, Artificial Sequence
  Description of Artificial Sequence: Synthetic oligonucleotide
  Antisense strand to SEQ ID NO: 2068314
uuacuccaagauaacaaag

SEQ ID NO: 2068316 - RNA, 19 nt, Artificial Sequence
  Description of Artificial Sequence: Synthetic oligonucleotide
  Sense strand starting at position 1084 of SEQ ID NO: 1881744
guuaucuuggaguaauuga

SEQ ID NO: 2068317 - RNA, 19 nt, Artificial Sequence
  Description of Artificial Sequence: Synthetic oligonucleotide
  Antisense strand to SEQ ID NO: 2068316
ucaauuacuccaagauaac

SEQ ID NO: 2068318 - RNA, 19 nt, Artificial Sequence
  Description of Artificial Sequence: Synthetic oligonucleotide
  Sense strand starting at position 1095 of SEQ ID NO: 1881744
guaauugacgaguaaauca

SEQ ID NO: 2068319 - RNA, 19 nt, Artificial Sequence
  Description of Artificial Sequence: Synthetic oligonucleotide
  Antisense strand to SEQ ID NO: 2068318
ugauuuacucgucaauuac

SEQ ID NO: 2068320 - RNA, 19 nt, Artificial Sequence
  Description of Artificial Sequence: Synthetic oligonucleotide
  Sense strand starting at position 1102 of SEQ ID NO: 1881744
acgaguaaaucauuacaaa

SEQ ID NO: 2068321 - RNA, 19 nt, Artificial Sequence
  Description of Artificial Sequence: Synthetic oligonucleotide
  Antisense strand to SEQ ID NO: 2068320
uuuguaaugauuuacucgu

SEQ ID NO: 2068322 - RNA, 19 nt, Artificial Sequence
  Description of Artificial Sequence: Synthetic oligonucleotide
  Sense strand starting at position 1175 of SEQ ID NO: 1881744
uugccuuauguuuauuaga

SEQ ID NO: 2068323 - RNA, 19 nt, Artificial Sequence
  Description of Artificial Sequence: Synthetic oligonucleotide
  Antisense strand to SEQ ID NO: 2068322
ucuaauaaacauaaggcaa

SEQ ID NO: 2068324 - RNA, 19 nt, Artificial Sequence
  Description of Artificial Sequence: Synthetic oligonucleotide
  Sense strand starting at position 1177 of SEQ ID NO: 1881744
gccuuauguuuauuagagg

SEQ ID NO: 2068325 - RNA, 19 nt, Artificial Sequence
  Description of Artificial Sequence: Synthetic oligonucleotide
  Antisense strand to SEQ ID NO: 2068324
ccucuaauaaacauaaggc

SEQ ID NO: 2068326 - RNA, 19 nt, Artificial Sequence
  Description of Artificial Sequence: Synthetic oligonucleotide
  Sense strand starting at position 1200 of SEQ ID NO: 1881744
ccugaaacuucuguagauu

SEQ ID NO: 2068327 - RNA, 19 nt, Artificial Sequence
  Description of Artificial Sequence: Synthetic oligonucleotide
  Antisense strand to SEQ ID NO: 2068326
aaucuacagaaguuucagg

SEQ ID NO: 2068328 - RNA, 19 nt, Artificial Sequence
  Description of Artificial Sequence: Synthetic oligonucleotide
  Sense strand starting at position 1203 of SEQ ID NO: 1881744
gaaacuucuguagauugca

SEQ ID NO: 2068329 - RNA, 19 nt, Artificial Sequence
  Description of Artificial Sequence: Synthetic oligonucleotide
  Antisense strand to SEQ ID NO: 2068328
ugcaaucuacagaaguuuc

SEQ ID NO: 2068330 - RNA, 19 nt, Artificial Sequence
  Description of Artificial Sequence: Synthetic oligonucleotide
  Sense strand starting at position 1241 of SEQ ID NO: 1881744
ugugauuacagcgauguua

SEQ ID NO: 2068331 - RNA, 19 nt, Artificial Sequence
  Description of Artificial Sequence: Synthetic oligonucleotide
  Antisense strand to SEQ ID NO: 2068330
uaacaucgcuguaaucaca

SEQ ID NO: 2068332 - RNA, 19 nt, Artificial Sequence
  Description of Artificial Sequence: Synthetic oligonucleotide
  Sense strand starting at position 1278 of SEQ ID NO: 1881744
aacucuguuguuuaaggga

SEQ ID NO: 2068333 - RNA, 19 nt, Artificial Sequence
  Description of Artificial Sequence: Synthetic oligonucleotide
  Antisense strand to SEQ ID NO: 2068332
ucccuuaaacaacagaguu

SEQ ID NO: 2068334 - RNA, 19 nt, Artificial Sequence
  Description of Artificial Sequence: Synthetic oligonucleotide
  Sense strand starting at position 1325 of SEQ ID NO: 1881744
ucuuuacugccagaacuga

SEQ ID NO: 2068335 - RNA, 19 nt, Artificial Sequence
  Description of Artificial Sequence: Synthetic oligonucleotide
  Antisense strand to SEQ ID NO: 2068334
ucaguucuggcaguaaaga

SEQ ID NO: 2068336 - RNA, 19 nt, Artificial Sequence
  Description of Artificial Sequence: Synthetic oligonucleotide
  Sense strand starting at position 1339 of SEQ ID NO: 1881744
acugaagcgugacccaaau

SEQ ID NO: 2068337 - RNA, 19 nt, Artificial Sequence
  Description of Artificial Sequence: Synthetic oligonucleotide
  Antisense strand to SEQ ID NO: 2068336
auuugggucacgcuucagu

SEQ ID NO: 2068338 - RNA, 19 nt, Artificial Sequence
  Description of Artificial Sequence: Synthetic oligonucleotide
  Sense strand starting at position 1393 of SEQ ID NO: 1881744
ugaugaucacuuggcaguu

SEQ ID NO: 2068339 - RNA, 19 nt, Artificial Sequence
  Description of Artificial Sequence: Synthetic oligonucleotide
  Antisense strand to SEQ ID NO: 2068338
aacugccaagugaucauca

SEQ ID NO: 2068340 - RNA, 19 nt, Artificial Sequence
  Description of Artificial Sequence: Synthetic oligonucleotide
  Sense strand starting at position 1615 of SEQ ID NO: 1881744
ggaguuucgaagcugcgua

SEQ ID NO: 2068341 - RNA, 19 nt, Artificial Sequence
  Description of Artificial Sequence: Synthetic oligonucleotide
  Antisense strand to SEQ ID NO: 2068340
uacgcagcuucgaaacucc

SEQ ID NO: 2068342 - RNA, 19 nt, Artificial Sequence
  Description of Artificial Sequence: Synthetic oligonucleotide
  Sense strand starting at position 1660 of SEQ ID NO: 1881744
uuuauacucuggcuagagu

SEQ ID NO: 2068343 - RNA, 19 nt, Artificial Sequence
  Description of Artificial Sequence: Synthetic oligonucleotide
  Antisense strand to SEQ ID NO: 2068342
acucuagccagaguauaaa

SEQ ID NO: 2068344 - RNA, 19 nt, Artificial Sequence
  Description of Artificial Sequence: Synthetic oligonucleotide
  Sense strand starting at position 1661 of SEQ ID NO: 1881744
uuauacucuggcuagagua

SEQ ID NO: 2068345 - RNA, 19 nt, Artificial Sequence
  Description of Artificial Sequence: Synthetic oligonucleotide
  Antisense strand to SEQ ID NO: 2068344
uacucuagccagaguauaa

SEQ ID NO: 2068346 - RNA, 19 nt, Artificial Sequence
  Description of Artificial Sequence: Synthetic oligonucleotide
  Sense strand starting at position 1663 of SEQ ID NO: 1881744
auacucuggcuagaguaaa

SEQ ID NO: 2068347 - RNA, 19 nt, Artificial Sequence
  Description of Artificial Sequence: Synthetic oligonucleotide
  Antisense strand to SEQ ID NO: 2068346
uuuacucuagccagaguau

SEQ ID NO: 2068348 - RNA, 19 nt, Artificial Sequence
  Description of Artificial Sequence: Synthetic oligonucleotide
  Sense strand starting at position 2952 of SEQ ID NO: 1881744
ggacguuaccugugggaag

SEQ ID NO: 2068349 - RNA, 19 nt, Artificial Sequence
  Description of Artificial Sequence: Synthetic oligonucleotide
  Antisense strand to SEQ ID NO: 2068348
cuucccacagguaacgucc

SEQ ID NO: 2068350 - RNA, 19 nt, Artificial Sequence
  Description of Artificial Sequence: Synthetic oligonucleotide
  Sense strand starting at position 3154 of SEQ ID NO: 1881744
aagcccuucgauuauggaa

SEQ ID NO: 2068351 - RNA, 19 nt, Artificial Sequence
  Description of Artificial Sequence: Synthetic oligonucleotide
  Antisense strand to SEQ ID NO: 2068350
uuccauaaucgaagggcuu

SEQ ID NO: 2068352 - RNA, 19 nt, Artificial Sequence
  Description of Artificial Sequence: Synthetic oligonucleotide
  Sense strand starting at position 3231 of SEQ ID NO: 1881744
acaguuacggcgggauuua

SEQ ID NO: 2068353 - RNA, 19 nt, Artificial Sequence
  Description of Artificial Sequence: Synthetic oligonucleotide
  Antisense strand to SEQ ID NO: 2068352
uaaaucccgccguaacugu

SEQ ID NO: 2068354 - RNA, 19 nt, Artificial Sequence
  Description of Artificial Sequence: Synthetic oligonucleotide
  Sense strand starting at position 3329 of SEQ ID NO: 1881744
ccauuuaauugugagaucu

SEQ ID NO: 2068355 - RNA, 19 nt, Artificial Sequence
  Description of Artificial Sequence: Synthetic oligonucleotide
  Antisense strand to SEQ ID NO: 2068354
agaucucacaauuaaaugg

SEQ ID NO: 2068356 - RNA, 19 nt, Artificial Sequence
  Description of Artificial Sequence: Synthetic oligonucleotide
  Sense strand starting at position 3337 of SEQ ID NO: 1881744
uugugagaucugcaauauc

SEQ ID NO: 2068357 - RNA, 19 nt, Artificial Sequence
  Description of Artificial Sequence: Synthetic oligonucleotide
  Antisense strand to SEQ ID NO: 2068356
gauauugcagaucucacaa

SEQ ID NO: 2068358 - RNA, 19 nt, Artificial Sequence
  Description of Artificial Sequence: Synthetic oligonucleotide
  Sense strand starting at position 3429 of SEQ ID NO: 1881744
auggacuuccaguaccuua

SEQ ID NO: 2068359 - RNA, 19 nt, Artificial Sequence
  Description of Artificial Sequence: Synthetic oligonucleotide
  Antisense strand to SEQ ID NO: 2068358
uaagguacuggaaguccau

SEQ ID NO: 2068360 - RNA, 19 nt, Artificial Sequence
  Description of Artificial Sequence: Synthetic oligonucleotide
  Sense strand starting at position 3478 of SEQ ID NO: 1881744
ggugcucaugcauacgaaa

SEQ ID NO: 2068361 - RNA, 19 nt, Artificial Sequence
  Description of Artificial Sequence: Synthetic oligonucleotide
  Antisense strand to SEQ ID NO: 2068360
uuucguaugcaugagcacc

SEQ ID NO: 2068362 - RNA, 19 nt, Artificial Sequence
  Description of Artificial Sequence: Synthetic oligonucleotide
  Sense strand starting at position 3604 of SEQ ID NO: 1881744
ggcauauuuccagguuggu

SEQ ID NO: 2068363 - RNA, 19 nt, Artificial Sequence
  Description of Artificial Sequence: Synthetic oligonucleotide
  Antisense strand to SEQ ID NO: 2068362
accaaccuggaaauaugcc

SEQ ID NO: 2068364 - RNA, 19 nt, Artificial Sequence
  Description of Artificial Sequence: Synthetic oligonucleotide
  Sense strand starting at position 3731 of SEQ ID NO: 1881744
agugcauaagucuaguaaa

SEQ ID NO: 2068365 - RNA, 19 nt, Artificial Sequence
  Description of Artificial Sequence: Synthetic oligonucleotide
  Antisense strand to SEQ ID NO: 2068364
uuuacuagacuuaugcacu

SEQ ID NO: 2068366 - RNA, 19 nt, Artificial Sequence
  Description of Artificial Sequence: Synthetic oligonucleotide
  Sense strand starting at position 3801 of SEQ ID NO: 1881744
ggaauuagguugguauguu

SEQ ID NO: 2068367 - RNA, 19 nt, Artificial Sequence
  Description of Artificial Sequence: Synthetic oligonucleotide
  Antisense strand to SEQ ID NO: 2068366
aacauaccaaccuaauucc

SEQ ID NO: 2068368 - RNA, 19 nt, Artificial Sequence
  Description of Artificial Sequence: Synthetic oligonucleotide
  Sense strand starting at position 3852 of SEQ ID NO: 1881744
ugagaacucuuccuaugau

SEQ ID NO: 2068369 - RNA, 19 nt, Artificial Sequence
  Description of Artificial Sequence: Synthetic oligonucleotide
  Antisense strand to SEQ ID NO: 2068368
aucauaggaagaguucuca

SEQ ID NO: 2068370 - RNA, 19 nt, Artificial Sequence
  Description of Artificial Sequence: Synthetic oligonucleotide
  Sense strand starting at position 3888 of SEQ ID NO: 1881744
guauguuaauacuuugaac

SEQ ID NO: 2068371 - RNA, 19 nt, Artificial Sequence
  Description of Artificial Sequence: Synthetic oligonucleotide
  Antisense strand to SEQ ID NO: 2068370
guucaaaguauuaacauac

SEQ ID NO: 2068372 - RNA, 19 nt, Artificial Sequence
  Description of Artificial Sequence: Synthetic oligonucleotide
  Sense strand starting at position 3947 of SEQ ID NO: 1881744
guuucuuuccaugaguuaa

SEQ ID NO: 2068373 - RNA, 19 nt, Artificial Sequence
  Description of Artificial Sequence: Synthetic oligonucleotide
  Antisense strand to SEQ ID NO: 2068372
uuaacucauggaaagaaac

SEQ ID NO: 2068374 - RNA, 19 nt, Artificial Sequence
  Description of Artificial Sequence: Synthetic oligonucleotide
  Sense strand starting at position 151 of SEQ ID NO: 1881745
agagcaccuuugguaauua

SEQ ID NO: 2068375 - RNA, 19 nt, Artificial Sequence
  Description of Artificial Sequence: Synthetic oligonucleotide
  Antisense strand to SEQ ID NO: 2068374
uaauuaccaaaggugcucu

SEQ ID NO: 2068376 - RNA, 19 nt, Artificial Sequence
  Description of Artificial Sequence: Synthetic oligonucleotide
  Sense strand starting at position 162 of SEQ ID NO: 1881745
gguaauuacuaagauuucu

SEQ ID NO: 2068377 - RNA, 19 nt, Artificial Sequence
  Description of Artificial Sequence: Synthetic oligonucleotide
  Antisense strand to SEQ ID NO: 2068376
agaaaucuuaguaauuacc

SEQ ID NO: 2068378 - RNA, 19 nt, Artificial Sequence
  Description of Artificial Sequence: Synthetic oligonucleotide
  Sense strand starting at position 187 of SEQ ID NO: 1881745
ggcugauuauuugcucaau

SEQ ID NO: 2068379 - RNA, 19 nt, Artificial Sequence
  Description of Artificial Sequence: Synthetic oligonucleotide
  Antisense strand to SEQ ID NO: 2068378
auugagcaaauaaucagcc

SEQ ID NO: 2068380 - RNA, 19 nt, Artificial Sequence
  Description of Artificial Sequence: Synthetic oligonucleotide
  Sense strand starting at position 215 of SEQ ID NO: 1881745
cuccauggucuguaagauc

SEQ ID NO: 2068381 - RNA, 19 nt, Artificial Sequence
  Description of Artificial Sequence: Synthetic oligonucleotide
  Antisense strand to SEQ ID NO: 2068380
gaucuuacagaccauggag

SEQ ID NO: 2068382 - RNA, 19 nt, Artificial Sequence
  Description of Artificial Sequence: Synthetic oligonucleotide
  Sense strand starting at position 368 of SEQ ID NO: 1881745
gcaacagaauguguuuaaa

SEQ ID NO: 2068383 - RNA, 19 nt, Artificial Sequence
  Description of Artificial Sequence: Synthetic oligonucleotide
  Antisense strand to SEQ ID NO: 2068382
uuuaaacacauucuguugc

SEQ ID NO: 2068384 - RNA, 19 nt, Artificial Sequence
  Description of Artificial Sequence: Synthetic oligonucleotide
  Sense strand starting at position 758 of SEQ ID NO: 1881745
agaagaccuuuauuaguuu

SEQ ID NO: 2068385 - RNA, 19 nt, Artificial Sequence
  Description of Artificial Sequence: Synthetic oligonucleotide
  Antisense strand to SEQ ID NO: 2068384
aaacuaauaaaggucuucu

SEQ ID NO: 2068386 - RNA, 19 nt, Artificial Sequence
  Description of Artificial Sequence: Synthetic oligonucleotide
  Sense strand starting at position 762 of SEQ ID NO: 1881745
gaccuuuauuaguuuguga

SEQ ID NO: 2068387 - RNA, 19 nt, Artificial Sequence
  Description of Artificial Sequence: Synthetic oligonucleotide
  Antisense strand to SEQ ID NO: 2068386
ucacaaacuaauaaagguc

SEQ ID NO: 2068388 - RNA, 19 nt, Artificial Sequence
  Description of Artificial Sequence: Synthetic oligonucleotide
  Sense strand starting at position 770 of SEQ ID NO: 1881745
uuaguuugugacuaaacca

SEQ ID NO: 2068389 - RNA, 19 nt, Artificial Sequence
  Description of Artificial Sequence: Synthetic oligonucleotide
  Antisense strand to SEQ ID NO: 2068388
ugguuuagucacaaacuaa

SEQ ID NO: 2068390 - RNA, 19 nt, Artificial Sequence
  Description of Artificial Sequence: Synthetic oligonucleotide
  Sense strand starting at position 958 of SEQ ID NO: 1881745
cuuacuuucccacggagga

SEQ ID NO: 2068391 - RNA, 19 nt, Artificial Sequence
  Description of Artificial Sequence: Synthetic oligonucleotide
  Antisense strand to SEQ ID NO: 2068390
uccuccgugggaaaguaag

SEQ ID NO: 2068392 - RNA, 19 nt, Artificial Sequence
  Description of Artificial Sequence: Synthetic oligonucleotide
  Sense strand starting at position 979 of SEQ ID NO: 1881745
gacaguguacacggagaau

SEQ ID NO: 2068393 - RNA, 19 nt, Artificial Sequence
  Description of Artificial Sequence: Synthetic oligonucleotide
  Antisense strand to SEQ ID NO: 2068392
auucuccguguacacuguc

SEQ ID NO: 2068394 - RNA, 19 nt, Artificial Sequence
  Description of Artificial Sequence: Synthetic oligonucleotide
  Sense strand starting at position 1290 of SEQ ID NO: 1881745
ugauguccagcucauaaga

SEQ ID NO: 2068395 - RNA, 19 nt, Artificial Sequence
  Description of Artificial Sequence: Synthetic oligonucleotide
  Antisense strand to SEQ ID NO: 2068394
ucuuaugagcuggacauca

SEQ ID NO: 2068396 - RNA, 19 nt, Artificial Sequence
  Description of Artificial Sequence: Synthetic oligonucleotide
  Sense strand starting at position 1303 of SEQ ID NO: 1881745
auaagaauguugcuaagua

SEQ ID NO: 2068397 - RNA, 19 nt, Artificial Sequence
  Description of Artificial Sequence: Synthetic oligonucleotide
  Antisense strand to SEQ ID NO: 2068396
uacuuagcaacauucuuau

SEQ ID NO: 2068398 - RNA, 19 nt, Artificial Sequence
  Description of Artificial Sequence: Synthetic oligonucleotide
  Sense strand starting at position 1313 of SEQ ID NO: 1881745
ugcuaaguaagguaaugaa

SEQ ID NO: 2068399 - RNA, 19 nt, Artificial Sequence
  Description of Artificial Sequence: Synthetic oligonucleotide
  Antisense strand to SEQ ID NO: 2068398
uucauuaccuuacuuagca

SEQ ID NO: 2068400 - RNA, 19 nt, Artificial Sequence
  Description of Artificial Sequence: Synthetic oligonucleotide
  Sense strand starting at position 1393 of SEQ ID NO: 1881745
cagaauuuaugugaaggag

SEQ ID NO: 2068401 - RNA, 19 nt, Artificial Sequence
  Description of Artificial Sequence: Synthetic oligonucleotide
  Antisense strand to SEQ ID NO: 2068400
cuccuucacauaaauucug

SEQ ID NO: 2068402 - RNA, 19 nt, Artificial Sequence
  Description of Artificial Sequence: Synthetic oligonucleotide
  Sense strand starting at position 1622 of SEQ ID NO: 1881745
ugcagcagugaguaugaaa

SEQ ID NO: 2068403 - RNA, 19 nt, Artificial Sequence
  Description of Artificial Sequence: Synthetic oligonucleotide
  Antisense strand to SEQ ID NO: 2068402
uuucauacucacugcugca

SEQ ID NO: 2068404 - RNA, 19 nt, Artificial Sequence
  Description of Artificial Sequence: Synthetic oligonucleotide
  Sense strand starting at position 1802 of SEQ ID NO: 1881745
gggaaagaucuaugcacuu

SEQ ID NO: 2068405 - RNA, 19 nt, Artificial Sequence
  Description of Artificial Sequence: Synthetic oligonucleotide
  Antisense strand to SEQ ID NO: 2068404
aagugcauagaucuuuccc

SEQ ID NO: 2068406 - RNA, 19 nt, Artificial Sequence
  Description of Artificial Sequence: Synthetic oligonucleotide
  Sense strand starting at position 1928 of SEQ ID NO: 1881745
gugguacagagcuaagaga

SEQ ID NO: 2068407 - RNA, 19 nt, Artificial Sequence
  Description of Artificial Sequence: Synthetic oligonucleotide
  Antisense strand to SEQ ID NO: 2068406
ucucuuagcucuguaccac

SEQ ID NO: 2068408 - RNA, 19 nt, Artificial Sequence
  Description of Artificial Sequence: Synthetic oligonucleotide
  Sense strand starting at position 2085 of SEQ ID NO: 1881745
agagucuaacccugacaga

SEQ ID NO: 2068409 - RNA, 19 nt, Artificial Sequence
  Description of Artificial Sequence: Synthetic oligonucleotide
  Antisense strand to SEQ ID NO: 2068408
ucugucaggguuagacucu

SEQ ID NO: 2068410 - RNA, 19 nt, Artificial Sequence
  Description of Artificial Sequence: Synthetic oligonucleotide
  Sense strand starting at position 2114 of SEQ ID NO: 1881745
gcaagagcaaguuaggauu

SEQ ID NO: 2068411 - RNA, 19 nt, Artificial Sequence
  Description of Artificial Sequence: Synthetic oligonucleotide
  Antisense strand to SEQ ID NO: 2068410
aauccuaacuugcucuugc

SEQ ID NO: 2068412 - RNA, 19 nt, Artificial Sequence
  Description of Artificial Sequence: Synthetic oligonucleotide
  Sense strand starting at position 2122 of SEQ ID NO: 1881745
aaguuaggauuauuagcaa

SEQ ID NO: 2068413 - RNA, 19 nt, Artificial Sequence
  Description of Artificial Sequence: Synthetic oligonucleotide
  Antisense strand to SEQ ID NO: 2068412
uugcuaauaauccuaacuu

SEQ ID NO: 2068414 - RNA, 19 nt, Artificial Sequence
  Description of Artificial Sequence: Synthetic oligonucleotide
  Sense strand starting at position 2399 of SEQ ID NO: 1881745
gggccucucaugggagaga

SEQ ID NO: 2068415 - RNA, 19 nt, Artificial Sequence
  Description of Artificial Sequence: Synthetic oligonucleotide
  Antisense strand to SEQ ID NO: 2068414
ucucucccaugagaggccc

SEQ ID NO: 2068416 - RNA, 19 nt, Artificial Sequence
  Description of Artificial Sequence: Synthetic oligonucleotide
  Sense strand starting at position 2569 of SEQ ID NO: 1881745
gugguagcaccucaggaau

SEQ ID NO: 2068417 - RNA, 19 nt, Artificial Sequence
  Description of Artificial Sequence: Synthetic oligonucleotide
  Antisense strand to SEQ ID NO: 2068416
auuccugaggugcuaccac

SEQ ID NO: 2068418 - RNA, 19 nt, Artificial Sequence
  Description of Artificial Sequence: Synthetic oligonucleotide
  Sense strand starting at position 2606 of SEQ ID NO: 1881745
gccaccucuguggaaagua

SEQ ID NO: 2068419 - RNA, 19 nt, Artificial Sequence
  Description of Artificial Sequence: Synthetic oligonucleotide
  Antisense strand to SEQ ID NO: 2068418
uacuuuccacagagguggc

SEQ ID NO: 2068420 - RNA, 19 nt, Artificial Sequence
  Description of Artificial Sequence: Synthetic oligonucleotide
  Sense strand starting at position 2647 of SEQ ID NO: 1881745
guggaaucuuacuuuaccu

SEQ ID NO: 2068421 - RNA, 19 nt, Artificial Sequence
  Description of Artificial Sequence: Synthetic oligonucleotide
  Antisense strand to SEQ ID NO: 2068420
agguaaaguaagauuccac

SEQ ID NO: 2068422 - RNA, 19 nt, Artificial Sequence
  Description of Artificial Sequence: Synthetic oligonucleotide
  Sense strand starting at position 2716 of SEQ ID NO: 1881745
ugugucacuggccagauaa

SEQ ID NO: 2068423 - RNA, 19 nt, Artificial Sequence
  Description of Artificial Sequence: Synthetic oligonucleotide
  Antisense strand to SEQ ID NO: 2068422
uuaucuggccagugacaca

SEQ ID NO: 2068424 - RNA, 19 nt, Artificial Sequence
  Description of Artificial Sequence: Synthetic oligonucleotide
  Sense strand starting at position 2754 of SEQ ID NO: 1881745
uugggugauuagucauauc

SEQ ID NO: 2068425 - RNA, 19 nt, Artificial Sequence
  Description of Artificial Sequence: Synthetic oligonucleotide
  Antisense strand to SEQ ID NO: 2068424
gauaugacuaaucacccaa

SEQ ID NO: 2068426 - RNA, 19 nt, Artificial Sequence
  Description of Artificial Sequence: Synthetic oligonucleotide
  Sense strand starting at position 2763 of SEQ ID NO: 1881745
uagucauaucuugggauac

SEQ ID NO: 2068427 - RNA, 19 nt, Artificial Sequence
  Description of Artificial Sequence: Synthetic oligonucleotide
  Antisense strand to SEQ ID NO: 2068426
guaucccaagauaugacua

SEQ ID NO: 2068428 - RNA, 19 nt, Artificial Sequence
  Description of Artificial Sequence: Synthetic oligonucleotide
  Sense strand starting at position 2806 of SEQ ID NO: 1881745
ucagacgcaugacuuuaau

SEQ ID NO: 2068429 - RNA, 19 nt, Artificial Sequence
  Description of Artificial Sequence: Synthetic oligonucleotide
  Antisense strand to SEQ ID NO: 2068428
auuaaagucaugcgucuga

SEQ ID NO: 2068430 - RNA, 19 nt, Artificial Sequence
  Description of Artificial Sequence: Synthetic oligonucleotide
  Sense strand starting at position 2948 of SEQ ID NO: 1881745
ucuggagagugcuuagaaa

SEQ ID NO: 2068431 - RNA, 19 nt, Artificial Sequence
  Description of Artificial Sequence: Synthetic oligonucleotide
  Antisense strand to SEQ ID NO: 2068430
uuucuaagcacucuccaga

SEQ ID NO: 2068432 - RNA, 19 nt, Artificial Sequence
  Description of Artificial Sequence: Synthetic oligonucleotide
  Sense strand starting at position 3114 of SEQ ID NO: 1881745
auuguuuaucagcauaaag

SEQ ID NO: 2068433 - RNA, 19 nt, Artificial Sequence
  Description of Artificial Sequence: Synthetic oligonucleotide
  Antisense strand to SEQ ID NO: 2068432
cuuuaugcugauaaacaau

SEQ ID NO: 2068434 - RNA, 19 nt, Artificial Sequence
  Description of Artificial Sequence: Synthetic oligonucleotide
  Sense strand starting at position 3116 of SEQ ID NO: 1881745
uguuuaucagcauaaagca

SEQ ID NO: 2068435 - RNA, 19 nt, Artificial Sequence
  Description of Artificial Sequence: Synthetic oligonucleotide
  Antisense strand to SEQ ID NO: 2068434
ugcuuuaugcugauaaaca

SEQ ID NO: 2068436 - RNA, 19 nt, Artificial Sequence
  Description of Artificial Sequence: Synthetic oligonucleotide
  Sense strand starting at position 3236 of SEQ ID NO: 1881745
cgcgucaccauuugggauu

SEQ ID NO: 2068437 - RNA, 19 nt, Artificial Sequence
  Description of Artificial Sequence: Synthetic oligonucleotide
  Antisense strand to SEQ ID NO: 2068436
aaucccaaauggugacgcg

SEQ ID NO: 2068438 - RNA, 19 nt, Artificial Sequence
  Description of Artificial Sequence: Synthetic oligonucleotide
  Sense strand starting at position 3239 of SEQ ID NO: 1881745
gucaccauuugggauuaaa

SEQ ID NO: 2068439 - RNA, 19 nt, Artificial Sequence
  Description of Artificial Sequence: Synthetic oligonucleotide
  Antisense strand to SEQ ID NO: 2068438
uuuaaucccaaauggugac

SEQ ID NO: 2068440 - RNA, 19 nt, Artificial Sequence
  Description of Artificial Sequence: Synthetic oligonucleotide
  Sense strand starting at position 3315 of SEQ ID NO: 1881745
agcaguuugcuugcaagca

SEQ ID NO: 2068441 - RNA, 19 nt, Artificial Sequence
  Description of Artificial Sequence: Synthetic oligonucleotide
  Antisense strand to SEQ ID NO: 2068440
ugcuugcaagcaaacugcu

SEQ ID NO: 2068442 - RNA, 19 nt, Artificial Sequence
  Description of Artificial Sequence: Synthetic oligonucleotide
  Sense strand starting at position 3357 of SEQ ID NO: 1881745
guuuaagaaucugucaaua

SEQ ID NO: 2068443 - RNA, 19 nt, Artificial Sequence
  Description of Artificial Sequence: Synthetic oligonucleotide
  Antisense strand to SEQ ID NO: 2068442
uauugacagauucuuaaac

SEQ ID NO: 2068444 - RNA, 19 nt, Artificial Sequence
  Description of Artificial Sequence: Synthetic oligonucleotide
  Sense strand starting at position 3396 of SEQ ID NO: 1881745
agacauuuguuguagaaau

SEQ ID NO: 2068445 - RNA, 19 nt, Artificial Sequence
  Description of Artificial Sequence: Synthetic oligonucleotide
  Antisense strand to SEQ ID NO: 2068444
auuucuacaacaaaugucu

SEQ ID NO: 2068446 - RNA, 19 nt, Artificial Sequence
  Description of Artificial Sequence: Synthetic oligonucleotide
  Sense strand starting at position 3417 of SEQ ID NO: 1881745
aggcauucucuuggaauga

SEQ ID NO: 2068447 - RNA, 19 nt, Artificial Sequence
  Description of Artificial Sequence: Synthetic oligonucleotide
  Antisense strand to SEQ ID NO: 2068446
ucauuccaagagaaugccu

SEQ ID NO: 2068448 - RNA, 19 nt, Artificial Sequence
  Description of Artificial Sequence: Synthetic oligonucleotide
  Sense strand starting at position 3436 of SEQ ID NO: 1881745
uucuaaucccuugaaccga

SEQ ID NO: 2068449 - RNA, 19 nt, Artificial Sequence
  Description of Artificial Sequence: Synthetic oligonucleotide
  Antisense strand to SEQ ID NO: 2068448
ucgguucaagggauuagaa

SEQ ID NO: 2068450 - RNA, 19 nt, Artificial Sequence
  Description of Artificial Sequence: Synthetic oligonucleotide
  Sense strand starting at position 3806 of SEQ ID NO: 1881745
gguagacaaauguggcauu

SEQ ID NO: 2068451 - RNA, 19 nt, Artificial Sequence
  Description of Artificial Sequence: Synthetic oligonucleotide
  Antisense strand to SEQ ID NO: 2068450
aaugccacauuugucuacc

SEQ ID NO: 2068452 - RNA, 19 nt, Artificial Sequence
  Description of Artificial Sequence: Synthetic oligonucleotide
  Sense strand starting at position 3886 of SEQ ID NO: 1881745
guaguauauguguaaaugg

SEQ ID NO: 2068453 - RNA, 19 nt, Artificial Sequence
  Description of Artificial Sequence: Synthetic oligonucleotide
  Antisense strand to SEQ ID NO: 2068452
ccauuuacacauauacuac

SEQ ID NO: 2068454 - RNA, 19 nt, Artificial Sequence
  Description of Artificial Sequence: Synthetic oligonucleotide
  Sense strand starting at position 28 of SEQ ID NO: 1881746
aguagugugagagauuaau

SEQ ID NO: 2068455 - RNA, 19 nt, Artificial Sequence
  Description of Artificial Sequence: Synthetic oligonucleotide
  Antisense strand to SEQ ID NO: 2068454
auuaaucucucacacuacu

SEQ ID NO: 2068456 - RNA, 19 nt, Artificial Sequence
  Description of Artificial Sequence: Synthetic oligonucleotide
  Sense strand starting at position 109 of SEQ ID NO: 1881746
gucucauuccaccgggaac

SEQ ID NO: 2068457 - RNA, 19 nt, Artificial Sequence
  Description of Artificial Sequence: Synthetic oligonucleotide
  Antisense strand to SEQ ID NO: 2068456
guucccgguggaaugagac

SEQ ID NO: 2068458 - RNA, 19 nt, Artificial Sequence
  Description of Artificial Sequence: Synthetic oligonucleotide
  Sense strand starting at position 111 of SEQ ID NO: 1881746
cucauuccaccgggaacua

SEQ ID NO: 2068459 - RNA, 19 nt, Artificial Sequence
  Description of Artificial Sequence: Synthetic oligonucleotide
  Antisense strand to SEQ ID NO: 2068458
uaguucccgguggaaugag

SEQ ID NO: 2068460 - RNA, 19 nt, Artificial Sequence
  Description of Artificial Sequence: Synthetic oligonucleotide
  Sense strand starting at position 131 of SEQ ID NO: 1881746
agaagcuugacuuguguga

SEQ ID NO: 2068461 - RNA, 19 nt, Artificial Sequence
  Description of Artificial Sequence: Synthetic oligonucleotide
  Antisense strand to SEQ ID NO: 2068460
ucacacaagucaagcuucu

SEQ ID NO: 2068462 - RNA, 19 nt, Artificial Sequence
  Description of Artificial Sequence: Synthetic oligonucleotide
  Sense strand starting at position 135 of SEQ ID NO: 1881746
gcuugacuugugugaucac

SEQ ID NO: 2068463 - RNA, 19 nt, Artificial Sequence
  Description of Artificial Sequence: Synthetic oligonucleotide
  Antisense strand to SEQ ID NO: 2068462
gugaucacacaagucaagc

SEQ ID NO: 2068464 - RNA, 19 nt, Artificial Sequence
  Description of Artificial Sequence: Synthetic oligonucleotide
  Sense strand starting at position 342 of SEQ ID NO: 1881746
gcuccaagcucuccagagu

SEQ ID NO: 2068465 - RNA, 19 nt, Artificial Sequence
  Description of Artificial Sequence: Synthetic oligonucleotide
  Antisense strand to SEQ ID NO: 2068464
acucuggagagcuuggagc

SEQ ID NO: 2068466 - RNA, 19 nt, Artificial Sequence
  Description of Artificial Sequence: Synthetic oligonucleotide
  Sense strand starting at position 343 of SEQ ID NO: 1881746
cuccaagcucuccagaguu

SEQ ID NO: 2068467 - RNA, 19 nt, Artificial Sequence
  Description of Artificial Sequence: Synthetic oligonucleotide
  Antisense strand to SEQ ID NO: 2068466
aacucuggagagcuuggag

SEQ ID NO: 2068468 - RNA, 19 nt, Artificial Sequence
  Description of Artificial Sequence: Synthetic oligonucleotide
  Sense strand starting at position 356 of SEQ ID NO: 1881746
agaguuucuggugguuuaa

SEQ ID NO: 2068469 - RNA, 19 nt, Artificial Sequence
  Description of Artificial Sequence: Synthetic oligonucleotide
  Antisense strand to SEQ ID NO: 2068468
uuaaaccaccagaaacucu

SEQ ID NO: 2068470 - RNA, 19 nt, Artificial Sequence
  Description of Artificial Sequence: Synthetic oligonucleotide
  Sense strand starting at position 467 of SEQ ID NO: 1881746
ccucuccaccuucgagauu

SEQ ID NO: 2068471 - RNA, 19 nt, Artificial Sequence
  Description of Artificial Sequence: Synthetic oligonucleotide
  Antisense strand to SEQ ID NO: 2068470
aaucucgaagguggagagg

SEQ ID NO: 2068472 - RNA, 19 nt, Artificial Sequence
  Description of Artificial Sequence: Synthetic oligonucleotide
  Sense strand starting at position 691 of SEQ ID NO: 1881746
gguggaaaguccuuacgca

SEQ ID NO: 2068473 - RNA, 19 nt, Artificial Sequence
  Description of Artificial Sequence: Synthetic oligonucleotide
  Antisense strand to SEQ ID NO: 2068472
ugcguaaggacuuuccacc

SEQ ID NO: 2068474 - RNA, 19 nt, Artificial Sequence
  Description of Artificial Sequence: Synthetic oligonucleotide
  Sense strand starting at position 692 of SEQ ID NO: 1881746
guggaaaguccuuacgcau

SEQ ID NO: 2068475 - RNA, 19 nt, Artificial Sequence
  Description of Artificial Sequence: Synthetic oligonucleotide
  Antisense strand to SEQ ID NO: 2068474
augcguaaggacuuuccac

SEQ ID NO: 2068476 - RNA, 19 nt, Artificial Sequence
  Description of Artificial Sequence: Synthetic oligonucleotide
  Sense strand starting at position 706 of SEQ ID NO: 1881746
cgcauuagcgggcaggauu

SEQ ID NO: 2068477 - RNA, 19 nt, Artificial Sequence
  Description of Artificial Sequence: Synthetic oligonucleotide
  Antisense strand to SEQ ID NO: 2068476
aauccugcccgcuaaugcg

SEQ ID NO: 2068478 - RNA, 19 nt, Artificial Sequence
  Description of Artificial Sequence: Synthetic oligonucleotide
  Sense strand starting at position 998 of SEQ ID NO: 1881746
guaguagcugcugaauaaa

SEQ ID NO: 2068479 - RNA, 19 nt, Artificial Sequence
  Description of Artificial Sequence: Synthetic oligonucleotide
  Antisense strand to SEQ ID NO: 2068478
uuuauucagcagcuacuac

SEQ ID NO: 2068480 - RNA, 19 nt, Artificial Sequence
  Description of Artificial Sequence: Synthetic oligonucleotide
  Sense strand starting at position 1001 of SEQ ID NO: 1881746
guagcugcugaauaaauaa

SEQ ID NO: 2068481 - RNA, 19 nt, Artificial Sequence
  Description of Artificial Sequence: Synthetic oligonucleotide
  Antisense strand to SEQ ID NO: 2068480
uuauuuauucagcagcuac

SEQ ID NO: 2068482 - RNA, 19 nt, Artificial Sequence
  Description of Artificial Sequence: Synthetic oligonucleotide
  Sense strand starting at position 1580 of SEQ ID NO: 1881746
cccuuuccucucgaaaguu

SEQ ID NO: 2068483 - RNA, 19 nt, Artificial Sequence
  Description of Artificial Sequence: Synthetic oligonucleotide
  Antisense strand to SEQ ID NO: 2068482
aacuuucgagaggaaaggg

SEQ ID NO: 2068484 - RNA, 19 nt, Artificial Sequence
  Description of Artificial Sequence: Synthetic oligonucleotide
  Sense strand starting at position 1601 of SEQ ID NO: 1881746
gugguuucccuagaagacg

SEQ ID NO: 2068485 - RNA, 19 nt, Artificial Sequence
  Description of Artificial Sequence: Synthetic oligonucleotide
  Antisense strand to SEQ ID NO: 2068484
cgucuucuagggaaaccac

SEQ ID NO: 2068486 - RNA, 19 nt, Artificial Sequence
  Description of Artificial Sequence: Synthetic oligonucleotide
  Sense strand starting at position 1619 of SEQ ID NO: 1881746
gaaagagguugagaagguu

SEQ ID NO: 2068487 - RNA, 19 nt, Artificial Sequence
  Description of Artificial Sequence: Synthetic oligonucleotide
  Antisense strand to SEQ ID NO: 2068486
aaccuucucaaccucuuuc

SEQ ID NO: 2068488 - RNA, 19 nt, Artificial Sequence
  Description of Artificial Sequence: Synthetic oligonucleotide
  Sense strand starting at position 1848 of SEQ ID NO: 1881746
gaggaaugcgcaugcagau

SEQ ID NO: 2068489 - RNA, 19 nt, Artificial Sequence
  Description of Artificial Sequence: Synthetic oligonucleotide
  Antisense strand to SEQ ID NO: 2068488
aucugcaugcgcauuccuc

SEQ ID NO: 2068490 - RNA, 19 nt, Artificial Sequence
  Description of Artificial Sequence: Synthetic oligonucleotide
  Sense strand starting at position 3024 of SEQ ID NO: 1881746
gucguuagucuucaccuga

SEQ ID NO: 2068491 - RNA, 19 nt, Artificial Sequence
  Description of Artificial Sequence: Synthetic oligonucleotide
  Antisense strand to SEQ ID NO: 2068490
ucaggugaagacuaacgac

SEQ ID NO: 2068492 - RNA, 19 nt, Artificial Sequence
  Description of Artificial Sequence: Synthetic oligonucleotide
  Sense strand starting at position 3071 of SEQ ID NO: 1881746
caggcauauuguguuugga

SEQ ID NO: 2068493 - RNA, 19 nt, Artificial Sequence
  Description of Artificial Sequence: Synthetic oligonucleotide
  Antisense strand to SEQ ID NO: 2068492
uccaaacacaauaugccug

SEQ ID NO: 2068494 - RNA, 19 nt, Artificial Sequence
  Description of Artificial Sequence: Synthetic oligonucleotide
  Sense strand starting at position 3073 of SEQ ID NO: 1881746
ggcauauuguguuuggaag

SEQ ID NO: 2068495 - RNA, 19 nt, Artificial Sequence
  Description of Artificial Sequence: Synthetic oligonucleotide
  Antisense strand to SEQ ID NO: 2068494
cuuccaaacacaauaugcc

SEQ ID NO: 2068496 - RNA, 19 nt, Artificial Sequence
  Description of Artificial Sequence: Synthetic oligonucleotide
  Sense strand starting at position 3074 of SEQ ID NO: 1881746
gcauauuguguuuggaagg

SEQ ID NO: 2068497 - RNA, 19 nt, Artificial Sequence
  Description of Artificial Sequence: Synthetic oligonucleotide
  Antisense strand to SEQ ID NO: 2068496
ccuuccaaacacaauaugc

SEQ ID NO: 2068498 - RNA, 19 nt, Artificial Sequence
  Description of Artificial Sequence: Synthetic oligonucleotide
  Sense strand starting at position 3079 of SEQ ID NO: 1881746
uuguguuuggaagggagau

SEQ ID NO: 2068499 - RNA, 19 nt, Artificial Sequence
  Description of Artificial Sequence: Synthetic oligonucleotide
  Antisense strand to SEQ ID NO: 2068498
aucucccuuccaaacacaa

SEQ ID NO: 2068500 - RNA, 19 nt, Artificial Sequence
  Description of Artificial Sequence: Synthetic oligonucleotide
  Sense strand starting at position 3102 of SEQ ID NO: 1881746
ugaaauuaacguuggguau

SEQ ID NO: 2068501 - RNA, 19 nt, Artificial Sequence
  Description of Artificial Sequence: Synthetic oligonucleotide
  Antisense strand to SEQ ID NO: 2068500
auacccaacguuaauuuca

SEQ ID NO: 2068502 - RNA, 19 nt, Artificial Sequence
  Description of Artificial Sequence: Synthetic oligonucleotide
  Sense strand starting at position 3103 of SEQ ID NO: 1881746
gaaauuaacguuggguauu

SEQ ID NO: 2068503 - RNA, 19 nt, Artificial Sequence
  Description of Artificial Sequence: Synthetic oligonucleotide
  Antisense strand to SEQ ID NO: 2068502
aauacccaacguuaauuuc

SEQ ID NO: 2068504 - RNA, 19 nt, Artificial Sequence
  Description of Artificial Sequence: Synthetic oligonucleotide
  Sense strand starting at position 3124 of SEQ ID NO: 1881746
ggcacucugauuugagcuu

SEQ ID NO: 2068505 - RNA, 19 nt, Artificial Sequence
  Description of Artificial Sequence: Synthetic oligonucleotide
  Antisense strand to SEQ ID NO: 2068504
aagcucaaaucagagugcc

SEQ ID NO: 2068506 - RNA, 19 nt, Artificial Sequence
  Description of Artificial Sequence: Synthetic oligonucleotide
  Sense strand starting at position 3200 of SEQ ID NO: 1881746
auguuucugugucccauau

SEQ ID NO: 2068507 - RNA, 19 nt, Artificial Sequence
  Description of Artificial Sequence: Synthetic oligonucleotide
  Antisense strand to SEQ ID NO: 2068506
auaugggacacagaaacau

SEQ ID NO: 2068508 - RNA, 19 nt, Artificial Sequence
  Description of Artificial Sequence: Synthetic oligonucleotide
  Sense strand starting at position 3252 of SEQ ID NO: 1881746
uaagaauaauaggagguau

SEQ ID NO: 2068509 - RNA, 19 nt, Artificial Sequence
  Description of Artificial Sequence: Synthetic oligonucleotide
  Antisense strand to SEQ ID NO: 2068508
auaccuccuauuauucuua

SEQ ID NO: 2068510 - RNA, 19 nt, Artificial Sequence
  Description of Artificial Sequence: Synthetic oligonucleotide
  Sense strand starting at position 3341 of SEQ ID NO: 1881746
cagggauaacuucgacauu

SEQ ID NO: 2068511 - RNA, 19 nt, Artificial Sequence
  Description of Artificial Sequence: Synthetic oligonucleotide
  Antisense strand to SEQ ID NO: 2068510
aaugucgaaguuaucccug

SEQ ID NO: 2068512 - RNA, 19 nt, Artificial Sequence
  Description of Artificial Sequence: Synthetic oligonucleotide
  Sense strand starting at position 3342 of SEQ ID NO: 1881746
agggauaacuucgacauuu

SEQ ID NO: 2068513 - RNA, 19 nt, Artificial Sequence
  Description of Artificial Sequence: Synthetic oligonucleotide
  Antisense strand to SEQ ID NO: 2068512
aaaugucgaaguuaucccu

SEQ ID NO: 2068514 - RNA, 19 nt, Artificial Sequence
  Description of Artificial Sequence: Synthetic oligonucleotide
  Sense strand starting at position 3426 of SEQ ID NO: 1881746
uuaggugcuucuccuauuu

SEQ ID NO: 2068515 - RNA, 19 nt, Artificial Sequence
  Description of Artificial Sequence: Synthetic oligonucleotide
  Antisense strand to SEQ ID NO: 2068514
aaauaggagaagcaccuaa

SEQ ID NO: 2068516 - RNA, 19 nt, Artificial Sequence
  Description of Artificial Sequence: Synthetic oligonucleotide
  Sense strand starting at position 3598 of SEQ ID NO: 1881746
ucaauuauccgugaagcua

SEQ ID NO: 2068517 - RNA, 19 nt, Artificial Sequence
  Description of Artificial Sequence: Synthetic oligonucleotide
  Antisense strand to SEQ ID NO: 2068516
uagcuucacggauaauuga

SEQ ID NO: 2068518 - RNA, 19 nt, Artificial Sequence
  Description of Artificial Sequence: Synthetic oligonucleotide
  Sense strand starting at position 3625 of SEQ ID NO: 1881746
gguuucccuccugaaauga

SEQ ID NO: 2068519 - RNA, 19 nt, Artificial Sequence
  Description of Artificial Sequence: Synthetic oligonucleotide
  Antisense strand to SEQ ID NO: 2068518
ucauuucaggagggaaacc

SEQ ID NO: 2068520 - RNA, 19 nt, Artificial Sequence
  Description of Artificial Sequence: Synthetic oligonucleotide
  Sense strand starting at position 3691 of SEQ ID NO: 1881746
uguugcuggccugaugaaa

SEQ ID NO: 2068521 - RNA, 19 nt, Artificial Sequence
  Description of Artificial Sequence: Synthetic oligonucleotide
  Antisense strand to SEQ ID NO: 2068520
uuucaucaggccagcaaca

SEQ ID NO: 2068522 - RNA, 19 nt, Artificial Sequence
  Description of Artificial Sequence: Synthetic oligonucleotide
  Sense strand starting at position 3799 of SEQ ID NO: 1881746
gcuauugcacuuugaaacu

SEQ ID NO: 2068523 - RNA, 19 nt, Artificial Sequence
  Description of Artificial Sequence: Synthetic oligonucleotide
  Antisense strand to SEQ ID NO: 2068522
aguuucaaagugcaauagc

SEQ ID NO: 2068524 - RNA, 19 nt, Artificial Sequence
  Description of Artificial Sequence: Synthetic oligonucleotide
  Sense strand starting at position 3823 of SEQ ID NO: 1881746
acagauaguaaaugucagu

SEQ ID NO: 2068525 - RNA, 19 nt, Artificial Sequence
  Description of Artificial Sequence: Synthetic oligonucleotide
  Antisense strand to SEQ ID NO: 2068524
acugacauuuacuaucugu

SEQ ID NO: 2068526 - RNA, 19 nt, Artificial Sequence
  Description of Artificial Sequence: Synthetic oligonucleotide
  Sense strand starting at position 3828 of SEQ ID NO: 1881746
uaguaaaugucagugcuga

SEQ ID NO: 2068527 - RNA, 19 nt, Artificial Sequence
  Description of Artificial Sequence: Synthetic oligonucleotide
  Antisense strand to SEQ ID NO: 2068526
ucagcacugacauuuacua

SEQ ID NO: 2068528 - RNA, 19 nt, Artificial Sequence
  Description of Artificial Sequence: Synthetic oligonucleotide
  Sense strand starting at position 3829 of SEQ ID NO: 1881746
aguaaaugucagugcugau

SEQ ID NO: 2068529 - RNA, 19 nt, Artificial Sequence
  Description of Artificial Sequence: Synthetic oligonucleotide
  Antisense strand to SEQ ID NO: 2068528
aucagcacugacauuuacu

SEQ ID NO: 2068530 - RNA, 19 nt, Artificial Sequence
  Description of Artificial Sequence: Synthetic oligonucleotide
  Sense strand starting at position 3897 of SEQ ID NO: 1881746
uuuacaguugugugguaau

SEQ ID NO: 2068531 - RNA, 19 nt, Artificial Sequence
  Description of Artificial Sequence: Synthetic oligonucleotide
  Antisense strand to SEQ ID NO: 2068530
auuaccacacaacuguaaa

SEQ ID NO: 2068532 - RNA, 19 nt, Artificial Sequence
  Description of Artificial Sequence: Synthetic oligonucleotide
  Sense strand starting at position 3923 of SEQ ID NO: 1881746
gcuuucugauacuuggagu

SEQ ID NO: 2068533 - RNA, 19 nt, Artificial Sequence
  Description of Artificial Sequence: Synthetic oligonucleotide
  Antisense strand to SEQ ID NO: 2068532
acuccaaguaucagaaagc

SEQ ID NO: 2068534 - RNA, 19 nt, Artificial Sequence
  Description of Artificial Sequence: Synthetic oligonucleotide
  Sense strand starting at position 29 of SEQ ID NO: 1881747
guucccaaguccuagauaa

SEQ ID NO: 2068535 - RNA, 19 nt, Artificial Sequence
  Description of Artificial Sequence: Synthetic oligonucleotide
  Antisense strand to SEQ ID NO: 2068534
uuaucuaggacuugggaac

SEQ ID NO: 2068536 - RNA, 19 nt, Artificial Sequence
  Description of Artificial Sequence: Synthetic oligonucleotide
  Sense strand starting at position 45 of SEQ ID NO: 1881747
uaaagacaagucugaguca

SEQ ID NO: 2068537 - RNA, 19 nt, Artificial Sequence
  Description of Artificial Sequence: Synthetic oligonucleotide
  Antisense strand to SEQ ID NO: 2068536
ugacucagacuugucuuua

SEQ ID NO: 2068538 - RNA, 19 nt, Artificial Sequence
  Description of Artificial Sequence: Synthetic oligonucleotide
  Sense strand starting at position 46 of SEQ ID NO: 1881747
aaagacaagucugagucaa

SEQ ID NO: 2068539 - RNA, 19 nt, Artificial Sequence
  Description of Artificial Sequence: Synthetic oligonucleotide
  Antisense strand to SEQ ID NO: 2068538
uugacucagacuugucuuu

SEQ ID NO: 2068540 - RNA, 19 nt, Artificial Sequence
  Description of Artificial Sequence: Synthetic oligonucleotide
  Sense strand starting at position 255 of SEQ ID NO: 1881747
aaggcauggucuugaauuc

SEQ ID NO: 2068541 - RNA, 19 nt, Artificial Sequence
  Description of Artificial Sequence: Synthetic oligonucleotide
  Antisense strand to SEQ ID NO: 2068540
gaauucaagaccaugccuu

SEQ ID NO: 2068542 - RNA, 19 nt, Artificial Sequence
  Description of Artificial Sequence: Synthetic oligonucleotide
  Sense strand starting at position 264 of SEQ ID NO: 1881747
ucuugaauucccuaacguc

SEQ ID NO: 2068543 - RNA, 19 nt, Artificial Sequence
  Description of Artificial Sequence: Synthetic oligonucleotide
  Antisense strand to SEQ ID NO: 2068542
gacguuagggaauucaaga

SEQ ID NO: 2068544 - RNA, 19 nt, Artificial Sequence
  Description of Artificial Sequence: Synthetic oligonucleotide
  Sense strand starting at position 272 of SEQ ID NO: 1881747
ucccuaacgucugaauucu

SEQ ID NO: 2068545 - RNA, 19 nt, Artificial Sequence
  Description of Artificial Sequence: Synthetic oligonucleotide
  Antisense strand to SEQ ID NO: 2068544
agaauucagacguuaggga

SEQ ID NO: 2068546 - RNA, 19 nt, Artificial Sequence
  Description of Artificial Sequence: Synthetic oligonucleotide
  Sense strand starting at position 284 of SEQ ID NO: 1881747
gaauucuuguaggcacgua

SEQ ID NO: 2068547 - RNA, 19 nt, Artificial Sequence
  Description of Artificial Sequence: Synthetic oligonucleotide
  Antisense strand to SEQ ID NO: 2068546
uacgugccuacaagaauuc

SEQ ID NO: 2068548 - RNA, 19 nt, Artificial Sequence
  Description of Artificial Sequence: Synthetic oligonucleotide
  Sense strand starting at position 296 of SEQ ID NO: 1881747
gcacguaagggaugaacuu

SEQ ID NO: 2068549 - RNA, 19 nt, Artificial Sequence
  Description of Artificial Sequence: Synthetic oligonucleotide
  Antisense strand to SEQ ID NO: 2068548
aaguucaucccuuacgugc

SEQ ID NO: 2068550 - RNA, 19 nt, Artificial Sequence
  Description of Artificial Sequence: Synthetic oligonucleotide
  Sense strand starting at position 374 of SEQ ID NO: 1881747
aggagcuaucaagagccau

SEQ ID NO: 2068551 - RNA, 19 nt, Artificial Sequence
  Description of Artificial Sequence: Synthetic oligonucleotide
  Antisense strand to SEQ ID NO: 2068550
auggcucuugauagcuccu

SEQ ID NO: 2068552 - RNA, 19 nt, Artificial Sequence
  Description of Artificial Sequence: Synthetic oligonucleotide
  Sense strand starting at position 493 of SEQ ID NO: 1881747
auaggagauuaagaucaga

SEQ ID NO: 2068553 - RNA, 19 nt, Artificial Sequence
  Description of Artificial Sequence: Synthetic oligonucleotide
  Antisense strand to SEQ ID NO: 2068552
ucugaucuuaaucuccuau

SEQ ID NO: 2068554 - RNA, 19 nt, Artificial Sequence
  Description of Artificial Sequence: Synthetic oligonucleotide
  Sense strand starting at position 654 of SEQ ID NO: 1881747
aggguagaacccugucuua

SEQ ID NO: 2068555 - RNA, 19 nt, Artificial Sequence
  Description of Artificial Sequence: Synthetic oligonucleotide
  Antisense strand to SEQ ID NO: 2068554
uaagacaggguucuacccu

SEQ ID NO: 2068556 - RNA, 19 nt, Artificial Sequence
  Description of Artificial Sequence: Synthetic oligonucleotide
  Sense strand starting at position 757 of SEQ ID NO: 1881747
aagggauguuucuuagaac

SEQ ID NO: 2068557 - RNA, 19 nt, Artificial Sequence
  Description of Artificial Sequence: Synthetic oligonucleotide
  Antisense strand to SEQ ID NO: 2068556
guucuaagaaacaucccuu

SEQ ID NO: 2068558 - RNA, 19 nt, Artificial Sequence
  Description of Artificial Sequence: Synthetic oligonucleotide
  Sense strand starting at position 758 of SEQ ID NO: 1881747
agggauguuucuuagaacu

SEQ ID NO: 2068559 - RNA, 19 nt, Artificial Sequence
  Description of Artificial Sequence: Synthetic oligonucleotide
  Antisense strand to SEQ ID NO: 2068558
aguucuaagaaacaucccu

SEQ ID NO: 2068560 - RNA, 19 nt, Artificial Sequence
  Description of Artificial Sequence: Synthetic oligonucleotide
  Sense strand starting at position 760 of SEQ ID NO: 1881747
ggauguuucuuagaacugc

SEQ ID NO: 2068561 - RNA, 19 nt, Artificial Sequence
  Description of Artificial Sequence: Synthetic oligonucleotide
  Antisense strand to SEQ ID NO: 2068560
gcaguucuaagaaacaucc

SEQ ID NO: 2068562 - RNA, 19 nt, Artificial Sequence
  Description of Artificial Sequence: Synthetic oligonucleotide
  Sense strand starting at position 2020 of SEQ ID NO: 1881747
ucauucggcaguugucaau

SEQ ID NO: 2068563 - RNA, 19 nt, Artificial Sequence
  Description of Artificial Sequence: Synthetic oligonucleotide
  Antisense strand to SEQ ID NO: 2068562
auugacaacugccgaauga

SEQ ID NO: 2068564 - RNA, 19 nt, Artificial Sequence
  Description of Artificial Sequence: Synthetic oligonucleotide
  Sense strand starting at position 2041 of SEQ ID NO: 1881747
agcgcucuaauuggauaga

SEQ ID NO: 2068565 - RNA, 19 nt, Artificial Sequence
  Description of Artificial Sequence: Synthetic oligonucleotide
  Antisense strand to SEQ ID NO: 2068564
ucuauccaauuagagcgcu

SEQ ID NO: 2068566 - RNA, 19 nt, Artificial Sequence
  Description of Artificial Sequence: Synthetic oligonucleotide
  Sense strand starting at position 2044 of SEQ ID NO: 1881747
gcucuaauuggauagagcu

SEQ ID NO: 2068567 - RNA, 19 nt, Artificial Sequence
  Description of Artificial Sequence: Synthetic oligonucleotide
  Antisense strand to SEQ ID NO: 2068566
agcucuauccaauuagagc

SEQ ID NO: 2068568 - RNA, 19 nt, Artificial Sequence
  Description of Artificial Sequence: Synthetic oligonucleotide
  Sense strand starting at position 2050 of SEQ ID NO: 1881747
auuggauagagcuguaagu

SEQ ID NO: 2068569 - RNA, 19 nt, Artificial Sequence
  Description of Artificial Sequence: Synthetic oligonucleotide
  Antisense strand to SEQ ID NO: 2068568
acuuacagcucuauccaau

SEQ ID NO: 2068570 - RNA, 19 nt, Artificial Sequence
  Description of Artificial Sequence: Synthetic oligonucleotide
  Sense strand starting at position 2052 of SEQ ID NO: 1881747
uggauagagcuguaagucu

SEQ ID NO: 2068571 - RNA, 19 nt, Artificial Sequence
  Description of Artificial Sequence: Synthetic oligonucleotide
  Antisense strand to SEQ ID NO: 2068570
agacuuacagcucuaucca

SEQ ID NO: 2068572 - RNA, 19 nt, Artificial Sequence
  Description of Artificial Sequence: Synthetic oligonucleotide
  Sense strand starting at position 2080 of SEQ ID NO: 1881747
ggccuugagugacagaagu

SEQ ID NO: 2068573 - RNA, 19 nt, Artificial Sequence
  Description of Artificial Sequence: Synthetic oligonucleotide
  Antisense strand to SEQ ID NO: 2068572
acuucugucacucaaggcc

SEQ ID NO: 2068574 - RNA, 19 nt, Artificial Sequence
  Description of Artificial Sequence: Synthetic oligonucleotide
  Sense strand starting at position 2151 of SEQ ID NO: 1881747
gguacuuugaggcagguuu

SEQ ID NO: 2068575 - RNA, 19 nt, Artificial Sequence
  Description of Artificial Sequence: Synthetic oligonucleotide
  Antisense strand to SEQ ID NO: 2068574
aaaccugccucaaaguacc

SEQ ID NO: 2068576 - RNA, 19 nt, Artificial Sequence
  Description of Artificial Sequence: Synthetic oligonucleotide
  Sense strand starting at position 2392 of SEQ ID NO: 1881747
caggguaucuguucgccua

SEQ ID NO: 2068577 - RNA, 19 nt, Artificial Sequence
  Description of Artificial Sequence: Synthetic oligonucleotide
  Antisense strand to SEQ ID NO: 2068576
uaggcgaacagauacccug

SEQ ID NO: 2068578 - RNA, 19 nt, Artificial Sequence
  Description of Artificial Sequence: Synthetic oligonucleotide
  Sense strand starting at position 2393 of SEQ ID NO: 1881747
aggguaucuguucgccuau

SEQ ID NO: 2068579 - RNA, 19 nt, Artificial Sequence
  Description of Artificial Sequence: Synthetic oligonucleotide
  Antisense strand to SEQ ID NO: 2068578
auaggcgaacagauacccu

SEQ ID NO: 2068580 - RNA, 19 nt, Artificial Sequence
  Description of Artificial Sequence: Synthetic oligonucleotide
  Sense strand starting at position 2395 of SEQ ID NO: 1881747
gguaucuguucgccuaugu

SEQ ID NO: 2068581 - RNA, 19 nt, Artificial Sequence
  Description of Artificial Sequence: Synthetic oligonucleotide
  Antisense strand to SEQ ID NO: 2068580
acauaggcgaacagauacc

SEQ ID NO: 2068582 - RNA, 19 nt, Artificial Sequence
  Description of Artificial Sequence: Synthetic oligonucleotide
  Sense strand starting at position 2466 of SEQ ID NO: 1881747
ggguguuaucucugugcuu

SEQ ID NO: 2068583 - RNA, 19 nt, Artificial Sequence
  Description of Artificial Sequence: Synthetic oligonucleotide
  Antisense strand to SEQ ID NO: 2068582
aagcacagagauaacaccc

SEQ ID NO: 2068584 - RNA, 19 nt, Artificial Sequence
  Description of Artificial Sequence: Synthetic oligonucleotide
  Sense strand starting at position 2467 of SEQ ID NO: 1881747
gguguuaucucugugcuug

SEQ ID NO: 2068585 - RNA, 19 nt, Artificial Sequence
  Description of Artificial Sequence: Synthetic oligonucleotide
  Antisense strand to SEQ ID NO: 2068584
caagcacagagauaacacc

SEQ ID NO: 2068586 - RNA, 19 nt, Artificial Sequence
  Description of Artificial Sequence: Synthetic oligonucleotide
  Sense strand starting at position 2513 of SEQ ID NO: 1881747
uuaaccuugugguauguaa

SEQ ID NO: 2068587 - RNA, 19 nt, Artificial Sequence
  Description of Artificial Sequence: Synthetic oligonucleotide
  Antisense strand to SEQ ID NO: 2068586
uuacauaccacaagguuaa

SEQ ID NO: 2068588 - RNA, 19 nt, Artificial Sequence
  Description of Artificial Sequence: Synthetic oligonucleotide
  Sense strand starting at position 2517 of SEQ ID NO: 1881747
ccuugugguauguaagguu

SEQ ID NO: 2068589 - RNA, 19 nt, Artificial Sequence
  Description of Artificial Sequence: Synthetic oligonucleotide
  Antisense strand to SEQ ID NO: 2068588
aaccuuacauaccacaagg

SEQ ID NO: 2068590 - RNA, 19 nt, Artificial Sequence
  Description of Artificial Sequence: Synthetic oligonucleotide
  Sense strand starting at position 2745 of SEQ ID NO: 1881747
aauguuagcuauuagugaa

SEQ ID NO: 2068591 - RNA, 19 nt, Artificial Sequence
  Description of Artificial Sequence: Synthetic oligonucleotide
  Antisense strand to SEQ ID NO: 2068590
uucacuaauagcuaacauu

SEQ ID NO: 2068592 - RNA, 19 nt, Artificial Sequence
  Description of Artificial Sequence: Synthetic oligonucleotide
  Sense strand starting at position 2748 of SEQ ID NO: 1881747
guuagcuauuagugaauuu

SEQ ID NO: 2068593 - RNA, 19 nt, Artificial Sequence
  Description of Artificial Sequence: Synthetic oligonucleotide
  Antisense strand to SEQ ID NO: 2068592
aaauucacuaauagcuaac

SEQ ID NO: 2068594 - RNA, 19 nt, Artificial Sequence
  Description of Artificial Sequence: Synthetic oligonucleotide
  Sense strand starting at position 2804 of SEQ ID NO: 1881747
aagugagauuguuugugau

SEQ ID NO: 2068595 - RNA, 19 nt, Artificial Sequence
  Description of Artificial Sequence: Synthetic oligonucleotide
  Antisense strand to SEQ ID NO: 2068594
aucacaaacaaucucacuu

SEQ ID NO: 2068596 - RNA, 19 nt, Artificial Sequence
  Description of Artificial Sequence: Synthetic oligonucleotide
  Sense strand starting at position 2806 of SEQ ID NO: 1881747
gugagauuguuugugauaa

SEQ ID NO: 2068597 - RNA, 19 nt, Artificial Sequence
  Description of Artificial Sequence: Synthetic oligonucleotide
  Antisense strand to SEQ ID NO: 2068596
uuaucacaaacaaucucac

SEQ ID NO: 2068598 - RNA, 19 nt, Artificial Sequence
  Description of Artificial Sequence: Synthetic oligonucleotide
  Sense strand starting at position 2807 of SEQ ID NO: 1881747
ugagauuguuugugauaau

SEQ ID NO: 2068599 - RNA, 19 nt, Artificial Sequence
  Description of Artificial Sequence: Synthetic oligonucleotide
  Antisense strand to SEQ ID NO: 2068598
auuaucacaaacaaucuca

SEQ ID NO: 2068600 - RNA, 19 nt, Artificial Sequence
  Description of Artificial Sequence: Synthetic oligonucleotide
  Sense strand starting at position 2808 of SEQ ID NO: 1881747
gagauuguuugugauaauu

SEQ ID NO: 2068601 - RNA, 19 nt, Artificial Sequence
  Description of Artificial Sequence: Synthetic oligonucleotide
  Antisense strand to SEQ ID NO: 2068600
aauuaucacaaacaaucuc

SEQ ID NO: 2068602 - RNA, 19 nt, Artificial Sequence
  Description of Artificial Sequence: Synthetic oligonucleotide
  Sense strand starting at position 2871 of SEQ ID NO: 1881747
auauauaauugagagguga

SEQ ID NO: 2068603 - RNA, 19 nt, Artificial Sequence
  Description of Artificial Sequence: Synthetic oligonucleotide
  Antisense strand to SEQ ID NO: 2068602
ucaccucucaauuauauau

SEQ ID NO: 2068604 - RNA, 19 nt, Artificial Sequence
  Description of Artificial Sequence: Synthetic oligonucleotide
  Sense strand starting at position 2895 of SEQ ID NO: 1881747
gcuggacuuccuggguaaa

SEQ ID NO: 2068605 - RNA, 19 nt, Artificial Sequence
  Description of Artificial Sequence: Synthetic oligonucleotide
  Antisense strand to SEQ ID NO: 2068604
uuuacccaggaaguccagc

SEQ ID NO: 2068606 - RNA, 19 nt, Artificial Sequence
  Description of Artificial Sequence: Synthetic oligonucleotide
  Sense strand starting at position 2896 of SEQ ID NO: 1881747
cuggacuuccuggguaaac

SEQ ID NO: 2068607 - RNA, 19 nt, Artificial Sequence
  Description of Artificial Sequence: Synthetic oligonucleotide
  Antisense strand to SEQ ID NO: 2068606
guuuacccaggaaguccag

SEQ ID NO: 2068608 - RNA, 19 nt, Artificial Sequence
  Description of Artificial Sequence: Synthetic oligonucleotide
  Sense strand starting at position 2897 of SEQ ID NO: 1881747
uggacuuccuggguaaacu

SEQ ID NO: 2068609 - RNA, 19 nt, Artificial Sequence
  Description of Artificial Sequence: Synthetic oligonucleotide
  Antisense strand to SEQ ID NO: 2068608
aguuuacccaggaagucca

SEQ ID NO: 2068610 - RNA, 19 nt, Artificial Sequence
  Description of Artificial Sequence: Synthetic oligonucleotide
  Sense strand starting at position 3105 of SEQ ID NO: 1881747
ggcacugugauaggacaaa

SEQ ID NO: 2068611 - RNA, 19 nt, Artificial Sequence
  Description of Artificial Sequence: Synthetic oligonucleotide
  Antisense strand to SEQ ID NO: 2068610
uuuguccuaucacagugcc

SEQ ID NO: 2068612 - RNA, 19 nt, Artificial Sequence
  Description of Artificial Sequence: Synthetic oligonucleotide
  Sense strand starting at position 3831 of SEQ ID NO: 1881747
ccacauugagugcagacau

SEQ ID NO: 2068613 - RNA, 19 nt, Artificial Sequence
  Description of Artificial Sequence: Synthetic oligonucleotide
  Antisense strand to SEQ ID NO: 2068612
augucugcacucaaugugg

SEQ ID NO: 2068614 - RNA, 19 nt, Artificial Sequence
  Description of Artificial Sequence: Synthetic oligonucleotide
  Sense strand starting at position 59 of SEQ ID NO: 1881748
ugaccuaguuaacugacaa

SEQ ID NO: 2068615 - RNA, 19 nt, Artificial Sequence
  Description of Artificial Sequence: Synthetic oligonucleotide
  Antisense strand to SEQ ID NO: 2068614
uugucaguuaacuagguca

SEQ ID NO: 2068616 - RNA, 19 nt, Artificial Sequence
  Description of Artificial Sequence: Synthetic oligonucleotide
  Sense strand starting at position 239 of SEQ ID NO: 1881748
agucuaaaggcauggucuu

SEQ ID NO: 2068617 - RNA, 19 nt, Artificial Sequence
  Description of Artificial Sequence: Synthetic oligonucleotide
  Antisense strand to SEQ ID NO: 2068616
aagaccaugccuuuagacu

SEQ ID NO: 2068618 - RNA, 19 nt, Artificial Sequence
  Description of Artificial Sequence: Synthetic oligonucleotide
  Sense strand starting at position 443 of SEQ ID NO: 1881748
aagacuacgcucugacuga

SEQ ID NO: 2068619 - RNA, 19 nt, Artificial Sequence
  Description of Artificial Sequence: Synthetic oligonucleotide
  Antisense strand to SEQ ID NO: 2068618
ucagucagagcguagucuu

SEQ ID NO: 2068620 - RNA, 19 nt, Artificial Sequence
  Description of Artificial Sequence: Synthetic oligonucleotide
  Sense strand starting at position 444 of SEQ ID NO: 1881748
agacuacgcucugacugau

SEQ ID NO: 2068621 - RNA, 19 nt, Artificial Sequence
  Description of Artificial Sequence: Synthetic oligonucleotide
  Antisense strand to SEQ ID NO: 2068620
aucagucagagcguagucu

SEQ ID NO: 2068622 - RNA, 19 nt, Artificial Sequence
  Description of Artificial Sequence: Synthetic oligonucleotide
  Sense strand starting at position 450 of SEQ ID NO: 1881748
cgcucugacugauuccuga

SEQ ID NO: 2068623 - RNA, 19 nt, Artificial Sequence
  Description of Artificial Sequence: Synthetic oligonucleotide
  Antisense strand to SEQ ID NO: 2068622
ucaggaaucagucagagcg

SEQ ID NO: 2068624 - RNA, 19 nt, Artificial Sequence
  Description of Artificial Sequence: Synthetic oligonucleotide
  Sense strand starting at position 582 of SEQ ID NO: 1881748
cuguguguauucuuaggag

SEQ ID NO: 2068625 - RNA, 19 nt, Artificial Sequence
  Description of Artificial Sequence: Synthetic oligonucleotide
  Antisense strand to SEQ ID NO: 2068624
cuccuaagaauacacacag

SEQ ID NO: 2068626 - RNA, 19 nt, Artificial Sequence
  Description of Artificial Sequence: Synthetic oligonucleotide
  Sense strand starting at position 627 of SEQ ID NO: 1881748
gccacaauuccugagggua

SEQ ID NO: 2068627 - RNA, 19 nt, Artificial Sequence
  Description of Artificial Sequence: Synthetic oligonucleotide
  Antisense strand to SEQ ID NO: 2068626
uacccucaggaauuguggc

SEQ ID NO: 2068628 - RNA, 19 nt, Artificial Sequence
  Description of Artificial Sequence: Synthetic oligonucleotide
  Sense strand starting at position 640 of SEQ ID NO: 1881748
aggguagaacccuguccua

SEQ ID NO: 2068629 - RNA, 19 nt, Artificial Sequence
  Description of Artificial Sequence: Synthetic oligonucleotide
  Antisense strand to SEQ ID NO: 2068628
uaggacaggguucuacccu

SEQ ID NO: 2068630 - RNA, 19 nt, Artificial Sequence
  Description of Artificial Sequence: Synthetic oligonucleotide
  Sense strand starting at position 1259 of SEQ ID NO: 1881748
gggacuggugggcaaguua

SEQ ID NO: 2068631 - RNA, 19 nt, Artificial Sequence
  Description of Artificial Sequence: Synthetic oligonucleotide
  Antisense strand to SEQ ID NO: 2068630
uaacuugcccaccaguccc

SEQ ID NO: 2068632 - RNA, 19 nt, Artificial Sequence
  Description of Artificial Sequence: Synthetic oligonucleotide
  Sense strand starting at position 1372 of SEQ ID NO: 1881748
ugcgcugucccguuaauga

SEQ ID NO: 2068633 - RNA, 19 nt, Artificial Sequence
  Description of Artificial Sequence: Synthetic oligonucleotide
  Antisense strand to SEQ ID NO: 2068632
ucauuaacgggacagcgca

SEQ ID NO: 2068634 - RNA, 19 nt, Artificial Sequence
  Description of Artificial Sequence: Synthetic oligonucleotide
  Sense strand starting at position 1520 of SEQ ID NO: 1881748
gcgucuuccagaugagcua

SEQ ID NO: 2068635 - RNA, 19 nt, Artificial Sequence
  Description of Artificial Sequence: Synthetic oligonucleotide
  Antisense strand to SEQ ID NO: 2068634
uagcucaucuggaagacgc

SEQ ID NO: 2068636 - RNA, 19 nt, Artificial Sequence
  Description of Artificial Sequence: Synthetic oligonucleotide
  Sense strand starting at position 2081 of SEQ ID NO: 1881748
gcccucaagcuuugaguga

SEQ ID NO: 2068637 - RNA, 19 nt, Artificial Sequence
  Description of Artificial Sequence: Synthetic oligonucleotide
  Antisense strand to SEQ ID NO: 2068636
ucacucaaagcuugagggc

SEQ ID NO: 2068638 - RNA, 19 nt, Artificial Sequence
  Description of Artificial Sequence: Synthetic oligonucleotide
  Sense strand starting at position 2085 of SEQ ID NO: 1881748
ucaagcuuugagugacaga

SEQ ID NO: 2068639 - RNA, 19 nt, Artificial Sequence
  Description of Artificial Sequence: Synthetic oligonucleotide
  Antisense strand to SEQ ID NO: 2068638
ucugucacucaaagcuuga

SEQ ID NO: 2068640 - RNA, 19 nt, Artificial Sequence
  Description of Artificial Sequence: Synthetic oligonucleotide
  Sense strand starting at position 2088 of SEQ ID NO: 1881748
agcuuugagugacagaauu

SEQ ID NO: 2068641 - RNA, 19 nt, Artificial Sequence
  Description of Artificial Sequence: Synthetic oligonucleotide
  Antisense strand to SEQ ID NO: 2068640
aauucugucacucaaagcu

SEQ ID NO: 2068642 - RNA, 19 nt, Artificial Sequence
  Description of Artificial Sequence: Synthetic oligonucleotide
  Sense strand starting at position 2099 of SEQ ID NO: 1881748
acagaauucgagugacaga

SEQ ID NO: 2068643 - RNA, 19 nt, Artificial Sequence
  Description of Artificial Sequence: Synthetic oligonucleotide
  Antisense strand to SEQ ID NO: 2068642
ucugucacucgaauucugu

SEQ ID NO: 2068644 - RNA, 19 nt, Artificial Sequence
  Description of Artificial Sequence: Synthetic oligonucleotide
  Sense strand starting at position 2102 of SEQ ID NO: 1881748
gaauucgagugacagaaau

SEQ ID NO: 2068645 - RNA, 19 nt, Artificial Sequence
  Description of Artificial Sequence: Synthetic oligonucleotide
  Antisense strand to SEQ ID NO: 2068644
auuucugucacucgaauuc

SEQ ID NO: 2068646 - RNA, 19 nt, Artificial Sequence
  Description of Artificial Sequence: Synthetic oligonucleotide
  Sense strand starting at position 2110 of SEQ ID NO: 1881748
gugacagaaauucgaccau

SEQ ID NO: 2068647 - RNA, 19 nt, Artificial Sequence
  Description of Artificial Sequence: Synthetic oligonucleotide
  Antisense strand to SEQ ID NO: 2068646
auggucgaauuucugucac

SEQ ID NO: 2068648 - RNA, 19 nt, Artificial Sequence
  Description of Artificial Sequence: Synthetic oligonucleotide
  Sense strand starting at position 2152 of SEQ ID NO: 1881748
agacucgugucuccaggua

SEQ ID NO: 2068649 - RNA, 19 nt, Artificial Sequence
  Description of Artificial Sequence: Synthetic oligonucleotide
  Antisense strand to SEQ ID NO: 2068648
uaccuggagacacgagucu

SEQ ID NO: 2068650 - RNA, 19 nt, Artificial Sequence
  Description of Artificial Sequence: Synthetic oligonucleotide
  Sense strand starting at position 2226 of SEQ ID NO: 1881748
acuucuguugugugagguu

SEQ ID NO: 2068651 - RNA, 19 nt, Artificial Sequence
  Description of Artificial Sequence: Synthetic oligonucleotide
  Antisense strand to SEQ ID NO: 2068650
aaccucacacaacagaagu

SEQ ID NO: 2068652 - RNA, 19 nt, Artificial Sequence
  Description of Artificial Sequence: Synthetic oligonucleotide
  Sense strand starting at position 2237 of SEQ ID NO: 1881748
gugagguuacguccguuua

SEQ ID NO: 2068653 - RNA, 19 nt, Artificial Sequence
  Description of Artificial Sequence: Synthetic oligonucleotide
  Antisense strand to SEQ ID NO: 2068652
uaaacggacguaaccucac

SEQ ID NO: 2068654 - RNA, 19 nt, Artificial Sequence
  Description of Artificial Sequence: Synthetic oligonucleotide
  Sense strand starting at position 2238 of SEQ ID NO: 1881748
ugagguuacguccguuuau

SEQ ID NO: 2068655 - RNA, 19 nt, Artificial Sequence
  Description of Artificial Sequence: Synthetic oligonucleotide
  Antisense strand to SEQ ID NO: 2068654
auaaacggacguaaccuca

SEQ ID NO: 2068656 - RNA, 19 nt, Artificial Sequence
  Description of Artificial Sequence: Synthetic oligonucleotide
  Sense strand starting at position 2239 of SEQ ID NO: 1881748
gagguuacguccguuuaua

SEQ ID NO: 2068657 - RNA, 19 nt, Artificial Sequence
  Description of Artificial Sequence: Synthetic oligonucleotide
  Antisense strand to SEQ ID NO: 2068656
uauaaacggacguaaccuc

SEQ ID NO: 2068658 - RNA, 19 nt, Artificial Sequence
  Description of Artificial Sequence: Synthetic oligonucleotide
  Sense strand starting at position 2425 of SEQ ID NO: 1881748
guuggcuauuugugaauuu

SEQ ID NO: 2068659 - RNA, 19 nt, Artificial Sequence
  Description of Artificial Sequence: Synthetic oligonucleotide
  Antisense strand to SEQ ID NO: 2068658
aaauucacaaauagccaac

SEQ ID NO: 2068660 - RNA, 19 nt, Artificial Sequence
  Description of Artificial Sequence: Synthetic oligonucleotide
  Sense strand starting at position 2500 of SEQ ID NO: 1881748
ugauaauuguaaccuauug

SEQ ID NO: 2068661 - RNA, 19 nt, Artificial Sequence
  Description of Artificial Sequence: Synthetic oligonucleotide
  Antisense strand to SEQ ID NO: 2068660
caauagguuacaauuauca

SEQ ID NO: 2068662 - RNA, 19 nt, Artificial Sequence
  Description of Artificial Sequence: Synthetic oligonucleotide
  Sense strand starting at position 2613 of SEQ ID NO: 1881748
uuguuugcagcacauauua

SEQ ID NO: 2068663 - RNA, 19 nt, Artificial Sequence
  Description of Artificial Sequence: Synthetic oligonucleotide
  Antisense strand to SEQ ID NO: 2068662
uaauaugugcugcaaacaa

SEQ ID NO: 2068664 - RNA, 19 nt, Artificial Sequence
  Description of Artificial Sequence: Synthetic oligonucleotide
  Sense strand starting at position 2653 of SEQ ID NO: 1881748
gguacucaguagcuacaua

SEQ ID NO: 2068665 - RNA, 19 nt, Artificial Sequence
  Description of Artificial Sequence: Synthetic oligonucleotide
  Antisense strand to SEQ ID NO: 2068664
uauguagcuacugaguacc

SEQ ID NO: 2068666 - RNA, 19 nt, Artificial Sequence
  Description of Artificial Sequence: Synthetic oligonucleotide
  Sense strand starting at position 2847 of SEQ ID NO: 1881748
gaguguccacgugaauauc

SEQ ID NO: 2068667 - RNA, 19 nt, Artificial Sequence
  Description of Artificial Sequence: Synthetic oligonucleotide
  Antisense strand to SEQ ID NO: 2068666
gauauucacguggacacuc

SEQ ID NO: 2068668 - RNA, 19 nt, Artificial Sequence
  Description of Artificial Sequence: Synthetic oligonucleotide
  Sense strand starting at position 3095 of SEQ ID NO: 1881748
aagucuucuguggguucua

SEQ ID NO: 2068669 - RNA, 19 nt, Artificial Sequence
  Description of Artificial Sequence: Synthetic oligonucleotide
  Antisense strand to SEQ ID NO: 2068668
uagaacccacagaagacuu

SEQ ID NO: 2068670 - RNA, 19 nt, Artificial Sequence
  Description of Artificial Sequence: Synthetic oligonucleotide
  Sense strand starting at position 3293 of SEQ ID NO: 1881748
caaggaaauuuagguugau

SEQ ID NO: 2068671 - RNA, 19 nt, Artificial Sequence
  Description of Artificial Sequence: Synthetic oligonucleotide
  Antisense strand to SEQ ID NO: 2068670
aucaaccuaaauuuccuug

SEQ ID NO: 2068672 - RNA, 19 nt, Artificial Sequence
  Description of Artificial Sequence: Synthetic oligonucleotide
  Sense strand starting at position 3321 of SEQ ID NO: 1881748
cuaugucuaagcugggaua

SEQ ID NO: 2068673 - RNA, 19 nt, Artificial Sequence
  Description of Artificial Sequence: Synthetic oligonucleotide
  Antisense strand to SEQ ID NO: 2068672
uaucccagcuuagacauag

SEQ ID NO: 2068674 - RNA, 19 nt, Artificial Sequence
  Description of Artificial Sequence: Synthetic oligonucleotide
  Sense strand starting at position 3323 of SEQ ID NO: 1881748
augucuaagcugggauagu

SEQ ID NO: 2068675 - RNA, 19 nt, Artificial Sequence
  Description of Artificial Sequence: Synthetic oligonucleotide
  Antisense strand to SEQ ID NO: 2068674
acuaucccagcuuagacau

SEQ ID NO: 2068676 - RNA, 19 nt, Artificial Sequence
  Description of Artificial Sequence: Synthetic oligonucleotide
  Sense strand starting at position 3332 of SEQ ID NO: 1881748
cugggauagucccaucuga

SEQ ID NO: 2068677 - RNA, 19 nt, Artificial Sequence
  Description of Artificial Sequence: Synthetic oligonucleotide
  Antisense strand to SEQ ID NO: 2068676
ucagaugggacuaucccag

SEQ ID NO: 2068678 - RNA, 19 nt, Artificial Sequence
  Description of Artificial Sequence: Synthetic oligonucleotide
  Sense strand starting at position 3501 of SEQ ID NO: 1881748
gguugagcugguuagaaau

SEQ ID NO: 2068679 - RNA, 19 nt, Artificial Sequence
  Description of Artificial Sequence: Synthetic oligonucleotide
  Antisense strand to SEQ ID NO: 2068678
auuucuaaccagcucaacc

SEQ ID NO: 2068680 - RNA, 19 nt, Artificial Sequence
  Description of Artificial Sequence: Synthetic oligonucleotide
  Sense strand starting at position 3579 of SEQ ID NO: 1881748
uggucagcugcuggugaau

SEQ ID NO: 2068681 - RNA, 19 nt, Artificial Sequence
  Description of Artificial Sequence: Synthetic oligonucleotide
  Antisense strand to SEQ ID NO: 2068680
auucaccagcagcugacca

SEQ ID NO: 2068682 - RNA, 19 nt, Artificial Sequence
  Description of Artificial Sequence: Synthetic oligonucleotide
  Sense strand starting at position 3790 of SEQ ID NO: 1881748
agcuucggccugugcaaau

SEQ ID NO: 2068683 - RNA, 19 nt, Artificial Sequence
  Description of Artificial Sequence: Synthetic oligonucleotide
  Antisense strand to SEQ ID NO: 2068682
auuugcacaggccgaagcu

SEQ ID NO: 2068684 - RNA, 19 nt, Artificial Sequence
  Description of Artificial Sequence: Synthetic oligonucleotide
  Sense strand starting at position 3829 of SEQ ID NO: 1881748
gaaacagaaucugucuguu

SEQ ID NO: 2068685 - RNA, 19 nt, Artificial Sequence
  Description of Artificial Sequence: Synthetic oligonucleotide
  Antisense strand to SEQ ID NO: 2068684
aacagacagauucuguuuc

SEQ ID NO: 2068686 - RNA, 19 nt, Artificial Sequence
  Description of Artificial Sequence: Synthetic oligonucleotide
  Sense strand starting at position 3831 of SEQ ID NO: 1881748
aacagaaucugucuguuga

SEQ ID NO: 2068687 - RNA, 19 nt, Artificial Sequence
  Description of Artificial Sequence: Synthetic oligonucleotide
  Antisense strand to SEQ ID NO: 2068686
ucaacagacagauucuguu

SEQ ID NO: 2068688 - RNA, 19 nt, Artificial Sequence
  Description of Artificial Sequence: Synthetic oligonucleotide
  Sense strand starting at position 3832 of SEQ ID NO: 1881748
acagaaucugucuguugau

SEQ ID NO: 2068689 - RNA, 19 nt, Artificial Sequence
  Description of Artificial Sequence: Synthetic oligonucleotide
  Antisense strand to SEQ ID NO: 2068688
aucaacagacagauucugu

SEQ ID NO: 2068690 - RNA, 19 nt, Artificial Sequence
  Description of Artificial Sequence: Synthetic oligonucleotide
  Sense strand starting at position 3833 of SEQ ID NO: 1881748
cagaaucugucuguugaug

SEQ ID NO: 2068691 - RNA, 19 nt, Artificial Sequence
  Description of Artificial Sequence: Synthetic oligonucleotide
  Antisense strand to SEQ ID NO: 2068690
caucaacagacagauucug

SEQ ID NO: 2068692 - RNA, 19 nt, Artificial Sequence
  Description of Artificial Sequence: Synthetic oligonucleotide
  Sense strand starting at position 3944 of SEQ ID NO: 1881748
ucuugcagguaaguauaaa

SEQ ID NO: 2068693 - RNA, 19 nt, Artificial Sequence
  Description of Artificial Sequence: Synthetic oligonucleotide
  Antisense strand to SEQ ID NO: 2068692
uuuauacuuaccugcaaga

SEQ ID NO: 2068694 - RNA, 19 nt, Artificial Sequence
  Description of Artificial Sequence: Synthetic oligonucleotide
  Sense strand starting at position 702 of SEQ ID NO: 1881749
gacaguuagccaugucgca

SEQ ID NO: 2068695 - RNA, 19 nt, Artificial Sequence
  Description of Artificial Sequence: Synthetic oligonucleotide
  Antisense strand to SEQ ID NO: 2068694
ugcgacauggcuaacuguc

SEQ ID NO: 2068696 - RNA, 19 nt, Artificial Sequence
  Description of Artificial Sequence: Synthetic oligonucleotide
  Sense strand starting at position 726 of SEQ ID NO: 1881749
agcagacaaugcuuucuca

SEQ ID NO: 2068697 - RNA, 19 nt, Artificial Sequence
  Description of Artificial Sequence: Synthetic oligonucleotide
  Antisense strand to SEQ ID NO: 2068696
ugagaaagcauugucugcu

SEQ ID NO: 2068698 - RNA, 19 nt, Artificial Sequence
  Description of Artificial Sequence: Synthetic oligonucleotide
  Sense strand starting at position 729 of SEQ ID NO: 1881749
agacaaugcuuucucaaag

SEQ ID NO: 2068699 - RNA, 19 nt, Artificial Sequence
  Description of Artificial Sequence: Synthetic oligonucleotide
  Antisense strand to SEQ ID NO: 2068698
cuuugagaaagcauugucu

SEQ ID NO: 2068700 - RNA, 19 nt, Artificial Sequence
  Description of Artificial Sequence: Synthetic oligonucleotide
  Sense strand starting at position 1676 of SEQ ID NO: 1881749
gugugcagcuguucagaga

SEQ ID NO: 2068701 - RNA, 19 nt, Artificial Sequence
  Description of Artificial Sequence: Synthetic oligonucleotide
  Antisense strand to SEQ ID NO: 2068700
ucucugaacagcugcacac

SEQ ID NO: 2068702 - RNA, 19 nt, Artificial Sequence
  Description of Artificial Sequence: Synthetic oligonucleotide
  Sense strand starting at position 1773 of SEQ ID NO: 1881749
gagagagguuccuuggcca

SEQ ID NO: 2068703 - RNA, 19 nt, Artificial Sequence
  Description of Artificial Sequence: Synthetic oligonucleotide
  Antisense strand to SEQ ID NO: 2068702
uggccaaggaaccucucuc

SEQ ID NO: 2068704 - RNA, 19 nt, Artificial Sequence
  Description of Artificial Sequence: Synthetic oligonucleotide
  Sense strand starting at position 1776 of SEQ ID NO: 1881749
agagguuccuuggccacau

SEQ ID NO: 2068705 - RNA, 19 nt, Artificial Sequence
  Description of Artificial Sequence: Synthetic oligonucleotide
  Antisense strand to SEQ ID NO: 2068704
auguggccaaggaaccucu

SEQ ID NO: 2068706 - RNA, 19 nt, Artificial Sequence
  Description of Artificial Sequence: Synthetic oligonucleotide
  Sense strand starting at position 1806 of SEQ ID NO: 1881749
gcgccaaacagugaagaga

SEQ ID NO: 2068707 - RNA, 19 nt, Artificial Sequence
  Description of Artificial Sequence: Synthetic oligonucleotide
  Antisense strand to SEQ ID NO: 2068706
ucucuucacuguuuggcgc

SEQ ID NO: 2068708 - RNA, 19 nt, Artificial Sequence
  Description of Artificial Sequence: Synthetic oligonucleotide
  Sense strand starting at position 1864 of SEQ ID NO: 1881749
acgcucagcccuugaucau

SEQ ID NO: 2068709 - RNA, 19 nt, Artificial Sequence
  Description of Artificial Sequence: Synthetic oligonucleotide
  Antisense strand to SEQ ID NO: 2068708
augaucaagggcugagcgu

SEQ ID NO: 2068710 - RNA, 19 nt, Artificial Sequence
  Description of Artificial Sequence: Synthetic oligonucleotide
  Sense strand starting at position 1898 of SEQ ID NO: 1881749
cuggcuggccaucaucaaa

SEQ ID NO: 2068711 - RNA, 19 nt, Artificial Sequence
  Description of Artificial Sequence: Synthetic oligonucleotide
  Antisense strand to SEQ ID NO: 2068710
uuugaugauggccagccag

SEQ ID NO: 2068712 - RNA, 19 nt, Artificial Sequence
  Description of Artificial Sequence: Synthetic oligonucleotide
  Sense strand starting at position 1942 of SEQ ID NO: 1881749
cgagaagucaucugccuua

SEQ ID NO: 2068713 - RNA, 19 nt, Artificial Sequence
  Description of Artificial Sequence: Synthetic oligonucleotide
  Antisense strand to SEQ ID NO: 2068712
uaaggcagaugacuucucg

SEQ ID NO: 2068714 - RNA, 19 nt, Artificial Sequence
  Description of Artificial Sequence: Synthetic oligonucleotide
  Sense strand starting at position 1945 of SEQ ID NO: 1881749
gaagucaucugccuuagca

SEQ ID NO: 2068715 - RNA, 19 nt, Artificial Sequence
  Description of Artificial Sequence: Synthetic oligonucleotide
  Antisense strand to SEQ ID NO: 2068714
ugcuaaggcagaugacuuc

SEQ ID NO: 2068716 - RNA, 19 nt, Artificial Sequence
  Description of Artificial Sequence: Synthetic oligonucleotide
  Sense strand starting at position 1967 of SEQ ID NO: 1881749
ggcucuccuccugaaguaa

SEQ ID NO: 2068717 - RNA, 19 nt, Artificial Sequence
  Description of Artificial Sequence: Synthetic oligonucleotide
  Antisense strand to SEQ ID NO: 2068716
uuacuucaggaggagagcc

SEQ ID NO: 2068718 - RNA, 19 nt, Artificial Sequence
  Description of Artificial Sequence: Synthetic oligonucleotide
  Sense strand starting at position 1993 of SEQ ID NO: 1881749
aagauuuccugugauccag

SEQ ID NO: 2068719 - RNA, 19 nt, Artificial Sequence
  Description of Artificial Sequence: Synthetic oligonucleotide
  Antisense strand to SEQ ID NO: 2068718
cuggaucacaggaaaucuu

SEQ ID NO: 2068720 - RNA, 19 nt, Artificial Sequence
  Description of Artificial Sequence: Synthetic oligonucleotide
  Sense strand starting at position 2216 of SEQ ID NO: 1881749
agccuucuacagggaugaa

SEQ ID NO: 2068721 - RNA, 19 nt, Artificial Sequence
  Description of Artificial Sequence: Synthetic oligonucleotide
  Antisense strand to SEQ ID NO: 2068720
uucaucccuguagaaggcu

SEQ ID NO: 2068722 - RNA, 19 nt, Artificial Sequence
  Description of Artificial Sequence: Synthetic oligonucleotide
  Sense strand starting at position 2291 of SEQ ID NO: 1881749
ugaaaugagcccuaagcga

SEQ ID NO: 2068723 - RNA, 19 nt, Artificial Sequence
  Description of Artificial Sequence: Synthetic oligonucleotide
  Antisense strand to SEQ ID NO: 2068722
ucgcuuagggcucauuuca

SEQ ID NO: 2068724 - RNA, 19 nt, Artificial Sequence
  Description of Artificial Sequence: Synthetic oligonucleotide
  Sense strand starting at position 2695 of SEQ ID NO: 1881749
ccuggcgucucauuggaca

SEQ ID NO: 2068725 - RNA, 19 nt, Artificial Sequence
  Description of Artificial Sequence: Synthetic oligonucleotide
  Antisense strand to SEQ ID NO: 2068724
uguccaaugagacgccagg

SEQ ID NO: 2068726 - RNA, 19 nt, Artificial Sequence
  Description of Artificial Sequence: Synthetic oligonucleotide
  Sense strand starting at position 2697 of SEQ ID NO: 1881749
uggcgucucauuggacauu

SEQ ID NO: 2068727 - RNA, 19 nt, Artificial Sequence
  Description of Artificial Sequence: Synthetic oligonucleotide
  Antisense strand to SEQ ID NO: 2068726
aauguccaaugagacgcca

SEQ ID NO: 2068728 - RNA, 19 nt, Artificial Sequence
  Description of Artificial Sequence: Synthetic oligonucleotide
  Sense strand starting at position 2698 of SEQ ID NO: 1881749
ggcgucucauuggacauuu

SEQ ID NO: 2068729 - RNA, 19 nt, Artificial Sequence
  Description of Artificial Sequence: Synthetic oligonucleotide
  Antisense strand to SEQ ID NO: 2068728
aaauguccaaugagacgcc

SEQ ID NO: 2068730 - RNA, 19 nt, Artificial Sequence
  Description of Artificial Sequence: Synthetic oligonucleotide
  Sense strand starting at position 3078 of SEQ ID NO: 1881749
gcgauugauguguccgguu

SEQ ID NO: 2068731 - RNA, 19 nt, Artificial Sequence
  Description of Artificial Sequence: Synthetic oligonucleotide
  Antisense strand to SEQ ID NO: 2068730
aaccggacacaucaaucgc

SEQ ID NO: 2068732 - RNA, 19 nt, Artificial Sequence
  Description of Artificial Sequence: Synthetic oligonucleotide
  Sense strand starting at position 3080 of SEQ ID NO: 1881749
gauugauguguccgguuuc

SEQ ID NO: 2068733 - RNA, 19 nt, Artificial Sequence
  Description of Artificial Sequence: Synthetic oligonucleotide
  Antisense strand to SEQ ID NO: 2068732
gaaaccggacacaucaauc

SEQ ID NO: 2068734 - RNA, 19 nt, Artificial Sequence
  Description of Artificial Sequence: Synthetic oligonucleotide
  Sense strand starting at position 3108 of SEQ ID NO: 1881749
acauguguaugucuacuca

SEQ ID NO: 2068735 - RNA, 19 nt, Artificial Sequence
  Description of Artificial Sequence: Synthetic oligonucleotide
  Antisense strand to SEQ ID NO: 2068734
ugaguagacauacacaugu

SEQ ID NO: 2068736 - RNA, 19 nt, Artificial Sequence
  Description of Artificial Sequence: Synthetic oligonucleotide
  Sense strand starting at position 3112 of SEQ ID NO: 1881749
guguaugucuacucaacaa

SEQ ID NO: 2068737 - RNA, 19 nt, Artificial Sequence
  Description of Artificial Sequence: Synthetic oligonucleotide
  Antisense strand to SEQ ID NO: 2068736
uuguugaguagacauacac

SEQ ID NO: 2068738 - RNA, 19 nt, Artificial Sequence
  Description of Artificial Sequence: Synthetic oligonucleotide
  Sense strand starting at position 3198 of SEQ ID NO: 1881749
ugccucauucuggaacuuu

SEQ ID NO: 2068739 - RNA, 19 nt, Artificial Sequence
  Description of Artificial Sequence: Synthetic oligonucleotide
  Antisense strand to SEQ ID NO: 2068738
aaaguuccagaaugaggca

SEQ ID NO: 2068740 - RNA, 19 nt, Artificial Sequence
  Description of Artificial Sequence: Synthetic oligonucleotide
  Sense strand starting at position 3239 of SEQ ID NO: 1881749
cucguuugccugggucaga

SEQ ID NO: 2068741 - RNA, 19 nt, Artificial Sequence
  Description of Artificial Sequence: Synthetic oligonucleotide
  Antisense strand to SEQ ID NO: 2068740
ucugacccaggcaaacgag

SEQ ID NO: 2068742 - RNA, 19 nt, Artificial Sequence
  Description of Artificial Sequence: Synthetic oligonucleotide
  Sense strand starting at position 3240 of SEQ ID NO: 1881749
ucguuugccugggucagau

SEQ ID NO: 2068743 - RNA, 19 nt, Artificial Sequence
  Description of Artificial Sequence: Synthetic oligonucleotide
  Antisense strand to SEQ ID NO: 2068742
aucugacccaggcaaacga

SEQ ID NO: 2068744 - RNA, 19 nt, Artificial Sequence
  Description of Artificial Sequence: Synthetic oligonucleotide
  Sense strand starting at position 3253 of SEQ ID NO: 1881749
ucagaucucccuugaauug

SEQ ID NO: 2068745 - RNA, 19 nt, Artificial Sequence
  Description of Artificial Sequence: Synthetic oligonucleotide
  Antisense strand to SEQ ID NO: 2068744
caauucaagggagaucuga

SEQ ID NO: 2068746 - RNA, 19 nt, Artificial Sequence
  Description of Artificial Sequence: Synthetic oligonucleotide
  Sense strand starting at position 3265 of SEQ ID NO: 1881749
ugaauuggaugggaaauuu

SEQ ID NO: 2068747 - RNA, 19 nt, Artificial Sequence
  Description of Artificial Sequence: Synthetic oligonucleotide
  Antisense strand to SEQ ID NO: 2068746
aaauuucccauccaauuca

SEQ ID NO: 2068748 - RNA, 19 nt, Artificial Sequence
  Description of Artificial Sequence: Synthetic oligonucleotide
  Sense strand starting at position 3273 of SEQ ID NO: 1881749
augggaaauuucuggguuu

SEQ ID NO: 2068749 - RNA, 19 nt, Artificial Sequence
  Description of Artificial Sequence: Synthetic oligonucleotide
  Antisense strand to SEQ ID NO: 2068748
aaacccagaaauuucccau

SEQ ID NO: 2068750 - RNA, 19 nt, Artificial Sequence
  Description of Artificial Sequence: Synthetic oligonucleotide
  Sense strand starting at position 3304 of SEQ ID NO: 1881749
guaguacugugcccuaauu

SEQ ID NO: 2068751 - RNA, 19 nt, Artificial Sequence
  Description of Artificial Sequence: Synthetic oligonucleotide
  Antisense strand to SEQ ID NO: 2068750
aauuagggcacaguacuac

SEQ ID NO: 2068752 - RNA, 19 nt, Artificial Sequence
  Description of Artificial Sequence: Synthetic oligonucleotide
  Sense strand starting at position 3306 of SEQ ID NO: 1881749
aguacugugcccuaauuaa

SEQ ID NO: 2068753 - RNA, 19 nt, Artificial Sequence
  Description of Artificial Sequence: Synthetic oligonucleotide
  Antisense strand to SEQ ID NO: 2068752
uuaauuagggcacaguacu

SEQ ID NO: 2068754 - RNA, 19 nt, Artificial Sequence
  Description of Artificial Sequence: Synthetic oligonucleotide
  Sense strand starting at position 3486 of SEQ ID NO: 1881749
cggcgugauggcgaaacaa

SEQ ID NO: 2068755 - RNA, 19 nt, Artificial Sequence
  Description of Artificial Sequence: Synthetic oligonucleotide
  Antisense strand to SEQ ID NO: 2068754
uuguuucgccaucacgccg

SEQ ID NO: 2068756 - RNA, 19 nt, Artificial Sequence
  Description of Artificial Sequence: Synthetic oligonucleotide
  Sense strand starting at position 3521 of SEQ ID NO: 1881749
ucuuccuuucuagagcaga

SEQ ID NO: 2068757 - RNA, 19 nt, Artificial Sequence
  Description of Artificial Sequence: Synthetic oligonucleotide
  Antisense strand to SEQ ID NO: 2068756
ucugcucuagaaaggaaga

SEQ ID NO: 2068758 - RNA, 19 nt, Artificial Sequence
  Description of Artificial Sequence: Synthetic oligonucleotide
  Sense strand starting at position 3541 of SEQ ID NO: 1881749
ugaacagagucagaucauu

SEQ ID NO: 2068759 - RNA, 19 nt, Artificial Sequence
  Description of Artificial Sequence: Synthetic oligonucleotide
  Antisense strand to SEQ ID NO: 2068758
aaugaucugacucuguuca

SEQ ID NO: 2068760 - RNA, 19 nt, Artificial Sequence
  Description of Artificial Sequence: Synthetic oligonucleotide
  Sense strand starting at position 3549 of SEQ ID NO: 1881749
gucagaucauucuccuucu

SEQ ID NO: 2068761 - RNA, 19 nt, Artificial Sequence
  Description of Artificial Sequence: Synthetic oligonucleotide
  Antisense strand to SEQ ID NO: 2068760
agaaggagaaugaucugac

SEQ ID NO: 2068762 - RNA, 19 nt, Artificial Sequence
  Description of Artificial Sequence: Synthetic oligonucleotide
  Sense strand starting at position 3584 of SEQ ID NO: 1881749
agcccugagucuccugaga

SEQ ID NO: 2068763 - RNA, 19 nt, Artificial Sequence
  Description of Artificial Sequence: Synthetic oligonucleotide
  Antisense strand to SEQ ID NO: 2068762
ucucaggagacucagggcu

SEQ ID NO: 2068764 - RNA, 19 nt, Artificial Sequence
  Description of Artificial Sequence: Synthetic oligonucleotide
  Sense strand starting at position 3589 of SEQ ID NO: 1881749
ugagucuccugagagcuga

SEQ ID NO: 2068765 - RNA, 19 nt, Artificial Sequence
  Description of Artificial Sequence: Synthetic oligonucleotide
  Antisense strand to SEQ ID NO: 2068764
ucagcucucaggagacuca

SEQ ID NO: 2068766 - RNA, 19 nt, Artificial Sequence
  Description of Artificial Sequence: Synthetic oligonucleotide
  Sense strand starting at position 3644 of SEQ ID NO: 1881749
ggugacugccgguaacaga

SEQ ID NO: 2068767 - RNA, 19 nt, Artificial Sequence
  Description of Artificial Sequence: Synthetic oligonucleotide
  Antisense strand to SEQ ID NO: 2068766
ucuguuaccggcagucacc

SEQ ID NO: 2068768 - RNA, 19 nt, Artificial Sequence
  Description of Artificial Sequence: Synthetic oligonucleotide
  Sense strand starting at position 3667 of SEQ ID NO: 1881749
gccuguuuggaauguguca

SEQ ID NO: 2068769 - RNA, 19 nt, Artificial Sequence
  Description of Artificial Sequence: Synthetic oligonucleotide
  Antisense strand to SEQ ID NO: 2068768
ugacacauuccaaacaggc

SEQ ID NO: 2068770 - RNA, 19 nt, Artificial Sequence
  Description of Artificial Sequence: Synthetic oligonucleotide
  Sense strand starting at position 3674 of SEQ ID NO: 1881749
uggaaugugucaucuacac

SEQ ID NO: 2068771 - RNA, 19 nt, Artificial Sequence
  Description of Artificial Sequence: Synthetic oligonucleotide
  Antisense strand to SEQ ID NO: 2068770
guguagaugacacauucca

SEQ ID NO: 2068772 - RNA, 19 nt, Artificial Sequence
  Description of Artificial Sequence: Synthetic oligonucleotide
  Sense strand starting at position 3681 of SEQ ID NO: 1881749
ugucaucuacacugacuua

SEQ ID NO: 2068773 - RNA, 19 nt, Artificial Sequence
  Description of Artificial Sequence: Synthetic oligonucleotide
  Antisense strand to SEQ ID NO: 2068772
uaagucaguguagaugaca

SEQ ID NO: 2068774 - RNA, 19 nt, Artificial Sequence
  Description of Artificial Sequence: Synthetic oligonucleotide
  Sense strand starting at position 36 of SEQ ID NO: 1881750
auggcuuuccuuugaaaua

SEQ ID NO: 2068775 - RNA, 19 nt, Artificial Sequence
  Description of Artificial Sequence: Synthetic oligonucleotide
  Antisense strand to SEQ ID NO: 2068774
uauuucaaaggaaagccau

SEQ ID NO: 2068776 - RNA, 19 nt, Artificial Sequence
  Description of Artificial Sequence: Synthetic oligonucleotide
  Sense strand starting at position 68 of SEQ ID NO: 1881750
cccuuaaaggcauaguagu

SEQ ID NO: 2068777 - RNA, 19 nt, Artificial Sequence
  Description of Artificial Sequence: Synthetic oligonucleotide
  Antisense strand to SEQ ID NO: 2068776
acuacuaugccuuuaaggg

SEQ ID NO: 2068778 - RNA, 19 nt, Artificial Sequence
  Description of Artificial Sequence: Synthetic oligonucleotide
  Sense strand starting at position 81 of SEQ ID NO: 1881750
aguagucaccuuugacaca

SEQ ID NO: 2068779 - RNA, 19 nt, Artificial Sequence
  Description of Artificial Sequence: Synthetic oligonucleotide
  Antisense strand to SEQ ID NO: 2068778
ugugucaaaggugacuacu

SEQ ID NO: 2068780 - RNA, 19 nt, Artificial Sequence
  Description of Artificial Sequence: Synthetic oligonucleotide
  Sense strand starting at position 245 of SEQ ID NO: 1881750
ccuuaaaucggaugugaac

SEQ ID NO: 2068781 - RNA, 19 nt, Artificial Sequence
  Description of Artificial Sequence: Synthetic oligonucleotide
  Antisense strand to SEQ ID NO: 2068780
guucacauccgauuuaagg

SEQ ID NO: 2068782 - RNA, 19 nt, Artificial Sequence
  Description of Artificial Sequence: Synthetic oligonucleotide
  Sense strand starting at position 265 of SEQ ID NO: 1881750
cuuugauguggcugaggga

SEQ ID NO: 2068783 - RNA, 19 nt, Artificial Sequence
  Description of Artificial Sequence: Synthetic oligonucleotide
  Antisense strand to SEQ ID NO: 2068782
ucccucagccacaucaaag

SEQ ID NO: 2068784 - RNA, 19 nt, Artificial Sequence
  Description of Artificial Sequence: Synthetic oligonucleotide
  Sense strand starting at position 467 of SEQ ID NO: 1881750
uguugauucccuuacucuu

SEQ ID NO: 2068785 - RNA, 19 nt, Artificial Sequence
  Description of Artificial Sequence: Synthetic oligonucleotide
  Antisense strand to SEQ ID NO: 2068784
aagaguaagggaaucaaca

SEQ ID NO: 2068786 - RNA, 19 nt, Artificial Sequence
  Description of Artificial Sequence: Synthetic oligonucleotide
  Sense strand starting at position 639 of SEQ ID NO: 1881750
ccuacuguccugggaaacu

SEQ ID NO: 2068787 - RNA, 19 nt, Artificial Sequence
  Description of Artificial Sequence: Synthetic oligonucleotide
  Antisense strand to SEQ ID NO: 2068786
aguuucccaggacaguagg

SEQ ID NO: 2068788 - RNA, 19 nt, Artificial Sequence
  Description of Artificial Sequence: Synthetic oligonucleotide
  Sense strand starting at position 662 of SEQ ID NO: 1881750
agcauauuccaugacgaau

SEQ ID NO: 2068789 - RNA, 19 nt, Artificial Sequence
  Description of Artificial Sequence: Synthetic oligonucleotide
  Antisense strand to SEQ ID NO: 2068788
auucgucauggaauaugcu

SEQ ID NO: 2068790 - RNA, 19 nt, Artificial Sequence
  Description of Artificial Sequence: Synthetic oligonucleotide
  Sense strand starting at position 728 of SEQ ID NO: 1881750
aucaaaggccuuugauaaa

SEQ ID NO: 2068791 - RNA, 19 nt, Artificial Sequence
  Description of Artificial Sequence: Synthetic oligonucleotide
  Antisense strand to SEQ ID NO: 2068790
uuuaucaaaggccuuugau

SEQ ID NO: 2068792 - RNA, 19 nt, Artificial Sequence
  Description of Artificial Sequence: Synthetic oligonucleotide
  Sense strand starting at position 763 of SEQ ID NO: 1881750
uggucaagucugcacuaau

SEQ ID NO: 2068793 - RNA, 19 nt, Artificial Sequence
  Description of Artificial Sequence: Synthetic oligonucleotide
  Antisense strand to SEQ ID NO: 2068792
auuagugcagacuugacca

SEQ ID NO: 2068794 - RNA, 19 nt, Artificial Sequence
  Description of Artificial Sequence: Synthetic oligonucleotide
  Sense strand starting at position 789 of SEQ ID NO: 1881750
uugugugaugugcgaauuu

SEQ ID NO: 2068795 - RNA, 19 nt, Artificial Sequence
  Description of Artificial Sequence: Synthetic oligonucleotide
  Antisense strand to SEQ ID NO: 2068794
aaauucgcacaucacacaa

SEQ ID NO: 2068796 - RNA, 19 nt, Artificial Sequence
  Description of Artificial Sequence: Synthetic oligonucleotide
  Sense strand starting at position 1044 of SEQ ID NO: 1881750
ucagaugugcuugauucuu

SEQ ID NO: 2068797 - RNA, 19 nt, Artificial Sequence
  Description of Artificial Sequence: Synthetic oligonucleotide
  Antisense strand to SEQ ID NO: 2068796
aagaaucaagcacaucuga

SEQ ID NO: 2068798 - RNA, 19 nt, Artificial Sequence
  Description of Artificial Sequence: Synthetic oligonucleotide
  Sense strand starting at position 1369 of SEQ ID NO: 1881750
gccugcucggccucggaaa

SEQ ID NO: 2068799 - RNA, 19 nt, Artificial Sequence
  Description of Artificial Sequence: Synthetic oligonucleotide
  Antisense strand to SEQ ID NO: 2068798
uuuccgaggccgagcaggc

SEQ ID NO: 2068800 - RNA, 19 nt, Artificial Sequence
  Description of Artificial Sequence: Synthetic oligonucleotide
  Sense strand starting at position 1982 of SEQ ID NO: 1881750
uuuaaccguauguggaaua

SEQ ID NO: 2068801 - RNA, 19 nt, Artificial Sequence
  Description of Artificial Sequence: Synthetic oligonucleotide
  Antisense strand to SEQ ID NO: 2068800
uauuccacauacgguuaaa

SEQ ID NO: 2068802 - RNA, 19 nt, Artificial Sequence
  Description of Artificial Sequence: Synthetic oligonucleotide
  Sense strand starting at position 1994 of SEQ ID NO: 1881750
uggaauaguuuccuucuaa

SEQ ID NO: 2068803 - RNA, 19 nt, Artificial Sequence
  Description of Artificial Sequence: Synthetic oligonucleotide
  Antisense strand to SEQ ID NO: 2068802
uuagaaggaaacuauucca

SEQ ID NO: 2068804 - RNA, 19 nt, Artificial Sequence
  Description of Artificial Sequence: Synthetic oligonucleotide
  Sense strand starting at position 1995 of SEQ ID NO: 1881750
ggaauaguuuccuucuaau

SEQ ID NO: 2068805 - RNA, 19 nt, Artificial Sequence
  Description of Artificial Sequence: Synthetic oligonucleotide
  Antisense strand to SEQ ID NO: 2068804
auuagaaggaaacuauucc

SEQ ID NO: 2068806 - RNA, 19 nt, Artificial Sequence
  Description of Artificial Sequence: Synthetic oligonucleotide
  Sense strand starting at position 2065 of SEQ ID NO: 1881750
gaacguaccuaaguugaua

SEQ ID NO: 2068807 - RNA, 19 nt, Artificial Sequence
  Description of Artificial Sequence: Synthetic oligonucleotide
  Antisense strand to SEQ ID NO: 2068806
uaucaacuuagguacguuc

SEQ ID NO: 2068808 - RNA, 19 nt, Artificial Sequence
  Description of Artificial Sequence: Synthetic oligonucleotide
  Sense strand starting at position 2117 of SEQ ID NO: 1881750
cguuuacucgugcuggagu

SEQ ID NO: 2068809 - RNA, 19 nt, Artificial Sequence
  Description of Artificial Sequence: Synthetic oligonucleotide
  Antisense strand to SEQ ID NO: 2068808
acuccagcacgaguaaacg

SEQ ID NO: 2068810 - RNA, 19 nt, Artificial Sequence
  Description of Artificial Sequence: Synthetic oligonucleotide
  Sense strand starting at position 2125 of SEQ ID NO: 1881750
cgugcuggagucuuugcau

SEQ ID NO: 2068811 - RNA, 19 nt, Artificial Sequence
  Description of Artificial Sequence: Synthetic oligonucleotide
  Antisense strand to SEQ ID NO: 2068810
augcaaagacuccagcacg

SEQ ID NO: 2068812 - RNA, 19 nt, Artificial Sequence
  Description of Artificial Sequence: Synthetic oligonucleotide
  Sense strand starting at position 2335 of SEQ ID NO: 1881750
gacugugagcuuggaaaug

SEQ ID NO: 2068813 - RNA, 19 nt, Artificial Sequence
  Description of Artificial Sequence: Synthetic oligonucleotide
  Antisense strand to SEQ ID NO: 2068812
cauuuccaagcucacaguc

SEQ ID NO: 2068814 - RNA, 19 nt, Artificial Sequence
  Description of Artificial Sequence: Synthetic oligonucleotide
  Sense strand starting at position 3228 of SEQ ID NO: 1881750
ggaacaucuccagggcagu

SEQ ID NO: 2068815 - RNA, 19 nt, Artificial Sequence
  Description of Artificial Sequence: Synthetic oligonucleotide
  Antisense strand to SEQ ID NO: 2068814
acugcccuggagauguucc

SEQ ID NO: 2068816 - RNA, 19 nt, Artificial Sequence
  Description of Artificial Sequence: Synthetic oligonucleotide
  Sense strand starting at position 3257 of SEQ ID NO: 1881750
ggaaguuuaauugggugga

SEQ ID NO: 2068817 - RNA, 19 nt, Artificial Sequence
  Description of Artificial Sequence: Synthetic oligonucleotide
  Antisense strand to SEQ ID NO: 2068816
uccacccaauuaaacuucc

SEQ ID NO: 2068818 - RNA, 19 nt, Artificial Sequence
  Description of Artificial Sequence: Synthetic oligonucleotide
  Sense strand starting at position 3259 of SEQ ID NO: 1881750
aaguuuaauuggguggaua

SEQ ID NO: 2068819 - RNA, 19 nt, Artificial Sequence
  Description of Artificial Sequence: Synthetic oligonucleotide
  Antisense strand to SEQ ID NO: 2068818
uauccacccaauuaaacuu

SEQ ID NO: 2068820 - RNA, 19 nt, Artificial Sequence
  Description of Artificial Sequence: Synthetic oligonucleotide
  Sense strand starting at position 3260 of SEQ ID NO: 1881750
aguuuaauuggguggauaa

SEQ ID NO: 2068821 - RNA, 19 nt, Artificial Sequence
  Description of Artificial Sequence: Synthetic oligonucleotide
  Antisense strand to SEQ ID NO: 2068820
uuauccacccaauuaaacu

SEQ ID NO: 2068822 - RNA, 19 nt, Artificial Sequence
  Description of Artificial Sequence: Synthetic oligonucleotide
  Sense strand starting at position 3261 of SEQ ID NO: 1881750
guuuaauuggguggauaaa

SEQ ID NO: 2068823 - RNA, 19 nt, Artificial Sequence
  Description of Artificial Sequence: Synthetic oligonucleotide
  Antisense strand to SEQ ID NO: 2068822
uuuauccacccaauuaaac

SEQ ID NO: 2068824 - RNA, 19 nt, Artificial Sequence
  Description of Artificial Sequence: Synthetic oligonucleotide
  Sense strand starting at position 3485 of SEQ ID NO: 1881750
ccucaucuguuaucuuaga

SEQ ID NO: 2068825 - RNA, 19 nt, Artificial Sequence
  Description of Artificial Sequence: Synthetic oligonucleotide
  Antisense strand to SEQ ID NO: 2068824
ucuaagauaacagaugagg

SEQ ID NO: 2068826 - RNA, 19 nt, Artificial Sequence
  Description of Artificial Sequence: Synthetic oligonucleotide
  Sense strand starting at position 3555 of SEQ ID NO: 1881750
cucugacaguugucuagaa

SEQ ID NO: 2068827 - RNA, 19 nt, Artificial Sequence
  Description of Artificial Sequence: Synthetic oligonucleotide
  Antisense strand to SEQ ID NO: 2068826
uucuagacaacugucagag

SEQ ID NO: 2068828 - RNA, 19 nt, Artificial Sequence
  Description of Artificial Sequence: Synthetic oligonucleotide
  Sense strand starting at position 3556 of SEQ ID NO: 1881750
ucugacaguugucuagaau

SEQ ID NO: 2068829 - RNA, 19 nt, Artificial Sequence
  Description of Artificial Sequence: Synthetic oligonucleotide
  Antisense strand to SEQ ID NO: 2068828
auucuagacaacugucaga

SEQ ID NO: 2068830 - RNA, 19 nt, Artificial Sequence
  Description of Artificial Sequence: Synthetic oligonucleotide
  Sense strand starting at position 3557 of SEQ ID NO: 1881750
cugacaguugucuagaauu

SEQ ID NO: 2068831 - RNA, 19 nt, Artificial Sequence
  Description of Artificial Sequence: Synthetic oligonucleotide
  Antisense strand to SEQ ID NO: 2068830
aauucuagacaacugucag

SEQ ID NO: 2068832 - RNA, 19 nt, Artificial Sequence
  Description of Artificial Sequence: Synthetic oligonucleotide
  Sense strand starting at position 3648 of SEQ ID NO: 1881750
gagacuggagguugaguaa

SEQ ID NO: 2068833 - RNA, 19 nt, Artificial Sequence
  Description of Artificial Sequence: Synthetic oligonucleotide
  Antisense strand to SEQ ID NO: 2068832
uuacucaaccuccagucuc

SEQ ID NO: 2068834 - RNA, 19 nt, Artificial Sequence
  Description of Artificial Sequence: Synthetic oligonucleotide
  Sense strand starting at position 3657 of SEQ ID NO: 1881750
gguugaguaacgggugaca

SEQ ID NO: 2068835 - RNA, 19 nt, Artificial Sequence
  Description of Artificial Sequence: Synthetic oligonucleotide
  Antisense strand to SEQ ID NO: 2068834
ugucacccguuacucaacc

SEQ ID NO: 2068836 - RNA, 19 nt, Artificial Sequence
  Description of Artificial Sequence: Synthetic oligonucleotide
  Sense strand starting at position 3659 of SEQ ID NO: 1881750
uugaguaacgggugacauu

SEQ ID NO: 2068837 - RNA, 19 nt, Artificial Sequence
  Description of Artificial Sequence: Synthetic oligonucleotide
  Antisense strand to SEQ ID NO: 2068836
aaugucacccguuacucaa

SEQ ID NO: 2068838 - RNA, 19 nt, Artificial Sequence
  Description of Artificial Sequence: Synthetic oligonucleotide
  Sense strand starting at position 3660 of SEQ ID NO: 1881750
ugaguaacgggugacauua

SEQ ID NO: 2068839 - RNA, 19 nt, Artificial Sequence
  Description of Artificial Sequence: Synthetic oligonucleotide
  Antisense strand to SEQ ID NO: 2068838
uaaugucacccguuacuca

SEQ ID NO: 2068840 - RNA, 19 nt, Artificial Sequence
  Description of Artificial Sequence: Synthetic oligonucleotide
  Sense strand starting at position 3691 of SEQ ID NO: 1881750
uguucaaaggguuaugguu

SEQ ID NO: 2068841 - RNA, 19 nt, Artificial Sequence
  Description of Artificial Sequence: Synthetic oligonucleotide
  Antisense strand to SEQ ID NO: 2068840
aaccauaacccuuugaaca

SEQ ID NO: 2068842 - RNA, 19 nt, Artificial Sequence
  Description of Artificial Sequence: Synthetic oligonucleotide
  Sense strand starting at position 3700 of SEQ ID NO: 1881750
gguuaugguucugugauuu

SEQ ID NO: 2068843 - RNA, 19 nt, Artificial Sequence
  Description of Artificial Sequence: Synthetic oligonucleotide
  Antisense strand to SEQ ID NO: 2068842
aaaucacagaaccauaacc

SEQ ID NO: 2068844 - RNA, 19 nt, Artificial Sequence
  Description of Artificial Sequence: Synthetic oligonucleotide
  Sense strand starting at position 3777 of SEQ ID NO: 1881750
gguggagagccuuguuaaa

SEQ ID NO: 2068845 - RNA, 19 nt, Artificial Sequence
  Description of Artificial Sequence: Synthetic oligonucleotide
  Antisense strand to SEQ ID NO: 2068844
uuuaacaaggcucuccacc

SEQ ID NO: 2068846 - RNA, 19 nt, Artificial Sequence
  Description of Artificial Sequence: Synthetic oligonucleotide
  Sense strand starting at position 3798 of SEQ ID NO: 1881750
gccuguugggauggaaagu

SEQ ID NO: 2068847 - RNA, 19 nt, Artificial Sequence
  Description of Artificial Sequence: Synthetic oligonucleotide
  Antisense strand to SEQ ID NO: 2068846
acuuuccaucccaacaggc

SEQ ID NO: 2068848 - RNA, 19 nt, Artificial Sequence
  Description of Artificial Sequence: Synthetic oligonucleotide
  Sense strand starting at position 3820 of SEQ ID NO: 1881750
agccauuugcucugucaau

SEQ ID NO: 2068849 - RNA, 19 nt, Artificial Sequence
  Description of Artificial Sequence: Synthetic oligonucleotide
  Antisense strand to SEQ ID NO: 2068848
auugacagagcaaauggcu

SEQ ID NO: 2068850 - RNA, 19 nt, Artificial Sequence
  Description of Artificial Sequence: Synthetic oligonucleotide
  Sense strand starting at position 3821 of SEQ ID NO: 1881750
gccauuugcucugucaaug

SEQ ID NO: 2068851 - RNA, 19 nt, Artificial Sequence
  Description of Artificial Sequence: Synthetic oligonucleotide
  Antisense strand to SEQ ID NO: 2068850
cauugacagagcaaauggc

SEQ ID NO: 2068852 - RNA, 19 nt, Artificial Sequence
  Description of Artificial Sequence: Synthetic oligonucleotide
  Sense strand starting at position 3833 of SEQ ID NO: 1881750
gucaauguagaacaucauu

SEQ ID NO: 2068853 - RNA, 19 nt, Artificial Sequence
  Description of Artificial Sequence: Synthetic oligonucleotide
  Antisense strand to SEQ ID NO: 2068852
aaugauguucuacauugac

SEQ ID NO: 2068854 - RNA, 19 nt, Artificial Sequence
  Description of Artificial Sequence: Synthetic oligonucleotide
  Sense strand starting at position 44 of SEQ ID NO: 1881751
cuugacuugcuguaugaga

SEQ ID NO: 2068855 - RNA, 19 nt, Artificial Sequence
  Description of Artificial Sequence: Synthetic oligonucleotide
  Antisense strand to SEQ ID NO: 2068854
ucucauacagcaagucaag

SEQ ID NO: 2068856 - RNA, 19 nt, Artificial Sequence
  Description of Artificial Sequence: Synthetic oligonucleotide
  Sense strand starting at position 154 of SEQ ID NO: 1881751
ggugguuauuuguuccuca

SEQ ID NO: 2068857 - RNA, 19 nt, Artificial Sequence
  Description of Artificial Sequence: Synthetic oligonucleotide
  Antisense strand to SEQ ID NO: 2068856
ugaggaacaaauaaccacc

SEQ ID NO: 2068858 - RNA, 19 nt, Artificial Sequence
  Description of Artificial Sequence: Synthetic oligonucleotide
  Sense strand starting at position 157 of SEQ ID NO: 1881751
gguuauuuguuccucagug

SEQ ID NO: 2068859 - RNA, 19 nt, Artificial Sequence
  Description of Artificial Sequence: Synthetic oligonucleotide
  Antisense strand to SEQ ID NO: 2068858
cacugaggaacaaauaacc

SEQ ID NO: 2068860 - RNA, 19 nt, Artificial Sequence
  Description of Artificial Sequence: Synthetic oligonucleotide
  Sense strand starting at position 175 of SEQ ID NO: 1881751
gggacaggaucuguucuca

SEQ ID NO: 2068861 - RNA, 19 nt, Artificial Sequence
  Description of Artificial Sequence: Synthetic oligonucleotide
  Antisense strand to SEQ ID NO: 2068860
ugagaacagauccuguccc

SEQ ID NO: 2068862 - RNA, 19 nt, Artificial Sequence
  Description of Artificial Sequence: Synthetic oligonucleotide
  Sense strand starting at position 216 of SEQ ID NO: 1881751
ugucauuucuccuugaguc

SEQ ID NO: 2068863 - RNA, 19 nt, Artificial Sequence
  Description of Artificial Sequence: Synthetic oligonucleotide
  Antisense strand to SEQ ID NO: 2068862
gacucaaggagaaaugaca

SEQ ID NO: 2068864 - RNA, 19 nt, Artificial Sequence
  Description of Artificial Sequence: Synthetic oligonucleotide
  Sense strand starting at position 217 of SEQ ID NO: 1881751
gucauuucuccuugagucu

SEQ ID NO: 2068865 - RNA, 19 nt, Artificial Sequence
  Description of Artificial Sequence: Synthetic oligonucleotide
  Antisense strand to SEQ ID NO: 2068864
agacucaaggagaaaugac

SEQ ID NO: 2068866 - RNA, 19 nt, Artificial Sequence
  Description of Artificial Sequence: Synthetic oligonucleotide
  Sense strand starting at position 564 of SEQ ID NO: 1881751
ggaaaugccucucuccaag

SEQ ID NO: 2068867 - RNA, 19 nt, Artificial Sequence
  Description of Artificial Sequence: Synthetic oligonucleotide
  Antisense strand to SEQ ID NO: 2068866
cuuggagagaggcauuucc

SEQ ID NO: 2068868 - RNA, 19 nt, Artificial Sequence
  Description of Artificial Sequence: Synthetic oligonucleotide
  Sense strand starting at position 583 of SEQ ID NO: 1881751
cacaguuucugauuggaua

SEQ ID NO: 2068869 - RNA, 19 nt, Artificial Sequence
  Description of Artificial Sequence: Synthetic oligonucleotide
  Antisense strand to SEQ ID NO: 2068868
uauccaaucagaaacugug

SEQ ID NO: 2068870 - RNA, 19 nt, Artificial Sequence
  Description of Artificial Sequence: Synthetic oligonucleotide
  Sense strand starting at position 584 of SEQ ID NO: 1881751
acaguuucugauuggauau

SEQ ID NO: 2068871 - RNA, 19 nt, Artificial Sequence
  Description of Artificial Sequence: Synthetic oligonucleotide
  Antisense strand to SEQ ID NO: 2068870
auauccaaucagaaacugu

SEQ ID NO: 2068872 - RNA, 19 nt, Artificial Sequence
  Description of Artificial Sequence: Synthetic oligonucleotide
  Sense strand starting at position 823 of SEQ ID NO: 1881751
gugggacucuuccucaaug

SEQ ID NO: 2068873 - RNA, 19 nt, Artificial Sequence
  Description of Artificial Sequence: Synthetic oligonucleotide
  Antisense strand to SEQ ID NO: 2068872
cauugaggaagagucccac

SEQ ID NO: 2068874 - RNA, 19 nt, Artificial Sequence
  Description of Artificial Sequence: Synthetic oligonucleotide
  Sense strand starting at position 914 of SEQ ID NO: 1881751
cuuacauaaguuggagagu

SEQ ID NO: 2068875 - RNA, 19 nt, Artificial Sequence
  Description of Artificial Sequence: Synthetic oligonucleotide
  Antisense strand to SEQ ID NO: 2068874
acucuccaacuuauguaag

SEQ ID NO: 2068876 - RNA, 19 nt, Artificial Sequence
  Description of Artificial Sequence: Synthetic oligonucleotide
  Sense strand starting at position 1114 of SEQ ID NO: 1881751
gggauaugauccucauccu

SEQ ID NO: 2068877 - RNA, 19 nt, Artificial Sequence
  Description of Artificial Sequence: Synthetic oligonucleotide
  Antisense strand to SEQ ID NO: 2068876
aggaugaggaucauauccc

SEQ ID NO: 2068878 - RNA, 19 nt, Artificial Sequence
  Description of Artificial Sequence: Synthetic oligonucleotide
  Sense strand starting at position 1152 of SEQ ID NO: 1881751
ggaggcauuacuugaagag

SEQ ID NO: 2068879 - RNA, 19 nt, Artificial Sequence
  Description of Artificial Sequence: Synthetic oligonucleotide
  Antisense strand to SEQ ID NO: 2068878
cucuucaaguaaugccucc

SEQ ID NO: 2068880 - RNA, 19 nt, Artificial Sequence
  Description of Artificial Sequence: Synthetic oligonucleotide
  Sense strand starting at position 1216 of SEQ ID NO: 1881751
auaguauaguacucagaga

SEQ ID NO: 2068881 - RNA, 19 nt, Artificial Sequence
  Description of Artificial Sequence: Synthetic oligonucleotide
  Antisense strand to SEQ ID NO: 2068880
ucucugaguacuauacuau

SEQ ID NO: 2068882 - RNA, 19 nt, Artificial Sequence
  Description of Artificial Sequence: Synthetic oligonucleotide
  Sense strand starting at position 1237 of SEQ ID NO: 1881751
gagaaauaggguuggguuu

SEQ ID NO: 2068883 - RNA, 19 nt, Artificial Sequence
  Description of Artificial Sequence: Synthetic oligonucleotide
  Antisense strand to SEQ ID NO: 2068882
aaacccaacccuauuucuc

SEQ ID NO: 2068884 - RNA, 19 nt, Artificial Sequence
  Description of Artificial Sequence: Synthetic oligonucleotide
  Sense strand starting at position 1249 of SEQ ID NO: 1881751
uggguuuggccugauuaga

SEQ ID NO: 2068885 - RNA, 19 nt, Artificial Sequence
  Description of Artificial Sequence: Synthetic oligonucleotide
  Antisense strand to SEQ ID NO: 2068884
ucuaaucaggccaaaccca

SEQ ID NO: 2068886 - RNA, 19 nt, Artificial Sequence
  Description of Artificial Sequence: Synthetic oligonucleotide
  Sense strand starting at position 1646 of SEQ ID NO: 1881751
uugagaugugcuuaggaga

SEQ ID NO: 2068887 - RNA, 19 nt, Artificial Sequence
  Description of Artificial Sequence: Synthetic oligonucleotide
  Antisense strand to SEQ ID NO: 2068886
ucuccuaagcacaucucaa

SEQ ID NO: 2068888 - RNA, 19 nt, Artificial Sequence
  Description of Artificial Sequence: Synthetic oligonucleotide
  Sense strand starting at position 1693 of SEQ ID NO: 1881751
gccugcugugugagaggau

SEQ ID NO: 2068889 - RNA, 19 nt, Artificial Sequence
  Description of Artificial Sequence: Synthetic oligonucleotide
  Antisense strand to SEQ ID NO: 2068888
auccucucacacagcaggc

SEQ ID NO: 2068890 - RNA, 19 nt, Artificial Sequence
  Description of Artificial Sequence: Synthetic oligonucleotide
  Sense strand starting at position 1816 of SEQ ID NO: 1881751
gaggguguuugaguagaga

SEQ ID NO: 2068891 - RNA, 19 nt, Artificial Sequence
  Description of Artificial Sequence: Synthetic oligonucleotide
  Antisense strand to SEQ ID NO: 2068890
ucucuacucaaacacccuc

SEQ ID NO: 2068892 - RNA, 19 nt, Artificial Sequence
  Description of Artificial Sequence: Synthetic oligonucleotide
  Sense strand starting at position 2175 of SEQ ID NO: 1881751
ggacuuugguauucuugaa

SEQ ID NO: 2068893 - RNA, 19 nt, Artificial Sequence
  Description of Artificial Sequence: Synthetic oligonucleotide
  Antisense strand to SEQ ID NO: 2068892
uucaagaauaccaaagucc

SEQ ID NO: 2068894 - RNA, 19 nt, Artificial Sequence
  Description of Artificial Sequence: Synthetic oligonucleotide
  Sense strand starting at position 2179 of SEQ ID NO: 1881751
uuugguauucuugaacuuu

SEQ ID NO: 2068895 - RNA, 19 nt, Artificial Sequence
  Description of Artificial Sequence: Synthetic oligonucleotide
  Antisense strand to SEQ ID NO: 2068894
aaaguucaagaauaccaaa

SEQ ID NO: 2068896 - RNA, 19 nt, Artificial Sequence
  Description of Artificial Sequence: Synthetic oligonucleotide
  Sense strand starting at position 2599 of SEQ ID NO: 1881751
gaaagaugugacugagcag

SEQ ID NO: 2068897 - RNA, 19 nt, Artificial Sequence
  Description of Artificial Sequence: Synthetic oligonucleotide
  Antisense strand to SEQ ID NO: 2068896
cugcucagucacaucuuuc

SEQ ID NO: 2068898 - RNA, 19 nt, Artificial Sequence
  Description of Artificial Sequence: Synthetic oligonucleotide
  Sense strand starting at position 2652 of SEQ ID NO: 1881751
gguaacuuuggaggucaca

SEQ ID NO: 2068899 - RNA, 19 nt, Artificial Sequence
  Description of Artificial Sequence: Synthetic oligonucleotide
  Antisense strand to SEQ ID NO: 2068898
ugugaccuccaaaguuacc

SEQ ID NO: 2068900 - RNA, 19 nt, Artificial Sequence
  Description of Artificial Sequence: Synthetic oligonucleotide
  Sense strand starting at position 2763 of SEQ ID NO: 1881751
aaggaaauggcuugacuug

SEQ ID NO: 2068901 - RNA, 19 nt, Artificial Sequence
  Description of Artificial Sequence: Synthetic oligonucleotide
  Antisense strand to SEQ ID NO: 2068900
caagucaagccauuuccuu

SEQ ID NO: 2068902 - RNA, 19 nt, Artificial Sequence
  Description of Artificial Sequence: Synthetic oligonucleotide
  Sense strand starting at position 2764 of SEQ ID NO: 1881751
aggaaauggcuugacuugu

SEQ ID NO: 2068903 - RNA, 19 nt, Artificial Sequence
  Description of Artificial Sequence: Synthetic oligonucleotide
  Antisense strand to SEQ ID NO: 2068902
acaagucaagccauuuccu

SEQ ID NO: 2068904 - RNA, 19 nt, Artificial Sequence
  Description of Artificial Sequence: Synthetic oligonucleotide
  Sense strand starting at position 2877 of SEQ ID NO: 1881751
uggguuaaauucucuuaaa

SEQ ID NO: 2068905 - RNA, 19 nt, Artificial Sequence
  Description of Artificial Sequence: Synthetic oligonucleotide
  Antisense strand to SEQ ID NO: 2068904
uuuaagagaauuuaaccca

SEQ ID NO: 2068906 - RNA, 19 nt, Artificial Sequence
  Description of Artificial Sequence: Synthetic oligonucleotide
  Sense strand starting at position 2878 of SEQ ID NO: 1881751
ggguuaaauucucuuaaau

SEQ ID NO: 2068907 - RNA, 19 nt, Artificial Sequence
  Description of Artificial Sequence: Synthetic oligonucleotide
  Antisense strand to SEQ ID NO: 2068906
auuuaagagaauuuaaccc

SEQ ID NO: 2068908 - RNA, 19 nt, Artificial Sequence
  Description of Artificial Sequence: Synthetic oligonucleotide
  Sense strand starting at position 2891 of SEQ ID NO: 1881751
uuaaauccggugcagauua

SEQ ID NO: 2068909 - RNA, 19 nt, Artificial Sequence
  Description of Artificial Sequence: Synthetic oligonucleotide
  Antisense strand to SEQ ID NO: 2068908
uaaucugcaccggauuuaa

SEQ ID NO: 2068910 - RNA, 19 nt, Artificial Sequence
  Description of Artificial Sequence: Synthetic oligonucleotide
  Sense strand starting at position 2893 of SEQ ID NO: 1881751
aaauccggugcagauuaau

SEQ ID NO: 2068911 - RNA, 19 nt, Artificial Sequence
  Description of Artificial Sequence: Synthetic oligonucleotide
  Antisense strand to SEQ ID NO: 2068910
auuaaucugcaccggauuu

SEQ ID NO: 2068912 - RNA, 19 nt, Artificial Sequence
  Description of Artificial Sequence: Synthetic oligonucleotide
  Sense strand starting at position 2946 of SEQ ID NO: 1881751
ccucuagucccugagugag

SEQ ID NO: 2068913 - RNA, 19 nt, Artificial Sequence
  Description of Artificial Sequence: Synthetic oligonucleotide
  Antisense strand to SEQ ID NO: 2068912
cucacucagggacuagagg

SEQ ID NO: 2068914 - RNA, 19 nt, Artificial Sequence
  Description of Artificial Sequence: Synthetic oligonucleotide
  Sense strand starting at position 3219 of SEQ ID NO: 1881751
caugaaacagcaggguuau

SEQ ID NO: 2068915 - RNA, 19 nt, Artificial Sequence
  Description of Artificial Sequence: Synthetic oligonucleotide
  Antisense strand to SEQ ID NO: 2068914
auaacccugcuguuucaug

SEQ ID NO: 2068916 - RNA, 19 nt, Artificial Sequence
  Description of Artificial Sequence: Synthetic oligonucleotide
  Sense strand starting at position 3220 of SEQ ID NO: 1881751
augaaacagcaggguuaua

SEQ ID NO: 2068917 - RNA, 19 nt, Artificial Sequence
  Description of Artificial Sequence: Synthetic oligonucleotide
  Antisense strand to SEQ ID NO: 2068916
uauaacccugcuguuucau

SEQ ID NO: 2068918 - RNA, 19 nt, Artificial Sequence
  Description of Artificial Sequence: Synthetic oligonucleotide
  Sense strand starting at position 3321 of SEQ ID NO: 1881751
guguguuagauuccugugu

SEQ ID NO: 2068919 - RNA, 19 nt, Artificial Sequence
  Description of Artificial Sequence: Synthetic oligonucleotide
  Antisense strand to SEQ ID NO: 2068918
acacaggaaucuaacacac

SEQ ID NO: 2068920 - RNA, 19 nt, Artificial Sequence
  Description of Artificial Sequence: Synthetic oligonucleotide
  Sense strand starting at position 3359 of SEQ ID NO: 1881751
ugaaauaaaucuuugggcu

SEQ ID NO: 2068921 - RNA, 19 nt, Artificial Sequence
  Description of Artificial Sequence: Synthetic oligonucleotide
  Antisense strand to SEQ ID NO: 2068920
agcccaaagauuuauuuca

SEQ ID NO: 2068922 - RNA, 19 nt, Artificial Sequence
  Description of Artificial Sequence: Synthetic oligonucleotide
  Sense strand starting at position 3360 of SEQ ID NO: 1881751
gaaauaaaucuuugggcug

SEQ ID NO: 2068923 - RNA, 19 nt, Artificial Sequence
  Description of Artificial Sequence: Synthetic oligonucleotide
  Antisense strand to SEQ ID NO: 2068922
cagcccaaagauuuauuuc

SEQ ID NO: 2068924 - RNA, 19 nt, Artificial Sequence
  Description of Artificial Sequence: Synthetic oligonucleotide
  Sense strand starting at position 3379 of SEQ ID NO: 1881751
cuccauauccaaggugaaa

SEQ ID NO: 2068925 - RNA, 19 nt, Artificial Sequence
  Description of Artificial Sequence: Synthetic oligonucleotide
  Antisense strand to SEQ ID NO: 2068924
uuucaccuuggauauggag

SEQ ID NO: 2068926 - RNA, 19 nt, Artificial Sequence
  Description of Artificial Sequence: Synthetic oligonucleotide
  Sense strand starting at position 3418 of SEQ ID NO: 1881751
aucuuacuggauugaaauu

SEQ ID NO: 2068927 - RNA, 19 nt, Artificial Sequence
  Description of Artificial Sequence: Synthetic oligonucleotide
  Antisense strand to SEQ ID NO: 2068926
aauuucaauccaguaagau

SEQ ID NO: 2068928 - RNA, 19 nt, Artificial Sequence
  Description of Artificial Sequence: Synthetic oligonucleotide
  Sense strand starting at position 3616 of SEQ ID NO: 1881751
aggucaguccuuuaacuuc

SEQ ID NO: 2068929 - RNA, 19 nt, Artificial Sequence
  Description of Artificial Sequence: Synthetic oligonucleotide
  Antisense strand to SEQ ID NO: 2068928
gaaguuaaaggacugaccu

SEQ ID NO: 2068930 - RNA, 19 nt, Artificial Sequence
  Description of Artificial Sequence: Synthetic oligonucleotide
  Sense strand starting at position 3854 of SEQ ID NO: 1881751
uuacauaucugaucuaugu

SEQ ID NO: 2068931 - RNA, 19 nt, Artificial Sequence
  Description of Artificial Sequence: Synthetic oligonucleotide
  Antisense strand to SEQ ID NO: 2068930
acauagaucagauauguaa

SEQ ID NO: 2068932 - RNA, 19 nt, Artificial Sequence
  Description of Artificial Sequence: Synthetic oligonucleotide
  Sense strand starting at position 3858 of SEQ ID NO: 1881751
auaucugaucuauguugga

SEQ ID NO: 2068933 - RNA, 19 nt, Artificial Sequence
  Description of Artificial Sequence: Synthetic oligonucleotide
  Antisense strand to SEQ ID NO: 2068932
uccaacauagaucagauau

SEQ ID NO: 2068934 - RNA, 19 nt, Artificial Sequence
  Description of Artificial Sequence: Synthetic oligonucleotide
  Sense strand starting at position 14 of SEQ ID NO: 1881752
auaauugaugacuguucuu

SEQ ID NO: 2068935 - RNA, 19 nt, Artificial Sequence
  Description of Artificial Sequence: Synthetic oligonucleotide
  Antisense strand to SEQ ID NO: 2068934
aagaacagucaucaauuau

SEQ ID NO: 2068936 - RNA, 19 nt, Artificial Sequence
  Description of Artificial Sequence: Synthetic oligonucleotide
  Sense strand starting at position 145 of SEQ ID NO: 1881752
aggaaugacuaucugucau

SEQ ID NO: 2068937 - RNA, 19 nt, Artificial Sequence
  Description of Artificial Sequence: Synthetic oligonucleotide
  Antisense strand to SEQ ID NO: 2068936
augacagauagucauuccu

SEQ ID NO: 2068938 - RNA, 19 nt, Artificial Sequence
  Description of Artificial Sequence: Synthetic oligonucleotide
  Sense strand starting at position 160 of SEQ ID NO: 1881752
ucauuaugauagguaucga

SEQ ID NO: 2068939 - RNA, 19 nt, Artificial Sequence
  Description of Artificial Sequence: Synthetic oligonucleotide
  Antisense strand to SEQ ID NO: 2068938
ucgauaccuaucauaauga

SEQ ID NO: 2068940 - RNA, 19 nt, Artificial Sequence
  Description of Artificial Sequence: Synthetic oligonucleotide
  Sense strand starting at position 169 of SEQ ID NO: 1881752
uagguaucgagucagguuu

SEQ ID NO: 2068941 - RNA, 19 nt, Artificial Sequence
  Description of Artificial Sequence: Synthetic oligonucleotide
  Antisense strand to SEQ ID NO: 2068940
aaaccugacucgauaccua

SEQ ID NO: 2068942 - RNA, 19 nt, Artificial Sequence
  Description of Artificial Sequence: Synthetic oligonucleotide
  Sense strand starting at position 536 of SEQ ID NO: 1881752
ggugguggcgaugacuuaa

SEQ ID NO: 2068943 - RNA, 19 nt, Artificial Sequence
  Description of Artificial Sequence: Synthetic oligonucleotide
  Antisense strand to SEQ ID NO: 2068942
uuaagucaucgccaccacc

SEQ ID NO: 2068944 - RNA, 19 nt, Artificial Sequence
  Description of Artificial Sequence: Synthetic oligonucleotide
  Sense strand starting at position 699 of SEQ ID NO: 1881752
acguacauccuggagaagu

SEQ ID NO: 2068945 - RNA, 19 nt, Artificial Sequence
  Description of Artificial Sequence: Synthetic oligonucleotide
  Antisense strand to SEQ ID NO: 2068944
acuucuccaggauguacgu

SEQ ID NO: 2068946 - RNA, 19 nt, Artificial Sequence
  Description of Artificial Sequence: Synthetic oligonucleotide
  Sense strand starting at position 709 of SEQ ID NO: 1881752
uggagaagugcugaugacu

SEQ ID NO: 2068947 - RNA, 19 nt, Artificial Sequence
  Description of Artificial Sequence: Synthetic oligonucleotide
  Antisense strand to SEQ ID NO: 2068946
agucaucagcacuucucca

SEQ ID NO: 2068948 - RNA, 19 nt, Artificial Sequence
  Description of Artificial Sequence: Synthetic oligonucleotide
  Sense strand starting at position 747 of SEQ ID NO: 1881752
ggaugcuuugagggacagu

SEQ ID NO: 2068949 - RNA, 19 nt, Artificial Sequence
  Description of Artificial Sequence: Synthetic oligonucleotide
  Antisense strand to SEQ ID NO: 2068948
acugucccucaaagcaucc

SEQ ID NO: 2068950 - RNA, 19 nt, Artificial Sequence
  Description of Artificial Sequence: Synthetic oligonucleotide
  Sense strand starting at position 748 of SEQ ID NO: 1881752
gaugcuuugagggacagua

SEQ ID NO: 2068951 - RNA, 19 nt, Artificial Sequence
  Description of Artificial Sequence: Synthetic oligonucleotide
  Antisense strand to SEQ ID NO: 2068950
uacugucccucaaagcauc

SEQ ID NO: 2068952 - RNA, 19 nt, Artificial Sequence
  Description of Artificial Sequence: Synthetic oligonucleotide
  Sense strand starting at position 750 of SEQ ID NO: 1881752
ugcuuugagggacaguauu

SEQ ID NO: 2068953 - RNA, 19 nt, Artificial Sequence
  Description of Artificial Sequence: Synthetic oligonucleotide
  Antisense strand to SEQ ID NO: 2068952
aauacugucccucaaagca

SEQ ID NO: 2068954 - RNA, 19 nt, Artificial Sequence
  Description of Artificial Sequence: Synthetic oligonucleotide
  Sense strand starting at position 905 of SEQ ID NO: 1881752
uaaugacagccuugguauu

SEQ ID NO: 2068955 - RNA, 19 nt, Artificial Sequence
  Description of Artificial Sequence: Synthetic oligonucleotide
  Antisense strand to SEQ ID NO: 2068954
aauaccaaggcugucauua

SEQ ID NO: 2068956 - RNA, 19 nt, Artificial Sequence
  Description of Artificial Sequence: Synthetic oligonucleotide
  Sense strand starting at position 912 of SEQ ID NO: 1881752
agccuugguauuuguugaa

SEQ ID NO: 2068957 - RNA, 19 nt, Artificial Sequence
  Description of Artificial Sequence: Synthetic oligonucleotide
  Antisense strand to SEQ ID NO: 2068956
uucaacaaauaccaaggcu

SEQ ID NO: 2068958 - RNA, 19 nt, Artificial Sequence
  Description of Artificial Sequence: Synthetic oligonucleotide
  Sense strand starting at position 936 of SEQ ID NO: 1881752
gauagaugacuuuguguuu

SEQ ID NO: 2068959 - RNA, 19 nt, Artificial Sequence
  Description of Artificial Sequence: Synthetic oligonucleotide
  Antisense strand to SEQ ID NO: 2068958
aaacacaaagucaucuauc

SEQ ID NO: 2068960 - RNA, 19 nt, Artificial Sequence
  Description of Artificial Sequence: Synthetic oligonucleotide
  Sense strand starting at position 1163 of SEQ ID NO: 1881752
acgagcucagucuggaaua

SEQ ID NO: 2068961 - RNA, 19 nt, Artificial Sequence
  Description of Artificial Sequence: Synthetic oligonucleotide
  Antisense strand to SEQ ID NO: 2068960
uauuccagacugagcucgu

SEQ ID NO: 2068962 - RNA, 19 nt, Artificial Sequence
  Description of Artificial Sequence: Synthetic oligonucleotide
  Sense strand starting at position 1165 of SEQ ID NO: 1881752
gagcucagucuggaauagu

SEQ ID NO: 2068963 - RNA, 19 nt, Artificial Sequence
  Description of Artificial Sequence: Synthetic oligonucleotide
  Antisense strand to SEQ ID NO: 2068962
acuauuccagacugagcuc

SEQ ID NO: 2068964 - RNA, 19 nt, Artificial Sequence
  Description of Artificial Sequence: Synthetic oligonucleotide
  Sense strand starting at position 1266 of SEQ ID NO: 1881752
guuuguuagccuguugcua

SEQ ID NO: 2068965 - RNA, 19 nt, Artificial Sequence
  Description of Artificial Sequence: Synthetic oligonucleotide
  Antisense strand to SEQ ID NO: 2068964
uagcaacaggcuaacaaac

SEQ ID NO: 2068966 - RNA, 19 nt, Artificial Sequence
  Description of Artificial Sequence: Synthetic oligonucleotide
  Sense strand starting at position 1379 of SEQ ID NO: 1881752
cgguaaagguuccuccaga

SEQ ID NO: 2068967 - RNA, 19 nt, Artificial Sequence
  Description of Artificial Sequence: Synthetic oligonucleotide
  Antisense strand to SEQ ID NO: 2068966
ucuggaggaaccuuuaccg

SEQ ID NO: 2068968 - RNA, 19 nt, Artificial Sequence
  Description of Artificial Sequence: Synthetic oligonucleotide
  Sense strand starting at position 1380 of SEQ ID NO: 1881752
gguaaagguuccuccagag

SEQ ID NO: 2068969 - RNA, 19 nt, Artificial Sequence
  Description of Artificial Sequence: Synthetic oligonucleotide
  Antisense strand to SEQ ID NO: 2068968
cucuggaggaaccuuuacc

SEQ ID NO: 2068970 - RNA, 19 nt, Artificial Sequence
  Description of Artificial Sequence: Synthetic oligonucleotide
  Sense strand starting at position 2192 of SEQ ID NO: 1881752
ggucuaguucuugauugac

SEQ ID NO: 2068971 - RNA, 19 nt, Artificial Sequence
  Description of Artificial Sequence: Synthetic oligonucleotide
  Antisense strand to SEQ ID NO: 2068970
gucaaucaagaacuagacc

SEQ ID NO: 2068972 - RNA, 19 nt, Artificial Sequence
  Description of Artificial Sequence: Synthetic oligonucleotide
  Sense strand starting at position 2194 of SEQ ID NO: 1881752
ucuaguucuugauugacag

SEQ ID NO: 2068973 - RNA, 19 nt, Artificial Sequence
  Description of Artificial Sequence: Synthetic oligonucleotide
  Antisense strand to SEQ ID NO: 2068972
cugucaaucaagaacuaga

SEQ ID NO: 2068974 - RNA, 19 nt, Artificial Sequence
  Description of Artificial Sequence: Synthetic oligonucleotide
  Sense strand starting at position 2460 of SEQ ID NO: 1881752
aaugaaaguaucgacguau

SEQ ID NO: 2068975 - RNA, 19 nt, Artificial Sequence
  Description of Artificial Sequence: Synthetic oligonucleotide
  Antisense strand to SEQ ID NO: 2068974
auacgucgauacuuucauu

SEQ ID NO: 2068976 - RNA, 19 nt, Artificial Sequence
  Description of Artificial Sequence: Synthetic oligonucleotide
  Sense strand starting at position 2504 of SEQ ID NO: 1881752
guuuaauaucagggaggca

SEQ ID NO: 2068977 - RNA, 19 nt, Artificial Sequence
  Description of Artificial Sequence: Synthetic oligonucleotide
  Antisense strand to SEQ ID NO: 2068976
ugccucccugauauuaaac

SEQ ID NO: 2068978 - RNA, 19 nt, Artificial Sequence
  Description of Artificial Sequence: Synthetic oligonucleotide
  Sense strand starting at position 2534 of SEQ ID NO: 1881752
guguauauccaauacuuug

SEQ ID NO: 2068979 - RNA, 19 nt, Artificial Sequence
  Description of Artificial Sequence: Synthetic oligonucleotide
  Antisense strand to SEQ ID NO: 2068978
caaaguauuggauauacac

SEQ ID NO: 2068980 - RNA, 19 nt, Artificial Sequence
  Description of Artificial Sequence: Synthetic oligonucleotide
  Sense strand starting at position 2669 of SEQ ID NO: 1881752
gcacuuuaaugaucuagaa

SEQ ID NO: 2068981 - RNA, 19 nt, Artificial Sequence
  Description of Artificial Sequence: Synthetic oligonucleotide
  Antisense strand to SEQ ID NO: 2068980
uucuagaucauuaaagugc

SEQ ID NO: 2068982 - RNA, 19 nt, Artificial Sequence
  Description of Artificial Sequence: Synthetic oligonucleotide
  Sense strand starting at position 2884 of SEQ ID NO: 1881752
cuuuguaauuaucuaaggu

SEQ ID NO: 2068983 - RNA, 19 nt, Artificial Sequence
  Description of Artificial Sequence: Synthetic oligonucleotide
  Antisense strand to SEQ ID NO: 2068982
accuuagauaauuacaaag

SEQ ID NO: 2068984 - RNA, 19 nt, Artificial Sequence
  Description of Artificial Sequence: Synthetic oligonucleotide
  Sense strand starting at position 2897 of SEQ ID NO: 1881752
uaagguauaguuuaugcaa

SEQ ID NO: 2068985 - RNA, 19 nt, Artificial Sequence
  Description of Artificial Sequence: Synthetic oligonucleotide
  Antisense strand to SEQ ID NO: 2068984
uugcauaaacuauaccuua

SEQ ID NO: 2068986 - RNA, 19 nt, Artificial Sequence
  Description of Artificial Sequence: Synthetic oligonucleotide
  Sense strand starting at position 3090 of SEQ ID NO: 1881752
uggaguaucuauucuauuc

SEQ ID NO: 2068987 - RNA, 19 nt, Artificial Sequence
  Description of Artificial Sequence: Synthetic oligonucleotide
  Antisense strand to SEQ ID NO: 2068986
gaauagaauagauacucca

SEQ ID NO: 2068988 - RNA, 19 nt, Artificial Sequence
  Description of Artificial Sequence: Synthetic oligonucleotide
  Sense strand starting at position 3113 of SEQ ID NO: 1881752
cugguauuauuauucccua

SEQ ID NO: 2068989 - RNA, 19 nt, Artificial Sequence
  Description of Artificial Sequence: Synthetic oligonucleotide
  Antisense strand to SEQ ID NO: 2068988
uagggaauaauaauaccag

SEQ ID NO: 2068990 - RNA, 19 nt, Artificial Sequence
  Description of Artificial Sequence: Synthetic oligonucleotide
  Sense strand starting at position 3114 of SEQ ID NO: 1881752
ugguauuauuauucccuau

SEQ ID NO: 2068991 - RNA, 19 nt, Artificial Sequence
  Description of Artificial Sequence: Synthetic oligonucleotide
  Antisense strand to SEQ ID NO: 2068990
auagggaauaauaauacca

SEQ ID NO: 2068992 - RNA, 19 nt, Artificial Sequence
  Description of Artificial Sequence: Synthetic oligonucleotide
  Sense strand starting at position 3224 of SEQ ID NO: 1881752
aaaggauagcauugucuua

SEQ ID NO: 2068993 - RNA, 19 nt, Artificial Sequence
  Description of Artificial Sequence: Synthetic oligonucleotide
  Antisense strand to SEQ ID NO: 2068992
uaagacaaugcuauccuuu

SEQ ID NO: 2068994 - RNA, 19 nt, Artificial Sequence
  Description of Artificial Sequence: Synthetic oligonucleotide
  Sense strand starting at position 3235 of SEQ ID NO: 1881752
uugucuuaccaugauguga

SEQ ID NO: 2068995 - RNA, 19 nt, Artificial Sequence
  Description of Artificial Sequence: Synthetic oligonucleotide
  Antisense strand to SEQ ID NO: 2068994
ucacaucaugguaagacaa

SEQ ID NO: 2068996 - RNA, 19 nt, Artificial Sequence
  Description of Artificial Sequence: Synthetic oligonucleotide
  Sense strand starting at position 3517 of SEQ ID NO: 1881752
ggaguauguaaauguugaa

SEQ ID NO: 2068997 - RNA, 19 nt, Artificial Sequence
  Description of Artificial Sequence: Synthetic oligonucleotide
  Antisense strand to SEQ ID NO: 2068996
uucaacauuuacauacucc

SEQ ID NO: 2068998 - RNA, 19 nt, Artificial Sequence
  Description of Artificial Sequence: Synthetic oligonucleotide
  Sense strand starting at position 3640 of SEQ ID NO: 1881752
cgagcuuccacagacguaa

SEQ ID NO: 2068999 - RNA, 19 nt, Artificial Sequence
  Description of Artificial Sequence: Synthetic oligonucleotide
  Antisense strand to SEQ ID NO: 2068998
uuacgucuguggaagcucg

SEQ ID NO: 2069000 - RNA, 19 nt, Artificial Sequence
  Description of Artificial Sequence: Synthetic oligonucleotide
  Sense strand starting at position 3691 of SEQ ID NO: 1881752
uuaugaucagagcauuauu

SEQ ID NO: 2069001 - RNA, 19 nt, Artificial Sequence
  Description of Artificial Sequence: Synthetic oligonucleotide
  Antisense strand to SEQ ID NO: 2069000
aauaaugcucugaucauaa

SEQ ID NO: 2069002 - RNA, 19 nt, Artificial Sequence
  Description of Artificial Sequence: Synthetic oligonucleotide
  Sense strand starting at position 3898 of SEQ ID NO: 1881752
ggaauaggguuuccuuuaa

SEQ ID NO: 2069003 - RNA, 19 nt, Artificial Sequence
  Description of Artificial Sequence: Synthetic oligonucleotide
  Antisense strand to SEQ ID NO: 2069002
uuaaaggaaacccuauucc

SEQ ID NO: 2069004 - RNA, 19 nt, Artificial Sequence
  Description of Artificial Sequence: Synthetic oligonucleotide
  Sense strand starting at position 3902 of SEQ ID NO: 1881752
uaggguuuccuuuaacaug

SEQ ID NO: 2069005 - RNA, 19 nt, Artificial Sequence
  Description of Artificial Sequence: Synthetic oligonucleotide
  Antisense strand to SEQ ID NO: 2069004
cauguuaaaggaaacccua

SEQ ID NO: 2069006 - RNA, 19 nt, Artificial Sequence
  Description of Artificial Sequence: Synthetic oligonucleotide
  Sense strand starting at position 3910 of SEQ ID NO: 1881752
ccuuuaacaugagugaauu

SEQ ID NO: 2069007 - RNA, 19 nt, Artificial Sequence
  Description of Artificial Sequence: Synthetic oligonucleotide
  Antisense strand to SEQ ID NO: 2069006
aauucacucauguuaaagg

SEQ ID NO: 2069008 - RNA, 19 nt, Artificial Sequence
  Description of Artificial Sequence: Synthetic oligonucleotide
  Sense strand starting at position 3911 of SEQ ID NO: 1881752
cuuuaacaugagugaauug

SEQ ID NO: 2069009 - RNA, 19 nt, Artificial Sequence
  Description of Artificial Sequence: Synthetic oligonucleotide
  Antisense strand to SEQ ID NO: 2069008
caauucacucauguuaaag

SEQ ID NO: 2069010 - RNA, 19 nt, Artificial Sequence
  Description of Artificial Sequence: Synthetic oligonucleotide
  Sense strand starting at position 3934 of SEQ ID NO: 1881752
uugcuagucgaauaauaac

SEQ ID NO: 2069011 - RNA, 19 nt, Artificial Sequence
  Description of Artificial Sequence: Synthetic oligonucleotide
  Antisense strand to SEQ ID NO: 2069010
guuauuauucgacuagcaa

SEQ ID NO: 2069012 - RNA, 19 nt, Artificial Sequence
  Description of Artificial Sequence: Synthetic oligonucleotide
  Sense strand starting at position 3940 of SEQ ID NO: 1881752
gucgaauaauaaccacuuu

SEQ ID NO: 2069013 - RNA, 19 nt, Artificial Sequence
  Description of Artificial Sequence: Synthetic oligonucleotide
  Antisense strand to SEQ ID NO: 2069012
aaagugguuauuauucgac

SEQ ID NO: 2069014 - RNA, 19 nt, Artificial Sequence
  Description of Artificial Sequence: Synthetic oligonucleotide
  Sense strand starting at position 184 of SEQ ID NO: 1881753
uuugacuaagacuguuaga

SEQ ID NO: 2069015 - RNA, 19 nt, Artificial Sequence
  Description of Artificial Sequence: Synthetic oligonucleotide
  Antisense strand to SEQ ID NO: 2069014
ucuaacagucuuagucaaa

SEQ ID NO: 2069016 - RNA, 19 nt, Artificial Sequence
  Description of Artificial Sequence: Synthetic oligonucleotide
  Sense strand starting at position 298 of SEQ ID NO: 1881753
gaaagauuccaguggcuau

SEQ ID NO: 2069017 - RNA, 19 nt, Artificial Sequence
  Description of Artificial Sequence: Synthetic oligonucleotide
  Antisense strand to SEQ ID NO: 2069016
auagccacuggaaucuuuc

SEQ ID NO: 2069018 - RNA, 19 nt, Artificial Sequence
  Description of Artificial Sequence: Synthetic oligonucleotide
  Sense strand starting at position 308 of SEQ ID NO: 1881753
aguggcuauccauggaaau

SEQ ID NO: 2069019 - RNA, 19 nt, Artificial Sequence
  Description of Artificial Sequence: Synthetic oligonucleotide
  Antisense strand to SEQ ID NO: 2069018
auuuccauggauagccacu

SEQ ID NO: 2069020 - RNA, 19 nt, Artificial Sequence
  Description of Artificial Sequence: Synthetic oligonucleotide
  Sense strand starting at position 309 of SEQ ID NO: 1881753
guggcuauccauggaaaua

SEQ ID NO: 2069021 - RNA, 19 nt, Artificial Sequence
  Description of Artificial Sequence: Synthetic oligonucleotide
  Antisense strand to SEQ ID NO: 2069020
uauuuccauggauagccac

SEQ ID NO: 2069022 - RNA, 19 nt, Artificial Sequence
  Description of Artificial Sequence: Synthetic oligonucleotide
  Sense strand starting at position 379 of SEQ ID NO: 1881753
gcagucuugggagagaauu

SEQ ID NO: 2069023 - RNA, 19 nt, Artificial Sequence
  Description of Artificial Sequence: Synthetic oligonucleotide
  Antisense strand to SEQ ID NO: 2069022
aauucucucccaagacugc

SEQ ID NO: 2069024 - RNA, 19 nt, Artificial Sequence
  Description of Artificial Sequence: Synthetic oligonucleotide
  Sense strand starting at position 749 of SEQ ID NO: 1881753
agaccacugucaucuuaag

SEQ ID NO: 2069025 - RNA, 19 nt, Artificial Sequence
  Description of Artificial Sequence: Synthetic oligonucleotide
  Antisense strand to SEQ ID NO: 2069024
cuuaagaugacaguggucu

SEQ ID NO: 2069026 - RNA, 19 nt, Artificial Sequence
  Description of Artificial Sequence: Synthetic oligonucleotide
  Sense strand starting at position 805 of SEQ ID NO: 1881753
cucugaaucgaggaugcuu

SEQ ID NO: 2069027 - RNA, 19 nt, Artificial Sequence
  Description of Artificial Sequence: Synthetic oligonucleotide
  Antisense strand to SEQ ID NO: 2069026
aagcauccucgauucagag

SEQ ID NO: 2069028 - RNA, 19 nt, Artificial Sequence
  Description of Artificial Sequence: Synthetic oligonucleotide
  Sense strand starting at position 810 of SEQ ID NO: 1881753
aaucgaggaugcuuauaug

SEQ ID NO: 2069029 - RNA, 19 nt, Artificial Sequence
  Description of Artificial Sequence: Synthetic oligonucleotide
  Antisense strand to SEQ ID NO: 2069028
cauauaagcauccucgauu

SEQ ID NO: 2069030 - RNA, 19 nt, Artificial Sequence
  Description of Artificial Sequence: Synthetic oligonucleotide
  Sense strand starting at position 857 of SEQ ID NO: 1881753
uaaacagagugcuuuagaa

SEQ ID NO: 2069031 - RNA, 19 nt, Artificial Sequence
  Description of Artificial Sequence: Synthetic oligonucleotide
  Antisense strand to SEQ ID NO: 2069030
uucuaaagcacucuguuua

SEQ ID NO: 2069032 - RNA, 19 nt, Artificial Sequence
  Description of Artificial Sequence: Synthetic oligonucleotide
  Sense strand starting at position 864 of SEQ ID NO: 1881753
agugcuuuagaacacguaa

SEQ ID NO: 2069033 - RNA, 19 nt, Artificial Sequence
  Description of Artificial Sequence: Synthetic oligonucleotide
  Antisense strand to SEQ ID NO: 2069032
uuacguguucuaaagcacu

SEQ ID NO: 2069034 - RNA, 19 nt, Artificial Sequence
  Description of Artificial Sequence: Synthetic oligonucleotide
  Sense strand starting at position 920 of SEQ ID NO: 1881753
gcaauaaaggguugaggau

SEQ ID NO: 2069035 - RNA, 19 nt, Artificial Sequence
  Description of Artificial Sequence: Synthetic oligonucleotide
  Antisense strand to SEQ ID NO: 2069034
auccucaacccuuuauugc

SEQ ID NO: 2069036 - RNA, 19 nt, Artificial Sequence
  Description of Artificial Sequence: Synthetic oligonucleotide
  Sense strand starting at position 1057 of SEQ ID NO: 1881753
ugguuuaaggagugaauuc

SEQ ID NO: 2069037 - RNA, 19 nt, Artificial Sequence
  Description of Artificial Sequence: Synthetic oligonucleotide
  Antisense strand to SEQ ID NO: 2069036
gaauucacuccuuaaacca

SEQ ID NO: 2069038 - RNA, 19 nt, Artificial Sequence
  Description of Artificial Sequence: Synthetic oligonucleotide
  Sense strand starting at position 1199 of SEQ ID NO: 1881753
uguuaaguaccuggaauua

SEQ ID NO: 2069039 - RNA, 19 nt, Artificial Sequence
  Description of Artificial Sequence: Synthetic oligonucleotide
  Antisense strand to SEQ ID NO: 2069038
uaauuccagguacuuaaca

SEQ ID NO: 2069040 - RNA, 19 nt, Artificial Sequence
  Description of Artificial Sequence: Synthetic oligonucleotide
  Sense strand starting at position 1407 of SEQ ID NO: 1881753
ucuucugaugacuggucaa

SEQ ID NO: 2069041 - RNA, 19 nt, Artificial Sequence
  Description of Artificial Sequence: Synthetic oligonucleotide
  Antisense strand to SEQ ID NO: 2069040
uugaccagucaucagaaga

SEQ ID NO: 2069042 - RNA, 19 nt, Artificial Sequence
  Description of Artificial Sequence: Synthetic oligonucleotide
  Sense strand starting at position 1510 of SEQ ID NO: 1881753
ccucucugcccggaaauaa

SEQ ID NO: 2069043 - RNA, 19 nt, Artificial Sequence
  Description of Artificial Sequence: Synthetic oligonucleotide
  Antisense strand to SEQ ID NO: 2069042
uuauuuccgggcagagagg

SEQ ID NO: 2069044 - RNA, 19 nt, Artificial Sequence
  Description of Artificial Sequence: Synthetic oligonucleotide
  Sense strand starting at position 1804 of SEQ ID NO: 1881753
gcaauuacacagugaaacu

SEQ ID NO: 2069045 - RNA, 19 nt, Artificial Sequence
  Description of Artificial Sequence: Synthetic oligonucleotide
  Antisense strand to SEQ ID NO: 2069044
aguuucacuguguaauugc

SEQ ID NO: 2069046 - RNA, 19 nt, Artificial Sequence
  Description of Artificial Sequence: Synthetic oligonucleotide
  Sense strand starting at position 1823 of SEQ ID NO: 1881753
ugguguucccggcuaguca

SEQ ID NO: 2069047 - RNA, 19 nt, Artificial Sequence
  Description of Artificial Sequence: Synthetic oligonucleotide
  Antisense strand to SEQ ID NO: 2069046
ugacuagccgggaacacca

SEQ ID NO: 2069048 - RNA, 19 nt, Artificial Sequence
  Description of Artificial Sequence: Synthetic oligonucleotide
  Sense strand starting at position 1937 of SEQ ID NO: 1881753
gucugugcucggucgaaug

SEQ ID NO: 2069049 - RNA, 19 nt, Artificial Sequence
  Description of Artificial Sequence: Synthetic oligonucleotide
  Antisense strand to SEQ ID NO: 2069048
cauucgaccgagcacagac

SEQ ID NO: 2069050 - RNA, 19 nt, Artificial Sequence
  Description of Artificial Sequence: Synthetic oligonucleotide
  Sense strand starting at position 1976 of SEQ ID NO: 1881753
cuggcucggaccuagaaau

SEQ ID NO: 2069051 - RNA, 19 nt, Artificial Sequence
  Description of Artificial Sequence: Synthetic oligonucleotide
  Antisense strand to SEQ ID NO: 2069050
auuucuagguccgagccag

SEQ ID NO: 2069052 - RNA, 19 nt, Artificial Sequence
  Description of Artificial Sequence: Synthetic oligonucleotide
  Sense strand starting at position 2799 of SEQ ID NO: 1881753
uggcuuccugcguuugaua

SEQ ID NO: 2069053 - RNA, 19 nt, Artificial Sequence
  Description of Artificial Sequence: Synthetic oligonucleotide
  Antisense strand to SEQ ID NO: 2069052
uaucaaacgcaggaagcca

SEQ ID NO: 2069054 - RNA, 19 nt, Artificial Sequence
  Description of Artificial Sequence: Synthetic oligonucleotide
  Sense strand starting at position 3146 of SEQ ID NO: 1881753
guaaauacuguuuaguaug

SEQ ID NO: 2069055 - RNA, 19 nt, Artificial Sequence
  Description of Artificial Sequence: Synthetic oligonucleotide
  Antisense strand to SEQ ID NO: 2069054
cauacuaaacaguauuuac

SEQ ID NO: 2069056 - RNA, 19 nt, Artificial Sequence
  Description of Artificial Sequence: Synthetic oligonucleotide
  Sense strand starting at position 3151 of SEQ ID NO: 1881753
uacuguuuaguauggacaa

SEQ ID NO: 2069057 - RNA, 19 nt, Artificial Sequence
  Description of Artificial Sequence: Synthetic oligonucleotide
  Antisense strand to SEQ ID NO: 2069056
uuguccauacuaaacagua

SEQ ID NO: 2069058 - RNA, 19 nt, Artificial Sequence
  Description of Artificial Sequence: Synthetic oligonucleotide
  Sense strand starting at position 3153 of SEQ ID NO: 1881753
cuguuuaguauggacaagu

SEQ ID NO: 2069059 - RNA, 19 nt, Artificial Sequence
  Description of Artificial Sequence: Synthetic oligonucleotide
  Antisense strand to SEQ ID NO: 2069058
acuuguccauacuaaacag

SEQ ID NO: 2069060 - RNA, 19 nt, Artificial Sequence
  Description of Artificial Sequence: Synthetic oligonucleotide
  Sense strand starting at position 3176 of SEQ ID NO: 1881753
gaggcauuaagguaguaga

SEQ ID NO: 2069061 - RNA, 19 nt, Artificial Sequence
  Description of Artificial Sequence: Synthetic oligonucleotide
  Antisense strand to SEQ ID NO: 2069060
ucuacuaccuuaaugccuc

SEQ ID NO: 2069062 - RNA, 19 nt, Artificial Sequence
  Description of Artificial Sequence: Synthetic oligonucleotide
  Sense strand starting at position 3204 of SEQ ID NO: 1881753
uuuguugaugaucgaggaa

SEQ ID NO: 2069063 - RNA, 19 nt, Artificial Sequence
  Description of Artificial Sequence: Synthetic oligonucleotide
  Antisense strand to SEQ ID NO: 2069062
uuccucgaucaucaacaaa

SEQ ID NO: 2069064 - RNA, 19 nt, Artificial Sequence
  Description of Artificial Sequence: Synthetic oligonucleotide
  Sense strand starting at position 3233 of SEQ ID NO: 1881753
gaguuaugugcuuaccuga

SEQ ID NO: 2069065 - RNA, 19 nt, Artificial Sequence
  Description of Artificial Sequence: Synthetic oligonucleotide
  Antisense strand to SEQ ID NO: 2069064
ucagguaagcacauaacuc

SEQ ID NO: 2069066 - RNA, 19 nt, Artificial Sequence
  Description of Artificial Sequence: Synthetic oligonucleotide
  Sense strand starting at position 3288 of SEQ ID NO: 1881753
cucccagugguaggauuaa

SEQ ID NO: 2069067 - RNA, 19 nt, Artificial Sequence
  Description of Artificial Sequence: Synthetic oligonucleotide
  Antisense strand to SEQ ID NO: 2069066
uuaauccuaccacugggag

SEQ ID NO: 2069068 - RNA, 19 nt, Artificial Sequence
  Description of Artificial Sequence: Synthetic oligonucleotide
  Sense strand starting at position 3297 of SEQ ID NO: 1881753
guaggauuaaugugaggua

SEQ ID NO: 2069069 - RNA, 19 nt, Artificial Sequence
  Description of Artificial Sequence: Synthetic oligonucleotide
  Antisense strand to SEQ ID NO: 2069068
uaccucacauuaauccuac

SEQ ID NO: 2069070 - RNA, 19 nt, Artificial Sequence
  Description of Artificial Sequence: Synthetic oligonucleotide
  Sense strand starting at position 3304 of SEQ ID NO: 1881753
uaaugugagguauaacugu

SEQ ID NO: 2069071 - RNA, 19 nt, Artificial Sequence
  Description of Artificial Sequence: Synthetic oligonucleotide
  Antisense strand to SEQ ID NO: 2069070
acaguuauaccucacauua

SEQ ID NO: 2069072 - RNA, 19 nt, Artificial Sequence
  Description of Artificial Sequence: Synthetic oligonucleotide
  Sense strand starting at position 3343 of SEQ ID NO: 1881753
ugcuuauagcaagaaauga

SEQ ID NO: 2069073 - RNA, 19 nt, Artificial Sequence
  Description of Artificial Sequence: Synthetic oligonucleotide
  Antisense strand to SEQ ID NO: 2069072
ucauuucuugcuauaagca

SEQ ID NO: 2069074 - RNA, 19 nt, Artificial Sequence
  Description of Artificial Sequence: Synthetic oligonucleotide
  Sense strand starting at position 3498 of SEQ ID NO: 1881753
guuaguugaagugagaaau

SEQ ID NO: 2069075 - RNA, 19 nt, Artificial Sequence
  Description of Artificial Sequence: Synthetic oligonucleotide
  Antisense strand to SEQ ID NO: 2069074
auuucucacuucaacuaac

SEQ ID NO: 2069076 - RNA, 19 nt, Artificial Sequence
  Description of Artificial Sequence: Synthetic oligonucleotide
  Sense strand starting at position 3508 of SEQ ID NO: 1881753
gugagaaaucuugagcuua

SEQ ID NO: 2069077 - RNA, 19 nt, Artificial Sequence
  Description of Artificial Sequence: Synthetic oligonucleotide
  Antisense strand to SEQ ID NO: 2069076
uaagcucaagauuucucac

SEQ ID NO: 2069078 - RNA, 19 nt, Artificial Sequence
  Description of Artificial Sequence: Synthetic oligonucleotide
  Sense strand starting at position 3616 of SEQ ID NO: 1881753
auacuaauggucuguuuaa

SEQ ID NO: 2069079 - RNA, 19 nt, Artificial Sequence
  Description of Artificial Sequence: Synthetic oligonucleotide
  Antisense strand to SEQ ID NO: 2069078
uuaaacagaccauuaguau

SEQ ID NO: 2069080 - RNA, 19 nt, Artificial Sequence
  Description of Artificial Sequence: Synthetic oligonucleotide
  Sense strand starting at position 3675 of SEQ ID NO: 1881753
gauccucccgaaugggaaa

SEQ ID NO: 2069081 - RNA, 19 nt, Artificial Sequence
  Description of Artificial Sequence: Synthetic oligonucleotide
  Antisense strand to SEQ ID NO: 2069080
uuucccauucgggaggauc

SEQ ID NO: 2069082 - RNA, 19 nt, Artificial Sequence
  Description of Artificial Sequence: Synthetic oligonucleotide
  Sense strand starting at position 3728 of SEQ ID NO: 1881753
aguaccagccuuuauugaa

SEQ ID NO: 2069083 - RNA, 19 nt, Artificial Sequence
  Description of Artificial Sequence: Synthetic oligonucleotide
  Antisense strand to SEQ ID NO: 2069082
uucaauaaaggcugguacu

SEQ ID NO: 2069084 - RNA, 19 nt, Artificial Sequence
  Description of Artificial Sequence: Synthetic oligonucleotide
  Sense strand starting at position 3744 of SEQ ID NO: 1881753
gaaggagucuuugucauaa

SEQ ID NO: 2069085 - RNA, 19 nt, Artificial Sequence
  Description of Artificial Sequence: Synthetic oligonucleotide
  Antisense strand to SEQ ID NO: 2069084
uuaugacaaagacuccuuc

SEQ ID NO: 2069086 - RNA, 19 nt, Artificial Sequence
  Description of Artificial Sequence: Synthetic oligonucleotide
  Sense strand starting at position 3768 of SEQ ID NO: 1881753
uugccagugucauccauuu

SEQ ID NO: 2069087 - RNA, 19 nt, Artificial Sequence
  Description of Artificial Sequence: Synthetic oligonucleotide
  Antisense strand to SEQ ID NO: 2069086
aaauggaugacacuggcaa

SEQ ID NO: 2069088 - RNA, 19 nt, Artificial Sequence
  Description of Artificial Sequence: Synthetic oligonucleotide
  Sense strand starting at position 3774 of SEQ ID NO: 1881753
gugucauccauuugcagug

SEQ ID NO: 2069089 - RNA, 19 nt, Artificial Sequence
  Description of Artificial Sequence: Synthetic oligonucleotide
  Antisense strand to SEQ ID NO: 2069088
cacugcaaauggaugacac

SEQ ID NO: 2069090 - RNA, 19 nt, Artificial Sequence
  Description of Artificial Sequence: Synthetic oligonucleotide
  Sense strand starting at position 3873 of SEQ ID NO: 1881753
ggguuuccuggcuaaucca

SEQ ID NO: 2069091 - RNA, 19 nt, Artificial Sequence
  Description of Artificial Sequence: Synthetic oligonucleotide
  Antisense strand to SEQ ID NO: 2069090
uggauuagccaggaaaccc

SEQ ID NO: 2069092 - RNA, 19 nt, Artificial Sequence
  Description of Artificial Sequence: Synthetic oligonucleotide
  Sense strand starting at position 3891 of SEQ ID NO: 1881753
auguaaucgguguauacua

SEQ ID NO: 2069093 - RNA, 19 nt, Artificial Sequence
  Description of Artificial Sequence: Synthetic oligonucleotide
  Antisense strand to SEQ ID NO: 2069092
uaguauacaccgauuacau

SEQ ID NO: 2069094 - RNA, 19 nt, Artificial Sequence
  Description of Artificial Sequence: Synthetic oligonucleotide
  Sense strand starting at position 20 of SEQ ID NO: 1881754
uacgauuggucucugugga

SEQ ID NO: 2069095 - RNA, 19 nt, Artificial Sequence
  Description of Artificial Sequence: Synthetic oligonucleotide
  Antisense strand to SEQ ID NO: 2069094
uccacagagaccaaucgua

SEQ ID NO: 2069096 - RNA, 19 nt, Artificial Sequence
  Description of Artificial Sequence: Synthetic oligonucleotide
  Sense strand starting at position 140 of SEQ ID NO: 1881754
cacgccuugcucuagacau

SEQ ID NO: 2069097 - RNA, 19 nt, Artificial Sequence
  Description of Artificial Sequence: Synthetic oligonucleotide
  Antisense strand to SEQ ID NO: 2069096
augucuagagcaaggcgug

SEQ ID NO: 2069098 - RNA, 19 nt, Artificial Sequence
  Description of Artificial Sequence: Synthetic oligonucleotide
  Sense strand starting at position 199 of SEQ ID NO: 1881754
ggaugaggcccuggaaaua

SEQ ID NO: 2069099 - RNA, 19 nt, Artificial Sequence
  Description of Artificial Sequence: Synthetic oligonucleotide
  Antisense strand to SEQ ID NO: 2069098
uauuuccagggccucaucc

SEQ ID NO: 2069100 - RNA, 19 nt, Artificial Sequence
  Description of Artificial Sequence: Synthetic oligonucleotide
  Sense strand starting at position 396 of SEQ ID NO: 1881754
ggaucaaagucgucagccu

SEQ ID NO: 2069101 - RNA, 19 nt, Artificial Sequence
  Description of Artificial Sequence: Synthetic oligonucleotide
  Antisense strand to SEQ ID NO: 2069100
aggcugacgacuuugaucc

SEQ ID NO: 2069102 - RNA, 19 nt, Artificial Sequence
  Description of Artificial Sequence: Synthetic oligonucleotide
  Sense strand starting at position 913 of SEQ ID NO: 1881754
ucugaccugucaucauagu

SEQ ID NO: 2069103 - RNA, 19 nt, Artificial Sequence
  Description of Artificial Sequence: Synthetic oligonucleotide
  Antisense strand to SEQ ID NO: 2069102
acuaugaugacaggucaga

SEQ ID NO: 2069104 - RNA, 19 nt, Artificial Sequence
  Description of Artificial Sequence: Synthetic oligonucleotide
  Sense strand starting at position 914 of SEQ ID NO: 1881754
cugaccugucaucauagua

SEQ ID NO: 2069105 - RNA, 19 nt, Artificial Sequence
  Description of Artificial Sequence: Synthetic oligonucleotide
  Antisense strand to SEQ ID NO: 2069104
uacuaugaugacaggucag

SEQ ID NO: 2069106 - RNA, 19 nt, Artificial Sequence
  Description of Artificial Sequence: Synthetic oligonucleotide
  Sense strand starting at position 1021 of SEQ ID NO: 1881754
ucggcauaaucugcacaga

SEQ ID NO: 2069107 - RNA, 19 nt, Artificial Sequence
  Description of Artificial Sequence: Synthetic oligonucleotide
  Antisense strand to SEQ ID NO: 2069106
ucugugcagauuaugccga

SEQ ID NO: 2069108 - RNA, 19 nt, Artificial Sequence
  Description of Artificial Sequence: Synthetic oligonucleotide
  Sense strand starting at position 1057 of SEQ ID NO: 1881754
ccgcgugcucaggugcaaa

SEQ ID NO: 2069109 - RNA, 19 nt, Artificial Sequence
  Description of Artificial Sequence: Synthetic oligonucleotide
  Antisense strand to SEQ ID NO: 2069108
uuugcaccugagcacgcgg

SEQ ID NO: 2069110 - RNA, 19 nt, Artificial Sequence
  Description of Artificial Sequence: Synthetic oligonucleotide
  Sense strand starting at position 1338 of SEQ ID NO: 1881754
cgaucucccuccuagaaac

SEQ ID NO: 2069111 - RNA, 19 nt, Artificial Sequence
  Description of Artificial Sequence: Synthetic oligonucleotide
  Antisense strand to SEQ ID NO: 2069110
guuucuaggagggagaucg

SEQ ID NO: 2069112 - RNA, 19 nt, Artificial Sequence
  Description of Artificial Sequence: Synthetic oligonucleotide
  Sense strand starting at position 1617 of SEQ ID NO: 1881754
ccgguucccugcccgaaau

SEQ ID NO: 2069113 - RNA, 19 nt, Artificial Sequence
  Description of Artificial Sequence: Synthetic oligonucleotide
  Antisense strand to SEQ ID NO: 2069112
auuucgggcagggaaccgg

SEQ ID NO: 2069114 - RNA, 19 nt, Artificial Sequence
  Description of Artificial Sequence: Synthetic oligonucleotide
  Sense strand starting at position 2569 of SEQ ID NO: 1881754
ggcuguccuccagugcauu

SEQ ID NO: 2069115 - RNA, 19 nt, Artificial Sequence
  Description of Artificial Sequence: Synthetic oligonucleotide
  Antisense strand to SEQ ID NO: 2069114
aaugcacuggaggacagcc

SEQ ID NO: 2069116 - RNA, 19 nt, Artificial Sequence
  Description of Artificial Sequence: Synthetic oligonucleotide
  Sense strand starting at position 2616 of SEQ ID NO: 1881754
auaggauggcugcgcauua

SEQ ID NO: 2069117 - RNA, 19 nt, Artificial Sequence
  Description of Artificial Sequence: Synthetic oligonucleotide
  Antisense strand to SEQ ID NO: 2069116
uaaugcgcagccauccuau

SEQ ID NO: 2069118 - RNA, 19 nt, Artificial Sequence
  Description of Artificial Sequence: Synthetic oligonucleotide
  Sense strand starting at position 2641 of SEQ ID NO: 1881754
gcucuagucucagccgaaa

SEQ ID NO: 2069119 - RNA, 19 nt, Artificial Sequence
  Description of Artificial Sequence: Synthetic oligonucleotide
  Antisense strand to SEQ ID NO: 2069118
uuucggcugagacuagagc

SEQ ID NO: 2069120 - RNA, 19 nt, Artificial Sequence
  Description of Artificial Sequence: Synthetic oligonucleotide
  Sense strand starting at position 2653 of SEQ ID NO: 1881754
gccgaaagcugggugguua

SEQ ID NO: 2069121 - RNA, 19 nt, Artificial Sequence
  Description of Artificial Sequence: Synthetic oligonucleotide
  Antisense strand to SEQ ID NO: 2069120
uaaccacccagcuuucggc

SEQ ID NO: 2069122 - RNA, 19 nt, Artificial Sequence
  Description of Artificial Sequence: Synthetic oligonucleotide
  Sense strand starting at position 2654 of SEQ ID NO: 1881754
ccgaaagcugggugguuau

SEQ ID NO: 2069123 - RNA, 19 nt, Artificial Sequence
  Description of Artificial Sequence: Synthetic oligonucleotide
  Antisense strand to SEQ ID NO: 2069122
auaaccacccagcuuucgg

SEQ ID NO: 2069124 - RNA, 19 nt, Artificial Sequence
  Description of Artificial Sequence: Synthetic oligonucleotide
  Sense strand starting at position 2661 of SEQ ID NO: 1881754
cugggugguuauucuuuga

SEQ ID NO: 2069125 - RNA, 19 nt, Artificial Sequence
  Description of Artificial Sequence: Synthetic oligonucleotide
  Antisense strand to SEQ ID NO: 2069124
ucaaagaauaaccacccag

SEQ ID NO: 2069126 - RNA, 19 nt, Artificial Sequence
  Description of Artificial Sequence: Synthetic oligonucleotide
  Sense strand starting at position 2665 of SEQ ID NO: 1881754
gugguuauucuuugagcca

SEQ ID NO: 2069127 - RNA, 19 nt, Artificial Sequence
  Description of Artificial Sequence: Synthetic oligonucleotide
  Antisense strand to SEQ ID NO: 2069126
uggcucaaagaauaaccac

SEQ ID NO: 2069128 - RNA, 19 nt, Artificial Sequence
  Description of Artificial Sequence: Synthetic oligonucleotide
  Sense strand starting at position 2720 of SEQ ID NO: 1881754
cggacucgauguuaaauuu

SEQ ID NO: 2069129 - RNA, 19 nt, Artificial Sequence
  Description of Artificial Sequence: Synthetic oligonucleotide
  Antisense strand to SEQ ID NO: 2069128
aaauuuaacaucgaguccg

SEQ ID NO: 2069130 - RNA, 19 nt, Artificial Sequence
  Description of Artificial Sequence: Synthetic oligonucleotide
  Sense strand starting at position 2884 of SEQ ID NO: 1881754
ggauugaggucaggugaga

SEQ ID NO: 2069131 - RNA, 19 nt, Artificial Sequence
  Description of Artificial Sequence: Synthetic oligonucleotide
  Antisense strand to SEQ ID NO: 2069130
ucucaccugaccucaaucc

SEQ ID NO: 2069132 - RNA, 19 nt, Artificial Sequence
  Description of Artificial Sequence: Synthetic oligonucleotide
  Sense strand starting at position 2988 of SEQ ID NO: 1881754
ucagacacgucagcauaau

SEQ ID NO: 2069133 - RNA, 19 nt, Artificial Sequence
  Description of Artificial Sequence: Synthetic oligonucleotide
  Antisense strand to SEQ ID NO: 2069132
auuaugcugacgugucuga

SEQ ID NO: 2069134 - RNA, 19 nt, Artificial Sequence
  Description of Artificial Sequence: Synthetic oligonucleotide
  Sense strand starting at position 2989 of SEQ ID NO: 1881754
cagacacgucagcauaauu

SEQ ID NO: 2069135 - RNA, 19 nt, Artificial Sequence
  Description of Artificial Sequence: Synthetic oligonucleotide
  Antisense strand to SEQ ID NO: 2069134
aauuaugcugacgugucug

SEQ ID NO: 2069136 - RNA, 19 nt, Artificial Sequence
  Description of Artificial Sequence: Synthetic oligonucleotide
  Sense strand starting at position 3051 of SEQ ID NO: 1881754
uggcgacaccuguguaaac

SEQ ID NO: 2069137 - RNA, 19 nt, Artificial Sequence
  Description of Artificial Sequence: Synthetic oligonucleotide
  Antisense strand to SEQ ID NO: 2069136
guuuacacaggugucgcca

SEQ ID NO: 2069138 - RNA, 19 nt, Artificial Sequence
  Description of Artificial Sequence: Synthetic oligonucleotide
  Sense strand starting at position 3052 of SEQ ID NO: 1881754
ggcgacaccuguguaaaca

SEQ ID NO: 2069139 - RNA, 19 nt, Artificial Sequence
  Description of Artificial Sequence: Synthetic oligonucleotide
  Antisense strand to SEQ ID NO: 2069138
uguuuacacaggugucgcc

SEQ ID NO: 2069140 - RNA, 19 nt, Artificial Sequence
  Description of Artificial Sequence: Synthetic oligonucleotide
  Sense strand starting at position 3146 of SEQ ID NO: 1881754
cagagacgcuaggcauaau

SEQ ID NO: 2069141 - RNA, 19 nt, Artificial Sequence
  Description of Artificial Sequence: Synthetic oligonucleotide
  Antisense strand to SEQ ID NO: 2069140
auuaugccuagcgucucug

SEQ ID NO: 2069142 - RNA, 19 nt, Artificial Sequence
  Description of Artificial Sequence: Synthetic oligonucleotide
  Sense strand starting at position 3158 of SEQ ID NO: 1881754
gcauaaucacaccagagca

SEQ ID NO: 2069143 - RNA, 19 nt, Artificial Sequence
  Description of Artificial Sequence: Synthetic oligonucleotide
  Antisense strand to SEQ ID NO: 2069142
ugcucuggugugauuaugc

SEQ ID NO: 2069144 - RNA, 19 nt, Artificial Sequence
  Description of Artificial Sequence: Synthetic oligonucleotide
  Sense strand starting at position 3442 of SEQ ID NO: 1881754
ggaccaggucacuguugua

SEQ ID NO: 2069145 - RNA, 19 nt, Artificial Sequence
  Description of Artificial Sequence: Synthetic oligonucleotide
  Antisense strand to SEQ ID NO: 2069144
uacaacagugaccuggucc

SEQ ID NO: 2069146 - RNA, 19 nt, Artificial Sequence
  Description of Artificial Sequence: Synthetic oligonucleotide
  Sense strand starting at position 3447 of SEQ ID NO: 1881754
aggucacuguuguagaaag

SEQ ID NO: 2069147 - RNA, 19 nt, Artificial Sequence
  Description of Artificial Sequence: Synthetic oligonucleotide
  Antisense strand to SEQ ID NO: 2069146
cuuucuacaacagugaccu

SEQ ID NO: 2069148 - RNA, 19 nt, Artificial Sequence
  Description of Artificial Sequence: Synthetic oligonucleotide
  Sense strand starting at position 3559 of SEQ ID NO: 1881754
auuggagacuuguuacaau

SEQ ID NO: 2069149 - RNA, 19 nt, Artificial Sequence
  Description of Artificial Sequence: Synthetic oligonucleotide
  Antisense strand to SEQ ID NO: 2069148
auuguaacaagucuccaau

SEQ ID NO: 2069150 - RNA, 19 nt, Artificial Sequence
  Description of Artificial Sequence: Synthetic oligonucleotide
  Sense strand starting at position 3562 of SEQ ID NO: 1881754
ggagacuuguuacaaugca

SEQ ID NO: 2069151 - RNA, 19 nt, Artificial Sequence
  Description of Artificial Sequence: Synthetic oligonucleotide
  Antisense strand to SEQ ID NO: 2069150
ugcauuguaacaagucucc

SEQ ID NO: 2069152 - RNA, 19 nt, Artificial Sequence
  Description of Artificial Sequence: Synthetic oligonucleotide
  Sense strand starting at position 3624 of SEQ ID NO: 1881754
agugaaagccaacauuauu

SEQ ID NO: 2069153 - RNA, 19 nt, Artificial Sequence
  Description of Artificial Sequence: Synthetic oligonucleotide
  Antisense strand to SEQ ID NO: 2069152
aauaauguuggcuuucacu

SEQ ID NO: 2069154 - RNA, 19 nt, Artificial Sequence
  Description of Artificial Sequence: Synthetic oligonucleotide
  Sense strand starting at position 3633 of SEQ ID NO: 1881754
caacauuauugcgugcuua

SEQ ID NO: 2069155 - RNA, 19 nt, Artificial Sequence
  Description of Artificial Sequence: Synthetic oligonucleotide
  Antisense strand to SEQ ID NO: 2069154
uaagcacgcaauaauguug

SEQ ID NO: 2069156 - RNA, 19 nt, Artificial Sequence
  Description of Artificial Sequence: Synthetic oligonucleotide
  Sense strand starting at position 3634 of SEQ ID NO: 1881754
aacauuauugcgugcuuac

SEQ ID NO: 2069157 - RNA, 19 nt, Artificial Sequence
  Description of Artificial Sequence: Synthetic oligonucleotide
  Antisense strand to SEQ ID NO: 2069156
guaagcacgcaauaauguu

SEQ ID NO: 2069158 - RNA, 19 nt, Artificial Sequence
  Description of Artificial Sequence: Synthetic oligonucleotide
  Sense strand starting at position 3637 of SEQ ID NO: 1881754
auuauugcgugcuuacuau

SEQ ID NO: 2069159 - RNA, 19 nt, Artificial Sequence
  Description of Artificial Sequence: Synthetic oligonucleotide
  Antisense strand to SEQ ID NO: 2069158
auaguaagcacgcaauaau

SEQ ID NO: 2069160 - RNA, 19 nt, Artificial Sequence
  Description of Artificial Sequence: Synthetic oligonucleotide
  Sense strand starting at position 3669 of SEQ ID NO: 1881754
uccuaaacacuuugagugu

SEQ ID NO: 2069161 - RNA, 19 nt, Artificial Sequence
  Description of Artificial Sequence: Synthetic oligonucleotide
  Antisense strand to SEQ ID NO: 2069160
acacucaaaguguuuagga

SEQ ID NO: 2069162 - RNA, 19 nt, Artificial Sequence
  Description of Artificial Sequence: Synthetic oligonucleotide
  Sense strand starting at position 3675 of SEQ ID NO: 1881754
acacuuugaguguauuaau

SEQ ID NO: 2069163 - RNA, 19 nt, Artificial Sequence
  Description of Artificial Sequence: Synthetic oligonucleotide
  Antisense strand to SEQ ID NO: 2069162
auuaauacacucaaagugu

SEQ ID NO: 2069164 - RNA, 19 nt, Artificial Sequence
  Description of Artificial Sequence: Synthetic oligonucleotide
  Sense strand starting at position 3717 of SEQ ID NO: 1881754
cgagaacucuuacuguugu

SEQ ID NO: 2069165 - RNA, 19 nt, Artificial Sequence
  Description of Artificial Sequence: Synthetic oligonucleotide
  Antisense strand to SEQ ID NO: 2069164
acaacaguaagaguucucg

SEQ ID NO: 2069166 - RNA, 19 nt, Artificial Sequence
  Description of Artificial Sequence: Synthetic oligonucleotide
  Sense strand starting at position 3863 of SEQ ID NO: 1881754
gggcuuucuuauguauugu

SEQ ID NO: 2069167 - RNA, 19 nt, Artificial Sequence
  Description of Artificial Sequence: Synthetic oligonucleotide
  Antisense strand to SEQ ID NO: 2069166
acaauacauaagaaagccc

SEQ ID NO: 2069168 - RNA, 19 nt, Artificial Sequence
  Description of Artificial Sequence: Synthetic oligonucleotide
  Sense strand starting at position 3869 of SEQ ID NO: 1881754
ucuuauguauugucugagu

SEQ ID NO: 2069169 - RNA, 19 nt, Artificial Sequence
  Description of Artificial Sequence: Synthetic oligonucleotide
  Antisense strand to SEQ ID NO: 2069168
acucagacaauacauaaga

SEQ ID NO: 2069170 - RNA, 19 nt, Artificial Sequence
  Description of Artificial Sequence: Synthetic oligonucleotide
  Sense strand starting at position 3871 of SEQ ID NO: 1881754
uuauguauugucugaguuu

SEQ ID NO: 2069171 - RNA, 19 nt, Artificial Sequence
  Description of Artificial Sequence: Synthetic oligonucleotide
  Antisense strand to SEQ ID NO: 2069170
aaacucagacaauacauaa

SEQ ID NO: 2069172 - RNA, 19 nt, Artificial Sequence
  Description of Artificial Sequence: Synthetic oligonucleotide
  Sense strand starting at position 3928 of SEQ ID NO: 1881754
agaucauuuauguguguuu

SEQ ID NO: 2069173 - RNA, 19 nt, Artificial Sequence
  Description of Artificial Sequence: Synthetic oligonucleotide
  Antisense strand to SEQ ID NO: 2069172
aaacacacauaaaugaucu

SEQ ID NO: 2069174 - RNA, 19 nt, Artificial Sequence
  Description of Artificial Sequence: Synthetic oligonucleotide
  Sense strand starting at position 124 of SEQ ID NO: 1881755
gccuaucuacauuggaaag

SEQ ID NO: 2069175 - RNA, 19 nt, Artificial Sequence
  Description of Artificial Sequence: Synthetic oligonucleotide
  Antisense strand to SEQ ID NO: 2069174
cuuuccaauguagauaggc

SEQ ID NO: 2069176 - RNA, 19 nt, Artificial Sequence
  Description of Artificial Sequence: Synthetic oligonucleotide
  Sense strand starting at position 186 of SEQ ID NO: 1881755
acuguuggauaaguagauu

SEQ ID NO: 2069177 - RNA, 19 nt, Artificial Sequence
  Description of Artificial Sequence: Synthetic oligonucleotide
  Antisense strand to SEQ ID NO: 2069176
aaucuacuuauccaacagu

SEQ ID NO: 2069178 - RNA, 19 nt, Artificial Sequence
  Description of Artificial Sequence: Synthetic oligonucleotide
  Sense strand starting at position 189 of SEQ ID NO: 1881755
guuggauaaguagauuagu

SEQ ID NO: 2069179 - RNA, 19 nt, Artificial Sequence
  Description of Artificial Sequence: Synthetic oligonucleotide
  Antisense strand to SEQ ID NO: 2069178
acuaaucuacuuauccaac

SEQ ID NO: 2069180 - RNA, 19 nt, Artificial Sequence
  Description of Artificial Sequence: Synthetic oligonucleotide
  Sense strand starting at position 194 of SEQ ID NO: 1881755
auaaguagauuaguaugga

SEQ ID NO: 2069181 - RNA, 19 nt, Artificial Sequence
  Description of Artificial Sequence: Synthetic oligonucleotide
  Antisense strand to SEQ ID NO: 2069180
uccauacuaaucuacuuau

SEQ ID NO: 2069182 - RNA, 19 nt, Artificial Sequence
  Description of Artificial Sequence: Synthetic oligonucleotide
  Sense strand starting at position 197 of SEQ ID NO: 1881755
aguagauuaguauggauag

SEQ ID NO: 2069183 - RNA, 19 nt, Artificial Sequence
  Description of Artificial Sequence: Synthetic oligonucleotide
  Antisense strand to SEQ ID NO: 2069182
cuauccauacuaaucuacu

SEQ ID NO: 2069184 - RNA, 19 nt, Artificial Sequence
  Description of Artificial Sequence: Synthetic oligonucleotide
  Sense strand starting at position 283 of SEQ ID NO: 1881755
gaagccagggcuuauugua

SEQ ID NO: 2069185 - RNA, 19 nt, Artificial Sequence
  Description of Artificial Sequence: Synthetic oligonucleotide
  Antisense strand to SEQ ID NO: 2069184
uacaauaagcccuggcuuc

SEQ ID NO: 2069186 - RNA, 19 nt, Artificial Sequence
  Description of Artificial Sequence: Synthetic oligonucleotide
  Sense strand starting at position 508 of SEQ ID NO: 1881755
agccuuagcgaagugugua

SEQ ID NO: 2069187 - RNA, 19 nt, Artificial Sequence
  Description of Artificial Sequence: Synthetic oligonucleotide
  Antisense strand to SEQ ID NO: 2069186
uacacacuucgcuaaggcu

SEQ ID NO: 2069188 - RNA, 19 nt, Artificial Sequence
  Description of Artificial Sequence: Synthetic oligonucleotide
  Sense strand starting at position 1037 of SEQ ID NO: 1881755
ucauguugucaaugauuau

SEQ ID NO: 2069189 - RNA, 19 nt, Artificial Sequence
  Description of Artificial Sequence: Synthetic oligonucleotide
  Antisense strand to SEQ ID NO: 2069188
auaaucauugacaacauga

SEQ ID NO: 2069190 - RNA, 19 nt, Artificial Sequence
  Description of Artificial Sequence: Synthetic oligonucleotide
  Sense strand starting at position 1304 of SEQ ID NO: 1881755
agguguuuguguaugagug

SEQ ID NO: 2069191 - RNA, 19 nt, Artificial Sequence
  Description of Artificial Sequence: Synthetic oligonucleotide
  Antisense strand to SEQ ID NO: 2069190
cacucauacacaaacaccu

SEQ ID NO: 2069192 - RNA, 19 nt, Artificial Sequence
  Description of Artificial Sequence: Synthetic oligonucleotide
  Sense strand starting at position 1480 of SEQ ID NO: 1881755
cuuauaauaucguugauca

SEQ ID NO: 2069193 - RNA, 19 nt, Artificial Sequence
  Description of Artificial Sequence: Synthetic oligonucleotide
  Antisense strand to SEQ ID NO: 2069192
ugaucaacgauauuauaag

SEQ ID NO: 2069194 - RNA, 19 nt, Artificial Sequence
  Description of Artificial Sequence: Synthetic oligonucleotide
  Sense strand starting at position 1627 of SEQ ID NO: 1881755
acugaaauguuguucuaau

SEQ ID NO: 2069195 - RNA, 19 nt, Artificial Sequence
  Description of Artificial Sequence: Synthetic oligonucleotide
  Antisense strand to SEQ ID NO: 2069194
auuagaacaacauuucagu

SEQ ID NO: 2069196 - RNA, 19 nt, Artificial Sequence
  Description of Artificial Sequence: Synthetic oligonucleotide
  Sense strand starting at position 1628 of SEQ ID NO: 1881755
cugaaauguuguucuaaug

SEQ ID NO: 2069197 - RNA, 19 nt, Artificial Sequence
  Description of Artificial Sequence: Synthetic oligonucleotide
  Antisense strand to SEQ ID NO: 2069196
cauuagaacaacauuucag

SEQ ID NO: 2069198 - RNA, 19 nt, Artificial Sequence
  Description of Artificial Sequence: Synthetic oligonucleotide
  Sense strand starting at position 1688 of SEQ ID NO: 1881755
uuguauaaagauggcuaga

SEQ ID NO: 2069199 - RNA, 19 nt, Artificial Sequence
  Description of Artificial Sequence: Synthetic oligonucleotide
  Antisense strand to SEQ ID NO: 2069198
ucuagccaucuuuauacaa

SEQ ID NO: 2069200 - RNA, 19 nt, Artificial Sequence
  Description of Artificial Sequence: Synthetic oligonucleotide
  Sense strand starting at position 1690 of SEQ ID NO: 1881755
guauaaagauggcuagauc

SEQ ID NO: 2069201 - RNA, 19 nt, Artificial Sequence
  Description of Artificial Sequence: Synthetic oligonucleotide
  Antisense strand to SEQ ID NO: 2069200
gaucuagccaucuuuauac

SEQ ID NO: 2069202 - RNA, 19 nt, Artificial Sequence
  Description of Artificial Sequence: Synthetic oligonucleotide
  Sense strand starting at position 1699 of SEQ ID NO: 1881755
uggcuagaucccuggaaag

SEQ ID NO: 2069203 - RNA, 19 nt, Artificial Sequence
  Description of Artificial Sequence: Synthetic oligonucleotide
  Antisense strand to SEQ ID NO: 2069202
cuuuccagggaucuagcca

SEQ ID NO: 2069204 - RNA, 19 nt, Artificial Sequence
  Description of Artificial Sequence: Synthetic oligonucleotide
  Sense strand starting at position 1701 of SEQ ID NO: 1881755
gcuagaucccuggaaagcu

SEQ ID NO: 2069205 - RNA, 19 nt, Artificial Sequence
  Description of Artificial Sequence: Synthetic oligonucleotide
  Antisense strand to SEQ ID NO: 2069204
agcuuuccagggaucuagc

SEQ ID NO: 2069206 - RNA, 19 nt, Artificial Sequence
  Description of Artificial Sequence: Synthetic oligonucleotide
  Sense strand starting at position 1882 of SEQ ID NO: 1881755
agugauaccugcuucugga

SEQ ID NO: 2069207 - RNA, 19 nt, Artificial Sequence
  Description of Artificial Sequence: Synthetic oligonucleotide
  Antisense strand to SEQ ID NO: 2069206
uccagaagcagguaucacu

SEQ ID NO: 2069208 - RNA, 19 nt, Artificial Sequence
  Description of Artificial Sequence: Synthetic oligonucleotide
  Sense strand starting at position 1911 of SEQ ID NO: 1881755
ggagcucuuagucauggca

SEQ ID NO: 2069209 - RNA, 19 nt, Artificial Sequence
  Description of Artificial Sequence: Synthetic oligonucleotide
  Antisense strand to SEQ ID NO: 2069208
ugccaugacuaagagcucc

SEQ ID NO: 2069210 - RNA, 19 nt, Artificial Sequence
  Description of Artificial Sequence: Synthetic oligonucleotide
  Sense strand starting at position 2294 of SEQ ID NO: 1881755
augagaaguucuucuacaa

SEQ ID NO: 2069211 - RNA, 19 nt, Artificial Sequence
  Description of Artificial Sequence: Synthetic oligonucleotide
  Antisense strand to SEQ ID NO: 2069210
uuguagaagaacuucucau

SEQ ID NO: 2069212 - RNA, 19 nt, Artificial Sequence
  Description of Artificial Sequence: Synthetic oligonucleotide
  Sense strand starting at position 2314 of SEQ ID NO: 1881755
agugauugauucuccacua

SEQ ID NO: 2069213 - RNA, 19 nt, Artificial Sequence
  Description of Artificial Sequence: Synthetic oligonucleotide
  Antisense strand to SEQ ID NO: 2069212
uaguggagaaucaaucacu

SEQ ID NO: 2069214 - RNA, 19 nt, Artificial Sequence
  Description of Artificial Sequence: Synthetic oligonucleotide
  Sense strand starting at position 2315 of SEQ ID NO: 1881755
gugauugauucuccacuaa

SEQ ID NO: 2069215 - RNA, 19 nt, Artificial Sequence
  Description of Artificial Sequence: Synthetic oligonucleotide
  Antisense strand to SEQ ID NO: 2069214
uuaguggagaaucaaucac

SEQ ID NO: 2069216 - RNA, 19 nt, Artificial Sequence
  Description of Artificial Sequence: Synthetic oligonucleotide
  Sense strand starting at position 2326 of SEQ ID NO: 1881755
uccacuaaauuguuauagu

SEQ ID NO: 2069217 - RNA, 19 nt, Artificial Sequence
  Description of Artificial Sequence: Synthetic oligonucleotide
  Antisense strand to SEQ ID NO: 2069216
acuauaacaauuuagugga

SEQ ID NO: 2069218 - RNA, 19 nt, Artificial Sequence
  Description of Artificial Sequence: Synthetic oligonucleotide
  Sense strand starting at position 2363 of SEQ ID NO: 1881755
ggguuuaugcuauagagau

SEQ ID NO: 2069219 - RNA, 19 nt, Artificial Sequence
  Description of Artificial Sequence: Synthetic oligonucleotide
  Antisense strand to SEQ ID NO: 2069218
aucucuauagcauaaaccc

SEQ ID NO: 2069220 - RNA, 19 nt, Artificial Sequence
  Description of Artificial Sequence: Synthetic oligonucleotide
  Sense strand starting at position 2383 of SEQ ID NO: 1881755
ugauaucuccuauacgcca

SEQ ID NO: 2069221 - RNA, 19 nt, Artificial Sequence
  Description of Artificial Sequence: Synthetic oligonucleotide
  Antisense strand to SEQ ID NO: 2069220
uggcguauaggagauauca

SEQ ID NO: 2069222 - RNA, 19 nt, Artificial Sequence
  Description of Artificial Sequence: Synthetic oligonucleotide
  Sense strand starting at position 2624 of SEQ ID NO: 1881755
guggguuggccagaugaca

SEQ ID NO: 2069223 - RNA, 19 nt, Artificial Sequence
  Description of Artificial Sequence: Synthetic oligonucleotide
  Antisense strand to SEQ ID NO: 2069222
ugucaucuggccaacccac

SEQ ID NO: 2069224 - RNA, 19 nt, Artificial Sequence
  Description of Artificial Sequence: Synthetic oligonucleotide
  Sense strand starting at position 2664 of SEQ ID NO: 1881755
cuaaauguuguauacguaa

SEQ ID NO: 2069225 - RNA, 19 nt, Artificial Sequence
  Description of Artificial Sequence: Synthetic oligonucleotide
  Antisense strand to SEQ ID NO: 2069224
uuacguauacaacauuuag

SEQ ID NO: 2069226 - RNA, 19 nt, Artificial Sequence
  Description of Artificial Sequence: Synthetic oligonucleotide
  Sense strand starting at position 2697 of SEQ ID NO: 1881755
gcaagcucucaggaauaua

SEQ ID NO: 2069227 - RNA, 19 nt, Artificial Sequence
  Description of Artificial Sequence: Synthetic oligonucleotide
  Antisense strand to SEQ ID NO: 2069226
uauauuccugagagcuugc

SEQ ID NO: 2069228 - RNA, 19 nt, Artificial Sequence
  Description of Artificial Sequence: Synthetic oligonucleotide
  Sense strand starting at position 3082 of SEQ ID NO: 1881755
gcacauugucugcacauuu

SEQ ID NO: 2069229 - RNA, 19 nt, Artificial Sequence
  Description of Artificial Sequence: Synthetic oligonucleotide
  Antisense strand to SEQ ID NO: 2069228
aaaugugcagacaaugugc

SEQ ID NO: 2069230 - RNA, 19 nt, Artificial Sequence
  Description of Artificial Sequence: Synthetic oligonucleotide
  Sense strand starting at position 3303 of SEQ ID NO: 1881755
ugugacuuucuugacuuua

SEQ ID NO: 2069231 - RNA, 19 nt, Artificial Sequence
  Description of Artificial Sequence: Synthetic oligonucleotide
  Antisense strand to SEQ ID NO: 2069230
uaaagucaagaaagucaca

SEQ ID NO: 2069232 - RNA, 19 nt, Artificial Sequence
  Description of Artificial Sequence: Synthetic oligonucleotide
  Sense strand starting at position 3422 of SEQ ID NO: 1881755
agguguauaagagggaauu

SEQ ID NO: 2069233 - RNA, 19 nt, Artificial Sequence
  Description of Artificial Sequence: Synthetic oligonucleotide
  Antisense strand to SEQ ID NO: 2069232
aauucccucuuauacaccu

SEQ ID NO: 2069234 - RNA, 19 nt, Artificial Sequence
  Description of Artificial Sequence: Synthetic oligonucleotide
  Sense strand starting at position 3424 of SEQ ID NO: 1881755
guguauaagagggaauugu

SEQ ID NO: 2069235 - RNA, 19 nt, Artificial Sequence
  Description of Artificial Sequence: Synthetic oligonucleotide
  Antisense strand to SEQ ID NO: 2069234
acaauucccucuuauacac

SEQ ID NO: 2069236 - RNA, 19 nt, Artificial Sequence
  Description of Artificial Sequence: Synthetic oligonucleotide
  Sense strand starting at position 3432 of SEQ ID NO: 1881755
gagggaauugucuaaguuu

SEQ ID NO: 2069237 - RNA, 19 nt, Artificial Sequence
  Description of Artificial Sequence: Synthetic oligonucleotide
  Antisense strand to SEQ ID NO: 2069236
aaacuuagacaauucccuc

SEQ ID NO: 2069238 - RNA, 19 nt, Artificial Sequence
  Description of Artificial Sequence: Synthetic oligonucleotide
  Sense strand starting at position 3435 of SEQ ID NO: 1881755
ggaauugucuaaguuuaau

SEQ ID NO: 2069239 - RNA, 19 nt, Artificial Sequence
  Description of Artificial Sequence: Synthetic oligonucleotide
  Antisense strand to SEQ ID NO: 2069238
auuaaacuuagacaauucc

SEQ ID NO: 2069240 - RNA, 19 nt, Artificial Sequence
  Description of Artificial Sequence: Synthetic oligonucleotide
  Sense strand starting at position 3493 of SEQ ID NO: 1881755
agaacaucuugauaaagaa

SEQ ID NO: 2069241 - RNA, 19 nt, Artificial Sequence
  Description of Artificial Sequence: Synthetic oligonucleotide
  Antisense strand to SEQ ID NO: 2069240
uucuuuaucaagauguucu

SEQ ID NO: 2069242 - RNA, 19 nt, Artificial Sequence
  Description of Artificial Sequence: Synthetic oligonucleotide
  Sense strand starting at position 3558 of SEQ ID NO: 1881755
ucccuugucagcgagaaau

SEQ ID NO: 2069243 - RNA, 19 nt, Artificial Sequence
  Description of Artificial Sequence: Synthetic oligonucleotide
  Antisense strand to SEQ ID NO: 2069242
auuucucgcugacaaggga

SEQ ID NO: 2069244 - RNA, 19 nt, Artificial Sequence
  Description of Artificial Sequence: Synthetic oligonucleotide
  Sense strand starting at position 3591 of SEQ ID NO: 1881755
gaaaguaaauguuugccua

SEQ ID NO: 2069245 - RNA, 19 nt, Artificial Sequence
  Description of Artificial Sequence: Synthetic oligonucleotide
  Antisense strand to SEQ ID NO: 2069244
uaggcaaacauuuacuuuc

SEQ ID NO: 2069246 - RNA, 19 nt, Artificial Sequence
  Description of Artificial Sequence: Synthetic oligonucleotide
  Sense strand starting at position 3594 of SEQ ID NO: 1881755
aguaaauguuugccuauaa

SEQ ID NO: 2069247 - RNA, 19 nt, Artificial Sequence
  Description of Artificial Sequence: Synthetic oligonucleotide
  Antisense strand to SEQ ID NO: 2069246
uuauaggcaaacauuuacu

SEQ ID NO: 2069248 - RNA, 19 nt, Artificial Sequence
  Description of Artificial Sequence: Synthetic oligonucleotide
  Sense strand starting at position 3702 of SEQ ID NO: 1881755
uaugcauugcuggaguaau

SEQ ID NO: 2069249 - RNA, 19 nt, Artificial Sequence
  Description of Artificial Sequence: Synthetic oligonucleotide
  Antisense strand to SEQ ID NO: 2069248
auuacuccagcaaugcaua

SEQ ID NO: 2069250 - RNA, 19 nt, Artificial Sequence
  Description of Artificial Sequence: Synthetic oligonucleotide
  Sense strand starting at position 3710 of SEQ ID NO: 1881755
gcuggaguaauaggaagua

SEQ ID NO: 2069251 - RNA, 19 nt, Artificial Sequence
  Description of Artificial Sequence: Synthetic oligonucleotide
  Antisense strand to SEQ ID NO: 2069250
uacuuccuauuacuccagc

SEQ ID NO: 2069252 - RNA, 19 nt, Artificial Sequence
  Description of Artificial Sequence: Synthetic oligonucleotide
  Sense strand starting at position 3832 of SEQ ID NO: 1881755
gugaucaucugauccaaau

SEQ ID NO: 2069253 - RNA, 19 nt, Artificial Sequence
  Description of Artificial Sequence: Synthetic oligonucleotide
  Antisense strand to SEQ ID NO: 2069252
auuuggaucagaugaucac

SEQ ID NO: 2069254 - RNA, 19 nt, Artificial Sequence
  Description of Artificial Sequence: Synthetic oligonucleotide
  Sense strand starting at position 37 of SEQ ID NO: 1881756
aacugaggauguuuguaua

SEQ ID NO: 2069255 - RNA, 19 nt, Artificial Sequence
  Description of Artificial Sequence: Synthetic oligonucleotide
  Antisense strand to SEQ ID NO: 2069254
uauacaaacauccucaguu

SEQ ID NO: 2069256 - RNA, 19 nt, Artificial Sequence
  Description of Artificial Sequence: Synthetic oligonucleotide
  Sense strand starting at position 40 of SEQ ID NO: 1881756
ugaggauguuuguauaaua

SEQ ID NO: 2069257 - RNA, 19 nt, Artificial Sequence
  Description of Artificial Sequence: Synthetic oligonucleotide
  Antisense strand to SEQ ID NO: 2069256
uauuauacaaacauccuca

SEQ ID NO: 2069258 - RNA, 19 nt, Artificial Sequence
  Description of Artificial Sequence: Synthetic oligonucleotide
  Sense strand starting at position 165 of SEQ ID NO: 1881756
gggaaccgcucuuuagaaa

SEQ ID NO: 2069259 - RNA, 19 nt, Artificial Sequence
  Description of Artificial Sequence: Synthetic oligonucleotide
  Antisense strand to SEQ ID NO: 2069258
uuucuaaagagcgguuccc

SEQ ID NO: 2069260 - RNA, 19 nt, Artificial Sequence
  Description of Artificial Sequence: Synthetic oligonucleotide
  Sense strand starting at position 166 of SEQ ID NO: 1881756
ggaaccgcucuuuagaaau

SEQ ID NO: 2069261 - RNA, 19 nt, Artificial Sequence
  Description of Artificial Sequence: Synthetic oligonucleotide
  Antisense strand to SEQ ID NO: 2069260
auuucuaaagagcgguucc

SEQ ID NO: 2069262 - RNA, 19 nt, Artificial Sequence
  Description of Artificial Sequence: Synthetic oligonucleotide
  Sense strand starting at position 185 of SEQ ID NO: 1881756
ggaaauacuccaggccagu

SEQ ID NO: 2069263 - RNA, 19 nt, Artificial Sequence
  Description of Artificial Sequence: Synthetic oligonucleotide
  Antisense strand to SEQ ID NO: 2069262
acuggccuggaguauuucc

SEQ ID NO: 2069264 - RNA, 19 nt, Artificial Sequence
  Description of Artificial Sequence: Synthetic oligonucleotide
  Sense strand starting at position 198 of SEQ ID NO: 1881756
gccagugcucccuggugau

SEQ ID NO: 2069265 - RNA, 19 nt, Artificial Sequence
  Description of Artificial Sequence: Synthetic oligonucleotide
  Antisense strand to SEQ ID NO: 2069264
aucaccagggagcacuggc

SEQ ID NO: 2069266 - RNA, 19 nt, Artificial Sequence
  Description of Artificial Sequence: Synthetic oligonucleotide
  Sense strand starting at position 201 of SEQ ID NO: 1881756
agugcucccuggugauaaa

SEQ ID NO: 2069267 - RNA, 19 nt, Artificial Sequence
  Description of Artificial Sequence: Synthetic oligonucleotide
  Antisense strand to SEQ ID NO: 2069266
uuuaucaccagggagcacu

SEQ ID NO: 2069268 - RNA, 19 nt, Artificial Sequence
  Description of Artificial Sequence: Synthetic oligonucleotide
  Sense strand starting at position 244 of SEQ ID NO: 1881756
uuaaacugaucugaucgua

SEQ ID NO: 2069269 - RNA, 19 nt, Artificial Sequence
  Description of Artificial Sequence: Synthetic oligonucleotide
  Antisense strand to SEQ ID NO: 2069268
uacgaucagaucaguuuaa

SEQ ID NO: 2069270 - RNA, 19 nt, Artificial Sequence
  Description of Artificial Sequence: Synthetic oligonucleotide
  Sense strand starting at position 247 of SEQ ID NO: 1881756
aacugaucugaucguaaag

SEQ ID NO: 2069271 - RNA, 19 nt, Artificial Sequence
  Description of Artificial Sequence: Synthetic oligonucleotide
  Antisense strand to SEQ ID NO: 2069270
cuuuacgaucagaucaguu

SEQ ID NO: 2069272 - RNA, 19 nt, Artificial Sequence
  Description of Artificial Sequence: Synthetic oligonucleotide
  Sense strand starting at position 249 of SEQ ID NO: 1881756
cugaucugaucguaaagga

SEQ ID NO: 2069273 - RNA, 19 nt, Artificial Sequence
  Description of Artificial Sequence: Synthetic oligonucleotide
  Antisense strand to SEQ ID NO: 2069272
uccuuuacgaucagaucag

SEQ ID NO: 2069274 - RNA, 19 nt, Artificial Sequence
  Description of Artificial Sequence: Synthetic oligonucleotide
  Sense strand starting at position 277 of SEQ ID NO: 1881756
guugccaucugaucugaca

SEQ ID NO: 2069275 - RNA, 19 nt, Artificial Sequence
  Description of Artificial Sequence: Synthetic oligonucleotide
  Antisense strand to SEQ ID NO: 2069274
ugucagaucagauggcaac

SEQ ID NO: 2069276 - RNA, 19 nt, Artificial Sequence
  Description of Artificial Sequence: Synthetic oligonucleotide
  Sense strand starting at position 294 of SEQ ID NO: 1881756
caguguuuguguuugccau

SEQ ID NO: 2069277 - RNA, 19 nt, Artificial Sequence
  Description of Artificial Sequence: Synthetic oligonucleotide
  Antisense strand to SEQ ID NO: 2069276
auggcaaacacaaacacug

SEQ ID NO: 2069278 - RNA, 19 nt, Artificial Sequence
  Description of Artificial Sequence: Synthetic oligonucleotide
  Sense strand starting at position 338 of SEQ ID NO: 1881756
ccucuucuuggaggaauuc

SEQ ID NO: 2069279 - RNA, 19 nt, Artificial Sequence
  Description of Artificial Sequence: Synthetic oligonucleotide
  Antisense strand to SEQ ID NO: 2069278
gaauuccuccaagaagagg

SEQ ID NO: 2069280 - RNA, 19 nt, Artificial Sequence
  Description of Artificial Sequence: Synthetic oligonucleotide
  Sense strand starting at position 434 of SEQ ID NO: 1881756
ucagcucuauaguaauuga

SEQ ID NO: 2069281 - RNA, 19 nt, Artificial Sequence
  Description of Artificial Sequence: Synthetic oligonucleotide
  Antisense strand to SEQ ID NO: 2069280
ucaauuacuauagagcuga

SEQ ID NO: 2069282 - RNA, 19 nt, Artificial Sequence
  Description of Artificial Sequence: Synthetic oligonucleotide
  Sense strand starting at position 458 of SEQ ID NO: 1881756
aauaucuguccuggacuga

SEQ ID NO: 2069283 - RNA, 19 nt, Artificial Sequence
  Description of Artificial Sequence: Synthetic oligonucleotide
  Antisense strand to SEQ ID NO: 2069282
ucaguccaggacagauauu

SEQ ID NO: 2069284 - RNA, 19 nt, Artificial Sequence
  Description of Artificial Sequence: Synthetic oligonucleotide
  Sense strand starting at position 462 of SEQ ID NO: 1881756
ucuguccuggacugaauua

SEQ ID NO: 2069285 - RNA, 19 nt, Artificial Sequence
  Description of Artificial Sequence: Synthetic oligonucleotide
  Antisense strand to SEQ ID NO: 2069284
uaauucaguccaggacaga

SEQ ID NO: 2069286 - RNA, 19 nt, Artificial Sequence
  Description of Artificial Sequence: Synthetic oligonucleotide
  Sense strand starting at position 599 of SEQ ID NO: 1881756
gcgugugcguguguugaga

SEQ ID NO: 2069287 - RNA, 19 nt, Artificial Sequence
  Description of Artificial Sequence: Synthetic oligonucleotide
  Antisense strand to SEQ ID NO: 2069286
ucucaacacacgcacacgc

SEQ ID NO: 2069288 - RNA, 19 nt, Artificial Sequence
  Description of Artificial Sequence: Synthetic oligonucleotide
  Sense strand starting at position 649 of SEQ ID NO: 1881756
ugugguuuguaggaagagu

SEQ ID NO: 2069289 - RNA, 19 nt, Artificial Sequence
  Description of Artificial Sequence: Synthetic oligonucleotide
  Antisense strand to SEQ ID NO: 2069288
acucuuccuacaaaccaca

SEQ ID NO: 2069290 - RNA, 19 nt, Artificial Sequence
  Description of Artificial Sequence: Synthetic oligonucleotide
  Sense strand starting at position 861 of SEQ ID NO: 1881756
gccugaugccgugaguguu

SEQ ID NO: 2069291 - RNA, 19 nt, Artificial Sequence
  Description of Artificial Sequence: Synthetic oligonucleotide
  Antisense strand to SEQ ID NO: 2069290
aacacucacggcaucaggc

SEQ ID NO: 2069292 - RNA, 19 nt, Artificial Sequence
  Description of Artificial Sequence: Synthetic oligonucleotide
  Sense strand starting at position 867 of SEQ ID NO: 1881756
ugccgugaguguuucucuu

SEQ ID NO: 2069293 - RNA, 19 nt, Artificial Sequence
  Description of Artificial Sequence: Synthetic oligonucleotide
  Antisense strand to SEQ ID NO: 2069292
aagagaaacacucacggca

SEQ ID NO: 2069294 - RNA, 19 nt, Artificial Sequence
  Description of Artificial Sequence: Synthetic oligonucleotide
  Sense strand starting at position 972 of SEQ ID NO: 1881756
uccugagaucacuaaggcu

SEQ ID NO: 2069295 - RNA, 19 nt, Artificial Sequence
  Description of Artificial Sequence: Synthetic oligonucleotide
  Antisense strand to SEQ ID NO: 2069294
agccuuagugaucucagga

SEQ ID NO: 2069296 - RNA, 19 nt, Artificial Sequence
  Description of Artificial Sequence: Synthetic oligonucleotide
  Sense strand starting at position 1097 of SEQ ID NO: 1881756
gacggcuuccgaggauaga

SEQ ID NO: 2069297 - RNA, 19 nt, Artificial Sequence
  Description of Artificial Sequence: Synthetic oligonucleotide
  Antisense strand to SEQ ID NO: 2069296
ucuauccucggaagccguc

SEQ ID NO: 2069298 - RNA, 19 nt, Artificial Sequence
  Description of Artificial Sequence: Synthetic oligonucleotide
  Sense strand starting at position 1587 of SEQ ID NO: 1881756
uggcgucauucccaacagu

SEQ ID NO: 2069299 - RNA, 19 nt, Artificial Sequence
  Description of Artificial Sequence: Synthetic oligonucleotide
  Antisense strand to SEQ ID NO: 2069298
acuguugggaaugacgcca

SEQ ID NO: 2069300 - RNA, 19 nt, Artificial Sequence
  Description of Artificial Sequence: Synthetic oligonucleotide
  Sense strand starting at position 1603 of SEQ ID NO: 1881756
aguggaaagucguaacguu

SEQ ID NO: 2069301 - RNA, 19 nt, Artificial Sequence
  Description of Artificial Sequence: Synthetic oligonucleotide
  Antisense strand to SEQ ID NO: 2069300
aacguuacgacuuuccacu

SEQ ID NO: 2069302 - RNA, 19 nt, Artificial Sequence
  Description of Artificial Sequence: Synthetic oligonucleotide
  Sense strand starting at position 2398 of SEQ ID NO: 1881756
gacagcugcgcguuccaau

SEQ ID NO: 2069303 - RNA, 19 nt, Artificial Sequence
  Description of Artificial Sequence: Synthetic oligonucleotide
  Antisense strand to SEQ ID NO: 2069302
auuggaacgcgcagcuguc

SEQ ID NO: 2069304 - RNA, 19 nt, Artificial Sequence
  Description of Artificial Sequence: Synthetic oligonucleotide
  Sense strand starting at position 2409 of SEQ ID NO: 1881756
guuccaaugucccucggaa

SEQ ID NO: 2069305 - RNA, 19 nt, Artificial Sequence
  Description of Artificial Sequence: Synthetic oligonucleotide
  Antisense strand to SEQ ID NO: 2069304
uuccgagggacauuggaac

SEQ ID NO: 2069306 - RNA, 19 nt, Artificial Sequence
  Description of Artificial Sequence: Synthetic oligonucleotide
  Sense strand starting at position 3329 of SEQ ID NO: 1881756
cugugugcucgccugcauu

SEQ ID NO: 2069307 - RNA, 19 nt, Artificial Sequence
  Description of Artificial Sequence: Synthetic oligonucleotide
  Antisense strand to SEQ ID NO: 2069306
aaugcaggcgagcacacag

SEQ ID NO: 2069308 - RNA, 19 nt, Artificial Sequence
  Description of Artificial Sequence: Synthetic oligonucleotide
  Sense strand starting at position 3634 of SEQ ID NO: 1881756
cgcgagucucgagguuacu

SEQ ID NO: 2069309 - RNA, 19 nt, Artificial Sequence
  Description of Artificial Sequence: Synthetic oligonucleotide
  Antisense strand to SEQ ID NO: 2069308
aguaaccucgagacucgcg

SEQ ID NO: 2069310 - RNA, 19 nt, Artificial Sequence
  Description of Artificial Sequence: Synthetic oligonucleotide
  Sense strand starting at position 3682 of SEQ ID NO: 1881756
gcacguuacgggcgauuga

SEQ ID NO: 2069311 - RNA, 19 nt, Artificial Sequence
  Description of Artificial Sequence: Synthetic oligonucleotide
  Antisense strand to SEQ ID NO: 2069310
ucaaucgcccguaacgugc

SEQ ID NO: 2069312 - RNA, 19 nt, Artificial Sequence
  Description of Artificial Sequence: Synthetic oligonucleotide
  Sense strand starting at position 3737 of SEQ ID NO: 1881756
cggaauuucugggcagcga

SEQ ID NO: 2069313 - RNA, 19 nt, Artificial Sequence
  Description of Artificial Sequence: Synthetic oligonucleotide
  Antisense strand to SEQ ID NO: 2069312
ucgcugcccagaaauuccg

SEQ ID NO: 2069314 - RNA, 19 nt, Artificial Sequence
  Description of Artificial Sequence: Synthetic oligonucleotide
  Sense strand starting at position 3782 of SEQ ID NO: 1881756
cugcaaaugccucgaauuu

SEQ ID NO: 2069315 - RNA, 19 nt, Artificial Sequence
  Description of Artificial Sequence: Synthetic oligonucleotide
  Antisense strand to SEQ ID NO: 2069314
aaauucgaggcauuugcag

SEQ ID NO: 2069316 - RNA, 19 nt, Artificial Sequence
  Description of Artificial Sequence: Synthetic oligonucleotide
  Sense strand starting at position 3802 of SEQ ID NO: 1881756
aacguuaaaggaugaauua

SEQ ID NO: 2069317 - RNA, 19 nt, Artificial Sequence
  Description of Artificial Sequence: Synthetic oligonucleotide
  Antisense strand to SEQ ID NO: 2069316
uaauucauccuuuaacguu

SEQ ID NO: 2069318 - RNA, 19 nt, Artificial Sequence
  Description of Artificial Sequence: Synthetic oligonucleotide
  Sense strand starting at position 3823 of SEQ ID NO: 1881756
augcuaauuacggcguauu

SEQ ID NO: 2069319 - RNA, 19 nt, Artificial Sequence
  Description of Artificial Sequence: Synthetic oligonucleotide
  Antisense strand to SEQ ID NO: 2069318
aauacgccguaauuagcau

SEQ ID NO: 2069320 - RNA, 19 nt, Artificial Sequence
  Description of Artificial Sequence: Synthetic oligonucleotide
  Sense strand starting at position 3824 of SEQ ID NO: 1881756
ugcuaauuacggcguauuu

SEQ ID NO: 2069321 - RNA, 19 nt, Artificial Sequence
  Description of Artificial Sequence: Synthetic oligonucleotide
  Antisense strand to SEQ ID NO: 2069320
aaauacgccguaauuagca

SEQ ID NO: 2069322 - RNA, 19 nt, Artificial Sequence
  Description of Artificial Sequence: Synthetic oligonucleotide
  Sense strand starting at position 3831 of SEQ ID NO: 1881756
uacggcguauuugaagaau

SEQ ID NO: 2069323 - RNA, 19 nt, Artificial Sequence
  Description of Artificial Sequence: Synthetic oligonucleotide
  Antisense strand to SEQ ID NO: 2069322
auucuucaaauacgccgua

SEQ ID NO: 2069324 - RNA, 19 nt, Artificial Sequence
  Description of Artificial Sequence: Synthetic oligonucleotide
  Sense strand starting at position 3861 of SEQ ID NO: 1881756
acuggcuucugaguugcaa

SEQ ID NO: 2069325 - RNA, 19 nt, Artificial Sequence
  Description of Artificial Sequence: Synthetic oligonucleotide
  Antisense strand to SEQ ID NO: 2069324
uugcaacucagaagccagu

SEQ ID NO: 2069326 - RNA, 19 nt, Artificial Sequence
  Description of Artificial Sequence: Synthetic oligonucleotide
  Sense strand starting at position 3863 of SEQ ID NO: 1881756
uggcuucugaguugcaaau

SEQ ID NO: 2069327 - RNA, 19 nt, Artificial Sequence
  Description of Artificial Sequence: Synthetic oligonucleotide
  Antisense strand to SEQ ID NO: 2069326
auuugcaacucagaagcca

SEQ ID NO: 2069328 - RNA, 19 nt, Artificial Sequence
  Description of Artificial Sequence: Synthetic oligonucleotide
  Sense strand starting at position 3891 of SEQ ID NO: 1881756
ccagcuuuagagcagugaa

SEQ ID NO: 2069329 - RNA, 19 nt, Artificial Sequence
  Description of Artificial Sequence: Synthetic oligonucleotide
  Antisense strand to SEQ ID NO: 2069328
uucacugcucuaaagcugg

SEQ ID NO: 2069330 - RNA, 19 nt, Artificial Sequence
  Description of Artificial Sequence: Synthetic oligonucleotide
  Sense strand starting at position 3894 of SEQ ID NO: 1881756
gcuuuagagcagugaauag

SEQ ID NO: 2069331 - RNA, 19 nt, Artificial Sequence
  Description of Artificial Sequence: Synthetic oligonucleotide
  Antisense strand to SEQ ID NO: 2069330
cuauucacugcucuaaagc

SEQ ID NO: 2069332 - RNA, 19 nt, Artificial Sequence
  Description of Artificial Sequence: Synthetic oligonucleotide
  Sense strand starting at position 3 of SEQ ID NO: 1881757
acauuagucgauuguggaa

SEQ ID NO: 2069333 - RNA, 19 nt, Artificial Sequence
  Description of Artificial Sequence: Synthetic oligonucleotide
  Antisense strand to SEQ ID NO: 2069332
uuccacaaucgacuaaugu

SEQ ID NO: 2069334 - RNA, 19 nt, Artificial Sequence
  Description of Artificial Sequence: Synthetic oligonucleotide
  Sense strand starting at position 10 of SEQ ID NO: 1881757
ucgauuguggaagagguua

SEQ ID NO: 2069335 - RNA, 19 nt, Artificial Sequence
  Description of Artificial Sequence: Synthetic oligonucleotide
  Antisense strand to SEQ ID NO: 2069334
uaaccucuuccacaaucga

SEQ ID NO: 2069336 - RNA, 19 nt, Artificial Sequence
  Description of Artificial Sequence: Synthetic oligonucleotide
  Sense strand starting at position 15 of SEQ ID NO: 1881757
uguggaagagguuacuagu

SEQ ID NO: 2069337 - RNA, 19 nt, Artificial Sequence
  Description of Artificial Sequence: Synthetic oligonucleotide
  Antisense strand to SEQ ID NO: 2069336
acuaguaaccucuuccaca

SEQ ID NO: 2069338 - RNA, 19 nt, Artificial Sequence
  Description of Artificial Sequence: Synthetic oligonucleotide
  Sense strand starting at position 117 of SEQ ID NO: 1881757
gagacuaguccaugccaau

SEQ ID NO: 2069339 - RNA, 19 nt, Artificial Sequence
  Description of Artificial Sequence: Synthetic oligonucleotide
  Antisense strand to SEQ ID NO: 2069338
auuggcauggacuagucuc

SEQ ID NO: 2069340 - RNA, 19 nt, Artificial Sequence
  Description of Artificial Sequence: Synthetic oligonucleotide
  Sense strand starting at position 128 of SEQ ID NO: 1881757
augccaauggaaugugaau

SEQ ID NO: 2069341 - RNA, 19 nt, Artificial Sequence
  Description of Artificial Sequence: Synthetic oligonucleotide
  Antisense strand to SEQ ID NO: 2069340
auucacauuccauuggcau

SEQ ID NO: 2069342 - RNA, 19 nt, Artificial Sequence
  Description of Artificial Sequence: Synthetic oligonucleotide
  Sense strand starting at position 672 of SEQ ID NO: 1881757
augaucagaucugugugau

SEQ ID NO: 2069343 - RNA, 19 nt, Artificial Sequence
  Description of Artificial Sequence: Synthetic oligonucleotide
  Antisense strand to SEQ ID NO: 2069342
aucacacagaucugaucau

SEQ ID NO: 2069344 - RNA, 19 nt, Artificial Sequence
  Description of Artificial Sequence: Synthetic oligonucleotide
  Sense strand starting at position 675 of SEQ ID NO: 1881757
aucagaucugugugauuag

SEQ ID NO: 2069345 - RNA, 19 nt, Artificial Sequence
  Description of Artificial Sequence: Synthetic oligonucleotide
  Antisense strand to SEQ ID NO: 2069344
cuaaucacacagaucugau

SEQ ID NO: 2069346 - RNA, 19 nt, Artificial Sequence
  Description of Artificial Sequence: Synthetic oligonucleotide
  Sense strand starting at position 855 of SEQ ID NO: 1881757
ccugauggguaacuugaau

SEQ ID NO: 2069347 - RNA, 19 nt, Artificial Sequence
  Description of Artificial Sequence: Synthetic oligonucleotide
  Antisense strand to SEQ ID NO: 2069346
auucaaguuacccaucagg

SEQ ID NO: 2069348 - RNA, 19 nt, Artificial Sequence
  Description of Artificial Sequence: Synthetic oligonucleotide
  Sense strand starting at position 960 of SEQ ID NO: 1881757
ccaagaaugaguuggcuau

SEQ ID NO: 2069349 - RNA, 19 nt, Artificial Sequence
  Description of Artificial Sequence: Synthetic oligonucleotide
  Antisense strand to SEQ ID NO: 2069348
auagccaacucauucuugg

SEQ ID NO: 2069350 - RNA, 19 nt, Artificial Sequence
  Description of Artificial Sequence: Synthetic oligonucleotide
  Sense strand starting at position 961 of SEQ ID NO: 1881757
caagaaugaguuggcuaua

SEQ ID NO: 2069351 - RNA, 19 nt, Artificial Sequence
  Description of Artificial Sequence: Synthetic oligonucleotide
  Antisense strand to SEQ ID NO: 2069350
uauagccaacucauucuug

SEQ ID NO: 2069352 - RNA, 19 nt, Artificial Sequence
  Description of Artificial Sequence: Synthetic oligonucleotide
  Sense strand starting at position 964 of SEQ ID NO: 1881757
gaaugaguuggcuauacuu

SEQ ID NO: 2069353 - RNA, 19 nt, Artificial Sequence
  Description of Artificial Sequence: Synthetic oligonucleotide
  Antisense strand to SEQ ID NO: 2069352
aaguauagccaacucauuc

SEQ ID NO: 2069354 - RNA, 19 nt, Artificial Sequence
  Description of Artificial Sequence: Synthetic oligonucleotide
  Sense strand starting at position 966 of SEQ ID NO: 1881757
augaguuggcuauacuuga

SEQ ID NO: 2069355 - RNA, 19 nt, Artificial Sequence
  Description of Artificial Sequence: Synthetic oligonucleotide
  Antisense strand to SEQ ID NO: 2069354
ucaaguauagccaacucau

SEQ ID NO: 2069356 - RNA, 19 nt, Artificial Sequence
  Description of Artificial Sequence: Synthetic oligonucleotide
  Sense strand starting at position 1033 of SEQ ID NO: 1881757
gaugcaguggacuggaaau

SEQ ID NO: 2069357 - RNA, 19 nt, Artificial Sequence
  Description of Artificial Sequence: Synthetic oligonucleotide
  Antisense strand to SEQ ID NO: 2069356
auuuccaguccacugcauc

SEQ ID NO: 2069358 - RNA, 19 nt, Artificial Sequence
  Description of Artificial Sequence: Synthetic oligonucleotide
  Sense strand starting at position 1131 of SEQ ID NO: 1881757
agaguaaggcccugacuuc

SEQ ID NO: 2069359 - RNA, 19 nt, Artificial Sequence
  Description of Artificial Sequence: Synthetic oligonucleotide
  Antisense strand to SEQ ID NO: 2069358
gaagucagggccuuacucu

SEQ ID NO: 2069360 - RNA, 19 nt, Artificial Sequence
  Description of Artificial Sequence: Synthetic oligonucleotide
  Sense strand starting at position 1280 of SEQ ID NO: 1881757
gcaccagaucuaggaaacu

SEQ ID NO: 2069361 - RNA, 19 nt, Artificial Sequence
  Description of Artificial Sequence: Synthetic oligonucleotide
  Antisense strand to SEQ ID NO: 2069360
aguuuccuagaucuggugc

SEQ ID NO: 2069362 - RNA, 19 nt, Artificial Sequence
  Description of Artificial Sequence: Synthetic oligonucleotide
  Sense strand starting at position 1342 of SEQ ID NO: 1881757
augagucugacaggucaga

SEQ ID NO: 2069363 - RNA, 19 nt, Artificial Sequence
  Description of Artificial Sequence: Synthetic oligonucleotide
  Antisense strand to SEQ ID NO: 2069362
ucugaccugucagacucau

SEQ ID NO: 2069364 - RNA, 19 nt, Artificial Sequence
  Description of Artificial Sequence: Synthetic oligonucleotide
  Sense strand starting at position 1367 of SEQ ID NO: 1881757
agauuaugagcucagguua

SEQ ID NO: 2069365 - RNA, 19 nt, Artificial Sequence
  Description of Artificial Sequence: Synthetic oligonucleotide
  Antisense strand to SEQ ID NO: 2069364
uaaccugagcucauaaucu

SEQ ID NO: 2069366 - RNA, 19 nt, Artificial Sequence
  Description of Artificial Sequence: Synthetic oligonucleotide
  Sense strand starting at position 2150 of SEQ ID NO: 1881757
gggacagguuccuccaucu

SEQ ID NO: 2069367 - RNA, 19 nt, Artificial Sequence
  Description of Artificial Sequence: Synthetic oligonucleotide
  Antisense strand to SEQ ID NO: 2069366
agauggaggaaccuguccc

SEQ ID NO: 2069368 - RNA, 19 nt, Artificial Sequence
  Description of Artificial Sequence: Synthetic oligonucleotide
  Sense strand starting at position 2312 of SEQ ID NO: 1881757
gggacuugaccaugaggua

SEQ ID NO: 2069369 - RNA, 19 nt, Artificial Sequence
  Description of Artificial Sequence: Synthetic oligonucleotide
  Antisense strand to SEQ ID NO: 2069368
uaccucauggucaaguccc

SEQ ID NO: 2069370 - RNA, 19 nt, Artificial Sequence
  Description of Artificial Sequence: Synthetic oligonucleotide
  Sense strand starting at position 2435 of SEQ ID NO: 1881757
uuuggacucccuggucuaa

SEQ ID NO: 2069371 - RNA, 19 nt, Artificial Sequence
  Description of Artificial Sequence: Synthetic oligonucleotide
  Antisense strand to SEQ ID NO: 2069370
uuagaccagggaguccaaa

SEQ ID NO: 2069372 - RNA, 19 nt, Artificial Sequence
  Description of Artificial Sequence: Synthetic oligonucleotide
  Sense strand starting at position 2456 of SEQ ID NO: 1881757
ggugcccaucaauaucuaa

SEQ ID NO: 2069373 - RNA, 19 nt, Artificial Sequence
  Description of Artificial Sequence: Synthetic oligonucleotide
  Antisense strand to SEQ ID NO: 2069372
uuagauauugaugggcacc

SEQ ID NO: 2069374 - RNA, 19 nt, Artificial Sequence
  Description of Artificial Sequence: Synthetic oligonucleotide
  Sense strand starting at position 2497 of SEQ ID NO: 1881757
agugucuggccgucucuua

SEQ ID NO: 2069375 - RNA, 19 nt, Artificial Sequence
  Description of Artificial Sequence: Synthetic oligonucleotide
  Antisense strand to SEQ ID NO: 2069374
uaagagacggccagacacu

SEQ ID NO: 2069376 - RNA, 19 nt, Artificial Sequence
  Description of Artificial Sequence: Synthetic oligonucleotide
  Sense strand starting at position 2510 of SEQ ID NO: 1881757
cucuuacugucagugauuu

SEQ ID NO: 2069377 - RNA, 19 nt, Artificial Sequence
  Description of Artificial Sequence: Synthetic oligonucleotide
  Antisense strand to SEQ ID NO: 2069376
aaaucacugacaguaagag

SEQ ID NO: 2069378 - RNA, 19 nt, Artificial Sequence
  Description of Artificial Sequence: Synthetic oligonucleotide
  Sense strand starting at position 2566 of SEQ ID NO: 1881757
cccugugggaugggaauaa

SEQ ID NO: 2069379 - RNA, 19 nt, Artificial Sequence
  Description of Artificial Sequence: Synthetic oligonucleotide
  Antisense strand to SEQ ID NO: 2069378
uuauucccaucccacaggg

SEQ ID NO: 2069380 - RNA, 19 nt, Artificial Sequence
  Description of Artificial Sequence: Synthetic oligonucleotide
  Sense strand starting at position 2744 of SEQ ID NO: 1881757
uggagcuaucuccaugaua

SEQ ID NO: 2069381 - RNA, 19 nt, Artificial Sequence
  Description of Artificial Sequence: Synthetic oligonucleotide
  Antisense strand to SEQ ID NO: 2069380
uaucauggagauagcucca

SEQ ID NO: 2069382 - RNA, 19 nt, Artificial Sequence
  Description of Artificial Sequence: Synthetic oligonucleotide
  Sense strand starting at position 2760 of SEQ ID NO: 1881757
auaacagguuaguugucaa

SEQ ID NO: 2069383 - RNA, 19 nt, Artificial Sequence
  Description of Artificial Sequence: Synthetic oligonucleotide
  Antisense strand to SEQ ID NO: 2069382
uugacaacuaaccuguuau

SEQ ID NO: 2069384 - RNA, 19 nt, Artificial Sequence
  Description of Artificial Sequence: Synthetic oligonucleotide
  Sense strand starting at position 2771 of SEQ ID NO: 1881757
guugucaaaguuuggacaa

SEQ ID NO: 2069385 - RNA, 19 nt, Artificial Sequence
  Description of Artificial Sequence: Synthetic oligonucleotide
  Antisense strand to SEQ ID NO: 2069384
uuguccaaacuuugacaac

SEQ ID NO: 2069386 - RNA, 19 nt, Artificial Sequence
  Description of Artificial Sequence: Synthetic oligonucleotide
  Sense strand starting at position 2784 of SEQ ID NO: 1881757
ggacaauauuaucuggagu

SEQ ID NO: 2069387 - RNA, 19 nt, Artificial Sequence
  Description of Artificial Sequence: Synthetic oligonucleotide
  Antisense strand to SEQ ID NO: 2069386
acuccagauaauauugucc

SEQ ID NO: 2069388 - RNA, 19 nt, Artificial Sequence
  Description of Artificial Sequence: Synthetic oligonucleotide
  Sense strand starting at position 2832 of SEQ ID NO: 1881757
uuuggaaggugucugaaac

SEQ ID NO: 2069389 - RNA, 19 nt, Artificial Sequence
  Description of Artificial Sequence: Synthetic oligonucleotide
  Antisense strand to SEQ ID NO: 2069388
guuucagacaccuuccaaa

SEQ ID NO: 2069390 - RNA, 19 nt, Artificial Sequence
  Description of Artificial Sequence: Synthetic oligonucleotide
  Sense strand starting at position 2833 of SEQ ID NO: 1881757
uuggaaggugucugaaacu

SEQ ID NO: 2069391 - RNA, 19 nt, Artificial Sequence
  Description of Artificial Sequence: Synthetic oligonucleotide
  Antisense strand to SEQ ID NO: 2069390
aguuucagacaccuuccaa

SEQ ID NO: 2069392 - RNA, 19 nt, Artificial Sequence
  Description of Artificial Sequence: Synthetic oligonucleotide
  Sense strand starting at position 2843 of SEQ ID NO: 1881757
ucugaaacuuagccugaca

SEQ ID NO: 2069393 - RNA, 19 nt, Artificial Sequence
  Description of Artificial Sequence: Synthetic oligonucleotide
  Antisense strand to SEQ ID NO: 2069392
ugucaggcuaaguuucaga

SEQ ID NO: 2069394 - RNA, 19 nt, Artificial Sequence
  Description of Artificial Sequence: Synthetic oligonucleotide
  Sense strand starting at position 2845 of SEQ ID NO: 1881757
ugaaacuuagccugacaau

SEQ ID NO: 2069395 - RNA, 19 nt, Artificial Sequence
  Description of Artificial Sequence: Synthetic oligonucleotide
  Antisense strand to SEQ ID NO: 2069394
auugucaggcuaaguuuca

SEQ ID NO: 2069396 - RNA, 19 nt, Artificial Sequence
  Description of Artificial Sequence: Synthetic oligonucleotide
  Sense strand starting at position 3175 of SEQ ID NO: 1881757
guuuaccuguuuguaauuu

SEQ ID NO: 2069397 - RNA, 19 nt, Artificial Sequence
  Description of Artificial Sequence: Synthetic oligonucleotide
  Antisense strand to SEQ ID NO: 2069396
aaauuacaaacagguaaac

SEQ ID NO: 2069398 - RNA, 19 nt, Artificial Sequence
  Description of Artificial Sequence: Synthetic oligonucleotide
  Sense strand starting at position 3196 of SEQ ID NO: 1881757
gcacauucccugcaagaug

SEQ ID NO: 2069399 - RNA, 19 nt, Artificial Sequence
  Description of Artificial Sequence: Synthetic oligonucleotide
  Antisense strand to SEQ ID NO: 2069398
caucuugcagggaaugugc

SEQ ID NO: 2069400 - RNA, 19 nt, Artificial Sequence
  Description of Artificial Sequence: Synthetic oligonucleotide
  Sense strand starting at position 3298 of SEQ ID NO: 1881757
gccaaaugaugaccuuaga

SEQ ID NO: 2069401 - RNA, 19 nt, Artificial Sequence
  Description of Artificial Sequence: Synthetic oligonucleotide
  Antisense strand to SEQ ID NO: 2069400
ucuaaggucaucauuuggc

SEQ ID NO: 2069402 - RNA, 19 nt, Artificial Sequence
  Description of Artificial Sequence: Synthetic oligonucleotide
  Sense strand starting at position 3329 of SEQ ID NO: 1881757
uguuucucuguccagaaga

SEQ ID NO: 2069403 - RNA, 19 nt, Artificial Sequence
  Description of Artificial Sequence: Synthetic oligonucleotide
  Antisense strand to SEQ ID NO: 2069402
ucuucuggacagagaaaca

SEQ ID NO: 2069404 - RNA, 19 nt, Artificial Sequence
  Description of Artificial Sequence: Synthetic oligonucleotide
  Sense strand starting at position 3331 of SEQ ID NO: 1881757
uuucucuguccagaagaug

SEQ ID NO: 2069405 - RNA, 19 nt, Artificial Sequence
  Description of Artificial Sequence: Synthetic oligonucleotide
  Antisense strand to SEQ ID NO: 2069404
caucuucuggacagagaaa

SEQ ID NO: 2069406 - RNA, 19 nt, Artificial Sequence
  Description of Artificial Sequence: Synthetic oligonucleotide
  Sense strand starting at position 3431 of SEQ ID NO: 1881757
ucuugacuccaagauagca

SEQ ID NO: 2069407 - RNA, 19 nt, Artificial Sequence
  Description of Artificial Sequence: Synthetic oligonucleotide
  Antisense strand to SEQ ID NO: 2069406
ugcuaucuuggagucaaga

SEQ ID NO: 2069408 - RNA, 19 nt, Artificial Sequence
  Description of Artificial Sequence: Synthetic oligonucleotide
  Sense strand starting at position 3711 of SEQ ID NO: 1881757
guugcauaaagucagaaug

SEQ ID NO: 2069409 - RNA, 19 nt, Artificial Sequence
  Description of Artificial Sequence: Synthetic oligonucleotide
  Antisense strand to SEQ ID NO: 2069408
cauucugacuuuaugcaac

SEQ ID NO: 2069410 - RNA, 19 nt, Artificial Sequence
  Description of Artificial Sequence: Synthetic oligonucleotide
  Sense strand starting at position 3760 of SEQ ID NO: 1881757
agagaagugcuaugcuaaa

SEQ ID NO: 2069411 - RNA, 19 nt, Artificial Sequence
  Description of Artificial Sequence: Synthetic oligonucleotide
  Antisense strand to SEQ ID NO: 2069410
uuuagcauagcacuucucu

SEQ ID NO: 2069412 - RNA, 19 nt, Artificial Sequence
  Description of Artificial Sequence: Synthetic oligonucleotide
  Sense strand starting at position 175 of SEQ ID NO: 1881758
ggcuucucagaaugggauu

SEQ ID NO: 2069413 - RNA, 19 nt, Artificial Sequence
  Description of Artificial Sequence: Synthetic oligonucleotide
  Antisense strand to SEQ ID NO: 2069412
aaucccauucugagaagcc

SEQ ID NO: 2069414 - RNA, 19 nt, Artificial Sequence
  Description of Artificial Sequence: Synthetic oligonucleotide
  Sense strand starting at position 299 of SEQ ID NO: 1881758
gagaguguagauggaagua

SEQ ID NO: 2069415 - RNA, 19 nt, Artificial Sequence
  Description of Artificial Sequence: Synthetic oligonucleotide
  Antisense strand to SEQ ID NO: 2069414
uacuuccaucuacacucuc

SEQ ID NO: 2069416 - RNA, 19 nt, Artificial Sequence
  Description of Artificial Sequence: Synthetic oligonucleotide
  Sense strand starting at position 807 of SEQ ID NO: 1881758
ggccaaucugcucaagaca

SEQ ID NO: 2069417 - RNA, 19 nt, Artificial Sequence
  Description of Artificial Sequence: Synthetic oligonucleotide
  Antisense strand to SEQ ID NO: 2069416
ugucuugagcagauuggcc

SEQ ID NO: 2069418 - RNA, 19 nt, Artificial Sequence
  Description of Artificial Sequence: Synthetic oligonucleotide
  Sense strand starting at position 972 of SEQ ID NO: 1881758
auucuuggaugcucuugaa

SEQ ID NO: 2069419 - RNA, 19 nt, Artificial Sequence
  Description of Artificial Sequence: Synthetic oligonucleotide
  Antisense strand to SEQ ID NO: 2069418
uucaagagcauccaagaau

SEQ ID NO: 2069420 - RNA, 19 nt, Artificial Sequence
  Description of Artificial Sequence: Synthetic oligonucleotide
  Sense strand starting at position 976 of SEQ ID NO: 1881758
uuggaugcucuugaauauu

SEQ ID NO: 2069421 - RNA, 19 nt, Artificial Sequence
  Description of Artificial Sequence: Synthetic oligonucleotide
  Antisense strand to SEQ ID NO: 2069420
aauauucaagagcauccaa

SEQ ID NO: 2069422 - RNA, 19 nt, Artificial Sequence
  Description of Artificial Sequence: Synthetic oligonucleotide
  Sense strand starting at position 1167 of SEQ ID NO: 1881758
cugcucuguccagagagau

SEQ ID NO: 2069423 - RNA, 19 nt, Artificial Sequence
  Description of Artificial Sequence: Synthetic oligonucleotide
  Antisense strand to SEQ ID NO: 2069422
aucucucuggacagagcag

SEQ ID NO: 2069424 - RNA, 19 nt, Artificial Sequence
  Description of Artificial Sequence: Synthetic oligonucleotide
  Sense strand starting at position 1220 of SEQ ID NO: 1881758
aucugcugggaucaugauu

SEQ ID NO: 2069425 - RNA, 19 nt, Artificial Sequence
  Description of Artificial Sequence: Synthetic oligonucleotide
  Antisense strand to SEQ ID NO: 2069424
aaucaugaucccagcagau

SEQ ID NO: 2069426 - RNA, 19 nt, Artificial Sequence
  Description of Artificial Sequence: Synthetic oligonucleotide
  Sense strand starting at position 1239 of SEQ ID NO: 1881758
ucuauacucuggucacaca

SEQ ID NO: 2069427 - RNA, 19 nt, Artificial Sequence
  Description of Artificial Sequence: Synthetic oligonucleotide
  Antisense strand to SEQ ID NO: 2069426
ugugugaccagaguauaga

SEQ ID NO: 2069428 - RNA, 19 nt, Artificial Sequence
  Description of Artificial Sequence: Synthetic oligonucleotide
  Sense strand starting at position 1469 of SEQ ID NO: 1881758
gucuguccuccucacacaa

SEQ ID NO: 2069429 - RNA, 19 nt, Artificial Sequence
  Description of Artificial Sequence: Synthetic oligonucleotide
  Antisense strand to SEQ ID NO: 2069428
uugugugaggaggacagac

SEQ ID NO: 2069430 - RNA, 19 nt, Artificial Sequence
  Description of Artificial Sequence: Synthetic oligonucleotide
  Sense strand starting at position 1593 of SEQ ID NO: 1881758
ugcuuugauagagggauga

SEQ ID NO: 2069431 - RNA, 19 nt, Artificial Sequence
  Description of Artificial Sequence: Synthetic oligonucleotide
  Antisense strand to SEQ ID NO: 2069430
ucaucccucuaucaaagca

SEQ ID NO: 2069432 - RNA, 19 nt, Artificial Sequence
  Description of Artificial Sequence: Synthetic oligonucleotide
  Sense strand starting at position 1647 of SEQ ID NO: 1881758
gcauaaaccgaccaaguuu

SEQ ID NO: 2069433 - RNA, 19 nt, Artificial Sequence
  Description of Artificial Sequence: Synthetic oligonucleotide
  Antisense strand to SEQ ID NO: 2069432
aaacuuggucgguuuaugc

SEQ ID NO: 2069434 - RNA, 19 nt, Artificial Sequence
  Description of Artificial Sequence: Synthetic oligonucleotide
  Sense strand starting at position 1668 of SEQ ID NO: 1881758
gggccugaagcauauucua

SEQ ID NO: 2069435 - RNA, 19 nt, Artificial Sequence
  Description of Artificial Sequence: Synthetic oligonucleotide
  Antisense strand to SEQ ID NO: 2069434
uagaauaugcuucaggccc

SEQ ID NO: 2069436 - RNA, 19 nt, Artificial Sequence
  Description of Artificial Sequence: Synthetic oligonucleotide
  Sense strand starting at position 1816 of SEQ ID NO: 1881758
ugauuuggcccuugcauau

SEQ ID NO: 2069437 - RNA, 19 nt, Artificial Sequence
  Description of Artificial Sequence: Synthetic oligonucleotide
  Antisense strand to SEQ ID NO: 2069436
auaugcaagggccaaauca

SEQ ID NO: 2069438 - RNA, 19 nt, Artificial Sequence
  Description of Artificial Sequence: Synthetic oligonucleotide
  Sense strand starting at position 1841 of SEQ ID NO: 1881758
auuguuuaucuugacauac

SEQ ID NO: 2069439 - RNA, 19 nt, Artificial Sequence
  Description of Artificial Sequence: Synthetic oligonucleotide
  Antisense strand to SEQ ID NO: 2069438
guaugucaagauaaacaau

SEQ ID NO: 2069440 - RNA, 19 nt, Artificial Sequence
  Description of Artificial Sequence: Synthetic oligonucleotide
  Sense strand starting at position 1894 of SEQ ID NO: 1881758
cauggagacccuggcuaua

SEQ ID NO: 2069441 - RNA, 19 nt, Artificial Sequence
  Description of Artificial Sequence: Synthetic oligonucleotide
  Antisense strand to SEQ ID NO: 2069440
uauagccagggucuccaug

SEQ ID NO: 2069442 - RNA, 19 nt, Artificial Sequence
  Description of Artificial Sequence: Synthetic oligonucleotide
  Sense strand starting at position 1916 of SEQ ID NO: 1881758
agaaaugcagcuuaacuua

SEQ ID NO: 2069443 - RNA, 19 nt, Artificial Sequence
  Description of Artificial Sequence: Synthetic oligonucleotide
  Antisense strand to SEQ ID NO: 2069442
uaaguuaagcugcauuucu

SEQ ID NO: 2069444 - RNA, 19 nt, Artificial Sequence
  Description of Artificial Sequence: Synthetic oligonucleotide
  Sense strand starting at position 2071 of SEQ ID NO: 1881758
uuguguucucucuaaauaa

SEQ ID NO: 2069445 - RNA, 19 nt, Artificial Sequence
  Description of Artificial Sequence: Synthetic oligonucleotide
  Antisense strand to SEQ ID NO: 2069444
uuauuuagagagaacacaa

SEQ ID NO: 2069446 - RNA, 19 nt, Artificial Sequence
  Description of Artificial Sequence: Synthetic oligonucleotide
  Sense strand starting at position 2262 of SEQ ID NO: 1881758
cccacugguguuuagagua

SEQ ID NO: 2069447 - RNA, 19 nt, Artificial Sequence
  Description of Artificial Sequence: Synthetic oligonucleotide
  Antisense strand to SEQ ID NO: 2069446
uacucuaaacaccaguggg

SEQ ID NO: 2069448 - RNA, 19 nt, Artificial Sequence
  Description of Artificial Sequence: Synthetic oligonucleotide
  Sense strand starting at position 2270 of SEQ ID NO: 1881758
uguuuagaguaauuaggua

SEQ ID NO: 2069449 - RNA, 19 nt, Artificial Sequence
  Description of Artificial Sequence: Synthetic oligonucleotide
  Antisense strand to SEQ ID NO: 2069448
uaccuaauuacucuaaaca

SEQ ID NO: 2069450 - RNA, 19 nt, Artificial Sequence
  Description of Artificial Sequence: Synthetic oligonucleotide
  Sense strand starting at position 2434 of SEQ ID NO: 1881758
gguaauuauuucuugcauu

SEQ ID NO: 2069451 - RNA, 19 nt, Artificial Sequence
  Description of Artificial Sequence: Synthetic oligonucleotide
  Antisense strand to SEQ ID NO: 2069450
aaugcaagaaauaauuacc

SEQ ID NO: 2069452 - RNA, 19 nt, Artificial Sequence
  Description of Artificial Sequence: Synthetic oligonucleotide
  Sense strand starting at position 2692 of SEQ ID NO: 1881758
auguauauagcaggcagaa

SEQ ID NO: 2069453 - RNA, 19 nt, Artificial Sequence
  Description of Artificial Sequence: Synthetic oligonucleotide
  Antisense strand to SEQ ID NO: 2069452
uucugccugcuauauacau

SEQ ID NO: 2069454 - RNA, 19 nt, Artificial Sequence
  Description of Artificial Sequence: Synthetic oligonucleotide
  Sense strand starting at position 2732 of SEQ ID NO: 1881758
aauucugaaggcugugaau

SEQ ID NO: 2069455 - RNA, 19 nt, Artificial Sequence
  Description of Artificial Sequence: Synthetic oligonucleotide
  Antisense strand to SEQ ID NO: 2069454
auucacagccuucagaauu

SEQ ID NO: 2069456 - RNA, 19 nt, Artificial Sequence
  Description of Artificial Sequence: Synthetic oligonucleotide
  Sense strand starting at position 2734 of SEQ ID NO: 1881758
uucugaaggcugugaauag

SEQ ID NO: 2069457 - RNA, 19 nt, Artificial Sequence
  Description of Artificial Sequence: Synthetic oligonucleotide
  Antisense strand to SEQ ID NO: 2069456
cuauucacagccuucagaa

SEQ ID NO: 2069458 - RNA, 19 nt, Artificial Sequence
  Description of Artificial Sequence: Synthetic oligonucleotide
  Sense strand starting at position 2738 of SEQ ID NO: 1881758
gaaggcugugaauagguua

SEQ ID NO: 2069459 - RNA, 19 nt, Artificial Sequence
  Description of Artificial Sequence: Synthetic oligonucleotide
  Antisense strand to SEQ ID NO: 2069458
uaaccuauucacagccuuc

SEQ ID NO: 2069460 - RNA, 19 nt, Artificial Sequence
  Description of Artificial Sequence: Synthetic oligonucleotide
  Sense strand starting at position 2745 of SEQ ID NO: 1881758
gugaauagguuaccucaaa

SEQ ID NO: 2069461 - RNA, 19 nt, Artificial Sequence
  Description of Artificial Sequence: Synthetic oligonucleotide
  Antisense strand to SEQ ID NO: 2069460
uuugagguaaccuauucac

SEQ ID NO: 2069462 - RNA, 19 nt, Artificial Sequence
  Description of Artificial Sequence: Synthetic oligonucleotide
  Sense strand starting at position 2746 of SEQ ID NO: 1881758
ugaauagguuaccucaaau

SEQ ID NO: 2069463 - RNA, 19 nt, Artificial Sequence
  Description of Artificial Sequence: Synthetic oligonucleotide
  Antisense strand to SEQ ID NO: 2069462
auuugagguaaccuauuca

SEQ ID NO: 2069464 - RNA, 19 nt, Artificial Sequence
  Description of Artificial Sequence: Synthetic oligonucleotide
  Sense strand starting at position 2847 of SEQ ID NO: 1881758
ugccauggucuuuaauaag

SEQ ID NO: 2069465 - RNA, 19 nt, Artificial Sequence
  Description of Artificial Sequence: Synthetic oligonucleotide
  Antisense strand to SEQ ID NO: 2069464
cuuauuaaagaccauggca

SEQ ID NO: 2069466 - RNA, 19 nt, Artificial Sequence
  Description of Artificial Sequence: Synthetic oligonucleotide
  Sense strand starting at position 2887 of SEQ ID NO: 1881758
gugagaaugacagggaugu

SEQ ID NO: 2069467 - RNA, 19 nt, Artificial Sequence
  Description of Artificial Sequence: Synthetic oligonucleotide
  Antisense strand to SEQ ID NO: 2069466
acaucccugucauucucac

SEQ ID NO: 2069468 - RNA, 19 nt, Artificial Sequence
  Description of Artificial Sequence: Synthetic oligonucleotide
  Sense strand starting at position 2935 of SEQ ID NO: 1881758
cgggucaugagucaaggaa

SEQ ID NO: 2069469 - RNA, 19 nt, Artificial Sequence
  Description of Artificial Sequence: Synthetic oligonucleotide
  Antisense strand to SEQ ID NO: 2069468
uuccuugacucaugacccg

SEQ ID NO: 2069470 - RNA, 19 nt, Artificial Sequence
  Description of Artificial Sequence: Synthetic oligonucleotide
  Sense strand starting at position 3036 of SEQ ID NO: 1881758
cugauaacccacugugaac

SEQ ID NO: 2069471 - RNA, 19 nt, Artificial Sequence
  Description of Artificial Sequence: Synthetic oligonucleotide
  Antisense strand to SEQ ID NO: 2069470
guucacaguggguuaucag

SEQ ID NO: 2069472 - RNA, 19 nt, Artificial Sequence
  Description of Artificial Sequence: Synthetic oligonucleotide
  Sense strand starting at position 3072 of SEQ ID NO: 1881758
guaagauaucuugguccau

SEQ ID NO: 2069473 - RNA, 19 nt, Artificial Sequence
  Description of Artificial Sequence: Synthetic oligonucleotide
  Antisense strand to SEQ ID NO: 2069472
auggaccaagauaucuuac

SEQ ID NO: 2069474 - RNA, 19 nt, Artificial Sequence
  Description of Artificial Sequence: Synthetic oligonucleotide
  Sense strand starting at position 3116 of SEQ ID NO: 1881758
caggcuagguaacuuauaa

SEQ ID NO: 2069475 - RNA, 19 nt, Artificial Sequence
  Description of Artificial Sequence: Synthetic oligonucleotide
  Antisense strand to SEQ ID NO: 2069474
uuauaaguuaccuagccug

SEQ ID NO: 2069476 - RNA, 19 nt, Artificial Sequence
  Description of Artificial Sequence: Synthetic oligonucleotide
  Sense strand starting at position 3305 of SEQ ID NO: 1881758
ggagcccacuccuuugaua

SEQ ID NO: 2069477 - RNA, 19 nt, Artificial Sequence
  Description of Artificial Sequence: Synthetic oligonucleotide
  Antisense strand to SEQ ID NO: 2069476
uaucaaaggagugggcucc

SEQ ID NO: 2069478 - RNA, 19 nt, Artificial Sequence
  Description of Artificial Sequence: Synthetic oligonucleotide
  Sense strand starting at position 3503 of SEQ ID NO: 1881758
ugaguuuguagucauuugu

SEQ ID NO: 2069479 - RNA, 19 nt, Artificial Sequence
  Description of Artificial Sequence: Synthetic oligonucleotide
  Antisense strand to SEQ ID NO: 2069478
acaaaugacuacaaacuca

SEQ ID NO: 2069480 - RNA, 19 nt, Artificial Sequence
  Description of Artificial Sequence: Synthetic oligonucleotide
  Sense strand starting at position 3507 of SEQ ID NO: 1881758
uuuguagucauuuguugga

SEQ ID NO: 2069481 - RNA, 19 nt, Artificial Sequence
  Description of Artificial Sequence: Synthetic oligonucleotide
  Antisense strand to SEQ ID NO: 2069480
uccaacaaaugacuacaaa

SEQ ID NO: 2069482 - RNA, 19 nt, Artificial Sequence
  Description of Artificial Sequence: Synthetic oligonucleotide
  Sense strand starting at position 3829 of SEQ ID NO: 1881758
ucaggaaaugagugaguuc

SEQ ID NO: 2069483 - RNA, 19 nt, Artificial Sequence
  Description of Artificial Sequence: Synthetic oligonucleotide
  Antisense strand to SEQ ID NO: 2069482
gaacucacucauuuccuga

SEQ ID NO: 2069484 - RNA, 19 nt, Artificial Sequence
  Description of Artificial Sequence: Synthetic oligonucleotide
  Sense strand starting at position 3832 of SEQ ID NO: 1881758
ggaaaugagugaguucuga

SEQ ID NO: 2069485 - RNA, 19 nt, Artificial Sequence
  Description of Artificial Sequence: Synthetic oligonucleotide
  Antisense strand to SEQ ID NO: 2069484
ucagaacucacucauuucc

SEQ ID NO: 2069486 - RNA, 19 nt, Artificial Sequence
  Description of Artificial Sequence: Synthetic oligonucleotide
  Sense strand starting at position 3868 of SEQ ID NO: 1881758
augcuaaagugauccggga

SEQ ID NO: 2069487 - RNA, 19 nt, Artificial Sequence
  Description of Artificial Sequence: Synthetic oligonucleotide
  Antisense strand to SEQ ID NO: 2069486
ucccggaucacuuuagcau

SEQ ID NO: 2069488 - RNA, 19 nt, Artificial Sequence
  Description of Artificial Sequence: Synthetic oligonucleotide
  Sense strand starting at position 3870 of SEQ ID NO: 1881758
gcuaaagugauccgggaag

SEQ ID NO: 2069489 - RNA, 19 nt, Artificial Sequence
  Description of Artificial Sequence: Synthetic oligonucleotide
  Antisense strand to SEQ ID NO: 2069488
cuucccggaucacuuuagc

SEQ ID NO: 2069490 - RNA, 19 nt, Artificial Sequence
  Description of Artificial Sequence: Synthetic oligonucleotide
  Sense strand starting at position 3872 of SEQ ID NO: 1881758
uaaagugauccgggaagac

SEQ ID NO: 2069491 - RNA, 19 nt, Artificial Sequence
  Description of Artificial Sequence: Synthetic oligonucleotide
  Antisense strand to SEQ ID NO: 2069490
gucuucccggaucacuuua

SEQ ID NO: 2069492 - RNA, 19 nt, Artificial Sequence
  Description of Artificial Sequence: Synthetic oligonucleotide
  Sense strand starting at position 95 of SEQ ID NO: 1881759
gcugucugguuccugagaa

SEQ ID NO: 2069493 - RNA, 19 nt, Artificial Sequence
  Description of Artificial Sequence: Synthetic oligonucleotide
  Antisense strand to SEQ ID NO: 2069492
uucucaggaaccagacagc

SEQ ID NO: 2069494 - RNA, 19 nt, Artificial Sequence
  Description of Artificial Sequence: Synthetic oligonucleotide
  Sense strand starting at position 219 of SEQ ID NO: 1881759
ggcugcuuucaugggagaa

SEQ ID NO: 2069495 - RNA, 19 nt, Artificial Sequence
  Description of Artificial Sequence: Synthetic oligonucleotide
  Antisense strand to SEQ ID NO: 2069494
uucucccaugaaagcagcc

SEQ ID NO: 2069496 - RNA, 19 nt, Artificial Sequence
  Description of Artificial Sequence: Synthetic oligonucleotide
  Sense strand starting at position 699 of SEQ ID NO: 1881759
uuacgaagcuggucaauuu

SEQ ID NO: 2069497 - RNA, 19 nt, Artificial Sequence
  Description of Artificial Sequence: Synthetic oligonucleotide
  Antisense strand to SEQ ID NO: 2069496
aaauugaccagcuucguaa

SEQ ID NO: 2069498 - RNA, 19 nt, Artificial Sequence
  Description of Artificial Sequence: Synthetic oligonucleotide
  Sense strand starting at position 797 of SEQ ID NO: 1881759
gcgggaaugucuuuauugg

SEQ ID NO: 2069499 - RNA, 19 nt, Artificial Sequence
  Description of Artificial Sequence: Synthetic oligonucleotide
  Antisense strand to SEQ ID NO: 2069498
ccaauaaagacauucccgc

SEQ ID NO: 2069500 - RNA, 19 nt, Artificial Sequence
  Description of Artificial Sequence: Synthetic oligonucleotide
  Sense strand starting at position 798 of SEQ ID NO: 1881759
cgggaaugucuuuauugga

SEQ ID NO: 2069501 - RNA, 19 nt, Artificial Sequence
  Description of Artificial Sequence: Synthetic oligonucleotide
  Antisense strand to SEQ ID NO: 2069500
uccaauaaagacauucccg

SEQ ID NO: 2069502 - RNA, 19 nt, Artificial Sequence
  Description of Artificial Sequence: Synthetic oligonucleotide
  Sense strand starting at position 814 of SEQ ID NO: 1881759
ggacguuacgaagggaauu

SEQ ID NO: 2069503 - RNA, 19 nt, Artificial Sequence
  Description of Artificial Sequence: Synthetic oligonucleotide
  Antisense strand to SEQ ID NO: 2069502
aauucccuucguaacgucc

SEQ ID NO: 2069504 - RNA, 19 nt, Artificial Sequence
  Description of Artificial Sequence: Synthetic oligonucleotide
  Sense strand starting at position 835 of SEQ ID NO: 1881759
gguuucucuccugggaaga

SEQ ID NO: 2069505 - RNA, 19 nt, Artificial Sequence
  Description of Artificial Sequence: Synthetic oligonucleotide
  Antisense strand to SEQ ID NO: 2069504
ucuucccaggagagaaacc

SEQ ID NO: 2069506 - RNA, 19 nt, Artificial Sequence
  Description of Artificial Sequence: Synthetic oligonucleotide
  Sense strand starting at position 836 of SEQ ID NO: 1881759
guuucucuccugggaagaa

SEQ ID NO: 2069507 - RNA, 19 nt, Artificial Sequence
  Description of Artificial Sequence: Synthetic oligonucleotide
  Antisense strand to SEQ ID NO: 2069506
uucuucccaggagagaaac

SEQ ID NO: 2069508 - RNA, 19 nt, Artificial Sequence
  Description of Artificial Sequence: Synthetic oligonucleotide
  Sense strand starting at position 837 of SEQ ID NO: 1881759
uuucucuccugggaagaaa

SEQ ID NO: 2069509 - RNA, 19 nt, Artificial Sequence
  Description of Artificial Sequence: Synthetic oligonucleotide
  Antisense strand to SEQ ID NO: 2069508
uuucuucccaggagagaaa

SEQ ID NO: 2069510 - RNA, 19 nt, Artificial Sequence
  Description of Artificial Sequence: Synthetic oligonucleotide
  Sense strand starting at position 1015 of SEQ ID NO: 1881759
gaacgaagcgguuucguuu

SEQ ID NO: 2069511 - RNA, 19 nt, Artificial Sequence
  Description of Artificial Sequence: Synthetic oligonucleotide
  Antisense strand to SEQ ID NO: 2069510
aaacgaaaccgcuucguuc

SEQ ID NO: 2069512 - RNA, 19 nt, Artificial Sequence
  Description of Artificial Sequence: Synthetic oligonucleotide
  Sense strand starting at position 1016 of SEQ ID NO: 1881759
aacgaagcgguuucguuua

SEQ ID NO: 2069513 - RNA, 19 nt, Artificial Sequence
  Description of Artificial Sequence: Synthetic oligonucleotide
  Antisense strand to SEQ ID NO: 2069512
uaaacgaaaccgcuucguu

SEQ ID NO: 2069514 - RNA, 19 nt, Artificial Sequence
  Description of Artificial Sequence: Synthetic oligonucleotide
  Sense strand starting at position 1021 of SEQ ID NO: 1881759
agcgguuucguuuaggaaa

SEQ ID NO: 2069515 - RNA, 19 nt, Artificial Sequence
  Description of Artificial Sequence: Synthetic oligonucleotide
  Antisense strand to SEQ ID NO: 2069514
uuuccuaaacgaaaccgcu

SEQ ID NO: 2069516 - RNA, 19 nt, Artificial Sequence
  Description of Artificial Sequence: Synthetic oligonucleotide
  Sense strand starting at position 2067 of SEQ ID NO: 1881759
ggcccuacuuccguuuaga

SEQ ID NO: 2069517 - RNA, 19 nt, Artificial Sequence
  Description of Artificial Sequence: Synthetic oligonucleotide
  Antisense strand to SEQ ID NO: 2069516
ucuaaacggaaguagggcc

SEQ ID NO: 2069518 - RNA, 19 nt, Artificial Sequence
  Description of Artificial Sequence: Synthetic oligonucleotide
  Sense strand starting at position 2568 of SEQ ID NO: 1881759
uugccucguggccagauaa

SEQ ID NO: 2069519 - RNA, 19 nt, Artificial Sequence
  Description of Artificial Sequence: Synthetic oligonucleotide
  Antisense strand to SEQ ID NO: 2069518
uuaucuggccacgaggcaa

SEQ ID NO: 2069520 - RNA, 19 nt, Artificial Sequence
  Description of Artificial Sequence: Synthetic oligonucleotide
  Sense strand starting at position 2663 of SEQ ID NO: 1881759
cugcuugcuguugggauua

SEQ ID NO: 2069521 - RNA, 19 nt, Artificial Sequence
  Description of Artificial Sequence: Synthetic oligonucleotide
  Antisense strand to SEQ ID NO: 2069520
uaaucccaacagcaagcag

SEQ ID NO: 2069522 - RNA, 19 nt, Artificial Sequence
  Description of Artificial Sequence: Synthetic oligonucleotide
  Sense strand starting at position 3161 of SEQ ID NO: 1881759
agggucgcaaguuaagaua

SEQ ID NO: 2069523 - RNA, 19 nt, Artificial Sequence
  Description of Artificial Sequence: Synthetic oligonucleotide
  Antisense strand to SEQ ID NO: 2069522
uaucuuaacuugcgacccu

SEQ ID NO: 2069524 - RNA, 19 nt, Artificial Sequence
  Description of Artificial Sequence: Synthetic oligonucleotide
  Sense strand starting at position 3205 of SEQ ID NO: 1881759
ggaccugcgccuggagaaa

SEQ ID NO: 2069525 - RNA, 19 nt, Artificial Sequence
  Description of Artificial Sequence: Synthetic oligonucleotide
  Antisense strand to SEQ ID NO: 2069524
uuucuccaggcgcaggucc

SEQ ID NO: 2069526 - RNA, 19 nt, Artificial Sequence
  Description of Artificial Sequence: Synthetic oligonucleotide
  Sense strand starting at position 3285 of SEQ ID NO: 1881759
cccauugacugcuuuaugu

SEQ ID NO: 2069527 - RNA, 19 nt, Artificial Sequence
  Description of Artificial Sequence: Synthetic oligonucleotide
  Antisense strand to SEQ ID NO: 2069526
acauaaagcagucaauggg

SEQ ID NO: 2069528 - RNA, 19 nt, Artificial Sequence
  Description of Artificial Sequence: Synthetic oligonucleotide
  Sense strand starting at position 3287 of SEQ ID NO: 1881759
cauugacugcuuuaugugu

SEQ ID NO: 2069529 - RNA, 19 nt, Artificial Sequence
  Description of Artificial Sequence: Synthetic oligonucleotide
  Antisense strand to SEQ ID NO: 2069528
acacauaaagcagucaaug

SEQ ID NO: 2069530 - RNA, 19 nt, Artificial Sequence
  Description of Artificial Sequence: Synthetic oligonucleotide
  Sense strand starting at position 3349 of SEQ ID NO: 1881759
agaaguuucuaaucuuguc

SEQ ID NO: 2069531 - RNA, 19 nt, Artificial Sequence
  Description of Artificial Sequence: Synthetic oligonucleotide
  Antisense strand to SEQ ID NO: 2069530
gacaagauuagaaacuucu

SEQ ID NO: 2069532 - RNA, 19 nt, Artificial Sequence
  Description of Artificial Sequence: Synthetic oligonucleotide
  Sense strand starting at position 3357 of SEQ ID NO: 1881759
cuaaucuugucucuggaau

SEQ ID NO: 2069533 - RNA, 19 nt, Artificial Sequence
  Description of Artificial Sequence: Synthetic oligonucleotide
  Antisense strand to SEQ ID NO: 2069532
auuccagagacaagauuag

SEQ ID NO: 2069534 - RNA, 19 nt, Artificial Sequence
  Description of Artificial Sequence: Synthetic oligonucleotide
  Sense strand starting at position 3399 of SEQ ID NO: 1881759
gggcaucuuugggcauaaa

SEQ ID NO: 2069535 - RNA, 19 nt, Artificial Sequence
  Description of Artificial Sequence: Synthetic oligonucleotide
  Antisense strand to SEQ ID NO: 2069534
uuuaugcccaaagaugccc

SEQ ID NO: 2069536 - RNA, 19 nt, Artificial Sequence
  Description of Artificial Sequence: Synthetic oligonucleotide
  Sense strand starting at position 3400 of SEQ ID NO: 1881759
ggcaucuuugggcauaaau

SEQ ID NO: 2069537 - RNA, 19 nt, Artificial Sequence
  Description of Artificial Sequence: Synthetic oligonucleotide
  Antisense strand to SEQ ID NO: 2069536
auuuaugcccaaagaugcc

SEQ ID NO: 2069538 - RNA, 19 nt, Artificial Sequence
  Description of Artificial Sequence: Synthetic oligonucleotide
  Sense strand starting at position 3545 of SEQ ID NO: 1881759
cccaucucuugugagauuu

SEQ ID NO: 2069539 - RNA, 19 nt, Artificial Sequence
  Description of Artificial Sequence: Synthetic oligonucleotide
  Antisense strand to SEQ ID NO: 2069538
aaaucucacaagagauggg

SEQ ID NO: 2069540 - RNA, 19 nt, Artificial Sequence
  Description of Artificial Sequence: Synthetic oligonucleotide
  Sense strand starting at position 3627 of SEQ ID NO: 1881759
uggccugagccagaaucuu

SEQ ID NO: 2069541 - RNA, 19 nt, Artificial Sequence
  Description of Artificial Sequence: Synthetic oligonucleotide
  Antisense strand to SEQ ID NO: 2069540
aagauucuggcucaggcca

SEQ ID NO: 2069542 - RNA, 19 nt, Artificial Sequence
  Description of Artificial Sequence: Synthetic oligonucleotide
  Sense strand starting at position 3635 of SEQ ID NO: 1881759
gccagaaucuugucagugg

SEQ ID NO: 2069543 - RNA, 19 nt, Artificial Sequence
  Description of Artificial Sequence: Synthetic oligonucleotide
  Antisense strand to SEQ ID NO: 2069542
ccacugacaagauucuggc

SEQ ID NO: 2069544 - RNA, 19 nt, Artificial Sequence
  Description of Artificial Sequence: Synthetic oligonucleotide
  Sense strand starting at position 3638 of SEQ ID NO: 1881759
agaaucuugucaguggcuu

SEQ ID NO: 2069545 - RNA, 19 nt, Artificial Sequence
  Description of Artificial Sequence: Synthetic oligonucleotide
  Antisense strand to SEQ ID NO: 2069544
aagccacugacaagauucu

SEQ ID NO: 2069546 - RNA, 19 nt, Artificial Sequence
  Description of Artificial Sequence: Synthetic oligonucleotide
  Sense strand starting at position 3639 of SEQ ID NO: 1881759
gaaucuugucaguggcuuu

SEQ ID NO: 2069547 - RNA, 19 nt, Artificial Sequence
  Description of Artificial Sequence: Synthetic oligonucleotide
  Antisense strand to SEQ ID NO: 2069546
aaagccacugacaagauuc

SEQ ID NO: 2069548 - RNA, 19 nt, Artificial Sequence
  Description of Artificial Sequence: Synthetic oligonucleotide
  Sense strand starting at position 3711 of SEQ ID NO: 1881759
ccaucugugaaaugugaga

SEQ ID NO: 2069549 - RNA, 19 nt, Artificial Sequence
  Description of Artificial Sequence: Synthetic oligonucleotide
  Antisense strand to SEQ ID NO: 2069548
ucucacauuucacagaugg

SEQ ID NO: 2069550 - RNA, 19 nt, Artificial Sequence
  Description of Artificial Sequence: Synthetic oligonucleotide
  Sense strand starting at position 3713 of SEQ ID NO: 1881759
aucugugaaaugugagaau

SEQ ID NO: 2069551 - RNA, 19 nt, Artificial Sequence
  Description of Artificial Sequence: Synthetic oligonucleotide
  Antisense strand to SEQ ID NO: 2069550
auucucacauuucacagau

SEQ ID NO: 2069552 - RNA, 19 nt, Artificial Sequence
  Description of Artificial Sequence: Synthetic oligonucleotide
  Sense strand starting at position 3716 of SEQ ID NO: 1881759
ugugaaaugugagaauaag

SEQ ID NO: 2069553 - RNA, 19 nt, Artificial Sequence
  Description of Artificial Sequence: Synthetic oligonucleotide
  Antisense strand to SEQ ID NO: 2069552
cuuauucucacauuucaca

SEQ ID NO: 2069554 - RNA, 19 nt, Artificial Sequence
  Description of Artificial Sequence: Synthetic oligonucleotide
  Sense strand starting at position 3736 of SEQ ID NO: 1881759
auuucugcuucuugggaaa

SEQ ID NO: 2069555 - RNA, 19 nt, Artificial Sequence
  Description of Artificial Sequence: Synthetic oligonucleotide
  Antisense strand to SEQ ID NO: 2069554
uuucccaagaagcagaaau

SEQ ID NO: 2069556 - RNA, 19 nt, Artificial Sequence
  Description of Artificial Sequence: Synthetic oligonucleotide
  Sense strand starting at position 3785 of SEQ ID NO: 1881759
uccugaguccuguggacag

SEQ ID NO: 2069557 - RNA, 19 nt, Artificial Sequence
  Description of Artificial Sequence: Synthetic oligonucleotide
  Antisense strand to SEQ ID NO: 2069556
cuguccacaggacucagga

SEQ ID NO: 2069558 - RNA, 19 nt, Artificial Sequence
  Description of Artificial Sequence: Synthetic oligonucleotide
  Sense strand starting at position 3809 of SEQ ID NO: 1881759
cugaaugcuaauggugaua

SEQ ID NO: 2069559 - RNA, 19 nt, Artificial Sequence
  Description of Artificial Sequence: Synthetic oligonucleotide
  Antisense strand to SEQ ID NO: 2069558
uaucaccauuagcauucag

SEQ ID NO: 2069560 - RNA, 19 nt, Artificial Sequence
  Description of Artificial Sequence: Synthetic oligonucleotide
  Sense strand starting at position 3833 of SEQ ID NO: 1881759
caggcugcucuuuaagaga

SEQ ID NO: 2069561 - RNA, 19 nt, Artificial Sequence
  Description of Artificial Sequence: Synthetic oligonucleotide
  Antisense strand to SEQ ID NO: 2069560
ucucuuaaagagcagccug

SEQ ID NO: 2069562 - RNA, 19 nt, Artificial Sequence
  Description of Artificial Sequence: Synthetic oligonucleotide
  Sense strand starting at position 3846 of SEQ ID NO: 1881759
aagagaguuugcucuuguu

SEQ ID NO: 2069563 - RNA, 19 nt, Artificial Sequence
  Description of Artificial Sequence: Synthetic oligonucleotide
  Antisense strand to SEQ ID NO: 2069562
aacaagagcaaacucucuu

SEQ ID NO: 2069564 - RNA, 19 nt, Artificial Sequence
  Description of Artificial Sequence: Synthetic oligonucleotide
  Sense strand starting at position 3888 of SEQ ID NO: 1881759
ggucauguugguugagucu

SEQ ID NO: 2069565 - RNA, 19 nt, Artificial Sequence
  Description of Artificial Sequence: Synthetic oligonucleotide
  Antisense strand to SEQ ID NO: 2069564
agacucaaccaacaugacc

SEQ ID NO: 2069566 - RNA, 19 nt, Artificial Sequence
  Description of Artificial Sequence: Synthetic oligonucleotide
  Sense strand starting at position 3895 of SEQ ID NO: 1881759
uugguugagucuaggagga

SEQ ID NO: 2069567 - RNA, 19 nt, Artificial Sequence
  Description of Artificial Sequence: Synthetic oligonucleotide
  Antisense strand to SEQ ID NO: 2069566
uccuccuagacucaaccaa

SEQ ID NO: 2069568 - RNA, 19 nt, Artificial Sequence
  Description of Artificial Sequence: Synthetic oligonucleotide
  Sense strand starting at position 3966 of SEQ ID NO: 1881759
uaggaaguuugguccagga

SEQ ID NO: 2069569 - RNA, 19 nt, Artificial Sequence
  Description of Artificial Sequence: Synthetic oligonucleotide
  Antisense strand to SEQ ID NO: 2069568
uccuggaccaaacuuccua

SEQ ID NO: 2069570 - RNA, 19 nt, Artificial Sequence
  Description of Artificial Sequence: Synthetic oligonucleotide
  Sense strand starting at position 3970 of SEQ ID NO: 1881759
aaguuugguccaggaaagc

SEQ ID NO: 2069571 - RNA, 19 nt, Artificial Sequence
  Description of Artificial Sequence: Synthetic oligonucleotide
  Antisense strand to SEQ ID NO: 2069570
gcuuuccuggaccaaacuu

SEQ ID NO: 2069572 - RNA, 19 nt, Artificial Sequence
  Description of Artificial Sequence: Synthetic oligonucleotide
  Sense strand starting at position 33 of SEQ ID NO: 1881760
gucuuuagcucuuuggaga

SEQ ID NO: 2069573 - RNA, 19 nt, Artificial Sequence
  Description of Artificial Sequence: Synthetic oligonucleotide
  Antisense strand to SEQ ID NO: 2069572
ucuccaaagagcuaaagac

SEQ ID NO: 2069574 - RNA, 19 nt, Artificial Sequence
  Description of Artificial Sequence: Synthetic oligonucleotide
  Sense strand starting at position 34 of SEQ ID NO: 1881760
ucuuuagcucuuuggagaa

SEQ ID NO: 2069575 - RNA, 19 nt, Artificial Sequence
  Description of Artificial Sequence: Synthetic oligonucleotide
  Antisense strand to SEQ ID NO: 2069574
uucuccaaagagcuaaaga

SEQ ID NO: 2069576 - RNA, 19 nt, Artificial Sequence
  Description of Artificial Sequence: Synthetic oligonucleotide
  Sense strand starting at position 188 of SEQ ID NO: 1881760
gcaguugucccaggaagga

SEQ ID NO: 2069577 - RNA, 19 nt, Artificial Sequence
  Description of Artificial Sequence: Synthetic oligonucleotide
  Antisense strand to SEQ ID NO: 2069576
uccuuccugggacaacugc

SEQ ID NO: 2069578 - RNA, 19 nt, Artificial Sequence
  Description of Artificial Sequence: Synthetic oligonucleotide
  Sense strand starting at position 305 of SEQ ID NO: 1881760
uucccugaacucuguaaga

SEQ ID NO: 2069579 - RNA, 19 nt, Artificial Sequence
  Description of Artificial Sequence: Synthetic oligonucleotide
  Antisense strand to SEQ ID NO: 2069578
ucuuacagaguucagggaa

SEQ ID NO: 2069580 - RNA, 19 nt, Artificial Sequence
  Description of Artificial Sequence: Synthetic oligonucleotide
  Sense strand starting at position 318 of SEQ ID NO: 1881760
guaagacaucacgggucau

SEQ ID NO: 2069581 - RNA, 19 nt, Artificial Sequence
  Description of Artificial Sequence: Synthetic oligonucleotide
  Antisense strand to SEQ ID NO: 2069580
augacccgugaugucuuac

SEQ ID NO: 2069582 - RNA, 19 nt, Artificial Sequence
  Description of Artificial Sequence: Synthetic oligonucleotide
  Sense strand starting at position 393 of SEQ ID NO: 1881760
gugugagggacuugaugua

SEQ ID NO: 2069583 - RNA, 19 nt, Artificial Sequence
  Description of Artificial Sequence: Synthetic oligonucleotide
  Antisense strand to SEQ ID NO: 2069582
uacaucaagucccucacac

SEQ ID NO: 2069584 - RNA, 19 nt, Artificial Sequence
  Description of Artificial Sequence: Synthetic oligonucleotide
  Sense strand starting at position 484 of SEQ ID NO: 1881760
uuacaugacuuguccaagu

SEQ ID NO: 2069585 - RNA, 19 nt, Artificial Sequence
  Description of Artificial Sequence: Synthetic oligonucleotide
  Antisense strand to SEQ ID NO: 2069584
acuuggacaagucauguaa

SEQ ID NO: 2069586 - RNA, 19 nt, Artificial Sequence
  Description of Artificial Sequence: Synthetic oligonucleotide
  Sense strand starting at position 486 of SEQ ID NO: 1881760
acaugacuuguccaaguuu

SEQ ID NO: 2069587 - RNA, 19 nt, Artificial Sequence
  Description of Artificial Sequence: Synthetic oligonucleotide
  Antisense strand to SEQ ID NO: 2069586
aaacuuggacaagucaugu

SEQ ID NO: 2069588 - RNA, 19 nt, Artificial Sequence
  Description of Artificial Sequence: Synthetic oligonucleotide
  Sense strand starting at position 678 of SEQ ID NO: 1881760
caggucugcguguuucuga

SEQ ID NO: 2069589 - RNA, 19 nt, Artificial Sequence
  Description of Artificial Sequence: Synthetic oligonucleotide
  Antisense strand to SEQ ID NO: 2069588
ucagaaacacgcagaccug

SEQ ID NO: 2069590 - RNA, 19 nt, Artificial Sequence
  Description of Artificial Sequence: Synthetic oligonucleotide
  Sense strand starting at position 757 of SEQ ID NO: 1881760
uugccuucccuggaaagua

SEQ ID NO: 2069591 - RNA, 19 nt, Artificial Sequence
  Description of Artificial Sequence: Synthetic oligonucleotide
  Antisense strand to SEQ ID NO: 2069590
uacuuuccagggaaggcaa

SEQ ID NO: 2069592 - RNA, 19 nt, Artificial Sequence
  Description of Artificial Sequence: Synthetic oligonucleotide
  Sense strand starting at position 1037 of SEQ ID NO: 1881760
guuaaacaagucugcagaa

SEQ ID NO: 2069593 - RNA, 19 nt, Artificial Sequence
  Description of Artificial Sequence: Synthetic oligonucleotide
  Antisense strand to SEQ ID NO: 2069592
uucugcagacuuguuuaac

SEQ ID NO: 2069594 - RNA, 19 nt, Artificial Sequence
  Description of Artificial Sequence: Synthetic oligonucleotide
  Sense strand starting at position 1038 of SEQ ID NO: 1881760
uuaaacaagucugcagaaa

SEQ ID NO: 2069595 - RNA, 19 nt, Artificial Sequence
  Description of Artificial Sequence: Synthetic oligonucleotide
  Antisense strand to SEQ ID NO: 2069594
uuucugcagacuuguuuaa

SEQ ID NO: 2069596 - RNA, 19 nt, Artificial Sequence
  Description of Artificial Sequence: Synthetic oligonucleotide
  Sense strand starting at position 1286 of SEQ ID NO: 1881760
guccuagugccggaaugau

SEQ ID NO: 2069597 - RNA, 19 nt, Artificial Sequence
  Description of Artificial Sequence: Synthetic oligonucleotide
  Antisense strand to SEQ ID NO: 2069596
aucauuccggcacuaggac

SEQ ID NO: 2069598 - RNA, 19 nt, Artificial Sequence
  Description of Artificial Sequence: Synthetic oligonucleotide
  Sense strand starting at position 1426 of SEQ ID NO: 1881760
gguuacucacgguaagcaa

SEQ ID NO: 2069599 - RNA, 19 nt, Artificial Sequence
  Description of Artificial Sequence: Synthetic oligonucleotide
  Antisense strand to SEQ ID NO: 2069598
uugcuuaccgugaguaacc

SEQ ID NO: 2069600 - RNA, 19 nt, Artificial Sequence
  Description of Artificial Sequence: Synthetic oligonucleotide
  Sense strand starting at position 1547 of SEQ ID NO: 1881760
agguauugacauugggauu

SEQ ID NO: 2069601 - RNA, 19 nt, Artificial Sequence
  Description of Artificial Sequence: Synthetic oligonucleotide
  Antisense strand to SEQ ID NO: 2069600
aaucccaaugucaauaccu

SEQ ID NO: 2069602 - RNA, 19 nt, Artificial Sequence
  Description of Artificial Sequence: Synthetic oligonucleotide
  Sense strand starting at position 1548 of SEQ ID NO: 1881760
gguauugacauugggauua

SEQ ID NO: 2069603 - RNA, 19 nt, Artificial Sequence
  Description of Artificial Sequence: Synthetic oligonucleotide
  Antisense strand to SEQ ID NO: 2069602
uaaucccaaugucaauacc

SEQ ID NO: 2069604 - RNA, 19 nt, Artificial Sequence
  Description of Artificial Sequence: Synthetic oligonucleotide
  Sense strand starting at position 1559 of SEQ ID NO: 1881760
ugggauuaacccugugggu

SEQ ID NO: 2069605 - RNA, 19 nt, Artificial Sequence
  Description of Artificial Sequence: Synthetic oligonucleotide
  Antisense strand to SEQ ID NO: 2069604
acccacaggguuaauccca

SEQ ID NO: 2069606 - RNA, 19 nt, Artificial Sequence
  Description of Artificial Sequence: Synthetic oligonucleotide
  Sense strand starting at position 1602 of SEQ ID NO: 1881760
ugugccucugcgucagauu

SEQ ID NO: 2069607 - RNA, 19 nt, Artificial Sequence
  Description of Artificial Sequence: Synthetic oligonucleotide
  Antisense strand to SEQ ID NO: 2069606
aaucugacgcagaggcaca

SEQ ID NO: 2069608 - RNA, 19 nt, Artificial Sequence
  Description of Artificial Sequence: Synthetic oligonucleotide
  Sense strand starting at position 1678 of SEQ ID NO: 1881760
ugugcagcgauccuguuau

SEQ ID NO: 2069609 - RNA, 19 nt, Artificial Sequence
  Description of Artificial Sequence: Synthetic oligonucleotide
  Antisense strand to SEQ ID NO: 2069608
auaacaggaucgcugcaca

SEQ ID NO: 2069610 - RNA, 19 nt, Artificial Sequence
  Description of Artificial Sequence: Synthetic oligonucleotide
  Sense strand starting at position 1701 of SEQ ID NO: 1881760
ggcagucccuuacuuugaa

SEQ ID NO: 2069611 - RNA, 19 nt, Artificial Sequence
  Description of Artificial Sequence: Synthetic oligonucleotide
  Antisense strand to SEQ ID NO: 2069610
uucaaaguaagggacugcc

SEQ ID NO: 2069612 - RNA, 19 nt, Artificial Sequence
  Description of Artificial Sequence: Synthetic oligonucleotide
  Sense strand starting at position 1768 of SEQ ID NO: 1881760
guggauaggucauugagaa

SEQ ID NO: 2069613 - RNA, 19 nt, Artificial Sequence
  Description of Artificial Sequence: Synthetic oligonucleotide
  Antisense strand to SEQ ID NO: 2069612
uucucaaugaccuauccac

SEQ ID NO: 2069614 - RNA, 19 nt, Artificial Sequence
  Description of Artificial Sequence: Synthetic oligonucleotide
  Sense strand starting at position 1938 of SEQ ID NO: 1881760
gagucugagaccuguuuag

SEQ ID NO: 2069615 - RNA, 19 nt, Artificial Sequence
  Description of Artificial Sequence: Synthetic oligonucleotide
  Antisense strand to SEQ ID NO: 2069614
cuaaacaggucucagacuc

SEQ ID NO: 2069616 - RNA, 19 nt, Artificial Sequence
  Description of Artificial Sequence: Synthetic oligonucleotide
  Sense strand starting at position 2100 of SEQ ID NO: 1881760
auauuauuaggucagaugu

SEQ ID NO: 2069617 - RNA, 19 nt, Artificial Sequence
  Description of Artificial Sequence: Synthetic oligonucleotide
  Antisense strand to SEQ ID NO: 2069616
acaucugaccuaauaauau

SEQ ID NO: 2069618 - RNA, 19 nt, Artificial Sequence
  Description of Artificial Sequence: Synthetic oligonucleotide
  Sense strand starting at position 2372 of SEQ ID NO: 1881760
agagcagacuuugucucaa

SEQ ID NO: 2069619 - RNA, 19 nt, Artificial Sequence
  Description of Artificial Sequence: Synthetic oligonucleotide
  Antisense strand to SEQ ID NO: 2069618
uugagacaaagucugcucu

SEQ ID NO: 2069620 - RNA, 19 nt, Artificial Sequence
  Description of Artificial Sequence: Synthetic oligonucleotide
  Sense strand starting at position 2488 of SEQ ID NO: 1881760
uuaugugacagcuggaaau

SEQ ID NO: 2069621 - RNA, 19 nt, Artificial Sequence
  Description of Artificial Sequence: Synthetic oligonucleotide
  Antisense strand to SEQ ID NO: 2069620
auuuccagcugucacauaa

SEQ ID NO: 2069622 - RNA, 19 nt, Artificial Sequence
  Description of Artificial Sequence: Synthetic oligonucleotide
  Sense strand starting at position 2706 of SEQ ID NO: 1881760
ugagaugagccuugggaug

SEQ ID NO: 2069623 - RNA, 19 nt, Artificial Sequence
  Description of Artificial Sequence: Synthetic oligonucleotide
  Antisense strand to SEQ ID NO: 2069622
caucccaaggcucaucuca

SEQ ID NO: 2069624 - RNA, 19 nt, Artificial Sequence
  Description of Artificial Sequence: Synthetic oligonucleotide
  Sense strand starting at position 2711 of SEQ ID NO: 1881760
ugagccuugggaugagagu

SEQ ID NO: 2069625 - RNA, 19 nt, Artificial Sequence
  Description of Artificial Sequence: Synthetic oligonucleotide
  Antisense strand to SEQ ID NO: 2069624
acucucaucccaaggcuca

SEQ ID NO: 2069626 - RNA, 19 nt, Artificial Sequence
  Description of Artificial Sequence: Synthetic oligonucleotide
  Sense strand starting at position 2849 of SEQ ID NO: 1881760
gagccaucucuguagcauc

SEQ ID NO: 2069627 - RNA, 19 nt, Artificial Sequence
  Description of Artificial Sequence: Synthetic oligonucleotide
  Antisense strand to SEQ ID NO: 2069626
gaugcuacagagauggcuc

SEQ ID NO: 2069628 - RNA, 19 nt, Artificial Sequence
  Description of Artificial Sequence: Synthetic oligonucleotide
  Sense strand starting at position 3065 of SEQ ID NO: 1881760
gaaugcaucucuccuggga

SEQ ID NO: 2069629 - RNA, 19 nt, Artificial Sequence
  Description of Artificial Sequence: Synthetic oligonucleotide
  Antisense strand to SEQ ID NO: 2069628
ucccaggagagaugcauuc

SEQ ID NO: 2069630 - RNA, 19 nt, Artificial Sequence
  Description of Artificial Sequence: Synthetic oligonucleotide
  Sense strand starting at position 3238 of SEQ ID NO: 1881760
aggguugacuccuucggga

SEQ ID NO: 2069631 - RNA, 19 nt, Artificial Sequence
  Description of Artificial Sequence: Synthetic oligonucleotide
  Antisense strand to SEQ ID NO: 2069630
ucccgaaggagucaacccu

SEQ ID NO: 2069632 - RNA, 19 nt, Artificial Sequence
  Description of Artificial Sequence: Synthetic oligonucleotide
  Sense strand starting at position 3328 of SEQ ID NO: 1881760
guggcuugugacuauguaa

SEQ ID NO: 2069633 - RNA, 19 nt, Artificial Sequence
  Description of Artificial Sequence: Synthetic oligonucleotide
  Antisense strand to SEQ ID NO: 2069632
uuacauagucacaagccac

SEQ ID NO: 2069634 - RNA, 19 nt, Artificial Sequence
  Description of Artificial Sequence: Synthetic oligonucleotide
  Sense strand starting at position 3335 of SEQ ID NO: 1881760
gugacuauguaacucuagu

SEQ ID NO: 2069635 - RNA, 19 nt, Artificial Sequence
  Description of Artificial Sequence: Synthetic oligonucleotide
  Antisense strand to SEQ ID NO: 2069634
acuagaguuacauagucac

SEQ ID NO: 2069636 - RNA, 19 nt, Artificial Sequence
  Description of Artificial Sequence: Synthetic oligonucleotide
  Sense strand starting at position 3603 of SEQ ID NO: 1881760
caguguggccuugggagau

SEQ ID NO: 2069637 - RNA, 19 nt, Artificial Sequence
  Description of Artificial Sequence: Synthetic oligonucleotide
  Antisense strand to SEQ ID NO: 2069636
aucucccaaggccacacug

SEQ ID NO: 2069638 - RNA, 19 nt, Artificial Sequence
  Description of Artificial Sequence: Synthetic oligonucleotide
  Sense strand starting at position 3616 of SEQ ID NO: 1881760
ggagaugagucacaaggga

SEQ ID NO: 2069639 - RNA, 19 nt, Artificial Sequence
  Description of Artificial Sequence: Synthetic oligonucleotide
  Antisense strand to SEQ ID NO: 2069638
ucccuugugacucaucucc

SEQ ID NO: 2069640 - RNA, 19 nt, Artificial Sequence
  Description of Artificial Sequence: Synthetic oligonucleotide
  Sense strand starting at position 3650 of SEQ ID NO: 1881760
agaggauaagucuggguga

SEQ ID NO: 2069641 - RNA, 19 nt, Artificial Sequence
  Description of Artificial Sequence: Synthetic oligonucleotide
  Antisense strand to SEQ ID NO: 2069640
ucacccagacuuauccucu

SEQ ID NO: 2069642 - RNA, 19 nt, Artificial Sequence
  Description of Artificial Sequence: Synthetic oligonucleotide
  Sense strand starting at position 3652 of SEQ ID NO: 1881760
aggauaagucugggugaga

SEQ ID NO: 2069643 - RNA, 19 nt, Artificial Sequence
  Description of Artificial Sequence: Synthetic oligonucleotide
  Antisense strand to SEQ ID NO: 2069642
ucucacccagacuuauccu

SEQ ID NO: 2069644 - RNA, 19 nt, Artificial Sequence
  Description of Artificial Sequence: Synthetic oligonucleotide
  Sense strand starting at position 3653 of SEQ ID NO: 1881760
ggauaagucugggugagac

SEQ ID NO: 2069645 - RNA, 19 nt, Artificial Sequence
  Description of Artificial Sequence: Synthetic oligonucleotide
  Antisense strand to SEQ ID NO: 2069644
gucucacccagacuuaucc

SEQ ID NO: 2069646 - RNA, 19 nt, Artificial Sequence
  Description of Artificial Sequence: Synthetic oligonucleotide
  Sense strand starting at position 3755 of SEQ ID NO: 1881760
ccagcucugaagugaugau

SEQ ID NO: 2069647 - RNA, 19 nt, Artificial Sequence
  Description of Artificial Sequence: Synthetic oligonucleotide
  Antisense strand to SEQ ID NO: 2069646
aucaucacuucagagcugg

SEQ ID NO: 2069648 - RNA, 19 nt, Artificial Sequence
  Description of Artificial Sequence: Synthetic oligonucleotide
  Sense strand starting at position 3848 of SEQ ID NO: 1881760
ggcagugcuauccaucaga

SEQ ID NO: 2069649 - RNA, 19 nt, Artificial Sequence
  Description of Artificial Sequence: Synthetic oligonucleotide
  Antisense strand to SEQ ID NO: 2069648
ucugauggauagcacugcc

SEQ ID NO: 2069650 - RNA, 19 nt, Artificial Sequence
  Description of Artificial Sequence: Synthetic oligonucleotide
  Sense strand starting at position 3895 of SEQ ID NO: 1881760
agaucugagcugugcaaca

SEQ ID NO: 2069651 - RNA, 19 nt, Artificial Sequence
  Description of Artificial Sequence: Synthetic oligonucleotide
  Antisense strand to SEQ ID NO: 2069650
uguugcacagcucagaucu

SEQ ID NO: 2069652 - RNA, 19 nt, Artificial Sequence
  Description of Artificial Sequence: Synthetic oligonucleotide
  Sense strand starting at position 195 of SEQ ID NO: 1881761
ugguuaguugauuaauuac

SEQ ID NO: 2069653 - RNA, 19 nt, Artificial Sequence
  Description of Artificial Sequence: Synthetic oligonucleotide
  Antisense strand to SEQ ID NO: 2069652
guaauuaaucaacuaacca

SEQ ID NO: 2069654 - RNA, 19 nt, Artificial Sequence
  Description of Artificial Sequence: Synthetic oligonucleotide
  Sense strand starting at position 417 of SEQ ID NO: 1881761
cagggucaccuguauuaag

SEQ ID NO: 2069655 - RNA, 19 nt, Artificial Sequence
  Description of Artificial Sequence: Synthetic oligonucleotide
  Antisense strand to SEQ ID NO: 2069654
cuuaauacaggugacccug

SEQ ID NO: 2069656 - RNA, 19 nt, Artificial Sequence
  Description of Artificial Sequence: Synthetic oligonucleotide
  Sense strand starting at position 505 of SEQ ID NO: 1881761
cucuuugaucuuuauaguc

SEQ ID NO: 2069657 - RNA, 19 nt, Artificial Sequence
  Description of Artificial Sequence: Synthetic oligonucleotide
  Antisense strand to SEQ ID NO: 2069656
gacuauaaagaucaaagag

SEQ ID NO: 2069658 - RNA, 19 nt, Artificial Sequence
  Description of Artificial Sequence: Synthetic oligonucleotide
  Sense strand starting at position 510 of SEQ ID NO: 1881761
ugaucuuuauagucuugaa

SEQ ID NO: 2069659 - RNA, 19 nt, Artificial Sequence
  Description of Artificial Sequence: Synthetic oligonucleotide
  Antisense strand to SEQ ID NO: 2069658
uucaagacuauaaagauca

SEQ ID NO: 2069660 - RNA, 19 nt, Artificial Sequence
  Description of Artificial Sequence: Synthetic oligonucleotide
  Sense strand starting at position 531 of SEQ ID NO: 1881761
gccugcucugguuuguaua

SEQ ID NO: 2069661 - RNA, 19 nt, Artificial Sequence
  Description of Artificial Sequence: Synthetic oligonucleotide
  Antisense strand to SEQ ID NO: 2069660
uauacaaaccagagcaggc

SEQ ID NO: 2069662 - RNA, 19 nt, Artificial Sequence
  Description of Artificial Sequence: Synthetic oligonucleotide
  Sense strand starting at position 628 of SEQ ID NO: 1881761
cuuauaaugggcuaucauu

SEQ ID NO: 2069663 - RNA, 19 nt, Artificial Sequence
  Description of Artificial Sequence: Synthetic oligonucleotide
  Antisense strand to SEQ ID NO: 2069662
aaugauagcccauuauaag

SEQ ID NO: 2069664 - RNA, 19 nt, Artificial Sequence
  Description of Artificial Sequence: Synthetic oligonucleotide
  Sense strand starting at position 669 of SEQ ID NO: 1881761
uauguuaugguagaugaug

SEQ ID NO: 2069665 - RNA, 19 nt, Artificial Sequence
  Description of Artificial Sequence: Synthetic oligonucleotide
  Antisense strand to SEQ ID NO: 2069664
caucaucuaccauaacaua

SEQ ID NO: 2069666 - RNA, 19 nt, Artificial Sequence
  Description of Artificial Sequence: Synthetic oligonucleotide
  Sense strand starting at position 708 of SEQ ID NO: 1881761
guuuccucucuggaguauu

SEQ ID NO: 2069667 - RNA, 19 nt, Artificial Sequence
  Description of Artificial Sequence: Synthetic oligonucleotide
  Antisense strand to SEQ ID NO: 2069666
aauacuccagagaggaaac

SEQ ID NO: 2069668 - RNA, 19 nt, Artificial Sequence
  Description of Artificial Sequence: Synthetic oligonucleotide
  Sense strand starting at position 827 of SEQ ID NO: 1881761
ucagacuaucuaggaugua

SEQ ID NO: 2069669 - RNA, 19 nt, Artificial Sequence
  Description of Artificial Sequence: Synthetic oligonucleotide
  Antisense strand to SEQ ID NO: 2069668
uacauccuagauagucuga

SEQ ID NO: 2069670 - RNA, 19 nt, Artificial Sequence
  Description of Artificial Sequence: Synthetic oligonucleotide
  Sense strand starting at position 1090 of SEQ ID NO: 1881761
agugaauaauucucacuag

SEQ ID NO: 2069671 - RNA, 19 nt, Artificial Sequence
  Description of Artificial Sequence: Synthetic oligonucleotide
  Antisense strand to SEQ ID NO: 2069670
cuagugagaauuauucacu

SEQ ID NO: 2069672 - RNA, 19 nt, Artificial Sequence
  Description of Artificial Sequence: Synthetic oligonucleotide
  Sense strand starting at position 1428 of SEQ ID NO: 1881761
acuaguuacccacauguuu

SEQ ID NO: 2069673 - RNA, 19 nt, Artificial Sequence
  Description of Artificial Sequence: Synthetic oligonucleotide
  Antisense strand to SEQ ID NO: 2069672
aaacauguggguaacuagu

SEQ ID NO: 2069674 - RNA, 19 nt, Artificial Sequence
  Description of Artificial Sequence: Synthetic oligonucleotide
  Sense strand starting at position 1514 of SEQ ID NO: 1881761
uccuuugauccugagguuu

SEQ ID NO: 2069675 - RNA, 19 nt, Artificial Sequence
  Description of Artificial Sequence: Synthetic oligonucleotide
  Antisense strand to SEQ ID NO: 2069674
aaaccucaggaucaaagga

SEQ ID NO: 2069676 - RNA, 19 nt, Artificial Sequence
  Description of Artificial Sequence: Synthetic oligonucleotide
  Sense strand starting at position 1600 of SEQ ID NO: 1881761
gcagaagugcaauauacuu

SEQ ID NO: 2069677 - RNA, 19 nt, Artificial Sequence
  Description of Artificial Sequence: Synthetic oligonucleotide
  Antisense strand to SEQ ID NO: 2069676
aaguauauugcacuucugc

SEQ ID NO: 2069678 - RNA, 19 nt, Artificial Sequence
  Description of Artificial Sequence: Synthetic oligonucleotide
  Sense strand starting at position 1697 of SEQ ID NO: 1881761
cgcuuuccucaagaugaca

SEQ ID NO: 2069679 - RNA, 19 nt, Artificial Sequence
  Description of Artificial Sequence: Synthetic oligonucleotide
  Antisense strand to SEQ ID NO: 2069678
ugucaucuugaggaaagcg

SEQ ID NO: 2069680 - RNA, 19 nt, Artificial Sequence
  Description of Artificial Sequence: Synthetic oligonucleotide
  Sense strand starting at position 1734 of SEQ ID NO: 1881761
cuaaguaauguauaucuca

SEQ ID NO: 2069681 - RNA, 19 nt, Artificial Sequence
  Description of Artificial Sequence: Synthetic oligonucleotide
  Antisense strand to SEQ ID NO: 2069680
ugagauauacauuacuuag

SEQ ID NO: 2069682 - RNA, 19 nt, Artificial Sequence
  Description of Artificial Sequence: Synthetic oligonucleotide
  Sense strand starting at position 2110 of SEQ ID NO: 1881761
aacacugccuugucaggaa

SEQ ID NO: 2069683 - RNA, 19 nt, Artificial Sequence
  Description of Artificial Sequence: Synthetic oligonucleotide
  Antisense strand to SEQ ID NO: 2069682
uuccugacaaggcaguguu

SEQ ID NO: 2069684 - RNA, 19 nt, Artificial Sequence
  Description of Artificial Sequence: Synthetic oligonucleotide
  Sense strand starting at position 2214 of SEQ ID NO: 1881761
uuucguacaccagauguaa

SEQ ID NO: 2069685 - RNA, 19 nt, Artificial Sequence
  Description of Artificial Sequence: Synthetic oligonucleotide
  Antisense strand to SEQ ID NO: 2069684
uuacaucugguguacgaaa

SEQ ID NO: 2069686 - RNA, 19 nt, Artificial Sequence
  Description of Artificial Sequence: Synthetic oligonucleotide
  Sense strand starting at position 2245 of SEQ ID NO: 1881761
ucagaaggcuuguuaagau

SEQ ID NO: 2069687 - RNA, 19 nt, Artificial Sequence
  Description of Artificial Sequence: Synthetic oligonucleotide
  Antisense strand to SEQ ID NO: 2069686
aucuuaacaagccuucuga

SEQ ID NO: 2069688 - RNA, 19 nt, Artificial Sequence
  Description of Artificial Sequence: Synthetic oligonucleotide
  Sense strand starting at position 2314 of SEQ ID NO: 1881761
aggagcucuaguuagggua

SEQ ID NO: 2069689 - RNA, 19 nt, Artificial Sequence
  Description of Artificial Sequence: Synthetic oligonucleotide
  Antisense strand to SEQ ID NO: 2069688
uacccuaacuagagcuccu

SEQ ID NO: 2069690 - RNA, 19 nt, Artificial Sequence
  Description of Artificial Sequence: Synthetic oligonucleotide
  Sense strand starting at position 2329 of SEQ ID NO: 1881761
gguaauuguugcuugauuu

SEQ ID NO: 2069691 - RNA, 19 nt, Artificial Sequence
  Description of Artificial Sequence: Synthetic oligonucleotide
  Antisense strand to SEQ ID NO: 2069690
aaaucaagcaacaauuacc

SEQ ID NO: 2069692 - RNA, 19 nt, Artificial Sequence
  Description of Artificial Sequence: Synthetic oligonucleotide
  Sense strand starting at position 2547 of SEQ ID NO: 1881761
agcucuagcaagggagauu

SEQ ID NO: 2069693 - RNA, 19 nt, Artificial Sequence
  Description of Artificial Sequence: Synthetic oligonucleotide
  Antisense strand to SEQ ID NO: 2069692
aaucucccuugcuagagcu

SEQ ID NO: 2069694 - RNA, 19 nt, Artificial Sequence
  Description of Artificial Sequence: Synthetic oligonucleotide
  Sense strand starting at position 2559 of SEQ ID NO: 1881761
ggagauucguguucauuuc

SEQ ID NO: 2069695 - RNA, 19 nt, Artificial Sequence
  Description of Artificial Sequence: Synthetic oligonucleotide
  Antisense strand to SEQ ID NO: 2069694
gaaaugaacacgaaucucc

SEQ ID NO: 2069696 - RNA, 19 nt, Artificial Sequence
  Description of Artificial Sequence: Synthetic oligonucleotide
  Sense strand starting at position 2693 of SEQ ID NO: 1881761
aaaguugugcgagaauucu

SEQ ID NO: 2069697 - RNA, 19 nt, Artificial Sequence
  Description of Artificial Sequence: Synthetic oligonucleotide
  Antisense strand to SEQ ID NO: 2069696
agaauucucgcacaacuuu

SEQ ID NO: 2069698 - RNA, 19 nt, Artificial Sequence
  Description of Artificial Sequence: Synthetic oligonucleotide
  Sense strand starting at position 2717 of SEQ ID NO: 1881761
ugcagagugcauucgguuu

SEQ ID NO: 2069699 - RNA, 19 nt, Artificial Sequence
  Description of Artificial Sequence: Synthetic oligonucleotide
  Antisense strand to SEQ ID NO: 2069698
aaaccgaaugcacucugca

SEQ ID NO: 2069700 - RNA, 19 nt, Artificial Sequence
  Description of Artificial Sequence: Synthetic oligonucleotide
  Sense strand starting at position 2735 of SEQ ID NO: 1881761
uuguaaugugcagacuaac

SEQ ID NO: 2069701 - RNA, 19 nt, Artificial Sequence
  Description of Artificial Sequence: Synthetic oligonucleotide
  Antisense strand to SEQ ID NO: 2069700
guuagucugcacauuacaa

SEQ ID NO: 2069702 - RNA, 19 nt, Artificial Sequence
  Description of Artificial Sequence: Synthetic oligonucleotide
  Sense strand starting at position 3058 of SEQ ID NO: 1881761
cuuaccaaugaguggaaau

SEQ ID NO: 2069703 - RNA, 19 nt, Artificial Sequence
  Description of Artificial Sequence: Synthetic oligonucleotide
  Antisense strand to SEQ ID NO: 2069702
auuuccacucauugguaag

SEQ ID NO: 2069704 - RNA, 19 nt, Artificial Sequence
  Description of Artificial Sequence: Synthetic oligonucleotide
  Sense strand starting at position 3135 of SEQ ID NO: 1881761
uuugguaagcuagacauaa

SEQ ID NO: 2069705 - RNA, 19 nt, Artificial Sequence
  Description of Artificial Sequence: Synthetic oligonucleotide
  Antisense strand to SEQ ID NO: 2069704
uuaugucuagcuuaccaaa

SEQ ID NO: 2069706 - RNA, 19 nt, Artificial Sequence
  Description of Artificial Sequence: Synthetic oligonucleotide
  Sense strand starting at position 3458 of SEQ ID NO: 1881761
gaaaccguuccugagcauu

SEQ ID NO: 2069707 - RNA, 19 nt, Artificial Sequence
  Description of Artificial Sequence: Synthetic oligonucleotide
  Antisense strand to SEQ ID NO: 2069706
aaugcucaggaacgguuuc

SEQ ID NO: 2069708 - RNA, 19 nt, Artificial Sequence
  Description of Artificial Sequence: Synthetic oligonucleotide
  Sense strand starting at position 3470 of SEQ ID NO: 1881761
gagcauuaucuugacuguu

SEQ ID NO: 2069709 - RNA, 19 nt, Artificial Sequence
  Description of Artificial Sequence: Synthetic oligonucleotide
  Antisense strand to SEQ ID NO: 2069708
aacagucaagauaaugcuc

SEQ ID NO: 2069710 - RNA, 19 nt, Artificial Sequence
  Description of Artificial Sequence: Synthetic oligonucleotide
  Sense strand starting at position 3484 of SEQ ID NO: 1881761
cuguuugcagaggagacau

SEQ ID NO: 2069711 - RNA, 19 nt, Artificial Sequence
  Description of Artificial Sequence: Synthetic oligonucleotide
  Antisense strand to SEQ ID NO: 2069710
augucuccucugcaaacag

SEQ ID NO: 2069712 - RNA, 19 nt, Artificial Sequence
  Description of Artificial Sequence: Synthetic oligonucleotide
  Sense strand starting at position 3559 of SEQ ID NO: 1881761
gucauagugaaauauaguu

SEQ ID NO: 2069713 - RNA, 19 nt, Artificial Sequence
  Description of Artificial Sequence: Synthetic oligonucleotide
  Antisense strand to SEQ ID NO: 2069712
aacuauauuucacuaugac

SEQ ID NO: 2069714 - RNA, 19 nt, Artificial Sequence
  Description of Artificial Sequence: Synthetic oligonucleotide
  Sense strand starting at position 3565 of SEQ ID NO: 1881761
gugaaauauaguugagaau

SEQ ID NO: 2069715 - RNA, 19 nt, Artificial Sequence
  Description of Artificial Sequence: Synthetic oligonucleotide
  Antisense strand to SEQ ID NO: 2069714
auucucaacuauauuucac

SEQ ID NO: 2069716 - RNA, 19 nt, Artificial Sequence
  Description of Artificial Sequence: Synthetic oligonucleotide
  Sense strand starting at position 3675 of SEQ ID NO: 1881761
gagugcaauuucucugguu

SEQ ID NO: 2069717 - RNA, 19 nt, Artificial Sequence
  Description of Artificial Sequence: Synthetic oligonucleotide
  Antisense strand to SEQ ID NO: 2069716
aaccagagaaauugcacuc

SEQ ID NO: 2069718 - RNA, 19 nt, Artificial Sequence
  Description of Artificial Sequence: Synthetic oligonucleotide
  Sense strand starting at position 3676 of SEQ ID NO: 1881761
agugcaauuucucugguuu

SEQ ID NO: 2069719 - RNA, 19 nt, Artificial Sequence
  Description of Artificial Sequence: Synthetic oligonucleotide
  Antisense strand to SEQ ID NO: 2069718
aaaccagagaaauugcacu

SEQ ID NO: 2069720 - RNA, 19 nt, Artificial Sequence
  Description of Artificial Sequence: Synthetic oligonucleotide
  Sense strand starting at position 3677 of SEQ ID NO: 1881761
gugcaauuucucugguuuc

SEQ ID NO: 2069721 - RNA, 19 nt, Artificial Sequence
  Description of Artificial Sequence: Synthetic oligonucleotide
  Antisense strand to SEQ ID NO: 2069720
gaaaccagagaaauugcac

SEQ ID NO: 2069722 - RNA, 19 nt, Artificial Sequence
  Description of Artificial Sequence: Synthetic oligonucleotide
  Sense strand starting at position 3705 of SEQ ID NO: 1881761
guguaucauaauggugaga

SEQ ID NO: 2069723 - RNA, 19 nt, Artificial Sequence
  Description of Artificial Sequence: Synthetic oligonucleotide
  Antisense strand to SEQ ID NO: 2069722
ucucaccauuaugauacac

SEQ ID NO: 2069724 - RNA, 19 nt, Artificial Sequence
  Description of Artificial Sequence: Synthetic oligonucleotide
  Sense strand starting at position 3740 of SEQ ID NO: 1881761
cugagacaacugugcuaaa

SEQ ID NO: 2069725 - RNA, 19 nt, Artificial Sequence
  Description of Artificial Sequence: Synthetic oligonucleotide
  Antisense strand to SEQ ID NO: 2069724
uuuagcacaguugucucag

SEQ ID NO: 2069726 - RNA, 19 nt, Artificial Sequence
  Description of Artificial Sequence: Synthetic oligonucleotide
  Sense strand starting at position 3788 of SEQ ID NO: 1881761
aaggcuugccuggagauga

SEQ ID NO: 2069727 - RNA, 19 nt, Artificial Sequence
  Description of Artificial Sequence: Synthetic oligonucleotide
  Antisense strand to SEQ ID NO: 2069726
ucaucuccaggcaagccuu

SEQ ID NO: 2069728 - RNA, 19 nt, Artificial Sequence
  Description of Artificial Sequence: Synthetic oligonucleotide
  Sense strand starting at position 3898 of SEQ ID NO: 1881761
uuuccugaaugagcuagau

SEQ ID NO: 2069729 - RNA, 19 nt, Artificial Sequence
  Description of Artificial Sequence: Synthetic oligonucleotide
  Antisense strand to SEQ ID NO: 2069728
aucuagcucauucaggaaa

SEQ ID NO: 2069730 - RNA, 19 nt, Artificial Sequence
  Description of Artificial Sequence: Synthetic oligonucleotide
  Sense strand starting at position 3940 of SEQ ID NO: 1881761
ucagguagacugugacuau

SEQ ID NO: 2069731 - RNA, 19 nt, Artificial Sequence
  Description of Artificial Sequence: Synthetic oligonucleotide
  Antisense strand to SEQ ID NO: 2069730
auagucacagucuaccuga

SEQ ID NO: 2069732 - RNA, 19 nt, Artificial Sequence
  Description of Artificial Sequence: Synthetic oligonucleotide
  Sense strand starting at position 263 of SEQ ID NO: 1881763
acugcuuccacguaaguga

SEQ ID NO: 2069733 - RNA, 19 nt, Artificial Sequence
  Description of Artificial Sequence: Synthetic oligonucleotide
  Antisense strand to SEQ ID NO: 2069732
ucacuuacguggaagcagu

SEQ ID NO: 2069734 - RNA, 19 nt, Artificial Sequence
  Description of Artificial Sequence: Synthetic oligonucleotide
  Sense strand starting at position 274 of SEQ ID NO: 1881763
guaagugaccuagagcgua

SEQ ID NO: 2069735 - RNA, 19 nt, Artificial Sequence
  Description of Artificial Sequence: Synthetic oligonucleotide
  Antisense strand to SEQ ID NO: 2069734
uacgcucuaggucacuuac

SEQ ID NO: 2069736 - RNA, 19 nt, Artificial Sequence
  Description of Artificial Sequence: Synthetic oligonucleotide
  Sense strand starting at position 387 of SEQ ID NO: 1881763
aagagcuauuugggacuga

SEQ ID NO: 2069737 - RNA, 19 nt, Artificial Sequence
  Description of Artificial Sequence: Synthetic oligonucleotide
  Antisense strand to SEQ ID NO: 2069736
ucagucccaaauagcucuu

SEQ ID NO: 2069738 - RNA, 19 nt, Artificial Sequence
  Description of Artificial Sequence: Synthetic oligonucleotide
  Sense strand starting at position 388 of SEQ ID NO: 1881763
agagcuauuugggacugau

SEQ ID NO: 2069739 - RNA, 19 nt, Artificial Sequence
  Description of Artificial Sequence: Synthetic oligonucleotide
  Antisense strand to SEQ ID NO: 2069738
aucagucccaaauagcucu

SEQ ID NO: 2069740 - RNA, 19 nt, Artificial Sequence
  Description of Artificial Sequence: Synthetic oligonucleotide
  Sense strand starting at position 459 of SEQ ID NO: 1881763
uucguuuguggagaaauug

SEQ ID NO: 2069741 - RNA, 19 nt, Artificial Sequence
  Description of Artificial Sequence: Synthetic oligonucleotide
  Antisense strand to SEQ ID NO: 2069740
caauuucuccacaaacgaa

SEQ ID NO: 2069742 - RNA, 19 nt, Artificial Sequence
  Description of Artificial Sequence: Synthetic oligonucleotide
  Sense strand starting at position 493 of SEQ ID NO: 1881763
gggauauaugcguaugcaa

SEQ ID NO: 2069743 - RNA, 19 nt, Artificial Sequence
  Description of Artificial Sequence: Synthetic oligonucleotide
  Antisense strand to SEQ ID NO: 2069742
uugcauacgcauauauccc

SEQ ID NO: 2069744 - RNA, 19 nt, Artificial Sequence
  Description of Artificial Sequence: Synthetic oligonucleotide
  Sense strand starting at position 504 of SEQ ID NO: 1881763
guaugcaaaugucugauaa

SEQ ID NO: 2069745 - RNA, 19 nt, Artificial Sequence
  Description of Artificial Sequence: Synthetic oligonucleotide
  Antisense strand to SEQ ID NO: 2069744
uuaucagacauuugcauac

SEQ ID NO: 2069746 - RNA, 19 nt, Artificial Sequence
  Description of Artificial Sequence: Synthetic oligonucleotide
  Sense strand starting at position 614 of SEQ ID NO: 1881763
ccgcguguaccuguuugau

SEQ ID NO: 2069747 - RNA, 19 nt, Artificial Sequence
  Description of Artificial Sequence: Synthetic oligonucleotide
  Antisense strand to SEQ ID NO: 2069746
aucaaacagguacacgcgg

SEQ ID NO: 2069748 - RNA, 19 nt, Artificial Sequence
  Description of Artificial Sequence: Synthetic oligonucleotide
  Sense strand starting at position 1041 of SEQ ID NO: 1881763
acacguuaccucgcguaau

SEQ ID NO: 2069749 - RNA, 19 nt, Artificial Sequence
  Description of Artificial Sequence: Synthetic oligonucleotide
  Antisense strand to SEQ ID NO: 2069748
auuacgcgagguaacgugu

SEQ ID NO: 2069750 - RNA, 19 nt, Artificial Sequence
  Description of Artificial Sequence: Synthetic oligonucleotide
  Sense strand starting at position 1052 of SEQ ID NO: 1881763
cgcguaaugggcucagcaa

SEQ ID NO: 2069751 - RNA, 19 nt, Artificial Sequence
  Description of Artificial Sequence: Synthetic oligonucleotide
  Antisense strand to SEQ ID NO: 2069750
uugcugagcccauuacgcg

SEQ ID NO: 2069752 - RNA, 19 nt, Artificial Sequence
  Description of Artificial Sequence: Synthetic oligonucleotide
  Sense strand starting at position 1127 of SEQ ID NO: 1881763
uaaauaacuugcccgaguu

SEQ ID NO: 2069753 - RNA, 19 nt, Artificial Sequence
  Description of Artificial Sequence: Synthetic oligonucleotide
  Antisense strand to SEQ ID NO: 2069752
aacucgggcaaguuauuua

SEQ ID NO: 2069754 - RNA, 19 nt, Artificial Sequence
  Description of Artificial Sequence: Synthetic oligonucleotide
  Sense strand starting at position 1128 of SEQ ID NO: 1881763
aaauaacuugcccgaguuc

SEQ ID NO: 2069755 - RNA, 19 nt, Artificial Sequence
  Description of Artificial Sequence: Synthetic oligonucleotide
  Antisense strand to SEQ ID NO: 2069754
gaacucgggcaaguuauuu

SEQ ID NO: 2069756 - RNA, 19 nt, Artificial Sequence
  Description of Artificial Sequence: Synthetic oligonucleotide
  Sense strand starting at position 1169 of SEQ ID NO: 1881763
ggaaacgaauuccucucua

SEQ ID NO: 2069757 - RNA, 19 nt, Artificial Sequence
  Description of Artificial Sequence: Synthetic oligonucleotide
  Antisense strand to SEQ ID NO: 2069756
uagagaggaauucguuucc

SEQ ID NO: 2069758 - RNA, 19 nt, Artificial Sequence
  Description of Artificial Sequence: Synthetic oligonucleotide
  Sense strand starting at position 1510 of SEQ ID NO: 1881763
gcggaaggucuguagaucu

SEQ ID NO: 2069759 - RNA, 19 nt, Artificial Sequence
  Description of Artificial Sequence: Synthetic oligonucleotide
  Antisense strand to SEQ ID NO: 2069758
agaucuacagaccuuccgc

SEQ ID NO: 2069760 - RNA, 19 nt, Artificial Sequence
  Description of Artificial Sequence: Synthetic oligonucleotide
  Sense strand starting at position 1814 of SEQ ID NO: 1881763
ccggguggccgcuuuacua

SEQ ID NO: 2069761 - RNA, 19 nt, Artificial Sequence
  Description of Artificial Sequence: Synthetic oligonucleotide
  Antisense strand to SEQ ID NO: 2069760
uaguaaagcggccacccgg

SEQ ID NO: 2069762 - RNA, 19 nt, Artificial Sequence
  Description of Artificial Sequence: Synthetic oligonucleotide
  Sense strand starting at position 2333 of SEQ ID NO: 1881763
uuuguaaaggucugauccu

SEQ ID NO: 2069763 - RNA, 19 nt, Artificial Sequence
  Description of Artificial Sequence: Synthetic oligonucleotide
  Antisense strand to SEQ ID NO: 2069762
aggaucagaccuuuacaaa

SEQ ID NO: 2069764 - RNA, 19 nt, Artificial Sequence
  Description of Artificial Sequence: Synthetic oligonucleotide
  Sense strand starting at position 2342 of SEQ ID NO: 1881763
gucugauccugaguuccaa

SEQ ID NO: 2069765 - RNA, 19 nt, Artificial Sequence
  Description of Artificial Sequence: Synthetic oligonucleotide
  Antisense strand to SEQ ID NO: 2069764
uuggaacucaggaucagac

SEQ ID NO: 2069766 - RNA, 19 nt, Artificial Sequence
  Description of Artificial Sequence: Synthetic oligonucleotide
  Sense strand starting at position 2350 of SEQ ID NO: 1881763
cugaguuccaaacgaaagu

SEQ ID NO: 2069767 - RNA, 19 nt, Artificial Sequence
  Description of Artificial Sequence: Synthetic oligonucleotide
  Antisense strand to SEQ ID NO: 2069766
acuuucguuuggaacucag

SEQ ID NO: 2069768 - RNA, 19 nt, Artificial Sequence
  Description of Artificial Sequence: Synthetic oligonucleotide
  Sense strand starting at position 2376 of SEQ ID NO: 1881763
gaauucugucgacacggga

SEQ ID NO: 2069769 - RNA, 19 nt, Artificial Sequence
  Description of Artificial Sequence: Synthetic oligonucleotide
  Antisense strand to SEQ ID NO: 2069768
ucccgugucgacagaauuc

SEQ ID NO: 2069770 - RNA, 19 nt, Artificial Sequence
  Description of Artificial Sequence: Synthetic oligonucleotide
  Sense strand starting at position 2427 of SEQ ID NO: 1881763
guguuaauucgguugcguu

SEQ ID NO: 2069771 - RNA, 19 nt, Artificial Sequence
  Description of Artificial Sequence: Synthetic oligonucleotide
  Antisense strand to SEQ ID NO: 2069770
aacgcaaccgaauuaacac

SEQ ID NO: 2069772 - RNA, 19 nt, Artificial Sequence
  Description of Artificial Sequence: Synthetic oligonucleotide
  Sense strand starting at position 2525 of SEQ ID NO: 1881763
gccguuugugcugcggaau

SEQ ID NO: 2069773 - RNA, 19 nt, Artificial Sequence
  Description of Artificial Sequence: Synthetic oligonucleotide
  Antisense strand to SEQ ID NO: 2069772
auuccgcagcacaaacggc

SEQ ID NO: 2069774 - RNA, 19 nt, Artificial Sequence
  Description of Artificial Sequence: Synthetic oligonucleotide
  Sense strand starting at position 2566 of SEQ ID NO: 1881763
ccacgcuuucgcgcucaaa

SEQ ID NO: 2069775 - RNA, 19 nt, Artificial Sequence
  Description of Artificial Sequence: Synthetic oligonucleotide
  Antisense strand to SEQ ID NO: 2069774
uuugagcgcgaaagcgugg

SEQ ID NO: 2069776 - RNA, 19 nt, Artificial Sequence
  Description of Artificial Sequence: Synthetic oligonucleotide
  Sense strand starting at position 2691 of SEQ ID NO: 1881763
gcgguuuaagaacauuguu

SEQ ID NO: 2069777 - RNA, 19 nt, Artificial Sequence
  Description of Artificial Sequence: Synthetic oligonucleotide
  Antisense strand to SEQ ID NO: 2069776
aacaauguucuuaaaccgc

SEQ ID NO: 2069778 - RNA, 19 nt, Artificial Sequence
  Description of Artificial Sequence: Synthetic oligonucleotide
  Sense strand starting at position 2694 of SEQ ID NO: 1881763
guuuaagaacauuguugga

SEQ ID NO: 2069779 - RNA, 19 nt, Artificial Sequence
  Description of Artificial Sequence: Synthetic oligonucleotide
  Antisense strand to SEQ ID NO: 2069778
uccaacaauguucuuaaac

SEQ ID NO: 2069780 - RNA, 19 nt, Artificial Sequence
  Description of Artificial Sequence: Synthetic oligonucleotide
  Sense strand starting at position 2718 of SEQ ID NO: 1881763
gcauuucgaguuugaucga

SEQ ID NO: 2069781 - RNA, 19 nt, Artificial Sequence
  Description of Artificial Sequence: Synthetic oligonucleotide
  Antisense strand to SEQ ID NO: 2069780
ucgaucaaacucgaaaugc

SEQ ID NO: 2069782 - RNA, 19 nt, Artificial Sequence
  Description of Artificial Sequence: Synthetic oligonucleotide
  Sense strand starting at position 2920 of SEQ ID NO: 1881763
ggguuuaguccacagacuc

SEQ ID NO: 2069783 - RNA, 19 nt, Artificial Sequence
  Description of Artificial Sequence: Synthetic oligonucleotide
  Antisense strand to SEQ ID NO: 2069782
gagucuguggacuaaaccc

SEQ ID NO: 2069784 - RNA, 19 nt, Artificial Sequence
  Description of Artificial Sequence: Synthetic oligonucleotide
  Sense strand starting at position 2976 of SEQ ID NO: 1881763
gugaaucuuccugaggguc

SEQ ID NO: 2069785 - RNA, 19 nt, Artificial Sequence
  Description of Artificial Sequence: Synthetic oligonucleotide
  Antisense strand to SEQ ID NO: 2069784
gacccucaggaagauucac

SEQ ID NO: 2069786 - RNA, 19 nt, Artificial Sequence
  Description of Artificial Sequence: Synthetic oligonucleotide
  Sense strand starting at position 2988 of SEQ ID NO: 1881763
gagggucucugacccuaua

SEQ ID NO: 2069787 - RNA, 19 nt, Artificial Sequence
  Description of Artificial Sequence: Synthetic oligonucleotide
  Antisense strand to SEQ ID NO: 2069786
uauagggucagagacccuc

SEQ ID NO: 2069788 - RNA, 19 nt, Artificial Sequence
  Description of Artificial Sequence: Synthetic oligonucleotide
  Sense strand starting at position 3172 of SEQ ID NO: 1881763
ugauaaaugugucugcuca

SEQ ID NO: 2069789 - RNA, 19 nt, Artificial Sequence
  Description of Artificial Sequence: Synthetic oligonucleotide
  Antisense strand to SEQ ID NO: 2069788
ugagcagacacauuuauca

SEQ ID NO: 2069790 - RNA, 19 nt, Artificial Sequence
  Description of Artificial Sequence: Synthetic oligonucleotide
  Sense strand starting at position 3173 of SEQ ID NO: 1881763
gauaaaugugucugcucaa

SEQ ID NO: 2069791 - RNA, 19 nt, Artificial Sequence
  Description of Artificial Sequence: Synthetic oligonucleotide
  Antisense strand to SEQ ID NO: 2069790
uugagcagacacauuuauc

SEQ ID NO: 2069792 - RNA, 19 nt, Artificial Sequence
  Description of Artificial Sequence: Synthetic oligonucleotide
  Sense strand starting at position 3174 of SEQ ID NO: 1881763
auaaaugugucugcucaaa

SEQ ID NO: 2069793 - RNA, 19 nt, Artificial Sequence
  Description of Artificial Sequence: Synthetic oligonucleotide
  Antisense strand to SEQ ID NO: 2069792
uuugagcagacacauuuau

SEQ ID NO: 2069794 - RNA, 19 nt, Artificial Sequence
  Description of Artificial Sequence: Synthetic oligonucleotide
  Sense strand starting at position 3193 of SEQ ID NO: 1881763
guacaaguuucugucuaug

SEQ ID NO: 2069795 - RNA, 19 nt, Artificial Sequence
  Description of Artificial Sequence: Synthetic oligonucleotide
  Antisense strand to SEQ ID NO: 2069794
cauagacagaaacuuguac

SEQ ID NO: 2069796 - RNA, 19 nt, Artificial Sequence
  Description of Artificial Sequence: Synthetic oligonucleotide
  Sense strand starting at position 3195 of SEQ ID NO: 1881763
acaaguuucugucuaugaa

SEQ ID NO: 2069797 - RNA, 19 nt, Artificial Sequence
  Description of Artificial Sequence: Synthetic oligonucleotide
  Antisense strand to SEQ ID NO: 2069796
uucauagacagaaacuugu

SEQ ID NO: 2069798 - RNA, 19 nt, Artificial Sequence
  Description of Artificial Sequence: Synthetic oligonucleotide
  Sense strand starting at position 3306 of SEQ ID NO: 1881763
ccauaacucugagcaagcu

SEQ ID NO: 2069799 - RNA, 19 nt, Artificial Sequence
  Description of Artificial Sequence: Synthetic oligonucleotide
  Antisense strand to SEQ ID NO: 2069798
agcuugcucagaguuaugg

SEQ ID NO: 2069800 - RNA, 19 nt, Artificial Sequence
  Description of Artificial Sequence: Synthetic oligonucleotide
  Sense strand starting at position 3729 of SEQ ID NO: 1881763
cagacuauuguugggagga

SEQ ID NO: 2069801 - RNA, 19 nt, Artificial Sequence
  Description of Artificial Sequence: Synthetic oligonucleotide
  Antisense strand to SEQ ID NO: 2069800
uccucccaacaauagucug

SEQ ID NO: 2069802 - RNA, 19 nt, Artificial Sequence
  Description of Artificial Sequence: Synthetic oligonucleotide
  Sense strand starting at position 3795 of SEQ ID NO: 1881763
ccagacuucuuccuagaga

SEQ ID NO: 2069803 - RNA, 19 nt, Artificial Sequence
  Description of Artificial Sequence: Synthetic oligonucleotide
  Antisense strand to SEQ ID NO: 2069802
ucucuaggaagaagucugg

SEQ ID NO: 2069804 - RNA, 19 nt, Artificial Sequence
  Description of Artificial Sequence: Synthetic oligonucleotide
  Sense strand starting at position 3811 of SEQ ID NO: 1881763
agaagcuuucugggugaga

SEQ ID NO: 2069805 - RNA, 19 nt, Artificial Sequence
  Description of Artificial Sequence: Synthetic oligonucleotide
  Antisense strand to SEQ ID NO: 2069804
ucucacccagaaagcuucu

SEQ ID NO: 2069806 - RNA, 19 nt, Artificial Sequence
  Description of Artificial Sequence: Synthetic oligonucleotide
  Sense strand starting at position 3812 of SEQ ID NO: 1881763
gaagcuuucugggugagaa

SEQ ID NO: 2069807 - RNA, 19 nt, Artificial Sequence
  Description of Artificial Sequence: Synthetic oligonucleotide
  Antisense strand to SEQ ID NO: 2069806
uucucacccagaaagcuuc

SEQ ID NO: 2069808 - RNA, 19 nt, Artificial Sequence
  Description of Artificial Sequence: Synthetic oligonucleotide
  Sense strand starting at position 3813 of SEQ ID NO: 1881763
aagcuuucugggugagaag

SEQ ID NO: 2069809 - RNA, 19 nt, Artificial Sequence
  Description of Artificial Sequence: Synthetic oligonucleotide
  Antisense strand to SEQ ID NO: 2069808
cuucucacccagaaagcuu

SEQ ID NO: 2069810 - RNA, 19 nt, Artificial Sequence
  Description of Artificial Sequence: Synthetic oligonucleotide
  Sense strand starting at position 3814 of SEQ ID NO: 1881763
agcuuucugggugagaaga

SEQ ID NO: 2069811 - RNA, 19 nt, Artificial Sequence
  Description of Artificial Sequence: Synthetic oligonucleotide
  Antisense strand to SEQ ID NO: 2069810
ucuucucacccagaaagcu

SEQ ID NO: 2069812 - RNA, 19 nt, Artificial Sequence
  Description of Artificial Sequence: Synthetic oligonucleotide
  Sense strand starting at position 175 of SEQ ID NO: 1881762
aacuguuuauuggugaaag

SEQ ID NO: 2069813 - RNA, 19 nt, Artificial Sequence
  Description of Artificial Sequence: Synthetic oligonucleotide
  Antisense strand to SEQ ID NO: 2069812
cuuucaccaauaaacaguu

SEQ ID NO: 2069814 - RNA, 19 nt, Artificial Sequence
  Description of Artificial Sequence: Synthetic oligonucleotide
  Sense strand starting at position 177 of SEQ ID NO: 1881762
cuguuuauuggugaaagac

SEQ ID NO: 2069815 - RNA, 19 nt, Artificial Sequence
  Description of Artificial Sequence: Synthetic oligonucleotide
  Antisense strand to SEQ ID NO: 2069814
gucuuucaccaauaaacag

SEQ ID NO: 2069816 - RNA, 19 nt, Artificial Sequence
  Description of Artificial Sequence: Synthetic oligonucleotide
  Sense strand starting at position 241 of SEQ ID NO: 1881762
gcuaguaucguacacuauu

SEQ ID NO: 2069817 - RNA, 19 nt, Artificial Sequence
  Description of Artificial Sequence: Synthetic oligonucleotide
  Antisense strand to SEQ ID NO: 2069816
aauaguguacgauacuagc

SEQ ID NO: 2069818 - RNA, 19 nt, Artificial Sequence
  Description of Artificial Sequence: Synthetic oligonucleotide
  Sense strand starting at position 408 of SEQ ID NO: 1881762
gcacuucucgcagaucuga

SEQ ID NO: 2069819 - RNA, 19 nt, Artificial Sequence
  Description of Artificial Sequence: Synthetic oligonucleotide
  Antisense strand to SEQ ID NO: 2069818
ucagaucugcgagaagugc

SEQ ID NO: 2069820 - RNA, 19 nt, Artificial Sequence
  Description of Artificial Sequence: Synthetic oligonucleotide
  Sense strand starting at position 714 of SEQ ID NO: 1881762
cgugaaaugcuccaggaag

SEQ ID NO: 2069821 - RNA, 19 nt, Artificial Sequence
  Description of Artificial Sequence: Synthetic oligonucleotide
  Antisense strand to SEQ ID NO: 2069820
cuuccuggagcauuucacg

SEQ ID NO: 2069822 - RNA, 19 nt, Artificial Sequence
  Description of Artificial Sequence: Synthetic oligonucleotide
  Sense strand starting at position 989 of SEQ ID NO: 1881762
acugcuuccacguaaguga

SEQ ID NO: 2069823 - RNA, 19 nt, Artificial Sequence
  Description of Artificial Sequence: Synthetic oligonucleotide
  Antisense strand to SEQ ID NO: 2069822
ucacuuacguggaagcagu

SEQ ID NO: 2069824 - RNA, 19 nt, Artificial Sequence
  Description of Artificial Sequence: Synthetic oligonucleotide
  Sense strand starting at position 1000 of SEQ ID NO: 1881762
guaagugaccuagagcgua

SEQ ID NO: 2069825 - RNA, 19 nt, Artificial Sequence
  Description of Artificial Sequence: Synthetic oligonucleotide
  Antisense strand to SEQ ID NO: 2069824
uacgcucuaggucacuuac

SEQ ID NO: 2069826 - RNA, 19 nt, Artificial Sequence
  Description of Artificial Sequence: Synthetic oligonucleotide
  Sense strand starting at position 1113 of SEQ ID NO: 1881762
aagagcuauuugggacuga

SEQ ID NO: 2069827 - RNA, 19 nt, Artificial Sequence
  Description of Artificial Sequence: Synthetic oligonucleotide
  Antisense strand to SEQ ID NO: 2069826
ucagucccaaauagcucuu

SEQ ID NO: 2069828 - RNA, 19 nt, Artificial Sequence
  Description of Artificial Sequence: Synthetic oligonucleotide
  Sense strand starting at position 1114 of SEQ ID NO: 1881762
agagcuauuugggacugau

SEQ ID NO: 2069829 - RNA, 19 nt, Artificial Sequence
  Description of Artificial Sequence: Synthetic oligonucleotide
  Antisense strand to SEQ ID NO: 2069828
aucagucccaaauagcucu

SEQ ID NO: 2069830 - RNA, 19 nt, Artificial Sequence
  Description of Artificial Sequence: Synthetic oligonucleotide
  Sense strand starting at position 1185 of SEQ ID NO: 1881762
uucguuuguggagaaauug

SEQ ID NO: 2069831 - RNA, 19 nt, Artificial Sequence
  Description of Artificial Sequence: Synthetic oligonucleotide
  Antisense strand to SEQ ID NO: 2069830
caauuucuccacaaacgaa

SEQ ID NO: 2069832 - RNA, 19 nt, Artificial Sequence
  Description of Artificial Sequence: Synthetic oligonucleotide
  Sense strand starting at position 1218 of SEQ ID NO: 1881762
agggauauaugcguaugca

SEQ ID NO: 2069833 - RNA, 19 nt, Artificial Sequence
  Description of Artificial Sequence: Synthetic oligonucleotide
  Antisense strand to SEQ ID NO: 2069832
ugcauacgcauauaucccu

SEQ ID NO: 2069834 - RNA, 19 nt, Artificial Sequence
  Description of Artificial Sequence: Synthetic oligonucleotide
  Sense strand starting at position 1219 of SEQ ID NO: 1881762
gggauauaugcguaugcaa

SEQ ID NO: 2069835 - RNA, 19 nt, Artificial Sequence
  Description of Artificial Sequence: Synthetic oligonucleotide
  Antisense strand to SEQ ID NO: 2069834
uugcauacgcauauauccc

SEQ ID NO: 2069836 - RNA, 19 nt, Artificial Sequence
  Description of Artificial Sequence: Synthetic oligonucleotide
  Sense strand starting at position 1230 of SEQ ID NO: 1881762
guaugcaaaugucugauaa

SEQ ID NO: 2069837 - RNA, 19 nt, Artificial Sequence
  Description of Artificial Sequence: Synthetic oligonucleotide
  Antisense strand to SEQ ID NO: 2069836
uuaucagacauuugcauac

SEQ ID NO: 2069838 - RNA, 19 nt, Artificial Sequence
  Description of Artificial Sequence: Synthetic oligonucleotide
  Sense strand starting at position 1340 of SEQ ID NO: 1881762
ccgcguguaccuguuugau

SEQ ID NO: 2069839 - RNA, 19 nt, Artificial Sequence
  Description of Artificial Sequence: Synthetic oligonucleotide
  Antisense strand to SEQ ID NO: 2069838
aucaaacagguacacgcgg

SEQ ID NO: 2069840 - RNA, 19 nt, Artificial Sequence
  Description of Artificial Sequence: Synthetic oligonucleotide
  Sense strand starting at position 1767 of SEQ ID NO: 1881762
acacguuaccucgcguaau

SEQ ID NO: 2069841 - RNA, 19 nt, Artificial Sequence
  Description of Artificial Sequence: Synthetic oligonucleotide
  Antisense strand to SEQ ID NO: 2069840
auuacgcgagguaacgugu

SEQ ID NO: 2069842 - RNA, 19 nt, Artificial Sequence
  Description of Artificial Sequence: Synthetic oligonucleotide
  Sense strand starting at position 1778 of SEQ ID NO: 1881762
cgcguaaugggcucagcaa

SEQ ID NO: 2069843 - RNA, 19 nt, Artificial Sequence
  Description of Artificial Sequence: Synthetic oligonucleotide
  Antisense strand to SEQ ID NO: 2069842
uugcugagcccauuacgcg

SEQ ID NO: 2069844 - RNA, 19 nt, Artificial Sequence
  Description of Artificial Sequence: Synthetic oligonucleotide
  Sense strand starting at position 1853 of SEQ ID NO: 1881762
uaaauaacuugcccgaguu

SEQ ID NO: 2069845 - RNA, 19 nt, Artificial Sequence
  Description of Artificial Sequence: Synthetic oligonucleotide
  Antisense strand to SEQ ID NO: 2069844
aacucgggcaaguuauuua

SEQ ID NO: 2069846 - RNA, 19 nt, Artificial Sequence
  Description of Artificial Sequence: Synthetic oligonucleotide
  Sense strand starting at position 1854 of SEQ ID NO: 1881762
aaauaacuugcccgaguuc

SEQ ID NO: 2069847 - RNA, 19 nt, Artificial Sequence
  Description of Artificial Sequence: Synthetic oligonucleotide
  Antisense strand to SEQ ID NO: 2069846
gaacucgggcaaguuauuu

SEQ ID NO: 2069848 - RNA, 19 nt, Artificial Sequence
  Description of Artificial Sequence: Synthetic oligonucleotide
  Sense strand starting at position 1895 of SEQ ID NO: 1881762
ggaaacgaauuccucucua

SEQ ID NO: 2069849 - RNA, 19 nt, Artificial Sequence
  Description of Artificial Sequence: Synthetic oligonucleotide
  Antisense strand to SEQ ID NO: 2069848
uagagaggaauucguuucc

SEQ ID NO: 2069850 - RNA, 19 nt, Artificial Sequence
  Description of Artificial Sequence: Synthetic oligonucleotide
  Sense strand starting at position 2236 of SEQ ID NO: 1881762
gcggaaggucuguagaucu

SEQ ID NO: 2069851 - RNA, 19 nt, Artificial Sequence
  Description of Artificial Sequence: Synthetic oligonucleotide
  Antisense strand to SEQ ID NO: 2069850
agaucuacagaccuuccgc

SEQ ID NO: 2069852 - RNA, 19 nt, Artificial Sequence
  Description of Artificial Sequence: Synthetic oligonucleotide
  Sense strand starting at position 2540 of SEQ ID NO: 1881762
ccggguggccgcuuuacua

SEQ ID NO: 2069853 - RNA, 19 nt, Artificial Sequence
  Description of Artificial Sequence: Synthetic oligonucleotide
  Antisense strand to SEQ ID NO: 2069852
uaguaaagcggccacccgg

SEQ ID NO: 2069854 - RNA, 19 nt, Artificial Sequence
  Description of Artificial Sequence: Synthetic oligonucleotide
  Sense strand starting at position 3059 of SEQ ID NO: 1881762
uuuguaaaggucugauccu

SEQ ID NO: 2069855 - RNA, 19 nt, Artificial Sequence
  Description of Artificial Sequence: Synthetic oligonucleotide
  Antisense strand to SEQ ID NO: 2069854
aggaucagaccuuuacaaa

SEQ ID NO: 2069856 - RNA, 19 nt, Artificial Sequence
  Description of Artificial Sequence: Synthetic oligonucleotide
  Sense strand starting at position 3068 of SEQ ID NO: 1881762
gucugauccugaguuccaa

SEQ ID NO: 2069857 - RNA, 19 nt, Artificial Sequence
  Description of Artificial Sequence: Synthetic oligonucleotide
  Antisense strand to SEQ ID NO: 2069856
uuggaacucaggaucagac

SEQ ID NO: 2069858 - RNA, 19 nt, Artificial Sequence
  Description of Artificial Sequence: Synthetic oligonucleotide
  Sense strand starting at position 3076 of SEQ ID NO: 1881762
cugaguuccaaacgaaagu

SEQ ID NO: 2069859 - RNA, 19 nt, Artificial Sequence
  Description of Artificial Sequence: Synthetic oligonucleotide
  Antisense strand to SEQ ID NO: 2069858
acuuucguuuggaacucag

SEQ ID NO: 2069860 - RNA, 19 nt, Artificial Sequence
  Description of Artificial Sequence: Synthetic oligonucleotide
  Sense strand starting at position 3102 of SEQ ID NO: 1881762
gaauucugucgacacggga

SEQ ID NO: 2069861 - RNA, 19 nt, Artificial Sequence
  Description of Artificial Sequence: Synthetic oligonucleotide
  Antisense strand to SEQ ID NO: 2069860
ucccgugucgacagaauuc

SEQ ID NO: 2069862 - RNA, 19 nt, Artificial Sequence
  Description of Artificial Sequence: Synthetic oligonucleotide
  Sense strand starting at position 3153 of SEQ ID NO: 1881762
guguuaauucgguugcguu

SEQ ID NO: 2069863 - RNA, 19 nt, Artificial Sequence
  Description of Artificial Sequence: Synthetic oligonucleotide
  Antisense strand to SEQ ID NO: 2069862
aacgcaaccgaauuaacac

SEQ ID NO: 2069864 - RNA, 19 nt, Artificial Sequence
  Description of Artificial Sequence: Synthetic oligonucleotide
  Sense strand starting at position 3251 of SEQ ID NO: 1881762
gccguuugugcugcggaau

SEQ ID NO: 2069865 - RNA, 19 nt, Artificial Sequence
  Description of Artificial Sequence: Synthetic oligonucleotide
  Antisense strand to SEQ ID NO: 2069864
auuccgcagcacaaacggc

SEQ ID NO: 2069866 - RNA, 19 nt, Artificial Sequence
  Description of Artificial Sequence: Synthetic oligonucleotide
  Sense strand starting at position 3292 of SEQ ID NO: 1881762
ccacgcuuucgcgcucaaa

SEQ ID NO: 2069867 - RNA, 19 nt, Artificial Sequence
  Description of Artificial Sequence: Synthetic oligonucleotide
  Antisense strand to SEQ ID NO: 2069866
uuugagcgcgaaagcgugg

SEQ ID NO: 2069868 - RNA, 19 nt, Artificial Sequence
  Description of Artificial Sequence: Synthetic oligonucleotide
  Sense strand starting at position 3417 of SEQ ID NO: 1881762
gcgguuuaagaacauuguu

SEQ ID NO: 2069869 - RNA, 19 nt, Artificial Sequence
  Description of Artificial Sequence: Synthetic oligonucleotide
  Antisense strand to SEQ ID NO: 2069868
aacaauguucuuaaaccgc

SEQ ID NO: 2069870 - RNA, 19 nt, Artificial Sequence
  Description of Artificial Sequence: Synthetic oligonucleotide
  Sense strand starting at position 3420 of SEQ ID NO: 1881762
guuuaagaacauuguugga

SEQ ID NO: 2069871 - RNA, 19 nt, Artificial Sequence
  Description of Artificial Sequence: Synthetic oligonucleotide
  Antisense strand to SEQ ID NO: 2069870
uccaacaauguucuuaaac

SEQ ID NO: 2069872 - RNA, 19 nt, Artificial Sequence
  Description of Artificial Sequence: Synthetic oligonucleotide
  Sense strand starting at position 3444 of SEQ ID NO: 1881762
gcauuucgaguuugaucga

SEQ ID NO: 2069873 - RNA, 19 nt, Artificial Sequence
  Description of Artificial Sequence: Synthetic oligonucleotide
  Antisense strand to SEQ ID NO: 2069872
ucgaucaaacucgaaaugc

SEQ ID NO: 2069874 - RNA, 19 nt, Artificial Sequence
  Description of Artificial Sequence: Synthetic oligonucleotide
  Sense strand starting at position 3447 of SEQ ID NO: 1881762
uuucgaguuugaucgaauu

SEQ ID NO: 2069875 - RNA, 19 nt, Artificial Sequence
  Description of Artificial Sequence: Synthetic oligonucleotide
  Antisense strand to SEQ ID NO: 2069874
aauucgaucaaacucgaaa

SEQ ID NO: 2069876 - RNA, 19 nt, Artificial Sequence
  Description of Artificial Sequence: Synthetic oligonucleotide
  Sense strand starting at position 3646 of SEQ ID NO: 1881762
ggguuuaguccacagacuc

SEQ ID NO: 2069877 - RNA, 19 nt, Artificial Sequence
  Description of Artificial Sequence: Synthetic oligonucleotide
  Antisense strand to SEQ ID NO: 2069876
gagucuguggacuaaaccc

SEQ ID NO: 2069878 - RNA, 19 nt, Artificial Sequence
  Description of Artificial Sequence: Synthetic oligonucleotide
  Sense strand starting at position 3702 of SEQ ID NO: 1881762
gugaaucuuccugaggguc

SEQ ID NO: 2069879 - RNA, 19 nt, Artificial Sequence
  Description of Artificial Sequence: Synthetic oligonucleotide
  Antisense strand to SEQ ID NO: 2069878
gacccucaggaagauucac

SEQ ID NO: 2069880 - RNA, 19 nt, Artificial Sequence
  Description of Artificial Sequence: Synthetic oligonucleotide
  Sense strand starting at position 3714 of SEQ ID NO: 1881762
gagggucucugacccuaua

SEQ ID NO: 2069881 - RNA, 19 nt, Artificial Sequence
  Description of Artificial Sequence: Synthetic oligonucleotide
  Antisense strand to SEQ ID NO: 2069880
uauagggucagagacccuc

SEQ ID NO: 2069882 - RNA, 19 nt, Artificial Sequence
  Description of Artificial Sequence: Synthetic oligonucleotide
  Sense strand starting at position 3898 of SEQ ID NO: 1881762
ugauaaaugugucugcuca

SEQ ID NO: 2069883 - RNA, 19 nt, Artificial Sequence
  Description of Artificial Sequence: Synthetic oligonucleotide
  Antisense strand to SEQ ID NO: 2069882
ugagcagacacauuuauca

SEQ ID NO: 2069884 - RNA, 19 nt, Artificial Sequence
  Description of Artificial Sequence: Synthetic oligonucleotide
  Sense strand starting at position 3899 of SEQ ID NO: 1881762
gauaaaugugucugcucaa

SEQ ID NO: 2069885 - RNA, 19 nt, Artificial Sequence
  Description of Artificial Sequence: Synthetic oligonucleotide
  Antisense strand to SEQ ID NO: 2069884
uugagcagacacauuuauc

SEQ ID NO: 2069886 - RNA, 19 nt, Artificial Sequence
  Description of Artificial Sequence: Synthetic oligonucleotide
  Sense strand starting at position 3900 of SEQ ID NO: 1881762
auaaaugugucugcucaaa

SEQ ID NO: 2069887 - RNA, 19 nt, Artificial Sequence
  Description of Artificial Sequence: Synthetic oligonucleotide
  Antisense strand to SEQ ID NO: 2069886
uuugagcagacacauuuau

SEQ ID NO: 2069888 - RNA, 19 nt, Artificial Sequence
  Description of Artificial Sequence: Synthetic oligonucleotide
  Sense strand starting at position 3919 of SEQ ID NO: 1881762
guacaaguuucugucuaug

SEQ ID NO: 2069889 - RNA, 19 nt, Artificial Sequence
  Description of Artificial Sequence: Synthetic oligonucleotide
  Antisense strand to SEQ ID NO: 2069888
cauagacagaaacuuguac

SEQ ID NO: 2069890 - RNA, 19 nt, Artificial Sequence
  Description of Artificial Sequence: Synthetic oligonucleotide
  Sense strand starting at position 3921 of SEQ ID NO: 1881762
acaaguuucugucuaugaa

SEQ ID NO: 2069891 - RNA, 19 nt, Artificial Sequence
  Description of Artificial Sequence: Synthetic oligonucleotide
  Antisense strand to SEQ ID NO: 2069890
uucauagacagaaacuugu

SEQ ID NO: 2069892 - RNA, 19 nt, Artificial Sequence
  Description of Artificial Sequence: Synthetic oligonucleotide
  Sense strand starting at position 37 of SEQ ID NO: 1881764
aagaaaucgguauguuccu

SEQ ID NO: 2069893 - RNA, 19 nt, Artificial Sequence
  Description of Artificial Sequence: Synthetic oligonucleotide
  Antisense strand to SEQ ID NO: 2069892
aggaacauaccgauuucuu

SEQ ID NO: 2069894 - RNA, 19 nt, Artificial Sequence
  Description of Artificial Sequence: Synthetic oligonucleotide
  Sense strand starting at position 54 of SEQ ID NO: 1881764
cuuugcuuccaagaaugaa

SEQ ID NO: 2069895 - RNA, 19 nt, Artificial Sequence
  Description of Artificial Sequence: Synthetic oligonucleotide
  Antisense strand to SEQ ID NO: 2069894
uucauucuuggaagcaaag

SEQ ID NO: 2069896 - RNA, 19 nt, Artificial Sequence
  Description of Artificial Sequence: Synthetic oligonucleotide
  Sense strand starting at position 120 of SEQ ID NO: 1881764
guuaaaugcgcccucuagu

SEQ ID NO: 2069897 - RNA, 19 nt, Artificial Sequence
  Description of Artificial Sequence: Synthetic oligonucleotide
  Antisense strand to SEQ ID NO: 2069896
acuagagggcgcauuuaac

SEQ ID NO: 2069898 - RNA, 19 nt, Artificial Sequence
  Description of Artificial Sequence: Synthetic oligonucleotide
  Sense strand starting at position 140 of SEQ ID NO: 1881764
guauguuauguguaaguac

SEQ ID NO: 2069899 - RNA, 19 nt, Artificial Sequence
  Description of Artificial Sequence: Synthetic oligonucleotide
  Antisense strand to SEQ ID NO: 2069898
guacuuacacauaacauac

SEQ ID NO: 2069900 - RNA, 19 nt, Artificial Sequence
  Description of Artificial Sequence: Synthetic oligonucleotide
  Sense strand starting at position 206 of SEQ ID NO: 1881764
gaaaccagcugguugagau

SEQ ID NO: 2069901 - RNA, 19 nt, Artificial Sequence
  Description of Artificial Sequence: Synthetic oligonucleotide
  Antisense strand to SEQ ID NO: 2069900
aucucaaccagcugguuuc

SEQ ID NO: 2069902 - RNA, 19 nt, Artificial Sequence
  Description of Artificial Sequence: Synthetic oligonucleotide
  Sense strand starting at position 213 of SEQ ID NO: 1881764
gcugguugagaucauuaca

SEQ ID NO: 2069903 - RNA, 19 nt, Artificial Sequence
  Description of Artificial Sequence: Synthetic oligonucleotide
  Antisense strand to SEQ ID NO: 2069902
uguaaugaucucaaccagc

SEQ ID NO: 2069904 - RNA, 19 nt, Artificial Sequence
  Description of Artificial Sequence: Synthetic oligonucleotide
  Sense strand starting at position 258 of SEQ ID NO: 1881764
uuaggaaguucccuaucuu

SEQ ID NO: 2069905 - RNA, 19 nt, Artificial Sequence
  Description of Artificial Sequence: Synthetic oligonucleotide
  Antisense strand to SEQ ID NO: 2069904
aagauagggaacuuccuaa

SEQ ID NO: 2069906 - RNA, 19 nt, Artificial Sequence
  Description of Artificial Sequence: Synthetic oligonucleotide
  Sense strand starting at position 329 of SEQ ID NO: 1881764
ccauaugaacuacgguauu

SEQ ID NO: 2069907 - RNA, 19 nt, Artificial Sequence
  Description of Artificial Sequence: Synthetic oligonucleotide
  Antisense strand to SEQ ID NO: 2069906
aauaccguaguucauaugg

SEQ ID NO: 2069908 - RNA, 19 nt, Artificial Sequence
  Description of Artificial Sequence: Synthetic oligonucleotide
  Sense strand starting at position 593 of SEQ ID NO: 1881764
gcgauaucccaucacuacu

SEQ ID NO: 2069909 - RNA, 19 nt, Artificial Sequence
  Description of Artificial Sequence: Synthetic oligonucleotide
  Antisense strand to SEQ ID NO: 2069908
aguagugaugggauaucgc

SEQ ID NO: 2069910 - RNA, 19 nt, Artificial Sequence
  Description of Artificial Sequence: Synthetic oligonucleotide
  Sense strand starting at position 879 of SEQ ID NO: 1881764
aaaugugaaccgugucaua

SEQ ID NO: 2069911 - RNA, 19 nt, Artificial Sequence
  Description of Artificial Sequence: Synthetic oligonucleotide
  Antisense strand to SEQ ID NO: 2069910
uaugacacgguucacauuu

SEQ ID NO: 2069912 - RNA, 19 nt, Artificial Sequence
  Description of Artificial Sequence: Synthetic oligonucleotide
  Sense strand starting at position 958 of SEQ ID NO: 1881764
cuggaaggcuuucuugaga

SEQ ID NO: 2069913 - RNA, 19 nt, Artificial Sequence
  Description of Artificial Sequence: Synthetic oligonucleotide
  Antisense strand to SEQ ID NO: 2069912
ucucaagaaagccuuccag

SEQ ID NO: 2069914 - RNA, 19 nt, Artificial Sequence
  Description of Artificial Sequence: Synthetic oligonucleotide
  Sense strand starting at position 1055 of SEQ ID NO: 1881764
aauguaaaggccuggagau

SEQ ID NO: 2069915 - RNA, 19 nt, Artificial Sequence
  Description of Artificial Sequence: Synthetic oligonucleotide
  Antisense strand to SEQ ID NO: 2069914
aucuccaggccuuuacauu

SEQ ID NO: 2069916 - RNA, 19 nt, Artificial Sequence
  Description of Artificial Sequence: Synthetic oligonucleotide
  Sense strand starting at position 1240 of SEQ ID NO: 1881764
gcaguacugcuuuaaaugu

SEQ ID NO: 2069917 - RNA, 19 nt, Artificial Sequence
  Description of Artificial Sequence: Synthetic oligonucleotide
  Antisense strand to SEQ ID NO: 2069916
acauuuaaagcaguacugc

SEQ ID NO: 2069918 - RNA, 19 nt, Artificial Sequence
  Description of Artificial Sequence: Synthetic oligonucleotide
  Sense strand starting at position 1422 of SEQ ID NO: 1881764
gguuaaauggauugagcaa

SEQ ID NO: 2069919 - RNA, 19 nt, Artificial Sequence
  Description of Artificial Sequence: Synthetic oligonucleotide
  Antisense strand to SEQ ID NO: 2069918
uugcucaauccauuuaacc

SEQ ID NO: 2069920 - RNA, 19 nt, Artificial Sequence
  Description of Artificial Sequence: Synthetic oligonucleotide
  Sense strand starting at position 1435 of SEQ ID NO: 1881764
gagcaaacuguugagagua

SEQ ID NO: 2069921 - RNA, 19 nt, Artificial Sequence
  Description of Artificial Sequence: Synthetic oligonucleotide
  Antisense strand to SEQ ID NO: 2069920
uacucucaacaguuugcuc

SEQ ID NO: 2069922 - RNA, 19 nt, Artificial Sequence
  Description of Artificial Sequence: Synthetic oligonucleotide
  Sense strand starting at position 1450 of SEQ ID NO: 1881764
aguagugguccugguaaau

SEQ ID NO: 2069923 - RNA, 19 nt, Artificial Sequence
  Description of Artificial Sequence: Synthetic oligonucleotide
  Antisense strand to SEQ ID NO: 2069922
auuuaccaggaccacuacu

SEQ ID NO: 2069924 - RNA, 19 nt, Artificial Sequence
  Description of Artificial Sequence: Synthetic oligonucleotide
  Sense strand starting at position 1525 of SEQ ID NO: 1881764
aaaugagccguuuggaaau

SEQ ID NO: 2069925 - RNA, 19 nt, Artificial Sequence
  Description of Artificial Sequence: Synthetic oligonucleotide
  Antisense strand to SEQ ID NO: 2069924
auuuccaaacggcucauuu

SEQ ID NO: 2069926 - RNA, 19 nt, Artificial Sequence
  Description of Artificial Sequence: Synthetic oligonucleotide
  Sense strand starting at position 1563 of SEQ ID NO: 1881764
aagagaacuuguuuggcua

SEQ ID NO: 2069927 - RNA, 19 nt, Artificial Sequence
  Description of Artificial Sequence: Synthetic oligonucleotide
  Antisense strand to SEQ ID NO: 2069926
uagccaaacaaguucucuu

SEQ ID NO: 2069928 - RNA, 19 nt, Artificial Sequence
  Description of Artificial Sequence: Synthetic oligonucleotide
  Sense strand starting at position 1564 of SEQ ID NO: 1881764
agagaacuuguuuggcuac

SEQ ID NO: 2069929 - RNA, 19 nt, Artificial Sequence
  Description of Artificial Sequence: Synthetic oligonucleotide
  Antisense strand to SEQ ID NO: 2069928
guagccaaacaaguucucu

SEQ ID NO: 2069930 - RNA, 19 nt, Artificial Sequence
  Description of Artificial Sequence: Synthetic oligonucleotide
  Sense strand starting at position 1566 of SEQ ID NO: 1881764
agaacuuguuuggcuacaa

SEQ ID NO: 2069931 - RNA, 19 nt, Artificial Sequence
  Description of Artificial Sequence: Synthetic oligonucleotide
  Antisense strand to SEQ ID NO: 2069930
uuguagccaaacaaguucu

SEQ ID NO: 2069932 - RNA, 19 nt, Artificial Sequence
  Description of Artificial Sequence: Synthetic oligonucleotide
  Sense strand starting at position 1567 of SEQ ID NO: 1881764
gaacuuguuuggcuacaaa

SEQ ID NO: 2069933 - RNA, 19 nt, Artificial Sequence
  Description of Artificial Sequence: Synthetic oligonucleotide
  Antisense strand to SEQ ID NO: 2069932
uuuguagccaaacaaguuc

SEQ ID NO: 2069934 - RNA, 19 nt, Artificial Sequence
  Description of Artificial Sequence: Synthetic oligonucleotide
  Sense strand starting at position 1597 of SEQ ID NO: 1881764
uuaauugaaugcucaacga

SEQ ID NO: 2069935 - RNA, 19 nt, Artificial Sequence
  Description of Artificial Sequence: Synthetic oligonucleotide
  Antisense strand to SEQ ID NO: 2069934
ucguugagcauucaauuaa

SEQ ID NO: 2069936 - RNA, 19 nt, Artificial Sequence
  Description of Artificial Sequence: Synthetic oligonucleotide
  Sense strand starting at position 1728 of SEQ ID NO: 1881764
ccuggaauguccuuaacuc

SEQ ID NO: 2069937 - RNA, 19 nt, Artificial Sequence
  Description of Artificial Sequence: Synthetic oligonucleotide
  Antisense strand to SEQ ID NO: 2069936
gaguuaaggacauuccagg

SEQ ID NO: 2069938 - RNA, 19 nt, Artificial Sequence
  Description of Artificial Sequence: Synthetic oligonucleotide
  Sense strand starting at position 2486 of SEQ ID NO: 1881764
gguaaaguggcauggaguu

SEQ ID NO: 2069939 - RNA, 19 nt, Artificial Sequence
  Description of Artificial Sequence: Synthetic oligonucleotide
  Antisense strand to SEQ ID NO: 2069938
aacuccaugccacuuuacc

SEQ ID NO: 2069940 - RNA, 19 nt, Artificial Sequence
  Description of Artificial Sequence: Synthetic oligonucleotide
  Sense strand starting at position 2589 of SEQ ID NO: 1881764
cagggaugcuggucuuaaa

SEQ ID NO: 2069941 - RNA, 19 nt, Artificial Sequence
  Description of Artificial Sequence: Synthetic oligonucleotide
  Antisense strand to SEQ ID NO: 2069940
uuuaagaccagcaucccug

SEQ ID NO: 2069942 - RNA, 19 nt, Artificial Sequence
  Description of Artificial Sequence: Synthetic oligonucleotide
  Sense strand starting at position 2993 of SEQ ID NO: 1881764
cguuucgugguugugugaa

SEQ ID NO: 2069943 - RNA, 19 nt, Artificial Sequence
  Description of Artificial Sequence: Synthetic oligonucleotide
  Antisense strand to SEQ ID NO: 2069942
uucacacaaccacgaaacg

SEQ ID NO: 2069944 - RNA, 19 nt, Artificial Sequence
  Description of Artificial Sequence: Synthetic oligonucleotide
  Sense strand starting at position 3075 of SEQ ID NO: 1881764
ucuacagaccuguacagua

SEQ ID NO: 2069945 - RNA, 19 nt, Artificial Sequence
  Description of Artificial Sequence: Synthetic oligonucleotide
  Antisense strand to SEQ ID NO: 2069944
uacuguacaggucuguaga

SEQ ID NO: 2069946 - RNA, 19 nt, Artificial Sequence
  Description of Artificial Sequence: Synthetic oligonucleotide
  Sense strand starting at position 3080 of SEQ ID NO: 1881764
agaccuguacaguauaacu

SEQ ID NO: 2069947 - RNA, 19 nt, Artificial Sequence
  Description of Artificial Sequence: Synthetic oligonucleotide
  Antisense strand to SEQ ID NO: 2069946
aguuauacuguacaggucu

SEQ ID NO: 2069948 - RNA, 19 nt, Artificial Sequence
  Description of Artificial Sequence: Synthetic oligonucleotide
  Sense strand starting at position 3122 of SEQ ID NO: 1881764
aaaggaugguguguaucua

SEQ ID NO: 2069949 - RNA, 19 nt, Artificial Sequence
  Description of Artificial Sequence: Synthetic oligonucleotide
  Antisense strand to SEQ ID NO: 2069948
uagauacacaccauccuuu

SEQ ID NO: 2069950 - RNA, 19 nt, Artificial Sequence
  Description of Artificial Sequence: Synthetic oligonucleotide
  Sense strand starting at position 3123 of SEQ ID NO: 1881764
aaggaugguguguaucuaa

SEQ ID NO: 2069951 - RNA, 19 nt, Artificial Sequence
  Description of Artificial Sequence: Synthetic oligonucleotide
  Antisense strand to SEQ ID NO: 2069950
uuagauacacaccauccuu

SEQ ID NO: 2069952 - RNA, 19 nt, Artificial Sequence
  Description of Artificial Sequence: Synthetic oligonucleotide
  Sense strand starting at position 3126 of SEQ ID NO: 1881764
gaugguguguaucuaaaca

SEQ ID NO: 2069953 - RNA, 19 nt, Artificial Sequence
  Description of Artificial Sequence: Synthetic oligonucleotide
  Antisense strand to SEQ ID NO: 2069952
uguuuagauacacaccauc

SEQ ID NO: 2069954 - RNA, 19 nt, Artificial Sequence
  Description of Artificial Sequence: Synthetic oligonucleotide
  Sense strand starting at position 3222 of SEQ ID NO: 1881764
agggcugucgguagcuauu

SEQ ID NO: 2069955 - RNA, 19 nt, Artificial Sequence
  Description of Artificial Sequence: Synthetic oligonucleotide
  Antisense strand to SEQ ID NO: 2069954
aauagcuaccgacagcccu

SEQ ID NO: 2069956 - RNA, 19 nt, Artificial Sequence
  Description of Artificial Sequence: Synthetic oligonucleotide
  Sense strand starting at position 3254 of SEQ ID NO: 1881764
agugguaugugagugugaa

SEQ ID NO: 2069957 - RNA, 19 nt, Artificial Sequence
  Description of Artificial Sequence: Synthetic oligonucleotide
  Antisense strand to SEQ ID NO: 2069956
uucacacucacauaccacu

SEQ ID NO: 2069958 - RNA, 19 nt, Artificial Sequence
  Description of Artificial Sequence: Synthetic oligonucleotide
  Sense strand starting at position 3270 of SEQ ID NO: 1881764
gaaggccuacgauauuauu

SEQ ID NO: 2069959 - RNA, 19 nt, Artificial Sequence
  Description of Artificial Sequence: Synthetic oligonucleotide
  Antisense strand to SEQ ID NO: 2069958
aauaauaucguaggccuuc

SEQ ID NO: 2069960 - RNA, 19 nt, Artificial Sequence
  Description of Artificial Sequence: Synthetic oligonucleotide
  Sense strand starting at position 3290 of SEQ ID NO: 1881764
aggguauuacuguacacua

SEQ ID NO: 2069961 - RNA, 19 nt, Artificial Sequence
  Description of Artificial Sequence: Synthetic oligonucleotide
  Antisense strand to SEQ ID NO: 2069960
uaguguacaguaauacccu

SEQ ID NO: 2069962 - RNA, 19 nt, Artificial Sequence
  Description of Artificial Sequence: Synthetic oligonucleotide
  Sense strand starting at position 3313 of SEQ ID NO: 1881764
agacuuuauaaaugcggua

SEQ ID NO: 2069963 - RNA, 19 nt, Artificial Sequence
  Description of Artificial Sequence: Synthetic oligonucleotide
  Antisense strand to SEQ ID NO: 2069962
uaccgcauuuauaaagucu

SEQ ID NO: 2069964 - RNA, 19 nt, Artificial Sequence
  Description of Artificial Sequence: Synthetic oligonucleotide
  Sense strand starting at position 3318 of SEQ ID NO: 1881764
uuauaaaugcgguaugcuu

SEQ ID NO: 2069965 - RNA, 19 nt, Artificial Sequence
  Description of Artificial Sequence: Synthetic oligonucleotide
  Antisense strand to SEQ ID NO: 2069964
aagcauaccgcauuuauaa

SEQ ID NO: 2069966 - RNA, 19 nt, Artificial Sequence
  Description of Artificial Sequence: Synthetic oligonucleotide
  Sense strand starting at position 3329 of SEQ ID NO: 1881764
guaugcuuagucuaaguuu

SEQ ID NO: 2069967 - RNA, 19 nt, Artificial Sequence
  Description of Artificial Sequence: Synthetic oligonucleotide
  Antisense strand to SEQ ID NO: 2069966
aaacuuagacuaagcauac

SEQ ID NO: 2069968 - RNA, 19 nt, Artificial Sequence
  Description of Artificial Sequence: Synthetic oligonucleotide
  Sense strand starting at position 3358 of SEQ ID NO: 1881764
agguaauaaccuuagcuua

SEQ ID NO: 2069969 - RNA, 19 nt, Artificial Sequence
  Description of Artificial Sequence: Synthetic oligonucleotide
  Antisense strand to SEQ ID NO: 2069968
uaagcuaagguuauuaccu

SEQ ID NO: 2069970 - RNA, 19 nt, Artificial Sequence
  Description of Artificial Sequence: Synthetic oligonucleotide
  Sense strand starting at position 3806 of SEQ ID NO: 1881764
uaauguguuguauagcuau

SEQ ID NO: 2069971 - RNA, 19 nt, Artificial Sequence
  Description of Artificial Sequence: Synthetic oligonucleotide
  Antisense strand to SEQ ID NO: 2069970
auagcuauacaacacauua

SEQ ID NO: 2069972 - RNA, 19 nt, Artificial Sequence
  Description of Artificial Sequence: Synthetic oligonucleotide
  Sense strand starting at position 131 of SEQ ID NO: 1881765
gggaucaaguccuagauug

SEQ ID NO: 2069973 - RNA, 19 nt, Artificial Sequence
  Description of Artificial Sequence: Synthetic oligonucleotide
  Antisense strand to SEQ ID NO: 2069972
caaucuaggacuugauccc

SEQ ID NO: 2069974 - RNA, 19 nt, Artificial Sequence
  Description of Artificial Sequence: Synthetic oligonucleotide
  Sense strand starting at position 133 of SEQ ID NO: 1881765
gaucaaguccuagauuggu

SEQ ID NO: 2069975 - RNA, 19 nt, Artificial Sequence
  Description of Artificial Sequence: Synthetic oligonucleotide
  Antisense strand to SEQ ID NO: 2069974
accaaucuaggacuugauc

SEQ ID NO: 2069976 - RNA, 19 nt, Artificial Sequence
  Description of Artificial Sequence: Synthetic oligonucleotide
  Sense strand starting at position 172 of SEQ ID NO: 1881765
ugggcaagauacucagauu

SEQ ID NO: 2069977 - RNA, 19 nt, Artificial Sequence
  Description of Artificial Sequence: Synthetic oligonucleotide
  Antisense strand to SEQ ID NO: 2069976
aaucugaguaucuugccca

SEQ ID NO: 2069978 - RNA, 19 nt, Artificial Sequence
  Description of Artificial Sequence: Synthetic oligonucleotide
  Sense strand starting at position 228 of SEQ ID NO: 1881765
gguuacauuucucauauca

SEQ ID NO: 2069979 - RNA, 19 nt, Artificial Sequence
  Description of Artificial Sequence: Synthetic oligonucleotide
  Antisense strand to SEQ ID NO: 2069978
ugauaugagaaauguaacc

SEQ ID NO: 2069980 - RNA, 19 nt, Artificial Sequence
  Description of Artificial Sequence: Synthetic oligonucleotide
  Sense strand starting at position 332 of SEQ ID NO: 1881765
gugcucaguaaacguugaa

SEQ ID NO: 2069981 - RNA, 19 nt, Artificial Sequence
  Description of Artificial Sequence: Synthetic oligonucleotide
  Antisense strand to SEQ ID NO: 2069980
uucaacguuuacugagcac

SEQ ID NO: 2069982 - RNA, 19 nt, Artificial Sequence
  Description of Artificial Sequence: Synthetic oligonucleotide
  Sense strand starting at position 336 of SEQ ID NO: 1881765
ucaguaaacguugaaugga

SEQ ID NO: 2069983 - RNA, 19 nt, Artificial Sequence
  Description of Artificial Sequence: Synthetic oligonucleotide
  Antisense strand to SEQ ID NO: 2069982
uccauucaacguuuacuga

SEQ ID NO: 2069984 - RNA, 19 nt, Artificial Sequence
  Description of Artificial Sequence: Synthetic oligonucleotide
  Sense strand starting at position 367 of SEQ ID NO: 1881765
ugugaagagccuuguaaac

SEQ ID NO: 2069985 - RNA, 19 nt, Artificial Sequence
  Description of Artificial Sequence: Synthetic oligonucleotide
  Antisense strand to SEQ ID NO: 2069984
guuuacaaggcucuucaca

SEQ ID NO: 2069986 - RNA, 19 nt, Artificial Sequence
  Description of Artificial Sequence: Synthetic oligonucleotide
  Sense strand starting at position 411 of SEQ ID NO: 1881765
guauauauguuagcacuua

SEQ ID NO: 2069987 - RNA, 19 nt, Artificial Sequence
  Description of Artificial Sequence: Synthetic oligonucleotide
  Antisense strand to SEQ ID NO: 2069986
uaagugcuaacauauauac

SEQ ID NO: 2069988 - RNA, 19 nt, Artificial Sequence
  Description of Artificial Sequence: Synthetic oligonucleotide
  Sense strand starting at position 496 of SEQ ID NO: 1881765
ccaugaaggugauaucuac

SEQ ID NO: 2069989 - RNA, 19 nt, Artificial Sequence
  Description of Artificial Sequence: Synthetic oligonucleotide
  Antisense strand to SEQ ID NO: 2069988
guagauaucaccuucaugg

SEQ ID NO: 2069990 - RNA, 19 nt, Artificial Sequence
  Description of Artificial Sequence: Synthetic oligonucleotide
  Sense strand starting at position 670 of SEQ ID NO: 1881765
ccauuaagucgacaacuac

SEQ ID NO: 2069991 - RNA, 19 nt, Artificial Sequence
  Description of Artificial Sequence: Synthetic oligonucleotide
  Antisense strand to SEQ ID NO: 2069990
guaguugucgacuuaaugg

SEQ ID NO: 2069992 - RNA, 19 nt, Artificial Sequence
  Description of Artificial Sequence: Synthetic oligonucleotide
  Sense strand starting at position 735 of SEQ ID NO: 1881765
cccacacuccggugucuaa

SEQ ID NO: 2069993 - RNA, 19 nt, Artificial Sequence
  Description of Artificial Sequence: Synthetic oligonucleotide
  Antisense strand to SEQ ID NO: 2069992
uuagacaccggaguguggg

SEQ ID NO: 2069994 - RNA, 19 nt, Artificial Sequence
  Description of Artificial Sequence: Synthetic oligonucleotide
  Sense strand starting at position 992 of SEQ ID NO: 1881765
agguuuaaauucuugaucu

SEQ ID NO: 2069995 - RNA, 19 nt, Artificial Sequence
  Description of Artificial Sequence: Synthetic oligonucleotide
  Antisense strand to SEQ ID NO: 2069994
agaucaagaauuuaaaccu

SEQ ID NO: 2069996 - RNA, 19 nt, Artificial Sequence
  Description of Artificial Sequence: Synthetic oligonucleotide
  Sense strand starting at position 1011 of SEQ ID NO: 1881765
gccacuuacuaguuauuuc

SEQ ID NO: 2069997 - RNA, 19 nt, Artificial Sequence
  Description of Artificial Sequence: Synthetic oligonucleotide
  Antisense strand to SEQ ID NO: 2069996
gaaauaacuaguaaguggc

SEQ ID NO: 2069998 - RNA, 19 nt, Artificial Sequence
  Description of Artificial Sequence: Synthetic oligonucleotide
  Sense strand starting at position 1083 of SEQ ID NO: 1881765
acguguaugaagugauuaa

SEQ ID NO: 2069999 - RNA, 19 nt, Artificial Sequence
  Description of Artificial Sequence: Synthetic oligonucleotide
  Antisense strand to SEQ ID NO: 2069998
uuaaucacuucauacacgu

SEQ ID NO: 2070000 - RNA, 19 nt, Artificial Sequence
  Description of Artificial Sequence: Synthetic oligonucleotide
  Sense strand starting at position 1084 of SEQ ID NO: 1881765
cguguaugaagugauuaaa

SEQ ID NO: 2070001 - RNA, 19 nt, Artificial Sequence
  Description of Artificial Sequence: Synthetic oligonucleotide
  Antisense strand to SEQ ID NO: 2070000
uuuaaucacuucauacacg

SEQ ID NO: 2070002 - RNA, 19 nt, Artificial Sequence
  Description of Artificial Sequence: Synthetic oligonucleotide
  Sense strand starting at position 1087 of SEQ ID NO: 1881765
guaugaagugauuaaaugu

SEQ ID NO: 2070003 - RNA, 19 nt, Artificial Sequence
  Description of Artificial Sequence: Synthetic oligonucleotide
  Antisense strand to SEQ ID NO: 2070002
acauuuaaucacuucauac

SEQ ID NO: 2070004 - RNA, 19 nt, Artificial Sequence
  Description of Artificial Sequence: Synthetic oligonucleotide
  Sense strand starting at position 1161 of SEQ ID NO: 1881765
uagugaguuccuggagcac

SEQ ID NO: 2070005 - RNA, 19 nt, Artificial Sequence
  Description of Artificial Sequence: Synthetic oligonucleotide
  Antisense strand to SEQ ID NO: 2070004
gugcuccaggaacucacua

SEQ ID NO: 2070006 - RNA, 19 nt, Artificial Sequence
  Description of Artificial Sequence: Synthetic oligonucleotide
  Sense strand starting at position 1374 of SEQ ID NO: 1881765
aaaugucaugaccgaauuc

SEQ ID NO: 2070007 - RNA, 19 nt, Artificial Sequence
  Description of Artificial Sequence: Synthetic oligonucleotide
  Antisense strand to SEQ ID NO: 2070006
gaauucggucaugacauuu

SEQ ID NO: 2070008 - RNA, 19 nt, Artificial Sequence
  Description of Artificial Sequence: Synthetic oligonucleotide
  Sense strand starting at position 1776 of SEQ ID NO: 1881765
agccaaagucaucagccau

SEQ ID NO: 2070009 - RNA, 19 nt, Artificial Sequence
  Description of Artificial Sequence: Synthetic oligonucleotide
  Antisense strand to SEQ ID NO: 2070008
auggcugaugacuuuggcu

SEQ ID NO: 2070010 - RNA, 19 nt, Artificial Sequence
  Description of Artificial Sequence: Synthetic oligonucleotide
  Sense strand starting at position 2299 of SEQ ID NO: 1881765
gcagaaguuucuucuccua

SEQ ID NO: 2070011 - RNA, 19 nt, Artificial Sequence
  Description of Artificial Sequence: Synthetic oligonucleotide
  Antisense strand to SEQ ID NO: 2070010
uaggagaagaaacuucugc

SEQ ID NO: 2070012 - RNA, 19 nt, Artificial Sequence
  Description of Artificial Sequence: Synthetic oligonucleotide
  Sense strand starting at position 2302 of SEQ ID NO: 1881765
gaaguuucuucuccuaggu

SEQ ID NO: 2070013 - RNA, 19 nt, Artificial Sequence
  Description of Artificial Sequence: Synthetic oligonucleotide
  Antisense strand to SEQ ID NO: 2070012
accuaggagaagaaacuuc

SEQ ID NO: 2070014 - RNA, 19 nt, Artificial Sequence
  Description of Artificial Sequence: Synthetic oligonucleotide
  Sense strand starting at position 2460 of SEQ ID NO: 1881765
guguaucucccuugaggag

SEQ ID NO: 2070015 - RNA, 19 nt, Artificial Sequence
  Description of Artificial Sequence: Synthetic oligonucleotide
  Antisense strand to SEQ ID NO: 2070014
cuccucaagggagauacac

SEQ ID NO: 2070016 - RNA, 19 nt, Artificial Sequence
  Description of Artificial Sequence: Synthetic oligonucleotide
  Sense strand starting at position 2521 of SEQ ID NO: 1881765
ccuuaaauguccuuuaggu

SEQ ID NO: 2070017 - RNA, 19 nt, Artificial Sequence
  Description of Artificial Sequence: Synthetic oligonucleotide
  Antisense strand to SEQ ID NO: 2070016
accuaaaggacauuuaagg

SEQ ID NO: 2070018 - RNA, 19 nt, Artificial Sequence
  Description of Artificial Sequence: Synthetic oligonucleotide
  Sense strand starting at position 2523 of SEQ ID NO: 1881765
uuaaauguccuuuagguau

SEQ ID NO: 2070019 - RNA, 19 nt, Artificial Sequence
  Description of Artificial Sequence: Synthetic oligonucleotide
  Antisense strand to SEQ ID NO: 2070018
auaccuaaaggacauuuaa

SEQ ID NO: 2070020 - RNA, 19 nt, Artificial Sequence
  Description of Artificial Sequence: Synthetic oligonucleotide
  Sense strand starting at position 2526 of SEQ ID NO: 1881765
aauguccuuuagguaugaa

SEQ ID NO: 2070021 - RNA, 19 nt, Artificial Sequence
  Description of Artificial Sequence: Synthetic oligonucleotide
  Antisense strand to SEQ ID NO: 2070020
uucauaccuaaaggacauu

SEQ ID NO: 2070022 - RNA, 19 nt, Artificial Sequence
  Description of Artificial Sequence: Synthetic oligonucleotide
  Sense strand starting at position 2529 of SEQ ID NO: 1881765
guccuuuagguaugaacca

SEQ ID NO: 2070023 - RNA, 19 nt, Artificial Sequence
  Description of Artificial Sequence: Synthetic oligonucleotide
  Antisense strand to SEQ ID NO: 2070022
ugguucauaccuaaaggac

SEQ ID NO: 2070024 - RNA, 19 nt, Artificial Sequence
  Description of Artificial Sequence: Synthetic oligonucleotide
  Sense strand starting at position 2731 of SEQ ID NO: 1881765
uggcaaauggccugucaaa

SEQ ID NO: 2070025 - RNA, 19 nt, Artificial Sequence
  Description of Artificial Sequence: Synthetic oligonucleotide
  Antisense strand to SEQ ID NO: 2070024
uuugacaggccauuugcca

SEQ ID NO: 2070026 - RNA, 19 nt, Artificial Sequence
  Description of Artificial Sequence: Synthetic oligonucleotide
  Sense strand starting at position 2757 of SEQ ID NO: 1881765
gugugaggcgcugugacau

SEQ ID NO: 2070027 - RNA, 19 nt, Artificial Sequence
  Description of Artificial Sequence: Synthetic oligonucleotide
  Antisense strand to SEQ ID NO: 2070026
augucacagcgccucacac

SEQ ID NO: 2070028 - RNA, 19 nt, Artificial Sequence
  Description of Artificial Sequence: Synthetic oligonucleotide
  Sense strand starting at position 2826 of SEQ ID NO: 1881765
gcugucugcuauuucuaau

SEQ ID NO: 2070029 - RNA, 19 nt, Artificial Sequence
  Description of Artificial Sequence: Synthetic oligonucleotide
  Antisense strand to SEQ ID NO: 2070028
auuagaaauagcagacagc

SEQ ID NO: 2070030 - RNA, 19 nt, Artificial Sequence
  Description of Artificial Sequence: Synthetic oligonucleotide
  Sense strand starting at position 2986 of SEQ ID NO: 1881765
gagacagggccucgcuaua

SEQ ID NO: 2070031 - RNA, 19 nt, Artificial Sequence
  Description of Artificial Sequence: Synthetic oligonucleotide
  Antisense strand to SEQ ID NO: 2070030
uauagcgaggcccugucuc

SEQ ID NO: 2070032 - RNA, 19 nt, Artificial Sequence
  Description of Artificial Sequence: Synthetic oligonucleotide
  Sense strand starting at position 3109 of SEQ ID NO: 1881765
ucaguuuaauugguaacaa

SEQ ID NO: 2070033 - RNA, 19 nt, Artificial Sequence
  Description of Artificial Sequence: Synthetic oligonucleotide
  Antisense strand to SEQ ID NO: 2070032
uuguuaccaauuaaacuga

SEQ ID NO: 2070034 - RNA, 19 nt, Artificial Sequence
  Description of Artificial Sequence: Synthetic oligonucleotide
  Sense strand starting at position 3286 of SEQ ID NO: 1881765
aguguagugguacgauuau

SEQ ID NO: 2070035 - RNA, 19 nt, Artificial Sequence
  Description of Artificial Sequence: Synthetic oligonucleotide
  Antisense strand to SEQ ID NO: 2070034
auaaucguaccacuacacu

SEQ ID NO: 2070036 - RNA, 19 nt, Artificial Sequence
  Description of Artificial Sequence: Synthetic oligonucleotide
  Sense strand starting at position 3407 of SEQ ID NO: 1881765
auguuauuguaaguggaag

SEQ ID NO: 2070037 - RNA, 19 nt, Artificial Sequence
  Description of Artificial Sequence: Synthetic oligonucleotide
  Antisense strand to SEQ ID NO: 2070036
cuuccacuuacaauaacau

SEQ ID NO: 2070038 - RNA, 19 nt, Artificial Sequence
  Description of Artificial Sequence: Synthetic oligonucleotide
  Sense strand starting at position 3408 of SEQ ID NO: 1881765
uguuauuguaaguggaagu

SEQ ID NO: 2070039 - RNA, 19 nt, Artificial Sequence
  Description of Artificial Sequence: Synthetic oligonucleotide
  Antisense strand to SEQ ID NO: 2070038
acuuccacuuacaauaaca

SEQ ID NO: 2070040 - RNA, 19 nt, Artificial Sequence
  Description of Artificial Sequence: Synthetic oligonucleotide
  Sense strand starting at position 3409 of SEQ ID NO: 1881765
guuauuguaaguggaaguu

SEQ ID NO: 2070041 - RNA, 19 nt, Artificial Sequence
  Description of Artificial Sequence: Synthetic oligonucleotide
  Antisense strand to SEQ ID NO: 2070040
aacuuccacuuacaauaac

SEQ ID NO: 2070042 - RNA, 19 nt, Artificial Sequence
  Description of Artificial Sequence: Synthetic oligonucleotide
  Sense strand starting at position 3813 of SEQ ID NO: 1881765
agcuaugauugugucagag

SEQ ID NO: 2070043 - RNA, 19 nt, Artificial Sequence
  Description of Artificial Sequence: Synthetic oligonucleotide
  Antisense strand to SEQ ID NO: 2070042
cucugacacaaucauagcu

SEQ ID NO: 2070044 - RNA, 19 nt, Artificial Sequence
  Description of Artificial Sequence: Synthetic oligonucleotide
  Sense strand starting at position 3819 of SEQ ID NO: 1881765
gauugugucagaggugugu

SEQ ID NO: 2070045 - RNA, 19 nt, Artificial Sequence
  Description of Artificial Sequence: Synthetic oligonucleotide
  Antisense strand to SEQ ID NO: 2070044
acacaccucugacacaauc

SEQ ID NO: 2070046 - RNA, 19 nt, Artificial Sequence
  Description of Artificial Sequence: Synthetic oligonucleotide
  Sense strand starting at position 3821 of SEQ ID NO: 1881765
uugugucagagguguguga

SEQ ID NO: 2070047 - RNA, 19 nt, Artificial Sequence
  Description of Artificial Sequence: Synthetic oligonucleotide
  Antisense strand to SEQ ID NO: 2070046
ucacacaccucugacacaa

SEQ ID NO: 2070048 - RNA, 19 nt, Artificial Sequence
  Description of Artificial Sequence: Synthetic oligonucleotide
  Sense strand starting at position 3823 of SEQ ID NO: 1881765
gugucagaggugugugaau

SEQ ID NO: 2070049 - RNA, 19 nt, Artificial Sequence
  Description of Artificial Sequence: Synthetic oligonucleotide
  Antisense strand to SEQ ID NO: 2070048
auucacacaccucugacac

SEQ ID NO: 2070050 - RNA, 19 nt, Artificial Sequence
  Description of Artificial Sequence: Synthetic oligonucleotide
  Sense strand starting at position 3858 of SEQ ID NO: 1881765
uaaacaggaucuggguaaa

SEQ ID NO: 2070051 - RNA, 19 nt, Artificial Sequence
  Description of Artificial Sequence: Synthetic oligonucleotide
  Antisense strand to SEQ ID NO: 2070050
uuuacccagauccuguuua

SEQ ID NO: 2070052 - RNA, 19 nt, Artificial Sequence
  Description of Artificial Sequence: Synthetic oligonucleotide
  Sense strand starting at position 80 of SEQ ID NO: 1881766
ccugcucgacuuuauaaua

SEQ ID NO: 2070053 - RNA, 19 nt, Artificial Sequence
  Description of Artificial Sequence: Synthetic oligonucleotide
  Antisense strand to SEQ ID NO: 2070052
uauuauaaagucgagcagg

SEQ ID NO: 2070054 - RNA, 19 nt, Artificial Sequence
  Description of Artificial Sequence: Synthetic oligonucleotide
  Sense strand starting at position 152 of SEQ ID NO: 1881766
uuccuagauuuguaguuaa

SEQ ID NO: 2070055 - RNA, 19 nt, Artificial Sequence
  Description of Artificial Sequence: Synthetic oligonucleotide
  Antisense strand to SEQ ID NO: 2070054
uuaacuacaaaucuaggaa

SEQ ID NO: 2070056 - RNA, 19 nt, Artificial Sequence
  Description of Artificial Sequence: Synthetic oligonucleotide
  Sense strand starting at position 163 of SEQ ID NO: 1881766
guaguuaaccauuggguuu

SEQ ID NO: 2070057 - RNA, 19 nt, Artificial Sequence
  Description of Artificial Sequence: Synthetic oligonucleotide
  Antisense strand to SEQ ID NO: 2070056
aaacccaaugguuaacuac

SEQ ID NO: 2070058 - RNA, 19 nt, Artificial Sequence
  Description of Artificial Sequence: Synthetic oligonucleotide
  Sense strand starting at position 169 of SEQ ID NO: 1881766
aaccauuggguuugacagu

SEQ ID NO: 2070059 - RNA, 19 nt, Artificial Sequence
  Description of Artificial Sequence: Synthetic oligonucleotide
  Antisense strand to SEQ ID NO: 2070058
acugucaaacccaaugguu

SEQ ID NO: 2070060 - RNA, 19 nt, Artificial Sequence
  Description of Artificial Sequence: Synthetic oligonucleotide
  Sense strand starting at position 197 of SEQ ID NO: 1881766
aaauaaguagcauguguuu

SEQ ID NO: 2070061 - RNA, 19 nt, Artificial Sequence
  Description of Artificial Sequence: Synthetic oligonucleotide
  Antisense strand to SEQ ID NO: 2070060
aaacacaugcuacuuauuu

SEQ ID NO: 2070062 - RNA, 19 nt, Artificial Sequence
  Description of Artificial Sequence: Synthetic oligonucleotide
  Sense strand starting at position 356 of SEQ ID NO: 1881766
ugaccugcagaaugaguua

SEQ ID NO: 2070063 - RNA, 19 nt, Artificial Sequence
  Description of Artificial Sequence: Synthetic oligonucleotide
  Antisense strand to SEQ ID NO: 2070062
uaacucauucugcagguca

SEQ ID NO: 2070064 - RNA, 19 nt, Artificial Sequence
  Description of Artificial Sequence: Synthetic oligonucleotide
  Sense strand starting at position 557 of SEQ ID NO: 1881766
ccauuaccuuuaguuguua

SEQ ID NO: 2070065 - RNA, 19 nt, Artificial Sequence
  Description of Artificial Sequence: Synthetic oligonucleotide
  Antisense strand to SEQ ID NO: 2070064
uaacaacuaaagguaaugg

SEQ ID NO: 2070066 - RNA, 19 nt, Artificial Sequence
  Description of Artificial Sequence: Synthetic oligonucleotide
  Sense strand starting at position 865 of SEQ ID NO: 1881766
ugggaauaauuagucucau

SEQ ID NO: 2070067 - RNA, 19 nt, Artificial Sequence
  Description of Artificial Sequence: Synthetic oligonucleotide
  Antisense strand to SEQ ID NO: 2070066
augagacuaauuauuccca

SEQ ID NO: 2070068 - RNA, 19 nt, Artificial Sequence
  Description of Artificial Sequence: Synthetic oligonucleotide
  Sense strand starting at position 866 of SEQ ID NO: 1881766
gggaauaauuagucucauc

SEQ ID NO: 2070069 - RNA, 19 nt, Artificial Sequence
  Description of Artificial Sequence: Synthetic oligonucleotide
  Antisense strand to SEQ ID NO: 2070068
gaugagacuaauuauuccc

SEQ ID NO: 2070070 - RNA, 19 nt, Artificial Sequence
  Description of Artificial Sequence: Synthetic oligonucleotide
  Sense strand starting at position 896 of SEQ ID NO: 1881766
gggucugcuccucaagagu

SEQ ID NO: 2070071 - RNA, 19 nt, Artificial Sequence
  Description of Artificial Sequence: Synthetic oligonucleotide
  Antisense strand to SEQ ID NO: 2070070
acucuugaggagcagaccc

SEQ ID NO: 2070072 - RNA, 19 nt, Artificial Sequence
  Description of Artificial Sequence: Synthetic oligonucleotide
  Sense strand starting at position 1819 of SEQ ID NO: 1881766
ccuggaagugcgcaaugaa

SEQ ID NO: 2070073 - RNA, 19 nt, Artificial Sequence
  Description of Artificial Sequence: Synthetic oligonucleotide
  Antisense strand to SEQ ID NO: 2070072
uucauugcgcacuuccagg

SEQ ID NO: 2070074 - RNA, 19 nt, Artificial Sequence
  Description of Artificial Sequence: Synthetic oligonucleotide
  Sense strand starting at position 2071 of SEQ ID NO: 1881766
guguaacugacuuacaguu

SEQ ID NO: 2070075 - RNA, 19 nt, Artificial Sequence
  Description of Artificial Sequence: Synthetic oligonucleotide
  Antisense strand to SEQ ID NO: 2070074
aacuguaagucaguuacac

SEQ ID NO: 2070076 - RNA, 19 nt, Artificial Sequence
  Description of Artificial Sequence: Synthetic oligonucleotide
  Sense strand starting at position 2278 of SEQ ID NO: 1881766
gccaguuaccucuaccuga

SEQ ID NO: 2070077 - RNA, 19 nt, Artificial Sequence
  Description of Artificial Sequence: Synthetic oligonucleotide
  Antisense strand to SEQ ID NO: 2070076
ucagguagagguaacuggc

SEQ ID NO: 2070078 - RNA, 19 nt, Artificial Sequence
  Description of Artificial Sequence: Synthetic oligonucleotide
  Sense strand starting at position 2294 of SEQ ID NO: 1881766
ugauccugcccuugacaaa

SEQ ID NO: 2070079 - RNA, 19 nt, Artificial Sequence
  Description of Artificial Sequence: Synthetic oligonucleotide
  Antisense strand to SEQ ID NO: 2070078
uuugucaagggcaggauca

SEQ ID NO: 2070080 - RNA, 19 nt, Artificial Sequence
  Description of Artificial Sequence: Synthetic oligonucleotide
  Sense strand starting at position 2430 of SEQ ID NO: 1881766
uugagaaguacuggccagu

SEQ ID NO: 2070081 - RNA, 19 nt, Artificial Sequence
  Description of Artificial Sequence: Synthetic oligonucleotide
  Antisense strand to SEQ ID NO: 2070080
acuggccaguacuucucaa

SEQ ID NO: 2070082 - RNA, 19 nt, Artificial Sequence
  Description of Artificial Sequence: Synthetic oligonucleotide
  Sense strand starting at position 2433 of SEQ ID NO: 1881766
agaaguacuggccaguuau

SEQ ID NO: 2070083 - RNA, 19 nt, Artificial Sequence
  Description of Artificial Sequence: Synthetic oligonucleotide
  Antisense strand to SEQ ID NO: 2070082
auaacuggccaguacuucu

SEQ ID NO: 2070084 - RNA, 19 nt, Artificial Sequence
  Description of Artificial Sequence: Synthetic oligonucleotide
  Sense strand starting at position 2499 of SEQ ID NO: 1881766
agguuaaauuggguuauga

SEQ ID NO: 2070085 - RNA, 19 nt, Artificial Sequence
  Description of Artificial Sequence: Synthetic oligonucleotide
  Antisense strand to SEQ ID NO: 2070084
ucauaacccaauuuaaccu

SEQ ID NO: 2070086 - RNA, 19 nt, Artificial Sequence
  Description of Artificial Sequence: Synthetic oligonucleotide
  Sense strand starting at position 2926 of SEQ ID NO: 1881766
augaaugacugacaauaca

SEQ ID NO: 2070087 - RNA, 19 nt, Artificial Sequence
  Description of Artificial Sequence: Synthetic oligonucleotide
  Antisense strand to SEQ ID NO: 2070086
uguauugucagucauucau

SEQ ID NO: 2070088 - RNA, 19 nt, Artificial Sequence
  Description of Artificial Sequence: Synthetic oligonucleotide
  Sense strand starting at position 3084 of SEQ ID NO: 1881766
gcaucaggaucaucaacaa

SEQ ID NO: 2070089 - RNA, 19 nt, Artificial Sequence
  Description of Artificial Sequence: Synthetic oligonucleotide
  Antisense strand to SEQ ID NO: 2070088
uuguugaugauccugaugc

SEQ ID NO: 2070090 - RNA, 19 nt, Artificial Sequence
  Description of Artificial Sequence: Synthetic oligonucleotide
  Sense strand starting at position 3105 of SEQ ID NO: 1881766
gugacaauguaauuaaauc

SEQ ID NO: 2070091 - RNA, 19 nt, Artificial Sequence
  Description of Artificial Sequence: Synthetic oligonucleotide
  Antisense strand to SEQ ID NO: 2070090
gauuuaauuacauugucac

SEQ ID NO: 2070092 - RNA, 19 nt, Artificial Sequence
  Description of Artificial Sequence: Synthetic oligonucleotide
  Sense strand starting at position 3113 of SEQ ID NO: 1881766
guaauuaaaucaguaagca

SEQ ID NO: 2070093 - RNA, 19 nt, Artificial Sequence
  Description of Artificial Sequence: Synthetic oligonucleotide
  Antisense strand to SEQ ID NO: 2070092
ugcuuacugauuuaauuac

SEQ ID NO: 2070094 - RNA, 19 nt, Artificial Sequence
  Description of Artificial Sequence: Synthetic oligonucleotide
  Sense strand starting at position 3121 of SEQ ID NO: 1881766
aucaguaagcaauagaugu

SEQ ID NO: 2070095 - RNA, 19 nt, Artificial Sequence
  Description of Artificial Sequence: Synthetic oligonucleotide
  Antisense strand to SEQ ID NO: 2070094
acaucuauugcuuacugau

SEQ ID NO: 2070096 - RNA, 19 nt, Artificial Sequence
  Description of Artificial Sequence: Synthetic oligonucleotide
  Sense strand starting at position 3125 of SEQ ID NO: 1881766
guaagcaauagauguuguu

SEQ ID NO: 2070097 - RNA, 19 nt, Artificial Sequence
  Description of Artificial Sequence: Synthetic oligonucleotide
  Antisense strand to SEQ ID NO: 2070096
aacaacaucuauugcuuac

SEQ ID NO: 2070098 - RNA, 19 nt, Artificial Sequence
  Description of Artificial Sequence: Synthetic oligonucleotide
  Sense strand starting at position 3140 of SEQ ID NO: 1881766
uguugacuugagcaacaga

SEQ ID NO: 2070099 - RNA, 19 nt, Artificial Sequence
  Description of Artificial Sequence: Synthetic oligonucleotide
  Antisense strand to SEQ ID NO: 2070098
ucuguugcucaagucaaca

SEQ ID NO: 2070100 - RNA, 19 nt, Artificial Sequence
  Description of Artificial Sequence: Synthetic oligonucleotide
  Sense strand starting at position 3262 of SEQ ID NO: 1881766
auguuaucuuguuuacuga

SEQ ID NO: 2070101 - RNA, 19 nt, Artificial Sequence
  Description of Artificial Sequence: Synthetic oligonucleotide
  Antisense strand to SEQ ID NO: 2070100
ucaguaaacaagauaacau

SEQ ID NO: 2070102 - RNA, 19 nt, Artificial Sequence
  Description of Artificial Sequence: Synthetic oligonucleotide
  Sense strand starting at position 3325 of SEQ ID NO: 1881766
ucaucuuuggaauguugga

SEQ ID NO: 2070103 - RNA, 19 nt, Artificial Sequence
  Description of Artificial Sequence: Synthetic oligonucleotide
  Antisense strand to SEQ ID NO: 2070102
uccaacauuccaaagauga

SEQ ID NO: 2070104 - RNA, 19 nt, Artificial Sequence
  Description of Artificial Sequence: Synthetic oligonucleotide
  Sense strand starting at position 3332 of SEQ ID NO: 1881766
uggaauguuggauguauaa

SEQ ID NO: 2070105 - RNA, 19 nt, Artificial Sequence
  Description of Artificial Sequence: Synthetic oligonucleotide
  Antisense strand to SEQ ID NO: 2070104
uuauacauccaacauucca

SEQ ID NO: 2070106 - RNA, 19 nt, Artificial Sequence
  Description of Artificial Sequence: Synthetic oligonucleotide
  Sense strand starting at position 3350 of SEQ ID NO: 1881766
aggaauuauucugucacuc

SEQ ID NO: 2070107 - RNA, 19 nt, Artificial Sequence
  Description of Artificial Sequence: Synthetic oligonucleotide
  Antisense strand to SEQ ID NO: 2070106
gagugacagaauaauuccu

SEQ ID NO: 2070108 - RNA, 19 nt, Artificial Sequence
  Description of Artificial Sequence: Synthetic oligonucleotide
  Sense strand starting at position 3383 of SEQ ID NO: 1881766
cagugaguaucgcuauaga

SEQ ID NO: 2070109 - RNA, 19 nt, Artificial Sequence
  Description of Artificial Sequence: Synthetic oligonucleotide
  Antisense strand to SEQ ID NO: 2070108
ucuauagcgauacucacug

SEQ ID NO: 2070110 - RNA, 19 nt, Artificial Sequence
  Description of Artificial Sequence: Synthetic oligonucleotide
  Sense strand starting at position 3386 of SEQ ID NO: 1881766
ugaguaucgcuauagacau

SEQ ID NO: 2070111 - RNA, 19 nt, Artificial Sequence
  Description of Artificial Sequence: Synthetic oligonucleotide
  Antisense strand to SEQ ID NO: 2070110
augucuauagcgauacuca

SEQ ID NO: 2070112 - RNA, 19 nt, Artificial Sequence
  Description of Artificial Sequence: Synthetic oligonucleotide
  Sense strand starting at position 3393 of SEQ ID NO: 1881766
cgcuauagacauugcaaau

SEQ ID NO: 2070113 - RNA, 19 nt, Artificial Sequence
  Description of Artificial Sequence: Synthetic oligonucleotide
  Antisense strand to SEQ ID NO: 2070112
auuugcaaugucuauagcg

SEQ ID NO: 2070114 - RNA, 19 nt, Artificial Sequence
  Description of Artificial Sequence: Synthetic oligonucleotide
  Sense strand starting at position 3405 of SEQ ID NO: 1881766
ugcaaauaugaguguccuu

SEQ ID NO: 2070115 - RNA, 19 nt, Artificial Sequence
  Description of Artificial Sequence: Synthetic oligonucleotide
  Antisense strand to SEQ ID NO: 2070114
aaggacacucauauuugca

SEQ ID NO: 2070116 - RNA, 19 nt, Artificial Sequence
  Description of Artificial Sequence: Synthetic oligonucleotide
  Sense strand starting at position 3408 of SEQ ID NO: 1881766
aaauaugaguguccuuaga

SEQ ID NO: 2070117 - RNA, 19 nt, Artificial Sequence
  Description of Artificial Sequence: Synthetic oligonucleotide
  Antisense strand to SEQ ID NO: 2070116
ucuaaggacacucauauuu

SEQ ID NO: 2070118 - RNA, 19 nt, Artificial Sequence
  Description of Artificial Sequence: Synthetic oligonucleotide
  Sense strand starting at position 3410 of SEQ ID NO: 1881766
auaugaguguccuuagagc

SEQ ID NO: 2070119 - RNA, 19 nt, Artificial Sequence
  Description of Artificial Sequence: Synthetic oligonucleotide
  Antisense strand to SEQ ID NO: 2070118
gcucuaaggacacucauau

SEQ ID NO: 2070120 - RNA, 19 nt, Artificial Sequence
  Description of Artificial Sequence: Synthetic oligonucleotide
  Sense strand starting at position 3562 of SEQ ID NO: 1881766
gaacuagugauguguaggu

SEQ ID NO: 2070121 - RNA, 19 nt, Artificial Sequence
  Description of Artificial Sequence: Synthetic oligonucleotide
  Antisense strand to SEQ ID NO: 2070120
accuacacaucacuaguuc

SEQ ID NO: 2070122 - RNA, 19 nt, Artificial Sequence
  Description of Artificial Sequence: Synthetic oligonucleotide
  Sense strand starting at position 3564 of SEQ ID NO: 1881766
acuagugauguguagguuu

SEQ ID NO: 2070123 - RNA, 19 nt, Artificial Sequence
  Description of Artificial Sequence: Synthetic oligonucleotide
  Antisense strand to SEQ ID NO: 2070122
aaaccuacacaucacuagu

SEQ ID NO: 2070124 - RNA, 19 nt, Artificial Sequence
  Description of Artificial Sequence: Synthetic oligonucleotide
  Sense strand starting at position 3642 of SEQ ID NO: 1881766
aggcucuugguaugagcaa

SEQ ID NO: 2070125 - RNA, 19 nt, Artificial Sequence
  Description of Artificial Sequence: Synthetic oligonucleotide
  Antisense strand to SEQ ID NO: 2070124
uugcucauaccaagagccu

SEQ ID NO: 2070126 - RNA, 19 nt, Artificial Sequence
  Description of Artificial Sequence: Synthetic oligonucleotide
  Sense strand starting at position 3680 of SEQ ID NO: 1881766
ggcuauaaucaauggguag

SEQ ID NO: 2070127 - RNA, 19 nt, Artificial Sequence
  Description of Artificial Sequence: Synthetic oligonucleotide
  Antisense strand to SEQ ID NO: 2070126
cuacccauugauuauagcc

SEQ ID NO: 2070128 - RNA, 19 nt, Artificial Sequence
  Description of Artificial Sequence: Synthetic oligonucleotide
  Sense strand starting at position 3713 of SEQ ID NO: 1881766
cugucauaguacguuuaga

SEQ ID NO: 2070129 - RNA, 19 nt, Artificial Sequence
  Description of Artificial Sequence: Synthetic oligonucleotide
  Antisense strand to SEQ ID NO: 2070128
ucuaaacguacuaugacag

SEQ ID NO: 2070130 - RNA, 19 nt, Artificial Sequence
  Description of Artificial Sequence: Synthetic oligonucleotide
  Sense strand starting at position 3842 of SEQ ID NO: 1881766
aggagagcuuucuaauuua

SEQ ID NO: 2070131 - RNA, 19 nt, Artificial Sequence
  Description of Artificial Sequence: Synthetic oligonucleotide
  Antisense strand to SEQ ID NO: 2070130
uaaauuagaaagcucuccu

SEQ ID NO: 2070132 - RNA, 19 nt, Artificial Sequence
  Description of Artificial Sequence: Synthetic oligonucleotide
  Sense strand starting at position 191 of SEQ ID NO: 1881767
agguuguggguguaaggau

SEQ ID NO: 2070133 - RNA, 19 nt, Artificial Sequence
  Description of Artificial Sequence: Synthetic oligonucleotide
  Antisense strand to SEQ ID NO: 2070132
auccuuacacccacaaccu

SEQ ID NO: 2070134 - RNA, 19 nt, Artificial Sequence
  Description of Artificial Sequence: Synthetic oligonucleotide
  Sense strand starting at position 192 of SEQ ID NO: 1881767
gguuguggguguaaggaua

SEQ ID NO: 2070135 - RNA, 19 nt, Artificial Sequence
  Description of Artificial Sequence: Synthetic oligonucleotide
  Antisense strand to SEQ ID NO: 2070134
uauccuuacacccacaacc

SEQ ID NO: 2070136 - RNA, 19 nt, Artificial Sequence
  Description of Artificial Sequence: Synthetic oligonucleotide
  Sense strand starting at position 224 of SEQ ID NO: 1881767
aaaucaaaccugugggacu

SEQ ID NO: 2070137 - RNA, 19 nt, Artificial Sequence
  Description of Artificial Sequence: Synthetic oligonucleotide
  Antisense strand to SEQ ID NO: 2070136
agucccacagguuugauuu

SEQ ID NO: 2070138 - RNA, 19 nt, Artificial Sequence
  Description of Artificial Sequence: Synthetic oligonucleotide
  Sense strand starting at position 282 of SEQ ID NO: 1881767
uuugucagaccucauugaa

SEQ ID NO: 2070139 - RNA, 19 nt, Artificial Sequence
  Description of Artificial Sequence: Synthetic oligonucleotide
  Antisense strand to SEQ ID NO: 2070138
uucaaugaggucugacaaa

SEQ ID NO: 2070140 - RNA, 19 nt, Artificial Sequence
  Description of Artificial Sequence: Synthetic oligonucleotide
  Sense strand starting at position 285 of SEQ ID NO: 1881767
gucagaccucauugaacuu

SEQ ID NO: 2070141 - RNA, 19 nt, Artificial Sequence
  Description of Artificial Sequence: Synthetic oligonucleotide
  Antisense strand to SEQ ID NO: 2070140
aaguucaaugaggucugac

SEQ ID NO: 2070142 - RNA, 19 nt, Artificial Sequence
  Description of Artificial Sequence: Synthetic oligonucleotide
  Sense strand starting at position 660 of SEQ ID NO: 1881767
uacucaagcucagugugau

SEQ ID NO: 2070143 - RNA, 19 nt, Artificial Sequence
  Description of Artificial Sequence: Synthetic oligonucleotide
  Antisense strand to SEQ ID NO: 2070142
aucacacugagcuugagua

SEQ ID NO: 2070144 - RNA, 19 nt, Artificial Sequence
  Description of Artificial Sequence: Synthetic oligonucleotide
  Sense strand starting at position 748 of SEQ ID NO: 1881767
uaggguccuucugugaaga

SEQ ID NO: 2070145 - RNA, 19 nt, Artificial Sequence
  Description of Artificial Sequence: Synthetic oligonucleotide
  Antisense strand to SEQ ID NO: 2070144
ucuucacagaaggacccua

SEQ ID NO: 2070146 - RNA, 19 nt, Artificial Sequence
  Description of Artificial Sequence: Synthetic oligonucleotide
  Sense strand starting at position 749 of SEQ ID NO: 1881767
aggguccuucugugaagag

SEQ ID NO: 2070147 - RNA, 19 nt, Artificial Sequence
  Description of Artificial Sequence: Synthetic oligonucleotide
  Antisense strand to SEQ ID NO: 2070146
cucuucacagaaggacccu

SEQ ID NO: 2070148 - RNA, 19 nt, Artificial Sequence
  Description of Artificial Sequence: Synthetic oligonucleotide
  Sense strand starting at position 823 of SEQ ID NO: 1881767
uuugaauaagcaggcaaua

SEQ ID NO: 2070149 - RNA, 19 nt, Artificial Sequence
  Description of Artificial Sequence: Synthetic oligonucleotide
  Antisense strand to SEQ ID NO: 2070148
uauugccugcuuauucaaa

SEQ ID NO: 2070150 - RNA, 19 nt, Artificial Sequence
  Description of Artificial Sequence: Synthetic oligonucleotide
  Sense strand starting at position 834 of SEQ ID NO: 1881767
aggcaauagaaauguguuu

SEQ ID NO: 2070151 - RNA, 19 nt, Artificial Sequence
  Description of Artificial Sequence: Synthetic oligonucleotide
  Antisense strand to SEQ ID NO: 2070150
aaacacauuucuauugccu

SEQ ID NO: 2070152 - RNA, 19 nt, Artificial Sequence
  Description of Artificial Sequence: Synthetic oligonucleotide
  Sense strand starting at position 909 of SEQ ID NO: 1881767
gauggaaauucugcagaac

SEQ ID NO: 2070153 - RNA, 19 nt, Artificial Sequence
  Description of Artificial Sequence: Synthetic oligonucleotide
  Antisense strand to SEQ ID NO: 2070152
guucugcagaauuuccauc

SEQ ID NO: 2070154 - RNA, 19 nt, Artificial Sequence
  Description of Artificial Sequence: Synthetic oligonucleotide
  Sense strand starting at position 1160 of SEQ ID NO: 1881767
ucagaucuugcauagaauc

SEQ ID NO: 2070155 - RNA, 19 nt, Artificial Sequence
  Description of Artificial Sequence: Synthetic oligonucleotide
  Antisense strand to SEQ ID NO: 2070154
gauucuaugcaagaucuga

SEQ ID NO: 2070156 - RNA, 19 nt, Artificial Sequence
  Description of Artificial Sequence: Synthetic oligonucleotide
  Sense strand starting at position 1168 of SEQ ID NO: 1881767
ugcauagaaucaucgaauc

SEQ ID NO: 2070157 - RNA, 19 nt, Artificial Sequence
  Description of Artificial Sequence: Synthetic oligonucleotide
  Antisense strand to SEQ ID NO: 2070156
gauucgaugauucuaugca

SEQ ID NO: 2070158 - RNA, 19 nt, Artificial Sequence
  Description of Artificial Sequence: Synthetic oligonucleotide
  Sense strand starting at position 1287 of SEQ ID NO: 1881767
guguguuggauauacagaa

SEQ ID NO: 2070159 - RNA, 19 nt, Artificial Sequence
  Description of Artificial Sequence: Synthetic oligonucleotide
  Antisense strand to SEQ ID NO: 2070158
uucuguauauccaacacac

SEQ ID NO: 2070160 - RNA, 19 nt, Artificial Sequence
  Description of Artificial Sequence: Synthetic oligonucleotide
  Sense strand starting at position 1335 of SEQ ID NO: 1881767
cugaaucugcauuguaaca

SEQ ID NO: 2070161 - RNA, 19 nt, Artificial Sequence
  Description of Artificial Sequence: Synthetic oligonucleotide
  Antisense strand to SEQ ID NO: 2070160
uguuacaaugcagauucag

SEQ ID NO: 2070162 - RNA, 19 nt, Artificial Sequence
  Description of Artificial Sequence: Synthetic oligonucleotide
  Sense strand starting at position 1368 of SEQ ID NO: 1881767
cuuguaugcacaggaaagu

SEQ ID NO: 2070163 - RNA, 19 nt, Artificial Sequence
  Description of Artificial Sequence: Synthetic oligonucleotide
  Antisense strand to SEQ ID NO: 2070162
acuuuccugugcauacaag

SEQ ID NO: 2070164 - RNA, 19 nt, Artificial Sequence
  Description of Artificial Sequence: Synthetic oligonucleotide
  Sense strand starting at position 1369 of SEQ ID NO: 1881767
uuguaugcacaggaaagua

SEQ ID NO: 2070165 - RNA, 19 nt, Artificial Sequence
  Description of Artificial Sequence: Synthetic oligonucleotide
  Antisense strand to SEQ ID NO: 2070164
uacuuuccugugcauacaa

SEQ ID NO: 2070166 - RNA, 19 nt, Artificial Sequence
  Description of Artificial Sequence: Synthetic oligonucleotide
  Sense strand starting at position 1438 of SEQ ID NO: 1881767
ccugcaauugaauagaagu

SEQ ID NO: 2070167 - RNA, 19 nt, Artificial Sequence
  Description of Artificial Sequence: Synthetic oligonucleotide
  Antisense strand to SEQ ID NO: 2070166
acuucuauucaauugcagg

SEQ ID NO: 2070168 - RNA, 19 nt, Artificial Sequence
  Description of Artificial Sequence: Synthetic oligonucleotide
  Sense strand starting at position 1853 of SEQ ID NO: 1881767
cuacuagcuccgcagggau

SEQ ID NO: 2070169 - RNA, 19 nt, Artificial Sequence
  Description of Artificial Sequence: Synthetic oligonucleotide
  Antisense strand to SEQ ID NO: 2070168
aucccugcggagcuaguag

SEQ ID NO: 2070170 - RNA, 19 nt, Artificial Sequence
  Description of Artificial Sequence: Synthetic oligonucleotide
  Sense strand starting at position 1989 of SEQ ID NO: 1881767
uuuggaaaucuugggucuu

SEQ ID NO: 2070171 - RNA, 19 nt, Artificial Sequence
  Description of Artificial Sequence: Synthetic oligonucleotide
  Antisense strand to SEQ ID NO: 2070170
aagacccaagauuuccaaa

SEQ ID NO: 2070172 - RNA, 19 nt, Artificial Sequence
  Description of Artificial Sequence: Synthetic oligonucleotide
  Sense strand starting at position 1991 of SEQ ID NO: 1881767
uggaaaucuugggucuuua

SEQ ID NO: 2070173 - RNA, 19 nt, Artificial Sequence
  Description of Artificial Sequence: Synthetic oligonucleotide
  Antisense strand to SEQ ID NO: 2070172
uaaagacccaagauuucca

SEQ ID NO: 2070174 - RNA, 19 nt, Artificial Sequence
  Description of Artificial Sequence: Synthetic oligonucleotide
  Sense strand starting at position 2184 of SEQ ID NO: 1881767
gggucuucagagugaucag

SEQ ID NO: 2070175 - RNA, 19 nt, Artificial Sequence
  Description of Artificial Sequence: Synthetic oligonucleotide
  Antisense strand to SEQ ID NO: 2070174
cugaucacucugaagaccc

SEQ ID NO: 2070176 - RNA, 19 nt, Artificial Sequence
  Description of Artificial Sequence: Synthetic oligonucleotide
  Sense strand starting at position 2222 of SEQ ID NO: 1881767
aagagaaguuagguugcau

SEQ ID NO: 2070177 - RNA, 19 nt, Artificial Sequence
  Description of Artificial Sequence: Synthetic oligonucleotide
  Antisense strand to SEQ ID NO: 2070176
augcaaccuaacuucucuu

SEQ ID NO: 2070178 - RNA, 19 nt, Artificial Sequence
  Description of Artificial Sequence: Synthetic oligonucleotide
  Sense strand starting at position 2451 of SEQ ID NO: 1881767
gagaucugacguuaucucu

SEQ ID NO: 2070179 - RNA, 19 nt, Artificial Sequence
  Description of Artificial Sequence: Synthetic oligonucleotide
  Antisense strand to SEQ ID NO: 2070178
agagauaacgucagaucuc

SEQ ID NO: 2070180 - RNA, 19 nt, Artificial Sequence
  Description of Artificial Sequence: Synthetic oligonucleotide
  Sense strand starting at position 2457 of SEQ ID NO: 1881767
ugacguuaucucuagguaa

SEQ ID NO: 2070181 - RNA, 19 nt, Artificial Sequence
  Description of Artificial Sequence: Synthetic oligonucleotide
  Antisense strand to SEQ ID NO: 2070180
uuaccuagagauaacguca

SEQ ID NO: 2070182 - RNA, 19 nt, Artificial Sequence
  Description of Artificial Sequence: Synthetic oligonucleotide
  Sense strand starting at position 2459 of SEQ ID NO: 1881767
acguuaucucuagguaaau

SEQ ID NO: 2070183 - RNA, 19 nt, Artificial Sequence
  Description of Artificial Sequence: Synthetic oligonucleotide
  Antisense strand to SEQ ID NO: 2070182
auuuaccuagagauaacgu

SEQ ID NO: 2070184 - RNA, 19 nt, Artificial Sequence
  Description of Artificial Sequence: Synthetic oligonucleotide
  Sense strand starting at position 2460 of SEQ ID NO: 1881767
cguuaucucuagguaaaua

SEQ ID NO: 2070185 - RNA, 19 nt, Artificial Sequence
  Description of Artificial Sequence: Synthetic oligonucleotide
  Antisense strand to SEQ ID NO: 2070184
uauuuaccuagagauaacg

SEQ ID NO: 2070186 - RNA, 19 nt, Artificial Sequence
  Description of Artificial Sequence: Synthetic oligonucleotide
  Sense strand starting at position 2528 of SEQ ID NO: 1881767
ucugaacaauugguugauu

SEQ ID NO: 2070187 - RNA, 19 nt, Artificial Sequence
  Description of Artificial Sequence: Synthetic oligonucleotide
  Antisense strand to SEQ ID NO: 2070186
aaucaaccaauuguucaga

SEQ ID NO: 2070188 - RNA, 19 nt, Artificial Sequence
  Description of Artificial Sequence: Synthetic oligonucleotide
  Sense strand starting at position 2669 of SEQ ID NO: 1881767
cugauaauauuggcaauaa

SEQ ID NO: 2070189 - RNA, 19 nt, Artificial Sequence
  Description of Artificial Sequence: Synthetic oligonucleotide
  Antisense strand to SEQ ID NO: 2070188
uuauugccaauauuaucag

SEQ ID NO: 2070190 - RNA, 19 nt, Artificial Sequence
  Description of Artificial Sequence: Synthetic oligonucleotide
  Sense strand starting at position 2752 of SEQ ID NO: 1881767
aaacuuuauguagguaagu

SEQ ID NO: 2070191 - RNA, 19 nt, Artificial Sequence
  Description of Artificial Sequence: Synthetic oligonucleotide
  Antisense strand to SEQ ID NO: 2070190
acuuaccuacauaaaguuu

SEQ ID NO: 2070192 - RNA, 19 nt, Artificial Sequence
  Description of Artificial Sequence: Synthetic oligonucleotide
  Sense strand starting at position 2753 of SEQ ID NO: 1881767
aacuuuauguagguaagua

SEQ ID NO: 2070193 - RNA, 19 nt, Artificial Sequence
  Description of Artificial Sequence: Synthetic oligonucleotide
  Antisense strand to SEQ ID NO: 2070192
uacuuaccuacauaaaguu

SEQ ID NO: 2070194 - RNA, 19 nt, Artificial Sequence
  Description of Artificial Sequence: Synthetic oligonucleotide
  Sense strand starting at position 2769 of SEQ ID NO: 1881767
guacuauugucauucucau

SEQ ID NO: 2070195 - RNA, 19 nt, Artificial Sequence
  Description of Artificial Sequence: Synthetic oligonucleotide
  Antisense strand to SEQ ID NO: 2070194
augagaaugacaauaguac

SEQ ID NO: 2070196 - RNA, 19 nt, Artificial Sequence
  Description of Artificial Sequence: Synthetic oligonucleotide
  Sense strand starting at position 2833 of SEQ ID NO: 1881767
gcuuguccauagucaaaca

SEQ ID NO: 2070197 - RNA, 19 nt, Artificial Sequence
  Description of Artificial Sequence: Synthetic oligonucleotide
  Antisense strand to SEQ ID NO: 2070196
uguuugacuauggacaagc

SEQ ID NO: 2070198 - RNA, 19 nt, Artificial Sequence
  Description of Artificial Sequence: Synthetic oligonucleotide
  Sense strand starting at position 2883 of SEQ ID NO: 1881767
ccagcagucugguuauaaa

SEQ ID NO: 2070199 - RNA, 19 nt, Artificial Sequence
  Description of Artificial Sequence: Synthetic oligonucleotide
  Antisense strand to SEQ ID NO: 2070198
uuuauaaccagacugcugg

SEQ ID NO: 2070200 - RNA, 19 nt, Artificial Sequence
  Description of Artificial Sequence: Synthetic oligonucleotide
  Sense strand starting at position 3064 of SEQ ID NO: 1881767
ucuaaagaacauggucauu

SEQ ID NO: 2070201 - RNA, 19 nt, Artificial Sequence
  Description of Artificial Sequence: Synthetic oligonucleotide
  Antisense strand to SEQ ID NO: 2070200
aaugaccauguucuuuaga

SEQ ID NO: 2070202 - RNA, 19 nt, Artificial Sequence
  Description of Artificial Sequence: Synthetic oligonucleotide
  Sense strand starting at position 3330 of SEQ ID NO: 1881767
aagugauucgcauaccuug

SEQ ID NO: 2070203 - RNA, 19 nt, Artificial Sequence
  Description of Artificial Sequence: Synthetic oligonucleotide
  Antisense strand to SEQ ID NO: 2070202
caagguaugcgaaucacuu

SEQ ID NO: 2070204 - RNA, 19 nt, Artificial Sequence
  Description of Artificial Sequence: Synthetic oligonucleotide
  Sense strand starting at position 3393 of SEQ ID NO: 1881767
gccuaaaguuccuucuuga

SEQ ID NO: 2070205 - RNA, 19 nt, Artificial Sequence
  Description of Artificial Sequence: Synthetic oligonucleotide
  Antisense strand to SEQ ID NO: 2070204
ucaagaaggaacuuuaggc

SEQ ID NO: 2070206 - RNA, 19 nt, Artificial Sequence
  Description of Artificial Sequence: Synthetic oligonucleotide
  Sense strand starting at position 3446 of SEQ ID NO: 1881767
aaaugaucauucccgugua

SEQ ID NO: 2070207 - RNA, 19 nt, Artificial Sequence
  Description of Artificial Sequence: Synthetic oligonucleotide
  Antisense strand to SEQ ID NO: 2070206
uacacgggaaugaucauuu

SEQ ID NO: 2070208 - RNA, 19 nt, Artificial Sequence
  Description of Artificial Sequence: Synthetic oligonucleotide
  Sense strand starting at position 3513 of SEQ ID NO: 1881767
gaguguauauauguacuuu

SEQ ID NO: 2070209 - RNA, 19 nt, Artificial Sequence
  Description of Artificial Sequence: Synthetic oligonucleotide
  Antisense strand to SEQ ID NO: 2070208
aaaguacauauauacacuc

SEQ ID NO: 2070210 - RNA, 19 nt, Artificial Sequence
  Description of Artificial Sequence: Synthetic oligonucleotide
  Sense strand starting at position 3560 of SEQ ID NO: 1881767
agcaaucaugaaugucaau

SEQ ID NO: 2070211 - RNA, 19 nt, Artificial Sequence
  Description of Artificial Sequence: Synthetic oligonucleotide
  Antisense strand to SEQ ID NO: 2070210
auugacauucaugauugcu

SEQ ID NO: 2070212 - RNA, 19 nt, Artificial Sequence
  Description of Artificial Sequence: Synthetic oligonucleotide
  Sense strand starting at position 271 of SEQ ID NO: 1881768
ccaacuccaugagugagaa

SEQ ID NO: 2070213 - RNA, 19 nt, Artificial Sequence
  Description of Artificial Sequence: Synthetic oligonucleotide
  Antisense strand to SEQ ID NO: 2070212
uucucacucauggaguugg

SEQ ID NO: 2070214 - RNA, 19 nt, Artificial Sequence
  Description of Artificial Sequence: Synthetic oligonucleotide
  Sense strand starting at position 284 of SEQ ID NO: 1881768
ugagaacgcuugccuauuu

SEQ ID NO: 2070215 - RNA, 19 nt, Artificial Sequence
  Description of Artificial Sequence: Synthetic oligonucleotide
  Antisense strand to SEQ ID NO: 2070214
aaauaggcaagcguucuca

SEQ ID NO: 2070216 - RNA, 19 nt, Artificial Sequence
  Description of Artificial Sequence: Synthetic oligonucleotide
  Sense strand starting at position 289 of SEQ ID NO: 1881768
acgcuugccuauuuggaga

SEQ ID NO: 2070217 - RNA, 19 nt, Artificial Sequence
  Description of Artificial Sequence: Synthetic oligonucleotide
  Antisense strand to SEQ ID NO: 2070216
ucuccaaauaggcaagcgu

SEQ ID NO: 2070218 - RNA, 19 nt, Artificial Sequence
  Description of Artificial Sequence: Synthetic oligonucleotide
  Sense strand starting at position 302 of SEQ ID NO: 1881768
uggagagggccugaauugu

SEQ ID NO: 2070219 - RNA, 19 nt, Artificial Sequence
  Description of Artificial Sequence: Synthetic oligonucleotide
  Antisense strand to SEQ ID NO: 2070218
acaauucaggcccucucca

SEQ ID NO: 2070220 - RNA, 19 nt, Artificial Sequence
  Description of Artificial Sequence: Synthetic oligonucleotide
  Sense strand starting at position 453 of SEQ ID NO: 1881768
gugacagugcuuuagaaac

SEQ ID NO: 2070221 - RNA, 19 nt, Artificial Sequence
  Description of Artificial Sequence: Synthetic oligonucleotide
  Antisense strand to SEQ ID NO: 2070220
guuucuaaagcacugucac

SEQ ID NO: 2070222 - RNA, 19 nt, Artificial Sequence
  Description of Artificial Sequence: Synthetic oligonucleotide
  Sense strand starting at position 645 of SEQ ID NO: 1881768
gcgguuacucugcucauau

SEQ ID NO: 2070223 - RNA, 19 nt, Artificial Sequence
  Description of Artificial Sequence: Synthetic oligonucleotide
  Antisense strand to SEQ ID NO: 2070222
auaugagcagaguaaccgc

SEQ ID NO: 2070224 - RNA, 19 nt, Artificial Sequence
  Description of Artificial Sequence: Synthetic oligonucleotide
  Sense strand starting at position 670 of SEQ ID NO: 1881768
cgcagacucagggaaaugu

SEQ ID NO: 2070225 - RNA, 19 nt, Artificial Sequence
  Description of Artificial Sequence: Synthetic oligonucleotide
  Antisense strand to SEQ ID NO: 2070224
acauuucccugagucugcg

SEQ ID NO: 2070226 - RNA, 19 nt, Artificial Sequence
  Description of Artificial Sequence: Synthetic oligonucleotide
  Sense strand starting at position 770 of SEQ ID NO: 1881768
gucauuauagcucagacag

SEQ ID NO: 2070227 - RNA, 19 nt, Artificial Sequence
  Description of Artificial Sequence: Synthetic oligonucleotide
  Antisense strand to SEQ ID NO: 2070226
cugucugagcuauaaugac

SEQ ID NO: 2070228 - RNA, 19 nt, Artificial Sequence
  Description of Artificial Sequence: Synthetic oligonucleotide
  Sense strand starting at position 1039 of SEQ ID NO: 1881768
acuagacuccucuggaagu

SEQ ID NO: 2070229 - RNA, 19 nt, Artificial Sequence
  Description of Artificial Sequence: Synthetic oligonucleotide
  Antisense strand to SEQ ID NO: 2070228
acuuccagaggagucuagu

SEQ ID NO: 2070230 - RNA, 19 nt, Artificial Sequence
  Description of Artificial Sequence: Synthetic oligonucleotide
  Sense strand starting at position 1094 of SEQ ID NO: 1881768
cuuuacauuucuguuaguu

SEQ ID NO: 2070231 - RNA, 19 nt, Artificial Sequence
  Description of Artificial Sequence: Synthetic oligonucleotide
  Antisense strand to SEQ ID NO: 2070230
aacuaacagaaauguaaag

SEQ ID NO: 2070232 - RNA, 19 nt, Artificial Sequence
  Description of Artificial Sequence: Synthetic oligonucleotide
  Sense strand starting at position 1256 of SEQ ID NO: 1881768
gagaccauaugugucaaga

SEQ ID NO: 2070233 - RNA, 19 nt, Artificial Sequence
  Description of Artificial Sequence: Synthetic oligonucleotide
  Antisense strand to SEQ ID NO: 2070232
ucuugacacauauggucuc

SEQ ID NO: 2070234 - RNA, 19 nt, Artificial Sequence
  Description of Artificial Sequence: Synthetic oligonucleotide
  Sense strand starting at position 1575 of SEQ ID NO: 1881768
acuguugcuccugauggaa

SEQ ID NO: 2070235 - RNA, 19 nt, Artificial Sequence
  Description of Artificial Sequence: Synthetic oligonucleotide
  Antisense strand to SEQ ID NO: 2070234
uuccaucaggagcaacagu

SEQ ID NO: 2070236 - RNA, 19 nt, Artificial Sequence
  Description of Artificial Sequence: Synthetic oligonucleotide
  Sense strand starting at position 1705 of SEQ ID NO: 1881768
uuucuaaagucacuugaga

SEQ ID NO: 2070237 - RNA, 19 nt, Artificial Sequence
  Description of Artificial Sequence: Synthetic oligonucleotide
  Antisense strand to SEQ ID NO: 2070236
ucucaagugacuuuagaaa

SEQ ID NO: 2070238 - RNA, 19 nt, Artificial Sequence
  Description of Artificial Sequence: Synthetic oligonucleotide
  Sense strand starting at position 1737 of SEQ ID NO: 1881768
uaguuagugcaagaaauga

SEQ ID NO: 2070239 - RNA, 19 nt, Artificial Sequence
  Description of Artificial Sequence: Synthetic oligonucleotide
  Antisense strand to SEQ ID NO: 2070238
ucauuucuugcacuaacua

SEQ ID NO: 2070240 - RNA, 19 nt, Artificial Sequence
  Description of Artificial Sequence: Synthetic oligonucleotide
  Sense strand starting at position 1775 of SEQ ID NO: 1881768
cucuguuaggaauagcauu

SEQ ID NO: 2070241 - RNA, 19 nt, Artificial Sequence
  Description of Artificial Sequence: Synthetic oligonucleotide
  Antisense strand to SEQ ID NO: 2070240
aaugcuauuccuaacagag

SEQ ID NO: 2070242 - RNA, 19 nt, Artificial Sequence
  Description of Artificial Sequence: Synthetic oligonucleotide
  Sense strand starting at position 1833 of SEQ ID NO: 1881768
ccuuauagucaugagagua

SEQ ID NO: 2070243 - RNA, 19 nt, Artificial Sequence
  Description of Artificial Sequence: Synthetic oligonucleotide
  Antisense strand to SEQ ID NO: 2070242
uacucucaugacuauaagg

SEQ ID NO: 2070244 - RNA, 19 nt, Artificial Sequence
  Description of Artificial Sequence: Synthetic oligonucleotide
  Sense strand starting at position 1848 of SEQ ID NO: 1881768
aguauuagagucuagagcu

SEQ ID NO: 2070245 - RNA, 19 nt, Artificial Sequence
  Description of Artificial Sequence: Synthetic oligonucleotide
  Antisense strand to SEQ ID NO: 2070244
agcucuagacucuaauacu

SEQ ID NO: 2070246 - RNA, 19 nt, Artificial Sequence
  Description of Artificial Sequence: Synthetic oligonucleotide
  Sense strand starting at position 1856 of SEQ ID NO: 1881768
agucuagagcuuggcauuu

SEQ ID NO: 2070247 - RNA, 19 nt, Artificial Sequence
  Description of Artificial Sequence: Synthetic oligonucleotide
  Antisense strand to SEQ ID NO: 2070246
aaaugccaagcucuagacu

SEQ ID NO: 2070248 - RNA, 19 nt, Artificial Sequence
  Description of Artificial Sequence: Synthetic oligonucleotide
  Sense strand starting at position 1993 of SEQ ID NO: 1881768
gucucuucuggguagaaug

SEQ ID NO: 2070249 - RNA, 19 nt, Artificial Sequence
  Description of Artificial Sequence: Synthetic oligonucleotide
  Antisense strand to SEQ ID NO: 2070248
cauucuacccagaagagac

SEQ ID NO: 2070250 - RNA, 19 nt, Artificial Sequence
  Description of Artificial Sequence: Synthetic oligonucleotide
  Sense strand starting at position 2082 of SEQ ID NO: 1881768
uggaucucauugucccaaa

SEQ ID NO: 2070251 - RNA, 19 nt, Artificial Sequence
  Description of Artificial Sequence: Synthetic oligonucleotide
  Antisense strand to SEQ ID NO: 2070250
uuugggacaaugagaucca

SEQ ID NO: 2070252 - RNA, 19 nt, Artificial Sequence
  Description of Artificial Sequence: Synthetic oligonucleotide
  Sense strand starting at position 2238 of SEQ ID NO: 1881768
ccuugaagaugaucugguu

SEQ ID NO: 2070253 - RNA, 19 nt, Artificial Sequence
  Description of Artificial Sequence: Synthetic oligonucleotide
  Antisense strand to SEQ ID NO: 2070252
aaccagaucaucuucaagg

SEQ ID NO: 2070254 - RNA, 19 nt, Artificial Sequence
  Description of Artificial Sequence: Synthetic oligonucleotide
  Sense strand starting at position 2445 of SEQ ID NO: 1881768
caguuccagcuggauauaa

SEQ ID NO: 2070255 - RNA, 19 nt, Artificial Sequence
  Description of Artificial Sequence: Synthetic oligonucleotide
  Antisense strand to SEQ ID NO: 2070254
uuauauccagcuggaacug

SEQ ID NO: 2070256 - RNA, 19 nt, Artificial Sequence
  Description of Artificial Sequence: Synthetic oligonucleotide
  Sense strand starting at position 2447 of SEQ ID NO: 1881768
guuccagcuggauauaacu

SEQ ID NO: 2070257 - RNA, 19 nt, Artificial Sequence
  Description of Artificial Sequence: Synthetic oligonucleotide
  Antisense strand to SEQ ID NO: 2070256
aguuauauccagcuggaac

SEQ ID NO: 2070258 - RNA, 19 nt, Artificial Sequence
  Description of Artificial Sequence: Synthetic oligonucleotide
  Sense strand starting at position 2456 of SEQ ID NO: 1881768
ggauauaacuuccugugga

SEQ ID NO: 2070259 - RNA, 19 nt, Artificial Sequence
  Description of Artificial Sequence: Synthetic oligonucleotide
  Antisense strand to SEQ ID NO: 2070258
uccacaggaaguuauaucc

SEQ ID NO: 2070260 - RNA, 19 nt, Artificial Sequence
  Description of Artificial Sequence: Synthetic oligonucleotide
  Sense strand starting at position 2524 of SEQ ID NO: 1881768
gaguauaaaggagguguuu

SEQ ID NO: 2070261 - RNA, 19 nt, Artificial Sequence
  Description of Artificial Sequence: Synthetic oligonucleotide
  Antisense strand to SEQ ID NO: 2070260
aaacaccuccuuuauacuc

SEQ ID NO: 2070262 - RNA, 19 nt, Artificial Sequence
  Description of Artificial Sequence: Synthetic oligonucleotide
  Sense strand starting at position 2526 of SEQ ID NO: 1881768
guauaaaggagguguuuaa

SEQ ID NO: 2070263 - RNA, 19 nt, Artificial Sequence
  Description of Artificial Sequence: Synthetic oligonucleotide
  Antisense strand to SEQ ID NO: 2070262
uuaaacaccuccuuuauac

SEQ ID NO: 2070264 - RNA, 19 nt, Artificial Sequence
  Description of Artificial Sequence: Synthetic oligonucleotide
  Sense strand starting at position 2811 of SEQ ID NO: 1881768
cccuguaaguaccuaaaua

SEQ ID NO: 2070265 - RNA, 19 nt, Artificial Sequence
  Description of Artificial Sequence: Synthetic oligonucleotide
  Antisense strand to SEQ ID NO: 2070264
uauuuagguacuuacaggg

SEQ ID NO: 2070266 - RNA, 19 nt, Artificial Sequence
  Description of Artificial Sequence: Synthetic oligonucleotide
  Sense strand starting at position 2982 of SEQ ID NO: 1881768
ggaccauuggguggaggua

SEQ ID NO: 2070267 - RNA, 19 nt, Artificial Sequence
  Description of Artificial Sequence: Synthetic oligonucleotide
  Antisense strand to SEQ ID NO: 2070266
uaccuccacccaauggucc

SEQ ID NO: 2070268 - RNA, 19 nt, Artificial Sequence
  Description of Artificial Sequence: Synthetic oligonucleotide
  Sense strand starting at position 3009 of SEQ ID NO: 1881768
gagagaguuccauguaaug

SEQ ID NO: 2070269 - RNA, 19 nt, Artificial Sequence
  Description of Artificial Sequence: Synthetic oligonucleotide
  Antisense strand to SEQ ID NO: 2070268
cauuacauggaacucucuc

SEQ ID NO: 2070270 - RNA, 19 nt, Artificial Sequence
  Description of Artificial Sequence: Synthetic oligonucleotide
  Sense strand starting at position 3032 of SEQ ID NO: 1881768
auaaacuucuuaguaguca

SEQ ID NO: 2070271 - RNA, 19 nt, Artificial Sequence
  Description of Artificial Sequence: Synthetic oligonucleotide
  Antisense strand to SEQ ID NO: 2070270
ugacuacuaagaaguuuau

SEQ ID NO: 2070272 - RNA, 19 nt, Artificial Sequence
  Description of Artificial Sequence: Synthetic oligonucleotide
  Sense strand starting at position 3066 of SEQ ID NO: 1881768
gaacuaggauugcuuuaga

SEQ ID NO: 2070273 - RNA, 19 nt, Artificial Sequence
  Description of Artificial Sequence: Synthetic oligonucleotide
  Antisense strand to SEQ ID NO: 2070272
ucuaaagcaauccuaguuc

SEQ ID NO: 2070274 - RNA, 19 nt, Artificial Sequence
  Description of Artificial Sequence: Synthetic oligonucleotide
  Sense strand starting at position 3074 of SEQ ID NO: 1881768
auugcuuuagaaggaaaug

SEQ ID NO: 2070275 - RNA, 19 nt, Artificial Sequence
  Description of Artificial Sequence: Synthetic oligonucleotide
  Antisense strand to SEQ ID NO: 2070274
cauuuccuucuaaagcaau

SEQ ID NO: 2070276 - RNA, 19 nt, Artificial Sequence
  Description of Artificial Sequence: Synthetic oligonucleotide
  Sense strand starting at position 3203 of SEQ ID NO: 1881768
uucugaaacagugaggguu

SEQ ID NO: 2070277 - RNA, 19 nt, Artificial Sequence
  Description of Artificial Sequence: Synthetic oligonucleotide
  Antisense strand to SEQ ID NO: 2070276
aacccucacuguuucagaa

SEQ ID NO: 2070278 - RNA, 19 nt, Artificial Sequence
  Description of Artificial Sequence: Synthetic oligonucleotide
  Sense strand starting at position 3333 of SEQ ID NO: 1881768
ggcuuugggaguuaagaac

SEQ ID NO: 2070279 - RNA, 19 nt, Artificial Sequence
  Description of Artificial Sequence: Synthetic oligonucleotide
  Antisense strand to SEQ ID NO: 2070278
guucuuaacucccaaagcc

SEQ ID NO: 2070280 - RNA, 19 nt, Artificial Sequence
  Description of Artificial Sequence: Synthetic oligonucleotide
  Sense strand starting at position 3353 of SEQ ID NO: 1881768
aauggacagucucugagau

SEQ ID NO: 2070281 - RNA, 19 nt, Artificial Sequence
  Description of Artificial Sequence: Synthetic oligonucleotide
  Antisense strand to SEQ ID NO: 2070280
aucucagagacuguccauu

SEQ ID NO: 2070282 - RNA, 19 nt, Artificial Sequence
  Description of Artificial Sequence: Synthetic oligonucleotide
  Sense strand starting at position 3354 of SEQ ID NO: 1881768
auggacagucucugagaua

SEQ ID NO: 2070283 - RNA, 19 nt, Artificial Sequence
  Description of Artificial Sequence: Synthetic oligonucleotide
  Antisense strand to SEQ ID NO: 2070282
uaucucagagacuguccau

SEQ ID NO: 2070284 - RNA, 19 nt, Artificial Sequence
  Description of Artificial Sequence: Synthetic oligonucleotide
  Sense strand starting at position 3740 of SEQ ID NO: 1881768
caaaguuggcauuaaguuu

SEQ ID NO: 2070285 - RNA, 19 nt, Artificial Sequence
  Description of Artificial Sequence: Synthetic oligonucleotide
  Antisense strand to SEQ ID NO: 2070284
aaacuuaaugccaacuuug

SEQ ID NO: 2070286 - RNA, 19 nt, Artificial Sequence
  Description of Artificial Sequence: Synthetic oligonucleotide
  Sense strand starting at position 3947 of SEQ ID NO: 1881768
gugaaagaauuggucugga

SEQ ID NO: 2070287 - RNA, 19 nt, Artificial Sequence
  Description of Artificial Sequence: Synthetic oligonucleotide
  Antisense strand to SEQ ID NO: 2070286
uccagaccaauucuuucac

SEQ ID NO: 2070288 - RNA, 19 nt, Artificial Sequence
  Description of Artificial Sequence: Synthetic oligonucleotide
  Sense strand starting at position 3952 of SEQ ID NO: 1881768
agaauuggucuggaucagu

SEQ ID NO: 2070289 - RNA, 19 nt, Artificial Sequence
  Description of Artificial Sequence: Synthetic oligonucleotide
  Antisense strand to SEQ ID NO: 2070288
acugauccagaccaauucu

SEQ ID NO: 2070290 - RNA, 19 nt, Artificial Sequence
  Description of Artificial Sequence: Synthetic oligonucleotide
  Sense strand starting at position 3955 of SEQ ID NO: 1881768
auuggucuggaucagugau

SEQ ID NO: 2070291 - RNA, 19 nt, Artificial Sequence
  Description of Artificial Sequence: Synthetic oligonucleotide
  Antisense strand to SEQ ID NO: 2070290
aucacugauccagaccaau

SEQ ID NO: 2070292 - RNA, 19 nt, Artificial Sequence
  Description of Artificial Sequence: Synthetic oligonucleotide
  Sense strand starting at position 160 of SEQ ID NO: 1881769
auggauagcccuuaucaau

SEQ ID NO: 2070293 - RNA, 19 nt, Artificial Sequence
  Description of Artificial Sequence: Synthetic oligonucleotide
  Antisense strand to SEQ ID NO: 2070292
auugauaagggcuauccau

SEQ ID NO: 2070294 - RNA, 19 nt, Artificial Sequence
  Description of Artificial Sequence: Synthetic oligonucleotide
  Sense strand starting at position 166 of SEQ ID NO: 1881769
agcccuuaucaaugacaag

SEQ ID NO: 2070295 - RNA, 19 nt, Artificial Sequence
  Description of Artificial Sequence: Synthetic oligonucleotide
  Antisense strand to SEQ ID NO: 2070294
cuugucauugauaagggcu

SEQ ID NO: 2070296 - RNA, 19 nt, Artificial Sequence
  Description of Artificial Sequence: Synthetic oligonucleotide
  Sense strand starting at position 211 of SEQ ID NO: 1881769
uugguucuguaaucuacaa

SEQ ID NO: 2070297 - RNA, 19 nt, Artificial Sequence
  Description of Artificial Sequence: Synthetic oligonucleotide
  Antisense strand to SEQ ID NO: 2070296
uuguagauuacagaaccaa

SEQ ID NO: 2070298 - RNA, 19 nt, Artificial Sequence
  Description of Artificial Sequence: Synthetic oligonucleotide
  Sense strand starting at position 218 of SEQ ID NO: 1881769
uguaaucuacaaggucauu

SEQ ID NO: 2070299 - RNA, 19 nt, Artificial Sequence
  Description of Artificial Sequence: Synthetic oligonucleotide
  Antisense strand to SEQ ID NO: 2070298
aaugaccuuguagauuaca

SEQ ID NO: 2070300 - RNA, 19 nt, Artificial Sequence
  Description of Artificial Sequence: Synthetic oligonucleotide
  Sense strand starting at position 962 of SEQ ID NO: 1881769
uguauaaaggcaggugaua

SEQ ID NO: 2070301 - RNA, 19 nt, Artificial Sequence
  Description of Artificial Sequence: Synthetic oligonucleotide
  Antisense strand to SEQ ID NO: 2070300
uaucaccugccuuuauaca

SEQ ID NO: 2070302 - RNA, 19 nt, Artificial Sequence
  Description of Artificial Sequence: Synthetic oligonucleotide
  Sense strand starting at position 994 of SEQ ID NO: 1881769
uuaucuucuugagugauuc

SEQ ID NO: 2070303 - RNA, 19 nt, Artificial Sequence
  Description of Artificial Sequence: Synthetic oligonucleotide
  Antisense strand to SEQ ID NO: 2070302
gaaucacucaagaagauaa

SEQ ID NO: 2070304 - RNA, 19 nt, Artificial Sequence
  Description of Artificial Sequence: Synthetic oligonucleotide
  Sense strand starting at position 1021 of SEQ ID NO: 1881769
uguaucaugccacaaagau

SEQ ID NO: 2070305 - RNA, 19 nt, Artificial Sequence
  Description of Artificial Sequence: Synthetic oligonucleotide
  Antisense strand to SEQ ID NO: 2070304
aucuuuguggcaugauaca

SEQ ID NO: 2070306 - RNA, 19 nt, Artificial Sequence
  Description of Artificial Sequence: Synthetic oligonucleotide
  Sense strand starting at position 1060 of SEQ ID NO: 1881769
gucauaaagcuuugagaua

SEQ ID NO: 2070307 - RNA, 19 nt, Artificial Sequence
  Description of Artificial Sequence: Synthetic oligonucleotide
  Antisense strand to SEQ ID NO: 2070306
uaucucaaagcuuuaugac

SEQ ID NO: 2070308 - RNA, 19 nt, Artificial Sequence
  Description of Artificial Sequence: Synthetic oligonucleotide
  Sense strand starting at position 1181 of SEQ ID NO: 1881769
gcaggcagaccucaaaguu

SEQ ID NO: 2070309 - RNA, 19 nt, Artificial Sequence
  Description of Artificial Sequence: Synthetic oligonucleotide
  Antisense strand to SEQ ID NO: 2070308
aacuuugaggucugccugc

SEQ ID NO: 2070310 - RNA, 19 nt, Artificial Sequence
  Description of Artificial Sequence: Synthetic oligonucleotide
  Sense strand starting at position 1373 of SEQ ID NO: 1881769
gaguaaguggcaugagaaa

SEQ ID NO: 2070311 - RNA, 19 nt, Artificial Sequence
  Description of Artificial Sequence: Synthetic oligonucleotide
  Antisense strand to SEQ ID NO: 2070310
uuucucaugccacuuacuc

SEQ ID NO: 2070312 - RNA, 19 nt, Artificial Sequence
  Description of Artificial Sequence: Synthetic oligonucleotide
  Sense strand starting at position 1417 of SEQ ID NO: 1881769
gagguaaguaacuguaggu

SEQ ID NO: 2070313 - RNA, 19 nt, Artificial Sequence
  Description of Artificial Sequence: Synthetic oligonucleotide
  Antisense strand to SEQ ID NO: 2070312
accuacaguuacuuaccuc

SEQ ID NO: 2070314 - RNA, 19 nt, Artificial Sequence
  Description of Artificial Sequence: Synthetic oligonucleotide
  Sense strand starting at position 1440 of SEQ ID NO: 1881769
agggcaggugaaugaauau

SEQ ID NO: 2070315 - RNA, 19 nt, Artificial Sequence
  Description of Artificial Sequence: Synthetic oligonucleotide
  Antisense strand to SEQ ID NO: 2070314
auauucauucaccugcccu

SEQ ID NO: 2070316 - RNA, 19 nt, Artificial Sequence
  Description of Artificial Sequence: Synthetic oligonucleotide
  Sense strand starting at position 1449 of SEQ ID NO: 1881769
gaaugaauauuugagcaga

SEQ ID NO: 2070317 - RNA, 19 nt, Artificial Sequence
  Description of Artificial Sequence: Synthetic oligonucleotide
  Antisense strand to SEQ ID NO: 2070316
ucugcucaaauauucauuc

SEQ ID NO: 2070318 - RNA, 19 nt, Artificial Sequence
  Description of Artificial Sequence: Synthetic oligonucleotide
  Sense strand starting at position 1551 of SEQ ID NO: 1881769
ccuauuuagcccggguuua

SEQ ID NO: 2070319 - RNA, 19 nt, Artificial Sequence
  Description of Artificial Sequence: Synthetic oligonucleotide
  Antisense strand to SEQ ID NO: 2070318
uaaacccgggcuaaauagg

SEQ ID NO: 2070320 - RNA, 19 nt, Artificial Sequence
  Description of Artificial Sequence: Synthetic oligonucleotide
  Sense strand starting at position 1552 of SEQ ID NO: 1881769
cuauuuagcccggguuuaa

SEQ ID NO: 2070321 - RNA, 19 nt, Artificial Sequence
  Description of Artificial Sequence: Synthetic oligonucleotide
  Antisense strand to SEQ ID NO: 2070320
uuaaacccgggcuaaauag

SEQ ID NO: 2070322 - RNA, 19 nt, Artificial Sequence
  Description of Artificial Sequence: Synthetic oligonucleotide
  Sense strand starting at position 1564 of SEQ ID NO: 1881769
gguuuaauuccacaugagc

SEQ ID NO: 2070323 - RNA, 19 nt, Artificial Sequence
  Description of Artificial Sequence: Synthetic oligonucleotide
  Antisense strand to SEQ ID NO: 2070322
gcucauguggaauuaaacc

SEQ ID NO: 2070324 - RNA, 19 nt, Artificial Sequence
  Description of Artificial Sequence: Synthetic oligonucleotide
  Sense strand starting at position 2011 of SEQ ID NO: 1881769
ugggcuauggcucagauua

SEQ ID NO: 2070325 - RNA, 19 nt, Artificial Sequence
  Description of Artificial Sequence: Synthetic oligonucleotide
  Antisense strand to SEQ ID NO: 2070324
uaaucugagccauagccca

SEQ ID NO: 2070326 - RNA, 19 nt, Artificial Sequence
  Description of Artificial Sequence: Synthetic oligonucleotide
  Sense strand starting at position 2054 of SEQ ID NO: 1881769
cuuugaagcccaggagaau

SEQ ID NO: 2070327 - RNA, 19 nt, Artificial Sequence
  Description of Artificial Sequence: Synthetic oligonucleotide
  Antisense strand to SEQ ID NO: 2070326
auucuccugggcuucaaag

SEQ ID NO: 2070328 - RNA, 19 nt, Artificial Sequence
  Description of Artificial Sequence: Synthetic oligonucleotide
  Sense strand starting at position 2109 of SEQ ID NO: 1881769
ggcagaaccucugcucaau

SEQ ID NO: 2070329 - RNA, 19 nt, Artificial Sequence
  Description of Artificial Sequence: Synthetic oligonucleotide
  Antisense strand to SEQ ID NO: 2070328
auugagcagagguucugcc

SEQ ID NO: 2070330 - RNA, 19 nt, Artificial Sequence
  Description of Artificial Sequence: Synthetic oligonucleotide
  Sense strand starting at position 2115 of SEQ ID NO: 1881769
accucugcucaauggaaga

SEQ ID NO: 2070331 - RNA, 19 nt, Artificial Sequence
  Description of Artificial Sequence: Synthetic oligonucleotide
  Antisense strand to SEQ ID NO: 2070330
ucuuccauugagcagaggu

SEQ ID NO: 2070332 - RNA, 19 nt, Artificial Sequence
  Description of Artificial Sequence: Synthetic oligonucleotide
  Sense strand starting at position 2211 of SEQ ID NO: 1881769
gugcuagacacuggauuaa

SEQ ID NO: 2070333 - RNA, 19 nt, Artificial Sequence
  Description of Artificial Sequence: Synthetic oligonucleotide
  Antisense strand to SEQ ID NO: 2070332
uuaauccagugucuagcac

SEQ ID NO: 2070334 - RNA, 19 nt, Artificial Sequence
  Description of Artificial Sequence: Synthetic oligonucleotide
  Sense strand starting at position 2250 of SEQ ID NO: 1881769
ugcuuaacucggucagugu

SEQ ID NO: 2070335 - RNA, 19 nt, Artificial Sequence
  Description of Artificial Sequence: Synthetic oligonucleotide
  Antisense strand to SEQ ID NO: 2070334
acacugaccgaguuaagca

SEQ ID NO: 2070336 - RNA, 19 nt, Artificial Sequence
  Description of Artificial Sequence: Synthetic oligonucleotide
  Sense strand starting at position 2287 of SEQ ID NO: 1881769
gcgcuauucucauuugaua

SEQ ID NO: 2070337 - RNA, 19 nt, Artificial Sequence
  Description of Artificial Sequence: Synthetic oligonucleotide
  Antisense strand to SEQ ID NO: 2070336
uaucaaaugagaauagcgc

SEQ ID NO: 2070338 - RNA, 19 nt, Artificial Sequence
  Description of Artificial Sequence: Synthetic oligonucleotide
  Sense strand starting at position 2316 of SEQ ID NO: 1881769
gugagccucagagagguua

SEQ ID NO: 2070339 - RNA, 19 nt, Artificial Sequence
  Description of Artificial Sequence: Synthetic oligonucleotide
  Antisense strand to SEQ ID NO: 2070338
uaaccucucugaggcucac

SEQ ID NO: 2070340 - RNA, 19 nt, Artificial Sequence
  Description of Artificial Sequence: Synthetic oligonucleotide
  Sense strand starting at position 2318 of SEQ ID NO: 1881769
gagccucagagagguuaga

SEQ ID NO: 2070341 - RNA, 19 nt, Artificial Sequence
  Description of Artificial Sequence: Synthetic oligonucleotide
  Antisense strand to SEQ ID NO: 2070340
ucuaaccucucugaggcuc

SEQ ID NO: 2070342 - RNA, 19 nt, Artificial Sequence
  Description of Artificial Sequence: Synthetic oligonucleotide
  Sense strand starting at position 2375 of SEQ ID NO: 1881769
ggguucaucccaggucuga

SEQ ID NO: 2070343 - RNA, 19 nt, Artificial Sequence
  Description of Artificial Sequence: Synthetic oligonucleotide
  Antisense strand to SEQ ID NO: 2070342
ucagaccugggaugaaccc

SEQ ID NO: 2070344 - RNA, 19 nt, Artificial Sequence
  Description of Artificial Sequence: Synthetic oligonucleotide
  Sense strand starting at position 2384 of SEQ ID NO: 1881769
ccaggucugacugaagagu

SEQ ID NO: 2070345 - RNA, 19 nt, Artificial Sequence
  Description of Artificial Sequence: Synthetic oligonucleotide
  Antisense strand to SEQ ID NO: 2070344
acucuucagucagaccugg

SEQ ID NO: 2070346 - RNA, 19 nt, Artificial Sequence
  Description of Artificial Sequence: Synthetic oligonucleotide
  Sense strand starting at position 2507 of SEQ ID NO: 1881769
caaagugauuucugaagau

SEQ ID NO: 2070347 - RNA, 19 nt, Artificial Sequence
  Description of Artificial Sequence: Synthetic oligonucleotide
  Antisense strand to SEQ ID NO: 2070346
aucuucagaaaucacuuug

SEQ ID NO: 2070348 - RNA, 19 nt, Artificial Sequence
  Description of Artificial Sequence: Synthetic oligonucleotide
  Sense strand starting at position 2522 of SEQ ID NO: 1881769
agauaucugauaugggcaa

SEQ ID NO: 2070349 - RNA, 19 nt, Artificial Sequence
  Description of Artificial Sequence: Synthetic oligonucleotide
  Antisense strand to SEQ ID NO: 2070348
uugcccauaucagauaucu

SEQ ID NO: 2070350 - RNA, 19 nt, Artificial Sequence
  Description of Artificial Sequence: Synthetic oligonucleotide
  Sense strand starting at position 2526 of SEQ ID NO: 1881769
aucugauaugggcaacuuu

SEQ ID NO: 2070351 - RNA, 19 nt, Artificial Sequence
  Description of Artificial Sequence: Synthetic oligonucleotide
  Antisense strand to SEQ ID NO: 2070350
aaaguugcccauaucagau

SEQ ID NO: 2070352 - RNA, 19 nt, Artificial Sequence
  Description of Artificial Sequence: Synthetic oligonucleotide
  Sense strand starting at position 2533 of SEQ ID NO: 1881769
augggcaacuuuccagaau

SEQ ID NO: 2070353 - RNA, 19 nt, Artificial Sequence
  Description of Artificial Sequence: Synthetic oligonucleotide
  Antisense strand to SEQ ID NO: 2070352
auucuggaaaguugcccau

SEQ ID NO: 2070354 - RNA, 19 nt, Artificial Sequence
  Description of Artificial Sequence: Synthetic oligonucleotide
  Sense strand starting at position 2636 of SEQ ID NO: 1881769
gagaaugauuuccaaggcu

SEQ ID NO: 2070355 - RNA, 19 nt, Artificial Sequence
  Description of Artificial Sequence: Synthetic oligonucleotide
  Antisense strand to SEQ ID NO: 2070354
agccuuggaaaucauucuc

SEQ ID NO: 2070356 - RNA, 19 nt, Artificial Sequence
  Description of Artificial Sequence: Synthetic oligonucleotide
  Sense strand starting at position 2827 of SEQ ID NO: 1881769
gcuuguaagauugagcacu

SEQ ID NO: 2070357 - RNA, 19 nt, Artificial Sequence
  Description of Artificial Sequence: Synthetic oligonucleotide
  Antisense strand to SEQ ID NO: 2070356
agugcucaaucuuacaagc

SEQ ID NO: 2070358 - RNA, 19 nt, Artificial Sequence
  Description of Artificial Sequence: Synthetic oligonucleotide
  Sense strand starting at position 3235 of SEQ ID NO: 1881769
agugguuccuaccuucuaa

SEQ ID NO: 2070359 - RNA, 19 nt, Artificial Sequence
  Description of Artificial Sequence: Synthetic oligonucleotide
  Antisense strand to SEQ ID NO: 2070358
uuagaagguaggaaccacu

SEQ ID NO: 2070360 - RNA, 19 nt, Artificial Sequence
  Description of Artificial Sequence: Synthetic oligonucleotide
  Sense strand starting at position 3314 of SEQ ID NO: 1881769
cccuauguugaaugaauaa

SEQ ID NO: 2070361 - RNA, 19 nt, Artificial Sequence
  Description of Artificial Sequence: Synthetic oligonucleotide
  Antisense strand to SEQ ID NO: 2070360
uuauucauucaacauaggg

SEQ ID NO: 2070362 - RNA, 19 nt, Artificial Sequence
  Description of Artificial Sequence: Synthetic oligonucleotide
  Sense strand starting at position 3472 of SEQ ID NO: 1881769
ugacaauaacaucggguua

SEQ ID NO: 2070363 - RNA, 19 nt, Artificial Sequence
  Description of Artificial Sequence: Synthetic oligonucleotide
  Antisense strand to SEQ ID NO: 2070362
uaacccgauguuauuguca

SEQ ID NO: 2070364 - RNA, 19 nt, Artificial Sequence
  Description of Artificial Sequence: Synthetic oligonucleotide
  Sense strand starting at position 3526 of SEQ ID NO: 1881769
ugaccugauguccauaagu

SEQ ID NO: 2070365 - RNA, 19 nt, Artificial Sequence
  Description of Artificial Sequence: Synthetic oligonucleotide
  Antisense strand to SEQ ID NO: 2070364
acuuauggacaucagguca

SEQ ID NO: 2070366 - RNA, 19 nt, Artificial Sequence
  Description of Artificial Sequence: Synthetic oligonucleotide
  Sense strand starting at position 3528 of SEQ ID NO: 1881769
accugauguccauaaguaa

SEQ ID NO: 2070367 - RNA, 19 nt, Artificial Sequence
  Description of Artificial Sequence: Synthetic oligonucleotide
  Antisense strand to SEQ ID NO: 2070366
uuacuuauggacaucaggu

SEQ ID NO: 2070368 - RNA, 19 nt, Artificial Sequence
  Description of Artificial Sequence: Synthetic oligonucleotide
  Sense strand starting at position 3531 of SEQ ID NO: 1881769
ugauguccauaaguaaaga

SEQ ID NO: 2070369 - RNA, 19 nt, Artificial Sequence
  Description of Artificial Sequence: Synthetic oligonucleotide
  Antisense strand to SEQ ID NO: 2070368
ucuuuacuuauggacauca

SEQ ID NO: 2070370 - RNA, 19 nt, Artificial Sequence
  Description of Artificial Sequence: Synthetic oligonucleotide
  Sense strand starting at position 3748 of SEQ ID NO: 1881769
cauugagccgcggaggaau

SEQ ID NO: 2070371 - RNA, 19 nt, Artificial Sequence
  Description of Artificial Sequence: Synthetic oligonucleotide
  Antisense strand to SEQ ID NO: 2070370
auuccuccgcggcucaaug

SEQ ID NO: 2070372 - RNA, 19 nt, Artificial Sequence
  Description of Artificial Sequence: Synthetic oligonucleotide
  Sense strand starting at position 19 of SEQ ID NO: 1881770
ucguaaacuguuuagugaa

SEQ ID NO: 2070373 - RNA, 19 nt, Artificial Sequence
  Description of Artificial Sequence: Synthetic oligonucleotide
  Antisense strand to SEQ ID NO: 2070372
uucacuaaacaguuuacga

SEQ ID NO: 2070374 - RNA, 19 nt, Artificial Sequence
  Description of Artificial Sequence: Synthetic oligonucleotide
  Sense strand starting at position 26 of SEQ ID NO: 1881770
cuguuuagugaaugaaaug

SEQ ID NO: 2070375 - RNA, 19 nt, Artificial Sequence
  Description of Artificial Sequence: Synthetic oligonucleotide
  Antisense strand to SEQ ID NO: 2070374
cauuucauucacuaaacag

SEQ ID NO: 2070376 - RNA, 19 nt, Artificial Sequence
  Description of Artificial Sequence: Synthetic oligonucleotide
  Sense strand starting at position 92 of SEQ ID NO: 1881770
gggaaauguugggugugau

SEQ ID NO: 2070377 - RNA, 19 nt, Artificial Sequence
  Description of Artificial Sequence: Synthetic oligonucleotide
  Antisense strand to SEQ ID NO: 2070376
aucacacccaacauuuccc

SEQ ID NO: 2070378 - RNA, 19 nt, Artificial Sequence
  Description of Artificial Sequence: Synthetic oligonucleotide
  Sense strand starting at position 93 of SEQ ID NO: 1881770
ggaaauguugggugugaug

SEQ ID NO: 2070379 - RNA, 19 nt, Artificial Sequence
  Description of Artificial Sequence: Synthetic oligonucleotide
  Antisense strand to SEQ ID NO: 2070378
caucacacccaacauuucc

SEQ ID NO: 2070380 - RNA, 19 nt, Artificial Sequence
  Description of Artificial Sequence: Synthetic oligonucleotide
  Sense strand starting at position 132 of SEQ ID NO: 1881770
guggccauuucgucagaug

SEQ ID NO: 2070381 - RNA, 19 nt, Artificial Sequence
  Description of Artificial Sequence: Synthetic oligonucleotide
  Antisense strand to SEQ ID NO: 2070380
caucugacgaaauggccac

SEQ ID NO: 2070382 - RNA, 19 nt, Artificial Sequence
  Description of Artificial Sequence: Synthetic oligonucleotide
  Sense strand starting at position 133 of SEQ ID NO: 1881770
uggccauuucgucagaugu

SEQ ID NO: 2070383 - RNA, 19 nt, Artificial Sequence
  Description of Artificial Sequence: Synthetic oligonucleotide
  Antisense strand to SEQ ID NO: 2070382
acaucugacgaaauggcca

SEQ ID NO: 2070384 - RNA, 19 nt, Artificial Sequence
  Description of Artificial Sequence: Synthetic oligonucleotide
  Sense strand starting at position 226 of SEQ ID NO: 1881770
gucucaccauuggcaagau

SEQ ID NO: 2070385 - RNA, 19 nt, Artificial Sequence
  Description of Artificial Sequence: Synthetic oligonucleotide
  Antisense strand to SEQ ID NO: 2070384
aucuugccaauggugagac

SEQ ID NO: 2070386 - RNA, 19 nt, Artificial Sequence
  Description of Artificial Sequence: Synthetic oligonucleotide
  Sense strand starting at position 464 of SEQ ID NO: 1881770
ugauguaagcuauaauaca

SEQ ID NO: 2070387 - RNA, 19 nt, Artificial Sequence
  Description of Artificial Sequence: Synthetic oligonucleotide
  Antisense strand to SEQ ID NO: 2070386
uguauuauagcuuacauca

SEQ ID NO: 2070388 - RNA, 19 nt, Artificial Sequence
  Description of Artificial Sequence: Synthetic oligonucleotide
  Sense strand starting at position 509 of SEQ ID NO: 1881770
uuaacuguaucugcuggaa

SEQ ID NO: 2070389 - RNA, 19 nt, Artificial Sequence
  Description of Artificial Sequence: Synthetic oligonucleotide
  Antisense strand to SEQ ID NO: 2070388
uuccagcagauacaguuaa

SEQ ID NO: 2070390 - RNA, 19 nt, Artificial Sequence
  Description of Artificial Sequence: Synthetic oligonucleotide
  Sense strand starting at position 512 of SEQ ID NO: 1881770
acuguaucugcuggaagag

SEQ ID NO: 2070391 - RNA, 19 nt, Artificial Sequence
  Description of Artificial Sequence: Synthetic oligonucleotide
  Antisense strand to SEQ ID NO: 2070390
cucuuccagcagauacagu

SEQ ID NO: 2070392 - RNA, 19 nt, Artificial Sequence
  Description of Artificial Sequence: Synthetic oligonucleotide
  Sense strand starting at position 564 of SEQ ID NO: 1881770
aaaucucaugggcguaaca

SEQ ID NO: 2070393 - RNA, 19 nt, Artificial Sequence
  Description of Artificial Sequence: Synthetic oligonucleotide
  Antisense strand to SEQ ID NO: 2070392
uguuacgcccaugagauuu

SEQ ID NO: 2070394 - RNA, 19 nt, Artificial Sequence
  Description of Artificial Sequence: Synthetic oligonucleotide
  Sense strand starting at position 566 of SEQ ID NO: 1881770
aucucaugggcguaacaca

SEQ ID NO: 2070395 - RNA, 19 nt, Artificial Sequence
  Description of Artificial Sequence: Synthetic oligonucleotide
  Antisense strand to SEQ ID NO: 2070394
uguguuacgcccaugagau

SEQ ID NO: 2070396 - RNA, 19 nt, Artificial Sequence
  Description of Artificial Sequence: Synthetic oligonucleotide
  Sense strand starting at position 701 of SEQ ID NO: 1881770
gaguuugggugauucacga

SEQ ID NO: 2070397 - RNA, 19 nt, Artificial Sequence
  Description of Artificial Sequence: Synthetic oligonucleotide
  Antisense strand to SEQ ID NO: 2070396
ucgugaaucacccaaacuc

SEQ ID NO: 2070398 - RNA, 19 nt, Artificial Sequence
  Description of Artificial Sequence: Synthetic oligonucleotide
  Sense strand starting at position 708 of SEQ ID NO: 1881770
ggugauucacgagagcuua

SEQ ID NO: 2070399 - RNA, 19 nt, Artificial Sequence
  Description of Artificial Sequence: Synthetic oligonucleotide
  Antisense strand to SEQ ID NO: 2070398
uaagcucucgugaaucacc

SEQ ID NO: 2070400 - RNA, 19 nt, Artificial Sequence
  Description of Artificial Sequence: Synthetic oligonucleotide
  Sense strand starting at position 898 of SEQ ID NO: 1881770
cccguuugacaagagauca

SEQ ID NO: 2070401 - RNA, 19 nt, Artificial Sequence
  Description of Artificial Sequence: Synthetic oligonucleotide
  Antisense strand to SEQ ID NO: 2070400
ugaucucuugucaaacggg

SEQ ID NO: 2070402 - RNA, 19 nt, Artificial Sequence
  Description of Artificial Sequence: Synthetic oligonucleotide
  Sense strand starting at position 1003 of SEQ ID NO: 1881770
aaagaaugucgccagugga

SEQ ID NO: 2070403 - RNA, 19 nt, Artificial Sequence
  Description of Artificial Sequence: Synthetic oligonucleotide
  Antisense strand to SEQ ID NO: 2070402
uccacuggcgacauucuuu

SEQ ID NO: 2070404 - RNA, 19 nt, Artificial Sequence
  Description of Artificial Sequence: Synthetic oligonucleotide
  Sense strand starting at position 1082 of SEQ ID NO: 1881770
uguguuagagaguagggua

SEQ ID NO: 2070405 - RNA, 19 nt, Artificial Sequence
  Description of Artificial Sequence: Synthetic oligonucleotide
  Antisense strand to SEQ ID NO: 2070404
uacccuacucucuaacaca

SEQ ID NO: 2070406 - RNA, 19 nt, Artificial Sequence
  Description of Artificial Sequence: Synthetic oligonucleotide
  Sense strand starting at position 1716 of SEQ ID NO: 1881770
cucugacuuccucagguau

SEQ ID NO: 2070407 - RNA, 19 nt, Artificial Sequence
  Description of Artificial Sequence: Synthetic oligonucleotide
  Antisense strand to SEQ ID NO: 2070406
auaccugaggaagucagag

SEQ ID NO: 2070408 - RNA, 19 nt, Artificial Sequence
  Description of Artificial Sequence: Synthetic oligonucleotide
  Sense strand starting at position 1798 of SEQ ID NO: 1881770
gcugcauuaguccaaacaa

SEQ ID NO: 2070409 - RNA, 19 nt, Artificial Sequence
  Description of Artificial Sequence: Synthetic oligonucleotide
  Antisense strand to SEQ ID NO: 2070408
uuguuuggacuaaugcagc

SEQ ID NO: 2070410 - RNA, 19 nt, Artificial Sequence
  Description of Artificial Sequence: Synthetic oligonucleotide
  Sense strand starting at position 1866 of SEQ ID NO: 1881770
uugagagaugucuagcaca

SEQ ID NO: 2070411 - RNA, 19 nt, Artificial Sequence
  Description of Artificial Sequence: Synthetic oligonucleotide
  Antisense strand to SEQ ID NO: 2070410
ugugcuagacaucucucaa

SEQ ID NO: 2070412 - RNA, 19 nt, Artificial Sequence
  Description of Artificial Sequence: Synthetic oligonucleotide
  Sense strand starting at position 1988 of SEQ ID NO: 1881770
cgcuuugugggcucuguaa

SEQ ID NO: 2070413 - RNA, 19 nt, Artificial Sequence
  Description of Artificial Sequence: Synthetic oligonucleotide
  Antisense strand to SEQ ID NO: 2070412
uuacagagcccacaaagcg

SEQ ID NO: 2070414 - RNA, 19 nt, Artificial Sequence
  Description of Artificial Sequence: Synthetic oligonucleotide
  Sense strand starting at position 2068 of SEQ ID NO: 1881770
ugccucuuggaauggagaa

SEQ ID NO: 2070415 - RNA, 19 nt, Artificial Sequence
  Description of Artificial Sequence: Synthetic oligonucleotide
  Antisense strand to SEQ ID NO: 2070414
uucuccauuccaagaggca

SEQ ID NO: 2070416 - RNA, 19 nt, Artificial Sequence
  Description of Artificial Sequence: Synthetic oligonucleotide
  Sense strand starting at position 2166 of SEQ ID NO: 1881770
ggagagaauguguggguau

SEQ ID NO: 2070417 - RNA, 19 nt, Artificial Sequence
  Description of Artificial Sequence: Synthetic oligonucleotide
  Antisense strand to SEQ ID NO: 2070416
auacccacacauucucucc

SEQ ID NO: 2070418 - RNA, 19 nt, Artificial Sequence
  Description of Artificial Sequence: Synthetic oligonucleotide
  Sense strand starting at position 2168 of SEQ ID NO: 1881770
agagaauguguggguauca

SEQ ID NO: 2070419 - RNA, 19 nt, Artificial Sequence
  Description of Artificial Sequence: Synthetic oligonucleotide
  Antisense strand to SEQ ID NO: 2070418
ugauacccacacauucucu

SEQ ID NO: 2070420 - RNA, 19 nt, Artificial Sequence
  Description of Artificial Sequence: Synthetic oligonucleotide
  Sense strand starting at position 2177 of SEQ ID NO: 1881770
guggguaucaugcaugaag

SEQ ID NO: 2070421 - RNA, 19 nt, Artificial Sequence
  Description of Artificial Sequence: Synthetic oligonucleotide
  Antisense strand to SEQ ID NO: 2070420
cuucaugcaugauacccac

SEQ ID NO: 2070422 - RNA, 19 nt, Artificial Sequence
  Description of Artificial Sequence: Synthetic oligonucleotide
  Sense strand starting at position 2180 of SEQ ID NO: 1881770
gguaucaugcaugaagcaa

SEQ ID NO: 2070423 - RNA, 19 nt, Artificial Sequence
  Description of Artificial Sequence: Synthetic oligonucleotide
  Antisense strand to SEQ ID NO: 2070422
uugcuucaugcaugauacc

SEQ ID NO: 2070424 - RNA, 19 nt, Artificial Sequence
  Description of Artificial Sequence: Synthetic oligonucleotide
  Sense strand starting at position 2261 of SEQ ID NO: 1881770
ggcccaaggcucugaacau

SEQ ID NO: 2070425 - RNA, 19 nt, Artificial Sequence
  Description of Artificial Sequence: Synthetic oligonucleotide
  Antisense strand to SEQ ID NO: 2070424
auguucagagccuugggcc

SEQ ID NO: 2070426 - RNA, 19 nt, Artificial Sequence
  Description of Artificial Sequence: Synthetic oligonucleotide
  Sense strand starting at position 2270 of SEQ ID NO: 1881770
cucugaacauuccuggagu

SEQ ID NO: 2070427 - RNA, 19 nt, Artificial Sequence
  Description of Artificial Sequence: Synthetic oligonucleotide
  Antisense strand to SEQ ID NO: 2070426
acuccaggaauguucagag

SEQ ID NO: 2070428 - RNA, 19 nt, Artificial Sequence
  Description of Artificial Sequence: Synthetic oligonucleotide
  Sense strand starting at position 2272 of SEQ ID NO: 1881770
cugaacauuccuggaguuu

SEQ ID NO: 2070429 - RNA, 19 nt, Artificial Sequence
  Description of Artificial Sequence: Synthetic oligonucleotide
  Antisense strand to SEQ ID NO: 2070428
aaacuccaggaauguucag

SEQ ID NO: 2070430 - RNA, 19 nt, Artificial Sequence
  Description of Artificial Sequence: Synthetic oligonucleotide
  Sense strand starting at position 2329 of SEQ ID NO: 1881770
aacagugcccagugaaauu

SEQ ID NO: 2070431 - RNA, 19 nt, Artificial Sequence
  Description of Artificial Sequence: Synthetic oligonucleotide
  Antisense strand to SEQ ID NO: 2070430
aauuucacugggcacuguu

SEQ ID NO: 2070432 - RNA, 19 nt, Artificial Sequence
  Description of Artificial Sequence: Synthetic oligonucleotide
  Sense strand starting at position 2394 of SEQ ID NO: 1881770
gcaucucuuaguggaggaa

SEQ ID NO: 2070433 - RNA, 19 nt, Artificial Sequence
  Description of Artificial Sequence: Synthetic oligonucleotide
  Antisense strand to SEQ ID NO: 2070432
uuccuccacuaagagaugc

SEQ ID NO: 2070434 - RNA, 19 nt, Artificial Sequence
  Description of Artificial Sequence: Synthetic oligonucleotide
  Sense strand starting at position 2397 of SEQ ID NO: 1881770
ucucuuaguggaggaaagu

SEQ ID NO: 2070435 - RNA, 19 nt, Artificial Sequence
  Description of Artificial Sequence: Synthetic oligonucleotide
  Antisense strand to SEQ ID NO: 2070434
acuuuccuccacuaagaga

SEQ ID NO: 2070436 - RNA, 19 nt, Artificial Sequence
  Description of Artificial Sequence: Synthetic oligonucleotide
  Sense strand starting at position 2983 of SEQ ID NO: 1881770
aucugugagcuccauaagu

SEQ ID NO: 2070437 - RNA, 19 nt, Artificial Sequence
  Description of Artificial Sequence: Synthetic oligonucleotide
  Antisense strand to SEQ ID NO: 2070436
acuuauggagcucacagau

SEQ ID NO: 2070438 - RNA, 19 nt, Artificial Sequence
  Description of Artificial Sequence: Synthetic oligonucleotide
  Sense strand starting at position 3107 of SEQ ID NO: 1881770
ccuucuuaauguguaaaug

SEQ ID NO: 2070439 - RNA, 19 nt, Artificial Sequence
  Description of Artificial Sequence: Synthetic oligonucleotide
  Antisense strand to SEQ ID NO: 2070438
cauuuacacauuaagaagg

SEQ ID NO: 2070440 - RNA, 19 nt, Artificial Sequence
  Description of Artificial Sequence: Synthetic oligonucleotide
  Sense strand starting at position 3166 of SEQ ID NO: 1881770
cccuacaucugucuggaau

SEQ ID NO: 2070441 - RNA, 19 nt, Artificial Sequence
  Description of Artificial Sequence: Synthetic oligonucleotide
  Antisense strand to SEQ ID NO: 2070440
auuccagacagauguaggg

SEQ ID NO: 2070442 - RNA, 19 nt, Artificial Sequence
  Description of Artificial Sequence: Synthetic oligonucleotide
  Sense strand starting at position 3167 of SEQ ID NO: 1881770
ccuacaucugucuggaauc

SEQ ID NO: 2070443 - RNA, 19 nt, Artificial Sequence
  Description of Artificial Sequence: Synthetic oligonucleotide
  Antisense strand to SEQ ID NO: 2070442
gauuccagacagauguagg

SEQ ID NO: 2070444 - RNA, 19 nt, Artificial Sequence
  Description of Artificial Sequence: Synthetic oligonucleotide
  Sense strand starting at position 3298 of SEQ ID NO: 1881770
cauuaaaugguguacuagu

SEQ ID NO: 2070445 - RNA, 19 nt, Artificial Sequence
  Description of Artificial Sequence: Synthetic oligonucleotide
  Antisense strand to SEQ ID NO: 2070444
acuaguacaccauuuaaug

SEQ ID NO: 2070446 - RNA, 19 nt, Artificial Sequence
  Description of Artificial Sequence: Synthetic oligonucleotide
  Sense strand starting at position 3797 of SEQ ID NO: 1881770
ggcagacuuagccaaaguu

SEQ ID NO: 2070447 - RNA, 19 nt, Artificial Sequence
  Description of Artificial Sequence: Synthetic oligonucleotide
  Antisense strand to SEQ ID NO: 2070446
aacuuuggcuaagucugcc

SEQ ID NO: 2070448 - RNA, 19 nt, Artificial Sequence
  Description of Artificial Sequence: Synthetic oligonucleotide
  Sense strand starting at position 3937 of SEQ ID NO: 1881770
ucacauuccugggcaaauc

SEQ ID NO: 2070449 - RNA, 19 nt, Artificial Sequence
  Description of Artificial Sequence: Synthetic oligonucleotide
  Antisense strand to SEQ ID NO: 2070448
gauuugcccaggaauguga

SEQ ID NO: 2070450 - RNA, 19 nt, Artificial Sequence
  Description of Artificial Sequence: Synthetic oligonucleotide
  Sense strand starting at position 3949 of SEQ ID NO: 1881770
gcaaaucacuggucaggga

SEQ ID NO: 2070451 - RNA, 19 nt, Artificial Sequence
  Description of Artificial Sequence: Synthetic oligonucleotide
  Antisense strand to SEQ ID NO: 2070450
ucccugaccagugauuugc

SEQ ID NO: 2070452 - RNA, 19 nt, Artificial Sequence
  Description of Artificial Sequence: Synthetic oligonucleotide
  Sense strand starting at position 63 of SEQ ID NO: 1881771
gggugagucauacgaaacu

SEQ ID NO: 2070453 - RNA, 19 nt, Artificial Sequence
  Description of Artificial Sequence: Synthetic oligonucleotide
  Antisense strand to SEQ ID NO: 2070452
aguuucguaugacucaccc

SEQ ID NO: 2070454 - RNA, 19 nt, Artificial Sequence
  Description of Artificial Sequence: Synthetic oligonucleotide
  Sense strand starting at position 162 of SEQ ID NO: 1881771
gcuguuaaauuauuagagu

SEQ ID NO: 2070455 - RNA, 19 nt, Artificial Sequence
  Description of Artificial Sequence: Synthetic oligonucleotide
  Antisense strand to SEQ ID NO: 2070454
acucuaauaauuuaacagc

SEQ ID NO: 2070456 - RNA, 19 nt, Artificial Sequence
  Description of Artificial Sequence: Synthetic oligonucleotide
  Sense strand starting at position 277 of SEQ ID NO: 1881771
agugauagcauguagauau

SEQ ID NO: 2070457 - RNA, 19 nt, Artificial Sequence
  Description of Artificial Sequence: Synthetic oligonucleotide
  Antisense strand to SEQ ID NO: 2070456
auaucuacaugcuaucacu

SEQ ID NO: 2070458 - RNA, 19 nt, Artificial Sequence
  Description of Artificial Sequence: Synthetic oligonucleotide
  Sense strand starting at position 325 of SEQ ID NO: 1881771
uugcaugaaugcucucaca

SEQ ID NO: 2070459 - RNA, 19 nt, Artificial Sequence
  Description of Artificial Sequence: Synthetic oligonucleotide
  Antisense strand to SEQ ID NO: 2070458
ugugagagcauucaugcaa

SEQ ID NO: 2070460 - RNA, 19 nt, Artificial Sequence
  Description of Artificial Sequence: Synthetic oligonucleotide
  Sense strand starting at position 458 of SEQ ID NO: 1881771
cuaggacauuuaugugaaa

SEQ ID NO: 2070461 - RNA, 19 nt, Artificial Sequence
  Description of Artificial Sequence: Synthetic oligonucleotide
  Antisense strand to SEQ ID NO: 2070460
uuucacauaaauguccuag

SEQ ID NO: 2070462 - RNA, 19 nt, Artificial Sequence
  Description of Artificial Sequence: Synthetic oligonucleotide
  Sense strand starting at position 476 of SEQ ID NO: 1881771
agggaaauucuaggcucca

SEQ ID NO: 2070463 - RNA, 19 nt, Artificial Sequence
  Description of Artificial Sequence: Synthetic oligonucleotide
  Antisense strand to SEQ ID NO: 2070462
uggagccuagaauuucccu

SEQ ID NO: 2070464 - RNA, 19 nt, Artificial Sequence
  Description of Artificial Sequence: Synthetic oligonucleotide
  Sense strand starting at position 477 of SEQ ID NO: 1881771
gggaaauucuaggcuccag

SEQ ID NO: 2070465 - RNA, 19 nt, Artificial Sequence
  Description of Artificial Sequence: Synthetic oligonucleotide
  Antisense strand to SEQ ID NO: 2070464
cuggagccuagaauuuccc

SEQ ID NO: 2070466 - RNA, 19 nt, Artificial Sequence
  Description of Artificial Sequence: Synthetic oligonucleotide
  Sense strand starting at position 596 of SEQ ID NO: 1881771
uguguugguccaguuugca

SEQ ID NO: 2070467 - RNA, 19 nt, Artificial Sequence
  Description of Artificial Sequence: Synthetic oligonucleotide
  Antisense strand to SEQ ID NO: 2070466
ugcaaacuggaccaacaca

SEQ ID NO: 2070468 - RNA, 19 nt, Artificial Sequence
  Description of Artificial Sequence: Synthetic oligonucleotide
  Sense strand starting at position 981 of SEQ ID NO: 1881771
ccauauuacgugcauauca

SEQ ID NO: 2070469 - RNA, 19 nt, Artificial Sequence
  Description of Artificial Sequence: Synthetic oligonucleotide
  Antisense strand to SEQ ID NO: 2070468
ugauaugcacguaauaugg

SEQ ID NO: 2070470 - RNA, 19 nt, Artificial Sequence
  Description of Artificial Sequence: Synthetic oligonucleotide
  Sense strand starting at position 1046 of SEQ ID NO: 1881771
gacaaugguuacucuaaag

SEQ ID NO: 2070471 - RNA, 19 nt, Artificial Sequence
  Description of Artificial Sequence: Synthetic oligonucleotide
  Antisense strand to SEQ ID NO: 2070470
cuuuagaguaaccauuguc

SEQ ID NO: 2070472 - RNA, 19 nt, Artificial Sequence
  Description of Artificial Sequence: Synthetic oligonucleotide
  Sense strand starting at position 1383 of SEQ ID NO: 1881771
gguguuuaauauuuacgca

SEQ ID NO: 2070473 - RNA, 19 nt, Artificial Sequence
  Description of Artificial Sequence: Synthetic oligonucleotide
  Antisense strand to SEQ ID NO: 2070472
ugcguaaauauuaaacacc

SEQ ID NO: 2070474 - RNA, 19 nt, Artificial Sequence
  Description of Artificial Sequence: Synthetic oligonucleotide
  Sense strand starting at position 1488 of SEQ ID NO: 1881771
aaaugaaaguaguagauga

SEQ ID NO: 2070475 - RNA, 19 nt, Artificial Sequence
  Description of Artificial Sequence: Synthetic oligonucleotide
  Antisense strand to SEQ ID NO: 2070474
ucaucuacuacuuucauuu

SEQ ID NO: 2070476 - RNA, 19 nt, Artificial Sequence
  Description of Artificial Sequence: Synthetic oligonucleotide
  Sense strand starting at position 1548 of SEQ ID NO: 1881771
uacuaauauuguguccgga

SEQ ID NO: 2070477 - RNA, 19 nt, Artificial Sequence
  Description of Artificial Sequence: Synthetic oligonucleotide
  Antisense strand to SEQ ID NO: 2070476
uccggacacaauauuagua

SEQ ID NO: 2070478 - RNA, 19 nt, Artificial Sequence
  Description of Artificial Sequence: Synthetic oligonucleotide
  Sense strand starting at position 1550 of SEQ ID NO: 1881771
cuaauauuguguccggaau

SEQ ID NO: 2070479 - RNA, 19 nt, Artificial Sequence
  Description of Artificial Sequence: Synthetic oligonucleotide
  Antisense strand to SEQ ID NO: 2070478
auuccggacacaauauuag

SEQ ID NO: 2070480 - RNA, 19 nt, Artificial Sequence
  Description of Artificial Sequence: Synthetic oligonucleotide
  Sense strand starting at position 1608 of SEQ ID NO: 1881771
gcagacccucaugguauaa

SEQ ID NO: 2070481 - RNA, 19 nt, Artificial Sequence
  Description of Artificial Sequence: Synthetic oligonucleotide
  Antisense strand to SEQ ID NO: 2070480
uuauaccaugagggucugc

SEQ ID NO: 2070482 - RNA, 19 nt, Artificial Sequence
  Description of Artificial Sequence: Synthetic oligonucleotide
  Sense strand starting at position 1619 of SEQ ID NO: 1881771
ugguauaaguguuccaguu

SEQ ID NO: 2070483 - RNA, 19 nt, Artificial Sequence
  Description of Artificial Sequence: Synthetic oligonucleotide
  Antisense strand to SEQ ID NO: 2070482
aacuggaacacuuauacca

SEQ ID NO: 2070484 - RNA, 19 nt, Artificial Sequence
  Description of Artificial Sequence: Synthetic oligonucleotide
  Sense strand starting at position 1782 of SEQ ID NO: 1881771
gcgcgucuggaauuguuca

SEQ ID NO: 2070485 - RNA, 19 nt, Artificial Sequence
  Description of Artificial Sequence: Synthetic oligonucleotide
  Antisense strand to SEQ ID NO: 2070484
ugaacaauuccagacgcgc

SEQ ID NO: 2070486 - RNA, 19 nt, Artificial Sequence
  Description of Artificial Sequence: Synthetic oligonucleotide
  Sense strand starting at position 2218 of SEQ ID NO: 1881771
acuuacaaaccuugaggua

SEQ ID NO: 2070487 - RNA, 19 nt, Artificial Sequence
  Description of Artificial Sequence: Synthetic oligonucleotide
  Antisense strand to SEQ ID NO: 2070486
uaccucaagguuuguaagu

SEQ ID NO: 2070488 - RNA, 19 nt, Artificial Sequence
  Description of Artificial Sequence: Synthetic oligonucleotide
  Sense strand starting at position 2462 of SEQ ID NO: 1881771
cuacaaucccuuggcuaga

SEQ ID NO: 2070489 - RNA, 19 nt, Artificial Sequence
  Description of Artificial Sequence: Synthetic oligonucleotide
  Antisense strand to SEQ ID NO: 2070488
ucuagccaagggauuguag

SEQ ID NO: 2070490 - RNA, 19 nt, Artificial Sequence
  Description of Artificial Sequence: Synthetic oligonucleotide
  Sense strand starting at position 3169 of SEQ ID NO: 1881771
acacauguauacguagauu

SEQ ID NO: 2070491 - RNA, 19 nt, Artificial Sequence
  Description of Artificial Sequence: Synthetic oligonucleotide
  Antisense strand to SEQ ID NO: 2070490
aaucuacguauacaugugu

SEQ ID NO: 2070492 - RNA, 19 nt, Artificial Sequence
  Description of Artificial Sequence: Synthetic oligonucleotide
  Sense strand starting at position 3172 of SEQ ID NO: 1881771
cauguauacguagauuaua

SEQ ID NO: 2070493 - RNA, 19 nt, Artificial Sequence
  Description of Artificial Sequence: Synthetic oligonucleotide
  Antisense strand to SEQ ID NO: 2070492
uauaaucuacguauacaug

SEQ ID NO: 2070494 - RNA, 19 nt, Artificial Sequence
  Description of Artificial Sequence: Synthetic oligonucleotide
  Sense strand starting at position 3241 of SEQ ID NO: 1881771
guuacuaaacuuuggguuu

SEQ ID NO: 2070495 - RNA, 19 nt, Artificial Sequence
  Description of Artificial Sequence: Synthetic oligonucleotide
  Antisense strand to SEQ ID NO: 2070494
aaacccaaaguuuaguaac

SEQ ID NO: 2070496 - RNA, 19 nt, Artificial Sequence
  Description of Artificial Sequence: Synthetic oligonucleotide
  Sense strand starting at position 3280 of SEQ ID NO: 1881771
cucagagguuaucucccau

SEQ ID NO: 2070497 - RNA, 19 nt, Artificial Sequence
  Description of Artificial Sequence: Synthetic oligonucleotide
  Antisense strand to SEQ ID NO: 2070496
augggagauaaccucugag

SEQ ID NO: 2070498 - RNA, 19 nt, Artificial Sequence
  Description of Artificial Sequence: Synthetic oligonucleotide
  Sense strand starting at position 3352 of SEQ ID NO: 1881771
ucaucagagaacugguguu

SEQ ID NO: 2070499 - RNA, 19 nt, Artificial Sequence
  Description of Artificial Sequence: Synthetic oligonucleotide
  Antisense strand to SEQ ID NO: 2070498
aacaccaguucucugauga

SEQ ID NO: 2070500 - RNA, 19 nt, Artificial Sequence
  Description of Artificial Sequence: Synthetic oligonucleotide
  Sense strand starting at position 3362 of SEQ ID NO: 1881771
acugguguugcagggcaaa

SEQ ID NO: 2070501 - RNA, 19 nt, Artificial Sequence
  Description of Artificial Sequence: Synthetic oligonucleotide
  Antisense strand to SEQ ID NO: 2070500
uuugcccugcaacaccagu

SEQ ID NO: 2070502 - RNA, 19 nt, Artificial Sequence
  Description of Artificial Sequence: Synthetic oligonucleotide
  Sense strand starting at position 3420 of SEQ ID NO: 1881771
gagucauagccugaucugu

SEQ ID NO: 2070503 - RNA, 19 nt, Artificial Sequence
  Description of Artificial Sequence: Synthetic oligonucleotide
  Antisense strand to SEQ ID NO: 2070502
acagaucaggcuaugacuc

SEQ ID NO: 2070504 - RNA, 19 nt, Artificial Sequence
  Description of Artificial Sequence: Synthetic oligonucleotide
  Sense strand starting at position 3422 of SEQ ID NO: 1881771
gucauagccugaucuguau

SEQ ID NO: 2070505 - RNA, 19 nt, Artificial Sequence
  Description of Artificial Sequence: Synthetic oligonucleotide
  Antisense strand to SEQ ID NO: 2070504
auacagaucaggcuaugac

SEQ ID NO: 2070506 - RNA, 19 nt, Artificial Sequence
  Description of Artificial Sequence: Synthetic oligonucleotide
  Sense strand starting at position 3425 of SEQ ID NO: 1881771
auagccugaucuguauacu

SEQ ID NO: 2070507 - RNA, 19 nt, Artificial Sequence
  Description of Artificial Sequence: Synthetic oligonucleotide
  Antisense strand to SEQ ID NO: 2070506
aguauacagaucaggcuau

SEQ ID NO: 2070508 - RNA, 19 nt, Artificial Sequence
  Description of Artificial Sequence: Synthetic oligonucleotide
  Sense strand starting at position 3428 of SEQ ID NO: 1881771
gccugaucuguauacugga

SEQ ID NO: 2070509 - RNA, 19 nt, Artificial Sequence
  Description of Artificial Sequence: Synthetic oligonucleotide
  Antisense strand to SEQ ID NO: 2070508
uccaguauacagaucaggc

SEQ ID NO: 2070510 - RNA, 19 nt, Artificial Sequence
  Description of Artificial Sequence: Synthetic oligonucleotide
  Sense strand starting at position 3433 of SEQ ID NO: 1881771
aucuguauacuggagcaga

SEQ ID NO: 2070511 - RNA, 19 nt, Artificial Sequence
  Description of Artificial Sequence: Synthetic oligonucleotide
  Antisense strand to SEQ ID NO: 2070510
ucugcuccaguauacagau

SEQ ID NO: 2070512 - RNA, 19 nt, Artificial Sequence
  Description of Artificial Sequence: Synthetic oligonucleotide
  Sense strand starting at position 3495 of SEQ ID NO: 1881771
uguaacaaauuguuguaga

SEQ ID NO: 2070513 - RNA, 19 nt, Artificial Sequence
  Description of Artificial Sequence: Synthetic oligonucleotide
  Antisense strand to SEQ ID NO: 2070512
ucuacaacaauuuguuaca

SEQ ID NO: 2070514 - RNA, 19 nt, Artificial Sequence
  Description of Artificial Sequence: Synthetic oligonucleotide
  Sense strand starting at position 3593 of SEQ ID NO: 1881771
ggacucuacuagguucuua

SEQ ID NO: 2070515 - RNA, 19 nt, Artificial Sequence
  Description of Artificial Sequence: Synthetic oligonucleotide
  Antisense strand to SEQ ID NO: 2070514
uaagaaccuaguagagucc

SEQ ID NO: 2070516 - RNA, 19 nt, Artificial Sequence
  Description of Artificial Sequence: Synthetic oligonucleotide
  Sense strand starting at position 3605 of SEQ ID NO: 1881771
guucuuagugcagaaacaa

SEQ ID NO: 2070517 - RNA, 19 nt, Artificial Sequence
  Description of Artificial Sequence: Synthetic oligonucleotide
  Antisense strand to SEQ ID NO: 2070516
uuguuucugcacuaagaac

SEQ ID NO: 2070518 - RNA, 19 nt, Artificial Sequence
  Description of Artificial Sequence: Synthetic oligonucleotide
  Sense strand starting at position 3786 of SEQ ID NO: 1881771
gugagaggauaggauucua

SEQ ID NO: 2070519 - RNA, 19 nt, Artificial Sequence
  Description of Artificial Sequence: Synthetic oligonucleotide
  Antisense strand to SEQ ID NO: 2070518
uagaauccuauccucucac

SEQ ID NO: 2070520 - RNA, 19 nt, Artificial Sequence
  Description of Artificial Sequence: Synthetic oligonucleotide
  Sense strand starting at position 3791 of SEQ ID NO: 1881771
aggauaggauucuaagaaa

SEQ ID NO: 2070521 - RNA, 19 nt, Artificial Sequence
  Description of Artificial Sequence: Synthetic oligonucleotide
  Antisense strand to SEQ ID NO: 2070520
uuucuuagaauccuauccu

SEQ ID NO: 2070522 - RNA, 19 nt, Artificial Sequence
  Description of Artificial Sequence: Synthetic oligonucleotide
  Sense strand starting at position 3794 of SEQ ID NO: 1881771
auaggauucuaagaaauac

SEQ ID NO: 2070523 - RNA, 19 nt, Artificial Sequence
  Description of Artificial Sequence: Synthetic oligonucleotide
  Antisense strand to SEQ ID NO: 2070522
guauuucuuagaauccuau

SEQ ID NO: 2070524 - RNA, 19 nt, Artificial Sequence
  Description of Artificial Sequence: Synthetic oligonucleotide
  Sense strand starting at position 3809 of SEQ ID NO: 1881771
auacauugugaaggucaca

SEQ ID NO: 2070525 - RNA, 19 nt, Artificial Sequence
  Description of Artificial Sequence: Synthetic oligonucleotide
  Antisense strand to SEQ ID NO: 2070524
ugugaccuucacaauguau

SEQ ID NO: 2070526 - RNA, 19 nt, Artificial Sequence
  Description of Artificial Sequence: Synthetic oligonucleotide
  Sense strand starting at position 3913 of SEQ ID NO: 1881771
ucagcaaggcucugguaua

SEQ ID NO: 2070527 - RNA, 19 nt, Artificial Sequence
  Description of Artificial Sequence: Synthetic oligonucleotide
  Antisense strand to SEQ ID NO: 2070526
uauaccagagccuugcuga

SEQ ID NO: 2070528 - RNA, 19 nt, Artificial Sequence
  Description of Artificial Sequence: Synthetic oligonucleotide
  Sense strand starting at position 3936 of SEQ ID NO: 1881771
caguguauuaaaggugaag

SEQ ID NO: 2070529 - RNA, 19 nt, Artificial Sequence
  Description of Artificial Sequence: Synthetic oligonucleotide
  Antisense strand to SEQ ID NO: 2070528
cuucaccuuuaauacacug

SEQ ID NO: 2070530 - RNA, 19 nt, Artificial Sequence
  Description of Artificial Sequence: Synthetic oligonucleotide
  Sense strand starting at position 3938 of SEQ ID NO: 1881771
guguauuaaaggugaagaa

SEQ ID NO: 2070531 - RNA, 19 nt, Artificial Sequence
  Description of Artificial Sequence: Synthetic oligonucleotide
  Antisense strand to SEQ ID NO: 2070530
uucuucaccuuuaauacac

SEQ ID NO: 2070532 - RNA, 19 nt, Artificial Sequence
  Description of Artificial Sequence: Synthetic oligonucleotide
  Sense strand starting at position 161 of SEQ ID NO: 1881772
augcaacacuuagcagaaa

SEQ ID NO: 2070533 - RNA, 19 nt, Artificial Sequence
  Description of Artificial Sequence: Synthetic oligonucleotide
  Antisense strand to SEQ ID NO: 2070532
uuucugcuaaguguugcau

SEQ ID NO: 2070534 - RNA, 19 nt, Artificial Sequence
  Description of Artificial Sequence: Synthetic oligonucleotide
  Sense strand starting at position 197 of SEQ ID NO: 1881772
ggagacaccugagggauaa

SEQ ID NO: 2070535 - RNA, 19 nt, Artificial Sequence
  Description of Artificial Sequence: Synthetic oligonucleotide
  Antisense strand to SEQ ID NO: 2070534
uuaucccucaggugucucc

SEQ ID NO: 2070536 - RNA, 19 nt, Artificial Sequence
  Description of Artificial Sequence: Synthetic oligonucleotide
  Sense strand starting at position 381 of SEQ ID NO: 1881772
agaacaauguguguucugu

SEQ ID NO: 2070537 - RNA, 19 nt, Artificial Sequence
  Description of Artificial Sequence: Synthetic oligonucleotide
  Antisense strand to SEQ ID NO: 2070536
acagaacacacauuguucu

SEQ ID NO: 2070538 - RNA, 19 nt, Artificial Sequence
  Description of Artificial Sequence: Synthetic oligonucleotide
  Sense strand starting at position 389 of SEQ ID NO: 1881772
guguguucugugugggaga

SEQ ID NO: 2070539 - RNA, 19 nt, Artificial Sequence
  Description of Artificial Sequence: Synthetic oligonucleotide
  Antisense strand to SEQ ID NO: 2070538
ucucccacacagaacacac

SEQ ID NO: 2070540 - RNA, 19 nt, Artificial Sequence
  Description of Artificial Sequence: Synthetic oligonucleotide
  Sense strand starting at position 391 of SEQ ID NO: 1881772
guguucugugugggagaga

SEQ ID NO: 2070541 - RNA, 19 nt, Artificial Sequence
  Description of Artificial Sequence: Synthetic oligonucleotide
  Antisense strand to SEQ ID NO: 2070540
ucucucccacacagaacac

SEQ ID NO: 2070542 - RNA, 19 nt, Artificial Sequence
  Description of Artificial Sequence: Synthetic oligonucleotide
  Sense strand starting at position 392 of SEQ ID NO: 1881772
uguucugugugggagagaa

SEQ ID NO: 2070543 - RNA, 19 nt, Artificial Sequence
  Description of Artificial Sequence: Synthetic oligonucleotide
  Antisense strand to SEQ ID NO: 2070542
uucucucccacacagaaca

SEQ ID NO: 2070544 - RNA, 19 nt, Artificial Sequence
  Description of Artificial Sequence: Synthetic oligonucleotide
  Sense strand starting at position 410 of SEQ ID NO: 1881772
acuaaugaguuuggaggaa

SEQ ID NO: 2070545 - RNA, 19 nt, Artificial Sequence
  Description of Artificial Sequence: Synthetic oligonucleotide
  Antisense strand to SEQ ID NO: 2070544
uuccuccaaacucauuagu

SEQ ID NO: 2070546 - RNA, 19 nt, Artificial Sequence
  Description of Artificial Sequence: Synthetic oligonucleotide
  Sense strand starting at position 536 of SEQ ID NO: 1881772
acguaaaguacgugggaaa

SEQ ID NO: 2070547 - RNA, 19 nt, Artificial Sequence
  Description of Artificial Sequence: Synthetic oligonucleotide
  Antisense strand to SEQ ID NO: 2070546
uuucccacguacuuuacgu

SEQ ID NO: 2070548 - RNA, 19 nt, Artificial Sequence
  Description of Artificial Sequence: Synthetic oligonucleotide
  Sense strand starting at position 703 of SEQ ID NO: 1881772
gccucugcuccuggagaaa

SEQ ID NO: 2070549 - RNA, 19 nt, Artificial Sequence
  Description of Artificial Sequence: Synthetic oligonucleotide
  Antisense strand to SEQ ID NO: 2070548
uuucuccaggagcagaggc

SEQ ID NO: 2070550 - RNA, 19 nt, Artificial Sequence
  Description of Artificial Sequence: Synthetic oligonucleotide
  Sense strand starting at position 787 of SEQ ID NO: 1881772
aaggaauggugagauggau

SEQ ID NO: 2070551 - RNA, 19 nt, Artificial Sequence
  Description of Artificial Sequence: Synthetic oligonucleotide
  Antisense strand to SEQ ID NO: 2070550
auccaucucaccauuccuu

SEQ ID NO: 2070552 - RNA, 19 nt, Artificial Sequence
  Description of Artificial Sequence: Synthetic oligonucleotide
  Sense strand starting at position 1143 of SEQ ID NO: 1881772
uugggacucuuaccuugua

SEQ ID NO: 2070553 - RNA, 19 nt, Artificial Sequence
  Description of Artificial Sequence: Synthetic oligonucleotide
  Antisense strand to SEQ ID NO: 2070552
uacaagguaagagucccaa

SEQ ID NO: 2070554 - RNA, 19 nt, Artificial Sequence
  Description of Artificial Sequence: Synthetic oligonucleotide
  Sense strand starting at position 1144 of SEQ ID NO: 1881772
ugggacucuuaccuuguau

SEQ ID NO: 2070555 - RNA, 19 nt, Artificial Sequence
  Description of Artificial Sequence: Synthetic oligonucleotide
  Antisense strand to SEQ ID NO: 2070554
auacaagguaagaguccca

SEQ ID NO: 2070556 - RNA, 19 nt, Artificial Sequence
  Description of Artificial Sequence: Synthetic oligonucleotide
  Sense strand starting at position 1148 of SEQ ID NO: 1881772
acucuuaccuuguauggaa

SEQ ID NO: 2070557 - RNA, 19 nt, Artificial Sequence
  Description of Artificial Sequence: Synthetic oligonucleotide
  Antisense strand to SEQ ID NO: 2070556
uuccauacaagguaagagu

SEQ ID NO: 2070558 - RNA, 19 nt, Artificial Sequence
  Description of Artificial Sequence: Synthetic oligonucleotide
  Sense strand starting at position 1419 of SEQ ID NO: 1881772
guagacuucuggugggaaa

SEQ ID NO: 2070559 - RNA, 19 nt, Artificial Sequence
  Description of Artificial Sequence: Synthetic oligonucleotide
  Antisense strand to SEQ ID NO: 2070558
uuucccaccagaagucuac

SEQ ID NO: 2070560 - RNA, 19 nt, Artificial Sequence
  Description of Artificial Sequence: Synthetic oligonucleotide
  Sense strand starting at position 2196 of SEQ ID NO: 1881772
gaaugagguuucgcgaaag

SEQ ID NO: 2070561 - RNA, 19 nt, Artificial Sequence
  Description of Artificial Sequence: Synthetic oligonucleotide
  Antisense strand to SEQ ID NO: 2070560
cuuucgcgaaaccucauuc

SEQ ID NO: 2070562 - RNA, 19 nt, Artificial Sequence
  Description of Artificial Sequence: Synthetic oligonucleotide
  Sense strand starting at position 2221 of SEQ ID NO: 1881772
aaauguaacugugaucuag

SEQ ID NO: 2070563 - RNA, 19 nt, Artificial Sequence
  Description of Artificial Sequence: Synthetic oligonucleotide
  Antisense strand to SEQ ID NO: 2070562
cuagaucacaguuacauuu

SEQ ID NO: 2070564 - RNA, 19 nt, Artificial Sequence
  Description of Artificial Sequence: Synthetic oligonucleotide
  Sense strand starting at position 2223 of SEQ ID NO: 1881772
auguaacugugaucuagug

SEQ ID NO: 2070565 - RNA, 19 nt, Artificial Sequence
  Description of Artificial Sequence: Synthetic oligonucleotide
  Antisense strand to SEQ ID NO: 2070564
cacuagaucacaguuacau

SEQ ID NO: 2070566 - RNA, 19 nt, Artificial Sequence
  Description of Artificial Sequence: Synthetic oligonucleotide
  Sense strand starting at position 2225 of SEQ ID NO: 1881772
guaacugugaucuagugcu

SEQ ID NO: 2070567 - RNA, 19 nt, Artificial Sequence
  Description of Artificial Sequence: Synthetic oligonucleotide
  Antisense strand to SEQ ID NO: 2070566
agcacuagaucacaguuac

SEQ ID NO: 2070568 - RNA, 19 nt, Artificial Sequence
  Description of Artificial Sequence: Synthetic oligonucleotide
  Sense strand starting at position 2269 of SEQ ID NO: 1881772
ccguguucucgaggacaaa

SEQ ID NO: 2070569 - RNA, 19 nt, Artificial Sequence
  Description of Artificial Sequence: Synthetic oligonucleotide
  Antisense strand to SEQ ID NO: 2070568
uuuguccucgagaacacgg

SEQ ID NO: 2070570 - RNA, 19 nt, Artificial Sequence
  Description of Artificial Sequence: Synthetic oligonucleotide
  Sense strand starting at position 2270 of SEQ ID NO: 1881772
cguguucucgaggacaaau

SEQ ID NO: 2070571 - RNA, 19 nt, Artificial Sequence
  Description of Artificial Sequence: Synthetic oligonucleotide
  Antisense strand to SEQ ID NO: 2070570
auuuguccucgagaacacg

SEQ ID NO: 2070572 - RNA, 19 nt, Artificial Sequence
  Description of Artificial Sequence: Synthetic oligonucleotide
  Sense strand starting at position 2335 of SEQ ID NO: 1881772
ccgcgaaucucaguccaca

SEQ ID NO: 2070573 - RNA, 19 nt, Artificial Sequence
  Description of Artificial Sequence: Synthetic oligonucleotide
  Antisense strand to SEQ ID NO: 2070572
uguggacugagauucgcgg

SEQ ID NO: 2070574 - RNA, 19 nt, Artificial Sequence
  Description of Artificial Sequence: Synthetic oligonucleotide
  Sense strand starting at position 2366 of SEQ ID NO: 1881772
uguggucguucaccuauuu

SEQ ID NO: 2070575 - RNA, 19 nt, Artificial Sequence
  Description of Artificial Sequence: Synthetic oligonucleotide
  Antisense strand to SEQ ID NO: 2070574
aaauaggugaacgaccaca

SEQ ID NO: 2070576 - RNA, 19 nt, Artificial Sequence
  Description of Artificial Sequence: Synthetic oligonucleotide
  Sense strand starting at position 2497 of SEQ ID NO: 1881772
gauugagucccguauugga

SEQ ID NO: 2070577 - RNA, 19 nt, Artificial Sequence
  Description of Artificial Sequence: Synthetic oligonucleotide
  Antisense strand to SEQ ID NO: 2070576
uccaauacgggacucaauc

SEQ ID NO: 2070578 - RNA, 19 nt, Artificial Sequence
  Description of Artificial Sequence: Synthetic oligonucleotide
  Sense strand starting at position 2552 of SEQ ID NO: 1881772
gcaggugauguauacaaac

SEQ ID NO: 2070579 - RNA, 19 nt, Artificial Sequence
  Description of Artificial Sequence: Synthetic oligonucleotide
  Antisense strand to SEQ ID NO: 2070578
guuuguauacaucaccugc

SEQ ID NO: 2070580 - RNA, 19 nt, Artificial Sequence
  Description of Artificial Sequence: Synthetic oligonucleotide
  Sense strand starting at position 2788 of SEQ ID NO: 1881772
ggcuuucuagcagacauug

SEQ ID NO: 2070581 - RNA, 19 nt, Artificial Sequence
  Description of Artificial Sequence: Synthetic oligonucleotide
  Antisense strand to SEQ ID NO: 2070580
caaugucugcuagaaagcc

SEQ ID NO: 2070582 - RNA, 19 nt, Artificial Sequence
  Description of Artificial Sequence: Synthetic oligonucleotide
  Sense strand starting at position 2911 of SEQ ID NO: 1881772
acucuucccuccgauugaa

SEQ ID NO: 2070583 - RNA, 19 nt, Artificial Sequence
  Description of Artificial Sequence: Synthetic oligonucleotide
  Antisense strand to SEQ ID NO: 2070582
uucaaucggagggaagagu

SEQ ID NO: 2070584 - RNA, 19 nt, Artificial Sequence
  Description of Artificial Sequence: Synthetic oligonucleotide
  Sense strand starting at position 2914 of SEQ ID NO: 1881772
cuucccuccgauugaaaua

SEQ ID NO: 2070585 - RNA, 19 nt, Artificial Sequence
  Description of Artificial Sequence: Synthetic oligonucleotide
  Antisense strand to SEQ ID NO: 2070584
uauuucaaucggagggaag

SEQ ID NO: 2070586 - RNA, 19 nt, Artificial Sequence
  Description of Artificial Sequence: Synthetic oligonucleotide
  Sense strand starting at position 2995 of SEQ ID NO: 1881772
cuccgugucucuguuccaa

SEQ ID NO: 2070587 - RNA, 19 nt, Artificial Sequence
  Description of Artificial Sequence: Synthetic oligonucleotide
  Antisense strand to SEQ ID NO: 2070586
uuggaacagagacacggag

SEQ ID NO: 2070588 - RNA, 19 nt, Artificial Sequence
  Description of Artificial Sequence: Synthetic oligonucleotide
  Sense strand starting at position 3206 of SEQ ID NO: 1881772
ccauguaauguagauacua

SEQ ID NO: 2070589 - RNA, 19 nt, Artificial Sequence
  Description of Artificial Sequence: Synthetic oligonucleotide
  Antisense strand to SEQ ID NO: 2070588
uaguaucuacauuacaugg

SEQ ID NO: 2070590 - RNA, 19 nt, Artificial Sequence
  Description of Artificial Sequence: Synthetic oligonucleotide
  Sense strand starting at position 3257 of SEQ ID NO: 1881772
aacgaaaguugauagaugu

SEQ ID NO: 2070591 - RNA, 19 nt, Artificial Sequence
  Description of Artificial Sequence: Synthetic oligonucleotide
  Antisense strand to SEQ ID NO: 2070590
acaucuaucaacuuucguu

SEQ ID NO: 2070592 - RNA, 19 nt, Artificial Sequence
  Description of Artificial Sequence: Synthetic oligonucleotide
  Sense strand starting at position 3264 of SEQ ID NO: 1881772
guugauagaugucacaaau

SEQ ID NO: 2070593 - RNA, 19 nt, Artificial Sequence
  Description of Artificial Sequence: Synthetic oligonucleotide
  Antisense strand to SEQ ID NO: 2070592
auuugugacaucuaucaac

SEQ ID NO: 2070594 - RNA, 19 nt, Artificial Sequence
  Description of Artificial Sequence: Synthetic oligonucleotide
  Sense strand starting at position 3339 of SEQ ID NO: 1881772
ugcuaucauccugaucugu

SEQ ID NO: 2070595 - RNA, 19 nt, Artificial Sequence
  Description of Artificial Sequence: Synthetic oligonucleotide
  Antisense strand to SEQ ID NO: 2070594
acagaucaggaugauagca

SEQ ID NO: 2070596 - RNA, 19 nt, Artificial Sequence
  Description of Artificial Sequence: Synthetic oligonucleotide
  Sense strand starting at position 3399 of SEQ ID NO: 1881772
ugucucuuauagucagaga

SEQ ID NO: 2070597 - RNA, 19 nt, Artificial Sequence
  Description of Artificial Sequence: Synthetic oligonucleotide
  Antisense strand to SEQ ID NO: 2070596
ucucugacuauaagagaca

SEQ ID NO: 2070598 - RNA, 19 nt, Artificial Sequence
  Description of Artificial Sequence: Synthetic oligonucleotide
  Sense strand starting at position 3404 of SEQ ID NO: 1881772
cuuauagucagagaugggu

SEQ ID NO: 2070599 - RNA, 19 nt, Artificial Sequence
  Description of Artificial Sequence: Synthetic oligonucleotide
  Antisense strand to SEQ ID NO: 2070598
acccaucucugacuauaag

SEQ ID NO: 2070600 - RNA, 19 nt, Artificial Sequence
  Description of Artificial Sequence: Synthetic oligonucleotide
  Sense strand starting at position 3410 of SEQ ID NO: 1881772
gucagagaugggugagaau

SEQ ID NO: 2070601 - RNA, 19 nt, Artificial Sequence
  Description of Artificial Sequence: Synthetic oligonucleotide
  Antisense strand to SEQ ID NO: 2070600
auucucacccaucucugac

SEQ ID NO: 2070602 - RNA, 19 nt, Artificial Sequence
  Description of Artificial Sequence: Synthetic oligonucleotide
  Sense strand starting at position 3444 of SEQ ID NO: 1881772
uuuaaauuccugcggucga

SEQ ID NO: 2070603 - RNA, 19 nt, Artificial Sequence
  Description of Artificial Sequence: Synthetic oligonucleotide
  Antisense strand to SEQ ID NO: 2070602
ucgaccgcaggaauuuaaa

SEQ ID NO: 2070604 - RNA, 19 nt, Artificial Sequence
  Description of Artificial Sequence: Synthetic oligonucleotide
  Sense strand starting at position 3478 of SEQ ID NO: 1881772
acaguuagguauccguguu

SEQ ID NO: 2070605 - RNA, 19 nt, Artificial Sequence
  Description of Artificial Sequence: Synthetic oligonucleotide
  Antisense strand to SEQ ID NO: 2070604
aacacggauaccuaacugu

SEQ ID NO: 2070606 - RNA, 19 nt, Artificial Sequence
  Description of Artificial Sequence: Synthetic oligonucleotide
  Sense strand starting at position 3582 of SEQ ID NO: 1881772
gagagagcuuuccacuaga

SEQ ID NO: 2070607 - RNA, 19 nt, Artificial Sequence
  Description of Artificial Sequence: Synthetic oligonucleotide
  Antisense strand to SEQ ID NO: 2070606
ucuaguggaaagcucucuc

SEQ ID NO: 2070608 - RNA, 19 nt, Artificial Sequence
  Description of Artificial Sequence: Synthetic oligonucleotide
  Sense strand starting at position 3585 of SEQ ID NO: 1881772
agagcuuuccacuagaugu

SEQ ID NO: 2070609 - RNA, 19 nt, Artificial Sequence
  Description of Artificial Sequence: Synthetic oligonucleotide
  Antisense strand to SEQ ID NO: 2070608
acaucuaguggaaagcucu

SEQ ID NO: 2070610 - RNA, 19 nt, Artificial Sequence
  Description of Artificial Sequence: Synthetic oligonucleotide
  Sense strand starting at position 3663 of SEQ ID NO: 1881772
ccguguucuggccuaggca

SEQ ID NO: 2070611 - RNA, 19 nt, Artificial Sequence
  Description of Artificial Sequence: Synthetic oligonucleotide
  Antisense strand to SEQ ID NO: 2070610
ugccuaggccagaacacgg

SEQ ID NO: 2070612 - RNA, 19 nt, Artificial Sequence
  Description of Artificial Sequence: Synthetic oligonucleotide
  Sense strand starting at position 191 of SEQ ID NO: 1881773
gcggaacuuagacggaaau

SEQ ID NO: 2070613 - RNA, 19 nt, Artificial Sequence
  Description of Artificial Sequence: Synthetic oligonucleotide
  Antisense strand to SEQ ID NO: 2070612
auuuccgucuaaguuccgc

SEQ ID NO: 2070614 - RNA, 19 nt, Artificial Sequence
  Description of Artificial Sequence: Synthetic oligonucleotide
  Sense strand starting at position 395 of SEQ ID NO: 1881773
gcaaguauccggaggcagu

SEQ ID NO: 2070615 - RNA, 19 nt, Artificial Sequence
  Description of Artificial Sequence: Synthetic oligonucleotide
  Antisense strand to SEQ ID NO: 2070614
acugccuccggauacuugc

SEQ ID NO: 2070616 - RNA, 19 nt, Artificial Sequence
  Description of Artificial Sequence: Synthetic oligonucleotide
  Sense strand starting at position 707 of SEQ ID NO: 1881773
uuaacauaugcccaacgaa

SEQ ID NO: 2070617 - RNA, 19 nt, Artificial Sequence
  Description of Artificial Sequence: Synthetic oligonucleotide
  Antisense strand to SEQ ID NO: 2070616
uucguugggcauauguuaa

SEQ ID NO: 2070618 - RNA, 19 nt, Artificial Sequence
  Description of Artificial Sequence: Synthetic oligonucleotide
  Sense strand starting at position 818 of SEQ ID NO: 1881773
cagcuugcuccugaaagag

SEQ ID NO: 2070619 - RNA, 19 nt, Artificial Sequence
  Description of Artificial Sequence: Synthetic oligonucleotide
  Antisense strand to SEQ ID NO: 2070618
cucuuucaggagcaagcug

SEQ ID NO: 2070620 - RNA, 19 nt, Artificial Sequence
  Description of Artificial Sequence: Synthetic oligonucleotide
  Sense strand starting at position 840 of SEQ ID NO: 1881773
auucuauagucuuuggaga

SEQ ID NO: 2070621 - RNA, 19 nt, Artificial Sequence
  Description of Artificial Sequence: Synthetic oligonucleotide
  Antisense strand to SEQ ID NO: 2070620
ucuccaaagacuauagaau

SEQ ID NO: 2070622 - RNA, 19 nt, Artificial Sequence
  Description of Artificial Sequence: Synthetic oligonucleotide
  Sense strand starting at position 841 of SEQ ID NO: 1881773
uucuauagucuuuggagaa

SEQ ID NO: 2070623 - RNA, 19 nt, Artificial Sequence
  Description of Artificial Sequence: Synthetic oligonucleotide
  Antisense strand to SEQ ID NO: 2070622
uucuccaaagacuauagaa

SEQ ID NO: 2070624 - RNA, 19 nt, Artificial Sequence
  Description of Artificial Sequence: Synthetic oligonucleotide
  Sense strand starting at position 955 of SEQ ID NO: 1881773
ucaguuccuguagauuaga

SEQ ID NO: 2070625 - RNA, 19 nt, Artificial Sequence
  Description of Artificial Sequence: Synthetic oligonucleotide
  Antisense strand to SEQ ID NO: 2070624
ucuaaucuacaggaacuga

SEQ ID NO: 2070626 - RNA, 19 nt, Artificial Sequence
  Description of Artificial Sequence: Synthetic oligonucleotide
  Sense strand starting at position 1014 of SEQ ID NO: 1881773
aucccuuuauuuguguauu

SEQ ID NO: 2070627 - RNA, 19 nt, Artificial Sequence
  Description of Artificial Sequence: Synthetic oligonucleotide
  Antisense strand to SEQ ID NO: 2070626
aauacacaaauaaagggau

SEQ ID NO: 2070628 - RNA, 19 nt, Artificial Sequence
  Description of Artificial Sequence: Synthetic oligonucleotide
  Sense strand starting at position 1016 of SEQ ID NO: 1881773
cccuuuauuuguguauuga

SEQ ID NO: 2070629 - RNA, 19 nt, Artificial Sequence
  Description of Artificial Sequence: Synthetic oligonucleotide
  Antisense strand to SEQ ID NO: 2070628
ucaauacacaaauaaaggg

SEQ ID NO: 2070630 - RNA, 19 nt, Artificial Sequence
  Description of Artificial Sequence: Synthetic oligonucleotide
  Sense strand starting at position 1054 of SEQ ID NO: 1881773
ggaacucuaugcccugaca

SEQ ID NO: 2070631 - RNA, 19 nt, Artificial Sequence
  Description of Artificial Sequence: Synthetic oligonucleotide
  Antisense strand to SEQ ID NO: 2070630
ugucagggcauagaguucc

SEQ ID NO: 2070632 - RNA, 19 nt, Artificial Sequence
  Description of Artificial Sequence: Synthetic oligonucleotide
  Sense strand starting at position 1057 of SEQ ID NO: 1881773
acucuaugcccugacaguu

SEQ ID NO: 2070633 - RNA, 19 nt, Artificial Sequence
  Description of Artificial Sequence: Synthetic oligonucleotide
  Antisense strand to SEQ ID NO: 2070632
aacugucagggcauagagu

SEQ ID NO: 2070634 - RNA, 19 nt, Artificial Sequence
  Description of Artificial Sequence: Synthetic oligonucleotide
  Sense strand starting at position 1121 of SEQ ID NO: 1881773
cgugaaacgaauuagauac

SEQ ID NO: 2070635 - RNA, 19 nt, Artificial Sequence
  Description of Artificial Sequence: Synthetic oligonucleotide
  Antisense strand to SEQ ID NO: 2070634
guaucuaauucguuucacg

SEQ ID NO: 2070636 - RNA, 19 nt, Artificial Sequence
  Description of Artificial Sequence: Synthetic oligonucleotide
  Sense strand starting at position 1185 of SEQ ID NO: 1881773
gcggcaugucccuugguaa

SEQ ID NO: 2070637 - RNA, 19 nt, Artificial Sequence
  Description of Artificial Sequence: Synthetic oligonucleotide
  Antisense strand to SEQ ID NO: 2070636
uuaccaagggacaugccgc

SEQ ID NO: 2070638 - RNA, 19 nt, Artificial Sequence
  Description of Artificial Sequence: Synthetic oligonucleotide
  Sense strand starting at position 1247 of SEQ ID NO: 1881773
uucguaaggauguaacuau

SEQ ID NO: 2070639 - RNA, 19 nt, Artificial Sequence
  Description of Artificial Sequence: Synthetic oligonucleotide
  Antisense strand to SEQ ID NO: 2070638
auaguuacauccuuacgaa

SEQ ID NO: 2070640 - RNA, 19 nt, Artificial Sequence
  Description of Artificial Sequence: Synthetic oligonucleotide
  Sense strand starting at position 1409 of SEQ ID NO: 1881773
cugaguuucccucagccaa

SEQ ID NO: 2070641 - RNA, 19 nt, Artificial Sequence
  Description of Artificial Sequence: Synthetic oligonucleotide
  Antisense strand to SEQ ID NO: 2070640
uuggcugagggaaacucag

SEQ ID NO: 2070642 - RNA, 19 nt, Artificial Sequence
  Description of Artificial Sequence: Synthetic oligonucleotide
  Sense strand starting at position 2289 of SEQ ID NO: 1881773
gagcguuuggguccgaagu

SEQ ID NO: 2070643 - RNA, 19 nt, Artificial Sequence
  Description of Artificial Sequence: Synthetic oligonucleotide
  Antisense strand to SEQ ID NO: 2070642
acuucggacccaaacgcuc

SEQ ID NO: 2070644 - RNA, 19 nt, Artificial Sequence
  Description of Artificial Sequence: Synthetic oligonucleotide
  Sense strand starting at position 2578 of SEQ ID NO: 1881773
augggacugugggugaauu

SEQ ID NO: 2070645 - RNA, 19 nt, Artificial Sequence
  Description of Artificial Sequence: Synthetic oligonucleotide
  Antisense strand to SEQ ID NO: 2070644
aauucacccacagucccau

SEQ ID NO: 2070646 - RNA, 19 nt, Artificial Sequence
  Description of Artificial Sequence: Synthetic oligonucleotide
  Sense strand starting at position 2579 of SEQ ID NO: 1881773
ugggacugugggugaauua

SEQ ID NO: 2070647 - RNA, 19 nt, Artificial Sequence
  Description of Artificial Sequence: Synthetic oligonucleotide
  Antisense strand to SEQ ID NO: 2070646
uaauucacccacaguccca

SEQ ID NO: 2070648 - RNA, 19 nt, Artificial Sequence
  Description of Artificial Sequence: Synthetic oligonucleotide
  Sense strand starting at position 2586 of SEQ ID NO: 1881773
gugggugaauuacuauaau

SEQ ID NO: 2070649 - RNA, 19 nt, Artificial Sequence
  Description of Artificial Sequence: Synthetic oligonucleotide
  Antisense strand to SEQ ID NO: 2070648
auuauaguaauucacccac

SEQ ID NO: 2070650 - RNA, 19 nt, Artificial Sequence
  Description of Artificial Sequence: Synthetic oligonucleotide
  Sense strand starting at position 2724 of SEQ ID NO: 1881773
guaaauaaaugaguggcaa

SEQ ID NO: 2070651 - RNA, 19 nt, Artificial Sequence
  Description of Artificial Sequence: Synthetic oligonucleotide
  Antisense strand to SEQ ID NO: 2070650
uugccacucauuuauuuac

SEQ ID NO: 2070652 - RNA, 19 nt, Artificial Sequence
  Description of Artificial Sequence: Synthetic oligonucleotide
  Sense strand starting at position 2971 of SEQ ID NO: 1881773
uuagaugucauauagguug

SEQ ID NO: 2070653 - RNA, 19 nt, Artificial Sequence
  Description of Artificial Sequence: Synthetic oligonucleotide
  Antisense strand to SEQ ID NO: 2070652
caaccuauaugacaucuaa

SEQ ID NO: 2070654 - RNA, 19 nt, Artificial Sequence
  Description of Artificial Sequence: Synthetic oligonucleotide
  Sense strand starting at position 3114 of SEQ ID NO: 1881773
cucucagauguguacagua

SEQ ID NO: 2070655 - RNA, 19 nt, Artificial Sequence
  Description of Artificial Sequence: Synthetic oligonucleotide
  Antisense strand to SEQ ID NO: 2070654
uacuguacacaucugagag

SEQ ID NO: 2070656 - RNA, 19 nt, Artificial Sequence
  Description of Artificial Sequence: Synthetic oligonucleotide
  Sense strand starting at position 3116 of SEQ ID NO: 1881773
cucagauguguacaguaga

SEQ ID NO: 2070657 - RNA, 19 nt, Artificial Sequence
  Description of Artificial Sequence: Synthetic oligonucleotide
  Antisense strand to SEQ ID NO: 2070656
ucuacuguacacaucugag

SEQ ID NO: 2070658 - RNA, 19 nt, Artificial Sequence
  Description of Artificial Sequence: Synthetic oligonucleotide
  Sense strand starting at position 3119 of SEQ ID NO: 1881773
agauguguacaguagaacu

SEQ ID NO: 2070659 - RNA, 19 nt, Artificial Sequence
  Description of Artificial Sequence: Synthetic oligonucleotide
  Antisense strand to SEQ ID NO: 2070658
aguucuacuguacacaucu

SEQ ID NO: 2070660 - RNA, 19 nt, Artificial Sequence
  Description of Artificial Sequence: Synthetic oligonucleotide
  Sense strand starting at position 3170 of SEQ ID NO: 1881773
ucgugauugggucacuaau

SEQ ID NO: 2070661 - RNA, 19 nt, Artificial Sequence
  Description of Artificial Sequence: Synthetic oligonucleotide
  Antisense strand to SEQ ID NO: 2070660
auuagugacccaaucacga

SEQ ID NO: 2070662 - RNA, 19 nt, Artificial Sequence
  Description of Artificial Sequence: Synthetic oligonucleotide
  Sense strand starting at position 3172 of SEQ ID NO: 1881773
gugauugggucacuaauaa

SEQ ID NO: 2070663 - RNA, 19 nt, Artificial Sequence
  Description of Artificial Sequence: Synthetic oligonucleotide
  Antisense strand to SEQ ID NO: 2070662
uuauuagugacccaaucac

SEQ ID NO: 2070664 - RNA, 19 nt, Artificial Sequence
  Description of Artificial Sequence: Synthetic oligonucleotide
  Sense strand starting at position 3259 of SEQ ID NO: 1881773
ugaaauuguaaguggaugu

SEQ ID NO: 2070665 - RNA, 19 nt, Artificial Sequence
  Description of Artificial Sequence: Synthetic oligonucleotide
  Antisense strand to SEQ ID NO: 2070664
acauccacuuacaauuuca

SEQ ID NO: 2070666 - RNA, 19 nt, Artificial Sequence
  Description of Artificial Sequence: Synthetic oligonucleotide
  Sense strand starting at position 3260 of SEQ ID NO: 1881773
gaaauuguaaguggaugua

SEQ ID NO: 2070667 - RNA, 19 nt, Artificial Sequence
  Description of Artificial Sequence: Synthetic oligonucleotide
  Antisense strand to SEQ ID NO: 2070666
uacauccacuuacaauuuc

SEQ ID NO: 2070668 - RNA, 19 nt, Artificial Sequence
  Description of Artificial Sequence: Synthetic oligonucleotide
  Sense strand starting at position 3486 of SEQ ID NO: 1881773
ggcuuauuccaacagaggu

SEQ ID NO: 2070669 - RNA, 19 nt, Artificial Sequence
  Description of Artificial Sequence: Synthetic oligonucleotide
  Antisense strand to SEQ ID NO: 2070668
accucuguuggaauaagcc

SEQ ID NO: 2070670 - RNA, 19 nt, Artificial Sequence
  Description of Artificial Sequence: Synthetic oligonucleotide
  Sense strand starting at position 3496 of SEQ ID NO: 1881773
aacagagguccucaaagcu

SEQ ID NO: 2070671 - RNA, 19 nt, Artificial Sequence
  Description of Artificial Sequence: Synthetic oligonucleotide
  Antisense strand to SEQ ID NO: 2070670
agcuuugaggaccucuguu

SEQ ID NO: 2070672 - RNA, 19 nt, Artificial Sequence
  Description of Artificial Sequence: Synthetic oligonucleotide
  Sense strand starting at position 3740 of SEQ ID NO: 1881773
agcuguuuccuggaaugac

SEQ ID NO: 2070673 - RNA, 19 nt, Artificial Sequence
  Description of Artificial Sequence: Synthetic oligonucleotide
  Antisense strand to SEQ ID NO: 2070672
gucauuccaggaaacagcu

SEQ ID NO: 2070674 - RNA, 19 nt, Artificial Sequence
  Description of Artificial Sequence: Synthetic oligonucleotide
  Sense strand starting at position 3803 of SEQ ID NO: 1881773
guuugucuugaauauagga

SEQ ID NO: 2070675 - RNA, 19 nt, Artificial Sequence
  Description of Artificial Sequence: Synthetic oligonucleotide
  Antisense strand to SEQ ID NO: 2070674
uccuauauucaagacaaac

SEQ ID NO: 2070676 - RNA, 19 nt, Artificial Sequence
  Description of Artificial Sequence: Synthetic oligonucleotide
  Sense strand starting at position 3816 of SEQ ID NO: 1881773
auaggaggcaugugagaau

SEQ ID NO: 2070677 - RNA, 19 nt, Artificial Sequence
  Description of Artificial Sequence: Synthetic oligonucleotide
  Antisense strand to SEQ ID NO: 2070676
auucucacaugccuccuau

SEQ ID NO: 2070678 - RNA, 19 nt, Artificial Sequence
  Description of Artificial Sequence: Synthetic oligonucleotide
  Sense strand starting at position 3829 of SEQ ID NO: 1881773
gagaaugcauaguccuuau

SEQ ID NO: 2070679 - RNA, 19 nt, Artificial Sequence
  Description of Artificial Sequence: Synthetic oligonucleotide
  Antisense strand to SEQ ID NO: 2070678
auaaggacuaugcauucuc

SEQ ID NO: 2070680 - RNA, 19 nt, Artificial Sequence
  Description of Artificial Sequence: Synthetic oligonucleotide
  Sense strand starting at position 3833 of SEQ ID NO: 1881773
augcauaguccuuaugaca

SEQ ID NO: 2070681 - RNA, 19 nt, Artificial Sequence
  Description of Artificial Sequence: Synthetic oligonucleotide
  Antisense strand to SEQ ID NO: 2070680
ugucauaaggacuaugcau

SEQ ID NO: 2070682 - RNA, 19 nt, Artificial Sequence
  Description of Artificial Sequence: Synthetic oligonucleotide
  Sense strand starting at position 3904 of SEQ ID NO: 1881773
cuauucuggcuguacuaga

SEQ ID NO: 2070683 - RNA, 19 nt, Artificial Sequence
  Description of Artificial Sequence: Synthetic oligonucleotide
  Antisense strand to SEQ ID NO: 2070682
ucuaguacagccagaauag

SEQ ID NO: 2070684 - RNA, 19 nt, Artificial Sequence
  Description of Artificial Sequence: Synthetic oligonucleotide
  Sense strand starting at position 3909 of SEQ ID NO: 1881773
cuggcuguacuagaugaau

SEQ ID NO: 2070685 - RNA, 19 nt, Artificial Sequence
  Description of Artificial Sequence: Synthetic oligonucleotide
  Antisense strand to SEQ ID NO: 2070684
auucaucuaguacagccag

SEQ ID NO: 2070686 - RNA, 19 nt, Artificial Sequence
  Description of Artificial Sequence: Synthetic oligonucleotide
  Sense strand starting at position 3911 of SEQ ID NO: 1881773
ggcuguacuagaugaauua

SEQ ID NO: 2070687 - RNA, 19 nt, Artificial Sequence
  Description of Artificial Sequence: Synthetic oligonucleotide
  Antisense strand to SEQ ID NO: 2070686
uaauucaucuaguacagcc

SEQ ID NO: 2070688 - RNA, 19 nt, Artificial Sequence
  Description of Artificial Sequence: Synthetic oligonucleotide
  Sense strand starting at position 3912 of SEQ ID NO: 1881773
gcuguacuagaugaauuac

SEQ ID NO: 2070689 - RNA, 19 nt, Artificial Sequence
  Description of Artificial Sequence: Synthetic oligonucleotide
  Antisense strand to SEQ ID NO: 2070688
guaauucaucuaguacagc

SEQ ID NO: 2070690 - RNA, 19 nt, Artificial Sequence
  Description of Artificial Sequence: Synthetic oligonucleotide
  Sense strand starting at position 3945 of SEQ ID NO: 1881773
agauacuaguccuuauuac

SEQ ID NO: 2070691 - RNA, 19 nt, Artificial Sequence
  Description of Artificial Sequence: Synthetic oligonucleotide
  Antisense strand to SEQ ID NO: 2070690
guaauaaggacuaguaucu

SEQ ID NO: 2070692 - RNA, 19 nt, Artificial Sequence
  Description of Artificial Sequence: Synthetic oligonucleotide
  Sense strand starting at position 1067 of SEQ ID NO: 1881774
gcucauuugugccuguaau

SEQ ID NO: 2070693 - RNA, 19 nt, Artificial Sequence
  Description of Artificial Sequence: Synthetic oligonucleotide
  Antisense strand to SEQ ID NO: 2070692
auuacaggcacaaaugagc

SEQ ID NO: 2070694 - RNA, 19 nt, Artificial Sequence
  Description of Artificial Sequence: Synthetic oligonucleotide
  Sense strand starting at position 1068 of SEQ ID NO: 1881774
cucauuugugccuguaauc

SEQ ID NO: 2070695 - RNA, 19 nt, Artificial Sequence
  Description of Artificial Sequence: Synthetic oligonucleotide
  Antisense strand to SEQ ID NO: 2070694
gauuacaggcacaaaugag

SEQ ID NO: 2070696 - RNA, 19 nt, Artificial Sequence
  Description of Artificial Sequence: Synthetic oligonucleotide
  Sense strand starting at position 1253 of SEQ ID NO: 1881774
cccugaaccgucuggguau

SEQ ID NO: 2070697 - RNA, 19 nt, Artificial Sequence
  Description of Artificial Sequence: Synthetic oligonucleotide
  Antisense strand to SEQ ID NO: 2070696
auacccagacgguucaggg

SEQ ID NO: 2070698 - RNA, 19 nt, Artificial Sequence
  Description of Artificial Sequence: Synthetic oligonucleotide
  Sense strand starting at position 1303 of SEQ ID NO: 1881774
gcugaucucggauagcaca

SEQ ID NO: 2070699 - RNA, 19 nt, Artificial Sequence
  Description of Artificial Sequence: Synthetic oligonucleotide
  Antisense strand to SEQ ID NO: 2070698
ugugcuauccgagaucagc

SEQ ID NO: 2070700 - RNA, 19 nt, Artificial Sequence
  Description of Artificial Sequence: Synthetic oligonucleotide
  Sense strand starting at position 1348 of SEQ ID NO: 1881774
gggucuccugccugaucca

SEQ ID NO: 2070701 - RNA, 19 nt, Artificial Sequence
  Description of Artificial Sequence: Synthetic oligonucleotide
  Antisense strand to SEQ ID NO: 2070700
uggaucaggcaggagaccc

SEQ ID NO: 2070702 - RNA, 19 nt, Artificial Sequence
  Description of Artificial Sequence: Synthetic oligonucleotide
  Sense strand starting at position 592 of SEQ ID NO: 1881775
gaugguucccugugcaaug

SEQ ID NO: 2070703 - RNA, 19 nt, Artificial Sequence
  Description of Artificial Sequence: Synthetic oligonucleotide
  Antisense strand to SEQ ID NO: 2070702
cauugcacagggaaccauc

SEQ ID NO: 2070704 - RNA, 19 nt, Artificial Sequence
  Description of Artificial Sequence: Synthetic oligonucleotide
  Sense strand starting at position 709 of SEQ ID NO: 1881775
ucucaaaugucauugcaug

SEQ ID NO: 2070705 - RNA, 19 nt, Artificial Sequence
  Description of Artificial Sequence: Synthetic oligonucleotide
  Antisense strand to SEQ ID NO: 2070704
caugcaaugacauuugaga

SEQ ID NO: 2070706 - RNA, 19 nt, Artificial Sequence
  Description of Artificial Sequence: Synthetic oligonucleotide
  Sense strand starting at position 710 of SEQ ID NO: 1881775
cucaaaugucauugcauga

SEQ ID NO: 2070707 - RNA, 19 nt, Artificial Sequence
  Description of Artificial Sequence: Synthetic oligonucleotide
  Antisense strand to SEQ ID NO: 2070706
ucaugcaaugacauuugag

SEQ ID NO: 2070708 - RNA, 19 nt, Artificial Sequence
  Description of Artificial Sequence: Synthetic oligonucleotide
  Sense strand starting at position 715 of SEQ ID NO: 1881775
augucauugcaugaccaca

SEQ ID NO: 2070709 - RNA, 19 nt, Artificial Sequence
  Description of Artificial Sequence: Synthetic oligonucleotide
  Antisense strand to SEQ ID NO: 2070708
uguggucaugcaaugacau

SEQ ID NO: 2070710 - RNA, 19 nt, Artificial Sequence
  Description of Artificial Sequence: Synthetic oligonucleotide
  Sense strand starting at position 805 of SEQ ID NO: 1881775
agcaaauauaugugaggau

SEQ ID NO: 2070711 - RNA, 19 nt, Artificial Sequence
  Description of Artificial Sequence: Synthetic oligonucleotide
  Antisense strand to SEQ ID NO: 2070710
auccucacauauauuugcu

SEQ ID NO: 2070712 - RNA, 19 nt, Artificial Sequence
  Description of Artificial Sequence: Synthetic oligonucleotide
  Sense strand starting at position 806 of SEQ ID NO: 1881775
gcaaauauaugugaggauu

SEQ ID NO: 2070713 - RNA, 19 nt, Artificial Sequence
  Description of Artificial Sequence: Synthetic oligonucleotide
  Antisense strand to SEQ ID NO: 2070712
aauccucacauauauuugc

SEQ ID NO: 2070714 - RNA, 19 nt, Artificial Sequence
  Description of Artificial Sequence: Synthetic oligonucleotide
  Sense strand starting at position 855 of SEQ ID NO: 1881775
ggacauccuccagguagga

SEQ ID NO: 2070715 - RNA, 19 nt, Artificial Sequence
  Description of Artificial Sequence: Synthetic oligonucleotide
  Antisense strand to SEQ ID NO: 2070714
uccuaccuggaggaugucc

SEQ ID NO: 2070716 - RNA, 19 nt, Artificial Sequence
  Description of Artificial Sequence: Synthetic oligonucleotide
  Sense strand starting at position 1114 of SEQ ID NO: 1881775
gcggcucuguggaugacaa

SEQ ID NO: 2070717 - RNA, 19 nt, Artificial Sequence
  Description of Artificial Sequence: Synthetic oligonucleotide
  Antisense strand to SEQ ID NO: 2070716
uugucauccacagagccgc

SEQ ID NO: 2070718 - RNA, 19 nt, Artificial Sequence
  Description of Artificial Sequence: Synthetic oligonucleotide
  Sense strand starting at position 1115 of SEQ ID NO: 1881775
cggcucuguggaugacaaa

SEQ ID NO: 2070719 - RNA, 19 nt, Artificial Sequence
  Description of Artificial Sequence: Synthetic oligonucleotide
  Antisense strand to SEQ ID NO: 2070718
uuugucauccacagagccg

SEQ ID NO: 2070720 - RNA, 19 nt, Artificial Sequence
  Description of Artificial Sequence: Synthetic oligonucleotide
  Sense strand starting at position 1413 of SEQ ID NO: 1881775
ggcuuaucaccguggucca

SEQ ID NO: 2070721 - RNA, 19 nt, Artificial Sequence
  Description of Artificial Sequence: Synthetic oligonucleotide
  Antisense strand to SEQ ID NO: 2070720
uggaccacggugauaagcc

SEQ ID NO: 2070722 - RNA, 19 nt, Artificial Sequence
  Description of Artificial Sequence: Synthetic oligonucleotide
  Sense strand starting at position 1831 of SEQ ID NO: 1881775
gagcuuagcguuuggccaa

SEQ ID NO: 2070723 - RNA, 19 nt, Artificial Sequence
  Description of Artificial Sequence: Synthetic oligonucleotide
  Antisense strand to SEQ ID NO: 2070722
uuggccaaacgcuaagcuc

SEQ ID NO: 2070724 - RNA, 19 nt, Artificial Sequence
  Description of Artificial Sequence: Synthetic oligonucleotide
  Sense strand starting at position 1832 of SEQ ID NO: 1881775
agcuuagcguuuggccaaa

SEQ ID NO: 2070725 - RNA, 19 nt, Artificial Sequence
  Description of Artificial Sequence: Synthetic oligonucleotide
  Antisense strand to SEQ ID NO: 2070724
uuuggccaaacgcuaagcu

SEQ ID NO: 2070726 - RNA, 19 nt, Artificial Sequence
  Description of Artificial Sequence: Synthetic oligonucleotide
  Sense strand starting at position 1875 of SEQ ID NO: 1881775
uccuguuagggcuguguga

SEQ ID NO: 2070727 - RNA, 19 nt, Artificial Sequence
  Description of Artificial Sequence: Synthetic oligonucleotide
  Antisense strand to SEQ ID NO: 2070726
ucacacagcccuaacagga

SEQ ID NO: 2070728 - RNA, 19 nt, Artificial Sequence
  Description of Artificial Sequence: Synthetic oligonucleotide
  Sense strand starting at position 2153 of SEQ ID NO: 1881775
aggugcuccgccuggaaau

SEQ ID NO: 2070729 - RNA, 19 nt, Artificial Sequence
  Description of Artificial Sequence: Synthetic oligonucleotide
  Antisense strand to SEQ ID NO: 2070728
auuuccaggcggagcaccu

SEQ ID NO: 2070730 - RNA, 19 nt, Artificial Sequence
  Description of Artificial Sequence: Synthetic oligonucleotide
  Sense strand starting at position 2164 of SEQ ID NO: 1881775
cuggaaaugucuccauuag

SEQ ID NO: 2070731 - RNA, 19 nt, Artificial Sequence
  Description of Artificial Sequence: Synthetic oligonucleotide
  Antisense strand to SEQ ID NO: 2070730
cuaauggagacauuuccag

SEQ ID NO: 2070732 - RNA, 19 nt, Artificial Sequence
  Description of Artificial Sequence: Synthetic oligonucleotide
  Sense strand starting at position 2165 of SEQ ID NO: 1881775
uggaaaugucuccauuagu

SEQ ID NO: 2070733 - RNA, 19 nt, Artificial Sequence
  Description of Artificial Sequence: Synthetic oligonucleotide
  Antisense strand to SEQ ID NO: 2070732
acuaauggagacauuucca

SEQ ID NO: 2070734 - RNA, 19 nt, Artificial Sequence
  Description of Artificial Sequence: Synthetic oligonucleotide
  Sense strand starting at position 2490 of SEQ ID NO: 1881775
gcacaaacuuugcgaggau

SEQ ID NO: 2070735 - RNA, 19 nt, Artificial Sequence
  Description of Artificial Sequence: Synthetic oligonucleotide
  Antisense strand to SEQ ID NO: 2070734
auccucgcaaaguuugugc

SEQ ID NO: 2070736 - RNA, 19 nt, Artificial Sequence
  Description of Artificial Sequence: Synthetic oligonucleotide
  Sense strand starting at position 2491 of SEQ ID NO: 1881775
cacaaacuuugcgaggauu

SEQ ID NO: 2070737 - RNA, 19 nt, Artificial Sequence
  Description of Artificial Sequence: Synthetic oligonucleotide
  Antisense strand to SEQ ID NO: 2070736
aauccucgcaaaguuugug

SEQ ID NO: 2070738 - RNA, 19 nt, Artificial Sequence
  Description of Artificial Sequence: Synthetic oligonucleotide
  Sense strand starting at position 2502 of SEQ ID NO: 1881775
cgaggauugcucuugcgcu

SEQ ID NO: 2070739 - RNA, 19 nt, Artificial Sequence
  Description of Artificial Sequence: Synthetic oligonucleotide
  Antisense strand to SEQ ID NO: 2070738
agcgcaagagcaauccucg

SEQ ID NO: 2070740 - RNA, 19 nt, Artificial Sequence
  Description of Artificial Sequence: Synthetic oligonucleotide
  Sense strand starting at position 2503 of SEQ ID NO: 1881775
gaggauugcucuugcgcuu

SEQ ID NO: 2070741 - RNA, 19 nt, Artificial Sequence
  Description of Artificial Sequence: Synthetic oligonucleotide
  Antisense strand to SEQ ID NO: 2070740
aagcgcaagagcaauccuc

SEQ ID NO: 2070742 - RNA, 19 nt, Artificial Sequence
  Description of Artificial Sequence: Synthetic oligonucleotide
  Sense strand starting at position 2504 of SEQ ID NO: 1881775
aggauugcucuugcgcuua

SEQ ID NO: 2070743 - RNA, 19 nt, Artificial Sequence
  Description of Artificial Sequence: Synthetic oligonucleotide
  Antisense strand to SEQ ID NO: 2070742
uaagcgcaagagcaauccu

SEQ ID NO: 2070744 - RNA, 19 nt, Artificial Sequence
  Description of Artificial Sequence: Synthetic oligonucleotide
  Sense strand starting at position 3020 of SEQ ID NO: 1881775
cgccuuuggcuggaguuaa

SEQ ID NO: 2070745 - RNA, 19 nt, Artificial Sequence
  Description of Artificial Sequence: Synthetic oligonucleotide
  Antisense strand to SEQ ID NO: 2070744
uuaacuccagccaaaggcg

SEQ ID NO: 2070746 - RNA, 19 nt, Artificial Sequence
  Description of Artificial Sequence: Synthetic oligonucleotide
  Sense strand starting at position 3036 of SEQ ID NO: 1881775
uaacuucucugggcuggaa

SEQ ID NO: 2070747 - RNA, 19 nt, Artificial Sequence
  Description of Artificial Sequence: Synthetic oligonucleotide
  Antisense strand to SEQ ID NO: 2070746
uuccagcccagagaaguua

SEQ ID NO: 2070748 - RNA, 19 nt, Artificial Sequence
  Description of Artificial Sequence: Synthetic oligonucleotide
  Sense strand starting at position 3101 of SEQ ID NO: 1881775
caggguaacuccugaagca

SEQ ID NO: 2070749 - RNA, 19 nt, Artificial Sequence
  Description of Artificial Sequence: Synthetic oligonucleotide
  Antisense strand to SEQ ID NO: 2070748
ugcuucaggaguuacccug

SEQ ID NO: 2070750 - RNA, 19 nt, Artificial Sequence
  Description of Artificial Sequence: Synthetic oligonucleotide
  Sense strand starting at position 3459 of SEQ ID NO: 1881775
gcguucagcugauaccuga

SEQ ID NO: 2070751 - RNA, 19 nt, Artificial Sequence
  Description of Artificial Sequence: Synthetic oligonucleotide
  Antisense strand to SEQ ID NO: 2070750
ucagguaucagcugaacgc

SEQ ID NO: 2070752 - RNA, 19 nt, Artificial Sequence
  Description of Artificial Sequence: Synthetic oligonucleotide
  Sense strand starting at position 3463 of SEQ ID NO: 1881775
ucagcugauaccugagaug

SEQ ID NO: 2070753 - RNA, 19 nt, Artificial Sequence
  Description of Artificial Sequence: Synthetic oligonucleotide
  Antisense strand to SEQ ID NO: 2070752
caucucagguaucagcuga

SEQ ID NO: 2070754 - RNA, 19 nt, Artificial Sequence
  Description of Artificial Sequence: Synthetic oligonucleotide
  Sense strand starting at position 3480 of SEQ ID NO: 1881775
ugcugagcguccuaucguu

SEQ ID NO: 2070755 - RNA, 19 nt, Artificial Sequence
  Description of Artificial Sequence: Synthetic oligonucleotide
  Antisense strand to SEQ ID NO: 2070754
aacgauaggacgcucagca

SEQ ID NO: 2070756 - RNA, 19 nt, Artificial Sequence
  Description of Artificial Sequence: Synthetic oligonucleotide
  Sense strand starting at position 3486 of SEQ ID NO: 1881775
gcguccuaucguuggugaa

SEQ ID NO: 2070757 - RNA, 19 nt, Artificial Sequence
  Description of Artificial Sequence: Synthetic oligonucleotide
  Antisense strand to SEQ ID NO: 2070756
uucaccaacgauaggacgc

SEQ ID NO: 2070758 - RNA, 19 nt, Artificial Sequence
  Description of Artificial Sequence: Synthetic oligonucleotide
  Sense strand starting at position 3487 of SEQ ID NO: 1881775
cguccuaucguuggugaaa

SEQ ID NO: 2070759 - RNA, 19 nt, Artificial Sequence
  Description of Artificial Sequence: Synthetic oligonucleotide
  Antisense strand to SEQ ID NO: 2070758
uuucaccaacgauaggacg

SEQ ID NO: 2070760 - RNA, 19 nt, Artificial Sequence
  Description of Artificial Sequence: Synthetic oligonucleotide
  Sense strand starting at position 3488 of SEQ ID NO: 1881775
guccuaucguuggugaaag

SEQ ID NO: 2070761 - RNA, 19 nt, Artificial Sequence
  Description of Artificial Sequence: Synthetic oligonucleotide
  Antisense strand to SEQ ID NO: 2070760
cuuucaccaacgauaggac

SEQ ID NO: 2070762 - RNA, 19 nt, Artificial Sequence
  Description of Artificial Sequence: Synthetic oligonucleotide
  Sense strand starting at position 3567 of SEQ ID NO: 1881775
caguauuaucuaugggaga

SEQ ID NO: 2070763 - RNA, 19 nt, Artificial Sequence
  Description of Artificial Sequence: Synthetic oligonucleotide
  Antisense strand to SEQ ID NO: 2070762
ucucccauagauaauacug

SEQ ID NO: 2070764 - RNA, 19 nt, Artificial Sequence
  Description of Artificial Sequence: Synthetic oligonucleotide
  Sense strand starting at position 3568 of SEQ ID NO: 1881775
aguauuaucuaugggagaa

SEQ ID NO: 2070765 - RNA, 19 nt, Artificial Sequence
  Description of Artificial Sequence: Synthetic oligonucleotide
  Antisense strand to SEQ ID NO: 2070764
uucucccauagauaauacu

SEQ ID NO: 2070766 - RNA, 19 nt, Artificial Sequence
  Description of Artificial Sequence: Synthetic oligonucleotide
  Sense strand starting at position 3649 of SEQ ID NO: 1881775
gugagaugucccggugguc

SEQ ID NO: 2070767 - RNA, 19 nt, Artificial Sequence
  Description of Artificial Sequence: Synthetic oligonucleotide
  Antisense strand to SEQ ID NO: 2070766
gaccaccgggacaucucac

SEQ ID NO: 2070768 - RNA, 19 nt, Artificial Sequence
  Description of Artificial Sequence: Synthetic oligonucleotide
  Sense strand starting at position 3688 of SEQ ID NO: 1881775
gacccuguguccuggaaug

SEQ ID NO: 2070769 - RNA, 19 nt, Artificial Sequence
  Description of Artificial Sequence: Synthetic oligonucleotide
  Antisense strand to SEQ ID NO: 2070768
cauuccaggacacaggguc

SEQ ID NO: 2070770 - RNA, 19 nt, Artificial Sequence
  Description of Artificial Sequence: Synthetic oligonucleotide
  Sense strand starting at position 3690 of SEQ ID NO: 1881775
cccuguguccuggaaugag

SEQ ID NO: 2070771 - RNA, 19 nt, Artificial Sequence
  Description of Artificial Sequence: Synthetic oligonucleotide
  Antisense strand to SEQ ID NO: 2070770
cucauuccaggacacaggg

SEQ ID NO: 2070772 - RNA, 19 nt, Artificial Sequence
  Description of Artificial Sequence: Synthetic oligonucleotide
  Sense strand starting at position 3880 of SEQ ID NO: 1881775
guuucugggucacggagaa

SEQ ID NO: 2070773 - RNA, 19 nt, Artificial Sequence
  Description of Artificial Sequence: Synthetic oligonucleotide
  Antisense strand to SEQ ID NO: 2070772
uucuccgugacccagaaac

SEQ ID NO: 2070774 - RNA, 19 nt, Artificial Sequence
  Description of Artificial Sequence: Synthetic oligonucleotide
  Sense strand starting at position 11 of SEQ ID NO: 1881776
augauaggauucuuugcua

SEQ ID NO: 2070775 - RNA, 19 nt, Artificial Sequence
  Description of Artificial Sequence: Synthetic oligonucleotide
  Antisense strand to SEQ ID NO: 2070774
uagcaaagaauccuaucau

SEQ ID NO: 2070776 - RNA, 19 nt, Artificial Sequence
  Description of Artificial Sequence: Synthetic oligonucleotide
  Sense strand starting at position 14 of SEQ ID NO: 1881776
auaggauucuuugcuagau

SEQ ID NO: 2070777 - RNA, 19 nt, Artificial Sequence
  Description of Artificial Sequence: Synthetic oligonucleotide
  Antisense strand to SEQ ID NO: 2070776
aucuagcaaagaauccuau

SEQ ID NO: 2070778 - RNA, 19 nt, Artificial Sequence
  Description of Artificial Sequence: Synthetic oligonucleotide
  Sense strand starting at position 71 of SEQ ID NO: 1881776
cuauuaucggaaugaauua

SEQ ID NO: 2070779 - RNA, 19 nt, Artificial Sequence
  Description of Artificial Sequence: Synthetic oligonucleotide
  Antisense strand to SEQ ID NO: 2070778
uaauucauuccgauaauag

SEQ ID NO: 2070780 - RNA, 19 nt, Artificial Sequence
  Description of Artificial Sequence: Synthetic oligonucleotide
  Sense strand starting at position 384 of SEQ ID NO: 1881776
cucuauuugguuugcaaca

SEQ ID NO: 2070781 - RNA, 19 nt, Artificial Sequence
  Description of Artificial Sequence: Synthetic oligonucleotide
  Antisense strand to SEQ ID NO: 2070780
uguugcaaaccaaauagag

SEQ ID NO: 2070782 - RNA, 19 nt, Artificial Sequence
  Description of Artificial Sequence: Synthetic oligonucleotide
  Sense strand starting at position 462 of SEQ ID NO: 1881776
agcguauuuguucagguca

SEQ ID NO: 2070783 - RNA, 19 nt, Artificial Sequence
  Description of Artificial Sequence: Synthetic oligonucleotide
  Antisense strand to SEQ ID NO: 2070782
ugaccugaacaaauacgcu

SEQ ID NO: 2070784 - RNA, 19 nt, Artificial Sequence
  Description of Artificial Sequence: Synthetic oligonucleotide
  Sense strand starting at position 664 of SEQ ID NO: 1881776
caggcucuucuugagaucu

SEQ ID NO: 2070785 - RNA, 19 nt, Artificial Sequence
  Description of Artificial Sequence: Synthetic oligonucleotide
  Antisense strand to SEQ ID NO: 2070784
agaucucaagaagagccug

SEQ ID NO: 2070786 - RNA, 19 nt, Artificial Sequence
  Description of Artificial Sequence: Synthetic oligonucleotide
  Sense strand starting at position 825 of SEQ ID NO: 1881776
accggauuaugaguuagaa

SEQ ID NO: 2070787 - RNA, 19 nt, Artificial Sequence
  Description of Artificial Sequence: Synthetic oligonucleotide
  Antisense strand to SEQ ID NO: 2070786
uucuaacucauaauccggu

SEQ ID NO: 2070788 - RNA, 19 nt, Artificial Sequence
  Description of Artificial Sequence: Synthetic oligonucleotide
  Sense strand starting at position 989 of SEQ ID NO: 1881776
ggguuagguauauggaaac

SEQ ID NO: 2070789 - RNA, 19 nt, Artificial Sequence
  Description of Artificial Sequence: Synthetic oligonucleotide
  Antisense strand to SEQ ID NO: 2070788
guuuccauauaccuaaccc

SEQ ID NO: 2070790 - RNA, 19 nt, Artificial Sequence
  Description of Artificial Sequence: Synthetic oligonucleotide
  Sense strand starting at position 1128 of SEQ ID NO: 1881776
gguugagaauaaucaguua

SEQ ID NO: 2070791 - RNA, 19 nt, Artificial Sequence
  Description of Artificial Sequence: Synthetic oligonucleotide
  Antisense strand to SEQ ID NO: 2070790
uaacugauuauucucaacc

SEQ ID NO: 2070792 - RNA, 19 nt, Artificial Sequence
  Description of Artificial Sequence: Synthetic oligonucleotide
  Sense strand starting at position 1343 of SEQ ID NO: 1881776
agaacaagauaucugugua

SEQ ID NO: 2070793 - RNA, 19 nt, Artificial Sequence
  Description of Artificial Sequence: Synthetic oligonucleotide
  Antisense strand to SEQ ID NO: 2070792
uacacagauaucuuguucu

SEQ ID NO: 2070794 - RNA, 19 nt, Artificial Sequence
  Description of Artificial Sequence: Synthetic oligonucleotide
  Sense strand starting at position 1346 of SEQ ID NO: 1881776
acaagauaucuguguaaag

SEQ ID NO: 2070795 - RNA, 19 nt, Artificial Sequence
  Description of Artificial Sequence: Synthetic oligonucleotide
  Antisense strand to SEQ ID NO: 2070794
cuuuacacagauaucuugu

SEQ ID NO: 2070796 - RNA, 19 nt, Artificial Sequence
  Description of Artificial Sequence: Synthetic oligonucleotide
  Sense strand starting at position 1347 of SEQ ID NO: 1881776
caagauaucuguguaaaga

SEQ ID NO: 2070797 - RNA, 19 nt, Artificial Sequence
  Description of Artificial Sequence: Synthetic oligonucleotide
  Antisense strand to SEQ ID NO: 2070796
ucuuuacacagauaucuug

SEQ ID NO: 2070798 - RNA, 19 nt, Artificial Sequence
  Description of Artificial Sequence: Synthetic oligonucleotide
  Sense strand starting at position 1558 of SEQ ID NO: 1881776
guacaucuuguggaaugau

SEQ ID NO: 2070799 - RNA, 19 nt, Artificial Sequence
  Description of Artificial Sequence: Synthetic oligonucleotide
  Antisense strand to SEQ ID NO: 2070798
aucauuccacaagauguac

SEQ ID NO: 2070800 - RNA, 19 nt, Artificial Sequence
  Description of Artificial Sequence: Synthetic oligonucleotide
  Sense strand starting at position 1561 of SEQ ID NO: 1881776
caucuuguggaaugauuaa

SEQ ID NO: 2070801 - RNA, 19 nt, Artificial Sequence
  Description of Artificial Sequence: Synthetic oligonucleotide
  Antisense strand to SEQ ID NO: 2070800
uuaaucauuccacaagaug

SEQ ID NO: 2070802 - RNA, 19 nt, Artificial Sequence
  Description of Artificial Sequence: Synthetic oligonucleotide
  Sense strand starting at position 1696 of SEQ ID NO: 1881776
caccaugugguagaauguu

SEQ ID NO: 2070803 - RNA, 19 nt, Artificial Sequence
  Description of Artificial Sequence: Synthetic oligonucleotide
  Antisense strand to SEQ ID NO: 2070802
aacauucuaccacauggug

SEQ ID NO: 2070804 - RNA, 19 nt, Artificial Sequence
  Description of Artificial Sequence: Synthetic oligonucleotide
  Sense strand starting at position 1775 of SEQ ID NO: 1881776
ggucuucugaaagagcuaa

SEQ ID NO: 2070805 - RNA, 19 nt, Artificial Sequence
  Description of Artificial Sequence: Synthetic oligonucleotide
  Antisense strand to SEQ ID NO: 2070804
uuagcucuuucagaagacc

SEQ ID NO: 2070806 - RNA, 19 nt, Artificial Sequence
  Description of Artificial Sequence: Synthetic oligonucleotide
  Sense strand starting at position 1850 of SEQ ID NO: 1881776
uuggauucugaguagcaug

SEQ ID NO: 2070807 - RNA, 19 nt, Artificial Sequence
  Description of Artificial Sequence: Synthetic oligonucleotide
  Antisense strand to SEQ ID NO: 2070806
caugcuacucagaauccaa

SEQ ID NO: 2070808 - RNA, 19 nt, Artificial Sequence
  Description of Artificial Sequence: Synthetic oligonucleotide
  Sense strand starting at position 1888 of SEQ ID NO: 1881776
auuaccacucgagauaguu

SEQ ID NO: 2070809 - RNA, 19 nt, Artificial Sequence
  Description of Artificial Sequence: Synthetic oligonucleotide
  Antisense strand to SEQ ID NO: 2070808
aacuaucucgagugguaau

SEQ ID NO: 2070810 - RNA, 19 nt, Artificial Sequence
  Description of Artificial Sequence: Synthetic oligonucleotide
  Sense strand starting at position 2077 of SEQ ID NO: 1881776
aaaucucuugaaugugaug

SEQ ID NO: 2070811 - RNA, 19 nt, Artificial Sequence
  Description of Artificial Sequence: Synthetic oligonucleotide
  Antisense strand to SEQ ID NO: 2070810
caucacauucaagagauuu

SEQ ID NO: 2070812 - RNA, 19 nt, Artificial Sequence
  Description of Artificial Sequence: Synthetic oligonucleotide
  Sense strand starting at position 2084 of SEQ ID NO: 1881776
uugaaugugaugugcauuu

SEQ ID NO: 2070813 - RNA, 19 nt, Artificial Sequence
  Description of Artificial Sequence: Synthetic oligonucleotide
  Antisense strand to SEQ ID NO: 2070812
aaaugcacaucacauucaa

SEQ ID NO: 2070814 - RNA, 19 nt, Artificial Sequence
  Description of Artificial Sequence: Synthetic oligonucleotide
  Sense strand starting at position 2205 of SEQ ID NO: 1881776
uuccauaggguuugaauga

SEQ ID NO: 2070815 - RNA, 19 nt, Artificial Sequence
  Description of Artificial Sequence: Synthetic oligonucleotide
  Antisense strand to SEQ ID NO: 2070814
ucauucaaacccuauggaa

SEQ ID NO: 2070816 - RNA, 19 nt, Artificial Sequence
  Description of Artificial Sequence: Synthetic oligonucleotide
  Sense strand starting at position 2212 of SEQ ID NO: 1881776
ggguuugaaugaguauaug

SEQ ID NO: 2070817 - RNA, 19 nt, Artificial Sequence
  Description of Artificial Sequence: Synthetic oligonucleotide
  Antisense strand to SEQ ID NO: 2070816
cauauacucauucaaaccc

SEQ ID NO: 2070818 - RNA, 19 nt, Artificial Sequence
  Description of Artificial Sequence: Synthetic oligonucleotide
  Sense strand starting at position 2292 of SEQ ID NO: 1881776
ggaaacacagugugugaua

SEQ ID NO: 2070819 - RNA, 19 nt, Artificial Sequence
  Description of Artificial Sequence: Synthetic oligonucleotide
  Antisense strand to SEQ ID NO: 2070818
uaucacacacuguguuucc

SEQ ID NO: 2070820 - RNA, 19 nt, Artificial Sequence
  Description of Artificial Sequence: Synthetic oligonucleotide
  Sense strand starting at position 2354 of SEQ ID NO: 1881776
aacaaugacuucucgggua

SEQ ID NO: 2070821 - RNA, 19 nt, Artificial Sequence
  Description of Artificial Sequence: Synthetic oligonucleotide
  Antisense strand to SEQ ID NO: 2070820
uacccgagaagucauuguu

SEQ ID NO: 2070822 - RNA, 19 nt, Artificial Sequence
  Description of Artificial Sequence: Synthetic oligonucleotide
  Sense strand starting at position 2555 of SEQ ID NO: 1881776
uucuaauugggagguaaau

SEQ ID NO: 2070823 - RNA, 19 nt, Artificial Sequence
  Description of Artificial Sequence: Synthetic oligonucleotide
  Antisense strand to SEQ ID NO: 2070822
auuuaccucccaauuagaa

SEQ ID NO: 2070824 - RNA, 19 nt, Artificial Sequence
  Description of Artificial Sequence: Synthetic oligonucleotide
  Sense strand starting at position 2873 of SEQ ID NO: 1881776
ugcguuauuuacuucccaa

SEQ ID NO: 2070825 - RNA, 19 nt, Artificial Sequence
  Description of Artificial Sequence: Synthetic oligonucleotide
  Antisense strand to SEQ ID NO: 2070824
uugggaaguaaauaacgca

SEQ ID NO: 2070826 - RNA, 19 nt, Artificial Sequence
  Description of Artificial Sequence: Synthetic oligonucleotide
  Sense strand starting at position 2944 of SEQ ID NO: 1881776
uugccauuuguaugucaaa

SEQ ID NO: 2070827 - RNA, 19 nt, Artificial Sequence
  Description of Artificial Sequence: Synthetic oligonucleotide
  Antisense strand to SEQ ID NO: 2070826
uuugacauacaaauggcaa

SEQ ID NO: 2070828 - RNA, 19 nt, Artificial Sequence
  Description of Artificial Sequence: Synthetic oligonucleotide
  Sense strand starting at position 2966 of SEQ ID NO: 1881776
ugucaaauacuggagguuu

SEQ ID NO: 2070829 - RNA, 19 nt, Artificial Sequence
  Description of Artificial Sequence: Synthetic oligonucleotide
  Antisense strand to SEQ ID NO: 2070828
aaaccuccaguauuugaca

SEQ ID NO: 2070830 - RNA, 19 nt, Artificial Sequence
  Description of Artificial Sequence: Synthetic oligonucleotide
  Sense strand starting at position 3058 of SEQ ID NO: 1881776
gugcuuggugugcugugaa

SEQ ID NO: 2070831 - RNA, 19 nt, Artificial Sequence
  Description of Artificial Sequence: Synthetic oligonucleotide
  Antisense strand to SEQ ID NO: 2070830
uucacagcacaccaagcac

SEQ ID NO: 2070832 - RNA, 19 nt, Artificial Sequence
  Description of Artificial Sequence: Synthetic oligonucleotide
  Sense strand starting at position 3087 of SEQ ID NO: 1881776
cccuuuguagaaggaauga

SEQ ID NO: 2070833 - RNA, 19 nt, Artificial Sequence
  Description of Artificial Sequence: Synthetic oligonucleotide
  Antisense strand to SEQ ID NO: 2070832
ucauuccuucuacaaaggg

SEQ ID NO: 2070834 - RNA, 19 nt, Artificial Sequence
  Description of Artificial Sequence: Synthetic oligonucleotide
  Sense strand starting at position 3235 of SEQ ID NO: 1881776
uuuccagauucccuggaau

SEQ ID NO: 2070835 - RNA, 19 nt, Artificial Sequence
  Description of Artificial Sequence: Synthetic oligonucleotide
  Antisense strand to SEQ ID NO: 2070834
auuccagggaaucuggaaa

SEQ ID NO: 2070836 - RNA, 19 nt, Artificial Sequence
  Description of Artificial Sequence: Synthetic oligonucleotide
  Sense strand starting at position 3237 of SEQ ID NO: 1881776
uccagauucccuggaauua

SEQ ID NO: 2070837 - RNA, 19 nt, Artificial Sequence
  Description of Artificial Sequence: Synthetic oligonucleotide
  Antisense strand to SEQ ID NO: 2070836
uaauuccagggaaucugga

SEQ ID NO: 2070838 - RNA, 19 nt, Artificial Sequence
  Description of Artificial Sequence: Synthetic oligonucleotide
  Sense strand starting at position 3292 of SEQ ID NO: 1881776
accagagaguccuucccua

SEQ ID NO: 2070839 - RNA, 19 nt, Artificial Sequence
  Description of Artificial Sequence: Synthetic oligonucleotide
  Antisense strand to SEQ ID NO: 2070838
uagggaaggacucucuggu

SEQ ID NO: 2070840 - RNA, 19 nt, Artificial Sequence
  Description of Artificial Sequence: Synthetic oligonucleotide
  Sense strand starting at position 3296 of SEQ ID NO: 1881776
gagaguccuucccuagaca

SEQ ID NO: 2070841 - RNA, 19 nt, Artificial Sequence
  Description of Artificial Sequence: Synthetic oligonucleotide
  Antisense strand to SEQ ID NO: 2070840
ugucuagggaaggacucuc

SEQ ID NO: 2070842 - RNA, 19 nt, Artificial Sequence
  Description of Artificial Sequence: Synthetic oligonucleotide
  Sense strand starting at position 3297 of SEQ ID NO: 1881776
agaguccuucccuagacau

SEQ ID NO: 2070843 - RNA, 19 nt, Artificial Sequence
  Description of Artificial Sequence: Synthetic oligonucleotide
  Antisense strand to SEQ ID NO: 2070842
augucuagggaaggacucu

SEQ ID NO: 2070844 - RNA, 19 nt, Artificial Sequence
  Description of Artificial Sequence: Synthetic oligonucleotide
  Sense strand starting at position 3540 of SEQ ID NO: 1881776
gaaugagugguuuggagaa

SEQ ID NO: 2070845 - RNA, 19 nt, Artificial Sequence
  Description of Artificial Sequence: Synthetic oligonucleotide
  Antisense strand to SEQ ID NO: 2070844
uucuccaaaccacucauuc

SEQ ID NO: 2070846 - RNA, 19 nt, Artificial Sequence
  Description of Artificial Sequence: Synthetic oligonucleotide
  Sense strand starting at position 3579 of SEQ ID NO: 1881776
cugauuugccaguggucua

SEQ ID NO: 2070847 - RNA, 19 nt, Artificial Sequence
  Description of Artificial Sequence: Synthetic oligonucleotide
  Antisense strand to SEQ ID NO: 2070846
uagaccacuggcaaaucag

SEQ ID NO: 2070848 - RNA, 19 nt, Artificial Sequence
  Description of Artificial Sequence: Synthetic oligonucleotide
  Sense strand starting at position 3580 of SEQ ID NO: 1881776
ugauuugccaguggucuaa

SEQ ID NO: 2070849 - RNA, 19 nt, Artificial Sequence
  Description of Artificial Sequence: Synthetic oligonucleotide
  Antisense strand to SEQ ID NO: 2070848
uuagaccacuggcaaauca

SEQ ID NO: 2070850 - RNA, 19 nt, Artificial Sequence
  Description of Artificial Sequence: Synthetic oligonucleotide
  Sense strand starting at position 3635 of SEQ ID NO: 1881776
ucuuacagaguuuagagua

SEQ ID NO: 2070851 - RNA, 19 nt, Artificial Sequence
  Description of Artificial Sequence: Synthetic oligonucleotide
  Antisense strand to SEQ ID NO: 2070850
uacucuaaacucuguaaga

SEQ ID NO: 2070852 - RNA, 19 nt, Artificial Sequence
  Description of Artificial Sequence: Synthetic oligonucleotide
  Sense strand starting at position 3661 of SEQ ID NO: 1881776
gauaaacuuuggguacaua

SEQ ID NO: 2070853 - RNA, 19 nt, Artificial Sequence
  Description of Artificial Sequence: Synthetic oligonucleotide
  Antisense strand to SEQ ID NO: 2070852
uauguacccaaaguuuauc

SEQ ID NO: 2070854 - RNA, 19 nt, Artificial Sequence
  Description of Artificial Sequence: Synthetic oligonucleotide
  Sense strand starting at position 39 of SEQ ID NO: 1881777
auacuugcuguuuacaagu

SEQ ID NO: 2070855 - RNA, 19 nt, Artificial Sequence
  Description of Artificial Sequence: Synthetic oligonucleotide
  Antisense strand to SEQ ID NO: 2070854
acuuguaaacagcaaguau

SEQ ID NO: 2070856 - RNA, 19 nt, Artificial Sequence
  Description of Artificial Sequence: Synthetic oligonucleotide
  Sense strand starting at position 100 of SEQ ID NO: 1881777
uacccuggugucugaggaa

SEQ ID NO: 2070857 - RNA, 19 nt, Artificial Sequence
  Description of Artificial Sequence: Synthetic oligonucleotide
  Antisense strand to SEQ ID NO: 2070856
uuccucagacaccagggua

SEQ ID NO: 2070858 - RNA, 19 nt, Artificial Sequence
  Description of Artificial Sequence: Synthetic oligonucleotide
  Sense strand starting at position 122 of SEQ ID NO: 1881777
uccagaaguguauggaaug

SEQ ID NO: 2070859 - RNA, 19 nt, Artificial Sequence
  Description of Artificial Sequence: Synthetic oligonucleotide
  Antisense strand to SEQ ID NO: 2070858
cauuccauacacuucugga

SEQ ID NO: 2070860 - RNA, 19 nt, Artificial Sequence
  Description of Artificial Sequence: Synthetic oligonucleotide
  Sense strand starting at position 271 of SEQ ID NO: 1881777
gucuccuguggagaaucau

SEQ ID NO: 2070861 - RNA, 19 nt, Artificial Sequence
  Description of Artificial Sequence: Synthetic oligonucleotide
  Antisense strand to SEQ ID NO: 2070860
augauucuccacaggagac

SEQ ID NO: 2070862 - RNA, 19 nt, Artificial Sequence
  Description of Artificial Sequence: Synthetic oligonucleotide
  Sense strand starting at position 280 of SEQ ID NO: 1881777
ggagaaucauugcucugag

SEQ ID NO: 2070863 - RNA, 19 nt, Artificial Sequence
  Description of Artificial Sequence: Synthetic oligonucleotide
  Antisense strand to SEQ ID NO: 2070862
cucagagcaaugauucucc

SEQ ID NO: 2070864 - RNA, 19 nt, Artificial Sequence
  Description of Artificial Sequence: Synthetic oligonucleotide
  Sense strand starting at position 281 of SEQ ID NO: 1881777
gagaaucauugcucugaga

SEQ ID NO: 2070865 - RNA, 19 nt, Artificial Sequence
  Description of Artificial Sequence: Synthetic oligonucleotide
  Antisense strand to SEQ ID NO: 2070864
ucucagagcaaugauucuc

SEQ ID NO: 2070866 - RNA, 19 nt, Artificial Sequence
  Description of Artificial Sequence: Synthetic oligonucleotide
  Sense strand starting at position 346 of SEQ ID NO: 1881777
uaagcaugguaucuagaca

SEQ ID NO: 2070867 - RNA, 19 nt, Artificial Sequence
  Description of Artificial Sequence: Synthetic oligonucleotide
  Antisense strand to SEQ ID NO: 2070866
ugucuagauaccaugcuua

SEQ ID NO: 2070868 - RNA, 19 nt, Artificial Sequence
  Description of Artificial Sequence: Synthetic oligonucleotide
  Sense strand starting at position 435 of SEQ ID NO: 1881777
uuaacucaaguuugauagu

SEQ ID NO: 2070869 - RNA, 19 nt, Artificial Sequence
  Description of Artificial Sequence: Synthetic oligonucleotide
  Antisense strand to SEQ ID NO: 2070868
acuaucaaacuugaguuaa

SEQ ID NO: 2070870 - RNA, 19 nt, Artificial Sequence
  Description of Artificial Sequence: Synthetic oligonucleotide
  Sense strand starting at position 446 of SEQ ID NO: 1881777
uugauagugugaccaacau

SEQ ID NO: 2070871 - RNA, 19 nt, Artificial Sequence
  Description of Artificial Sequence: Synthetic oligonucleotide
  Antisense strand to SEQ ID NO: 2070870
auguuggucacacuaucaa

SEQ ID NO: 2070872 - RNA, 19 nt, Artificial Sequence
  Description of Artificial Sequence: Synthetic oligonucleotide
  Sense strand starting at position 484 of SEQ ID NO: 1881777
gacagaaguugggaagaaa

SEQ ID NO: 2070873 - RNA, 19 nt, Artificial Sequence
  Description of Artificial Sequence: Synthetic oligonucleotide
  Antisense strand to SEQ ID NO: 2070872
uuucuucccaacuucuguc

SEQ ID NO: 2070874 - RNA, 19 nt, Artificial Sequence
  Description of Artificial Sequence: Synthetic oligonucleotide
  Sense strand starting at position 556 of SEQ ID NO: 1881777
ggacuuccagucuaguaag

SEQ ID NO: 2070875 - RNA, 19 nt, Artificial Sequence
  Description of Artificial Sequence: Synthetic oligonucleotide
  Antisense strand to SEQ ID NO: 2070874
cuuacuagacuggaagucc

SEQ ID NO: 2070876 - RNA, 19 nt, Artificial Sequence
  Description of Artificial Sequence: Synthetic oligonucleotide
  Sense strand starting at position 641 of SEQ ID NO: 1881777
gacgcagguacguauaaga

SEQ ID NO: 2070877 - RNA, 19 nt, Artificial Sequence
  Description of Artificial Sequence: Synthetic oligonucleotide
  Antisense strand to SEQ ID NO: 2070876
ucuuauacguaccugcguc

SEQ ID NO: 2070878 - RNA, 19 nt, Artificial Sequence
  Description of Artificial Sequence: Synthetic oligonucleotide
  Sense strand starting at position 880 of SEQ ID NO: 1881777
gguaaugugcauucucguu

SEQ ID NO: 2070879 - RNA, 19 nt, Artificial Sequence
  Description of Artificial Sequence: Synthetic oligonucleotide
  Antisense strand to SEQ ID NO: 2070878
aacgagaaugcacauuacc

SEQ ID NO: 2070880 - RNA, 19 nt, Artificial Sequence
  Description of Artificial Sequence: Synthetic oligonucleotide
  Sense strand starting at position 1011 of SEQ ID NO: 1881777
cccuguguaccagaaguaa

SEQ ID NO: 2070881 - RNA, 19 nt, Artificial Sequence
  Description of Artificial Sequence: Synthetic oligonucleotide
  Antisense strand to SEQ ID NO: 2070880
uuacuucugguacacaggg

SEQ ID NO: 2070882 - RNA, 19 nt, Artificial Sequence
  Description of Artificial Sequence: Synthetic oligonucleotide
  Sense strand starting at position 1668 of SEQ ID NO: 1881777
gcccguucucggagggauc

SEQ ID NO: 2070883 - RNA, 19 nt, Artificial Sequence
  Description of Artificial Sequence: Synthetic oligonucleotide
  Antisense strand to SEQ ID NO: 2070882
gaucccuccgagaacgggc

SEQ ID NO: 2070884 - RNA, 19 nt, Artificial Sequence
  Description of Artificial Sequence: Synthetic oligonucleotide
  Sense strand starting at position 1916 of SEQ ID NO: 1881777
gaccuaguccugggacaga

SEQ ID NO: 2070885 - RNA, 19 nt, Artificial Sequence
  Description of Artificial Sequence: Synthetic oligonucleotide
  Antisense strand to SEQ ID NO: 2070884
ucugucccaggacuagguc

SEQ ID NO: 2070886 - RNA, 19 nt, Artificial Sequence
  Description of Artificial Sequence: Synthetic oligonucleotide
  Sense strand starting at position 2044 of SEQ ID NO: 1881777
aguggacuguaagcauauu

SEQ ID NO: 2070887 - RNA, 19 nt, Artificial Sequence
  Description of Artificial Sequence: Synthetic oligonucleotide
  Antisense strand to SEQ ID NO: 2070886
aauaugcuuacaguccacu

SEQ ID NO: 2070888 - RNA, 19 nt, Artificial Sequence
  Description of Artificial Sequence: Synthetic oligonucleotide
  Sense strand starting at position 2071 of SEQ ID NO: 1881777
aggaucaugucauuacaau

SEQ ID NO: 2070889 - RNA, 19 nt, Artificial Sequence
  Description of Artificial Sequence: Synthetic oligonucleotide
  Antisense strand to SEQ ID NO: 2070888
auuguaaugacaugauccu

SEQ ID NO: 2070890 - RNA, 19 nt, Artificial Sequence
  Description of Artificial Sequence: Synthetic oligonucleotide
  Sense strand starting at position 2103 of SEQ ID NO: 1881777
guaccuggaauguaguaaa

SEQ ID NO: 2070891 - RNA, 19 nt, Artificial Sequence
  Description of Artificial Sequence: Synthetic oligonucleotide
  Antisense strand to SEQ ID NO: 2070890
uuuacuacauuccagguac

SEQ ID NO: 2070892 - RNA, 19 nt, Artificial Sequence
  Description of Artificial Sequence: Synthetic oligonucleotide
  Sense strand starting at position 2117 of SEQ ID NO: 1881777
guaaauagccaguaaaugu

SEQ ID NO: 2070893 - RNA, 19 nt, Artificial Sequence
  Description of Artificial Sequence: Synthetic oligonucleotide
  Antisense strand to SEQ ID NO: 2070892
acauuuacuggcuauuuac

SEQ ID NO: 2070894 - RNA, 19 nt, Artificial Sequence
  Description of Artificial Sequence: Synthetic oligonucleotide
  Sense strand starting at position 2125 of SEQ ID NO: 1881777
ccaguaaauguuuacugaa

SEQ ID NO: 2070895 - RNA, 19 nt, Artificial Sequence
  Description of Artificial Sequence: Synthetic oligonucleotide
  Antisense strand to SEQ ID NO: 2070894
uucaguaaacauuuacugg

SEQ ID NO: 2070896 - RNA, 19 nt, Artificial Sequence
  Description of Artificial Sequence: Synthetic oligonucleotide
  Sense strand starting at position 2162 of SEQ ID NO: 1881777
augaaugaaugccucuuaa

SEQ ID NO: 2070897 - RNA, 19 nt, Artificial Sequence
  Description of Artificial Sequence: Synthetic oligonucleotide
  Antisense strand to SEQ ID NO: 2070896
uuaagaggcauucauucau

SEQ ID NO: 2070898 - RNA, 19 nt, Artificial Sequence
  Description of Artificial Sequence: Synthetic oligonucleotide
  Sense strand starting at position 2190 of SEQ ID NO: 1881777
gaguguacaugaucauaaa

SEQ ID NO: 2070899 - RNA, 19 nt, Artificial Sequence
  Description of Artificial Sequence: Synthetic oligonucleotide
  Antisense strand to SEQ ID NO: 2070898
uuuaugaucauguacacuc

SEQ ID NO: 2070900 - RNA, 19 nt, Artificial Sequence
  Description of Artificial Sequence: Synthetic oligonucleotide
  Sense strand starting at position 2380 of SEQ ID NO: 1881777
uauugcugugcgguuauau

SEQ ID NO: 2070901 - RNA, 19 nt, Artificial Sequence
  Description of Artificial Sequence: Synthetic oligonucleotide
  Antisense strand to SEQ ID NO: 2070900
auauaaccgcacagcaaua

SEQ ID NO: 2070902 - RNA, 19 nt, Artificial Sequence
  Description of Artificial Sequence: Synthetic oligonucleotide
  Sense strand starting at position 2381 of SEQ ID NO: 1881777
auugcugugcgguuauaua

SEQ ID NO: 2070903 - RNA, 19 nt, Artificial Sequence
  Description of Artificial Sequence: Synthetic oligonucleotide
  Antisense strand to SEQ ID NO: 2070902
uauauaaccgcacagcaau

SEQ ID NO: 2070904 - RNA, 19 nt, Artificial Sequence
  Description of Artificial Sequence: Synthetic oligonucleotide
  Sense strand starting at position 2501 of SEQ ID NO: 1881777
augcaugagaucuggagga

SEQ ID NO: 2070905 - RNA, 19 nt, Artificial Sequence
  Description of Artificial Sequence: Synthetic oligonucleotide
  Antisense strand to SEQ ID NO: 2070904
uccuccagaucucaugcau

SEQ ID NO: 2070906 - RNA, 19 nt, Artificial Sequence
  Description of Artificial Sequence: Synthetic oligonucleotide
  Sense strand starting at position 2563 of SEQ ID NO: 1881777
ggccuuguaauccaggaca

SEQ ID NO: 2070907 - RNA, 19 nt, Artificial Sequence
  Description of Artificial Sequence: Synthetic oligonucleotide
  Antisense strand to SEQ ID NO: 2070906
uguccuggauuacaaggcc

SEQ ID NO: 2070908 - RNA, 19 nt, Artificial Sequence
  Description of Artificial Sequence: Synthetic oligonucleotide
  Sense strand starting at position 2565 of SEQ ID NO: 1881777
ccuuguaauccaggacauc

SEQ ID NO: 2070909 - RNA, 19 nt, Artificial Sequence
  Description of Artificial Sequence: Synthetic oligonucleotide
  Antisense strand to SEQ ID NO: 2070908
gauguccuggauuacaagg

SEQ ID NO: 2070910 - RNA, 19 nt, Artificial Sequence
  Description of Artificial Sequence: Synthetic oligonucleotide
  Sense strand starting at position 2566 of SEQ ID NO: 1881777
cuuguaauccaggacaucu

SEQ ID NO: 2070911 - RNA, 19 nt, Artificial Sequence
  Description of Artificial Sequence: Synthetic oligonucleotide
  Antisense strand to SEQ ID NO: 2070910
agauguccuggauuacaag

SEQ ID NO: 2070912 - RNA, 19 nt, Artificial Sequence
  Description of Artificial Sequence: Synthetic oligonucleotide
  Sense strand starting at position 2876 of SEQ ID NO: 1881777
gagagugaggcuggugaaa

SEQ ID NO: 2070913 - RNA, 19 nt, Artificial Sequence
  Description of Artificial Sequence: Synthetic oligonucleotide
  Antisense strand to SEQ ID NO: 2070912
uuucaccagccucacucuc

SEQ ID NO: 2070914 - RNA, 19 nt, Artificial Sequence
  Description of Artificial Sequence: Synthetic oligonucleotide
  Sense strand starting at position 2966 of SEQ ID NO: 1881777
gcaguauguccacaggaaa

SEQ ID NO: 2070915 - RNA, 19 nt, Artificial Sequence
  Description of Artificial Sequence: Synthetic oligonucleotide
  Antisense strand to SEQ ID NO: 2070914
uuuccuguggacauacugc

SEQ ID NO: 2070916 - RNA, 19 nt, Artificial Sequence
  Description of Artificial Sequence: Synthetic oligonucleotide
  Sense strand starting at position 2981 of SEQ ID NO: 1881777
gaaacagacucucuugguu

SEQ ID NO: 2070917 - RNA, 19 nt, Artificial Sequence
  Description of Artificial Sequence: Synthetic oligonucleotide
  Antisense strand to SEQ ID NO: 2070916
aaccaagagagucuguuuc

SEQ ID NO: 2070918 - RNA, 19 nt, Artificial Sequence
  Description of Artificial Sequence: Synthetic oligonucleotide
  Sense strand starting at position 2984 of SEQ ID NO: 1881777
acagacucucuugguuaaa

SEQ ID NO: 2070919 - RNA, 19 nt, Artificial Sequence
  Description of Artificial Sequence: Synthetic oligonucleotide
  Antisense strand to SEQ ID NO: 2070918
uuuaaccaagagagucugu

SEQ ID NO: 2070920 - RNA, 19 nt, Artificial Sequence
  Description of Artificial Sequence: Synthetic oligonucleotide
  Sense strand starting at position 2986 of SEQ ID NO: 1881777
agacucucuugguuaaauc

SEQ ID NO: 2070921 - RNA, 19 nt, Artificial Sequence
  Description of Artificial Sequence: Synthetic oligonucleotide
  Antisense strand to SEQ ID NO: 2070920
gauuuaaccaagagagucu

SEQ ID NO: 2070922 - RNA, 19 nt, Artificial Sequence
  Description of Artificial Sequence: Synthetic oligonucleotide
  Sense strand starting at position 3127 of SEQ ID NO: 1881777
aacaaagacgcauguagaa

SEQ ID NO: 2070923 - RNA, 19 nt, Artificial Sequence
  Description of Artificial Sequence: Synthetic oligonucleotide
  Antisense strand to SEQ ID NO: 2070922
uucuacaugcgucuuuguu

SEQ ID NO: 2070924 - RNA, 19 nt, Artificial Sequence
  Description of Artificial Sequence: Synthetic oligonucleotide
  Sense strand starting at position 3300 of SEQ ID NO: 1881777
cagagaacugguuguuaaa

SEQ ID NO: 2070925 - RNA, 19 nt, Artificial Sequence
  Description of Artificial Sequence: Synthetic oligonucleotide
  Antisense strand to SEQ ID NO: 2070924
uuuaacaaccaguucucug

SEQ ID NO: 2070926 - RNA, 19 nt, Artificial Sequence
  Description of Artificial Sequence: Synthetic oligonucleotide
  Sense strand starting at position 3302 of SEQ ID NO: 1881777
gagaacugguuguuaaaua

SEQ ID NO: 2070927 - RNA, 19 nt, Artificial Sequence
  Description of Artificial Sequence: Synthetic oligonucleotide
  Antisense strand to SEQ ID NO: 2070926
uauuuaacaaccaguucuc

SEQ ID NO: 2070928 - RNA, 19 nt, Artificial Sequence
  Description of Artificial Sequence: Synthetic oligonucleotide
  Sense strand starting at position 3328 of SEQ ID NO: 1881777
gcacacaagugauuauucu

SEQ ID NO: 2070929 - RNA, 19 nt, Artificial Sequence
  Description of Artificial Sequence: Synthetic oligonucleotide
  Antisense strand to SEQ ID NO: 2070928
agaauaaucacuugugugc

SEQ ID NO: 2070930 - RNA, 19 nt, Artificial Sequence
  Description of Artificial Sequence: Synthetic oligonucleotide
  Sense strand starting at position 3867 of SEQ ID NO: 1881777
cuuggauacuuguuauacu

SEQ ID NO: 2070931 - RNA, 19 nt, Artificial Sequence
  Description of Artificial Sequence: Synthetic oligonucleotide
  Antisense strand to SEQ ID NO: 2070930
aguauaacaaguauccaag

SEQ ID NO: 2070932 - RNA, 19 nt, Artificial Sequence
  Description of Artificial Sequence: Synthetic oligonucleotide
  Sense strand starting at position 3920 of SEQ ID NO: 1881777
guuccauuagguuaguaag

SEQ ID NO: 2070933 - RNA, 19 nt, Artificial Sequence
  Description of Artificial Sequence: Synthetic oligonucleotide
  Antisense strand to SEQ ID NO: 2070932
cuuacuaaccuaauggaac

SEQ ID NO: 2070934 - RNA, 19 nt, Artificial Sequence
  Description of Artificial Sequence: Synthetic oligonucleotide
  Sense strand starting at position 35 of SEQ ID NO: 1881778
gaggacagggcuugucaau

SEQ ID NO: 2070935 - RNA, 19 nt, Artificial Sequence
  Description of Artificial Sequence: Synthetic oligonucleotide
  Antisense strand to SEQ ID NO: 2070934
auugacaagcccuguccuc

SEQ ID NO: 2070936 - RNA, 19 nt, Artificial Sequence
  Description of Artificial Sequence: Synthetic oligonucleotide
  Sense strand starting at position 119 of SEQ ID NO: 1881778
ccaccuucccuugggaaga

SEQ ID NO: 2070937 - RNA, 19 nt, Artificial Sequence
  Description of Artificial Sequence: Synthetic oligonucleotide
  Antisense strand to SEQ ID NO: 2070936
ucuucccaagggaaggugg

SEQ ID NO: 2070938 - RNA, 19 nt, Artificial Sequence
  Description of Artificial Sequence: Synthetic oligonucleotide
  Sense strand starting at position 318 of SEQ ID NO: 1881778
uccugcuucugaguggaca

SEQ ID NO: 2070939 - RNA, 19 nt, Artificial Sequence
  Description of Artificial Sequence: Synthetic oligonucleotide
  Antisense strand to SEQ ID NO: 2070938
uguccacucagaagcagga

SEQ ID NO: 2070940 - RNA, 19 nt, Artificial Sequence
  Description of Artificial Sequence: Synthetic oligonucleotide
  Sense strand starting at position 440 of SEQ ID NO: 1881778
ugcuauggugcccauuaaa

SEQ ID NO: 2070941 - RNA, 19 nt, Artificial Sequence
  Description of Artificial Sequence: Synthetic oligonucleotide
  Antisense strand to SEQ ID NO: 2070940
uuuaaugggcaccauagca

SEQ ID NO: 2070942 - RNA, 19 nt, Artificial Sequence
  Description of Artificial Sequence: Synthetic oligonucleotide
  Sense strand starting at position 682 of SEQ ID NO: 1881778
ggcagcuuacuguaugauc

SEQ ID NO: 2070943 - RNA, 19 nt, Artificial Sequence
  Description of Artificial Sequence: Synthetic oligonucleotide
  Antisense strand to SEQ ID NO: 2070942
gaucauacaguaagcugcc

SEQ ID NO: 2070944 - RNA, 19 nt, Artificial Sequence
  Description of Artificial Sequence: Synthetic oligonucleotide
  Sense strand starting at position 689 of SEQ ID NO: 1881778
uacuguaugaucgagguga

SEQ ID NO: 2070945 - RNA, 19 nt, Artificial Sequence
  Description of Artificial Sequence: Synthetic oligonucleotide
  Antisense strand to SEQ ID NO: 2070944
ucaccucgaucauacagua

SEQ ID NO: 2070946 - RNA, 19 nt, Artificial Sequence
  Description of Artificial Sequence: Synthetic oligonucleotide
  Sense strand starting at position 691 of SEQ ID NO: 1881778
cuguaugaucgaggugauu

SEQ ID NO: 2070947 - RNA, 19 nt, Artificial Sequence
  Description of Artificial Sequence: Synthetic oligonucleotide
  Antisense strand to SEQ ID NO: 2070946
aaucaccucgaucauacag

SEQ ID NO: 2070948 - RNA, 19 nt, Artificial Sequence
  Description of Artificial Sequence: Synthetic oligonucleotide
  Sense strand starting at position 847 of SEQ ID NO: 1881778
uuugauucuugggucaagu

SEQ ID NO: 2070949 - RNA, 19 nt, Artificial Sequence
  Description of Artificial Sequence: Synthetic oligonucleotide
  Antisense strand to SEQ ID NO: 2070948
acuugacccaagaaucaaa

SEQ ID NO: 2070950 - RNA, 19 nt, Artificial Sequence
  Description of Artificial Sequence: Synthetic oligonucleotide
  Sense strand starting at position 849 of SEQ ID NO: 1881778
ugauucuugggucaaguga

SEQ ID NO: 2070951 - RNA, 19 nt, Artificial Sequence
  Description of Artificial Sequence: Synthetic oligonucleotide
  Antisense strand to SEQ ID NO: 2070950
ucacuugacccaagaauca

SEQ ID NO: 2070952 - RNA, 19 nt, Artificial Sequence
  Description of Artificial Sequence: Synthetic oligonucleotide
  Sense strand starting at position 896 of SEQ ID NO: 1881778
cacgccugauacuuaggaa

SEQ ID NO: 2070953 - RNA, 19 nt, Artificial Sequence
  Description of Artificial Sequence: Synthetic oligonucleotide
  Antisense strand to SEQ ID NO: 2070952
uuccuaaguaucaggcgug

SEQ ID NO: 2070954 - RNA, 19 nt, Artificial Sequence
  Description of Artificial Sequence: Synthetic oligonucleotide
  Sense strand starting at position 897 of SEQ ID NO: 1881778
acgccugauacuuaggaaa

SEQ ID NO: 2070955 - RNA, 19 nt, Artificial Sequence
  Description of Artificial Sequence: Synthetic oligonucleotide
  Antisense strand to SEQ ID NO: 2070954
uuuccuaaguaucaggcgu

SEQ ID NO: 2070956 - RNA, 19 nt, Artificial Sequence
  Description of Artificial Sequence: Synthetic oligonucleotide
  Sense strand starting at position 1363 of SEQ ID NO: 1881778
cuugucuuauugcuaggaa

SEQ ID NO: 2070957 - RNA, 19 nt, Artificial Sequence
  Description of Artificial Sequence: Synthetic oligonucleotide
  Antisense strand to SEQ ID NO: 2070956
uuccuagcaauaagacaag

SEQ ID NO: 2070958 - RNA, 19 nt, Artificial Sequence
  Description of Artificial Sequence: Synthetic oligonucleotide
  Sense strand starting at position 1366 of SEQ ID NO: 1881778
gucuuauugcuaggaagaa

SEQ ID NO: 2070959 - RNA, 19 nt, Artificial Sequence
  Description of Artificial Sequence: Synthetic oligonucleotide
  Antisense strand to SEQ ID NO: 2070958
uucuuccuagcaauaagac

SEQ ID NO: 2070960 - RNA, 19 nt, Artificial Sequence
  Description of Artificial Sequence: Synthetic oligonucleotide
  Sense strand starting at position 1378 of SEQ ID NO: 1881778
ggaagaaaucucuguacuu

SEQ ID NO: 2070961 - RNA, 19 nt, Artificial Sequence
  Description of Artificial Sequence: Synthetic oligonucleotide
  Antisense strand to SEQ ID NO: 2070960
aaguacagagauuucuucc

SEQ ID NO: 2070962 - RNA, 19 nt, Artificial Sequence
  Description of Artificial Sequence: Synthetic oligonucleotide
  Sense strand starting at position 1618 of SEQ ID NO: 1881778
uaacgauaaguuugggagu

SEQ ID NO: 2070963 - RNA, 19 nt, Artificial Sequence
  Description of Artificial Sequence: Synthetic oligonucleotide
  Antisense strand to SEQ ID NO: 2070962
acucccaaacuuaucguua

SEQ ID NO: 2070964 - RNA, 19 nt, Artificial Sequence
  Description of Artificial Sequence: Synthetic oligonucleotide
  Sense strand starting at position 1743 of SEQ ID NO: 1881778
guggauaugccagggacua

SEQ ID NO: 2070965 - RNA, 19 nt, Artificial Sequence
  Description of Artificial Sequence: Synthetic oligonucleotide
  Antisense strand to SEQ ID NO: 2070964
uagucccuggcauauccac

SEQ ID NO: 2070966 - RNA, 19 nt, Artificial Sequence
  Description of Artificial Sequence: Synthetic oligonucleotide
  Sense strand starting at position 1745 of SEQ ID NO: 1881778
ggauaugccagggacuagu

SEQ ID NO: 2070967 - RNA, 19 nt, Artificial Sequence
  Description of Artificial Sequence: Synthetic oligonucleotide
  Antisense strand to SEQ ID NO: 2070966
acuagucccuggcauaucc

SEQ ID NO: 2070968 - RNA, 19 nt, Artificial Sequence
  Description of Artificial Sequence: Synthetic oligonucleotide
  Sense strand starting at position 1881 of SEQ ID NO: 1881778
ccaaauauaccaggcugau

SEQ ID NO: 2070969 - RNA, 19 nt, Artificial Sequence
  Description of Artificial Sequence: Synthetic oligonucleotide
  Antisense strand to SEQ ID NO: 2070968
aucagccugguauauuugg

SEQ ID NO: 2070970 - RNA, 19 nt, Artificial Sequence
  Description of Artificial Sequence: Synthetic oligonucleotide
  Sense strand starting at position 2050 of SEQ ID NO: 1881778
cucagacuugaccauguuu

SEQ ID NO: 2070971 - RNA, 19 nt, Artificial Sequence
  Description of Artificial Sequence: Synthetic oligonucleotide
  Antisense strand to SEQ ID NO: 2070970
aaacauggucaagucugag

SEQ ID NO: 2070972 - RNA, 19 nt, Artificial Sequence
  Description of Artificial Sequence: Synthetic oligonucleotide
  Sense strand starting at position 2265 of SEQ ID NO: 1881778
agugauuucucugaagacc

SEQ ID NO: 2070973 - RNA, 19 nt, Artificial Sequence
  Description of Artificial Sequence: Synthetic oligonucleotide
  Antisense strand to SEQ ID NO: 2070972
ggucuucagagaaaucacu

SEQ ID NO: 2070974 - RNA, 19 nt, Artificial Sequence
  Description of Artificial Sequence: Synthetic oligonucleotide
  Sense strand starting at position 2485 of SEQ ID NO: 1881778
ggcugcagccuggagauua

SEQ ID NO: 2070975 - RNA, 19 nt, Artificial Sequence
  Description of Artificial Sequence: Synthetic oligonucleotide
  Antisense strand to SEQ ID NO: 2070974
uaaucuccaggcugcagcc

SEQ ID NO: 2070976 - RNA, 19 nt, Artificial Sequence
  Description of Artificial Sequence: Synthetic oligonucleotide
  Sense strand starting at position 2654 of SEQ ID NO: 1881778
augauacaugucugauacu

SEQ ID NO: 2070977 - RNA, 19 nt, Artificial Sequence
  Description of Artificial Sequence: Synthetic oligonucleotide
  Antisense strand to SEQ ID NO: 2070976
aguaucagacauguaucau

SEQ ID NO: 2070978 - RNA, 19 nt, Artificial Sequence
  Description of Artificial Sequence: Synthetic oligonucleotide
  Sense strand starting at position 2664 of SEQ ID NO: 1881778
ucugauacucaauauggca

SEQ ID NO: 2070979 - RNA, 19 nt, Artificial Sequence
  Description of Artificial Sequence: Synthetic oligonucleotide
  Antisense strand to SEQ ID NO: 2070978
ugccauauugaguaucaga

SEQ ID NO: 2070980 - RNA, 19 nt, Artificial Sequence
  Description of Artificial Sequence: Synthetic oligonucleotide
  Sense strand starting at position 2679 of SEQ ID NO: 1881778
ggcauuugaucuuuagcug

SEQ ID NO: 2070981 - RNA, 19 nt, Artificial Sequence
  Description of Artificial Sequence: Synthetic oligonucleotide
  Antisense strand to SEQ ID NO: 2070980
cagcuaaagaucaaaugcc

SEQ ID NO: 2070982 - RNA, 19 nt, Artificial Sequence
  Description of Artificial Sequence: Synthetic oligonucleotide
  Sense strand starting at position 2693 of SEQ ID NO: 1881778
agcugaacucucugaggca

SEQ ID NO: 2070983 - RNA, 19 nt, Artificial Sequence
  Description of Artificial Sequence: Synthetic oligonucleotide
  Antisense strand to SEQ ID NO: 2070982
ugccucagagaguucagcu

SEQ ID NO: 2070984 - RNA, 19 nt, Artificial Sequence
  Description of Artificial Sequence: Synthetic oligonucleotide
  Sense strand starting at position 2768 of SEQ ID NO: 1881778
aggauuugauuccaugucu

SEQ ID NO: 2070985 - RNA, 19 nt, Artificial Sequence
  Description of Artificial Sequence: Synthetic oligonucleotide
  Antisense strand to SEQ ID NO: 2070984
agacauggaaucaaauccu

SEQ ID NO: 2070986 - RNA, 19 nt, Artificial Sequence
  Description of Artificial Sequence: Synthetic oligonucleotide
  Sense strand starting at position 3023 of SEQ ID NO: 1881778
cugggaaguucuucuuaca

SEQ ID NO: 2070987 - RNA, 19 nt, Artificial Sequence
  Description of Artificial Sequence: Synthetic oligonucleotide
  Antisense strand to SEQ ID NO: 2070986
uguaagaagaacuucccag

SEQ ID NO: 2070988 - RNA, 19 nt, Artificial Sequence
  Description of Artificial Sequence: Synthetic oligonucleotide
  Sense strand starting at position 3057 of SEQ ID NO: 1881778
cuccuaugauagcugaaac

SEQ ID NO: 2070989 - RNA, 19 nt, Artificial Sequence
  Description of Artificial Sequence: Synthetic oligonucleotide
  Antisense strand to SEQ ID NO: 2070988
guuucagcuaucauaggag

SEQ ID NO: 2070990 - RNA, 19 nt, Artificial Sequence
  Description of Artificial Sequence: Synthetic oligonucleotide
  Sense strand starting at position 3165 of SEQ ID NO: 1881778
acuaacuucuugcugaagu

SEQ ID NO: 2070991 - RNA, 19 nt, Artificial Sequence
  Description of Artificial Sequence: Synthetic oligonucleotide
  Antisense strand to SEQ ID NO: 2070990
acuucagcaagaaguuagu

SEQ ID NO: 2070992 - RNA, 19 nt, Artificial Sequence
  Description of Artificial Sequence: Synthetic oligonucleotide
  Sense strand starting at position 3217 of SEQ ID NO: 1881778
gaggauuuaucaugacucu

SEQ ID NO: 2070993 - RNA, 19 nt, Artificial Sequence
  Description of Artificial Sequence: Synthetic oligonucleotide
  Antisense strand to SEQ ID NO: 2070992
agagucaugauaaauccuc

SEQ ID NO: 2070994 - RNA, 19 nt, Artificial Sequence
  Description of Artificial Sequence: Synthetic oligonucleotide
  Sense strand starting at position 3272 of SEQ ID NO: 1881778
ccauuagagacgggucaga

SEQ ID NO: 2070995 - RNA, 19 nt, Artificial Sequence
  Description of Artificial Sequence: Synthetic oligonucleotide
  Antisense strand to SEQ ID NO: 2070994
ucugacccgucucuaaugg

SEQ ID NO: 2070996 - RNA, 19 nt, Artificial Sequence
  Description of Artificial Sequence: Synthetic oligonucleotide
  Sense strand starting at position 3281 of SEQ ID NO: 1881778
acgggucagaccugaauaa

SEQ ID NO: 2070997 - RNA, 19 nt, Artificial Sequence
  Description of Artificial Sequence: Synthetic oligonucleotide
  Antisense strand to SEQ ID NO: 2070996
uuauucaggucugacccgu

SEQ ID NO: 2070998 - RNA, 19 nt, Artificial Sequence
  Description of Artificial Sequence: Synthetic oligonucleotide
  Sense strand starting at position 3306 of SEQ ID NO: 1881778
uuuccagacuucucuguga

SEQ ID NO: 2070999 - RNA, 19 nt, Artificial Sequence
  Description of Artificial Sequence: Synthetic oligonucleotide
  Antisense strand to SEQ ID NO: 2070998
ucacagagaagucuggaaa

SEQ ID NO: 2071000 - RNA, 19 nt, Artificial Sequence
  Description of Artificial Sequence: Synthetic oligonucleotide
  Sense strand starting at position 3308 of SEQ ID NO: 1881778
uccagacuucucugugaca

SEQ ID NO: 2071001 - RNA, 19 nt, Artificial Sequence
  Description of Artificial Sequence: Synthetic oligonucleotide
  Antisense strand to SEQ ID NO: 2071000
ugucacagagaagucugga

SEQ ID NO: 2071002 - RNA, 19 nt, Artificial Sequence
  Description of Artificial Sequence: Synthetic oligonucleotide
  Sense strand starting at position 3309 of SEQ ID NO: 1881778
ccagacuucucugugacag

SEQ ID NO: 2071003 - RNA, 19 nt, Artificial Sequence
  Description of Artificial Sequence: Synthetic oligonucleotide
  Antisense strand to SEQ ID NO: 2071002
cugucacagagaagucugg

SEQ ID NO: 2071004 - RNA, 19 nt, Artificial Sequence
  Description of Artificial Sequence: Synthetic oligonucleotide
  Sense strand starting at position 3475 of SEQ ID NO: 1881778
gcugauuagccaggaagga

SEQ ID NO: 2071005 - RNA, 19 nt, Artificial Sequence
  Description of Artificial Sequence: Synthetic oligonucleotide
  Antisense strand to SEQ ID NO: 2071004
uccuuccuggcuaaucagc

SEQ ID NO: 2071006 - RNA, 19 nt, Artificial Sequence
  Description of Artificial Sequence: Synthetic oligonucleotide
  Sense strand starting at position 3530 of SEQ ID NO: 1881778
ccaggagagaaauggcuuu

SEQ ID NO: 2071007 - RNA, 19 nt, Artificial Sequence
  Description of Artificial Sequence: Synthetic oligonucleotide
  Antisense strand to SEQ ID NO: 2071006
aaagccauuucucuccugg

SEQ ID NO: 2071008 - RNA, 19 nt, Artificial Sequence
  Description of Artificial Sequence: Synthetic oligonucleotide
  Sense strand starting at position 3536 of SEQ ID NO: 1881778
gagaaauggcuuuguugug

SEQ ID NO: 2071009 - RNA, 19 nt, Artificial Sequence
  Description of Artificial Sequence: Synthetic oligonucleotide
  Antisense strand to SEQ ID NO: 2071008
cacaacaaagccauuucuc

SEQ ID NO: 2071010 - RNA, 19 nt, Artificial Sequence
  Description of Artificial Sequence: Synthetic oligonucleotide
  Sense strand starting at position 3687 of SEQ ID NO: 1881778
agcuuaccuccaggugauu

SEQ ID NO: 2071011 - RNA, 19 nt, Artificial Sequence
  Description of Artificial Sequence: Synthetic oligonucleotide
  Antisense strand to SEQ ID NO: 2071010
aaucaccuggagguaagcu

SEQ ID NO: 2071012 - RNA, 19 nt, Artificial Sequence
  Description of Artificial Sequence: Synthetic oligonucleotide
  Sense strand starting at position 3718 of SEQ ID NO: 1881778
cugugaauacauggagagu

SEQ ID NO: 2071013 - RNA, 19 nt, Artificial Sequence
  Description of Artificial Sequence: Synthetic oligonucleotide
  Antisense strand to SEQ ID NO: 2071012
acucuccauguauucacag

SEQ ID NO: 2071014 - RNA, 19 nt, Artificial Sequence
  Description of Artificial Sequence: Synthetic oligonucleotide
  Sense strand starting at position 345 of SEQ ID NO: 1881779
uguggaaacucuguguauc

SEQ ID NO: 2071015 - RNA, 19 nt, Artificial Sequence
  Description of Artificial Sequence: Synthetic oligonucleotide
  Antisense strand to SEQ ID NO: 2071014
gauacacagaguuuccaca

SEQ ID NO: 2071016 - RNA, 19 nt, Artificial Sequence
  Description of Artificial Sequence: Synthetic oligonucleotide
  Sense strand starting at position 346 of SEQ ID NO: 1881779
guggaaacucuguguaucu

SEQ ID NO: 2071017 - RNA, 19 nt, Artificial Sequence
  Description of Artificial Sequence: Synthetic oligonucleotide
  Antisense strand to SEQ ID NO: 2071016
agauacacagaguuuccac

SEQ ID NO: 2071018 - RNA, 19 nt, Artificial Sequence
  Description of Artificial Sequence: Synthetic oligonucleotide
  Sense strand starting at position 347 of SEQ ID NO: 1881779
uggaaacucuguguaucua

SEQ ID NO: 2071019 - RNA, 19 nt, Artificial Sequence
  Description of Artificial Sequence: Synthetic oligonucleotide
  Antisense strand to SEQ ID NO: 2071018
uagauacacagaguuucca

SEQ ID NO: 2071020 - RNA, 19 nt, Artificial Sequence
  Description of Artificial Sequence: Synthetic oligonucleotide
  Sense strand starting at position 348 of SEQ ID NO: 1881779
ggaaacucuguguaucuaa

SEQ ID NO: 2071021 - RNA, 19 nt, Artificial Sequence
  Description of Artificial Sequence: Synthetic oligonucleotide
  Antisense strand to SEQ ID NO: 2071020
uuagauacacagaguuucc

SEQ ID NO: 2071022 - RNA, 19 nt, Artificial Sequence
  Description of Artificial Sequence: Synthetic oligonucleotide
  Sense strand starting at position 476 of SEQ ID NO: 1881779
ucgcuagggccagauaaga

SEQ ID NO: 2071023 - RNA, 19 nt, Artificial Sequence
  Description of Artificial Sequence: Synthetic oligonucleotide
  Antisense strand to SEQ ID NO: 2071022
ucuuaucuggcccuagcga

SEQ ID NO: 2071024 - RNA, 19 nt, Artificial Sequence
  Description of Artificial Sequence: Synthetic oligonucleotide
  Sense strand starting at position 1370 of SEQ ID NO: 1881779
gcagaauucuggccaggcu

SEQ ID NO: 2071025 - RNA, 19 nt, Artificial Sequence
  Description of Artificial Sequence: Synthetic oligonucleotide
  Antisense strand to SEQ ID NO: 2071024
agccuggccagaauucugc

SEQ ID NO: 2071026 - RNA, 19 nt, Artificial Sequence
  Description of Artificial Sequence: Synthetic oligonucleotide
  Sense strand starting at position 1605 of SEQ ID NO: 1881779
ggaagaguuuccuccucag

SEQ ID NO: 2071027 - RNA, 19 nt, Artificial Sequence
  Description of Artificial Sequence: Synthetic oligonucleotide
  Antisense strand to SEQ ID NO: 2071026
cugaggaggaaacucuucc

SEQ ID NO: 2071028 - RNA, 19 nt, Artificial Sequence
  Description of Artificial Sequence: Synthetic oligonucleotide
  Sense strand starting at position 1608 of SEQ ID NO: 1881779
agaguuuccuccucagccu

SEQ ID NO: 2071029 - RNA, 19 nt, Artificial Sequence
  Description of Artificial Sequence: Synthetic oligonucleotide
  Antisense strand to SEQ ID NO: 2071028
aggcugaggaggaaacucu

SEQ ID NO: 2071030 - RNA, 19 nt, Artificial Sequence
  Description of Artificial Sequence: Synthetic oligonucleotide
  Sense strand starting at position 2710 of SEQ ID NO: 1881779
gcgguaaguccgugaggug

SEQ ID NO: 2071031 - RNA, 19 nt, Artificial Sequence
  Description of Artificial Sequence: Synthetic oligonucleotide
  Antisense strand to SEQ ID NO: 2071030
caccucacggacuuaccgc

SEQ ID NO: 2071032 - RNA, 19 nt, Artificial Sequence
  Description of Artificial Sequence: Synthetic oligonucleotide
  Sense strand starting at position 2731 of SEQ ID NO: 1881779
ggcuucuaauccuugccau

SEQ ID NO: 2071033 - RNA, 19 nt, Artificial Sequence
  Description of Artificial Sequence: Synthetic oligonucleotide
  Antisense strand to SEQ ID NO: 2071032
auggcaaggauuagaagcc

SEQ ID NO: 2071034 - RNA, 19 nt, Artificial Sequence
  Description of Artificial Sequence: Synthetic oligonucleotide
  Sense strand starting at position 2747 of SEQ ID NO: 1881779
cauuuagcagcucguaauc

SEQ ID NO: 2071035 - RNA, 19 nt, Artificial Sequence
  Description of Artificial Sequence: Synthetic oligonucleotide
  Antisense strand to SEQ ID NO: 2071034
gauuacgagcugcuaaaug

SEQ ID NO: 2071036 - RNA, 19 nt, Artificial Sequence
  Description of Artificial Sequence: Synthetic oligonucleotide
  Sense strand starting at position 2797 of SEQ ID NO: 1881779
uguucacgacucuguggaa

SEQ ID NO: 2071037 - RNA, 19 nt, Artificial Sequence
  Description of Artificial Sequence: Synthetic oligonucleotide
  Antisense strand to SEQ ID NO: 2071036
uuccacagagucgugaaca

SEQ ID NO: 2071038 - RNA, 19 nt, Artificial Sequence
  Description of Artificial Sequence: Synthetic oligonucleotide
  Sense strand starting at position 2827 of SEQ ID NO: 1881779
agaugcuguugugaacuuu

SEQ ID NO: 2071039 - RNA, 19 nt, Artificial Sequence
  Description of Artificial Sequence: Synthetic oligonucleotide
  Antisense strand to SEQ ID NO: 2071038
aaaguucacaacagcaucu

SEQ ID NO: 2071040 - RNA, 19 nt, Artificial Sequence
  Description of Artificial Sequence: Synthetic oligonucleotide
  Sense strand starting at position 2919 of SEQ ID NO: 1881779
aacgguuugccagaguuau

SEQ ID NO: 2071041 - RNA, 19 nt, Artificial Sequence
  Description of Artificial Sequence: Synthetic oligonucleotide
  Antisense strand to SEQ ID NO: 2071040
auaacucuggcaaaccguu

SEQ ID NO: 2071042 - RNA, 19 nt, Artificial Sequence
  Description of Artificial Sequence: Synthetic oligonucleotide
  Sense strand starting at position 2923 of SEQ ID NO: 1881779
guuugccagaguuauugau

SEQ ID NO: 2071043 - RNA, 19 nt, Artificial Sequence
  Description of Artificial Sequence: Synthetic oligonucleotide
  Antisense strand to SEQ ID NO: 2071042
aucaauaacucuggcaaac

SEQ ID NO: 2071044 - RNA, 19 nt, Artificial Sequence
  Description of Artificial Sequence: Synthetic oligonucleotide
  Sense strand starting at position 3009 of SEQ ID NO: 1881779
gcuauuaauguaugcauca

SEQ ID NO: 2071045 - RNA, 19 nt, Artificial Sequence
  Description of Artificial Sequence: Synthetic oligonucleotide
  Antisense strand to SEQ ID NO: 2071044
ugaugcauacauuaauagc

SEQ ID NO: 2071046 - RNA, 19 nt, Artificial Sequence
  Description of Artificial Sequence: Synthetic oligonucleotide
  Sense strand starting at position 3023 of SEQ ID NO: 1881779
caucaaagccgucauaaag

SEQ ID NO: 2071047 - RNA, 19 nt, Artificial Sequence
  Description of Artificial Sequence: Synthetic oligonucleotide
  Antisense strand to SEQ ID NO: 2071046
cuuuaugacggcuuugaug

SEQ ID NO: 2071048 - RNA, 19 nt, Artificial Sequence
  Description of Artificial Sequence: Synthetic oligonucleotide
  Sense strand starting at position 3032 of SEQ ID NO: 1881779
cgucauaaagagcaaauua

SEQ ID NO: 2071049 - RNA, 19 nt, Artificial Sequence
  Description of Artificial Sequence: Synthetic oligonucleotide
  Antisense strand to SEQ ID NO: 2071048
uaauuugcucuuuaugacg

SEQ ID NO: 2071050 - RNA, 19 nt, Artificial Sequence
  Description of Artificial Sequence: Synthetic oligonucleotide
  Sense strand starting at position 3146 of SEQ ID NO: 1881779
cguugcuuauucucaguga

SEQ ID NO: 2071051 - RNA, 19 nt, Artificial Sequence
  Description of Artificial Sequence: Synthetic oligonucleotide
  Antisense strand to SEQ ID NO: 2071050
ucacugagaauaagcaacg

SEQ ID NO: 2071052 - RNA, 19 nt, Artificial Sequence
  Description of Artificial Sequence: Synthetic oligonucleotide
  Sense strand starting at position 3147 of SEQ ID NO: 1881779
guugcuuauucucagugaa

SEQ ID NO: 2071053 - RNA, 19 nt, Artificial Sequence
  Description of Artificial Sequence: Synthetic oligonucleotide
  Antisense strand to SEQ ID NO: 2071052
uucacugagaauaagcaac

SEQ ID NO: 2071054 - RNA, 19 nt, Artificial Sequence
  Description of Artificial Sequence: Synthetic oligonucleotide
  Sense strand starting at position 3149 of SEQ ID NO: 1881779
ugcuuauucucagugaagg

SEQ ID NO: 2071055 - RNA, 19 nt, Artificial Sequence
  Description of Artificial Sequence: Synthetic oligonucleotide
  Antisense strand to SEQ ID NO: 2071054
ccuucacugagaauaagca

SEQ ID NO: 2071056 - RNA, 19 nt, Artificial Sequence
  Description of Artificial Sequence: Synthetic oligonucleotide
  Sense strand starting at position 3150 of SEQ ID NO: 1881779
gcuuauucucagugaagga

SEQ ID NO: 2071057 - RNA, 19 nt, Artificial Sequence
  Description of Artificial Sequence: Synthetic oligonucleotide
  Antisense strand to SEQ ID NO: 2071056
uccuucacugagaauaagc

SEQ ID NO: 2071058 - RNA, 19 nt, Artificial Sequence
  Description of Artificial Sequence: Synthetic oligonucleotide
  Sense strand starting at position 3234 of SEQ ID NO: 1881779
acauaauagugccugaaau

SEQ ID NO: 2071059 - RNA, 19 nt, Artificial Sequence
  Description of Artificial Sequence: Synthetic oligonucleotide
  Antisense strand to SEQ ID NO: 2071058
auuucaggcacuauuaugu

SEQ ID NO: 2071060 - RNA, 19 nt, Artificial Sequence
  Description of Artificial Sequence: Synthetic oligonucleotide
  Sense strand starting at position 3235 of SEQ ID NO: 1881779
cauaauagugccugaaaug

SEQ ID NO: 2071061 - RNA, 19 nt, Artificial Sequence
  Description of Artificial Sequence: Synthetic oligonucleotide
  Antisense strand to SEQ ID NO: 2071060
cauuucaggcacuauuaug

SEQ ID NO: 2071062 - RNA, 19 nt, Artificial Sequence
  Description of Artificial Sequence: Synthetic oligonucleotide
  Sense strand starting at position 3244 of SEQ ID NO: 1881779
gccugaaauggcuaaucag

SEQ ID NO: 2071063 - RNA, 19 nt, Artificial Sequence
  Description of Artificial Sequence: Synthetic oligonucleotide
  Antisense strand to SEQ ID NO: 2071062
cugauuagccauuucaggc

SEQ ID NO: 2071064 - RNA, 19 nt, Artificial Sequence
  Description of Artificial Sequence: Synthetic oligonucleotide
  Sense strand starting at position 3256 of SEQ ID NO: 1881779
uaaucagcugauugugaca

SEQ ID NO: 2071065 - RNA, 19 nt, Artificial Sequence
  Description of Artificial Sequence: Synthetic oligonucleotide
  Antisense strand to SEQ ID NO: 2071064
ugucacaaucagcugauua

SEQ ID NO: 2071066 - RNA, 19 nt, Artificial Sequence
  Description of Artificial Sequence: Synthetic oligonucleotide
  Sense strand starting at position 3314 of SEQ ID NO: 1881779
gagggcaagucuuauucuu

SEQ ID NO: 2071067 - RNA, 19 nt, Artificial Sequence
  Description of Artificial Sequence: Synthetic oligonucleotide
  Antisense strand to SEQ ID NO: 2071066
aagaauaagacuugcccuc

SEQ ID NO: 2071068 - RNA, 19 nt, Artificial Sequence
  Description of Artificial Sequence: Synthetic oligonucleotide
  Sense strand starting at position 3373 of SEQ ID NO: 1881779
uuuggaaauuugcugucuu

SEQ ID NO: 2071069 - RNA, 19 nt, Artificial Sequence
  Description of Artificial Sequence: Synthetic oligonucleotide
  Antisense strand to SEQ ID NO: 2071068
aagacagcaaauuuccaaa

SEQ ID NO: 2071070 - RNA, 19 nt, Artificial Sequence
  Description of Artificial Sequence: Synthetic oligonucleotide
  Sense strand starting at position 3374 of SEQ ID NO: 1881779
uuggaaauuugcugucuua

SEQ ID NO: 2071071 - RNA, 19 nt, Artificial Sequence
  Description of Artificial Sequence: Synthetic oligonucleotide
  Antisense strand to SEQ ID NO: 2071070
uaagacagcaaauuuccaa

SEQ ID NO: 2071072 - RNA, 19 nt, Artificial Sequence
  Description of Artificial Sequence: Synthetic oligonucleotide
  Sense strand starting at position 3381 of SEQ ID NO: 1881779
uuugcugucuuauggaaag

SEQ ID NO: 2071073 - RNA, 19 nt, Artificial Sequence
  Description of Artificial Sequence: Synthetic oligonucleotide
  Antisense strand to SEQ ID NO: 2071072
cuuuccauaagacagcaaa

SEQ ID NO: 2071074 - RNA, 19 nt, Artificial Sequence
  Description of Artificial Sequence: Synthetic oligonucleotide
  Sense strand starting at position 3387 of SEQ ID NO: 1881779
gucuuauggaaagggaucu

SEQ ID NO: 2071075 - RNA, 19 nt, Artificial Sequence
  Description of Artificial Sequence: Synthetic oligonucleotide
  Antisense strand to SEQ ID NO: 2071074
agaucccuuuccauaagac

SEQ ID NO: 2071076 - RNA, 19 nt, Artificial Sequence
  Description of Artificial Sequence: Synthetic oligonucleotide
  Sense strand starting at position 3397 of SEQ ID NO: 1881779
aagggaucucugugucuuc

SEQ ID NO: 2071077 - RNA, 19 nt, Artificial Sequence
  Description of Artificial Sequence: Synthetic oligonucleotide
  Antisense strand to SEQ ID NO: 2071076
gaagacacagagaucccuu

SEQ ID NO: 2071078 - RNA, 19 nt, Artificial Sequence
  Description of Artificial Sequence: Synthetic oligonucleotide
  Sense strand starting at position 3527 of SEQ ID NO: 1881779
acaauaaauugccguauca

SEQ ID NO: 2071079 - RNA, 19 nt, Artificial Sequence
  Description of Artificial Sequence: Synthetic oligonucleotide
  Antisense strand to SEQ ID NO: 2071078
ugauacggcaauuuauugu

SEQ ID NO: 2071080 - RNA, 19 nt, Artificial Sequence
  Description of Artificial Sequence: Synthetic oligonucleotide
  Sense strand starting at position 3724 of SEQ ID NO: 1881779
cugccaaaugaguacacaa

SEQ ID NO: 2071081 - RNA, 19 nt, Artificial Sequence
  Description of Artificial Sequence: Synthetic oligonucleotide
  Antisense strand to SEQ ID NO: 2071080
uuguguacucauuuggcag

SEQ ID NO: 2071082 - RNA, 19 nt, Artificial Sequence
  Description of Artificial Sequence: Synthetic oligonucleotide
  Sense strand starting at position 3751 of SEQ ID NO: 1881779
uaaggugaccggugucaga

SEQ ID NO: 2071083 - RNA, 19 nt, Artificial Sequence
  Description of Artificial Sequence: Synthetic oligonucleotide
  Antisense strand to SEQ ID NO: 2071082
ucugacaccggucaccuua

SEQ ID NO: 2071084 - RNA, 19 nt, Artificial Sequence
  Description of Artificial Sequence: Synthetic oligonucleotide
  Sense strand starting at position 3766 of SEQ ID NO: 1881779
cagauugacgcucaccaua

SEQ ID NO: 2071085 - RNA, 19 nt, Artificial Sequence
  Description of Artificial Sequence: Synthetic oligonucleotide
  Antisense strand to SEQ ID NO: 2071084
uauggugagcgucaaucug

SEQ ID NO: 2071086 - RNA, 19 nt, Artificial Sequence
  Description of Artificial Sequence: Synthetic oligonucleotide
  Sense strand starting at position 3768 of SEQ ID NO: 1881779
gauugacgcucaccauagu

SEQ ID NO: 2071087 - RNA, 19 nt, Artificial Sequence
  Description of Artificial Sequence: Synthetic oligonucleotide
  Antisense strand to SEQ ID NO: 2071086
acuauggugagcgucaauc

SEQ ID NO: 2071088 - RNA, 19 nt, Artificial Sequence
  Description of Artificial Sequence: Synthetic oligonucleotide
  Sense strand starting at position 3809 of SEQ ID NO: 1881779
ggcgcuaggugcaaaugau

SEQ ID NO: 2071089 - RNA, 19 nt, Artificial Sequence
  Description of Artificial Sequence: Synthetic oligonucleotide
  Antisense strand to SEQ ID NO: 2071088
aucauuugcaccuagcgcc

SEQ ID NO: 2071090 - RNA, 19 nt, Artificial Sequence
  Description of Artificial Sequence: Synthetic oligonucleotide
  Sense strand starting at position 3871 of SEQ ID NO: 1881779
aguuaauuaucuguccauu

SEQ ID NO: 2071091 - RNA, 19 nt, Artificial Sequence
  Description of Artificial Sequence: Synthetic oligonucleotide
  Antisense strand to SEQ ID NO: 2071090
aauggacagauaauuaacu

SEQ ID NO: 2071092 - RNA, 19 nt, Artificial Sequence
  Description of Artificial Sequence: Synthetic oligonucleotide
  Sense strand starting at position 3893 of SEQ ID NO: 1881779
agacuauccucuugugguu

SEQ ID NO: 2071093 - RNA, 19 nt, Artificial Sequence
  Description of Artificial Sequence: Synthetic oligonucleotide
  Antisense strand to SEQ ID NO: 2071092
aaccacaagaggauagucu

SEQ ID NO: 2071094 - RNA, 19 nt, Artificial Sequence
  Description of Artificial Sequence: Synthetic oligonucleotide
  Sense strand starting at position 56 of SEQ ID NO: 1881780
auuugugcaucucuaagca

SEQ ID NO: 2071095 - RNA, 19 nt, Artificial Sequence
  Description of Artificial Sequence: Synthetic oligonucleotide
  Antisense strand to SEQ ID NO: 2071094
ugcuuagagaugcacaaau

SEQ ID NO: 2071096 - RNA, 19 nt, Artificial Sequence
  Description of Artificial Sequence: Synthetic oligonucleotide
  Sense strand starting at position 106 of SEQ ID NO: 1881780
auugguguugcacaauaau

SEQ ID NO: 2071097 - RNA, 19 nt, Artificial Sequence
  Description of Artificial Sequence: Synthetic oligonucleotide
  Antisense strand to SEQ ID NO: 2071096
auuauugugcaacaccaau

SEQ ID NO: 2071098 - RNA, 19 nt, Artificial Sequence
  Description of Artificial Sequence: Synthetic oligonucleotide
  Sense strand starting at position 141 of SEQ ID NO: 1881780
aauggagugguuuggauua

SEQ ID NO: 2071099 - RNA, 19 nt, Artificial Sequence
  Description of Artificial Sequence: Synthetic oligonucleotide
  Antisense strand to SEQ ID NO: 2071098
uaauccaaaccacuccauu

SEQ ID NO: 2071100 - RNA, 19 nt, Artificial Sequence
  Description of Artificial Sequence: Synthetic oligonucleotide
  Sense strand starting at position 264 of SEQ ID NO: 1881780
cagagugagaagugaaugu

SEQ ID NO: 2071101 - RNA, 19 nt, Artificial Sequence
  Description of Artificial Sequence: Synthetic oligonucleotide
  Antisense strand to SEQ ID NO: 2071100
acauucacuucucacucug

SEQ ID NO: 2071102 - RNA, 19 nt, Artificial Sequence
  Description of Artificial Sequence: Synthetic oligonucleotide
  Sense strand starting at position 268 of SEQ ID NO: 1881780
gugagaagugaaugucaaa

SEQ ID NO: 2071103 - RNA, 19 nt, Artificial Sequence
  Description of Artificial Sequence: Synthetic oligonucleotide
  Antisense strand to SEQ ID NO: 2071102
uuugacauucacuucucac

SEQ ID NO: 2071104 - RNA, 19 nt, Artificial Sequence
  Description of Artificial Sequence: Synthetic oligonucleotide
  Sense strand starting at position 275 of SEQ ID NO: 1881780
gugaaugucaaaggucaga

SEQ ID NO: 2071105 - RNA, 19 nt, Artificial Sequence
  Description of Artificial Sequence: Synthetic oligonucleotide
  Antisense strand to SEQ ID NO: 2071104
ucugaccuuugacauucac

SEQ ID NO: 2071106 - RNA, 19 nt, Artificial Sequence
  Description of Artificial Sequence: Synthetic oligonucleotide
  Sense strand starting at position 445 of SEQ ID NO: 1881780
aauggagaauugcugcauu

SEQ ID NO: 2071107 - RNA, 19 nt, Artificial Sequence
  Description of Artificial Sequence: Synthetic oligonucleotide
  Antisense strand to SEQ ID NO: 2071106
aaugcagcaauucuccauu

SEQ ID NO: 2071108 - RNA, 19 nt, Artificial Sequence
  Description of Artificial Sequence: Synthetic oligonucleotide
  Sense strand starting at position 546 of SEQ ID NO: 1881780
augagcaaugggugauagu

SEQ ID NO: 2071109 - RNA, 19 nt, Artificial Sequence
  Description of Artificial Sequence: Synthetic oligonucleotide
  Antisense strand to SEQ ID NO: 2071108
acuaucacccauugcucau

SEQ ID NO: 2071110 - RNA, 19 nt, Artificial Sequence
  Description of Artificial Sequence: Synthetic oligonucleotide
  Sense strand starting at position 599 of SEQ ID NO: 1881780
gguauucccauggguaaua

SEQ ID NO: 2071111 - RNA, 19 nt, Artificial Sequence
  Description of Artificial Sequence: Synthetic oligonucleotide
  Antisense strand to SEQ ID NO: 2071110
uauuacccaugggaauacc

SEQ ID NO: 2071112 - RNA, 19 nt, Artificial Sequence
  Description of Artificial Sequence: Synthetic oligonucleotide
  Sense strand starting at position 600 of SEQ ID NO: 1881780
guauucccauggguaauau

SEQ ID NO: 2071113 - RNA, 19 nt, Artificial Sequence
  Description of Artificial Sequence: Synthetic oligonucleotide
  Antisense strand to SEQ ID NO: 2071112
auauuacccaugggaauac

SEQ ID NO: 2071114 - RNA, 19 nt, Artificial Sequence
  Description of Artificial Sequence: Synthetic oligonucleotide
  Sense strand starting at position 612 of SEQ ID NO: 1881780
guaauaucaccugagccau

SEQ ID NO: 2071115 - RNA, 19 nt, Artificial Sequence
  Description of Artificial Sequence: Synthetic oligonucleotide
  Antisense strand to SEQ ID NO: 2071114
auggcucaggugauauuac

SEQ ID NO: 2071116 - RNA, 19 nt, Artificial Sequence
  Description of Artificial Sequence: Synthetic oligonucleotide
  Sense strand starting at position 712 of SEQ ID NO: 1881780
gaguucuacucuguaugaa

SEQ ID NO: 2071117 - RNA, 19 nt, Artificial Sequence
  Description of Artificial Sequence: Synthetic oligonucleotide
  Antisense strand to SEQ ID NO: 2071116
uucauacagaguagaacuc

SEQ ID NO: 2071118 - RNA, 19 nt, Artificial Sequence
  Description of Artificial Sequence: Synthetic oligonucleotide
  Sense strand starting at position 713 of SEQ ID NO: 1881780
aguucuacucuguaugaau

SEQ ID NO: 2071119 - RNA, 19 nt, Artificial Sequence
  Description of Artificial Sequence: Synthetic oligonucleotide
  Antisense strand to SEQ ID NO: 2071118
auucauacagaguagaacu

SEQ ID NO: 2071120 - RNA, 19 nt, Artificial Sequence
  Description of Artificial Sequence: Synthetic oligonucleotide
  Sense strand starting at position 966 of SEQ ID NO: 1881780
caaggaagcucugugggau

SEQ ID NO: 2071121 - RNA, 19 nt, Artificial Sequence
  Description of Artificial Sequence: Synthetic oligonucleotide
  Antisense strand to SEQ ID NO: 2071120
aucccacagagcuuccuug

SEQ ID NO: 2071122 - RNA, 19 nt, Artificial Sequence
  Description of Artificial Sequence: Synthetic oligonucleotide
  Sense strand starting at position 1183 of SEQ ID NO: 1881780
ucaucacuuguggagcaaa

SEQ ID NO: 2071123 - RNA, 19 nt, Artificial Sequence
  Description of Artificial Sequence: Synthetic oligonucleotide
  Antisense strand to SEQ ID NO: 2071122
uuugcuccacaagugauga

SEQ ID NO: 2071124 - RNA, 19 nt, Artificial Sequence
  Description of Artificial Sequence: Synthetic oligonucleotide
  Sense strand starting at position 1215 of SEQ ID NO: 1881780
ugauauaacuaguugguca

SEQ ID NO: 2071125 - RNA, 19 nt, Artificial Sequence
  Description of Artificial Sequence: Synthetic oligonucleotide
  Antisense strand to SEQ ID NO: 2071124
ugaccaacuaguuauauca

SEQ ID NO: 2071126 - RNA, 19 nt, Artificial Sequence
  Description of Artificial Sequence: Synthetic oligonucleotide
  Sense strand starting at position 1217 of SEQ ID NO: 1881780
auauaacuaguuggucauu

SEQ ID NO: 2071127 - RNA, 19 nt, Artificial Sequence
  Description of Artificial Sequence: Synthetic oligonucleotide
  Antisense strand to SEQ ID NO: 2071126
aaugaccaacuaguuauau

SEQ ID NO: 2071128 - RNA, 19 nt, Artificial Sequence
  Description of Artificial Sequence: Synthetic oligonucleotide
  Sense strand starting at position 1223 of SEQ ID NO: 1881780
cuaguuggucauuagcaau

SEQ ID NO: 2071129 - RNA, 19 nt, Artificial Sequence
  Description of Artificial Sequence: Synthetic oligonucleotide
  Antisense strand to SEQ ID NO: 2071128
auugcuaaugaccaacuag

SEQ ID NO: 2071130 - RNA, 19 nt, Artificial Sequence
  Description of Artificial Sequence: Synthetic oligonucleotide
  Sense strand starting at position 1639 of SEQ ID NO: 1881780
uuccacaguuuccuggaau

SEQ ID NO: 2071131 - RNA, 19 nt, Artificial Sequence
  Description of Artificial Sequence: Synthetic oligonucleotide
  Antisense strand to SEQ ID NO: 2071130
auuccaggaaacuguggaa

SEQ ID NO: 2071132 - RNA, 19 nt, Artificial Sequence
  Description of Artificial Sequence: Synthetic oligonucleotide
  Sense strand starting at position 1671 of SEQ ID NO: 1881780
augcauuagcuggaucuuu

SEQ ID NO: 2071133 - RNA, 19 nt, Artificial Sequence
  Description of Artificial Sequence: Synthetic oligonucleotide
  Antisense strand to SEQ ID NO: 2071132
aaagauccagcuaaugcau

SEQ ID NO: 2071134 - RNA, 19 nt, Artificial Sequence
  Description of Artificial Sequence: Synthetic oligonucleotide
  Sense strand starting at position 1699 of SEQ ID NO: 1881780
cucacagugcugcaaugaa

SEQ ID NO: 2071135 - RNA, 19 nt, Artificial Sequence
  Description of Artificial Sequence: Synthetic oligonucleotide
  Antisense strand to SEQ ID NO: 2071134
uucauugcagcacugugag

SEQ ID NO: 2071136 - RNA, 19 nt, Artificial Sequence
  Description of Artificial Sequence: Synthetic oligonucleotide
  Sense strand starting at position 1907 of SEQ ID NO: 1881780
agaauaauaugccuuguca

SEQ ID NO: 2071137 - RNA, 19 nt, Artificial Sequence
  Description of Artificial Sequence: Synthetic oligonucleotide
  Antisense strand to SEQ ID NO: 2071136
ugacaaggcauauuauucu

SEQ ID NO: 2071138 - RNA, 19 nt, Artificial Sequence
  Description of Artificial Sequence: Synthetic oligonucleotide
  Sense strand starting at position 1931 of SEQ ID NO: 1881780
uuaguuaacuucuuaggga

SEQ ID NO: 2071139 - RNA, 19 nt, Artificial Sequence
  Description of Artificial Sequence: Synthetic oligonucleotide
  Antisense strand to SEQ ID NO: 2071138
ucccuaagaaguuaacuaa

SEQ ID NO: 2071140 - RNA, 19 nt, Artificial Sequence
  Description of Artificial Sequence: Synthetic oligonucleotide
  Sense strand starting at position 2153 of SEQ ID NO: 1881780
ucugaagaauguuugguaa

SEQ ID NO: 2071141 - RNA, 19 nt, Artificial Sequence
  Description of Artificial Sequence: Synthetic oligonucleotide
  Antisense strand to SEQ ID NO: 2071140
uuaccaaacauucuucaga

SEQ ID NO: 2071142 - RNA, 19 nt, Artificial Sequence
  Description of Artificial Sequence: Synthetic oligonucleotide
  Sense strand starting at position 2156 of SEQ ID NO: 1881780
gaagaauguuugguaauau

SEQ ID NO: 2071143 - RNA, 19 nt, Artificial Sequence
  Description of Artificial Sequence: Synthetic oligonucleotide
  Antisense strand to SEQ ID NO: 2071142
auauuaccaaacauucuuc

SEQ ID NO: 2071144 - RNA, 19 nt, Artificial Sequence
  Description of Artificial Sequence: Synthetic oligonucleotide
  Sense strand starting at position 2206 of SEQ ID NO: 1881780
aguagaaacucagccuuga

SEQ ID NO: 2071145 - RNA, 19 nt, Artificial Sequence
  Description of Artificial Sequence: Synthetic oligonucleotide
  Antisense strand to SEQ ID NO: 2071144
ucaaggcugaguuucuacu

SEQ ID NO: 2071146 - RNA, 19 nt, Artificial Sequence
  Description of Artificial Sequence: Synthetic oligonucleotide
  Sense strand starting at position 2314 of SEQ ID NO: 1881780
uucuaagacguuuagcaac

SEQ ID NO: 2071147 - RNA, 19 nt, Artificial Sequence
  Description of Artificial Sequence: Synthetic oligonucleotide
  Antisense strand to SEQ ID NO: 2071146
guugcuaaacgucuuagaa

SEQ ID NO: 2071148 - RNA, 19 nt, Artificial Sequence
  Description of Artificial Sequence: Synthetic oligonucleotide
  Sense strand starting at position 2367 of SEQ ID NO: 1881780
ccuccuggcucauuuguga

SEQ ID NO: 2071149 - RNA, 19 nt, Artificial Sequence
  Description of Artificial Sequence: Synthetic oligonucleotide
  Antisense strand to SEQ ID NO: 2071148
ucacaaaugagccaggagg

SEQ ID NO: 2071150 - RNA, 19 nt, Artificial Sequence
  Description of Artificial Sequence: Synthetic oligonucleotide
  Sense strand starting at position 2447 of SEQ ID NO: 1881780
ugagaacugcugcauucga

SEQ ID NO: 2071151 - RNA, 19 nt, Artificial Sequence
  Description of Artificial Sequence: Synthetic oligonucleotide
  Antisense strand to SEQ ID NO: 2071150
ucgaaugcagcaguucuca

SEQ ID NO: 2071152 - RNA, 19 nt, Artificial Sequence
  Description of Artificial Sequence: Synthetic oligonucleotide
  Sense strand starting at position 2508 of SEQ ID NO: 1881780
ccuauuaaagcagggaauu

SEQ ID NO: 2071153 - RNA, 19 nt, Artificial Sequence
  Description of Artificial Sequence: Synthetic oligonucleotide
  Antisense strand to SEQ ID NO: 2071152
aauucccugcuuuaauagg

SEQ ID NO: 2071154 - RNA, 19 nt, Artificial Sequence
  Description of Artificial Sequence: Synthetic oligonucleotide
  Sense strand starting at position 2773 of SEQ ID NO: 1881780
agacuuuaguucuccuaua

SEQ ID NO: 2071155 - RNA, 19 nt, Artificial Sequence
  Description of Artificial Sequence: Synthetic oligonucleotide
  Antisense strand to SEQ ID NO: 2071154
uauaggagaacuaaagucu

SEQ ID NO: 2071156 - RNA, 19 nt, Artificial Sequence
  Description of Artificial Sequence: Synthetic oligonucleotide
  Sense strand starting at position 2925 of SEQ ID NO: 1881780
augguccaggucugaaauu

SEQ ID NO: 2071157 - RNA, 19 nt, Artificial Sequence
  Description of Artificial Sequence: Synthetic oligonucleotide
  Antisense strand to SEQ ID NO: 2071156
aauuucagaccuggaccau

SEQ ID NO: 2071158 - RNA, 19 nt, Artificial Sequence
  Description of Artificial Sequence: Synthetic oligonucleotide
  Sense strand starting at position 3131 of SEQ ID NO: 1881780
agaaauaaagugugggagu

SEQ ID NO: 2071159 - RNA, 19 nt, Artificial Sequence
  Description of Artificial Sequence: Synthetic oligonucleotide
  Antisense strand to SEQ ID NO: 2071158
acucccacacuuuauuucu

SEQ ID NO: 2071160 - RNA, 19 nt, Artificial Sequence
  Description of Artificial Sequence: Synthetic oligonucleotide
  Sense strand starting at position 3412 of SEQ ID NO: 1881780
uugaauguuccuggaggaa

SEQ ID NO: 2071161 - RNA, 19 nt, Artificial Sequence
  Description of Artificial Sequence: Synthetic oligonucleotide
  Antisense strand to SEQ ID NO: 2071160
uuccuccaggaacauucaa

SEQ ID NO: 2071162 - RNA, 19 nt, Artificial Sequence
  Description of Artificial Sequence: Synthetic oligonucleotide
  Sense strand starting at position 3495 of SEQ ID NO: 1881780
uguagaacuugaguuaauc

SEQ ID NO: 2071163 - RNA, 19 nt, Artificial Sequence
  Description of Artificial Sequence: Synthetic oligonucleotide
  Antisense strand to SEQ ID NO: 2071162
gauuaacucaaguucuaca

SEQ ID NO: 2071164 - RNA, 19 nt, Artificial Sequence
  Description of Artificial Sequence: Synthetic oligonucleotide
  Sense strand starting at position 3738 of SEQ ID NO: 1881780
guggaaaguugacccaauu

SEQ ID NO: 2071165 - RNA, 19 nt, Artificial Sequence
  Description of Artificial Sequence: Synthetic oligonucleotide
  Antisense strand to SEQ ID NO: 2071164
aauugggucaacuuuccac

SEQ ID NO: 2071166 - RNA, 19 nt, Artificial Sequence
  Description of Artificial Sequence: Synthetic oligonucleotide
  Sense strand starting at position 3827 of SEQ ID NO: 1881780
cuaaacuaauuguuggauu

SEQ ID NO: 2071167 - RNA, 19 nt, Artificial Sequence
  Description of Artificial Sequence: Synthetic oligonucleotide
  Antisense strand to SEQ ID NO: 2071166
aauccaacaauuaguuuag

SEQ ID NO: 2071168 - RNA, 19 nt, Artificial Sequence
  Description of Artificial Sequence: Synthetic oligonucleotide
  Sense strand starting at position 3840 of SEQ ID NO: 1881780
uggauuaaaguccaguuua

SEQ ID NO: 2071169 - RNA, 19 nt, Artificial Sequence
  Description of Artificial Sequence: Synthetic oligonucleotide
  Antisense strand to SEQ ID NO: 2071168
uaaacuggacuuuaaucca

SEQ ID NO: 2071170 - RNA, 19 nt, Artificial Sequence
  Description of Artificial Sequence: Synthetic oligonucleotide
  Sense strand starting at position 3931 of SEQ ID NO: 1881780
uuccuaaagucugugggau

SEQ ID NO: 2071171 - RNA, 19 nt, Artificial Sequence
  Description of Artificial Sequence: Synthetic oligonucleotide
  Antisense strand to SEQ ID NO: 2071170
aucccacagacuuuaggaa

SEQ ID NO: 2071172 - RNA, 19 nt, Artificial Sequence
  Description of Artificial Sequence: Synthetic oligonucleotide
  Sense strand starting at position 3932 of SEQ ID NO: 1881780
uccuaaagucugugggaug

SEQ ID NO: 2071173 - RNA, 19 nt, Artificial Sequence
  Description of Artificial Sequence: Synthetic oligonucleotide
  Antisense strand to SEQ ID NO: 2071172
caucccacagacuuuagga

SEQ ID NO: 2071174 - RNA, 19 nt, Artificial Sequence
  Description of Artificial Sequence: Synthetic oligonucleotide
  Sense strand starting at position 21 of SEQ ID NO: 1881781
cgcugagagcgagagcauu

SEQ ID NO: 2071175 - RNA, 19 nt, Artificial Sequence
  Description of Artificial Sequence: Synthetic oligonucleotide
  Antisense strand to SEQ ID NO: 2071174
aaugcucucgcucucagcg

SEQ ID NO: 2071176 - RNA, 19 nt, Artificial Sequence
  Description of Artificial Sequence: Synthetic oligonucleotide
  Sense strand starting at position 100 of SEQ ID NO: 1881781
agcguugacugagaaccau

SEQ ID NO: 2071177 - RNA, 19 nt, Artificial Sequence
  Description of Artificial Sequence: Synthetic oligonucleotide
  Antisense strand to SEQ ID NO: 2071176
augguucucagucaacgcu

SEQ ID NO: 2071178 - RNA, 19 nt, Artificial Sequence
  Description of Artificial Sequence: Synthetic oligonucleotide
  Sense strand starting at position 456 of SEQ ID NO: 1881781
ucauuacucuguuauuugu

SEQ ID NO: 2071179 - RNA, 19 nt, Artificial Sequence
  Description of Artificial Sequence: Synthetic oligonucleotide
  Antisense strand to SEQ ID NO: 2071178
acaaauaacagaguaauga

SEQ ID NO: 2071180 - RNA, 19 nt, Artificial Sequence
  Description of Artificial Sequence: Synthetic oligonucleotide
  Sense strand starting at position 772 of SEQ ID NO: 1881781
augcguuucuuggucagga

SEQ ID NO: 2071181 - RNA, 19 nt, Artificial Sequence
  Description of Artificial Sequence: Synthetic oligonucleotide
  Antisense strand to SEQ ID NO: 2071180
uccugaccaagaaacgcau

SEQ ID NO: 2071182 - RNA, 19 nt, Artificial Sequence
  Description of Artificial Sequence: Synthetic oligonucleotide
  Sense strand starting at position 773 of SEQ ID NO: 1881781
ugcguuucuuggucaggaa

SEQ ID NO: 2071183 - RNA, 19 nt, Artificial Sequence
  Description of Artificial Sequence: Synthetic oligonucleotide
  Antisense strand to SEQ ID NO: 2071182
uuccugaccaagaaacgca

SEQ ID NO: 2071184 - RNA, 19 nt, Artificial Sequence
  Description of Artificial Sequence: Synthetic oligonucleotide
  Sense strand starting at position 776 of SEQ ID NO: 1881781
guuucuuggucaggaacau

SEQ ID NO: 2071185 - RNA, 19 nt, Artificial Sequence
  Description of Artificial Sequence: Synthetic oligonucleotide
  Antisense strand to SEQ ID NO: 2071184
auguuccugaccaagaaac

SEQ ID NO: 2071186 - RNA, 19 nt, Artificial Sequence
  Description of Artificial Sequence: Synthetic oligonucleotide
  Sense strand starting at position 787 of SEQ ID NO: 1881781
aggaacaucgugugggaaa

SEQ ID NO: 2071187 - RNA, 19 nt, Artificial Sequence
  Description of Artificial Sequence: Synthetic oligonucleotide
  Antisense strand to SEQ ID NO: 2071186
uuucccacacgauguuccu

SEQ ID NO: 2071188 - RNA, 19 nt, Artificial Sequence
  Description of Artificial Sequence: Synthetic oligonucleotide
  Sense strand starting at position 788 of SEQ ID NO: 1881781
ggaacaucgugugggaaau

SEQ ID NO: 2071189 - RNA, 19 nt, Artificial Sequence
  Description of Artificial Sequence: Synthetic oligonucleotide
  Antisense strand to SEQ ID NO: 2071188
auuucccacacgauguucc

SEQ ID NO: 2071190 - RNA, 19 nt, Artificial Sequence
  Description of Artificial Sequence: Synthetic oligonucleotide
  Sense strand starting at position 789 of SEQ ID NO: 1881781
gaacaucgugugggaaauu

SEQ ID NO: 2071191 - RNA, 19 nt, Artificial Sequence
  Description of Artificial Sequence: Synthetic oligonucleotide
  Antisense strand to SEQ ID NO: 2071190
aauuucccacacgauguuc

SEQ ID NO: 2071192 - RNA, 19 nt, Artificial Sequence
  Description of Artificial Sequence: Synthetic oligonucleotide
  Sense strand starting at position 790 of SEQ ID NO: 1881781
aacaucgugugggaaauua

SEQ ID NO: 2071193 - RNA, 19 nt, Artificial Sequence
  Description of Artificial Sequence: Synthetic oligonucleotide
  Antisense strand to SEQ ID NO: 2071192
uaauuucccacacgauguu

SEQ ID NO: 2071194 - RNA, 19 nt, Artificial Sequence
  Description of Artificial Sequence: Synthetic oligonucleotide
  Sense strand starting at position 800 of SEQ ID NO: 1881781
gggaaauuauaacaucuga

SEQ ID NO: 2071195 - RNA, 19 nt, Artificial Sequence
  Description of Artificial Sequence: Synthetic oligonucleotide
  Antisense strand to SEQ ID NO: 2071194
ucagauguuauaauuuccc

SEQ ID NO: 2071196 - RNA, 19 nt, Artificial Sequence
  Description of Artificial Sequence: Synthetic oligonucleotide
  Sense strand starting at position 817 of SEQ ID NO: 1881781
gaauaaggcguucggaaag

SEQ ID NO: 2071197 - RNA, 19 nt, Artificial Sequence
  Description of Artificial Sequence: Synthetic oligonucleotide
  Antisense strand to SEQ ID NO: 2071196
cuuuccgaacgccuuauuc

SEQ ID NO: 2071198 - RNA, 19 nt, Artificial Sequence
  Description of Artificial Sequence: Synthetic oligonucleotide
  Sense strand starting at position 854 of SEQ ID NO: 1881781
gaagacagcccuggaguaa

SEQ ID NO: 2071199 - RNA, 19 nt, Artificial Sequence
  Description of Artificial Sequence: Synthetic oligonucleotide
  Antisense strand to SEQ ID NO: 2071198
uuacuccagggcugucuuc

SEQ ID NO: 2071200 - RNA, 19 nt, Artificial Sequence
  Description of Artificial Sequence: Synthetic oligonucleotide
  Sense strand starting at position 878 of SEQ ID NO: 1881781
ggugacaagucccagacaa

SEQ ID NO: 2071201 - RNA, 19 nt, Artificial Sequence
  Description of Artificial Sequence: Synthetic oligonucleotide
  Antisense strand to SEQ ID NO: 2071200
uugucugggacuugucacc

SEQ ID NO: 2071202 - RNA, 19 nt, Artificial Sequence
  Description of Artificial Sequence: Synthetic oligonucleotide
  Sense strand starting at position 910 of SEQ ID NO: 1881781
agagaauagcucugcucuc

SEQ ID NO: 2071203 - RNA, 19 nt, Artificial Sequence
  Description of Artificial Sequence: Synthetic oligonucleotide
  Antisense strand to SEQ ID NO: 2071202
gagagcagagcuauucucu

SEQ ID NO: 2071204 - RNA, 19 nt, Artificial Sequence
  Description of Artificial Sequence: Synthetic oligonucleotide
  Sense strand starting at position 1310 of SEQ ID NO: 1881781
gagccaccuccaugagaga

SEQ ID NO: 2071205 - RNA, 19 nt, Artificial Sequence
  Description of Artificial Sequence: Synthetic oligonucleotide
  Antisense strand to SEQ ID NO: 2071204
ucucucauggagguggcuc

SEQ ID NO: 2071206 - RNA, 19 nt, Artificial Sequence
  Description of Artificial Sequence: Synthetic oligonucleotide
  Sense strand starting at position 1460 of SEQ ID NO: 1881781
ccgggaugguccucaguga

SEQ ID NO: 2071207 - RNA, 19 nt, Artificial Sequence
  Description of Artificial Sequence: Synthetic oligonucleotide
  Antisense strand to SEQ ID NO: 2071206
ucacugaggaccaucccgg

SEQ ID NO: 2071208 - RNA, 19 nt, Artificial Sequence
  Description of Artificial Sequence: Synthetic oligonucleotide
  Sense strand starting at position 1464 of SEQ ID NO: 1881781
gaugguccucagugagcau

SEQ ID NO: 2071209 - RNA, 19 nt, Artificial Sequence
  Description of Artificial Sequence: Synthetic oligonucleotide
  Antisense strand to SEQ ID NO: 2071208
augcucacugaggaccauc

SEQ ID NO: 2071210 - RNA, 19 nt, Artificial Sequence
  Description of Artificial Sequence: Synthetic oligonucleotide
  Sense strand starting at position 1582 of SEQ ID NO: 1881781
ccuugauggucucgucaaa

SEQ ID NO: 2071211 - RNA, 19 nt, Artificial Sequence
  Description of Artificial Sequence: Synthetic oligonucleotide
  Antisense strand to SEQ ID NO: 2071210
uuugacgagaccaucaagg

SEQ ID NO: 2071212 - RNA, 19 nt, Artificial Sequence
  Description of Artificial Sequence: Synthetic oligonucleotide
  Sense strand starting at position 1963 of SEQ ID NO: 1881781
aggagaaauauccggagcu

SEQ ID NO: 2071213 - RNA, 19 nt, Artificial Sequence
  Description of Artificial Sequence: Synthetic oligonucleotide
  Antisense strand to SEQ ID NO: 2071212
agcuccggauauuucuccu

SEQ ID NO: 2071214 - RNA, 19 nt, Artificial Sequence
  Description of Artificial Sequence: Synthetic oligonucleotide
  Sense strand starting at position 1964 of SEQ ID NO: 1881781
ggagaaauauccggagcuc

SEQ ID NO: 2071215 - RNA, 19 nt, Artificial Sequence
  Description of Artificial Sequence: Synthetic oligonucleotide
  Antisense strand to SEQ ID NO: 2071214
gagcuccggauauuucucc

SEQ ID NO: 2071216 - RNA, 19 nt, Artificial Sequence
  Description of Artificial Sequence: Synthetic oligonucleotide
  Sense strand starting at position 1991 of SEQ ID NO: 1881781
guguguuugugaggccaga

SEQ ID NO: 2071217 - RNA, 19 nt, Artificial Sequence
  Description of Artificial Sequence: Synthetic oligonucleotide
  Antisense strand to SEQ ID NO: 2071216
ucuggccucacaaacacac

SEQ ID NO: 2071218 - RNA, 19 nt, Artificial Sequence
  Description of Artificial Sequence: Synthetic oligonucleotide
  Sense strand starting at position 2095 of SEQ ID NO: 1881781
cguuccucccacugggaua

SEQ ID NO: 2071219 - RNA, 19 nt, Artificial Sequence
  Description of Artificial Sequence: Synthetic oligonucleotide
  Antisense strand to SEQ ID NO: 2071218
uaucccagugggaggaacg

SEQ ID NO: 2071220 - RNA, 19 nt, Artificial Sequence
  Description of Artificial Sequence: Synthetic oligonucleotide
  Sense strand starting at position 2230 of SEQ ID NO: 1881781
auuugauccuccgaaggga

SEQ ID NO: 2071221 - RNA, 19 nt, Artificial Sequence
  Description of Artificial Sequence: Synthetic oligonucleotide
  Antisense strand to SEQ ID NO: 2071220
ucccuucggaggaucaaau

SEQ ID NO: 2071222 - RNA, 19 nt, Artificial Sequence
  Description of Artificial Sequence: Synthetic oligonucleotide
  Sense strand starting at position 2455 of SEQ ID NO: 1881781
cgugcuuggccaguguuua

SEQ ID NO: 2071223 - RNA, 19 nt, Artificial Sequence
  Description of Artificial Sequence: Synthetic oligonucleotide
  Antisense strand to SEQ ID NO: 2071222
uaaacacuggccaagcacg

SEQ ID NO: 2071224 - RNA, 19 nt, Artificial Sequence
  Description of Artificial Sequence: Synthetic oligonucleotide
  Sense strand starting at position 2456 of SEQ ID NO: 1881781
gugcuuggccaguguuuaa

SEQ ID NO: 2071225 - RNA, 19 nt, Artificial Sequence
  Description of Artificial Sequence: Synthetic oligonucleotide
  Antisense strand to SEQ ID NO: 2071224
uuaaacacuggccaagcac

SEQ ID NO: 2071226 - RNA, 19 nt, Artificial Sequence
  Description of Artificial Sequence: Synthetic oligonucleotide
  Sense strand starting at position 2483 of SEQ ID NO: 1881781
gcgugaugcucuccacuuc

SEQ ID NO: 2071227 - RNA, 19 nt, Artificial Sequence
  Description of Artificial Sequence: Synthetic oligonucleotide
  Antisense strand to SEQ ID NO: 2071226
gaaguggagagcaucacgc

SEQ ID NO: 2071228 - RNA, 19 nt, Artificial Sequence
  Description of Artificial Sequence: Synthetic oligonucleotide
  Sense strand starting at position 2514 of SEQ ID NO: 1881781
ggacgucacuccuauucca

SEQ ID NO: 2071229 - RNA, 19 nt, Artificial Sequence
  Description of Artificial Sequence: Synthetic oligonucleotide
  Antisense strand to SEQ ID NO: 2071228
uggaauaggagugacgucc

SEQ ID NO: 2071230 - RNA, 19 nt, Artificial Sequence
  Description of Artificial Sequence: Synthetic oligonucleotide
  Sense strand starting at position 2536 of SEQ ID NO: 1881781
cuugucuuuccacaggacu

SEQ ID NO: 2071231 - RNA, 19 nt, Artificial Sequence
  Description of Artificial Sequence: Synthetic oligonucleotide
  Antisense strand to SEQ ID NO: 2071230
aguccuguggaaagacaag

SEQ ID NO: 2071232 - RNA, 19 nt, Artificial Sequence
  Description of Artificial Sequence: Synthetic oligonucleotide
  Sense strand starting at position 2839 of SEQ ID NO: 1881781
uguguuucuucucuccaga

SEQ ID NO: 2071233 - RNA, 19 nt, Artificial Sequence
  Description of Artificial Sequence: Synthetic oligonucleotide
  Antisense strand to SEQ ID NO: 2071232
ucuggagagaagaaacaca

SEQ ID NO: 2071234 - RNA, 19 nt, Artificial Sequence
  Description of Artificial Sequence: Synthetic oligonucleotide
  Sense strand starting at position 2854 of SEQ ID NO: 1881781
cagaguuccugaguccgga

SEQ ID NO: 2071235 - RNA, 19 nt, Artificial Sequence
  Description of Artificial Sequence: Synthetic oligonucleotide
  Antisense strand to SEQ ID NO: 2071234
uccggacucaggaacucug

SEQ ID NO: 2071236 - RNA, 19 nt, Artificial Sequence
  Description of Artificial Sequence: Synthetic oligonucleotide
  Sense strand starting at position 3129 of SEQ ID NO: 1881781
cagcgucucgcacauagaa

SEQ ID NO: 2071237 - RNA, 19 nt, Artificial Sequence
  Description of Artificial Sequence: Synthetic oligonucleotide
  Antisense strand to SEQ ID NO: 2071236
uucuaugugcgagacgcug

SEQ ID NO: 2071238 - RNA, 19 nt, Artificial Sequence
  Description of Artificial Sequence: Synthetic oligonucleotide
  Sense strand starting at position 3131 of SEQ ID NO: 1881781
gcgucucgcacauagaauu

SEQ ID NO: 2071239 - RNA, 19 nt, Artificial Sequence
  Description of Artificial Sequence: Synthetic oligonucleotide
  Antisense strand to SEQ ID NO: 2071238
aauucuaugugcgagacgc

SEQ ID NO: 2071240 - RNA, 19 nt, Artificial Sequence
  Description of Artificial Sequence: Synthetic oligonucleotide
  Sense strand starting at position 3270 of SEQ ID NO: 1881781
cucuguacccguggaguua

SEQ ID NO: 2071241 - RNA, 19 nt, Artificial Sequence
  Description of Artificial Sequence: Synthetic oligonucleotide
  Antisense strand to SEQ ID NO: 2071240
uaacuccacggguacagag

SEQ ID NO: 2071242 - RNA, 19 nt, Artificial Sequence
  Description of Artificial Sequence: Synthetic oligonucleotide
  Sense strand starting at position 3283 of SEQ ID NO: 1881781
gaguuagaaucaggaagag

SEQ ID NO: 2071243 - RNA, 19 nt, Artificial Sequence
  Description of Artificial Sequence: Synthetic oligonucleotide
  Antisense strand to SEQ ID NO: 2071242
cucuuccugauucuaacuc

SEQ ID NO: 2071244 - RNA, 19 nt, Artificial Sequence
  Description of Artificial Sequence: Synthetic oligonucleotide
  Sense strand starting at position 3369 of SEQ ID NO: 1881781
guguucagucccugucagu

SEQ ID NO: 2071245 - RNA, 19 nt, Artificial Sequence
  Description of Artificial Sequence: Synthetic oligonucleotide
  Antisense strand to SEQ ID NO: 2071244
acugacagggacugaacac

SEQ ID NO: 2071246 - RNA, 19 nt, Artificial Sequence
  Description of Artificial Sequence: Synthetic oligonucleotide
  Sense strand starting at position 3860 of SEQ ID NO: 1881781
cccaucugguccugagacu

SEQ ID NO: 2071247 - RNA, 19 nt, Artificial Sequence
  Description of Artificial Sequence: Synthetic oligonucleotide
  Antisense strand to SEQ ID NO: 2071246
agucucaggaccagauggg

SEQ ID NO: 2071248 - RNA, 19 nt, Artificial Sequence
  Description of Artificial Sequence: Synthetic oligonucleotide
  Sense strand starting at position 3861 of SEQ ID NO: 1881781
ccaucugguccugagacuu

SEQ ID NO: 2071249 - RNA, 19 nt, Artificial Sequence
  Description of Artificial Sequence: Synthetic oligonucleotide
  Antisense strand to SEQ ID NO: 2071248
aagucucaggaccagaugg

SEQ ID NO: 2071250 - RNA, 19 nt, Artificial Sequence
  Description of Artificial Sequence: Synthetic oligonucleotide
  Sense strand starting at position 10 of SEQ ID NO: 1881782
caacuugagccguauagac

SEQ ID NO: 2071251 - RNA, 19 nt, Artificial Sequence
  Description of Artificial Sequence: Synthetic oligonucleotide
  Antisense strand to SEQ ID NO: 2071250
gucuauacggcucaaguug

SEQ ID NO: 2071252 - RNA, 19 nt, Artificial Sequence
  Description of Artificial Sequence: Synthetic oligonucleotide
  Sense strand starting at position 50 of SEQ ID NO: 1881782
cugacuugugauuagugua

SEQ ID NO: 2071253 - RNA, 19 nt, Artificial Sequence
  Description of Artificial Sequence: Synthetic oligonucleotide
  Antisense strand to SEQ ID NO: 2071252
uacacuaaucacaagucag

SEQ ID NO: 2071254 - RNA, 19 nt, Artificial Sequence
  Description of Artificial Sequence: Synthetic oligonucleotide
  Sense strand starting at position 55 of SEQ ID NO: 1881782
uugugauuaguguaaucaa

SEQ ID NO: 2071255 - RNA, 19 nt, Artificial Sequence
  Description of Artificial Sequence: Synthetic oligonucleotide
  Antisense strand to SEQ ID NO: 2071254
uugauuacacuaaucacaa

SEQ ID NO: 2071256 - RNA, 19 nt, Artificial Sequence
  Description of Artificial Sequence: Synthetic oligonucleotide
  Sense strand starting at position 58 of SEQ ID NO: 1881782
ugauuaguguaaucaaagg

SEQ ID NO: 2071257 - RNA, 19 nt, Artificial Sequence
  Description of Artificial Sequence: Synthetic oligonucleotide
  Antisense strand to SEQ ID NO: 2071256
ccuuugauuacacuaauca

SEQ ID NO: 2071258 - RNA, 19 nt, Artificial Sequence
  Description of Artificial Sequence: Synthetic oligonucleotide
  Sense strand starting at position 94 of SEQ ID NO: 1881782
cuuaacuccgaauguaauc

SEQ ID NO: 2071259 - RNA, 19 nt, Artificial Sequence
  Description of Artificial Sequence: Synthetic oligonucleotide
  Antisense strand to SEQ ID NO: 2071258
gauuacauucggaguuaag

SEQ ID NO: 2071260 - RNA, 19 nt, Artificial Sequence
  Description of Artificial Sequence: Synthetic oligonucleotide
  Sense strand starting at position 192 of SEQ ID NO: 1881782
gaacauucuccguauggca

SEQ ID NO: 2071261 - RNA, 19 nt, Artificial Sequence
  Description of Artificial Sequence: Synthetic oligonucleotide
  Antisense strand to SEQ ID NO: 2071260
ugccauacggagaauguuc

SEQ ID NO: 2071262 - RNA, 19 nt, Artificial Sequence
  Description of Artificial Sequence: Synthetic oligonucleotide
  Sense strand starting at position 206 of SEQ ID NO: 1881782
uggcaaccauaugcuaaua

SEQ ID NO: 2071263 - RNA, 19 nt, Artificial Sequence
  Description of Artificial Sequence: Synthetic oligonucleotide
  Antisense strand to SEQ ID NO: 2071262
uauuagcauaugguugcca

SEQ ID NO: 2071264 - RNA, 19 nt, Artificial Sequence
  Description of Artificial Sequence: Synthetic oligonucleotide
  Sense strand starting at position 253 of SEQ ID NO: 1881782
cuaguucguauuugaggau

SEQ ID NO: 2071265 - RNA, 19 nt, Artificial Sequence
  Description of Artificial Sequence: Synthetic oligonucleotide
  Antisense strand to SEQ ID NO: 2071264
auccucaaauacgaacuag

SEQ ID NO: 2071266 - RNA, 19 nt, Artificial Sequence
  Description of Artificial Sequence: Synthetic oligonucleotide
  Sense strand starting at position 331 of SEQ ID NO: 1881782
ccgccauaacuugauauga

SEQ ID NO: 2071267 - RNA, 19 nt, Artificial Sequence
  Description of Artificial Sequence: Synthetic oligonucleotide
  Antisense strand to SEQ ID NO: 2071266
ucauaucaaguuauggcgg

SEQ ID NO: 2071268 - RNA, 19 nt, Artificial Sequence
  Description of Artificial Sequence: Synthetic oligonucleotide
  Sense strand starting at position 398 of SEQ ID NO: 1881782
aagccuugucauuauguag

SEQ ID NO: 2071269 - RNA, 19 nt, Artificial Sequence
  Description of Artificial Sequence: Synthetic oligonucleotide
  Antisense strand to SEQ ID NO: 2071268
cuacauaaugacaaggcuu

SEQ ID NO: 2071270 - RNA, 19 nt, Artificial Sequence
  Description of Artificial Sequence: Synthetic oligonucleotide
  Sense strand starting at position 402 of SEQ ID NO: 1881782
cuugucauuauguagguga

SEQ ID NO: 2071271 - RNA, 19 nt, Artificial Sequence
  Description of Artificial Sequence: Synthetic oligonucleotide
  Antisense strand to SEQ ID NO: 2071270
ucaccuacauaaugacaag

SEQ ID NO: 2071272 - RNA, 19 nt, Artificial Sequence
  Description of Artificial Sequence: Synthetic oligonucleotide
  Sense strand starting at position 405 of SEQ ID NO: 1881782
gucauuauguaggugaaug

SEQ ID NO: 2071273 - RNA, 19 nt, Artificial Sequence
  Description of Artificial Sequence: Synthetic oligonucleotide
  Antisense strand to SEQ ID NO: 2071272
cauucaccuacauaaugac

SEQ ID NO: 2071274 - RNA, 19 nt, Artificial Sequence
  Description of Artificial Sequence: Synthetic oligonucleotide
  Sense strand starting at position 406 of SEQ ID NO: 1881782
ucauuauguaggugaauga

SEQ ID NO: 2071275 - RNA, 19 nt, Artificial Sequence
  Description of Artificial Sequence: Synthetic oligonucleotide
  Antisense strand to SEQ ID NO: 2071274
ucauucaccuacauaauga

SEQ ID NO: 2071276 - RNA, 19 nt, Artificial Sequence
  Description of Artificial Sequence: Synthetic oligonucleotide
  Sense strand starting at position 475 of SEQ ID NO: 1881782
aaguaugcacaaugagaua

SEQ ID NO: 2071277 - RNA, 19 nt, Artificial Sequence
  Description of Artificial Sequence: Synthetic oligonucleotide
  Antisense strand to SEQ ID NO: 2071276
uaucucauugugcauacuu

SEQ ID NO: 2071278 - RNA, 19 nt, Artificial Sequence
  Description of Artificial Sequence: Synthetic oligonucleotide
  Sense strand starting at position 489 of SEQ ID NO: 1881782
agauaacuccuagggaguu

SEQ ID NO: 2071279 - RNA, 19 nt, Artificial Sequence
  Description of Artificial Sequence: Synthetic oligonucleotide
  Antisense strand to SEQ ID NO: 2071278
aacucccuaggaguuaucu

SEQ ID NO: 2071280 - RNA, 19 nt, Artificial Sequence
  Description of Artificial Sequence: Synthetic oligonucleotide
  Sense strand starting at position 526 of SEQ ID NO: 1881782
cauggaagucacugcagaa

SEQ ID NO: 2071281 - RNA, 19 nt, Artificial Sequence
  Description of Artificial Sequence: Synthetic oligonucleotide
  Antisense strand to SEQ ID NO: 2071280
uucugcagugacuuccaug

SEQ ID NO: 2071282 - RNA, 19 nt, Artificial Sequence
  Description of Artificial Sequence: Synthetic oligonucleotide
  Sense strand starting at position 565 of SEQ ID NO: 1881782
uuggucacauaguucuuaa

SEQ ID NO: 2071283 - RNA, 19 nt, Artificial Sequence
  Description of Artificial Sequence: Synthetic oligonucleotide
  Antisense strand to SEQ ID NO: 2071282
uuaagaacuaugugaccaa

SEQ ID NO: 2071284 - RNA, 19 nt, Artificial Sequence
  Description of Artificial Sequence: Synthetic oligonucleotide
  Sense strand starting at position 598 of SEQ ID NO: 1881782
accugucaggccuaauacu

SEQ ID NO: 2071285 - RNA, 19 nt, Artificial Sequence
  Description of Artificial Sequence: Synthetic oligonucleotide
  Antisense strand to SEQ ID NO: 2071284
aguauuaggccugacaggu

SEQ ID NO: 2071286 - RNA, 19 nt, Artificial Sequence
  Description of Artificial Sequence: Synthetic oligonucleotide
  Sense strand starting at position 653 of SEQ ID NO: 1881782
uuugcuugagcacaguaaa

SEQ ID NO: 2071287 - RNA, 19 nt, Artificial Sequence
  Description of Artificial Sequence: Synthetic oligonucleotide
  Antisense strand to SEQ ID NO: 2071286
uuuacugugcucaagcaaa

SEQ ID NO: 2071288 - RNA, 19 nt, Artificial Sequence
  Description of Artificial Sequence: Synthetic oligonucleotide
  Sense strand starting at position 705 of SEQ ID NO: 1881782
cgaaucagaucagcucaaa

SEQ ID NO: 2071289 - RNA, 19 nt, Artificial Sequence
  Description of Artificial Sequence: Synthetic oligonucleotide
  Antisense strand to SEQ ID NO: 2071288
uuugagcugaucugauucg

SEQ ID NO: 2071290 - RNA, 19 nt, Artificial Sequence
  Description of Artificial Sequence: Synthetic oligonucleotide
  Sense strand starting at position 1220 of SEQ ID NO: 1881782
cugggaagccgcuaaauau

SEQ ID NO: 2071291 - RNA, 19 nt, Artificial Sequence
  Description of Artificial Sequence: Synthetic oligonucleotide
  Antisense strand to SEQ ID NO: 2071290
auauuuagcggcuucccag

SEQ ID NO: 2071292 - RNA, 19 nt, Artificial Sequence
  Description of Artificial Sequence: Synthetic oligonucleotide
  Sense strand starting at position 1294 of SEQ ID NO: 1881782
gacgcauaugacuaagucu

SEQ ID NO: 2071293 - RNA, 19 nt, Artificial Sequence
  Description of Artificial Sequence: Synthetic oligonucleotide
  Antisense strand to SEQ ID NO: 2071292
agacuuagucauaugcguc

SEQ ID NO: 2071294 - RNA, 19 nt, Artificial Sequence
  Description of Artificial Sequence: Synthetic oligonucleotide
  Sense strand starting at position 1336 of SEQ ID NO: 1881782
ucguaaugacauugaacau

SEQ ID NO: 2071295 - RNA, 19 nt, Artificial Sequence
  Description of Artificial Sequence: Synthetic oligonucleotide
  Antisense strand to SEQ ID NO: 2071294
auguucaaugucauuacga

SEQ ID NO: 2071296 - RNA, 19 nt, Artificial Sequence
  Description of Artificial Sequence: Synthetic oligonucleotide
  Sense strand starting at position 1405 of SEQ ID NO: 1881782
ccguauauuagggacguca

SEQ ID NO: 2071297 - RNA, 19 nt, Artificial Sequence
  Description of Artificial Sequence: Synthetic oligonucleotide
  Antisense strand to SEQ ID NO: 2071296
ugacgucccuaauauacgg

SEQ ID NO: 2071298 - RNA, 19 nt, Artificial Sequence
  Description of Artificial Sequence: Synthetic oligonucleotide
  Sense strand starting at position 1541 of SEQ ID NO: 1881782
ugguaaccgcuccaagaaa

SEQ ID NO: 2071299 - RNA, 19 nt, Artificial Sequence
  Description of Artificial Sequence: Synthetic oligonucleotide
  Antisense strand to SEQ ID NO: 2071298
uuucuuggagcgguuacca

SEQ ID NO: 2071300 - RNA, 19 nt, Artificial Sequence
  Description of Artificial Sequence: Synthetic oligonucleotide
  Sense strand starting at position 1791 of SEQ ID NO: 1881782
ggcggcuuccucgcaaaca

SEQ ID NO: 2071301 - RNA, 19 nt, Artificial Sequence
  Description of Artificial Sequence: Synthetic oligonucleotide
  Antisense strand to SEQ ID NO: 2071300
uguuugcgaggaagccgcc

SEQ ID NO: 2071302 - RNA, 19 nt, Artificial Sequence
  Description of Artificial Sequence: Synthetic oligonucleotide
  Sense strand starting at position 2682 of SEQ ID NO: 1881782
gaugucagccugcaacaaa

SEQ ID NO: 2071303 - RNA, 19 nt, Artificial Sequence
  Description of Artificial Sequence: Synthetic oligonucleotide
  Antisense strand to SEQ ID NO: 2071302
uuuguugcaggcugacauc

SEQ ID NO: 2071304 - RNA, 19 nt, Artificial Sequence
  Description of Artificial Sequence: Synthetic oligonucleotide
  Sense strand starting at position 2911 of SEQ ID NO: 1881782
aggguuucuccuuaggcaa

SEQ ID NO: 2071305 - RNA, 19 nt, Artificial Sequence
  Description of Artificial Sequence: Synthetic oligonucleotide
  Antisense strand to SEQ ID NO: 2071304
uugccuaaggagaaacccu

SEQ ID NO: 2071306 - RNA, 19 nt, Artificial Sequence
  Description of Artificial Sequence: Synthetic oligonucleotide
  Sense strand starting at position 2948 of SEQ ID NO: 1881782
acuggaaugucuguaaacu

SEQ ID NO: 2071307 - RNA, 19 nt, Artificial Sequence
  Description of Artificial Sequence: Synthetic oligonucleotide
  Antisense strand to SEQ ID NO: 2071306
aguuuacagacauuccagu

SEQ ID NO: 2071308 - RNA, 19 nt, Artificial Sequence
  Description of Artificial Sequence: Synthetic oligonucleotide
  Sense strand starting at position 2949 of SEQ ID NO: 1881782
cuggaaugucuguaaacuu

SEQ ID NO: 2071309 - RNA, 19 nt, Artificial Sequence
  Description of Artificial Sequence: Synthetic oligonucleotide
  Antisense strand to SEQ ID NO: 2071308
aaguuuacagacauuccag

SEQ ID NO: 2071310 - RNA, 19 nt, Artificial Sequence
  Description of Artificial Sequence: Synthetic oligonucleotide
  Sense strand starting at position 2960 of SEQ ID NO: 1881782
guaaacuuccugcaagaaa

SEQ ID NO: 2071311 - RNA, 19 nt, Artificial Sequence
  Description of Artificial Sequence: Synthetic oligonucleotide
  Antisense strand to SEQ ID NO: 2071310
uuucuugcaggaaguuuac

SEQ ID NO: 2071312 - RNA, 19 nt, Artificial Sequence
  Description of Artificial Sequence: Synthetic oligonucleotide
  Sense strand starting at position 2992 of SEQ ID NO: 1881782
ucuggaacuugagcagauu

SEQ ID NO: 2071313 - RNA, 19 nt, Artificial Sequence
  Description of Artificial Sequence: Synthetic oligonucleotide
  Antisense strand to SEQ ID NO: 2071312
aaucugcucaaguuccaga

SEQ ID NO: 2071314 - RNA, 19 nt, Artificial Sequence
  Description of Artificial Sequence: Synthetic oligonucleotide
  Sense strand starting at position 3242 of SEQ ID NO: 1881782
augcguagccugcugugaa

SEQ ID NO: 2071315 - RNA, 19 nt, Artificial Sequence
  Description of Artificial Sequence: Synthetic oligonucleotide
  Antisense strand to SEQ ID NO: 2071314
uucacagcaggcuacgcau

SEQ ID NO: 2071316 - RNA, 19 nt, Artificial Sequence
  Description of Artificial Sequence: Synthetic oligonucleotide
  Sense strand starting at position 3542 of SEQ ID NO: 1881782
cagagcuuguuucugaaac

SEQ ID NO: 2071317 - RNA, 19 nt, Artificial Sequence
  Description of Artificial Sequence: Synthetic oligonucleotide
  Antisense strand to SEQ ID NO: 2071316
guuucagaaacaagcucug

SEQ ID NO: 2071318 - RNA, 19 nt, Artificial Sequence
  Description of Artificial Sequence: Synthetic oligonucleotide
  Sense strand starting at position 3600 of SEQ ID NO: 1881782
gggauuuggugcuuacgau

SEQ ID NO: 2071319 - RNA, 19 nt, Artificial Sequence
  Description of Artificial Sequence: Synthetic oligonucleotide
  Antisense strand to SEQ ID NO: 2071318
aucguaagcaccaaauccc

SEQ ID NO: 2071320 - RNA, 19 nt, Artificial Sequence
  Description of Artificial Sequence: Synthetic oligonucleotide
  Sense strand starting at position 3612 of SEQ ID NO: 1881782
uuacgauucucaguaacau

SEQ ID NO: 2071321 - RNA, 19 nt, Artificial Sequence
  Description of Artificial Sequence: Synthetic oligonucleotide
  Antisense strand to SEQ ID NO: 2071320
auguuacugagaaucguaa

SEQ ID NO: 2071322 - RNA, 19 nt, Artificial Sequence
  Description of Artificial Sequence: Synthetic oligonucleotide
  Sense strand starting at position 3700 of SEQ ID NO: 1881782
uuuauuauacuugggagua

SEQ ID NO: 2071323 - RNA, 19 nt, Artificial Sequence
  Description of Artificial Sequence: Synthetic oligonucleotide
  Antisense strand to SEQ ID NO: 2071322
uacucccaaguauaauaaa

SEQ ID NO: 2071324 - RNA, 19 nt, Artificial Sequence
  Description of Artificial Sequence: Synthetic oligonucleotide
  Sense strand starting at position 3710 of SEQ ID NO: 1881782
uugggaguaaguugaaaua

SEQ ID NO: 2071325 - RNA, 19 nt, Artificial Sequence
  Description of Artificial Sequence: Synthetic oligonucleotide
  Antisense strand to SEQ ID NO: 2071324
uauuucaacuuacucccaa

SEQ ID NO: 2071326 - RNA, 19 nt, Artificial Sequence
  Description of Artificial Sequence: Synthetic oligonucleotide
  Sense strand starting at position 3800 of SEQ ID NO: 1881782
gcagauuaagcagacuauu

SEQ ID NO: 2071327 - RNA, 19 nt, Artificial Sequence
  Description of Artificial Sequence: Synthetic oligonucleotide
  Antisense strand to SEQ ID NO: 2071326
aauagucugcuuaaucugc

SEQ ID NO: 2071328 - RNA, 19 nt, Artificial Sequence
  Description of Artificial Sequence: Synthetic oligonucleotide
  Sense strand starting at position 3954 of SEQ ID NO: 1881782
uccugaguccugugaggga

SEQ ID NO: 2071329 - RNA, 19 nt, Artificial Sequence
  Description of Artificial Sequence: Synthetic oligonucleotide
  Antisense strand to SEQ ID NO: 2071328
ucccucacaggacucagga

SEQ ID NO: 2071330 - RNA, 19 nt, Artificial Sequence
  Description of Artificial Sequence: Synthetic oligonucleotide
  Sense strand starting at position 123 of SEQ ID NO: 1881783
ccauuuguauuaguugcaa

SEQ ID NO: 2071331 - RNA, 19 nt, Artificial Sequence
  Description of Artificial Sequence: Synthetic oligonucleotide
  Antisense strand to SEQ ID NO: 2071330
uugcaacuaauacaaaugg

SEQ ID NO: 2071332 - RNA, 19 nt, Artificial Sequence
  Description of Artificial Sequence: Synthetic oligonucleotide
  Sense strand starting at position 185 of SEQ ID NO: 1881783
aaacguuaggcuuauuacu

SEQ ID NO: 2071333 - RNA, 19 nt, Artificial Sequence
  Description of Artificial Sequence: Synthetic oligonucleotide
  Antisense strand to SEQ ID NO: 2071332
aguaauaagccuaacguuu

SEQ ID NO: 2071334 - RNA, 19 nt, Artificial Sequence
  Description of Artificial Sequence: Synthetic oligonucleotide
  Sense strand starting at position 198 of SEQ ID NO: 1881783
auuacuucuccuugguaug

SEQ ID NO: 2071335 - RNA, 19 nt, Artificial Sequence
  Description of Artificial Sequence: Synthetic oligonucleotide
  Antisense strand to SEQ ID NO: 2071334
cauaccaaggagaaguaau

SEQ ID NO: 2071336 - RNA, 19 nt, Artificial Sequence
  Description of Artificial Sequence: Synthetic oligonucleotide
  Sense strand starting at position 199 of SEQ ID NO: 1881783
uuacuucuccuugguauga

SEQ ID NO: 2071337 - RNA, 19 nt, Artificial Sequence
  Description of Artificial Sequence: Synthetic oligonucleotide
  Antisense strand to SEQ ID NO: 2071336
ucauaccaaggagaaguaa

SEQ ID NO: 2071338 - RNA, 19 nt, Artificial Sequence
  Description of Artificial Sequence: Synthetic oligonucleotide
  Sense strand starting at position 203 of SEQ ID NO: 1881783
uucuccuugguaugagaga

SEQ ID NO: 2071339 - RNA, 19 nt, Artificial Sequence
  Description of Artificial Sequence: Synthetic oligonucleotide
  Antisense strand to SEQ ID NO: 2071338
ucucucauaccaaggagaa

SEQ ID NO: 2071340 - RNA, 19 nt, Artificial Sequence
  Description of Artificial Sequence: Synthetic oligonucleotide
  Sense strand starting at position 272 of SEQ ID NO: 1881783
ugugaauuaggaugaaugu

SEQ ID NO: 2071341 - RNA, 19 nt, Artificial Sequence
  Description of Artificial Sequence: Synthetic oligonucleotide
  Antisense strand to SEQ ID NO: 2071340
acauucauccuaauucaca

SEQ ID NO: 2071342 - RNA, 19 nt, Artificial Sequence
  Description of Artificial Sequence: Synthetic oligonucleotide
  Sense strand starting at position 278 of SEQ ID NO: 1881783
uuaggaugaaugugaccuu

SEQ ID NO: 2071343 - RNA, 19 nt, Artificial Sequence
  Description of Artificial Sequence: Synthetic oligonucleotide
  Antisense strand to SEQ ID NO: 2071342
aaggucacauucauccuaa

SEQ ID NO: 2071344 - RNA, 19 nt, Artificial Sequence
  Description of Artificial Sequence: Synthetic oligonucleotide
  Sense strand starting at position 281 of SEQ ID NO: 1881783
ggaugaaugugaccuuaug

SEQ ID NO: 2071345 - RNA, 19 nt, Artificial Sequence
  Description of Artificial Sequence: Synthetic oligonucleotide
  Antisense strand to SEQ ID NO: 2071344
cauaaggucacauucaucc

SEQ ID NO: 2071346 - RNA, 19 nt, Artificial Sequence
  Description of Artificial Sequence: Synthetic oligonucleotide
  Sense strand starting at position 287 of SEQ ID NO: 1881783
augugaccuuauguaaauu

SEQ ID NO: 2071347 - RNA, 19 nt, Artificial Sequence
  Description of Artificial Sequence: Synthetic oligonucleotide
  Antisense strand to SEQ ID NO: 2071346
aauuuacauaaggucacau

SEQ ID NO: 2071348 - RNA, 19 nt, Artificial Sequence
  Description of Artificial Sequence: Synthetic oligonucleotide
  Sense strand starting at position 618 of SEQ ID NO: 1881783
gaggcagagacucguuuga

SEQ ID NO: 2071349 - RNA, 19 nt, Artificial Sequence
  Description of Artificial Sequence: Synthetic oligonucleotide
  Antisense strand to SEQ ID NO: 2071348
ucaaacgagucucugccuc

SEQ ID NO: 2071350 - RNA, 19 nt, Artificial Sequence
  Description of Artificial Sequence: Synthetic oligonucleotide
  Sense strand starting at position 620 of SEQ ID NO: 1881783
ggcagagacucguuugaau

SEQ ID NO: 2071351 - RNA, 19 nt, Artificial Sequence
  Description of Artificial Sequence: Synthetic oligonucleotide
  Antisense strand to SEQ ID NO: 2071350
auucaaacgagucucugcc

SEQ ID NO: 2071352 - RNA, 19 nt, Artificial Sequence
  Description of Artificial Sequence: Synthetic oligonucleotide
  Sense strand starting at position 911 of SEQ ID NO: 1881783
gacaacuccggguaucacu

SEQ ID NO: 2071353 - RNA, 19 nt, Artificial Sequence
  Description of Artificial Sequence: Synthetic oligonucleotide
  Antisense strand to SEQ ID NO: 2071352
agugauacccggaguuguc

SEQ ID NO: 2071354 - RNA, 19 nt, Artificial Sequence
  Description of Artificial Sequence: Synthetic oligonucleotide
  Sense strand starting at position 1042 of SEQ ID NO: 1881783
aguauacacccugaguuaa

SEQ ID NO: 2071355 - RNA, 19 nt, Artificial Sequence
  Description of Artificial Sequence: Synthetic oligonucleotide
  Antisense strand to SEQ ID NO: 2071354
uuaacucaggguguauacu

SEQ ID NO: 2071356 - RNA, 19 nt, Artificial Sequence
  Description of Artificial Sequence: Synthetic oligonucleotide
  Sense strand starting at position 1274 of SEQ ID NO: 1881783
cugggauccuaagccuuaa

SEQ ID NO: 2071357 - RNA, 19 nt, Artificial Sequence
  Description of Artificial Sequence: Synthetic oligonucleotide
  Antisense strand to SEQ ID NO: 2071356
uuaaggcuuaggaucccag

SEQ ID NO: 2071358 - RNA, 19 nt, Artificial Sequence
  Description of Artificial Sequence: Synthetic oligonucleotide
  Sense strand starting at position 1490 of SEQ ID NO: 1881783
gaggaaauuccggguguuc

SEQ ID NO: 2071359 - RNA, 19 nt, Artificial Sequence
  Description of Artificial Sequence: Synthetic oligonucleotide
  Antisense strand to SEQ ID NO: 2071358
gaacacccggaauuuccuc

SEQ ID NO: 2071360 - RNA, 19 nt, Artificial Sequence
  Description of Artificial Sequence: Synthetic oligonucleotide
  Sense strand starting at position 1519 of SEQ ID NO: 1881783
gacggagggccuugagaaa

SEQ ID NO: 2071361 - RNA, 19 nt, Artificial Sequence
  Description of Artificial Sequence: Synthetic oligonucleotide
  Antisense strand to SEQ ID NO: 2071360
uuucucaaggcccuccguc

SEQ ID NO: 2071362 - RNA, 19 nt, Artificial Sequence
  Description of Artificial Sequence: Synthetic oligonucleotide
  Sense strand starting at position 2124 of SEQ ID NO: 1881783
cucaguugcuacucagaaa

SEQ ID NO: 2071363 - RNA, 19 nt, Artificial Sequence
  Description of Artificial Sequence: Synthetic oligonucleotide
  Antisense strand to SEQ ID NO: 2071362
uuucugaguagcaacugag

SEQ ID NO: 2071364 - RNA, 19 nt, Artificial Sequence
  Description of Artificial Sequence: Synthetic oligonucleotide
  Sense strand starting at position 2245 of SEQ ID NO: 1881783
gacacauauccgggacuuu

SEQ ID NO: 2071365 - RNA, 19 nt, Artificial Sequence
  Description of Artificial Sequence: Synthetic oligonucleotide
  Antisense strand to SEQ ID NO: 2071364
aaagucccggauauguguc

SEQ ID NO: 2071366 - RNA, 19 nt, Artificial Sequence
  Description of Artificial Sequence: Synthetic oligonucleotide
  Sense strand starting at position 2317 of SEQ ID NO: 1881783
cccugagaauccguacaac

SEQ ID NO: 2071367 - RNA, 19 nt, Artificial Sequence
  Description of Artificial Sequence: Synthetic oligonucleotide
  Antisense strand to SEQ ID NO: 2071366
guuguacggauucucaggg

SEQ ID NO: 2071368 - RNA, 19 nt, Artificial Sequence
  Description of Artificial Sequence: Synthetic oligonucleotide
  Sense strand starting at position 2342 of SEQ ID NO: 1881783
guaugcucgcgauuccugu

SEQ ID NO: 2071369 - RNA, 19 nt, Artificial Sequence
  Description of Artificial Sequence: Synthetic oligonucleotide
  Antisense strand to SEQ ID NO: 2071368
acaggaaucgcgagcauac

SEQ ID NO: 2071370 - RNA, 19 nt, Artificial Sequence
  Description of Artificial Sequence: Synthetic oligonucleotide
  Sense strand starting at position 2564 of SEQ ID NO: 1881783
gcugaacucugaucuguau

SEQ ID NO: 2071371 - RNA, 19 nt, Artificial Sequence
  Description of Artificial Sequence: Synthetic oligonucleotide
  Antisense strand to SEQ ID NO: 2071370
auacagaucagaguucagc

SEQ ID NO: 2071372 - RNA, 19 nt, Artificial Sequence
  Description of Artificial Sequence: Synthetic oligonucleotide
  Sense strand starting at position 3196 of SEQ ID NO: 1881783
uuucuucucccugaguagu

SEQ ID NO: 2071373 - RNA, 19 nt, Artificial Sequence
  Description of Artificial Sequence: Synthetic oligonucleotide
  Antisense strand to SEQ ID NO: 2071372
acuacucagggagaagaaa

SEQ ID NO: 2071374 - RNA, 19 nt, Artificial Sequence
  Description of Artificial Sequence: Synthetic oligonucleotide
  Sense strand starting at position 3311 of SEQ ID NO: 1881783
aggccuuaaccuggaguca

SEQ ID NO: 2071375 - RNA, 19 nt, Artificial Sequence
  Description of Artificial Sequence: Synthetic oligonucleotide
  Antisense strand to SEQ ID NO: 2071374
ugacuccagguuaaggccu

SEQ ID NO: 2071376 - RNA, 19 nt, Artificial Sequence
  Description of Artificial Sequence: Synthetic oligonucleotide
  Sense strand starting at position 3312 of SEQ ID NO: 1881783
ggccuuaaccuggagucaa

SEQ ID NO: 2071377 - RNA, 19 nt, Artificial Sequence
  Description of Artificial Sequence: Synthetic oligonucleotide
  Antisense strand to SEQ ID NO: 2071376
uugacuccagguuaaggcc

SEQ ID NO: 2071378 - RNA, 19 nt, Artificial Sequence
  Description of Artificial Sequence: Synthetic oligonucleotide
  Sense strand starting at position 3323 of SEQ ID NO: 1881783
ggagucaagugccuugaaa

SEQ ID NO: 2071379 - RNA, 19 nt, Artificial Sequence
  Description of Artificial Sequence: Synthetic oligonucleotide
  Antisense strand to SEQ ID NO: 2071378
uuucaaggcacuugacucc

SEQ ID NO: 2071380 - RNA, 19 nt, Artificial Sequence
  Description of Artificial Sequence: Synthetic oligonucleotide
  Sense strand starting at position 3367 of SEQ ID NO: 1881783
gaugguacuuguuuccuga

SEQ ID NO: 2071381 - RNA, 19 nt, Artificial Sequence
  Description of Artificial Sequence: Synthetic oligonucleotide
  Antisense strand to SEQ ID NO: 2071380
ucaggaaacaaguaccauc

SEQ ID NO: 2071382 - RNA, 19 nt, Artificial Sequence
  Description of Artificial Sequence: Synthetic oligonucleotide
  Sense strand starting at position 3369 of SEQ ID NO: 1881783
ugguacuuguuuccugaga

SEQ ID NO: 2071383 - RNA, 19 nt, Artificial Sequence
  Description of Artificial Sequence: Synthetic oligonucleotide
  Antisense strand to SEQ ID NO: 2071382
ucucaggaaacaaguacca

SEQ ID NO: 2071384 - RNA, 19 nt, Artificial Sequence
  Description of Artificial Sequence: Synthetic oligonucleotide
  Sense strand starting at position 3370 of SEQ ID NO: 1881783
gguacuuguuuccugagag

SEQ ID NO: 2071385 - RNA, 19 nt, Artificial Sequence
  Description of Artificial Sequence: Synthetic oligonucleotide
  Antisense strand to SEQ ID NO: 2071384
cucucaggaaacaaguacc

SEQ ID NO: 2071386 - RNA, 19 nt, Artificial Sequence
  Description of Artificial Sequence: Synthetic oligonucleotide
  Sense strand starting at position 3399 of SEQ ID NO: 1881783
ggaugaucuggcugagcug

SEQ ID NO: 2071387 - RNA, 19 nt, Artificial Sequence
  Description of Artificial Sequence: Synthetic oligonucleotide
  Antisense strand to SEQ ID NO: 2071386
cagcucagccagaucaucc

SEQ ID NO: 2071388 - RNA, 19 nt, Artificial Sequence
  Description of Artificial Sequence: Synthetic oligonucleotide
  Sense strand starting at position 3421 of SEQ ID NO: 1881783
guuggaaacacaugguauc

SEQ ID NO: 2071389 - RNA, 19 nt, Artificial Sequence
  Description of Artificial Sequence: Synthetic oligonucleotide
  Antisense strand to SEQ ID NO: 2071388
gauaccauguguuuccaac

SEQ ID NO: 2071390 - RNA, 19 nt, Artificial Sequence
  Description of Artificial Sequence: Synthetic oligonucleotide
  Sense strand starting at position 3454 of SEQ ID NO: 1881783
auucuuucugcugaugaaa

SEQ ID NO: 2071391 - RNA, 19 nt, Artificial Sequence
  Description of Artificial Sequence: Synthetic oligonucleotide
  Antisense strand to SEQ ID NO: 2071390
uuucaucagcagaaagaau

SEQ ID NO: 2071392 - RNA, 19 nt, Artificial Sequence
  Description of Artificial Sequence: Synthetic oligonucleotide
  Sense strand starting at position 3546 of SEQ ID NO: 1881783
guauuccauuugcuuuauu

SEQ ID NO: 2071393 - RNA, 19 nt, Artificial Sequence
  Description of Artificial Sequence: Synthetic oligonucleotide
  Antisense strand to SEQ ID NO: 2071392
aauaaagcaaauggaauac

SEQ ID NO: 2071394 - RNA, 19 nt, Artificial Sequence
  Description of Artificial Sequence: Synthetic oligonucleotide
  Sense strand starting at position 3637 of SEQ ID NO: 1881783
gcagauagccugugaggga

SEQ ID NO: 2071395 - RNA, 19 nt, Artificial Sequence
  Description of Artificial Sequence: Synthetic oligonucleotide
  Antisense strand to SEQ ID NO: 2071394
ucccucacaggcuaucugc

SEQ ID NO: 2071396 - RNA, 19 nt, Artificial Sequence
  Description of Artificial Sequence: Synthetic oligonucleotide
  Sense strand starting at position 3646 of SEQ ID NO: 1881783
cugugagggaggugaucuu

SEQ ID NO: 2071397 - RNA, 19 nt, Artificial Sequence
  Description of Artificial Sequence: Synthetic oligonucleotide
  Antisense strand to SEQ ID NO: 2071396
aagaucaccucccucacag

SEQ ID NO: 2071398 - RNA, 19 nt, Artificial Sequence
  Description of Artificial Sequence: Synthetic oligonucleotide
  Sense strand starting at position 3734 of SEQ ID NO: 1881783
ggaaauuagcacugugguu

SEQ ID NO: 2071399 - RNA, 19 nt, Artificial Sequence
  Description of Artificial Sequence: Synthetic oligonucleotide
  Antisense strand to SEQ ID NO: 2071398
aaccacagugcuaauuucc

SEQ ID NO: 2071400 - RNA, 19 nt, Artificial Sequence
  Description of Artificial Sequence: Synthetic oligonucleotide
  Sense strand starting at position 3736 of SEQ ID NO: 1881783
aaauuagcacugugguuaa

SEQ ID NO: 2071401 - RNA, 19 nt, Artificial Sequence
  Description of Artificial Sequence: Synthetic oligonucleotide
  Antisense strand to SEQ ID NO: 2071400
uuaaccacagugcuaauuu

SEQ ID NO: 2071402 - RNA, 19 nt, Artificial Sequence
  Description of Artificial Sequence: Synthetic oligonucleotide
  Sense strand starting at position 3746 of SEQ ID NO: 1881783
ugugguuaacuggagcuua

SEQ ID NO: 2071403 - RNA, 19 nt, Artificial Sequence
  Description of Artificial Sequence: Synthetic oligonucleotide
  Antisense strand to SEQ ID NO: 2071402
uaagcuccaguuaaccaca

SEQ ID NO: 2071404 - RNA, 19 nt, Artificial Sequence
  Description of Artificial Sequence: Synthetic oligonucleotide
  Sense strand starting at position 3759 of SEQ ID NO: 1881783
agcuuacugucacuggaga

SEQ ID NO: 2071405 - RNA, 19 nt, Artificial Sequence
  Description of Artificial Sequence: Synthetic oligonucleotide
  Antisense strand to SEQ ID NO: 2071404
ucuccagugacaguaagcu

SEQ ID NO: 2071406 - RNA, 19 nt, Artificial Sequence
  Description of Artificial Sequence: Synthetic oligonucleotide
  Sense strand starting at position 3760 of SEQ ID NO: 1881783
gcuuacugucacuggagaa

SEQ ID NO: 2071407 - RNA, 19 nt, Artificial Sequence
  Description of Artificial Sequence: Synthetic oligonucleotide
  Antisense strand to SEQ ID NO: 2071406
uucuccagugacaguaagc

SEQ ID NO: 2071408 - RNA, 19 nt, Artificial Sequence
  Description of Artificial Sequence: Synthetic oligonucleotide
  Sense strand starting at position 3804 of SEQ ID NO: 1881783
accucagaguuaucccacu

SEQ ID NO: 2071409 - RNA, 19 nt, Artificial Sequence
  Description of Artificial Sequence: Synthetic oligonucleotide
  Antisense strand to SEQ ID NO: 2071408
agugggauaacucugaggu

SEQ ID NO: 2071410 - RNA, 19 nt, Artificial Sequence
  Description of Artificial Sequence: Synthetic oligonucleotide
  Sense strand starting at position 109 of SEQ ID NO: 1881784
cuaggagauucuuaaagac

SEQ ID NO: 2071411 - RNA, 19 nt, Artificial Sequence
  Description of Artificial Sequence: Synthetic oligonucleotide
  Antisense strand to SEQ ID NO: 2071410
gucuuuaagaaucuccuag

SEQ ID NO: 2071412 - RNA, 19 nt, Artificial Sequence
  Description of Artificial Sequence: Synthetic oligonucleotide
  Sense strand starting at position 118 of SEQ ID NO: 1881784
ucuuaaagacuguagucuu

SEQ ID NO: 2071413 - RNA, 19 nt, Artificial Sequence
  Description of Artificial Sequence: Synthetic oligonucleotide
  Antisense strand to SEQ ID NO: 2071412
aagacuacagucuuuaaga

SEQ ID NO: 2071414 - RNA, 19 nt, Artificial Sequence
  Description of Artificial Sequence: Synthetic oligonucleotide
  Sense strand starting at position 182 of SEQ ID NO: 1881784
ggagaauucugauucuauu

SEQ ID NO: 2071415 - RNA, 19 nt, Artificial Sequence
  Description of Artificial Sequence: Synthetic oligonucleotide
  Antisense strand to SEQ ID NO: 2071414
aauagaaucagaauucucc

SEQ ID NO: 2071416 - RNA, 19 nt, Artificial Sequence
  Description of Artificial Sequence: Synthetic oligonucleotide
  Sense strand starting at position 510 of SEQ ID NO: 1881784
ggccuugaaggcugucaua

SEQ ID NO: 2071417 - RNA, 19 nt, Artificial Sequence
  Description of Artificial Sequence: Synthetic oligonucleotide
  Antisense strand to SEQ ID NO: 2071416
uaugacagccuucaaggcc

SEQ ID NO: 2071418 - RNA, 19 nt, Artificial Sequence
  Description of Artificial Sequence: Synthetic oligonucleotide
  Sense strand starting at position 625 of SEQ ID NO: 1881784
uguaguguaagggaucuaa

SEQ ID NO: 2071419 - RNA, 19 nt, Artificial Sequence
  Description of Artificial Sequence: Synthetic oligonucleotide
  Antisense strand to SEQ ID NO: 2071418
uuagaucccuuacacuaca

SEQ ID NO: 2071420 - RNA, 19 nt, Artificial Sequence
  Description of Artificial Sequence: Synthetic oligonucleotide
  Sense strand starting at position 698 of SEQ ID NO: 1881784
gauguaguagucuggacaa

SEQ ID NO: 2071421 - RNA, 19 nt, Artificial Sequence
  Description of Artificial Sequence: Synthetic oligonucleotide
  Antisense strand to SEQ ID NO: 2071420
uuguccagacuacuacauc

SEQ ID NO: 2071422 - RNA, 19 nt, Artificial Sequence
  Description of Artificial Sequence: Synthetic oligonucleotide
  Sense strand starting at position 700 of SEQ ID NO: 1881784
uguaguagucuggacaaua

SEQ ID NO: 2071423 - RNA, 19 nt, Artificial Sequence
  Description of Artificial Sequence: Synthetic oligonucleotide
  Antisense strand to SEQ ID NO: 2071422
uauuguccagacuacuaca

SEQ ID NO: 2071424 - RNA, 19 nt, Artificial Sequence
  Description of Artificial Sequence: Synthetic oligonucleotide
  Sense strand starting at position 921 of SEQ ID NO: 1881784
ugaugauuacacgguuuau

SEQ ID NO: 2071425 - RNA, 19 nt, Artificial Sequence
  Description of Artificial Sequence: Synthetic oligonucleotide
  Antisense strand to SEQ ID NO: 2071424
auaaaccguguaaucauca

SEQ ID NO: 2071426 - RNA, 19 nt, Artificial Sequence
  Description of Artificial Sequence: Synthetic oligonucleotide
  Sense strand starting at position 925 of SEQ ID NO: 1881784
gauuacacgguuuauauau

SEQ ID NO: 2071427 - RNA, 19 nt, Artificial Sequence
  Description of Artificial Sequence: Synthetic oligonucleotide
  Antisense strand to SEQ ID NO: 2071426
auauauaaaccguguaauc

SEQ ID NO: 2071428 - RNA, 19 nt, Artificial Sequence
  Description of Artificial Sequence: Synthetic oligonucleotide
  Sense strand starting at position 932 of SEQ ID NO: 1881784
cgguuuauauauuugcuaa

SEQ ID NO: 2071429 - RNA, 19 nt, Artificial Sequence
  Description of Artificial Sequence: Synthetic oligonucleotide
  Antisense strand to SEQ ID NO: 2071428
uuagcaaauauauaaaccg

SEQ ID NO: 2071430 - RNA, 19 nt, Artificial Sequence
  Description of Artificial Sequence: Synthetic oligonucleotide
  Sense strand starting at position 978 of SEQ ID NO: 1881784
uguccauuucccugauugu

SEQ ID NO: 2071431 - RNA, 19 nt, Artificial Sequence
  Description of Artificial Sequence: Synthetic oligonucleotide
  Antisense strand to SEQ ID NO: 2071430
acaaucagggaaauggaca

SEQ ID NO: 2071432 - RNA, 19 nt, Artificial Sequence
  Description of Artificial Sequence: Synthetic oligonucleotide
  Sense strand starting at position 994 of SEQ ID NO: 1881784
uguuaauuguaccucaaca

SEQ ID NO: 2071433 - RNA, 19 nt, Artificial Sequence
  Description of Artificial Sequence: Synthetic oligonucleotide
  Antisense strand to SEQ ID NO: 2071432
uguugagguacaauuaaca

SEQ ID NO: 2071434 - RNA, 19 nt, Artificial Sequence
  Description of Artificial Sequence: Synthetic oligonucleotide
  Sense strand starting at position 1160 of SEQ ID NO: 1881784
gagaucuaaugaguucuaa

SEQ ID NO: 2071435 - RNA, 19 nt, Artificial Sequence
  Description of Artificial Sequence: Synthetic oligonucleotide
  Antisense strand to SEQ ID NO: 2071434
uuagaacucauuagaucuc

SEQ ID NO: 2071436 - RNA, 19 nt, Artificial Sequence
  Description of Artificial Sequence: Synthetic oligonucleotide
  Sense strand starting at position 1175 of SEQ ID NO: 1881784
cuaauaagagcucauaguc

SEQ ID NO: 2071437 - RNA, 19 nt, Artificial Sequence
  Description of Artificial Sequence: Synthetic oligonucleotide
  Antisense strand to SEQ ID NO: 2071436
gacuaugagcucuuauuag

SEQ ID NO: 2071438 - RNA, 19 nt, Artificial Sequence
  Description of Artificial Sequence: Synthetic oligonucleotide
  Sense strand starting at position 1245 of SEQ ID NO: 1881784
cgaaaucuauuugcgaagu

SEQ ID NO: 2071439 - RNA, 19 nt, Artificial Sequence
  Description of Artificial Sequence: Synthetic oligonucleotide
  Antisense strand to SEQ ID NO: 2071438
acuucgcaaauagauuucg

SEQ ID NO: 2071440 - RNA, 19 nt, Artificial Sequence
  Description of Artificial Sequence: Synthetic oligonucleotide
  Sense strand starting at position 1284 of SEQ ID NO: 1881784
uuuauuguagcccaguaaa

SEQ ID NO: 2071441 - RNA, 19 nt, Artificial Sequence
  Description of Artificial Sequence: Synthetic oligonucleotide
  Antisense strand to SEQ ID NO: 2071440
uuuacugggcuacaauaaa

SEQ ID NO: 2071442 - RNA, 19 nt, Artificial Sequence
  Description of Artificial Sequence: Synthetic oligonucleotide
  Sense strand starting at position 1302 of SEQ ID NO: 1881784
aagccuagucguguauagu

SEQ ID NO: 2071443 - RNA, 19 nt, Artificial Sequence
  Description of Artificial Sequence: Synthetic oligonucleotide
  Antisense strand to SEQ ID NO: 2071442
acuauacacgacuaggcuu

SEQ ID NO: 2071444 - RNA, 19 nt, Artificial Sequence
  Description of Artificial Sequence: Synthetic oligonucleotide
  Sense strand starting at position 1312 of SEQ ID NO: 1881784
guguauagugcugucgaug

SEQ ID NO: 2071445 - RNA, 19 nt, Artificial Sequence
  Description of Artificial Sequence: Synthetic oligonucleotide
  Antisense strand to SEQ ID NO: 2071444
caucgacagcacuauacac

SEQ ID NO: 2071446 - RNA, 19 nt, Artificial Sequence
  Description of Artificial Sequence: Synthetic oligonucleotide
  Sense strand starting at position 1318 of SEQ ID NO: 1881784
agugcugucgaugcgguaa

SEQ ID NO: 2071447 - RNA, 19 nt, Artificial Sequence
  Description of Artificial Sequence: Synthetic oligonucleotide
  Antisense strand to SEQ ID NO: 2071446
uuaccgcaucgacagcacu

SEQ ID NO: 2071448 - RNA, 19 nt, Artificial Sequence
  Description of Artificial Sequence: Synthetic oligonucleotide
  Sense strand starting at position 1464 of SEQ ID NO: 1881784
gaucacuucugacugaagu

SEQ ID NO: 2071449 - RNA, 19 nt, Artificial Sequence
  Description of Artificial Sequence: Synthetic oligonucleotide
  Antisense strand to SEQ ID NO: 2071448
acuucagucagaagugauc

SEQ ID NO: 2071450 - RNA, 19 nt, Artificial Sequence
  Description of Artificial Sequence: Synthetic oligonucleotide
  Sense strand starting at position 1465 of SEQ ID NO: 1881784
aucacuucugacugaagua

SEQ ID NO: 2071451 - RNA, 19 nt, Artificial Sequence
  Description of Artificial Sequence: Synthetic oligonucleotide
  Antisense strand to SEQ ID NO: 2071450
uacuucagucagaagugau

SEQ ID NO: 2071452 - RNA, 19 nt, Artificial Sequence
  Description of Artificial Sequence: Synthetic oligonucleotide
  Sense strand starting at position 2114 of SEQ ID NO: 1881784
ggcugauuagugcgaugga

SEQ ID NO: 2071453 - RNA, 19 nt, Artificial Sequence
  Description of Artificial Sequence: Synthetic oligonucleotide
  Antisense strand to SEQ ID NO: 2071452
uccaucgcacuaaucagcc

SEQ ID NO: 2071454 - RNA, 19 nt, Artificial Sequence
  Description of Artificial Sequence: Synthetic oligonucleotide
  Sense strand starting at position 2212 of SEQ ID NO: 1881784
gccuuaauuugcgcuaaau

SEQ ID NO: 2071455 - RNA, 19 nt, Artificial Sequence
  Description of Artificial Sequence: Synthetic oligonucleotide
  Antisense strand to SEQ ID NO: 2071454
auuuagcgcaaauuaaggc

SEQ ID NO: 2071456 - RNA, 19 nt, Artificial Sequence
  Description of Artificial Sequence: Synthetic oligonucleotide
  Sense strand starting at position 2246 of SEQ ID NO: 1881784
uccguacacgcucuuuauu

SEQ ID NO: 2071457 - RNA, 19 nt, Artificial Sequence
  Description of Artificial Sequence: Synthetic oligonucleotide
  Antisense strand to SEQ ID NO: 2071456
aauaaagagcguguacgga

SEQ ID NO: 2071458 - RNA, 19 nt, Artificial Sequence
  Description of Artificial Sequence: Synthetic oligonucleotide
  Sense strand starting at position 2332 of SEQ ID NO: 1881784
acagucuauccgggaaaca

SEQ ID NO: 2071459 - RNA, 19 nt, Artificial Sequence
  Description of Artificial Sequence: Synthetic oligonucleotide
  Antisense strand to SEQ ID NO: 2071458
uguuucccggauagacugu

SEQ ID NO: 2071460 - RNA, 19 nt, Artificial Sequence
  Description of Artificial Sequence: Synthetic oligonucleotide
  Sense strand starting at position 2561 of SEQ ID NO: 1881784
acacguuucccuuggaagu

SEQ ID NO: 2071461 - RNA, 19 nt, Artificial Sequence
  Description of Artificial Sequence: Synthetic oligonucleotide
  Antisense strand to SEQ ID NO: 2071460
acuuccaagggaaacgugu

SEQ ID NO: 2071462 - RNA, 19 nt, Artificial Sequence
  Description of Artificial Sequence: Synthetic oligonucleotide
  Sense strand starting at position 2579 of SEQ ID NO: 1881784
ugaacucugaggugagauu

SEQ ID NO: 2071463 - RNA, 19 nt, Artificial Sequence
  Description of Artificial Sequence: Synthetic oligonucleotide
  Antisense strand to SEQ ID NO: 2071462
aaucucaccucagaguuca

SEQ ID NO: 2071464 - RNA, 19 nt, Artificial Sequence
  Description of Artificial Sequence: Synthetic oligonucleotide
  Sense strand starting at position 3091 of SEQ ID NO: 1881784
cuucuugugcacugggaau

SEQ ID NO: 2071465 - RNA, 19 nt, Artificial Sequence
  Description of Artificial Sequence: Synthetic oligonucleotide
  Antisense strand to SEQ ID NO: 2071464
auucccagugcacaagaag

SEQ ID NO: 2071466 - RNA, 19 nt, Artificial Sequence
  Description of Artificial Sequence: Synthetic oligonucleotide
  Sense strand starting at position 3140 of SEQ ID NO: 1881784
agucaagauugagaacauu

SEQ ID NO: 2071467 - RNA, 19 nt, Artificial Sequence
  Description of Artificial Sequence: Synthetic oligonucleotide
  Antisense strand to SEQ ID NO: 2071466
aauguucucaaucuugacu

SEQ ID NO: 2071468 - RNA, 19 nt, Artificial Sequence
  Description of Artificial Sequence: Synthetic oligonucleotide
  Sense strand starting at position 3148 of SEQ ID NO: 1881784
uugagaacauuauucgaga

SEQ ID NO: 2071469 - RNA, 19 nt, Artificial Sequence
  Description of Artificial Sequence: Synthetic oligonucleotide
  Antisense strand to SEQ ID NO: 2071468
ucucgaauaauguucucaa

SEQ ID NO: 2071470 - RNA, 19 nt, Artificial Sequence
  Description of Artificial Sequence: Synthetic oligonucleotide
  Sense strand starting at position 3153 of SEQ ID NO: 1881784
aacauuauucgagaguuug

SEQ ID NO: 2071471 - RNA, 19 nt, Artificial Sequence
  Description of Artificial Sequence: Synthetic oligonucleotide
  Antisense strand to SEQ ID NO: 2071470
caaacucucgaauaauguu

SEQ ID NO: 2071472 - RNA, 19 nt, Artificial Sequence
  Description of Artificial Sequence: Synthetic oligonucleotide
  Sense strand starting at position 3161 of SEQ ID NO: 1881784
ucgagaguuugggcaccaa

SEQ ID NO: 2071473 - RNA, 19 nt, Artificial Sequence
  Description of Artificial Sequence: Synthetic oligonucleotide
  Antisense strand to SEQ ID NO: 2071472
uuggugcccaaacucucga

SEQ ID NO: 2071474 - RNA, 19 nt, Artificial Sequence
  Description of Artificial Sequence: Synthetic oligonucleotide
  Sense strand starting at position 3186 of SEQ ID NO: 1881784
guauauguauugucucaug

SEQ ID NO: 2071475 - RNA, 19 nt, Artificial Sequence
  Description of Artificial Sequence: Synthetic oligonucleotide
  Antisense strand to SEQ ID NO: 2071474
caugagacaauacauauac

SEQ ID NO: 2071476 - RNA, 19 nt, Artificial Sequence
  Description of Artificial Sequence: Synthetic oligonucleotide
  Sense strand starting at position 3637 of SEQ ID NO: 1881784
aaaguucugugucuugauu

SEQ ID NO: 2071477 - RNA, 19 nt, Artificial Sequence
  Description of Artificial Sequence: Synthetic oligonucleotide
  Antisense strand to SEQ ID NO: 2071476
aaucaagacacagaacuuu

SEQ ID NO: 2071478 - RNA, 19 nt, Artificial Sequence
  Description of Artificial Sequence: Synthetic oligonucleotide
  Sense strand starting at position 3655 of SEQ ID NO: 1881784
uuuaguggucauugaauag

SEQ ID NO: 2071479 - RNA, 19 nt, Artificial Sequence
  Description of Artificial Sequence: Synthetic oligonucleotide
  Antisense strand to SEQ ID NO: 2071478
cuauucaaugaccacuaaa

SEQ ID NO: 2071480 - RNA, 19 nt, Artificial Sequence
  Description of Artificial Sequence: Synthetic oligonucleotide
  Sense strand starting at position 3717 of SEQ ID NO: 1881784
guacaugacuuauuguaug

SEQ ID NO: 2071481 - RNA, 19 nt, Artificial Sequence
  Description of Artificial Sequence: Synthetic oligonucleotide
  Antisense strand to SEQ ID NO: 2071480
cauacaauaagucauguac

SEQ ID NO: 2071482 - RNA, 19 nt, Artificial Sequence
  Description of Artificial Sequence: Synthetic oligonucleotide
  Sense strand starting at position 3906 of SEQ ID NO: 1881784
guaagaaggccugagcuaa

SEQ ID NO: 2071483 - RNA, 19 nt, Artificial Sequence
  Description of Artificial Sequence: Synthetic oligonucleotide
  Antisense strand to SEQ ID NO: 2071482
uuagcucaggccuucuuac

SEQ ID NO: 2071484 - RNA, 19 nt, Artificial Sequence
  Description of Artificial Sequence: Synthetic oligonucleotide
  Sense strand starting at position 3967 of SEQ ID NO: 1881784
cccuguaaauuguuuggau

SEQ ID NO: 2071485 - RNA, 19 nt, Artificial Sequence
  Description of Artificial Sequence: Synthetic oligonucleotide
  Antisense strand to SEQ ID NO: 2071484
auccaaacaauuuacaggg

SEQ ID NO: 2071486 - RNA, 19 nt, Artificial Sequence
  Description of Artificial Sequence: Synthetic oligonucleotide
  Sense strand starting at position 3968 of SEQ ID NO: 1881784
ccuguaaauuguuuggaug

SEQ ID NO: 2071487 - RNA, 19 nt, Artificial Sequence
  Description of Artificial Sequence: Synthetic oligonucleotide
  Antisense strand to SEQ ID NO: 2071486
cauccaaacaauuuacagg

SEQ ID NO: 2071488 - RNA, 19 nt, Artificial Sequence
  Description of Artificial Sequence: Synthetic oligonucleotide
  Sense strand starting at position 3969 of SEQ ID NO: 1881784
cuguaaauuguuuggaugu

SEQ ID NO: 2071489 - RNA, 19 nt, Artificial Sequence
  Description of Artificial Sequence: Synthetic oligonucleotide
  Antisense strand to SEQ ID NO: 2071488
acauccaaacaauuuacag

SEQ ID NO: 2071490 - RNA, 19 nt, Artificial Sequence
  Description of Artificial Sequence: Synthetic oligonucleotide
  Sense strand starting at position 1 of SEQ ID NO: 1881785
auuuguguacuuuguagau

SEQ ID NO: 2071491 - RNA, 19 nt, Artificial Sequence
  Description of Artificial Sequence: Synthetic oligonucleotide
  Antisense strand to SEQ ID NO: 2071490
aucuacaaaguacacaaau

SEQ ID NO: 2071492 - RNA, 19 nt, Artificial Sequence
  Description of Artificial Sequence: Synthetic oligonucleotide
  Sense strand starting at position 5 of SEQ ID NO: 1881785
guguacuuuguagauugau

SEQ ID NO: 2071493 - RNA, 19 nt, Artificial Sequence
  Description of Artificial Sequence: Synthetic oligonucleotide
  Antisense strand to SEQ ID NO: 2071492
aucaaucuacaaaguacac

SEQ ID NO: 2071494 - RNA, 19 nt, Artificial Sequence
  Description of Artificial Sequence: Synthetic oligonucleotide
  Sense strand starting at position 177 of SEQ ID NO: 1881785
uugagagucagcuaucuga

SEQ ID NO: 2071495 - RNA, 19 nt, Artificial Sequence
  Description of Artificial Sequence: Synthetic oligonucleotide
  Antisense strand to SEQ ID NO: 2071494
ucagauagcugacucucaa

SEQ ID NO: 2071496 - RNA, 19 nt, Artificial Sequence
  Description of Artificial Sequence: Synthetic oligonucleotide
  Sense strand starting at position 275 of SEQ ID NO: 1881785
ugucaucaucucuaccagu

SEQ ID NO: 2071497 - RNA, 19 nt, Artificial Sequence
  Description of Artificial Sequence: Synthetic oligonucleotide
  Antisense strand to SEQ ID NO: 2071496
acugguagagaugaugaca

SEQ ID NO: 2071498 - RNA, 19 nt, Artificial Sequence
  Description of Artificial Sequence: Synthetic oligonucleotide
  Sense strand starting at position 286 of SEQ ID NO: 1881785
cuaccagugaccuaagugu

SEQ ID NO: 2071499 - RNA, 19 nt, Artificial Sequence
  Description of Artificial Sequence: Synthetic oligonucleotide
  Antisense strand to SEQ ID NO: 2071498
acacuuaggucacugguag

SEQ ID NO: 2071500 - RNA, 19 nt, Artificial Sequence
  Description of Artificial Sequence: Synthetic oligonucleotide
  Sense strand starting at position 510 of SEQ ID NO: 1881785
gccugaaauuauccuagau

SEQ ID NO: 2071501 - RNA, 19 nt, Artificial Sequence
  Description of Artificial Sequence: Synthetic oligonucleotide
  Antisense strand to SEQ ID NO: 2071500
aucuaggauaauuucaggc

SEQ ID NO: 2071502 - RNA, 19 nt, Artificial Sequence
  Description of Artificial Sequence: Synthetic oligonucleotide
  Sense strand starting at position 661 of SEQ ID NO: 1881785
agggucauguaaccuuaaa

SEQ ID NO: 2071503 - RNA, 19 nt, Artificial Sequence
  Description of Artificial Sequence: Synthetic oligonucleotide
  Antisense strand to SEQ ID NO: 2071502
uuuaagguuacaugacccu

SEQ ID NO: 2071504 - RNA, 19 nt, Artificial Sequence
  Description of Artificial Sequence: Synthetic oligonucleotide
  Sense strand starting at position 827 of SEQ ID NO: 1881785
uuugcucgugcguugacau

SEQ ID NO: 2071505 - RNA, 19 nt, Artificial Sequence
  Description of Artificial Sequence: Synthetic oligonucleotide
  Antisense strand to SEQ ID NO: 2071504
augucaacgcacgagcaaa

SEQ ID NO: 2071506 - RNA, 19 nt, Artificial Sequence
  Description of Artificial Sequence: Synthetic oligonucleotide
  Sense strand starting at position 915 of SEQ ID NO: 1881785
acagauccauaauaagaga

SEQ ID NO: 2071507 - RNA, 19 nt, Artificial Sequence
  Description of Artificial Sequence: Synthetic oligonucleotide
  Antisense strand to SEQ ID NO: 2071506
ucucuuauuauggaucugu

SEQ ID NO: 2071508 - RNA, 19 nt, Artificial Sequence
  Description of Artificial Sequence: Synthetic oligonucleotide
  Sense strand starting at position 1087 of SEQ ID NO: 1881785
gagaaacagcguuacucga

SEQ ID NO: 2071509 - RNA, 19 nt, Artificial Sequence
  Description of Artificial Sequence: Synthetic oligonucleotide
  Antisense strand to SEQ ID NO: 2071508
ucgaguaacgcuguuucuc

SEQ ID NO: 2071510 - RNA, 19 nt, Artificial Sequence
  Description of Artificial Sequence: Synthetic oligonucleotide
  Sense strand starting at position 1238 of SEQ ID NO: 1881785
gcagaauccgggcagaaau

SEQ ID NO: 2071511 - RNA, 19 nt, Artificial Sequence
  Description of Artificial Sequence: Synthetic oligonucleotide
  Antisense strand to SEQ ID NO: 2071510
auuucugcccggauucugc

SEQ ID NO: 2071512 - RNA, 19 nt, Artificial Sequence
  Description of Artificial Sequence: Synthetic oligonucleotide
  Sense strand starting at position 2316 of SEQ ID NO: 1881785
cuugguggucgaagaguuu

SEQ ID NO: 2071513 - RNA, 19 nt, Artificial Sequence
  Description of Artificial Sequence: Synthetic oligonucleotide
  Antisense strand to SEQ ID NO: 2071512
aaacucuucgaccaccaag

SEQ ID NO: 2071514 - RNA, 19 nt, Artificial Sequence
  Description of Artificial Sequence: Synthetic oligonucleotide
  Sense strand starting at position 2355 of SEQ ID NO: 1881785
gcuggauugggugacuaga

SEQ ID NO: 2071515 - RNA, 19 nt, Artificial Sequence
  Description of Artificial Sequence: Synthetic oligonucleotide
  Antisense strand to SEQ ID NO: 2071514
ucuagucacccaauccagc

SEQ ID NO: 2071516 - RNA, 19 nt, Artificial Sequence
  Description of Artificial Sequence: Synthetic oligonucleotide
  Sense strand starting at position 2419 of SEQ ID NO: 1881785
ggcucaauauuugaaauca

SEQ ID NO: 2071517 - RNA, 19 nt, Artificial Sequence
  Description of Artificial Sequence: Synthetic oligonucleotide
  Antisense strand to SEQ ID NO: 2071516
ugauuucaaauauugagcc

SEQ ID NO: 2071518 - RNA, 19 nt, Artificial Sequence
  Description of Artificial Sequence: Synthetic oligonucleotide
  Sense strand starting at position 2429 of SEQ ID NO: 1881785
uugaaaucacuacgguuaa

SEQ ID NO: 2071519 - RNA, 19 nt, Artificial Sequence
  Description of Artificial Sequence: Synthetic oligonucleotide
  Antisense strand to SEQ ID NO: 2071518
uuaaccguagugauuucaa

SEQ ID NO: 2071520 - RNA, 19 nt, Artificial Sequence
  Description of Artificial Sequence: Synthetic oligonucleotide
  Sense strand starting at position 2510 of SEQ ID NO: 1881785
aauacaguuuggguggaua

SEQ ID NO: 2071521 - RNA, 19 nt, Artificial Sequence
  Description of Artificial Sequence: Synthetic oligonucleotide
  Antisense strand to SEQ ID NO: 2071520
uauccacccaaacuguauu

SEQ ID NO: 2071522 - RNA, 19 nt, Artificial Sequence
  Description of Artificial Sequence: Synthetic oligonucleotide
  Sense strand starting at position 2512 of SEQ ID NO: 1881785
uacaguuuggguggauaaa

SEQ ID NO: 2071523 - RNA, 19 nt, Artificial Sequence
  Description of Artificial Sequence: Synthetic oligonucleotide
  Antisense strand to SEQ ID NO: 2071522
uuuauccacccaaacugua

SEQ ID NO: 2071524 - RNA, 19 nt, Artificial Sequence
  Description of Artificial Sequence: Synthetic oligonucleotide
  Sense strand starting at position 2523 of SEQ ID NO: 1881785
uggauaaaguuucuuagga

SEQ ID NO: 2071525 - RNA, 19 nt, Artificial Sequence
  Description of Artificial Sequence: Synthetic oligonucleotide
  Antisense strand to SEQ ID NO: 2071524
uccuaagaaacuuuaucca

SEQ ID NO: 2071526 - RNA, 19 nt, Artificial Sequence
  Description of Artificial Sequence: Synthetic oligonucleotide
  Sense strand starting at position 2530 of SEQ ID NO: 1881785
aguuucuuaggaugguaua

SEQ ID NO: 2071527 - RNA, 19 nt, Artificial Sequence
  Description of Artificial Sequence: Synthetic oligonucleotide
  Antisense strand to SEQ ID NO: 2071526
uauaccauccuaagaaacu

SEQ ID NO: 2071528 - RNA, 19 nt, Artificial Sequence
  Description of Artificial Sequence: Synthetic oligonucleotide
  Sense strand starting at position 2541 of SEQ ID NO: 1881785
augguauagaugugacuaa

SEQ ID NO: 2071529 - RNA, 19 nt, Artificial Sequence
  Description of Artificial Sequence: Synthetic oligonucleotide
  Antisense strand to SEQ ID NO: 2071528
uuagucacaucuauaccau

SEQ ID NO: 2071530 - RNA, 19 nt, Artificial Sequence
  Description of Artificial Sequence: Synthetic oligonucleotide
  Sense strand starting at position 2665 of SEQ ID NO: 1881785
gggucaccugcacaguauu

SEQ ID NO: 2071531 - RNA, 19 nt, Artificial Sequence
  Description of Artificial Sequence: Synthetic oligonucleotide
  Antisense strand to SEQ ID NO: 2071530
aauacugugcaggugaccc

SEQ ID NO: 2071532 - RNA, 19 nt, Artificial Sequence
  Description of Artificial Sequence: Synthetic oligonucleotide
  Sense strand starting at position 2686 of SEQ ID NO: 1881785
ucagauugaggcuguggaa

SEQ ID NO: 2071533 - RNA, 19 nt, Artificial Sequence
  Description of Artificial Sequence: Synthetic oligonucleotide
  Antisense strand to SEQ ID NO: 2071532
uuccacagccucaaucuga

SEQ ID NO: 2071534 - RNA, 19 nt, Artificial Sequence
  Description of Artificial Sequence: Synthetic oligonucleotide
  Sense strand starting at position 2778 of SEQ ID NO: 1881785
guuccuuucguauauauuu

SEQ ID NO: 2071535 - RNA, 19 nt, Artificial Sequence
  Description of Artificial Sequence: Synthetic oligonucleotide
  Antisense strand to SEQ ID NO: 2071534
aaauauauacgaaaggaac

SEQ ID NO: 2071536 - RNA, 19 nt, Artificial Sequence
  Description of Artificial Sequence: Synthetic oligonucleotide
  Sense strand starting at position 2786 of SEQ ID NO: 1881785
cguauauauuucucccuua

SEQ ID NO: 2071537 - RNA, 19 nt, Artificial Sequence
  Description of Artificial Sequence: Synthetic oligonucleotide
  Antisense strand to SEQ ID NO: 2071536
uaagggagaaauauauacg

SEQ ID NO: 2071538 - RNA, 19 nt, Artificial Sequence
  Description of Artificial Sequence: Synthetic oligonucleotide
  Sense strand starting at position 2894 of SEQ ID NO: 1881785
uggugaaggacuuauguau

SEQ ID NO: 2071539 - RNA, 19 nt, Artificial Sequence
  Description of Artificial Sequence: Synthetic oligonucleotide
  Antisense strand to SEQ ID NO: 2071538
auacauaaguccuucacca

SEQ ID NO: 2071540 - RNA, 19 nt, Artificial Sequence
  Description of Artificial Sequence: Synthetic oligonucleotide
  Sense strand starting at position 2952 of SEQ ID NO: 1881785
uugucacaucuuuagugau

SEQ ID NO: 2071541 - RNA, 19 nt, Artificial Sequence
  Description of Artificial Sequence: Synthetic oligonucleotide
  Antisense strand to SEQ ID NO: 2071540
aucacuaaagaugugacaa

SEQ ID NO: 2071542 - RNA, 19 nt, Artificial Sequence
  Description of Artificial Sequence: Synthetic oligonucleotide
  Sense strand starting at position 2954 of SEQ ID NO: 1881785
gucacaucuuuagugauga

SEQ ID NO: 2071543 - RNA, 19 nt, Artificial Sequence
  Description of Artificial Sequence: Synthetic oligonucleotide
  Antisense strand to SEQ ID NO: 2071542
ucaucacuaaagaugugac

SEQ ID NO: 2071544 - RNA, 19 nt, Artificial Sequence
  Description of Artificial Sequence: Synthetic oligonucleotide
  Sense strand starting at position 2998 of SEQ ID NO: 1881785
cuuaaauugcagugaacau

SEQ ID NO: 2071545 - RNA, 19 nt, Artificial Sequence
  Description of Artificial Sequence: Synthetic oligonucleotide
  Antisense strand to SEQ ID NO: 2071544
auguucacugcaauuuaag

SEQ ID NO: 2071546 - RNA, 19 nt, Artificial Sequence
  Description of Artificial Sequence: Synthetic oligonucleotide
  Sense strand starting at position 3111 of SEQ ID NO: 1881785
auguaaguagggugauuca

SEQ ID NO: 2071547 - RNA, 19 nt, Artificial Sequence
  Description of Artificial Sequence: Synthetic oligonucleotide
  Antisense strand to SEQ ID NO: 2071546
ugaaucacccuacuuacau

SEQ ID NO: 2071548 - RNA, 19 nt, Artificial Sequence
  Description of Artificial Sequence: Synthetic oligonucleotide
  Sense strand starting at position 3149 of SEQ ID NO: 1881785
gcugaaggcucauugaauc

SEQ ID NO: 2071549 - RNA, 19 nt, Artificial Sequence
  Description of Artificial Sequence: Synthetic oligonucleotide
  Antisense strand to SEQ ID NO: 2071548
gauucaaugagccuucagc

SEQ ID NO: 2071550 - RNA, 19 nt, Artificial Sequence
  Description of Artificial Sequence: Synthetic oligonucleotide
  Sense strand starting at position 3346 of SEQ ID NO: 1881785
aguuguaagguuuaaauug

SEQ ID NO: 2071551 - RNA, 19 nt, Artificial Sequence
  Description of Artificial Sequence: Synthetic oligonucleotide
  Antisense strand to SEQ ID NO: 2071550
caauuuaaaccuuacaacu

SEQ ID NO: 2071552 - RNA, 19 nt, Artificial Sequence
  Description of Artificial Sequence: Synthetic oligonucleotide
  Sense strand starting at position 3380 of SEQ ID NO: 1881785
gccuucucagaguagagau

SEQ ID NO: 2071553 - RNA, 19 nt, Artificial Sequence
  Description of Artificial Sequence: Synthetic oligonucleotide
  Antisense strand to SEQ ID NO: 2071552
aucucuacucugagaaggc

SEQ ID NO: 2071554 - RNA, 19 nt, Artificial Sequence
  Description of Artificial Sequence: Synthetic oligonucleotide
  Sense strand starting at position 3420 of SEQ ID NO: 1881785
cccgauauaggcuacagaa

SEQ ID NO: 2071555 - RNA, 19 nt, Artificial Sequence
  Description of Artificial Sequence: Synthetic oligonucleotide
  Antisense strand to SEQ ID NO: 2071554
uucuguagccuauaucggg

SEQ ID NO: 2071556 - RNA, 19 nt, Artificial Sequence
  Description of Artificial Sequence: Synthetic oligonucleotide
  Sense strand starting at position 3615 of SEQ ID NO: 1881785
ggcagaagagcguauuaga

SEQ ID NO: 2071557 - RNA, 19 nt, Artificial Sequence
  Description of Artificial Sequence: Synthetic oligonucleotide
  Antisense strand to SEQ ID NO: 2071556
ucuaauacgcucuucugcc

SEQ ID NO: 2071558 - RNA, 19 nt, Artificial Sequence
  Description of Artificial Sequence: Synthetic oligonucleotide
  Sense strand starting at position 3645 of SEQ ID NO: 1881785
uuucuuuguggagaaaggu

SEQ ID NO: 2071559 - RNA, 19 nt, Artificial Sequence
  Description of Artificial Sequence: Synthetic oligonucleotide
  Antisense strand to SEQ ID NO: 2071558
accuuucuccacaaagaaa

SEQ ID NO: 2071560 - RNA, 19 nt, Artificial Sequence
  Description of Artificial Sequence: Synthetic oligonucleotide
  Sense strand starting at position 3700 of SEQ ID NO: 1881785
gauggugauguguauagga

SEQ ID NO: 2071561 - RNA, 19 nt, Artificial Sequence
  Description of Artificial Sequence: Synthetic oligonucleotide
  Antisense strand to SEQ ID NO: 2071560
uccuauacacaucaccauc

SEQ ID NO: 2071562 - RNA, 19 nt, Artificial Sequence
  Description of Artificial Sequence: Synthetic oligonucleotide
  Sense strand starting at position 3748 of SEQ ID NO: 1881785
gcaauuuagcuguaguucu

SEQ ID NO: 2071563 - RNA, 19 nt, Artificial Sequence
  Description of Artificial Sequence: Synthetic oligonucleotide
  Antisense strand to SEQ ID NO: 2071562
agaacuacagcuaaauugc

SEQ ID NO: 2071564 - RNA, 19 nt, Artificial Sequence
  Description of Artificial Sequence: Synthetic oligonucleotide
  Sense strand starting at position 3917 of SEQ ID NO: 1881785
auugguguucuguauauac

SEQ ID NO: 2071565 - RNA, 19 nt, Artificial Sequence
  Description of Artificial Sequence: Synthetic oligonucleotide
  Antisense strand to SEQ ID NO: 2071564
guauauacagaacaccaau

SEQ ID NO: 2071566 - RNA, 19 nt, Artificial Sequence
  Description of Artificial Sequence: Synthetic oligonucleotide
  Sense strand starting at position 3924 of SEQ ID NO: 1881785
uucuguauauacuuccaga

SEQ ID NO: 2071567 - RNA, 19 nt, Artificial Sequence
  Description of Artificial Sequence: Synthetic oligonucleotide
  Antisense strand to SEQ ID NO: 2071566
ucuggaaguauauacagaa

SEQ ID NO: 2071568 - RNA, 19 nt, Artificial Sequence
  Description of Artificial Sequence: Synthetic oligonucleotide
  Sense strand starting at position 3965 of SEQ ID NO: 1881785
auaugugcauagucauaag

SEQ ID NO: 2071569 - RNA, 19 nt, Artificial Sequence
  Description of Artificial Sequence: Synthetic oligonucleotide
  Antisense strand to SEQ ID NO: 2071568
cuuaugacuaugcacauau

SEQ ID NO: 2071570 - RNA, 19 nt, Artificial Sequence
  Description of Artificial Sequence: Synthetic oligonucleotide
  Sense strand starting at position 39 of SEQ ID NO: 1881786
uucugaauguagucgagga

SEQ ID NO: 2071571 - RNA, 19 nt, Artificial Sequence
  Description of Artificial Sequence: Synthetic oligonucleotide
  Antisense strand to SEQ ID NO: 2071570
uccucgacuacauucagaa

SEQ ID NO: 2071572 - RNA, 19 nt, Artificial Sequence
  Description of Artificial Sequence: Synthetic oligonucleotide
  Sense strand starting at position 40 of SEQ ID NO: 1881786
ucugaauguagucgaggau

SEQ ID NO: 2071573 - RNA, 19 nt, Artificial Sequence
  Description of Artificial Sequence: Synthetic oligonucleotide
  Antisense strand to SEQ ID NO: 2071572
auccucgacuacauucaga

SEQ ID NO: 2071574 - RNA, 19 nt, Artificial Sequence
  Description of Artificial Sequence: Synthetic oligonucleotide
  Sense strand starting at position 43 of SEQ ID NO: 1881786
gaauguagucgaggauguu

SEQ ID NO: 2071575 - RNA, 19 nt, Artificial Sequence
  Description of Artificial Sequence: Synthetic oligonucleotide
  Antisense strand to SEQ ID NO: 2071574
aacauccucgacuacauuc

SEQ ID NO: 2071576 - RNA, 19 nt, Artificial Sequence
  Description of Artificial Sequence: Synthetic oligonucleotide
  Sense strand starting at position 44 of SEQ ID NO: 1881786
aauguagucgaggauguuu

SEQ ID NO: 2071577 - RNA, 19 nt, Artificial Sequence
  Description of Artificial Sequence: Synthetic oligonucleotide
  Antisense strand to SEQ ID NO: 2071576
aaacauccucgacuacauu

SEQ ID NO: 2071578 - RNA, 19 nt, Artificial Sequence
  Description of Artificial Sequence: Synthetic oligonucleotide
  Sense strand starting at position 49 of SEQ ID NO: 1881786
agucgaggauguuuauaag

SEQ ID NO: 2071579 - RNA, 19 nt, Artificial Sequence
  Description of Artificial Sequence: Synthetic oligonucleotide
  Antisense strand to SEQ ID NO: 2071578
cuuauaaacauccucgacu

SEQ ID NO: 2071580 - RNA, 19 nt, Artificial Sequence
  Description of Artificial Sequence: Synthetic oligonucleotide
  Sense strand starting at position 112 of SEQ ID NO: 1881786
aguuaucuucuguauuaga

SEQ ID NO: 2071581 - RNA, 19 nt, Artificial Sequence
  Description of Artificial Sequence: Synthetic oligonucleotide
  Antisense strand to SEQ ID NO: 2071580
ucuaauacagaagauaacu

SEQ ID NO: 2071582 - RNA, 19 nt, Artificial Sequence
  Description of Artificial Sequence: Synthetic oligonucleotide
  Sense strand starting at position 192 of SEQ ID NO: 1881786
guuugaaauuggguauaua

SEQ ID NO: 2071583 - RNA, 19 nt, Artificial Sequence
  Description of Artificial Sequence: Synthetic oligonucleotide
  Antisense strand to SEQ ID NO: 2071582
uauauacccaauuucaaac

SEQ ID NO: 2071584 - RNA, 19 nt, Artificial Sequence
  Description of Artificial Sequence: Synthetic oligonucleotide
  Sense strand starting at position 718 of SEQ ID NO: 1881786
acagcaauccugugaguua

SEQ ID NO: 2071585 - RNA, 19 nt, Artificial Sequence
  Description of Artificial Sequence: Synthetic oligonucleotide
  Antisense strand to SEQ ID NO: 2071584
uaacucacaggauugcugu

SEQ ID NO: 2071586 - RNA, 19 nt, Artificial Sequence
  Description of Artificial Sequence: Synthetic oligonucleotide
  Sense strand starting at position 727 of SEQ ID NO: 1881786
cugugaguuauauagagca

SEQ ID NO: 2071587 - RNA, 19 nt, Artificial Sequence
  Description of Artificial Sequence: Synthetic oligonucleotide
  Antisense strand to SEQ ID NO: 2071586
ugcucuauauaacucacag

SEQ ID NO: 2071588 - RNA, 19 nt, Artificial Sequence
  Description of Artificial Sequence: Synthetic oligonucleotide
  Sense strand starting at position 729 of SEQ ID NO: 1881786
gugaguuauauagagcaaa

SEQ ID NO: 2071589 - RNA, 19 nt, Artificial Sequence
  Description of Artificial Sequence: Synthetic oligonucleotide
  Antisense strand to SEQ ID NO: 2071588
uuugcucuauauaacucac

SEQ ID NO: 2071590 - RNA, 19 nt, Artificial Sequence
  Description of Artificial Sequence: Synthetic oligonucleotide
  Sense strand starting at position 797 of SEQ ID NO: 1881786
ggucacauucuguguaaca

SEQ ID NO: 2071591 - RNA, 19 nt, Artificial Sequence
  Description of Artificial Sequence: Synthetic oligonucleotide
  Antisense strand to SEQ ID NO: 2071590
uguuacacagaaugugacc

SEQ ID NO: 2071592 - RNA, 19 nt, Artificial Sequence
  Description of Artificial Sequence: Synthetic oligonucleotide
  Sense strand starting at position 798 of SEQ ID NO: 1881786
gucacauucuguguaacag

SEQ ID NO: 2071593 - RNA, 19 nt, Artificial Sequence
  Description of Artificial Sequence: Synthetic oligonucleotide
  Antisense strand to SEQ ID NO: 2071592
cuguuacacagaaugugac

SEQ ID NO: 2071594 - RNA, 19 nt, Artificial Sequence
  Description of Artificial Sequence: Synthetic oligonucleotide
  Sense strand starting at position 799 of SEQ ID NO: 1881786
ucacauucuguguaacaga

SEQ ID NO: 2071595 - RNA, 19 nt, Artificial Sequence
  Description of Artificial Sequence: Synthetic oligonucleotide
  Antisense strand to SEQ ID NO: 2071594
ucuguuacacagaauguga

SEQ ID NO: 2071596 - RNA, 19 nt, Artificial Sequence
  Description of Artificial Sequence: Synthetic oligonucleotide
  Sense strand starting at position 846 of SEQ ID NO: 1881786
cugcauucccaguacugga

SEQ ID NO: 2071597 - RNA, 19 nt, Artificial Sequence
  Description of Artificial Sequence: Synthetic oligonucleotide
  Antisense strand to SEQ ID NO: 2071596
uccaguacugggaaugcag

SEQ ID NO: 2071598 - RNA, 19 nt, Artificial Sequence
  Description of Artificial Sequence: Synthetic oligonucleotide
  Sense strand starting at position 991 of SEQ ID NO: 1881786
aauaauguugagugaugcu

SEQ ID NO: 2071599 - RNA, 19 nt, Artificial Sequence
  Description of Artificial Sequence: Synthetic oligonucleotide
  Antisense strand to SEQ ID NO: 2071598
agcaucacucaacauuauu

SEQ ID NO: 2071600 - RNA, 19 nt, Artificial Sequence
  Description of Artificial Sequence: Synthetic oligonucleotide
  Sense strand starting at position 998 of SEQ ID NO: 1881786
uugagugaugcugauaaac

SEQ ID NO: 2071601 - RNA, 19 nt, Artificial Sequence
  Description of Artificial Sequence: Synthetic oligonucleotide
  Antisense strand to SEQ ID NO: 2071600
guuuaucagcaucacucaa

SEQ ID NO: 2071602 - RNA, 19 nt, Artificial Sequence
  Description of Artificial Sequence: Synthetic oligonucleotide
  Sense strand starting at position 1155 of SEQ ID NO: 1881786
ugggcuauucugggaacca

SEQ ID NO: 2071603 - RNA, 19 nt, Artificial Sequence
  Description of Artificial Sequence: Synthetic oligonucleotide
  Antisense strand to SEQ ID NO: 2071602
ugguucccagaauagccca

SEQ ID NO: 2071604 - RNA, 19 nt, Artificial Sequence
  Description of Artificial Sequence: Synthetic oligonucleotide
  Sense strand starting at position 1413 of SEQ ID NO: 1881786
auagacuaacgauagugua

SEQ ID NO: 2071605 - RNA, 19 nt, Artificial Sequence
  Description of Artificial Sequence: Synthetic oligonucleotide
  Antisense strand to SEQ ID NO: 2071604
uacacuaucguuagucuau

SEQ ID NO: 2071606 - RNA, 19 nt, Artificial Sequence
  Description of Artificial Sequence: Synthetic oligonucleotide
  Sense strand starting at position 1420 of SEQ ID NO: 1881786
aacgauaguguagaauauu

SEQ ID NO: 2071607 - RNA, 19 nt, Artificial Sequence
  Description of Artificial Sequence: Synthetic oligonucleotide
  Antisense strand to SEQ ID NO: 2071606
aauauucuacacuaucguu

SEQ ID NO: 2071608 - RNA, 19 nt, Artificial Sequence
  Description of Artificial Sequence: Synthetic oligonucleotide
  Sense strand starting at position 1489 of SEQ ID NO: 1881786
ugugcugauauggaacaau

SEQ ID NO: 2071609 - RNA, 19 nt, Artificial Sequence
  Description of Artificial Sequence: Synthetic oligonucleotide
  Antisense strand to SEQ ID NO: 2071608
auuguuccauaucagcaca

SEQ ID NO: 2071610 - RNA, 19 nt, Artificial Sequence
  Description of Artificial Sequence: Synthetic oligonucleotide
  Sense strand starting at position 2131 of SEQ ID NO: 1881786
gggccaagaaggugaguuu

SEQ ID NO: 2071611 - RNA, 19 nt, Artificial Sequence
  Description of Artificial Sequence: Synthetic oligonucleotide
  Antisense strand to SEQ ID NO: 2071610
aaacucaccuucuuggccc

SEQ ID NO: 2071612 - RNA, 19 nt, Artificial Sequence
  Description of Artificial Sequence: Synthetic oligonucleotide
  Sense strand starting at position 2345 of SEQ ID NO: 1881786
ugcugugcucaaguuaucu

SEQ ID NO: 2071613 - RNA, 19 nt, Artificial Sequence
  Description of Artificial Sequence: Synthetic oligonucleotide
  Antisense strand to SEQ ID NO: 2071612
agauaacuugagcacagca

SEQ ID NO: 2071614 - RNA, 19 nt, Artificial Sequence
  Description of Artificial Sequence: Synthetic oligonucleotide
  Sense strand starting at position 2465 of SEQ ID NO: 1881786
ggaucagaagucuagcuuu

SEQ ID NO: 2071615 - RNA, 19 nt, Artificial Sequence
  Description of Artificial Sequence: Synthetic oligonucleotide
  Antisense strand to SEQ ID NO: 2071614
aaagcuagacuucugaucc

SEQ ID NO: 2071616 - RNA, 19 nt, Artificial Sequence
  Description of Artificial Sequence: Synthetic oligonucleotide
  Sense strand starting at position 2770 of SEQ ID NO: 1881786
ucaccagauguuggcuuua

SEQ ID NO: 2071617 - RNA, 19 nt, Artificial Sequence
  Description of Artificial Sequence: Synthetic oligonucleotide
  Antisense strand to SEQ ID NO: 2071616
uaaagccaacaucugguga

SEQ ID NO: 2071618 - RNA, 19 nt, Artificial Sequence
  Description of Artificial Sequence: Synthetic oligonucleotide
  Sense strand starting at position 2772 of SEQ ID NO: 1881786
accagauguuggcuuuaug

SEQ ID NO: 2071619 - RNA, 19 nt, Artificial Sequence
  Description of Artificial Sequence: Synthetic oligonucleotide
  Antisense strand to SEQ ID NO: 2071618
cauaaagccaacaucuggu

SEQ ID NO: 2071620 - RNA, 19 nt, Artificial Sequence
  Description of Artificial Sequence: Synthetic oligonucleotide
  Sense strand starting at position 2794 of SEQ ID NO: 1881786
agccauuucuacgucgagu

SEQ ID NO: 2071621 - RNA, 19 nt, Artificial Sequence
  Description of Artificial Sequence: Synthetic oligonucleotide
  Antisense strand to SEQ ID NO: 2071620
acucgacguagaaauggcu

SEQ ID NO: 2071622 - RNA, 19 nt, Artificial Sequence
  Description of Artificial Sequence: Synthetic oligonucleotide
  Sense strand starting at position 2796 of SEQ ID NO: 1881786
ccauuucuacgucgaguau

SEQ ID NO: 2071623 - RNA, 19 nt, Artificial Sequence
  Description of Artificial Sequence: Synthetic oligonucleotide
  Antisense strand to SEQ ID NO: 2071622
auacucgacguagaaaugg

SEQ ID NO: 2071624 - RNA, 19 nt, Artificial Sequence
  Description of Artificial Sequence: Synthetic oligonucleotide
  Sense strand starting at position 2978 of SEQ ID NO: 1881786
ccgagcuauuuauacuaaa

SEQ ID NO: 2071625 - RNA, 19 nt, Artificial Sequence
  Description of Artificial Sequence: Synthetic oligonucleotide
  Antisense strand to SEQ ID NO: 2071624
uuuaguauaaauagcucgg

SEQ ID NO: 2071626 - RNA, 19 nt, Artificial Sequence
  Description of Artificial Sequence: Synthetic oligonucleotide
  Sense strand starting at position 3019 of SEQ ID NO: 1881786
ucugcaauacgggauucua

SEQ ID NO: 2071627 - RNA, 19 nt, Artificial Sequence
  Description of Artificial Sequence: Synthetic oligonucleotide
  Antisense strand to SEQ ID NO: 2071626
uagaaucccguauugcaga

SEQ ID NO: 2071628 - RNA, 19 nt, Artificial Sequence
  Description of Artificial Sequence: Synthetic oligonucleotide
  Sense strand starting at position 3131 of SEQ ID NO: 1881786
ggaaauauaucacaaacug

SEQ ID NO: 2071629 - RNA, 19 nt, Artificial Sequence
  Description of Artificial Sequence: Synthetic oligonucleotide
  Antisense strand to SEQ ID NO: 2071628
caguuugugauauauuucc

SEQ ID NO: 2071630 - RNA, 19 nt, Artificial Sequence
  Description of Artificial Sequence: Synthetic oligonucleotide
  Sense strand starting at position 3222 of SEQ ID NO: 1881786
uguggaauauugguuuaaa

SEQ ID NO: 2071631 - RNA, 19 nt, Artificial Sequence
  Description of Artificial Sequence: Synthetic oligonucleotide
  Antisense strand to SEQ ID NO: 2071630
uuuaaaccaauauuccaca

SEQ ID NO: 2071632 - RNA, 19 nt, Artificial Sequence
  Description of Artificial Sequence: Synthetic oligonucleotide
  Sense strand starting at position 3279 of SEQ ID NO: 1881786
aaaugugagcauugaaaga

SEQ ID NO: 2071633 - RNA, 19 nt, Artificial Sequence
  Description of Artificial Sequence: Synthetic oligonucleotide
  Antisense strand to SEQ ID NO: 2071632
ucuuucaaugcucacauuu

SEQ ID NO: 2071634 - RNA, 19 nt, Artificial Sequence
  Description of Artificial Sequence: Synthetic oligonucleotide
  Sense strand starting at position 3474 of SEQ ID NO: 1881786
gaauguguaccugggaguu

SEQ ID NO: 2071635 - RNA, 19 nt, Artificial Sequence
  Description of Artificial Sequence: Synthetic oligonucleotide
  Antisense strand to SEQ ID NO: 2071634
aacucccagguacacauuc

SEQ ID NO: 2071636 - RNA, 19 nt, Artificial Sequence
  Description of Artificial Sequence: Synthetic oligonucleotide
  Sense strand starting at position 3676 of SEQ ID NO: 1881786
ccuacuacacagugaaguu

SEQ ID NO: 2071637 - RNA, 19 nt, Artificial Sequence
  Description of Artificial Sequence: Synthetic oligonucleotide
  Antisense strand to SEQ ID NO: 2071636
aacuucacuguguaguagg

SEQ ID NO: 2071638 - RNA, 19 nt, Artificial Sequence
  Description of Artificial Sequence: Synthetic oligonucleotide
  Sense strand starting at position 3745 of SEQ ID NO: 1881786
agaggucuuacguagugau

SEQ ID NO: 2071639 - RNA, 19 nt, Artificial Sequence
  Description of Artificial Sequence: Synthetic oligonucleotide
  Antisense strand to SEQ ID NO: 2071638
aucacuacguaagaccucu

SEQ ID NO: 2071640 - RNA, 19 nt, Artificial Sequence
  Description of Artificial Sequence: Synthetic oligonucleotide
  Sense strand starting at position 3749 of SEQ ID NO: 1881786
gucuuacguagugauaucu

SEQ ID NO: 2071641 - RNA, 19 nt, Artificial Sequence
  Description of Artificial Sequence: Synthetic oligonucleotide
  Antisense strand to SEQ ID NO: 2071640
agauaucacuacguaagac

SEQ ID NO: 2071642 - RNA, 19 nt, Artificial Sequence
  Description of Artificial Sequence: Synthetic oligonucleotide
  Sense strand starting at position 3899 of SEQ ID NO: 1881786
acauguuccugucuuuaua

SEQ ID NO: 2071643 - RNA, 19 nt, Artificial Sequence
  Description of Artificial Sequence: Synthetic oligonucleotide
  Antisense strand to SEQ ID NO: 2071642
uauaaagacaggaacaugu

SEQ ID NO: 2071644 - RNA, 19 nt, Artificial Sequence
  Description of Artificial Sequence: Synthetic oligonucleotide
  Sense strand starting at position 3901 of SEQ ID NO: 1881786
auguuccugucuuuauaau

SEQ ID NO: 2071645 - RNA, 19 nt, Artificial Sequence
  Description of Artificial Sequence: Synthetic oligonucleotide
  Antisense strand to SEQ ID NO: 2071644
auuauaaagacaggaacau

SEQ ID NO: 2071646 - RNA, 19 nt, Artificial Sequence
  Description of Artificial Sequence: Synthetic oligonucleotide
  Sense strand starting at position 3902 of SEQ ID NO: 1881786
uguuccugucuuuauaauu

SEQ ID NO: 2071647 - RNA, 19 nt, Artificial Sequence
  Description of Artificial Sequence: Synthetic oligonucleotide
  Antisense strand to SEQ ID NO: 2071646
aauuauaaagacaggaaca

SEQ ID NO: 2071648 - RNA, 19 nt, Artificial Sequence
  Description of Artificial Sequence: Synthetic oligonucleotide
  Sense strand starting at position 3927 of SEQ ID NO: 1881786
uugacuuuagaucguacua

SEQ ID NO: 2071649 - RNA, 19 nt, Artificial Sequence
  Description of Artificial Sequence: Synthetic oligonucleotide
  Antisense strand to SEQ ID NO: 2071648
uaguacgaucuaaagucaa

SEQ ID NO: 2071650 - RNA, 19 nt, Artificial Sequence
  Description of Artificial Sequence: Synthetic oligonucleotide
  Sense strand starting at position 460 of SEQ ID NO: 1881787
aguuguugugaaggaagga

SEQ ID NO: 2071651 - RNA, 19 nt, Artificial Sequence
  Description of Artificial Sequence: Synthetic oligonucleotide
  Antisense strand to SEQ ID NO: 2071650
uccuuccuucacaacaacu

SEQ ID NO: 2071652 - RNA, 19 nt, Artificial Sequence
  Description of Artificial Sequence: Synthetic oligonucleotide
  Sense strand starting at position 506 of SEQ ID NO: 1881787
gccugacaugcucaaugaa

SEQ ID NO: 2071653 - RNA, 19 nt, Artificial Sequence
  Description of Artificial Sequence: Synthetic oligonucleotide
  Antisense strand to SEQ ID NO: 2071652
uucauugagcaugucaggc

SEQ ID NO: 2071654 - RNA, 19 nt, Artificial Sequence
  Description of Artificial Sequence: Synthetic oligonucleotide
  Sense strand starting at position 610 of SEQ ID NO: 1881787
ccuuuaugggccugaaugu

SEQ ID NO: 2071655 - RNA, 19 nt, Artificial Sequence
  Description of Artificial Sequence: Synthetic oligonucleotide
  Antisense strand to SEQ ID NO: 2071654
acauucaggcccauaaagg

SEQ ID NO: 2071656 - RNA, 19 nt, Artificial Sequence
  Description of Artificial Sequence: Synthetic oligonucleotide
  Sense strand starting at position 620 of SEQ ID NO: 1881787
ccugaaugugcucaggauu

SEQ ID NO: 2071657 - RNA, 19 nt, Artificial Sequence
  Description of Artificial Sequence: Synthetic oligonucleotide
  Antisense strand to SEQ ID NO: 2071656
aauccugagcacauucagg

SEQ ID NO: 2071658 - RNA, 19 nt, Artificial Sequence
  Description of Artificial Sequence: Synthetic oligonucleotide
  Sense strand starting at position 623 of SEQ ID NO: 1881787
gaaugugcucaggauuccu

SEQ ID NO: 2071659 - RNA, 19 nt, Artificial Sequence
  Description of Artificial Sequence: Synthetic oligonucleotide
  Antisense strand to SEQ ID NO: 2071658
aggaauccugagcacauuc

SEQ ID NO: 2071660 - RNA, 19 nt, Artificial Sequence
  Description of Artificial Sequence: Synthetic oligonucleotide
  Sense strand starting at position 665 of SEQ ID NO: 1881787
aggaaaugcucugcacacu

SEQ ID NO: 2071661 - RNA, 19 nt, Artificial Sequence
  Description of Artificial Sequence: Synthetic oligonucleotide
  Antisense strand to SEQ ID NO: 2071660
agugugcagagcauuuccu

SEQ ID NO: 2071662 - RNA, 19 nt, Artificial Sequence
  Description of Artificial Sequence: Synthetic oligonucleotide
  Sense strand starting at position 666 of SEQ ID NO: 1881787
ggaaaugcucugcacacuu

SEQ ID NO: 2071663 - RNA, 19 nt, Artificial Sequence
  Description of Artificial Sequence: Synthetic oligonucleotide
  Antisense strand to SEQ ID NO: 2071662
aagugugcagagcauuucc

SEQ ID NO: 2071664 - RNA, 19 nt, Artificial Sequence
  Description of Artificial Sequence: Synthetic oligonucleotide
  Sense strand starting at position 760 of SEQ ID NO: 1881787
uggcacuugccugggagaa

SEQ ID NO: 2071665 - RNA, 19 nt, Artificial Sequence
  Description of Artificial Sequence: Synthetic oligonucleotide
  Antisense strand to SEQ ID NO: 2071664
uucucccaggcaagugcca

SEQ ID NO: 2071666 - RNA, 19 nt, Artificial Sequence
  Description of Artificial Sequence: Synthetic oligonucleotide
  Sense strand starting at position 761 of SEQ ID NO: 1881787
ggcacuugccugggagaaa

SEQ ID NO: 2071667 - RNA, 19 nt, Artificial Sequence
  Description of Artificial Sequence: Synthetic oligonucleotide
  Antisense strand to SEQ ID NO: 2071666
uuucucccaggcaagugcc

SEQ ID NO: 2071668 - RNA, 19 nt, Artificial Sequence
  Description of Artificial Sequence: Synthetic oligonucleotide
  Sense strand starting at position 965 of SEQ ID NO: 1881787
cugacaucuccggaagcca

SEQ ID NO: 2071669 - RNA, 19 nt, Artificial Sequence
  Description of Artificial Sequence: Synthetic oligonucleotide
  Antisense strand to SEQ ID NO: 2071668
uggcuuccggagaugucag

SEQ ID NO: 2071670 - RNA, 19 nt, Artificial Sequence
  Description of Artificial Sequence: Synthetic oligonucleotide
  Sense strand starting at position 1223 of SEQ ID NO: 1881787
caacucauuggcuggcaga

SEQ ID NO: 2071671 - RNA, 19 nt, Artificial Sequence
  Description of Artificial Sequence: Synthetic oligonucleotide
  Antisense strand to SEQ ID NO: 2071670
ucugccagccaaugaguug

SEQ ID NO: 2071672 - RNA, 19 nt, Artificial Sequence
  Description of Artificial Sequence: Synthetic oligonucleotide
  Sense strand starting at position 1244 of SEQ ID NO: 1881787
cugucagagaggugccauu

SEQ ID NO: 2071673 - RNA, 19 nt, Artificial Sequence
  Description of Artificial Sequence: Synthetic oligonucleotide
  Antisense strand to SEQ ID NO: 2071672
aauggcaccucucugacag

SEQ ID NO: 2071674 - RNA, 19 nt, Artificial Sequence
  Description of Artificial Sequence: Synthetic oligonucleotide
  Sense strand starting at position 1309 of SEQ ID NO: 1881787
ugagaauguuaagcacauc

SEQ ID NO: 2071675 - RNA, 19 nt, Artificial Sequence
  Description of Artificial Sequence: Synthetic oligonucleotide
  Antisense strand to SEQ ID NO: 2071674
gaugugcuuaacauucuca

SEQ ID NO: 2071676 - RNA, 19 nt, Artificial Sequence
  Description of Artificial Sequence: Synthetic oligonucleotide
  Sense strand starting at position 1321 of SEQ ID NO: 1881787
gcacauccuccuuggugaa

SEQ ID NO: 2071677 - RNA, 19 nt, Artificial Sequence
  Description of Artificial Sequence: Synthetic oligonucleotide
  Antisense strand to SEQ ID NO: 2071676
uucaccaaggaggaugugc

SEQ ID NO: 2071678 - RNA, 19 nt, Artificial Sequence
  Description of Artificial Sequence: Synthetic oligonucleotide
  Sense strand starting at position 1323 of SEQ ID NO: 1881787
acauccuccuuggugaaua

SEQ ID NO: 2071679 - RNA, 19 nt, Artificial Sequence
  Description of Artificial Sequence: Synthetic oligonucleotide
  Antisense strand to SEQ ID NO: 2071678
uauucaccaaggaggaugu

SEQ ID NO: 2071680 - RNA, 19 nt, Artificial Sequence
  Description of Artificial Sequence: Synthetic oligonucleotide
  Sense strand starting at position 1398 of SEQ ID NO: 1881787
uaggaauuccuagguugcu

SEQ ID NO: 2071681 - RNA, 19 nt, Artificial Sequence
  Description of Artificial Sequence: Synthetic oligonucleotide
  Antisense strand to SEQ ID NO: 2071680
agcaaccuaggaauuccua

SEQ ID NO: 2071682 - RNA, 19 nt, Artificial Sequence
  Description of Artificial Sequence: Synthetic oligonucleotide
  Sense strand starting at position 1399 of SEQ ID NO: 1881787
aggaauuccuagguugcua

SEQ ID NO: 2071683 - RNA, 19 nt, Artificial Sequence
  Description of Artificial Sequence: Synthetic oligonucleotide
  Antisense strand to SEQ ID NO: 2071682
uagcaaccuaggaauuccu

SEQ ID NO: 2071684 - RNA, 19 nt, Artificial Sequence
  Description of Artificial Sequence: Synthetic oligonucleotide
  Sense strand starting at position 1411 of SEQ ID NO: 1881787
guugcuacuccucauguga

SEQ ID NO: 2071685 - RNA, 19 nt, Artificial Sequence
  Description of Artificial Sequence: Synthetic oligonucleotide
  Antisense strand to SEQ ID NO: 2071684
ucacaugaggaguagcaac

SEQ ID NO: 2071686 - RNA, 19 nt, Artificial Sequence
  Description of Artificial Sequence: Synthetic oligonucleotide
  Sense strand starting at position 1455 of SEQ ID NO: 1881787
gcccauggugcagaggauu

SEQ ID NO: 2071687 - RNA, 19 nt, Artificial Sequence
  Description of Artificial Sequence: Synthetic oligonucleotide
  Antisense strand to SEQ ID NO: 2071686
aauccucugcaccaugggc

SEQ ID NO: 2071688 - RNA, 19 nt, Artificial Sequence
  Description of Artificial Sequence: Synthetic oligonucleotide
  Sense strand starting at position 1467 of SEQ ID NO: 1881787
gaggauuuguguuagaaca

SEQ ID NO: 2071689 - RNA, 19 nt, Artificial Sequence
  Description of Artificial Sequence: Synthetic oligonucleotide
  Antisense strand to SEQ ID NO: 2071688
uguucuaacacaaauccuc

SEQ ID NO: 2071690 - RNA, 19 nt, Artificial Sequence
  Description of Artificial Sequence: Synthetic oligonucleotide
  Sense strand starting at position 1577 of SEQ ID NO: 1881787
ugggucuugcacuaacaca

SEQ ID NO: 2071691 - RNA, 19 nt, Artificial Sequence
  Description of Artificial Sequence: Synthetic oligonucleotide
  Antisense strand to SEQ ID NO: 2071690
uguguuagugcaagaccca

SEQ ID NO: 2071692 - RNA, 19 nt, Artificial Sequence
  Description of Artificial Sequence: Synthetic oligonucleotide
  Sense strand starting at position 1648 of SEQ ID NO: 1881787
aggacaauuucccacaaga

SEQ ID NO: 2071693 - RNA, 19 nt, Artificial Sequence
  Description of Artificial Sequence: Synthetic oligonucleotide
  Antisense strand to SEQ ID NO: 2071692
ucuugugggaaauuguccu

SEQ ID NO: 2071694 - RNA, 19 nt, Artificial Sequence
  Description of Artificial Sequence: Synthetic oligonucleotide
  Sense strand starting at position 1733 of SEQ ID NO: 1881787
auggaaaggcucuggaauu

SEQ ID NO: 2071695 - RNA, 19 nt, Artificial Sequence
  Description of Artificial Sequence: Synthetic oligonucleotide
  Antisense strand to SEQ ID NO: 2071694
aauuccagagccuuuccau

SEQ ID NO: 2071696 - RNA, 19 nt, Artificial Sequence
  Description of Artificial Sequence: Synthetic oligonucleotide
  Sense strand starting at position 1776 of SEQ ID NO: 1881787
gaaagcaugugucuccuga

SEQ ID NO: 2071697 - RNA, 19 nt, Artificial Sequence
  Description of Artificial Sequence: Synthetic oligonucleotide
  Antisense strand to SEQ ID NO: 2071696
ucaggagacacaugcuuuc

SEQ ID NO: 2071698 - RNA, 19 nt, Artificial Sequence
  Description of Artificial Sequence: Synthetic oligonucleotide
  Sense strand starting at position 1778 of SEQ ID NO: 1881787
aagcaugugucuccugaga

SEQ ID NO: 2071699 - RNA, 19 nt, Artificial Sequence
  Description of Artificial Sequence: Synthetic oligonucleotide
  Antisense strand to SEQ ID NO: 2071698
ucucaggagacacaugcuu

SEQ ID NO: 2071700 - RNA, 19 nt, Artificial Sequence
  Description of Artificial Sequence: Synthetic oligonucleotide
  Sense strand starting at position 1962 of SEQ ID NO: 1881787
aguggaggcucuguccaua

SEQ ID NO: 2071701 - RNA, 19 nt, Artificial Sequence
  Description of Artificial Sequence: Synthetic oligonucleotide
  Antisense strand to SEQ ID NO: 2071700
uauggacagagccuccacu

SEQ ID NO: 2071702 - RNA, 19 nt, Artificial Sequence
  Description of Artificial Sequence: Synthetic oligonucleotide
  Sense strand starting at position 2304 of SEQ ID NO: 1881787
gguucuccuuucccaugau

SEQ ID NO: 2071703 - RNA, 19 nt, Artificial Sequence
  Description of Artificial Sequence: Synthetic oligonucleotide
  Antisense strand to SEQ ID NO: 2071702
aucaugggaaaggagaacc

SEQ ID NO: 2071704 - RNA, 19 nt, Artificial Sequence
  Description of Artificial Sequence: Synthetic oligonucleotide
  Sense strand starting at position 2396 of SEQ ID NO: 1881787
cagggaucccaaugcagau

SEQ ID NO: 2071705 - RNA, 19 nt, Artificial Sequence
  Description of Artificial Sequence: Synthetic oligonucleotide
  Antisense strand to SEQ ID NO: 2071704
aucugcauugggaucccug

SEQ ID NO: 2071706 - RNA, 19 nt, Artificial Sequence
  Description of Artificial Sequence: Synthetic oligonucleotide
  Sense strand starting at position 2438 of SEQ ID NO: 1881787
aggcccuauacgcaugauu

SEQ ID NO: 2071707 - RNA, 19 nt, Artificial Sequence
  Description of Artificial Sequence: Synthetic oligonucleotide
  Antisense strand to SEQ ID NO: 2071706
aaucaugcguauagggccu

SEQ ID NO: 2071708 - RNA, 19 nt, Artificial Sequence
  Description of Artificial Sequence: Synthetic oligonucleotide
  Sense strand starting at position 2441 of SEQ ID NO: 1881787
cccuauacgcaugauuauu

SEQ ID NO: 2071709 - RNA, 19 nt, Artificial Sequence
  Description of Artificial Sequence: Synthetic oligonucleotide
  Antisense strand to SEQ ID NO: 2071708
aauaaucaugcguauaggg

SEQ ID NO: 2071710 - RNA, 19 nt, Artificial Sequence
  Description of Artificial Sequence: Synthetic oligonucleotide
  Sense strand starting at position 2443 of SEQ ID NO: 1881787
cuauacgcaugauuauuau

SEQ ID NO: 2071711 - RNA, 19 nt, Artificial Sequence
  Description of Artificial Sequence: Synthetic oligonucleotide
  Antisense strand to SEQ ID NO: 2071710
auaauaaucaugcguauag

SEQ ID NO: 2071712 - RNA, 19 nt, Artificial Sequence
  Description of Artificial Sequence: Synthetic oligonucleotide
  Sense strand starting at position 2826 of SEQ ID NO: 1881787
cuauauugcucagucugga

SEQ ID NO: 2071713 - RNA, 19 nt, Artificial Sequence
  Description of Artificial Sequence: Synthetic oligonucleotide
  Antisense strand to SEQ ID NO: 2071712
uccagacugagcaauauag

SEQ ID NO: 2071714 - RNA, 19 nt, Artificial Sequence
  Description of Artificial Sequence: Synthetic oligonucleotide
  Sense strand starting at position 3090 of SEQ ID NO: 1881787
ucaauauuccuaggaccug

SEQ ID NO: 2071715 - RNA, 19 nt, Artificial Sequence
  Description of Artificial Sequence: Synthetic oligonucleotide
  Antisense strand to SEQ ID NO: 2071714
cagguccuaggaauauuga

SEQ ID NO: 2071716 - RNA, 19 nt, Artificial Sequence
  Description of Artificial Sequence: Synthetic oligonucleotide
  Sense strand starting at position 3128 of SEQ ID NO: 1881787
gcagguccucagcacauau

SEQ ID NO: 2071717 - RNA, 19 nt, Artificial Sequence
  Description of Artificial Sequence: Synthetic oligonucleotide
  Antisense strand to SEQ ID NO: 2071716
auaugugcugaggaccugc

SEQ ID NO: 2071718 - RNA, 19 nt, Artificial Sequence
  Description of Artificial Sequence: Synthetic oligonucleotide
  Sense strand starting at position 3417 of SEQ ID NO: 1881787
cuaugaucagagugagacu

SEQ ID NO: 2071719 - RNA, 19 nt, Artificial Sequence
  Description of Artificial Sequence: Synthetic oligonucleotide
  Antisense strand to SEQ ID NO: 2071718
agucucacucugaucauag

SEQ ID NO: 2071720 - RNA, 19 nt, Artificial Sequence
  Description of Artificial Sequence: Synthetic oligonucleotide
  Sense strand starting at position 3478 of SEQ ID NO: 1881787
agaggaaugucagaaacaa

SEQ ID NO: 2071721 - RNA, 19 nt, Artificial Sequence
  Description of Artificial Sequence: Synthetic oligonucleotide
  Antisense strand to SEQ ID NO: 2071720
uuguuucugacauuccucu

SEQ ID NO: 2071722 - RNA, 19 nt, Artificial Sequence
  Description of Artificial Sequence: Synthetic oligonucleotide
  Sense strand starting at position 3553 of SEQ ID NO: 1881787
gccuuccagucuuugacaa

SEQ ID NO: 2071723 - RNA, 19 nt, Artificial Sequence
  Description of Artificial Sequence: Synthetic oligonucleotide
  Antisense strand to SEQ ID NO: 2071722
uugucaaagacuggaaggc

SEQ ID NO: 2071724 - RNA, 19 nt, Artificial Sequence
  Description of Artificial Sequence: Synthetic oligonucleotide
  Sense strand starting at position 3560 of SEQ ID NO: 1881787
agucuuugacaauaugcau

SEQ ID NO: 2071725 - RNA, 19 nt, Artificial Sequence
  Description of Artificial Sequence: Synthetic oligonucleotide
  Antisense strand to SEQ ID NO: 2071724
augcauauugucaaagacu

SEQ ID NO: 2071726 - RNA, 19 nt, Artificial Sequence
  Description of Artificial Sequence: Synthetic oligonucleotide
  Sense strand starting at position 3675 of SEQ ID NO: 1881787
acuggaaugcaguguaaga

SEQ ID NO: 2071727 - RNA, 19 nt, Artificial Sequence
  Description of Artificial Sequence: Synthetic oligonucleotide
  Antisense strand to SEQ ID NO: 2071726
ucuuacacugcauuccagu

SEQ ID NO: 2071728 - RNA, 19 nt, Artificial Sequence
  Description of Artificial Sequence: Synthetic oligonucleotide
  Sense strand starting at position 3955 of SEQ ID NO: 1881787
uugaaacagucacaagaaa

SEQ ID NO: 2071729 - RNA, 19 nt, Artificial Sequence
  Description of Artificial Sequence: Synthetic oligonucleotide
  Antisense strand to SEQ ID NO: 2071728
uuucuugugacuguuucaa

SEQ ID NO: 2071730 - RNA, 19 nt, Artificial Sequence
  Description of Artificial Sequence: Synthetic oligonucleotide
  Sense strand starting at position 5 of SEQ ID NO: 1881788
ugacaagauugggcuggau

SEQ ID NO: 2071731 - RNA, 19 nt, Artificial Sequence
  Description of Artificial Sequence: Synthetic oligonucleotide
  Antisense strand to SEQ ID NO: 2071730
auccagcccaaucuuguca

SEQ ID NO: 2071732 - RNA, 19 nt, Artificial Sequence
  Description of Artificial Sequence: Synthetic oligonucleotide
  Sense strand starting at position 198 of SEQ ID NO: 1881788
gaccuuuguugaguacaug

SEQ ID NO: 2071733 - RNA, 19 nt, Artificial Sequence
  Description of Artificial Sequence: Synthetic oligonucleotide
  Antisense strand to SEQ ID NO: 2071732
cauguacucaacaaagguc

SEQ ID NO: 2071734 - RNA, 19 nt, Artificial Sequence
  Description of Artificial Sequence: Synthetic oligonucleotide
  Sense strand starting at position 199 of SEQ ID NO: 1881788
accuuuguugaguacauga

SEQ ID NO: 2071735 - RNA, 19 nt, Artificial Sequence
  Description of Artificial Sequence: Synthetic oligonucleotide
  Antisense strand to SEQ ID NO: 2071734
ucauguacucaacaaaggu

SEQ ID NO: 2071736 - RNA, 19 nt, Artificial Sequence
  Description of Artificial Sequence: Synthetic oligonucleotide
  Sense strand starting at position 213 of SEQ ID NO: 1881788
caugaaguguuagugacau

SEQ ID NO: 2071737 - RNA, 19 nt, Artificial Sequence
  Description of Artificial Sequence: Synthetic oligonucleotide
  Antisense strand to SEQ ID NO: 2071736
augucacuaacacuucaug

SEQ ID NO: 2071738 - RNA, 19 nt, Artificial Sequence
  Description of Artificial Sequence: Synthetic oligonucleotide
  Sense strand starting at position 219 of SEQ ID NO: 1881788
guguuagugacauggagga

SEQ ID NO: 2071739 - RNA, 19 nt, Artificial Sequence
  Description of Artificial Sequence: Synthetic oligonucleotide
  Antisense strand to SEQ ID NO: 2071738
uccuccaugucacuaacac

SEQ ID NO: 2071740 - RNA, 19 nt, Artificial Sequence
  Description of Artificial Sequence: Synthetic oligonucleotide
  Sense strand starting at position 239 of SEQ ID NO: 1881788
gggaaaggauaugaagaaa

SEQ ID NO: 2071741 - RNA, 19 nt, Artificial Sequence
  Description of Artificial Sequence: Synthetic oligonucleotide
  Antisense strand to SEQ ID NO: 2071740
uuucuucauauccuuuccc

SEQ ID NO: 2071742 - RNA, 19 nt, Artificial Sequence
  Description of Artificial Sequence: Synthetic oligonucleotide
  Sense strand starting at position 268 of SEQ ID NO: 1881788
gguuucugcccucaaagga

SEQ ID NO: 2071743 - RNA, 19 nt, Artificial Sequence
  Description of Artificial Sequence: Synthetic oligonucleotide
  Antisense strand to SEQ ID NO: 2071742
uccuuugagggcagaaacc

SEQ ID NO: 2071744 - RNA, 19 nt, Artificial Sequence
  Description of Artificial Sequence: Synthetic oligonucleotide
  Sense strand starting at position 288 of SEQ ID NO: 1881788
uuacaaucgaguugguaaa

SEQ ID NO: 2071745 - RNA, 19 nt, Artificial Sequence
  Description of Artificial Sequence: Synthetic oligonucleotide
  Antisense strand to SEQ ID NO: 2071744
uuuaccaacucgauuguaa

SEQ ID NO: 2071746 - RNA, 19 nt, Artificial Sequence
  Description of Artificial Sequence: Synthetic oligonucleotide
  Sense strand starting at position 290 of SEQ ID NO: 1881788
acaaucgaguugguaaaca

SEQ ID NO: 2071747 - RNA, 19 nt, Artificial Sequence
  Description of Artificial Sequence: Synthetic oligonucleotide
  Antisense strand to SEQ ID NO: 2071746
uguuuaccaacucgauugu

SEQ ID NO: 2071748 - RNA, 19 nt, Artificial Sequence
  Description of Artificial Sequence: Synthetic oligonucleotide
  Sense strand starting at position 363 of SEQ ID NO: 1881788
guguguugacuuuaucaag

SEQ ID NO: 2071749 - RNA, 19 nt, Artificial Sequence
  Description of Artificial Sequence: Synthetic oligonucleotide
  Antisense strand to SEQ ID NO: 2071748
cuugauaaagucaacacac

SEQ ID NO: 2071750 - RNA, 19 nt, Artificial Sequence
  Description of Artificial Sequence: Synthetic oligonucleotide
  Sense strand starting at position 396 of SEQ ID NO: 1881788
gcugauuggaggcauauau

SEQ ID NO: 2071751 - RNA, 19 nt, Artificial Sequence
  Description of Artificial Sequence: Synthetic oligonucleotide
  Antisense strand to SEQ ID NO: 2071750
auauaugccuccaaucagc

SEQ ID NO: 2071752 - RNA, 19 nt, Artificial Sequence
  Description of Artificial Sequence: Synthetic oligonucleotide
  Sense strand starting at position 449 of SEQ ID NO: 1881788
aggaauguccuacaagucu

SEQ ID NO: 2071753 - RNA, 19 nt, Artificial Sequence
  Description of Artificial Sequence: Synthetic oligonucleotide
  Antisense strand to SEQ ID NO: 2071752
agacuuguaggacauuccu

SEQ ID NO: 2071754 - RNA, 19 nt, Artificial Sequence
  Description of Artificial Sequence: Synthetic oligonucleotide
  Sense strand starting at position 795 of SEQ ID NO: 1881788
gauuaaguagcaugaugua

SEQ ID NO: 2071755 - RNA, 19 nt, Artificial Sequence
  Description of Artificial Sequence: Synthetic oligonucleotide
  Antisense strand to SEQ ID NO: 2071754
uacaucaugcuacuuaauc

SEQ ID NO: 2071756 - RNA, 19 nt, Artificial Sequence
  Description of Artificial Sequence: Synthetic oligonucleotide
  Sense strand starting at position 800 of SEQ ID NO: 1881788
aguagcaugauguagucaa

SEQ ID NO: 2071757 - RNA, 19 nt, Artificial Sequence
  Description of Artificial Sequence: Synthetic oligonucleotide
  Antisense strand to SEQ ID NO: 2071756
uugacuacaucaugcuacu

SEQ ID NO: 2071758 - RNA, 19 nt, Artificial Sequence
  Description of Artificial Sequence: Synthetic oligonucleotide
  Sense strand starting at position 960 of SEQ ID NO: 1881788
acuuaagcgauguaugaaa

SEQ ID NO: 2071759 - RNA, 19 nt, Artificial Sequence
  Description of Artificial Sequence: Synthetic oligonucleotide
  Antisense strand to SEQ ID NO: 2071758
uuucauacaucgcuuaagu

SEQ ID NO: 2071760 - RNA, 19 nt, Artificial Sequence
  Description of Artificial Sequence: Synthetic oligonucleotide
  Sense strand starting at position 1062 of SEQ ID NO: 1881788
gcaauaggcgauuaggaga

SEQ ID NO: 2071761 - RNA, 19 nt, Artificial Sequence
  Description of Artificial Sequence: Synthetic oligonucleotide
  Antisense strand to SEQ ID NO: 2071760
ucuccuaaucgccuauugc

SEQ ID NO: 2071762 - RNA, 19 nt, Artificial Sequence
  Description of Artificial Sequence: Synthetic oligonucleotide
  Sense strand starting at position 1291 of SEQ ID NO: 1881788
ucaauaaaucauggugaug

SEQ ID NO: 2071763 - RNA, 19 nt, Artificial Sequence
  Description of Artificial Sequence: Synthetic oligonucleotide
  Antisense strand to SEQ ID NO: 2071762
caucaccaugauuuauuga

SEQ ID NO: 2071764 - RNA, 19 nt, Artificial Sequence
  Description of Artificial Sequence: Synthetic oligonucleotide
  Sense strand starting at position 1425 of SEQ ID NO: 1881788
aggaaaucauaggauaaag

SEQ ID NO: 2071765 - RNA, 19 nt, Artificial Sequence
  Description of Artificial Sequence: Synthetic oligonucleotide
  Antisense strand to SEQ ID NO: 2071764
cuuuauccuaugauuuccu

SEQ ID NO: 2071766 - RNA, 19 nt, Artificial Sequence
  Description of Artificial Sequence: Synthetic oligonucleotide
  Sense strand starting at position 1448 of SEQ ID NO: 1881788
agagaaucuuaaccuuguu

SEQ ID NO: 2071767 - RNA, 19 nt, Artificial Sequence
  Description of Artificial Sequence: Synthetic oligonucleotide
  Antisense strand to SEQ ID NO: 2071766
aacaagguuaagauucucu

SEQ ID NO: 2071768 - RNA, 19 nt, Artificial Sequence
  Description of Artificial Sequence: Synthetic oligonucleotide
  Sense strand starting at position 1451 of SEQ ID NO: 1881788
gaaucuuaaccuuguugag

SEQ ID NO: 2071769 - RNA, 19 nt, Artificial Sequence
  Description of Artificial Sequence: Synthetic oligonucleotide
  Antisense strand to SEQ ID NO: 2071768
cucaacaagguuaagauuc

SEQ ID NO: 2071770 - RNA, 19 nt, Artificial Sequence
  Description of Artificial Sequence: Synthetic oligonucleotide
  Sense strand starting at position 1453 of SEQ ID NO: 1881788
aucuuaaccuuguugagaa

SEQ ID NO: 2071771 - RNA, 19 nt, Artificial Sequence
  Description of Artificial Sequence: Synthetic oligonucleotide
  Antisense strand to SEQ ID NO: 2071770
uucucaacaagguuaagau

SEQ ID NO: 2071772 - RNA, 19 nt, Artificial Sequence
  Description of Artificial Sequence: Synthetic oligonucleotide
  Sense strand starting at position 1463 of SEQ ID NO: 1881788
uguugagaauguguuaaua

SEQ ID NO: 2071773 - RNA, 19 nt, Artificial Sequence
  Description of Artificial Sequence: Synthetic oligonucleotide
  Antisense strand to SEQ ID NO: 2071772
uauuaacacauucucaaca

SEQ ID NO: 2071774 - RNA, 19 nt, Artificial Sequence
  Description of Artificial Sequence: Synthetic oligonucleotide
  Sense strand starting at position 2451 of SEQ ID NO: 1881788
ucaguugacagguggacua

SEQ ID NO: 2071775 - RNA, 19 nt, Artificial Sequence
  Description of Artificial Sequence: Synthetic oligonucleotide
  Antisense strand to SEQ ID NO: 2071774
uaguccaccugucaacuga

SEQ ID NO: 2071776 - RNA, 19 nt, Artificial Sequence
  Description of Artificial Sequence: Synthetic oligonucleotide
  Sense strand starting at position 2626 of SEQ ID NO: 1881788
ucuggucugggaggagauu

SEQ ID NO: 2071777 - RNA, 19 nt, Artificial Sequence
  Description of Artificial Sequence: Synthetic oligonucleotide
  Antisense strand to SEQ ID NO: 2071776
aaucuccucccagaccaga

SEQ ID NO: 2071778 - RNA, 19 nt, Artificial Sequence
  Description of Artificial Sequence: Synthetic oligonucleotide
  Sense strand starting at position 2839 of SEQ ID NO: 1881788
guccuugugaaugggauca

SEQ ID NO: 2071779 - RNA, 19 nt, Artificial Sequence
  Description of Artificial Sequence: Synthetic oligonucleotide
  Antisense strand to SEQ ID NO: 2071778
ugaucccauucacaaggac

SEQ ID NO: 2071780 - RNA, 19 nt, Artificial Sequence
  Description of Artificial Sequence: Synthetic oligonucleotide
  Sense strand starting at position 3076 of SEQ ID NO: 1881788
gaguuugucuuccugagaa

SEQ ID NO: 2071781 - RNA, 19 nt, Artificial Sequence
  Description of Artificial Sequence: Synthetic oligonucleotide
  Antisense strand to SEQ ID NO: 2071780
uucucaggaagacaaacuc

SEQ ID NO: 2071782 - RNA, 19 nt, Artificial Sequence
  Description of Artificial Sequence: Synthetic oligonucleotide
  Sense strand starting at position 3078 of SEQ ID NO: 1881788
guuugucuuccugagaaug

SEQ ID NO: 2071783 - RNA, 19 nt, Artificial Sequence
  Description of Artificial Sequence: Synthetic oligonucleotide
  Antisense strand to SEQ ID NO: 2071782
cauucucaggaagacaaac

SEQ ID NO: 2071784 - RNA, 19 nt, Artificial Sequence
  Description of Artificial Sequence: Synthetic oligonucleotide
  Sense strand starting at position 3088 of SEQ ID NO: 1881788
cugagaauggugcaugacu

SEQ ID NO: 2071785 - RNA, 19 nt, Artificial Sequence
  Description of Artificial Sequence: Synthetic oligonucleotide
  Antisense strand to SEQ ID NO: 2071784
agucaugcaccauucucag

SEQ ID NO: 2071786 - RNA, 19 nt, Artificial Sequence
  Description of Artificial Sequence: Synthetic oligonucleotide
  Sense strand starting at position 3090 of SEQ ID NO: 1881788
gagaauggugcaugacuua

SEQ ID NO: 2071787 - RNA, 19 nt, Artificial Sequence
  Description of Artificial Sequence: Synthetic oligonucleotide
  Antisense strand to SEQ ID NO: 2071786
uaagucaugcaccauucuc

SEQ ID NO: 2071788 - RNA, 19 nt, Artificial Sequence
  Description of Artificial Sequence: Synthetic oligonucleotide
  Sense strand starting at position 3102 of SEQ ID NO: 1881788
ugacuuagcuuauucugaa

SEQ ID NO: 2071789 - RNA, 19 nt, Artificial Sequence
  Description of Artificial Sequence: Synthetic oligonucleotide
  Antisense strand to SEQ ID NO: 2071788
uucagaauaagcuaaguca

SEQ ID NO: 2071790 - RNA, 19 nt, Artificial Sequence
  Description of Artificial Sequence: Synthetic oligonucleotide
  Sense strand starting at position 3198 of SEQ ID NO: 1881788
ccaaacacuggaugucuaa

SEQ ID NO: 2071791 - RNA, 19 nt, Artificial Sequence
  Description of Artificial Sequence: Synthetic oligonucleotide
  Antisense strand to SEQ ID NO: 2071790
uuagacauccaguguuugg

SEQ ID NO: 2071792 - RNA, 19 nt, Artificial Sequence
  Description of Artificial Sequence: Synthetic oligonucleotide
  Sense strand starting at position 3449 of SEQ ID NO: 1881788
guggauucugcggaugaca

SEQ ID NO: 2071793 - RNA, 19 nt, Artificial Sequence
  Description of Artificial Sequence: Synthetic oligonucleotide
  Antisense strand to SEQ ID NO: 2071792
ugucauccgcagaauccac

SEQ ID NO: 2071794 - RNA, 19 nt, Artificial Sequence
  Description of Artificial Sequence: Synthetic oligonucleotide
  Sense strand starting at position 3458 of SEQ ID NO: 1881788
gcggaugacaguugaauaa

SEQ ID NO: 2071795 - RNA, 19 nt, Artificial Sequence
  Description of Artificial Sequence: Synthetic oligonucleotide
  Antisense strand to SEQ ID NO: 2071794
uuauucaacugucauccgc

SEQ ID NO: 2071796 - RNA, 19 nt, Artificial Sequence
  Description of Artificial Sequence: Synthetic oligonucleotide
  Sense strand starting at position 3502 of SEQ ID NO: 1881788
agaugaugcucuguauuga

SEQ ID NO: 2071797 - RNA, 19 nt, Artificial Sequence
  Description of Artificial Sequence: Synthetic oligonucleotide
  Antisense strand to SEQ ID NO: 2071796
ucaauacagagcaucaucu

SEQ ID NO: 2071798 - RNA, 19 nt, Artificial Sequence
  Description of Artificial Sequence: Synthetic oligonucleotide
  Sense strand starting at position 3503 of SEQ ID NO: 1881788
gaugaugcucuguauugac

SEQ ID NO: 2071799 - RNA, 19 nt, Artificial Sequence
  Description of Artificial Sequence: Synthetic oligonucleotide
  Antisense strand to SEQ ID NO: 2071798
gucaauacagagcaucauc

SEQ ID NO: 2071800 - RNA, 19 nt, Artificial Sequence
  Description of Artificial Sequence: Synthetic oligonucleotide
  Sense strand starting at position 3559 of SEQ ID NO: 1881788
agauuuaguuguccugcua

SEQ ID NO: 2071801 - RNA, 19 nt, Artificial Sequence
  Description of Artificial Sequence: Synthetic oligonucleotide
  Antisense strand to SEQ ID NO: 2071800
uagcaggacaacuaaaucu

SEQ ID NO: 2071802 - RNA, 19 nt, Artificial Sequence
  Description of Artificial Sequence: Synthetic oligonucleotide
  Sense strand starting at position 3627 of SEQ ID NO: 1881788
uuugguugugggaguguuu

SEQ ID NO: 2071803 - RNA, 19 nt, Artificial Sequence
  Description of Artificial Sequence: Synthetic oligonucleotide
  Antisense strand to SEQ ID NO: 2071802
aaacacucccacaaccaaa

SEQ ID NO: 2071804 - RNA, 19 nt, Artificial Sequence
  Description of Artificial Sequence: Synthetic oligonucleotide
  Sense strand starting at position 3681 of SEQ ID NO: 1881788
agugaaauacuuuguacuu

SEQ ID NO: 2071805 - RNA, 19 nt, Artificial Sequence
  Description of Artificial Sequence: Synthetic oligonucleotide
  Antisense strand to SEQ ID NO: 2071804
aaguacaaaguauuucacu

SEQ ID NO: 2071806 - RNA, 19 nt, Artificial Sequence
  Description of Artificial Sequence: Synthetic oligonucleotide
  Sense strand starting at position 3897 of SEQ ID NO: 1881788
auauauguaucccuaagua

SEQ ID NO: 2071807 - RNA, 19 nt, Artificial Sequence
  Description of Artificial Sequence: Synthetic oligonucleotide
  Antisense strand to SEQ ID NO: 2071806
uacuuagggauacauauau

SEQ ID NO: 2071808 - RNA, 19 nt, Artificial Sequence
  Description of Artificial Sequence: Synthetic oligonucleotide
  Sense strand starting at position 3901 of SEQ ID NO: 1881788
auguaucccuaaguaauau

SEQ ID NO: 2071809 - RNA, 19 nt, Artificial Sequence
  Description of Artificial Sequence: Synthetic oligonucleotide
  Antisense strand to SEQ ID NO: 2071808
auauuacuuagggauacau

SEQ ID NO: 2071810 - RNA, 19 nt, Artificial Sequence
  Description of Artificial Sequence: Synthetic oligonucleotide
  Sense strand starting at position 401 of SEQ ID NO: 1881789
gucggaguaagcuagauaa

SEQ ID NO: 2071811 - RNA, 19 nt, Artificial Sequence
  Description of Artificial Sequence: Synthetic oligonucleotide
  Antisense strand to SEQ ID NO: 2071810
uuaucuagcuuacuccgac

SEQ ID NO: 2071812 - RNA, 19 nt, Artificial Sequence
  Description of Artificial Sequence: Synthetic oligonucleotide
  Sense strand starting at position 403 of SEQ ID NO: 1881789
cggaguaagcuagauaaug

SEQ ID NO: 2071813 - RNA, 19 nt, Artificial Sequence
  Description of Artificial Sequence: Synthetic oligonucleotide
  Antisense strand to SEQ ID NO: 2071812
cauuaucuagcuuacuccg

SEQ ID NO: 2071814 - RNA, 19 nt, Artificial Sequence
  Description of Artificial Sequence: Synthetic oligonucleotide
  Sense strand starting at position 480 of SEQ ID NO: 1881789
acugccaugguagauuaua

SEQ ID NO: 2071815 - RNA, 19 nt, Artificial Sequence
  Description of Artificial Sequence: Synthetic oligonucleotide
  Antisense strand to SEQ ID NO: 2071814
uauaaucuaccauggcagu

SEQ ID NO: 2071816 - RNA, 19 nt, Artificial Sequence
  Description of Artificial Sequence: Synthetic oligonucleotide
  Sense strand starting at position 500 of SEQ ID NO: 1881789
gagacugaucucugaagca

SEQ ID NO: 2071817 - RNA, 19 nt, Artificial Sequence
  Description of Artificial Sequence: Synthetic oligonucleotide
  Antisense strand to SEQ ID NO: 2071816
ugcuucagagaucagucuc

SEQ ID NO: 2071818 - RNA, 19 nt, Artificial Sequence
  Description of Artificial Sequence: Synthetic oligonucleotide
  Sense strand starting at position 510 of SEQ ID NO: 1881789
ucugaagcaucuuuacuga

SEQ ID NO: 2071819 - RNA, 19 nt, Artificial Sequence
  Description of Artificial Sequence: Synthetic oligonucleotide
  Antisense strand to SEQ ID NO: 2071818
ucaguaaagaugcuucaga

SEQ ID NO: 2071820 - RNA, 19 nt, Artificial Sequence
  Description of Artificial Sequence: Synthetic oligonucleotide
  Sense strand starting at position 518 of SEQ ID NO: 1881789
aucuuuacugagugaccca

SEQ ID NO: 2071821 - RNA, 19 nt, Artificial Sequence
  Description of Artificial Sequence: Synthetic oligonucleotide
  Antisense strand to SEQ ID NO: 2071820
ugggucacucaguaaagau

SEQ ID NO: 2071822 - RNA, 19 nt, Artificial Sequence
  Description of Artificial Sequence: Synthetic oligonucleotide
  Sense strand starting at position 658 of SEQ ID NO: 1881789
gaacgagucacauggcaga

SEQ ID NO: 2071823 - RNA, 19 nt, Artificial Sequence
  Description of Artificial Sequence: Synthetic oligonucleotide
  Antisense strand to SEQ ID NO: 2071822
ucugccaugugacucguuc

SEQ ID NO: 2071824 - RNA, 19 nt, Artificial Sequence
  Description of Artificial Sequence: Synthetic oligonucleotide
  Sense strand starting at position 801 of SEQ ID NO: 1881789
agacuaaguuucuccaaag

SEQ ID NO: 2071825 - RNA, 19 nt, Artificial Sequence
  Description of Artificial Sequence: Synthetic oligonucleotide
  Antisense strand to SEQ ID NO: 2071824
cuuuggagaaacuuagucu

SEQ ID NO: 2071826 - RNA, 19 nt, Artificial Sequence
  Description of Artificial Sequence: Synthetic oligonucleotide
  Sense strand starting at position 887 of SEQ ID NO: 1881789
ggcaguucccacuaucaaa

SEQ ID NO: 2071827 - RNA, 19 nt, Artificial Sequence
  Description of Artificial Sequence: Synthetic oligonucleotide
  Antisense strand to SEQ ID NO: 2071826
uuugauagugggaacugcc

SEQ ID NO: 2071828 - RNA, 19 nt, Artificial Sequence
  Description of Artificial Sequence: Synthetic oligonucleotide
  Sense strand starting at position 915 of SEQ ID NO: 1881789
auguaaggaucucuaacau

SEQ ID NO: 2071829 - RNA, 19 nt, Artificial Sequence
  Description of Artificial Sequence: Synthetic oligonucleotide
  Antisense strand to SEQ ID NO: 2071828
auguuagagauccuuacau

SEQ ID NO: 2071830 - RNA, 19 nt, Artificial Sequence
  Description of Artificial Sequence: Synthetic oligonucleotide
  Sense strand starting at position 1056 of SEQ ID NO: 1881789
ugagcaaacugagcauuaa

SEQ ID NO: 2071831 - RNA, 19 nt, Artificial Sequence
  Description of Artificial Sequence: Synthetic oligonucleotide
  Antisense strand to SEQ ID NO: 2071830
uuaaugcucaguuugcuca

SEQ ID NO: 2071832 - RNA, 19 nt, Artificial Sequence
  Description of Artificial Sequence: Synthetic oligonucleotide
  Sense strand starting at position 1077 of SEQ ID NO: 1881789
agugucuuaguuuggauuu

SEQ ID NO: 2071833 - RNA, 19 nt, Artificial Sequence
  Description of Artificial Sequence: Synthetic oligonucleotide
  Antisense strand to SEQ ID NO: 2071832
aaauccaaacuaagacacu

SEQ ID NO: 2071834 - RNA, 19 nt, Artificial Sequence
  Description of Artificial Sequence: Synthetic oligonucleotide
  Sense strand starting at position 1162 of SEQ ID NO: 1881789
gggucaguaaugugaugag

SEQ ID NO: 2071835 - RNA, 19 nt, Artificial Sequence
  Description of Artificial Sequence: Synthetic oligonucleotide
  Antisense strand to SEQ ID NO: 2071834
cucaucacauuacugaccc

SEQ ID NO: 2071836 - RNA, 19 nt, Artificial Sequence
  Description of Artificial Sequence: Synthetic oligonucleotide
  Sense strand starting at position 1169 of SEQ ID NO: 1881789
uaaugugaugagugaguca

SEQ ID NO: 2071837 - RNA, 19 nt, Artificial Sequence
  Description of Artificial Sequence: Synthetic oligonucleotide
  Antisense strand to SEQ ID NO: 2071836
ugacucacucaucacauua

SEQ ID NO: 2071838 - RNA, 19 nt, Artificial Sequence
  Description of Artificial Sequence: Synthetic oligonucleotide
  Sense strand starting at position 1174 of SEQ ID NO: 1881789
ugaugagugagucaccacu

SEQ ID NO: 2071839 - RNA, 19 nt, Artificial Sequence
  Description of Artificial Sequence: Synthetic oligonucleotide
  Antisense strand to SEQ ID NO: 2071838
aguggugacucacucauca

SEQ ID NO: 2071840 - RNA, 19 nt, Artificial Sequence
  Description of Artificial Sequence: Synthetic oligonucleotide
  Sense strand starting at position 1309 of SEQ ID NO: 1881789
ugagacuuguucuugagau

SEQ ID NO: 2071841 - RNA, 19 nt, Artificial Sequence
  Description of Artificial Sequence: Synthetic oligonucleotide
  Antisense strand to SEQ ID NO: 2071840
aucucaagaacaagucuca

SEQ ID NO: 2071842 - RNA, 19 nt, Artificial Sequence
  Description of Artificial Sequence: Synthetic oligonucleotide
  Sense strand starting at position 1311 of SEQ ID NO: 1881789
agacuuguucuugagaugu

SEQ ID NO: 2071843 - RNA, 19 nt, Artificial Sequence
  Description of Artificial Sequence: Synthetic oligonucleotide
  Antisense strand to SEQ ID NO: 2071842
acaucucaagaacaagucu

SEQ ID NO: 2071844 - RNA, 19 nt, Artificial Sequence
  Description of Artificial Sequence: Synthetic oligonucleotide
  Sense strand starting at position 1741 of SEQ ID NO: 1881789
ugcuuucuccaugaaugaa

SEQ ID NO: 2071845 - RNA, 19 nt, Artificial Sequence
  Description of Artificial Sequence: Synthetic oligonucleotide
  Antisense strand to SEQ ID NO: 2071844
uucauucauggagaaagca

SEQ ID NO: 2071846 - RNA, 19 nt, Artificial Sequence
  Description of Artificial Sequence: Synthetic oligonucleotide
  Sense strand starting at position 2125 of SEQ ID NO: 1881789
gucaguuaugcuccugcca

SEQ ID NO: 2071847 - RNA, 19 nt, Artificial Sequence
  Description of Artificial Sequence: Synthetic oligonucleotide
  Antisense strand to SEQ ID NO: 2071846
uggcaggagcauaacugac

SEQ ID NO: 2071848 - RNA, 19 nt, Artificial Sequence
  Description of Artificial Sequence: Synthetic oligonucleotide
  Sense strand starting at position 2150 of SEQ ID NO: 1881789
cucuguggugucucgcaua

SEQ ID NO: 2071849 - RNA, 19 nt, Artificial Sequence
  Description of Artificial Sequence: Synthetic oligonucleotide
  Antisense strand to SEQ ID NO: 2071848
uaugcgagacaccacagag

SEQ ID NO: 2071850 - RNA, 19 nt, Artificial Sequence
  Description of Artificial Sequence: Synthetic oligonucleotide
  Sense strand starting at position 2261 of SEQ ID NO: 1881789
uggaauaaggcagguaaau

SEQ ID NO: 2071851 - RNA, 19 nt, Artificial Sequence
  Description of Artificial Sequence: Synthetic oligonucleotide
  Antisense strand to SEQ ID NO: 2071850
auuuaccugccuuauucca

SEQ ID NO: 2071852 - RNA, 19 nt, Artificial Sequence
  Description of Artificial Sequence: Synthetic oligonucleotide
  Sense strand starting at position 2273 of SEQ ID NO: 1881789
gguaaauaugacuguaaau

SEQ ID NO: 2071853 - RNA, 19 nt, Artificial Sequence
  Description of Artificial Sequence: Synthetic oligonucleotide
  Antisense strand to SEQ ID NO: 2071852
auuuacagucauauuuacc

SEQ ID NO: 2071854 - RNA, 19 nt, Artificial Sequence
  Description of Artificial Sequence: Synthetic oligonucleotide
  Sense strand starting at position 2285 of SEQ ID NO: 1881789
uguaaaugugcacacaaua

SEQ ID NO: 2071855 - RNA, 19 nt, Artificial Sequence
  Description of Artificial Sequence: Synthetic oligonucleotide
  Antisense strand to SEQ ID NO: 2071854
uauugugugcacauuuaca

SEQ ID NO: 2071856 - RNA, 19 nt, Artificial Sequence
  Description of Artificial Sequence: Synthetic oligonucleotide
  Sense strand starting at position 2471 of SEQ ID NO: 1881789
uuccacuccugaguaggaa

SEQ ID NO: 2071857 - RNA, 19 nt, Artificial Sequence
  Description of Artificial Sequence: Synthetic oligonucleotide
  Antisense strand to SEQ ID NO: 2071856
uuccuacucaggaguggaa

SEQ ID NO: 2071858 - RNA, 19 nt, Artificial Sequence
  Description of Artificial Sequence: Synthetic oligonucleotide
  Sense strand starting at position 2566 of SEQ ID NO: 1881789
gugucuuaucuggaaaugu

SEQ ID NO: 2071859 - RNA, 19 nt, Artificial Sequence
  Description of Artificial Sequence: Synthetic oligonucleotide
  Antisense strand to SEQ ID NO: 2071858
acauuuccagauaagacac

SEQ ID NO: 2071860 - RNA, 19 nt, Artificial Sequence
  Description of Artificial Sequence: Synthetic oligonucleotide
  Sense strand starting at position 2574 of SEQ ID NO: 1881789
ucuggaaauguguaccugu

SEQ ID NO: 2071861 - RNA, 19 nt, Artificial Sequence
  Description of Artificial Sequence: Synthetic oligonucleotide
  Antisense strand to SEQ ID NO: 2071860
acagguacacauuuccaga

SEQ ID NO: 2071862 - RNA, 19 nt, Artificial Sequence
  Description of Artificial Sequence: Synthetic oligonucleotide
  Sense strand starting at position 3091 of SEQ ID NO: 1881789
agaaacuucuggccacaga

SEQ ID NO: 2071863 - RNA, 19 nt, Artificial Sequence
  Description of Artificial Sequence: Synthetic oligonucleotide
  Antisense strand to SEQ ID NO: 2071862
ucuguggccagaaguuucu

SEQ ID NO: 2071864 - RNA, 19 nt, Artificial Sequence
  Description of Artificial Sequence: Synthetic oligonucleotide
  Sense strand starting at position 3337 of SEQ ID NO: 1881789
uucuuacauggcuaagagu

SEQ ID NO: 2071865 - RNA, 19 nt, Artificial Sequence
  Description of Artificial Sequence: Synthetic oligonucleotide
  Antisense strand to SEQ ID NO: 2071864
acucuuagccauguaagaa

SEQ ID NO: 2071866 - RNA, 19 nt, Artificial Sequence
  Description of Artificial Sequence: Synthetic oligonucleotide
  Sense strand starting at position 3348 of SEQ ID NO: 1881789
cuaagaguuuguuugagga

SEQ ID NO: 2071867 - RNA, 19 nt, Artificial Sequence
  Description of Artificial Sequence: Synthetic oligonucleotide
  Antisense strand to SEQ ID NO: 2071866
uccucaaacaaacucuuag

SEQ ID NO: 2071868 - RNA, 19 nt, Artificial Sequence
  Description of Artificial Sequence: Synthetic oligonucleotide
  Sense strand starting at position 3368 of SEQ ID NO: 1881789
uggcuuugucguguuucau

SEQ ID NO: 2071869 - RNA, 19 nt, Artificial Sequence
  Description of Artificial Sequence: Synthetic oligonucleotide
  Antisense strand to SEQ ID NO: 2071868
augaaacacgacaaagcca

SEQ ID NO: 2071870 - RNA, 19 nt, Artificial Sequence
  Description of Artificial Sequence: Synthetic oligonucleotide
  Sense strand starting at position 3369 of SEQ ID NO: 1881789
ggcuuugucguguuucaug

SEQ ID NO: 2071871 - RNA, 19 nt, Artificial Sequence
  Description of Artificial Sequence: Synthetic oligonucleotide
  Antisense strand to SEQ ID NO: 2071870
caugaaacacgacaaagcc

SEQ ID NO: 2071872 - RNA, 19 nt, Artificial Sequence
  Description of Artificial Sequence: Synthetic oligonucleotide
  Sense strand starting at position 3387 of SEQ ID NO: 1881789
guguuugucacugcugcuu

SEQ ID NO: 2071873 - RNA, 19 nt, Artificial Sequence
  Description of Artificial Sequence: Synthetic oligonucleotide
  Antisense strand to SEQ ID NO: 2071872
aagcagcagugacaaacac

SEQ ID NO: 2071874 - RNA, 19 nt, Artificial Sequence
  Description of Artificial Sequence: Synthetic oligonucleotide
  Sense strand starting at position 3552 of SEQ ID NO: 1881789
gcugaaugcuaacugaaca

SEQ ID NO: 2071875 - RNA, 19 nt, Artificial Sequence
  Description of Artificial Sequence: Synthetic oligonucleotide
  Antisense strand to SEQ ID NO: 2071874
uguucaguuagcauucagc

SEQ ID NO: 2071876 - RNA, 19 nt, Artificial Sequence
  Description of Artificial Sequence: Synthetic oligonucleotide
  Sense strand starting at position 3574 of SEQ ID NO: 1881789
aggucuugaguugauauua

SEQ ID NO: 2071877 - RNA, 19 nt, Artificial Sequence
  Description of Artificial Sequence: Synthetic oligonucleotide
  Antisense strand to SEQ ID NO: 2071876
uaauaucaacucaagaccu

SEQ ID NO: 2071878 - RNA, 19 nt, Artificial Sequence
  Description of Artificial Sequence: Synthetic oligonucleotide
  Sense strand starting at position 3623 of SEQ ID NO: 1881789
gguauacuaaagggauagu

SEQ ID NO: 2071879 - RNA, 19 nt, Artificial Sequence
  Description of Artificial Sequence: Synthetic oligonucleotide
  Antisense strand to SEQ ID NO: 2071878
acuaucccuuuaguauacc

SEQ ID NO: 2071880 - RNA, 19 nt, Artificial Sequence
  Description of Artificial Sequence: Synthetic oligonucleotide
  Sense strand starting at position 3759 of SEQ ID NO: 1881789
augugugauuaaucaagga

SEQ ID NO: 2071881 - RNA, 19 nt, Artificial Sequence
  Description of Artificial Sequence: Synthetic oligonucleotide
  Antisense strand to SEQ ID NO: 2071880
uccuugauuaaucacacau

SEQ ID NO: 2071882 - RNA, 19 nt, Artificial Sequence
  Description of Artificial Sequence: Synthetic oligonucleotide
  Sense strand starting at position 3778 of SEQ ID NO: 1881789
gaacuuucuggaggaguua

SEQ ID NO: 2071883 - RNA, 19 nt, Artificial Sequence
  Description of Artificial Sequence: Synthetic oligonucleotide
  Antisense strand to SEQ ID NO: 2071882
uaacuccuccagaaaguuc

SEQ ID NO: 2071884 - RNA, 19 nt, Artificial Sequence
  Description of Artificial Sequence: Synthetic oligonucleotide
  Sense strand starting at position 3829 of SEQ ID NO: 1881789
cauaaagagccaugugaac

SEQ ID NO: 2071885 - RNA, 19 nt, Artificial Sequence
  Description of Artificial Sequence: Synthetic oligonucleotide
  Antisense strand to SEQ ID NO: 2071884
guucacauggcucuuuaug

SEQ ID NO: 2071886 - RNA, 19 nt, Artificial Sequence
  Description of Artificial Sequence: Synthetic oligonucleotide
  Sense strand starting at position 3835 of SEQ ID NO: 1881789
gagccaugugaacaacuau

SEQ ID NO: 2071887 - RNA, 19 nt, Artificial Sequence
  Description of Artificial Sequence: Synthetic oligonucleotide
  Antisense strand to SEQ ID NO: 2071886
auaguuguucacauggcuc

SEQ ID NO: 2071888 - RNA, 19 nt, Artificial Sequence
  Description of Artificial Sequence: Synthetic oligonucleotide
  Sense strand starting at position 3957 of SEQ ID NO: 1881789
cagaguuauccuggugaaa

SEQ ID NO: 2071889 - RNA, 19 nt, Artificial Sequence
  Description of Artificial Sequence: Synthetic oligonucleotide
  Antisense strand to SEQ ID NO: 2071888
uuucaccaggauaacucug

SEQ ID NO: 2071890 - RNA, 19 nt, Artificial Sequence
  Description of Artificial Sequence: Synthetic oligonucleotide
  Sense strand starting at position 156 of SEQ ID NO: 1881790
uuacauuaccgguaacaau

SEQ ID NO: 2071891 - RNA, 19 nt, Artificial Sequence
  Description of Artificial Sequence: Synthetic oligonucleotide
  Antisense strand to SEQ ID NO: 2071890
auuguuaccgguaauguaa

SEQ ID NO: 2071892 - RNA, 19 nt, Artificial Sequence
  Description of Artificial Sequence: Synthetic oligonucleotide
  Sense strand starting at position 206 of SEQ ID NO: 1881790
agcuucuugccagagucuu

SEQ ID NO: 2071893 - RNA, 19 nt, Artificial Sequence
  Description of Artificial Sequence: Synthetic oligonucleotide
  Antisense strand to SEQ ID NO: 2071892
aagacucuggcaagaagcu

SEQ ID NO: 2071894 - RNA, 19 nt, Artificial Sequence
  Description of Artificial Sequence: Synthetic oligonucleotide
  Sense strand starting at position 236 of SEQ ID NO: 1881790
uugcaacgcuauuuaacaa

SEQ ID NO: 2071895 - RNA, 19 nt, Artificial Sequence
  Description of Artificial Sequence: Synthetic oligonucleotide
  Antisense strand to SEQ ID NO: 2071894
uuguuaaauagcguugcaa

SEQ ID NO: 2071896 - RNA, 19 nt, Artificial Sequence
  Description of Artificial Sequence: Synthetic oligonucleotide
  Sense strand starting at position 409 of SEQ ID NO: 1881790
acauuuccgccgcagugaa

SEQ ID NO: 2071897 - RNA, 19 nt, Artificial Sequence
  Description of Artificial Sequence: Synthetic oligonucleotide
  Antisense strand to SEQ ID NO: 2071896
uucacugcggcggaaaugu

SEQ ID NO: 2071898 - RNA, 19 nt, Artificial Sequence
  Description of Artificial Sequence: Synthetic oligonucleotide
  Sense strand starting at position 1203 of SEQ ID NO: 1881790
gcuagaaagcgccuugugu

SEQ ID NO: 2071899 - RNA, 19 nt, Artificial Sequence
  Description of Artificial Sequence: Synthetic oligonucleotide
  Antisense strand to SEQ ID NO: 2071898
acacaaggcgcuuucuagc

SEQ ID NO: 2071900 - RNA, 19 nt, Artificial Sequence
  Description of Artificial Sequence: Synthetic oligonucleotide
  Sense strand starting at position 2320 of SEQ ID NO: 1881790
caacuagaggcuugucuuu

SEQ ID NO: 2071901 - RNA, 19 nt, Artificial Sequence
  Description of Artificial Sequence: Synthetic oligonucleotide
  Antisense strand to SEQ ID NO: 2071900
aaagacaagccucuaguug

SEQ ID NO: 2071902 - RNA, 19 nt, Artificial Sequence
  Description of Artificial Sequence: Synthetic oligonucleotide
  Sense strand starting at position 2331 of SEQ ID NO: 1881790
uugucuuuccacugggagu

SEQ ID NO: 2071903 - RNA, 19 nt, Artificial Sequence
  Description of Artificial Sequence: Synthetic oligonucleotide
  Antisense strand to SEQ ID NO: 2071902
acucccaguggaaagacaa

SEQ ID NO: 2071904 - RNA, 19 nt, Artificial Sequence
  Description of Artificial Sequence: Synthetic oligonucleotide
  Sense strand starting at position 2332 of SEQ ID NO: 1881790
ugucuuuccacugggaguu

SEQ ID NO: 2071905 - RNA, 19 nt, Artificial Sequence
  Description of Artificial Sequence: Synthetic oligonucleotide
  Antisense strand to SEQ ID NO: 2071904
aacucccaguggaaagaca

SEQ ID NO: 2071906 - RNA, 19 nt, Artificial Sequence
  Description of Artificial Sequence: Synthetic oligonucleotide
  Sense strand starting at position 2333 of SEQ ID NO: 1881790
gucuuuccacugggaguua

SEQ ID NO: 2071907 - RNA, 19 nt, Artificial Sequence
  Description of Artificial Sequence: Synthetic oligonucleotide
  Antisense strand to SEQ ID NO: 2071906
uaacucccaguggaaagac

SEQ ID NO: 2071908 - RNA, 19 nt, Artificial Sequence
  Description of Artificial Sequence: Synthetic oligonucleotide
  Sense strand starting at position 2377 of SEQ ID NO: 1881790
uggagcuaagucuauaaau

SEQ ID NO: 2071909 - RNA, 19 nt, Artificial Sequence
  Description of Artificial Sequence: Synthetic oligonucleotide
  Antisense strand to SEQ ID NO: 2071908
auuuauagacuuagcucca

SEQ ID NO: 2071910 - RNA, 19 nt, Artificial Sequence
  Description of Artificial Sequence: Synthetic oligonucleotide
  Sense strand starting at position 2448 of SEQ ID NO: 1881790
ggcccagggagaugugaau

SEQ ID NO: 2071911 - RNA, 19 nt, Artificial Sequence
  Description of Artificial Sequence: Synthetic oligonucleotide
  Antisense strand to SEQ ID NO: 2071910
auucacaucucccugggcc

SEQ ID NO: 2071912 - RNA, 19 nt, Artificial Sequence
  Description of Artificial Sequence: Synthetic oligonucleotide
  Sense strand starting at position 2461 of SEQ ID NO: 1881790
gugaauugccuggcucgua

SEQ ID NO: 2071913 - RNA, 19 nt, Artificial Sequence
  Description of Artificial Sequence: Synthetic oligonucleotide
  Antisense strand to SEQ ID NO: 2071912
uacgagccaggcaauucac

SEQ ID NO: 2071914 - RNA, 19 nt, Artificial Sequence
  Description of Artificial Sequence: Synthetic oligonucleotide
  Sense strand starting at position 2473 of SEQ ID NO: 1881790
gcucguagucacuuagcaa

SEQ ID NO: 2071915 - RNA, 19 nt, Artificial Sequence
  Description of Artificial Sequence: Synthetic oligonucleotide
  Antisense strand to SEQ ID NO: 2071914
uugcuaagugacuacgagc

SEQ ID NO: 2071916 - RNA, 19 nt, Artificial Sequence
  Description of Artificial Sequence: Synthetic oligonucleotide
  Sense strand starting at position 2730 of SEQ ID NO: 1881790
ccugguauuugcgccgaga

SEQ ID NO: 2071917 - RNA, 19 nt, Artificial Sequence
  Description of Artificial Sequence: Synthetic oligonucleotide
  Antisense strand to SEQ ID NO: 2071916
ucucggcgcaaauaccagg

SEQ ID NO: 2071918 - RNA, 19 nt, Artificial Sequence
  Description of Artificial Sequence: Synthetic oligonucleotide
  Sense strand starting at position 2732 of SEQ ID NO: 1881790
ugguauuugcgccgagaaa

SEQ ID NO: 2071919 - RNA, 19 nt, Artificial Sequence
  Description of Artificial Sequence: Synthetic oligonucleotide
  Antisense strand to SEQ ID NO: 2071918
uuucucggcgcaaauacca

SEQ ID NO: 2071920 - RNA, 19 nt, Artificial Sequence
  Description of Artificial Sequence: Synthetic oligonucleotide
  Sense strand starting at position 2733 of SEQ ID NO: 1881790
gguauuugcgccgagaaau

SEQ ID NO: 2071921 - RNA, 19 nt, Artificial Sequence
  Description of Artificial Sequence: Synthetic oligonucleotide
  Antisense strand to SEQ ID NO: 2071920
auuucucggcgcaaauacc

SEQ ID NO: 2071922 - RNA, 19 nt, Artificial Sequence
  Description of Artificial Sequence: Synthetic oligonucleotide
  Sense strand starting at position 2743 of SEQ ID NO: 1881790
ccgagaaauuucgcuccuu

SEQ ID NO: 2071923 - RNA, 19 nt, Artificial Sequence
  Description of Artificial Sequence: Synthetic oligonucleotide
  Antisense strand to SEQ ID NO: 2071922
aaggagcgaaauuucucgg

SEQ ID NO: 2071924 - RNA, 19 nt, Artificial Sequence
  Description of Artificial Sequence: Synthetic oligonucleotide
  Sense strand starting at position 2744 of SEQ ID NO: 1881790
cgagaaauuucgcuccuug

SEQ ID NO: 2071925 - RNA, 19 nt, Artificial Sequence
  Description of Artificial Sequence: Synthetic oligonucleotide
  Antisense strand to SEQ ID NO: 2071924
caaggagcgaaauuucucg

SEQ ID NO: 2071926 - RNA, 19 nt, Artificial Sequence
  Description of Artificial Sequence: Synthetic oligonucleotide
  Sense strand starting at position 2995 of SEQ ID NO: 1881790
gauggaaacucuguagacu

SEQ ID NO: 2071927 - RNA, 19 nt, Artificial Sequence
  Description of Artificial Sequence: Synthetic oligonucleotide
  Antisense strand to SEQ ID NO: 2071926
agucuacagaguuuccauc

SEQ ID NO: 2071928 - RNA, 19 nt, Artificial Sequence
  Description of Artificial Sequence: Synthetic oligonucleotide
  Sense strand starting at position 3013 of SEQ ID NO: 1881790
uccagagauaggugcugaa

SEQ ID NO: 2071929 - RNA, 19 nt, Artificial Sequence
  Description of Artificial Sequence: Synthetic oligonucleotide
  Antisense strand to SEQ ID NO: 2071928
uucagcaccuaucucugga

SEQ ID NO: 2071930 - RNA, 19 nt, Artificial Sequence
  Description of Artificial Sequence: Synthetic oligonucleotide
  Sense strand starting at position 3041 of SEQ ID NO: 1881790
ggcggaaauguguaacuau

SEQ ID NO: 2071931 - RNA, 19 nt, Artificial Sequence
  Description of Artificial Sequence: Synthetic oligonucleotide
  Antisense strand to SEQ ID NO: 2071930
auaguuacacauuuccgcc

SEQ ID NO: 2071932 - RNA, 19 nt, Artificial Sequence
  Description of Artificial Sequence: Synthetic oligonucleotide
  Sense strand starting at position 3052 of SEQ ID NO: 1881790
guaacuauugcacauaugu

SEQ ID NO: 2071933 - RNA, 19 nt, Artificial Sequence
  Description of Artificial Sequence: Synthetic oligonucleotide
  Antisense strand to SEQ ID NO: 2071932
acauaugugcaauaguuac

SEQ ID NO: 2071934 - RNA, 19 nt, Artificial Sequence
  Description of Artificial Sequence: Synthetic oligonucleotide
  Sense strand starting at position 3210 of SEQ ID NO: 1881790
agaugaccuugccuagaaa

SEQ ID NO: 2071935 - RNA, 19 nt, Artificial Sequence
  Description of Artificial Sequence: Synthetic oligonucleotide
  Antisense strand to SEQ ID NO: 2071934
uuucuaggcaaggucaucu

SEQ ID NO: 2071936 - RNA, 19 nt, Artificial Sequence
  Description of Artificial Sequence: Synthetic oligonucleotide
  Sense strand starting at position 3291 of SEQ ID NO: 1881790
gggacagguauguaucuuu

SEQ ID NO: 2071937 - RNA, 19 nt, Artificial Sequence
  Description of Artificial Sequence: Synthetic oligonucleotide
  Antisense strand to SEQ ID NO: 2071936
aaagauacauaccuguccc

SEQ ID NO: 2071938 - RNA, 19 nt, Artificial Sequence
  Description of Artificial Sequence: Synthetic oligonucleotide
  Sense strand starting at position 3315 of SEQ ID NO: 1881790
cuagaaauugcgggauguc

SEQ ID NO: 2071939 - RNA, 19 nt, Artificial Sequence
  Description of Artificial Sequence: Synthetic oligonucleotide
  Antisense strand to SEQ ID NO: 2071938
gacaucccgcaauuucuag

SEQ ID NO: 2071940 - RNA, 19 nt, Artificial Sequence
  Description of Artificial Sequence: Synthetic oligonucleotide
  Sense strand starting at position 3318 of SEQ ID NO: 1881790
gaaauugcgggauguccuu

SEQ ID NO: 2071941 - RNA, 19 nt, Artificial Sequence
  Description of Artificial Sequence: Synthetic oligonucleotide
  Antisense strand to SEQ ID NO: 2071940
aaggacaucccgcaauuuc

SEQ ID NO: 2071942 - RNA, 19 nt, Artificial Sequence
  Description of Artificial Sequence: Synthetic oligonucleotide
  Sense strand starting at position 3324 of SEQ ID NO: 1881790
gcgggauguccuuaaccaa

SEQ ID NO: 2071943 - RNA, 19 nt, Artificial Sequence
  Description of Artificial Sequence: Synthetic oligonucleotide
  Antisense strand to SEQ ID NO: 2071942
uugguuaaggacaucccgc

SEQ ID NO: 2071944 - RNA, 19 nt, Artificial Sequence
  Description of Artificial Sequence: Synthetic oligonucleotide
  Sense strand starting at position 3331 of SEQ ID NO: 1881790
guccuuaaccaagggaaca

SEQ ID NO: 2071945 - RNA, 19 nt, Artificial Sequence
  Description of Artificial Sequence: Synthetic oligonucleotide
  Antisense strand to SEQ ID NO: 2071944
uguucccuugguuaaggac

SEQ ID NO: 2071946 - RNA, 19 nt, Artificial Sequence
  Description of Artificial Sequence: Synthetic oligonucleotide
  Sense strand starting at position 3357 of SEQ ID NO: 1881790
ucagaucccuuugcaaaga

SEQ ID NO: 2071947 - RNA, 19 nt, Artificial Sequence
  Description of Artificial Sequence: Synthetic oligonucleotide
  Antisense strand to SEQ ID NO: 2071946
ucuuugcaaagggaucuga

SEQ ID NO: 2071948 - RNA, 19 nt, Artificial Sequence
  Description of Artificial Sequence: Synthetic oligonucleotide
  Sense strand starting at position 3368 of SEQ ID NO: 1881790
ugcaaagaacuuugcuaag

SEQ ID NO: 2071949 - RNA, 19 nt, Artificial Sequence
  Description of Artificial Sequence: Synthetic oligonucleotide
  Antisense strand to SEQ ID NO: 2071948
cuuagcaaaguucuuugca

SEQ ID NO: 2071950 - RNA, 19 nt, Artificial Sequence
  Description of Artificial Sequence: Synthetic oligonucleotide
  Sense strand starting at position 3406 of SEQ ID NO: 1881790
aaagaaauccgcuggccau

SEQ ID NO: 2071951 - RNA, 19 nt, Artificial Sequence
  Description of Artificial Sequence: Synthetic oligonucleotide
  Antisense strand to SEQ ID NO: 2071950
auggccagcggauuucuuu

SEQ ID NO: 2071952 - RNA, 19 nt, Artificial Sequence
  Description of Artificial Sequence: Synthetic oligonucleotide
  Sense strand starting at position 3407 of SEQ ID NO: 1881790
aagaaauccgcuggccauu

SEQ ID NO: 2071953 - RNA, 19 nt, Artificial Sequence
  Description of Artificial Sequence: Synthetic oligonucleotide
  Antisense strand to SEQ ID NO: 2071952
aauggccagcggauuucuu

SEQ ID NO: 2071954 - RNA, 19 nt, Artificial Sequence
  Description of Artificial Sequence: Synthetic oligonucleotide
  Sense strand starting at position 3444 of SEQ ID NO: 1881790
gccacuuuccuguaucuuu

SEQ ID NO: 2071955 - RNA, 19 nt, Artificial Sequence
  Description of Artificial Sequence: Synthetic oligonucleotide
  Antisense strand to SEQ ID NO: 2071954
aaagauacaggaaaguggc

SEQ ID NO: 2071956 - RNA, 19 nt, Artificial Sequence
  Description of Artificial Sequence: Synthetic oligonucleotide
  Sense strand starting at position 3677 of SEQ ID NO: 1881790
uuggaaaucaugggugcua

SEQ ID NO: 2071957 - RNA, 19 nt, Artificial Sequence
  Description of Artificial Sequence: Synthetic oligonucleotide
  Antisense strand to SEQ ID NO: 2071956
uagcacccaugauuuccaa

SEQ ID NO: 2071958 - RNA, 19 nt, Artificial Sequence
  Description of Artificial Sequence: Synthetic oligonucleotide
  Sense strand starting at position 3679 of SEQ ID NO: 1881790
ggaaaucaugggugcuacu

SEQ ID NO: 2071959 - RNA, 19 nt, Artificial Sequence
  Description of Artificial Sequence: Synthetic oligonucleotide
  Antisense strand to SEQ ID NO: 2071958
aguagcacccaugauuucc

SEQ ID NO: 2071960 - RNA, 19 nt, Artificial Sequence
  Description of Artificial Sequence: Synthetic oligonucleotide
  Sense strand starting at position 3720 of SEQ ID NO: 1881790
ucugguuugcuugagccaa

SEQ ID NO: 2071961 - RNA, 19 nt, Artificial Sequence
  Description of Artificial Sequence: Synthetic oligonucleotide
  Antisense strand to SEQ ID NO: 2071960
uuggcucaagcaaaccaga

SEQ ID NO: 2071962 - RNA, 19 nt, Artificial Sequence
  Description of Artificial Sequence: Synthetic oligonucleotide
  Sense strand starting at position 3734 of SEQ ID NO: 1881790
gccaaucuaugacuaguuu

SEQ ID NO: 2071963 - RNA, 19 nt, Artificial Sequence
  Description of Artificial Sequence: Synthetic oligonucleotide
  Antisense strand to SEQ ID NO: 2071962
aaacuagucauagauuggc

SEQ ID NO: 2071964 - RNA, 19 nt, Artificial Sequence
  Description of Artificial Sequence: Synthetic oligonucleotide
  Sense strand starting at position 3775 of SEQ ID NO: 1881790
augcuuaucucagcugaaa

SEQ ID NO: 2071965 - RNA, 19 nt, Artificial Sequence
  Description of Artificial Sequence: Synthetic oligonucleotide
  Antisense strand to SEQ ID NO: 2071964
uuucagcugagauaagcau

SEQ ID NO: 2071966 - RNA, 19 nt, Artificial Sequence
  Description of Artificial Sequence: Synthetic oligonucleotide
  Sense strand starting at position 3837 of SEQ ID NO: 1881790
gguguaaucccacagcauc

SEQ ID NO: 2071967 - RNA, 19 nt, Artificial Sequence
  Description of Artificial Sequence: Synthetic oligonucleotide
  Antisense strand to SEQ ID NO: 2071966
gaugcugugggauuacacc

SEQ ID NO: 2071968 - RNA, 19 nt, Artificial Sequence
  Description of Artificial Sequence: Synthetic oligonucleotide
  Sense strand starting at position 3932 of SEQ ID NO: 1881790
ggaagaaacuucuaaacag

SEQ ID NO: 2071969 - RNA, 19 nt, Artificial Sequence
  Description of Artificial Sequence: Synthetic oligonucleotide
  Antisense strand to SEQ ID NO: 2071968
cuguuuagaaguuucuucc

SEQ ID NO: 2071970 - RNA, 19 nt, Artificial Sequence
  Description of Artificial Sequence: Synthetic oligonucleotide
  Sense strand starting at position 5 of SEQ ID NO: 1881791
gcacaccugucacuagaaa

SEQ ID NO: 2071971 - RNA, 19 nt, Artificial Sequence
  Description of Artificial Sequence: Synthetic oligonucleotide
  Antisense strand to SEQ ID NO: 2071970
uuucuagugacaggugugc

SEQ ID NO: 2071972 - RNA, 19 nt, Artificial Sequence
  Description of Artificial Sequence: Synthetic oligonucleotide
  Sense strand starting at position 398 of SEQ ID NO: 1881791
ucaauucgacagcaaauau

SEQ ID NO: 2071973 - RNA, 19 nt, Artificial Sequence
  Description of Artificial Sequence: Synthetic oligonucleotide
  Antisense strand to SEQ ID NO: 2071972
auauuugcugucgaauuga

SEQ ID NO: 2071974 - RNA, 19 nt, Artificial Sequence
  Description of Artificial Sequence: Synthetic oligonucleotide
  Sense strand starting at position 446 of SEQ ID NO: 1881791
guaauaugccugcgauuuc

SEQ ID NO: 2071975 - RNA, 19 nt, Artificial Sequence
  Description of Artificial Sequence: Synthetic oligonucleotide
  Antisense strand to SEQ ID NO: 2071974
gaaaucgcaggcauauuac

SEQ ID NO: 2071976 - RNA, 19 nt, Artificial Sequence
  Description of Artificial Sequence: Synthetic oligonucleotide
  Sense strand starting at position 518 of SEQ ID NO: 1881791
gcagaaugccaguacuaug

SEQ ID NO: 2071977 - RNA, 19 nt, Artificial Sequence
  Description of Artificial Sequence: Synthetic oligonucleotide
  Antisense strand to SEQ ID NO: 2071976
cauaguacuggcauucugc

SEQ ID NO: 2071978 - RNA, 19 nt, Artificial Sequence
  Description of Artificial Sequence: Synthetic oligonucleotide
  Sense strand starting at position 525 of SEQ ID NO: 1881791
gccaguacuaugcguauuu

SEQ ID NO: 2071979 - RNA, 19 nt, Artificial Sequence
  Description of Artificial Sequence: Synthetic oligonucleotide
  Antisense strand to SEQ ID NO: 2071978
aaauacgcauaguacuggc

SEQ ID NO: 2071980 - RNA, 19 nt, Artificial Sequence
  Description of Artificial Sequence: Synthetic oligonucleotide
  Sense strand starting at position 526 of SEQ ID NO: 1881791
ccaguacuaugcguauuua

SEQ ID NO: 2071981 - RNA, 19 nt, Artificial Sequence
  Description of Artificial Sequence: Synthetic oligonucleotide
  Antisense strand to SEQ ID NO: 2071980
uaaauacgcauaguacugg

SEQ ID NO: 2071982 - RNA, 19 nt, Artificial Sequence
  Description of Artificial Sequence: Synthetic oligonucleotide
  Sense strand starting at position 527 of SEQ ID NO: 1881791
caguacuaugcguauuuau

SEQ ID NO: 2071983 - RNA, 19 nt, Artificial Sequence
  Description of Artificial Sequence: Synthetic oligonucleotide
  Antisense strand to SEQ ID NO: 2071982
auaaauacgcauaguacug

SEQ ID NO: 2071984 - RNA, 19 nt, Artificial Sequence
  Description of Artificial Sequence: Synthetic oligonucleotide
  Sense strand starting at position 551 of SEQ ID NO: 1881791
ugggcuucucaggaaguau

SEQ ID NO: 2071985 - RNA, 19 nt, Artificial Sequence
  Description of Artificial Sequence: Synthetic oligonucleotide
  Antisense strand to SEQ ID NO: 2071984
auacuuccugagaagccca

SEQ ID NO: 2071986 - RNA, 19 nt, Artificial Sequence
  Description of Artificial Sequence: Synthetic oligonucleotide
  Sense strand starting at position 880 of SEQ ID NO: 1881791
caagaucacgcguggaaac

SEQ ID NO: 2071987 - RNA, 19 nt, Artificial Sequence
  Description of Artificial Sequence: Synthetic oligonucleotide
  Antisense strand to SEQ ID NO: 2071986
guuuccacgcgugaucuug

SEQ ID NO: 2071988 - RNA, 19 nt, Artificial Sequence
  Description of Artificial Sequence: Synthetic oligonucleotide
  Sense strand starting at position 1052 of SEQ ID NO: 1881791
ugagguaggcuuuauggca

SEQ ID NO: 2071989 - RNA, 19 nt, Artificial Sequence
  Description of Artificial Sequence: Synthetic oligonucleotide
  Antisense strand to SEQ ID NO: 2071988
ugccauaaagccuaccuca

SEQ ID NO: 2071990 - RNA, 19 nt, Artificial Sequence
  Description of Artificial Sequence: Synthetic oligonucleotide
  Sense strand starting at position 1059 of SEQ ID NO: 1881791
ggcuuuauggcauaagguu

SEQ ID NO: 2071991 - RNA, 19 nt, Artificial Sequence
  Description of Artificial Sequence: Synthetic oligonucleotide
  Antisense strand to SEQ ID NO: 2071990
aaccuuaugccauaaagcc

SEQ ID NO: 2071992 - RNA, 19 nt, Artificial Sequence
  Description of Artificial Sequence: Synthetic oligonucleotide
  Sense strand starting at position 1089 of SEQ ID NO: 1881791
gacaguaaugccgauuaca

SEQ ID NO: 2071993 - RNA, 19 nt, Artificial Sequence
  Description of Artificial Sequence: Synthetic oligonucleotide
  Antisense strand to SEQ ID NO: 2071992
uguaaucggcauuacuguc

SEQ ID NO: 2071994 - RNA, 19 nt, Artificial Sequence
  Description of Artificial Sequence: Synthetic oligonucleotide
  Sense strand starting at position 2137 of SEQ ID NO: 1881791
cauucugcuugggugagua

SEQ ID NO: 2071995 - RNA, 19 nt, Artificial Sequence
  Description of Artificial Sequence: Synthetic oligonucleotide
  Antisense strand to SEQ ID NO: 2071994
uacucacccaagcagaaug

SEQ ID NO: 2071996 - RNA, 19 nt, Artificial Sequence
  Description of Artificial Sequence: Synthetic oligonucleotide
  Sense strand starting at position 2181 of SEQ ID NO: 1881791
gcugaaauucuacaaugua

SEQ ID NO: 2071997 - RNA, 19 nt, Artificial Sequence
  Description of Artificial Sequence: Synthetic oligonucleotide
  Antisense strand to SEQ ID NO: 2071996
uacauuguagaauuucagc

SEQ ID NO: 2071998 - RNA, 19 nt, Artificial Sequence
  Description of Artificial Sequence: Synthetic oligonucleotide
  Sense strand starting at position 2222 of SEQ ID NO: 1881791
agggucaugccauagggua

SEQ ID NO: 2071999 - RNA, 19 nt, Artificial Sequence
  Description of Artificial Sequence: Synthetic oligonucleotide
  Antisense strand to SEQ ID NO: 2071998
uacccuauggcaugacccu

SEQ ID NO: 2072000 - RNA, 19 nt, Artificial Sequence
  Description of Artificial Sequence: Synthetic oligonucleotide
  Sense strand starting at position 2256 of SEQ ID NO: 1881791
aacagugugagccaugagu

SEQ ID NO: 2072001 - RNA, 19 nt, Artificial Sequence
  Description of Artificial Sequence: Synthetic oligonucleotide
  Antisense strand to SEQ ID NO: 2072000
acucauggcucacacuguu

SEQ ID NO: 2072002 - RNA, 19 nt, Artificial Sequence
  Description of Artificial Sequence: Synthetic oligonucleotide
  Sense strand starting at position 2861 of SEQ ID NO: 1881791
gugugaaggcgguuaugca

SEQ ID NO: 2072003 - RNA, 19 nt, Artificial Sequence
  Description of Artificial Sequence: Synthetic oligonucleotide
  Antisense strand to SEQ ID NO: 2072002
ugcauaaccgccuucacac

SEQ ID NO: 2072004 - RNA, 19 nt, Artificial Sequence
  Description of Artificial Sequence: Synthetic oligonucleotide
  Sense strand starting at position 2862 of SEQ ID NO: 1881791
ugugaaggcgguuaugcaa

SEQ ID NO: 2072005 - RNA, 19 nt, Artificial Sequence
  Description of Artificial Sequence: Synthetic oligonucleotide
  Antisense strand to SEQ ID NO: 2072004
uugcauaaccgccuucaca

SEQ ID NO: 2072006 - RNA, 19 nt, Artificial Sequence
  Description of Artificial Sequence: Synthetic oligonucleotide
  Sense strand starting at position 2868 of SEQ ID NO: 1881791
ggcgguuaugcaagaucug

SEQ ID NO: 2072007 - RNA, 19 nt, Artificial Sequence
  Description of Artificial Sequence: Synthetic oligonucleotide
  Antisense strand to SEQ ID NO: 2072006
cagaucuugcauaaccgcc

SEQ ID NO: 2072008 - RNA, 19 nt, Artificial Sequence
  Description of Artificial Sequence: Synthetic oligonucleotide
  Sense strand starting at position 3029 of SEQ ID NO: 1881791
agaguugauuaauuaucac

SEQ ID NO: 2072009 - RNA, 19 nt, Artificial Sequence
  Description of Artificial Sequence: Synthetic oligonucleotide
  Antisense strand to SEQ ID NO: 2072008
gugauaauuaaucaacucu

SEQ ID NO: 2072010 - RNA, 19 nt, Artificial Sequence
  Description of Artificial Sequence: Synthetic oligonucleotide
  Sense strand starting at position 3056 of SEQ ID NO: 1881791
uuaagcagaguuuguuaau

SEQ ID NO: 2072011 - RNA, 19 nt, Artificial Sequence
  Description of Artificial Sequence: Synthetic oligonucleotide
  Antisense strand to SEQ ID NO: 2072010
auuaacaaacucugcuuaa

SEQ ID NO: 2072012 - RNA, 19 nt, Artificial Sequence
  Description of Artificial Sequence: Synthetic oligonucleotide
  Sense strand starting at position 3057 of SEQ ID NO: 1881791
uaagcagaguuuguuaauu

SEQ ID NO: 2072013 - RNA, 19 nt, Artificial Sequence
  Description of Artificial Sequence: Synthetic oligonucleotide
  Antisense strand to SEQ ID NO: 2072012
aauuaacaaacucugcuua

SEQ ID NO: 2072014 - RNA, 19 nt, Artificial Sequence
  Description of Artificial Sequence: Synthetic oligonucleotide
  Sense strand starting at position 3062 of SEQ ID NO: 1881791
agaguuuguuaauuggcuu

SEQ ID NO: 2072015 - RNA, 19 nt, Artificial Sequence
  Description of Artificial Sequence: Synthetic oligonucleotide
  Antisense strand to SEQ ID NO: 2072014
aagccaauuaacaaacucu

SEQ ID NO: 2072016 - RNA, 19 nt, Artificial Sequence
  Description of Artificial Sequence: Synthetic oligonucleotide
  Sense strand starting at position 3129 of SEQ ID NO: 1881791
agacaaguuguaugauaac

SEQ ID NO: 2072017 - RNA, 19 nt, Artificial Sequence
  Description of Artificial Sequence: Synthetic oligonucleotide
  Antisense strand to SEQ ID NO: 2072016
guuaucauacaacuugucu

SEQ ID NO: 2072018 - RNA, 19 nt, Artificial Sequence
  Description of Artificial Sequence: Synthetic oligonucleotide
  Sense strand starting at position 3146 of SEQ ID NO: 1881791
acaacuaggucuccauguu

SEQ ID NO: 2072019 - RNA, 19 nt, Artificial Sequence
  Description of Artificial Sequence: Synthetic oligonucleotide
  Antisense strand to SEQ ID NO: 2072018
aacauggagaccuaguugu

SEQ ID NO: 2072020 - RNA, 19 nt, Artificial Sequence
  Description of Artificial Sequence: Synthetic oligonucleotide
  Sense strand starting at position 3155 of SEQ ID NO: 1881791
ucuccauguuucucuaagu

SEQ ID NO: 2072021 - RNA, 19 nt, Artificial Sequence
  Description of Artificial Sequence: Synthetic oligonucleotide
  Antisense strand to SEQ ID NO: 2072020
acuuagagaaacauggaga

SEQ ID NO: 2072022 - RNA, 19 nt, Artificial Sequence
  Description of Artificial Sequence: Synthetic oligonucleotide
  Sense strand starting at position 3266 of SEQ ID NO: 1881791
aggagcuuaucuccgaaca

SEQ ID NO: 2072023 - RNA, 19 nt, Artificial Sequence
  Description of Artificial Sequence: Synthetic oligonucleotide
  Antisense strand to SEQ ID NO: 2072022
uguucggagauaagcuccu

SEQ ID NO: 2072024 - RNA, 19 nt, Artificial Sequence
  Description of Artificial Sequence: Synthetic oligonucleotide
  Sense strand starting at position 3267 of SEQ ID NO: 1881791
ggagcuuaucuccgaacac

SEQ ID NO: 2072025 - RNA, 19 nt, Artificial Sequence
  Description of Artificial Sequence: Synthetic oligonucleotide
  Antisense strand to SEQ ID NO: 2072024
guguucggagauaagcucc

SEQ ID NO: 2072026 - RNA, 19 nt, Artificial Sequence
  Description of Artificial Sequence: Synthetic oligonucleotide
  Sense strand starting at position 3276 of SEQ ID NO: 1881791
cuccgaacacaucaaguua

SEQ ID NO: 2072027 - RNA, 19 nt, Artificial Sequence
  Description of Artificial Sequence: Synthetic oligonucleotide
  Antisense strand to SEQ ID NO: 2072026
uaacuugauguguucggag

SEQ ID NO: 2072028 - RNA, 19 nt, Artificial Sequence
  Description of Artificial Sequence: Synthetic oligonucleotide
  Sense strand starting at position 3376 of SEQ ID NO: 1881791
cccaguggucaucacacaa

SEQ ID NO: 2072029 - RNA, 19 nt, Artificial Sequence
  Description of Artificial Sequence: Synthetic oligonucleotide
  Antisense strand to SEQ ID NO: 2072028
uugugugaugaccacuggg

SEQ ID NO: 2072030 - RNA, 19 nt, Artificial Sequence
  Description of Artificial Sequence: Synthetic oligonucleotide
  Sense strand starting at position 3495 of SEQ ID NO: 1881791
uuaggaagucacuguaaca

SEQ ID NO: 2072031 - RNA, 19 nt, Artificial Sequence
  Description of Artificial Sequence: Synthetic oligonucleotide
  Antisense strand to SEQ ID NO: 2072030
uguuacagugacuuccuaa

SEQ ID NO: 2072032 - RNA, 19 nt, Artificial Sequence
  Description of Artificial Sequence: Synthetic oligonucleotide
  Sense strand starting at position 3551 of SEQ ID NO: 1881791
acacgaagauuguccuuua

SEQ ID NO: 2072033 - RNA, 19 nt, Artificial Sequence
  Description of Artificial Sequence: Synthetic oligonucleotide
  Antisense strand to SEQ ID NO: 2072032
uaaaggacaaucuucgugu

SEQ ID NO: 2072034 - RNA, 19 nt, Artificial Sequence
  Description of Artificial Sequence: Synthetic oligonucleotide
  Sense strand starting at position 3552 of SEQ ID NO: 1881791
cacgaagauuguccuuuaa

SEQ ID NO: 2072035 - RNA, 19 nt, Artificial Sequence
  Description of Artificial Sequence: Synthetic oligonucleotide
  Antisense strand to SEQ ID NO: 2072034
uuaaaggacaaucuucgug

SEQ ID NO: 2072036 - RNA, 19 nt, Artificial Sequence
  Description of Artificial Sequence: Synthetic oligonucleotide
  Sense strand starting at position 3554 of SEQ ID NO: 1881791
cgaagauuguccuuuaaag

SEQ ID NO: 2072037 - RNA, 19 nt, Artificial Sequence
  Description of Artificial Sequence: Synthetic oligonucleotide
  Antisense strand to SEQ ID NO: 2072036
cuuuaaaggacaaucuucg

SEQ ID NO: 2072038 - RNA, 19 nt, Artificial Sequence
  Description of Artificial Sequence: Synthetic oligonucleotide
  Sense strand starting at position 3627 of SEQ ID NO: 1881791
uagggaaagucagugacau

SEQ ID NO: 2072039 - RNA, 19 nt, Artificial Sequence
  Description of Artificial Sequence: Synthetic oligonucleotide
  Antisense strand to SEQ ID NO: 2072038
augucacugacuuucccua

SEQ ID NO: 2072040 - RNA, 19 nt, Artificial Sequence
  Description of Artificial Sequence: Synthetic oligonucleotide
  Sense strand starting at position 3628 of SEQ ID NO: 1881791
agggaaagucagugacaug

SEQ ID NO: 2072041 - RNA, 19 nt, Artificial Sequence
  Description of Artificial Sequence: Synthetic oligonucleotide
  Antisense strand to SEQ ID NO: 2072040
caugucacugacuuucccu

SEQ ID NO: 2072042 - RNA, 19 nt, Artificial Sequence
  Description of Artificial Sequence: Synthetic oligonucleotide
  Sense strand starting at position 3629 of SEQ ID NO: 1881791
gggaaagucagugacaugu

SEQ ID NO: 2072043 - RNA, 19 nt, Artificial Sequence
  Description of Artificial Sequence: Synthetic oligonucleotide
  Antisense strand to SEQ ID NO: 2072042
acaugucacugacuuuccc

SEQ ID NO: 2072044 - RNA, 19 nt, Artificial Sequence
  Description of Artificial Sequence: Synthetic oligonucleotide
  Sense strand starting at position 3736 of SEQ ID NO: 1881791
gaaucauaggguugguuac

SEQ ID NO: 2072045 - RNA, 19 nt, Artificial Sequence
  Description of Artificial Sequence: Synthetic oligonucleotide
  Antisense strand to SEQ ID NO: 2072044
guaaccaacccuaugauuc

SEQ ID NO: 2072046 - RNA, 19 nt, Artificial Sequence
  Description of Artificial Sequence: Synthetic oligonucleotide
  Sense strand starting at position 3800 of SEQ ID NO: 1881791
accagaucuuugcuuggca

SEQ ID NO: 2072047 - RNA, 19 nt, Artificial Sequence
  Description of Artificial Sequence: Synthetic oligonucleotide
  Antisense strand to SEQ ID NO: 2072046
ugccaagcaaagaucuggu

SEQ ID NO: 2072048 - RNA, 19 nt, Artificial Sequence
  Description of Artificial Sequence: Synthetic oligonucleotide
  Sense strand starting at position 3906 of SEQ ID NO: 1881791
gcuaaacuguaaguuaauu

SEQ ID NO: 2072049 - RNA, 19 nt, Artificial Sequence
  Description of Artificial Sequence: Synthetic oligonucleotide
  Antisense strand to SEQ ID NO: 2072048
aauuaacuuacaguuuagc

SEQ ID NO: 2072050 - RNA, 19 nt, Artificial Sequence
  Description of Artificial Sequence: Synthetic oligonucleotide
  Sense strand starting at position 11 of SEQ ID NO: 1881792
auccucuugucacuaguaa

SEQ ID NO: 2072051 - RNA, 19 nt, Artificial Sequence
  Description of Artificial Sequence: Synthetic oligonucleotide
  Antisense strand to SEQ ID NO: 2072050
uuacuagugacaagaggau

SEQ ID NO: 2072052 - RNA, 19 nt, Artificial Sequence
  Description of Artificial Sequence: Synthetic oligonucleotide
  Sense strand starting at position 12 of SEQ ID NO: 1881792
uccucuugucacuaguaau

SEQ ID NO: 2072053 - RNA, 19 nt, Artificial Sequence
  Description of Artificial Sequence: Synthetic oligonucleotide
  Antisense strand to SEQ ID NO: 2072052
auuacuagugacaagagga

SEQ ID NO: 2072054 - RNA, 19 nt, Artificial Sequence
  Description of Artificial Sequence: Synthetic oligonucleotide
  Sense strand starting at position 18 of SEQ ID NO: 1881792
ugucacuaguaaucucuaa

SEQ ID NO: 2072055 - RNA, 19 nt, Artificial Sequence
  Description of Artificial Sequence: Synthetic oligonucleotide
  Antisense strand to SEQ ID NO: 2072054
uuagagauuacuagugaca

SEQ ID NO: 2072056 - RNA, 19 nt, Artificial Sequence
  Description of Artificial Sequence: Synthetic oligonucleotide
  Sense strand starting at position 67 of SEQ ID NO: 1881792
uucuccagucuccgauaaa

SEQ ID NO: 2072057 - RNA, 19 nt, Artificial Sequence
  Description of Artificial Sequence: Synthetic oligonucleotide
  Antisense strand to SEQ ID NO: 2072056
uuuaucggagacuggagaa

SEQ ID NO: 2072058 - RNA, 19 nt, Artificial Sequence
  Description of Artificial Sequence: Synthetic oligonucleotide
  Sense strand starting at position 70 of SEQ ID NO: 1881792
uccagucuccgauaaagaa

SEQ ID NO: 2072059 - RNA, 19 nt, Artificial Sequence
  Description of Artificial Sequence: Synthetic oligonucleotide
  Antisense strand to SEQ ID NO: 2072058
uucuuuaucggagacugga

SEQ ID NO: 2072060 - RNA, 19 nt, Artificial Sequence
  Description of Artificial Sequence: Synthetic oligonucleotide
  Sense strand starting at position 118 of SEQ ID NO: 1881792
gagugucauauguauggga

SEQ ID NO: 2072061 - RNA, 19 nt, Artificial Sequence
  Description of Artificial Sequence: Synthetic oligonucleotide
  Antisense strand to SEQ ID NO: 2072060
ucccauacauaugacacuc

SEQ ID NO: 2072062 - RNA, 19 nt, Artificial Sequence
  Description of Artificial Sequence: Synthetic oligonucleotide
  Sense strand starting at position 122 of SEQ ID NO: 1881792
gucauauguaugggaccuu

SEQ ID NO: 2072063 - RNA, 19 nt, Artificial Sequence
  Description of Artificial Sequence: Synthetic oligonucleotide
  Antisense strand to SEQ ID NO: 2072062
aaggucccauacauaugac

SEQ ID NO: 2072064 - RNA, 19 nt, Artificial Sequence
  Description of Artificial Sequence: Synthetic oligonucleotide
  Sense strand starting at position 133 of SEQ ID NO: 1881792
gggaccuuauggcuuugua

SEQ ID NO: 2072065 - RNA, 19 nt, Artificial Sequence
  Description of Artificial Sequence: Synthetic oligonucleotide
  Antisense strand to SEQ ID NO: 2072064
uacaaagccauaagguccc

SEQ ID NO: 2072066 - RNA, 19 nt, Artificial Sequence
  Description of Artificial Sequence: Synthetic oligonucleotide
  Sense strand starting at position 136 of SEQ ID NO: 1881792
accuuauggcuuuguaacu

SEQ ID NO: 2072067 - RNA, 19 nt, Artificial Sequence
  Description of Artificial Sequence: Synthetic oligonucleotide
  Antisense strand to SEQ ID NO: 2072066
aguuacaaagccauaaggu

SEQ ID NO: 2072068 - RNA, 19 nt, Artificial Sequence
  Description of Artificial Sequence: Synthetic oligonucleotide
  Sense strand starting at position 137 of SEQ ID NO: 1881792
ccuuauggcuuuguaacuu

SEQ ID NO: 2072069 - RNA, 19 nt, Artificial Sequence
  Description of Artificial Sequence: Synthetic oligonucleotide
  Antisense strand to SEQ ID NO: 2072068
aaguuacaaagccauaagg

SEQ ID NO: 2072070 - RNA, 19 nt, Artificial Sequence
  Description of Artificial Sequence: Synthetic oligonucleotide
  Sense strand starting at position 327 of SEQ ID NO: 1881792
ggaacagaugauugcuuga

SEQ ID NO: 2072071 - RNA, 19 nt, Artificial Sequence
  Description of Artificial Sequence: Synthetic oligonucleotide
  Antisense strand to SEQ ID NO: 2072070
ucaagcaaucaucuguucc

SEQ ID NO: 2072072 - RNA, 19 nt, Artificial Sequence
  Description of Artificial Sequence: Synthetic oligonucleotide
  Sense strand starting at position 332 of SEQ ID NO: 1881792
agaugauugcuugaaccuu

SEQ ID NO: 2072073 - RNA, 19 nt, Artificial Sequence
  Description of Artificial Sequence: Synthetic oligonucleotide
  Antisense strand to SEQ ID NO: 2072072
aagguucaagcaaucaucu

SEQ ID NO: 2072074 - RNA, 19 nt, Artificial Sequence
  Description of Artificial Sequence: Synthetic oligonucleotide
  Sense strand starting at position 367 of SEQ ID NO: 1881792
aagugucucgguuggauau

SEQ ID NO: 2072075 - RNA, 19 nt, Artificial Sequence
  Description of Artificial Sequence: Synthetic oligonucleotide
  Antisense strand to SEQ ID NO: 2072074
auauccaaccgagacacuu

SEQ ID NO: 2072076 - RNA, 19 nt, Artificial Sequence
  Description of Artificial Sequence: Synthetic oligonucleotide
  Sense strand starting at position 436 of SEQ ID NO: 1881792
uccugucaggaauacugua

SEQ ID NO: 2072077 - RNA, 19 nt, Artificial Sequence
  Description of Artificial Sequence: Synthetic oligonucleotide
  Antisense strand to SEQ ID NO: 2072076
uacaguauuccugacagga

SEQ ID NO: 2072078 - RNA, 19 nt, Artificial Sequence
  Description of Artificial Sequence: Synthetic oligonucleotide
  Sense strand starting at position 444 of SEQ ID NO: 1881792
ggaauacuguauuacagaa

SEQ ID NO: 2072079 - RNA, 19 nt, Artificial Sequence
  Description of Artificial Sequence: Synthetic oligonucleotide
  Antisense strand to SEQ ID NO: 2072078
uucuguaauacaguauucc

SEQ ID NO: 2072080 - RNA, 19 nt, Artificial Sequence
  Description of Artificial Sequence: Synthetic oligonucleotide
  Sense strand starting at position 2462 of SEQ ID NO: 1881792
uaaugcaucgcgcuugagu

SEQ ID NO: 2072081 - RNA, 19 nt, Artificial Sequence
  Description of Artificial Sequence: Synthetic oligonucleotide
  Antisense strand to SEQ ID NO: 2072080
acucaagcgcgaugcauua

SEQ ID NO: 2072082 - RNA, 19 nt, Artificial Sequence
  Description of Artificial Sequence: Synthetic oligonucleotide
  Sense strand starting at position 2800 of SEQ ID NO: 1881792
gacguaccagggugaguua

SEQ ID NO: 2072083 - RNA, 19 nt, Artificial Sequence
  Description of Artificial Sequence: Synthetic oligonucleotide
  Antisense strand to SEQ ID NO: 2072082
uaacucacccugguacguc

SEQ ID NO: 2072084 - RNA, 19 nt, Artificial Sequence
  Description of Artificial Sequence: Synthetic oligonucleotide
  Sense strand starting at position 2811 of SEQ ID NO: 1881792
gugaguuaacuuugaguuc

SEQ ID NO: 2072085 - RNA, 19 nt, Artificial Sequence
  Description of Artificial Sequence: Synthetic oligonucleotide
  Antisense strand to SEQ ID NO: 2072084
gaacucaaaguuaacucac

SEQ ID NO: 2072086 - RNA, 19 nt, Artificial Sequence
  Description of Artificial Sequence: Synthetic oligonucleotide
  Sense strand starting at position 2814 of SEQ ID NO: 1881792
aguuaacuuugaguuccuu

SEQ ID NO: 2072087 - RNA, 19 nt, Artificial Sequence
  Description of Artificial Sequence: Synthetic oligonucleotide
  Antisense strand to SEQ ID NO: 2072086
aaggaacucaaaguuaacu

SEQ ID NO: 2072088 - RNA, 19 nt, Artificial Sequence
  Description of Artificial Sequence: Synthetic oligonucleotide
  Sense strand starting at position 2840 of SEQ ID NO: 1881792
caaaguugaguuugacguu

SEQ ID NO: 2072089 - RNA, 19 nt, Artificial Sequence
  Description of Artificial Sequence: Synthetic oligonucleotide
  Antisense strand to SEQ ID NO: 2072088
aacgucaaacucaacuuug

SEQ ID NO: 2072090 - RNA, 19 nt, Artificial Sequence
  Description of Artificial Sequence: Synthetic oligonucleotide
  Sense strand starting at position 2852 of SEQ ID NO: 1881792
ugacguuucuaaguuuacu

SEQ ID NO: 2072091 - RNA, 19 nt, Artificial Sequence
  Description of Artificial Sequence: Synthetic oligonucleotide
  Antisense strand to SEQ ID NO: 2072090
aguaaacuuagaaacguca

SEQ ID NO: 2072092 - RNA, 19 nt, Artificial Sequence
  Description of Artificial Sequence: Synthetic oligonucleotide
  Sense strand starting at position 3004 of SEQ ID NO: 1881792
caugguuucccucgacuuu

SEQ ID NO: 2072093 - RNA, 19 nt, Artificial Sequence
  Description of Artificial Sequence: Synthetic oligonucleotide
  Antisense strand to SEQ ID NO: 2072092
aaagucgagggaaaccaug

SEQ ID NO: 2072094 - RNA, 19 nt, Artificial Sequence
  Description of Artificial Sequence: Synthetic oligonucleotide
  Sense strand starting at position 3034 of SEQ ID NO: 1881792
uuuccuugacaguguuauu

SEQ ID NO: 2072095 - RNA, 19 nt, Artificial Sequence
  Description of Artificial Sequence: Synthetic oligonucleotide
  Antisense strand to SEQ ID NO: 2072094
aauaacacugucaaggaaa

SEQ ID NO: 2072096 - RNA, 19 nt, Artificial Sequence
  Description of Artificial Sequence: Synthetic oligonucleotide
  Sense strand starting at position 3039 of SEQ ID NO: 1881792
uugacaguguuauuaggga

SEQ ID NO: 2072097 - RNA, 19 nt, Artificial Sequence
  Description of Artificial Sequence: Synthetic oligonucleotide
  Antisense strand to SEQ ID NO: 2072096
ucccuaauaacacugucaa

SEQ ID NO: 2072098 - RNA, 19 nt, Artificial Sequence
  Description of Artificial Sequence: Synthetic oligonucleotide
  Sense strand starting at position 3044 of SEQ ID NO: 1881792
aguguuauuagggaaguga

SEQ ID NO: 2072099 - RNA, 19 nt, Artificial Sequence
  Description of Artificial Sequence: Synthetic oligonucleotide
  Antisense strand to SEQ ID NO: 2072098
ucacuucccuaauaacacu

SEQ ID NO: 2072100 - RNA, 19 nt, Artificial Sequence
  Description of Artificial Sequence: Synthetic oligonucleotide
  Sense strand starting at position 3072 of SEQ ID NO: 1881792
cucguugaaacgcauuaau

SEQ ID NO: 2072101 - RNA, 19 nt, Artificial Sequence
  Description of Artificial Sequence: Synthetic oligonucleotide
  Antisense strand to SEQ ID NO: 2072100
auuaaugcguuucaacgag

SEQ ID NO: 2072102 - RNA, 19 nt, Artificial Sequence
  Description of Artificial Sequence: Synthetic oligonucleotide
  Sense strand starting at position 3083 of SEQ ID NO: 1881792
gcauuaaugggucauugug

SEQ ID NO: 2072103 - RNA, 19 nt, Artificial Sequence
  Description of Artificial Sequence: Synthetic oligonucleotide
  Antisense strand to SEQ ID NO: 2072102
cacaaugacccauuaaugc

SEQ ID NO: 2072104 - RNA, 19 nt, Artificial Sequence
  Description of Artificial Sequence: Synthetic oligonucleotide
  Sense strand starting at position 3085 of SEQ ID NO: 1881792
auuaaugggucauugugau

SEQ ID NO: 2072105 - RNA, 19 nt, Artificial Sequence
  Description of Artificial Sequence: Synthetic oligonucleotide
  Antisense strand to SEQ ID NO: 2072104
aucacaaugacccauuaau

SEQ ID NO: 2072106 - RNA, 19 nt, Artificial Sequence
  Description of Artificial Sequence: Synthetic oligonucleotide
  Sense strand starting at position 3126 of SEQ ID NO: 1881792
ggguaaugcuacguuugga

SEQ ID NO: 2072107 - RNA, 19 nt, Artificial Sequence
  Description of Artificial Sequence: Synthetic oligonucleotide
  Antisense strand to SEQ ID NO: 2072106
uccaaacguagcauuaccc

SEQ ID NO: 2072108 - RNA, 19 nt, Artificial Sequence
  Description of Artificial Sequence: Synthetic oligonucleotide
  Sense strand starting at position 3174 of SEQ ID NO: 1881792
cuggguuuauccucacauu

SEQ ID NO: 2072109 - RNA, 19 nt, Artificial Sequence
  Description of Artificial Sequence: Synthetic oligonucleotide
  Antisense strand to SEQ ID NO: 2072108
aaugugaggauaaacccag

SEQ ID NO: 2072110 - RNA, 19 nt, Artificial Sequence
  Description of Artificial Sequence: Synthetic oligonucleotide
  Sense strand starting at position 3235 of SEQ ID NO: 1881792
cuguuugugggucauuaaa

SEQ ID NO: 2072111 - RNA, 19 nt, Artificial Sequence
  Description of Artificial Sequence: Synthetic oligonucleotide
  Antisense strand to SEQ ID NO: 2072110
uuuaaugacccacaaacag

SEQ ID NO: 2072112 - RNA, 19 nt, Artificial Sequence
  Description of Artificial Sequence: Synthetic oligonucleotide
  Sense strand starting at position 3331 of SEQ ID NO: 1881792
augagaagguacguauguu

SEQ ID NO: 2072113 - RNA, 19 nt, Artificial Sequence
  Description of Artificial Sequence: Synthetic oligonucleotide
  Antisense strand to SEQ ID NO: 2072112
aacauacguaccuucucau

SEQ ID NO: 2072114 - RNA, 19 nt, Artificial Sequence
  Description of Artificial Sequence: Synthetic oligonucleotide
  Sense strand starting at position 3332 of SEQ ID NO: 1881792
ugagaagguacguauguuu

SEQ ID NO: 2072115 - RNA, 19 nt, Artificial Sequence
  Description of Artificial Sequence: Synthetic oligonucleotide
  Antisense strand to SEQ ID NO: 2072114
aaacauacguaccuucuca

SEQ ID NO: 2072116 - RNA, 19 nt, Artificial Sequence
  Description of Artificial Sequence: Synthetic oligonucleotide
  Sense strand starting at position 3421 of SEQ ID NO: 1881792
gaucuaaauccggagcguu

SEQ ID NO: 2072117 - RNA, 19 nt, Artificial Sequence
  Description of Artificial Sequence: Synthetic oligonucleotide
  Antisense strand to SEQ ID NO: 2072116
aacgcuccggauuuagauc

SEQ ID NO: 2072118 - RNA, 19 nt, Artificial Sequence
  Description of Artificial Sequence: Synthetic oligonucleotide
  Sense strand starting at position 3506 of SEQ ID NO: 1881792
ugagucuggugaagggaaa

SEQ ID NO: 2072119 - RNA, 19 nt, Artificial Sequence
  Description of Artificial Sequence: Synthetic oligonucleotide
  Antisense strand to SEQ ID NO: 2072118
uuucccuucaccagacuca

SEQ ID NO: 2072120 - RNA, 19 nt, Artificial Sequence
  Description of Artificial Sequence: Synthetic oligonucleotide
  Sense strand starting at position 3542 of SEQ ID NO: 1881792
cucugauagagcuggcuuu

SEQ ID NO: 2072121 - RNA, 19 nt, Artificial Sequence
  Description of Artificial Sequence: Synthetic oligonucleotide
  Antisense strand to SEQ ID NO: 2072120
aaagccagcucuaucagag

SEQ ID NO: 2072122 - RNA, 19 nt, Artificial Sequence
  Description of Artificial Sequence: Synthetic oligonucleotide
  Sense strand starting at position 3549 of SEQ ID NO: 1881792
agagcuggcuuucugagaa

SEQ ID NO: 2072123 - RNA, 19 nt, Artificial Sequence
  Description of Artificial Sequence: Synthetic oligonucleotide
  Antisense strand to SEQ ID NO: 2072122
uucucagaaagccagcucu

SEQ ID NO: 2072124 - RNA, 19 nt, Artificial Sequence
  Description of Artificial Sequence: Synthetic oligonucleotide
  Sense strand starting at position 3689 of SEQ ID NO: 1881792
ggauaacuauuccuggcua

SEQ ID NO: 2072125 - RNA, 19 nt, Artificial Sequence
  Description of Artificial Sequence: Synthetic oligonucleotide
  Antisense strand to SEQ ID NO: 2072124
uagccaggaauaguuaucc

SEQ ID NO: 2072126 - RNA, 19 nt, Artificial Sequence
  Description of Artificial Sequence: Synthetic oligonucleotide
  Sense strand starting at position 3729 of SEQ ID NO: 1881792
ccauucuuaguguacagaa

SEQ ID NO: 2072127 - RNA, 19 nt, Artificial Sequence
  Description of Artificial Sequence: Synthetic oligonucleotide
  Antisense strand to SEQ ID NO: 2072126
uucuguacacuaagaaugg

SEQ ID NO: 2072128 - RNA, 19 nt, Artificial Sequence
  Description of Artificial Sequence: Synthetic oligonucleotide
  Sense strand starting at position 3731 of SEQ ID NO: 1881792
auucuuaguguacagaauu

SEQ ID NO: 2072129 - RNA, 19 nt, Artificial Sequence
  Description of Artificial Sequence: Synthetic oligonucleotide
  Antisense strand to SEQ ID NO: 2072128
aauucuguacacuaagaau

SEQ ID NO: 2072130 - RNA, 19 nt, Artificial Sequence
  Description of Artificial Sequence: Synthetic oligonucleotide
  Sense strand starting at position 728 of SEQ ID NO: 1881793
gauauaauaguaugagucu

SEQ ID NO: 2072131 - RNA, 19 nt, Artificial Sequence
  Description of Artificial Sequence: Synthetic oligonucleotide
  Antisense strand to SEQ ID NO: 2072130
agacucauacuauuauauc

SEQ ID NO: 2072132 - RNA, 19 nt, Artificial Sequence
  Description of Artificial Sequence: Synthetic oligonucleotide
  Sense strand starting at position 735 of SEQ ID NO: 1881793
uaguaugagucuuuaguuc

SEQ ID NO: 2072133 - RNA, 19 nt, Artificial Sequence
  Description of Artificial Sequence: Synthetic oligonucleotide
  Antisense strand to SEQ ID NO: 2072132
gaacuaaagacucauacua

SEQ ID NO: 2072134 - RNA, 19 nt, Artificial Sequence
  Description of Artificial Sequence: Synthetic oligonucleotide
  Sense strand starting at position 891 of SEQ ID NO: 1881793
cucaacuuguugcuagauu

SEQ ID NO: 2072135 - RNA, 19 nt, Artificial Sequence
  Description of Artificial Sequence: Synthetic oligonucleotide
  Antisense strand to SEQ ID NO: 2072134
aaucuagcaacaaguugag

SEQ ID NO: 2072136 - RNA, 19 nt, Artificial Sequence
  Description of Artificial Sequence: Synthetic oligonucleotide
  Sense strand starting at position 892 of SEQ ID NO: 1881793
ucaacuuguugcuagauuu

SEQ ID NO: 2072137 - RNA, 19 nt, Artificial Sequence
  Description of Artificial Sequence: Synthetic oligonucleotide
  Antisense strand to SEQ ID NO: 2072136
aaaucuagcaacaaguuga

SEQ ID NO: 2072138 - RNA, 19 nt, Artificial Sequence
  Description of Artificial Sequence: Synthetic oligonucleotide
  Sense strand starting at position 1104 of SEQ ID NO: 1881793
uccuuucguguggcuaauu

SEQ ID NO: 2072139 - RNA, 19 nt, Artificial Sequence
  Description of Artificial Sequence: Synthetic oligonucleotide
  Antisense strand to SEQ ID NO: 2072138
aauuagccacacgaaagga

SEQ ID NO: 2072140 - RNA, 19 nt, Artificial Sequence
  Description of Artificial Sequence: Synthetic oligonucleotide
  Sense strand starting at position 1105 of SEQ ID NO: 1881793
ccuuucguguggcuaauuu

SEQ ID NO: 2072141 - RNA, 19 nt, Artificial Sequence
  Description of Artificial Sequence: Synthetic oligonucleotide
  Antisense strand to SEQ ID NO: 2072140
aaauuagccacacgaaagg

SEQ ID NO: 2072142 - RNA, 19 nt, Artificial Sequence
  Description of Artificial Sequence: Synthetic oligonucleotide
  Sense strand starting at position 1151 of SEQ ID NO: 1881793
agcuccaaccuaugaaaga

SEQ ID NO: 2072143 - RNA, 19 nt, Artificial Sequence
  Description of Artificial Sequence: Synthetic oligonucleotide
  Antisense strand to SEQ ID NO: 2072142
ucuuucauagguuggagcu

SEQ ID NO: 2072144 - RNA, 19 nt, Artificial Sequence
  Description of Artificial Sequence: Synthetic oligonucleotide
  Sense strand starting at position 1161 of SEQ ID NO: 1881793
uaugaaagacuuugucagu

SEQ ID NO: 2072145 - RNA, 19 nt, Artificial Sequence
  Description of Artificial Sequence: Synthetic oligonucleotide
  Antisense strand to SEQ ID NO: 2072144
acugacaaagucuuucaua

SEQ ID NO: 2072146 - RNA, 19 nt, Artificial Sequence
  Description of Artificial Sequence: Synthetic oligonucleotide
  Sense strand starting at position 1162 of SEQ ID NO: 1881793
augaaagacuuugucaguu

SEQ ID NO: 2072147 - RNA, 19 nt, Artificial Sequence
  Description of Artificial Sequence: Synthetic oligonucleotide
  Antisense strand to SEQ ID NO: 2072146
aacugacaaagucuuucau

SEQ ID NO: 2072148 - RNA, 19 nt, Artificial Sequence
  Description of Artificial Sequence: Synthetic oligonucleotide
  Sense strand starting at position 1185 of SEQ ID NO: 1881793
ugucaaagccagcaucuuu

SEQ ID NO: 2072149 - RNA, 19 nt, Artificial Sequence
  Description of Artificial Sequence: Synthetic oligonucleotide
  Antisense strand to SEQ ID NO: 2072148
aaagaugcuggcuuugaca

SEQ ID NO: 2072150 - RNA, 19 nt, Artificial Sequence
  Description of Artificial Sequence: Synthetic oligonucleotide
  Sense strand starting at position 1219 of SEQ ID NO: 1881793
cccugaacgcucgugguuu

SEQ ID NO: 2072151 - RNA, 19 nt, Artificial Sequence
  Description of Artificial Sequence: Synthetic oligonucleotide
  Antisense strand to SEQ ID NO: 2072150
aaaccacgagcguucaggg

SEQ ID NO: 2072152 - RNA, 19 nt, Artificial Sequence
  Description of Artificial Sequence: Synthetic oligonucleotide
  Sense strand starting at position 1511 of SEQ ID NO: 1881793
gcagguaugacagacguuu

SEQ ID NO: 2072153 - RNA, 19 nt, Artificial Sequence
  Description of Artificial Sequence: Synthetic oligonucleotide
  Antisense strand to SEQ ID NO: 2072152
aaacgucugucauaccugc

SEQ ID NO: 2072154 - RNA, 19 nt, Artificial Sequence
  Description of Artificial Sequence: Synthetic oligonucleotide
  Sense strand starting at position 1520 of SEQ ID NO: 1881793
acagacguuugauucccaa

SEQ ID NO: 2072155 - RNA, 19 nt, Artificial Sequence
  Description of Artificial Sequence: Synthetic oligonucleotide
  Antisense strand to SEQ ID NO: 2072154
uugggaaucaaacgucugu

SEQ ID NO: 2072156 - RNA, 19 nt, Artificial Sequence
  Description of Artificial Sequence: Synthetic oligonucleotide
  Sense strand starting at position 1549 of SEQ ID NO: 1881793
uuugguuucuucguuuacu

SEQ ID NO: 2072157 - RNA, 19 nt, Artificial Sequence
  Description of Artificial Sequence: Synthetic oligonucleotide
  Antisense strand to SEQ ID NO: 2072156
aguaaacgaagaaaccaaa

SEQ ID NO: 2072158 - RNA, 19 nt, Artificial Sequence
  Description of Artificial Sequence: Synthetic oligonucleotide
  Sense strand starting at position 1552 of SEQ ID NO: 1881793
gguuucuucguuuacugaa

SEQ ID NO: 2072159 - RNA, 19 nt, Artificial Sequence
  Description of Artificial Sequence: Synthetic oligonucleotide
  Antisense strand to SEQ ID NO: 2072158
uucaguaaacgaagaaacc

SEQ ID NO: 2072160 - RNA, 19 nt, Artificial Sequence
  Description of Artificial Sequence: Synthetic oligonucleotide
  Sense strand starting at position 2173 of SEQ ID NO: 1881793
gguggucgccgucuuucau

SEQ ID NO: 2072161 - RNA, 19 nt, Artificial Sequence
  Description of Artificial Sequence: Synthetic oligonucleotide
  Antisense strand to SEQ ID NO: 2072160
augaaagacggcgaccacc

SEQ ID NO: 2072162 - RNA, 19 nt, Artificial Sequence
  Description of Artificial Sequence: Synthetic oligonucleotide
  Sense strand starting at position 2553 of SEQ ID NO: 1881793
gcaggaguucuccaaggug

SEQ ID NO: 2072163 - RNA, 19 nt, Artificial Sequence
  Description of Artificial Sequence: Synthetic oligonucleotide
  Antisense strand to SEQ ID NO: 2072162
caccuuggagaacuccugc

SEQ ID NO: 2072164 - RNA, 19 nt, Artificial Sequence
  Description of Artificial Sequence: Synthetic oligonucleotide
  Sense strand starting at position 2556 of SEQ ID NO: 1881793
ggaguucuccaaggugcaa

SEQ ID NO: 2072165 - RNA, 19 nt, Artificial Sequence
  Description of Artificial Sequence: Synthetic oligonucleotide
  Antisense strand to SEQ ID NO: 2072164
uugcaccuuggagaacucc

SEQ ID NO: 2072166 - RNA, 19 nt, Artificial Sequence
  Description of Artificial Sequence: Synthetic oligonucleotide
  Sense strand starting at position 2660 of SEQ ID NO: 1881793
gcaguuguccuuccuggca

SEQ ID NO: 2072167 - RNA, 19 nt, Artificial Sequence
  Description of Artificial Sequence: Synthetic oligonucleotide
  Antisense strand to SEQ ID NO: 2072166
ugccaggaaggacaacugc

SEQ ID NO: 2072168 - RNA, 19 nt, Artificial Sequence
  Description of Artificial Sequence: Synthetic oligonucleotide
  Sense strand starting at position 3041 of SEQ ID NO: 1881793
ggaccugggucucuguuua

SEQ ID NO: 2072169 - RNA, 19 nt, Artificial Sequence
  Description of Artificial Sequence: Synthetic oligonucleotide
  Antisense strand to SEQ ID NO: 2072168
uaaacagagacccaggucc

SEQ ID NO: 2072170 - RNA, 19 nt, Artificial Sequence
  Description of Artificial Sequence: Synthetic oligonucleotide
  Sense strand starting at position 3051 of SEQ ID NO: 1881793
cucuguuuauggucucuga

SEQ ID NO: 2072171 - RNA, 19 nt, Artificial Sequence
  Description of Artificial Sequence: Synthetic oligonucleotide
  Antisense strand to SEQ ID NO: 2072170
ucagagaccauaaacagag

SEQ ID NO: 2072172 - RNA, 19 nt, Artificial Sequence
  Description of Artificial Sequence: Synthetic oligonucleotide
  Sense strand starting at position 3054 of SEQ ID NO: 1881793
uguuuauggucucugaguu

SEQ ID NO: 2072173 - RNA, 19 nt, Artificial Sequence
  Description of Artificial Sequence: Synthetic oligonucleotide
  Antisense strand to SEQ ID NO: 2072172
aacucagagaccauaaaca

SEQ ID NO: 2072174 - RNA, 19 nt, Artificial Sequence
  Description of Artificial Sequence: Synthetic oligonucleotide
  Sense strand starting at position 3055 of SEQ ID NO: 1881793
guuuauggucucugaguuc

SEQ ID NO: 2072175 - RNA, 19 nt, Artificial Sequence
  Description of Artificial Sequence: Synthetic oligonucleotide
  Antisense strand to SEQ ID NO: 2072174
gaacucagagaccauaaac

SEQ ID NO: 2072176 - RNA, 19 nt, Artificial Sequence
  Description of Artificial Sequence: Synthetic oligonucleotide
  Sense strand starting at position 3165 of SEQ ID NO: 1881793
ccacaugaguagcuuuauu

SEQ ID NO: 2072177 - RNA, 19 nt, Artificial Sequence
  Description of Artificial Sequence: Synthetic oligonucleotide
  Antisense strand to SEQ ID NO: 2072176
aauaaagcuacucaugugg

SEQ ID NO: 2072178 - RNA, 19 nt, Artificial Sequence
  Description of Artificial Sequence: Synthetic oligonucleotide
  Sense strand starting at position 3176 of SEQ ID NO: 1881793
gcuuuauucugacuccaag

SEQ ID NO: 2072179 - RNA, 19 nt, Artificial Sequence
  Description of Artificial Sequence: Synthetic oligonucleotide
  Antisense strand to SEQ ID NO: 2072178
cuuggagucagaauaaagc

SEQ ID NO: 2072180 - RNA, 19 nt, Artificial Sequence
  Description of Artificial Sequence: Synthetic oligonucleotide
  Sense strand starting at position 3319 of SEQ ID NO: 1881793
gguccacuucuuggguuau

SEQ ID NO: 2072181 - RNA, 19 nt, Artificial Sequence
  Description of Artificial Sequence: Synthetic oligonucleotide
  Antisense strand to SEQ ID NO: 2072180
auaacccaagaaguggacc

SEQ ID NO: 2072182 - RNA, 19 nt, Artificial Sequence
  Description of Artificial Sequence: Synthetic oligonucleotide
  Sense strand starting at position 3321 of SEQ ID NO: 1881793
uccacuucuuggguuauua

SEQ ID NO: 2072183 - RNA, 19 nt, Artificial Sequence
  Description of Artificial Sequence: Synthetic oligonucleotide
  Antisense strand to SEQ ID NO: 2072182
uaauaacccaagaagugga

SEQ ID NO: 2072184 - RNA, 19 nt, Artificial Sequence
  Description of Artificial Sequence: Synthetic oligonucleotide
  Sense strand starting at position 3440 of SEQ ID NO: 1881793
ucauauaagcaguggaauc

SEQ ID NO: 2072185 - RNA, 19 nt, Artificial Sequence
  Description of Artificial Sequence: Synthetic oligonucleotide
  Antisense strand to SEQ ID NO: 2072184
gauuccacugcuuauauga

SEQ ID NO: 2072186 - RNA, 19 nt, Artificial Sequence
  Description of Artificial Sequence: Synthetic oligonucleotide
  Sense strand starting at position 3450 of SEQ ID NO: 1881793
aguggaaucuuagcuuuaa

SEQ ID NO: 2072187 - RNA, 19 nt, Artificial Sequence
  Description of Artificial Sequence: Synthetic oligonucleotide
  Antisense strand to SEQ ID NO: 2072186
uuaaagcuaagauuccacu

SEQ ID NO: 2072188 - RNA, 19 nt, Artificial Sequence
  Description of Artificial Sequence: Synthetic oligonucleotide
  Sense strand starting at position 3451 of SEQ ID NO: 1881793
guggaaucuuagcuuuaaa

SEQ ID NO: 2072189 - RNA, 19 nt, Artificial Sequence
  Description of Artificial Sequence: Synthetic oligonucleotide
  Antisense strand to SEQ ID NO: 2072188
uuuaaagcuaagauuccac

SEQ ID NO: 2072190 - RNA, 19 nt, Artificial Sequence
  Description of Artificial Sequence: Synthetic oligonucleotide
  Sense strand starting at position 3584 of SEQ ID NO: 1881793
cccugaguggugggauaua

SEQ ID NO: 2072191 - RNA, 19 nt, Artificial Sequence
  Description of Artificial Sequence: Synthetic oligonucleotide
  Antisense strand to SEQ ID NO: 2072190
uauaucccaccacucaggg

SEQ ID NO: 2072192 - RNA, 19 nt, Artificial Sequence
  Description of Artificial Sequence: Synthetic oligonucleotide
  Sense strand starting at position 3622 of SEQ ID NO: 1881793
ggugggauuuacgggaagu

SEQ ID NO: 2072193 - RNA, 19 nt, Artificial Sequence
  Description of Artificial Sequence: Synthetic oligonucleotide
  Antisense strand to SEQ ID NO: 2072192
acuucccguaaaucccacc

SEQ ID NO: 2072194 - RNA, 19 nt, Artificial Sequence
  Description of Artificial Sequence: Synthetic oligonucleotide
  Sense strand starting at position 3635 of SEQ ID NO: 1881793
ggaaguugucccuggauug

SEQ ID NO: 2072195 - RNA, 19 nt, Artificial Sequence
  Description of Artificial Sequence: Synthetic oligonucleotide
  Antisense strand to SEQ ID NO: 2072194
caauccagggacaacuucc

SEQ ID NO: 2072196 - RNA, 19 nt, Artificial Sequence
  Description of Artificial Sequence: Synthetic oligonucleotide
  Sense strand starting at position 3636 of SEQ ID NO: 1881793
gaaguugucccuggauugu

SEQ ID NO: 2072197 - RNA, 19 nt, Artificial Sequence
  Description of Artificial Sequence: Synthetic oligonucleotide
  Antisense strand to SEQ ID NO: 2072196
acaauccagggacaacuuc

SEQ ID NO: 2072198 - RNA, 19 nt, Artificial Sequence
  Description of Artificial Sequence: Synthetic oligonucleotide
  Sense strand starting at position 3645 of SEQ ID NO: 1881793
ccuggauugugagauuuaa

SEQ ID NO: 2072199 - RNA, 19 nt, Artificial Sequence
  Description of Artificial Sequence: Synthetic oligonucleotide
  Antisense strand to SEQ ID NO: 2072198
uuaaaucucacaauccagg

SEQ ID NO: 2072200 - RNA, 19 nt, Artificial Sequence
  Description of Artificial Sequence: Synthetic oligonucleotide
  Sense strand starting at position 3725 of SEQ ID NO: 1881793
gggaguugccucuggcauc

SEQ ID NO: 2072201 - RNA, 19 nt, Artificial Sequence
  Description of Artificial Sequence: Synthetic oligonucleotide
  Antisense strand to SEQ ID NO: 2072200
gaugccagaggcaacuccc

SEQ ID NO: 2072202 - RNA, 19 nt, Artificial Sequence
  Description of Artificial Sequence: Synthetic oligonucleotide
  Sense strand starting at position 3771 of SEQ ID NO: 1881793
cuacguugguaugccaaau

SEQ ID NO: 2072203 - RNA, 19 nt, Artificial Sequence
  Description of Artificial Sequence: Synthetic oligonucleotide
  Antisense strand to SEQ ID NO: 2072202
auuuggcauaccaacguag

SEQ ID NO: 2072204 - RNA, 19 nt, Artificial Sequence
  Description of Artificial Sequence: Synthetic oligonucleotide
  Sense strand starting at position 3868 of SEQ ID NO: 1881793
gcaugugggcauggagaau

SEQ ID NO: 2072205 - RNA, 19 nt, Artificial Sequence
  Description of Artificial Sequence: Synthetic oligonucleotide
  Antisense strand to SEQ ID NO: 2072204
auucuccaugcccacaugc

SEQ ID NO: 2072206 - RNA, 19 nt, Artificial Sequence
  Description of Artificial Sequence: Synthetic oligonucleotide
  Sense strand starting at position 3968 of SEQ ID NO: 1881793
aucggauucccucauugac

SEQ ID NO: 2072207 - RNA, 19 nt, Artificial Sequence
  Description of Artificial Sequence: Synthetic oligonucleotide
  Antisense strand to SEQ ID NO: 2072206
gucaaugagggaauccgau

SEQ ID NO: 2072208 - RNA, 19 nt, Artificial Sequence
  Description of Artificial Sequence: Synthetic oligonucleotide
  Sense strand starting at position 3971 of SEQ ID NO: 1881793
ggauucccucauugacuga

SEQ ID NO: 2072209 - RNA, 19 nt, Artificial Sequence
  Description of Artificial Sequence: Synthetic oligonucleotide
  Antisense strand to SEQ ID NO: 2072208
ucagucaaugagggaaucc

SEQ ID NO: 2072210 - RNA, 19 nt, Artificial Sequence
  Description of Artificial Sequence: Synthetic oligonucleotide
  Sense strand starting at position 1543 of SEQ ID NO: 1881794
cccugugguucuuccgauu

SEQ ID NO: 2072211 - RNA, 19 nt, Artificial Sequence
  Description of Artificial Sequence: Synthetic oligonucleotide
  Antisense strand to SEQ ID NO: 2072210
aaucggaagaaccacaggg

SEQ ID NO: 2072212 - RNA, 19 nt, Artificial Sequence
  Description of Artificial Sequence: Synthetic oligonucleotide
  Sense strand starting at position 2217 of SEQ ID NO: 1881794
cggaguggcuucccggaua

SEQ ID NO: 2072213 - RNA, 19 nt, Artificial Sequence
  Description of Artificial Sequence: Synthetic oligonucleotide
  Antisense strand to SEQ ID NO: 2072212
uauccgggaagccacuccg

SEQ ID NO: 2072214 - RNA, 19 nt, Artificial Sequence
  Description of Artificial Sequence: Synthetic oligonucleotide
  Sense strand starting at position 3589 of SEQ ID NO: 1881794
uguacuuaauugucacaua

SEQ ID NO: 2072215 - RNA, 19 nt, Artificial Sequence
  Description of Artificial Sequence: Synthetic oligonucleotide
  Antisense strand to SEQ ID NO: 2072214
uaugugacaauuaaguaca

SEQ ID NO: 2072216 - RNA, 19 nt, Artificial Sequence
  Description of Artificial Sequence: Synthetic oligonucleotide
  Sense strand starting at position 3590 of SEQ ID NO: 1881794
guacuuaauugucacauaa

SEQ ID NO: 2072217 - RNA, 19 nt, Artificial Sequence
  Description of Artificial Sequence: Synthetic oligonucleotide
  Antisense strand to SEQ ID NO: 2072216
uuaugugacaauuaaguac

SEQ ID NO: 2072218 - RNA, 19 nt, Artificial Sequence
  Description of Artificial Sequence: Synthetic oligonucleotide
  Sense strand starting at position 3600 of SEQ ID NO: 1881794
gucacauaacauuguauca

SEQ ID NO: 2072219 - RNA, 19 nt, Artificial Sequence
  Description of Artificial Sequence: Synthetic oligonucleotide
  Antisense strand to SEQ ID NO: 2072218
ugauacaauguuaugugac

SEQ ID NO: 2072220 - RNA, 19 nt, Artificial Sequence
  Description of Artificial Sequence: Synthetic oligonucleotide
  Sense strand starting at position 3667 of SEQ ID NO: 1881794
ugggccaguucuucugaau

SEQ ID NO: 2072221 - RNA, 19 nt, Artificial Sequence
  Description of Artificial Sequence: Synthetic oligonucleotide
  Antisense strand to SEQ ID NO: 2072220
auucagaagaacuggccca

SEQ ID NO: 2072222 - RNA, 19 nt, Artificial Sequence
  Description of Artificial Sequence: Synthetic oligonucleotide
  Sense strand starting at position 263 of SEQ ID NO: 1881795
acucauguggaaggucaau

SEQ ID NO: 2072223 - RNA, 19 nt, Artificial Sequence
  Description of Artificial Sequence: Synthetic oligonucleotide
  Antisense strand to SEQ ID NO: 2072222
auugaccuuccacaugagu

SEQ ID NO: 2072224 - RNA, 19 nt, Artificial Sequence
  Description of Artificial Sequence: Synthetic oligonucleotide
  Sense strand starting at position 364 of SEQ ID NO: 1881795
caagauuucugugaaagac

SEQ ID NO: 2072225 - RNA, 19 nt, Artificial Sequence
  Description of Artificial Sequence: Synthetic oligonucleotide
  Antisense strand to SEQ ID NO: 2072224
gucuuucacagaaaucuug

SEQ ID NO: 2072226 - RNA, 19 nt, Artificial Sequence
  Description of Artificial Sequence: Synthetic oligonucleotide
  Sense strand starting at position 374 of SEQ ID NO: 1881795
gugaaagacgaucauguuu

SEQ ID NO: 2072227 - RNA, 19 nt, Artificial Sequence
  Description of Artificial Sequence: Synthetic oligonucleotide
  Antisense strand to SEQ ID NO: 2072226
aaacaugaucgucuuucac

SEQ ID NO: 2072228 - RNA, 19 nt, Artificial Sequence
  Description of Artificial Sequence: Synthetic oligonucleotide
  Sense strand starting at position 504 of SEQ ID NO: 1881795
uuuagucugguccauacua

SEQ ID NO: 2072229 - RNA, 19 nt, Artificial Sequence
  Description of Artificial Sequence: Synthetic oligonucleotide
  Antisense strand to SEQ ID NO: 2072228
uaguauggaccagacuaaa

SEQ ID NO: 2072230 - RNA, 19 nt, Artificial Sequence
  Description of Artificial Sequence: Synthetic oligonucleotide
  Sense strand starting at position 506 of SEQ ID NO: 1881795
uagucugguccauacuagu

SEQ ID NO: 2072231 - RNA, 19 nt, Artificial Sequence
  Description of Artificial Sequence: Synthetic oligonucleotide
  Antisense strand to SEQ ID NO: 2072230
acuaguauggaccagacua

SEQ ID NO: 2072232 - RNA, 19 nt, Artificial Sequence
  Description of Artificial Sequence: Synthetic oligonucleotide
  Sense strand starting at position 512 of SEQ ID NO: 1881795
gguccauacuagucaauaa

SEQ ID NO: 2072233 - RNA, 19 nt, Artificial Sequence
  Description of Artificial Sequence: Synthetic oligonucleotide
  Antisense strand to SEQ ID NO: 2072232
uuauugacuaguauggacc

SEQ ID NO: 2072234 - RNA, 19 nt, Artificial Sequence
  Description of Artificial Sequence: Synthetic oligonucleotide
  Sense strand starting at position 578 of SEQ ID NO: 1881795
uugcaaagaucaucuguac

SEQ ID NO: 2072235 - RNA, 19 nt, Artificial Sequence
  Description of Artificial Sequence: Synthetic oligonucleotide
  Antisense strand to SEQ ID NO: 2072234
guacagaugaucuuugcaa

SEQ ID NO: 2072236 - RNA, 19 nt, Artificial Sequence
  Description of Artificial Sequence: Synthetic oligonucleotide
  Sense strand starting at position 637 of SEQ ID NO: 1881795
agauccacuucggugaauu

SEQ ID NO: 2072237 - RNA, 19 nt, Artificial Sequence
  Description of Artificial Sequence: Synthetic oligonucleotide
  Antisense strand to SEQ ID NO: 2072236
aauucaccgaaguggaucu

SEQ ID NO: 2072238 - RNA, 19 nt, Artificial Sequence
  Description of Artificial Sequence: Synthetic oligonucleotide
  Sense strand starting at position 666 of SEQ ID NO: 1881795
cccaaaugugugcauuaug

SEQ ID NO: 2072239 - RNA, 19 nt, Artificial Sequence
  Description of Artificial Sequence: Synthetic oligonucleotide
  Antisense strand to SEQ ID NO: 2072238
cauaaugcacacauuuggg

SEQ ID NO: 2072240 - RNA, 19 nt, Artificial Sequence
  Description of Artificial Sequence: Synthetic oligonucleotide
  Sense strand starting at position 669 of SEQ ID NO: 1881795
aaaugugugcauuaugcaa

SEQ ID NO: 2072241 - RNA, 19 nt, Artificial Sequence
  Description of Artificial Sequence: Synthetic oligonucleotide
  Antisense strand to SEQ ID NO: 2072240
uugcauaaugcacacauuu

SEQ ID NO: 2072242 - RNA, 19 nt, Artificial Sequence
  Description of Artificial Sequence: Synthetic oligonucleotide
  Sense strand starting at position 735 of SEQ ID NO: 1881795
auauaaauggcuuggguau

SEQ ID NO: 2072243 - RNA, 19 nt, Artificial Sequence
  Description of Artificial Sequence: Synthetic oligonucleotide
  Antisense strand to SEQ ID NO: 2072242
auacccaagccauuuauau

SEQ ID NO: 2072244 - RNA, 19 nt, Artificial Sequence
  Description of Artificial Sequence: Synthetic oligonucleotide
  Sense strand starting at position 736 of SEQ ID NO: 1881795
uauaaauggcuuggguaua

SEQ ID NO: 2072245 - RNA, 19 nt, Artificial Sequence
  Description of Artificial Sequence: Synthetic oligonucleotide
  Antisense strand to SEQ ID NO: 2072244
uauacccaagccauuuaua

SEQ ID NO: 2072246 - RNA, 19 nt, Artificial Sequence
  Description of Artificial Sequence: Synthetic oligonucleotide
  Sense strand starting at position 774 of SEQ ID NO: 1881795
aguaauucgcaagaagcca

SEQ ID NO: 2072247 - RNA, 19 nt, Artificial Sequence
  Description of Artificial Sequence: Synthetic oligonucleotide
  Antisense strand to SEQ ID NO: 2072246
uggcuucuugcgaauuacu

SEQ ID NO: 2072248 - RNA, 19 nt, Artificial Sequence
  Description of Artificial Sequence: Synthetic oligonucleotide
  Sense strand starting at position 782 of SEQ ID NO: 1881795
gcaagaagccaacgaauua

SEQ ID NO: 2072249 - RNA, 19 nt, Artificial Sequence
  Description of Artificial Sequence: Synthetic oligonucleotide
  Antisense strand to SEQ ID NO: 2072248
uaauucguuggcuucuugc

SEQ ID NO: 2072250 - RNA, 19 nt, Artificial Sequence
  Description of Artificial Sequence: Synthetic oligonucleotide
  Sense strand starting at position 1010 of SEQ ID NO: 1881795
gaauccacccgauacgaua

SEQ ID NO: 2072251 - RNA, 19 nt, Artificial Sequence
  Description of Artificial Sequence: Synthetic oligonucleotide
  Antisense strand to SEQ ID NO: 2072250
uaucguaucggguggauuc

SEQ ID NO: 2072252 - RNA, 19 nt, Artificial Sequence
  Description of Artificial Sequence: Synthetic oligonucleotide
  Sense strand starting at position 1091 of SEQ ID NO: 1881795
agucaugggagucagugua

SEQ ID NO: 2072253 - RNA, 19 nt, Artificial Sequence
  Description of Artificial Sequence: Synthetic oligonucleotide
  Antisense strand to SEQ ID NO: 2072252
uacacugacucccaugacu

SEQ ID NO: 2072254 - RNA, 19 nt, Artificial Sequence
  Description of Artificial Sequence: Synthetic oligonucleotide
  Sense strand starting at position 1099 of SEQ ID NO: 1881795
gagucaguguaauccagac

SEQ ID NO: 2072255 - RNA, 19 nt, Artificial Sequence
  Description of Artificial Sequence: Synthetic oligonucleotide
  Antisense strand to SEQ ID NO: 2072254
gucuggauuacacugacuc

SEQ ID NO: 2072256 - RNA, 19 nt, Artificial Sequence
  Description of Artificial Sequence: Synthetic oligonucleotide
  Sense strand starting at position 1243 of SEQ ID NO: 1881795
gagggagaaucauacaaua

SEQ ID NO: 2072257 - RNA, 19 nt, Artificial Sequence
  Description of Artificial Sequence: Synthetic oligonucleotide
  Antisense strand to SEQ ID NO: 2072256
uauuguaugauucucccuc

SEQ ID NO: 2072258 - RNA, 19 nt, Artificial Sequence
  Description of Artificial Sequence: Synthetic oligonucleotide
  Sense strand starting at position 1490 of SEQ ID NO: 1881795
cgggcauucccucacacaa

SEQ ID NO: 2072259 - RNA, 19 nt, Artificial Sequence
  Description of Artificial Sequence: Synthetic oligonucleotide
  Antisense strand to SEQ ID NO: 2072258
uugugugagggaaugcccg

SEQ ID NO: 2072260 - RNA, 19 nt, Artificial Sequence
  Description of Artificial Sequence: Synthetic oligonucleotide
  Sense strand starting at position 2269 of SEQ ID NO: 1881795
gguauuaaagagugaccuu

SEQ ID NO: 2072261 - RNA, 19 nt, Artificial Sequence
  Description of Artificial Sequence: Synthetic oligonucleotide
  Antisense strand to SEQ ID NO: 2072260
aaggucacucuuuaauacc

SEQ ID NO: 2072262 - RNA, 19 nt, Artificial Sequence
  Description of Artificial Sequence: Synthetic oligonucleotide
  Sense strand starting at position 2278 of SEQ ID NO: 1881795
gagugaccuuggcuuagau

SEQ ID NO: 2072263 - RNA, 19 nt, Artificial Sequence
  Description of Artificial Sequence: Synthetic oligonucleotide
  Antisense strand to SEQ ID NO: 2072262
aucuaagccaaggucacuc

SEQ ID NO: 2072264 - RNA, 19 nt, Artificial Sequence
  Description of Artificial Sequence: Synthetic oligonucleotide
  Sense strand starting at position 2280 of SEQ ID NO: 1881795
gugaccuuggcuuagauau

SEQ ID NO: 2072265 - RNA, 19 nt, Artificial Sequence
  Description of Artificial Sequence: Synthetic oligonucleotide
  Antisense strand to SEQ ID NO: 2072264
auaucuaagccaaggucac

SEQ ID NO: 2072266 - RNA, 19 nt, Artificial Sequence
  Description of Artificial Sequence: Synthetic oligonucleotide
  Sense strand starting at position 2409 of SEQ ID NO: 1881795
cgcguaggcccuccugaaa

SEQ ID NO: 2072267 - RNA, 19 nt, Artificial Sequence
  Description of Artificial Sequence: Synthetic oligonucleotide
  Antisense strand to SEQ ID NO: 2072266
uuucaggagggccuacgcg

SEQ ID NO: 2072268 - RNA, 19 nt, Artificial Sequence
  Description of Artificial Sequence: Synthetic oligonucleotide
  Sense strand starting at position 2659 of SEQ ID NO: 1881795
ccguuuaaccgguacagaa

SEQ ID NO: 2072269 - RNA, 19 nt, Artificial Sequence
  Description of Artificial Sequence: Synthetic oligonucleotide
  Antisense strand to SEQ ID NO: 2072268
uucuguaccgguuaaacgg

SEQ ID NO: 2072270 - RNA, 19 nt, Artificial Sequence
  Description of Artificial Sequence: Synthetic oligonucleotide
  Sense strand starting at position 2661 of SEQ ID NO: 1881795
guuuaaccgguacagaaua

SEQ ID NO: 2072271 - RNA, 19 nt, Artificial Sequence
  Description of Artificial Sequence: Synthetic oligonucleotide
  Antisense strand to SEQ ID NO: 2072270
uauucuguaccgguuaaac

SEQ ID NO: 2072272 - RNA, 19 nt, Artificial Sequence
  Description of Artificial Sequence: Synthetic oligonucleotide
  Sense strand starting at position 2822 of SEQ ID NO: 1881795
gauaaauugucuuuaaggu

SEQ ID NO: 2072273 - RNA, 19 nt, Artificial Sequence
  Description of Artificial Sequence: Synthetic oligonucleotide
  Antisense strand to SEQ ID NO: 2072272
accuuaaagacaauuuauc

SEQ ID NO: 2072274 - RNA, 19 nt, Artificial Sequence
  Description of Artificial Sequence: Synthetic oligonucleotide
  Sense strand starting at position 2932 of SEQ ID NO: 1881795
auccaagaaccguaguauu

SEQ ID NO: 2072275 - RNA, 19 nt, Artificial Sequence
  Description of Artificial Sequence: Synthetic oligonucleotide
  Antisense strand to SEQ ID NO: 2072274
aauacuacgguucuuggau

SEQ ID NO: 2072276 - RNA, 19 nt, Artificial Sequence
  Description of Artificial Sequence: Synthetic oligonucleotide
  Sense strand starting at position 2998 of SEQ ID NO: 1881795
ggaaauauuuagcaaucac

SEQ ID NO: 2072277 - RNA, 19 nt, Artificial Sequence
  Description of Artificial Sequence: Synthetic oligonucleotide
  Antisense strand to SEQ ID NO: 2072276
gugauugcuaaauauuucc

SEQ ID NO: 2072278 - RNA, 19 nt, Artificial Sequence
  Description of Artificial Sequence: Synthetic oligonucleotide
  Sense strand starting at position 3028 of SEQ ID NO: 1881795
ucacgaauuuacuaaugau

SEQ ID NO: 2072279 - RNA, 19 nt, Artificial Sequence
  Description of Artificial Sequence: Synthetic oligonucleotide
  Antisense strand to SEQ ID NO: 2072278
aucauuaguaaauucguga

SEQ ID NO: 2072280 - RNA, 19 nt, Artificial Sequence
  Description of Artificial Sequence: Synthetic oligonucleotide
  Sense strand starting at position 3078 of SEQ ID NO: 1881795
aaagaaugcuuguugauau

SEQ ID NO: 2072281 - RNA, 19 nt, Artificial Sequence
  Description of Artificial Sequence: Synthetic oligonucleotide
  Antisense strand to SEQ ID NO: 2072280
auaucaacaagcauucuuu

SEQ ID NO: 2072282 - RNA, 19 nt, Artificial Sequence
  Description of Artificial Sequence: Synthetic oligonucleotide
  Sense strand starting at position 3271 of SEQ ID NO: 1881795
acccauagccagugaugaa

SEQ ID NO: 2072283 - RNA, 19 nt, Artificial Sequence
  Description of Artificial Sequence: Synthetic oligonucleotide
  Antisense strand to SEQ ID NO: 2072282
uucaucacuggcuaugggu

SEQ ID NO: 2072284 - RNA, 19 nt, Artificial Sequence
  Description of Artificial Sequence: Synthetic oligonucleotide
  Sense strand starting at position 3278 of SEQ ID NO: 1881795
gccagugaugaaugaaauu

SEQ ID NO: 2072285 - RNA, 19 nt, Artificial Sequence
  Description of Artificial Sequence: Synthetic oligonucleotide
  Antisense strand to SEQ ID NO: 2072284
aauuucauucaucacuggc

SEQ ID NO: 2072286 - RNA, 19 nt, Artificial Sequence
  Description of Artificial Sequence: Synthetic oligonucleotide
  Sense strand starting at position 3374 of SEQ ID NO: 1881795
ggaagcuuuggcuaccaga

SEQ ID NO: 2072287 - RNA, 19 nt, Artificial Sequence
  Description of Artificial Sequence: Synthetic oligonucleotide
  Antisense strand to SEQ ID NO: 2072286
ucugguagccaaagcuucc

SEQ ID NO: 2072288 - RNA, 19 nt, Artificial Sequence
  Description of Artificial Sequence: Synthetic oligonucleotide
  Sense strand starting at position 3391 of SEQ ID NO: 1881795
gacuaugcccuacagaugu

SEQ ID NO: 2072289 - RNA, 19 nt, Artificial Sequence
  Description of Artificial Sequence: Synthetic oligonucleotide
  Antisense strand to SEQ ID NO: 2072288
acaucuguagggcauaguc

SEQ ID NO: 2072290 - RNA, 19 nt, Artificial Sequence
  Description of Artificial Sequence: Synthetic oligonucleotide
  Sense strand starting at position 3460 of SEQ ID NO: 1881795
auuugaaaugccugggugu

SEQ ID NO: 2072291 - RNA, 19 nt, Artificial Sequence
  Description of Artificial Sequence: Synthetic oligonucleotide
  Antisense strand to SEQ ID NO: 2072290
acacccaggcauuucaaau

SEQ ID NO: 2072292 - RNA, 19 nt, Artificial Sequence
  Description of Artificial Sequence: Synthetic oligonucleotide
  Sense strand starting at position 3473 of SEQ ID NO: 1881795
gggugugauugacucuuag

SEQ ID NO: 2072293 - RNA, 19 nt, Artificial Sequence
  Description of Artificial Sequence: Synthetic oligonucleotide
  Antisense strand to SEQ ID NO: 2072292
cuaagagucaaucacaccc

SEQ ID NO: 2072294 - RNA, 19 nt, Artificial Sequence
  Description of Artificial Sequence: Synthetic oligonucleotide
  Sense strand starting at position 3479 of SEQ ID NO: 1881795
gauugacucuuagcuauug

SEQ ID NO: 2072295 - RNA, 19 nt, Artificial Sequence
  Description of Artificial Sequence: Synthetic oligonucleotide
  Antisense strand to SEQ ID NO: 2072294
caauagcuaagagucaauc

SEQ ID NO: 2072296 - RNA, 19 nt, Artificial Sequence
  Description of Artificial Sequence: Synthetic oligonucleotide
  Sense strand starting at position 3503 of SEQ ID NO: 1881795
gaaguaugcggguauuugu

SEQ ID NO: 2072297 - RNA, 19 nt, Artificial Sequence
  Description of Artificial Sequence: Synthetic oligonucleotide
  Antisense strand to SEQ ID NO: 2072296
acaaauacccgcauacuuc

SEQ ID NO: 2072298 - RNA, 19 nt, Artificial Sequence
  Description of Artificial Sequence: Synthetic oligonucleotide
  Sense strand starting at position 3513 of SEQ ID NO: 1881795
gguauuugugccuggguca

SEQ ID NO: 2072299 - RNA, 19 nt, Artificial Sequence
  Description of Artificial Sequence: Synthetic oligonucleotide
  Antisense strand to SEQ ID NO: 2072298
ugacccaggcacaaauacc

SEQ ID NO: 2072300 - RNA, 19 nt, Artificial Sequence
  Description of Artificial Sequence: Synthetic oligonucleotide
  Sense strand starting at position 3557 of SEQ ID NO: 1881795
gcuauucugguaggagaca

SEQ ID NO: 2072301 - RNA, 19 nt, Artificial Sequence
  Description of Artificial Sequence: Synthetic oligonucleotide
  Antisense strand to SEQ ID NO: 2072300
ugucuccuaccagaauagc

SEQ ID NO: 2072302 - RNA, 19 nt, Artificial Sequence
  Description of Artificial Sequence: Synthetic oligonucleotide
  Sense strand starting at position 84 of SEQ ID NO: 1881796
aguguucccuuaucagaga

SEQ ID NO: 2072303 - RNA, 19 nt, Artificial Sequence
  Description of Artificial Sequence: Synthetic oligonucleotide
  Antisense strand to SEQ ID NO: 2072302
ucucugauaagggaacacu

SEQ ID NO: 2072304 - RNA, 19 nt, Artificial Sequence
  Description of Artificial Sequence: Synthetic oligonucleotide
  Sense strand starting at position 555 of SEQ ID NO: 1881796
auguaaguuccaggagcaa

SEQ ID NO: 2072305 - RNA, 19 nt, Artificial Sequence
  Description of Artificial Sequence: Synthetic oligonucleotide
  Antisense strand to SEQ ID NO: 2072304
uugcuccuggaacuuacau

SEQ ID NO: 2072306 - RNA, 19 nt, Artificial Sequence
  Description of Artificial Sequence: Synthetic oligonucleotide
  Sense strand starting at position 630 of SEQ ID NO: 1881796
cacugaagguugccaguaa

SEQ ID NO: 2072307 - RNA, 19 nt, Artificial Sequence
  Description of Artificial Sequence: Synthetic oligonucleotide
  Antisense strand to SEQ ID NO: 2072306
uuacuggcaaccuucagug

SEQ ID NO: 2072308 - RNA, 19 nt, Artificial Sequence
  Description of Artificial Sequence: Synthetic oligonucleotide
  Sense strand starting at position 634 of SEQ ID NO: 1881796
gaagguugccaguaaauac

SEQ ID NO: 2072309 - RNA, 19 nt, Artificial Sequence
  Description of Artificial Sequence: Synthetic oligonucleotide
  Antisense strand to SEQ ID NO: 2072308
guauuuacuggcaaccuuc

SEQ ID NO: 2072310 - RNA, 19 nt, Artificial Sequence
  Description of Artificial Sequence: Synthetic oligonucleotide
  Sense strand starting at position 788 of SEQ ID NO: 1881796
aggauucacugguuaagug

SEQ ID NO: 2072311 - RNA, 19 nt, Artificial Sequence
  Description of Artificial Sequence: Synthetic oligonucleotide
  Antisense strand to SEQ ID NO: 2072310
cacuuaaccagugaauccu

SEQ ID NO: 2072312 - RNA, 19 nt, Artificial Sequence
  Description of Artificial Sequence: Synthetic oligonucleotide
  Sense strand starting at position 795 of SEQ ID NO: 1881796
acugguuaaguggaaguaa

SEQ ID NO: 2072313 - RNA, 19 nt, Artificial Sequence
  Description of Artificial Sequence: Synthetic oligonucleotide
  Antisense strand to SEQ ID NO: 2072312
uuacuuccacuuaaccagu

SEQ ID NO: 2072314 - RNA, 19 nt, Artificial Sequence
  Description of Artificial Sequence: Synthetic oligonucleotide
  Sense strand starting at position 806 of SEQ ID NO: 1881796
ggaaguaaggccuaguuga

SEQ ID NO: 2072315 - RNA, 19 nt, Artificial Sequence
  Description of Artificial Sequence: Synthetic oligonucleotide
  Antisense strand to SEQ ID NO: 2072314
ucaacuaggccuuacuucc

SEQ ID NO: 2072316 - RNA, 19 nt, Artificial Sequence
  Description of Artificial Sequence: Synthetic oligonucleotide
  Sense strand starting at position 914 of SEQ ID NO: 1881796
gcuaaauguauacagugua

SEQ ID NO: 2072317 - RNA, 19 nt, Artificial Sequence
  Description of Artificial Sequence: Synthetic oligonucleotide
  Antisense strand to SEQ ID NO: 2072316
uacacuguauacauuuagc

SEQ ID NO: 2072318 - RNA, 19 nt, Artificial Sequence
  Description of Artificial Sequence: Synthetic oligonucleotide
  Sense strand starting at position 942 of SEQ ID NO: 1881796
cgcauuguaggauaaagaa

SEQ ID NO: 2072319 - RNA, 19 nt, Artificial Sequence
  Description of Artificial Sequence: Synthetic oligonucleotide
  Antisense strand to SEQ ID NO: 2072318
uucuuuauccuacaaugcg

SEQ ID NO: 2072320 - RNA, 19 nt, Artificial Sequence
  Description of Artificial Sequence: Synthetic oligonucleotide
  Sense strand starting at position 977 of SEQ ID NO: 1881796
gauauuuguuaugcaguau

SEQ ID NO: 2072321 - RNA, 19 nt, Artificial Sequence
  Description of Artificial Sequence: Synthetic oligonucleotide
  Antisense strand to SEQ ID NO: 2072320
auacugcauaacaaauauc

SEQ ID NO: 2072322 - RNA, 19 nt, Artificial Sequence
  Description of Artificial Sequence: Synthetic oligonucleotide
  Sense strand starting at position 1019 of SEQ ID NO: 1881796
ugucauguacuacauuaaa

SEQ ID NO: 2072323 - RNA, 19 nt, Artificial Sequence
  Description of Artificial Sequence: Synthetic oligonucleotide
  Antisense strand to SEQ ID NO: 2072322
uuuaauguaguacaugaca

SEQ ID NO: 2072324 - RNA, 19 nt, Artificial Sequence
  Description of Artificial Sequence: Synthetic oligonucleotide
  Sense strand starting at position 1188 of SEQ ID NO: 1881796
aguuucuuggcccaacaga

SEQ ID NO: 2072325 - RNA, 19 nt, Artificial Sequence
  Description of Artificial Sequence: Synthetic oligonucleotide
  Antisense strand to SEQ ID NO: 2072324
ucuguugggccaagaaacu

SEQ ID NO: 2072326 - RNA, 19 nt, Artificial Sequence
  Description of Artificial Sequence: Synthetic oligonucleotide
  Sense strand starting at position 1204 of SEQ ID NO: 1881796
agauauagacccuggagca

SEQ ID NO: 2072327 - RNA, 19 nt, Artificial Sequence
  Description of Artificial Sequence: Synthetic oligonucleotide
  Antisense strand to SEQ ID NO: 2072326
ugcuccagggucuauaucu

SEQ ID NO: 2072328 - RNA, 19 nt, Artificial Sequence
  Description of Artificial Sequence: Synthetic oligonucleotide
  Sense strand starting at position 1220 of SEQ ID NO: 1881796
gcacuauaagaauauguua

SEQ ID NO: 2072329 - RNA, 19 nt, Artificial Sequence
  Description of Artificial Sequence: Synthetic oligonucleotide
  Antisense strand to SEQ ID NO: 2072328
uaacauauucuuauagugc

SEQ ID NO: 2072330 - RNA, 19 nt, Artificial Sequence
  Description of Artificial Sequence: Synthetic oligonucleotide
  Sense strand starting at position 1351 of SEQ ID NO: 1881796
gcgcccaugcauguuacaa

SEQ ID NO: 2072331 - RNA, 19 nt, Artificial Sequence
  Description of Artificial Sequence: Synthetic oligonucleotide
  Antisense strand to SEQ ID NO: 2072330
uuguaacaugcaugggcgc

SEQ ID NO: 2072332 - RNA, 19 nt, Artificial Sequence
  Description of Artificial Sequence: Synthetic oligonucleotide
  Sense strand starting at position 1965 of SEQ ID NO: 1881796
aggagauugauacgucauu

SEQ ID NO: 2072333 - RNA, 19 nt, Artificial Sequence
  Description of Artificial Sequence: Synthetic oligonucleotide
  Antisense strand to SEQ ID NO: 2072332
aaugacguaucaaucuccu

SEQ ID NO: 2072334 - RNA, 19 nt, Artificial Sequence
  Description of Artificial Sequence: Synthetic oligonucleotide
  Sense strand starting at position 1966 of SEQ ID NO: 1881796
ggagauugauacgucauua

SEQ ID NO: 2072335 - RNA, 19 nt, Artificial Sequence
  Description of Artificial Sequence: Synthetic oligonucleotide
  Antisense strand to SEQ ID NO: 2072334
uaaugacguaucaaucucc

SEQ ID NO: 2072336 - RNA, 19 nt, Artificial Sequence
  Description of Artificial Sequence: Synthetic oligonucleotide
  Sense strand starting at position 2084 of SEQ ID NO: 1881796
gugaauuaaguguaguucu

SEQ ID NO: 2072337 - RNA, 19 nt, Artificial Sequence
  Description of Artificial Sequence: Synthetic oligonucleotide
  Antisense strand to SEQ ID NO: 2072336
agaacuacacuuaauucac

SEQ ID NO: 2072338 - RNA, 19 nt, Artificial Sequence
  Description of Artificial Sequence: Synthetic oligonucleotide
  Sense strand starting at position 2299 of SEQ ID NO: 1881796
gaggucuagauucggaaga

SEQ ID NO: 2072339 - RNA, 19 nt, Artificial Sequence
  Description of Artificial Sequence: Synthetic oligonucleotide
  Antisense strand to SEQ ID NO: 2072338
ucuuccgaaucuagaccuc

SEQ ID NO: 2072340 - RNA, 19 nt, Artificial Sequence
  Description of Artificial Sequence: Synthetic oligonucleotide
  Sense strand starting at position 2511 of SEQ ID NO: 1881796
uuuagauaguacucucaga

SEQ ID NO: 2072341 - RNA, 19 nt, Artificial Sequence
  Description of Artificial Sequence: Synthetic oligonucleotide
  Antisense strand to SEQ ID NO: 2072340
ucugagaguacuaucuaaa

SEQ ID NO: 2072342 - RNA, 19 nt, Artificial Sequence
  Description of Artificial Sequence: Synthetic oligonucleotide
  Sense strand starting at position 2585 of SEQ ID NO: 1881796
ggguaacaaagcugaguua

SEQ ID NO: 2072343 - RNA, 19 nt, Artificial Sequence
  Description of Artificial Sequence: Synthetic oligonucleotide
  Antisense strand to SEQ ID NO: 2072342
uaacucagcuuuguuaccc

SEQ ID NO: 2072344 - RNA, 19 nt, Artificial Sequence
  Description of Artificial Sequence: Synthetic oligonucleotide
  Sense strand starting at position 2588 of SEQ ID NO: 1881796
uaacaaagcugaguuagau

SEQ ID NO: 2072345 - RNA, 19 nt, Artificial Sequence
  Description of Artificial Sequence: Synthetic oligonucleotide
  Antisense strand to SEQ ID NO: 2072344
aucuaacucagcuuuguua

SEQ ID NO: 2072346 - RNA, 19 nt, Artificial Sequence
  Description of Artificial Sequence: Synthetic oligonucleotide
  Sense strand starting at position 2760 of SEQ ID NO: 1881796
auguaaacucacugauggu

SEQ ID NO: 2072347 - RNA, 19 nt, Artificial Sequence
  Description of Artificial Sequence: Synthetic oligonucleotide
  Antisense strand to SEQ ID NO: 2072346
accaucagugaguuuacau

SEQ ID NO: 2072348 - RNA, 19 nt, Artificial Sequence
  Description of Artificial Sequence: Synthetic oligonucleotide
  Sense strand starting at position 2861 of SEQ ID NO: 1881796
augacugaaugaucacagu

SEQ ID NO: 2072349 - RNA, 19 nt, Artificial Sequence
  Description of Artificial Sequence: Synthetic oligonucleotide
  Antisense strand to SEQ ID NO: 2072348
acugugaucauucagucau

SEQ ID NO: 2072350 - RNA, 19 nt, Artificial Sequence
  Description of Artificial Sequence: Synthetic oligonucleotide
  Sense strand starting at position 2867 of SEQ ID NO: 1881796
gaaugaucacagugguaaa

SEQ ID NO: 2072351 - RNA, 19 nt, Artificial Sequence
  Description of Artificial Sequence: Synthetic oligonucleotide
  Antisense strand to SEQ ID NO: 2072350
uuuaccacugugaucauuc

SEQ ID NO: 2072352 - RNA, 19 nt, Artificial Sequence
  Description of Artificial Sequence: Synthetic oligonucleotide
  Sense strand starting at position 2925 of SEQ ID NO: 1881796
aagaaagugguguaaguaa

SEQ ID NO: 2072353 - RNA, 19 nt, Artificial Sequence
  Description of Artificial Sequence: Synthetic oligonucleotide
  Antisense strand to SEQ ID NO: 2072352
uuacuuacaccacuuucuu

SEQ ID NO: 2072354 - RNA, 19 nt, Artificial Sequence
  Description of Artificial Sequence: Synthetic oligonucleotide
  Sense strand starting at position 2938 of SEQ ID NO: 1881796
aaguaaguggcgggagaua

SEQ ID NO: 2072355 - RNA, 19 nt, Artificial Sequence
  Description of Artificial Sequence: Synthetic oligonucleotide
  Antisense strand to SEQ ID NO: 2072354
uaucucccgccacuuacuu

SEQ ID NO: 2072356 - RNA, 19 nt, Artificial Sequence
  Description of Artificial Sequence: Synthetic oligonucleotide
  Sense strand starting at position 2983 of SEQ ID NO: 1881796
acuggaguuagccagaacu

SEQ ID NO: 2072357 - RNA, 19 nt, Artificial Sequence
  Description of Artificial Sequence: Synthetic oligonucleotide
  Antisense strand to SEQ ID NO: 2072356
aguucuggcuaacuccagu

SEQ ID NO: 2072358 - RNA, 19 nt, Artificial Sequence
  Description of Artificial Sequence: Synthetic oligonucleotide
  Sense strand starting at position 3060 of SEQ ID NO: 1881796
acucaaaugguuuguagag

SEQ ID NO: 2072359 - RNA, 19 nt, Artificial Sequence
  Description of Artificial Sequence: Synthetic oligonucleotide
  Antisense strand to SEQ ID NO: 2072358
cucuacaaaccauuugagu

SEQ ID NO: 2072360 - RNA, 19 nt, Artificial Sequence
  Description of Artificial Sequence: Synthetic oligonucleotide
  Sense strand starting at position 3129 of SEQ ID NO: 1881796
cuaugucaugcugaguaau

SEQ ID NO: 2072361 - RNA, 19 nt, Artificial Sequence
  Description of Artificial Sequence: Synthetic oligonucleotide
  Antisense strand to SEQ ID NO: 2072360
auuacucagcaugacauag

SEQ ID NO: 2072362 - RNA, 19 nt, Artificial Sequence
  Description of Artificial Sequence: Synthetic oligonucleotide
  Sense strand starting at position 3131 of SEQ ID NO: 1881796
augucaugcugaguaauuu

SEQ ID NO: 2072363 - RNA, 19 nt, Artificial Sequence
  Description of Artificial Sequence: Synthetic oligonucleotide
  Antisense strand to SEQ ID NO: 2072362
aaauuacucagcaugacau

SEQ ID NO: 2072364 - RNA, 19 nt, Artificial Sequence
  Description of Artificial Sequence: Synthetic oligonucleotide
  Sense strand starting at position 3177 of SEQ ID NO: 1881796
gcugaaggauuguugaaca

SEQ ID NO: 2072365 - RNA, 19 nt, Artificial Sequence
  Description of Artificial Sequence: Synthetic oligonucleotide
  Antisense strand to SEQ ID NO: 2072364
uguucaacaauccuucagc

SEQ ID NO: 2072366 - RNA, 19 nt, Artificial Sequence
  Description of Artificial Sequence: Synthetic oligonucleotide
  Sense strand starting at position 3428 of SEQ ID NO: 1881796
auagaaauagaacguaagu

SEQ ID NO: 2072367 - RNA, 19 nt, Artificial Sequence
  Description of Artificial Sequence: Synthetic oligonucleotide
  Antisense strand to SEQ ID NO: 2072366
acuuacguucuauuucuau

SEQ ID NO: 2072368 - RNA, 19 nt, Artificial Sequence
  Description of Artificial Sequence: Synthetic oligonucleotide
  Sense strand starting at position 3434 of SEQ ID NO: 1881796
auagaacguaagugagaaa

SEQ ID NO: 2072369 - RNA, 19 nt, Artificial Sequence
  Description of Artificial Sequence: Synthetic oligonucleotide
  Antisense strand to SEQ ID NO: 2072368
uuucucacuuacguucuau

SEQ ID NO: 2072370 - RNA, 19 nt, Artificial Sequence
  Description of Artificial Sequence: Synthetic oligonucleotide
  Sense strand starting at position 3534 of SEQ ID NO: 1881796
agaugagugacaugaccuu

SEQ ID NO: 2072371 - RNA, 19 nt, Artificial Sequence
  Description of Artificial Sequence: Synthetic oligonucleotide
  Antisense strand to SEQ ID NO: 2072370
aaggucaugucacucaucu

SEQ ID NO: 2072372 - RNA, 19 nt, Artificial Sequence
  Description of Artificial Sequence: Synthetic oligonucleotide
  Sense strand starting at position 3590 of SEQ ID NO: 1881796
gggaauguacuuuguucag

SEQ ID NO: 2072373 - RNA, 19 nt, Artificial Sequence
  Description of Artificial Sequence: Synthetic oligonucleotide
  Antisense strand to SEQ ID NO: 2072372
cugaacaaaguacauuccc

SEQ ID NO: 2072374 - RNA, 19 nt, Artificial Sequence
  Description of Artificial Sequence: Synthetic oligonucleotide
  Sense strand starting at position 3656 of SEQ ID NO: 1881796
gcuggacuuacaugggaau

SEQ ID NO: 2072375 - RNA, 19 nt, Artificial Sequence
  Description of Artificial Sequence: Synthetic oligonucleotide
  Antisense strand to SEQ ID NO: 2072374
auucccauguaaguccagc

SEQ ID NO: 2072376 - RNA, 19 nt, Artificial Sequence
  Description of Artificial Sequence: Synthetic oligonucleotide
  Sense strand starting at position 3865 of SEQ ID NO: 1881796
cuaauagcuguaugacaac

SEQ ID NO: 2072377 - RNA, 19 nt, Artificial Sequence
  Description of Artificial Sequence: Synthetic oligonucleotide
  Antisense strand to SEQ ID NO: 2072376
guugucauacagcuauuag

SEQ ID NO: 2072378 - RNA, 19 nt, Artificial Sequence
  Description of Artificial Sequence: Synthetic oligonucleotide
  Sense strand starting at position 3910 of SEQ ID NO: 1881796
uccaauccugccuaagaug

SEQ ID NO: 2072379 - RNA, 19 nt, Artificial Sequence
  Description of Artificial Sequence: Synthetic oligonucleotide
  Antisense strand to SEQ ID NO: 2072378
caucuuaggcaggauugga

SEQ ID NO: 2072380 - RNA, 19 nt, Artificial Sequence
  Description of Artificial Sequence: Synthetic oligonucleotide
  Sense strand starting at position 3947 of SEQ ID NO: 1881796
agguuaugugcugaaacag

SEQ ID NO: 2072381 - RNA, 19 nt, Artificial Sequence
  Description of Artificial Sequence: Synthetic oligonucleotide
  Antisense strand to SEQ ID NO: 2072380
cuguuucagcacauaaccu

SEQ ID NO: 2072382 - RNA, 19 nt, Artificial Sequence
  Description of Artificial Sequence: Synthetic oligonucleotide
  Sense strand starting at position 4 of SEQ ID NO: 1881797
cuucuaauauugguugaaa

SEQ ID NO: 2072383 - RNA, 19 nt, Artificial Sequence
  Description of Artificial Sequence: Synthetic oligonucleotide
  Antisense strand to SEQ ID NO: 2072382
uuucaaccaauauuagaag

SEQ ID NO: 2072384 - RNA, 19 nt, Artificial Sequence
  Description of Artificial Sequence: Synthetic oligonucleotide
  Sense strand starting at position 65 of SEQ ID NO: 1881797
ggcagugacagauguacaa

SEQ ID NO: 2072385 - RNA, 19 nt, Artificial Sequence
  Description of Artificial Sequence: Synthetic oligonucleotide
  Antisense strand to SEQ ID NO: 2072384
uuguacaucugucacugcc

SEQ ID NO: 2072386 - RNA, 19 nt, Artificial Sequence
  Description of Artificial Sequence: Synthetic oligonucleotide
  Sense strand starting at position 147 of SEQ ID NO: 1881797
gccuguuaggaauaguaac

SEQ ID NO: 2072387 - RNA, 19 nt, Artificial Sequence
  Description of Artificial Sequence: Synthetic oligonucleotide
  Antisense strand to SEQ ID NO: 2072386
guuacuauuccuaacaggc

SEQ ID NO: 2072388 - RNA, 19 nt, Artificial Sequence
  Description of Artificial Sequence: Synthetic oligonucleotide
  Sense strand starting at position 289 of SEQ ID NO: 1881797
uucuuauguccuuaagaag

SEQ ID NO: 2072389 - RNA, 19 nt, Artificial Sequence
  Description of Artificial Sequence: Synthetic oligonucleotide
  Antisense strand to SEQ ID NO: 2072388
cuucuuaaggacauaagaa

SEQ ID NO: 2072390 - RNA, 19 nt, Artificial Sequence
  Description of Artificial Sequence: Synthetic oligonucleotide
  Sense strand starting at position 321 of SEQ ID NO: 1881797
agucuaaugucauuugugu

SEQ ID NO: 2072391 - RNA, 19 nt, Artificial Sequence
  Description of Artificial Sequence: Synthetic oligonucleotide
  Antisense strand to SEQ ID NO: 2072390
acacaaaugacauuagacu

SEQ ID NO: 2072392 - RNA, 19 nt, Artificial Sequence
  Description of Artificial Sequence: Synthetic oligonucleotide
  Sense strand starting at position 575 of SEQ ID NO: 1881797
aaggucuagcgcguaagua

SEQ ID NO: 2072393 - RNA, 19 nt, Artificial Sequence
  Description of Artificial Sequence: Synthetic oligonucleotide
  Antisense strand to SEQ ID NO: 2072392
uacuuacgcgcuagaccuu

SEQ ID NO: 2072394 - RNA, 19 nt, Artificial Sequence
  Description of Artificial Sequence: Synthetic oligonucleotide
  Sense strand starting at position 577 of SEQ ID NO: 1881797
ggucuagcgcguaaguaug

SEQ ID NO: 2072395 - RNA, 19 nt, Artificial Sequence
  Description of Artificial Sequence: Synthetic oligonucleotide
  Antisense strand to SEQ ID NO: 2072394
cauacuuacgcgcuagacc

SEQ ID NO: 2072396 - RNA, 19 nt, Artificial Sequence
  Description of Artificial Sequence: Synthetic oligonucleotide
  Sense strand starting at position 817 of SEQ ID NO: 1881797
aauguuauagugcauguau

SEQ ID NO: 2072397 - RNA, 19 nt, Artificial Sequence
  Description of Artificial Sequence: Synthetic oligonucleotide
  Antisense strand to SEQ ID NO: 2072396
auacaugcacuauaacauu

SEQ ID NO: 2072398 - RNA, 19 nt, Artificial Sequence
  Description of Artificial Sequence: Synthetic oligonucleotide
  Sense strand starting at position 847 of SEQ ID NO: 1881797
cuuauugagugccuaauaa

SEQ ID NO: 2072399 - RNA, 19 nt, Artificial Sequence
  Description of Artificial Sequence: Synthetic oligonucleotide
  Antisense strand to SEQ ID NO: 2072398
uuauuaggcacucaauaag

SEQ ID NO: 2072400 - RNA, 19 nt, Artificial Sequence
  Description of Artificial Sequence: Synthetic oligonucleotide
  Sense strand starting at position 858 of SEQ ID NO: 1881797
ccuaauaaagucugggaau

SEQ ID NO: 2072401 - RNA, 19 nt, Artificial Sequence
  Description of Artificial Sequence: Synthetic oligonucleotide
  Antisense strand to SEQ ID NO: 2072400
auucccagacuuuauuagg

SEQ ID NO: 2072402 - RNA, 19 nt, Artificial Sequence
  Description of Artificial Sequence: Synthetic oligonucleotide
  Sense strand starting at position 1053 of SEQ ID NO: 1881797
agcauaauacagggcuuaa

SEQ ID NO: 2072403 - RNA, 19 nt, Artificial Sequence
  Description of Artificial Sequence: Synthetic oligonucleotide
  Antisense strand to SEQ ID NO: 2072402
uuaagcccuguauuaugcu

SEQ ID NO: 2072404 - RNA, 19 nt, Artificial Sequence
  Description of Artificial Sequence: Synthetic oligonucleotide
  Sense strand starting at position 1177 of SEQ ID NO: 1881797
ggcguuaacaccgucucua

SEQ ID NO: 2072405 - RNA, 19 nt, Artificial Sequence
  Description of Artificial Sequence: Synthetic oligonucleotide
  Antisense strand to SEQ ID NO: 2072404
uagagacgguguuaacgcc

SEQ ID NO: 2072406 - RNA, 19 nt, Artificial Sequence
  Description of Artificial Sequence: Synthetic oligonucleotide
  Sense strand starting at position 1530 of SEQ ID NO: 1881797
gugaguaggcacuacuguu

SEQ ID NO: 2072407 - RNA, 19 nt, Artificial Sequence
  Description of Artificial Sequence: Synthetic oligonucleotide
  Antisense strand to SEQ ID NO: 2072406
aacaguagugccuacucac

SEQ ID NO: 2072408 - RNA, 19 nt, Artificial Sequence
  Description of Artificial Sequence: Synthetic oligonucleotide
  Sense strand starting at position 1584 of SEQ ID NO: 1881797
caaagaaguuaagggauuu

SEQ ID NO: 2072409 - RNA, 19 nt, Artificial Sequence
  Description of Artificial Sequence: Synthetic oligonucleotide
  Antisense strand to SEQ ID NO: 2072408
aaaucccuuaacuucuuug

SEQ ID NO: 2072410 - RNA, 19 nt, Artificial Sequence
  Description of Artificial Sequence: Synthetic oligonucleotide
  Sense strand starting at position 1710 of SEQ ID NO: 1881797
cuaaguagccuagaacagu

SEQ ID NO: 2072411 - RNA, 19 nt, Artificial Sequence
  Description of Artificial Sequence: Synthetic oligonucleotide
  Antisense strand to SEQ ID NO: 2072410
acuguucuaggcuacuuag

SEQ ID NO: 2072412 - RNA, 19 nt, Artificial Sequence
  Description of Artificial Sequence: Synthetic oligonucleotide
  Sense strand starting at position 1956 of SEQ ID NO: 1881797
ucccuccaucgcgagauuu

SEQ ID NO: 2072413 - RNA, 19 nt, Artificial Sequence
  Description of Artificial Sequence: Synthetic oligonucleotide
  Antisense strand to SEQ ID NO: 2072412
aaaucucgcgauggaggga

SEQ ID NO: 2072414 - RNA, 19 nt, Artificial Sequence
  Description of Artificial Sequence: Synthetic oligonucleotide
  Sense strand starting at position 2076 of SEQ ID NO: 1881797
gaaauagugcuuuaaguca

SEQ ID NO: 2072415 - RNA, 19 nt, Artificial Sequence
  Description of Artificial Sequence: Synthetic oligonucleotide
  Antisense strand to SEQ ID NO: 2072414
ugacuuaaagcacuauuuc

SEQ ID NO: 2072416 - RNA, 19 nt, Artificial Sequence
  Description of Artificial Sequence: Synthetic oligonucleotide
  Sense strand starting at position 2084 of SEQ ID NO: 1881797
gcuuuaagucaaugaauuc

SEQ ID NO: 2072417 - RNA, 19 nt, Artificial Sequence
  Description of Artificial Sequence: Synthetic oligonucleotide
  Antisense strand to SEQ ID NO: 2072416
gaauucauugacuuaaagc

SEQ ID NO: 2072418 - RNA, 19 nt, Artificial Sequence
  Description of Artificial Sequence: Synthetic oligonucleotide
  Sense strand starting at position 2122 of SEQ ID NO: 1881797
gagaaacuaucagugguaa

SEQ ID NO: 2072419 - RNA, 19 nt, Artificial Sequence
  Description of Artificial Sequence: Synthetic oligonucleotide
  Antisense strand to SEQ ID NO: 2072418
uuaccacugauaguuucuc

SEQ ID NO: 2072420 - RNA, 19 nt, Artificial Sequence
  Description of Artificial Sequence: Synthetic oligonucleotide
  Sense strand starting at position 2123 of SEQ ID NO: 1881797
agaaacuaucagugguaac

SEQ ID NO: 2072421 - RNA, 19 nt, Artificial Sequence
  Description of Artificial Sequence: Synthetic oligonucleotide
  Antisense strand to SEQ ID NO: 2072420
guuaccacugauaguuucu

SEQ ID NO: 2072422 - RNA, 19 nt, Artificial Sequence
  Description of Artificial Sequence: Synthetic oligonucleotide
  Sense strand starting at position 2173 of SEQ ID NO: 1881797
ugacuuguguguccuaaga

SEQ ID NO: 2072423 - RNA, 19 nt, Artificial Sequence
  Description of Artificial Sequence: Synthetic oligonucleotide
  Antisense strand to SEQ ID NO: 2072422
ucuuaggacacacaaguca

SEQ ID NO: 2072424 - RNA, 19 nt, Artificial Sequence
  Description of Artificial Sequence: Synthetic oligonucleotide
  Sense strand starting at position 2223 of SEQ ID NO: 1881797
cccggcuuccuggauaaua

SEQ ID NO: 2072425 - RNA, 19 nt, Artificial Sequence
  Description of Artificial Sequence: Synthetic oligonucleotide
  Antisense strand to SEQ ID NO: 2072424
uauuauccaggaagccggg

SEQ ID NO: 2072426 - RNA, 19 nt, Artificial Sequence
  Description of Artificial Sequence: Synthetic oligonucleotide
  Sense strand starting at position 2225 of SEQ ID NO: 1881797
cggcuuccuggauaauaga

SEQ ID NO: 2072427 - RNA, 19 nt, Artificial Sequence
  Description of Artificial Sequence: Synthetic oligonucleotide
  Antisense strand to SEQ ID NO: 2072426
ucuauuauccaggaagccg

SEQ ID NO: 2072428 - RNA, 19 nt, Artificial Sequence
  Description of Artificial Sequence: Synthetic oligonucleotide
  Sense strand starting at position 2888 of SEQ ID NO: 1881797
gggagaugcucugucaccu

SEQ ID NO: 2072429 - RNA, 19 nt, Artificial Sequence
  Description of Artificial Sequence: Synthetic oligonucleotide
  Antisense strand to SEQ ID NO: 2072428
aggugacagagcaucuccc

SEQ ID NO: 2072430 - RNA, 19 nt, Artificial Sequence
  Description of Artificial Sequence: Synthetic oligonucleotide
  Sense strand starting at position 2989 of SEQ ID NO: 1881797
ggucacuuaacaggguauu

SEQ ID NO: 2072431 - RNA, 19 nt, Artificial Sequence
  Description of Artificial Sequence: Synthetic oligonucleotide
  Antisense strand to SEQ ID NO: 2072430
aauacccuguuaagugacc

SEQ ID NO: 2072432 - RNA, 19 nt, Artificial Sequence
  Description of Artificial Sequence: Synthetic oligonucleotide
  Sense strand starting at position 3068 of SEQ ID NO: 1881797
cgcacauaaccguaauaca

SEQ ID NO: 2072433 - RNA, 19 nt, Artificial Sequence
  Description of Artificial Sequence: Synthetic oligonucleotide
  Antisense strand to SEQ ID NO: 2072432
uguauuacgguuaugugcg

SEQ ID NO: 2072434 - RNA, 19 nt, Artificial Sequence
  Description of Artificial Sequence: Synthetic oligonucleotide
  Sense strand starting at position 3198 of SEQ ID NO: 1881797
gaaguaaaggcuugggcaa

SEQ ID NO: 2072435 - RNA, 19 nt, Artificial Sequence
  Description of Artificial Sequence: Synthetic oligonucleotide
  Antisense strand to SEQ ID NO: 2072434
uugcccaagccuuuacuuc

SEQ ID NO: 2072436 - RNA, 19 nt, Artificial Sequence
  Description of Artificial Sequence: Synthetic oligonucleotide
  Sense strand starting at position 3229 of SEQ ID NO: 1881797
cacguuguagaauggaaga

SEQ ID NO: 2072437 - RNA, 19 nt, Artificial Sequence
  Description of Artificial Sequence: Synthetic oligonucleotide
  Antisense strand to SEQ ID NO: 2072436
ucuuccauucuacaacgug

SEQ ID NO: 2072438 - RNA, 19 nt, Artificial Sequence
  Description of Artificial Sequence: Synthetic oligonucleotide
  Sense strand starting at position 3286 of SEQ ID NO: 1881797
acaauaguucccgaaggug

SEQ ID NO: 2072439 - RNA, 19 nt, Artificial Sequence
  Description of Artificial Sequence: Synthetic oligonucleotide
  Antisense strand to SEQ ID NO: 2072438
caccuucgggaacuauugu

SEQ ID NO: 2072440 - RNA, 19 nt, Artificial Sequence
  Description of Artificial Sequence: Synthetic oligonucleotide
  Sense strand starting at position 3308 of SEQ ID NO: 1881797
gcuauugaaugcccaacau

SEQ ID NO: 2072441 - RNA, 19 nt, Artificial Sequence
  Description of Artificial Sequence: Synthetic oligonucleotide
  Antisense strand to SEQ ID NO: 2072440
auguugggcauucaauagc

SEQ ID NO: 2072442 - RNA, 19 nt, Artificial Sequence
  Description of Artificial Sequence: Synthetic oligonucleotide
  Sense strand starting at position 3408 of SEQ ID NO: 1881797
ggcagcaaagcuugagaua

SEQ ID NO: 2072443 - RNA, 19 nt, Artificial Sequence
  Description of Artificial Sequence: Synthetic oligonucleotide
  Antisense strand to SEQ ID NO: 2072442
uaucucaagcuuugcugcc

SEQ ID NO: 2072444 - RNA, 19 nt, Artificial Sequence
  Description of Artificial Sequence: Synthetic oligonucleotide
  Sense strand starting at position 3630 of SEQ ID NO: 1881797
gguuuacuuacgcaaaguu

SEQ ID NO: 2072445 - RNA, 19 nt, Artificial Sequence
  Description of Artificial Sequence: Synthetic oligonucleotide
  Antisense strand to SEQ ID NO: 2072444
aacuuugcguaaguaaacc

SEQ ID NO: 2072446 - RNA, 19 nt, Artificial Sequence
  Description of Artificial Sequence: Synthetic oligonucleotide
  Sense strand starting at position 3670 of SEQ ID NO: 1881797
uggacucuuuguuugacuu

SEQ ID NO: 2072447 - RNA, 19 nt, Artificial Sequence
  Description of Artificial Sequence: Synthetic oligonucleotide
  Antisense strand to SEQ ID NO: 2072446
aagucaaacaaagagucca

SEQ ID NO: 2072448 - RNA, 19 nt, Artificial Sequence
  Description of Artificial Sequence: Synthetic oligonucleotide
  Sense strand starting at position 3671 of SEQ ID NO: 1881797
ggacucuuuguuugacuua

SEQ ID NO: 2072449 - RNA, 19 nt, Artificial Sequence
  Description of Artificial Sequence: Synthetic oligonucleotide
  Antisense strand to SEQ ID NO: 2072448
uaagucaaacaaagagucc

SEQ ID NO: 2072450 - RNA, 19 nt, Artificial Sequence
  Description of Artificial Sequence: Synthetic oligonucleotide
  Sense strand starting at position 3756 of SEQ ID NO: 1881797
aagacuugacagugauauu

SEQ ID NO: 2072451 - RNA, 19 nt, Artificial Sequence
  Description of Artificial Sequence: Synthetic oligonucleotide
  Antisense strand to SEQ ID NO: 2072450
aauaucacugucaagucuu

SEQ ID NO: 2072452 - RNA, 19 nt, Artificial Sequence
  Description of Artificial Sequence: Synthetic oligonucleotide
  Sense strand starting at position 3767 of SEQ ID NO: 1881797
gugauauuaaauggaguga

SEQ ID NO: 2072453 - RNA, 19 nt, Artificial Sequence
  Description of Artificial Sequence: Synthetic oligonucleotide
  Antisense strand to SEQ ID NO: 2072452
ucacuccauuuaauaucac

SEQ ID NO: 2072454 - RNA, 19 nt, Artificial Sequence
  Description of Artificial Sequence: Synthetic oligonucleotide
  Sense strand starting at position 3771 of SEQ ID NO: 1881797
uauuaaauggagugacuua

SEQ ID NO: 2072455 - RNA, 19 nt, Artificial Sequence
  Description of Artificial Sequence: Synthetic oligonucleotide
  Antisense strand to SEQ ID NO: 2072454
uaagucacuccauuuaaua

SEQ ID NO: 2072456 - RNA, 19 nt, Artificial Sequence
  Description of Artificial Sequence: Synthetic oligonucleotide
  Sense strand starting at position 3814 of SEQ ID NO: 1881797
acgguaggcacucaguauu

SEQ ID NO: 2072457 - RNA, 19 nt, Artificial Sequence
  Description of Artificial Sequence: Synthetic oligonucleotide
  Antisense strand to SEQ ID NO: 2072456
aauacugagugccuaccgu

SEQ ID NO: 2072458 - RNA, 19 nt, Artificial Sequence
  Description of Artificial Sequence: Synthetic oligonucleotide
  Sense strand starting at position 3827 of SEQ ID NO: 1881797
aguauuuguuuccuuucua

SEQ ID NO: 2072459 - RNA, 19 nt, Artificial Sequence
  Description of Artificial Sequence: Synthetic oligonucleotide
  Antisense strand to SEQ ID NO: 2072458
uagaaaggaaacaaauacu

SEQ ID NO: 2072460 - RNA, 19 nt, Artificial Sequence
  Description of Artificial Sequence: Synthetic oligonucleotide
  Sense strand starting at position 3828 of SEQ ID NO: 1881797
guauuuguuuccuuucuag

SEQ ID NO: 2072461 - RNA, 19 nt, Artificial Sequence
  Description of Artificial Sequence: Synthetic oligonucleotide
  Antisense strand to SEQ ID NO: 2072460
cuagaaaggaaacaaauac

SEQ ID NO: 2072462 - RNA, 19 nt, Artificial Sequence
  Description of Artificial Sequence: Synthetic oligonucleotide
  Sense strand starting at position 165 of SEQ ID NO: 1881798
gggagucuccuacggaagu

SEQ ID NO: 2072463 - RNA, 19 nt, Artificial Sequence
  Description of Artificial Sequence: Synthetic oligonucleotide
  Antisense strand to SEQ ID NO: 2072462
acuuccguaggagacuccc

SEQ ID NO: 2072464 - RNA, 19 nt, Artificial Sequence
  Description of Artificial Sequence: Synthetic oligonucleotide
  Sense strand starting at position 268 of SEQ ID NO: 1881798
accuuauugugaucugaga

SEQ ID NO: 2072465 - RNA, 19 nt, Artificial Sequence
  Description of Artificial Sequence: Synthetic oligonucleotide
  Antisense strand to SEQ ID NO: 2072464
ucucagaucacaauaaggu

SEQ ID NO: 2072466 - RNA, 19 nt, Artificial Sequence
  Description of Artificial Sequence: Synthetic oligonucleotide
  Sense strand starting at position 622 of SEQ ID NO: 1881798
ugcacaauuccagagauuc

SEQ ID NO: 2072467 - RNA, 19 nt, Artificial Sequence
  Description of Artificial Sequence: Synthetic oligonucleotide
  Antisense strand to SEQ ID NO: 2072466
gaaucucuggaauugugca

SEQ ID NO: 2072468 - RNA, 19 nt, Artificial Sequence
  Description of Artificial Sequence: Synthetic oligonucleotide
  Sense strand starting at position 632 of SEQ ID NO: 1881798
cagagauucuacuagaagg

SEQ ID NO: 2072469 - RNA, 19 nt, Artificial Sequence
  Description of Artificial Sequence: Synthetic oligonucleotide
  Antisense strand to SEQ ID NO: 2072468
ccuucuaguagaaucucug

SEQ ID NO: 2072470 - RNA, 19 nt, Artificial Sequence
  Description of Artificial Sequence: Synthetic oligonucleotide
  Sense strand starting at position 2133 of SEQ ID NO: 1881798
cggaguucgcugggagaaa

SEQ ID NO: 2072471 - RNA, 19 nt, Artificial Sequence
  Description of Artificial Sequence: Synthetic oligonucleotide
  Antisense strand to SEQ ID NO: 2072470
uuucucccagcgaacuccg

SEQ ID NO: 2072472 - RNA, 19 nt, Artificial Sequence
  Description of Artificial Sequence: Synthetic oligonucleotide
  Sense strand starting at position 2218 of SEQ ID NO: 1881798
gcguguaaugcggugguaa

SEQ ID NO: 2072473 - RNA, 19 nt, Artificial Sequence
  Description of Artificial Sequence: Synthetic oligonucleotide
  Antisense strand to SEQ ID NO: 2072472
uuaccaccgcauuacacgc

SEQ ID NO: 2072474 - RNA, 19 nt, Artificial Sequence
  Description of Artificial Sequence: Synthetic oligonucleotide
  Sense strand starting at position 2266 of SEQ ID NO: 1881798
uugccuguuaaauggauga

SEQ ID NO: 2072475 - RNA, 19 nt, Artificial Sequence
  Description of Artificial Sequence: Synthetic oligonucleotide
  Antisense strand to SEQ ID NO: 2072474
ucauccauuuaacaggcaa

SEQ ID NO: 2072476 - RNA, 19 nt, Artificial Sequence
  Description of Artificial Sequence: Synthetic oligonucleotide
  Sense strand starting at position 2268 of SEQ ID NO: 1881798
gccuguuaaauggaugagu

SEQ ID NO: 2072477 - RNA, 19 nt, Artificial Sequence
  Description of Artificial Sequence: Synthetic oligonucleotide
  Antisense strand to SEQ ID NO: 2072476
acucauccauuuaacaggc

SEQ ID NO: 2072478 - RNA, 19 nt, Artificial Sequence
  Description of Artificial Sequence: Synthetic oligonucleotide
  Sense strand starting at position 2352 of SEQ ID NO: 1881798
gaggcagguacggaucauu

SEQ ID NO: 2072479 - RNA, 19 nt, Artificial Sequence
  Description of Artificial Sequence: Synthetic oligonucleotide
  Antisense strand to SEQ ID NO: 2072478
aaugauccguaccugccuc

SEQ ID NO: 2072480 - RNA, 19 nt, Artificial Sequence
  Description of Artificial Sequence: Synthetic oligonucleotide
  Sense strand starting at position 2417 of SEQ ID NO: 1881798
aagguugcuguacaucauu

SEQ ID NO: 2072481 - RNA, 19 nt, Artificial Sequence
  Description of Artificial Sequence: Synthetic oligonucleotide
  Antisense strand to SEQ ID NO: 2072480
aaugauguacagcaaccuu

SEQ ID NO: 2072482 - RNA, 19 nt, Artificial Sequence
  Description of Artificial Sequence: Synthetic oligonucleotide
  Sense strand starting at position 2519 of SEQ ID NO: 1881798
cagcguucugugcuuggga

SEQ ID NO: 2072483 - RNA, 19 nt, Artificial Sequence
  Description of Artificial Sequence: Synthetic oligonucleotide
  Antisense strand to SEQ ID NO: 2072482
ucccaagcacagaacgcug

SEQ ID NO: 2072484 - RNA, 19 nt, Artificial Sequence
  Description of Artificial Sequence: Synthetic oligonucleotide
  Sense strand starting at position 2603 of SEQ ID NO: 1881798
aguuacaaccggugugaua

SEQ ID NO: 2072485 - RNA, 19 nt, Artificial Sequence
  Description of Artificial Sequence: Synthetic oligonucleotide
  Antisense strand to SEQ ID NO: 2072484
uaucacaccgguuguaacu

SEQ ID NO: 2072486 - RNA, 19 nt, Artificial Sequence
  Description of Artificial Sequence: Synthetic oligonucleotide
  Sense strand starting at position 2612 of SEQ ID NO: 1881798
cggugugauaacgaugaga

SEQ ID NO: 2072487 - RNA, 19 nt, Artificial Sequence
  Description of Artificial Sequence: Synthetic oligonucleotide
  Antisense strand to SEQ ID NO: 2072486
ucucaucguuaucacaccg

SEQ ID NO: 2072488 - RNA, 19 nt, Artificial Sequence
  Description of Artificial Sequence: Synthetic oligonucleotide
  Sense strand starting at position 2614 of SEQ ID NO: 1881798
gugugauaacgaugagacg

SEQ ID NO: 2072489 - RNA, 19 nt, Artificial Sequence
  Description of Artificial Sequence: Synthetic oligonucleotide
  Antisense strand to SEQ ID NO: 2072488
cgucucaucguuaucacac

SEQ ID NO: 2072490 - RNA, 19 nt, Artificial Sequence
  Description of Artificial Sequence: Synthetic oligonucleotide
  Sense strand starting at position 2615 of SEQ ID NO: 1881798
ugugauaacgaugagacga

SEQ ID NO: 2072491 - RNA, 19 nt, Artificial Sequence
  Description of Artificial Sequence: Synthetic oligonucleotide
  Antisense strand to SEQ ID NO: 2072490
ucgucucaucguuaucaca

SEQ ID NO: 2072492 - RNA, 19 nt, Artificial Sequence
  Description of Artificial Sequence: Synthetic oligonucleotide
  Sense strand starting at position 2630 of SEQ ID NO: 1881798
acgacuagguguuuccaaa

SEQ ID NO: 2072493 - RNA, 19 nt, Artificial Sequence
  Description of Artificial Sequence: Synthetic oligonucleotide
  Antisense strand to SEQ ID NO: 2072492
uuuggaaacaccuagucgu

SEQ ID NO: 2072494 - RNA, 19 nt, Artificial Sequence
  Description of Artificial Sequence: Synthetic oligonucleotide
  Sense strand starting at position 2655 of SEQ ID NO: 1881798
guaugugcaggagaggauu

SEQ ID NO: 2072495 - RNA, 19 nt, Artificial Sequence
  Description of Artificial Sequence: Synthetic oligonucleotide
  Antisense strand to SEQ ID NO: 2072494
aauccucuccugcacauac

SEQ ID NO: 2072496 - RNA, 19 nt, Artificial Sequence
  Description of Artificial Sequence: Synthetic oligonucleotide
  Sense strand starting at position 2777 of SEQ ID NO: 1881798
auguacauggcacagauua

SEQ ID NO: 2072497 - RNA, 19 nt, Artificial Sequence
  Description of Artificial Sequence: Synthetic oligonucleotide
  Antisense strand to SEQ ID NO: 2072496
uaaucugugccauguacau

SEQ ID NO: 2072498 - RNA, 19 nt, Artificial Sequence
  Description of Artificial Sequence: Synthetic oligonucleotide
  Sense strand starting at position 2809 of SEQ ID NO: 1881798
uugagugaagucugucuca

SEQ ID NO: 2072499 - RNA, 19 nt, Artificial Sequence
  Description of Artificial Sequence: Synthetic oligonucleotide
  Antisense strand to SEQ ID NO: 2072498
ugagacagacuucacucaa

SEQ ID NO: 2072500 - RNA, 19 nt, Artificial Sequence
  Description of Artificial Sequence: Synthetic oligonucleotide
  Sense strand starting at position 2832 of SEQ ID NO: 1881798
ugggcuauguacucugaaa

SEQ ID NO: 2072501 - RNA, 19 nt, Artificial Sequence
  Description of Artificial Sequence: Synthetic oligonucleotide
  Antisense strand to SEQ ID NO: 2072500
uuucagaguacauagccca

SEQ ID NO: 2072502 - RNA, 19 nt, Artificial Sequence
  Description of Artificial Sequence: Synthetic oligonucleotide
  Sense strand starting at position 2834 of SEQ ID NO: 1881798
ggcuauguacucugaaauu

SEQ ID NO: 2072503 - RNA, 19 nt, Artificial Sequence
  Description of Artificial Sequence: Synthetic oligonucleotide
  Antisense strand to SEQ ID NO: 2072502
aauuucagaguacauagcc

SEQ ID NO: 2072504 - RNA, 19 nt, Artificial Sequence
  Description of Artificial Sequence: Synthetic oligonucleotide
  Sense strand starting at position 2845 of SEQ ID NO: 1881798
cugaaauugugguuauaug

SEQ ID NO: 2072505 - RNA, 19 nt, Artificial Sequence
  Description of Artificial Sequence: Synthetic oligonucleotide
  Antisense strand to SEQ ID NO: 2072504
cauauaaccacaauuucag

SEQ ID NO: 2072506 - RNA, 19 nt, Artificial Sequence
  Description of Artificial Sequence: Synthetic oligonucleotide
  Sense strand starting at position 2852 of SEQ ID NO: 1881798
ugugguuauaugcagaguu

SEQ ID NO: 2072507 - RNA, 19 nt, Artificial Sequence
  Description of Artificial Sequence: Synthetic oligonucleotide
  Antisense strand to SEQ ID NO: 2072506
aacucugcauauaaccaca

SEQ ID NO: 2072508 - RNA, 19 nt, Artificial Sequence
  Description of Artificial Sequence: Synthetic oligonucleotide
  Sense strand starting at position 2865 of SEQ ID NO: 1881798
agaguugcuauugguauca

SEQ ID NO: 2072509 - RNA, 19 nt, Artificial Sequence
  Description of Artificial Sequence: Synthetic oligonucleotide
  Antisense strand to SEQ ID NO: 2072508
ugauaccaauagcaacucu

SEQ ID NO: 2072510 - RNA, 19 nt, Artificial Sequence
  Description of Artificial Sequence: Synthetic oligonucleotide
  Sense strand starting at position 3009 of SEQ ID NO: 1881798
uuaucucacccagggauua

SEQ ID NO: 2072511 - RNA, 19 nt, Artificial Sequence
  Description of Artificial Sequence: Synthetic oligonucleotide
  Antisense strand to SEQ ID NO: 2072510
uaaucccugggugagauaa

SEQ ID NO: 2072512 - RNA, 19 nt, Artificial Sequence
  Description of Artificial Sequence: Synthetic oligonucleotide
  Sense strand starting at position 3088 of SEQ ID NO: 1881798
ucaguuugcccagaacaga

SEQ ID NO: 2072513 - RNA, 19 nt, Artificial Sequence
  Description of Artificial Sequence: Synthetic oligonucleotide
  Antisense strand to SEQ ID NO: 2072512
ucuguucugggcaaacuga

SEQ ID NO: 2072514 - RNA, 19 nt, Artificial Sequence
  Description of Artificial Sequence: Synthetic oligonucleotide
  Sense strand starting at position 3108 of SEQ ID NO: 1881798
gagagacggccuugaagaa

SEQ ID NO: 2072515 - RNA, 19 nt, Artificial Sequence
  Description of Artificial Sequence: Synthetic oligonucleotide
  Antisense strand to SEQ ID NO: 2072514
uucuucaaggccgucucuc

SEQ ID NO: 2072516 - RNA, 19 nt, Artificial Sequence
  Description of Artificial Sequence: Synthetic oligonucleotide
  Sense strand starting at position 3207 of SEQ ID NO: 1881798
gacagaucagcacaguugu

SEQ ID NO: 2072517 - RNA, 19 nt, Artificial Sequence
  Description of Artificial Sequence: Synthetic oligonucleotide
  Antisense strand to SEQ ID NO: 2072516
acaacugugcugaucuguc

SEQ ID NO: 2072518 - RNA, 19 nt, Artificial Sequence
  Description of Artificial Sequence: Synthetic oligonucleotide
  Sense strand starting at position 3220 of SEQ ID NO: 1881798
aguuguuggucucuaauag

SEQ ID NO: 2072519 - RNA, 19 nt, Artificial Sequence
  Description of Artificial Sequence: Synthetic oligonucleotide
  Antisense strand to SEQ ID NO: 2072518
cuauuagagaccaacaacu

SEQ ID NO: 2072520 - RNA, 19 nt, Artificial Sequence
  Description of Artificial Sequence: Synthetic oligonucleotide
  Sense strand starting at position 3240 of SEQ ID NO: 1881798
caacaagaggucuggucaa

SEQ ID NO: 2072521 - RNA, 19 nt, Artificial Sequence
  Description of Artificial Sequence: Synthetic oligonucleotide
  Antisense strand to SEQ ID NO: 2072520
uugaccagaccucuuguug

SEQ ID NO: 2072522 - RNA, 19 nt, Artificial Sequence
  Description of Artificial Sequence: Synthetic oligonucleotide
  Sense strand starting at position 3247 of SEQ ID NO: 1881798
aggucuggucaaugguuau

SEQ ID NO: 2072523 - RNA, 19 nt, Artificial Sequence
  Description of Artificial Sequence: Synthetic oligonucleotide
  Antisense strand to SEQ ID NO: 2072522
auaaccauugaccagaccu

SEQ ID NO: 2072524 - RNA, 19 nt, Artificial Sequence
  Description of Artificial Sequence: Synthetic oligonucleotide
  Sense strand starting at position 3260 of SEQ ID NO: 1881798
gguuauucuucuguaccaa

SEQ ID NO: 2072525 - RNA, 19 nt, Artificial Sequence
  Description of Artificial Sequence: Synthetic oligonucleotide
  Antisense strand to SEQ ID NO: 2072524
uugguacagaagaauaacc

SEQ ID NO: 2072526 - RNA, 19 nt, Artificial Sequence
  Description of Artificial Sequence: Synthetic oligonucleotide
  Sense strand starting at position 3261 of SEQ ID NO: 1881798
guuauucuucuguaccaaa

SEQ ID NO: 2072527 - RNA, 19 nt, Artificial Sequence
  Description of Artificial Sequence: Synthetic oligonucleotide
  Antisense strand to SEQ ID NO: 2072526
uuugguacagaagaauaac

SEQ ID NO: 2072528 - RNA, 19 nt, Artificial Sequence
  Description of Artificial Sequence: Synthetic oligonucleotide
  Sense strand starting at position 3282 of SEQ ID NO: 1881798
ccaggaaucccuugcauug

SEQ ID NO: 2072529 - RNA, 19 nt, Artificial Sequence
  Description of Artificial Sequence: Synthetic oligonucleotide
  Antisense strand to SEQ ID NO: 2072528
caaugcaagggauuccugg

SEQ ID NO: 2072530 - RNA, 19 nt, Artificial Sequence
  Description of Artificial Sequence: Synthetic oligonucleotide
  Sense strand starting at position 3317 of SEQ ID NO: 1881798
gguaaacccucacugucuu

SEQ ID NO: 2072531 - RNA, 19 nt, Artificial Sequence
  Description of Artificial Sequence: Synthetic oligonucleotide
  Antisense strand to SEQ ID NO: 2072530
aagacagugaggguuuacc

SEQ ID NO: 2072532 - RNA, 19 nt, Artificial Sequence
  Description of Artificial Sequence: Synthetic oligonucleotide
  Sense strand starting at position 3791 of SEQ ID NO: 1881798
agcagauauccuggaugau

SEQ ID NO: 2072533 - RNA, 19 nt, Artificial Sequence
  Description of Artificial Sequence: Synthetic oligonucleotide
  Antisense strand to SEQ ID NO: 2072532
aucauccaggauaucugcu

SEQ ID NO: 2072534 - RNA, 19 nt, Artificial Sequence
  Description of Artificial Sequence: Synthetic oligonucleotide
  Sense strand starting at position 3829 of SEQ ID NO: 1881798
gugccagaggauggauaau

SEQ ID NO: 2072535 - RNA, 19 nt, Artificial Sequence
  Description of Artificial Sequence: Synthetic oligonucleotide
  Antisense strand to SEQ ID NO: 2072534
auuauccauccucuggcac

SEQ ID NO: 2072536 - RNA, 19 nt, Artificial Sequence
  Description of Artificial Sequence: Synthetic oligonucleotide
  Sense strand starting at position 3883 of SEQ ID NO: 1881798
caucuaggagucugggaua

SEQ ID NO: 2072537 - RNA, 19 nt, Artificial Sequence
  Description of Artificial Sequence: Synthetic oligonucleotide
  Antisense strand to SEQ ID NO: 2072536
uaucccagacuccuagaug

SEQ ID NO: 2072538 - RNA, 19 nt, Artificial Sequence
  Description of Artificial Sequence: Synthetic oligonucleotide
  Sense strand starting at position 3896 of SEQ ID NO: 1881798
gggauauguugagauauuu

SEQ ID NO: 2072539 - RNA, 19 nt, Artificial Sequence
  Description of Artificial Sequence: Synthetic oligonucleotide
  Antisense strand to SEQ ID NO: 2072538
aaauaucucaacauauccc

SEQ ID NO: 2072540 - RNA, 19 nt, Artificial Sequence
  Description of Artificial Sequence: Synthetic oligonucleotide
  Sense strand starting at position 3905 of SEQ ID NO: 1881798
ugagauauuucguacaaag

SEQ ID NO: 2072541 - RNA, 19 nt, Artificial Sequence
  Description of Artificial Sequence: Synthetic oligonucleotide
  Antisense strand to SEQ ID NO: 2072540
cuuuguacgaaauaucuca

SEQ ID NO: 2072542 - RNA, 19 nt, Artificial Sequence
  Description of Artificial Sequence: Synthetic oligonucleotide
  Sense strand starting at position 54 of SEQ ID NO: 1881799
guuagugaaaugugggaca

SEQ ID NO: 2072543 - RNA, 19 nt, Artificial Sequence
  Description of Artificial Sequence: Synthetic oligonucleotide
  Antisense strand to SEQ ID NO: 2072542
ugucccacauuucacuaac

SEQ ID NO: 2072544 - RNA, 19 nt, Artificial Sequence
  Description of Artificial Sequence: Synthetic oligonucleotide
  Sense strand starting at position 106 of SEQ ID NO: 1881799
agaggaaaugcuugacuuu

SEQ ID NO: 2072545 - RNA, 19 nt, Artificial Sequence
  Description of Artificial Sequence: Synthetic oligonucleotide
  Antisense strand to SEQ ID NO: 2072544
aaagucaagcauuuccucu

SEQ ID NO: 2072546 - RNA, 19 nt, Artificial Sequence
  Description of Artificial Sequence: Synthetic oligonucleotide
  Sense strand starting at position 109 of SEQ ID NO: 1881799
ggaaaugcuugacuuugau

SEQ ID NO: 2072547 - RNA, 19 nt, Artificial Sequence
  Description of Artificial Sequence: Synthetic oligonucleotide
  Antisense strand to SEQ ID NO: 2072546
aucaaagucaagcauuucc

SEQ ID NO: 2072548 - RNA, 19 nt, Artificial Sequence
  Description of Artificial Sequence: Synthetic oligonucleotide
  Sense strand starting at position 115 of SEQ ID NO: 1881799
gcuugacuuugaucaagaa

SEQ ID NO: 2072549 - RNA, 19 nt, Artificial Sequence
  Description of Artificial Sequence: Synthetic oligonucleotide
  Antisense strand to SEQ ID NO: 2072548
uucuugaucaaagucaagc

SEQ ID NO: 2072550 - RNA, 19 nt, Artificial Sequence
  Description of Artificial Sequence: Synthetic oligonucleotide
  Sense strand starting at position 145 of SEQ ID NO: 1881799
gugagcauuuggcuaauca

SEQ ID NO: 2072551 - RNA, 19 nt, Artificial Sequence
  Description of Artificial Sequence: Synthetic oligonucleotide
  Antisense strand to SEQ ID NO: 2072550
ugauuagccaaaugcucac

SEQ ID NO: 2072552 - RNA, 19 nt, Artificial Sequence
  Description of Artificial Sequence: Synthetic oligonucleotide
  Sense strand starting at position 180 of SEQ ID NO: 1881799
ggaaacuauugauagggaa

SEQ ID NO: 2072553 - RNA, 19 nt, Artificial Sequence
  Description of Artificial Sequence: Synthetic oligonucleotide
  Antisense strand to SEQ ID NO: 2072552
uucccuaucaauaguuucc

SEQ ID NO: 2072554 - RNA, 19 nt, Artificial Sequence
  Description of Artificial Sequence: Synthetic oligonucleotide
  Sense strand starting at position 246 of SEQ ID NO: 1881799
aguacaugccugcaagauu

SEQ ID NO: 2072555 - RNA, 19 nt, Artificial Sequence
  Description of Artificial Sequence: Synthetic oligonucleotide
  Antisense strand to SEQ ID NO: 2072554
aaucuugcaggcauguacu

SEQ ID NO: 2072556 - RNA, 19 nt, Artificial Sequence
  Description of Artificial Sequence: Synthetic oligonucleotide
  Sense strand starting at position 317 of SEQ ID NO: 1881799
gaaguugauuuauaaugag

SEQ ID NO: 2072557 - RNA, 19 nt, Artificial Sequence
  Description of Artificial Sequence: Synthetic oligonucleotide
  Antisense strand to SEQ ID NO: 2072556
cucauuauaaaucaacuuc

SEQ ID NO: 2072558 - RNA, 19 nt, Artificial Sequence
  Description of Artificial Sequence: Synthetic oligonucleotide
  Sense strand starting at position 487 of SEQ ID NO: 1881799
agaaucagagcuugcaaag

SEQ ID NO: 2072559 - RNA, 19 nt, Artificial Sequence
  Description of Artificial Sequence: Synthetic oligonucleotide
  Antisense strand to SEQ ID NO: 2072558
cuuugcaagcucugauucu

SEQ ID NO: 2072560 - RNA, 19 nt, Artificial Sequence
  Description of Artificial Sequence: Synthetic oligonucleotide
  Sense strand starting at position 703 of SEQ ID NO: 1881799
acuucuucugaugaaguca

SEQ ID NO: 2072561 - RNA, 19 nt, Artificial Sequence
  Description of Artificial Sequence: Synthetic oligonucleotide
  Antisense strand to SEQ ID NO: 2072560
ugacuucaucagaagaagu

SEQ ID NO: 2072562 - RNA, 19 nt, Artificial Sequence
  Description of Artificial Sequence: Synthetic oligonucleotide
  Sense strand starting at position 932 of SEQ ID NO: 1881799
ccuugacuaccuugugaac

SEQ ID NO: 2072563 - RNA, 19 nt, Artificial Sequence
  Description of Artificial Sequence: Synthetic oligonucleotide
  Antisense strand to SEQ ID NO: 2072562
guucacaagguagucaagg

SEQ ID NO: 2072564 - RNA, 19 nt, Artificial Sequence
  Description of Artificial Sequence: Synthetic oligonucleotide
  Sense strand starting at position 938 of SEQ ID NO: 1881799
cuaccuugugaacaugauu

SEQ ID NO: 2072565 - RNA, 19 nt, Artificial Sequence
  Description of Artificial Sequence: Synthetic oligonucleotide
  Antisense strand to SEQ ID NO: 2072564
aaucauguucacaagguag

SEQ ID NO: 2072566 - RNA, 19 nt, Artificial Sequence
  Description of Artificial Sequence: Synthetic oligonucleotide
  Sense strand starting at position 947 of SEQ ID NO: 1881799
gaacaugauuuagagguuu

SEQ ID NO: 2072567 - RNA, 19 nt, Artificial Sequence
  Description of Artificial Sequence: Synthetic oligonucleotide
  Antisense strand to SEQ ID NO: 2072566
aaaccucuaaaucauguuc

SEQ ID NO: 2072568 - RNA, 19 nt, Artificial Sequence
  Description of Artificial Sequence: Synthetic oligonucleotide
  Sense strand starting at position 1012 of SEQ ID NO: 1881799
cgauaaagguucuuccuca

SEQ ID NO: 2072569 - RNA, 19 nt, Artificial Sequence
  Description of Artificial Sequence: Synthetic oligonucleotide
  Antisense strand to SEQ ID NO: 2072568
ugaggaagaaccuuuaucg

SEQ ID NO: 2072570 - RNA, 19 nt, Artificial Sequence
  Description of Artificial Sequence: Synthetic oligonucleotide
  Sense strand starting at position 1016 of SEQ ID NO: 1881799
aaagguucuuccucaaggu

SEQ ID NO: 2072571 - RNA, 19 nt, Artificial Sequence
  Description of Artificial Sequence: Synthetic oligonucleotide
  Antisense strand to SEQ ID NO: 2072570
accuugaggaagaaccuuu

SEQ ID NO: 2072572 - RNA, 19 nt, Artificial Sequence
  Description of Artificial Sequence: Synthetic oligonucleotide
  Sense strand starting at position 1023 of SEQ ID NO: 1881799
cuuccucaaggugauuaau

SEQ ID NO: 2072573 - RNA, 19 nt, Artificial Sequence
  Description of Artificial Sequence: Synthetic oligonucleotide
  Antisense strand to SEQ ID NO: 2072572
auuaaucaccuugaggaag

SEQ ID NO: 2072574 - RNA, 19 nt, Artificial Sequence
  Description of Artificial Sequence: Synthetic oligonucleotide
  Sense strand starting at position 1237 of SEQ ID NO: 1881799
uuagaagaguggcugacau

SEQ ID NO: 2072575 - RNA, 19 nt, Artificial Sequence
  Description of Artificial Sequence: Synthetic oligonucleotide
  Antisense strand to SEQ ID NO: 2072574
augucagccacucuucuaa

SEQ ID NO: 2072576 - RNA, 19 nt, Artificial Sequence
  Description of Artificial Sequence: Synthetic oligonucleotide
  Sense strand starting at position 1244 of SEQ ID NO: 1881799
aguggcugacauugaacaa

SEQ ID NO: 2072577 - RNA, 19 nt, Artificial Sequence
  Description of Artificial Sequence: Synthetic oligonucleotide
  Antisense strand to SEQ ID NO: 2072576
uuguucaaugucagccacu

SEQ ID NO: 2072578 - RNA, 19 nt, Artificial Sequence
  Description of Artificial Sequence: Synthetic oligonucleotide
  Sense strand starting at position 1245 of SEQ ID NO: 1881799
guggcugacauugaacaau

SEQ ID NO: 2072579 - RNA, 19 nt, Artificial Sequence
  Description of Artificial Sequence: Synthetic oligonucleotide
  Antisense strand to SEQ ID NO: 2072578
auuguucaaugucagccac

SEQ ID NO: 2072580 - RNA, 19 nt, Artificial Sequence
  Description of Artificial Sequence: Synthetic oligonucleotide
  Sense strand starting at position 1440 of SEQ ID NO: 1881799
aaggguggcccuuaaaugu

SEQ ID NO: 2072581 - RNA, 19 nt, Artificial Sequence
  Description of Artificial Sequence: Synthetic oligonucleotide
  Antisense strand to SEQ ID NO: 2072580
acauuuaagggccacccuu

SEQ ID NO: 2072582 - RNA, 19 nt, Artificial Sequence
  Description of Artificial Sequence: Synthetic oligonucleotide
  Sense strand starting at position 1448 of SEQ ID NO: 1881799
cccuuaaauguugguugaa

SEQ ID NO: 2072583 - RNA, 19 nt, Artificial Sequence
  Description of Artificial Sequence: Synthetic oligonucleotide
  Antisense strand to SEQ ID NO: 2072582
uucaaccaacauuuaaggg

SEQ ID NO: 2072584 - RNA, 19 nt, Artificial Sequence
  Description of Artificial Sequence: Synthetic oligonucleotide
  Sense strand starting at position 1449 of SEQ ID NO: 1881799
ccuuaaauguugguugaag

SEQ ID NO: 2072585 - RNA, 19 nt, Artificial Sequence
  Description of Artificial Sequence: Synthetic oligonucleotide
  Antisense strand to SEQ ID NO: 2072584
cuucaaccaacauuuaagg

SEQ ID NO: 2072586 - RNA, 19 nt, Artificial Sequence
  Description of Artificial Sequence: Synthetic oligonucleotide
  Sense strand starting at position 1451 of SEQ ID NO: 1881799
uuaaauguugguugaagga

SEQ ID NO: 2072587 - RNA, 19 nt, Artificial Sequence
  Description of Artificial Sequence: Synthetic oligonucleotide
  Antisense strand to SEQ ID NO: 2072586
uccuucaaccaacauuuaa

SEQ ID NO: 2072588 - RNA, 19 nt, Artificial Sequence
  Description of Artificial Sequence: Synthetic oligonucleotide
  Sense strand starting at position 1593 of SEQ ID NO: 1881799
gggagaagguuaguguuga

SEQ ID NO: 2072589 - RNA, 19 nt, Artificial Sequence
  Description of Artificial Sequence: Synthetic oligonucleotide
  Antisense strand to SEQ ID NO: 2072588
ucaacacuaaccuucuccc

SEQ ID NO: 2072590 - RNA, 19 nt, Artificial Sequence
  Description of Artificial Sequence: Synthetic oligonucleotide
  Sense strand starting at position 1616 of SEQ ID NO: 1881799
aagggucuacuuugucaau

SEQ ID NO: 2072591 - RNA, 19 nt, Artificial Sequence
  Description of Artificial Sequence: Synthetic oligonucleotide
  Antisense strand to SEQ ID NO: 2072590
auugacaaaguagacccuu

SEQ ID NO: 2072592 - RNA, 19 nt, Artificial Sequence
  Description of Artificial Sequence: Synthetic oligonucleotide
  Sense strand starting at position 1622 of SEQ ID NO: 1881799
cuacuuugucaauggaaac

SEQ ID NO: 2072593 - RNA, 19 nt, Artificial Sequence
  Description of Artificial Sequence: Synthetic oligonucleotide
  Antisense strand to SEQ ID NO: 2072592
guuuccauugacaaaguag

SEQ ID NO: 2072594 - RNA, 19 nt, Artificial Sequence
  Description of Artificial Sequence: Synthetic oligonucleotide
  Sense strand starting at position 2720 of SEQ ID NO: 1881799
uugauugauccugggaagc

SEQ ID NO: 2072595 - RNA, 19 nt, Artificial Sequence
  Description of Artificial Sequence: Synthetic oligonucleotide
  Antisense strand to SEQ ID NO: 2072594
gcuucccaggaucaaucaa

SEQ ID NO: 2072596 - RNA, 19 nt, Artificial Sequence
  Description of Artificial Sequence: Synthetic oligonucleotide
  Sense strand starting at position 2863 of SEQ ID NO: 1881799
ucagauaacuuaucgagua

SEQ ID NO: 2072597 - RNA, 19 nt, Artificial Sequence
  Description of Artificial Sequence: Synthetic oligonucleotide
  Antisense strand to SEQ ID NO: 2072596
uacucgauaaguuaucuga

SEQ ID NO: 2072598 - RNA, 19 nt, Artificial Sequence
  Description of Artificial Sequence: Synthetic oligonucleotide
  Sense strand starting at position 2868 of SEQ ID NO: 1881799
uaacuuaucgaguaccagu

SEQ ID NO: 2072599 - RNA, 19 nt, Artificial Sequence
  Description of Artificial Sequence: Synthetic oligonucleotide
  Antisense strand to SEQ ID NO: 2072598
acugguacucgauaaguua

SEQ ID NO: 2072600 - RNA, 19 nt, Artificial Sequence
  Description of Artificial Sequence: Synthetic oligonucleotide
  Sense strand starting at position 2993 of SEQ ID NO: 1881799
ccguuagaugaguauggaa

SEQ ID NO: 2072601 - RNA, 19 nt, Artificial Sequence
  Description of Artificial Sequence: Synthetic oligonucleotide
  Antisense strand to SEQ ID NO: 2072600
uuccauacucaucuaacgg

SEQ ID NO: 2072602 - RNA, 19 nt, Artificial Sequence
  Description of Artificial Sequence: Synthetic oligonucleotide
  Sense strand starting at position 3078 of SEQ ID NO: 1881799
guuuaaguggauuggaaau

SEQ ID NO: 2072603 - RNA, 19 nt, Artificial Sequence
  Description of Artificial Sequence: Synthetic oligonucleotide
  Antisense strand to SEQ ID NO: 2072602
auuuccaauccacuuaaac

SEQ ID NO: 2072604 - RNA, 19 nt, Artificial Sequence
  Description of Artificial Sequence: Synthetic oligonucleotide
  Sense strand starting at position 3103 of SEQ ID NO: 1881799
ucguuauaugcacccguuu

SEQ ID NO: 2072605 - RNA, 19 nt, Artificial Sequence
  Description of Artificial Sequence: Synthetic oligonucleotide
  Antisense strand to SEQ ID NO: 2072604
aaacgggugcauauaacga

SEQ ID NO: 2072606 - RNA, 19 nt, Artificial Sequence
  Description of Artificial Sequence: Synthetic oligonucleotide
  Sense strand starting at position 3121 of SEQ ID NO: 1881799
uguauauaugcccauacac

SEQ ID NO: 2072607 - RNA, 19 nt, Artificial Sequence
  Description of Artificial Sequence: Synthetic oligonucleotide
  Antisense strand to SEQ ID NO: 2072606
guguaugggcauauauaca

SEQ ID NO: 2072608 - RNA, 19 nt, Artificial Sequence
  Description of Artificial Sequence: Synthetic oligonucleotide
  Sense strand starting at position 3193 of SEQ ID NO: 1881799
ccuuuaguacuaugauuag

SEQ ID NO: 2072609 - RNA, 19 nt, Artificial Sequence
  Description of Artificial Sequence: Synthetic oligonucleotide
  Antisense strand to SEQ ID NO: 2072608
cuaaucauaguacuaaagg

SEQ ID NO: 2072610 - RNA, 19 nt, Artificial Sequence
  Description of Artificial Sequence: Synthetic oligonucleotide
  Sense strand starting at position 3218 of SEQ ID NO: 1881799
uagcguuaggaucaaauaa

SEQ ID NO: 2072611 - RNA, 19 nt, Artificial Sequence
  Description of Artificial Sequence: Synthetic oligonucleotide
  Antisense strand to SEQ ID NO: 2072610
uuauuugauccuaacgcua

SEQ ID NO: 2072612 - RNA, 19 nt, Artificial Sequence
  Description of Artificial Sequence: Synthetic oligonucleotide
  Sense strand starting at position 3314 of SEQ ID NO: 1881799
gacuguugugaaugauacu

SEQ ID NO: 2072613 - RNA, 19 nt, Artificial Sequence
  Description of Artificial Sequence: Synthetic oligonucleotide
  Antisense strand to SEQ ID NO: 2072612
aguaucauucacaacaguc

SEQ ID NO: 2072614 - RNA, 19 nt, Artificial Sequence
  Description of Artificial Sequence: Synthetic oligonucleotide
  Sense strand starting at position 3327 of SEQ ID NO: 1881799
gauacuguggcucaaguuu

SEQ ID NO: 2072615 - RNA, 19 nt, Artificial Sequence
  Description of Artificial Sequence: Synthetic oligonucleotide
  Antisense strand to SEQ ID NO: 2072614
aaacuugagccacaguauc

SEQ ID NO: 2072616 - RNA, 19 nt, Artificial Sequence
  Description of Artificial Sequence: Synthetic oligonucleotide
  Sense strand starting at position 3408 of SEQ ID NO: 1881799
ggauaaaggagcuguggua

SEQ ID NO: 2072617 - RNA, 19 nt, Artificial Sequence
  Description of Artificial Sequence: Synthetic oligonucleotide
  Antisense strand to SEQ ID NO: 2072616
uaccacagcuccuuuaucc

SEQ ID NO: 2072618 - RNA, 19 nt, Artificial Sequence
  Description of Artificial Sequence: Synthetic oligonucleotide
  Sense strand starting at position 3871 of SEQ ID NO: 1881799
uagugaauccgauaagguu

SEQ ID NO: 2072619 - RNA, 19 nt, Artificial Sequence
  Description of Artificial Sequence: Synthetic oligonucleotide
  Antisense strand to SEQ ID NO: 2072618
aaccuuaucggauucacua

SEQ ID NO: 2072620 - RNA, 19 nt, Artificial Sequence
  Description of Artificial Sequence: Synthetic oligonucleotide
  Sense strand starting at position 3934 of SEQ ID NO: 1881799
uugguugggaagugauauu

SEQ ID NO: 2072621 - RNA, 19 nt, Artificial Sequence
  Description of Artificial Sequence: Synthetic oligonucleotide
  Antisense strand to SEQ ID NO: 2072620
aauaucacuucccaaccaa

SEQ ID NO: 2072622 - RNA, 19 nt, Artificial Sequence
  Description of Artificial Sequence: Synthetic oligonucleotide
  Sense strand starting at position 60 of SEQ ID NO: 1881800
gggaguaauuugucugccu

SEQ ID NO: 2072623 - RNA, 19 nt, Artificial Sequence
  Description of Artificial Sequence: Synthetic oligonucleotide
  Antisense strand to SEQ ID NO: 2072622
aggcagacaaauuacuccc

SEQ ID NO: 2072624 - RNA, 19 nt, Artificial Sequence
  Description of Artificial Sequence: Synthetic oligonucleotide
  Sense strand starting at position 61 of SEQ ID NO: 1881800
ggaguaauuugucugccug

SEQ ID NO: 2072625 - RNA, 19 nt, Artificial Sequence
  Description of Artificial Sequence: Synthetic oligonucleotide
  Antisense strand to SEQ ID NO: 2072624
caggcagacaaauuacucc

SEQ ID NO: 2072626 - RNA, 19 nt, Artificial Sequence
  Description of Artificial Sequence: Synthetic oligonucleotide
  Sense strand starting at position 62 of SEQ ID NO: 1881800
gaguaauuugucugccugu

SEQ ID NO: 2072627 - RNA, 19 nt, Artificial Sequence
  Description of Artificial Sequence: Synthetic oligonucleotide
  Antisense strand to SEQ ID NO: 2072626
acaggcagacaaauuacuc

SEQ ID NO: 2072628 - RNA, 19 nt, Artificial Sequence
  Description of Artificial Sequence: Synthetic oligonucleotide
  Sense strand starting at position 63 of SEQ ID NO: 1881800
aguaauuugucugccuguu

SEQ ID NO: 2072629 - RNA, 19 nt, Artificial Sequence
  Description of Artificial Sequence: Synthetic oligonucleotide
  Antisense strand to SEQ ID NO: 2072628
aacaggcagacaaauuacu

SEQ ID NO: 2072630 - RNA, 19 nt, Artificial Sequence
  Description of Artificial Sequence: Synthetic oligonucleotide
  Sense strand starting at position 95 of SEQ ID NO: 1881800
gugauaccacuuuggguau

SEQ ID NO: 2072631 - RNA, 19 nt, Artificial Sequence
  Description of Artificial Sequence: Synthetic oligonucleotide
  Antisense strand to SEQ ID NO: 2072630
auacccaaagugguaucac

SEQ ID NO: 2072632 - RNA, 19 nt, Artificial Sequence
  Description of Artificial Sequence: Synthetic oligonucleotide
  Sense strand starting at position 99 of SEQ ID NO: 1881800
uaccacuuuggguauguua

SEQ ID NO: 2072633 - RNA, 19 nt, Artificial Sequence
  Description of Artificial Sequence: Synthetic oligonucleotide
  Antisense strand to SEQ ID NO: 2072632
uaacauacccaaaguggua

SEQ ID NO: 2072634 - RNA, 19 nt, Artificial Sequence
  Description of Artificial Sequence: Synthetic oligonucleotide
  Sense strand starting at position 110 of SEQ ID NO: 1881800
guauguuaugcccuguagu

SEQ ID NO: 2072635 - RNA, 19 nt, Artificial Sequence
  Description of Artificial Sequence: Synthetic oligonucleotide
  Antisense strand to SEQ ID NO: 2072634
acuacagggcauaacauac

SEQ ID NO: 2072636 - RNA, 19 nt, Artificial Sequence
  Description of Artificial Sequence: Synthetic oligonucleotide
  Sense strand starting at position 528 of SEQ ID NO: 1881800
aagggcuuaguugaagagu

SEQ ID NO: 2072637 - RNA, 19 nt, Artificial Sequence
  Description of Artificial Sequence: Synthetic oligonucleotide
  Antisense strand to SEQ ID NO: 2072636
acucuucaacuaagcccuu

SEQ ID NO: 2072638 - RNA, 19 nt, Artificial Sequence
  Description of Artificial Sequence: Synthetic oligonucleotide
  Sense strand starting at position 531 of SEQ ID NO: 1881800
ggcuuaguugaagaguaaa

SEQ ID NO: 2072639 - RNA, 19 nt, Artificial Sequence
  Description of Artificial Sequence: Synthetic oligonucleotide
  Antisense strand to SEQ ID NO: 2072638
uuuacucuucaacuaagcc

SEQ ID NO: 2072640 - RNA, 19 nt, Artificial Sequence
  Description of Artificial Sequence: Synthetic oligonucleotide
  Sense strand starting at position 558 of SEQ ID NO: 1881800
aaccuauugugguuaagac

SEQ ID NO: 2072641 - RNA, 19 nt, Artificial Sequence
  Description of Artificial Sequence: Synthetic oligonucleotide
  Antisense strand to SEQ ID NO: 2072640
gucuuaaccacaauagguu

SEQ ID NO: 2072642 - RNA, 19 nt, Artificial Sequence
  Description of Artificial Sequence: Synthetic oligonucleotide
  Sense strand starting at position 559 of SEQ ID NO: 1881800
accuauugugguuaagacu

SEQ ID NO: 2072643 - RNA, 19 nt, Artificial Sequence
  Description of Artificial Sequence: Synthetic oligonucleotide
  Antisense strand to SEQ ID NO: 2072642
agucuuaaccacaauaggu

SEQ ID NO: 2072644 - RNA, 19 nt, Artificial Sequence
  Description of Artificial Sequence: Synthetic oligonucleotide
  Sense strand starting at position 591 of SEQ ID NO: 1881800
agaugauugguguguuuga

SEQ ID NO: 2072645 - RNA, 19 nt, Artificial Sequence
  Description of Artificial Sequence: Synthetic oligonucleotide
  Antisense strand to SEQ ID NO: 2072644
ucaaacacaccaaucaucu

SEQ ID NO: 2072646 - RNA, 19 nt, Artificial Sequence
  Description of Artificial Sequence: Synthetic oligonucleotide
  Sense strand starting at position 659 of SEQ ID NO: 1881800
ucaugugacuuggccaaau

SEQ ID NO: 2072647 - RNA, 19 nt, Artificial Sequence
  Description of Artificial Sequence: Synthetic oligonucleotide
  Antisense strand to SEQ ID NO: 2072646
auuuggccaagucacauga

SEQ ID NO: 2072648 - RNA, 19 nt, Artificial Sequence
  Description of Artificial Sequence: Synthetic oligonucleotide
  Sense strand starting at position 661 of SEQ ID NO: 1881800
augugacuuggccaaaugu

SEQ ID NO: 2072649 - RNA, 19 nt, Artificial Sequence
  Description of Artificial Sequence: Synthetic oligonucleotide
  Antisense strand to SEQ ID NO: 2072648
acauuuggccaagucacau

SEQ ID NO: 2072650 - RNA, 19 nt, Artificial Sequence
  Description of Artificial Sequence: Synthetic oligonucleotide
  Sense strand starting at position 671 of SEQ ID NO: 1881800
gccaaaugugagcagaagu

SEQ ID NO: 2072651 - RNA, 19 nt, Artificial Sequence
  Description of Artificial Sequence: Synthetic oligonucleotide
  Antisense strand to SEQ ID NO: 2072650
acuucugcucacauuuggc

SEQ ID NO: 2072652 - RNA, 19 nt, Artificial Sequence
  Description of Artificial Sequence: Synthetic oligonucleotide
  Sense strand starting at position 747 of SEQ ID NO: 1881800
uuuccucugcccuagggau

SEQ ID NO: 2072653 - RNA, 19 nt, Artificial Sequence
  Description of Artificial Sequence: Synthetic oligonucleotide
  Antisense strand to SEQ ID NO: 2072652
aucccuagggcagaggaaa

SEQ ID NO: 2072654 - RNA, 19 nt, Artificial Sequence
  Description of Artificial Sequence: Synthetic oligonucleotide
  Sense strand starting at position 802 of SEQ ID NO: 1881800
uggagaccugagugauuag

SEQ ID NO: 2072655 - RNA, 19 nt, Artificial Sequence
  Description of Artificial Sequence: Synthetic oligonucleotide
  Antisense strand to SEQ ID NO: 2072654
cuaaucacucaggucucca

SEQ ID NO: 2072656 - RNA, 19 nt, Artificial Sequence
  Description of Artificial Sequence: Synthetic oligonucleotide
  Sense strand starting at position 811 of SEQ ID NO: 1881800
gagugauuagaaugagcac

SEQ ID NO: 2072657 - RNA, 19 nt, Artificial Sequence
  Description of Artificial Sequence: Synthetic oligonucleotide
  Antisense strand to SEQ ID NO: 2072656
gugcucauucuaaucacuc

SEQ ID NO: 2072658 - RNA, 19 nt, Artificial Sequence
  Description of Artificial Sequence: Synthetic oligonucleotide
  Sense strand starting at position 870 of SEQ ID NO: 1881800
gguuuaggccacugggauu

SEQ ID NO: 2072659 - RNA, 19 nt, Artificial Sequence
  Description of Artificial Sequence: Synthetic oligonucleotide
  Antisense strand to SEQ ID NO: 2072658
aaucccaguggccuaaacc

SEQ ID NO: 2072660 - RNA, 19 nt, Artificial Sequence
  Description of Artificial Sequence: Synthetic oligonucleotide
  Sense strand starting at position 922 of SEQ ID NO: 1881800
cuggcaucaccauacagau

SEQ ID NO: 2072661 - RNA, 19 nt, Artificial Sequence
  Description of Artificial Sequence: Synthetic oligonucleotide
  Antisense strand to SEQ ID NO: 2072660
aucuguauggugaugccag

SEQ ID NO: 2072662 - RNA, 19 nt, Artificial Sequence
  Description of Artificial Sequence: Synthetic oligonucleotide
  Sense strand starting at position 2490 of SEQ ID NO: 1881800
ccaccaguucugggacuau

SEQ ID NO: 2072663 - RNA, 19 nt, Artificial Sequence
  Description of Artificial Sequence: Synthetic oligonucleotide
  Antisense strand to SEQ ID NO: 2072662
auagucccagaacuggugg

SEQ ID NO: 2072664 - RNA, 19 nt, Artificial Sequence
  Description of Artificial Sequence: Synthetic oligonucleotide
  Sense strand starting at position 2503 of SEQ ID NO: 1881800
gacuauugaucagcaagga

SEQ ID NO: 2072665 - RNA, 19 nt, Artificial Sequence
  Description of Artificial Sequence: Synthetic oligonucleotide
  Antisense strand to SEQ ID NO: 2072664
uccuugcugaucaauaguc

SEQ ID NO: 2072666 - RNA, 19 nt, Artificial Sequence
  Description of Artificial Sequence: Synthetic oligonucleotide
  Sense strand starting at position 2517 of SEQ ID NO: 1881800
aaggaaguguuguugauuc

SEQ ID NO: 2072667 - RNA, 19 nt, Artificial Sequence
  Description of Artificial Sequence: Synthetic oligonucleotide
  Antisense strand to SEQ ID NO: 2072666
gaaucaacaacacuuccuu

SEQ ID NO: 2072668 - RNA, 19 nt, Artificial Sequence
  Description of Artificial Sequence: Synthetic oligonucleotide
  Sense strand starting at position 2519 of SEQ ID NO: 1881800
ggaaguguuguugauucuu

SEQ ID NO: 2072669 - RNA, 19 nt, Artificial Sequence
  Description of Artificial Sequence: Synthetic oligonucleotide
  Antisense strand to SEQ ID NO: 2072668
aagaaucaacaacacuucc

SEQ ID NO: 2072670 - RNA, 19 nt, Artificial Sequence
  Description of Artificial Sequence: Synthetic oligonucleotide
  Sense strand starting at position 2972 of SEQ ID NO: 1881800
gaauuaagugucuacucga

SEQ ID NO: 2072671 - RNA, 19 nt, Artificial Sequence
  Description of Artificial Sequence: Synthetic oligonucleotide
  Antisense strand to SEQ ID NO: 2072670
ucgaguagacacuuaauuc

SEQ ID NO: 2072672 - RNA, 19 nt, Artificial Sequence
  Description of Artificial Sequence: Synthetic oligonucleotide
  Sense strand starting at position 2975 of SEQ ID NO: 1881800
uuaagugucuacucgagag

SEQ ID NO: 2072673 - RNA, 19 nt, Artificial Sequence
  Description of Artificial Sequence: Synthetic oligonucleotide
  Antisense strand to SEQ ID NO: 2072672
cucucgaguagacacuuaa

SEQ ID NO: 2072674 - RNA, 19 nt, Artificial Sequence
  Description of Artificial Sequence: Synthetic oligonucleotide
  Sense strand starting at position 2977 of SEQ ID NO: 1881800
aagugucuacucgagagag

SEQ ID NO: 2072675 - RNA, 19 nt, Artificial Sequence
  Description of Artificial Sequence: Synthetic oligonucleotide
  Antisense strand to SEQ ID NO: 2072674
cucucucgaguagacacuu

SEQ ID NO: 2072676 - RNA, 19 nt, Artificial Sequence
  Description of Artificial Sequence: Synthetic oligonucleotide
  Sense strand starting at position 3142 of SEQ ID NO: 1881800
acuggagugucuccuuaau

SEQ ID NO: 2072677 - RNA, 19 nt, Artificial Sequence
  Description of Artificial Sequence: Synthetic oligonucleotide
  Antisense strand to SEQ ID NO: 2072676
auuaaggagacacuccagu

SEQ ID NO: 2072678 - RNA, 19 nt, Artificial Sequence
  Description of Artificial Sequence: Synthetic oligonucleotide
  Sense strand starting at position 3196 of SEQ ID NO: 1881800
gggaucagugagugaaaug

SEQ ID NO: 2072679 - RNA, 19 nt, Artificial Sequence
  Description of Artificial Sequence: Synthetic oligonucleotide
  Antisense strand to SEQ ID NO: 2072678
cauuucacucacugauccc

SEQ ID NO: 2072680 - RNA, 19 nt, Artificial Sequence
  Description of Artificial Sequence: Synthetic oligonucleotide
  Sense strand starting at position 3197 of SEQ ID NO: 1881800
ggaucagugagugaaaugu

SEQ ID NO: 2072681 - RNA, 19 nt, Artificial Sequence
  Description of Artificial Sequence: Synthetic oligonucleotide
  Antisense strand to SEQ ID NO: 2072680
acauuucacucacugaucc

SEQ ID NO: 2072682 - RNA, 19 nt, Artificial Sequence
  Description of Artificial Sequence: Synthetic oligonucleotide
  Sense strand starting at position 3201 of SEQ ID NO: 1881800
cagugagugaaauguauga

SEQ ID NO: 2072683 - RNA, 19 nt, Artificial Sequence
  Description of Artificial Sequence: Synthetic oligonucleotide
  Antisense strand to SEQ ID NO: 2072682
ucauacauuucacucacug

SEQ ID NO: 2072684 - RNA, 19 nt, Artificial Sequence
  Description of Artificial Sequence: Synthetic oligonucleotide
  Sense strand starting at position 3203 of SEQ ID NO: 1881800
gugagugaaauguaugauu

SEQ ID NO: 2072685 - RNA, 19 nt, Artificial Sequence
  Description of Artificial Sequence: Synthetic oligonucleotide
  Antisense strand to SEQ ID NO: 2072684
aaucauacauuucacucac

SEQ ID NO: 2072686 - RNA, 19 nt, Artificial Sequence
  Description of Artificial Sequence: Synthetic oligonucleotide
  Sense strand starting at position 3208 of SEQ ID NO: 1881800
ugaaauguaugauuccuga

SEQ ID NO: 2072687 - RNA, 19 nt, Artificial Sequence
  Description of Artificial Sequence: Synthetic oligonucleotide
  Antisense strand to SEQ ID NO: 2072686
ucaggaaucauacauuuca

SEQ ID NO: 2072688 - RNA, 19 nt, Artificial Sequence
  Description of Artificial Sequence: Synthetic oligonucleotide
  Sense strand starting at position 3211 of SEQ ID NO: 1881800
aauguaugauuccugaggu

SEQ ID NO: 2072689 - RNA, 19 nt, Artificial Sequence
  Description of Artificial Sequence: Synthetic oligonucleotide
  Antisense strand to SEQ ID NO: 2072688
accucaggaaucauacauu

SEQ ID NO: 2072690 - RNA, 19 nt, Artificial Sequence
  Description of Artificial Sequence: Synthetic oligonucleotide
  Sense strand starting at position 3377 of SEQ ID NO: 1881800
gucaaauaguauucugagu

SEQ ID NO: 2072691 - RNA, 19 nt, Artificial Sequence
  Description of Artificial Sequence: Synthetic oligonucleotide
  Antisense strand to SEQ ID NO: 2072690
acucagaauacuauuugac

SEQ ID NO: 2072692 - RNA, 19 nt, Artificial Sequence
  Description of Artificial Sequence: Synthetic oligonucleotide
  Sense strand starting at position 3437 of SEQ ID NO: 1881800
ugguauauugaguaaagcu

SEQ ID NO: 2072693 - RNA, 19 nt, Artificial Sequence
  Description of Artificial Sequence: Synthetic oligonucleotide
  Antisense strand to SEQ ID NO: 2072692
agcuuuacucaauauacca

SEQ ID NO: 2072694 - RNA, 19 nt, Artificial Sequence
  Description of Artificial Sequence: Synthetic oligonucleotide
  Sense strand starting at position 3452 of SEQ ID NO: 1881800
agcugauugccgucuacga

SEQ ID NO: 2072695 - RNA, 19 nt, Artificial Sequence
  Description of Artificial Sequence: Synthetic oligonucleotide
  Antisense strand to SEQ ID NO: 2072694
ucguagacggcaaucagcu

SEQ ID NO: 2072696 - RNA, 19 nt, Artificial Sequence
  Description of Artificial Sequence: Synthetic oligonucleotide
  Sense strand starting at position 3453 of SEQ ID NO: 1881800
gcugauugccgucuacgau

SEQ ID NO: 2072697 - RNA, 19 nt, Artificial Sequence
  Description of Artificial Sequence: Synthetic oligonucleotide
  Antisense strand to SEQ ID NO: 2072696
aucguagacggcaaucagc

SEQ ID NO: 2072698 - RNA, 19 nt, Artificial Sequence
  Description of Artificial Sequence: Synthetic oligonucleotide
  Sense strand starting at position 3597 of SEQ ID NO: 1881800
accuuuggacugggacauu

SEQ ID NO: 2072699 - RNA, 19 nt, Artificial Sequence
  Description of Artificial Sequence: Synthetic oligonucleotide
  Antisense strand to SEQ ID NO: 2072698
aaugucccaguccaaaggu

SEQ ID NO: 2072700 - RNA, 19 nt, Artificial Sequence
  Description of Artificial Sequence: Synthetic oligonucleotide
  Sense strand starting at position 3706 of SEQ ID NO: 1881800
ugugucuuuggagaaccuu

SEQ ID NO: 2072701 - RNA, 19 nt, Artificial Sequence
  Description of Artificial Sequence: Synthetic oligonucleotide
  Antisense strand to SEQ ID NO: 2072700
aagguucuccaaagacaca

SEQ ID NO: 2072702 - RNA, 19 nt, Artificial Sequence
  Description of Artificial Sequence: Synthetic oligonucleotide
  Sense strand starting at position 44 of SEQ ID NO: 1881801
aguuuagagucauucuuaa

SEQ ID NO: 2072703 - RNA, 19 nt, Artificial Sequence
  Description of Artificial Sequence: Synthetic oligonucleotide
  Antisense strand to SEQ ID NO: 2072702
uuaagaaugacucuaaacu

SEQ ID NO: 2072704 - RNA, 19 nt, Artificial Sequence
  Description of Artificial Sequence: Synthetic oligonucleotide
  Sense strand starting at position 99 of SEQ ID NO: 1881801
uggaauggauuaucacagu

SEQ ID NO: 2072705 - RNA, 19 nt, Artificial Sequence
  Description of Artificial Sequence: Synthetic oligonucleotide
  Antisense strand to SEQ ID NO: 2072704
acugugauaauccauucca

SEQ ID NO: 2072706 - RNA, 19 nt, Artificial Sequence
  Description of Artificial Sequence: Synthetic oligonucleotide
  Sense strand starting at position 134 of SEQ ID NO: 1881801
cucuuaacucuuggcaaag

SEQ ID NO: 2072707 - RNA, 19 nt, Artificial Sequence
  Description of Artificial Sequence: Synthetic oligonucleotide
  Antisense strand to SEQ ID NO: 2072706
cuuugccaagaguuaagag

SEQ ID NO: 2072708 - RNA, 19 nt, Artificial Sequence
  Description of Artificial Sequence: Synthetic oligonucleotide
  Sense strand starting at position 166 of SEQ ID NO: 1881801
ggacuuaguucugucaaua

SEQ ID NO: 2072709 - RNA, 19 nt, Artificial Sequence
  Description of Artificial Sequence: Synthetic oligonucleotide
  Antisense strand to SEQ ID NO: 2072708
uauugacagaacuaagucc

SEQ ID NO: 2072710 - RNA, 19 nt, Artificial Sequence
  Description of Artificial Sequence: Synthetic oligonucleotide
  Sense strand starting at position 258 of SEQ ID NO: 1881801
ggacuaguagugcagugau

SEQ ID NO: 2072711 - RNA, 19 nt, Artificial Sequence
  Description of Artificial Sequence: Synthetic oligonucleotide
  Antisense strand to SEQ ID NO: 2072710
aucacugcacuacuagucc

SEQ ID NO: 2072712 - RNA, 19 nt, Artificial Sequence
  Description of Artificial Sequence: Synthetic oligonucleotide
  Sense strand starting at position 426 of SEQ ID NO: 1881801
ccauaaagugcguuugcuu

SEQ ID NO: 2072713 - RNA, 19 nt, Artificial Sequence
  Description of Artificial Sequence: Synthetic oligonucleotide
  Antisense strand to SEQ ID NO: 2072712
aagcaaacgcacuuuaugg

SEQ ID NO: 2072714 - RNA, 19 nt, Artificial Sequence
  Description of Artificial Sequence: Synthetic oligonucleotide
  Sense strand starting at position 427 of SEQ ID NO: 1881801
cauaaagugcguuugcuuu

SEQ ID NO: 2072715 - RNA, 19 nt, Artificial Sequence
  Description of Artificial Sequence: Synthetic oligonucleotide
  Antisense strand to SEQ ID NO: 2072714
aaagcaaacgcacuuuaug

SEQ ID NO: 2072716 - RNA, 19 nt, Artificial Sequence
  Description of Artificial Sequence: Synthetic oligonucleotide
  Sense strand starting at position 463 of SEQ ID NO: 1881801
cagugaagggcucauguua

SEQ ID NO: 2072717 - RNA, 19 nt, Artificial Sequence
  Description of Artificial Sequence: Synthetic oligonucleotide
  Antisense strand to SEQ ID NO: 2072716
uaacaugagcccuucacug

SEQ ID NO: 2072718 - RNA, 19 nt, Artificial Sequence
  Description of Artificial Sequence: Synthetic oligonucleotide
  Sense strand starting at position 513 of SEQ ID NO: 1881801
uuucauuugcgccgagaga

SEQ ID NO: 2072719 - RNA, 19 nt, Artificial Sequence
  Description of Artificial Sequence: Synthetic oligonucleotide
  Antisense strand to SEQ ID NO: 2072718
ucucucggcgcaaaugaaa

SEQ ID NO: 2072720 - RNA, 19 nt, Artificial Sequence
  Description of Artificial Sequence: Synthetic oligonucleotide
  Sense strand starting at position 618 of SEQ ID NO: 1881801
gcgagaaaucagugauuca

SEQ ID NO: 2072721 - RNA, 19 nt, Artificial Sequence
  Description of Artificial Sequence: Synthetic oligonucleotide
  Antisense strand to SEQ ID NO: 2072720
ugaaucacugauuucucgc

SEQ ID NO: 2072722 - RNA, 19 nt, Artificial Sequence
  Description of Artificial Sequence: Synthetic oligonucleotide
  Sense strand starting at position 884 of SEQ ID NO: 1881801
aggagauccuacgcuggaa

SEQ ID NO: 2072723 - RNA, 19 nt, Artificial Sequence
  Description of Artificial Sequence: Synthetic oligonucleotide
  Antisense strand to SEQ ID NO: 2072722
uuccagcguaggaucuccu

SEQ ID NO: 2072724 - RNA, 19 nt, Artificial Sequence
  Description of Artificial Sequence: Synthetic oligonucleotide
  Sense strand starting at position 1012 of SEQ ID NO: 1881801
gacgcuuuagcagcgaauu

SEQ ID NO: 2072725 - RNA, 19 nt, Artificial Sequence
  Description of Artificial Sequence: Synthetic oligonucleotide
  Antisense strand to SEQ ID NO: 2072724
aauucgcugcuaaagcguc

SEQ ID NO: 2072726 - RNA, 19 nt, Artificial Sequence
  Description of Artificial Sequence: Synthetic oligonucleotide
  Sense strand starting at position 1291 of SEQ ID NO: 1881801
ccaccucuggcuuagaauc

SEQ ID NO: 2072727 - RNA, 19 nt, Artificial Sequence
  Description of Artificial Sequence: Synthetic oligonucleotide
  Antisense strand to SEQ ID NO: 2072726
gauucuaagccagaggugg

SEQ ID NO: 2072728 - RNA, 19 nt, Artificial Sequence
  Description of Artificial Sequence: Synthetic oligonucleotide
  Sense strand starting at position 1299 of SEQ ID NO: 1881801
ggcuuagaaucacugacau

SEQ ID NO: 2072729 - RNA, 19 nt, Artificial Sequence
  Description of Artificial Sequence: Synthetic oligonucleotide
  Antisense strand to SEQ ID NO: 2072728
augucagugauucuaagcc

SEQ ID NO: 2072730 - RNA, 19 nt, Artificial Sequence
  Description of Artificial Sequence: Synthetic oligonucleotide
  Sense strand starting at position 2273 of SEQ ID NO: 1881801
ggagauguccgcuggagaa

SEQ ID NO: 2072731 - RNA, 19 nt, Artificial Sequence
  Description of Artificial Sequence: Synthetic oligonucleotide
  Antisense strand to SEQ ID NO: 2072730
uucuccagcggacaucucc

SEQ ID NO: 2072732 - RNA, 19 nt, Artificial Sequence
  Description of Artificial Sequence: Synthetic oligonucleotide
  Sense strand starting at position 2286 of SEQ ID NO: 1881801
ggagaaagcuauucucuuu

SEQ ID NO: 2072733 - RNA, 19 nt, Artificial Sequence
  Description of Artificial Sequence: Synthetic oligonucleotide
  Antisense strand to SEQ ID NO: 2072732
aaagagaauagcuuucucc

SEQ ID NO: 2072734 - RNA, 19 nt, Artificial Sequence
  Description of Artificial Sequence: Synthetic oligonucleotide
  Sense strand starting at position 2360 of SEQ ID NO: 1881801
gagaacugcccguacagua

SEQ ID NO: 2072735 - RNA, 19 nt, Artificial Sequence
  Description of Artificial Sequence: Synthetic oligonucleotide
  Antisense strand to SEQ ID NO: 2072734
uacuguacgggcaguucuc

SEQ ID NO: 2072736 - RNA, 19 nt, Artificial Sequence
  Description of Artificial Sequence: Synthetic oligonucleotide
  Sense strand starting at position 2447 of SEQ ID NO: 1881801
uccagauguggccagcuaa

SEQ ID NO: 2072737 - RNA, 19 nt, Artificial Sequence
  Description of Artificial Sequence: Synthetic oligonucleotide
  Antisense strand to SEQ ID NO: 2072736
uuagcuggccacaucugga

SEQ ID NO: 2072738 - RNA, 19 nt, Artificial Sequence
  Description of Artificial Sequence: Synthetic oligonucleotide
  Sense strand starting at position 2652 of SEQ ID NO: 1881801
ggcgcucaagagaguuguu

SEQ ID NO: 2072739 - RNA, 19 nt, Artificial Sequence
  Description of Artificial Sequence: Synthetic oligonucleotide
  Antisense strand to SEQ ID NO: 2072738
aacaacucucuugagcgcc

SEQ ID NO: 2072740 - RNA, 19 nt, Artificial Sequence
  Description of Artificial Sequence: Synthetic oligonucleotide
  Sense strand starting at position 2782 of SEQ ID NO: 1881801
cuggcaaucuuguuaagag

SEQ ID NO: 2072741 - RNA, 19 nt, Artificial Sequence
  Description of Artificial Sequence: Synthetic oligonucleotide
  Antisense strand to SEQ ID NO: 2072740
cucuuaacaagauugccag

SEQ ID NO: 2072742 - RNA, 19 nt, Artificial Sequence
  Description of Artificial Sequence: Synthetic oligonucleotide
  Sense strand starting at position 3012 of SEQ ID NO: 1881801
gugauugcaguccaugaag

SEQ ID NO: 2072743 - RNA, 19 nt, Artificial Sequence
  Description of Artificial Sequence: Synthetic oligonucleotide
  Antisense strand to SEQ ID NO: 2072742
cuucauggacugcaaucac

SEQ ID NO: 2072744 - RNA, 19 nt, Artificial Sequence
  Description of Artificial Sequence: Synthetic oligonucleotide
  Sense strand starting at position 3015 of SEQ ID NO: 1881801
auugcaguccaugaaguua

SEQ ID NO: 2072745 - RNA, 19 nt, Artificial Sequence
  Description of Artificial Sequence: Synthetic oligonucleotide
  Antisense strand to SEQ ID NO: 2072744
uaacuucauggacugcaau

SEQ ID NO: 2072746 - RNA, 19 nt, Artificial Sequence
  Description of Artificial Sequence: Synthetic oligonucleotide
  Sense strand starting at position 3132 of SEQ ID NO: 1881801
ugugguguccuguuguacu

SEQ ID NO: 2072747 - RNA, 19 nt, Artificial Sequence
  Description of Artificial Sequence: Synthetic oligonucleotide
  Antisense strand to SEQ ID NO: 2072746
aguacaacaggacaccaca

SEQ ID NO: 2072748 - RNA, 19 nt, Artificial Sequence
  Description of Artificial Sequence: Synthetic oligonucleotide
  Sense strand starting at position 3331 of SEQ ID NO: 1881801
guaaauuaugccugggauc

SEQ ID NO: 2072749 - RNA, 19 nt, Artificial Sequence
  Description of Artificial Sequence: Synthetic oligonucleotide
  Antisense strand to SEQ ID NO: 2072748
gaucccaggcauaauuuac

SEQ ID NO: 2072750 - RNA, 19 nt, Artificial Sequence
  Description of Artificial Sequence: Synthetic oligonucleotide
  Sense strand starting at position 3471 of SEQ ID NO: 1881801
gugucucuucuugaaucaa

SEQ ID NO: 2072751 - RNA, 19 nt, Artificial Sequence
  Description of Artificial Sequence: Synthetic oligonucleotide
  Antisense strand to SEQ ID NO: 2072750
uugauucaagaagagacac

SEQ ID NO: 2072752 - RNA, 19 nt, Artificial Sequence
  Description of Artificial Sequence: Synthetic oligonucleotide
  Sense strand starting at position 3499 of SEQ ID NO: 1881801
cccagauuacucuguugac

SEQ ID NO: 2072753 - RNA, 19 nt, Artificial Sequence
  Description of Artificial Sequence: Synthetic oligonucleotide
  Antisense strand to SEQ ID NO: 2072752
gucaacagaguaaucuggg

SEQ ID NO: 2072754 - RNA, 19 nt, Artificial Sequence
  Description of Artificial Sequence: Synthetic oligonucleotide
  Sense strand starting at position 3500 of SEQ ID NO: 1881801
ccagauuacucuguugacu

SEQ ID NO: 2072755 - RNA, 19 nt, Artificial Sequence
  Description of Artificial Sequence: Synthetic oligonucleotide
  Antisense strand to SEQ ID NO: 2072754
agucaacagaguaaucugg

SEQ ID NO: 2072756 - RNA, 19 nt, Artificial Sequence
  Description of Artificial Sequence: Synthetic oligonucleotide
  Sense strand starting at position 3556 of SEQ ID NO: 1881801
auccacuauugauuguuau

SEQ ID NO: 2072757 - RNA, 19 nt, Artificial Sequence
  Description of Artificial Sequence: Synthetic oligonucleotide
  Antisense strand to SEQ ID NO: 2072756
auaacaaucaauaguggau

SEQ ID NO: 2072758 - RNA, 19 nt, Artificial Sequence
  Description of Artificial Sequence: Synthetic oligonucleotide
  Sense strand starting at position 3563 of SEQ ID NO: 1881801
auugauuguuaugugaaag

SEQ ID NO: 2072759 - RNA, 19 nt, Artificial Sequence
  Description of Artificial Sequence: Synthetic oligonucleotide
  Antisense strand to SEQ ID NO: 2072758
cuuucacauaacaaucaau

SEQ ID NO: 2072760 - RNA, 19 nt, Artificial Sequence
  Description of Artificial Sequence: Synthetic oligonucleotide
  Sense strand starting at position 3564 of SEQ ID NO: 1881801
uugauuguuaugugaaagg

SEQ ID NO: 2072761 - RNA, 19 nt, Artificial Sequence
  Description of Artificial Sequence: Synthetic oligonucleotide
  Antisense strand to SEQ ID NO: 2072760
ccuuucacauaacaaucaa

SEQ ID NO: 2072762 - RNA, 19 nt, Artificial Sequence
  Description of Artificial Sequence: Synthetic oligonucleotide
  Sense strand starting at position 3593 of SEQ ID NO: 1881801
ucuguaauggcacacugaa

SEQ ID NO: 2072763 - RNA, 19 nt, Artificial Sequence
  Description of Artificial Sequence: Synthetic oligonucleotide
  Antisense strand to SEQ ID NO: 2072762
uucagugugccauuacaga

SEQ ID NO: 2072764 - RNA, 19 nt, Artificial Sequence
  Description of Artificial Sequence: Synthetic oligonucleotide
  Sense strand starting at position 3628 of SEQ ID NO: 1881801
guuuaaacaucuuuaguga

SEQ ID NO: 2072765 - RNA, 19 nt, Artificial Sequence
  Description of Artificial Sequence: Synthetic oligonucleotide
  Antisense strand to SEQ ID NO: 2072764
ucacuaaagauguuuaaac

SEQ ID NO: 2072766 - RNA, 19 nt, Artificial Sequence
  Description of Artificial Sequence: Synthetic oligonucleotide
  Sense strand starting at position 3654 of SEQ ID NO: 1881801
gcauuaucucaaugguaaa

SEQ ID NO: 2072767 - RNA, 19 nt, Artificial Sequence
  Description of Artificial Sequence: Synthetic oligonucleotide
  Antisense strand to SEQ ID NO: 2072766
uuuaccauugagauaaugc

SEQ ID NO: 2072768 - RNA, 19 nt, Artificial Sequence
  Description of Artificial Sequence: Synthetic oligonucleotide
  Sense strand starting at position 3738 of SEQ ID NO: 1881801
cuugucaguuaacuuaaau

SEQ ID NO: 2072769 - RNA, 19 nt, Artificial Sequence
  Description of Artificial Sequence: Synthetic oligonucleotide
  Antisense strand to SEQ ID NO: 2072768
auuuaaguuaacugacaag

SEQ ID NO: 2072770 - RNA, 19 nt, Artificial Sequence
  Description of Artificial Sequence: Synthetic oligonucleotide
  Sense strand starting at position 3749 of SEQ ID NO: 1881801
acuuaaauacgucagucaa

SEQ ID NO: 2072771 - RNA, 19 nt, Artificial Sequence
  Description of Artificial Sequence: Synthetic oligonucleotide
  Antisense strand to SEQ ID NO: 2072770
uugacugacguauuuaagu

SEQ ID NO: 2072772 - RNA, 19 nt, Artificial Sequence
  Description of Artificial Sequence: Synthetic oligonucleotide
  Sense strand starting at position 3751 of SEQ ID NO: 1881801
uuaaauacgucagucaaac

SEQ ID NO: 2072773 - RNA, 19 nt, Artificial Sequence
  Description of Artificial Sequence: Synthetic oligonucleotide
  Antisense strand to SEQ ID NO: 2072772
guuugacugacguauuuaa

SEQ ID NO: 2072774 - RNA, 19 nt, Artificial Sequence
  Description of Artificial Sequence: Synthetic oligonucleotide
  Sense strand starting at position 3773 of SEQ ID NO: 1881801
ucaagauuccuugguuuag

SEQ ID NO: 2072775 - RNA, 19 nt, Artificial Sequence
  Description of Artificial Sequence: Synthetic oligonucleotide
  Antisense strand to SEQ ID NO: 2072774
cuaaaccaaggaaucuuga

SEQ ID NO: 2072776 - RNA, 19 nt, Artificial Sequence
  Description of Artificial Sequence: Synthetic oligonucleotide
  Sense strand starting at position 3774 of SEQ ID NO: 1881801
caagauuccuugguuuaga

SEQ ID NO: 2072777 - RNA, 19 nt, Artificial Sequence
  Description of Artificial Sequence: Synthetic oligonucleotide
  Antisense strand to SEQ ID NO: 2072776
ucuaaaccaaggaaucuug

SEQ ID NO: 2072778 - RNA, 19 nt, Artificial Sequence
  Description of Artificial Sequence: Synthetic oligonucleotide
  Sense strand starting at position 3775 of SEQ ID NO: 1881801
aagauuccuugguuuagaa

SEQ ID NO: 2072779 - RNA, 19 nt, Artificial Sequence
  Description of Artificial Sequence: Synthetic oligonucleotide
  Antisense strand to SEQ ID NO: 2072778
uucuaaaccaaggaaucuu

SEQ ID NO: 2072780 - RNA, 19 nt, Artificial Sequence
  Description of Artificial Sequence: Synthetic oligonucleotide
  Sense strand starting at position 3789 of SEQ ID NO: 1881801
uagaaaguaccagguacua

SEQ ID NO: 2072781 - RNA, 19 nt, Artificial Sequence
  Description of Artificial Sequence: Synthetic oligonucleotide
  Antisense strand to SEQ ID NO: 2072780
uaguaccugguacuuucua

SEQ ID NO: 2072782 - RNA, 19 nt, Artificial Sequence
  Description of Artificial Sequence: Synthetic oligonucleotide
  Sense strand starting at position 429 of SEQ ID NO: 1881802
accaaaguauaguuugagu

SEQ ID NO: 2072783 - RNA, 19 nt, Artificial Sequence
  Description of Artificial Sequence: Synthetic oligonucleotide
  Antisense strand to SEQ ID NO: 2072782
acucaaacuauacuuuggu

SEQ ID NO: 2072784 - RNA, 19 nt, Artificial Sequence
  Description of Artificial Sequence: Synthetic oligonucleotide
  Sense strand starting at position 431 of SEQ ID NO: 1881802
caaaguauaguuugaguac

SEQ ID NO: 2072785 - RNA, 19 nt, Artificial Sequence
  Description of Artificial Sequence: Synthetic oligonucleotide
  Antisense strand to SEQ ID NO: 2072784
guacucaaacuauacuuug

SEQ ID NO: 2072786 - RNA, 19 nt, Artificial Sequence
  Description of Artificial Sequence: Synthetic oligonucleotide
  Sense strand starting at position 503 of SEQ ID NO: 1881802
aguagaauaaguugaugau

SEQ ID NO: 2072787 - RNA, 19 nt, Artificial Sequence
  Description of Artificial Sequence: Synthetic oligonucleotide
  Antisense strand to SEQ ID NO: 2072786
aucaucaacuuauucuacu

SEQ ID NO: 2072788 - RNA, 19 nt, Artificial Sequence
  Description of Artificial Sequence: Synthetic oligonucleotide
  Sense strand starting at position 574 of SEQ ID NO: 1881802
cuaaguguuuaccugggau

SEQ ID NO: 2072789 - RNA, 19 nt, Artificial Sequence
  Description of Artificial Sequence: Synthetic oligonucleotide
  Antisense strand to SEQ ID NO: 2072788
aucccagguaaacacuuag

SEQ ID NO: 2072790 - RNA, 19 nt, Artificial Sequence
  Description of Artificial Sequence: Synthetic oligonucleotide
  Sense strand starting at position 702 of SEQ ID NO: 1881802
uacuaagugcugggacaga

SEQ ID NO: 2072791 - RNA, 19 nt, Artificial Sequence
  Description of Artificial Sequence: Synthetic oligonucleotide
  Antisense strand to SEQ ID NO: 2072790
ucugucccagcacuuagua

SEQ ID NO: 2072792 - RNA, 19 nt, Artificial Sequence
  Description of Artificial Sequence: Synthetic oligonucleotide
  Sense strand starting at position 763 of SEQ ID NO: 1881802
uugugugcccaagaaauau

SEQ ID NO: 2072793 - RNA, 19 nt, Artificial Sequence
  Description of Artificial Sequence: Synthetic oligonucleotide
  Antisense strand to SEQ ID NO: 2072792
auauuucuugggcacacaa

SEQ ID NO: 2072794 - RNA, 19 nt, Artificial Sequence
  Description of Artificial Sequence: Synthetic oligonucleotide
  Sense strand starting at position 800 of SEQ ID NO: 1881802
ucucaucuagccugggaga

SEQ ID NO: 2072795 - RNA, 19 nt, Artificial Sequence
  Description of Artificial Sequence: Synthetic oligonucleotide
  Antisense strand to SEQ ID NO: 2072794
ucucccaggcuagaugaga

SEQ ID NO: 2072796 - RNA, 19 nt, Artificial Sequence
  Description of Artificial Sequence: Synthetic oligonucleotide
  Sense strand starting at position 801 of SEQ ID NO: 1881802
cucaucuagccugggagaa

SEQ ID NO: 2072797 - RNA, 19 nt, Artificial Sequence
  Description of Artificial Sequence: Synthetic oligonucleotide
  Antisense strand to SEQ ID NO: 2072796
uucucccaggcuagaugag

SEQ ID NO: 2072798 - RNA, 19 nt, Artificial Sequence
  Description of Artificial Sequence: Synthetic oligonucleotide
  Sense strand starting at position 898 of SEQ ID NO: 1881802
cugagaaaguguuccagga

SEQ ID NO: 2072799 - RNA, 19 nt, Artificial Sequence
  Description of Artificial Sequence: Synthetic oligonucleotide
  Antisense strand to SEQ ID NO: 2072798
uccuggaacacuuucucag

SEQ ID NO: 2072800 - RNA, 19 nt, Artificial Sequence
  Description of Artificial Sequence: Synthetic oligonucleotide
  Sense strand starting at position 990 of SEQ ID NO: 1881802
uggucagaacuuggaauau

SEQ ID NO: 2072801 - RNA, 19 nt, Artificial Sequence
  Description of Artificial Sequence: Synthetic oligonucleotide
  Antisense strand to SEQ ID NO: 2072800
auauuccaaguucugacca

SEQ ID NO: 2072802 - RNA, 19 nt, Artificial Sequence
  Description of Artificial Sequence: Synthetic oligonucleotide
  Sense strand starting at position 1001 of SEQ ID NO: 1881802
uggaauauguguuugggag

SEQ ID NO: 2072803 - RNA, 19 nt, Artificial Sequence
  Description of Artificial Sequence: Synthetic oligonucleotide
  Antisense strand to SEQ ID NO: 2072802
cucccaaacacauauucca

SEQ ID NO: 2072804 - RNA, 19 nt, Artificial Sequence
  Description of Artificial Sequence: Synthetic oligonucleotide
  Sense strand starting at position 1068 of SEQ ID NO: 1881802
ucuuaagauccuugauaag

SEQ ID NO: 2072805 - RNA, 19 nt, Artificial Sequence
  Description of Artificial Sequence: Synthetic oligonucleotide
  Antisense strand to SEQ ID NO: 2072804
cuuaucaaggaucuuaaga

SEQ ID NO: 2072806 - RNA, 19 nt, Artificial Sequence
  Description of Artificial Sequence: Synthetic oligonucleotide
  Sense strand starting at position 1205 of SEQ ID NO: 1881802
ggucaaggagucuacgaga

SEQ ID NO: 2072807 - RNA, 19 nt, Artificial Sequence
  Description of Artificial Sequence: Synthetic oligonucleotide
  Antisense strand to SEQ ID NO: 2072806
ucucguagacuccuugacc

SEQ ID NO: 2072808 - RNA, 19 nt, Artificial Sequence
  Description of Artificial Sequence: Synthetic oligonucleotide
  Sense strand starting at position 1214 of SEQ ID NO: 1881802
gucuacgagaaagauguua

SEQ ID NO: 2072809 - RNA, 19 nt, Artificial Sequence
  Description of Artificial Sequence: Synthetic oligonucleotide
  Antisense strand to SEQ ID NO: 2072808
uaacaucuuucucguagac

SEQ ID NO: 2072810 - RNA, 19 nt, Artificial Sequence
  Description of Artificial Sequence: Synthetic oligonucleotide
  Sense strand starting at position 1216 of SEQ ID NO: 1881802
cuacgagaaagauguuaau

SEQ ID NO: 2072811 - RNA, 19 nt, Artificial Sequence
  Description of Artificial Sequence: Synthetic oligonucleotide
  Antisense strand to SEQ ID NO: 2072810
auuaacaucuuucucguag

SEQ ID NO: 2072812 - RNA, 19 nt, Artificial Sequence
  Description of Artificial Sequence: Synthetic oligonucleotide
  Sense strand starting at position 1401 of SEQ ID NO: 1881802
ccuggagagucaccaguuu

SEQ ID NO: 2072813 - RNA, 19 nt, Artificial Sequence
  Description of Artificial Sequence: Synthetic oligonucleotide
  Antisense strand to SEQ ID NO: 2072812
aaacuggugacucuccagg

SEQ ID NO: 2072814 - RNA, 19 nt, Artificial Sequence
  Description of Artificial Sequence: Synthetic oligonucleotide
  Sense strand starting at position 1413 of SEQ ID NO: 1881802
ccaguuuggaaugaguuga

SEQ ID NO: 2072815 - RNA, 19 nt, Artificial Sequence
  Description of Artificial Sequence: Synthetic oligonucleotide
  Antisense strand to SEQ ID NO: 2072814
ucaacucauuccaaacugg

SEQ ID NO: 2072816 - RNA, 19 nt, Artificial Sequence
  Description of Artificial Sequence: Synthetic oligonucleotide
  Sense strand starting at position 1948 of SEQ ID NO: 1881802
aacuuugcugcauagggaa

SEQ ID NO: 2072817 - RNA, 19 nt, Artificial Sequence
  Description of Artificial Sequence: Synthetic oligonucleotide
  Antisense strand to SEQ ID NO: 2072816
uucccuaugcagcaaaguu

SEQ ID NO: 2072818 - RNA, 19 nt, Artificial Sequence
  Description of Artificial Sequence: Synthetic oligonucleotide
  Sense strand starting at position 2013 of SEQ ID NO: 1881802
guuugucaucagggagacu

SEQ ID NO: 2072819 - RNA, 19 nt, Artificial Sequence
  Description of Artificial Sequence: Synthetic oligonucleotide
  Antisense strand to SEQ ID NO: 2072818
agucucccugaugacaaac

SEQ ID NO: 2072820 - RNA, 19 nt, Artificial Sequence
  Description of Artificial Sequence: Synthetic oligonucleotide
  Sense strand starting at position 2192 of SEQ ID NO: 1881802
aucagaaauuugcaagagu

SEQ ID NO: 2072821 - RNA, 19 nt, Artificial Sequence
  Description of Artificial Sequence: Synthetic oligonucleotide
  Antisense strand to SEQ ID NO: 2072820
acucuugcaaauuucugau

SEQ ID NO: 2072822 - RNA, 19 nt, Artificial Sequence
  Description of Artificial Sequence: Synthetic oligonucleotide
  Sense strand starting at position 2251 of SEQ ID NO: 1881802
agaugagguuaucugccua

SEQ ID NO: 2072823 - RNA, 19 nt, Artificial Sequence
  Description of Artificial Sequence: Synthetic oligonucleotide
  Antisense strand to SEQ ID NO: 2072822
uaggcagauaaccucaucu

SEQ ID NO: 2072824 - RNA, 19 nt, Artificial Sequence
  Description of Artificial Sequence: Synthetic oligonucleotide
  Sense strand starting at position 2360 of SEQ ID NO: 1881802
gaaacagaguaguuucuga

SEQ ID NO: 2072825 - RNA, 19 nt, Artificial Sequence
  Description of Artificial Sequence: Synthetic oligonucleotide
  Antisense strand to SEQ ID NO: 2072824
ucagaaacuacucuguuuc

SEQ ID NO: 2072826 - RNA, 19 nt, Artificial Sequence
  Description of Artificial Sequence: Synthetic oligonucleotide
  Sense strand starting at position 2493 of SEQ ID NO: 1881802
uccaaacaucaggguugaa

SEQ ID NO: 2072827 - RNA, 19 nt, Artificial Sequence
  Description of Artificial Sequence: Synthetic oligonucleotide
  Antisense strand to SEQ ID NO: 2072826
uucaacccugauguuugga

SEQ ID NO: 2072828 - RNA, 19 nt, Artificial Sequence
  Description of Artificial Sequence: Synthetic oligonucleotide
  Sense strand starting at position 2553 of SEQ ID NO: 1881802
uggguuuagugaguugaga

SEQ ID NO: 2072829 - RNA, 19 nt, Artificial Sequence
  Description of Artificial Sequence: Synthetic oligonucleotide
  Antisense strand to SEQ ID NO: 2072828
ucucaacucacuaaaccca

SEQ ID NO: 2072830 - RNA, 19 nt, Artificial Sequence
  Description of Artificial Sequence: Synthetic oligonucleotide
  Sense strand starting at position 2561 of SEQ ID NO: 1881802
gugaguugagaccauuggu

SEQ ID NO: 2072831 - RNA, 19 nt, Artificial Sequence
  Description of Artificial Sequence: Synthetic oligonucleotide
  Antisense strand to SEQ ID NO: 2072830
accaauggucucaacucac

SEQ ID NO: 2072832 - RNA, 19 nt, Artificial Sequence
  Description of Artificial Sequence: Synthetic oligonucleotide
  Sense strand starting at position 2564 of SEQ ID NO: 1881802
aguugagaccauugguaag

SEQ ID NO: 2072833 - RNA, 19 nt, Artificial Sequence
  Description of Artificial Sequence: Synthetic oligonucleotide
  Antisense strand to SEQ ID NO: 2072832
cuuaccaauggucucaacu

SEQ ID NO: 2072834 - RNA, 19 nt, Artificial Sequence
  Description of Artificial Sequence: Synthetic oligonucleotide
  Sense strand starting at position 2666 of SEQ ID NO: 1881802
ucaagaaguggugggacuu

SEQ ID NO: 2072835 - RNA, 19 nt, Artificial Sequence
  Description of Artificial Sequence: Synthetic oligonucleotide
  Antisense strand to SEQ ID NO: 2072834
aagucccaccacuucuuga

SEQ ID NO: 2072836 - RNA, 19 nt, Artificial Sequence
  Description of Artificial Sequence: Synthetic oligonucleotide
  Sense strand starting at position 2702 of SEQ ID NO: 1881802
gaaggucagauguggugaa

SEQ ID NO: 2072837 - RNA, 19 nt, Artificial Sequence
  Description of Artificial Sequence: Synthetic oligonucleotide
  Antisense strand to SEQ ID NO: 2072836
uucaccacaucugaccuuc

SEQ ID NO: 2072838 - RNA, 19 nt, Artificial Sequence
  Description of Artificial Sequence: Synthetic oligonucleotide
  Sense strand starting at position 2815 of SEQ ID NO: 1881802
gccaaugacccugaucuga

SEQ ID NO: 2072839 - RNA, 19 nt, Artificial Sequence
  Description of Artificial Sequence: Synthetic oligonucleotide
  Antisense strand to SEQ ID NO: 2072838
ucagaucagggucauuggc

SEQ ID NO: 2072840 - RNA, 19 nt, Artificial Sequence
  Description of Artificial Sequence: Synthetic oligonucleotide
  Sense strand starting at position 2967 of SEQ ID NO: 1881802
gugaaagggcuuuagguua

SEQ ID NO: 2072841 - RNA, 19 nt, Artificial Sequence
  Description of Artificial Sequence: Synthetic oligonucleotide
  Antisense strand to SEQ ID NO: 2072840
uaaccuaaagcccuuucac

SEQ ID NO: 2072842 - RNA, 19 nt, Artificial Sequence
  Description of Artificial Sequence: Synthetic oligonucleotide
  Sense strand starting at position 2993 of SEQ ID NO: 1881802
cccagagagucaucaugga

SEQ ID NO: 2072843 - RNA, 19 nt, Artificial Sequence
  Description of Artificial Sequence: Synthetic oligonucleotide
  Antisense strand to SEQ ID NO: 2072842
uccaugaugacucucuggg

SEQ ID NO: 2072844 - RNA, 19 nt, Artificial Sequence
  Description of Artificial Sequence: Synthetic oligonucleotide
  Sense strand starting at position 3036 of SEQ ID NO: 1881802
gguaaauaucaugggcaaa

SEQ ID NO: 2072845 - RNA, 19 nt, Artificial Sequence
  Description of Artificial Sequence: Synthetic oligonucleotide
  Antisense strand to SEQ ID NO: 2072844
uuugcccaugauauuuacc

SEQ ID NO: 2072846 - RNA, 19 nt, Artificial Sequence
  Description of Artificial Sequence: Synthetic oligonucleotide
  Sense strand starting at position 3037 of SEQ ID NO: 1881802
guaaauaucaugggcaaag

SEQ ID NO: 2072847 - RNA, 19 nt, Artificial Sequence
  Description of Artificial Sequence: Synthetic oligonucleotide
  Antisense strand to SEQ ID NO: 2072846
cuuugcccaugauauuuac

SEQ ID NO: 2072848 - RNA, 19 nt, Artificial Sequence
  Description of Artificial Sequence: Synthetic oligonucleotide
  Sense strand starting at position 3110 of SEQ ID NO: 1881802
cgaggucaccuugauacca

SEQ ID NO: 2072849 - RNA, 19 nt, Artificial Sequence
  Description of Artificial Sequence: Synthetic oligonucleotide
  Antisense strand to SEQ ID NO: 2072848
ugguaucaaggugaccucg

SEQ ID NO: 2072850 - RNA, 19 nt, Artificial Sequence
  Description of Artificial Sequence: Synthetic oligonucleotide
  Sense strand starting at position 3304 of SEQ ID NO: 1881802
aguggaaggugguugagaa

SEQ ID NO: 2072851 - RNA, 19 nt, Artificial Sequence
  Description of Artificial Sequence: Synthetic oligonucleotide
  Antisense strand to SEQ ID NO: 2072850
uucucaaccaccuuccacu

SEQ ID NO: 2072852 - RNA, 19 nt, Artificial Sequence
  Description of Artificial Sequence: Synthetic oligonucleotide
  Sense strand starting at position 3305 of SEQ ID NO: 1881802
guggaaggugguugagaaa

SEQ ID NO: 2072853 - RNA, 19 nt, Artificial Sequence
  Description of Artificial Sequence: Synthetic oligonucleotide
  Antisense strand to SEQ ID NO: 2072852
uuucucaaccaccuuccac

SEQ ID NO: 2072854 - RNA, 19 nt, Artificial Sequence
  Description of Artificial Sequence: Synthetic oligonucleotide
  Sense strand starting at position 3539 of SEQ ID NO: 1881802
augaaaguuugguucugga

SEQ ID NO: 2072855 - RNA, 19 nt, Artificial Sequence
  Description of Artificial Sequence: Synthetic oligonucleotide
  Antisense strand to SEQ ID NO: 2072854
uccagaaccaaacuuucau

SEQ ID NO: 2072856 - RNA, 19 nt, Artificial Sequence
  Description of Artificial Sequence: Synthetic oligonucleotide
  Sense strand starting at position 3875 of SEQ ID NO: 1881802
gagagugaaagaugcugau

SEQ ID NO: 2072857 - RNA, 19 nt, Artificial Sequence
  Description of Artificial Sequence: Synthetic oligonucleotide
  Antisense strand to SEQ ID NO: 2072856
aucagcaucuuucacucuc

SEQ ID NO: 2072858 - RNA, 19 nt, Artificial Sequence
  Description of Artificial Sequence: Synthetic oligonucleotide
  Sense strand starting at position 3879 of SEQ ID NO: 1881802
gugaaagaugcugaugcuu

SEQ ID NO: 2072859 - RNA, 19 nt, Artificial Sequence
  Description of Artificial Sequence: Synthetic oligonucleotide
  Antisense strand to SEQ ID NO: 2072858
aagcaucagcaucuuucac

SEQ ID NO: 2072860 - RNA, 19 nt, Artificial Sequence
  Description of Artificial Sequence: Synthetic oligonucleotide
  Sense strand starting at position 3884 of SEQ ID NO: 1881802
agaugcugaugcuuuagaa

SEQ ID NO: 2072861 - RNA, 19 nt, Artificial Sequence
  Description of Artificial Sequence: Synthetic oligonucleotide
  Antisense strand to SEQ ID NO: 2072860
uucuaaagcaucagcaucu

SEQ ID NO: 2072862 - RNA, 19 nt, Artificial Sequence
  Description of Artificial Sequence: Synthetic oligonucleotide
  Sense strand starting at position 9 of SEQ ID NO: 1881803
gccaauacucuacagaggu

SEQ ID NO: 2072863 - RNA, 19 nt, Artificial Sequence
  Description of Artificial Sequence: Synthetic oligonucleotide
  Antisense strand to SEQ ID NO: 2072862
accucuguagaguauuggc

SEQ ID NO: 2072864 - RNA, 19 nt, Artificial Sequence
  Description of Artificial Sequence: Synthetic oligonucleotide
  Sense strand starting at position 40 of SEQ ID NO: 1881803
auguaauuccagcacagca

SEQ ID NO: 2072865 - RNA, 19 nt, Artificial Sequence
  Description of Artificial Sequence: Synthetic oligonucleotide
  Antisense strand to SEQ ID NO: 2072864
ugcugugcuggaauuacau

SEQ ID NO: 2072866 - RNA, 19 nt, Artificial Sequence
  Description of Artificial Sequence: Synthetic oligonucleotide
  Sense strand starting at position 142 of SEQ ID NO: 1881803
aaaugugaguuucuuggga

SEQ ID NO: 2072867 - RNA, 19 nt, Artificial Sequence
  Description of Artificial Sequence: Synthetic oligonucleotide
  Antisense strand to SEQ ID NO: 2072866
ucccaagaaacucacauuu

SEQ ID NO: 2072868 - RNA, 19 nt, Artificial Sequence
  Description of Artificial Sequence: Synthetic oligonucleotide
  Sense strand starting at position 248 of SEQ ID NO: 1881803
uguguugugacauaucaau

SEQ ID NO: 2072869 - RNA, 19 nt, Artificial Sequence
  Description of Artificial Sequence: Synthetic oligonucleotide
  Antisense strand to SEQ ID NO: 2072868
auugauaugucacaacaca

SEQ ID NO: 2072870 - RNA, 19 nt, Artificial Sequence
  Description of Artificial Sequence: Synthetic oligonucleotide
  Sense strand starting at position 345 of SEQ ID NO: 1881803
agaaguguugaccgaguag

SEQ ID NO: 2072871 - RNA, 19 nt, Artificial Sequence
  Description of Artificial Sequence: Synthetic oligonucleotide
  Antisense strand to SEQ ID NO: 2072870
cuacucggucaacacuucu

SEQ ID NO: 2072872 - RNA, 19 nt, Artificial Sequence
  Description of Artificial Sequence: Synthetic oligonucleotide
  Sense strand starting at position 374 of SEQ ID NO: 1881803
augauuauagcugauacuu

SEQ ID NO: 2072873 - RNA, 19 nt, Artificial Sequence
  Description of Artificial Sequence: Synthetic oligonucleotide
  Antisense strand to SEQ ID NO: 2072872
aaguaucagcuauaaucau

SEQ ID NO: 2072874 - RNA, 19 nt, Artificial Sequence
  Description of Artificial Sequence: Synthetic oligonucleotide
  Sense strand starting at position 410 of SEQ ID NO: 1881803
ugccaaacacuguauguau

SEQ ID NO: 2072875 - RNA, 19 nt, Artificial Sequence
  Description of Artificial Sequence: Synthetic oligonucleotide
  Antisense strand to SEQ ID NO: 2072874
auacauacaguguuuggca

SEQ ID NO: 2072876 - RNA, 19 nt, Artificial Sequence
  Description of Artificial Sequence: Synthetic oligonucleotide
  Sense strand starting at position 762 of SEQ ID NO: 1881803
gcaccuguagucugagaua

SEQ ID NO: 2072877 - RNA, 19 nt, Artificial Sequence
  Description of Artificial Sequence: Synthetic oligonucleotide
  Antisense strand to SEQ ID NO: 2072876
uaucucagacuacaggugc

SEQ ID NO: 2072878 - RNA, 19 nt, Artificial Sequence
  Description of Artificial Sequence: Synthetic oligonucleotide
  Sense strand starting at position 902 of SEQ ID NO: 1881803
ucaaguuuccuggaucuau

SEQ ID NO: 2072879 - RNA, 19 nt, Artificial Sequence
  Description of Artificial Sequence: Synthetic oligonucleotide
  Antisense strand to SEQ ID NO: 2072878
auagauccaggaaacuuga

SEQ ID NO: 2072880 - RNA, 19 nt, Artificial Sequence
  Description of Artificial Sequence: Synthetic oligonucleotide
  Sense strand starting at position 1005 of SEQ ID NO: 1881803
ggucacaaucuauagguua

SEQ ID NO: 2072881 - RNA, 19 nt, Artificial Sequence
  Description of Artificial Sequence: Synthetic oligonucleotide
  Antisense strand to SEQ ID NO: 2072880
uaaccuauagauugugacc

SEQ ID NO: 2072882 - RNA, 19 nt, Artificial Sequence
  Description of Artificial Sequence: Synthetic oligonucleotide
  Sense strand starting at position 1611 of SEQ ID NO: 1881803
uacguaagucuuggagaga

SEQ ID NO: 2072883 - RNA, 19 nt, Artificial Sequence
  Description of Artificial Sequence: Synthetic oligonucleotide
  Antisense strand to SEQ ID NO: 2072882
ucucuccaagacuuacgua

SEQ ID NO: 2072884 - RNA, 19 nt, Artificial Sequence
  Description of Artificial Sequence: Synthetic oligonucleotide
  Sense strand starting at position 2198 of SEQ ID NO: 1881803
cggagaaggaucugacagu

SEQ ID NO: 2072885 - RNA, 19 nt, Artificial Sequence
  Description of Artificial Sequence: Synthetic oligonucleotide
  Antisense strand to SEQ ID NO: 2072884
acugucagauccuucuccg

SEQ ID NO: 2072886 - RNA, 19 nt, Artificial Sequence
  Description of Artificial Sequence: Synthetic oligonucleotide
  Sense strand starting at position 2570 of SEQ ID NO: 1881803
acaacuuugucaccucgau

SEQ ID NO: 2072887 - RNA, 19 nt, Artificial Sequence
  Description of Artificial Sequence: Synthetic oligonucleotide
  Antisense strand to SEQ ID NO: 2072886
aucgaggugacaaaguugu

SEQ ID NO: 2072888 - RNA, 19 nt, Artificial Sequence
  Description of Artificial Sequence: Synthetic oligonucleotide
  Sense strand starting at position 2574 of SEQ ID NO: 1881803
cuuugucaccucgauuauc

SEQ ID NO: 2072889 - RNA, 19 nt, Artificial Sequence
  Description of Artificial Sequence: Synthetic oligonucleotide
  Antisense strand to SEQ ID NO: 2072888
gauaaucgaggugacaaag

SEQ ID NO: 2072890 - RNA, 19 nt, Artificial Sequence
  Description of Artificial Sequence: Synthetic oligonucleotide
  Sense strand starting at position 2757 of SEQ ID NO: 1881803
cuucauucucgagguggau

SEQ ID NO: 2072891 - RNA, 19 nt, Artificial Sequence
  Description of Artificial Sequence: Synthetic oligonucleotide
  Antisense strand to SEQ ID NO: 2072890
auccaccucgagaaugaag

SEQ ID NO: 2072892 - RNA, 19 nt, Artificial Sequence
  Description of Artificial Sequence: Synthetic oligonucleotide
  Sense strand starting at position 2926 of SEQ ID NO: 1881803
acuguaucccaaggagaac

SEQ ID NO: 2072893 - RNA, 19 nt, Artificial Sequence
  Description of Artificial Sequence: Synthetic oligonucleotide
  Antisense strand to SEQ ID NO: 2072892
guucuccuugggauacagu

SEQ ID NO: 2072894 - RNA, 19 nt, Artificial Sequence
  Description of Artificial Sequence: Synthetic oligonucleotide
  Sense strand starting at position 3000 of SEQ ID NO: 1881803
gaagcaagggucuguucuu

SEQ ID NO: 2072895 - RNA, 19 nt, Artificial Sequence
  Description of Artificial Sequence: Synthetic oligonucleotide
  Antisense strand to SEQ ID NO: 2072894
aagaacagacccuugcuuc

SEQ ID NO: 2072896 - RNA, 19 nt, Artificial Sequence
  Description of Artificial Sequence: Synthetic oligonucleotide
  Sense strand starting at position 3007 of SEQ ID NO: 1881803
gggucuguucuucagugga

SEQ ID NO: 2072897 - RNA, 19 nt, Artificial Sequence
  Description of Artificial Sequence: Synthetic oligonucleotide
  Antisense strand to SEQ ID NO: 2072896
uccacugaagaacagaccc

SEQ ID NO: 2072898 - RNA, 19 nt, Artificial Sequence
  Description of Artificial Sequence: Synthetic oligonucleotide
  Sense strand starting at position 3195 of SEQ ID NO: 1881803
auuagaaugccagggugaa

SEQ ID NO: 2072899 - RNA, 19 nt, Artificial Sequence
  Description of Artificial Sequence: Synthetic oligonucleotide
  Antisense strand to SEQ ID NO: 2072898
uucacccuggcauucuaau

SEQ ID NO: 2072900 - RNA, 19 nt, Artificial Sequence
  Description of Artificial Sequence: Synthetic oligonucleotide
  Sense strand starting at position 3196 of SEQ ID NO: 1881803
uuagaaugccagggugaau

SEQ ID NO: 2072901 - RNA, 19 nt, Artificial Sequence
  Description of Artificial Sequence: Synthetic oligonucleotide
  Antisense strand to SEQ ID NO: 2072900
auucacccuggcauucuaa

SEQ ID NO: 2072902 - RNA, 19 nt, Artificial Sequence
  Description of Artificial Sequence: Synthetic oligonucleotide
  Sense strand starting at position 3241 of SEQ ID NO: 1881803
uugacagugcuguaaacaa

SEQ ID NO: 2072903 - RNA, 19 nt, Artificial Sequence
  Description of Artificial Sequence: Synthetic oligonucleotide
  Antisense strand to SEQ ID NO: 2072902
uuguuuacagcacugucaa

SEQ ID NO: 2072904 - RNA, 19 nt, Artificial Sequence
  Description of Artificial Sequence: Synthetic oligonucleotide
  Sense strand starting at position 3261 of SEQ ID NO: 1881803
cccuuuaaacuguguauga

SEQ ID NO: 2072905 - RNA, 19 nt, Artificial Sequence
  Description of Artificial Sequence: Synthetic oligonucleotide
  Antisense strand to SEQ ID NO: 2072904
ucauacacaguuuaaaggg

SEQ ID NO: 2072906 - RNA, 19 nt, Artificial Sequence
  Description of Artificial Sequence: Synthetic oligonucleotide
  Sense strand starting at position 3262 of SEQ ID NO: 1881803
ccuuuaaacuguguaugac

SEQ ID NO: 2072907 - RNA, 19 nt, Artificial Sequence
  Description of Artificial Sequence: Synthetic oligonucleotide
  Antisense strand to SEQ ID NO: 2072906
gucauacacaguuuaaagg

SEQ ID NO: 2072908 - RNA, 19 nt, Artificial Sequence
  Description of Artificial Sequence: Synthetic oligonucleotide
  Sense strand starting at position 3263 of SEQ ID NO: 1881803
cuuuaaacuguguaugacu

SEQ ID NO: 2072909 - RNA, 19 nt, Artificial Sequence
  Description of Artificial Sequence: Synthetic oligonucleotide
  Antisense strand to SEQ ID NO: 2072908
agucauacacaguuuaaag

SEQ ID NO: 2072910 - RNA, 19 nt, Artificial Sequence
  Description of Artificial Sequence: Synthetic oligonucleotide
  Sense strand starting at position 3309 of SEQ ID NO: 1881803
auuugaaauuacggacuca

SEQ ID NO: 2072911 - RNA, 19 nt, Artificial Sequence
  Description of Artificial Sequence: Synthetic oligonucleotide
  Antisense strand to SEQ ID NO: 2072910
ugaguccguaauuucaaau

SEQ ID NO: 2072912 - RNA, 19 nt, Artificial Sequence
  Description of Artificial Sequence: Synthetic oligonucleotide
  Sense strand starting at position 3321 of SEQ ID NO: 1881803
ggacucagaucaucaguuu

SEQ ID NO: 2072913 - RNA, 19 nt, Artificial Sequence
  Description of Artificial Sequence: Synthetic oligonucleotide
  Antisense strand to SEQ ID NO: 2072912
aaacugaugaucugagucc

SEQ ID NO: 2072914 - RNA, 19 nt, Artificial Sequence
  Description of Artificial Sequence: Synthetic oligonucleotide
  Sense strand starting at position 3337 of SEQ ID NO: 1881803
uuuagcugugugccauuau

SEQ ID NO: 2072915 - RNA, 19 nt, Artificial Sequence
  Description of Artificial Sequence: Synthetic oligonucleotide
  Antisense strand to SEQ ID NO: 2072914
auaauggcacacagcuaaa

SEQ ID NO: 2072916 - RNA, 19 nt, Artificial Sequence
  Description of Artificial Sequence: Synthetic oligonucleotide
  Sense strand starting at position 3340 of SEQ ID NO: 1881803
agcugugugccauuauguu

SEQ ID NO: 2072917 - RNA, 19 nt, Artificial Sequence
  Description of Artificial Sequence: Synthetic oligonucleotide
  Antisense strand to SEQ ID NO: 2072916
aacauaauggcacacagcu

SEQ ID NO: 2072918 - RNA, 19 nt, Artificial Sequence
  Description of Artificial Sequence: Synthetic oligonucleotide
  Sense strand starting at position 3464 of SEQ ID NO: 1881803
auuucucuuuagggauaau

SEQ ID NO: 2072919 - RNA, 19 nt, Artificial Sequence
  Description of Artificial Sequence: Synthetic oligonucleotide
  Antisense strand to SEQ ID NO: 2072918
auuaucccuaaagagaaau

SEQ ID NO: 2072920 - RNA, 19 nt, Artificial Sequence
  Description of Artificial Sequence: Synthetic oligonucleotide
  Sense strand starting at position 3477 of SEQ ID NO: 1881803
gauaaucuugaacguuugu

SEQ ID NO: 2072921 - RNA, 19 nt, Artificial Sequence
  Description of Artificial Sequence: Synthetic oligonucleotide
  Antisense strand to SEQ ID NO: 2072920
acaaacguucaagauuauc

SEQ ID NO: 2072922 - RNA, 19 nt, Artificial Sequence
  Description of Artificial Sequence: Synthetic oligonucleotide
  Sense strand starting at position 3497 of SEQ ID NO: 1881803
uuuaaucuugagugaaaga

SEQ ID NO: 2072923 - RNA, 19 nt, Artificial Sequence
  Description of Artificial Sequence: Synthetic oligonucleotide
  Antisense strand to SEQ ID NO: 2072922
ucuuucacucaagauuaaa

SEQ ID NO: 2072924 - RNA, 19 nt, Artificial Sequence
  Description of Artificial Sequence: Synthetic oligonucleotide
  Sense strand starting at position 3585 of SEQ ID NO: 1881803
auguauugacaauaccagu

SEQ ID NO: 2072925 - RNA, 19 nt, Artificial Sequence
  Description of Artificial Sequence: Synthetic oligonucleotide
  Antisense strand to SEQ ID NO: 2072924
acugguauugucaauacau

SEQ ID NO: 2072926 - RNA, 19 nt, Artificial Sequence
  Description of Artificial Sequence: Synthetic oligonucleotide
  Sense strand starting at position 3765 of SEQ ID NO: 1881803
caguguuagggcgaaaguu

SEQ ID NO: 2072927 - RNA, 19 nt, Artificial Sequence
  Description of Artificial Sequence: Synthetic oligonucleotide
  Antisense strand to SEQ ID NO: 2072926
aacuuucgcccuaacacug

SEQ ID NO: 2072928 - RNA, 19 nt, Artificial Sequence
  Description of Artificial Sequence: Synthetic oligonucleotide
  Sense strand starting at position 3775 of SEQ ID NO: 1881803
gcgaaaguuaaauacaugu

SEQ ID NO: 2072929 - RNA, 19 nt, Artificial Sequence
  Description of Artificial Sequence: Synthetic oligonucleotide
  Antisense strand to SEQ ID NO: 2072928
acauguauuuaacuuucgc

SEQ ID NO: 2072930 - RNA, 19 nt, Artificial Sequence
  Description of Artificial Sequence: Synthetic oligonucleotide
  Sense strand starting at position 3790 of SEQ ID NO: 1881803
augugaaguagguguuaaa

SEQ ID NO: 2072931 - RNA, 19 nt, Artificial Sequence
  Description of Artificial Sequence: Synthetic oligonucleotide
  Antisense strand to SEQ ID NO: 2072930
uuuaacaccuacuucacau

SEQ ID NO: 2072932 - RNA, 19 nt, Artificial Sequence
  Description of Artificial Sequence: Synthetic oligonucleotide
  Sense strand starting at position 3848 of SEQ ID NO: 1881803
aaacuagaucugugugacu

SEQ ID NO: 2072933 - RNA, 19 nt, Artificial Sequence
  Description of Artificial Sequence: Synthetic oligonucleotide
  Antisense strand to SEQ ID NO: 2072932
agucacacagaucuaguuu

SEQ ID NO: 2072934 - RNA, 19 nt, Artificial Sequence
  Description of Artificial Sequence: Synthetic oligonucleotide
  Sense strand starting at position 3866 of SEQ ID NO: 1881803
uccaaauccugugcucuga

SEQ ID NO: 2072935 - RNA, 19 nt, Artificial Sequence
  Description of Artificial Sequence: Synthetic oligonucleotide
  Antisense strand to SEQ ID NO: 2072934
ucagagcacaggauuugga

SEQ ID NO: 2072936 - RNA, 19 nt, Artificial Sequence
  Description of Artificial Sequence: Synthetic oligonucleotide
  Sense strand starting at position 3898 of SEQ ID NO: 1881803
guugacacguuucucauaa

SEQ ID NO: 2072937 - RNA, 19 nt, Artificial Sequence
  Description of Artificial Sequence: Synthetic oligonucleotide
  Antisense strand to SEQ ID NO: 2072936
uuaugagaaacgugucaac

SEQ ID NO: 2072938 - RNA, 19 nt, Artificial Sequence
  Description of Artificial Sequence: Synthetic oligonucleotide
  Sense strand starting at position 3899 of SEQ ID NO: 1881803
uugacacguuucucauaaa

SEQ ID NO: 2072939 - RNA, 19 nt, Artificial Sequence
  Description of Artificial Sequence: Synthetic oligonucleotide
  Antisense strand to SEQ ID NO: 2072938
uuuaugagaaacgugucaa

SEQ ID NO: 2072940 - RNA, 19 nt, Artificial Sequence
  Description of Artificial Sequence: Synthetic oligonucleotide
  Sense strand starting at position 3930 of SEQ ID NO: 1881803
acaauuugguuugggaacu

SEQ ID NO: 2072941 - RNA, 19 nt, Artificial Sequence
  Description of Artificial Sequence: Synthetic oligonucleotide
  Antisense strand to SEQ ID NO: 2072940
aguucccaaaccaaauugu

SEQ ID NO: 2072942 - RNA, 19 nt, Artificial Sequence
  Description of Artificial Sequence: Synthetic oligonucleotide
  Sense strand starting at position 57 of SEQ ID NO: 1881804
gagcgauucccacagaguu

SEQ ID NO: 2072943 - RNA, 19 nt, Artificial Sequence
  Description of Artificial Sequence: Synthetic oligonucleotide
  Antisense strand to SEQ ID NO: 2072942
aacucugugggaaucgcuc

SEQ ID NO: 2072944 - RNA, 19 nt, Artificial Sequence
  Description of Artificial Sequence: Synthetic oligonucleotide
  Sense strand starting at position 131 of SEQ ID NO: 1881804
cggcgcugugccuuucauu

SEQ ID NO: 2072945 - RNA, 19 nt, Artificial Sequence
  Description of Artificial Sequence: Synthetic oligonucleotide
  Antisense strand to SEQ ID NO: 2072944
aaugaaaggcacagcgccg

SEQ ID NO: 2072946 - RNA, 19 nt, Artificial Sequence
  Description of Artificial Sequence: Synthetic oligonucleotide
  Sense strand starting at position 153 of SEQ ID NO: 1881804
caccgagaucucggaccua

SEQ ID NO: 2072947 - RNA, 19 nt, Artificial Sequence
  Description of Artificial Sequence: Synthetic oligonucleotide
  Antisense strand to SEQ ID NO: 2072946
uagguccgagaucucggug

SEQ ID NO: 2072948 - RNA, 19 nt, Artificial Sequence
  Description of Artificial Sequence: Synthetic oligonucleotide
  Sense strand starting at position 158 of SEQ ID NO: 1881804
agaucucggaccuagaguu

SEQ ID NO: 2072949 - RNA, 19 nt, Artificial Sequence
  Description of Artificial Sequence: Synthetic oligonucleotide
  Antisense strand to SEQ ID NO: 2072948
aacucuagguccgagaucu

SEQ ID NO: 2072950 - RNA, 19 nt, Artificial Sequence
  Description of Artificial Sequence: Synthetic oligonucleotide
  Sense strand starting at position 166 of SEQ ID NO: 1881804
gaccuagaguuuccagguu

SEQ ID NO: 2072951 - RNA, 19 nt, Artificial Sequence
  Description of Artificial Sequence: Synthetic oligonucleotide
  Antisense strand to SEQ ID NO: 2072950
aaccuggaaacucuagguc

SEQ ID NO: 2072952 - RNA, 19 nt, Artificial Sequence
  Description of Artificial Sequence: Synthetic oligonucleotide
  Sense strand starting at position 213 of SEQ ID NO: 1881804
ccuagaauccgugagggcu

SEQ ID NO: 2072953 - RNA, 19 nt, Artificial Sequence
  Description of Artificial Sequence: Synthetic oligonucleotide
  Antisense strand to SEQ ID NO: 2072952
agcccucacggauucuagg

SEQ ID NO: 2072954 - RNA, 19 nt, Artificial Sequence
  Description of Artificial Sequence: Synthetic oligonucleotide
  Sense strand starting at position 315 of SEQ ID NO: 1881804
aaguguucgcgaccugcau

SEQ ID NO: 2072955 - RNA, 19 nt, Artificial Sequence
  Description of Artificial Sequence: Synthetic oligonucleotide
  Antisense strand to SEQ ID NO: 2072954
augcaggucgcgaacacuu

SEQ ID NO: 2072956 - RNA, 19 nt, Artificial Sequence
  Description of Artificial Sequence: Synthetic oligonucleotide
  Sense strand starting at position 431 of SEQ ID NO: 1881804
gcccucaguaauuagggau

SEQ ID NO: 2072957 - RNA, 19 nt, Artificial Sequence
  Description of Artificial Sequence: Synthetic oligonucleotide
  Antisense strand to SEQ ID NO: 2072956
aucccuaauuacugagggc

SEQ ID NO: 2072958 - RNA, 19 nt, Artificial Sequence
  Description of Artificial Sequence: Synthetic oligonucleotide
  Sense strand starting at position 517 of SEQ ID NO: 1881804
ggaguaaugucaguagcag

SEQ ID NO: 2072959 - RNA, 19 nt, Artificial Sequence
  Description of Artificial Sequence: Synthetic oligonucleotide
  Antisense strand to SEQ ID NO: 2072958
cugcuacugacauuacucc

SEQ ID NO: 2072960 - RNA, 19 nt, Artificial Sequence
  Description of Artificial Sequence: Synthetic oligonucleotide
  Sense strand starting at position 518 of SEQ ID NO: 1881804
gaguaaugucaguagcagu

SEQ ID NO: 2072961 - RNA, 19 nt, Artificial Sequence
  Description of Artificial Sequence: Synthetic oligonucleotide
  Antisense strand to SEQ ID NO: 2072960
acugcuacugacauuacuc

SEQ ID NO: 2072962 - RNA, 19 nt, Artificial Sequence
  Description of Artificial Sequence: Synthetic oligonucleotide
  Sense strand starting at position 632 of SEQ ID NO: 1881804
cccugaacggaggguuuau

SEQ ID NO: 2072963 - RNA, 19 nt, Artificial Sequence
  Description of Artificial Sequence: Synthetic oligonucleotide
  Antisense strand to SEQ ID NO: 2072962
auaaacccuccguucaggg

SEQ ID NO: 2072964 - RNA, 19 nt, Artificial Sequence
  Description of Artificial Sequence: Synthetic oligonucleotide
  Sense strand starting at position 643 of SEQ ID NO: 1881804
ggguuuauggcugacaccu

SEQ ID NO: 2072965 - RNA, 19 nt, Artificial Sequence
  Description of Artificial Sequence: Synthetic oligonucleotide
  Antisense strand to SEQ ID NO: 2072964
aggugucagccauaaaccc

SEQ ID NO: 2072966 - RNA, 19 nt, Artificial Sequence
  Description of Artificial Sequence: Synthetic oligonucleotide
  Sense strand starting at position 691 of SEQ ID NO: 1881804
gccggcugcaucuuugaau

SEQ ID NO: 2072967 - RNA, 19 nt, Artificial Sequence
  Description of Artificial Sequence: Synthetic oligonucleotide
  Antisense strand to SEQ ID NO: 2072966
auucaaagaugcagccggc

SEQ ID NO: 2072968 - RNA, 19 nt, Artificial Sequence
  Description of Artificial Sequence: Synthetic oligonucleotide
  Sense strand starting at position 1098 of SEQ ID NO: 1881804
gaguccaguuucuugguga

SEQ ID NO: 2072969 - RNA, 19 nt, Artificial Sequence
  Description of Artificial Sequence: Synthetic oligonucleotide
  Antisense strand to SEQ ID NO: 2072968
ucaccaagaaacuggacuc

SEQ ID NO: 2072970 - RNA, 19 nt, Artificial Sequence
  Description of Artificial Sequence: Synthetic oligonucleotide
  Sense strand starting at position 1125 of SEQ ID NO: 1881804
uugguugcgccauaaggaa

SEQ ID NO: 2072971 - RNA, 19 nt, Artificial Sequence
  Description of Artificial Sequence: Synthetic oligonucleotide
  Antisense strand to SEQ ID NO: 2072970
uuccuuauggcgcaaccaa

SEQ ID NO: 2072972 - RNA, 19 nt, Artificial Sequence
  Description of Artificial Sequence: Synthetic oligonucleotide
  Sense strand starting at position 1137 of SEQ ID NO: 1881804
uaaggaauguuguccuuga

SEQ ID NO: 2072973 - RNA, 19 nt, Artificial Sequence
  Description of Artificial Sequence: Synthetic oligonucleotide
  Antisense strand to SEQ ID NO: 2072972
ucaaggacaacauuccuua

SEQ ID NO: 2072974 - RNA, 19 nt, Artificial Sequence
  Description of Artificial Sequence: Synthetic oligonucleotide
  Sense strand starting at position 1141 of SEQ ID NO: 1881804
gaauguuguccuugacaac

SEQ ID NO: 2072975 - RNA, 19 nt, Artificial Sequence
  Description of Artificial Sequence: Synthetic oligonucleotide
  Antisense strand to SEQ ID NO: 2072974
guugucaaggacaacauuc

SEQ ID NO: 2072976 - RNA, 19 nt, Artificial Sequence
  Description of Artificial Sequence: Synthetic oligonucleotide
  Sense strand starting at position 1990 of SEQ ID NO: 1881804
cggcgauuucuaggucgua

SEQ ID NO: 2072977 - RNA, 19 nt, Artificial Sequence
  Description of Artificial Sequence: Synthetic oligonucleotide
  Antisense strand to SEQ ID NO: 2072976
uacgaccuagaaaucgccg

SEQ ID NO: 2072978 - RNA, 19 nt, Artificial Sequence
  Description of Artificial Sequence: Synthetic oligonucleotide
  Sense strand starting at position 1991 of SEQ ID NO: 1881804
ggcgauuucuaggucguag

SEQ ID NO: 2072979 - RNA, 19 nt, Artificial Sequence
  Description of Artificial Sequence: Synthetic oligonucleotide
  Antisense strand to SEQ ID NO: 2072978
cuacgaccuagaaaucgcc

SEQ ID NO: 2072980 - RNA, 19 nt, Artificial Sequence
  Description of Artificial Sequence: Synthetic oligonucleotide
  Sense strand starting at position 1993 of SEQ ID NO: 1881804
cgauuucuaggucguagga

SEQ ID NO: 2072981 - RNA, 19 nt, Artificial Sequence
  Description of Artificial Sequence: Synthetic oligonucleotide
  Antisense strand to SEQ ID NO: 2072980
uccuacgaccuagaaaucg

SEQ ID NO: 2072982 - RNA, 19 nt, Artificial Sequence
  Description of Artificial Sequence: Synthetic oligonucleotide
  Sense strand starting at position 2016 of SEQ ID NO: 1881804
gauguuucgccacagaaag

SEQ ID NO: 2072983 - RNA, 19 nt, Artificial Sequence
  Description of Artificial Sequence: Synthetic oligonucleotide
  Antisense strand to SEQ ID NO: 2072982
cuuucuguggcgaaacauc

SEQ ID NO: 2072984 - RNA, 19 nt, Artificial Sequence
  Description of Artificial Sequence: Synthetic oligonucleotide
  Sense strand starting at position 2497 of SEQ ID NO: 1881804
ccuguagaaaucuguguac

SEQ ID NO: 2072985 - RNA, 19 nt, Artificial Sequence
  Description of Artificial Sequence: Synthetic oligonucleotide
  Antisense strand to SEQ ID NO: 2072984
guacacagauuucuacagg

SEQ ID NO: 2072986 - RNA, 19 nt, Artificial Sequence
  Description of Artificial Sequence: Synthetic oligonucleotide
  Sense strand starting at position 2499 of SEQ ID NO: 1881804
uguagaaaucuguguacca

SEQ ID NO: 2072987 - RNA, 19 nt, Artificial Sequence
  Description of Artificial Sequence: Synthetic oligonucleotide
  Antisense strand to SEQ ID NO: 2072986
ugguacacagauuucuaca

SEQ ID NO: 2072988 - RNA, 19 nt, Artificial Sequence
  Description of Artificial Sequence: Synthetic oligonucleotide
  Sense strand starting at position 2500 of SEQ ID NO: 1881804
guagaaaucuguguaccag

SEQ ID NO: 2072989 - RNA, 19 nt, Artificial Sequence
  Description of Artificial Sequence: Synthetic oligonucleotide
  Antisense strand to SEQ ID NO: 2072988
cugguacacagauuucuac

SEQ ID NO: 2072990 - RNA, 19 nt, Artificial Sequence
  Description of Artificial Sequence: Synthetic oligonucleotide
  Sense strand starting at position 2665 of SEQ ID NO: 1881804
agcgauuucugguuuacga

SEQ ID NO: 2072991 - RNA, 19 nt, Artificial Sequence
  Description of Artificial Sequence: Synthetic oligonucleotide
  Antisense strand to SEQ ID NO: 2072990
ucguaaaccagaaaucgcu

SEQ ID NO: 2072992 - RNA, 19 nt, Artificial Sequence
  Description of Artificial Sequence: Synthetic oligonucleotide
  Sense strand starting at position 2687 of SEQ ID NO: 1881804
ucgguuugacgauagcaau

SEQ ID NO: 2072993 - RNA, 19 nt, Artificial Sequence
  Description of Artificial Sequence: Synthetic oligonucleotide
  Antisense strand to SEQ ID NO: 2072992
auugcuaucgucaaaccga

SEQ ID NO: 2072994 - RNA, 19 nt, Artificial Sequence
  Description of Artificial Sequence: Synthetic oligonucleotide
  Sense strand starting at position 2744 of SEQ ID NO: 1881804
cgggauauaucagcuacua

SEQ ID NO: 2072995 - RNA, 19 nt, Artificial Sequence
  Description of Artificial Sequence: Synthetic oligonucleotide
  Antisense strand to SEQ ID NO: 2072994
uaguagcugauauaucccg

SEQ ID NO: 2072996 - RNA, 19 nt, Artificial Sequence
  Description of Artificial Sequence: Synthetic oligonucleotide
  Sense strand starting at position 2775 of SEQ ID NO: 1881804
cguaaacagguuuaaccau

SEQ ID NO: 2072997 - RNA, 19 nt, Artificial Sequence
  Description of Artificial Sequence: Synthetic oligonucleotide
  Antisense strand to SEQ ID NO: 2072996
augguuaaaccuguuuacg

SEQ ID NO: 2072998 - RNA, 19 nt, Artificial Sequence
  Description of Artificial Sequence: Synthetic oligonucleotide
  Sense strand starting at position 2933 of SEQ ID NO: 1881804
cuuguaauuucugcuuugu

SEQ ID NO: 2072999 - RNA, 19 nt, Artificial Sequence
  Description of Artificial Sequence: Synthetic oligonucleotide
  Antisense strand to SEQ ID NO: 2072998
acaaagcagaaauuacaag

SEQ ID NO: 2073000 - RNA, 19 nt, Artificial Sequence
  Description of Artificial Sequence: Synthetic oligonucleotide
  Sense strand starting at position 2935 of SEQ ID NO: 1881804
uguaauuucugcuuuguag

SEQ ID NO: 2073001 - RNA, 19 nt, Artificial Sequence
  Description of Artificial Sequence: Synthetic oligonucleotide
  Antisense strand to SEQ ID NO: 2073000
cuacaaagcagaaauuaca

SEQ ID NO: 2073002 - RNA, 19 nt, Artificial Sequence
  Description of Artificial Sequence: Synthetic oligonucleotide
  Sense strand starting at position 2951 of SEQ ID NO: 1881804
uaggguugguucucucuaa

SEQ ID NO: 2073003 - RNA, 19 nt, Artificial Sequence
  Description of Artificial Sequence: Synthetic oligonucleotide
  Antisense strand to SEQ ID NO: 2073002
uuagagagaaccaacccua

SEQ ID NO: 2073004 - RNA, 19 nt, Artificial Sequence
  Description of Artificial Sequence: Synthetic oligonucleotide
  Sense strand starting at position 2952 of SEQ ID NO: 1881804
aggguugguucucucuaau

SEQ ID NO: 2073005 - RNA, 19 nt, Artificial Sequence
  Description of Artificial Sequence: Synthetic oligonucleotide
  Antisense strand to SEQ ID NO: 2073004
auuagagagaaccaacccu

SEQ ID NO: 2073006 - RNA, 19 nt, Artificial Sequence
  Description of Artificial Sequence: Synthetic oligonucleotide
  Sense strand starting at position 3352 of SEQ ID NO: 1881804
cgcggaguccauaaguugu

SEQ ID NO: 2073007 - RNA, 19 nt, Artificial Sequence
  Description of Artificial Sequence: Synthetic oligonucleotide
  Antisense strand to SEQ ID NO: 2073006
acaacuuauggacuccgcg

SEQ ID NO: 2073008 - RNA, 19 nt, Artificial Sequence
  Description of Artificial Sequence: Synthetic oligonucleotide
  Sense strand starting at position 3474 of SEQ ID NO: 1881804
acuaguacuuccguaauac

SEQ ID NO: 2073009 - RNA, 19 nt, Artificial Sequence
  Description of Artificial Sequence: Synthetic oligonucleotide
  Antisense strand to SEQ ID NO: 2073008
guauuacggaaguacuagu

SEQ ID NO: 2073010 - RNA, 19 nt, Artificial Sequence
  Description of Artificial Sequence: Synthetic oligonucleotide
  Sense strand starting at position 3475 of SEQ ID NO: 1881804
cuaguacuuccguaauacc

SEQ ID NO: 2073011 - RNA, 19 nt, Artificial Sequence
  Description of Artificial Sequence: Synthetic oligonucleotide
  Antisense strand to SEQ ID NO: 2073010
gguauuacggaaguacuag

SEQ ID NO: 2073012 - RNA, 19 nt, Artificial Sequence
  Description of Artificial Sequence: Synthetic oligonucleotide
  Sense strand starting at position 3612 of SEQ ID NO: 1881804
gguccauuccuccagacag

SEQ ID NO: 2073013 - RNA, 19 nt, Artificial Sequence
  Description of Artificial Sequence: Synthetic oligonucleotide
  Antisense strand to SEQ ID NO: 2073012
cugucuggaggaauggacc

SEQ ID NO: 2073014 - RNA, 19 nt, Artificial Sequence
  Description of Artificial Sequence: Synthetic oligonucleotide
  Sense strand starting at position 3614 of SEQ ID NO: 1881804
uccauuccuccagacagua

SEQ ID NO: 2073015 - RNA, 19 nt, Artificial Sequence
  Description of Artificial Sequence: Synthetic oligonucleotide
  Antisense strand to SEQ ID NO: 2073014
uacugucuggaggaaugga

SEQ ID NO: 2073016 - RNA, 19 nt, Artificial Sequence
  Description of Artificial Sequence: Synthetic oligonucleotide
  Sense strand starting at position 3685 of SEQ ID NO: 1881804
caccguuauggcgccuaaa

SEQ ID NO: 2073017 - RNA, 19 nt, Artificial Sequence
  Description of Artificial Sequence: Synthetic oligonucleotide
  Antisense strand to SEQ ID NO: 2073016
uuuaggcgccauaacggug

SEQ ID NO: 2073018 - RNA, 19 nt, Artificial Sequence
  Description of Artificial Sequence: Synthetic oligonucleotide
  Sense strand starting at position 3704 of SEQ ID NO: 1881804
cggauauuuguuuggcaau

SEQ ID NO: 2073019 - RNA, 19 nt, Artificial Sequence
  Description of Artificial Sequence: Synthetic oligonucleotide
  Antisense strand to SEQ ID NO: 2073018
auugccaaacaaauauccg

SEQ ID NO: 2073020 - RNA, 19 nt, Artificial Sequence
  Description of Artificial Sequence: Synthetic oligonucleotide
  Sense strand starting at position 3837 of SEQ ID NO: 1881804
ugcucauuucccggacaca

SEQ ID NO: 2073021 - RNA, 19 nt, Artificial Sequence
  Description of Artificial Sequence: Synthetic oligonucleotide
  Antisense strand to SEQ ID NO: 2073020
uguguccgggaaaugagca

SEQ ID NO: 2073022 - RNA, 19 nt, Artificial Sequence
  Description of Artificial Sequence: Synthetic oligonucleotide
  Sense strand starting at position 18 of SEQ ID NO: 1881805
gucauugucaggcauuaga

SEQ ID NO: 2073023 - RNA, 19 nt, Artificial Sequence
  Description of Artificial Sequence: Synthetic oligonucleotide
  Antisense strand to SEQ ID NO: 2073022
ucuaaugccugacaaugac

SEQ ID NO: 2073024 - RNA, 19 nt, Artificial Sequence
  Description of Artificial Sequence: Synthetic oligonucleotide
  Sense strand starting at position 208 of SEQ ID NO: 1881805
agucaucagacacgaaguu

SEQ ID NO: 2073025 - RNA, 19 nt, Artificial Sequence
  Description of Artificial Sequence: Synthetic oligonucleotide
  Antisense strand to SEQ ID NO: 2073024
aacuucgugucugaugacu

SEQ ID NO: 2073026 - RNA, 19 nt, Artificial Sequence
  Description of Artificial Sequence: Synthetic oligonucleotide
  Sense strand starting at position 260 of SEQ ID NO: 1881805
aagccuuucugucuugaag

SEQ ID NO: 2073027 - RNA, 19 nt, Artificial Sequence
  Description of Artificial Sequence: Synthetic oligonucleotide
  Antisense strand to SEQ ID NO: 2073026
cuucaagacagaaaggcuu

SEQ ID NO: 2073028 - RNA, 19 nt, Artificial Sequence
  Description of Artificial Sequence: Synthetic oligonucleotide
  Sense strand starting at position 263 of SEQ ID NO: 1881805
ccuuucugucuugaagguu

SEQ ID NO: 2073029 - RNA, 19 nt, Artificial Sequence
  Description of Artificial Sequence: Synthetic oligonucleotide
  Antisense strand to SEQ ID NO: 2073028
aaccuucaagacagaaagg

SEQ ID NO: 2073030 - RNA, 19 nt, Artificial Sequence
  Description of Artificial Sequence: Synthetic oligonucleotide
  Sense strand starting at position 429 of SEQ ID NO: 1881805
cccaaacuucuagaguugu

SEQ ID NO: 2073031 - RNA, 19 nt, Artificial Sequence
  Description of Artificial Sequence: Synthetic oligonucleotide
  Antisense strand to SEQ ID NO: 2073030
acaacucuagaaguuuggg

SEQ ID NO: 2073032 - RNA, 19 nt, Artificial Sequence
  Description of Artificial Sequence: Synthetic oligonucleotide
  Sense strand starting at position 452 of SEQ ID NO: 1881805
accaguuguuuauuuguca

SEQ ID NO: 2073033 - RNA, 19 nt, Artificial Sequence
  Description of Artificial Sequence: Synthetic oligonucleotide
  Antisense strand to SEQ ID NO: 2073032
ugacaaauaaacaacuggu

SEQ ID NO: 2073034 - RNA, 19 nt, Artificial Sequence
  Description of Artificial Sequence: Synthetic oligonucleotide
  Sense strand starting at position 455 of SEQ ID NO: 1881805
aguuguuuauuugucacau

SEQ ID NO: 2073035 - RNA, 19 nt, Artificial Sequence
  Description of Artificial Sequence: Synthetic oligonucleotide
  Antisense strand to SEQ ID NO: 2073034
augugacaaauaaacaacu

SEQ ID NO: 2073036 - RNA, 19 nt, Artificial Sequence
  Description of Artificial Sequence: Synthetic oligonucleotide
  Sense strand starting at position 456 of SEQ ID NO: 1881805
guuguuuauuugucacauu

SEQ ID NO: 2073037 - RNA, 19 nt, Artificial Sequence
  Description of Artificial Sequence: Synthetic oligonucleotide
  Antisense strand to SEQ ID NO: 2073036
aaugugacaaauaaacaac

SEQ ID NO: 2073038 - RNA, 19 nt, Artificial Sequence
  Description of Artificial Sequence: Synthetic oligonucleotide
  Sense strand starting at position 465 of SEQ ID NO: 1881805
uugucacauugcuuauuua

SEQ ID NO: 2073039 - RNA, 19 nt, Artificial Sequence
  Description of Artificial Sequence: Synthetic oligonucleotide
  Antisense strand to SEQ ID NO: 2073038
uaaauaagcaaugugacaa

SEQ ID NO: 2073040 - RNA, 19 nt, Artificial Sequence
  Description of Artificial Sequence: Synthetic oligonucleotide
  Sense strand starting at position 553 of SEQ ID NO: 1881805
acgagauuauugucuuauu

SEQ ID NO: 2073041 - RNA, 19 nt, Artificial Sequence
  Description of Artificial Sequence: Synthetic oligonucleotide
  Antisense strand to SEQ ID NO: 2073040
aauaagacaauaaucucgu

SEQ ID NO: 2073042 - RNA, 19 nt, Artificial Sequence
  Description of Artificial Sequence: Synthetic oligonucleotide
  Sense strand starting at position 554 of SEQ ID NO: 1881805
cgagauuauugucuuauua

SEQ ID NO: 2073043 - RNA, 19 nt, Artificial Sequence
  Description of Artificial Sequence: Synthetic oligonucleotide
  Antisense strand to SEQ ID NO: 2073042
uaauaagacaauaaucucg

SEQ ID NO: 2073044 - RNA, 19 nt, Artificial Sequence
  Description of Artificial Sequence: Synthetic oligonucleotide
  Sense strand starting at position 685 of SEQ ID NO: 1881805
caaacacgucguuauuaca

SEQ ID NO: 2073045 - RNA, 19 nt, Artificial Sequence
  Description of Artificial Sequence: Synthetic oligonucleotide
  Antisense strand to SEQ ID NO: 2073044
uguaauaacgacguguuug

SEQ ID NO: 2073046 - RNA, 19 nt, Artificial Sequence
  Description of Artificial Sequence: Synthetic oligonucleotide
  Sense strand starting at position 693 of SEQ ID NO: 1881805
ucguuauuacaggaacaca

SEQ ID NO: 2073047 - RNA, 19 nt, Artificial Sequence
  Description of Artificial Sequence: Synthetic oligonucleotide
  Antisense strand to SEQ ID NO: 2073046
uguguuccuguaauaacga

SEQ ID NO: 2073048 - RNA, 19 nt, Artificial Sequence
  Description of Artificial Sequence: Synthetic oligonucleotide
  Sense strand starting at position 808 of SEQ ID NO: 1881805
uggccuuacuucucuagau

SEQ ID NO: 2073049 - RNA, 19 nt, Artificial Sequence
  Description of Artificial Sequence: Synthetic oligonucleotide
  Antisense strand to SEQ ID NO: 2073048
aucuagagaaguaaggcca

SEQ ID NO: 2073050 - RNA, 19 nt, Artificial Sequence
  Description of Artificial Sequence: Synthetic oligonucleotide
  Sense strand starting at position 809 of SEQ ID NO: 1881805
ggccuuacuucucuagauc

SEQ ID NO: 2073051 - RNA, 19 nt, Artificial Sequence
  Description of Artificial Sequence: Synthetic oligonucleotide
  Antisense strand to SEQ ID NO: 2073050
gaucuagagaaguaaggcc

SEQ ID NO: 2073052 - RNA, 19 nt, Artificial Sequence
  Description of Artificial Sequence: Synthetic oligonucleotide
  Sense strand starting at position 823 of SEQ ID NO: 1881805
agaucagauuugcacacuu

SEQ ID NO: 2073053 - RNA, 19 nt, Artificial Sequence
  Description of Artificial Sequence: Synthetic oligonucleotide
  Antisense strand to SEQ ID NO: 2073052
aagugugcaaaucugaucu

SEQ ID NO: 2073054 - RNA, 19 nt, Artificial Sequence
  Description of Artificial Sequence: Synthetic oligonucleotide
  Sense strand starting at position 1317 of SEQ ID NO: 1881805
ucguguucuccugucacca

SEQ ID NO: 2073055 - RNA, 19 nt, Artificial Sequence
  Description of Artificial Sequence: Synthetic oligonucleotide
  Antisense strand to SEQ ID NO: 2073054
uggugacaggagaacacga

SEQ ID NO: 2073056 - RNA, 19 nt, Artificial Sequence
  Description of Artificial Sequence: Synthetic oligonucleotide
  Sense strand starting at position 1459 of SEQ ID NO: 1881805
agacuucgcuucccauaaa

SEQ ID NO: 2073057 - RNA, 19 nt, Artificial Sequence
  Description of Artificial Sequence: Synthetic oligonucleotide
  Antisense strand to SEQ ID NO: 2073056
uuuaugggaagcgaagucu

SEQ ID NO: 2073058 - RNA, 19 nt, Artificial Sequence
  Description of Artificial Sequence: Synthetic oligonucleotide
  Sense strand starting at position 1577 of SEQ ID NO: 1881805
gugcaaacaucugugacca

SEQ ID NO: 2073059 - RNA, 19 nt, Artificial Sequence
  Description of Artificial Sequence: Synthetic oligonucleotide
  Antisense strand to SEQ ID NO: 2073058
uggucacagauguuugcac

SEQ ID NO: 2073060 - RNA, 19 nt, Artificial Sequence
  Description of Artificial Sequence: Synthetic oligonucleotide
  Sense strand starting at position 1787 of SEQ ID NO: 1881805
agaugaucuucuucccaag

SEQ ID NO: 2073061 - RNA, 19 nt, Artificial Sequence
  Description of Artificial Sequence: Synthetic oligonucleotide
  Antisense strand to SEQ ID NO: 2073060
cuugggaagaagaucaucu

SEQ ID NO: 2073062 - RNA, 19 nt, Artificial Sequence
  Description of Artificial Sequence: Synthetic oligonucleotide
  Sense strand starting at position 2000 of SEQ ID NO: 1881805
gaacgauguugccuuggaa

SEQ ID NO: 2073063 - RNA, 19 nt, Artificial Sequence
  Description of Artificial Sequence: Synthetic oligonucleotide
  Antisense strand to SEQ ID NO: 2073062
uuccaaggcaacaucguuc

SEQ ID NO: 2073064 - RNA, 19 nt, Artificial Sequence
  Description of Artificial Sequence: Synthetic oligonucleotide
  Sense strand starting at position 2661 of SEQ ID NO: 1881805
ccagguucccagcaaaugu

SEQ ID NO: 2073065 - RNA, 19 nt, Artificial Sequence
  Description of Artificial Sequence: Synthetic oligonucleotide
  Antisense strand to SEQ ID NO: 2073064
acauuugcugggaaccugg

SEQ ID NO: 2073066 - RNA, 19 nt, Artificial Sequence
  Description of Artificial Sequence: Synthetic oligonucleotide
  Sense strand starting at position 2878 of SEQ ID NO: 1881805
ccaucuauggguugcagaa

SEQ ID NO: 2073067 - RNA, 19 nt, Artificial Sequence
  Description of Artificial Sequence: Synthetic oligonucleotide
  Antisense strand to SEQ ID NO: 2073066
uucugcaacccauagaugg

SEQ ID NO: 2073068 - RNA, 19 nt, Artificial Sequence
  Description of Artificial Sequence: Synthetic oligonucleotide
  Sense strand starting at position 2890 of SEQ ID NO: 1881805
ugcagaaucuggguggaca

SEQ ID NO: 2073069 - RNA, 19 nt, Artificial Sequence
  Description of Artificial Sequence: Synthetic oligonucleotide
  Antisense strand to SEQ ID NO: 2073068
uguccacccagauucugca

SEQ ID NO: 2073070 - RNA, 19 nt, Artificial Sequence
  Description of Artificial Sequence: Synthetic oligonucleotide
  Sense strand starting at position 2977 of SEQ ID NO: 1881805
cucaauuagggcuaguaaa

SEQ ID NO: 2073071 - RNA, 19 nt, Artificial Sequence
  Description of Artificial Sequence: Synthetic oligonucleotide
  Antisense strand to SEQ ID NO: 2073070
uuuacuagcccuaauugag

SEQ ID NO: 2073072 - RNA, 19 nt, Artificial Sequence
  Description of Artificial Sequence: Synthetic oligonucleotide
  Sense strand starting at position 3030 of SEQ ID NO: 1881805
aaucuuugggcuugugaag

SEQ ID NO: 2073073 - RNA, 19 nt, Artificial Sequence
  Description of Artificial Sequence: Synthetic oligonucleotide
  Antisense strand to SEQ ID NO: 2073072
cuucacaagcccaaagauu

SEQ ID NO: 2073074 - RNA, 19 nt, Artificial Sequence
  Description of Artificial Sequence: Synthetic oligonucleotide
  Sense strand starting at position 3067 of SEQ ID NO: 1881805
uguugaugccauuaaguag

SEQ ID NO: 2073075 - RNA, 19 nt, Artificial Sequence
  Description of Artificial Sequence: Synthetic oligonucleotide
  Antisense strand to SEQ ID NO: 2073074
cuacuuaauggcaucaaca

SEQ ID NO: 2073076 - RNA, 19 nt, Artificial Sequence
  Description of Artificial Sequence: Synthetic oligonucleotide
  Sense strand starting at position 3070 of SEQ ID NO: 1881805
ugaugccauuaaguagaau

SEQ ID NO: 2073077 - RNA, 19 nt, Artificial Sequence
  Description of Artificial Sequence: Synthetic oligonucleotide
  Antisense strand to SEQ ID NO: 2073076
auucuacuuaauggcauca

SEQ ID NO: 2073078 - RNA, 19 nt, Artificial Sequence
  Description of Artificial Sequence: Synthetic oligonucleotide
  Sense strand starting at position 3076 of SEQ ID NO: 1881805
cauuaaguagaaugaguca

SEQ ID NO: 2073079 - RNA, 19 nt, Artificial Sequence
  Description of Artificial Sequence: Synthetic oligonucleotide
  Antisense strand to SEQ ID NO: 2073078
ugacucauucuacuuaaug

SEQ ID NO: 2073080 - RNA, 19 nt, Artificial Sequence
  Description of Artificial Sequence: Synthetic oligonucleotide
  Sense strand starting at position 3081 of SEQ ID NO: 1881805
aguagaaugagucacugua

SEQ ID NO: 2073081 - RNA, 19 nt, Artificial Sequence
  Description of Artificial Sequence: Synthetic oligonucleotide
  Antisense strand to SEQ ID NO: 2073080
uacagugacucauucuacu

SEQ ID NO: 2073082 - RNA, 19 nt, Artificial Sequence
  Description of Artificial Sequence: Synthetic oligonucleotide
  Sense strand starting at position 3083 of SEQ ID NO: 1881805
uagaaugagucacuguaua

SEQ ID NO: 2073083 - RNA, 19 nt, Artificial Sequence
  Description of Artificial Sequence: Synthetic oligonucleotide
  Antisense strand to SEQ ID NO: 2073082
uauacagugacucauucua

SEQ ID NO: 2073084 - RNA, 19 nt, Artificial Sequence
  Description of Artificial Sequence: Synthetic oligonucleotide
  Sense strand starting at position 3088 of SEQ ID NO: 1881805
ugagucacuguauauauua

SEQ ID NO: 2073085 - RNA, 19 nt, Artificial Sequence
  Description of Artificial Sequence: Synthetic oligonucleotide
  Antisense strand to SEQ ID NO: 2073084
uaauauauacagugacuca

SEQ ID NO: 2073086 - RNA, 19 nt, Artificial Sequence
  Description of Artificial Sequence: Synthetic oligonucleotide
  Sense strand starting at position 3123 of SEQ ID NO: 1881805
gcgacauaagucuaugaau

SEQ ID NO: 2073087 - RNA, 19 nt, Artificial Sequence
  Description of Artificial Sequence: Synthetic oligonucleotide
  Antisense strand to SEQ ID NO: 2073086
auucauagacuuaugucgc

SEQ ID NO: 2073088 - RNA, 19 nt, Artificial Sequence
  Description of Artificial Sequence: Synthetic oligonucleotide
  Sense strand starting at position 3187 of SEQ ID NO: 1881805
uuauuaaaccaguggcaaa

SEQ ID NO: 2073089 - RNA, 19 nt, Artificial Sequence
  Description of Artificial Sequence: Synthetic oligonucleotide
  Antisense strand to SEQ ID NO: 2073088
uuugccacugguuuaauaa

SEQ ID NO: 2073090 - RNA, 19 nt, Artificial Sequence
  Description of Artificial Sequence: Synthetic oligonucleotide
  Sense strand starting at position 3366 of SEQ ID NO: 1881805
ucaaauaagaugugagcga

SEQ ID NO: 2073091 - RNA, 19 nt, Artificial Sequence
  Description of Artificial Sequence: Synthetic oligonucleotide
  Antisense strand to SEQ ID NO: 2073090
ucgcucacaucuuauuuga

SEQ ID NO: 2073092 - RNA, 19 nt, Artificial Sequence
  Description of Artificial Sequence: Synthetic oligonucleotide
  Sense strand starting at position 3481 of SEQ ID NO: 1881805
gaggaucccuggcuggaau

SEQ ID NO: 2073093 - RNA, 19 nt, Artificial Sequence
  Description of Artificial Sequence: Synthetic oligonucleotide
  Antisense strand to SEQ ID NO: 2073092
auuccagccagggauccuc

SEQ ID NO: 2073094 - RNA, 19 nt, Artificial Sequence
  Description of Artificial Sequence: Synthetic oligonucleotide
  Sense strand starting at position 3679 of SEQ ID NO: 1881805
ggaagacagccagguguau

SEQ ID NO: 2073095 - RNA, 19 nt, Artificial Sequence
  Description of Artificial Sequence: Synthetic oligonucleotide
  Antisense strand to SEQ ID NO: 2073094
auacaccuggcugucuucc

SEQ ID NO: 2073096 - RNA, 19 nt, Artificial Sequence
  Description of Artificial Sequence: Synthetic oligonucleotide
  Sense strand starting at position 3809 of SEQ ID NO: 1881805
cugacuggccuuuggcaaa

SEQ ID NO: 2073097 - RNA, 19 nt, Artificial Sequence
  Description of Artificial Sequence: Synthetic oligonucleotide
  Antisense strand to SEQ ID NO: 2073096
uuugccaaaggccagucag

SEQ ID NO: 2073098 - RNA, 19 nt, Artificial Sequence
  Description of Artificial Sequence: Synthetic oligonucleotide
  Sense strand starting at position 3822 of SEQ ID NO: 1881805
ggcaaagggcuuuagagau

SEQ ID NO: 2073099 - RNA, 19 nt, Artificial Sequence
  Description of Artificial Sequence: Synthetic oligonucleotide
  Antisense strand to SEQ ID NO: 2073098
aucucuaaagcccuuugcc

SEQ ID NO: 2073100 - RNA, 19 nt, Artificial Sequence
  Description of Artificial Sequence: Synthetic oligonucleotide
  Sense strand starting at position 3923 of SEQ ID NO: 1881805
gcuuacagagcucaugaga

SEQ ID NO: 2073101 - RNA, 19 nt, Artificial Sequence
  Description of Artificial Sequence: Synthetic oligonucleotide
  Antisense strand to SEQ ID NO: 2073100
ucucaugagcucuguaagc

SEQ ID NO: 2073102 - RNA, 19 nt, Artificial Sequence
  Description of Artificial Sequence: Synthetic oligonucleotide
  Sense strand starting at position 22 of SEQ ID NO: 1881806
uaaggagacugauacaaag

SEQ ID NO: 2073103 - RNA, 19 nt, Artificial Sequence
  Description of Artificial Sequence: Synthetic oligonucleotide
  Antisense strand to SEQ ID NO: 2073102
cuuuguaucagucuccuua

SEQ ID NO: 2073104 - RNA, 19 nt, Artificial Sequence
  Description of Artificial Sequence: Synthetic oligonucleotide
  Sense strand starting at position 103 of SEQ ID NO: 1881806
ggaguuuaaaugugagauc

SEQ ID NO: 2073105 - RNA, 19 nt, Artificial Sequence
  Description of Artificial Sequence: Synthetic oligonucleotide
  Antisense strand to SEQ ID NO: 2073104
gaucucacauuuaaacucc

SEQ ID NO: 2073106 - RNA, 19 nt, Artificial Sequence
  Description of Artificial Sequence: Synthetic oligonucleotide
  Sense strand starting at position 373 of SEQ ID NO: 1881806
uggcggaaugguggagauu

SEQ ID NO: 2073107 - RNA, 19 nt, Artificial Sequence
  Description of Artificial Sequence: Synthetic oligonucleotide
  Antisense strand to SEQ ID NO: 2073106
aaucuccaccauuccgcca

SEQ ID NO: 2073108 - RNA, 19 nt, Artificial Sequence
  Description of Artificial Sequence: Synthetic oligonucleotide
  Sense strand starting at position 385 of SEQ ID NO: 1881806
ggagauuccggucagccuu

SEQ ID NO: 2073109 - RNA, 19 nt, Artificial Sequence
  Description of Artificial Sequence: Synthetic oligonucleotide
  Antisense strand to SEQ ID NO: 2073108
aaggcugaccggaaucucc

SEQ ID NO: 2073110 - RNA, 19 nt, Artificial Sequence
  Description of Artificial Sequence: Synthetic oligonucleotide
  Sense strand starting at position 420 of SEQ ID NO: 1881806
cccauuacugaggguaaac

SEQ ID NO: 2073111 - RNA, 19 nt, Artificial Sequence
  Description of Artificial Sequence: Synthetic oligonucleotide
  Antisense strand to SEQ ID NO: 2073110
guuuacccucaguaauggg

SEQ ID NO: 2073112 - RNA, 19 nt, Artificial Sequence
  Description of Artificial Sequence: Synthetic oligonucleotide
  Sense strand starting at position 431 of SEQ ID NO: 1881806
ggguaaaccucagugguau

SEQ ID NO: 2073113 - RNA, 19 nt, Artificial Sequence
  Description of Artificial Sequence: Synthetic oligonucleotide
  Antisense strand to SEQ ID NO: 2073112
auaccacugagguuuaccc

SEQ ID NO: 2073114 - RNA, 19 nt, Artificial Sequence
  Description of Artificial Sequence: Synthetic oligonucleotide
  Sense strand starting at position 432 of SEQ ID NO: 1881806
gguaaaccucagugguauc

SEQ ID NO: 2073115 - RNA, 19 nt, Artificial Sequence
  Description of Artificial Sequence: Synthetic oligonucleotide
  Antisense strand to SEQ ID NO: 2073114
gauaccacugagguuuacc

SEQ ID NO: 2073116 - RNA, 19 nt, Artificial Sequence
  Description of Artificial Sequence: Synthetic oligonucleotide
  Sense strand starting at position 444 of SEQ ID NO: 1881806
ugguaucuguuccuugcaa

SEQ ID NO: 2073117 - RNA, 19 nt, Artificial Sequence
  Description of Artificial Sequence: Synthetic oligonucleotide
  Antisense strand to SEQ ID NO: 2073116
uugcaaggaacagauacca

SEQ ID NO: 2073118 - RNA, 19 nt, Artificial Sequence
  Description of Artificial Sequence: Synthetic oligonucleotide
  Sense strand starting at position 539 of SEQ ID NO: 1881806
gugcuagauauuugcaggu

SEQ ID NO: 2073119 - RNA, 19 nt, Artificial Sequence
  Description of Artificial Sequence: Synthetic oligonucleotide
  Antisense strand to SEQ ID NO: 2073118
accugcaaauaucuagcac

SEQ ID NO: 2073120 - RNA, 19 nt, Artificial Sequence
  Description of Artificial Sequence: Synthetic oligonucleotide
  Sense strand starting at position 543 of SEQ ID NO: 1881806
uagauauuugcaggugcuu

SEQ ID NO: 2073121 - RNA, 19 nt, Artificial Sequence
  Description of Artificial Sequence: Synthetic oligonucleotide
  Antisense strand to SEQ ID NO: 2073120
aagcaccugcaaauaucua

SEQ ID NO: 2073122 - RNA, 19 nt, Artificial Sequence
  Description of Artificial Sequence: Synthetic oligonucleotide
  Sense strand starting at position 628 of SEQ ID NO: 1881806
ugaugagggucgucuucaa

SEQ ID NO: 2073123 - RNA, 19 nt, Artificial Sequence
  Description of Artificial Sequence: Synthetic oligonucleotide
  Antisense strand to SEQ ID NO: 2073122
uugaagacgacccucauca

SEQ ID NO: 2073124 - RNA, 19 nt, Artificial Sequence
  Description of Artificial Sequence: Synthetic oligonucleotide
  Sense strand starting at position 661 of SEQ ID NO: 1881806
gcuaaacggcaauaaauau

SEQ ID NO: 2073125 - RNA, 19 nt, Artificial Sequence
  Description of Artificial Sequence: Synthetic oligonucleotide
  Antisense strand to SEQ ID NO: 2073124
auauuuauugccguuuagc

SEQ ID NO: 2073126 - RNA, 19 nt, Artificial Sequence
  Description of Artificial Sequence: Synthetic oligonucleotide
  Sense strand starting at position 841 of SEQ ID NO: 1881806
acagcaacguuaguaagaa

SEQ ID NO: 2073127 - RNA, 19 nt, Artificial Sequence
  Description of Artificial Sequence: Synthetic oligonucleotide
  Antisense strand to SEQ ID NO: 2073126
uucuuacuaacguugcugu

SEQ ID NO: 2073128 - RNA, 19 nt, Artificial Sequence
  Description of Artificial Sequence: Synthetic oligonucleotide
  Sense strand starting at position 885 of SEQ ID NO: 1881806
cugacaaaccugcaaagua

SEQ ID NO: 2073129 - RNA, 19 nt, Artificial Sequence
  Description of Artificial Sequence: Synthetic oligonucleotide
  Antisense strand to SEQ ID NO: 2073128
uacuuugcagguuugucag

SEQ ID NO: 2073130 - RNA, 19 nt, Artificial Sequence
  Description of Artificial Sequence: Synthetic oligonucleotide
  Sense strand starting at position 897 of SEQ ID NO: 1881806
caaaguagcugaucuuuga

SEQ ID NO: 2073131 - RNA, 19 nt, Artificial Sequence
  Description of Artificial Sequence: Synthetic oligonucleotide
  Antisense strand to SEQ ID NO: 2073130
ucaaagaucagcuacuuug

SEQ ID NO: 2073132 - RNA, 19 nt, Artificial Sequence
  Description of Artificial Sequence: Synthetic oligonucleotide
  Sense strand starting at position 985 of SEQ ID NO: 1881806
uguaucagcuacuugaaga

SEQ ID NO: 2073133 - RNA, 19 nt, Artificial Sequence
  Description of Artificial Sequence: Synthetic oligonucleotide
  Antisense strand to SEQ ID NO: 2073132
ucuucaaguagcugauaca

SEQ ID NO: 2073134 - RNA, 19 nt, Artificial Sequence
  Description of Artificial Sequence: Synthetic oligonucleotide
  Sense strand starting at position 1143 of SEQ ID NO: 1881806
acagguuucugcuuagcaa

SEQ ID NO: 2073135 - RNA, 19 nt, Artificial Sequence
  Description of Artificial Sequence: Synthetic oligonucleotide
  Antisense strand to SEQ ID NO: 2073134
uugcuaagcagaaaccugu

SEQ ID NO: 2073136 - RNA, 19 nt, Artificial Sequence
  Description of Artificial Sequence: Synthetic oligonucleotide
  Sense strand starting at position 1144 of SEQ ID NO: 1881806
cagguuucugcuuagcaaa

SEQ ID NO: 2073137 - RNA, 19 nt, Artificial Sequence
  Description of Artificial Sequence: Synthetic oligonucleotide
  Antisense strand to SEQ ID NO: 2073136
uuugcuaagcagaaaccug

SEQ ID NO: 2073138 - RNA, 19 nt, Artificial Sequence
  Description of Artificial Sequence: Synthetic oligonucleotide
  Sense strand starting at position 1146 of SEQ ID NO: 1881806
gguuucugcuuagcaaaga

SEQ ID NO: 2073139 - RNA, 19 nt, Artificial Sequence
  Description of Artificial Sequence: Synthetic oligonucleotide
  Antisense strand to SEQ ID NO: 2073138
ucuuugcuaagcagaaacc

SEQ ID NO: 2073140 - RNA, 19 nt, Artificial Sequence
  Description of Artificial Sequence: Synthetic oligonucleotide
  Sense strand starting at position 1167 of SEQ ID NO: 1881806
ugcccuauuuaguacauua

SEQ ID NO: 2073141 - RNA, 19 nt, Artificial Sequence
  Description of Artificial Sequence: Synthetic oligonucleotide
  Antisense strand to SEQ ID NO: 2073140
uaauguacuaaauagggca

SEQ ID NO: 2073142 - RNA, 19 nt, Artificial Sequence
  Description of Artificial Sequence: Synthetic oligonucleotide
  Sense strand starting at position 1306 of SEQ ID NO: 1881806
gcuucugguggugaacuaa

SEQ ID NO: 2073143 - RNA, 19 nt, Artificial Sequence
  Description of Artificial Sequence: Synthetic oligonucleotide
  Antisense strand to SEQ ID NO: 2073142
uuaguucaccaccagaagc

SEQ ID NO: 2073144 - RNA, 19 nt, Artificial Sequence
  Description of Artificial Sequence: Synthetic oligonucleotide
  Sense strand starting at position 1514 of SEQ ID NO: 1881806
aucuuacgccucuggaauu

SEQ ID NO: 2073145 - RNA, 19 nt, Artificial Sequence
  Description of Artificial Sequence: Synthetic oligonucleotide
  Antisense strand to SEQ ID NO: 2073144
aauuccagaggcguaagau

SEQ ID NO: 2073146 - RNA, 19 nt, Artificial Sequence
  Description of Artificial Sequence: Synthetic oligonucleotide
  Sense strand starting at position 1723 of SEQ ID NO: 1881806
cuaaacuaauguguguuua

SEQ ID NO: 2073147 - RNA, 19 nt, Artificial Sequence
  Description of Artificial Sequence: Synthetic oligonucleotide
  Antisense strand to SEQ ID NO: 2073146
uaaacacacauuaguuuag

SEQ ID NO: 2073148 - RNA, 19 nt, Artificial Sequence
  Description of Artificial Sequence: Synthetic oligonucleotide
  Sense strand starting at position 1731 of SEQ ID NO: 1881806
auguguguuuaggucagaa

SEQ ID NO: 2073149 - RNA, 19 nt, Artificial Sequence
  Description of Artificial Sequence: Synthetic oligonucleotide
  Antisense strand to SEQ ID NO: 2073148
uucugaccuaaacacacau

SEQ ID NO: 2073150 - RNA, 19 nt, Artificial Sequence
  Description of Artificial Sequence: Synthetic oligonucleotide
  Sense strand starting at position 1733 of SEQ ID NO: 1881806
guguguuuaggucagaaag

SEQ ID NO: 2073151 - RNA, 19 nt, Artificial Sequence
  Description of Artificial Sequence: Synthetic oligonucleotide
  Antisense strand to SEQ ID NO: 2073150
cuuucugaccuaaacacac

SEQ ID NO: 2073152 - RNA, 19 nt, Artificial Sequence
  Description of Artificial Sequence: Synthetic oligonucleotide
  Sense strand starting at position 1787 of SEQ ID NO: 1881806
gugagagcccuauaaauuc

SEQ ID NO: 2073153 - RNA, 19 nt, Artificial Sequence
  Description of Artificial Sequence: Synthetic oligonucleotide
  Antisense strand to SEQ ID NO: 2073152
gaauuuauagggcucucac

SEQ ID NO: 2073154 - RNA, 19 nt, Artificial Sequence
  Description of Artificial Sequence: Synthetic oligonucleotide
  Sense strand starting at position 2463 of SEQ ID NO: 1881806
uucggaucuccaggcaaga

SEQ ID NO: 2073155 - RNA, 19 nt, Artificial Sequence
  Description of Artificial Sequence: Synthetic oligonucleotide
  Antisense strand to SEQ ID NO: 2073154
ucuugccuggagauccgaa

SEQ ID NO: 2073156 - RNA, 19 nt, Artificial Sequence
  Description of Artificial Sequence: Synthetic oligonucleotide
  Sense strand starting at position 2889 of SEQ ID NO: 1881806
uggaguuaauguccaaccu

SEQ ID NO: 2073157 - RNA, 19 nt, Artificial Sequence
  Description of Artificial Sequence: Synthetic oligonucleotide
  Antisense strand to SEQ ID NO: 2073156
agguuggacauuaacucca

SEQ ID NO: 2073158 - RNA, 19 nt, Artificial Sequence
  Description of Artificial Sequence: Synthetic oligonucleotide
  Sense strand starting at position 2890 of SEQ ID NO: 1881806
ggaguuaauguccaaccua

SEQ ID NO: 2073159 - RNA, 19 nt, Artificial Sequence
  Description of Artificial Sequence: Synthetic oligonucleotide
  Antisense strand to SEQ ID NO: 2073158
uagguuggacauuaacucc

SEQ ID NO: 2073160 - RNA, 19 nt, Artificial Sequence
  Description of Artificial Sequence: Synthetic oligonucleotide
  Sense strand starting at position 3083 of SEQ ID NO: 1881806
uaagcuaugcgaggagaga

SEQ ID NO: 2073161 - RNA, 19 nt, Artificial Sequence
  Description of Artificial Sequence: Synthetic oligonucleotide
  Antisense strand to SEQ ID NO: 2073160
ucucuccucgcauagcuua

SEQ ID NO: 2073162 - RNA, 19 nt, Artificial Sequence
  Description of Artificial Sequence: Synthetic oligonucleotide
  Sense strand starting at position 3239 of SEQ ID NO: 1881806
ggugcucuuccgucaaguc

SEQ ID NO: 2073163 - RNA, 19 nt, Artificial Sequence
  Description of Artificial Sequence: Synthetic oligonucleotide
  Antisense strand to SEQ ID NO: 2073162
gacuugacggaagagcacc

SEQ ID NO: 2073164 - RNA, 19 nt, Artificial Sequence
  Description of Artificial Sequence: Synthetic oligonucleotide
  Sense strand starting at position 3249 of SEQ ID NO: 1881806
cgucaagucacagaacgau

SEQ ID NO: 2073165 - RNA, 19 nt, Artificial Sequence
  Description of Artificial Sequence: Synthetic oligonucleotide
  Antisense strand to SEQ ID NO: 2073164
aucguucugugacuugacg

SEQ ID NO: 2073166 - RNA, 19 nt, Artificial Sequence
  Description of Artificial Sequence: Synthetic oligonucleotide
  Sense strand starting at position 3271 of SEQ ID NO: 1881806
gggcuugggucaucuucga

SEQ ID NO: 2073167 - RNA, 19 nt, Artificial Sequence
  Description of Artificial Sequence: Synthetic oligonucleotide
  Antisense strand to SEQ ID NO: 2073166
ucgaagaugacccaagccc

SEQ ID NO: 2073168 - RNA, 19 nt, Artificial Sequence
  Description of Artificial Sequence: Synthetic oligonucleotide
  Sense strand starting at position 3347 of SEQ ID NO: 1881806
gagugcaacuuacuauuga

SEQ ID NO: 2073169 - RNA, 19 nt, Artificial Sequence
  Description of Artificial Sequence: Synthetic oligonucleotide
  Antisense strand to SEQ ID NO: 2073168
ucaauaguaaguugcacuc

SEQ ID NO: 2073170 - RNA, 19 nt, Artificial Sequence
  Description of Artificial Sequence: Synthetic oligonucleotide
  Sense strand starting at position 3582 of SEQ ID NO: 1881806
aaucucugucucgaacgua

SEQ ID NO: 2073171 - RNA, 19 nt, Artificial Sequence
  Description of Artificial Sequence: Synthetic oligonucleotide
  Antisense strand to SEQ ID NO: 2073170
uacguucgagacagagauu

SEQ ID NO: 2073172 - RNA, 19 nt, Artificial Sequence
  Description of Artificial Sequence: Synthetic oligonucleotide
  Sense strand starting at position 3594 of SEQ ID NO: 1881806
gaacguauucuugagacuc

SEQ ID NO: 2073173 - RNA, 19 nt, Artificial Sequence
  Description of Artificial Sequence: Synthetic oligonucleotide
  Antisense strand to SEQ ID NO: 2073172
gagucucaagaauacguuc

SEQ ID NO: 2073174 - RNA, 19 nt, Artificial Sequence
  Description of Artificial Sequence: Synthetic oligonucleotide
  Sense strand starting at position 3618 of SEQ ID NO: 1881806
ggccauugagguuauuauu

SEQ ID NO: 2073175 - RNA, 19 nt, Artificial Sequence
  Description of Artificial Sequence: Synthetic oligonucleotide
  Antisense strand to SEQ ID NO: 2073174
aauaauaaccucaauggcc

SEQ ID NO: 2073176 - RNA, 19 nt, Artificial Sequence
  Description of Artificial Sequence: Synthetic oligonucleotide
  Sense strand starting at position 3827 of SEQ ID NO: 1881806
gcuaguuucggcuuuggua

SEQ ID NO: 2073177 - RNA, 19 nt, Artificial Sequence
  Description of Artificial Sequence: Synthetic oligonucleotide
  Antisense strand to SEQ ID NO: 2073176
uaccaaagccgaaacuagc

SEQ ID NO: 2073178 - RNA, 19 nt, Artificial Sequence
  Description of Artificial Sequence: Synthetic oligonucleotide
  Sense strand starting at position 3982 of SEQ ID NO: 1881806
cuugcucaguguuuggaau

SEQ ID NO: 2073179 - RNA, 19 nt, Artificial Sequence
  Description of Artificial Sequence: Synthetic oligonucleotide
  Antisense strand to SEQ ID NO: 2073178
auuccaaacacugagcaag

SEQ ID NO: 2073180 - RNA, 19 nt, Artificial Sequence
  Description of Artificial Sequence: Synthetic oligonucleotide
  Sense strand starting at position 3983 of SEQ ID NO: 1881806
uugcucaguguuuggaaua

SEQ ID NO: 2073181 - RNA, 19 nt, Artificial Sequence
  Description of Artificial Sequence: Synthetic oligonucleotide
  Antisense strand to SEQ ID NO: 2073180
uauuccaaacacugagcaa

SEQ ID NO: 2073182 - RNA, 19 nt, Artificial Sequence
  Description of Artificial Sequence: Synthetic oligonucleotide
  Sense strand starting at position 1995 of SEQ ID NO: 1881807
agggaauaauucuaucuga

SEQ ID NO: 2073183 - RNA, 19 nt, Artificial Sequence
  Description of Artificial Sequence: Synthetic oligonucleotide
  Antisense strand to SEQ ID NO: 2073182
ucagauagaauuauucccu

SEQ ID NO: 2073184 - RNA, 19 nt, Artificial Sequence
  Description of Artificial Sequence: Synthetic oligonucleotide
  Sense strand starting at position 2164 of SEQ ID NO: 1881807
ucuaauucccaguauguca

SEQ ID NO: 2073185 - RNA, 19 nt, Artificial Sequence
  Description of Artificial Sequence: Synthetic oligonucleotide
  Antisense strand to SEQ ID NO: 2073184
ugacauacugggaauuaga

SEQ ID NO: 2073186 - RNA, 19 nt, Artificial Sequence
  Description of Artificial Sequence: Synthetic oligonucleotide
  Sense strand starting at position 2263 of SEQ ID NO: 1881807
ccuugucccugagucuaau

SEQ ID NO: 2073187 - RNA, 19 nt, Artificial Sequence
  Description of Artificial Sequence: Synthetic oligonucleotide
  Antisense strand to SEQ ID NO: 2073186
auuagacucagggacaagg

SEQ ID NO: 2073188 - RNA, 19 nt, Artificial Sequence
  Description of Artificial Sequence: Synthetic oligonucleotide
  Sense strand starting at position 2295 of SEQ ID NO: 1881807
aaaggaaagguuugccuaa

SEQ ID NO: 2073189 - RNA, 19 nt, Artificial Sequence
  Description of Artificial Sequence: Synthetic oligonucleotide
  Antisense strand to SEQ ID NO: 2073188
uuaggcaaaccuuuccuuu

SEQ ID NO: 2073190 - RNA, 19 nt, Artificial Sequence
  Description of Artificial Sequence: Synthetic oligonucleotide
  Sense strand starting at position 2317 of SEQ ID NO: 1881807
accucugcagucugucaaa

SEQ ID NO: 2073191 - RNA, 19 nt, Artificial Sequence
  Description of Artificial Sequence: Synthetic oligonucleotide
  Antisense strand to SEQ ID NO: 2073190
uuugacagacugcagaggu

SEQ ID NO: 2073192 - RNA, 19 nt, Artificial Sequence
  Description of Artificial Sequence: Synthetic oligonucleotide
  Sense strand starting at position 2354 of SEQ ID NO: 1881807
uaggauauauccuauagug

SEQ ID NO: 2073193 - RNA, 19 nt, Artificial Sequence
  Description of Artificial Sequence: Synthetic oligonucleotide
  Antisense strand to SEQ ID NO: 2073192
cacuauaggauauauccua

SEQ ID NO: 2073194 - RNA, 19 nt, Artificial Sequence
  Description of Artificial Sequence: Synthetic oligonucleotide
  Sense strand starting at position 2370 of SEQ ID NO: 1881807
guggaauuacccugaugcu

SEQ ID NO: 2073195 - RNA, 19 nt, Artificial Sequence
  Description of Artificial Sequence: Synthetic oligonucleotide
  Antisense strand to SEQ ID NO: 2073194
agcaucaggguaauuccac

SEQ ID NO: 2073196 - RNA, 19 nt, Artificial Sequence
  Description of Artificial Sequence: Synthetic oligonucleotide
  Sense strand starting at position 2397 of SEQ ID NO: 1881807
ggcccugcugugucuuaau

SEQ ID NO: 2073197 - RNA, 19 nt, Artificial Sequence
  Description of Artificial Sequence: Synthetic oligonucleotide
  Antisense strand to SEQ ID NO: 2073196
auuaagacacagcagggcc

SEQ ID NO: 2073198 - RNA, 19 nt, Artificial Sequence
  Description of Artificial Sequence: Synthetic oligonucleotide
  Sense strand starting at position 2424 of SEQ ID NO: 1881807
gccuuaaguccuuacagca

SEQ ID NO: 2073199 - RNA, 19 nt, Artificial Sequence
  Description of Artificial Sequence: Synthetic oligonucleotide
  Antisense strand to SEQ ID NO: 2073198
ugcuguaaggacuuaaggc

SEQ ID NO: 2073200 - RNA, 19 nt, Artificial Sequence
  Description of Artificial Sequence: Synthetic oligonucleotide
  Sense strand starting at position 2440 of SEQ ID NO: 1881807
gcaugacucuucucaagac

SEQ ID NO: 2073201 - RNA, 19 nt, Artificial Sequence
  Description of Artificial Sequence: Synthetic oligonucleotide
  Antisense strand to SEQ ID NO: 2073200
gucuugagaagagucaugc

SEQ ID NO: 2073202 - RNA, 19 nt, Artificial Sequence
  Description of Artificial Sequence: Synthetic oligonucleotide
  Sense strand starting at position 2883 of SEQ ID NO: 1881807
gagaacuucuuugggugca

SEQ ID NO: 2073203 - RNA, 19 nt, Artificial Sequence
  Description of Artificial Sequence: Synthetic oligonucleotide
  Antisense strand to SEQ ID NO: 2073202
ugcacccaaagaaguucuc

SEQ ID NO: 2073204 - RNA, 19 nt, Artificial Sequence
  Description of Artificial Sequence: Synthetic oligonucleotide
  Sense strand starting at position 2885 of SEQ ID NO: 1881807
gaacuucuuugggugcaua

SEQ ID NO: 2073205 - RNA, 19 nt, Artificial Sequence
  Description of Artificial Sequence: Synthetic oligonucleotide
  Antisense strand to SEQ ID NO: 2073204
uaugcacccaaagaaguuc

SEQ ID NO: 2073206 - RNA, 19 nt, Artificial Sequence
  Description of Artificial Sequence: Synthetic oligonucleotide
  Sense strand starting at position 2886 of SEQ ID NO: 1881807
aacuucuuugggugcauau

SEQ ID NO: 2073207 - RNA, 19 nt, Artificial Sequence
  Description of Artificial Sequence: Synthetic oligonucleotide
  Antisense strand to SEQ ID NO: 2073206
auaugcacccaaagaaguu

SEQ ID NO: 2073208 - RNA, 19 nt, Artificial Sequence
  Description of Artificial Sequence: Synthetic oligonucleotide
  Sense strand starting at position 2965 of SEQ ID NO: 1881807
aagcacuaucagugcagaa

SEQ ID NO: 2073209 - RNA, 19 nt, Artificial Sequence
  Description of Artificial Sequence: Synthetic oligonucleotide
  Antisense strand to SEQ ID NO: 2073208
uucugcacugauagugcuu

SEQ ID NO: 2073210 - RNA, 19 nt, Artificial Sequence
  Description of Artificial Sequence: Synthetic oligonucleotide
  Sense strand starting at position 2967 of SEQ ID NO: 1881807
gcacuaucagugcagaaua

SEQ ID NO: 2073211 - RNA, 19 nt, Artificial Sequence
  Description of Artificial Sequence: Synthetic oligonucleotide
  Antisense strand to SEQ ID NO: 2073210
uauucugcacugauagugc

SEQ ID NO: 2073212 - RNA, 19 nt, Artificial Sequence
  Description of Artificial Sequence: Synthetic oligonucleotide
  Sense strand starting at position 2977 of SEQ ID NO: 1881807
ugcagaauagcccagaacu

SEQ ID NO: 2073213 - RNA, 19 nt, Artificial Sequence
  Description of Artificial Sequence: Synthetic oligonucleotide
  Antisense strand to SEQ ID NO: 2073212
aguucugggcuauucugca

SEQ ID NO: 2073214 - RNA, 19 nt, Artificial Sequence
  Description of Artificial Sequence: Synthetic oligonucleotide
  Sense strand starting at position 3199 of SEQ ID NO: 1881807
caggccuagaucgguagaa

SEQ ID NO: 2073215 - RNA, 19 nt, Artificial Sequence
  Description of Artificial Sequence: Synthetic oligonucleotide
  Antisense strand to SEQ ID NO: 2073214
uucuaccgaucuaggccug

SEQ ID NO: 2073216 - RNA, 19 nt, Artificial Sequence
  Description of Artificial Sequence: Synthetic oligonucleotide
  Sense strand starting at position 3237 of SEQ ID NO: 1881807
agcucuuaccagugcauga

SEQ ID NO: 2073217 - RNA, 19 nt, Artificial Sequence
  Description of Artificial Sequence: Synthetic oligonucleotide
  Antisense strand to SEQ ID NO: 2073216
ucaugcacugguaagagcu

SEQ ID NO: 2073218 - RNA, 19 nt, Artificial Sequence
  Description of Artificial Sequence: Synthetic oligonucleotide
  Sense strand starting at position 3244 of SEQ ID NO: 1881807
accagugcaugagaguuaa

SEQ ID NO: 2073219 - RNA, 19 nt, Artificial Sequence
  Description of Artificial Sequence: Synthetic oligonucleotide
  Antisense strand to SEQ ID NO: 2073218
uuaacucucaugcacuggu

SEQ ID NO: 2073220 - RNA, 19 nt, Artificial Sequence
  Description of Artificial Sequence: Synthetic oligonucleotide
  Sense strand starting at position 3248 of SEQ ID NO: 1881807
gugcaugagaguuaaaugu

SEQ ID NO: 2073221 - RNA, 19 nt, Artificial Sequence
  Description of Artificial Sequence: Synthetic oligonucleotide
  Antisense strand to SEQ ID NO: 2073220
acauuuaacucucaugcac

SEQ ID NO: 2073222 - RNA, 19 nt, Artificial Sequence
  Description of Artificial Sequence: Synthetic oligonucleotide
  Sense strand starting at position 3254 of SEQ ID NO: 1881807
gagaguuaaaugugugcau

SEQ ID NO: 2073223 - RNA, 19 nt, Artificial Sequence
  Description of Artificial Sequence: Synthetic oligonucleotide
  Antisense strand to SEQ ID NO: 2073222
augcacacauuuaacucuc

SEQ ID NO: 2073224 - RNA, 19 nt, Artificial Sequence
  Description of Artificial Sequence: Synthetic oligonucleotide
  Sense strand starting at position 3256 of SEQ ID NO: 1881807
gaguuaaaugugugcaucu

SEQ ID NO: 2073225 - RNA, 19 nt, Artificial Sequence
  Description of Artificial Sequence: Synthetic oligonucleotide
  Antisense strand to SEQ ID NO: 2073224
agaugcacacauuuaacuc

SEQ ID NO: 2073226 - RNA, 19 nt, Artificial Sequence
  Description of Artificial Sequence: Synthetic oligonucleotide
  Sense strand starting at position 3258 of SEQ ID NO: 1881807
guuaaaugugugcaucucu

SEQ ID NO: 2073227 - RNA, 19 nt, Artificial Sequence
  Description of Artificial Sequence: Synthetic oligonucleotide
  Antisense strand to SEQ ID NO: 2073226
agagaugcacacauuuaac

SEQ ID NO: 2073228 - RNA, 19 nt, Artificial Sequence
  Description of Artificial Sequence: Synthetic oligonucleotide
  Sense strand starting at position 3294 of SEQ ID NO: 1881807
ugaggucacucugguaaga

SEQ ID NO: 2073229 - RNA, 19 nt, Artificial Sequence
  Description of Artificial Sequence: Synthetic oligonucleotide
  Antisense strand to SEQ ID NO: 2073228
ucuuaccagagugaccuca

SEQ ID NO: 2073230 - RNA, 19 nt, Artificial Sequence
  Description of Artificial Sequence: Synthetic oligonucleotide
  Sense strand starting at position 3296 of SEQ ID NO: 1881807
aggucacucugguaagaug

SEQ ID NO: 2073231 - RNA, 19 nt, Artificial Sequence
  Description of Artificial Sequence: Synthetic oligonucleotide
  Antisense strand to SEQ ID NO: 2073230
caucuuaccagagugaccu

SEQ ID NO: 2073232 - RNA, 19 nt, Artificial Sequence
  Description of Artificial Sequence: Synthetic oligonucleotide
  Sense strand starting at position 3299 of SEQ ID NO: 1881807
ucacucugguaagaugaaa

SEQ ID NO: 2073233 - RNA, 19 nt, Artificial Sequence
  Description of Artificial Sequence: Synthetic oligonucleotide
  Antisense strand to SEQ ID NO: 2073232
uuucaucuuaccagaguga

SEQ ID NO: 2073234 - RNA, 19 nt, Artificial Sequence
  Description of Artificial Sequence: Synthetic oligonucleotide
  Sense strand starting at position 3319 of SEQ ID NO: 1881807
cugccauggugggaggauu

SEQ ID NO: 2073235 - RNA, 19 nt, Artificial Sequence
  Description of Artificial Sequence: Synthetic oligonucleotide
  Antisense strand to SEQ ID NO: 2073234
aauccucccaccauggcag

SEQ ID NO: 2073236 - RNA, 19 nt, Artificial Sequence
  Description of Artificial Sequence: Synthetic oligonucleotide
  Sense strand starting at position 3383 of SEQ ID NO: 1881807
uuaugucugcgagcgaguu

SEQ ID NO: 2073237 - RNA, 19 nt, Artificial Sequence
  Description of Artificial Sequence: Synthetic oligonucleotide
  Antisense strand to SEQ ID NO: 2073236
aacucgcucgcagacauaa

SEQ ID NO: 2073238 - RNA, 19 nt, Artificial Sequence
  Description of Artificial Sequence: Synthetic oligonucleotide
  Sense strand starting at position 3387 of SEQ ID NO: 1881807
gucugcgagcgaguuguua

SEQ ID NO: 2073239 - RNA, 19 nt, Artificial Sequence
  Description of Artificial Sequence: Synthetic oligonucleotide
  Antisense strand to SEQ ID NO: 2073238
uaacaacucgcucgcagac

SEQ ID NO: 2073240 - RNA, 19 nt, Artificial Sequence
  Description of Artificial Sequence: Synthetic oligonucleotide
  Sense strand starting at position 3389 of SEQ ID NO: 1881807
cugcgagcgaguuguuaaa

SEQ ID NO: 2073241 - RNA, 19 nt, Artificial Sequence
  Description of Artificial Sequence: Synthetic oligonucleotide
  Antisense strand to SEQ ID NO: 2073240
uuuaacaacucgcucgcag

SEQ ID NO: 2073242 - RNA, 19 nt, Artificial Sequence
  Description of Artificial Sequence: Synthetic oligonucleotide
  Sense strand starting at position 3391 of SEQ ID NO: 1881807
gcgagcgaguuguuaaaca

SEQ ID NO: 2073243 - RNA, 19 nt, Artificial Sequence
  Description of Artificial Sequence: Synthetic oligonucleotide
  Antisense strand to SEQ ID NO: 2073242
uguuuaacaacucgcucgc

SEQ ID NO: 2073244 - RNA, 19 nt, Artificial Sequence
  Description of Artificial Sequence: Synthetic oligonucleotide
  Sense strand starting at position 3474 of SEQ ID NO: 1881807
gcaagaaggcuauacugua

SEQ ID NO: 2073245 - RNA, 19 nt, Artificial Sequence
  Description of Artificial Sequence: Synthetic oligonucleotide
  Antisense strand to SEQ ID NO: 2073244
uacaguauagccuucuugc

SEQ ID NO: 2073246 - RNA, 19 nt, Artificial Sequence
  Description of Artificial Sequence: Synthetic oligonucleotide
  Sense strand starting at position 3487 of SEQ ID NO: 1881807
acuguagugagaugacuuu

SEQ ID NO: 2073247 - RNA, 19 nt, Artificial Sequence
  Description of Artificial Sequence: Synthetic oligonucleotide
  Antisense strand to SEQ ID NO: 2073246
aaagucaucucacuacagu

SEQ ID NO: 2073248 - RNA, 19 nt, Artificial Sequence
  Description of Artificial Sequence: Synthetic oligonucleotide
  Sense strand starting at position 3500 of SEQ ID NO: 1881807
gacuuuaccuaugggaaag

SEQ ID NO: 2073249 - RNA, 19 nt, Artificial Sequence
  Description of Artificial Sequence: Synthetic oligonucleotide
  Antisense strand to SEQ ID NO: 2073248
cuuucccauagguaaaguc

SEQ ID NO: 2073250 - RNA, 19 nt, Artificial Sequence
  Description of Artificial Sequence: Synthetic oligonucleotide
  Sense strand starting at position 3577 of SEQ ID NO: 1881807
gggacaucgugggcagaua

SEQ ID NO: 2073251 - RNA, 19 nt, Artificial Sequence
  Description of Artificial Sequence: Synthetic oligonucleotide
  Antisense strand to SEQ ID NO: 2073250
uaucugcccacgauguccc

SEQ ID NO: 2073252 - RNA, 19 nt, Artificial Sequence
  Description of Artificial Sequence: Synthetic oligonucleotide
  Sense strand starting at position 3578 of SEQ ID NO: 1881807
ggacaucgugggcagauau

SEQ ID NO: 2073253 - RNA, 19 nt, Artificial Sequence
  Description of Artificial Sequence: Synthetic oligonucleotide
  Antisense strand to SEQ ID NO: 2073252
auaucugcccacgaugucc

SEQ ID NO: 2073254 - RNA, 19 nt, Artificial Sequence
  Description of Artificial Sequence: Synthetic oligonucleotide
  Sense strand starting at position 3691 of SEQ ID NO: 1881807
agaacaggcuuguuuacua

SEQ ID NO: 2073255 - RNA, 19 nt, Artificial Sequence
  Description of Artificial Sequence: Synthetic oligonucleotide
  Antisense strand to SEQ ID NO: 2073254
uaguaaacaagccuguucu

SEQ ID NO: 2073256 - RNA, 19 nt, Artificial Sequence
  Description of Artificial Sequence: Synthetic oligonucleotide
  Sense strand starting at position 3707 of SEQ ID NO: 1881807
cuaaacugcucagaggaaa

SEQ ID NO: 2073257 - RNA, 19 nt, Artificial Sequence
  Description of Artificial Sequence: Synthetic oligonucleotide
  Antisense strand to SEQ ID NO: 2073256
uuuccucugagcaguuuag

SEQ ID NO: 2073258 - RNA, 19 nt, Artificial Sequence
  Description of Artificial Sequence: Synthetic oligonucleotide
  Sense strand starting at position 3882 of SEQ ID NO: 1881807
ccuggaugcuggcaaaucu

SEQ ID NO: 2073259 - RNA, 19 nt, Artificial Sequence
  Description of Artificial Sequence: Synthetic oligonucleotide
  Antisense strand to SEQ ID NO: 2073258
agauuugccagcauccagg

SEQ ID NO: 2073260 - RNA, 19 nt, Artificial Sequence
  Description of Artificial Sequence: Synthetic oligonucleotide
  Sense strand starting at position 3890 of SEQ ID NO: 1881807
cuggcaaaucuggacucua

SEQ ID NO: 2073261 - RNA, 19 nt, Artificial Sequence
  Description of Artificial Sequence: Synthetic oligonucleotide
  Antisense strand to SEQ ID NO: 2073260
uagaguccagauuugccag

SEQ ID NO: 2073262 - RNA, 19 nt, Artificial Sequence
  Description of Artificial Sequence: Synthetic oligonucleotide
  Sense strand starting at position 37 of SEQ ID NO: 1881808
agucucucccaugaugaua

SEQ ID NO: 2073263 - RNA, 19 nt, Artificial Sequence
  Description of Artificial Sequence: Synthetic oligonucleotide
  Antisense strand to SEQ ID NO: 2073262
uaucaucaugggagagacu

SEQ ID NO: 2073264 - RNA, 19 nt, Artificial Sequence
  Description of Artificial Sequence: Synthetic oligonucleotide
  Sense strand starting at position 56 of SEQ ID NO: 1881808
gggugcuguagagaagaau

SEQ ID NO: 2073265 - RNA, 19 nt, Artificial Sequence
  Description of Artificial Sequence: Synthetic oligonucleotide
  Antisense strand to SEQ ID NO: 2073264
auucuucucuacagcaccc

SEQ ID NO: 2073266 - RNA, 19 nt, Artificial Sequence
  Description of Artificial Sequence: Synthetic oligonucleotide
  Sense strand starting at position 98 of SEQ ID NO: 1881808
caguuagaacuguaaguaa

SEQ ID NO: 2073267 - RNA, 19 nt, Artificial Sequence
  Description of Artificial Sequence: Synthetic oligonucleotide
  Antisense strand to SEQ ID NO: 2073266
uuacuuacaguucuaacug

SEQ ID NO: 2073268 - RNA, 19 nt, Artificial Sequence
  Description of Artificial Sequence: Synthetic oligonucleotide
  Sense strand starting at position 289 of SEQ ID NO: 1881808
uaaagagaaugaugagauc

SEQ ID NO: 2073269 - RNA, 19 nt, Artificial Sequence
  Description of Artificial Sequence: Synthetic oligonucleotide
  Antisense strand to SEQ ID NO: 2073268
gaucucaucauucucuuua

SEQ ID NO: 2073270 - RNA, 19 nt, Artificial Sequence
  Description of Artificial Sequence: Synthetic oligonucleotide
  Sense strand starting at position 597 of SEQ ID NO: 1881808
cagccugugcgacaagauu

SEQ ID NO: 2073271 - RNA, 19 nt, Artificial Sequence
  Description of Artificial Sequence: Synthetic oligonucleotide
  Antisense strand to SEQ ID NO: 2073270
aaucuugucgcacaggcug

SEQ ID NO: 2073272 - RNA, 19 nt, Artificial Sequence
  Description of Artificial Sequence: Synthetic oligonucleotide
  Sense strand starting at position 603 of SEQ ID NO: 1881808
gugcgacaagauugaaacu

SEQ ID NO: 2073273 - RNA, 19 nt, Artificial Sequence
  Description of Artificial Sequence: Synthetic oligonucleotide
  Antisense strand to SEQ ID NO: 2073272
aguuucaaucuugucgcac

SEQ ID NO: 2073274 - RNA, 19 nt, Artificial Sequence
  Description of Artificial Sequence: Synthetic oligonucleotide
  Sense strand starting at position 1127 of SEQ ID NO: 1881808
acuuucugguaguuaauua

SEQ ID NO: 2073275 - RNA, 19 nt, Artificial Sequence
  Description of Artificial Sequence: Synthetic oligonucleotide
  Antisense strand to SEQ ID NO: 2073274
uaauuaacuaccagaaagu

SEQ ID NO: 2073276 - RNA, 19 nt, Artificial Sequence
  Description of Artificial Sequence: Synthetic oligonucleotide
  Sense strand starting at position 1135 of SEQ ID NO: 1881808
guaguuaauuacuucuuga

SEQ ID NO: 2073277 - RNA, 19 nt, Artificial Sequence
  Description of Artificial Sequence: Synthetic oligonucleotide
  Antisense strand to SEQ ID NO: 2073276
ucaagaaguaauuaacuac

SEQ ID NO: 2073278 - RNA, 19 nt, Artificial Sequence
  Description of Artificial Sequence: Synthetic oligonucleotide
  Sense strand starting at position 1189 of SEQ ID NO: 1881808
uuugauucggugcaccaaa

SEQ ID NO: 2073279 - RNA, 19 nt, Artificial Sequence
  Description of Artificial Sequence: Synthetic oligonucleotide
  Antisense strand to SEQ ID NO: 2073278
uuuggugcaccgaaucaaa

SEQ ID NO: 2073280 - RNA, 19 nt, Artificial Sequence
  Description of Artificial Sequence: Synthetic oligonucleotide
  Sense strand starting at position 1212 of SEQ ID NO: 1881808
cucagaaauuucuggaauc

SEQ ID NO: 2073281 - RNA, 19 nt, Artificial Sequence
  Description of Artificial Sequence: Synthetic oligonucleotide
  Antisense strand to SEQ ID NO: 2073280
gauuccagaaauuucugag

SEQ ID NO: 2073282 - RNA, 19 nt, Artificial Sequence
  Description of Artificial Sequence: Synthetic oligonucleotide
  Sense strand starting at position 1213 of SEQ ID NO: 1881808
ucagaaauuucuggaauca

SEQ ID NO: 2073283 - RNA, 19 nt, Artificial Sequence
  Description of Artificial Sequence: Synthetic oligonucleotide
  Antisense strand to SEQ ID NO: 2073282
ugauuccagaaauuucuga

SEQ ID NO: 2073284 - RNA, 19 nt, Artificial Sequence
  Description of Artificial Sequence: Synthetic oligonucleotide
  Sense strand starting at position 1388 of SEQ ID NO: 1881808
gacuucgccgaaugauaga

SEQ ID NO: 2073285 - RNA, 19 nt, Artificial Sequence
  Description of Artificial Sequence: Synthetic oligonucleotide
  Antisense strand to SEQ ID NO: 2073284
ucuaucauucggcgaaguc

SEQ ID NO: 2073286 - RNA, 19 nt, Artificial Sequence
  Description of Artificial Sequence: Synthetic oligonucleotide
  Sense strand starting at position 1413 of SEQ ID NO: 1881808
cuuccauacugagcgaaca

SEQ ID NO: 2073287 - RNA, 19 nt, Artificial Sequence
  Description of Artificial Sequence: Synthetic oligonucleotide
  Antisense strand to SEQ ID NO: 2073286
uguucgcucaguauggaag

SEQ ID NO: 2073288 - RNA, 19 nt, Artificial Sequence
  Description of Artificial Sequence: Synthetic oligonucleotide
  Sense strand starting at position 1489 of SEQ ID NO: 1881808
gccugaaaggucagcggua

SEQ ID NO: 2073289 - RNA, 19 nt, Artificial Sequence
  Description of Artificial Sequence: Synthetic oligonucleotide
  Antisense strand to SEQ ID NO: 2073288
uaccgcugaccuuucaggc

SEQ ID NO: 2073290 - RNA, 19 nt, Artificial Sequence
  Description of Artificial Sequence: Synthetic oligonucleotide
  Sense strand starting at position 2195 of SEQ ID NO: 1881808
caagcuuuggagcaagauu

SEQ ID NO: 2073291 - RNA, 19 nt, Artificial Sequence
  Description of Artificial Sequence: Synthetic oligonucleotide
  Antisense strand to SEQ ID NO: 2073290
aaucuugcuccaaagcuug

SEQ ID NO: 2073292 - RNA, 19 nt, Artificial Sequence
  Description of Artificial Sequence: Synthetic oligonucleotide
  Sense strand starting at position 2242 of SEQ ID NO: 1881808
uugauccaccgcuaagagu

SEQ ID NO: 2073293 - RNA, 19 nt, Artificial Sequence
  Description of Artificial Sequence: Synthetic oligonucleotide
  Antisense strand to SEQ ID NO: 2073292
acucuuagcgguggaucaa

SEQ ID NO: 2073294 - RNA, 19 nt, Artificial Sequence
  Description of Artificial Sequence: Synthetic oligonucleotide
  Sense strand starting at position 2307 of SEQ ID NO: 1881808
gccuaaugggaauaugguu

SEQ ID NO: 2073295 - RNA, 19 nt, Artificial Sequence
  Description of Artificial Sequence: Synthetic oligonucleotide
  Antisense strand to SEQ ID NO: 2073294
aaccauauucccauuaggc

SEQ ID NO: 2073296 - RNA, 19 nt, Artificial Sequence
  Description of Artificial Sequence: Synthetic oligonucleotide
  Sense strand starting at position 2313 of SEQ ID NO: 1881808
ugggaauaugguugucccu

SEQ ID NO: 2073297 - RNA, 19 nt, Artificial Sequence
  Description of Artificial Sequence: Synthetic oligonucleotide
  Antisense strand to SEQ ID NO: 2073296
agggacaaccauauuccca

SEQ ID NO: 2073298 - RNA, 19 nt, Artificial Sequence
  Description of Artificial Sequence: Synthetic oligonucleotide
  Sense strand starting at position 2315 of SEQ ID NO: 1881808
ggaauaugguugucccuug

SEQ ID NO: 2073299 - RNA, 19 nt, Artificial Sequence
  Description of Artificial Sequence: Synthetic oligonucleotide
  Antisense strand to SEQ ID NO: 2073298
caagggacaaccauauucc

SEQ ID NO: 2073300 - RNA, 19 nt, Artificial Sequence
  Description of Artificial Sequence: Synthetic oligonucleotide
  Sense strand starting at position 2469 of SEQ ID NO: 1881808
cuuuguguuacgucucuau

SEQ ID NO: 2073301 - RNA, 19 nt, Artificial Sequence
  Description of Artificial Sequence: Synthetic oligonucleotide
  Antisense strand to SEQ ID NO: 2073300
auagagacguaacacaaag

SEQ ID NO: 2073302 - RNA, 19 nt, Artificial Sequence
  Description of Artificial Sequence: Synthetic oligonucleotide
  Sense strand starting at position 2473 of SEQ ID NO: 1881808
guguuacgucucuauaauc

SEQ ID NO: 2073303 - RNA, 19 nt, Artificial Sequence
  Description of Artificial Sequence: Synthetic oligonucleotide
  Antisense strand to SEQ ID NO: 2073302
gauuauagagacguaacac

SEQ ID NO: 2073304 - RNA, 19 nt, Artificial Sequence
  Description of Artificial Sequence: Synthetic oligonucleotide
  Sense strand starting at position 2529 of SEQ ID NO: 1881808
augugauugcugcaaaguu

SEQ ID NO: 2073305 - RNA, 19 nt, Artificial Sequence
  Description of Artificial Sequence: Synthetic oligonucleotide
  Antisense strand to SEQ ID NO: 2073304
aacuuugcagcaaucacau

SEQ ID NO: 2073306 - RNA, 19 nt, Artificial Sequence
  Description of Artificial Sequence: Synthetic oligonucleotide
  Sense strand starting at position 2539 of SEQ ID NO: 1881808
ugcaaaguuuaugugauag

SEQ ID NO: 2073307 - RNA, 19 nt, Artificial Sequence
  Description of Artificial Sequence: Synthetic oligonucleotide
  Antisense strand to SEQ ID NO: 2073306
cuaucacauaaacuuugca

SEQ ID NO: 2073308 - RNA, 19 nt, Artificial Sequence
  Description of Artificial Sequence: Synthetic oligonucleotide
  Sense strand starting at position 2579 of SEQ ID NO: 1881808
guugguuguuacuuaacau

SEQ ID NO: 2073309 - RNA, 19 nt, Artificial Sequence
  Description of Artificial Sequence: Synthetic oligonucleotide
  Antisense strand to SEQ ID NO: 2073308
auguuaaguaacaaccaac

SEQ ID NO: 2073310 - RNA, 19 nt, Artificial Sequence
  Description of Artificial Sequence: Synthetic oligonucleotide
  Sense strand starting at position 2610 of SEQ ID NO: 1881808
uggacuuggcuuuguauca

SEQ ID NO: 2073311 - RNA, 19 nt, Artificial Sequence
  Description of Artificial Sequence: Synthetic oligonucleotide
  Antisense strand to SEQ ID NO: 2073310
ugauacaaagccaagucca

SEQ ID NO: 2073312 - RNA, 19 nt, Artificial Sequence
  Description of Artificial Sequence: Synthetic oligonucleotide
  Sense strand starting at position 2611 of SEQ ID NO: 1881808
ggacuuggcuuuguaucau

SEQ ID NO: 2073313 - RNA, 19 nt, Artificial Sequence
  Description of Artificial Sequence: Synthetic oligonucleotide
  Antisense strand to SEQ ID NO: 2073312
augauacaaagccaagucc

SEQ ID NO: 2073314 - RNA, 19 nt, Artificial Sequence
  Description of Artificial Sequence: Synthetic oligonucleotide
  Sense strand starting at position 2711 of SEQ ID NO: 1881808
ccauacauugcuggugaaa

SEQ ID NO: 2073315 - RNA, 19 nt, Artificial Sequence
  Description of Artificial Sequence: Synthetic oligonucleotide
  Antisense strand to SEQ ID NO: 2073314
uuucaccagcaauguaugg

SEQ ID NO: 2073316 - RNA, 19 nt, Artificial Sequence
  Description of Artificial Sequence: Synthetic oligonucleotide
  Sense strand starting at position 2782 of SEQ ID NO: 1881808
ugaagacuugcaugcaguu

SEQ ID NO: 2073317 - RNA, 19 nt, Artificial Sequence
  Description of Artificial Sequence: Synthetic oligonucleotide
  Antisense strand to SEQ ID NO: 2073316
aacugcaugcaagucuuca

SEQ ID NO: 2073318 - RNA, 19 nt, Artificial Sequence
  Description of Artificial Sequence: Synthetic oligonucleotide
  Sense strand starting at position 2872 of SEQ ID NO: 1881808
uaaacagugguguauccau

SEQ ID NO: 2073319 - RNA, 19 nt, Artificial Sequence
  Description of Artificial Sequence: Synthetic oligonucleotide
  Antisense strand to SEQ ID NO: 2073318
auggauacaccacuguuua

SEQ ID NO: 2073320 - RNA, 19 nt, Artificial Sequence
  Description of Artificial Sequence: Synthetic oligonucleotide
  Sense strand starting at position 3127 of SEQ ID NO: 1881808
gauuguggugguuacagaa

SEQ ID NO: 2073321 - RNA, 19 nt, Artificial Sequence
  Description of Artificial Sequence: Synthetic oligonucleotide
  Antisense strand to SEQ ID NO: 2073320
uucuguaaccaccacaauc

SEQ ID NO: 2073322 - RNA, 19 nt, Artificial Sequence
  Description of Artificial Sequence: Synthetic oligonucleotide
  Sense strand starting at position 3137 of SEQ ID NO: 1881808
guuacagaacuguguaguu

SEQ ID NO: 2073323 - RNA, 19 nt, Artificial Sequence
  Description of Artificial Sequence: Synthetic oligonucleotide
  Antisense strand to SEQ ID NO: 2073322
aacuacacaguucuguaac

SEQ ID NO: 2073324 - RNA, 19 nt, Artificial Sequence
  Description of Artificial Sequence: Synthetic oligonucleotide
  Sense strand starting at position 3142 of SEQ ID NO: 1881808
agaacuguguaguuaggaa

SEQ ID NO: 2073325 - RNA, 19 nt, Artificial Sequence
  Description of Artificial Sequence: Synthetic oligonucleotide
  Antisense strand to SEQ ID NO: 2073324
uuccuaacuacacaguucu

SEQ ID NO: 2073326 - RNA, 19 nt, Artificial Sequence
  Description of Artificial Sequence: Synthetic oligonucleotide
  Sense strand starting at position 3239 of SEQ ID NO: 1881808
uuaaaugugaaaugaaggu

SEQ ID NO: 2073327 - RNA, 19 nt, Artificial Sequence
  Description of Artificial Sequence: Synthetic oligonucleotide
  Antisense strand to SEQ ID NO: 2073326
accuucauuucacauuuaa

SEQ ID NO: 2073328 - RNA, 19 nt, Artificial Sequence
  Description of Artificial Sequence: Synthetic oligonucleotide
  Sense strand starting at position 3243 of SEQ ID NO: 1881808
augugaaaugaagguguua

SEQ ID NO: 2073329 - RNA, 19 nt, Artificial Sequence
  Description of Artificial Sequence: Synthetic oligonucleotide
  Antisense strand to SEQ ID NO: 2073328
uaacaccuucauuucacau

SEQ ID NO: 2073330 - RNA, 19 nt, Artificial Sequence
  Description of Artificial Sequence: Synthetic oligonucleotide
  Sense strand starting at position 3245 of SEQ ID NO: 1881808
gugaaaugaagguguuauu

SEQ ID NO: 2073331 - RNA, 19 nt, Artificial Sequence
  Description of Artificial Sequence: Synthetic oligonucleotide
  Antisense strand to SEQ ID NO: 2073330
aauaacaccuucauuucac

SEQ ID NO: 2073332 - RNA, 19 nt, Artificial Sequence
  Description of Artificial Sequence: Synthetic oligonucleotide
  Sense strand starting at position 3451 of SEQ ID NO: 1881808
aagugaacauuuggaugaa

SEQ ID NO: 2073333 - RNA, 19 nt, Artificial Sequence
  Description of Artificial Sequence: Synthetic oligonucleotide
  Antisense strand to SEQ ID NO: 2073332
uucauccaaauguucacuu

SEQ ID NO: 2073334 - RNA, 19 nt, Artificial Sequence
  Description of Artificial Sequence: Synthetic oligonucleotide
  Sense strand starting at position 3452 of SEQ ID NO: 1881808
agugaacauuuggaugaaa

SEQ ID NO: 2073335 - RNA, 19 nt, Artificial Sequence
  Description of Artificial Sequence: Synthetic oligonucleotide
  Antisense strand to SEQ ID NO: 2073334
uuucauccaaauguucacu

SEQ ID NO: 2073336 - RNA, 19 nt, Artificial Sequence
  Description of Artificial Sequence: Synthetic oligonucleotide
  Sense strand starting at position 3503 of SEQ ID NO: 1881808
uuagaauaauugucaguac

SEQ ID NO: 2073337 - RNA, 19 nt, Artificial Sequence
  Description of Artificial Sequence: Synthetic oligonucleotide
  Antisense strand to SEQ ID NO: 2073336
guacugacaauuauucuaa

SEQ ID NO: 2073338 - RNA, 19 nt, Artificial Sequence
  Description of Artificial Sequence: Synthetic oligonucleotide
  Sense strand starting at position 3744 of SEQ ID NO: 1881808
agacguaaguggucucauu

SEQ ID NO: 2073339 - RNA, 19 nt, Artificial Sequence
  Description of Artificial Sequence: Synthetic oligonucleotide
  Antisense strand to SEQ ID NO: 2073338
aaugagaccacuuacgucu

SEQ ID NO: 2073340 - RNA, 19 nt, Artificial Sequence
  Description of Artificial Sequence: Synthetic oligonucleotide
  Sense strand starting at position 3839 of SEQ ID NO: 1881808
guaguaucaagaugcauga

SEQ ID NO: 2073341 - RNA, 19 nt, Artificial Sequence
  Description of Artificial Sequence: Synthetic oligonucleotide
  Antisense strand to SEQ ID NO: 2073340
ucaugcaucuugauacuac

SEQ ID NO: 2073342 - RNA, 19 nt, Artificial Sequence
  Description of Artificial Sequence: Synthetic oligonucleotide
  Sense strand starting at position 26 of SEQ ID NO: 1881809
ucugcugaugcugaauuaa

SEQ ID NO: 2073343 - RNA, 19 nt, Artificial Sequence
  Description of Artificial Sequence: Synthetic oligonucleotide
  Antisense strand to SEQ ID NO: 2073342
uuaauucagcaucagcaga

SEQ ID NO: 2073344 - RNA, 19 nt, Artificial Sequence
  Description of Artificial Sequence: Synthetic oligonucleotide
  Sense strand starting at position 181 of SEQ ID NO: 1881809
gccuuugucauuguuaguc

SEQ ID NO: 2073345 - RNA, 19 nt, Artificial Sequence
  Description of Artificial Sequence: Synthetic oligonucleotide
  Antisense strand to SEQ ID NO: 2073344
gacuaacaaugacaaaggc

SEQ ID NO: 2073346 - RNA, 19 nt, Artificial Sequence
  Description of Artificial Sequence: Synthetic oligonucleotide
  Sense strand starting at position 202 of SEQ ID NO: 1881809
cuuagaugugaauaucagu

SEQ ID NO: 2073347 - RNA, 19 nt, Artificial Sequence
  Description of Artificial Sequence: Synthetic oligonucleotide
  Antisense strand to SEQ ID NO: 2073346
acugauauucacaucuaag

SEQ ID NO: 2073348 - RNA, 19 nt, Artificial Sequence
  Description of Artificial Sequence: Synthetic oligonucleotide
  Sense strand starting at position 234 of SEQ ID NO: 1881809
uaaagcuggccugaaaguu

SEQ ID NO: 2073349 - RNA, 19 nt, Artificial Sequence
  Description of Artificial Sequence: Synthetic oligonucleotide
  Antisense strand to SEQ ID NO: 2073348
aacuuucaggccagcuuua

SEQ ID NO: 2073350 - RNA, 19 nt, Artificial Sequence
  Description of Artificial Sequence: Synthetic oligonucleotide
  Sense strand starting at position 406 of SEQ ID NO: 1881809
ccacuuguuccugauccuu

SEQ ID NO: 2073351 - RNA, 19 nt, Artificial Sequence
  Description of Artificial Sequence: Synthetic oligonucleotide
  Antisense strand to SEQ ID NO: 2073350
aaggaucaggaacaagugg

SEQ ID NO: 2073352 - RNA, 19 nt, Artificial Sequence
  Description of Artificial Sequence: Synthetic oligonucleotide
  Sense strand starting at position 436 of SEQ ID NO: 1881809
guauuugauagccaguugu

SEQ ID NO: 2073353 - RNA, 19 nt, Artificial Sequence
  Description of Artificial Sequence: Synthetic oligonucleotide
  Antisense strand to SEQ ID NO: 2073352
acaacuggcuaucaaauac

SEQ ID NO: 2073354 - RNA, 19 nt, Artificial Sequence
  Description of Artificial Sequence: Synthetic oligonucleotide
  Sense strand starting at position 450 of SEQ ID NO: 1881809
guuguucuacuacauacua

SEQ ID NO: 2073355 - RNA, 19 nt, Artificial Sequence
  Description of Artificial Sequence: Synthetic oligonucleotide
  Antisense strand to SEQ ID NO: 2073354
uaguauguaguagaacaac

SEQ ID NO: 2073356 - RNA, 19 nt, Artificial Sequence
  Description of Artificial Sequence: Synthetic oligonucleotide
  Sense strand starting at position 515 of SEQ ID NO: 1881809
gcuccuucgaggccguaaa

SEQ ID NO: 2073357 - RNA, 19 nt, Artificial Sequence
  Description of Artificial Sequence: Synthetic oligonucleotide
  Antisense strand to SEQ ID NO: 2073356
uuuacggccucgaaggagc

SEQ ID NO: 2073358 - RNA, 19 nt, Artificial Sequence
  Description of Artificial Sequence: Synthetic oligonucleotide
  Sense strand starting at position 582 of SEQ ID NO: 1881809
auguauccauugguguaaa

SEQ ID NO: 2073359 - RNA, 19 nt, Artificial Sequence
  Description of Artificial Sequence: Synthetic oligonucleotide
  Antisense strand to SEQ ID NO: 2073358
uuuacaccaauggauacau

SEQ ID NO: 2073360 - RNA, 19 nt, Artificial Sequence
  Description of Artificial Sequence: Synthetic oligonucleotide
  Sense strand starting at position 633 of SEQ ID NO: 1881809
guccaacaccaguaguauu

SEQ ID NO: 2073361 - RNA, 19 nt, Artificial Sequence
  Description of Artificial Sequence: Synthetic oligonucleotide
  Antisense strand to SEQ ID NO: 2073360
aauacuacugguguuggac

SEQ ID NO: 2073362 - RNA, 19 nt, Artificial Sequence
  Description of Artificial Sequence: Synthetic oligonucleotide
  Sense strand starting at position 697 of SEQ ID NO: 1881809
cuaggucuucuuuauugau

SEQ ID NO: 2073363 - RNA, 19 nt, Artificial Sequence
  Description of Artificial Sequence: Synthetic oligonucleotide
  Antisense strand to SEQ ID NO: 2073362
aucaauaaagaagaccuag

SEQ ID NO: 2073364 - RNA, 19 nt, Artificial Sequence
  Description of Artificial Sequence: Synthetic oligonucleotide
  Sense strand starting at position 789 of SEQ ID NO: 1881809
agccauucugaagguacua

SEQ ID NO: 2073365 - RNA, 19 nt, Artificial Sequence
  Description of Artificial Sequence: Synthetic oligonucleotide
  Antisense strand to SEQ ID NO: 2073364
uaguaccuucagaauggcu

SEQ ID NO: 2073366 - RNA, 19 nt, Artificial Sequence
  Description of Artificial Sequence: Synthetic oligonucleotide
  Sense strand starting at position 822 of SEQ ID NO: 1881809
auaauucuugcagaagcua

SEQ ID NO: 2073367 - RNA, 19 nt, Artificial Sequence
  Description of Artificial Sequence: Synthetic oligonucleotide
  Antisense strand to SEQ ID NO: 2073366
uagcuucugcaagaauuau

SEQ ID NO: 2073368 - RNA, 19 nt, Artificial Sequence
  Description of Artificial Sequence: Synthetic oligonucleotide
  Sense strand starting at position 834 of SEQ ID NO: 1881809
gaagcuaggucacugauaa

SEQ ID NO: 2073369 - RNA, 19 nt, Artificial Sequence
  Description of Artificial Sequence: Synthetic oligonucleotide
  Antisense strand to SEQ ID NO: 2073368
uuaucagugaccuagcuuc

SEQ ID NO: 2073370 - RNA, 19 nt, Artificial Sequence
  Description of Artificial Sequence: Synthetic oligonucleotide
  Sense strand starting at position 835 of SEQ ID NO: 1881809
aagcuaggucacugauaau

SEQ ID NO: 2073371 - RNA, 19 nt, Artificial Sequence
  Description of Artificial Sequence: Synthetic oligonucleotide
  Antisense strand to SEQ ID NO: 2073370
auuaucagugaccuagcuu

SEQ ID NO: 2073372 - RNA, 19 nt, Artificial Sequence
  Description of Artificial Sequence: Synthetic oligonucleotide
  Sense strand starting at position 955 of SEQ ID NO: 1881809
agacaucuguuucugucaa

SEQ ID NO: 2073373 - RNA, 19 nt, Artificial Sequence
  Description of Artificial Sequence: Synthetic oligonucleotide
  Antisense strand to SEQ ID NO: 2073372
uugacagaaacagaugucu

SEQ ID NO: 2073374 - RNA, 19 nt, Artificial Sequence
  Description of Artificial Sequence: Synthetic oligonucleotide
  Sense strand starting at position 1029 of SEQ ID NO: 1881809
uuuagagugguguauacau

SEQ ID NO: 2073375 - RNA, 19 nt, Artificial Sequence
  Description of Artificial Sequence: Synthetic oligonucleotide
  Antisense strand to SEQ ID NO: 2073374
auguauacaccacucuaaa

SEQ ID NO: 2073376 - RNA, 19 nt, Artificial Sequence
  Description of Artificial Sequence: Synthetic oligonucleotide
  Sense strand starting at position 1129 of SEQ ID NO: 1881809
uaacauucuggugagucau

SEQ ID NO: 2073377 - RNA, 19 nt, Artificial Sequence
  Description of Artificial Sequence: Synthetic oligonucleotide
  Antisense strand to SEQ ID NO: 2073376
augacucaccagaauguua

SEQ ID NO: 2073378 - RNA, 19 nt, Artificial Sequence
  Description of Artificial Sequence: Synthetic oligonucleotide
  Sense strand starting at position 1131 of SEQ ID NO: 1881809
acauucuggugagucauca

SEQ ID NO: 2073379 - RNA, 19 nt, Artificial Sequence
  Description of Artificial Sequence: Synthetic oligonucleotide
  Antisense strand to SEQ ID NO: 2073378
ugaugacucaccagaaugu

SEQ ID NO: 2073380 - RNA, 19 nt, Artificial Sequence
  Description of Artificial Sequence: Synthetic oligonucleotide
  Sense strand starting at position 1135 of SEQ ID NO: 1881809
ucuggugagucaucaaauu

SEQ ID NO: 2073381 - RNA, 19 nt, Artificial Sequence
  Description of Artificial Sequence: Synthetic oligonucleotide
  Antisense strand to SEQ ID NO: 2073380
aauuugaugacucaccaga

SEQ ID NO: 2073382 - RNA, 19 nt, Artificial Sequence
  Description of Artificial Sequence: Synthetic oligonucleotide
  Sense strand starting at position 1143 of SEQ ID NO: 1881809
gucaucaaauuguuuagaa

SEQ ID NO: 2073383 - RNA, 19 nt, Artificial Sequence
  Description of Artificial Sequence: Synthetic oligonucleotide
  Antisense strand to SEQ ID NO: 2073382
uucuaaacaauuugaugac

SEQ ID NO: 2073384 - RNA, 19 nt, Artificial Sequence
  Description of Artificial Sequence: Synthetic oligonucleotide
  Sense strand starting at position 1144 of SEQ ID NO: 1881809
ucaucaaauuguuuagaag

SEQ ID NO: 2073385 - RNA, 19 nt, Artificial Sequence
  Description of Artificial Sequence: Synthetic oligonucleotide
  Antisense strand to SEQ ID NO: 2073384
cuucuaaacaauuugauga

SEQ ID NO: 2073386 - RNA, 19 nt, Artificial Sequence
  Description of Artificial Sequence: Synthetic oligonucleotide
  Sense strand starting at position 1205 of SEQ ID NO: 1881809
cucuacugauguguaauaa

SEQ ID NO: 2073387 - RNA, 19 nt, Artificial Sequence
  Description of Artificial Sequence: Synthetic oligonucleotide
  Antisense strand to SEQ ID NO: 2073386
uuauuacacaucaguagag

SEQ ID NO: 2073388 - RNA, 19 nt, Artificial Sequence
  Description of Artificial Sequence: Synthetic oligonucleotide
  Sense strand starting at position 1206 of SEQ ID NO: 1881809
ucuacugauguguaauaac

SEQ ID NO: 2073389 - RNA, 19 nt, Artificial Sequence
  Description of Artificial Sequence: Synthetic oligonucleotide
  Antisense strand to SEQ ID NO: 2073388
guuauuacacaucaguaga

SEQ ID NO: 2073390 - RNA, 19 nt, Artificial Sequence
  Description of Artificial Sequence: Synthetic oligonucleotide
  Sense strand starting at position 1215 of SEQ ID NO: 1881809
guguaauaaccgcauacag

SEQ ID NO: 2073391 - RNA, 19 nt, Artificial Sequence
  Description of Artificial Sequence: Synthetic oligonucleotide
  Antisense strand to SEQ ID NO: 2073390
cuguaugcgguuauuacac

SEQ ID NO: 2073392 - RNA, 19 nt, Artificial Sequence
  Description of Artificial Sequence: Synthetic oligonucleotide
  Sense strand starting at position 1217 of SEQ ID NO: 1881809
guaauaaccgcauacaguu

SEQ ID NO: 2073393 - RNA, 19 nt, Artificial Sequence
  Description of Artificial Sequence: Synthetic oligonucleotide
  Antisense strand to SEQ ID NO: 2073392
aacuguaugcgguuauuac

SEQ ID NO: 2073394 - RNA, 19 nt, Artificial Sequence
  Description of Artificial Sequence: Synthetic oligonucleotide
  Sense strand starting at position 1396 of SEQ ID NO: 1881809
caauguucuggucaggaau

SEQ ID NO: 2073395 - RNA, 19 nt, Artificial Sequence
  Description of Artificial Sequence: Synthetic oligonucleotide
  Antisense strand to SEQ ID NO: 2073394
auuccugaccagaacauug

SEQ ID NO: 2073396 - RNA, 19 nt, Artificial Sequence
  Description of Artificial Sequence: Synthetic oligonucleotide
  Sense strand starting at position 2882 of SEQ ID NO: 1881809
gaaauuccgucuccagaaa

SEQ ID NO: 2073397 - RNA, 19 nt, Artificial Sequence
  Description of Artificial Sequence: Synthetic oligonucleotide
  Antisense strand to SEQ ID NO: 2073396
uuucuggagacggaauuuc

SEQ ID NO: 2073398 - RNA, 19 nt, Artificial Sequence
  Description of Artificial Sequence: Synthetic oligonucleotide
  Sense strand starting at position 3053 of SEQ ID NO: 1881809
ugaccauggcugggugaaa

SEQ ID NO: 2073399 - RNA, 19 nt, Artificial Sequence
  Description of Artificial Sequence: Synthetic oligonucleotide
  Antisense strand to SEQ ID NO: 2073398
uuucacccagccaugguca

SEQ ID NO: 2073400 - RNA, 19 nt, Artificial Sequence
  Description of Artificial Sequence: Synthetic oligonucleotide
  Sense strand starting at position 3054 of SEQ ID NO: 1881809
gaccauggcugggugaaau

SEQ ID NO: 2073401 - RNA, 19 nt, Artificial Sequence
  Description of Artificial Sequence: Synthetic oligonucleotide
  Antisense strand to SEQ ID NO: 2073400
auuucacccagccaugguc

SEQ ID NO: 2073402 - RNA, 19 nt, Artificial Sequence
  Description of Artificial Sequence: Synthetic oligonucleotide
  Sense strand starting at position 3170 of SEQ ID NO: 1881809
gcaggauuaggaugucgga

SEQ ID NO: 2073403 - RNA, 19 nt, Artificial Sequence
  Description of Artificial Sequence: Synthetic oligonucleotide
  Antisense strand to SEQ ID NO: 2073402
uccgacauccuaauccugc

SEQ ID NO: 2073404 - RNA, 19 nt, Artificial Sequence
  Description of Artificial Sequence: Synthetic oligonucleotide
  Sense strand starting at position 3231 of SEQ ID NO: 1881809
gggcaugguccuggaaauu

SEQ ID NO: 2073405 - RNA, 19 nt, Artificial Sequence
  Description of Artificial Sequence: Synthetic oligonucleotide
  Antisense strand to SEQ ID NO: 2073404
aauuuccaggaccaugccc

SEQ ID NO: 2073406 - RNA, 19 nt, Artificial Sequence
  Description of Artificial Sequence: Synthetic oligonucleotide
  Sense strand starting at position 3426 of SEQ ID NO: 1881809
ggugucuuccuguaagaaa

SEQ ID NO: 2073407 - RNA, 19 nt, Artificial Sequence
  Description of Artificial Sequence: Synthetic oligonucleotide
  Antisense strand to SEQ ID NO: 2073406
uuucuuacaggaagacacc

SEQ ID NO: 2073408 - RNA, 19 nt, Artificial Sequence
  Description of Artificial Sequence: Synthetic oligonucleotide
  Sense strand starting at position 3568 of SEQ ID NO: 1881809
gggcaucagggccagauau

SEQ ID NO: 2073409 - RNA, 19 nt, Artificial Sequence
  Description of Artificial Sequence: Synthetic oligonucleotide
  Antisense strand to SEQ ID NO: 2073408
auaucuggcccugaugccc

SEQ ID NO: 2073410 - RNA, 19 nt, Artificial Sequence
  Description of Artificial Sequence: Synthetic oligonucleotide
  Sense strand starting at position 3570 of SEQ ID NO: 1881809
gcaucagggccagauaugu

SEQ ID NO: 2073411 - RNA, 19 nt, Artificial Sequence
  Description of Artificial Sequence: Synthetic oligonucleotide
  Antisense strand to SEQ ID NO: 2073410
acauaucuggcccugaugc

SEQ ID NO: 2073412 - RNA, 19 nt, Artificial Sequence
  Description of Artificial Sequence: Synthetic oligonucleotide
  Sense strand starting at position 3696 of SEQ ID NO: 1881809
uccucaaaccuaugugagu

SEQ ID NO: 2073413 - RNA, 19 nt, Artificial Sequence
  Description of Artificial Sequence: Synthetic oligonucleotide
  Antisense strand to SEQ ID NO: 2073412
acucacauagguuugagga

SEQ ID NO: 2073414 - RNA, 19 nt, Artificial Sequence
  Description of Artificial Sequence: Synthetic oligonucleotide
  Sense strand starting at position 3756 of SEQ ID NO: 1881809
gggaaagugacuuguucua

SEQ ID NO: 2073415 - RNA, 19 nt, Artificial Sequence
  Description of Artificial Sequence: Synthetic oligonucleotide
  Antisense strand to SEQ ID NO: 2073414
uagaacaagucacuuuccc

SEQ ID NO: 2073416 - RNA, 19 nt, Artificial Sequence
  Description of Artificial Sequence: Synthetic oligonucleotide
  Sense strand starting at position 3758 of SEQ ID NO: 1881809
gaaagugacuuguucuaaa

SEQ ID NO: 2073417 - RNA, 19 nt, Artificial Sequence
  Description of Artificial Sequence: Synthetic oligonucleotide
  Antisense strand to SEQ ID NO: 2073416
uuuagaacaagucacuuuc

SEQ ID NO: 2073418 - RNA, 19 nt, Artificial Sequence
  Description of Artificial Sequence: Synthetic oligonucleotide
  Sense strand starting at position 3856 of SEQ ID NO: 1881809
aggugaauggucuauguug

SEQ ID NO: 2073419 - RNA, 19 nt, Artificial Sequence
  Description of Artificial Sequence: Synthetic oligonucleotide
  Antisense strand to SEQ ID NO: 2073418
caacauagaccauucaccu

SEQ ID NO: 2073420 - RNA, 19 nt, Artificial Sequence
  Description of Artificial Sequence: Synthetic oligonucleotide
  Sense strand starting at position 3862 of SEQ ID NO: 1881809
auggucuauguugaccaaa

SEQ ID NO: 2073421 - RNA, 19 nt, Artificial Sequence
  Description of Artificial Sequence: Synthetic oligonucleotide
  Antisense strand to SEQ ID NO: 2073420
uuuggucaacauagaccau

SEQ ID NO: 2073422 - RNA, 19 nt, Artificial Sequence
  Description of Artificial Sequence: Synthetic oligonucleotide
  Sense strand starting at position 109 of SEQ ID NO: 1881810
auuuaaugguaugaagacu

SEQ ID NO: 2073423 - RNA, 19 nt, Artificial Sequence
  Description of Artificial Sequence: Synthetic oligonucleotide
  Antisense strand to SEQ ID NO: 2073422
agucuucauaccauuaaau

SEQ ID NO: 2073424 - RNA, 19 nt, Artificial Sequence
  Description of Artificial Sequence: Synthetic oligonucleotide
  Sense strand starting at position 118 of SEQ ID NO: 1881810
uaugaagacucaguguuac

SEQ ID NO: 2073425 - RNA, 19 nt, Artificial Sequence
  Description of Artificial Sequence: Synthetic oligonucleotide
  Antisense strand to SEQ ID NO: 2073424
guaacacugagucuucaua

SEQ ID NO: 2073426 - RNA, 19 nt, Artificial Sequence
  Description of Artificial Sequence: Synthetic oligonucleotide
  Sense strand starting at position 163 of SEQ ID NO: 1881810
cucuuauaguaguccaaga

SEQ ID NO: 2073427 - RNA, 19 nt, Artificial Sequence
  Description of Artificial Sequence: Synthetic oligonucleotide
  Antisense strand to SEQ ID NO: 2073426
ucuuggacuacuauaagag

SEQ ID NO: 2073428 - RNA, 19 nt, Artificial Sequence
  Description of Artificial Sequence: Synthetic oligonucleotide
  Sense strand starting at position 165 of SEQ ID NO: 1881810
cuuauaguaguccaagauu

SEQ ID NO: 2073429 - RNA, 19 nt, Artificial Sequence
  Description of Artificial Sequence: Synthetic oligonucleotide
  Antisense strand to SEQ ID NO: 2073428
aaucuuggacuacuauaag

SEQ ID NO: 2073430 - RNA, 19 nt, Artificial Sequence
  Description of Artificial Sequence: Synthetic oligonucleotide
  Sense strand starting at position 168 of SEQ ID NO: 1881810
auaguaguccaagauuacu

SEQ ID NO: 2073431 - RNA, 19 nt, Artificial Sequence
  Description of Artificial Sequence: Synthetic oligonucleotide
  Antisense strand to SEQ ID NO: 2073430
aguaaucuuggacuacuau

SEQ ID NO: 2073432 - RNA, 19 nt, Artificial Sequence
  Description of Artificial Sequence: Synthetic oligonucleotide
  Sense strand starting at position 226 of SEQ ID NO: 1881810
aguauaguauagguccuaa

SEQ ID NO: 2073433 - RNA, 19 nt, Artificial Sequence
  Description of Artificial Sequence: Synthetic oligonucleotide
  Antisense strand to SEQ ID NO: 2073432
uuaggaccuauacuauacu

SEQ ID NO: 2073434 - RNA, 19 nt, Artificial Sequence
  Description of Artificial Sequence: Synthetic oligonucleotide
  Sense strand starting at position 293 of SEQ ID NO: 1881810
gggcaaggagcuuaaacuu

SEQ ID NO: 2073435 - RNA, 19 nt, Artificial Sequence
  Description of Artificial Sequence: Synthetic oligonucleotide
  Antisense strand to SEQ ID NO: 2073434
aaguuuaagcuccuugccc

SEQ ID NO: 2073436 - RNA, 19 nt, Artificial Sequence
  Description of Artificial Sequence: Synthetic oligonucleotide
  Sense strand starting at position 481 of SEQ ID NO: 1881810
ggagauaggauucagucgu

SEQ ID NO: 2073437 - RNA, 19 nt, Artificial Sequence
  Description of Artificial Sequence: Synthetic oligonucleotide
  Antisense strand to SEQ ID NO: 2073436
acgacugaauccuaucucc

SEQ ID NO: 2073438 - RNA, 19 nt, Artificial Sequence
  Description of Artificial Sequence: Synthetic oligonucleotide
  Sense strand starting at position 788 of SEQ ID NO: 1881810
caaauuauauaggcggaau

SEQ ID NO: 2073439 - RNA, 19 nt, Artificial Sequence
  Description of Artificial Sequence: Synthetic oligonucleotide
  Antisense strand to SEQ ID NO: 2073438
auuccgccuauauaauuug

SEQ ID NO: 2073440 - RNA, 19 nt, Artificial Sequence
  Description of Artificial Sequence: Synthetic oligonucleotide
  Sense strand starting at position 791 of SEQ ID NO: 1881810
auuauauaggcggaauagu

SEQ ID NO: 2073441 - RNA, 19 nt, Artificial Sequence
  Description of Artificial Sequence: Synthetic oligonucleotide
  Antisense strand to SEQ ID NO: 2073440
acuauuccgccuauauaau

SEQ ID NO: 2073442 - RNA, 19 nt, Artificial Sequence
  Description of Artificial Sequence: Synthetic oligonucleotide
  Sense strand starting at position 802 of SEQ ID NO: 1881810
ggaauaguucgccacuuac

SEQ ID NO: 2073443 - RNA, 19 nt, Artificial Sequence
  Description of Artificial Sequence: Synthetic oligonucleotide
  Antisense strand to SEQ ID NO: 2073442
guaaguggcgaacuauucc

SEQ ID NO: 2073444 - RNA, 19 nt, Artificial Sequence
  Description of Artificial Sequence: Synthetic oligonucleotide
  Sense strand starting at position 811 of SEQ ID NO: 1881810
cgccacuuacucuaugaaa

SEQ ID NO: 2073445 - RNA, 19 nt, Artificial Sequence
  Description of Artificial Sequence: Synthetic oligonucleotide
  Antisense strand to SEQ ID NO: 2073444
uuucauagaguaaguggcg

SEQ ID NO: 2073446 - RNA, 19 nt, Artificial Sequence
  Description of Artificial Sequence: Synthetic oligonucleotide
  Sense strand starting at position 859 of SEQ ID NO: 1881810
uuguauccugccuaagaua

SEQ ID NO: 2073447 - RNA, 19 nt, Artificial Sequence
  Description of Artificial Sequence: Synthetic oligonucleotide
  Antisense strand to SEQ ID NO: 2073446
uaucuuaggcaggauacaa

SEQ ID NO: 2073448 - RNA, 19 nt, Artificial Sequence
  Description of Artificial Sequence: Synthetic oligonucleotide
  Sense strand starting at position 1016 of SEQ ID NO: 1881810
cuaaucaugcuguaugagu

SEQ ID NO: 2073449 - RNA, 19 nt, Artificial Sequence
  Description of Artificial Sequence: Synthetic oligonucleotide
  Antisense strand to SEQ ID NO: 2073448
acucauacagcaugauuag

SEQ ID NO: 2073450 - RNA, 19 nt, Artificial Sequence
  Description of Artificial Sequence: Synthetic oligonucleotide
  Sense strand starting at position 1343 of SEQ ID NO: 1881810
auucuauagcuccauguua

SEQ ID NO: 2073451 - RNA, 19 nt, Artificial Sequence
  Description of Artificial Sequence: Synthetic oligonucleotide
  Antisense strand to SEQ ID NO: 2073450
uaacauggagcuauagaau

SEQ ID NO: 2073452 - RNA, 19 nt, Artificial Sequence
  Description of Artificial Sequence: Synthetic oligonucleotide
  Sense strand starting at position 2325 of SEQ ID NO: 1881810
gcggucagugcuuucuaau

SEQ ID NO: 2073453 - RNA, 19 nt, Artificial Sequence
  Description of Artificial Sequence: Synthetic oligonucleotide
  Antisense strand to SEQ ID NO: 2073452
auuagaaagcacugaccgc

SEQ ID NO: 2073454 - RNA, 19 nt, Artificial Sequence
  Description of Artificial Sequence: Synthetic oligonucleotide
  Sense strand starting at position 2422 of SEQ ID NO: 1881810
gguacuccacuguaagcaa

SEQ ID NO: 2073455 - RNA, 19 nt, Artificial Sequence
  Description of Artificial Sequence: Synthetic oligonucleotide
  Antisense strand to SEQ ID NO: 2073454
uugcuuacaguggaguacc

SEQ ID NO: 2073456 - RNA, 19 nt, Artificial Sequence
  Description of Artificial Sequence: Synthetic oligonucleotide
  Sense strand starting at position 2489 of SEQ ID NO: 1881810
ucguuccuaagagaauguu

SEQ ID NO: 2073457 - RNA, 19 nt, Artificial Sequence
  Description of Artificial Sequence: Synthetic oligonucleotide
  Antisense strand to SEQ ID NO: 2073456
aacauucucuuaggaacga

SEQ ID NO: 2073458 - RNA, 19 nt, Artificial Sequence
  Description of Artificial Sequence: Synthetic oligonucleotide
  Sense strand starting at position 2545 of SEQ ID NO: 1881810
ccauaagaauuugagcaua

SEQ ID NO: 2073459 - RNA, 19 nt, Artificial Sequence
  Description of Artificial Sequence: Synthetic oligonucleotide
  Antisense strand to SEQ ID NO: 2073458
uaugcucaaauucuuaugg

SEQ ID NO: 2073460 - RNA, 19 nt, Artificial Sequence
  Description of Artificial Sequence: Synthetic oligonucleotide
  Sense strand starting at position 2645 of SEQ ID NO: 1881810
uugucugucuccucauuua

SEQ ID NO: 2073461 - RNA, 19 nt, Artificial Sequence
  Description of Artificial Sequence: Synthetic oligonucleotide
  Antisense strand to SEQ ID NO: 2073460
uaaaugaggagacagacaa

SEQ ID NO: 2073462 - RNA, 19 nt, Artificial Sequence
  Description of Artificial Sequence: Synthetic oligonucleotide
  Sense strand starting at position 2691 of SEQ ID NO: 1881810
ggcuguuaggaguagauga

SEQ ID NO: 2073463 - RNA, 19 nt, Artificial Sequence
  Description of Artificial Sequence: Synthetic oligonucleotide
  Antisense strand to SEQ ID NO: 2073462
ucaucuacuccuaacagcc

SEQ ID NO: 2073464 - RNA, 19 nt, Artificial Sequence
  Description of Artificial Sequence: Synthetic oligonucleotide
  Sense strand starting at position 2705 of SEQ ID NO: 1881810
gaugaaugagacuguguga

SEQ ID NO: 2073465 - RNA, 19 nt, Artificial Sequence
  Description of Artificial Sequence: Synthetic oligonucleotide
  Antisense strand to SEQ ID NO: 2073464
ucacacagucucauucauc

SEQ ID NO: 2073466 - RNA, 19 nt, Artificial Sequence
  Description of Artificial Sequence: Synthetic oligonucleotide
  Sense strand starting at position 2708 of SEQ ID NO: 1881810
gaaugagacugugugaagu

SEQ ID NO: 2073467 - RNA, 19 nt, Artificial Sequence
  Description of Artificial Sequence: Synthetic oligonucleotide
  Antisense strand to SEQ ID NO: 2073466
acuucacacagucucauuc

SEQ ID NO: 2073468 - RNA, 19 nt, Artificial Sequence
  Description of Artificial Sequence: Synthetic oligonucleotide
  Sense strand starting at position 2724 of SEQ ID NO: 1881810
agugcaacucuuuacagua

SEQ ID NO: 2073469 - RNA, 19 nt, Artificial Sequence
  Description of Artificial Sequence: Synthetic oligonucleotide
  Antisense strand to SEQ ID NO: 2073468
uacuguaaagaguugcacu

SEQ ID NO: 2073470 - RNA, 19 nt, Artificial Sequence
  Description of Artificial Sequence: Synthetic oligonucleotide
  Sense strand starting at position 2753 of SEQ ID NO: 1881810
gugguaaacccucagcaaa

SEQ ID NO: 2073471 - RNA, 19 nt, Artificial Sequence
  Description of Artificial Sequence: Synthetic oligonucleotide
  Antisense strand to SEQ ID NO: 2073470
uuugcugaggguuuaccac

SEQ ID NO: 2073472 - RNA, 19 nt, Artificial Sequence
  Description of Artificial Sequence: Synthetic oligonucleotide
  Sense strand starting at position 2755 of SEQ ID NO: 1881810
gguaaacccucagcaaaug

SEQ ID NO: 2073473 - RNA, 19 nt, Artificial Sequence
  Description of Artificial Sequence: Synthetic oligonucleotide
  Antisense strand to SEQ ID NO: 2073472
cauuugcugaggguuuacc

SEQ ID NO: 2073474 - RNA, 19 nt, Artificial Sequence
  Description of Artificial Sequence: Synthetic oligonucleotide
  Sense strand starting at position 3071 of SEQ ID NO: 1881810
ggcacucauuuagcguuau

SEQ ID NO: 2073475 - RNA, 19 nt, Artificial Sequence
  Description of Artificial Sequence: Synthetic oligonucleotide
  Antisense strand to SEQ ID NO: 2073474
auaacgcuaaaugagugcc

SEQ ID NO: 2073476 - RNA, 19 nt, Artificial Sequence
  Description of Artificial Sequence: Synthetic oligonucleotide
  Sense strand starting at position 3102 of SEQ ID NO: 1881810
cugagcaccuccucugaaa

SEQ ID NO: 2073477 - RNA, 19 nt, Artificial Sequence
  Description of Artificial Sequence: Synthetic oligonucleotide
  Antisense strand to SEQ ID NO: 2073476
uuucagaggaggugcucag

SEQ ID NO: 2073478 - RNA, 19 nt, Artificial Sequence
  Description of Artificial Sequence: Synthetic oligonucleotide
  Sense strand starting at position 3113 of SEQ ID NO: 1881810
cucugaaagcugcaauacu

SEQ ID NO: 2073479 - RNA, 19 nt, Artificial Sequence
  Description of Artificial Sequence: Synthetic oligonucleotide
  Antisense strand to SEQ ID NO: 2073478
aguauugcagcuuucagag

SEQ ID NO: 2073480 - RNA, 19 nt, Artificial Sequence
  Description of Artificial Sequence: Synthetic oligonucleotide
  Sense strand starting at position 3186 of SEQ ID NO: 1881810
acagaaaccgugugggaau

SEQ ID NO: 2073481 - RNA, 19 nt, Artificial Sequence
  Description of Artificial Sequence: Synthetic oligonucleotide
  Antisense strand to SEQ ID NO: 2073480
auucccacacgguuucugu

SEQ ID NO: 2073482 - RNA, 19 nt, Artificial Sequence
  Description of Artificial Sequence: Synthetic oligonucleotide
  Sense strand starting at position 3251 of SEQ ID NO: 1881810
cuaggugauccaggagauu

SEQ ID NO: 2073483 - RNA, 19 nt, Artificial Sequence
  Description of Artificial Sequence: Synthetic oligonucleotide
  Antisense strand to SEQ ID NO: 2073482
aaucuccuggaucaccuag

SEQ ID NO: 2073484 - RNA, 19 nt, Artificial Sequence
  Description of Artificial Sequence: Synthetic oligonucleotide
  Sense strand starting at position 3322 of SEQ ID NO: 1881810
cuuuaaauccacgagcaua

SEQ ID NO: 2073485 - RNA, 19 nt, Artificial Sequence
  Description of Artificial Sequence: Synthetic oligonucleotide
  Antisense strand to SEQ ID NO: 2073484
uaugcucguggauuuaaag

SEQ ID NO: 2073486 - RNA, 19 nt, Artificial Sequence
  Description of Artificial Sequence: Synthetic oligonucleotide
  Sense strand starting at position 3335 of SEQ ID NO: 1881810
agcauaucaacggaguaga

SEQ ID NO: 2073487 - RNA, 19 nt, Artificial Sequence
  Description of Artificial Sequence: Synthetic oligonucleotide
  Antisense strand to SEQ ID NO: 2073486
ucuacuccguugauaugcu

SEQ ID NO: 2073488 - RNA, 19 nt, Artificial Sequence
  Description of Artificial Sequence: Synthetic oligonucleotide
  Sense strand starting at position 3547 of SEQ ID NO: 1881810
gcguuuguaaaggcuuuau

SEQ ID NO: 2073489 - RNA, 19 nt, Artificial Sequence
  Description of Artificial Sequence: Synthetic oligonucleotide
  Antisense strand to SEQ ID NO: 2073488
auaaagccuuuacaaacgc

SEQ ID NO: 2073490 - RNA, 19 nt, Artificial Sequence
  Description of Artificial Sequence: Synthetic oligonucleotide
  Sense strand starting at position 3570 of SEQ ID NO: 1881810
ggcuaaauacccuggcaaa

SEQ ID NO: 2073491 - RNA, 19 nt, Artificial Sequence
  Description of Artificial Sequence: Synthetic oligonucleotide
  Antisense strand to SEQ ID NO: 2073490
uuugccaggguauuuagcc

SEQ ID NO: 2073492 - RNA, 19 nt, Artificial Sequence
  Description of Artificial Sequence: Synthetic oligonucleotide
  Sense strand starting at position 3694 of SEQ ID NO: 1881810
uguguaugacauuacccua

SEQ ID NO: 2073493 - RNA, 19 nt, Artificial Sequence
  Description of Artificial Sequence: Synthetic oligonucleotide
  Antisense strand to SEQ ID NO: 2073492
uaggguaaugucauacaca

SEQ ID NO: 2073494 - RNA, 19 nt, Artificial Sequence
  Description of Artificial Sequence: Synthetic oligonucleotide
  Sense strand starting at position 3712 of SEQ ID NO: 1881810
aggcacugugaugaguaaa

SEQ ID NO: 2073495 - RNA, 19 nt, Artificial Sequence
  Description of Artificial Sequence: Synthetic oligonucleotide
  Antisense strand to SEQ ID NO: 2073494
uuuacucaucacagugccu

SEQ ID NO: 2073496 - RNA, 19 nt, Artificial Sequence
  Description of Artificial Sequence: Synthetic oligonucleotide
  Sense strand starting at position 3785 of SEQ ID NO: 1881810
auuacuaaguguuuaggaa

SEQ ID NO: 2073497 - RNA, 19 nt, Artificial Sequence
  Description of Artificial Sequence: Synthetic oligonucleotide
  Antisense strand to SEQ ID NO: 2073496
uuccuaaacacuuaguaau

SEQ ID NO: 2073498 - RNA, 19 nt, Artificial Sequence
  Description of Artificial Sequence: Synthetic oligonucleotide
  Sense strand starting at position 3886 of SEQ ID NO: 1881810
gugaaaguuaaucaaccga

SEQ ID NO: 2073499 - RNA, 19 nt, Artificial Sequence
  Description of Artificial Sequence: Synthetic oligonucleotide
  Antisense strand to SEQ ID NO: 2073498
ucgguugauuaacuuucac

SEQ ID NO: 2073500 - RNA, 19 nt, Artificial Sequence
  Description of Artificial Sequence: Synthetic oligonucleotide
  Sense strand starting at position 3936 of SEQ ID NO: 1881810
acucaagugcuagaaaucu

SEQ ID NO: 2073501 - RNA, 19 nt, Artificial Sequence
  Description of Artificial Sequence: Synthetic oligonucleotide
  Antisense strand to SEQ ID NO: 2073500
agauuucuagcacuugagu

SEQ ID NO: 2073502 - RNA, 19 nt, Artificial Sequence
  Description of Artificial Sequence: Synthetic oligonucleotide
  Sense strand starting at position 82 of SEQ ID NO: 1881811
ccuccucugcaaugaauga

SEQ ID NO: 2073503 - RNA, 19 nt, Artificial Sequence
  Description of Artificial Sequence: Synthetic oligonucleotide
  Antisense strand to SEQ ID NO: 2073502
ucauucauugcagaggagg

SEQ ID NO: 2073504 - RNA, 19 nt, Artificial Sequence
  Description of Artificial Sequence: Synthetic oligonucleotide
  Sense strand starting at position 86 of SEQ ID NO: 1881811
cucugcaaugaaugaaaga

SEQ ID NO: 2073505 - RNA, 19 nt, Artificial Sequence
  Description of Artificial Sequence: Synthetic oligonucleotide
  Antisense strand to SEQ ID NO: 2073504
ucuuucauucauugcagag

SEQ ID NO: 2073506 - RNA, 19 nt, Artificial Sequence
  Description of Artificial Sequence: Synthetic oligonucleotide
  Sense strand starting at position 185 of SEQ ID NO: 1881811
cguguuaggcacuaacaca

SEQ ID NO: 2073507 - RNA, 19 nt, Artificial Sequence
  Description of Artificial Sequence: Synthetic oligonucleotide
  Antisense strand to SEQ ID NO: 2073506
uguguuagugccuaacacg

SEQ ID NO: 2073508 - RNA, 19 nt, Artificial Sequence
  Description of Artificial Sequence: Synthetic oligonucleotide
  Sense strand starting at position 405 of SEQ ID NO: 1881811
gcgaacuuucccuagugga

SEQ ID NO: 2073509 - RNA, 19 nt, Artificial Sequence
  Description of Artificial Sequence: Synthetic oligonucleotide
  Antisense strand to SEQ ID NO: 2073508
uccacuagggaaaguucgc

SEQ ID NO: 2073510 - RNA, 19 nt, Artificial Sequence
  Description of Artificial Sequence: Synthetic oligonucleotide
  Sense strand starting at position 421 of SEQ ID NO: 1881811
ggagcuaucucccuaccag

SEQ ID NO: 2073511 - RNA, 19 nt, Artificial Sequence
  Description of Artificial Sequence: Synthetic oligonucleotide
  Antisense strand to SEQ ID NO: 2073510
cugguagggagauagcucc

SEQ ID NO: 2073512 - RNA, 19 nt, Artificial Sequence
  Description of Artificial Sequence: Synthetic oligonucleotide
  Sense strand starting at position 572 of SEQ ID NO: 1881811
gguguuauugcuucuguuu

SEQ ID NO: 2073513 - RNA, 19 nt, Artificial Sequence
  Description of Artificial Sequence: Synthetic oligonucleotide
  Antisense strand to SEQ ID NO: 2073512
aaacagaagcaauaacacc

SEQ ID NO: 2073514 - RNA, 19 nt, Artificial Sequence
  Description of Artificial Sequence: Synthetic oligonucleotide
  Sense strand starting at position 573 of SEQ ID NO: 1881811
guguuauugcuucuguuug

SEQ ID NO: 2073515 - RNA, 19 nt, Artificial Sequence
  Description of Artificial Sequence: Synthetic oligonucleotide
  Antisense strand to SEQ ID NO: 2073514
caaacagaagcaauaacac

SEQ ID NO: 2073516 - RNA, 19 nt, Artificial Sequence
  Description of Artificial Sequence: Synthetic oligonucleotide
  Sense strand starting at position 666 of SEQ ID NO: 1881811
gccuuugagaaguguaaca

SEQ ID NO: 2073517 - RNA, 19 nt, Artificial Sequence
  Description of Artificial Sequence: Synthetic oligonucleotide
  Antisense strand to SEQ ID NO: 2073516
uguuacacuucucaaaggc

SEQ ID NO: 2073518 - RNA, 19 nt, Artificial Sequence
  Description of Artificial Sequence: Synthetic oligonucleotide
  Sense strand starting at position 834 of SEQ ID NO: 1881811
aagguagaccucuguggau

SEQ ID NO: 2073519 - RNA, 19 nt, Artificial Sequence
  Description of Artificial Sequence: Synthetic oligonucleotide
  Antisense strand to SEQ ID NO: 2073518
auccacagaggucuaccuu

SEQ ID NO: 2073520 - RNA, 19 nt, Artificial Sequence
  Description of Artificial Sequence: Synthetic oligonucleotide
  Sense strand starting at position 836 of SEQ ID NO: 1881811
gguagaccucuguggauag

SEQ ID NO: 2073521 - RNA, 19 nt, Artificial Sequence
  Description of Artificial Sequence: Synthetic oligonucleotide
  Antisense strand to SEQ ID NO: 2073520
cuauccacagaggucuacc

SEQ ID NO: 2073522 - RNA, 19 nt, Artificial Sequence
  Description of Artificial Sequence: Synthetic oligonucleotide
  Sense strand starting at position 1287 of SEQ ID NO: 1881811
agcgaugguuccuccauuu

SEQ ID NO: 2073523 - RNA, 19 nt, Artificial Sequence
  Description of Artificial Sequence: Synthetic oligonucleotide
  Antisense strand to SEQ ID NO: 2073522
aaauggaggaaccaucgcu

SEQ ID NO: 2073524 - RNA, 19 nt, Artificial Sequence
  Description of Artificial Sequence: Synthetic oligonucleotide
  Sense strand starting at position 1335 of SEQ ID NO: 1881811
guaugugugcgugugugaa

SEQ ID NO: 2073525 - RNA, 19 nt, Artificial Sequence
  Description of Artificial Sequence: Synthetic oligonucleotide
  Antisense strand to SEQ ID NO: 2073524
uucacacacgcacacauac

SEQ ID NO: 2073526 - RNA, 19 nt, Artificial Sequence
  Description of Artificial Sequence: Synthetic oligonucleotide
  Sense strand starting at position 2239 of SEQ ID NO: 1881811
uggguucagcuguaaguca

SEQ ID NO: 2073527 - RNA, 19 nt, Artificial Sequence
  Description of Artificial Sequence: Synthetic oligonucleotide
  Antisense strand to SEQ ID NO: 2073526
ugacuuacagcugaaccca

SEQ ID NO: 2073528 - RNA, 19 nt, Artificial Sequence
  Description of Artificial Sequence: Synthetic oligonucleotide
  Sense strand starting at position 2293 of SEQ ID NO: 1881811
ccaccagcugcuugaucua

SEQ ID NO: 2073529 - RNA, 19 nt, Artificial Sequence
  Description of Artificial Sequence: Synthetic oligonucleotide
  Antisense strand to SEQ ID NO: 2073528
uagaucaagcagcuggugg

SEQ ID NO: 2073530 - RNA, 19 nt, Artificial Sequence
  Description of Artificial Sequence: Synthetic oligonucleotide
  Sense strand starting at position 2300 of SEQ ID NO: 1881811
cugcuugaucuaggucacu

SEQ ID NO: 2073531 - RNA, 19 nt, Artificial Sequence
  Description of Artificial Sequence: Synthetic oligonucleotide
  Antisense strand to SEQ ID NO: 2073530
agugaccuagaucaagcag

SEQ ID NO: 2073532 - RNA, 19 nt, Artificial Sequence
  Description of Artificial Sequence: Synthetic oligonucleotide
  Sense strand starting at position 2410 of SEQ ID NO: 1881811
agaaaucccuccuaggaaa

SEQ ID NO: 2073533 - RNA, 19 nt, Artificial Sequence
  Description of Artificial Sequence: Synthetic oligonucleotide
  Antisense strand to SEQ ID NO: 2073532
uuuccuaggagggauuucu

SEQ ID NO: 2073534 - RNA, 19 nt, Artificial Sequence
  Description of Artificial Sequence: Synthetic oligonucleotide
  Sense strand starting at position 2544 of SEQ ID NO: 1881811
ccugucuaccuuuacaagu

SEQ ID NO: 2073535 - RNA, 19 nt, Artificial Sequence
  Description of Artificial Sequence: Synthetic oligonucleotide
  Antisense strand to SEQ ID NO: 2073534
acuuguaaagguagacagg

SEQ ID NO: 2073536 - RNA, 19 nt, Artificial Sequence
  Description of Artificial Sequence: Synthetic oligonucleotide
  Sense strand starting at position 2635 of SEQ ID NO: 1881811
agucuauagcaucagaauc

SEQ ID NO: 2073537 - RNA, 19 nt, Artificial Sequence
  Description of Artificial Sequence: Synthetic oligonucleotide
  Antisense strand to SEQ ID NO: 2073536
gauucugaugcuauagacu

SEQ ID NO: 2073538 - RNA, 19 nt, Artificial Sequence
  Description of Artificial Sequence: Synthetic oligonucleotide
  Sense strand starting at position 2691 of SEQ ID NO: 1881811
gagcaauuacaugagucau

SEQ ID NO: 2073539 - RNA, 19 nt, Artificial Sequence
  Description of Artificial Sequence: Synthetic oligonucleotide
  Antisense strand to SEQ ID NO: 2073538
augacucauguaauugcuc

SEQ ID NO: 2073540 - RNA, 19 nt, Artificial Sequence
  Description of Artificial Sequence: Synthetic oligonucleotide
  Sense strand starting at position 2810 of SEQ ID NO: 1881811
agggcuucugcugaaauaa

SEQ ID NO: 2073541 - RNA, 19 nt, Artificial Sequence
  Description of Artificial Sequence: Synthetic oligonucleotide
  Antisense strand to SEQ ID NO: 2073540
uuauuucagcagaagcccu

SEQ ID NO: 2073542 - RNA, 19 nt, Artificial Sequence
  Description of Artificial Sequence: Synthetic oligonucleotide
  Sense strand starting at position 2819 of SEQ ID NO: 1881811
gcugaaauaaccuguagag

SEQ ID NO: 2073543 - RNA, 19 nt, Artificial Sequence
  Description of Artificial Sequence: Synthetic oligonucleotide
  Antisense strand to SEQ ID NO: 2073542
cucuacagguuauuucagc

SEQ ID NO: 2073544 - RNA, 19 nt, Artificial Sequence
  Description of Artificial Sequence: Synthetic oligonucleotide
  Sense strand starting at position 2843 of SEQ ID NO: 1881811
agcuguguucaggauagua

SEQ ID NO: 2073545 - RNA, 19 nt, Artificial Sequence
  Description of Artificial Sequence: Synthetic oligonucleotide
  Antisense strand to SEQ ID NO: 2073544
uacuauccugaacacagcu

SEQ ID NO: 2073546 - RNA, 19 nt, Artificial Sequence
  Description of Artificial Sequence: Synthetic oligonucleotide
  Sense strand starting at position 2845 of SEQ ID NO: 1881811
cuguguucaggauaguagu

SEQ ID NO: 2073547 - RNA, 19 nt, Artificial Sequence
  Description of Artificial Sequence: Synthetic oligonucleotide
  Antisense strand to SEQ ID NO: 2073546
acuacuauccugaacacag

SEQ ID NO: 2073548 - RNA, 19 nt, Artificial Sequence
  Description of Artificial Sequence: Synthetic oligonucleotide
  Sense strand starting at position 2858 of SEQ ID NO: 1881811
aguaguguuaaaugcaaag

SEQ ID NO: 2073549 - RNA, 19 nt, Artificial Sequence
  Description of Artificial Sequence: Synthetic oligonucleotide
  Antisense strand to SEQ ID NO: 2073548
cuuugcauuuaacacuacu

SEQ ID NO: 2073550 - RNA, 19 nt, Artificial Sequence
  Description of Artificial Sequence: Synthetic oligonucleotide
  Sense strand starting at position 2996 of SEQ ID NO: 1881811
uaagacuucugggauuaag

SEQ ID NO: 2073551 - RNA, 19 nt, Artificial Sequence
  Description of Artificial Sequence: Synthetic oligonucleotide
  Antisense strand to SEQ ID NO: 2073550
cuuaaucccagaagucuua

SEQ ID NO: 2073552 - RNA, 19 nt, Artificial Sequence
  Description of Artificial Sequence: Synthetic oligonucleotide
  Sense strand starting at position 3006 of SEQ ID NO: 1881811
gggauuaagucauaaagac

SEQ ID NO: 2073553 - RNA, 19 nt, Artificial Sequence
  Description of Artificial Sequence: Synthetic oligonucleotide
  Antisense strand to SEQ ID NO: 2073552
gucuuuaugacuuaauccc

SEQ ID NO: 2073554 - RNA, 19 nt, Artificial Sequence
  Description of Artificial Sequence: Synthetic oligonucleotide
  Sense strand starting at position 3053 of SEQ ID NO: 1881811
cuacaaacuugagugcuuu

SEQ ID NO: 2073555 - RNA, 19 nt, Artificial Sequence
  Description of Artificial Sequence: Synthetic oligonucleotide
  Antisense strand to SEQ ID NO: 2073554
aaagcacucaaguuuguag

SEQ ID NO: 2073556 - RNA, 19 nt, Artificial Sequence
  Description of Artificial Sequence: Synthetic oligonucleotide
  Sense strand starting at position 3142 of SEQ ID NO: 1881811
agucaacuuugucuuuagu

SEQ ID NO: 2073557 - RNA, 19 nt, Artificial Sequence
  Description of Artificial Sequence: Synthetic oligonucleotide
  Antisense strand to SEQ ID NO: 2073556
acuaaagacaaaguugacu

SEQ ID NO: 2073558 - RNA, 19 nt, Artificial Sequence
  Description of Artificial Sequence: Synthetic oligonucleotide
  Sense strand starting at position 3191 of SEQ ID NO: 1881811
uuugcuuugccauaugaau

SEQ ID NO: 2073559 - RNA, 19 nt, Artificial Sequence
  Description of Artificial Sequence: Synthetic oligonucleotide
  Antisense strand to SEQ ID NO: 2073558
auucauauggcaaagcaaa

SEQ ID NO: 2073560 - RNA, 19 nt, Artificial Sequence
  Description of Artificial Sequence: Synthetic oligonucleotide
  Sense strand starting at position 3253 of SEQ ID NO: 1881811
guauaucauguggacuuga

SEQ ID NO: 2073561 - RNA, 19 nt, Artificial Sequence
  Description of Artificial Sequence: Synthetic oligonucleotide
  Antisense strand to SEQ ID NO: 2073560
ucaaguccacaugauauac

SEQ ID NO: 2073562 - RNA, 19 nt, Artificial Sequence
  Description of Artificial Sequence: Synthetic oligonucleotide
  Sense strand starting at position 3348 of SEQ ID NO: 1881811
gaggucaaaugcuuuguga

SEQ ID NO: 2073563 - RNA, 19 nt, Artificial Sequence
  Description of Artificial Sequence: Synthetic oligonucleotide
  Antisense strand to SEQ ID NO: 2073562
ucacaaagcauuugaccuc

SEQ ID NO: 2073564 - RNA, 19 nt, Artificial Sequence
  Description of Artificial Sequence: Synthetic oligonucleotide
  Sense strand starting at position 3350 of SEQ ID NO: 1881811
ggucaaaugcuuugugauu

SEQ ID NO: 2073565 - RNA, 19 nt, Artificial Sequence
  Description of Artificial Sequence: Synthetic oligonucleotide
  Antisense strand to SEQ ID NO: 2073564
aaucacaaagcauuugacc

SEQ ID NO: 2073566 - RNA, 19 nt, Artificial Sequence
  Description of Artificial Sequence: Synthetic oligonucleotide
  Sense strand starting at position 3351 of SEQ ID NO: 1881811
gucaaaugcuuugugauuu

SEQ ID NO: 2073567 - RNA, 19 nt, Artificial Sequence
  Description of Artificial Sequence: Synthetic oligonucleotide
  Antisense strand to SEQ ID NO: 2073566
aaaucacaaagcauuugac

SEQ ID NO: 2073568 - RNA, 19 nt, Artificial Sequence
  Description of Artificial Sequence: Synthetic oligonucleotide
  Sense strand starting at position 3359 of SEQ ID NO: 1881811
cuuugugauuuccuaugca

SEQ ID NO: 2073569 - RNA, 19 nt, Artificial Sequence
  Description of Artificial Sequence: Synthetic oligonucleotide
  Antisense strand to SEQ ID NO: 2073568
ugcauaggaaaucacaaag

SEQ ID NO: 2073570 - RNA, 19 nt, Artificial Sequence
  Description of Artificial Sequence: Synthetic oligonucleotide
  Sense strand starting at position 3362 of SEQ ID NO: 1881811
ugugauuuccuaugcacuu

SEQ ID NO: 2073571 - RNA, 19 nt, Artificial Sequence
  Description of Artificial Sequence: Synthetic oligonucleotide
  Antisense strand to SEQ ID NO: 2073570
aagugcauaggaaaucaca

SEQ ID NO: 2073572 - RNA, 19 nt, Artificial Sequence
  Description of Artificial Sequence: Synthetic oligonucleotide
  Sense strand starting at position 3363 of SEQ ID NO: 1881811
gugauuuccuaugcacuuu

SEQ ID NO: 2073573 - RNA, 19 nt, Artificial Sequence
  Description of Artificial Sequence: Synthetic oligonucleotide
  Antisense strand to SEQ ID NO: 2073572
aaagugcauaggaaaucac

SEQ ID NO: 2073574 - RNA, 19 nt, Artificial Sequence
  Description of Artificial Sequence: Synthetic oligonucleotide
  Sense strand starting at position 3488 of SEQ ID NO: 1881811
guacaauaccuguguaggu

SEQ ID NO: 2073575 - RNA, 19 nt, Artificial Sequence
  Description of Artificial Sequence: Synthetic oligonucleotide
  Antisense strand to SEQ ID NO: 2073574
accuacacagguauuguac

SEQ ID NO: 2073576 - RNA, 19 nt, Artificial Sequence
  Description of Artificial Sequence: Synthetic oligonucleotide
  Sense strand starting at position 3489 of SEQ ID NO: 1881811
uacaauaccuguguaggua

SEQ ID NO: 2073577 - RNA, 19 nt, Artificial Sequence
  Description of Artificial Sequence: Synthetic oligonucleotide
  Antisense strand to SEQ ID NO: 2073576
uaccuacacagguauugua

SEQ ID NO: 2073578 - RNA, 19 nt, Artificial Sequence
  Description of Artificial Sequence: Synthetic oligonucleotide
  Sense strand starting at position 3731 of SEQ ID NO: 1881811
cuucuaaggucucugccaa

SEQ ID NO: 2073579 - RNA, 19 nt, Artificial Sequence
  Description of Artificial Sequence: Synthetic oligonucleotide
  Antisense strand to SEQ ID NO: 2073578
uuggcagagaccuuagaag

SEQ ID NO: 2073580 - RNA, 19 nt, Artificial Sequence
  Description of Artificial Sequence: Synthetic oligonucleotide
  Sense strand starting at position 3752 of SEQ ID NO: 1881811
uuaagagucucugauuuaa

SEQ ID NO: 2073581 - RNA, 19 nt, Artificial Sequence
  Description of Artificial Sequence: Synthetic oligonucleotide
  Antisense strand to SEQ ID NO: 2073580
uuaaaucagagacucuuaa

SEQ ID NO: 2073582 - RNA, 19 nt, Artificial Sequence
  Description of Artificial Sequence: Synthetic oligonucleotide
  Sense strand starting at position 2267 of SEQ ID NO: 1881812
uucugaggagcucgaucuu

SEQ ID NO: 2073583 - RNA, 19 nt, Artificial Sequence
  Description of Artificial Sequence: Synthetic oligonucleotide
  Antisense strand to SEQ ID NO: 2073582
aagaucgagcuccucagaa

SEQ ID NO: 2073584 - RNA, 19 nt, Artificial Sequence
  Description of Artificial Sequence: Synthetic oligonucleotide
  Sense strand starting at position 2273 of SEQ ID NO: 1881812
ggagcucgaucuugucuuu

SEQ ID NO: 2073585 - RNA, 19 nt, Artificial Sequence
  Description of Artificial Sequence: Synthetic oligonucleotide
  Antisense strand to SEQ ID NO: 2073584
aaagacaagaucgagcucc

SEQ ID NO: 2073586 - RNA, 19 nt, Artificial Sequence
  Description of Artificial Sequence: Synthetic oligonucleotide
  Sense strand starting at position 2276 of SEQ ID NO: 1881812
gcucgaucuugucuuucua

SEQ ID NO: 2073587 - RNA, 19 nt, Artificial Sequence
  Description of Artificial Sequence: Synthetic oligonucleotide
  Antisense strand to SEQ ID NO: 2073586
uagaaagacaagaucgagc

SEQ ID NO: 2073588 - RNA, 19 nt, Artificial Sequence
  Description of Artificial Sequence: Synthetic oligonucleotide
  Sense strand starting at position 2437 of SEQ ID NO: 1881812
augucuaagcacugaggaa

SEQ ID NO: 2073589 - RNA, 19 nt, Artificial Sequence
  Description of Artificial Sequence: Synthetic oligonucleotide
  Antisense strand to SEQ ID NO: 2073588
uuccucagugcuuagacau

SEQ ID NO: 2073590 - RNA, 19 nt, Artificial Sequence
  Description of Artificial Sequence: Synthetic oligonucleotide
  Sense strand starting at position 2586 of SEQ ID NO: 1881812
gggagaaguuugcaguuua

SEQ ID NO: 2073591 - RNA, 19 nt, Artificial Sequence
  Description of Artificial Sequence: Synthetic oligonucleotide
  Antisense strand to SEQ ID NO: 2073590
uaaacugcaaacuucuccc

SEQ ID NO: 2073592 - RNA, 19 nt, Artificial Sequence
  Description of Artificial Sequence: Synthetic oligonucleotide
  Sense strand starting at position 2967 of SEQ ID NO: 1881812
ggguguuaacccugcugau

SEQ ID NO: 2073593 - RNA, 19 nt, Artificial Sequence
  Description of Artificial Sequence: Synthetic oligonucleotide
  Antisense strand to SEQ ID NO: 2073592
aucagcaggguuaacaccc

SEQ ID NO: 2073594 - RNA, 19 nt, Artificial Sequence
  Description of Artificial Sequence: Synthetic oligonucleotide
  Sense strand starting at position 3342 of SEQ ID NO: 1881812
uuggacaaguuguaugacu

SEQ ID NO: 2073595 - RNA, 19 nt, Artificial Sequence
  Description of Artificial Sequence: Synthetic oligonucleotide
  Antisense strand to SEQ ID NO: 2073594
agucauacaacuuguccaa

SEQ ID NO: 2073596 - RNA, 19 nt, Artificial Sequence
  Description of Artificial Sequence: Synthetic oligonucleotide
  Sense strand starting at position 3347 of SEQ ID NO: 1881812
caaguuguaugacugccaa

SEQ ID NO: 2073597 - RNA, 19 nt, Artificial Sequence
  Description of Artificial Sequence: Synthetic oligonucleotide
  Antisense strand to SEQ ID NO: 2073596
uuggcagucauacaacuug

SEQ ID NO: 2073598 - RNA, 19 nt, Artificial Sequence
  Description of Artificial Sequence: Synthetic oligonucleotide
  Sense strand starting at position 3351 of SEQ ID NO: 1881812
uuguaugacugccaauuaa

SEQ ID NO: 2073599 - RNA, 19 nt, Artificial Sequence
  Description of Artificial Sequence: Synthetic oligonucleotide
  Antisense strand to SEQ ID NO: 2073598
uuaauuggcagucauacaa

SEQ ID NO: 2073600 - RNA, 19 nt, Artificial Sequence
  Description of Artificial Sequence: Synthetic oligonucleotide
  Sense strand starting at position 2437 of SEQ ID NO: 1881813
augucuaagcacugaagaa

SEQ ID NO: 2073601 - RNA, 19 nt, Artificial Sequence
  Description of Artificial Sequence: Synthetic oligonucleotide
  Antisense strand to SEQ ID NO: 2073600
uucuucagugcuuagacau

SEQ ID NO: 2073602 - RNA, 19 nt, Artificial Sequence
  Description of Artificial Sequence: Synthetic oligonucleotide
  Sense strand starting at position 2967 of SEQ ID NO: 1881813
ggguguuaacccuacugau

SEQ ID NO: 2073603 - RNA, 19 nt, Artificial Sequence
  Description of Artificial Sequence: Synthetic oligonucleotide
  Antisense strand to SEQ ID NO: 2073602
aucaguaggguuaacaccc

SEQ ID NO: 2073604 - RNA, 19 nt, Artificial Sequence
  Description of Artificial Sequence: Synthetic oligonucleotide
  Sense strand starting at position 3342 of SEQ ID NO: 1881813
uuggacaaguugucugacu

SEQ ID NO: 2073605 - RNA, 19 nt, Artificial Sequence
  Description of Artificial Sequence: Synthetic oligonucleotide
  Antisense strand to SEQ ID NO: 2073604
agucagacaacuuguccaa

SEQ ID NO: 2073606 - RNA, 19 nt, Artificial Sequence
  Description of Artificial Sequence: Synthetic oligonucleotide
  Sense strand starting at position 3347 of SEQ ID NO: 1881813
caaguugucugacugccaa

SEQ ID NO: 2073607 - RNA, 19 nt, Artificial Sequence
  Description of Artificial Sequence: Synthetic oligonucleotide
  Antisense strand to SEQ ID NO: 2073606
uuggcagucagacaacuug

SEQ ID NO: 2073608 - RNA, 19 nt, Artificial Sequence
  Description of Artificial Sequence: Synthetic oligonucleotide
  Sense strand starting at position 3351 of SEQ ID NO: 1881813
uugucugacugccaauuaa

SEQ ID NO: 2073609 - RNA, 19 nt, Artificial Sequence
  Description of Artificial Sequence: Synthetic oligonucleotide
  Antisense strand to SEQ ID NO: 2073608
uuaauuggcagucagacaa

SEQ ID NO: 2073610 - RNA, 19 nt, Artificial Sequence
  Description of Artificial Sequence: Synthetic oligonucleotide
  Sense strand starting at position 81 of SEQ ID NO: 1881814
gucagagagauccaacguu

SEQ ID NO: 2073611 - RNA, 19 nt, Artificial Sequence
  Description of Artificial Sequence: Synthetic oligonucleotide
  Antisense strand to SEQ ID NO: 2073610
aacguuggaucucucugac

SEQ ID NO: 2073612 - RNA, 19 nt, Artificial Sequence
  Description of Artificial Sequence: Synthetic oligonucleotide
  Sense strand starting at position 88 of SEQ ID NO: 1881814
agauccaacguuugagaag

SEQ ID NO: 2073613 - RNA, 19 nt, Artificial Sequence
  Description of Artificial Sequence: Synthetic oligonucleotide
  Antisense strand to SEQ ID NO: 2073612
cuucucaaacguuggaucu

SEQ ID NO: 2073614 - RNA, 19 nt, Artificial Sequence
  Description of Artificial Sequence: Synthetic oligonucleotide
  Sense strand starting at position 89 of SEQ ID NO: 1881814
gauccaacguuugagaaga

SEQ ID NO: 2073615 - RNA, 19 nt, Artificial Sequence
  Description of Artificial Sequence: Synthetic oligonucleotide
  Antisense strand to SEQ ID NO: 2073614
ucuucucaaacguuggauc

SEQ ID NO: 2073616 - RNA, 19 nt, Artificial Sequence
  Description of Artificial Sequence: Synthetic oligonucleotide
  Sense strand starting at position 91 of SEQ ID NO: 1881814
uccaacguuugagaagaau

SEQ ID NO: 2073617 - RNA, 19 nt, Artificial Sequence
  Description of Artificial Sequence: Synthetic oligonucleotide
  Antisense strand to SEQ ID NO: 2073616
auucuucucaaacguugga

SEQ ID NO: 2073618 - RNA, 19 nt, Artificial Sequence
  Description of Artificial Sequence: Synthetic oligonucleotide
  Sense strand starting at position 102 of SEQ ID NO: 1881814
agaagaauuugaggcguua

SEQ ID NO: 2073619 - RNA, 19 nt, Artificial Sequence
  Description of Artificial Sequence: Synthetic oligonucleotide
  Antisense strand to SEQ ID NO: 2073618
uaacgccucaaauucuucu

SEQ ID NO: 2073620 - RNA, 19 nt, Artificial Sequence
  Description of Artificial Sequence: Synthetic oligonucleotide
  Sense strand starting at position 114 of SEQ ID NO: 1881814
ggcguuauaguuggcuuga

SEQ ID NO: 2073621 - RNA, 19 nt, Artificial Sequence
  Description of Artificial Sequence: Synthetic oligonucleotide
  Antisense strand to SEQ ID NO: 2073620
ucaagccaacuauaacgcc

SEQ ID NO: 2073622 - RNA, 19 nt, Artificial Sequence
  Description of Artificial Sequence: Synthetic oligonucleotide
  Sense strand starting at position 115 of SEQ ID NO: 1881814
gcguuauaguuggcuugaa

SEQ ID NO: 2073623 - RNA, 19 nt, Artificial Sequence
  Description of Artificial Sequence: Synthetic oligonucleotide
  Antisense strand to SEQ ID NO: 2073622
uucaagccaacuauaacgc

SEQ ID NO: 2073624 - RNA, 19 nt, Artificial Sequence
  Description of Artificial Sequence: Synthetic oligonucleotide
  Sense strand starting at position 116 of SEQ ID NO: 1881814
cguuauaguuggcuugaag

SEQ ID NO: 2073625 - RNA, 19 nt, Artificial Sequence
  Description of Artificial Sequence: Synthetic oligonucleotide
  Antisense strand to SEQ ID NO: 2073624
cuucaagccaacuauaacg

SEQ ID NO: 2073626 - RNA, 19 nt, Artificial Sequence
  Description of Artificial Sequence: Synthetic oligonucleotide
  Sense strand starting at position 216 of SEQ ID NO: 1881814
acuguugagcauggaaaca

SEQ ID NO: 2073627 - RNA, 19 nt, Artificial Sequence
  Description of Artificial Sequence: Synthetic oligonucleotide
  Antisense strand to SEQ ID NO: 2073626
uguuuccaugcucaacagu

SEQ ID NO: 2073628 - RNA, 19 nt, Artificial Sequence
  Description of Artificial Sequence: Synthetic oligonucleotide
  Sense strand starting at position 426 of SEQ ID NO: 1881814
gaucgaucagccugggcaa

SEQ ID NO: 2073629 - RNA, 19 nt, Artificial Sequence
  Description of Artificial Sequence: Synthetic oligonucleotide
  Antisense strand to SEQ ID NO: 2073628
uugcccaggcugaucgauc

SEQ ID NO: 2073630 - RNA, 19 nt, Artificial Sequence
  Description of Artificial Sequence: Synthetic oligonucleotide
  Sense strand starting at position 578 of SEQ ID NO: 1881814
ccaagaucgcacuaguaca

SEQ ID NO: 2073631 - RNA, 19 nt, Artificial Sequence
  Description of Artificial Sequence: Synthetic oligonucleotide
  Antisense strand to SEQ ID NO: 2073630
uguacuagugcgaucuugg

SEQ ID NO: 2073632 - RNA, 19 nt, Artificial Sequence
  Description of Artificial Sequence: Synthetic oligonucleotide
  Sense strand starting at position 1235 of SEQ ID NO: 1881814
uugguacggauaugguaaa

SEQ ID NO: 2073633 - RNA, 19 nt, Artificial Sequence
  Description of Artificial Sequence: Synthetic oligonucleotide
  Antisense strand to SEQ ID NO: 2073632
uuuaccauauccguaccaa

SEQ ID NO: 2073634 - RNA, 19 nt, Artificial Sequence
  Description of Artificial Sequence: Synthetic oligonucleotide
  Sense strand starting at position 1311 of SEQ ID NO: 1881814
guauuacggcaguaagcau

SEQ ID NO: 2073635 - RNA, 19 nt, Artificial Sequence
  Description of Artificial Sequence: Synthetic oligonucleotide
  Antisense strand to SEQ ID NO: 2073634
augcuuacugccguaauac

SEQ ID NO: 2073636 - RNA, 19 nt, Artificial Sequence
  Description of Artificial Sequence: Synthetic oligonucleotide
  Sense strand starting at position 1318 of SEQ ID NO: 1881814
ggcaguaagcaucaagaag

SEQ ID NO: 2073637 - RNA, 19 nt, Artificial Sequence
  Description of Artificial Sequence: Synthetic oligonucleotide
  Antisense strand to SEQ ID NO: 2073636
cuucuugaugcuuacugcc

SEQ ID NO: 2073638 - RNA, 19 nt, Artificial Sequence
  Description of Artificial Sequence: Synthetic oligonucleotide
  Sense strand starting at position 1535 of SEQ ID NO: 1881814
ccaggacucucauaacugu

SEQ ID NO: 2073639 - RNA, 19 nt, Artificial Sequence
  Description of Artificial Sequence: Synthetic oligonucleotide
  Antisense strand to SEQ ID NO: 2073638
acaguuaugagaguccugg

SEQ ID NO: 2073640 - RNA, 19 nt, Artificial Sequence
  Description of Artificial Sequence: Synthetic oligonucleotide
  Sense strand starting at position 1544 of SEQ ID NO: 1881814
ucauaacugucaccugagu

SEQ ID NO: 2073641 - RNA, 19 nt, Artificial Sequence
  Description of Artificial Sequence: Synthetic oligonucleotide
  Antisense strand to SEQ ID NO: 2073640
acucaggugacaguuauga

SEQ ID NO: 2073642 - RNA, 19 nt, Artificial Sequence
  Description of Artificial Sequence: Synthetic oligonucleotide
  Sense strand starting at position 2139 of SEQ ID NO: 1881814
gggaguaguaucuggaguu

SEQ ID NO: 2073643 - RNA, 19 nt, Artificial Sequence
  Description of Artificial Sequence: Synthetic oligonucleotide
  Antisense strand to SEQ ID NO: 2073642
aacuccagauacuacuccc

SEQ ID NO: 2073644 - RNA, 19 nt, Artificial Sequence
  Description of Artificial Sequence: Synthetic oligonucleotide
  Sense strand starting at position 2149 of SEQ ID NO: 1881814
ucuggaguuucuguaacau

SEQ ID NO: 2073645 - RNA, 19 nt, Artificial Sequence
  Description of Artificial Sequence: Synthetic oligonucleotide
  Antisense strand to SEQ ID NO: 2073644
auguuacagaaacuccaga

SEQ ID NO: 2073646 - RNA, 19 nt, Artificial Sequence
  Description of Artificial Sequence: Synthetic oligonucleotide
  Sense strand starting at position 2914 of SEQ ID NO: 1881814
aagcgugagccaucgcaaa

SEQ ID NO: 2073647 - RNA, 19 nt, Artificial Sequence
  Description of Artificial Sequence: Synthetic oligonucleotide
  Antisense strand to SEQ ID NO: 2073646
uuugcgauggcucacgcuu

SEQ ID NO: 2073648 - RNA, 19 nt, Artificial Sequence
  Description of Artificial Sequence: Synthetic oligonucleotide
  Sense strand starting at position 2916 of SEQ ID NO: 1881814
gcgugagccaucgcaaaua

SEQ ID NO: 2073649 - RNA, 19 nt, Artificial Sequence
  Description of Artificial Sequence: Synthetic oligonucleotide
  Antisense strand to SEQ ID NO: 2073648
uauuugcgauggcucacgc

SEQ ID NO: 2073650 - RNA, 19 nt, Artificial Sequence
  Description of Artificial Sequence: Synthetic oligonucleotide
  Sense strand starting at position 2950 of SEQ ID NO: 1881814
cguauaggcugucuacuua

SEQ ID NO: 2073651 - RNA, 19 nt, Artificial Sequence
  Description of Artificial Sequence: Synthetic oligonucleotide
  Antisense strand to SEQ ID NO: 2073650
uaaguagacagccuauacg

SEQ ID NO: 2073652 - RNA, 19 nt, Artificial Sequence
  Description of Artificial Sequence: Synthetic oligonucleotide
  Sense strand starting at position 2958 of SEQ ID NO: 1881814
cugucuacuuacucgauga

SEQ ID NO: 2073653 - RNA, 19 nt, Artificial Sequence
  Description of Artificial Sequence: Synthetic oligonucleotide
  Antisense strand to SEQ ID NO: 2073652
ucaucgaguaaguagacag

SEQ ID NO: 2073654 - RNA, 19 nt, Artificial Sequence
  Description of Artificial Sequence: Synthetic oligonucleotide
  Sense strand starting at position 2962 of SEQ ID NO: 1881814
cuacuuacucgaugaccuu

SEQ ID NO: 2073655 - RNA, 19 nt, Artificial Sequence
  Description of Artificial Sequence: Synthetic oligonucleotide
  Antisense strand to SEQ ID NO: 2073654
aaggucaucgaguaaguag

SEQ ID NO: 2073656 - RNA, 19 nt, Artificial Sequence
  Description of Artificial Sequence: Synthetic oligonucleotide
  Sense strand starting at position 3085 of SEQ ID NO: 1881814
uaauguuguuaguugagca

SEQ ID NO: 2073657 - RNA, 19 nt, Artificial Sequence
  Description of Artificial Sequence: Synthetic oligonucleotide
  Antisense strand to SEQ ID NO: 2073656
ugcucaacuaacaacauua

SEQ ID NO: 2073658 - RNA, 19 nt, Artificial Sequence
  Description of Artificial Sequence: Synthetic oligonucleotide
  Sense strand starting at position 3089 of SEQ ID NO: 1881814
guuguuaguugagcaaaca

SEQ ID NO: 2073659 - RNA, 19 nt, Artificial Sequence
  Description of Artificial Sequence: Synthetic oligonucleotide
  Antisense strand to SEQ ID NO: 2073658
uguuugcucaacuaacaac

SEQ ID NO: 2073660 - RNA, 19 nt, Artificial Sequence
  Description of Artificial Sequence: Synthetic oligonucleotide
  Sense strand starting at position 3131 of SEQ ID NO: 1881814
uuauaaaucuugguggcuu

SEQ ID NO: 2073661 - RNA, 19 nt, Artificial Sequence
  Description of Artificial Sequence: Synthetic oligonucleotide
  Antisense strand to SEQ ID NO: 2073660
aagccaccaagauuuauaa

SEQ ID NO: 2073662 - RNA, 19 nt, Artificial Sequence
  Description of Artificial Sequence: Synthetic oligonucleotide
  Sense strand starting at position 3133 of SEQ ID NO: 1881814
auaaaucuugguggcuuau

SEQ ID NO: 2073663 - RNA, 19 nt, Artificial Sequence
  Description of Artificial Sequence: Synthetic oligonucleotide
  Antisense strand to SEQ ID NO: 2073662
auaagccaccaagauuuau

SEQ ID NO: 2073664 - RNA, 19 nt, Artificial Sequence
  Description of Artificial Sequence: Synthetic oligonucleotide
  Sense strand starting at position 3156 of SEQ ID NO: 1881814
gcagaagccuacuccacua

SEQ ID NO: 2073665 - RNA, 19 nt, Artificial Sequence
  Description of Artificial Sequence: Synthetic oligonucleotide
  Antisense strand to SEQ ID NO: 2073664
uaguggaguaggcuucugc

SEQ ID NO: 2073666 - RNA, 19 nt, Artificial Sequence
  Description of Artificial Sequence: Synthetic oligonucleotide
  Sense strand starting at position 3380 of SEQ ID NO: 1881814
guugaauuccuccaguaac

SEQ ID NO: 2073667 - RNA, 19 nt, Artificial Sequence
  Description of Artificial Sequence: Synthetic oligonucleotide
  Antisense strand to SEQ ID NO: 2073666
guuacuggaggaauucaac

SEQ ID NO: 2073668 - RNA, 19 nt, Artificial Sequence
  Description of Artificial Sequence: Synthetic oligonucleotide
  Sense strand starting at position 3399 of SEQ ID NO: 1881814
auuguaacguuguuagaau

SEQ ID NO: 2073669 - RNA, 19 nt, Artificial Sequence
  Description of Artificial Sequence: Synthetic oligonucleotide
  Antisense strand to SEQ ID NO: 2073668
auucuaacaacguuacaau

SEQ ID NO: 2073670 - RNA, 19 nt, Artificial Sequence
  Description of Artificial Sequence: Synthetic oligonucleotide
  Sense strand starting at position 3406 of SEQ ID NO: 1881814
cguuguuagaauuauguga

SEQ ID NO: 2073671 - RNA, 19 nt, Artificial Sequence
  Description of Artificial Sequence: Synthetic oligonucleotide
  Antisense strand to SEQ ID NO: 2073670
ucacauaauucuaacaacg

SEQ ID NO: 2073672 - RNA, 19 nt, Artificial Sequence
  Description of Artificial Sequence: Synthetic oligonucleotide
  Sense strand starting at position 3481 of SEQ ID NO: 1881814
uguuguauguuucccuaaa

SEQ ID NO: 2073673 - RNA, 19 nt, Artificial Sequence
  Description of Artificial Sequence: Synthetic oligonucleotide
  Antisense strand to SEQ ID NO: 2073672
uuuagggaaacauacaaca

SEQ ID NO: 2073674 - RNA, 19 nt, Artificial Sequence
  Description of Artificial Sequence: Synthetic oligonucleotide
  Sense strand starting at position 3482 of SEQ ID NO: 1881814
guuguauguuucccuaaau

SEQ ID NO: 2073675 - RNA, 19 nt, Artificial Sequence
  Description of Artificial Sequence: Synthetic oligonucleotide
  Antisense strand to SEQ ID NO: 2073674
auuuagggaaacauacaac

SEQ ID NO: 2073676 - RNA, 19 nt, Artificial Sequence
  Description of Artificial Sequence: Synthetic oligonucleotide
  Sense strand starting at position 3483 of SEQ ID NO: 1881814
uuguauguuucccuaaaug

SEQ ID NO: 2073677 - RNA, 19 nt, Artificial Sequence
  Description of Artificial Sequence: Synthetic oligonucleotide
  Antisense strand to SEQ ID NO: 2073676
cauuuagggaaacauacaa

SEQ ID NO: 2073678 - RNA, 19 nt, Artificial Sequence
  Description of Artificial Sequence: Synthetic oligonucleotide
  Sense strand starting at position 3532 of SEQ ID NO: 1881814
uugguuugguugcuauuua

SEQ ID NO: 2073679 - RNA, 19 nt, Artificial Sequence
  Description of Artificial Sequence: Synthetic oligonucleotide
  Antisense strand to SEQ ID NO: 2073678
uaaauagcaaccaaaccaa

SEQ ID NO: 2073680 - RNA, 19 nt, Artificial Sequence
  Description of Artificial Sequence: Synthetic oligonucleotide
  Sense strand starting at position 3533 of SEQ ID NO: 1881814
ugguuugguugcuauuuau

SEQ ID NO: 2073681 - RNA, 19 nt, Artificial Sequence
  Description of Artificial Sequence: Synthetic oligonucleotide
  Antisense strand to SEQ ID NO: 2073680
auaaauagcaaccaaacca

SEQ ID NO: 2073682 - RNA, 19 nt, Artificial Sequence
  Description of Artificial Sequence: Synthetic oligonucleotide
  Sense strand starting at position 3660 of SEQ ID NO: 1881814
acuccaucacuugaguuua

SEQ ID NO: 2073683 - RNA, 19 nt, Artificial Sequence
  Description of Artificial Sequence: Synthetic oligonucleotide
  Antisense strand to SEQ ID NO: 2073682
uaaacucaagugauggagu

SEQ ID NO: 2073684 - RNA, 19 nt, Artificial Sequence
  Description of Artificial Sequence: Synthetic oligonucleotide
  Sense strand starting at position 3849 of SEQ ID NO: 1881814
gaauaugaguccuucugag

SEQ ID NO: 2073685 - RNA, 19 nt, Artificial Sequence
  Description of Artificial Sequence: Synthetic oligonucleotide
  Antisense strand to SEQ ID NO: 2073684
cucagaaggacucauauuc

SEQ ID NO: 2073686 - RNA, 19 nt, Artificial Sequence
  Description of Artificial Sequence: Synthetic oligonucleotide
  Sense strand starting at position 3942 of SEQ ID NO: 1881814
ccuggaacuuugguaguau

SEQ ID NO: 2073687 - RNA, 19 nt, Artificial Sequence
  Description of Artificial Sequence: Synthetic oligonucleotide
  Antisense strand to SEQ ID NO: 2073686
auacuaccaaaguuccagg

SEQ ID NO: 2073688 - RNA, 19 nt, Artificial Sequence
  Description of Artificial Sequence: Synthetic oligonucleotide
  Sense strand starting at position 3946 of SEQ ID NO: 1881814
gaacuuugguaguauauac

SEQ ID NO: 2073689 - RNA, 19 nt, Artificial Sequence
  Description of Artificial Sequence: Synthetic oligonucleotide
  Antisense strand to SEQ ID NO: 2073688
guauauacuaccaaaguuc

SEQ ID NO: 2073690 - RNA, 19 nt, Artificial Sequence
  Description of Artificial Sequence: Synthetic oligonucleotide
  Sense strand starting at position 821 of SEQ ID NO: 1881817
gugacuucugugcagucaa

SEQ ID NO: 2073691 - RNA, 19 nt, Artificial Sequence
  Description of Artificial Sequence: Synthetic oligonucleotide
  Antisense strand to SEQ ID NO: 2073690
uugacugcacagaagucac

SEQ ID NO: 2073692 - RNA, 19 nt, Artificial Sequence
  Description of Artificial Sequence: Synthetic oligonucleotide
  Sense strand starting at position 75 of SEQ ID NO: 1881820
gaagaauugguuugccaag

SEQ ID NO: 2073693 - RNA, 19 nt, Artificial Sequence
  Description of Artificial Sequence: Synthetic oligonucleotide
  Antisense strand to SEQ ID NO: 2073692
cuuggcaaaccaauucuuc

SEQ ID NO: 2073694 - RNA, 19 nt, Artificial Sequence
  Description of Artificial Sequence: Synthetic oligonucleotide
  Sense strand starting at position 77 of SEQ ID NO: 1881820
agaauugguuugccaaggu

SEQ ID NO: 2073695 - RNA, 19 nt, Artificial Sequence
  Description of Artificial Sequence: Synthetic oligonucleotide
  Antisense strand to SEQ ID NO: 2073694
accuuggcaaaccaauucu

SEQ ID NO: 2073696 - RNA, 19 nt, Artificial Sequence
  Description of Artificial Sequence: Synthetic oligonucleotide
  Sense strand starting at position 81 of SEQ ID NO: 1881820
uugguuugccaagguggaa

SEQ ID NO: 2073697 - RNA, 19 nt, Artificial Sequence
  Description of Artificial Sequence: Synthetic oligonucleotide
  Antisense strand to SEQ ID NO: 2073696
uuccaccuuggcaaaccaa

SEQ ID NO: 2073698 - RNA, 19 nt, Artificial Sequence
  Description of Artificial Sequence: Synthetic oligonucleotide
  Sense strand starting at position 108 of SEQ ID NO: 1881820
ucaucagugacgugacuua

SEQ ID NO: 2073699 - RNA, 19 nt, Artificial Sequence
  Description of Artificial Sequence: Synthetic oligonucleotide
  Antisense strand to SEQ ID NO: 2073698
uaagucacgucacugauga

SEQ ID NO: 2073700 - RNA, 19 nt, Artificial Sequence
  Description of Artificial Sequence: Synthetic oligonucleotide
  Sense strand starting at position 138 of SEQ ID NO: 1881820
ugguuauaccucuauaccu

SEQ ID NO: 2073701 - RNA, 19 nt, Artificial Sequence
  Description of Artificial Sequence: Synthetic oligonucleotide
  Antisense strand to SEQ ID NO: 2073700
agguauagagguauaacca

SEQ ID NO: 2073702 - RNA, 19 nt, Artificial Sequence
  Description of Artificial Sequence: Synthetic oligonucleotide
  Sense strand starting at position 399 of SEQ ID NO: 1881820
ccacaaugggugugcuaga

SEQ ID NO: 2073703 - RNA, 19 nt, Artificial Sequence
  Description of Artificial Sequence: Synthetic oligonucleotide
  Antisense strand to SEQ ID NO: 2073702
ucuagcacacccauugugg

SEQ ID NO: 2073704 - RNA, 19 nt, Artificial Sequence
  Description of Artificial Sequence: Synthetic oligonucleotide
  Sense strand starting at position 467 of SEQ ID NO: 1881820
ucugaaguguacucagaau

SEQ ID NO: 2073705 - RNA, 19 nt, Artificial Sequence
  Description of Artificial Sequence: Synthetic oligonucleotide
  Antisense strand to SEQ ID NO: 2073704
auucugaguacacuucaga

SEQ ID NO: 2073706 - RNA, 19 nt, Artificial Sequence
  Description of Artificial Sequence: Synthetic oligonucleotide
  Sense strand starting at position 537 of SEQ ID NO: 1881820
acacaagaauuaucgugga

SEQ ID NO: 2073707 - RNA, 19 nt, Artificial Sequence
  Description of Artificial Sequence: Synthetic oligonucleotide
  Antisense strand to SEQ ID NO: 2073706
uccacgauaauucuugugu

SEQ ID NO: 2073708 - RNA, 19 nt, Artificial Sequence
  Description of Artificial Sequence: Synthetic oligonucleotide
  Sense strand starting at position 541 of SEQ ID NO: 1881820
aagaauuaucguggaacag

SEQ ID NO: 2073709 - RNA, 19 nt, Artificial Sequence
  Description of Artificial Sequence: Synthetic oligonucleotide
  Antisense strand to SEQ ID NO: 2073708
cuguuccacgauaauucuu

SEQ ID NO: 2073710 - RNA, 19 nt, Artificial Sequence
  Description of Artificial Sequence: Synthetic oligonucleotide
  Sense strand starting at position 557 of SEQ ID NO: 1881820
cagcuugugugaccgauca

SEQ ID NO: 2073711 - RNA, 19 nt, Artificial Sequence
  Description of Artificial Sequence: Synthetic oligonucleotide
  Antisense strand to SEQ ID NO: 2073710
ugaucggucacacaagcug

SEQ ID NO: 2073712 - RNA, 19 nt, Artificial Sequence
  Description of Artificial Sequence: Synthetic oligonucleotide
  Sense strand starting at position 559 of SEQ ID NO: 1881820
gcuugugugaccgaucaac

SEQ ID NO: 2073713 - RNA, 19 nt, Artificial Sequence
  Description of Artificial Sequence: Synthetic oligonucleotide
  Antisense strand to SEQ ID NO: 2073712
guugaucggucacacaagc

SEQ ID NO: 2073714 - RNA, 19 nt, Artificial Sequence
  Description of Artificial Sequence: Synthetic oligonucleotide
  Sense strand starting at position 603 of SEQ ID NO: 1881820
ucuuguugacucuguuacu

SEQ ID NO: 2073715 - RNA, 19 nt, Artificial Sequence
  Description of Artificial Sequence: Synthetic oligonucleotide
  Antisense strand to SEQ ID NO: 2073714
aguaacagagucaacaaga

SEQ ID NO: 2073716 - RNA, 19 nt, Artificial Sequence
  Description of Artificial Sequence: Synthetic oligonucleotide
  Sense strand starting at position 637 of SEQ ID NO: 1881820
gucucauggcuucucgcau

SEQ ID NO: 2073717 - RNA, 19 nt, Artificial Sequence
  Description of Artificial Sequence: Synthetic oligonucleotide
  Antisense strand to SEQ ID NO: 2073716
augcgagaagccaugagac

SEQ ID NO: 2073718 - RNA, 19 nt, Artificial Sequence
  Description of Artificial Sequence: Synthetic oligonucleotide
  Sense strand starting at position 734 of SEQ ID NO: 1881820
caggaagcuucugcugauu

SEQ ID NO: 2073719 - RNA, 19 nt, Artificial Sequence
  Description of Artificial Sequence: Synthetic oligonucleotide
  Antisense strand to SEQ ID NO: 2073718
aaucagcagaagcuuccug

SEQ ID NO: 2073720 - RNA, 19 nt, Artificial Sequence
  Description of Artificial Sequence: Synthetic oligonucleotide
  Sense strand starting at position 737 of SEQ ID NO: 1881820
gaagcuucugcugauugaa

SEQ ID NO: 2073721 - RNA, 19 nt, Artificial Sequence
  Description of Artificial Sequence: Synthetic oligonucleotide
  Antisense strand to SEQ ID NO: 2073720
uucaaucagcagaagcuuc

SEQ ID NO: 2073722 - RNA, 19 nt, Artificial Sequence
  Description of Artificial Sequence: Synthetic oligonucleotide
  Sense strand starting at position 778 of SEQ ID NO: 1881820
ggagcaaccuucuuagauc

SEQ ID NO: 2073723 - RNA, 19 nt, Artificial Sequence
  Description of Artificial Sequence: Synthetic oligonucleotide
  Antisense strand to SEQ ID NO: 2073722
gaucuaagaagguugcucc

SEQ ID NO: 2073724 - RNA, 19 nt, Artificial Sequence
  Description of Artificial Sequence: Synthetic oligonucleotide
  Sense strand starting at position 820 of SEQ ID NO: 1881820
gggaguagguaacaagaua

SEQ ID NO: 2073725 - RNA, 19 nt, Artificial Sequence
  Description of Artificial Sequence: Synthetic oligonucleotide
  Antisense strand to SEQ ID NO: 2073724
uaucuuguuaccuacuccc

SEQ ID NO: 2073726 - RNA, 19 nt, Artificial Sequence
  Description of Artificial Sequence: Synthetic oligonucleotide
  Sense strand starting at position 1002 of SEQ ID NO: 1881820
ugagauuaagccuaagcca

SEQ ID NO: 2073727 - RNA, 19 nt, Artificial Sequence
  Description of Artificial Sequence: Synthetic oligonucleotide
  Antisense strand to SEQ ID NO: 2073726
uggcuuaggcuuaaucuca

SEQ ID NO: 2073728 - RNA, 19 nt, Artificial Sequence
  Description of Artificial Sequence: Synthetic oligonucleotide
  Sense strand starting at position 1030 of SEQ ID NO: 1881820
gggucucagucagucauca

SEQ ID NO: 2073729 - RNA, 19 nt, Artificial Sequence
  Description of Artificial Sequence: Synthetic oligonucleotide
  Antisense strand to SEQ ID NO: 2073728
ugaugacugacugagaccc

SEQ ID NO: 2073730 - RNA, 19 nt, Artificial Sequence
  Description of Artificial Sequence: Synthetic oligonucleotide
  Sense strand starting at position 1089 of SEQ ID NO: 1881820
ccuuccagcugucugagau

SEQ ID NO: 2073731 - RNA, 19 nt, Artificial Sequence
  Description of Artificial Sequence: Synthetic oligonucleotide
  Antisense strand to SEQ ID NO: 2073730
aucucagacagcuggaagg

SEQ ID NO: 2073732 - RNA, 19 nt, Artificial Sequence
  Description of Artificial Sequence: Synthetic oligonucleotide
  Sense strand starting at position 1090 of SEQ ID NO: 1881820
cuuccagcugucugagauu

SEQ ID NO: 2073733 - RNA, 19 nt, Artificial Sequence
  Description of Artificial Sequence: Synthetic oligonucleotide
  Antisense strand to SEQ ID NO: 2073732
aaucucagacagcuggaag

SEQ ID NO: 2073734 - RNA, 19 nt, Artificial Sequence
  Description of Artificial Sequence: Synthetic oligonucleotide
  Sense strand starting at position 1099 of SEQ ID NO: 1881820
gucugagauuaagcagaac

SEQ ID NO: 2073735 - RNA, 19 nt, Artificial Sequence
  Description of Artificial Sequence: Synthetic oligonucleotide
  Antisense strand to SEQ ID NO: 2073734
guucugcuuaaucucagac

SEQ ID NO: 2073736 - RNA, 19 nt, Artificial Sequence
  Description of Artificial Sequence: Synthetic oligonucleotide
  Sense strand starting at position 1205 of SEQ ID NO: 1881820
cgcagagguagcuaccauu

SEQ ID NO: 2073737 - RNA, 19 nt, Artificial Sequence
  Description of Artificial Sequence: Synthetic oligonucleotide
  Antisense strand to SEQ ID NO: 2073736
aaugguagcuaccucugcg

SEQ ID NO: 2073738 - RNA, 19 nt, Artificial Sequence
  Description of Artificial Sequence: Synthetic oligonucleotide
  Sense strand starting at position 1216 of SEQ ID NO: 1881820
cuaccauuugcguagaggu

SEQ ID NO: 2073739 - RNA, 19 nt, Artificial Sequence
  Description of Artificial Sequence: Synthetic oligonucleotide
  Antisense strand to SEQ ID NO: 2073738
accucuacgcaaaugguag

SEQ ID NO: 2073740 - RNA, 19 nt, Artificial Sequence
  Description of Artificial Sequence: Synthetic oligonucleotide
  Sense strand starting at position 1229 of SEQ ID NO: 1881820
agagguagcugggucuuua

SEQ ID NO: 2073741 - RNA, 19 nt, Artificial Sequence
  Description of Artificial Sequence: Synthetic oligonucleotide
  Antisense strand to SEQ ID NO: 2073740
uaaagacccagcuaccucu

SEQ ID NO: 2073742 - RNA, 19 nt, Artificial Sequence
  Description of Artificial Sequence: Synthetic oligonucleotide
  Sense strand starting at position 1242 of SEQ ID NO: 1881820
ucuuuaagguuagagggaa

SEQ ID NO: 2073743 - RNA, 19 nt, Artificial Sequence
  Description of Artificial Sequence: Synthetic oligonucleotide
  Antisense strand to SEQ ID NO: 2073742
uucccucuaaccuuaaaga

SEQ ID NO: 2073744 - RNA, 19 nt, Artificial Sequence
  Description of Artificial Sequence: Synthetic oligonucleotide
  Sense strand starting at position 1782 of SEQ ID NO: 1881820
ccugguuucggccauguuu

SEQ ID NO: 2073745 - RNA, 19 nt, Artificial Sequence
  Description of Artificial Sequence: Synthetic oligonucleotide
  Antisense strand to SEQ ID NO: 2073744
aaacauggccgaaaccagg

SEQ ID NO: 2073746 - RNA, 19 nt, Artificial Sequence
  Description of Artificial Sequence: Synthetic oligonucleotide
  Sense strand starting at position 1915 of SEQ ID NO: 1881820
cgcgguguucuuguaaauu

SEQ ID NO: 2073747 - RNA, 19 nt, Artificial Sequence
  Description of Artificial Sequence: Synthetic oligonucleotide
  Antisense strand to SEQ ID NO: 2073746
aauuuacaagaacaccgcg

SEQ ID NO: 2073748 - RNA, 19 nt, Artificial Sequence
  Description of Artificial Sequence: Synthetic oligonucleotide
  Sense strand starting at position 1927 of SEQ ID NO: 1881820
guaaauuagaaccggccua

SEQ ID NO: 2073749 - RNA, 19 nt, Artificial Sequence
  Description of Artificial Sequence: Synthetic oligonucleotide
  Antisense strand to SEQ ID NO: 2073748
uaggccgguucuaauuuac

SEQ ID NO: 2073750 - RNA, 19 nt, Artificial Sequence
  Description of Artificial Sequence: Synthetic oligonucleotide
  Sense strand starting at position 2497 of SEQ ID NO: 1881820
cuugcuggcuccuugauuu

SEQ ID NO: 2073751 - RNA, 19 nt, Artificial Sequence
  Description of Artificial Sequence: Synthetic oligonucleotide
  Antisense strand to SEQ ID NO: 2073750
aaaucaaggagccagcaag

SEQ ID NO: 2073752 - RNA, 19 nt, Artificial Sequence
  Description of Artificial Sequence: Synthetic oligonucleotide
  Sense strand starting at position 2555 of SEQ ID NO: 1881820
gagacagucuguucuguca

SEQ ID NO: 2073753 - RNA, 19 nt, Artificial Sequence
  Description of Artificial Sequence: Synthetic oligonucleotide
  Antisense strand to SEQ ID NO: 2073752
ugacagaacagacugucuc

SEQ ID NO: 2073754 - RNA, 19 nt, Artificial Sequence
  Description of Artificial Sequence: Synthetic oligonucleotide
  Sense strand starting at position 2927 of SEQ ID NO: 1881820
ugaauacagccaugcuuga

SEQ ID NO: 2073755 - RNA, 19 nt, Artificial Sequence
  Description of Artificial Sequence: Synthetic oligonucleotide
  Antisense strand to SEQ ID NO: 2073754
ucaagcauggcuguauuca

SEQ ID NO: 2073756 - RNA, 19 nt, Artificial Sequence
  Description of Artificial Sequence: Synthetic oligonucleotide
  Sense strand starting at position 2932 of SEQ ID NO: 1881820
acagccaugcuugauaauu

SEQ ID NO: 2073757 - RNA, 19 nt, Artificial Sequence
  Description of Artificial Sequence: Synthetic oligonucleotide
  Antisense strand to SEQ ID NO: 2073756
aauuaucaagcauggcugu

SEQ ID NO: 2073758 - RNA, 19 nt, Artificial Sequence
  Description of Artificial Sequence: Synthetic oligonucleotide
  Sense strand starting at position 2973 of SEQ ID NO: 1881820
gguguuaggaaguauuguu

SEQ ID NO: 2073759 - RNA, 19 nt, Artificial Sequence
  Description of Artificial Sequence: Synthetic oligonucleotide
  Antisense strand to SEQ ID NO: 2073758
aacaauacuuccuaacacc

SEQ ID NO: 2073760 - RNA, 19 nt, Artificial Sequence
  Description of Artificial Sequence: Synthetic oligonucleotide
  Sense strand starting at position 2991 of SEQ ID NO: 1881820
uuuaaauucuaagacagug

SEQ ID NO: 2073761 - RNA, 19 nt, Artificial Sequence
  Description of Artificial Sequence: Synthetic oligonucleotide
  Antisense strand to SEQ ID NO: 2073760
cacugucuuagaauuuaaa

SEQ ID NO: 2073762 - RNA, 19 nt, Artificial Sequence
  Description of Artificial Sequence: Synthetic oligonucleotide
  Sense strand starting at position 3248 of SEQ ID NO: 1881820
ucugacacuugcucaaguu

SEQ ID NO: 2073763 - RNA, 19 nt, Artificial Sequence
  Description of Artificial Sequence: Synthetic oligonucleotide
  Antisense strand to SEQ ID NO: 2073762
aacuugagcaagugucaga

SEQ ID NO: 2073764 - RNA, 19 nt, Artificial Sequence
  Description of Artificial Sequence: Synthetic oligonucleotide
  Sense strand starting at position 3249 of SEQ ID NO: 1881820
cugacacuugcucaaguuu

SEQ ID NO: 2073765 - RNA, 19 nt, Artificial Sequence
  Description of Artificial Sequence: Synthetic oligonucleotide
  Antisense strand to SEQ ID NO: 2073764
aaacuugagcaagugucag

SEQ ID NO: 2073766 - RNA, 19 nt, Artificial Sequence
  Description of Artificial Sequence: Synthetic oligonucleotide
  Sense strand starting at position 3426 of SEQ ID NO: 1881820
ccauguucuggucagcagu

SEQ ID NO: 2073767 - RNA, 19 nt, Artificial Sequence
  Description of Artificial Sequence: Synthetic oligonucleotide
  Antisense strand to SEQ ID NO: 2073766
acugcugaccagaacaugg

SEQ ID NO: 2073768 - RNA, 19 nt, Artificial Sequence
  Description of Artificial Sequence: Synthetic oligonucleotide
  Sense strand starting at position 3450 of SEQ ID NO: 1881820
gguucauuccguuacgaau

SEQ ID NO: 2073769 - RNA, 19 nt, Artificial Sequence
  Description of Artificial Sequence: Synthetic oligonucleotide
  Antisense strand to SEQ ID NO: 2073768
auucguaacggaaugaacc

SEQ ID NO: 2073770 - RNA, 19 nt, Artificial Sequence
  Description of Artificial Sequence: Synthetic oligonucleotide
  Sense strand starting at position 3888 of SEQ ID NO: 1881820
agagcuagcuugcugauuu

SEQ ID NO: 2073771 - RNA, 19 nt, Artificial Sequence
  Description of Artificial Sequence: Synthetic oligonucleotide
  Antisense strand to SEQ ID NO: 2073770
aaaucagcaagcuagcucu

SEQ ID NO: 2073772 - RNA, 19 nt, Artificial Sequence
  Description of Artificial Sequence: Synthetic oligonucleotide
  Sense strand starting at position 134 of SEQ ID NO: 1881821
auacaugauuucugggaga

SEQ ID NO: 2073773 - RNA, 19 nt, Artificial Sequence
  Description of Artificial Sequence: Synthetic oligonucleotide
  Antisense strand to SEQ ID NO: 2073772
ucucccagaaaucauguau

SEQ ID NO: 2073774 - RNA, 19 nt, Artificial Sequence
  Description of Artificial Sequence: Synthetic oligonucleotide
  Sense strand starting at position 196 of SEQ ID NO: 1881821
ccauuacucccaggucaga

SEQ ID NO: 2073775 - RNA, 19 nt, Artificial Sequence
  Description of Artificial Sequence: Synthetic oligonucleotide
  Antisense strand to SEQ ID NO: 2073774
ucugaccugggaguaaugg

SEQ ID NO: 2073776 - RNA, 19 nt, Artificial Sequence
  Description of Artificial Sequence: Synthetic oligonucleotide
  Sense strand starting at position 214 of SEQ ID NO: 1881821
aguccuaguugugcaauuu

SEQ ID NO: 2073777 - RNA, 19 nt, Artificial Sequence
  Description of Artificial Sequence: Synthetic oligonucleotide
  Antisense strand to SEQ ID NO: 2073776
aaauugcacaacuaggacu

SEQ ID NO: 2073778 - RNA, 19 nt, Artificial Sequence
  Description of Artificial Sequence: Synthetic oligonucleotide
  Sense strand starting at position 215 of SEQ ID NO: 1881821
guccuaguugugcaauuuc

SEQ ID NO: 2073779 - RNA, 19 nt, Artificial Sequence
  Description of Artificial Sequence: Synthetic oligonucleotide
  Antisense strand to SEQ ID NO: 2073778
gaaauugcacaacuaggac

SEQ ID NO: 2073780 - RNA, 19 nt, Artificial Sequence
  Description of Artificial Sequence: Synthetic oligonucleotide
  Sense strand starting at position 278 of SEQ ID NO: 1881821
acauauuugucugauacuu

SEQ ID NO: 2073781 - RNA, 19 nt, Artificial Sequence
  Description of Artificial Sequence: Synthetic oligonucleotide
  Antisense strand to SEQ ID NO: 2073780
aaguaucagacaaauaugu

SEQ ID NO: 2073782 - RNA, 19 nt, Artificial Sequence
  Description of Artificial Sequence: Synthetic oligonucleotide
  Sense strand starting at position 280 of SEQ ID NO: 1881821
auauuugucugauacuuga

SEQ ID NO: 2073783 - RNA, 19 nt, Artificial Sequence
  Description of Artificial Sequence: Synthetic oligonucleotide
  Antisense strand to SEQ ID NO: 2073782
ucaaguaucagacaaauau

SEQ ID NO: 2073784 - RNA, 19 nt, Artificial Sequence
  Description of Artificial Sequence: Synthetic oligonucleotide
  Sense strand starting at position 283 of SEQ ID NO: 1881821
uuugucugauacuugauua

SEQ ID NO: 2073785 - RNA, 19 nt, Artificial Sequence
  Description of Artificial Sequence: Synthetic oligonucleotide
  Antisense strand to SEQ ID NO: 2073784
uaaucaaguaucagacaaa

SEQ ID NO: 2073786 - RNA, 19 nt, Artificial Sequence
  Description of Artificial Sequence: Synthetic oligonucleotide
  Sense strand starting at position 350 of SEQ ID NO: 1881821
uuguguaaagcugaagagu

SEQ ID NO: 2073787 - RNA, 19 nt, Artificial Sequence
  Description of Artificial Sequence: Synthetic oligonucleotide
  Antisense strand to SEQ ID NO: 2073786
acucuucagcuuuacacaa

SEQ ID NO: 2073788 - RNA, 19 nt, Artificial Sequence
  Description of Artificial Sequence: Synthetic oligonucleotide
  Sense strand starting at position 353 of SEQ ID NO: 1881821
uguaaagcugaagaguaua

SEQ ID NO: 2073789 - RNA, 19 nt, Artificial Sequence
  Description of Artificial Sequence: Synthetic oligonucleotide
  Antisense strand to SEQ ID NO: 2073788
uauacucuucagcuuuaca

SEQ ID NO: 2073790 - RNA, 19 nt, Artificial Sequence
  Description of Artificial Sequence: Synthetic oligonucleotide
  Sense strand starting at position 506 of SEQ ID NO: 1881821
uugucucaggaguaauucu

SEQ ID NO: 2073791 - RNA, 19 nt, Artificial Sequence
  Description of Artificial Sequence: Synthetic oligonucleotide
  Antisense strand to SEQ ID NO: 2073790
agaauuacuccugagacaa

SEQ ID NO: 2073792 - RNA, 19 nt, Artificial Sequence
  Description of Artificial Sequence: Synthetic oligonucleotide
  Sense strand starting at position 584 of SEQ ID NO: 1881821
ggacuucggugguucaaau

SEQ ID NO: 2073793 - RNA, 19 nt, Artificial Sequence
  Description of Artificial Sequence: Synthetic oligonucleotide
  Antisense strand to SEQ ID NO: 2073792
auuugaaccaccgaagucc

SEQ ID NO: 2073794 - RNA, 19 nt, Artificial Sequence
  Description of Artificial Sequence: Synthetic oligonucleotide
  Sense strand starting at position 755 of SEQ ID NO: 1881821
gaaucuaaccgacauuagu

SEQ ID NO: 2073795 - RNA, 19 nt, Artificial Sequence
  Description of Artificial Sequence: Synthetic oligonucleotide
  Antisense strand to SEQ ID NO: 2073794
acuaaugucgguuagauuc

SEQ ID NO: 2073796 - RNA, 19 nt, Artificial Sequence
  Description of Artificial Sequence: Synthetic oligonucleotide
  Sense strand starting at position 858 of SEQ ID NO: 1881821
ugcccagcuuuaucugaga

SEQ ID NO: 2073797 - RNA, 19 nt, Artificial Sequence
  Description of Artificial Sequence: Synthetic oligonucleotide
  Antisense strand to SEQ ID NO: 2073796
ucucagauaaagcugggca

SEQ ID NO: 2073798 - RNA, 19 nt, Artificial Sequence
  Description of Artificial Sequence: Synthetic oligonucleotide
  Sense strand starting at position 980 of SEQ ID NO: 1881821
cuuagucucuuggcauaaa

SEQ ID NO: 2073799 - RNA, 19 nt, Artificial Sequence
  Description of Artificial Sequence: Synthetic oligonucleotide
  Antisense strand to SEQ ID NO: 2073798
uuuaugccaagagacuaag

SEQ ID NO: 2073800 - RNA, 19 nt, Artificial Sequence
  Description of Artificial Sequence: Synthetic oligonucleotide
  Sense strand starting at position 1325 of SEQ ID NO: 1881821
ggagauugggccugaguca

SEQ ID NO: 2073801 - RNA, 19 nt, Artificial Sequence
  Description of Artificial Sequence: Synthetic oligonucleotide
  Antisense strand to SEQ ID NO: 2073800
ugacucaggcccaaucucc

SEQ ID NO: 2073802 - RNA, 19 nt, Artificial Sequence
  Description of Artificial Sequence: Synthetic oligonucleotide
  Sense strand starting at position 1688 of SEQ ID NO: 1881821
cgaggauccgcggacgaua

SEQ ID NO: 2073803 - RNA, 19 nt, Artificial Sequence
  Description of Artificial Sequence: Synthetic oligonucleotide
  Antisense strand to SEQ ID NO: 2073802
uaucguccgcggauccucg

SEQ ID NO: 2073804 - RNA, 19 nt, Artificial Sequence
  Description of Artificial Sequence: Synthetic oligonucleotide
  Sense strand starting at position 1772 of SEQ ID NO: 1881821
gcugguauuuccuugcgga

SEQ ID NO: 2073805 - RNA, 19 nt, Artificial Sequence
  Description of Artificial Sequence: Synthetic oligonucleotide
  Antisense strand to SEQ ID NO: 2073804
uccgcaaggaaauaccagc

SEQ ID NO: 2073806 - RNA, 19 nt, Artificial Sequence
  Description of Artificial Sequence: Synthetic oligonucleotide
  Sense strand starting at position 1773 of SEQ ID NO: 1881821
cugguauuuccuugcggau

SEQ ID NO: 2073807 - RNA, 19 nt, Artificial Sequence
  Description of Artificial Sequence: Synthetic oligonucleotide
  Antisense strand to SEQ ID NO: 2073806
auccgcaaggaaauaccag

SEQ ID NO: 2073808 - RNA, 19 nt, Artificial Sequence
  Description of Artificial Sequence: Synthetic oligonucleotide
  Sense strand starting at position 1785 of SEQ ID NO: 1881821
ugcggaugaucuucccaaa

SEQ ID NO: 2073809 - RNA, 19 nt, Artificial Sequence
  Description of Artificial Sequence: Synthetic oligonucleotide
  Antisense strand to SEQ ID NO: 2073808
uuugggaagaucauccgca

SEQ ID NO: 2073810 - RNA, 19 nt, Artificial Sequence
  Description of Artificial Sequence: Synthetic oligonucleotide
  Sense strand starting at position 2061 of SEQ ID NO: 1881821
ggaaguuccuggucuugag

SEQ ID NO: 2073811 - RNA, 19 nt, Artificial Sequence
  Description of Artificial Sequence: Synthetic oligonucleotide
  Antisense strand to SEQ ID NO: 2073810
cucaagaccaggaacuucc

SEQ ID NO: 2073812 - RNA, 19 nt, Artificial Sequence
  Description of Artificial Sequence: Synthetic oligonucleotide
  Sense strand starting at position 2086 of SEQ ID NO: 1881821
ggagauuccuaagucguuu

SEQ ID NO: 2073813 - RNA, 19 nt, Artificial Sequence
  Description of Artificial Sequence: Synthetic oligonucleotide
  Antisense strand to SEQ ID NO: 2073812
aaacgacuuaggaaucucc

SEQ ID NO: 2073814 - RNA, 19 nt, Artificial Sequence
  Description of Artificial Sequence: Synthetic oligonucleotide
  Sense strand starting at position 2410 of SEQ ID NO: 1881821
uaagaaucuuuggagauga

SEQ ID NO: 2073815 - RNA, 19 nt, Artificial Sequence
  Description of Artificial Sequence: Synthetic oligonucleotide
  Antisense strand to SEQ ID NO: 2073814
ucaucuccaaagauucuua

SEQ ID NO: 2073816 - RNA, 19 nt, Artificial Sequence
  Description of Artificial Sequence: Synthetic oligonucleotide
  Sense strand starting at position 2458 of SEQ ID NO: 1881821
ccuagacugcucugcaaag

SEQ ID NO: 2073817 - RNA, 19 nt, Artificial Sequence
  Description of Artificial Sequence: Synthetic oligonucleotide
  Antisense strand to SEQ ID NO: 2073816
cuuugcagagcagucuagg

SEQ ID NO: 2073818 - RNA, 19 nt, Artificial Sequence
  Description of Artificial Sequence: Synthetic oligonucleotide
  Sense strand starting at position 2459 of SEQ ID NO: 1881821
cuagacugcucugcaaaga

SEQ ID NO: 2073819 - RNA, 19 nt, Artificial Sequence
  Description of Artificial Sequence: Synthetic oligonucleotide
  Antisense strand to SEQ ID NO: 2073818
ucuuugcagagcagucuag

SEQ ID NO: 2073820 - RNA, 19 nt, Artificial Sequence
  Description of Artificial Sequence: Synthetic oligonucleotide
  Sense strand starting at position 2703 of SEQ ID NO: 1881821
auaccagaccucuaagugu

SEQ ID NO: 2073821 - RNA, 19 nt, Artificial Sequence
  Description of Artificial Sequence: Synthetic oligonucleotide
  Antisense strand to SEQ ID NO: 2073820
acacuuagaggucugguau

SEQ ID NO: 2073822 - RNA, 19 nt, Artificial Sequence
  Description of Artificial Sequence: Synthetic oligonucleotide
  Sense strand starting at position 2709 of SEQ ID NO: 1881821
gaccucuaaguguacguau

SEQ ID NO: 2073823 - RNA, 19 nt, Artificial Sequence
  Description of Artificial Sequence: Synthetic oligonucleotide
  Antisense strand to SEQ ID NO: 2073822
auacguacacuuagagguc

SEQ ID NO: 2073824 - RNA, 19 nt, Artificial Sequence
  Description of Artificial Sequence: Synthetic oligonucleotide
  Sense strand starting at position 3090 of SEQ ID NO: 1881821
gguugccuuuaaucucaaa

SEQ ID NO: 2073825 - RNA, 19 nt, Artificial Sequence
  Description of Artificial Sequence: Synthetic oligonucleotide
  Antisense strand to SEQ ID NO: 2073824
uuugagauuaaaggcaacc

SEQ ID NO: 2073826 - RNA, 19 nt, Artificial Sequence
  Description of Artificial Sequence: Synthetic oligonucleotide
  Sense strand starting at position 3264 of SEQ ID NO: 1881821
ccuacaaguuagguuucua

SEQ ID NO: 2073827 - RNA, 19 nt, Artificial Sequence
  Description of Artificial Sequence: Synthetic oligonucleotide
  Antisense strand to SEQ ID NO: 2073826
uagaaaccuaacuuguagg

SEQ ID NO: 2073828 - RNA, 19 nt, Artificial Sequence
  Description of Artificial Sequence: Synthetic oligonucleotide
  Sense strand starting at position 3279 of SEQ ID NO: 1881821
ucuaacuuuccaggugaua

SEQ ID NO: 2073829 - RNA, 19 nt, Artificial Sequence
  Description of Artificial Sequence: Synthetic oligonucleotide
  Antisense strand to SEQ ID NO: 2073828
uaucaccuggaaaguuaga

SEQ ID NO: 2073830 - RNA, 19 nt, Artificial Sequence
  Description of Artificial Sequence: Synthetic oligonucleotide
  Sense strand starting at position 3338 of SEQ ID NO: 1881821
gauacaagggaaugucuuu

SEQ ID NO: 2073831 - RNA, 19 nt, Artificial Sequence
  Description of Artificial Sequence: Synthetic oligonucleotide
  Antisense strand to SEQ ID NO: 2073830
aaagacauucccuuguauc

SEQ ID NO: 2073832 - RNA, 19 nt, Artificial Sequence
  Description of Artificial Sequence: Synthetic oligonucleotide
  Sense strand starting at position 3344 of SEQ ID NO: 1881821
agggaaugucuuuguagga

SEQ ID NO: 2073833 - RNA, 19 nt, Artificial Sequence
  Description of Artificial Sequence: Synthetic oligonucleotide
  Antisense strand to SEQ ID NO: 2073832
uccuacaaagacauucccu

SEQ ID NO: 2073834 - RNA, 19 nt, Artificial Sequence
  Description of Artificial Sequence: Synthetic oligonucleotide
  Sense strand starting at position 3345 of SEQ ID NO: 1881821
gggaaugucuuuguaggaa

SEQ ID NO: 2073835 - RNA, 19 nt, Artificial Sequence
  Description of Artificial Sequence: Synthetic oligonucleotide
  Antisense strand to SEQ ID NO: 2073834
uuccuacaaagacauuccc

SEQ ID NO: 2073836 - RNA, 19 nt, Artificial Sequence
  Description of Artificial Sequence: Synthetic oligonucleotide
  Sense strand starting at position 3392 of SEQ ID NO: 1881821
guaucauguccgcaacuua

SEQ ID NO: 2073837 - RNA, 19 nt, Artificial Sequence
  Description of Artificial Sequence: Synthetic oligonucleotide
  Antisense strand to SEQ ID NO: 2073836
uaaguugcggacaugauac

SEQ ID NO: 2073838 - RNA, 19 nt, Artificial Sequence
  Description of Artificial Sequence: Synthetic oligonucleotide
  Sense strand starting at position 3433 of SEQ ID NO: 1881821
agugucugucuauagguaa

SEQ ID NO: 2073839 - RNA, 19 nt, Artificial Sequence
  Description of Artificial Sequence: Synthetic oligonucleotide
  Antisense strand to SEQ ID NO: 2073838
uuaccuauagacagacacu

SEQ ID NO: 2073840 - RNA, 19 nt, Artificial Sequence
  Description of Artificial Sequence: Synthetic oligonucleotide
  Sense strand starting at position 3436 of SEQ ID NO: 1881821
gucugucuauagguaauua

SEQ ID NO: 2073841 - RNA, 19 nt, Artificial Sequence
  Description of Artificial Sequence: Synthetic oligonucleotide
  Antisense strand to SEQ ID NO: 2073840
uaauuaccuauagacagac

SEQ ID NO: 2073842 - RNA, 19 nt, Artificial Sequence
  Description of Artificial Sequence: Synthetic oligonucleotide
  Sense strand starting at position 3440 of SEQ ID NO: 1881821
gucuauagguaauuagaga

SEQ ID NO: 2073843 - RNA, 19 nt, Artificial Sequence
  Description of Artificial Sequence: Synthetic oligonucleotide
  Antisense strand to SEQ ID NO: 2073842
ucucuaauuaccuauagac

SEQ ID NO: 2073844 - RNA, 19 nt, Artificial Sequence
  Description of Artificial Sequence: Synthetic oligonucleotide
  Sense strand starting at position 3694 of SEQ ID NO: 1881821
cccuuaauuccagacuggu

SEQ ID NO: 2073845 - RNA, 19 nt, Artificial Sequence
  Description of Artificial Sequence: Synthetic oligonucleotide
  Antisense strand to SEQ ID NO: 2073844
accagucuggaauuaaggg

SEQ ID NO: 2073846 - RNA, 19 nt, Artificial Sequence
  Description of Artificial Sequence: Synthetic oligonucleotide
  Sense strand starting at position 3700 of SEQ ID NO: 1881821
auuccagacuggucuguga

SEQ ID NO: 2073847 - RNA, 19 nt, Artificial Sequence
  Description of Artificial Sequence: Synthetic oligonucleotide
  Antisense strand to SEQ ID NO: 2073846
ucacagaccagucuggaau

SEQ ID NO: 2073848 - RNA, 19 nt, Artificial Sequence
  Description of Artificial Sequence: Synthetic oligonucleotide
  Sense strand starting at position 3704 of SEQ ID NO: 1881821
cagacuggucugugacaua

SEQ ID NO: 2073849 - RNA, 19 nt, Artificial Sequence
  Description of Artificial Sequence: Synthetic oligonucleotide
  Antisense strand to SEQ ID NO: 2073848
uaugucacagaccagucug

SEQ ID NO: 2073850 - RNA, 19 nt, Artificial Sequence
  Description of Artificial Sequence: Synthetic oligonucleotide
  Sense strand starting at position 3978 of SEQ ID NO: 1881821
aucucuuuccuggaguacu

SEQ ID NO: 2073851 - RNA, 19 nt, Artificial Sequence
  Description of Artificial Sequence: Synthetic oligonucleotide
  Antisense strand to SEQ ID NO: 2073850
aguacuccaggaaagagau

SEQ ID NO: 2073852 - RNA, 19 nt, Artificial Sequence
  Description of Artificial Sequence: Synthetic oligonucleotide
  Sense strand starting at position 145 of SEQ ID NO: 1881822
aucuuaauacaugguugaa

SEQ ID NO: 2073853 - RNA, 19 nt, Artificial Sequence
  Description of Artificial Sequence: Synthetic oligonucleotide
  Antisense strand to SEQ ID NO: 2073852
uucaaccauguauuaagau

SEQ ID NO: 2073854 - RNA, 19 nt, Artificial Sequence
  Description of Artificial Sequence: Synthetic oligonucleotide
  Sense strand starting at position 147 of SEQ ID NO: 1881822
cuuaauacaugguugaauu

SEQ ID NO: 2073855 - RNA, 19 nt, Artificial Sequence
  Description of Artificial Sequence: Synthetic oligonucleotide
  Antisense strand to SEQ ID NO: 2073854
aauucaaccauguauuaag

SEQ ID NO: 2073856 - RNA, 19 nt, Artificial Sequence
  Description of Artificial Sequence: Synthetic oligonucleotide
  Sense strand starting at position 526 of SEQ ID NO: 1881822
ucaggugaugccuacauau

SEQ ID NO: 2073857 - RNA, 19 nt, Artificial Sequence
  Description of Artificial Sequence: Synthetic oligonucleotide
  Antisense strand to SEQ ID NO: 2073856
auauguaggcaucaccuga

SEQ ID NO: 2073858 - RNA, 19 nt, Artificial Sequence
  Description of Artificial Sequence: Synthetic oligonucleotide
  Sense strand starting at position 528 of SEQ ID NO: 1881822
aggugaugccuacauauca

SEQ ID NO: 2073859 - RNA, 19 nt, Artificial Sequence
  Description of Artificial Sequence: Synthetic oligonucleotide
  Antisense strand to SEQ ID NO: 2073858
ugauauguaggcaucaccu

SEQ ID NO: 2073860 - RNA, 19 nt, Artificial Sequence
  Description of Artificial Sequence: Synthetic oligonucleotide
  Sense strand starting at position 608 of SEQ ID NO: 1881822
ucuccaugagcuugggaga

SEQ ID NO: 2073861 - RNA, 19 nt, Artificial Sequence
  Description of Artificial Sequence: Synthetic oligonucleotide
  Antisense strand to SEQ ID NO: 2073860
ucucccaagcucauggaga

SEQ ID NO: 2073862 - RNA, 19 nt, Artificial Sequence
  Description of Artificial Sequence: Synthetic oligonucleotide
  Sense strand starting at position 609 of SEQ ID NO: 1881822
cuccaugagcuugggagaa

SEQ ID NO: 2073863 - RNA, 19 nt, Artificial Sequence
  Description of Artificial Sequence: Synthetic oligonucleotide
  Antisense strand to SEQ ID NO: 2073862
uucucccaagcucauggag

SEQ ID NO: 2073864 - RNA, 19 nt, Artificial Sequence
  Description of Artificial Sequence: Synthetic oligonucleotide
  Sense strand starting at position 830 of SEQ ID NO: 1881822
aacuuaauugaccacggua

SEQ ID NO: 2073865 - RNA, 19 nt, Artificial Sequence
  Description of Artificial Sequence: Synthetic oligonucleotide
  Antisense strand to SEQ ID NO: 2073864
uaccguggucaauuaaguu

SEQ ID NO: 2073866 - RNA, 19 nt, Artificial Sequence
  Description of Artificial Sequence: Synthetic oligonucleotide
  Sense strand starting at position 903 of SEQ ID NO: 1881822
aguaguuaucugcauagga

SEQ ID NO: 2073867 - RNA, 19 nt, Artificial Sequence
  Description of Artificial Sequence: Synthetic oligonucleotide
  Antisense strand to SEQ ID NO: 2073866
uccuaugcagauaacuacu

SEQ ID NO: 2073868 - RNA, 19 nt, Artificial Sequence
  Description of Artificial Sequence: Synthetic oligonucleotide
  Sense strand starting at position 905 of SEQ ID NO: 1881822
uaguuaucugcauaggaua

SEQ ID NO: 2073869 - RNA, 19 nt, Artificial Sequence
  Description of Artificial Sequence: Synthetic oligonucleotide
  Antisense strand to SEQ ID NO: 2073868
uauccuaugcagauaacua

SEQ ID NO: 2073870 - RNA, 19 nt, Artificial Sequence
  Description of Artificial Sequence: Synthetic oligonucleotide
  Sense strand starting at position 1138 of SEQ ID NO: 1881822
ucaagucacucaguaaaug

SEQ ID NO: 2073871 - RNA, 19 nt, Artificial Sequence
  Description of Artificial Sequence: Synthetic oligonucleotide
  Antisense strand to SEQ ID NO: 2073870
cauuuacugagugacuuga

SEQ ID NO: 2073872 - RNA, 19 nt, Artificial Sequence
  Description of Artificial Sequence: Synthetic oligonucleotide
  Sense strand starting at position 1372 of SEQ ID NO: 1881822
gcaaaugucuuaccaauag

SEQ ID NO: 2073873 - RNA, 19 nt, Artificial Sequence
  Description of Artificial Sequence: Synthetic oligonucleotide
  Antisense strand to SEQ ID NO: 2073872
cuauugguaagacauuugc

SEQ ID NO: 2073874 - RNA, 19 nt, Artificial Sequence
  Description of Artificial Sequence: Synthetic oligonucleotide
  Sense strand starting at position 1376 of SEQ ID NO: 1881822
augucuuaccaauaggucu

SEQ ID NO: 2073875 - RNA, 19 nt, Artificial Sequence
  Description of Artificial Sequence: Synthetic oligonucleotide
  Antisense strand to SEQ ID NO: 2073874
agaccuauugguaagacau

SEQ ID NO: 2073876 - RNA, 19 nt, Artificial Sequence
  Description of Artificial Sequence: Synthetic oligonucleotide
  Sense strand starting at position 1382 of SEQ ID NO: 1881822
uaccaauaggucuggagua

SEQ ID NO: 2073877 - RNA, 19 nt, Artificial Sequence
  Description of Artificial Sequence: Synthetic oligonucleotide
  Antisense strand to SEQ ID NO: 2073876
uacuccagaccuauuggua

SEQ ID NO: 2073878 - RNA, 19 nt, Artificial Sequence
  Description of Artificial Sequence: Synthetic oligonucleotide
  Sense strand starting at position 1455 of SEQ ID NO: 1881822
accaaugugauguggaaag

SEQ ID NO: 2073879 - RNA, 19 nt, Artificial Sequence
  Description of Artificial Sequence: Synthetic oligonucleotide
  Antisense strand to SEQ ID NO: 2073878
cuuuccacaucacauuggu

SEQ ID NO: 2073880 - RNA, 19 nt, Artificial Sequence
  Description of Artificial Sequence: Synthetic oligonucleotide
  Sense strand starting at position 1523 of SEQ ID NO: 1881822
uugauaugcccugagguag

SEQ ID NO: 2073881 - RNA, 19 nt, Artificial Sequence
  Description of Artificial Sequence: Synthetic oligonucleotide
  Antisense strand to SEQ ID NO: 2073880
cuaccucagggcauaucaa

SEQ ID NO: 2073882 - RNA, 19 nt, Artificial Sequence
  Description of Artificial Sequence: Synthetic oligonucleotide
  Sense strand starting at position 1585 of SEQ ID NO: 1881822
gcuucuggucggccuuaua

SEQ ID NO: 2073883 - RNA, 19 nt, Artificial Sequence
  Description of Artificial Sequence: Synthetic oligonucleotide
  Antisense strand to SEQ ID NO: 2073882
uauaaggccgaccagaagc

SEQ ID NO: 2073884 - RNA, 19 nt, Artificial Sequence
  Description of Artificial Sequence: Synthetic oligonucleotide
  Sense strand starting at position 1594 of SEQ ID NO: 1881822
cggccuuauagacagggau

SEQ ID NO: 2073885 - RNA, 19 nt, Artificial Sequence
  Description of Artificial Sequence: Synthetic oligonucleotide
  Antisense strand to SEQ ID NO: 2073884
aucccugucuauaaggccg

SEQ ID NO: 2073886 - RNA, 19 nt, Artificial Sequence
  Description of Artificial Sequence: Synthetic oligonucleotide
  Sense strand starting at position 1775 of SEQ ID NO: 1881822
gcgaguugaauggacauau

SEQ ID NO: 2073887 - RNA, 19 nt, Artificial Sequence
  Description of Artificial Sequence: Synthetic oligonucleotide
  Antisense strand to SEQ ID NO: 2073886
auauguccauucaacucgc

SEQ ID NO: 2073888 - RNA, 19 nt, Artificial Sequence
  Description of Artificial Sequence: Synthetic oligonucleotide
  Sense strand starting at position 1944 of SEQ ID NO: 1881822
gcccucacuccauagguaa

SEQ ID NO: 2073889 - RNA, 19 nt, Artificial Sequence
  Description of Artificial Sequence: Synthetic oligonucleotide
  Antisense strand to SEQ ID NO: 2073888
uuaccuauggagugagggc

SEQ ID NO: 2073890 - RNA, 19 nt, Artificial Sequence
  Description of Artificial Sequence: Synthetic oligonucleotide
  Sense strand starting at position 1964 of SEQ ID NO: 1881822
gaaaccaauguguggauua

SEQ ID NO: 2073891 - RNA, 19 nt, Artificial Sequence
  Description of Artificial Sequence: Synthetic oligonucleotide
  Antisense strand to SEQ ID NO: 2073890
uaauccacacauugguuuc

SEQ ID NO: 2073892 - RNA, 19 nt, Artificial Sequence
  Description of Artificial Sequence: Synthetic oligonucleotide
  Sense strand starting at position 1966 of SEQ ID NO: 1881822
aaccaauguguggauuauu

SEQ ID NO: 2073893 - RNA, 19 nt, Artificial Sequence
  Description of Artificial Sequence: Synthetic oligonucleotide
  Antisense strand to SEQ ID NO: 2073892
aauaauccacacauugguu

SEQ ID NO: 2073894 - RNA, 19 nt, Artificial Sequence
  Description of Artificial Sequence: Synthetic oligonucleotide
  Sense strand starting at position 2065 of SEQ ID NO: 1881822
cccauugugagauggaacu

SEQ ID NO: 2073895 - RNA, 19 nt, Artificial Sequence
  Description of Artificial Sequence: Synthetic oligonucleotide
  Antisense strand to SEQ ID NO: 2073894
aguuccaucucacaauggg

SEQ ID NO: 2073896 - RNA, 19 nt, Artificial Sequence
  Description of Artificial Sequence: Synthetic oligonucleotide
  Sense strand starting at position 2354 of SEQ ID NO: 1881822
uauaaaguggcucaaguuu

SEQ ID NO: 2073897 - RNA, 19 nt, Artificial Sequence
  Description of Artificial Sequence: Synthetic oligonucleotide
  Antisense strand to SEQ ID NO: 2073896
aaacuugagccacuuuaua

SEQ ID NO: 2073898 - RNA, 19 nt, Artificial Sequence
  Description of Artificial Sequence: Synthetic oligonucleotide
  Sense strand starting at position 2445 of SEQ ID NO: 1881822
gcuuauacagaucaaguua

SEQ ID NO: 2073899 - RNA, 19 nt, Artificial Sequence
  Description of Artificial Sequence: Synthetic oligonucleotide
  Antisense strand to SEQ ID NO: 2073898
uaacuugaucuguauaagc

SEQ ID NO: 2073900 - RNA, 19 nt, Artificial Sequence
  Description of Artificial Sequence: Synthetic oligonucleotide
  Sense strand starting at position 2521 of SEQ ID NO: 1881822
aaagcauaggucuacaagu

SEQ ID NO: 2073901 - RNA, 19 nt, Artificial Sequence
  Description of Artificial Sequence: Synthetic oligonucleotide
  Antisense strand to SEQ ID NO: 2073900
acuuguagaccuaugcuuu

SEQ ID NO: 2073902 - RNA, 19 nt, Artificial Sequence
  Description of Artificial Sequence: Synthetic oligonucleotide
  Sense strand starting at position 2523 of SEQ ID NO: 1881822
agcauaggucuacaaguga

SEQ ID NO: 2073903 - RNA, 19 nt, Artificial Sequence
  Description of Artificial Sequence: Synthetic oligonucleotide
  Antisense strand to SEQ ID NO: 2073902
ucacuuguagaccuaugcu

SEQ ID NO: 2073904 - RNA, 19 nt, Artificial Sequence
  Description of Artificial Sequence: Synthetic oligonucleotide
  Sense strand starting at position 2562 of SEQ ID NO: 1881822
uggcucugucauuaugaua

SEQ ID NO: 2073905 - RNA, 19 nt, Artificial Sequence
  Description of Artificial Sequence: Synthetic oligonucleotide
  Antisense strand to SEQ ID NO: 2073904
uaucauaaugacagagcca

SEQ ID NO: 2073906 - RNA, 19 nt, Artificial Sequence
  Description of Artificial Sequence: Synthetic oligonucleotide
  Sense strand starting at position 2636 of SEQ ID NO: 1881822
gggauccuuuacuuccauu

SEQ ID NO: 2073907 - RNA, 19 nt, Artificial Sequence
  Description of Artificial Sequence: Synthetic oligonucleotide
  Antisense strand to SEQ ID NO: 2073906
aauggaaguaaaggauccc

SEQ ID NO: 2073908 - RNA, 19 nt, Artificial Sequence
  Description of Artificial Sequence: Synthetic oligonucleotide
  Sense strand starting at position 2688 of SEQ ID NO: 1881822
agcucuggccuacagagaa

SEQ ID NO: 2073909 - RNA, 19 nt, Artificial Sequence
  Description of Artificial Sequence: Synthetic oligonucleotide
  Antisense strand to SEQ ID NO: 2073908
uucucuguaggccagagcu

SEQ ID NO: 2073910 - RNA, 19 nt, Artificial Sequence
  Description of Artificial Sequence: Synthetic oligonucleotide
  Sense strand starting at position 2734 of SEQ ID NO: 1881822
gcuggagcucuccucgcaa

SEQ ID NO: 2073911 - RNA, 19 nt, Artificial Sequence
  Description of Artificial Sequence: Synthetic oligonucleotide
  Antisense strand to SEQ ID NO: 2073910
uugcgaggagagcuccagc

SEQ ID NO: 2073912 - RNA, 19 nt, Artificial Sequence
  Description of Artificial Sequence: Synthetic oligonucleotide
  Sense strand starting at position 2761 of SEQ ID NO: 1881822
cucauaguauuggugaaag

SEQ ID NO: 2073913 - RNA, 19 nt, Artificial Sequence
  Description of Artificial Sequence: Synthetic oligonucleotide
  Antisense strand to SEQ ID NO: 2073912
cuuucaccaauacuaugag

SEQ ID NO: 2073914 - RNA, 19 nt, Artificial Sequence
  Description of Artificial Sequence: Synthetic oligonucleotide
  Sense strand starting at position 2763 of SEQ ID NO: 1881822
cauaguauuggugaaaggu

SEQ ID NO: 2073915 - RNA, 19 nt, Artificial Sequence
  Description of Artificial Sequence: Synthetic oligonucleotide
  Antisense strand to SEQ ID NO: 2073914
accuuucaccaauacuaug

SEQ ID NO: 2073916 - RNA, 19 nt, Artificial Sequence
  Description of Artificial Sequence: Synthetic oligonucleotide
  Sense strand starting at position 3060 of SEQ ID NO: 1881822
ucaugauccacccgagaug

SEQ ID NO: 2073917 - RNA, 19 nt, Artificial Sequence
  Description of Artificial Sequence: Synthetic oligonucleotide
  Antisense strand to SEQ ID NO: 2073916
caucucggguggaucauga

SEQ ID NO: 2073918 - RNA, 19 nt, Artificial Sequence
  Description of Artificial Sequence: Synthetic oligonucleotide
  Sense strand starting at position 3240 of SEQ ID NO: 1881822
auguuaaaugcagaaucuu

SEQ ID NO: 2073919 - RNA, 19 nt, Artificial Sequence
  Description of Artificial Sequence: Synthetic oligonucleotide
  Antisense strand to SEQ ID NO: 2073918
aagauucugcauuuaacau

SEQ ID NO: 2073920 - RNA, 19 nt, Artificial Sequence
  Description of Artificial Sequence: Synthetic oligonucleotide
  Sense strand starting at position 3275 of SEQ ID NO: 1881822
gucaauaaauuugaccuga

SEQ ID NO: 2073921 - RNA, 19 nt, Artificial Sequence
  Description of Artificial Sequence: Synthetic oligonucleotide
  Antisense strand to SEQ ID NO: 2073920
ucaggucaaauuuauugac

SEQ ID NO: 2073922 - RNA, 19 nt, Artificial Sequence
  Description of Artificial Sequence: Synthetic oligonucleotide
  Sense strand starting at position 3378 of SEQ ID NO: 1881822
uagagacuuugaguaacuc

SEQ ID NO: 2073923 - RNA, 19 nt, Artificial Sequence
  Description of Artificial Sequence: Synthetic oligonucleotide
  Antisense strand to SEQ ID NO: 2073922
gaguuacucaaagucucua

SEQ ID NO: 2073924 - RNA, 19 nt, Artificial Sequence
  Description of Artificial Sequence: Synthetic oligonucleotide
  Sense strand starting at position 3392 of SEQ ID NO: 1881822
aacucuuuggaguauagca

SEQ ID NO: 2073925 - RNA, 19 nt, Artificial Sequence
  Description of Artificial Sequence: Synthetic oligonucleotide
  Antisense strand to SEQ ID NO: 2073924
ugcuauacuccaaagaguu

SEQ ID NO: 2073926 - RNA, 19 nt, Artificial Sequence
  Description of Artificial Sequence: Synthetic oligonucleotide
  Sense strand starting at position 3558 of SEQ ID NO: 1881822
aguguuaaucaucacagac

SEQ ID NO: 2073927 - RNA, 19 nt, Artificial Sequence
  Description of Artificial Sequence: Synthetic oligonucleotide
  Antisense strand to SEQ ID NO: 2073926
gucugugaugauuaacacu

SEQ ID NO: 2073928 - RNA, 19 nt, Artificial Sequence
  Description of Artificial Sequence: Synthetic oligonucleotide
  Sense strand starting at position 3585 of SEQ ID NO: 1881822
ggguacuaucacuggaaau

SEQ ID NO: 2073929 - RNA, 19 nt, Artificial Sequence
  Description of Artificial Sequence: Synthetic oligonucleotide
  Antisense strand to SEQ ID NO: 2073928
auuuccagugauaguaccc

SEQ ID NO: 2073930 - RNA, 19 nt, Artificial Sequence
  Description of Artificial Sequence: Synthetic oligonucleotide
  Sense strand starting at position 3586 of SEQ ID NO: 1881822
gguacuaucacuggaaaug

SEQ ID NO: 2073931 - RNA, 19 nt, Artificial Sequence
  Description of Artificial Sequence: Synthetic oligonucleotide
  Antisense strand to SEQ ID NO: 2073930
cauuuccagugauaguacc

SEQ ID NO: 2073932 - RNA, 19 nt, Artificial Sequence
  Description of Artificial Sequence: Synthetic oligonucleotide
  Sense strand starting at position 57 of SEQ ID NO: 1881823
ccagauaacucagaggaac

SEQ ID NO: 2073933 - RNA, 19 nt, Artificial Sequence
  Description of Artificial Sequence: Synthetic oligonucleotide
  Antisense strand to SEQ ID NO: 2073932
guuccucugaguuaucugg

SEQ ID NO: 2073934 - RNA, 19 nt, Artificial Sequence
  Description of Artificial Sequence: Synthetic oligonucleotide
  Sense strand starting at position 108 of SEQ ID NO: 1881823
cuccuucugcucgauauga

SEQ ID NO: 2073935 - RNA, 19 nt, Artificial Sequence
  Description of Artificial Sequence: Synthetic oligonucleotide
  Antisense strand to SEQ ID NO: 2073934
ucauaucgagcagaaggag

SEQ ID NO: 2073936 - RNA, 19 nt, Artificial Sequence
  Description of Artificial Sequence: Synthetic oligonucleotide
  Sense strand starting at position 110 of SEQ ID NO: 1881823
ccuucugcucgauaugaac

SEQ ID NO: 2073937 - RNA, 19 nt, Artificial Sequence
  Description of Artificial Sequence: Synthetic oligonucleotide
  Antisense strand to SEQ ID NO: 2073936
guucauaucgagcagaagg

SEQ ID NO: 2073938 - RNA, 19 nt, Artificial Sequence
  Description of Artificial Sequence: Synthetic oligonucleotide
  Sense strand starting at position 133 of SEQ ID NO: 1881823
cuaaaugcucccugaagcu

SEQ ID NO: 2073939 - RNA, 19 nt, Artificial Sequence
  Description of Artificial Sequence: Synthetic oligonucleotide
  Antisense strand to SEQ ID NO: 2073938
agcuucagggagcauuuag

SEQ ID NO: 2073940 - RNA, 19 nt, Artificial Sequence
  Description of Artificial Sequence: Synthetic oligonucleotide
  Sense strand starting at position 201 of SEQ ID NO: 1881823
guggcucuccucuauaaua

SEQ ID NO: 2073941 - RNA, 19 nt, Artificial Sequence
  Description of Artificial Sequence: Synthetic oligonucleotide
  Antisense strand to SEQ ID NO: 2073940
uauuauagaggagagccac

SEQ ID NO: 2073942 - RNA, 19 nt, Artificial Sequence
  Description of Artificial Sequence: Synthetic oligonucleotide
  Sense strand starting at position 248 of SEQ ID NO: 1881823
gagggaaugaugcaaacgu

SEQ ID NO: 2073943 - RNA, 19 nt, Artificial Sequence
  Description of Artificial Sequence: Synthetic oligonucleotide
  Antisense strand to SEQ ID NO: 2073942
acguuugcaucauucccuc

SEQ ID NO: 2073944 - RNA, 19 nt, Artificial Sequence
  Description of Artificial Sequence: Synthetic oligonucleotide
  Sense strand starting at position 365 of SEQ ID NO: 1881823
uccugacacuuguauauuu

SEQ ID NO: 2073945 - RNA, 19 nt, Artificial Sequence
  Description of Artificial Sequence: Synthetic oligonucleotide
  Antisense strand to SEQ ID NO: 2073944
aaauauacaagugucagga

SEQ ID NO: 2073946 - RNA, 19 nt, Artificial Sequence
  Description of Artificial Sequence: Synthetic oligonucleotide
  Sense strand starting at position 374 of SEQ ID NO: 1881823
uuguauauuuccuagguga

SEQ ID NO: 2073947 - RNA, 19 nt, Artificial Sequence
  Description of Artificial Sequence: Synthetic oligonucleotide
  Antisense strand to SEQ ID NO: 2073946
ucaccuaggaaauauacaa

SEQ ID NO: 2073948 - RNA, 19 nt, Artificial Sequence
  Description of Artificial Sequence: Synthetic oligonucleotide
  Sense strand starting at position 528 of SEQ ID NO: 1881823
ggucacugaugcucaaguu

SEQ ID NO: 2073949 - RNA, 19 nt, Artificial Sequence
  Description of Artificial Sequence: Synthetic oligonucleotide
  Antisense strand to SEQ ID NO: 2073948
aacuugagcaucagugacc

SEQ ID NO: 2073950 - RNA, 19 nt, Artificial Sequence
  Description of Artificial Sequence: Synthetic oligonucleotide
  Sense strand starting at position 773 of SEQ ID NO: 1881823
auugaacucuaggaagaca

SEQ ID NO: 2073951 - RNA, 19 nt, Artificial Sequence
  Description of Artificial Sequence: Synthetic oligonucleotide
  Antisense strand to SEQ ID NO: 2073950
ugucuuccuagaguucaau

SEQ ID NO: 2073952 - RNA, 19 nt, Artificial Sequence
  Description of Artificial Sequence: Synthetic oligonucleotide
  Sense strand starting at position 889 of SEQ ID NO: 1881823
gguagcaagcugugaggaa

SEQ ID NO: 2073953 - RNA, 19 nt, Artificial Sequence
  Description of Artificial Sequence: Synthetic oligonucleotide
  Antisense strand to SEQ ID NO: 2073952
uuccucacagcuugcuacc

SEQ ID NO: 2073954 - RNA, 19 nt, Artificial Sequence
  Description of Artificial Sequence: Synthetic oligonucleotide
  Sense strand starting at position 909 of SEQ ID NO: 1881823
ugcaucugaaaucgggauu

SEQ ID NO: 2073955 - RNA, 19 nt, Artificial Sequence
  Description of Artificial Sequence: Synthetic oligonucleotide
  Antisense strand to SEQ ID NO: 2073954
aaucccgauuucagaugca

SEQ ID NO: 2073956 - RNA, 19 nt, Artificial Sequence
  Description of Artificial Sequence: Synthetic oligonucleotide
  Sense strand starting at position 915 of SEQ ID NO: 1881823
ugaaaucgggauugggauu

SEQ ID NO: 2073957 - RNA, 19 nt, Artificial Sequence
  Description of Artificial Sequence: Synthetic oligonucleotide
  Antisense strand to SEQ ID NO: 2073956
aaucccaaucccgauuuca

SEQ ID NO: 2073958 - RNA, 19 nt, Artificial Sequence
  Description of Artificial Sequence: Synthetic oligonucleotide
  Sense strand starting at position 1246 of SEQ ID NO: 1881823
cuuguauagucagugagca

SEQ ID NO: 2073959 - RNA, 19 nt, Artificial Sequence
  Description of Artificial Sequence: Synthetic oligonucleotide
  Antisense strand to SEQ ID NO: 2073958
ugcucacugacuauacaag

SEQ ID NO: 2073960 - RNA, 19 nt, Artificial Sequence
  Description of Artificial Sequence: Synthetic oligonucleotide
  Sense strand starting at position 1247 of SEQ ID NO: 1881823
uuguauagucagugagcac

SEQ ID NO: 2073961 - RNA, 19 nt, Artificial Sequence
  Description of Artificial Sequence: Synthetic oligonucleotide
  Antisense strand to SEQ ID NO: 2073960
gugcucacugacuauacaa

SEQ ID NO: 2073962 - RNA, 19 nt, Artificial Sequence
  Description of Artificial Sequence: Synthetic oligonucleotide
  Sense strand starting at position 1248 of SEQ ID NO: 1881823
uguauagucagugagcaca

SEQ ID NO: 2073963 - RNA, 19 nt, Artificial Sequence
  Description of Artificial Sequence: Synthetic oligonucleotide
  Antisense strand to SEQ ID NO: 2073962
ugugcucacugacuauaca

SEQ ID NO: 2073964 - RNA, 19 nt, Artificial Sequence
  Description of Artificial Sequence: Synthetic oligonucleotide
  Sense strand starting at position 1336 of SEQ ID NO: 1881823
cuggaaacacguuguauac

SEQ ID NO: 2073965 - RNA, 19 nt, Artificial Sequence
  Description of Artificial Sequence: Synthetic oligonucleotide
  Antisense strand to SEQ ID NO: 2073964
guauacaacguguuuccag

SEQ ID NO: 2073966 - RNA, 19 nt, Artificial Sequence
  Description of Artificial Sequence: Synthetic oligonucleotide
  Sense strand starting at position 2123 of SEQ ID NO: 1881823
ggcgucugugccagggaaa

SEQ ID NO: 2073967 - RNA, 19 nt, Artificial Sequence
  Description of Artificial Sequence: Synthetic oligonucleotide
  Antisense strand to SEQ ID NO: 2073966
uuucccuggcacagacgcc

SEQ ID NO: 2073968 - RNA, 19 nt, Artificial Sequence
  Description of Artificial Sequence: Synthetic oligonucleotide
  Sense strand starting at position 2136 of SEQ ID NO: 1881823
gggaaauccuaucccugua

SEQ ID NO: 2073969 - RNA, 19 nt, Artificial Sequence
  Description of Artificial Sequence: Synthetic oligonucleotide
  Antisense strand to SEQ ID NO: 2073968
uacagggauaggauuuccc

SEQ ID NO: 2073970 - RNA, 19 nt, Artificial Sequence
  Description of Artificial Sequence: Synthetic oligonucleotide
  Sense strand starting at position 2141 of SEQ ID NO: 1881823
auccuaucccuguauaguu

SEQ ID NO: 2073971 - RNA, 19 nt, Artificial Sequence
  Description of Artificial Sequence: Synthetic oligonucleotide
  Antisense strand to SEQ ID NO: 2073970
aacuauacagggauaggau

SEQ ID NO: 2073972 - RNA, 19 nt, Artificial Sequence
  Description of Artificial Sequence: Synthetic oligonucleotide
  Sense strand starting at position 2227 of SEQ ID NO: 1881823
uucguagcaccuuggauau

SEQ ID NO: 2073973 - RNA, 19 nt, Artificial Sequence
  Description of Artificial Sequence: Synthetic oligonucleotide
  Antisense strand to SEQ ID NO: 2073972
auauccaaggugcuacgaa

SEQ ID NO: 2073974 - RNA, 19 nt, Artificial Sequence
  Description of Artificial Sequence: Synthetic oligonucleotide
  Sense strand starting at position 2272 of SEQ ID NO: 1881823
auuccauuugccugaaguc

SEQ ID NO: 2073975 - RNA, 19 nt, Artificial Sequence
  Description of Artificial Sequence: Synthetic oligonucleotide
  Antisense strand to SEQ ID NO: 2073974
gacuucaggcaaauggaau

SEQ ID NO: 2073976 - RNA, 19 nt, Artificial Sequence
  Description of Artificial Sequence: Synthetic oligonucleotide
  Sense strand starting at position 2282 of SEQ ID NO: 1881823
ccugaagucuuccuaaaug

SEQ ID NO: 2073977 - RNA, 19 nt, Artificial Sequence
  Description of Artificial Sequence: Synthetic oligonucleotide
  Antisense strand to SEQ ID NO: 2073976
cauuuaggaagacuucagg

SEQ ID NO: 2073978 - RNA, 19 nt, Artificial Sequence
  Description of Artificial Sequence: Synthetic oligonucleotide
  Sense strand starting at position 2299 of SEQ ID NO: 1881823
ugauccuguccauauugau

SEQ ID NO: 2073979 - RNA, 19 nt, Artificial Sequence
  Description of Artificial Sequence: Synthetic oligonucleotide
  Antisense strand to SEQ ID NO: 2073978
aucaauauggacaggauca

SEQ ID NO: 2073980 - RNA, 19 nt, Artificial Sequence
  Description of Artificial Sequence: Synthetic oligonucleotide
  Sense strand starting at position 2308 of SEQ ID NO: 1881823
ccauauugauaguccacua

SEQ ID NO: 2073981 - RNA, 19 nt, Artificial Sequence
  Description of Artificial Sequence: Synthetic oligonucleotide
  Antisense strand to SEQ ID NO: 2073980
uaguggacuaucaauaugg

SEQ ID NO: 2073982 - RNA, 19 nt, Artificial Sequence
  Description of Artificial Sequence: Synthetic oligonucleotide
  Sense strand starting at position 2371 of SEQ ID NO: 1881823
uugagcauguaauuaaaca

SEQ ID NO: 2073983 - RNA, 19 nt, Artificial Sequence
  Description of Artificial Sequence: Synthetic oligonucleotide
  Antisense strand to SEQ ID NO: 2073982
uguuuaauuacaugcucaa

SEQ ID NO: 2073984 - RNA, 19 nt, Artificial Sequence
  Description of Artificial Sequence: Synthetic oligonucleotide
  Sense strand starting at position 2412 of SEQ ID NO: 1881823
gucuguaacacgggcauaa

SEQ ID NO: 2073985 - RNA, 19 nt, Artificial Sequence
  Description of Artificial Sequence: Synthetic oligonucleotide
  Antisense strand to SEQ ID NO: 2073984
uuaugcccguguuacagac

SEQ ID NO: 2073986 - RNA, 19 nt, Artificial Sequence
  Description of Artificial Sequence: Synthetic oligonucleotide
  Sense strand starting at position 2706 of SEQ ID NO: 1881823
agcuguggacagugauuaa

SEQ ID NO: 2073987 - RNA, 19 nt, Artificial Sequence
  Description of Artificial Sequence: Synthetic oligonucleotide
  Antisense strand to SEQ ID NO: 2073986
uuaaucacuguccacagcu

SEQ ID NO: 2073988 - RNA, 19 nt, Artificial Sequence
  Description of Artificial Sequence: Synthetic oligonucleotide
  Sense strand starting at position 2709 of SEQ ID NO: 1881823
uguggacagugauuaacuu

SEQ ID NO: 2073989 - RNA, 19 nt, Artificial Sequence
  Description of Artificial Sequence: Synthetic oligonucleotide
  Antisense strand to SEQ ID NO: 2073988
aaguuaaucacuguccaca

SEQ ID NO: 2073990 - RNA, 19 nt, Artificial Sequence
  Description of Artificial Sequence: Synthetic oligonucleotide
  Sense strand starting at position 2713 of SEQ ID NO: 1881823
gacagugauuaacuucuga

SEQ ID NO: 2073991 - RNA, 19 nt, Artificial Sequence
  Description of Artificial Sequence: Synthetic oligonucleotide
  Antisense strand to SEQ ID NO: 2073990
ucagaaguuaaucacuguc

SEQ ID NO: 2073992 - RNA, 19 nt, Artificial Sequence
  Description of Artificial Sequence: Synthetic oligonucleotide
  Sense strand starting at position 2734 of SEQ ID NO: 1881823
guaaauaaaucugcaaaga

SEQ ID NO: 2073993 - RNA, 19 nt, Artificial Sequence
  Description of Artificial Sequence: Synthetic oligonucleotide
  Antisense strand to SEQ ID NO: 2073992
ucuuugcagauuuauuuac

SEQ ID NO: 2073994 - RNA, 19 nt, Artificial Sequence
  Description of Artificial Sequence: Synthetic oligonucleotide
  Sense strand starting at position 2832 of SEQ ID NO: 1881823
gcuagaaaccuuugaguug

SEQ ID NO: 2073995 - RNA, 19 nt, Artificial Sequence
  Description of Artificial Sequence: Synthetic oligonucleotide
  Antisense strand to SEQ ID NO: 2073994
caacucaaagguuucuagc

SEQ ID NO: 2073996 - RNA, 19 nt, Artificial Sequence
  Description of Artificial Sequence: Synthetic oligonucleotide
  Sense strand starting at position 3095 of SEQ ID NO: 1881823
uguguaugucuugaauaug

SEQ ID NO: 2073997 - RNA, 19 nt, Artificial Sequence
  Description of Artificial Sequence: Synthetic oligonucleotide
  Antisense strand to SEQ ID NO: 2073996
cauauucaagacauacaca

SEQ ID NO: 2073998 - RNA, 19 nt, Artificial Sequence
  Description of Artificial Sequence: Synthetic oligonucleotide
  Sense strand starting at position 3098 of SEQ ID NO: 1881823
guaugucuugaauauguau

SEQ ID NO: 2073999 - RNA, 19 nt, Artificial Sequence
  Description of Artificial Sequence: Synthetic oligonucleotide
  Antisense strand to SEQ ID NO: 2073998
auacauauucaagacauac

SEQ ID NO: 2074000 - RNA, 19 nt, Artificial Sequence
  Description of Artificial Sequence: Synthetic oligonucleotide
  Sense strand starting at position 3150 of SEQ ID NO: 1881823
agaggagcuguagauuguu

SEQ ID NO: 2074001 - RNA, 19 nt, Artificial Sequence
  Description of Artificial Sequence: Synthetic oligonucleotide
  Antisense strand to SEQ ID NO: 2074000
aacaaucuacagcuccucu

SEQ ID NO: 2074002 - RNA, 19 nt, Artificial Sequence
  Description of Artificial Sequence: Synthetic oligonucleotide
  Sense strand starting at position 3159 of SEQ ID NO: 1881823
guagauuguuucuuuaaug

SEQ ID NO: 2074003 - RNA, 19 nt, Artificial Sequence
  Description of Artificial Sequence: Synthetic oligonucleotide
  Antisense strand to SEQ ID NO: 2074002
cauuaaagaaacaaucuac

SEQ ID NO: 2074004 - RNA, 19 nt, Artificial Sequence
  Description of Artificial Sequence: Synthetic oligonucleotide
  Sense strand starting at position 3267 of SEQ ID NO: 1881823
ugcucagagccugaaucau

SEQ ID NO: 2074005 - RNA, 19 nt, Artificial Sequence
  Description of Artificial Sequence: Synthetic oligonucleotide
  Antisense strand to SEQ ID NO: 2074004
augauucaggcucugagca

SEQ ID NO: 2074006 - RNA, 19 nt, Artificial Sequence
  Description of Artificial Sequence: Synthetic oligonucleotide
  Sense strand starting at position 3361 of SEQ ID NO: 1881823
uccacucugucauuugcau

SEQ ID NO: 2074007 - RNA, 19 nt, Artificial Sequence
  Description of Artificial Sequence: Synthetic oligonucleotide
  Antisense strand to SEQ ID NO: 2074006
augcaaaugacagagugga

SEQ ID NO: 2074008 - RNA, 19 nt, Artificial Sequence
  Description of Artificial Sequence: Synthetic oligonucleotide
  Sense strand starting at position 3574 of SEQ ID NO: 1881823
cuuccucaggcagauagau

SEQ ID NO: 2074009 - RNA, 19 nt, Artificial Sequence
  Description of Artificial Sequence: Synthetic oligonucleotide
  Antisense strand to SEQ ID NO: 2074008
aucuaucugccugaggaag

SEQ ID NO: 2074010 - RNA, 19 nt, Artificial Sequence
  Description of Artificial Sequence: Synthetic oligonucleotide
  Sense strand starting at position 3681 of SEQ ID NO: 1881823
aggaccugugguuauguua

SEQ ID NO: 2074011 - RNA, 19 nt, Artificial Sequence
  Description of Artificial Sequence: Synthetic oligonucleotide
  Antisense strand to SEQ ID NO: 2074010
uaacauaaccacagguccu

SEQ ID NO: 2074012 - RNA, 19 nt, Artificial Sequence
  Description of Artificial Sequence: Synthetic oligonucleotide
  Sense strand starting at position 89 of SEQ ID NO: 1881824
auuccaugcuucucuagga

SEQ ID NO: 2074013 - RNA, 19 nt, Artificial Sequence
  Description of Artificial Sequence: Synthetic oligonucleotide
  Antisense strand to SEQ ID NO: 2074012
uccuagagaagcauggaau

SEQ ID NO: 2074014 - RNA, 19 nt, Artificial Sequence
  Description of Artificial Sequence: Synthetic oligonucleotide
  Sense strand starting at position 207 of SEQ ID NO: 1881824
ggauuuauggguugcccuu

SEQ ID NO: 2074015 - RNA, 19 nt, Artificial Sequence
  Description of Artificial Sequence: Synthetic oligonucleotide
  Antisense strand to SEQ ID NO: 2074014
aagggcaacccauaaaucc

SEQ ID NO: 2074016 - RNA, 19 nt, Artificial Sequence
  Description of Artificial Sequence: Synthetic oligonucleotide
  Sense strand starting at position 259 of SEQ ID NO: 1881824
uuaugagaaacgugucaac

SEQ ID NO: 2074017 - RNA, 19 nt, Artificial Sequence
  Description of Artificial Sequence: Synthetic oligonucleotide
  Antisense strand to SEQ ID NO: 2074016
guugacacguuucucauaa

SEQ ID NO: 2074018 - RNA, 19 nt, Artificial Sequence
  Description of Artificial Sequence: Synthetic oligonucleotide
  Sense strand starting at position 418 of SEQ ID NO: 1881824
gugcaaagccuuggaaaca

SEQ ID NO: 2074019 - RNA, 19 nt, Artificial Sequence
  Description of Artificial Sequence: Synthetic oligonucleotide
  Antisense strand to SEQ ID NO: 2074018
uguuuccaaggcuuugcac

SEQ ID NO: 2074020 - RNA, 19 nt, Artificial Sequence
  Description of Artificial Sequence: Synthetic oligonucleotide
  Sense strand starting at position 546 of SEQ ID NO: 1881824
aucuaaauugccugugaga

SEQ ID NO: 2074021 - RNA, 19 nt, Artificial Sequence
  Description of Artificial Sequence: Synthetic oligonucleotide
  Antisense strand to SEQ ID NO: 2074020
ucucacaggcaauuuagau

SEQ ID NO: 2074022 - RNA, 19 nt, Artificial Sequence
  Description of Artificial Sequence: Synthetic oligonucleotide
  Sense strand starting at position 548 of SEQ ID NO: 1881824
cuaaauugccugugagaaa

SEQ ID NO: 2074023 - RNA, 19 nt, Artificial Sequence
  Description of Artificial Sequence: Synthetic oligonucleotide
  Antisense strand to SEQ ID NO: 2074022
uuucucacaggcaauuuag

SEQ ID NO: 2074024 - RNA, 19 nt, Artificial Sequence
  Description of Artificial Sequence: Synthetic oligonucleotide
  Sense strand starting at position 574 of SEQ ID NO: 1881824
ugguauugucaauacauac

SEQ ID NO: 2074025 - RNA, 19 nt, Artificial Sequence
  Description of Artificial Sequence: Synthetic oligonucleotide
  Antisense strand to SEQ ID NO: 2074024
guauguauugacaauacca

SEQ ID NO: 2074026 - RNA, 19 nt, Artificial Sequence
  Description of Artificial Sequence: Synthetic oligonucleotide
  Sense strand starting at position 834 of SEQ ID NO: 1881824
cuaaacugaugaucugagu

SEQ ID NO: 2074027 - RNA, 19 nt, Artificial Sequence
  Description of Artificial Sequence: Synthetic oligonucleotide
  Antisense strand to SEQ ID NO: 2074026
acucagaucaucaguuuag

SEQ ID NO: 2074028 - RNA, 19 nt, Artificial Sequence
  Description of Artificial Sequence: Synthetic oligonucleotide
  Sense strand starting at position 843 of SEQ ID NO: 1881824
ugaucugaguccguaauuu

SEQ ID NO: 2074029 - RNA, 19 nt, Artificial Sequence
  Description of Artificial Sequence: Synthetic oligonucleotide
  Antisense strand to SEQ ID NO: 2074028
aaauuacggacucagauca

SEQ ID NO: 2074030 - RNA, 19 nt, Artificial Sequence
  Description of Artificial Sequence: Synthetic oligonucleotide
  Sense strand starting at position 906 of SEQ ID NO: 1881824
uuuaaaggguuuguuuaca

SEQ ID NO: 2074031 - RNA, 19 nt, Artificial Sequence
  Description of Artificial Sequence: Synthetic oligonucleotide
  Antisense strand to SEQ ID NO: 2074030
uguaaacaaacccuuuaaa

SEQ ID NO: 2074032 - RNA, 19 nt, Artificial Sequence
  Description of Artificial Sequence: Synthetic oligonucleotide
  Sense strand starting at position 997 of SEQ ID NO: 1881824
gcaguauaauuguugaaau

SEQ ID NO: 2074033 - RNA, 19 nt, Artificial Sequence
  Description of Artificial Sequence: Synthetic oligonucleotide
  Antisense strand to SEQ ID NO: 2074032
auuucaacaauuauacugc

SEQ ID NO: 2074034 - RNA, 19 nt, Artificial Sequence
  Description of Artificial Sequence: Synthetic oligonucleotide
  Sense strand starting at position 1117 of SEQ ID NO: 1881824
ucaguuucggauuaugaaa

SEQ ID NO: 2074035 - RNA, 19 nt, Artificial Sequence
  Description of Artificial Sequence: Synthetic oligonucleotide
  Antisense strand to SEQ ID NO: 2074034
uuucauaauccgaaacuga

SEQ ID NO: 2074036 - RNA, 19 nt, Artificial Sequence
  Description of Artificial Sequence: Synthetic oligonucleotide
  Sense strand starting at position 1242 of SEQ ID NO: 1881824
gauacagugagauguggaa

SEQ ID NO: 2074037 - RNA, 19 nt, Artificial Sequence
  Description of Artificial Sequence: Synthetic oligonucleotide
  Antisense strand to SEQ ID NO: 2074036
uuccacaucucacuguauc

SEQ ID NO: 2074038 - RNA, 19 nt, Artificial Sequence
  Description of Artificial Sequence: Synthetic oligonucleotide
  Sense strand starting at position 1244 of SEQ ID NO: 1881824
uacagugagauguggaauu

SEQ ID NO: 2074039 - RNA, 19 nt, Artificial Sequence
  Description of Artificial Sequence: Synthetic oligonucleotide
  Antisense strand to SEQ ID NO: 2074038
aauuccacaucucacugua

SEQ ID NO: 2074040 - RNA, 19 nt, Artificial Sequence
  Description of Artificial Sequence: Synthetic oligonucleotide
  Sense strand starting at position 1254 of SEQ ID NO: 1881824
uguggaauucguuaggaau

SEQ ID NO: 2074041 - RNA, 19 nt, Artificial Sequence
  Description of Artificial Sequence: Synthetic oligonucleotide
  Antisense strand to SEQ ID NO: 2074040
auuccuaacgaauuccaca

SEQ ID NO: 2074042 - RNA, 19 nt, Artificial Sequence
  Description of Artificial Sequence: Synthetic oligonucleotide
  Sense strand starting at position 1260 of SEQ ID NO: 1881824
auucguuaggaaugauaau

SEQ ID NO: 2074043 - RNA, 19 nt, Artificial Sequence
  Description of Artificial Sequence: Synthetic oligonucleotide
  Antisense strand to SEQ ID NO: 2074042
auuaucauuccuaacgaau

SEQ ID NO: 2074044 - RNA, 19 nt, Artificial Sequence
  Description of Artificial Sequence: Synthetic oligonucleotide
  Sense strand starting at position 1261 of SEQ ID NO: 1881824
uucguuaggaaugauaauu

SEQ ID NO: 2074045 - RNA, 19 nt, Artificial Sequence
  Description of Artificial Sequence: Synthetic oligonucleotide
  Antisense strand to SEQ ID NO: 2074044
aauuaucauuccuaacgaa

SEQ ID NO: 2074046 - RNA, 19 nt, Artificial Sequence
  Description of Artificial Sequence: Synthetic oligonucleotide
  Sense strand starting at position 1313 of SEQ ID NO: 1881824
guuaauaguguuuauaagc

SEQ ID NO: 2074047 - RNA, 19 nt, Artificial Sequence
  Description of Artificial Sequence: Synthetic oligonucleotide
  Antisense strand to SEQ ID NO: 2074046
gcuuauaaacacuauuaac

SEQ ID NO: 2074048 - RNA, 19 nt, Artificial Sequence
  Description of Artificial Sequence: Synthetic oligonucleotide
  Sense strand starting at position 1396 of SEQ ID NO: 1881824
ggaaauccaccucgagaau

SEQ ID NO: 2074049 - RNA, 19 nt, Artificial Sequence
  Description of Artificial Sequence: Synthetic oligonucleotide
  Antisense strand to SEQ ID NO: 2074048
auucucgagguggauuucc

SEQ ID NO: 2074050 - RNA, 19 nt, Artificial Sequence
  Description of Artificial Sequence: Synthetic oligonucleotide
  Sense strand starting at position 1582 of SEQ ID NO: 1881824
cgauaaucgaggugacaaa

SEQ ID NO: 2074051 - RNA, 19 nt, Artificial Sequence
  Description of Artificial Sequence: Synthetic oligonucleotide
  Antisense strand to SEQ ID NO: 2074050
uuugucaccucgauuaucg

SEQ ID NO: 2074052 - RNA, 19 nt, Artificial Sequence
  Description of Artificial Sequence: Synthetic oligonucleotide
  Sense strand starting at position 1591 of SEQ ID NO: 1881824
aggugacaaaguuguggaa

SEQ ID NO: 2074053 - RNA, 19 nt, Artificial Sequence
  Description of Artificial Sequence: Synthetic oligonucleotide
  Antisense strand to SEQ ID NO: 2074052
uuccacaacuuugucaccu

SEQ ID NO: 2074054 - RNA, 19 nt, Artificial Sequence
  Description of Artificial Sequence: Synthetic oligonucleotide
  Sense strand starting at position 2551 of SEQ ID NO: 1881824
ccaagacuuacguaaacga

SEQ ID NO: 2074055 - RNA, 19 nt, Artificial Sequence
  Description of Artificial Sequence: Synthetic oligonucleotide
  Antisense strand to SEQ ID NO: 2074054
ucguuuacguaagucuugg

SEQ ID NO: 2074056 - RNA, 19 nt, Artificial Sequence
  Description of Artificial Sequence: Synthetic oligonucleotide
  Sense strand starting at position 2660 of SEQ ID NO: 1881824
uguuucuuugcgguuugua

SEQ ID NO: 2074057 - RNA, 19 nt, Artificial Sequence
  Description of Artificial Sequence: Synthetic oligonucleotide
  Antisense strand to SEQ ID NO: 2074056
uacaaaccgcaaagaaaca

SEQ ID NO: 2074058 - RNA, 19 nt, Artificial Sequence
  Description of Artificial Sequence: Synthetic oligonucleotide
  Sense strand starting at position 2896 of SEQ ID NO: 1881824
guggaagaaugagaggaua

SEQ ID NO: 2074059 - RNA, 19 nt, Artificial Sequence
  Description of Artificial Sequence: Synthetic oligonucleotide
  Antisense strand to SEQ ID NO: 2074058
uauccucucauucuuccac

SEQ ID NO: 2074060 - RNA, 19 nt, Artificial Sequence
  Description of Artificial Sequence: Synthetic oligonucleotide
  Sense strand starting at position 3028 of SEQ ID NO: 1881824
cucuuaguuguugaucaga

SEQ ID NO: 2074061 - RNA, 19 nt, Artificial Sequence
  Description of Artificial Sequence: Synthetic oligonucleotide
  Antisense strand to SEQ ID NO: 2074060
ucugaucaacaacuaagag

SEQ ID NO: 2074062 - RNA, 19 nt, Artificial Sequence
  Description of Artificial Sequence: Synthetic oligonucleotide
  Sense strand starting at position 3030 of SEQ ID NO: 1881824
cuuaguuguugaucagaua

SEQ ID NO: 2074063 - RNA, 19 nt, Artificial Sequence
  Description of Artificial Sequence: Synthetic oligonucleotide
  Antisense strand to SEQ ID NO: 2074062
uaucugaucaacaacuaag

SEQ ID NO: 2074064 - RNA, 19 nt, Artificial Sequence
  Description of Artificial Sequence: Synthetic oligonucleotide
  Sense strand starting at position 3031 of SEQ ID NO: 1881824
uuaguuguugaucagauaa

SEQ ID NO: 2074065 - RNA, 19 nt, Artificial Sequence
  Description of Artificial Sequence: Synthetic oligonucleotide
  Antisense strand to SEQ ID NO: 2074064
uuaucugaucaacaacuaa

SEQ ID NO: 2074066 - RNA, 19 nt, Artificial Sequence
  Description of Artificial Sequence: Synthetic oligonucleotide
  Sense strand starting at position 3157 of SEQ ID NO: 1881824
uauagauugugaccagauu

SEQ ID NO: 2074067 - RNA, 19 nt, Artificial Sequence
  Description of Artificial Sequence: Synthetic oligonucleotide
  Antisense strand to SEQ ID NO: 2074066
aaucuggucacaaucuaua

SEQ ID NO: 2074068 - RNA, 19 nt, Artificial Sequence
  Description of Artificial Sequence: Synthetic oligonucleotide
  Sense strand starting at position 3178 of SEQ ID NO: 1881824
guucuagcuuugccauuua

SEQ ID NO: 2074069 - RNA, 19 nt, Artificial Sequence
  Description of Artificial Sequence: Synthetic oligonucleotide
  Antisense strand to SEQ ID NO: 2074068
uaaauggcaaagcuagaac

SEQ ID NO: 2074070 - RNA, 19 nt, Artificial Sequence
  Description of Artificial Sequence: Synthetic oligonucleotide
  Sense strand starting at position 3252 of SEQ ID NO: 1881824
uguauagauccaggaaacu

SEQ ID NO: 2074071 - RNA, 19 nt, Artificial Sequence
  Description of Artificial Sequence: Synthetic oligonucleotide
  Antisense strand to SEQ ID NO: 2074070
aguuuccuggaucuauaca

SEQ ID NO: 2074072 - RNA, 19 nt, Artificial Sequence
  Description of Artificial Sequence: Synthetic oligonucleotide
  Sense strand starting at position 3536 of SEQ ID NO: 1881824
ugagauaacaggugugaug

SEQ ID NO: 2074073 - RNA, 19 nt, Artificial Sequence
  Description of Artificial Sequence: Synthetic oligonucleotide
  Antisense strand to SEQ ID NO: 2074072
caucacaccuguuaucuca

SEQ ID NO: 2074074 - RNA, 19 nt, Artificial Sequence
  Description of Artificial Sequence: Synthetic oligonucleotide
  Sense strand starting at position 3543 of SEQ ID NO: 1881824
acaggugugaugcaaagau

SEQ ID NO: 2074075 - RNA, 19 nt, Artificial Sequence
  Description of Artificial Sequence: Synthetic oligonucleotide
  Antisense strand to SEQ ID NO: 2074074
aucuuugcaucacaccugu

SEQ ID NO: 2074076 - RNA, 19 nt, Artificial Sequence
  Description of Artificial Sequence: Synthetic oligonucleotide
  Sense strand starting at position 3547 of SEQ ID NO: 1881824
gugugaugcaaagauguau

SEQ ID NO: 2074077 - RNA, 19 nt, Artificial Sequence
  Description of Artificial Sequence: Synthetic oligonucleotide
  Antisense strand to SEQ ID NO: 2074076
auacaucuuugcaucacac

SEQ ID NO: 2074078 - RNA, 19 nt, Artificial Sequence
  Description of Artificial Sequence: Synthetic oligonucleotide
  Sense strand starting at position 3574 of SEQ ID NO: 1881824
gauguauagugguuaaaug

SEQ ID NO: 2074079 - RNA, 19 nt, Artificial Sequence
  Description of Artificial Sequence: Synthetic oligonucleotide
  Antisense strand to SEQ ID NO: 2074078
cauuuaaccacuauacauc

SEQ ID NO: 2074080 - RNA, 19 nt, Artificial Sequence
  Description of Artificial Sequence: Synthetic oligonucleotide
  Sense strand starting at position 3575 of SEQ ID NO: 1881824
auguauagugguuaaaugu

SEQ ID NO: 2074081 - RNA, 19 nt, Artificial Sequence
  Description of Artificial Sequence: Synthetic oligonucleotide
  Antisense strand to SEQ ID NO: 2074080
acauuuaaccacuauacau

SEQ ID NO: 2074082 - RNA, 19 nt, Artificial Sequence
  Description of Artificial Sequence: Synthetic oligonucleotide
  Sense strand starting at position 3605 of SEQ ID NO: 1881824
cuagauugccuagguuuaa

SEQ ID NO: 2074083 - RNA, 19 nt, Artificial Sequence
  Description of Artificial Sequence: Synthetic oligonucleotide
  Antisense strand to SEQ ID NO: 2074082
uuaaaccuaggcaaucuag

SEQ ID NO: 2074084 - RNA, 19 nt, Artificial Sequence
  Description of Artificial Sequence: Synthetic oligonucleotide
  Sense strand starting at position 3625 of SEQ ID NO: 1881824
ugcugaugccucuauuucu

SEQ ID NO: 2074085 - RNA, 19 nt, Artificial Sequence
  Description of Artificial Sequence: Synthetic oligonucleotide
  Antisense strand to SEQ ID NO: 2074084
agaaauagaggcaucagca

SEQ ID NO: 2074086 - RNA, 19 nt, Artificial Sequence
  Description of Artificial Sequence: Synthetic oligonucleotide
  Sense strand starting at position 3809 of SEQ ID NO: 1881824
ugucuacucggucaacacu

SEQ ID NO: 2074087 - RNA, 19 nt, Artificial Sequence
  Description of Artificial Sequence: Synthetic oligonucleotide
  Antisense strand to SEQ ID NO: 2074086
aguguugaccgaguagaca

SEQ ID NO: 2074088 - RNA, 19 nt, Artificial Sequence
  Description of Artificial Sequence: Synthetic oligonucleotide
  Sense strand starting at position 3904 of SEQ ID NO: 1881824
aguggauugauaugucaca

SEQ ID NO: 2074089 - RNA, 19 nt, Artificial Sequence
  Description of Artificial Sequence: Synthetic oligonucleotide
  Antisense strand to SEQ ID NO: 2074088
ugugacauaucaauccacu

SEQ ID NO: 2074090 - RNA, 19 nt, Artificial Sequence
  Description of Artificial Sequence: Synthetic oligonucleotide
  Sense strand starting at position 3905 of SEQ ID NO: 1881824
guggauugauaugucacaa

SEQ ID NO: 2074091 - RNA, 19 nt, Artificial Sequence
  Description of Artificial Sequence: Synthetic oligonucleotide
  Antisense strand to SEQ ID NO: 2074090
uugugacauaucaauccac

SEQ ID NO: 2074092 - RNA, 19 nt, Artificial Sequence
  Description of Artificial Sequence: Synthetic oligonucleotide
  Sense strand starting at position 61 of SEQ ID NO: 1881825
gcaaucacugaauggauau

SEQ ID NO: 2074093 - RNA, 19 nt, Artificial Sequence
  Description of Artificial Sequence: Synthetic oligonucleotide
  Antisense strand to SEQ ID NO: 2074092
auauccauucagugauugc

SEQ ID NO: 2074094 - RNA, 19 nt, Artificial Sequence
  Description of Artificial Sequence: Synthetic oligonucleotide
  Sense strand starting at position 108 of SEQ ID NO: 1881825
aggauuuaauagggauuag

SEQ ID NO: 2074095 - RNA, 19 nt, Artificial Sequence
  Description of Artificial Sequence: Synthetic oligonucleotide
  Antisense strand to SEQ ID NO: 2074094
cuaaucccuauuaaauccu

SEQ ID NO: 2074096 - RNA, 19 nt, Artificial Sequence
  Description of Artificial Sequence: Synthetic oligonucleotide
  Sense strand starting at position 118 of SEQ ID NO: 1881825
agggauuagcuaugaguau

SEQ ID NO: 2074097 - RNA, 19 nt, Artificial Sequence
  Description of Artificial Sequence: Synthetic oligonucleotide
  Antisense strand to SEQ ID NO: 2074096
auacucauagcuaaucccu

SEQ ID NO: 2074098 - RNA, 19 nt, Artificial Sequence
  Description of Artificial Sequence: Synthetic oligonucleotide
  Sense strand starting at position 380 of SEQ ID NO: 1881825
aauuguguggaauauguau

SEQ ID NO: 2074099 - RNA, 19 nt, Artificial Sequence
  Description of Artificial Sequence: Synthetic oligonucleotide
  Antisense strand to SEQ ID NO: 2074098
auacauauuccacacaauu

SEQ ID NO: 2074100 - RNA, 19 nt, Artificial Sequence
  Description of Artificial Sequence: Synthetic oligonucleotide
  Sense strand starting at position 410 of SEQ ID NO: 1881825
cagugucaucuagaagucu

SEQ ID NO: 2074101 - RNA, 19 nt, Artificial Sequence
  Description of Artificial Sequence: Synthetic oligonucleotide
  Antisense strand to SEQ ID NO: 2074100
agacuucuagaugacacug

SEQ ID NO: 2074102 - RNA, 19 nt, Artificial Sequence
  Description of Artificial Sequence: Synthetic oligonucleotide
  Sense strand starting at position 443 of SEQ ID NO: 1881825
ggaguuaguugauuaauag

SEQ ID NO: 2074103 - RNA, 19 nt, Artificial Sequence
  Description of Artificial Sequence: Synthetic oligonucleotide
  Antisense strand to SEQ ID NO: 2074102
cuauuaaucaacuaacucc

SEQ ID NO: 2074104 - RNA, 19 nt, Artificial Sequence
  Description of Artificial Sequence: Synthetic oligonucleotide
  Sense strand starting at position 444 of SEQ ID NO: 1881825
gaguuaguugauuaauagu

SEQ ID NO: 2074105 - RNA, 19 nt, Artificial Sequence
  Description of Artificial Sequence: Synthetic oligonucleotide
  Antisense strand to SEQ ID NO: 2074104
acuauuaaucaacuaacuc

SEQ ID NO: 2074106 - RNA, 19 nt, Artificial Sequence
  Description of Artificial Sequence: Synthetic oligonucleotide
  Sense strand starting at position 701 of SEQ ID NO: 1881825
auaguaugaucaccagggu

SEQ ID NO: 2074107 - RNA, 19 nt, Artificial Sequence
  Description of Artificial Sequence: Synthetic oligonucleotide
  Antisense strand to SEQ ID NO: 2074106
acccuggugaucauacuau

SEQ ID NO: 2074108 - RNA, 19 nt, Artificial Sequence
  Description of Artificial Sequence: Synthetic oligonucleotide
  Sense strand starting at position 704 of SEQ ID NO: 1881825
guaugaucaccagggugaa

SEQ ID NO: 2074109 - RNA, 19 nt, Artificial Sequence
  Description of Artificial Sequence: Synthetic oligonucleotide
  Antisense strand to SEQ ID NO: 2074108
uucacccuggugaucauac

SEQ ID NO: 2074110 - RNA, 19 nt, Artificial Sequence
  Description of Artificial Sequence: Synthetic oligonucleotide
  Sense strand starting at position 716 of SEQ ID NO: 1881825
gggugaacuagugaguaua

SEQ ID NO: 2074111 - RNA, 19 nt, Artificial Sequence
  Description of Artificial Sequence: Synthetic oligonucleotide
  Antisense strand to SEQ ID NO: 2074110
uauacucacuaguucaccc

SEQ ID NO: 2074112 - RNA, 19 nt, Artificial Sequence
  Description of Artificial Sequence: Synthetic oligonucleotide
  Sense strand starting at position 718 of SEQ ID NO: 1881825
gugaacuagugaguauaga

SEQ ID NO: 2074113 - RNA, 19 nt, Artificial Sequence
  Description of Artificial Sequence: Synthetic oligonucleotide
  Antisense strand to SEQ ID NO: 2074112
ucuauacucacuaguucac

SEQ ID NO: 2074114 - RNA, 19 nt, Artificial Sequence
  Description of Artificial Sequence: Synthetic oligonucleotide
  Sense strand starting at position 829 of SEQ ID NO: 1881825
cccauaaagugagucauau

SEQ ID NO: 2074115 - RNA, 19 nt, Artificial Sequence
  Description of Artificial Sequence: Synthetic oligonucleotide
  Antisense strand to SEQ ID NO: 2074114
auaugacucacuuuauggg

SEQ ID NO: 2074116 - RNA, 19 nt, Artificial Sequence
  Description of Artificial Sequence: Synthetic oligonucleotide
  Sense strand starting at position 913 of SEQ ID NO: 1881825
ucguaauuacaugacucaa

SEQ ID NO: 2074117 - RNA, 19 nt, Artificial Sequence
  Description of Artificial Sequence: Synthetic oligonucleotide
  Antisense strand to SEQ ID NO: 2074116
uugagucauguaauuacga

SEQ ID NO: 2074118 - RNA, 19 nt, Artificial Sequence
  Description of Artificial Sequence: Synthetic oligonucleotide
  Sense strand starting at position 932 of SEQ ID NO: 1881825
aaugcauaagcugagucau

SEQ ID NO: 2074119 - RNA, 19 nt, Artificial Sequence
  Description of Artificial Sequence: Synthetic oligonucleotide
  Antisense strand to SEQ ID NO: 2074118
augacucagcuuaugcauu

SEQ ID NO: 2074120 - RNA, 19 nt, Artificial Sequence
  Description of Artificial Sequence: Synthetic oligonucleotide
  Sense strand starting at position 965 of SEQ ID NO: 1881825
ugauauugucuauagccaa

SEQ ID NO: 2074121 - RNA, 19 nt, Artificial Sequence
  Description of Artificial Sequence: Synthetic oligonucleotide
  Antisense strand to SEQ ID NO: 2074120
uuggcuauagacaauauca

SEQ ID NO: 2074122 - RNA, 19 nt, Artificial Sequence
  Description of Artificial Sequence: Synthetic oligonucleotide
  Sense strand starting at position 1011 of SEQ ID NO: 1881825
gcuuaauuugcaggagcaa

SEQ ID NO: 2074123 - RNA, 19 nt, Artificial Sequence
  Description of Artificial Sequence: Synthetic oligonucleotide
  Antisense strand to SEQ ID NO: 2074122
uugcuccugcaaauuaagc

SEQ ID NO: 2074124 - RNA, 19 nt, Artificial Sequence
  Description of Artificial Sequence: Synthetic oligonucleotide
  Sense strand starting at position 1175 of SEQ ID NO: 1881825
gccaauuuguuggugugga

SEQ ID NO: 2074125 - RNA, 19 nt, Artificial Sequence
  Description of Artificial Sequence: Synthetic oligonucleotide
  Antisense strand to SEQ ID NO: 2074124
uccacaccaacaaauuggc

SEQ ID NO: 2074126 - RNA, 19 nt, Artificial Sequence
  Description of Artificial Sequence: Synthetic oligonucleotide
  Sense strand starting at position 1307 of SEQ ID NO: 1881825
aaaguuauuggaugucuac

SEQ ID NO: 2074127 - RNA, 19 nt, Artificial Sequence
  Description of Artificial Sequence: Synthetic oligonucleotide
  Antisense strand to SEQ ID NO: 2074126
guagacauccaauaacuuu

SEQ ID NO: 2074128 - RNA, 19 nt, Artificial Sequence
  Description of Artificial Sequence: Synthetic oligonucleotide
  Sense strand starting at position 1316 of SEQ ID NO: 1881825
ggaugucuacuauauucua

SEQ ID NO: 2074129 - RNA, 19 nt, Artificial Sequence
  Description of Artificial Sequence: Synthetic oligonucleotide
  Antisense strand to SEQ ID NO: 2074128
uagaauauaguagacaucc

SEQ ID NO: 2074130 - RNA, 19 nt, Artificial Sequence
  Description of Artificial Sequence: Synthetic oligonucleotide
  Sense strand starting at position 1360 of SEQ ID NO: 1881825
uagcacuggucacugaaga

SEQ ID NO: 2074131 - RNA, 19 nt, Artificial Sequence
  Description of Artificial Sequence: Synthetic oligonucleotide
  Antisense strand to SEQ ID NO: 2074130
ucuucagugaccagugcua

SEQ ID NO: 2074132 - RNA, 19 nt, Artificial Sequence
  Description of Artificial Sequence: Synthetic oligonucleotide
  Sense strand starting at position 1542 of SEQ ID NO: 1881825
guaagagcagaguaaucau

SEQ ID NO: 2074133 - RNA, 19 nt, Artificial Sequence
  Description of Artificial Sequence: Synthetic oligonucleotide
  Antisense strand to SEQ ID NO: 2074132
augauuacucugcucuuac

SEQ ID NO: 2074134 - RNA, 19 nt, Artificial Sequence
  Description of Artificial Sequence: Synthetic oligonucleotide
  Sense strand starting at position 1594 of SEQ ID NO: 1881825
gcauuccuucuugagaaua

SEQ ID NO: 2074135 - RNA, 19 nt, Artificial Sequence
  Description of Artificial Sequence: Synthetic oligonucleotide
  Antisense strand to SEQ ID NO: 2074134
uauucucaagaaggaaugc

SEQ ID NO: 2074136 - RNA, 19 nt, Artificial Sequence
  Description of Artificial Sequence: Synthetic oligonucleotide
  Sense strand starting at position 1656 of SEQ ID NO: 1881825
ugucauggugguuaaacau

SEQ ID NO: 2074137 - RNA, 19 nt, Artificial Sequence
  Description of Artificial Sequence: Synthetic oligonucleotide
  Antisense strand to SEQ ID NO: 2074136
auguuuaaccaccaugaca

SEQ ID NO: 2074138 - RNA, 19 nt, Artificial Sequence
  Description of Artificial Sequence: Synthetic oligonucleotide
  Sense strand starting at position 1999 of SEQ ID NO: 1881825
gaucuagggcuuuauacuu

SEQ ID NO: 2074139 - RNA, 19 nt, Artificial Sequence
  Description of Artificial Sequence: Synthetic oligonucleotide
  Antisense strand to SEQ ID NO: 2074138
aaguauaaagcccuagauc

SEQ ID NO: 2074140 - RNA, 19 nt, Artificial Sequence
  Description of Artificial Sequence: Synthetic oligonucleotide
  Sense strand starting at position 2093 of SEQ ID NO: 1881825
aguauugcugcuguaagca

SEQ ID NO: 2074141 - RNA, 19 nt, Artificial Sequence
  Description of Artificial Sequence: Synthetic oligonucleotide
  Antisense strand to SEQ ID NO: 2074140
ugcuuacagcagcaauacu

SEQ ID NO: 2074142 - RNA, 19 nt, Artificial Sequence
  Description of Artificial Sequence: Synthetic oligonucleotide
  Sense strand starting at position 2244 of SEQ ID NO: 1881825
gcuagaggcuacuuuauuu

SEQ ID NO: 2074143 - RNA, 19 nt, Artificial Sequence
  Description of Artificial Sequence: Synthetic oligonucleotide
  Antisense strand to SEQ ID NO: 2074142
aaauaaaguagccucuagc

SEQ ID NO: 2074144 - RNA, 19 nt, Artificial Sequence
  Description of Artificial Sequence: Synthetic oligonucleotide
  Sense strand starting at position 2653 of SEQ ID NO: 1881825
aacagucugcacuauguga

SEQ ID NO: 2074145 - RNA, 19 nt, Artificial Sequence
  Description of Artificial Sequence: Synthetic oligonucleotide
  Antisense strand to SEQ ID NO: 2074144
ucacauagugcagacuguu

SEQ ID NO: 2074146 - RNA, 19 nt, Artificial Sequence
  Description of Artificial Sequence: Synthetic oligonucleotide
  Sense strand starting at position 2755 of SEQ ID NO: 1881825
cuguguaucccugguauuu

SEQ ID NO: 2074147 - RNA, 19 nt, Artificial Sequence
  Description of Artificial Sequence: Synthetic oligonucleotide
  Antisense strand to SEQ ID NO: 2074146
aaauaccagggauacacag

SEQ ID NO: 2074148 - RNA, 19 nt, Artificial Sequence
  Description of Artificial Sequence: Synthetic oligonucleotide
  Sense strand starting at position 3016 of SEQ ID NO: 1881825
gcaacaauggcagagcuaa

SEQ ID NO: 2074149 - RNA, 19 nt, Artificial Sequence
  Description of Artificial Sequence: Synthetic oligonucleotide
  Antisense strand to SEQ ID NO: 2074148
uuagcucugccauuguugc

SEQ ID NO: 2074150 - RNA, 19 nt, Artificial Sequence
  Description of Artificial Sequence: Synthetic oligonucleotide
  Sense strand starting at position 3225 of SEQ ID NO: 1881825
uaaauuagugccuagguau

SEQ ID NO: 2074151 - RNA, 19 nt, Artificial Sequence
  Description of Artificial Sequence: Synthetic oligonucleotide
  Antisense strand to SEQ ID NO: 2074150
auaccuaggcacuaauuua

SEQ ID NO: 2074152 - RNA, 19 nt, Artificial Sequence
  Description of Artificial Sequence: Synthetic oligonucleotide
  Sense strand starting at position 3318 of SEQ ID NO: 1881825
cuaauauggccucaugguu

SEQ ID NO: 2074153 - RNA, 19 nt, Artificial Sequence
  Description of Artificial Sequence: Synthetic oligonucleotide
  Antisense strand to SEQ ID NO: 2074152
aaccaugaggccauauuag

SEQ ID NO: 2074154 - RNA, 19 nt, Artificial Sequence
  Description of Artificial Sequence: Synthetic oligonucleotide
  Sense strand starting at position 3489 of SEQ ID NO: 1881825
gcaguuauaaggugaggag

SEQ ID NO: 2074155 - RNA, 19 nt, Artificial Sequence
  Description of Artificial Sequence: Synthetic oligonucleotide
  Antisense strand to SEQ ID NO: 2074154
cuccucaccuuauaacugc

SEQ ID NO: 2074156 - RNA, 19 nt, Artificial Sequence
  Description of Artificial Sequence: Synthetic oligonucleotide
  Sense strand starting at position 3490 of SEQ ID NO: 1881825
caguuauaaggugaggagu

SEQ ID NO: 2074157 - RNA, 19 nt, Artificial Sequence
  Description of Artificial Sequence: Synthetic oligonucleotide
  Antisense strand to SEQ ID NO: 2074156
acuccucaccuuauaacug

SEQ ID NO: 2074158 - RNA, 19 nt, Artificial Sequence
  Description of Artificial Sequence: Synthetic oligonucleotide
  Sense strand starting at position 3514 of SEQ ID NO: 1881825
gaaacuaagugaucaguga

SEQ ID NO: 2074159 - RNA, 19 nt, Artificial Sequence
  Description of Artificial Sequence: Synthetic oligonucleotide
  Antisense strand to SEQ ID NO: 2074158
ucacugaucacuuaguuuc

SEQ ID NO: 2074160 - RNA, 19 nt, Artificial Sequence
  Description of Artificial Sequence: Synthetic oligonucleotide
  Sense strand starting at position 3534 of SEQ ID NO: 1881825
uuaugaacuucuguuggau

SEQ ID NO: 2074161 - RNA, 19 nt, Artificial Sequence
  Description of Artificial Sequence: Synthetic oligonucleotide
  Antisense strand to SEQ ID NO: 2074160
auccaacagaaguucauaa

SEQ ID NO: 2074162 - RNA, 19 nt, Artificial Sequence
  Description of Artificial Sequence: Synthetic oligonucleotide
  Sense strand starting at position 3554 of SEQ ID NO: 1881825
cacugucauuagguagaau

SEQ ID NO: 2074163 - RNA, 19 nt, Artificial Sequence
  Description of Artificial Sequence: Synthetic oligonucleotide
  Antisense strand to SEQ ID NO: 2074162
auucuaccuaaugacagug

SEQ ID NO: 2074164 - RNA, 19 nt, Artificial Sequence
  Description of Artificial Sequence: Synthetic oligonucleotide
  Sense strand starting at position 3666 of SEQ ID NO: 1881825
ugauuuagcuugucccauc

SEQ ID NO: 2074165 - RNA, 19 nt, Artificial Sequence
  Description of Artificial Sequence: Synthetic oligonucleotide
  Antisense strand to SEQ ID NO: 2074164
gaugggacaagcuaaauca

SEQ ID NO: 2074166 - RNA, 19 nt, Artificial Sequence
  Description of Artificial Sequence: Synthetic oligonucleotide
  Sense strand starting at position 3821 of SEQ ID NO: 1881825
caaggaauacuucggagca

SEQ ID NO: 2074167 - RNA, 19 nt, Artificial Sequence
  Description of Artificial Sequence: Synthetic oligonucleotide
  Antisense strand to SEQ ID NO: 2074166
ugcuccgaaguauuccuug

SEQ ID NO: 2074168 - RNA, 19 nt, Artificial Sequence
  Description of Artificial Sequence: Synthetic oligonucleotide
  Sense strand starting at position 3980 of SEQ ID NO: 1881825
uuugaaagcuugguuagaa

SEQ ID NO: 2074169 - RNA, 19 nt, Artificial Sequence
  Description of Artificial Sequence: Synthetic oligonucleotide
  Antisense strand to SEQ ID NO: 2074168
uucuaaccaagcuuucaaa

SEQ ID NO: 2074170 - RNA, 19 nt, Artificial Sequence
  Description of Artificial Sequence: Synthetic oligonucleotide
  Sense strand starting at position 3981 of SEQ ID NO: 1881825
uugaaagcuugguuagaaa

SEQ ID NO: 2074171 - RNA, 19 nt, Artificial Sequence
  Description of Artificial Sequence: Synthetic oligonucleotide
  Antisense strand to SEQ ID NO: 2074170
uuucuaaccaagcuuucaa

SEQ ID NO: 2074172 - RNA, 19 nt, Artificial Sequence
  Description of Artificial Sequence: Synthetic oligonucleotide
  Sense strand starting at position 1483 of SEQ ID NO: 1881826
gaguauggaauacguucua

SEQ ID NO: 2074173 - RNA, 19 nt, Artificial Sequence
  Description of Artificial Sequence: Synthetic oligonucleotide
  Antisense strand to SEQ ID NO: 2074172
uagaacguauuccauacuc

SEQ ID NO: 2074174 - RNA, 19 nt, Artificial Sequence
  Description of Artificial Sequence: Synthetic oligonucleotide
  Sense strand starting at position 1490 of SEQ ID NO: 1881826
gaauacguucuagaauuau

SEQ ID NO: 2074175 - RNA, 19 nt, Artificial Sequence
  Description of Artificial Sequence: Synthetic oligonucleotide
  Antisense strand to SEQ ID NO: 2074174
auaauucuagaacguauuc

SEQ ID NO: 2074176 - RNA, 19 nt, Artificial Sequence
  Description of Artificial Sequence: Synthetic oligonucleotide
  Sense strand starting at position 1559 of SEQ ID NO: 1881826
ugaaacauuugcuaaguua

SEQ ID NO: 2074177 - RNA, 19 nt, Artificial Sequence
  Description of Artificial Sequence: Synthetic oligonucleotide
  Antisense strand to SEQ ID NO: 2074176
uaacuuagcaaauguuuca

SEQ ID NO: 2074178 - RNA, 19 nt, Artificial Sequence
  Description of Artificial Sequence: Synthetic oligonucleotide
  Sense strand starting at position 1604 of SEQ ID NO: 1881826
acaggugacaaaugaugua

SEQ ID NO: 2074179 - RNA, 19 nt, Artificial Sequence
  Description of Artificial Sequence: Synthetic oligonucleotide
  Antisense strand to SEQ ID NO: 2074178
uacaucauuugucaccugu

SEQ ID NO: 2074180 - RNA, 19 nt, Artificial Sequence
  Description of Artificial Sequence: Synthetic oligonucleotide
  Sense strand starting at position 1760 of SEQ ID NO: 1881826
ucaugucagcuagaaguuc

SEQ ID NO: 2074181 - RNA, 19 nt, Artificial Sequence
  Description of Artificial Sequence: Synthetic oligonucleotide
  Antisense strand to SEQ ID NO: 2074180
gaacuucuagcugacauga

SEQ ID NO: 2074182 - RNA, 19 nt, Artificial Sequence
  Description of Artificial Sequence: Synthetic oligonucleotide
  Sense strand starting at position 1987 of SEQ ID NO: 1881826
cuuuacagucaauguguaa

SEQ ID NO: 2074183 - RNA, 19 nt, Artificial Sequence
  Description of Artificial Sequence: Synthetic oligonucleotide
  Antisense strand to SEQ ID NO: 2074182
uuacacauugacuguaaag

SEQ ID NO: 2074184 - RNA, 19 nt, Artificial Sequence
  Description of Artificial Sequence: Synthetic oligonucleotide
  Sense strand starting at position 2009 of SEQ ID NO: 1881826
agagguugccauggauaca

SEQ ID NO: 2074185 - RNA, 19 nt, Artificial Sequence
  Description of Artificial Sequence: Synthetic oligonucleotide
  Antisense strand to SEQ ID NO: 2074184
uguauccauggcaaccucu

SEQ ID NO: 2074186 - RNA, 19 nt, Artificial Sequence
  Description of Artificial Sequence: Synthetic oligonucleotide
  Sense strand starting at position 2069 of SEQ ID NO: 1881826
aguauugcugaacggaaau

SEQ ID NO: 2074187 - RNA, 19 nt, Artificial Sequence
  Description of Artificial Sequence: Synthetic oligonucleotide
  Antisense strand to SEQ ID NO: 2074186
auuuccguucagcaauacu

SEQ ID NO: 2074188 - RNA, 19 nt, Artificial Sequence
  Description of Artificial Sequence: Synthetic oligonucleotide
  Sense strand starting at position 2105 of SEQ ID NO: 1881826
ucagaaugcaguuagaguu

SEQ ID NO: 2074189 - RNA, 19 nt, Artificial Sequence
  Description of Artificial Sequence: Synthetic oligonucleotide
  Antisense strand to SEQ ID NO: 2074188
aacucuaacugcauucuga

SEQ ID NO: 2074190 - RNA, 19 nt, Artificial Sequence
  Description of Artificial Sequence: Synthetic oligonucleotide
  Sense strand starting at position 2281 of SEQ ID NO: 1881826
auguauaucgaguaauaca

SEQ ID NO: 2074191 - RNA, 19 nt, Artificial Sequence
  Description of Artificial Sequence: Synthetic oligonucleotide
  Antisense strand to SEQ ID NO: 2074190
uguauuacucgauauacau

SEQ ID NO: 2074192 - RNA, 19 nt, Artificial Sequence
  Description of Artificial Sequence: Synthetic oligonucleotide
  Sense strand starting at position 2335 of SEQ ID NO: 1881826
uguuguguuaaauacgcau

SEQ ID NO: 2074193 - RNA, 19 nt, Artificial Sequence
  Description of Artificial Sequence: Synthetic oligonucleotide
  Antisense strand to SEQ ID NO: 2074192
augcguauuuaacacaaca

SEQ ID NO: 2074194 - RNA, 19 nt, Artificial Sequence
  Description of Artificial Sequence: Synthetic oligonucleotide
  Sense strand starting at position 2338 of SEQ ID NO: 1881826
uguguuaaauacgcauuga

SEQ ID NO: 2074195 - RNA, 19 nt, Artificial Sequence
  Description of Artificial Sequence: Synthetic oligonucleotide
  Antisense strand to SEQ ID NO: 2074194
ucaaugcguauuuaacaca

SEQ ID NO: 2074196 - RNA, 19 nt, Artificial Sequence
  Description of Artificial Sequence: Synthetic oligonucleotide
  Sense strand starting at position 2339 of SEQ ID NO: 1881826
guguuaaauacgcauugaa

SEQ ID NO: 2074197 - RNA, 19 nt, Artificial Sequence
  Description of Artificial Sequence: Synthetic oligonucleotide
  Antisense strand to SEQ ID NO: 2074196
uucaaugcguauuuaacac

SEQ ID NO: 2074198 - RNA, 19 nt, Artificial Sequence
  Description of Artificial Sequence: Synthetic oligonucleotide
  Sense strand starting at position 2423 of SEQ ID NO: 1881826
guuguuauauuauccucca

SEQ ID NO: 2074199 - RNA, 19 nt, Artificial Sequence
  Description of Artificial Sequence: Synthetic oligonucleotide
  Antisense strand to SEQ ID NO: 2074198
uggaggauaauauaacaac

SEQ ID NO: 2074200 - RNA, 19 nt, Artificial Sequence
  Description of Artificial Sequence: Synthetic oligonucleotide
  Sense strand starting at position 2426 of SEQ ID NO: 1881826
guuauauuauccuccagug

SEQ ID NO: 2074201 - RNA, 19 nt, Artificial Sequence
  Description of Artificial Sequence: Synthetic oligonucleotide
  Antisense strand to SEQ ID NO: 2074200
cacuggaggauaauauaac

SEQ ID NO: 2074202 - RNA, 19 nt, Artificial Sequence
  Description of Artificial Sequence: Synthetic oligonucleotide
  Sense strand starting at position 2494 of SEQ ID NO: 1881826
cuacuuaauacgugaggua

SEQ ID NO: 2074203 - RNA, 19 nt, Artificial Sequence
  Description of Artificial Sequence: Synthetic oligonucleotide
  Antisense strand to SEQ ID NO: 2074202
uaccucacguauuaaguag

SEQ ID NO: 2074204 - RNA, 19 nt, Artificial Sequence
  Description of Artificial Sequence: Synthetic oligonucleotide
  Sense strand starting at position 2507 of SEQ ID NO: 1881826
gagguacuaauugguagua

SEQ ID NO: 2074205 - RNA, 19 nt, Artificial Sequence
  Description of Artificial Sequence: Synthetic oligonucleotide
  Antisense strand to SEQ ID NO: 2074204
uacuaccaauuaguaccuc

SEQ ID NO: 2074206 - RNA, 19 nt, Artificial Sequence
  Description of Artificial Sequence: Synthetic oligonucleotide
  Sense strand starting at position 2508 of SEQ ID NO: 1881826
agguacuaauugguaguaa

SEQ ID NO: 2074207 - RNA, 19 nt, Artificial Sequence
  Description of Artificial Sequence: Synthetic oligonucleotide
  Antisense strand to SEQ ID NO: 2074206
uuacuaccaauuaguaccu

SEQ ID NO: 2074208 - RNA, 19 nt, Artificial Sequence
  Description of Artificial Sequence: Synthetic oligonucleotide
  Sense strand starting at position 2546 of SEQ ID NO: 1881826
gcacuaauugguuguguug

SEQ ID NO: 2074209 - RNA, 19 nt, Artificial Sequence
  Description of Artificial Sequence: Synthetic oligonucleotide
  Antisense strand to SEQ ID NO: 2074208
caacacaaccaauuagugc

SEQ ID NO: 2074210 - RNA, 19 nt, Artificial Sequence
  Description of Artificial Sequence: Synthetic oligonucleotide
  Sense strand starting at position 2552 of SEQ ID NO: 1881826
auugguuguguuggguuau

SEQ ID NO: 2074211 - RNA, 19 nt, Artificial Sequence
  Description of Artificial Sequence: Synthetic oligonucleotide
  Antisense strand to SEQ ID NO: 2074210
auaacccaacacaaccaau

SEQ ID NO: 2074212 - RNA, 19 nt, Artificial Sequence
  Description of Artificial Sequence: Synthetic oligonucleotide
  Sense strand starting at position 2563 of SEQ ID NO: 1881826
uggguuauaagauguuaag

SEQ ID NO: 2074213 - RNA, 19 nt, Artificial Sequence
  Description of Artificial Sequence: Synthetic oligonucleotide
  Antisense strand to SEQ ID NO: 2074212
cuuaacaucuuauaaccca

SEQ ID NO: 2074214 - RNA, 19 nt, Artificial Sequence
  Description of Artificial Sequence: Synthetic oligonucleotide
  Sense strand starting at position 2566 of SEQ ID NO: 1881826
guuauaagauguuaagaag

SEQ ID NO: 2074215 - RNA, 19 nt, Artificial Sequence
  Description of Artificial Sequence: Synthetic oligonucleotide
  Antisense strand to SEQ ID NO: 2074214
cuucuuaacaucuuauaac

SEQ ID NO: 2074216 - RNA, 19 nt, Artificial Sequence
  Description of Artificial Sequence: Synthetic oligonucleotide
  Sense strand starting at position 2602 of SEQ ID NO: 1881826
gacauagguuaucuuugca

SEQ ID NO: 2074217 - RNA, 19 nt, Artificial Sequence
  Description of Artificial Sequence: Synthetic oligonucleotide
  Antisense strand to SEQ ID NO: 2074216
ugcaaagauaaccuauguc

SEQ ID NO: 2074218 - RNA, 19 nt, Artificial Sequence
  Description of Artificial Sequence: Synthetic oligonucleotide
  Sense strand starting at position 2648 of SEQ ID NO: 1881826
gauguuucgcccuauauau

SEQ ID NO: 2074219 - RNA, 19 nt, Artificial Sequence
  Description of Artificial Sequence: Synthetic oligonucleotide
  Antisense strand to SEQ ID NO: 2074218
auauauagggcgaaacauc

SEQ ID NO: 2074220 - RNA, 19 nt, Artificial Sequence
  Description of Artificial Sequence: Synthetic oligonucleotide
  Sense strand starting at position 2665 of SEQ ID NO: 1881826
auaucuguaucaguuugaa

SEQ ID NO: 2074221 - RNA, 19 nt, Artificial Sequence
  Description of Artificial Sequence: Synthetic oligonucleotide
  Antisense strand to SEQ ID NO: 2074220
uucaaacugauacagauau

SEQ ID NO: 2074222 - RNA, 19 nt, Artificial Sequence
  Description of Artificial Sequence: Synthetic oligonucleotide
  Sense strand starting at position 2668 of SEQ ID NO: 1881826
ucuguaucaguuugaaucu

SEQ ID NO: 2074223 - RNA, 19 nt, Artificial Sequence
  Description of Artificial Sequence: Synthetic oligonucleotide
  Antisense strand to SEQ ID NO: 2074222
agauucaaacugauacaga

SEQ ID NO: 2074224 - RNA, 19 nt, Artificial Sequence
  Description of Artificial Sequence: Synthetic oligonucleotide
  Sense strand starting at position 2795 of SEQ ID NO: 1881826
acuuuaagcuaguugcuua

SEQ ID NO: 2074225 - RNA, 19 nt, Artificial Sequence
  Description of Artificial Sequence: Synthetic oligonucleotide
  Antisense strand to SEQ ID NO: 2074224
uaagcaacuagcuuaaagu

SEQ ID NO: 2074226 - RNA, 19 nt, Artificial Sequence
  Description of Artificial Sequence: Synthetic oligonucleotide
  Sense strand starting at position 2800 of SEQ ID NO: 1881826
aagcuaguugcuuaagcuu

SEQ ID NO: 2074227 - RNA, 19 nt, Artificial Sequence
  Description of Artificial Sequence: Synthetic oligonucleotide
  Antisense strand to SEQ ID NO: 2074226
aagcuuaagcaacuagcuu

SEQ ID NO: 2074228 - RNA, 19 nt, Artificial Sequence
  Description of Artificial Sequence: Synthetic oligonucleotide
  Sense strand starting at position 3031 of SEQ ID NO: 1881826
uggauagcagaucguuauc

SEQ ID NO: 2074229 - RNA, 19 nt, Artificial Sequence
  Description of Artificial Sequence: Synthetic oligonucleotide
  Antisense strand to SEQ ID NO: 2074228
gauaacgaucugcuaucca

SEQ ID NO: 2074230 - RNA, 19 nt, Artificial Sequence
  Description of Artificial Sequence: Synthetic oligonucleotide
  Sense strand starting at position 3033 of SEQ ID NO: 1881826
gauagcagaucguuaucaa

SEQ ID NO: 2074231 - RNA, 19 nt, Artificial Sequence
  Description of Artificial Sequence: Synthetic oligonucleotide
  Antisense strand to SEQ ID NO: 2074230
uugauaacgaucugcuauc

SEQ ID NO: 2074232 - RNA, 19 nt, Artificial Sequence
  Description of Artificial Sequence: Synthetic oligonucleotide
  Sense strand starting at position 3034 of SEQ ID NO: 1881826
auagcagaucguuaucaaa

SEQ ID NO: 2074233 - RNA, 19 nt, Artificial Sequence
  Description of Artificial Sequence: Synthetic oligonucleotide
  Antisense strand to SEQ ID NO: 2074232
uuugauaacgaucugcuau

SEQ ID NO: 2074234 - RNA, 19 nt, Artificial Sequence
  Description of Artificial Sequence: Synthetic oligonucleotide
  Sense strand starting at position 3074 of SEQ ID NO: 1881826
uauccauuauggcugguua

SEQ ID NO: 2074235 - RNA, 19 nt, Artificial Sequence
  Description of Artificial Sequence: Synthetic oligonucleotide
  Antisense strand to SEQ ID NO: 2074234
uaaccagccauaauggaua

SEQ ID NO: 2074236 - RNA, 19 nt, Artificial Sequence
  Description of Artificial Sequence: Synthetic oligonucleotide
  Sense strand starting at position 3076 of SEQ ID NO: 1881826
uccauuauggcugguuacu

SEQ ID NO: 2074237 - RNA, 19 nt, Artificial Sequence
  Description of Artificial Sequence: Synthetic oligonucleotide
  Antisense strand to SEQ ID NO: 2074236
aguaaccagccauaaugga

SEQ ID NO: 2074238 - RNA, 19 nt, Artificial Sequence
  Description of Artificial Sequence: Synthetic oligonucleotide
  Sense strand starting at position 3087 of SEQ ID NO: 1881826
ugguuacuguuauugcuau

SEQ ID NO: 2074239 - RNA, 19 nt, Artificial Sequence
  Description of Artificial Sequence: Synthetic oligonucleotide
  Antisense strand to SEQ ID NO: 2074238
auagcaauaacaguaacca

SEQ ID NO: 2074240 - RNA, 19 nt, Artificial Sequence
  Description of Artificial Sequence: Synthetic oligonucleotide
  Sense strand starting at position 3165 of SEQ ID NO: 1881826
gggcuauguuucucagguc

SEQ ID NO: 2074241 - RNA, 19 nt, Artificial Sequence
  Description of Artificial Sequence: Synthetic oligonucleotide
  Antisense strand to SEQ ID NO: 2074240
gaccugagaaacauagccc

SEQ ID NO: 2074242 - RNA, 19 nt, Artificial Sequence
  Description of Artificial Sequence: Synthetic oligonucleotide
  Sense strand starting at position 3217 of SEQ ID NO: 1881826
ugauaugaagcuuguccca

SEQ ID NO: 2074243 - RNA, 19 nt, Artificial Sequence
  Description of Artificial Sequence: Synthetic oligonucleotide
  Antisense strand to SEQ ID NO: 2074242
ugggacaagcuucauauca

SEQ ID NO: 2074244 - RNA, 19 nt, Artificial Sequence
  Description of Artificial Sequence: Synthetic oligonucleotide
  Sense strand starting at position 3599 of SEQ ID NO: 1881826
aggaguugcuguucuuaga

SEQ ID NO: 2074245 - RNA, 19 nt, Artificial Sequence
  Description of Artificial Sequence: Synthetic oligonucleotide
  Antisense strand to SEQ ID NO: 2074244
ucuaagaacagcaacuccu

SEQ ID NO: 2074246 - RNA, 19 nt, Artificial Sequence
  Description of Artificial Sequence: Synthetic oligonucleotide
  Sense strand starting at position 3735 of SEQ ID NO: 1881826
uugacucauugagcuguuu

SEQ ID NO: 2074247 - RNA, 19 nt, Artificial Sequence
  Description of Artificial Sequence: Synthetic oligonucleotide
  Antisense strand to SEQ ID NO: 2074246
aaacagcucaaugagucaa

SEQ ID NO: 2074248 - RNA, 19 nt, Artificial Sequence
  Description of Artificial Sequence: Synthetic oligonucleotide
  Sense strand starting at position 3756 of SEQ ID NO: 1881826
cucucauucuuguugcuga

SEQ ID NO: 2074249 - RNA, 19 nt, Artificial Sequence
  Description of Artificial Sequence: Synthetic oligonucleotide
  Antisense strand to SEQ ID NO: 2074248
ucagcaacaagaaugagag

SEQ ID NO: 2074250 - RNA, 19 nt, Artificial Sequence
  Description of Artificial Sequence: Synthetic oligonucleotide
  Sense strand starting at position 3929 of SEQ ID NO: 1881826
ucuguauggaugcauguau

SEQ ID NO: 2074251 - RNA, 19 nt, Artificial Sequence
  Description of Artificial Sequence: Synthetic oligonucleotide
  Antisense strand to SEQ ID NO: 2074250
auacaugcauccauacaga

SEQ ID NO: 2074252 - RNA, 19 nt, Artificial Sequence
  Description of Artificial Sequence: Synthetic oligonucleotide
  Sense strand starting at position 5 of SEQ ID NO: 1881827
ugggauacucaugguacca

SEQ ID NO: 2074253 - RNA, 19 nt, Artificial Sequence
  Description of Artificial Sequence: Synthetic oligonucleotide
  Antisense strand to SEQ ID NO: 2074252
ugguaccaugaguauccca

SEQ ID NO: 2074254 - RNA, 19 nt, Artificial Sequence
  Description of Artificial Sequence: Synthetic oligonucleotide
  Sense strand starting at position 69 of SEQ ID NO: 1881827
gagagagcuuucuuaugag

SEQ ID NO: 2074255 - RNA, 19 nt, Artificial Sequence
  Description of Artificial Sequence: Synthetic oligonucleotide
  Antisense strand to SEQ ID NO: 2074254
cucauaagaaagcucucuc

SEQ ID NO: 2074256 - RNA, 19 nt, Artificial Sequence
  Description of Artificial Sequence: Synthetic oligonucleotide
  Sense strand starting at position 109 of SEQ ID NO: 1881827
cuguuccuugaguauacaa

SEQ ID NO: 2074257 - RNA, 19 nt, Artificial Sequence
  Description of Artificial Sequence: Synthetic oligonucleotide
  Antisense strand to SEQ ID NO: 2074256
uuguauacucaaggaacag

SEQ ID NO: 2074258 - RNA, 19 nt, Artificial Sequence
  Description of Artificial Sequence: Synthetic oligonucleotide
  Sense strand starting at position 111 of SEQ ID NO: 1881827
guuccuugaguauacaaau

SEQ ID NO: 2074259 - RNA, 19 nt, Artificial Sequence
  Description of Artificial Sequence: Synthetic oligonucleotide
  Antisense strand to SEQ ID NO: 2074258
auuuguauacucaaggaac

SEQ ID NO: 2074260 - RNA, 19 nt, Artificial Sequence
  Description of Artificial Sequence: Synthetic oligonucleotide
  Sense strand starting at position 121 of SEQ ID NO: 1881827
uauacaaauggcuggagua

SEQ ID NO: 2074261 - RNA, 19 nt, Artificial Sequence
  Description of Artificial Sequence: Synthetic oligonucleotide
  Antisense strand to SEQ ID NO: 2074260
uacuccagccauuuguaua

SEQ ID NO: 2074262 - RNA, 19 nt, Artificial Sequence
  Description of Artificial Sequence: Synthetic oligonucleotide
  Sense strand starting at position 216 of SEQ ID NO: 1881827
uuauuaacuccagguuaag

SEQ ID NO: 2074263 - RNA, 19 nt, Artificial Sequence
  Description of Artificial Sequence: Synthetic oligonucleotide
  Antisense strand to SEQ ID NO: 2074262
cuuaaccuggaguuaauaa

SEQ ID NO: 2074264 - RNA, 19 nt, Artificial Sequence
  Description of Artificial Sequence: Synthetic oligonucleotide
  Sense strand starting at position 253 of SEQ ID NO: 1881827
ugccuugcagcguuacauu

SEQ ID NO: 2074265 - RNA, 19 nt, Artificial Sequence
  Description of Artificial Sequence: Synthetic oligonucleotide
  Antisense strand to SEQ ID NO: 2074264
aauguaacgcugcaaggca

SEQ ID NO: 2074266 - RNA, 19 nt, Artificial Sequence
  Description of Artificial Sequence: Synthetic oligonucleotide
  Sense strand starting at position 417 of SEQ ID NO: 1881827
aguuguauuccagagacuc

SEQ ID NO: 2074267 - RNA, 19 nt, Artificial Sequence
  Description of Artificial Sequence: Synthetic oligonucleotide
  Antisense strand to SEQ ID NO: 2074266
gagucucuggaauacaacu

SEQ ID NO: 2074268 - RNA, 19 nt, Artificial Sequence
  Description of Artificial Sequence: Synthetic oligonucleotide
  Sense strand starting at position 460 of SEQ ID NO: 1881827
accugaaauccguagauua

SEQ ID NO: 2074269 - RNA, 19 nt, Artificial Sequence
  Description of Artificial Sequence: Synthetic oligonucleotide
  Antisense strand to SEQ ID NO: 2074268
uaaucuacggauuucaggu

SEQ ID NO: 2074270 - RNA, 19 nt, Artificial Sequence
  Description of Artificial Sequence: Synthetic oligonucleotide
  Sense strand starting at position 507 of SEQ ID NO: 1881827
cugguucccggagaaagua

SEQ ID NO: 2074271 - RNA, 19 nt, Artificial Sequence
  Description of Artificial Sequence: Synthetic oligonucleotide
  Antisense strand to SEQ ID NO: 2074270
uacuuucuccgggaaccag

SEQ ID NO: 2074272 - RNA, 19 nt, Artificial Sequence
  Description of Artificial Sequence: Synthetic oligonucleotide
  Sense strand starting at position 516 of SEQ ID NO: 1881827
ggagaaaguaucugaagca

SEQ ID NO: 2074273 - RNA, 19 nt, Artificial Sequence
  Description of Artificial Sequence: Synthetic oligonucleotide
  Antisense strand to SEQ ID NO: 2074272
ugcuucagauacuuucucc

SEQ ID NO: 2074274 - RNA, 19 nt, Artificial Sequence
  Description of Artificial Sequence: Synthetic oligonucleotide
  Sense strand starting at position 594 of SEQ ID NO: 1881827
uggugcuauuucucucuua

SEQ ID NO: 2074275 - RNA, 19 nt, Artificial Sequence
  Description of Artificial Sequence: Synthetic oligonucleotide
  Antisense strand to SEQ ID NO: 2074274
uaagagagaaauagcacca

SEQ ID NO: 2074276 - RNA, 19 nt, Artificial Sequence
  Description of Artificial Sequence: Synthetic oligonucleotide
  Sense strand starting at position 595 of SEQ ID NO: 1881827
ggugcuauuucucucuuau

SEQ ID NO: 2074277 - RNA, 19 nt, Artificial Sequence
  Description of Artificial Sequence: Synthetic oligonucleotide
  Antisense strand to SEQ ID NO: 2074276
auaagagagaaauagcacc

SEQ ID NO: 2074278 - RNA, 19 nt, Artificial Sequence
  Description of Artificial Sequence: Synthetic oligonucleotide
  Sense strand starting at position 891 of SEQ ID NO: 1881827
cugccuaauggucagggaa

SEQ ID NO: 2074279 - RNA, 19 nt, Artificial Sequence
  Description of Artificial Sequence: Synthetic oligonucleotide
  Antisense strand to SEQ ID NO: 2074278
uucccugaccauuaggcag

SEQ ID NO: 2074280 - RNA, 19 nt, Artificial Sequence
  Description of Artificial Sequence: Synthetic oligonucleotide
  Sense strand starting at position 1055 of SEQ ID NO: 1881827
gcaucuaggauccagaagu

SEQ ID NO: 2074281 - RNA, 19 nt, Artificial Sequence
  Description of Artificial Sequence: Synthetic oligonucleotide
  Antisense strand to SEQ ID NO: 2074280
acuucuggauccuagaugc

SEQ ID NO: 2074282 - RNA, 19 nt, Artificial Sequence
  Description of Artificial Sequence: Synthetic oligonucleotide
  Sense strand starting at position 1098 of SEQ ID NO: 1881827
uuuacauucgucgaauaga

SEQ ID NO: 2074283 - RNA, 19 nt, Artificial Sequence
  Description of Artificial Sequence: Synthetic oligonucleotide
  Antisense strand to SEQ ID NO: 2074282
ucuauucgacgaauguaaa

SEQ ID NO: 2074284 - RNA, 19 nt, Artificial Sequence
  Description of Artificial Sequence: Synthetic oligonucleotide
  Sense strand starting at position 1101 of SEQ ID NO: 1881827
acauucgucgaauagacaa

SEQ ID NO: 2074285 - RNA, 19 nt, Artificial Sequence
  Description of Artificial Sequence: Synthetic oligonucleotide
  Antisense strand to SEQ ID NO: 2074284
uugucuauucgacgaaugu

SEQ ID NO: 2074286 - RNA, 19 nt, Artificial Sequence
  Description of Artificial Sequence: Synthetic oligonucleotide
  Sense strand starting at position 1108 of SEQ ID NO: 1881827
ucgaauagacaauguuaca

SEQ ID NO: 2074287 - RNA, 19 nt, Artificial Sequence
  Description of Artificial Sequence: Synthetic oligonucleotide
  Antisense strand to SEQ ID NO: 2074286
uguaacauugucuauucga

SEQ ID NO: 2074288 - RNA, 19 nt, Artificial Sequence
  Description of Artificial Sequence: Synthetic oligonucleotide
  Sense strand starting at position 1238 of SEQ ID NO: 1881827
guaagaaauagaggcauua

SEQ ID NO: 2074289 - RNA, 19 nt, Artificial Sequence
  Description of Artificial Sequence: Synthetic oligonucleotide
  Antisense strand to SEQ ID NO: 2074288
uaaugccucuauuucuuac

SEQ ID NO: 2074290 - RNA, 19 nt, Artificial Sequence
  Description of Artificial Sequence: Synthetic oligonucleotide
  Sense strand starting at position 1627 of SEQ ID NO: 1881827
agaaguaucucuuuccaag

SEQ ID NO: 2074291 - RNA, 19 nt, Artificial Sequence
  Description of Artificial Sequence: Synthetic oligonucleotide
  Antisense strand to SEQ ID NO: 2074290
cuuggaaagagauacuucu

SEQ ID NO: 2074292 - RNA, 19 nt, Artificial Sequence
  Description of Artificial Sequence: Synthetic oligonucleotide
  Sense strand starting at position 1676 of SEQ ID NO: 1881827
cguggaauccgagggaaca

SEQ ID NO: 2074293 - RNA, 19 nt, Artificial Sequence
  Description of Artificial Sequence: Synthetic oligonucleotide
  Antisense strand to SEQ ID NO: 2074292
uguucccucggauuccacg

SEQ ID NO: 2074294 - RNA, 19 nt, Artificial Sequence
  Description of Artificial Sequence: Synthetic oligonucleotide
  Sense strand starting at position 2492 of SEQ ID NO: 1881827
gcagaaugaccagguuaga

SEQ ID NO: 2074295 - RNA, 19 nt, Artificial Sequence
  Description of Artificial Sequence: Synthetic oligonucleotide
  Antisense strand to SEQ ID NO: 2074294
ucuaaccuggucauucugc

SEQ ID NO: 2074296 - RNA, 19 nt, Artificial Sequence
  Description of Artificial Sequence: Synthetic oligonucleotide
  Sense strand starting at position 2528 of SEQ ID NO: 1881827
agaagaucugcucacaagu

SEQ ID NO: 2074297 - RNA, 19 nt, Artificial Sequence
  Description of Artificial Sequence: Synthetic oligonucleotide
  Antisense strand to SEQ ID NO: 2074296
acuugugagcagaucuucu

SEQ ID NO: 2074298 - RNA, 19 nt, Artificial Sequence
  Description of Artificial Sequence: Synthetic oligonucleotide
  Sense strand starting at position 2544 of SEQ ID NO: 1881827
aguuaugauuauccaaggu

SEQ ID NO: 2074299 - RNA, 19 nt, Artificial Sequence
  Description of Artificial Sequence: Synthetic oligonucleotide
  Antisense strand to SEQ ID NO: 2074298
accuuggauaaucauaacu

SEQ ID NO: 2074300 - RNA, 19 nt, Artificial Sequence
  Description of Artificial Sequence: Synthetic oligonucleotide
  Sense strand starting at position 2548 of SEQ ID NO: 1881827
augauuauccaaggugaua

SEQ ID NO: 2074301 - RNA, 19 nt, Artificial Sequence
  Description of Artificial Sequence: Synthetic oligonucleotide
  Antisense strand to SEQ ID NO: 2074300
uaucaccuuggauaaucau

SEQ ID NO: 2074302 - RNA, 19 nt, Artificial Sequence
  Description of Artificial Sequence: Synthetic oligonucleotide
  Sense strand starting at position 2649 of SEQ ID NO: 1881827
ccucuccuccgagauaauu

SEQ ID NO: 2074303 - RNA, 19 nt, Artificial Sequence
  Description of Artificial Sequence: Synthetic oligonucleotide
  Antisense strand to SEQ ID NO: 2074302
aauuaucucggaggagagg

SEQ ID NO: 2074304 - RNA, 19 nt, Artificial Sequence
  Description of Artificial Sequence: Synthetic oligonucleotide
  Sense strand starting at position 2772 of SEQ ID NO: 1881827
ugacauagacugugaccau

SEQ ID NO: 2074305 - RNA, 19 nt, Artificial Sequence
  Description of Artificial Sequence: Synthetic oligonucleotide
  Antisense strand to SEQ ID NO: 2074304
auggucacagucuauguca

SEQ ID NO: 2074306 - RNA, 19 nt, Artificial Sequence
  Description of Artificial Sequence: Synthetic oligonucleotide
  Sense strand starting at position 3001 of SEQ ID NO: 1881827
agcuuaaggaguuaugagu

SEQ ID NO: 2074307 - RNA, 19 nt, Artificial Sequence
  Description of Artificial Sequence: Synthetic oligonucleotide
  Antisense strand to SEQ ID NO: 2074306
acucauaacuccuuaagcu

SEQ ID NO: 2074308 - RNA, 19 nt, Artificial Sequence
  Description of Artificial Sequence: Synthetic oligonucleotide
  Sense strand starting at position 3209 of SEQ ID NO: 1881827
auugguaugcaucagaugu

SEQ ID NO: 2074309 - RNA, 19 nt, Artificial Sequence
  Description of Artificial Sequence: Synthetic oligonucleotide
  Antisense strand to SEQ ID NO: 2074308
acaucugaugcauaccaau

SEQ ID NO: 2074310 - RNA, 19 nt, Artificial Sequence
  Description of Artificial Sequence: Synthetic oligonucleotide
  Sense strand starting at position 3528 of SEQ ID NO: 1881827
acugaaaugugaguaagug

SEQ ID NO: 2074311 - RNA, 19 nt, Artificial Sequence
  Description of Artificial Sequence: Synthetic oligonucleotide
  Antisense strand to SEQ ID NO: 2074310
cacuuacucacauuucagu

SEQ ID NO: 2074312 - RNA, 19 nt, Artificial Sequence
  Description of Artificial Sequence: Synthetic oligonucleotide
  Sense strand starting at position 3529 of SEQ ID NO: 1881827
cugaaaugugaguaagugu

SEQ ID NO: 2074313 - RNA, 19 nt, Artificial Sequence
  Description of Artificial Sequence: Synthetic oligonucleotide
  Antisense strand to SEQ ID NO: 2074312
acacuuacucacauuucag

SEQ ID NO: 2074314 - RNA, 19 nt, Artificial Sequence
  Description of Artificial Sequence: Synthetic oligonucleotide
  Sense strand starting at position 3572 of SEQ ID NO: 1881827
gcaggacacuuccuuuaau

SEQ ID NO: 2074315 - RNA, 19 nt, Artificial Sequence
  Description of Artificial Sequence: Synthetic oligonucleotide
  Antisense strand to SEQ ID NO: 2074314
auuaaaggaaguguccugc

SEQ ID NO: 2074316 - RNA, 19 nt, Artificial Sequence
  Description of Artificial Sequence: Synthetic oligonucleotide
  Sense strand starting at position 3575 of SEQ ID NO: 1881827
ggacacuuccuuuaaugug

SEQ ID NO: 2074317 - RNA, 19 nt, Artificial Sequence
  Description of Artificial Sequence: Synthetic oligonucleotide
  Antisense strand to SEQ ID NO: 2074316
cacauuaaaggaagugucc

SEQ ID NO: 2074318 - RNA, 19 nt, Artificial Sequence
  Description of Artificial Sequence: Synthetic oligonucleotide
  Sense strand starting at position 3689 of SEQ ID NO: 1881827
ugucaugaagugcagaaua

SEQ ID NO: 2074319 - RNA, 19 nt, Artificial Sequence
  Description of Artificial Sequence: Synthetic oligonucleotide
  Antisense strand to SEQ ID NO: 2074318
uauucugcacuucaugaca

SEQ ID NO: 2074320 - RNA, 19 nt, Artificial Sequence
  Description of Artificial Sequence: Synthetic oligonucleotide
  Sense strand starting at position 3788 of SEQ ID NO: 1881827
aggauaaaguguuccugag

SEQ ID NO: 2074321 - RNA, 19 nt, Artificial Sequence
  Description of Artificial Sequence: Synthetic oligonucleotide
  Antisense strand to SEQ ID NO: 2074320
cucaggaacacuuuauccu

SEQ ID NO: 2074322 - RNA, 19 nt, Artificial Sequence
  Description of Artificial Sequence: Synthetic oligonucleotide
  Sense strand starting at position 3790 of SEQ ID NO: 1881827
gauaaaguguuccugagac

SEQ ID NO: 2074323 - RNA, 19 nt, Artificial Sequence
  Description of Artificial Sequence: Synthetic oligonucleotide
  Antisense strand to SEQ ID NO: 2074322
gucucaggaacacuuuauc

SEQ ID NO: 2074324 - RNA, 19 nt, Artificial Sequence
  Description of Artificial Sequence: Synthetic oligonucleotide
  Sense strand starting at position 3796 of SEQ ID NO: 1881827
guguuccugagacaaagua

SEQ ID NO: 2074325 - RNA, 19 nt, Artificial Sequence
  Description of Artificial Sequence: Synthetic oligonucleotide
  Antisense strand to SEQ ID NO: 2074324
uacuuugucucaggaacac

SEQ ID NO: 2074326 - RNA, 19 nt, Artificial Sequence
  Description of Artificial Sequence: Synthetic oligonucleotide
  Sense strand starting at position 3806 of SEQ ID NO: 1881827
gacaaaguaguuugagaac

SEQ ID NO: 2074327 - RNA, 19 nt, Artificial Sequence
  Description of Artificial Sequence: Synthetic oligonucleotide
  Antisense strand to SEQ ID NO: 2074326
guucucaaacuacuuuguc

SEQ ID NO: 2074328 - RNA, 19 nt, Artificial Sequence
  Description of Artificial Sequence: Synthetic oligonucleotide
  Sense strand starting at position 3844 of SEQ ID NO: 1881827
ugccuaguugcaguuguga

SEQ ID NO: 2074329 - RNA, 19 nt, Artificial Sequence
  Description of Artificial Sequence: Synthetic oligonucleotide
  Antisense strand to SEQ ID NO: 2074328
ucacaacugcaacuaggca

SEQ ID NO: 2074330 - RNA, 19 nt, Artificial Sequence
  Description of Artificial Sequence: Synthetic oligonucleotide
  Sense strand starting at position 3963 of SEQ ID NO: 1881827
auccuauuaugugugaaca

SEQ ID NO: 2074331 - RNA, 19 nt, Artificial Sequence
  Description of Artificial Sequence: Synthetic oligonucleotide
  Antisense strand to SEQ ID NO: 2074330
uguucacacauaauaggau

SEQ ID NO: 2074332 - RNA, 19 nt, Artificial Sequence
  Description of Artificial Sequence: Synthetic oligonucleotide
  Sense strand starting at position 255 of SEQ ID NO: 1881828
ucaggaaucugagagaaag

SEQ ID NO: 2074333 - RNA, 19 nt, Artificial Sequence
  Description of Artificial Sequence: Synthetic oligonucleotide
  Antisense strand to SEQ ID NO: 2074332
cuuucucucagauuccuga

SEQ ID NO: 2074334 - RNA, 19 nt, Artificial Sequence
  Description of Artificial Sequence: Synthetic oligonucleotide
  Sense strand starting at position 372 of SEQ ID NO: 1881828
agacuauguuaggcuccau

SEQ ID NO: 2074335 - RNA, 19 nt, Artificial Sequence
  Description of Artificial Sequence: Synthetic oligonucleotide
  Antisense strand to SEQ ID NO: 2074334
auggagccuaacauagucu

SEQ ID NO: 2074336 - RNA, 19 nt, Artificial Sequence
  Description of Artificial Sequence: Synthetic oligonucleotide
  Sense strand starting at position 510 of SEQ ID NO: 1881828
gccugaugugggcaauaaa

SEQ ID NO: 2074337 - RNA, 19 nt, Artificial Sequence
  Description of Artificial Sequence: Synthetic oligonucleotide
  Antisense strand to SEQ ID NO: 2074336
uuuauugcccacaucaggc

SEQ ID NO: 2074338 - RNA, 19 nt, Artificial Sequence
  Description of Artificial Sequence: Synthetic oligonucleotide
  Sense strand starting at position 713 of SEQ ID NO: 1881828
gugugaggccuucagaacu

SEQ ID NO: 2074339 - RNA, 19 nt, Artificial Sequence
  Description of Artificial Sequence: Synthetic oligonucleotide
  Antisense strand to SEQ ID NO: 2074338
aguucugaaggccucacac

SEQ ID NO: 2074340 - RNA, 19 nt, Artificial Sequence
  Description of Artificial Sequence: Synthetic oligonucleotide
  Sense strand starting at position 863 of SEQ ID NO: 1881828
acugacuauccuugucuca

SEQ ID NO: 2074341 - RNA, 19 nt, Artificial Sequence
  Description of Artificial Sequence: Synthetic oligonucleotide
  Antisense strand to SEQ ID NO: 2074340
ugagacaaggauagucagu

SEQ ID NO: 2074342 - RNA, 19 nt, Artificial Sequence
  Description of Artificial Sequence: Synthetic oligonucleotide
  Sense strand starting at position 942 of SEQ ID NO: 1881828
uguuccuaccuuugaaaga

SEQ ID NO: 2074343 - RNA, 19 nt, Artificial Sequence
  Description of Artificial Sequence: Synthetic oligonucleotide
  Antisense strand to SEQ ID NO: 2074342
ucuuucaaagguaggaaca

SEQ ID NO: 2074344 - RNA, 19 nt, Artificial Sequence
  Description of Artificial Sequence: Synthetic oligonucleotide
  Sense strand starting at position 962 of SEQ ID NO: 1881828
aagccaagcugagugauua

SEQ ID NO: 2074345 - RNA, 19 nt, Artificial Sequence
  Description of Artificial Sequence: Synthetic oligonucleotide
  Antisense strand to SEQ ID NO: 2074344
uaaucacucagcuuggcuu

SEQ ID NO: 2074346 - RNA, 19 nt, Artificial Sequence
  Description of Artificial Sequence: Synthetic oligonucleotide
  Sense strand starting at position 963 of SEQ ID NO: 1881828
agccaagcugagugauuaa

SEQ ID NO: 2074347 - RNA, 19 nt, Artificial Sequence
  Description of Artificial Sequence: Synthetic oligonucleotide
  Antisense strand to SEQ ID NO: 2074346
uuaaucacucagcuuggcu

SEQ ID NO: 2074348 - RNA, 19 nt, Artificial Sequence
  Description of Artificial Sequence: Synthetic oligonucleotide
  Sense strand starting at position 966 of SEQ ID NO: 1881828
caagcugagugauuaagag

SEQ ID NO: 2074349 - RNA, 19 nt, Artificial Sequence
  Description of Artificial Sequence: Synthetic oligonucleotide
  Antisense strand to SEQ ID NO: 2074348
cucuuaaucacucagcuug

SEQ ID NO: 2074350 - RNA, 19 nt, Artificial Sequence
  Description of Artificial Sequence: Synthetic oligonucleotide
  Sense strand starting at position 1174 of SEQ ID NO: 1881828
cuuuguguugaguagggaa

SEQ ID NO: 2074351 - RNA, 19 nt, Artificial Sequence
  Description of Artificial Sequence: Synthetic oligonucleotide
  Antisense strand to SEQ ID NO: 2074350
uucccuacucaacacaaag

SEQ ID NO: 2074352 - RNA, 19 nt, Artificial Sequence
  Description of Artificial Sequence: Synthetic oligonucleotide
  Sense strand starting at position 1176 of SEQ ID NO: 1881828
uuguguugaguagggaaau

SEQ ID NO: 2074353 - RNA, 19 nt, Artificial Sequence
  Description of Artificial Sequence: Synthetic oligonucleotide
  Antisense strand to SEQ ID NO: 2074352
auuucccuacucaacacaa

SEQ ID NO: 2074354 - RNA, 19 nt, Artificial Sequence
  Description of Artificial Sequence: Synthetic oligonucleotide
  Sense strand starting at position 1186 of SEQ ID NO: 1881828
uagggaaauguaugugaac

SEQ ID NO: 2074355 - RNA, 19 nt, Artificial Sequence
  Description of Artificial Sequence: Synthetic oligonucleotide
  Antisense strand to SEQ ID NO: 2074354
guucacauacauuucccua

SEQ ID NO: 2074356 - RNA, 19 nt, Artificial Sequence
  Description of Artificial Sequence: Synthetic oligonucleotide
  Sense strand starting at position 1188 of SEQ ID NO: 1881828
gggaaauguaugugaacac

SEQ ID NO: 2074357 - RNA, 19 nt, Artificial Sequence
  Description of Artificial Sequence: Synthetic oligonucleotide
  Antisense strand to SEQ ID NO: 2074356
guguucacauacauuuccc

SEQ ID NO: 2074358 - RNA, 19 nt, Artificial Sequence
  Description of Artificial Sequence: Synthetic oligonucleotide
  Sense strand starting at position 1263 of SEQ ID NO: 1881828
ggaauacugugucuaggag

SEQ ID NO: 2074359 - RNA, 19 nt, Artificial Sequence
  Description of Artificial Sequence: Synthetic oligonucleotide
  Antisense strand to SEQ ID NO: 2074358
cuccuagacacaguauucc

SEQ ID NO: 2074360 - RNA, 19 nt, Artificial Sequence
  Description of Artificial Sequence: Synthetic oligonucleotide
  Sense strand starting at position 1351 of SEQ ID NO: 1881828
ugugucuggcgcuuagaca

SEQ ID NO: 2074361 - RNA, 19 nt, Artificial Sequence
  Description of Artificial Sequence: Synthetic oligonucleotide
  Antisense strand to SEQ ID NO: 2074360
ugucuaagcgccagacaca

SEQ ID NO: 2074362 - RNA, 19 nt, Artificial Sequence
  Description of Artificial Sequence: Synthetic oligonucleotide
  Sense strand starting at position 1424 of SEQ ID NO: 1881828
ggacauauauuugagaugu

SEQ ID NO: 2074363 - RNA, 19 nt, Artificial Sequence
  Description of Artificial Sequence: Synthetic oligonucleotide
  Antisense strand to SEQ ID NO: 2074362
acaucucaaauauaugucc

SEQ ID NO: 2074364 - RNA, 19 nt, Artificial Sequence
  Description of Artificial Sequence: Synthetic oligonucleotide
  Sense strand starting at position 1426 of SEQ ID NO: 1881828
acauauauuugagauguuc

SEQ ID NO: 2074365 - RNA, 19 nt, Artificial Sequence
  Description of Artificial Sequence: Synthetic oligonucleotide
  Antisense strand to SEQ ID NO: 2074364
gaacaucucaaauauaugu

SEQ ID NO: 2074366 - RNA, 19 nt, Artificial Sequence
  Description of Artificial Sequence: Synthetic oligonucleotide
  Sense strand starting at position 1515 of SEQ ID NO: 1881828
guccauuaggguuauaguu

SEQ ID NO: 2074367 - RNA, 19 nt, Artificial Sequence
  Description of Artificial Sequence: Synthetic oligonucleotide
  Antisense strand to SEQ ID NO: 2074366
aacuauaacccuaauggac

SEQ ID NO: 2074368 - RNA, 19 nt, Artificial Sequence
  Description of Artificial Sequence: Synthetic oligonucleotide
  Sense strand starting at position 1596 of SEQ ID NO: 1881828
cuuggacuucuuuagcaaa

SEQ ID NO: 2074369 - RNA, 19 nt, Artificial Sequence
  Description of Artificial Sequence: Synthetic oligonucleotide
  Antisense strand to SEQ ID NO: 2074368
uuugcuaaagaaguccaag

SEQ ID NO: 2074370 - RNA, 19 nt, Artificial Sequence
  Description of Artificial Sequence: Synthetic oligonucleotide
  Sense strand starting at position 1598 of SEQ ID NO: 1881828
uggacuucuuuagcaaaua

SEQ ID NO: 2074371 - RNA, 19 nt, Artificial Sequence
  Description of Artificial Sequence: Synthetic oligonucleotide
  Antisense strand to SEQ ID NO: 2074370
uauuugcuaaagaagucca

SEQ ID NO: 2074372 - RNA, 19 nt, Artificial Sequence
  Description of Artificial Sequence: Synthetic oligonucleotide
  Sense strand starting at position 1618 of SEQ ID NO: 1881828
gcuauuuagugagcuuucu

SEQ ID NO: 2074373 - RNA, 19 nt, Artificial Sequence
  Description of Artificial Sequence: Synthetic oligonucleotide
  Antisense strand to SEQ ID NO: 2074372
agaaagcucacuaaauagc

SEQ ID NO: 2074374 - RNA, 19 nt, Artificial Sequence
  Description of Artificial Sequence: Synthetic oligonucleotide
  Sense strand starting at position 1992 of SEQ ID NO: 1881828
guaggaauacagcauccua

SEQ ID NO: 2074375 - RNA, 19 nt, Artificial Sequence
  Description of Artificial Sequence: Synthetic oligonucleotide
  Antisense strand to SEQ ID NO: 2074374
uaggaugcuguauuccuac

SEQ ID NO: 2074376 - RNA, 19 nt, Artificial Sequence
  Description of Artificial Sequence: Synthetic oligonucleotide
  Sense strand starting at position 2151 of SEQ ID NO: 1881828
cuuuauucuggcuaugaaa

SEQ ID NO: 2074377 - RNA, 19 nt, Artificial Sequence
  Description of Artificial Sequence: Synthetic oligonucleotide
  Antisense strand to SEQ ID NO: 2074376
uuucauagccagaauaaag

SEQ ID NO: 2074378 - RNA, 19 nt, Artificial Sequence
  Description of Artificial Sequence: Synthetic oligonucleotide
  Sense strand starting at position 2153 of SEQ ID NO: 1881828
uuauucuggcuaugaaaua

SEQ ID NO: 2074379 - RNA, 19 nt, Artificial Sequence
  Description of Artificial Sequence: Synthetic oligonucleotide
  Antisense strand to SEQ ID NO: 2074378
uauuucauagccagaauaa

SEQ ID NO: 2074380 - RNA, 19 nt, Artificial Sequence
  Description of Artificial Sequence: Synthetic oligonucleotide
  Sense strand starting at position 2256 of SEQ ID NO: 1881828
gguacagaauaauucuauu

SEQ ID NO: 2074381 - RNA, 19 nt, Artificial Sequence
  Description of Artificial Sequence: Synthetic oligonucleotide
  Antisense strand to SEQ ID NO: 2074380
aauagaauuauucuguacc

SEQ ID NO: 2074382 - RNA, 19 nt, Artificial Sequence
  Description of Artificial Sequence: Synthetic oligonucleotide
  Sense strand starting at position 2782 of SEQ ID NO: 1881828
ugggaauuggcaugaguga

SEQ ID NO: 2074383 - RNA, 19 nt, Artificial Sequence
  Description of Artificial Sequence: Synthetic oligonucleotide
  Antisense strand to SEQ ID NO: 2074382
ucacucaugccaauuccca

SEQ ID NO: 2074384 - RNA, 19 nt, Artificial Sequence
  Description of Artificial Sequence: Synthetic oligonucleotide
  Sense strand starting at position 2789 of SEQ ID NO: 1881828
uggcaugagugaucccaau

SEQ ID NO: 2074385 - RNA, 19 nt, Artificial Sequence
  Description of Artificial Sequence: Synthetic oligonucleotide
  Antisense strand to SEQ ID NO: 2074384
auugggaucacucaugcca

SEQ ID NO: 2074386 - RNA, 19 nt, Artificial Sequence
  Description of Artificial Sequence: Synthetic oligonucleotide
  Sense strand starting at position 2832 of SEQ ID NO: 1881828
uggauauuaaugggcacau

SEQ ID NO: 2074387 - RNA, 19 nt, Artificial Sequence
  Description of Artificial Sequence: Synthetic oligonucleotide
  Antisense strand to SEQ ID NO: 2074386
augugcccauuaauaucca

SEQ ID NO: 2074388 - RNA, 19 nt, Artificial Sequence
  Description of Artificial Sequence: Synthetic oligonucleotide
  Sense strand starting at position 2833 of SEQ ID NO: 1881828
ggauauuaaugggcacaua

SEQ ID NO: 2074389 - RNA, 19 nt, Artificial Sequence
  Description of Artificial Sequence: Synthetic oligonucleotide
  Antisense strand to SEQ ID NO: 2074388
uaugugcccauuaauaucc

SEQ ID NO: 2074390 - RNA, 19 nt, Artificial Sequence
  Description of Artificial Sequence: Synthetic oligonucleotide
  Sense strand starting at position 2974 of SEQ ID NO: 1881828
cagugugaauaaucaggca

SEQ ID NO: 2074391 - RNA, 19 nt, Artificial Sequence
  Description of Artificial Sequence: Synthetic oligonucleotide
  Antisense strand to SEQ ID NO: 2074390
ugccugauuauucacacug

SEQ ID NO: 2074392 - RNA, 19 nt, Artificial Sequence
  Description of Artificial Sequence: Synthetic oligonucleotide
  Sense strand starting at position 3027 of SEQ ID NO: 1881828
gagagauucugggcacuuu

SEQ ID NO: 2074393 - RNA, 19 nt, Artificial Sequence
  Description of Artificial Sequence: Synthetic oligonucleotide
  Antisense strand to SEQ ID NO: 2074392
aaagugcccagaaucucuc

SEQ ID NO: 2074394 - RNA, 19 nt, Artificial Sequence
  Description of Artificial Sequence: Synthetic oligonucleotide
  Sense strand starting at position 3182 of SEQ ID NO: 1881828
acaagaacauucuuguguu

SEQ ID NO: 2074395 - RNA, 19 nt, Artificial Sequence
  Description of Artificial Sequence: Synthetic oligonucleotide
  Antisense strand to SEQ ID NO: 2074394
aacacaagaauguucuugu

SEQ ID NO: 2074396 - RNA, 19 nt, Artificial Sequence
  Description of Artificial Sequence: Synthetic oligonucleotide
  Sense strand starting at position 3265 of SEQ ID NO: 1881828
ugcuaagguccgcuucuau

SEQ ID NO: 2074397 - RNA, 19 nt, Artificial Sequence
  Description of Artificial Sequence: Synthetic oligonucleotide
  Antisense strand to SEQ ID NO: 2074396
auagaagcggaccuuagca

SEQ ID NO: 2074398 - RNA, 19 nt, Artificial Sequence
  Description of Artificial Sequence: Synthetic oligonucleotide
  Sense strand starting at position 3299 of SEQ ID NO: 1881828
ucuguuaaaccuugggcaa

SEQ ID NO: 2074399 - RNA, 19 nt, Artificial Sequence
  Description of Artificial Sequence: Synthetic oligonucleotide
  Antisense strand to SEQ ID NO: 2074398
uugcccaagguuuaacaga

SEQ ID NO: 2074400 - RNA, 19 nt, Artificial Sequence
  Description of Artificial Sequence: Synthetic oligonucleotide
  Sense strand starting at position 3366 of SEQ ID NO: 1881828
aucugcagccuugaagauu

SEQ ID NO: 2074401 - RNA, 19 nt, Artificial Sequence
  Description of Artificial Sequence: Synthetic oligonucleotide
  Antisense strand to SEQ ID NO: 2074400
aaucuucaaggcugcagau

SEQ ID NO: 2074402 - RNA, 19 nt, Artificial Sequence
  Description of Artificial Sequence: Synthetic oligonucleotide
  Sense strand starting at position 3498 of SEQ ID NO: 1881828
ccuugagaugcugauguuu

SEQ ID NO: 2074403 - RNA, 19 nt, Artificial Sequence
  Description of Artificial Sequence: Synthetic oligonucleotide
  Antisense strand to SEQ ID NO: 2074402
aaacaucagcaucucaagg

SEQ ID NO: 2074404 - RNA, 19 nt, Artificial Sequence
  Description of Artificial Sequence: Synthetic oligonucleotide
  Sense strand starting at position 3618 of SEQ ID NO: 1881828
ccagauaccuauguuaucu

SEQ ID NO: 2074405 - RNA, 19 nt, Artificial Sequence
  Description of Artificial Sequence: Synthetic oligonucleotide
  Antisense strand to SEQ ID NO: 2074404
agauaacauagguaucugg

SEQ ID NO: 2074406 - RNA, 19 nt, Artificial Sequence
  Description of Artificial Sequence: Synthetic oligonucleotide
  Sense strand starting at position 3761 of SEQ ID NO: 1881828
guugccaaacacugaauaa

SEQ ID NO: 2074407 - RNA, 19 nt, Artificial Sequence
  Description of Artificial Sequence: Synthetic oligonucleotide
  Antisense strand to SEQ ID NO: 2074406
uuauucaguguuuggcaac

SEQ ID NO: 2074408 - RNA, 19 nt, Artificial Sequence
  Description of Artificial Sequence: Synthetic oligonucleotide
  Sense strand starting at position 3790 of SEQ ID NO: 1881828
guuagaauagggugcaauu

SEQ ID NO: 2074409 - RNA, 19 nt, Artificial Sequence
  Description of Artificial Sequence: Synthetic oligonucleotide
  Antisense strand to SEQ ID NO: 2074408
aauugcacccuauucuaac

SEQ ID NO: 2074410 - RNA, 19 nt, Artificial Sequence
  Description of Artificial Sequence: Synthetic oligonucleotide
  Sense strand starting at position 3847 of SEQ ID NO: 1881828
gucaucugguauccaaaga

SEQ ID NO: 2074411 - RNA, 19 nt, Artificial Sequence
  Description of Artificial Sequence: Synthetic oligonucleotide
  Antisense strand to SEQ ID NO: 2074410
ucuuuggauaccagaugac

SEQ ID NO: 2074412 - RNA, 19 nt, Artificial Sequence
  Description of Artificial Sequence: Synthetic oligonucleotide
  Sense strand starting at position 22 of SEQ ID NO: 1881829
cugauagaauacuaugaag

SEQ ID NO: 2074413 - RNA, 19 nt, Artificial Sequence
  Description of Artificial Sequence: Synthetic oligonucleotide
  Antisense strand to SEQ ID NO: 2074412
cuucauaguauucuaucag

SEQ ID NO: 2074414 - RNA, 19 nt, Artificial Sequence
  Description of Artificial Sequence: Synthetic oligonucleotide
  Sense strand starting at position 25 of SEQ ID NO: 1881829
auagaauacuaugaagucu

SEQ ID NO: 2074415 - RNA, 19 nt, Artificial Sequence
  Description of Artificial Sequence: Synthetic oligonucleotide
  Antisense strand to SEQ ID NO: 2074414
agacuucauaguauucuau

SEQ ID NO: 2074416 - RNA, 19 nt, Artificial Sequence
  Description of Artificial Sequence: Synthetic oligonucleotide
  Sense strand starting at position 68 of SEQ ID NO: 1881829
caguuucuggcccaaagga

SEQ ID NO: 2074417 - RNA, 19 nt, Artificial Sequence
  Description of Artificial Sequence: Synthetic oligonucleotide
  Antisense strand to SEQ ID NO: 2074416
uccuuugggccagaaacug

SEQ ID NO: 2074418 - RNA, 19 nt, Artificial Sequence
  Description of Artificial Sequence: Synthetic oligonucleotide
  Sense strand starting at position 78 of SEQ ID NO: 1881829
cccaaaggaguuugagacu

SEQ ID NO: 2074419 - RNA, 19 nt, Artificial Sequence
  Description of Artificial Sequence: Synthetic oligonucleotide
  Antisense strand to SEQ ID NO: 2074418
agucucaaacuccuuuggg

SEQ ID NO: 2074420 - RNA, 19 nt, Artificial Sequence
  Description of Artificial Sequence: Synthetic oligonucleotide
  Sense strand starting at position 81 of SEQ ID NO: 1881829
aaaggaguuugagacucau

SEQ ID NO: 2074421 - RNA, 19 nt, Artificial Sequence
  Description of Artificial Sequence: Synthetic oligonucleotide
  Antisense strand to SEQ ID NO: 2074420
augagucucaaacuccuuu

SEQ ID NO: 2074422 - RNA, 19 nt, Artificial Sequence
  Description of Artificial Sequence: Synthetic oligonucleotide
  Sense strand starting at position 85 of SEQ ID NO: 1881829
gaguuugagacucaucguu

SEQ ID NO: 2074423 - RNA, 19 nt, Artificial Sequence
  Description of Artificial Sequence: Synthetic oligonucleotide
  Antisense strand to SEQ ID NO: 2074422
aacgaugagucucaaacuc

SEQ ID NO: 2074424 - RNA, 19 nt, Artificial Sequence
  Description of Artificial Sequence: Synthetic oligonucleotide
  Sense strand starting at position 90 of SEQ ID NO: 1881829
ugagacucaucguuccuau

SEQ ID NO: 2074425 - RNA, 19 nt, Artificial Sequence
  Description of Artificial Sequence: Synthetic oligonucleotide
  Antisense strand to SEQ ID NO: 2074424
auaggaacgaugagucuca

SEQ ID NO: 2074426 - RNA, 19 nt, Artificial Sequence
  Description of Artificial Sequence: Synthetic oligonucleotide
  Sense strand starting at position 241 of SEQ ID NO: 1881829
acagcuuacuuggaacaaa

SEQ ID NO: 2074427 - RNA, 19 nt, Artificial Sequence
  Description of Artificial Sequence: Synthetic oligonucleotide
  Antisense strand to SEQ ID NO: 2074426
uuuguuccaaguaagcugu

SEQ ID NO: 2074428 - RNA, 19 nt, Artificial Sequence
  Description of Artificial Sequence: Synthetic oligonucleotide
  Sense strand starting at position 284 of SEQ ID NO: 1881829
gccagccucagguaaugau

SEQ ID NO: 2074429 - RNA, 19 nt, Artificial Sequence
  Description of Artificial Sequence: Synthetic oligonucleotide
  Antisense strand to SEQ ID NO: 2074428
aucauuaccugaggcuggc

SEQ ID NO: 2074430 - RNA, 19 nt, Artificial Sequence
  Description of Artificial Sequence: Synthetic oligonucleotide
  Sense strand starting at position 339 of SEQ ID NO: 1881829
cacucacuagcuugagaga

SEQ ID NO: 2074431 - RNA, 19 nt, Artificial Sequence
  Description of Artificial Sequence: Synthetic oligonucleotide
  Antisense strand to SEQ ID NO: 2074430
ucucucaagcuagugagug

SEQ ID NO: 2074432 - RNA, 19 nt, Artificial Sequence
  Description of Artificial Sequence: Synthetic oligonucleotide
  Sense strand starting at position 476 of SEQ ID NO: 1881829
ccaauaggaucuuaggaua

SEQ ID NO: 2074433 - RNA, 19 nt, Artificial Sequence
  Description of Artificial Sequence: Synthetic oligonucleotide
  Antisense strand to SEQ ID NO: 2074432
uauccuaagauccuauugg

SEQ ID NO: 2074434 - RNA, 19 nt, Artificial Sequence
  Description of Artificial Sequence: Synthetic oligonucleotide
  Sense strand starting at position 479 of SEQ ID NO: 1881829
auaggaucuuaggauaaag

SEQ ID NO: 2074435 - RNA, 19 nt, Artificial Sequence
  Description of Artificial Sequence: Synthetic oligonucleotide
  Antisense strand to SEQ ID NO: 2074434
cuuuauccuaagauccuau

SEQ ID NO: 2074436 - RNA, 19 nt, Artificial Sequence
  Description of Artificial Sequence: Synthetic oligonucleotide
  Sense strand starting at position 515 of SEQ ID NO: 1881829
uccugcuuccagcagagaa

SEQ ID NO: 2074437 - RNA, 19 nt, Artificial Sequence
  Description of Artificial Sequence: Synthetic oligonucleotide
  Antisense strand to SEQ ID NO: 2074436
uucucugcuggaagcagga

SEQ ID NO: 2074438 - RNA, 19 nt, Artificial Sequence
  Description of Artificial Sequence: Synthetic oligonucleotide
  Sense strand starting at position 582 of SEQ ID NO: 1881829
auagcuugcccucauagga

SEQ ID NO: 2074439 - RNA, 19 nt, Artificial Sequence
  Description of Artificial Sequence: Synthetic oligonucleotide
  Antisense strand to SEQ ID NO: 2074438
uccuaugagggcaagcuau

SEQ ID NO: 2074440 - RNA, 19 nt, Artificial Sequence
  Description of Artificial Sequence: Synthetic oligonucleotide
  Sense strand starting at position 702 of SEQ ID NO: 1881829
cccggagugaucuggcauu

SEQ ID NO: 2074441 - RNA, 19 nt, Artificial Sequence
  Description of Artificial Sequence: Synthetic oligonucleotide
  Antisense strand to SEQ ID NO: 2074440
aaugccagaucacuccggg

SEQ ID NO: 2074442 - RNA, 19 nt, Artificial Sequence
  Description of Artificial Sequence: Synthetic oligonucleotide
  Sense strand starting at position 766 of SEQ ID NO: 1881829
guugcaucuaaaugggaga

SEQ ID NO: 2074443 - RNA, 19 nt, Artificial Sequence
  Description of Artificial Sequence: Synthetic oligonucleotide
  Antisense strand to SEQ ID NO: 2074442
ucucccauuuagaugcaac

SEQ ID NO: 2074444 - RNA, 19 nt, Artificial Sequence
  Description of Artificial Sequence: Synthetic oligonucleotide
  Sense strand starting at position 824 of SEQ ID NO: 1881829
agggaccuguacuuauuaa

SEQ ID NO: 2074445 - RNA, 19 nt, Artificial Sequence
  Description of Artificial Sequence: Synthetic oligonucleotide
  Antisense strand to SEQ ID NO: 2074444
uuaauaaguacaggucccu

SEQ ID NO: 2074446 - RNA, 19 nt, Artificial Sequence
  Description of Artificial Sequence: Synthetic oligonucleotide
  Sense strand starting at position 849 of SEQ ID NO: 1881829
gagaacuaaucaccggacu

SEQ ID NO: 2074447 - RNA, 19 nt, Artificial Sequence
  Description of Artificial Sequence: Synthetic oligonucleotide
  Antisense strand to SEQ ID NO: 2074446
aguccggugauuaguucuc

SEQ ID NO: 2074448 - RNA, 19 nt, Artificial Sequence
  Description of Artificial Sequence: Synthetic oligonucleotide
  Sense strand starting at position 1047 of SEQ ID NO: 1881829
gcaucaaccugacucagau

SEQ ID NO: 2074449 - RNA, 19 nt, Artificial Sequence
  Description of Artificial Sequence: Synthetic oligonucleotide
  Antisense strand to SEQ ID NO: 2074448
aucugagucagguugaugc

SEQ ID NO: 2074450 - RNA, 19 nt, Artificial Sequence
  Description of Artificial Sequence: Synthetic oligonucleotide
  Sense strand starting at position 1061 of SEQ ID NO: 1881829
cagauaugguaggaauguu

SEQ ID NO: 2074451 - RNA, 19 nt, Artificial Sequence
  Description of Artificial Sequence: Synthetic oligonucleotide
  Antisense strand to SEQ ID NO: 2074450
aacauuccuaccauaucug

SEQ ID NO: 2074452 - RNA, 19 nt, Artificial Sequence
  Description of Artificial Sequence: Synthetic oligonucleotide
  Sense strand starting at position 1081 of SEQ ID NO: 1881829
ggguuaucagacugggauu

SEQ ID NO: 2074453 - RNA, 19 nt, Artificial Sequence
  Description of Artificial Sequence: Synthetic oligonucleotide
  Antisense strand to SEQ ID NO: 2074452
aaucccagucugauaaccc

SEQ ID NO: 2074454 - RNA, 19 nt, Artificial Sequence
  Description of Artificial Sequence: Synthetic oligonucleotide
  Sense strand starting at position 1084 of SEQ ID NO: 1881829
uuaucagacugggauuuaa

SEQ ID NO: 2074455 - RNA, 19 nt, Artificial Sequence
  Description of Artificial Sequence: Synthetic oligonucleotide
  Antisense strand to SEQ ID NO: 2074454
uuaaaucccagucugauaa

SEQ ID NO: 2074456 - RNA, 19 nt, Artificial Sequence
  Description of Artificial Sequence: Synthetic oligonucleotide
  Sense strand starting at position 1111 of SEQ ID NO: 1881829
ugauuaguauguuaaggga

SEQ ID NO: 2074457 - RNA, 19 nt, Artificial Sequence
  Description of Artificial Sequence: Synthetic oligonucleotide
  Antisense strand to SEQ ID NO: 2074456
ucccuuaacauacuaauca

SEQ ID NO: 2074458 - RNA, 19 nt, Artificial Sequence
  Description of Artificial Sequence: Synthetic oligonucleotide
  Sense strand starting at position 1145 of SEQ ID NO: 1881829
ggcagcacgcaagaauaaa

SEQ ID NO: 2074459 - RNA, 19 nt, Artificial Sequence
  Description of Artificial Sequence: Synthetic oligonucleotide
  Antisense strand to SEQ ID NO: 2074458
uuuauucuugcgugcugcc

SEQ ID NO: 2074460 - RNA, 19 nt, Artificial Sequence
  Description of Artificial Sequence: Synthetic oligonucleotide
  Sense strand starting at position 1246 of SEQ ID NO: 1881829
gaaugucuugaugggcuua

SEQ ID NO: 2074461 - RNA, 19 nt, Artificial Sequence
  Description of Artificial Sequence: Synthetic oligonucleotide
  Antisense strand to SEQ ID NO: 2074460
uaagcccaucaagacauuc

SEQ ID NO: 2074462 - RNA, 19 nt, Artificial Sequence
  Description of Artificial Sequence: Synthetic oligonucleotide
  Sense strand starting at position 1251 of SEQ ID NO: 1881829
ucuugaugggcuuaugagu

SEQ ID NO: 2074463 - RNA, 19 nt, Artificial Sequence
  Description of Artificial Sequence: Synthetic oligonucleotide
  Antisense strand to SEQ ID NO: 2074462
acucauaagcccaucaaga

SEQ ID NO: 2074464 - RNA, 19 nt, Artificial Sequence
  Description of Artificial Sequence: Synthetic oligonucleotide
  Sense strand starting at position 1257 of SEQ ID NO: 1881829
ugggcuuaugaguaguaga

SEQ ID NO: 2074465 - RNA, 19 nt, Artificial Sequence
  Description of Artificial Sequence: Synthetic oligonucleotide
  Antisense strand to SEQ ID NO: 2074464
ucuacuacucauaagccca

SEQ ID NO: 2074466 - RNA, 19 nt, Artificial Sequence
  Description of Artificial Sequence: Synthetic oligonucleotide
  Sense strand starting at position 1265 of SEQ ID NO: 1881829
ugaguaguagacuguuuau

SEQ ID NO: 2074467 - RNA, 19 nt, Artificial Sequence
  Description of Artificial Sequence: Synthetic oligonucleotide
  Antisense strand to SEQ ID NO: 2074466
auaaacagucuacuacuca

SEQ ID NO: 2074468 - RNA, 19 nt, Artificial Sequence
  Description of Artificial Sequence: Synthetic oligonucleotide
  Sense strand starting at position 1268 of SEQ ID NO: 1881829
guaguagacuguuuauagc

SEQ ID NO: 2074469 - RNA, 19 nt, Artificial Sequence
  Description of Artificial Sequence: Synthetic oligonucleotide
  Antisense strand to SEQ ID NO: 2074468
gcuauaaacagucuacuac

SEQ ID NO: 2074470 - RNA, 19 nt, Artificial Sequence
  Description of Artificial Sequence: Synthetic oligonucleotide
  Sense strand starting at position 1275 of SEQ ID NO: 1881829
acuguuuauagcgaaggaa

SEQ ID NO: 2074471 - RNA, 19 nt, Artificial Sequence
  Description of Artificial Sequence: Synthetic oligonucleotide
  Antisense strand to SEQ ID NO: 2074470
uuccuucgcuauaaacagu

SEQ ID NO: 2074472 - RNA, 19 nt, Artificial Sequence
  Description of Artificial Sequence: Synthetic oligonucleotide
  Sense strand starting at position 1538 of SEQ ID NO: 1881829
acaucaauggucugaauac

SEQ ID NO: 2074473 - RNA, 19 nt, Artificial Sequence
  Description of Artificial Sequence: Synthetic oligonucleotide
  Antisense strand to SEQ ID NO: 2074472
guauucagaccauugaugu

SEQ ID NO: 2074474 - RNA, 19 nt, Artificial Sequence
  Description of Artificial Sequence: Synthetic oligonucleotide
  Sense strand starting at position 1570 of SEQ ID NO: 1881829
ggcugucagagugaauaaa

SEQ ID NO: 2074475 - RNA, 19 nt, Artificial Sequence
  Description of Artificial Sequence: Synthetic oligonucleotide
  Antisense strand to SEQ ID NO: 2074474
uuuauucacucugacagcc

SEQ ID NO: 2074476 - RNA, 19 nt, Artificial Sequence
  Description of Artificial Sequence: Synthetic oligonucleotide
  Sense strand starting at position 3033 of SEQ ID NO: 1881829
ccauguguuguccacaaga

SEQ ID NO: 2074477 - RNA, 19 nt, Artificial Sequence
  Description of Artificial Sequence: Synthetic oligonucleotide
  Antisense strand to SEQ ID NO: 2074476
ucuuguggacaacacaugg

SEQ ID NO: 2074478 - RNA, 19 nt, Artificial Sequence
  Description of Artificial Sequence: Synthetic oligonucleotide
  Sense strand starting at position 3035 of SEQ ID NO: 1881829
auguguuguccacaagaaa

SEQ ID NO: 2074479 - RNA, 19 nt, Artificial Sequence
  Description of Artificial Sequence: Synthetic oligonucleotide
  Antisense strand to SEQ ID NO: 2074478
uuucuuguggacaacacau

SEQ ID NO: 2074480 - RNA, 19 nt, Artificial Sequence
  Description of Artificial Sequence: Synthetic oligonucleotide
  Sense strand starting at position 3359 of SEQ ID NO: 1881829
ucaacaucucucuguuagu

SEQ ID NO: 2074481 - RNA, 19 nt, Artificial Sequence
  Description of Artificial Sequence: Synthetic oligonucleotide
  Antisense strand to SEQ ID NO: 2074480
acuaacagagagauguuga

SEQ ID NO: 2074482 - RNA, 19 nt, Artificial Sequence
  Description of Artificial Sequence: Synthetic oligonucleotide
  Sense strand starting at position 3407 of SEQ ID NO: 1881829
guaacaacguaguugaauu

SEQ ID NO: 2074483 - RNA, 19 nt, Artificial Sequence
  Description of Artificial Sequence: Synthetic oligonucleotide
  Antisense strand to SEQ ID NO: 2074482
aauucaacuacguuguuac

SEQ ID NO: 2074484 - RNA, 19 nt, Artificial Sequence
  Description of Artificial Sequence: Synthetic oligonucleotide
  Sense strand starting at position 3447 of SEQ ID NO: 1881829
ggaucuagcugacauuuau

SEQ ID NO: 2074485 - RNA, 19 nt, Artificial Sequence
  Description of Artificial Sequence: Synthetic oligonucleotide
  Antisense strand to SEQ ID NO: 2074484
auaaaugucagcuagaucc

SEQ ID NO: 2074486 - RNA, 19 nt, Artificial Sequence
  Description of Artificial Sequence: Synthetic oligonucleotide
  Sense strand starting at position 3527 of SEQ ID NO: 1881829
gacauauucugggcccuga

SEQ ID NO: 2074487 - RNA, 19 nt, Artificial Sequence
  Description of Artificial Sequence: Synthetic oligonucleotide
  Antisense strand to SEQ ID NO: 2074486
ucagggcccagaauauguc

SEQ ID NO: 2074488 - RNA, 19 nt, Artificial Sequence
  Description of Artificial Sequence: Synthetic oligonucleotide
  Sense strand starting at position 3531 of SEQ ID NO: 1881829
uauucugggcccugaaaga

SEQ ID NO: 2074489 - RNA, 19 nt, Artificial Sequence
  Description of Artificial Sequence: Synthetic oligonucleotide
  Antisense strand to SEQ ID NO: 2074488
ucuuucagggcccagaaua

SEQ ID NO: 2074490 - RNA, 19 nt, Artificial Sequence
  Description of Artificial Sequence: Synthetic oligonucleotide
  Sense strand starting at position 3940 of SEQ ID NO: 1881829
agcagauaucaaugaagug

SEQ ID NO: 2074491 - RNA, 19 nt, Artificial Sequence
  Description of Artificial Sequence: Synthetic oligonucleotide
  Antisense strand to SEQ ID NO: 2074490
cacuucauugauaucugcu

SEQ ID NO: 2074492 - RNA, 19 nt, Artificial Sequence
  Description of Artificial Sequence: Synthetic oligonucleotide
  Sense strand starting at position 7 of SEQ ID NO: 1881830
agugaaaugaugugaugac

SEQ ID NO: 2074493 - RNA, 19 nt, Artificial Sequence
  Description of Artificial Sequence: Synthetic oligonucleotide
  Antisense strand to SEQ ID NO: 2074492
gucaucacaucauuucacu

SEQ ID NO: 2074494 - RNA, 19 nt, Artificial Sequence
  Description of Artificial Sequence: Synthetic oligonucleotide
  Sense strand starting at position 8 of SEQ ID NO: 1881830
gugaaaugaugugaugacu

SEQ ID NO: 2074495 - RNA, 19 nt, Artificial Sequence
  Description of Artificial Sequence: Synthetic oligonucleotide
  Antisense strand to SEQ ID NO: 2074494
agucaucacaucauuucac

SEQ ID NO: 2074496 - RNA, 19 nt, Artificial Sequence
  Description of Artificial Sequence: Synthetic oligonucleotide
  Sense strand starting at position 30 of SEQ ID NO: 1881830
cggacagacagauguuaau

SEQ ID NO: 2074497 - RNA, 19 nt, Artificial Sequence
  Description of Artificial Sequence: Synthetic oligonucleotide
  Antisense strand to SEQ ID NO: 2074496
auuaacaucugucuguccg

SEQ ID NO: 2074498 - RNA, 19 nt, Artificial Sequence
  Description of Artificial Sequence: Synthetic oligonucleotide
  Sense strand starting at position 664 of SEQ ID NO: 1881830
agcuaucucuuacagaaag

SEQ ID NO: 2074499 - RNA, 19 nt, Artificial Sequence
  Description of Artificial Sequence: Synthetic oligonucleotide
  Antisense strand to SEQ ID NO: 2074498
cuuucuguaagagauagcu

SEQ ID NO: 2074500 - RNA, 19 nt, Artificial Sequence
  Description of Artificial Sequence: Synthetic oligonucleotide
  Sense strand starting at position 1070 of SEQ ID NO: 1881830
aaguaaauuuguccacggu

SEQ ID NO: 2074501 - RNA, 19 nt, Artificial Sequence
  Description of Artificial Sequence: Synthetic oligonucleotide
  Antisense strand to SEQ ID NO: 2074500
accguggacaaauuuacuu

SEQ ID NO: 2074502 - RNA, 19 nt, Artificial Sequence
  Description of Artificial Sequence: Synthetic oligonucleotide
  Sense strand starting at position 1159 of SEQ ID NO: 1881830
cugagaaaguuacucuugu

SEQ ID NO: 2074503 - RNA, 19 nt, Artificial Sequence
  Description of Artificial Sequence: Synthetic oligonucleotide
  Antisense strand to SEQ ID NO: 2074502
acaagaguaacuuucucag

SEQ ID NO: 2074504 - RNA, 19 nt, Artificial Sequence
  Description of Artificial Sequence: Synthetic oligonucleotide
  Sense strand starting at position 1197 of SEQ ID NO: 1881830
ucccucuaucccgauagga

SEQ ID NO: 2074505 - RNA, 19 nt, Artificial Sequence
  Description of Artificial Sequence: Synthetic oligonucleotide
  Antisense strand to SEQ ID NO: 2074504
uccuaucgggauagaggga

SEQ ID NO: 2074506 - RNA, 19 nt, Artificial Sequence
  Description of Artificial Sequence: Synthetic oligonucleotide
  Sense strand starting at position 1199 of SEQ ID NO: 1881830
ccucuaucccgauaggacu

SEQ ID NO: 2074507 - RNA, 19 nt, Artificial Sequence
  Description of Artificial Sequence: Synthetic oligonucleotide
  Antisense strand to SEQ ID NO: 2074506
aguccuaucgggauagagg

SEQ ID NO: 2074508 - RNA, 19 nt, Artificial Sequence
  Description of Artificial Sequence: Synthetic oligonucleotide
  Sense strand starting at position 1571 of SEQ ID NO: 1881830
cagggcauucccggagaga

SEQ ID NO: 2074509 - RNA, 19 nt, Artificial Sequence
  Description of Artificial Sequence: Synthetic oligonucleotide
  Antisense strand to SEQ ID NO: 2074508
ucucuccgggaaugcccug

SEQ ID NO: 2074510 - RNA, 19 nt, Artificial Sequence
  Description of Artificial Sequence: Synthetic oligonucleotide
  Sense strand starting at position 1736 of SEQ ID NO: 1881830
ccuccugaucgccagagaa

SEQ ID NO: 2074511 - RNA, 19 nt, Artificial Sequence
  Description of Artificial Sequence: Synthetic oligonucleotide
  Antisense strand to SEQ ID NO: 2074510
uucucuggcgaucaggagg

SEQ ID NO: 2074512 - RNA, 19 nt, Artificial Sequence
  Description of Artificial Sequence: Synthetic oligonucleotide
  Sense strand starting at position 1827 of SEQ ID NO: 1881830
cccggaguccggcacuaaa

SEQ ID NO: 2074513 - RNA, 19 nt, Artificial Sequence
  Description of Artificial Sequence: Synthetic oligonucleotide
  Antisense strand to SEQ ID NO: 2074512
uuuagugccggacuccggg

SEQ ID NO: 2074514 - RNA, 19 nt, Artificial Sequence
  Description of Artificial Sequence: Synthetic oligonucleotide
  Sense strand starting at position 1892 of SEQ ID NO: 1881830
gacccaagccauugugaga

SEQ ID NO: 2074515 - RNA, 19 nt, Artificial Sequence
  Description of Artificial Sequence: Synthetic oligonucleotide
  Antisense strand to SEQ ID NO: 2074514
ucucacaauggcuuggguc

SEQ ID NO: 2074516 - RNA, 19 nt, Artificial Sequence
  Description of Artificial Sequence: Synthetic oligonucleotide
  Sense strand starting at position 2003 of SEQ ID NO: 1881830
gggaucucgcgcgagacuu

SEQ ID NO: 2074517 - RNA, 19 nt, Artificial Sequence
  Description of Artificial Sequence: Synthetic oligonucleotide
  Antisense strand to SEQ ID NO: 2074516
aagucucgcgcgagauccc

SEQ ID NO: 2074518 - RNA, 19 nt, Artificial Sequence
  Description of Artificial Sequence: Synthetic oligonucleotide
  Sense strand starting at position 2047 of SEQ ID NO: 1881830
gggaguuguuguccacgau

SEQ ID NO: 2074519 - RNA, 19 nt, Artificial Sequence
  Description of Artificial Sequence: Synthetic oligonucleotide
  Antisense strand to SEQ ID NO: 2074518
aucguggacaacaacuccc

SEQ ID NO: 2074520 - RNA, 19 nt, Artificial Sequence
  Description of Artificial Sequence: Synthetic oligonucleotide
  Sense strand starting at position 2048 of SEQ ID NO: 1881830
ggaguuguuguccacgauc

SEQ ID NO: 2074521 - RNA, 19 nt, Artificial Sequence
  Description of Artificial Sequence: Synthetic oligonucleotide
  Antisense strand to SEQ ID NO: 2074520
gaucguggacaacaacucc

SEQ ID NO: 2074522 - RNA, 19 nt, Artificial Sequence
  Description of Artificial Sequence: Synthetic oligonucleotide
  Sense strand starting at position 2195 of SEQ ID NO: 1881830
gugccuggguccgugacaa

SEQ ID NO: 2074523 - RNA, 19 nt, Artificial Sequence
  Description of Artificial Sequence: Synthetic oligonucleotide
  Antisense strand to SEQ ID NO: 2074522
uugucacggacccaggcac

SEQ ID NO: 2074524 - RNA, 19 nt, Artificial Sequence
  Description of Artificial Sequence: Synthetic oligonucleotide
  Sense strand starting at position 2295 of SEQ ID NO: 1881830
gagcacuugucauccuguu

SEQ ID NO: 2074525 - RNA, 19 nt, Artificial Sequence
  Description of Artificial Sequence: Synthetic oligonucleotide
  Antisense strand to SEQ ID NO: 2074524
aacaggaugacaagugcuc

SEQ ID NO: 2074526 - RNA, 19 nt, Artificial Sequence
  Description of Artificial Sequence: Synthetic oligonucleotide
  Sense strand starting at position 2335 of SEQ ID NO: 1881830
agcugagacugggagagau

SEQ ID NO: 2074527 - RNA, 19 nt, Artificial Sequence
  Description of Artificial Sequence: Synthetic oligonucleotide
  Antisense strand to SEQ ID NO: 2074526
aucucucccagucucagcu

SEQ ID NO: 2074528 - RNA, 19 nt, Artificial Sequence
  Description of Artificial Sequence: Synthetic oligonucleotide
  Sense strand starting at position 2429 of SEQ ID NO: 1881830
guacuaguagcugaaccaa

SEQ ID NO: 2074529 - RNA, 19 nt, Artificial Sequence
  Description of Artificial Sequence: Synthetic oligonucleotide
  Antisense strand to SEQ ID NO: 2074528
uugguucagcuacuaguac

SEQ ID NO: 2074530 - RNA, 19 nt, Artificial Sequence
  Description of Artificial Sequence: Synthetic oligonucleotide
  Sense strand starting at position 2660 of SEQ ID NO: 1881830
guccaaagcucgccaucaa

SEQ ID NO: 2074531 - RNA, 19 nt, Artificial Sequence
  Description of Artificial Sequence: Synthetic oligonucleotide
  Antisense strand to SEQ ID NO: 2074530
uugauggcgagcuuuggac

SEQ ID NO: 2074532 - RNA, 19 nt, Artificial Sequence
  Description of Artificial Sequence: Synthetic oligonucleotide
  Sense strand starting at position 2661 of SEQ ID NO: 1881830
uccaaagcucgccaucaaa

SEQ ID NO: 2074533 - RNA, 19 nt, Artificial Sequence
  Description of Artificial Sequence: Synthetic oligonucleotide
  Antisense strand to SEQ ID NO: 2074532
uuugauggcgagcuuugga

SEQ ID NO: 2074534 - RNA, 19 nt, Artificial Sequence
  Description of Artificial Sequence: Synthetic oligonucleotide
  Sense strand starting at position 2711 of SEQ ID NO: 1881830
cagggugaaugucacauuu

SEQ ID NO: 2074535 - RNA, 19 nt, Artificial Sequence
  Description of Artificial Sequence: Synthetic oligonucleotide
  Antisense strand to SEQ ID NO: 2074534
aaaugugacauucacccug

SEQ ID NO: 2074536 - RNA, 19 nt, Artificial Sequence
  Description of Artificial Sequence: Synthetic oligonucleotide
  Sense strand starting at position 2713 of SEQ ID NO: 1881830
gggugaaugucacauuuag

SEQ ID NO: 2074537 - RNA, 19 nt, Artificial Sequence
  Description of Artificial Sequence: Synthetic oligonucleotide
  Antisense strand to SEQ ID NO: 2074536
cuaaaugugacauucaccc

SEQ ID NO: 2074538 - RNA, 19 nt, Artificial Sequence
  Description of Artificial Sequence: Synthetic oligonucleotide
  Sense strand starting at position 2781 of SEQ ID NO: 1881830
gcucaugcgacuugaaacu

SEQ ID NO: 2074539 - RNA, 19 nt, Artificial Sequence
  Description of Artificial Sequence: Synthetic oligonucleotide
  Antisense strand to SEQ ID NO: 2074538
aguuucaagucgcaugagc

SEQ ID NO: 2074540 - RNA, 19 nt, Artificial Sequence
  Description of Artificial Sequence: Synthetic oligonucleotide
  Sense strand starting at position 2824 of SEQ ID NO: 1881830
gcuugagugcacuaagaau

SEQ ID NO: 2074541 - RNA, 19 nt, Artificial Sequence
  Description of Artificial Sequence: Synthetic oligonucleotide
  Antisense strand to SEQ ID NO: 2074540
auucuuagugcacucaagc

SEQ ID NO: 2074542 - RNA, 19 nt, Artificial Sequence
  Description of Artificial Sequence: Synthetic oligonucleotide
  Sense strand starting at position 2839 of SEQ ID NO: 1881830
gaauuaaagucuuugauga

SEQ ID NO: 2074543 - RNA, 19 nt, Artificial Sequence
  Description of Artificial Sequence: Synthetic oligonucleotide
  Antisense strand to SEQ ID NO: 2074542
ucaucaaagacuuuaauuc

SEQ ID NO: 2074544 - RNA, 19 nt, Artificial Sequence
  Description of Artificial Sequence: Synthetic oligonucleotide
  Sense strand starting at position 2881 of SEQ ID NO: 1881830
gcacaauuacauugcagua

SEQ ID NO: 2074545 - RNA, 19 nt, Artificial Sequence
  Description of Artificial Sequence: Synthetic oligonucleotide
  Antisense strand to SEQ ID NO: 2074544
uacugcaauguaauugugc

SEQ ID NO: 2074546 - RNA, 19 nt, Artificial Sequence
  Description of Artificial Sequence: Synthetic oligonucleotide
  Sense strand starting at position 2895 of SEQ ID NO: 1881830
caguauaauuguguguaua

SEQ ID NO: 2074547 - RNA, 19 nt, Artificial Sequence
  Description of Artificial Sequence: Synthetic oligonucleotide
  Antisense strand to SEQ ID NO: 2074546
uauacacacaauuauacug

SEQ ID NO: 2074548 - RNA, 19 nt, Artificial Sequence
  Description of Artificial Sequence: Synthetic oligonucleotide
  Sense strand starting at position 2897 of SEQ ID NO: 1881830
guauaauuguguguauaug

SEQ ID NO: 2074549 - RNA, 19 nt, Artificial Sequence
  Description of Artificial Sequence: Synthetic oligonucleotide
  Antisense strand to SEQ ID NO: 2074548
cauauacacacaauuauac

SEQ ID NO: 2074550 - RNA, 19 nt, Artificial Sequence
  Description of Artificial Sequence: Synthetic oligonucleotide
  Sense strand starting at position 2938 of SEQ ID NO: 1881830
agguguuccuuuguuaauu

SEQ ID NO: 2074551 - RNA, 19 nt, Artificial Sequence
  Description of Artificial Sequence: Synthetic oligonucleotide
  Antisense strand to SEQ ID NO: 2074550
aauuaacaaaggaacaccu

SEQ ID NO: 2074552 - RNA, 19 nt, Artificial Sequence
  Description of Artificial Sequence: Synthetic oligonucleotide
  Sense strand starting at position 2939 of SEQ ID NO: 1881830
gguguuccuuuguuaauuu

SEQ ID NO: 2074553 - RNA, 19 nt, Artificial Sequence
  Description of Artificial Sequence: Synthetic oligonucleotide
  Antisense strand to SEQ ID NO: 2074552
aaauuaacaaaggaacacc

SEQ ID NO: 2074554 - RNA, 19 nt, Artificial Sequence
  Description of Artificial Sequence: Synthetic oligonucleotide
  Sense strand starting at position 3037 of SEQ ID NO: 1881830
ggauguauaucaccucuca

SEQ ID NO: 2074555 - RNA, 19 nt, Artificial Sequence
  Description of Artificial Sequence: Synthetic oligonucleotide
  Antisense strand to SEQ ID NO: 2074554
ugagaggugauauacaucc

SEQ ID NO: 2074556 - RNA, 19 nt, Artificial Sequence
  Description of Artificial Sequence: Synthetic oligonucleotide
  Sense strand starting at position 3104 of SEQ ID NO: 1881830
gugggaucaucucauuuau

SEQ ID NO: 2074557 - RNA, 19 nt, Artificial Sequence
  Description of Artificial Sequence: Synthetic oligonucleotide
  Antisense strand to SEQ ID NO: 2074556
auaaaugagaugaucccac

SEQ ID NO: 2074558 - RNA, 19 nt, Artificial Sequence
  Description of Artificial Sequence: Synthetic oligonucleotide
  Sense strand starting at position 3149 of SEQ ID NO: 1881830
uaagacuuuccuggaaguu

SEQ ID NO: 2074559 - RNA, 19 nt, Artificial Sequence
  Description of Artificial Sequence: Synthetic oligonucleotide
  Antisense strand to SEQ ID NO: 2074558
aacuuccaggaaagucuua

SEQ ID NO: 2074560 - RNA, 19 nt, Artificial Sequence
  Description of Artificial Sequence: Synthetic oligonucleotide
  Sense strand starting at position 3158 of SEQ ID NO: 1881830
ccuggaaguuacuauuuga

SEQ ID NO: 2074561 - RNA, 19 nt, Artificial Sequence
  Description of Artificial Sequence: Synthetic oligonucleotide
  Antisense strand to SEQ ID NO: 2074560
ucaaauaguaacuuccagg

SEQ ID NO: 2074562 - RNA, 19 nt, Artificial Sequence
  Description of Artificial Sequence: Synthetic oligonucleotide
  Sense strand starting at position 3539 of SEQ ID NO: 1881830
ggguacauggguugagaga

SEQ ID NO: 2074563 - RNA, 19 nt, Artificial Sequence
  Description of Artificial Sequence: Synthetic oligonucleotide
  Antisense strand to SEQ ID NO: 2074562
ucucucaacccauguaccc

SEQ ID NO: 2074564 - RNA, 19 nt, Artificial Sequence
  Description of Artificial Sequence: Synthetic oligonucleotide
  Sense strand starting at position 3672 of SEQ ID NO: 1881830
ccuauuccuucugauuugu

SEQ ID NO: 2074565 - RNA, 19 nt, Artificial Sequence
  Description of Artificial Sequence: Synthetic oligonucleotide
  Antisense strand to SEQ ID NO: 2074564
acaaaucagaaggaauagg

SEQ ID NO: 2074566 - RNA, 19 nt, Artificial Sequence
  Description of Artificial Sequence: Synthetic oligonucleotide
  Sense strand starting at position 3919 of SEQ ID NO: 1881830
ccugauauuugugguacca

SEQ ID NO: 2074567 - RNA, 19 nt, Artificial Sequence
  Description of Artificial Sequence: Synthetic oligonucleotide
  Antisense strand to SEQ ID NO: 2074566
ugguaccacaaauaucagg

SEQ ID NO: 2074568 - RNA, 19 nt, Artificial Sequence
  Description of Artificial Sequence: Synthetic oligonucleotide
  Sense strand starting at position 3921 of SEQ ID NO: 1881830
ugauauuugugguaccaau

SEQ ID NO: 2074569 - RNA, 19 nt, Artificial Sequence
  Description of Artificial Sequence: Synthetic oligonucleotide
  Antisense strand to SEQ ID NO: 2074568
auugguaccacaaauauca

SEQ ID NO: 2074570 - RNA, 19 nt, Artificial Sequence
  Description of Artificial Sequence: Synthetic oligonucleotide
  Sense strand starting at position 3962 of SEQ ID NO: 1881830
gugcauagcaccuauguga

SEQ ID NO: 2074571 - RNA, 19 nt, Artificial Sequence
  Description of Artificial Sequence: Synthetic oligonucleotide
  Antisense strand to SEQ ID NO: 2074570
ucacauaggugcuaugcac

SEQ ID NO: 2074572 - RNA, 19 nt, Artificial Sequence
  Description of Artificial Sequence: Synthetic oligonucleotide
  Sense strand starting at position 2760 of SEQ ID NO: 1881831
ggugaccugccaggugauu

SEQ ID NO: 2074573 - RNA, 19 nt, Artificial Sequence
  Description of Artificial Sequence: Synthetic oligonucleotide
  Antisense strand to SEQ ID NO: 2074572
aaucaccuggcaggucacc

SEQ ID NO: 2074574 - RNA, 19 nt, Artificial Sequence
  Description of Artificial Sequence: Synthetic oligonucleotide
  Sense strand starting at position 2826 of SEQ ID NO: 1881831
ucuguauccguagugcauu

SEQ ID NO: 2074575 - RNA, 19 nt, Artificial Sequence
  Description of Artificial Sequence: Synthetic oligonucleotide
  Antisense strand to SEQ ID NO: 2074574
aaugcacuacggauacaga

SEQ ID NO: 2074576 - RNA, 19 nt, Artificial Sequence
  Description of Artificial Sequence: Synthetic oligonucleotide
  Sense strand starting at position 2840 of SEQ ID NO: 1881831
gcauuugacuuaccuguau

SEQ ID NO: 2074577 - RNA, 19 nt, Artificial Sequence
  Description of Artificial Sequence: Synthetic oligonucleotide
  Antisense strand to SEQ ID NO: 2074576
auacagguaagucaaaugc

SEQ ID NO: 2074578 - RNA, 19 nt, Artificial Sequence
  Description of Artificial Sequence: Synthetic oligonucleotide
  Sense strand starting at position 2906 of SEQ ID NO: 1881831
uaaaguguuggaggucaaa

SEQ ID NO: 2074579 - RNA, 19 nt, Artificial Sequence
  Description of Artificial Sequence: Synthetic oligonucleotide
  Antisense strand to SEQ ID NO: 2074578
uuugaccuccaacacuuua

SEQ ID NO: 2074580 - RNA, 19 nt, Artificial Sequence
  Description of Artificial Sequence: Synthetic oligonucleotide
  Sense strand starting at position 2909 of SEQ ID NO: 1881831
aguguuggaggucaaaguu

SEQ ID NO: 2074581 - RNA, 19 nt, Artificial Sequence
  Description of Artificial Sequence: Synthetic oligonucleotide
  Antisense strand to SEQ ID NO: 2074580
aacuuugaccuccaacacu

SEQ ID NO: 2074582 - RNA, 19 nt, Artificial Sequence
  Description of Artificial Sequence: Synthetic oligonucleotide
  Sense strand starting at position 2922 of SEQ ID NO: 1881831
aaaguuaggcuuugugaaa

SEQ ID NO: 2074583 - RNA, 19 nt, Artificial Sequence
  Description of Artificial Sequence: Synthetic oligonucleotide
  Antisense strand to SEQ ID NO: 2074582
uuucacaaagccuaacuuu

SEQ ID NO: 2074584 - RNA, 19 nt, Artificial Sequence
  Description of Artificial Sequence: Synthetic oligonucleotide
  Sense strand starting at position 2923 of SEQ ID NO: 1881831
aaguuaggcuuugugaaag

SEQ ID NO: 2074585 - RNA, 19 nt, Artificial Sequence
  Description of Artificial Sequence: Synthetic oligonucleotide
  Antisense strand to SEQ ID NO: 2074584
cuuucacaaagccuaacuu

SEQ ID NO: 2074586 - RNA, 19 nt, Artificial Sequence
  Description of Artificial Sequence: Synthetic oligonucleotide
  Sense strand starting at position 2929 of SEQ ID NO: 1881831
ggcuuugugaaagaugcca

SEQ ID NO: 2074587 - RNA, 19 nt, Artificial Sequence
  Description of Artificial Sequence: Synthetic oligonucleotide
  Antisense strand to SEQ ID NO: 2074586
uggcaucuuucacaaagcc

SEQ ID NO: 2074588 - RNA, 19 nt, Artificial Sequence
  Description of Artificial Sequence: Synthetic oligonucleotide
  Sense strand starting at position 2934 of SEQ ID NO: 1881831
ugugaaagaugccauuucu

SEQ ID NO: 2074589 - RNA, 19 nt, Artificial Sequence
  Description of Artificial Sequence: Synthetic oligonucleotide
  Antisense strand to SEQ ID NO: 2074588
agaaauggcaucuuucaca

SEQ ID NO: 2074590 - RNA, 19 nt, Artificial Sequence
  Description of Artificial Sequence: Synthetic oligonucleotide
  Sense strand starting at position 2941 of SEQ ID NO: 1881831
gaugccauuucuguuaugu

SEQ ID NO: 2074591 - RNA, 19 nt, Artificial Sequence
  Description of Artificial Sequence: Synthetic oligonucleotide
  Antisense strand to SEQ ID NO: 2074590
acauaacagaaauggcauc

SEQ ID NO: 2074592 - RNA, 19 nt, Artificial Sequence
  Description of Artificial Sequence: Synthetic oligonucleotide
  Sense strand starting at position 2985 of SEQ ID NO: 1881831
aggaguucugagcgacaca

SEQ ID NO: 2074593 - RNA, 19 nt, Artificial Sequence
  Description of Artificial Sequence: Synthetic oligonucleotide
  Antisense strand to SEQ ID NO: 2074592
ugugucgcucagaacuccu

SEQ ID NO: 2074594 - RNA, 19 nt, Artificial Sequence
  Description of Artificial Sequence: Synthetic oligonucleotide
  Sense strand starting at position 2986 of SEQ ID NO: 1881831
ggaguucugagcgacacaa

SEQ ID NO: 2074595 - RNA, 19 nt, Artificial Sequence
  Description of Artificial Sequence: Synthetic oligonucleotide
  Antisense strand to SEQ ID NO: 2074594
uugugucgcucagaacucc

SEQ ID NO: 2074596 - RNA, 19 nt, Artificial Sequence
  Description of Artificial Sequence: Synthetic oligonucleotide
  Sense strand starting at position 3010 of SEQ ID NO: 1881831
cacaucacguguucugaau

SEQ ID NO: 2074597 - RNA, 19 nt, Artificial Sequence
  Description of Artificial Sequence: Synthetic oligonucleotide
  Antisense strand to SEQ ID NO: 2074596
auucagaacacgugaugug

SEQ ID NO: 2074598 - RNA, 19 nt, Artificial Sequence
  Description of Artificial Sequence: Synthetic oligonucleotide
  Sense strand starting at position 3163 of SEQ ID NO: 1881831
uguuauaaccuguauuguu

SEQ ID NO: 2074599 - RNA, 19 nt, Artificial Sequence
  Description of Artificial Sequence: Synthetic oligonucleotide
  Antisense strand to SEQ ID NO: 2074598
aacaauacagguuauaaca

SEQ ID NO: 2074600 - RNA, 19 nt, Artificial Sequence
  Description of Artificial Sequence: Synthetic oligonucleotide
  Sense strand starting at position 3171 of SEQ ID NO: 1881831
ccuguauuguuauugagug

SEQ ID NO: 2074601 - RNA, 19 nt, Artificial Sequence
  Description of Artificial Sequence: Synthetic oligonucleotide
  Antisense strand to SEQ ID NO: 2074600
cacucaauaacaauacagg

SEQ ID NO: 2074602 - RNA, 19 nt, Artificial Sequence
  Description of Artificial Sequence: Synthetic oligonucleotide
  Sense strand starting at position 3175 of SEQ ID NO: 1881831
uauuguuauugaguggcau

SEQ ID NO: 2074603 - RNA, 19 nt, Artificial Sequence
  Description of Artificial Sequence: Synthetic oligonucleotide
  Antisense strand to SEQ ID NO: 2074602
augccacucaauaacaaua

SEQ ID NO: 2074604 - RNA, 19 nt, Artificial Sequence
  Description of Artificial Sequence: Synthetic oligonucleotide
  Sense strand starting at position 3176 of SEQ ID NO: 1881831
auuguuauugaguggcauu

SEQ ID NO: 2074605 - RNA, 19 nt, Artificial Sequence
  Description of Artificial Sequence: Synthetic oligonucleotide
  Antisense strand to SEQ ID NO: 2074604
aaugccacucaauaacaau

SEQ ID NO: 2074606 - RNA, 19 nt, Artificial Sequence
  Description of Artificial Sequence: Synthetic oligonucleotide
  Sense strand starting at position 3177 of SEQ ID NO: 1881831
uuguuauugaguggcauuu

SEQ ID NO: 2074607 - RNA, 19 nt, Artificial Sequence
  Description of Artificial Sequence: Synthetic oligonucleotide
  Antisense strand to SEQ ID NO: 2074606
aaaugccacucaauaacaa

SEQ ID NO: 2074608 - RNA, 19 nt, Artificial Sequence
  Description of Artificial Sequence: Synthetic oligonucleotide
  Sense strand starting at position 3188 of SEQ ID NO: 1881831
uggcauuuauauggaaauc

SEQ ID NO: 2074609 - RNA, 19 nt, Artificial Sequence
  Description of Artificial Sequence: Synthetic oligonucleotide
  Antisense strand to SEQ ID NO: 2074608
gauuuccauauaaaugcca

SEQ ID NO: 2074610 - RNA, 19 nt, Artificial Sequence
  Description of Artificial Sequence: Synthetic oligonucleotide
  Sense strand starting at position 3200 of SEQ ID NO: 1881831
ggaaaucgguucuuugcau

SEQ ID NO: 2074611 - RNA, 19 nt, Artificial Sequence
  Description of Artificial Sequence: Synthetic oligonucleotide
  Antisense strand to SEQ ID NO: 2074610
augcaaagaaccgauuucc

SEQ ID NO: 2074612 - RNA, 19 nt, Artificial Sequence
  Description of Artificial Sequence: Synthetic oligonucleotide
  Sense strand starting at position 3272 of SEQ ID NO: 1881831
uaaaguuugucuuccgauu

SEQ ID NO: 2074613 - RNA, 19 nt, Artificial Sequence
  Description of Artificial Sequence: Synthetic oligonucleotide
  Antisense strand to SEQ ID NO: 2074612
aaucggaagacaaacuuua

SEQ ID NO: 2074614 - RNA, 19 nt, Artificial Sequence
  Description of Artificial Sequence: Synthetic oligonucleotide
  Sense strand starting at position 3526 of SEQ ID NO: 1881831
accagagaguuucuugucu

SEQ ID NO: 2074615 - RNA, 19 nt, Artificial Sequence
  Description of Artificial Sequence: Synthetic oligonucleotide
  Antisense strand to SEQ ID NO: 2074614
agacaagaaacucucuggu

SEQ ID NO: 2074616 - RNA, 19 nt, Artificial Sequence
  Description of Artificial Sequence: Synthetic oligonucleotide
  Sense strand starting at position 3530 of SEQ ID NO: 1881831
gagaguuucuugucuaagc

SEQ ID NO: 2074617 - RNA, 19 nt, Artificial Sequence
  Description of Artificial Sequence: Synthetic oligonucleotide
  Antisense strand to SEQ ID NO: 2074616
gcuuagacaagaaacucuc

SEQ ID NO: 2074618 - RNA, 19 nt, Artificial Sequence
  Description of Artificial Sequence: Synthetic oligonucleotide
  Sense strand starting at position 3532 of SEQ ID NO: 1881831
gaguuucuugucuaagccu

SEQ ID NO: 2074619 - RNA, 19 nt, Artificial Sequence
  Description of Artificial Sequence: Synthetic oligonucleotide
  Antisense strand to SEQ ID NO: 2074618
aggcuuagacaagaaacuc

SEQ ID NO: 2074620 - RNA, 19 nt, Artificial Sequence
  Description of Artificial Sequence: Synthetic oligonucleotide
  Sense strand starting at position 3607 of SEQ ID NO: 1881831
uuuaguugucuucuacguu

SEQ ID NO: 2074621 - RNA, 19 nt, Artificial Sequence
  Description of Artificial Sequence: Synthetic oligonucleotide
  Antisense strand to SEQ ID NO: 2074620
aacguagaagacaacuaaa

SEQ ID NO: 2074622 - RNA, 19 nt, Artificial Sequence
  Description of Artificial Sequence: Synthetic oligonucleotide
  Sense strand starting at position 3705 of SEQ ID NO: 1881831
uaugauguguucccaaggu

SEQ ID NO: 2074623 - RNA, 19 nt, Artificial Sequence
  Description of Artificial Sequence: Synthetic oligonucleotide
  Antisense strand to SEQ ID NO: 2074622
accuugggaacacaucaua

SEQ ID NO: 2074624 - RNA, 19 nt, Artificial Sequence
  Description of Artificial Sequence: Synthetic oligonucleotide
  Sense strand starting at position 3709 of SEQ ID NO: 1881831
auguguucccaaggugauc

SEQ ID NO: 2074625 - RNA, 19 nt, Artificial Sequence
  Description of Artificial Sequence: Synthetic oligonucleotide
  Antisense strand to SEQ ID NO: 2074624
gaucaccuugggaacacau

SEQ ID NO: 2074626 - RNA, 19 nt, Artificial Sequence
  Description of Artificial Sequence: Synthetic oligonucleotide
  Sense strand starting at position 3720 of SEQ ID NO: 1881831
aggugaucggagcagcuau

SEQ ID NO: 2074627 - RNA, 19 nt, Artificial Sequence
  Description of Artificial Sequence: Synthetic oligonucleotide
  Antisense strand to SEQ ID NO: 2074626
auagcugcuccgaucaccu

SEQ ID NO: 2074628 - RNA, 19 nt, Artificial Sequence
  Description of Artificial Sequence: Synthetic oligonucleotide
  Sense strand starting at position 3758 of SEQ ID NO: 1881831
uugagacuucuuugcuuug

SEQ ID NO: 2074629 - RNA, 19 nt, Artificial Sequence
  Description of Artificial Sequence: Synthetic oligonucleotide
  Antisense strand to SEQ ID NO: 2074628
caaagcaaagaagucucaa

SEQ ID NO: 2074630 - RNA, 19 nt, Artificial Sequence
  Description of Artificial Sequence: Synthetic oligonucleotide
  Sense strand starting at position 3760 of SEQ ID NO: 1881831
gagacuucuuugcuuugua

SEQ ID NO: 2074631 - RNA, 19 nt, Artificial Sequence
  Description of Artificial Sequence: Synthetic oligonucleotide
  Antisense strand to SEQ ID NO: 2074630
uacaaagcaaagaagucuc

SEQ ID NO: 2074632 - RNA, 19 nt, Artificial Sequence
  Description of Artificial Sequence: Synthetic oligonucleotide
  Sense strand starting at position 3761 of SEQ ID NO: 1881831
agacuucuuugcuuuguaa

SEQ ID NO: 2074633 - RNA, 19 nt, Artificial Sequence
  Description of Artificial Sequence: Synthetic oligonucleotide
  Antisense strand to SEQ ID NO: 2074632
uuacaaagcaaagaagucu

SEQ ID NO: 2074634 - RNA, 19 nt, Artificial Sequence
  Description of Artificial Sequence: Synthetic oligonucleotide
  Sense strand starting at position 3764 of SEQ ID NO: 1881831
cuucuuugcuuuguaauag

SEQ ID NO: 2074635 - RNA, 19 nt, Artificial Sequence
  Description of Artificial Sequence: Synthetic oligonucleotide
  Antisense strand to SEQ ID NO: 2074634
cuauuacaaagcaaagaag

SEQ ID NO: 2074636 - RNA, 19 nt, Artificial Sequence
  Description of Artificial Sequence: Synthetic oligonucleotide
  Sense strand starting at position 3775 of SEQ ID NO: 1881831
uguaauaggugagugagau

SEQ ID NO: 2074637 - RNA, 19 nt, Artificial Sequence
  Description of Artificial Sequence: Synthetic oligonucleotide
  Antisense strand to SEQ ID NO: 2074636
aucucacucaccuauuaca

SEQ ID NO: 2074638 - RNA, 19 nt, Artificial Sequence
  Description of Artificial Sequence: Synthetic oligonucleotide
  Sense strand starting at position 3776 of SEQ ID NO: 1881831
guaauaggugagugagauc

SEQ ID NO: 2074639 - RNA, 19 nt, Artificial Sequence
  Description of Artificial Sequence: Synthetic oligonucleotide
  Antisense strand to SEQ ID NO: 2074638
gaucucacucaccuauuac

SEQ ID NO: 2074640 - RNA, 19 nt, Artificial Sequence
  Description of Artificial Sequence: Synthetic oligonucleotide
  Sense strand starting at position 3803 of SEQ ID NO: 1881831
gccucuugauuaguggaga

SEQ ID NO: 2074641 - RNA, 19 nt, Artificial Sequence
  Description of Artificial Sequence: Synthetic oligonucleotide
  Antisense strand to SEQ ID NO: 2074640
ucuccacuaaucaagaggc

SEQ ID NO: 2074642 - RNA, 19 nt, Artificial Sequence
  Description of Artificial Sequence: Synthetic oligonucleotide
  Sense strand starting at position 3895 of SEQ ID NO: 1881831
aaauuugcuucugaauggu

SEQ ID NO: 2074643 - RNA, 19 nt, Artificial Sequence
  Description of Artificial Sequence: Synthetic oligonucleotide
  Antisense strand to SEQ ID NO: 2074642
accauucagaagcaaauuu

SEQ ID NO: 2074644 - RNA, 19 nt, Artificial Sequence
  Description of Artificial Sequence: Synthetic oligonucleotide
  Sense strand starting at position 3898 of SEQ ID NO: 1881831
uuugcuucugaauggucau

SEQ ID NO: 2074645 - RNA, 19 nt, Artificial Sequence
  Description of Artificial Sequence: Synthetic oligonucleotide
  Antisense strand to SEQ ID NO: 2074644
augaccauucagaagcaaa

SEQ ID NO: 2074646 - RNA, 19 nt, Artificial Sequence
  Description of Artificial Sequence: Synthetic oligonucleotide
  Sense strand starting at position 3904 of SEQ ID NO: 1881831
ucugaauggucauccuuga

SEQ ID NO: 2074647 - RNA, 19 nt, Artificial Sequence
  Description of Artificial Sequence: Synthetic oligonucleotide
  Antisense strand to SEQ ID NO: 2074646
ucaaggaugaccauucaga

SEQ ID NO: 2074648 - RNA, 19 nt, Artificial Sequence
  Description of Artificial Sequence: Synthetic oligonucleotide
  Sense strand starting at position 3921 of SEQ ID NO: 1881831
gacaaauauguugguaaua

SEQ ID NO: 2074649 - RNA, 19 nt, Artificial Sequence
  Description of Artificial Sequence: Synthetic oligonucleotide
  Antisense strand to SEQ ID NO: 2074648
uauuaccaacauauuuguc

SEQ ID NO: 2074650 - RNA, 19 nt, Artificial Sequence
  Description of Artificial Sequence: Synthetic oligonucleotide
  Sense strand starting at position 3922 of SEQ ID NO: 1881831
acaaauauguugguaauag

SEQ ID NO: 2074651 - RNA, 19 nt, Artificial Sequence
  Description of Artificial Sequence: Synthetic oligonucleotide
  Antisense strand to SEQ ID NO: 2074650
cuauuaccaacauauuugu

SEQ ID NO: 2074652 - RNA, 19 nt, Artificial Sequence
  Description of Artificial Sequence: Synthetic oligonucleotide
  Sense strand starting at position 1 of SEQ ID NO: 1881834
ggguguuaucgugaugacu

SEQ ID NO: 2074653 - RNA, 19 nt, Artificial Sequence
  Description of Artificial Sequence: Synthetic oligonucleotide
  Antisense strand to SEQ ID NO: 2074652
agucaucacgauaacaccc

SEQ ID NO: 2074654 - RNA, 19 nt, Artificial Sequence
  Description of Artificial Sequence: Synthetic oligonucleotide
  Sense strand starting at position 7 of SEQ ID NO: 1881834
uaucgugaugacuguguga

SEQ ID NO: 2074655 - RNA, 19 nt, Artificial Sequence
  Description of Artificial Sequence: Synthetic oligonucleotide
  Antisense strand to SEQ ID NO: 2074654
ucacacagucaucacgaua

SEQ ID NO: 2074656 - RNA, 19 nt, Artificial Sequence
  Description of Artificial Sequence: Synthetic oligonucleotide
  Sense strand starting at position 9 of SEQ ID NO: 1881834
ucgugaugacugugugaag

SEQ ID NO: 2074657 - RNA, 19 nt, Artificial Sequence
  Description of Artificial Sequence: Synthetic oligonucleotide
  Antisense strand to SEQ ID NO: 2074656
cuucacacagucaucacga

SEQ ID NO: 2074658 - RNA, 19 nt, Artificial Sequence
  Description of Artificial Sequence: Synthetic oligonucleotide
  Sense strand starting at position 46 of SEQ ID NO: 1881834
uuacaaggcuuucuguuua

SEQ ID NO: 2074659 - RNA, 19 nt, Artificial Sequence
  Description of Artificial Sequence: Synthetic oligonucleotide
  Antisense strand to SEQ ID NO: 2074658
uaaacagaaagccuuguaa

SEQ ID NO: 2074660 - RNA, 19 nt, Artificial Sequence
  Description of Artificial Sequence: Synthetic oligonucleotide
  Sense strand starting at position 58 of SEQ ID NO: 1881834
cuguuuaggucucccucaa

SEQ ID NO: 2074661 - RNA, 19 nt, Artificial Sequence
  Description of Artificial Sequence: Synthetic oligonucleotide
  Antisense strand to SEQ ID NO: 2074660
uugagggagaccuaaacag

SEQ ID NO: 2074662 - RNA, 19 nt, Artificial Sequence
  Description of Artificial Sequence: Synthetic oligonucleotide
  Sense strand starting at position 133 of SEQ ID NO: 1881834
gcuaaauugucauuagacu

SEQ ID NO: 2074663 - RNA, 19 nt, Artificial Sequence
  Description of Artificial Sequence: Synthetic oligonucleotide
  Antisense strand to SEQ ID NO: 2074662
agucuaaugacaauuuagc

SEQ ID NO: 2074664 - RNA, 19 nt, Artificial Sequence
  Description of Artificial Sequence: Synthetic oligonucleotide
  Sense strand starting at position 250 of SEQ ID NO: 1881834
gaugcaaggaugugaagau

SEQ ID NO: 2074665 - RNA, 19 nt, Artificial Sequence
  Description of Artificial Sequence: Synthetic oligonucleotide
  Antisense strand to SEQ ID NO: 2074664
aucuucacauccuugcauc

SEQ ID NO: 2074666 - RNA, 19 nt, Artificial Sequence
  Description of Artificial Sequence: Synthetic oligonucleotide
  Sense strand starting at position 281 of SEQ ID NO: 1881834
cacauuauugcacgugaaa

SEQ ID NO: 2074667 - RNA, 19 nt, Artificial Sequence
  Description of Artificial Sequence: Synthetic oligonucleotide
  Antisense strand to SEQ ID NO: 2074666
uuucacgugcaauaaugug

SEQ ID NO: 2074668 - RNA, 19 nt, Artificial Sequence
  Description of Artificial Sequence: Synthetic oligonucleotide
  Sense strand starting at position 314 of SEQ ID NO: 1881834
uuugacaccuggcuaaauu

SEQ ID NO: 2074669 - RNA, 19 nt, Artificial Sequence
  Description of Artificial Sequence: Synthetic oligonucleotide
  Antisense strand to SEQ ID NO: 2074668
aauuuagccaggugucaaa

SEQ ID NO: 2074670 - RNA, 19 nt, Artificial Sequence
  Description of Artificial Sequence: Synthetic oligonucleotide
  Sense strand starting at position 426 of SEQ ID NO: 1881834
uggaaauccgcaggaucuu

SEQ ID NO: 2074671 - RNA, 19 nt, Artificial Sequence
  Description of Artificial Sequence: Synthetic oligonucleotide
  Antisense strand to SEQ ID NO: 2074670
aagauccugcggauuucca

SEQ ID NO: 2074672 - RNA, 19 nt, Artificial Sequence
  Description of Artificial Sequence: Synthetic oligonucleotide
  Sense strand starting at position 427 of SEQ ID NO: 1881834
ggaaauccgcaggaucuua

SEQ ID NO: 2074673 - RNA, 19 nt, Artificial Sequence
  Description of Artificial Sequence: Synthetic oligonucleotide
  Antisense strand to SEQ ID NO: 2074672
uaagauccugcggauuucc

SEQ ID NO: 2074674 - RNA, 19 nt, Artificial Sequence
  Description of Artificial Sequence: Synthetic oligonucleotide
  Sense strand starting at position 475 of SEQ ID NO: 1881834
caaggacaccugugugcau

SEQ ID NO: 2074675 - RNA, 19 nt, Artificial Sequence
  Description of Artificial Sequence: Synthetic oligonucleotide
  Antisense strand to SEQ ID NO: 2074674
augcacacagguguccuug

SEQ ID NO: 2074676 - RNA, 19 nt, Artificial Sequence
  Description of Artificial Sequence: Synthetic oligonucleotide
  Sense strand starting at position 488 of SEQ ID NO: 1881834
gugcaucugccuggagaua

SEQ ID NO: 2074677 - RNA, 19 nt, Artificial Sequence
  Description of Artificial Sequence: Synthetic oligonucleotide
  Antisense strand to SEQ ID NO: 2074676
uaucuccaggcagaugcac

SEQ ID NO: 2074678 - RNA, 19 nt, Artificial Sequence
  Description of Artificial Sequence: Synthetic oligonucleotide
  Sense strand starting at position 636 of SEQ ID NO: 1881834
cacuaacguguccagguua

SEQ ID NO: 2074679 - RNA, 19 nt, Artificial Sequence
  Description of Artificial Sequence: Synthetic oligonucleotide
  Antisense strand to SEQ ID NO: 2074678
uaaccuggacacguuagug

SEQ ID NO: 2074680 - RNA, 19 nt, Artificial Sequence
  Description of Artificial Sequence: Synthetic oligonucleotide
  Sense strand starting at position 650 of SEQ ID NO: 1881834
gguuaacuccuggaaggca

SEQ ID NO: 2074681 - RNA, 19 nt, Artificial Sequence
  Description of Artificial Sequence: Synthetic oligonucleotide
  Antisense strand to SEQ ID NO: 2074680
ugccuuccaggaguuaacc

SEQ ID NO: 2074682 - RNA, 19 nt, Artificial Sequence
  Description of Artificial Sequence: Synthetic oligonucleotide
  Sense strand starting at position 690 of SEQ ID NO: 1881834
guacgaauauggcuucuuu

SEQ ID NO: 2074683 - RNA, 19 nt, Artificial Sequence
  Description of Artificial Sequence: Synthetic oligonucleotide
  Antisense strand to SEQ ID NO: 2074682
aaagaagccauauucguac

SEQ ID NO: 2074684 - RNA, 19 nt, Artificial Sequence
  Description of Artificial Sequence: Synthetic oligonucleotide
  Sense strand starting at position 773 of SEQ ID NO: 1881834
uuucuugaucucggcaaac

SEQ ID NO: 2074685 - RNA, 19 nt, Artificial Sequence
  Description of Artificial Sequence: Synthetic oligonucleotide
  Antisense strand to SEQ ID NO: 2074684
guuugccgagaucaagaaa

SEQ ID NO: 2074686 - RNA, 19 nt, Artificial Sequence
  Description of Artificial Sequence: Synthetic oligonucleotide
  Sense strand starting at position 775 of SEQ ID NO: 1881834
ucuugaucucggcaaacaa

SEQ ID NO: 2074687 - RNA, 19 nt, Artificial Sequence
  Description of Artificial Sequence: Synthetic oligonucleotide
  Antisense strand to SEQ ID NO: 2074686
uuguuugccgagaucaaga

SEQ ID NO: 2074688 - RNA, 19 nt, Artificial Sequence
  Description of Artificial Sequence: Synthetic oligonucleotide
  Sense strand starting at position 1279 of SEQ ID NO: 1881834
gcuuauugguaggucauca

SEQ ID NO: 2074689 - RNA, 19 nt, Artificial Sequence
  Description of Artificial Sequence: Synthetic oligonucleotide
  Antisense strand to SEQ ID NO: 2074688
ugaugaccuaccaauaagc

SEQ ID NO: 2074690 - RNA, 19 nt, Artificial Sequence
  Description of Artificial Sequence: Synthetic oligonucleotide
  Sense strand starting at position 1301 of SEQ ID NO: 1881834
gcugaucagacaugguaau

SEQ ID NO: 2074691 - RNA, 19 nt, Artificial Sequence
  Description of Artificial Sequence: Synthetic oligonucleotide
  Antisense strand to SEQ ID NO: 2074690
auuaccaugucugaucagc

SEQ ID NO: 2074692 - RNA, 19 nt, Artificial Sequence
  Description of Artificial Sequence: Synthetic oligonucleotide
  Sense strand starting at position 1302 of SEQ ID NO: 1881834
cugaucagacaugguaauc

SEQ ID NO: 2074693 - RNA, 19 nt, Artificial Sequence
  Description of Artificial Sequence: Synthetic oligonucleotide
  Antisense strand to SEQ ID NO: 2074692
gauuaccaugucugaucag

SEQ ID NO: 2074694 - RNA, 19 nt, Artificial Sequence
  Description of Artificial Sequence: Synthetic oligonucleotide
  Sense strand starting at position 1569 of SEQ ID NO: 1881834
gcgacuuaggaagggaaau

SEQ ID NO: 2074695 - RNA, 19 nt, Artificial Sequence
  Description of Artificial Sequence: Synthetic oligonucleotide
  Antisense strand to SEQ ID NO: 2074694
auuucccuuccuaagucgc

SEQ ID NO: 2074696 - RNA, 19 nt, Artificial Sequence
  Description of Artificial Sequence: Synthetic oligonucleotide
  Sense strand starting at position 2390 of SEQ ID NO: 1881834
gggcuucuacccuagcaga

SEQ ID NO: 2074697 - RNA, 19 nt, Artificial Sequence
  Description of Artificial Sequence: Synthetic oligonucleotide
  Antisense strand to SEQ ID NO: 2074696
ucugcuaggguagaagccc

SEQ ID NO: 2074698 - RNA, 19 nt, Artificial Sequence
  Description of Artificial Sequence: Synthetic oligonucleotide
  Sense strand starting at position 2802 of SEQ ID NO: 1881834
gcgcgcucuaggcuagaaa

SEQ ID NO: 2074699 - RNA, 19 nt, Artificial Sequence
  Description of Artificial Sequence: Synthetic oligonucleotide
  Antisense strand to SEQ ID NO: 2074698
uuucuagccuagagcgcgc

SEQ ID NO: 2074700 - RNA, 19 nt, Artificial Sequence
  Description of Artificial Sequence: Synthetic oligonucleotide
  Sense strand starting at position 2805 of SEQ ID NO: 1881834
cgcucuaggcuagaaagaa

SEQ ID NO: 2074701 - RNA, 19 nt, Artificial Sequence
  Description of Artificial Sequence: Synthetic oligonucleotide
  Antisense strand to SEQ ID NO: 2074700
uucuuucuagccuagagcg

SEQ ID NO: 2074702 - RNA, 19 nt, Artificial Sequence
  Description of Artificial Sequence: Synthetic oligonucleotide
  Sense strand starting at position 2895 of SEQ ID NO: 1881834
gagauuacaguuugcagca

SEQ ID NO: 2074703 - RNA, 19 nt, Artificial Sequence
  Description of Artificial Sequence: Synthetic oligonucleotide
  Antisense strand to SEQ ID NO: 2074702
ugcugcaaacuguaaucuc

SEQ ID NO: 2074704 - RNA, 19 nt, Artificial Sequence
  Description of Artificial Sequence: Synthetic oligonucleotide
  Sense strand starting at position 2961 of SEQ ID NO: 1881834
cagcaaggauuguuuauca

SEQ ID NO: 2074705 - RNA, 19 nt, Artificial Sequence
  Description of Artificial Sequence: Synthetic oligonucleotide
  Antisense strand to SEQ ID NO: 2074704
ugauaaacaauccuugcug

SEQ ID NO: 2074706 - RNA, 19 nt, Artificial Sequence
  Description of Artificial Sequence: Synthetic oligonucleotide
  Sense strand starting at position 3097 of SEQ ID NO: 1881834
gagcauccacgauggauaa

SEQ ID NO: 2074707 - RNA, 19 nt, Artificial Sequence
  Description of Artificial Sequence: Synthetic oligonucleotide
  Antisense strand to SEQ ID NO: 2074706
uuauccaucguggaugcuc

SEQ ID NO: 2074708 - RNA, 19 nt, Artificial Sequence
  Description of Artificial Sequence: Synthetic oligonucleotide
  Sense strand starting at position 3098 of SEQ ID NO: 1881834
agcauccacgauggauaaa

SEQ ID NO: 2074709 - RNA, 19 nt, Artificial Sequence
  Description of Artificial Sequence: Synthetic oligonucleotide
  Antisense strand to SEQ ID NO: 2074708
uuuauccaucguggaugcu

SEQ ID NO: 2074710 - RNA, 19 nt, Artificial Sequence
  Description of Artificial Sequence: Synthetic oligonucleotide
  Sense strand starting at position 3148 of SEQ ID NO: 1881834
ucaguacgugaugggauua

SEQ ID NO: 2074711 - RNA, 19 nt, Artificial Sequence
  Description of Artificial Sequence: Synthetic oligonucleotide
  Antisense strand to SEQ ID NO: 2074710
uaaucccaucacguacuga

SEQ ID NO: 2074712 - RNA, 19 nt, Artificial Sequence
  Description of Artificial Sequence: Synthetic oligonucleotide
  Sense strand starting at position 3149 of SEQ ID NO: 1881834
caguacgugaugggauuaa

SEQ ID NO: 2074713 - RNA, 19 nt, Artificial Sequence
  Description of Artificial Sequence: Synthetic oligonucleotide
  Antisense strand to SEQ ID NO: 2074712
uuaaucccaucacguacug

SEQ ID NO: 2074714 - RNA, 19 nt, Artificial Sequence
  Description of Artificial Sequence: Synthetic oligonucleotide
  Sense strand starting at position 3200 of SEQ ID NO: 1881834
ccauuaguucuccguuaaa

SEQ ID NO: 2074715 - RNA, 19 nt, Artificial Sequence
  Description of Artificial Sequence: Synthetic oligonucleotide
  Antisense strand to SEQ ID NO: 2074714
uuuaacggagaacuaaugg

SEQ ID NO: 2074716 - RNA, 19 nt, Artificial Sequence
  Description of Artificial Sequence: Synthetic oligonucleotide
  Sense strand starting at position 3203 of SEQ ID NO: 1881834
uuaguucuccguuaaaugc

SEQ ID NO: 2074717 - RNA, 19 nt, Artificial Sequence
  Description of Artificial Sequence: Synthetic oligonucleotide
  Antisense strand to SEQ ID NO: 2074716
gcauuuaacggagaacuaa

SEQ ID NO: 2074718 - RNA, 19 nt, Artificial Sequence
  Description of Artificial Sequence: Synthetic oligonucleotide
  Sense strand starting at position 3212 of SEQ ID NO: 1881834
cguuaaaugcacuaaacca

SEQ ID NO: 2074719 - RNA, 19 nt, Artificial Sequence
  Description of Artificial Sequence: Synthetic oligonucleotide
  Antisense strand to SEQ ID NO: 2074718
ugguuuagugcauuuaacg

SEQ ID NO: 2074720 - RNA, 19 nt, Artificial Sequence
  Description of Artificial Sequence: Synthetic oligonucleotide
  Sense strand starting at position 3454 of SEQ ID NO: 1881834
ugaccugugcgacauuaua

SEQ ID NO: 2074721 - RNA, 19 nt, Artificial Sequence
  Description of Artificial Sequence: Synthetic oligonucleotide
  Antisense strand to SEQ ID NO: 2074720
uauaaugucgcacagguca

SEQ ID NO: 2074722 - RNA, 19 nt, Artificial Sequence
  Description of Artificial Sequence: Synthetic oligonucleotide
  Sense strand starting at position 3716 of SEQ ID NO: 1881834
ggauuacuguugcuacaca

SEQ ID NO: 2074723 - RNA, 19 nt, Artificial Sequence
  Description of Artificial Sequence: Synthetic oligonucleotide
  Antisense strand to SEQ ID NO: 2074722
uguguagcaacaguaaucc

SEQ ID NO: 2074724 - RNA, 19 nt, Artificial Sequence
  Description of Artificial Sequence: Synthetic oligonucleotide
  Sense strand starting at position 3753 of SEQ ID NO: 1881834
ggaaucucugaacgguaga

SEQ ID NO: 2074725 - RNA, 19 nt, Artificial Sequence
  Description of Artificial Sequence: Synthetic oligonucleotide
  Antisense strand to SEQ ID NO: 2074724
ucuaccguucagagauucc

SEQ ID NO: 2074726 - RNA, 19 nt, Artificial Sequence
  Description of Artificial Sequence: Synthetic oligonucleotide
  Sense strand starting at position 3774 of SEQ ID NO: 1881834
gcgggacauuuggcauguu

SEQ ID NO: 2074727 - RNA, 19 nt, Artificial Sequence
  Description of Artificial Sequence: Synthetic oligonucleotide
  Antisense strand to SEQ ID NO: 2074726
aacaugccaaaugucccgc

SEQ ID NO: 2074728 - RNA, 19 nt, Artificial Sequence
  Description of Artificial Sequence: Synthetic oligonucleotide
  Sense strand starting at position 3777 of SEQ ID NO: 1881834
ggacauuuggcauguugua

SEQ ID NO: 2074729 - RNA, 19 nt, Artificial Sequence
  Description of Artificial Sequence: Synthetic oligonucleotide
  Antisense strand to SEQ ID NO: 2074728
uacaacaugccaaaugucc

SEQ ID NO: 2074730 - RNA, 19 nt, Artificial Sequence
  Description of Artificial Sequence: Synthetic oligonucleotide
  Sense strand starting at position 3952 of SEQ ID NO: 1881834
gccgguuacgcacuguauu

SEQ ID NO: 2074731 - RNA, 19 nt, Artificial Sequence
  Description of Artificial Sequence: Synthetic oligonucleotide
  Antisense strand to SEQ ID NO: 2074730
aauacagugcguaaccggc

SEQ ID NO: 2074732 - RNA, 19 nt, Artificial Sequence
  Description of Artificial Sequence: Synthetic oligonucleotide
  Sense strand starting at position 9 of SEQ ID NO: 1881833
guugguuccagcguguauu

SEQ ID NO: 2074733 - RNA, 19 nt, Artificial Sequence
  Description of Artificial Sequence: Synthetic oligonucleotide
  Antisense strand to SEQ ID NO: 2074732
aauacacgcuggaaccaac

SEQ ID NO: 2074734 - RNA, 19 nt, Artificial Sequence
  Description of Artificial Sequence: Synthetic oligonucleotide
  Sense strand starting at position 11 of SEQ ID NO: 1881833
ugguuccagcguguauuau

SEQ ID NO: 2074735 - RNA, 19 nt, Artificial Sequence
  Description of Artificial Sequence: Synthetic oligonucleotide
  Antisense strand to SEQ ID NO: 2074734
auaauacacgcuggaacca

SEQ ID NO: 2074736 - RNA, 19 nt, Artificial Sequence
  Description of Artificial Sequence: Synthetic oligonucleotide
  Sense strand starting at position 214 of SEQ ID NO: 1881833
ugucucuugcuagauaaua

SEQ ID NO: 2074737 - RNA, 19 nt, Artificial Sequence
  Description of Artificial Sequence: Synthetic oligonucleotide
  Antisense strand to SEQ ID NO: 2074736
uauuaucuagcaagagaca

SEQ ID NO: 2074738 - RNA, 19 nt, Artificial Sequence
  Description of Artificial Sequence: Synthetic oligonucleotide
  Sense strand starting at position 246 of SEQ ID NO: 1881833
cccugcuucuguuuauuua

SEQ ID NO: 2074739 - RNA, 19 nt, Artificial Sequence
  Description of Artificial Sequence: Synthetic oligonucleotide
  Antisense strand to SEQ ID NO: 2074738
uaaauaaacagaagcaggg

SEQ ID NO: 2074740 - RNA, 19 nt, Artificial Sequence
  Description of Artificial Sequence: Synthetic oligonucleotide
  Sense strand starting at position 250 of SEQ ID NO: 1881833
gcuucuguuuauuuaaggu

SEQ ID NO: 2074741 - RNA, 19 nt, Artificial Sequence
  Description of Artificial Sequence: Synthetic oligonucleotide
  Antisense strand to SEQ ID NO: 2074740
accuuaaauaaacagaagc

SEQ ID NO: 2074742 - RNA, 19 nt, Artificial Sequence
  Description of Artificial Sequence: Synthetic oligonucleotide
  Sense strand starting at position 313 of SEQ ID NO: 1881833
ccuccugguuuggucauaa

SEQ ID NO: 2074743 - RNA, 19 nt, Artificial Sequence
  Description of Artificial Sequence: Synthetic oligonucleotide
  Antisense strand to SEQ ID NO: 2074742
uuaugaccaaaccaggagg

SEQ ID NO: 2074744 - RNA, 19 nt, Artificial Sequence
  Description of Artificial Sequence: Synthetic oligonucleotide
  Sense strand starting at position 399 of SEQ ID NO: 1881833
cucaaaguuugauugucua

SEQ ID NO: 2074745 - RNA, 19 nt, Artificial Sequence
  Description of Artificial Sequence: Synthetic oligonucleotide
  Antisense strand to SEQ ID NO: 2074744
uagacaaucaaacuuugag

SEQ ID NO: 2074746 - RNA, 19 nt, Artificial Sequence
  Description of Artificial Sequence: Synthetic oligonucleotide
  Sense strand starting at position 453 of SEQ ID NO: 1881833
cagugcuuucgagauaaug

SEQ ID NO: 2074747 - RNA, 19 nt, Artificial Sequence
  Description of Artificial Sequence: Synthetic oligonucleotide
  Antisense strand to SEQ ID NO: 2074746
cauuaucucgaaagcacug

SEQ ID NO: 2074748 - RNA, 19 nt, Artificial Sequence
  Description of Artificial Sequence: Synthetic oligonucleotide
  Sense strand starting at position 455 of SEQ ID NO: 1881833
gugcuuucgagauaaugua

SEQ ID NO: 2074749 - RNA, 19 nt, Artificial Sequence
  Description of Artificial Sequence: Synthetic oligonucleotide
  Antisense strand to SEQ ID NO: 2074748
uacauuaucucgaaagcac

SEQ ID NO: 2074750 - RNA, 19 nt, Artificial Sequence
  Description of Artificial Sequence: Synthetic oligonucleotide
  Sense strand starting at position 462 of SEQ ID NO: 1881833
cgagauaauguauguauaa

SEQ ID NO: 2074751 - RNA, 19 nt, Artificial Sequence
  Description of Artificial Sequence: Synthetic oligonucleotide
  Antisense strand to SEQ ID NO: 2074750
uuauacauacauuaucucg

SEQ ID NO: 2074752 - RNA, 19 nt, Artificial Sequence
  Description of Artificial Sequence: Synthetic oligonucleotide
  Sense strand starting at position 463 of SEQ ID NO: 1881833
gagauaauguauguauaag

SEQ ID NO: 2074753 - RNA, 19 nt, Artificial Sequence
  Description of Artificial Sequence: Synthetic oligonucleotide
  Antisense strand to SEQ ID NO: 2074752
cuuauacauacauuaucuc

SEQ ID NO: 2074754 - RNA, 19 nt, Artificial Sequence
  Description of Artificial Sequence: Synthetic oligonucleotide
  Sense strand starting at position 469 of SEQ ID NO: 1881833
auguauguauaagugaagu

SEQ ID NO: 2074755 - RNA, 19 nt, Artificial Sequence
  Description of Artificial Sequence: Synthetic oligonucleotide
  Antisense strand to SEQ ID NO: 2074754
acuucacuuauacauacau

SEQ ID NO: 2074756 - RNA, 19 nt, Artificial Sequence
  Description of Artificial Sequence: Synthetic oligonucleotide
  Sense strand starting at position 471 of SEQ ID NO: 1881833
guauguauaagugaaguga

SEQ ID NO: 2074757 - RNA, 19 nt, Artificial Sequence
  Description of Artificial Sequence: Synthetic oligonucleotide
  Antisense strand to SEQ ID NO: 2074756
ucacuucacuuauacauac

SEQ ID NO: 2074758 - RNA, 19 nt, Artificial Sequence
  Description of Artificial Sequence: Synthetic oligonucleotide
  Sense strand starting at position 516 of SEQ ID NO: 1881833
ugcugauugccugagaggu

SEQ ID NO: 2074759 - RNA, 19 nt, Artificial Sequence
  Description of Artificial Sequence: Synthetic oligonucleotide
  Antisense strand to SEQ ID NO: 2074758
accucucaggcaaucagca

SEQ ID NO: 2074760 - RNA, 19 nt, Artificial Sequence
  Description of Artificial Sequence: Synthetic oligonucleotide
  Sense strand starting at position 617 of SEQ ID NO: 1881833
gacagccuucugcaaggaa

SEQ ID NO: 2074761 - RNA, 19 nt, Artificial Sequence
  Description of Artificial Sequence: Synthetic oligonucleotide
  Antisense strand to SEQ ID NO: 2074760
uuccuugcagaaggcuguc

SEQ ID NO: 2074762 - RNA, 19 nt, Artificial Sequence
  Description of Artificial Sequence: Synthetic oligonucleotide
  Sense strand starting at position 704 of SEQ ID NO: 1881833
aucuuaauauggcuggaaa

SEQ ID NO: 2074763 - RNA, 19 nt, Artificial Sequence
  Description of Artificial Sequence: Synthetic oligonucleotide
  Antisense strand to SEQ ID NO: 2074762
uuuccagccauauuaagau

SEQ ID NO: 2074764 - RNA, 19 nt, Artificial Sequence
  Description of Artificial Sequence: Synthetic oligonucleotide
  Sense strand starting at position 705 of SEQ ID NO: 1881833
ucuuaauauggcuggaaac

SEQ ID NO: 2074765 - RNA, 19 nt, Artificial Sequence
  Description of Artificial Sequence: Synthetic oligonucleotide
  Antisense strand to SEQ ID NO: 2074764
guuuccagccauauuaaga

SEQ ID NO: 2074766 - RNA, 19 nt, Artificial Sequence
  Description of Artificial Sequence: Synthetic oligonucleotide
  Sense strand starting at position 706 of SEQ ID NO: 1881833
cuuaauauggcuggaaaca

SEQ ID NO: 2074767 - RNA, 19 nt, Artificial Sequence
  Description of Artificial Sequence: Synthetic oligonucleotide
  Antisense strand to SEQ ID NO: 2074766
uguuuccagccauauuaag

SEQ ID NO: 2074768 - RNA, 19 nt, Artificial Sequence
  Description of Artificial Sequence: Synthetic oligonucleotide
  Sense strand starting at position 727 of SEQ ID NO: 1881833
gcacauuaucuugacugaa

SEQ ID NO: 2074769 - RNA, 19 nt, Artificial Sequence
  Description of Artificial Sequence: Synthetic oligonucleotide
  Antisense strand to SEQ ID NO: 2074768
uucagucaagauaaugugc

SEQ ID NO: 2074770 - RNA, 19 nt, Artificial Sequence
  Description of Artificial Sequence: Synthetic oligonucleotide
  Sense strand starting at position 832 of SEQ ID NO: 1881833
auauacaggccuugaguua

SEQ ID NO: 2074771 - RNA, 19 nt, Artificial Sequence
  Description of Artificial Sequence: Synthetic oligonucleotide
  Antisense strand to SEQ ID NO: 2074770
uaacucaaggccuguauau

SEQ ID NO: 2074772 - RNA, 19 nt, Artificial Sequence
  Description of Artificial Sequence: Synthetic oligonucleotide
  Sense strand starting at position 857 of SEQ ID NO: 1881833
aagcaaugguaaucuuguu

SEQ ID NO: 2074773 - RNA, 19 nt, Artificial Sequence
  Description of Artificial Sequence: Synthetic oligonucleotide
  Antisense strand to SEQ ID NO: 2074772
aacaagauuaccauugcuu

SEQ ID NO: 2074774 - RNA, 19 nt, Artificial Sequence
  Description of Artificial Sequence: Synthetic oligonucleotide
  Sense strand starting at position 862 of SEQ ID NO: 1881833
augguaaucuuguuuauag

SEQ ID NO: 2074775 - RNA, 19 nt, Artificial Sequence
  Description of Artificial Sequence: Synthetic oligonucleotide
  Antisense strand to SEQ ID NO: 2074774
cuauaaacaagauuaccau

SEQ ID NO: 2074776 - RNA, 19 nt, Artificial Sequence
  Description of Artificial Sequence: Synthetic oligonucleotide
  Sense strand starting at position 885 of SEQ ID NO: 1881833
ggauucucuuucuuggcaa

SEQ ID NO: 2074777 - RNA, 19 nt, Artificial Sequence
  Description of Artificial Sequence: Synthetic oligonucleotide
  Antisense strand to SEQ ID NO: 2074776
uugccaagaaagagaaucc

SEQ ID NO: 2074778 - RNA, 19 nt, Artificial Sequence
  Description of Artificial Sequence: Synthetic oligonucleotide
  Sense strand starting at position 1196 of SEQ ID NO: 1881833
uggacuauccagcauccau

SEQ ID NO: 2074779 - RNA, 19 nt, Artificial Sequence
  Description of Artificial Sequence: Synthetic oligonucleotide
  Antisense strand to SEQ ID NO: 2074778
auggaugcuggauagucca

SEQ ID NO: 2074780 - RNA, 19 nt, Artificial Sequence
  Description of Artificial Sequence: Synthetic oligonucleotide
  Sense strand starting at position 1279 of SEQ ID NO: 1881833
acaccaaagugcucauaug

SEQ ID NO: 2074781 - RNA, 19 nt, Artificial Sequence
  Description of Artificial Sequence: Synthetic oligonucleotide
  Antisense strand to SEQ ID NO: 2074780
cauaugagcacuuuggugu

SEQ ID NO: 2074782 - RNA, 19 nt, Artificial Sequence
  Description of Artificial Sequence: Synthetic oligonucleotide
  Sense strand starting at position 1320 of SEQ ID NO: 1881833
gucagauggcuacacguau

SEQ ID NO: 2074783 - RNA, 19 nt, Artificial Sequence
  Description of Artificial Sequence: Synthetic oligonucleotide
  Antisense strand to SEQ ID NO: 2074782
auacguguagccaucugac

SEQ ID NO: 2074784 - RNA, 19 nt, Artificial Sequence
  Description of Artificial Sequence: Synthetic oligonucleotide
  Sense strand starting at position 1455 of SEQ ID NO: 1881833
uccacaacugauugcagaa

SEQ ID NO: 2074785 - RNA, 19 nt, Artificial Sequence
  Description of Artificial Sequence: Synthetic oligonucleotide
  Antisense strand to SEQ ID NO: 2074784
uucugcaaucaguugugga

SEQ ID NO: 2074786 - RNA, 19 nt, Artificial Sequence
  Description of Artificial Sequence: Synthetic oligonucleotide
  Sense strand starting at position 1710 of SEQ ID NO: 1881833
caugcauguguguacagau

SEQ ID NO: 2074787 - RNA, 19 nt, Artificial Sequence
  Description of Artificial Sequence: Synthetic oligonucleotide
  Antisense strand to SEQ ID NO: 2074786
aucuguacacacaugcaug

SEQ ID NO: 2074788 - RNA, 19 nt, Artificial Sequence
  Description of Artificial Sequence: Synthetic oligonucleotide
  Sense strand starting at position 2360 of SEQ ID NO: 1881833
gacaauaaaugagaggaga

SEQ ID NO: 2074789 - RNA, 19 nt, Artificial Sequence
  Description of Artificial Sequence: Synthetic oligonucleotide
  Antisense strand to SEQ ID NO: 2074788
ucuccucucauuuauuguc

SEQ ID NO: 2074790 - RNA, 19 nt, Artificial Sequence
  Description of Artificial Sequence: Synthetic oligonucleotide
  Sense strand starting at position 2477 of SEQ ID NO: 1881833
aacccaaaggguugaguua

SEQ ID NO: 2074791 - RNA, 19 nt, Artificial Sequence
  Description of Artificial Sequence: Synthetic oligonucleotide
  Antisense strand to SEQ ID NO: 2074790
uaacucaacccuuuggguu

SEQ ID NO: 2074792 - RNA, 19 nt, Artificial Sequence
  Description of Artificial Sequence: Synthetic oligonucleotide
  Sense strand starting at position 2610 of SEQ ID NO: 1881833
uccaaugagacacguguuu

SEQ ID NO: 2074793 - RNA, 19 nt, Artificial Sequence
  Description of Artificial Sequence: Synthetic oligonucleotide
  Antisense strand to SEQ ID NO: 2074792
aaacacgugucucauugga

SEQ ID NO: 2074794 - RNA, 19 nt, Artificial Sequence
  Description of Artificial Sequence: Synthetic oligonucleotide
  Sense strand starting at position 2642 of SEQ ID NO: 1881833
cacgucaccgaaugauuaa

SEQ ID NO: 2074795 - RNA, 19 nt, Artificial Sequence
  Description of Artificial Sequence: Synthetic oligonucleotide
  Antisense strand to SEQ ID NO: 2074794
uuaaucauucggugacgug

SEQ ID NO: 2074796 - RNA, 19 nt, Artificial Sequence
  Description of Artificial Sequence: Synthetic oligonucleotide
  Sense strand starting at position 2643 of SEQ ID NO: 1881833
acgucaccgaaugauuaau

SEQ ID NO: 2074797 - RNA, 19 nt, Artificial Sequence
  Description of Artificial Sequence: Synthetic oligonucleotide
  Antisense strand to SEQ ID NO: 2074796
auuaaucauucggugacgu

SEQ ID NO: 2074798 - RNA, 19 nt, Artificial Sequence
  Description of Artificial Sequence: Synthetic oligonucleotide
  Sense strand starting at position 2836 of SEQ ID NO: 1881833
guccucugaaauggugaga

SEQ ID NO: 2074799 - RNA, 19 nt, Artificial Sequence
  Description of Artificial Sequence: Synthetic oligonucleotide
  Antisense strand to SEQ ID NO: 2074798
ucucaccauuucagaggac

SEQ ID NO: 2074800 - RNA, 19 nt, Artificial Sequence
  Description of Artificial Sequence: Synthetic oligonucleotide
  Sense strand starting at position 3094 of SEQ ID NO: 1881833
gcaaacuaacucugaauag

SEQ ID NO: 2074801 - RNA, 19 nt, Artificial Sequence
  Description of Artificial Sequence: Synthetic oligonucleotide
  Antisense strand to SEQ ID NO: 2074800
cuauucagaguuaguuugc

SEQ ID NO: 2074802 - RNA, 19 nt, Artificial Sequence
  Description of Artificial Sequence: Synthetic oligonucleotide
  Sense strand starting at position 3112 of SEQ ID NO: 1881833
gcaccugauucugaauuua

SEQ ID NO: 2074803 - RNA, 19 nt, Artificial Sequence
  Description of Artificial Sequence: Synthetic oligonucleotide
  Antisense strand to SEQ ID NO: 2074802
uaaauucagaaucaggugc

SEQ ID NO: 2074804 - RNA, 19 nt, Artificial Sequence
  Description of Artificial Sequence: Synthetic oligonucleotide
  Sense strand starting at position 3231 of SEQ ID NO: 1881833
ggauguacccauuguaaau

SEQ ID NO: 2074805 - RNA, 19 nt, Artificial Sequence
  Description of Artificial Sequence: Synthetic oligonucleotide
  Antisense strand to SEQ ID NO: 2074804
auuuacaauggguacaucc

SEQ ID NO: 2074806 - RNA, 19 nt, Artificial Sequence
  Description of Artificial Sequence: Synthetic oligonucleotide
  Sense strand starting at position 3370 of SEQ ID NO: 1881833
cagagaagggcgcagaauu

SEQ ID NO: 2074807 - RNA, 19 nt, Artificial Sequence
  Description of Artificial Sequence: Synthetic oligonucleotide
  Antisense strand to SEQ ID NO: 2074806
aauucugcgcccuucucug

SEQ ID NO: 2074808 - RNA, 19 nt, Artificial Sequence
  Description of Artificial Sequence: Synthetic oligonucleotide
  Sense strand starting at position 3415 of SEQ ID NO: 1881833
uuccaaagauucgcuaacu

SEQ ID NO: 2074809 - RNA, 19 nt, Artificial Sequence
  Description of Artificial Sequence: Synthetic oligonucleotide
  Antisense strand to SEQ ID NO: 2074808
aguuagcgaaucuuuggaa

SEQ ID NO: 2074810 - RNA, 19 nt, Artificial Sequence
  Description of Artificial Sequence: Synthetic oligonucleotide
  Sense strand starting at position 3760 of SEQ ID NO: 1881833
ucguaaagcccauauggaa

SEQ ID NO: 2074811 - RNA, 19 nt, Artificial Sequence
  Description of Artificial Sequence: Synthetic oligonucleotide
  Antisense strand to SEQ ID NO: 2074810
uuccauaugggcuuuacga

SEQ ID NO: 2074812 - RNA, 19 nt, Artificial Sequence
  Description of Artificial Sequence: Synthetic oligonucleotide
  Sense strand starting at position 110 of SEQ ID NO: 1881832
agaggagaguccuuccaug

SEQ ID NO: 2074813 - RNA, 19 nt, Artificial Sequence
  Description of Artificial Sequence: Synthetic oligonucleotide
  Antisense strand to SEQ ID NO: 2074812
cauggaaggacucuccucu

SEQ ID NO: 2074814 - RNA, 19 nt, Artificial Sequence
  Description of Artificial Sequence: Synthetic oligonucleotide
  Sense strand starting at position 203 of SEQ ID NO: 1881832
auggcaaucccuggauaaa

SEQ ID NO: 2074815 - RNA, 19 nt, Artificial Sequence
  Description of Artificial Sequence: Synthetic oligonucleotide
  Antisense strand to SEQ ID NO: 2074814
uuuauccagggauugccau

SEQ ID NO: 2074816 - RNA, 19 nt, Artificial Sequence
  Description of Artificial Sequence: Synthetic oligonucleotide
  Sense strand starting at position 241 of SEQ ID NO: 1881832
augcaaauaguuuacugua

SEQ ID NO: 2074817 - RNA, 19 nt, Artificial Sequence
  Description of Artificial Sequence: Synthetic oligonucleotide
  Antisense strand to SEQ ID NO: 2074816
uacaguaaacuauuugcau

SEQ ID NO: 2074818 - RNA, 19 nt, Artificial Sequence
  Description of Artificial Sequence: Synthetic oligonucleotide
  Sense strand starting at position 271 of SEQ ID NO: 1881832
ccgugagaugugcauucau

SEQ ID NO: 2074819 - RNA, 19 nt, Artificial Sequence
  Description of Artificial Sequence: Synthetic oligonucleotide
  Antisense strand to SEQ ID NO: 2074818
augaaugcacaucucacgg

SEQ ID NO: 2074820 - RNA, 19 nt, Artificial Sequence
  Description of Artificial Sequence: Synthetic oligonucleotide
  Sense strand starting at position 343 of SEQ ID NO: 1881832
accugauugcuguaaagug

SEQ ID NO: 2074821 - RNA, 19 nt, Artificial Sequence
  Description of Artificial Sequence: Synthetic oligonucleotide
  Antisense strand to SEQ ID NO: 2074820
cacuuuacagcaaucaggu

SEQ ID NO: 2074822 - RNA, 19 nt, Artificial Sequence
  Description of Artificial Sequence: Synthetic oligonucleotide
  Sense strand starting at position 527 of SEQ ID NO: 1881832
ugguuuaauuaugcugacu

SEQ ID NO: 2074823 - RNA, 19 nt, Artificial Sequence
  Description of Artificial Sequence: Synthetic oligonucleotide
  Antisense strand to SEQ ID NO: 2074822
agucagcauaauuaaacca

SEQ ID NO: 2074824 - RNA, 19 nt, Artificial Sequence
  Description of Artificial Sequence: Synthetic oligonucleotide
  Sense strand starting at position 794 of SEQ ID NO: 1881832
gcggguacauuugcaagau

SEQ ID NO: 2074825 - RNA, 19 nt, Artificial Sequence
  Description of Artificial Sequence: Synthetic oligonucleotide
  Antisense strand to SEQ ID NO: 2074824
aucuugcaaauguacccgc

SEQ ID NO: 2074826 - RNA, 19 nt, Artificial Sequence
  Description of Artificial Sequence: Synthetic oligonucleotide
  Sense strand starting at position 834 of SEQ ID NO: 1881832
caaauacauugcccgaguu

SEQ ID NO: 2074827 - RNA, 19 nt, Artificial Sequence
  Description of Artificial Sequence: Synthetic oligonucleotide
  Antisense strand to SEQ ID NO: 2074826
aacucgggcaauguauuug

SEQ ID NO: 2074828 - RNA, 19 nt, Artificial Sequence
  Description of Artificial Sequence: Synthetic oligonucleotide
  Sense strand starting at position 863 of SEQ ID NO: 1881832
uggguuccugcagauaauu

SEQ ID NO: 2074829 - RNA, 19 nt, Artificial Sequence
  Description of Artificial Sequence: Synthetic oligonucleotide
  Antisense strand to SEQ ID NO: 2074828
aauuaucugcaggaaccca

SEQ ID NO: 2074830 - RNA, 19 nt, Artificial Sequence
  Description of Artificial Sequence: Synthetic oligonucleotide
  Sense strand starting at position 918 of SEQ ID NO: 1881832
gggucuagacucuaagcaa

SEQ ID NO: 2074831 - RNA, 19 nt, Artificial Sequence
  Description of Artificial Sequence: Synthetic oligonucleotide
  Antisense strand to SEQ ID NO: 2074830
uugcuuagagucuagaccc

SEQ ID NO: 2074832 - RNA, 19 nt, Artificial Sequence
  Description of Artificial Sequence: Synthetic oligonucleotide
  Sense strand starting at position 1040 of SEQ ID NO: 1881832
uugggauaacccuguaaag

SEQ ID NO: 2074833 - RNA, 19 nt, Artificial Sequence
  Description of Artificial Sequence: Synthetic oligonucleotide
  Antisense strand to SEQ ID NO: 2074832
cuuuacaggguuaucccaa

SEQ ID NO: 2074834 - RNA, 19 nt, Artificial Sequence
  Description of Artificial Sequence: Synthetic oligonucleotide
  Sense strand starting at position 1229 of SEQ ID NO: 1881832
ugcgaauucgaauacagaa

SEQ ID NO: 2074835 - RNA, 19 nt, Artificial Sequence
  Description of Artificial Sequence: Synthetic oligonucleotide
  Antisense strand to SEQ ID NO: 2074834
uucuguauucgaauucgca

SEQ ID NO: 2074836 - RNA, 19 nt, Artificial Sequence
  Description of Artificial Sequence: Synthetic oligonucleotide
  Sense strand starting at position 1355 of SEQ ID NO: 1881832
acgcgaagauuuccuggca

SEQ ID NO: 2074837 - RNA, 19 nt, Artificial Sequence
  Description of Artificial Sequence: Synthetic oligonucleotide
  Antisense strand to SEQ ID NO: 2074836
ugccaggaaaucuucgcgu

SEQ ID NO: 2074838 - RNA, 19 nt, Artificial Sequence
  Description of Artificial Sequence: Synthetic oligonucleotide
  Sense strand starting at position 1356 of SEQ ID NO: 1881832
cgcgaagauuuccuggcau

SEQ ID NO: 2074839 - RNA, 19 nt, Artificial Sequence
  Description of Artificial Sequence: Synthetic oligonucleotide
  Antisense strand to SEQ ID NO: 2074838
augccaggaaaucuucgcg

SEQ ID NO: 2074840 - RNA, 19 nt, Artificial Sequence
  Description of Artificial Sequence: Synthetic oligonucleotide
  Sense strand starting at position 1431 of SEQ ID NO: 1881832
ucacgagaucaacagguuu

SEQ ID NO: 2074841 - RNA, 19 nt, Artificial Sequence
  Description of Artificial Sequence: Synthetic oligonucleotide
  Antisense strand to SEQ ID NO: 2074840
aaaccuguugaucucguga

SEQ ID NO: 2074842 - RNA, 19 nt, Artificial Sequence
  Description of Artificial Sequence: Synthetic oligonucleotide
  Sense strand starting at position 1433 of SEQ ID NO: 1881832
acgagaucaacagguuuaa

SEQ ID NO: 2074843 - RNA, 19 nt, Artificial Sequence
  Description of Artificial Sequence: Synthetic oligonucleotide
  Antisense strand to SEQ ID NO: 2074842
uuaaaccuguugaucucgu

SEQ ID NO: 2074844 - RNA, 19 nt, Artificial Sequence
  Description of Artificial Sequence: Synthetic oligonucleotide
  Sense strand starting at position 1444 of SEQ ID NO: 1881832
agguuuaacauccgaggca

SEQ ID NO: 2074845 - RNA, 19 nt, Artificial Sequence
  Description of Artificial Sequence: Synthetic oligonucleotide
  Antisense strand to SEQ ID NO: 2074844
ugccucggauguuaaaccu

SEQ ID NO: 2074846 - RNA, 19 nt, Artificial Sequence
  Description of Artificial Sequence: Synthetic oligonucleotide
  Sense strand starting at position 1624 of SEQ ID NO: 1881832
ccacgauacucacuugauc

SEQ ID NO: 2074847 - RNA, 19 nt, Artificial Sequence
  Description of Artificial Sequence: Synthetic oligonucleotide
  Antisense strand to SEQ ID NO: 2074846
gaucaagugaguaucgugg

SEQ ID NO: 2074848 - RNA, 19 nt, Artificial Sequence
  Description of Artificial Sequence: Synthetic oligonucleotide
  Sense strand starting at position 1834 of SEQ ID NO: 1881832
ucaauuccacauggugauu

SEQ ID NO: 2074849 - RNA, 19 nt, Artificial Sequence
  Description of Artificial Sequence: Synthetic oligonucleotide
  Antisense strand to SEQ ID NO: 2074848
aaucaccauguggaauuga

SEQ ID NO: 2074850 - RNA, 19 nt, Artificial Sequence
  Description of Artificial Sequence: Synthetic oligonucleotide
  Sense strand starting at position 1845 of SEQ ID NO: 1881832
uggugauucuugguugauu

SEQ ID NO: 2074851 - RNA, 19 nt, Artificial Sequence
  Description of Artificial Sequence: Synthetic oligonucleotide
  Antisense strand to SEQ ID NO: 2074850
aaucaaccaagaaucacca

SEQ ID NO: 2074852 - RNA, 19 nt, Artificial Sequence
  Description of Artificial Sequence: Synthetic oligonucleotide
  Sense strand starting at position 1846 of SEQ ID NO: 1881832
ggugauucuugguugauug

SEQ ID NO: 2074853 - RNA, 19 nt, Artificial Sequence
  Description of Artificial Sequence: Synthetic oligonucleotide
  Antisense strand to SEQ ID NO: 2074852
caaucaaccaagaaucacc

SEQ ID NO: 2074854 - RNA, 19 nt, Artificial Sequence
  Description of Artificial Sequence: Synthetic oligonucleotide
  Sense strand starting at position 2071 of SEQ ID NO: 1881832
gaggacgugcucugaaacu

SEQ ID NO: 2074855 - RNA, 19 nt, Artificial Sequence
  Description of Artificial Sequence: Synthetic oligonucleotide
  Antisense strand to SEQ ID NO: 2074854
aguuucagagcacguccuc

SEQ ID NO: 2074856 - RNA, 19 nt, Artificial Sequence
  Description of Artificial Sequence: Synthetic oligonucleotide
  Sense strand starting at position 2182 of SEQ ID NO: 1881832
ugcguugccagagauaaug

SEQ ID NO: 2074857 - RNA, 19 nt, Artificial Sequence
  Description of Artificial Sequence: Synthetic oligonucleotide
  Antisense strand to SEQ ID NO: 2074856
cauuaucucuggcaacgca

SEQ ID NO: 2074858 - RNA, 19 nt, Artificial Sequence
  Description of Artificial Sequence: Synthetic oligonucleotide
  Sense strand starting at position 2184 of SEQ ID NO: 1881832
cguugccagagauaaugaa

SEQ ID NO: 2074859 - RNA, 19 nt, Artificial Sequence
  Description of Artificial Sequence: Synthetic oligonucleotide
  Antisense strand to SEQ ID NO: 2074858
uucauuaucucuggcaacg

SEQ ID NO: 2074860 - RNA, 19 nt, Artificial Sequence
  Description of Artificial Sequence: Synthetic oligonucleotide
  Sense strand starting at position 2251 of SEQ ID NO: 1881832
agaaaugucucgucugaag

SEQ ID NO: 2074861 - RNA, 19 nt, Artificial Sequence
  Description of Artificial Sequence: Synthetic oligonucleotide
  Antisense strand to SEQ ID NO: 2074860
cuucagacgagacauuucu

SEQ ID NO: 2074862 - RNA, 19 nt, Artificial Sequence
  Description of Artificial Sequence: Synthetic oligonucleotide
  Sense strand starting at position 2253 of SEQ ID NO: 1881832
aaaugucucgucugaagga

SEQ ID NO: 2074863 - RNA, 19 nt, Artificial Sequence
  Description of Artificial Sequence: Synthetic oligonucleotide
  Antisense strand to SEQ ID NO: 2074862
uccuucagacgagacauuu

SEQ ID NO: 2074864 - RNA, 19 nt, Artificial Sequence
  Description of Artificial Sequence: Synthetic oligonucleotide
  Sense strand starting at position 2399 of SEQ ID NO: 1881832
cucucuugguuucuuaaga

SEQ ID NO: 2074865 - RNA, 19 nt, Artificial Sequence
  Description of Artificial Sequence: Synthetic oligonucleotide
  Antisense strand to SEQ ID NO: 2074864
ucuuaagaaaccaagagag

SEQ ID NO: 2074866 - RNA, 19 nt, Artificial Sequence
  Description of Artificial Sequence: Synthetic oligonucleotide
  Sense strand starting at position 2400 of SEQ ID NO: 1881832
ucucuugguuucuuaagau

SEQ ID NO: 2074867 - RNA, 19 nt, Artificial Sequence
  Description of Artificial Sequence: Synthetic oligonucleotide
  Antisense strand to SEQ ID NO: 2074866
aucuuaagaaaccaagaga

SEQ ID NO: 2074868 - RNA, 19 nt, Artificial Sequence
  Description of Artificial Sequence: Synthetic oligonucleotide
  Sense strand starting at position 2479 of SEQ ID NO: 1881832
acuugugagucuuccuaac

SEQ ID NO: 2074869 - RNA, 19 nt, Artificial Sequence
  Description of Artificial Sequence: Synthetic oligonucleotide
  Antisense strand to SEQ ID NO: 2074868
guuaggaagacucacaagu

SEQ ID NO: 2074870 - RNA, 19 nt, Artificial Sequence
  Description of Artificial Sequence: Synthetic oligonucleotide
  Sense strand starting at position 2481 of SEQ ID NO: 1881832
uugugagucuuccuaaccu

SEQ ID NO: 2074871 - RNA, 19 nt, Artificial Sequence
  Description of Artificial Sequence: Synthetic oligonucleotide
  Antisense strand to SEQ ID NO: 2074870
agguuaggaagacucacaa

SEQ ID NO: 2074872 - RNA, 19 nt, Artificial Sequence
  Description of Artificial Sequence: Synthetic oligonucleotide
  Sense strand starting at position 2639 of SEQ ID NO: 1881832
guuugugucgugguuguua

SEQ ID NO: 2074873 - RNA, 19 nt, Artificial Sequence
  Description of Artificial Sequence: Synthetic oligonucleotide
  Antisense strand to SEQ ID NO: 2074872
uaacaaccacgacacaaac

SEQ ID NO: 2074874 - RNA, 19 nt, Artificial Sequence
  Description of Artificial Sequence: Synthetic oligonucleotide
  Sense strand starting at position 2642 of SEQ ID NO: 1881832
ugugucgugguuguuaaau

SEQ ID NO: 2074875 - RNA, 19 nt, Artificial Sequence
  Description of Artificial Sequence: Synthetic oligonucleotide
  Antisense strand to SEQ ID NO: 2074874
auuuaacaaccacgacaca

SEQ ID NO: 2074876 - RNA, 19 nt, Artificial Sequence
  Description of Artificial Sequence: Synthetic oligonucleotide
  Sense strand starting at position 2647 of SEQ ID NO: 1881832
cgugguuguuaaauguguu

SEQ ID NO: 2074877 - RNA, 19 nt, Artificial Sequence
  Description of Artificial Sequence: Synthetic oligonucleotide
  Antisense strand to SEQ ID NO: 2074876
aacacauuuaacaaccacg

SEQ ID NO: 2074878 - RNA, 19 nt, Artificial Sequence
  Description of Artificial Sequence: Synthetic oligonucleotide
  Sense strand starting at position 2654 of SEQ ID NO: 1881832
guuaaauguguuuagcuaa

SEQ ID NO: 2074879 - RNA, 19 nt, Artificial Sequence
  Description of Artificial Sequence: Synthetic oligonucleotide
  Antisense strand to SEQ ID NO: 2074878
uuagcuaaacacauuuaac

SEQ ID NO: 2074880 - RNA, 19 nt, Artificial Sequence
  Description of Artificial Sequence: Synthetic oligonucleotide
  Sense strand starting at position 2657 of SEQ ID NO: 1881832
aaauguguuuagcuaaaga

SEQ ID NO: 2074881 - RNA, 19 nt, Artificial Sequence
  Description of Artificial Sequence: Synthetic oligonucleotide
  Antisense strand to SEQ ID NO: 2074880
ucuuuagcuaaacacauuu

SEQ ID NO: 2074882 - RNA, 19 nt, Artificial Sequence
  Description of Artificial Sequence: Synthetic oligonucleotide
  Sense strand starting at position 2753 of SEQ ID NO: 1881832
ucaucuauuugaggaggaa

SEQ ID NO: 2074883 - RNA, 19 nt, Artificial Sequence
  Description of Artificial Sequence: Synthetic oligonucleotide
  Antisense strand to SEQ ID NO: 2074882
uuccuccucaaauagauga

SEQ ID NO: 2074884 - RNA, 19 nt, Artificial Sequence
  Description of Artificial Sequence: Synthetic oligonucleotide
  Sense strand starting at position 2921 of SEQ ID NO: 1881832
gugggcuuccugcaacaca

SEQ ID NO: 2074885 - RNA, 19 nt, Artificial Sequence
  Description of Artificial Sequence: Synthetic oligonucleotide
  Antisense strand to SEQ ID NO: 2074884
uguguugcaggaagcccac

SEQ ID NO: 2074886 - RNA, 19 nt, Artificial Sequence
  Description of Artificial Sequence: Synthetic oligonucleotide
  Sense strand starting at position 3448 of SEQ ID NO: 1881832
cggagaagucgccaccaca

SEQ ID NO: 2074887 - RNA, 19 nt, Artificial Sequence
  Description of Artificial Sequence: Synthetic oligonucleotide
  Antisense strand to SEQ ID NO: 2074886
ugugguggcgacuucuccg

SEQ ID NO: 2074888 - RNA, 19 nt, Artificial Sequence
  Description of Artificial Sequence: Synthetic oligonucleotide
  Sense strand starting at position 3898 of SEQ ID NO: 1881832
gauggcuccgcagaugagu

SEQ ID NO: 2074889 - RNA, 19 nt, Artificial Sequence
  Description of Artificial Sequence: Synthetic oligonucleotide
  Antisense strand to SEQ ID NO: 2074888
acucaucugcggagccauc

SEQ ID NO: 2074890 - RNA, 19 nt, Artificial Sequence
  Description of Artificial Sequence: Synthetic oligonucleotide
  Sense strand starting at position 3931 of SEQ ID NO: 1881832
uggaaagacugaucucucu

SEQ ID NO: 2074891 - RNA, 19 nt, Artificial Sequence
  Description of Artificial Sequence: Synthetic oligonucleotide
  Antisense strand to SEQ ID NO: 2074890
agagagaucagucuuucca

SEQ ID NO: 2074892 - RNA, 19 nt, Artificial Sequence
  Description of Artificial Sequence: Synthetic oligonucleotide
  Sense strand starting at position 314 of SEQ ID NO: 1881835
uccagaaucuuggugcacu

SEQ ID NO: 2074893 - RNA, 19 nt, Artificial Sequence
  Description of Artificial Sequence: Synthetic oligonucleotide
  Antisense strand to SEQ ID NO: 2074892
agugcaccaagauucugga

SEQ ID NO: 2074894 - RNA, 19 nt, Artificial Sequence
  Description of Artificial Sequence: Synthetic oligonucleotide
  Sense strand starting at position 325 of SEQ ID NO: 1881835
ggugcacuacuuuauguau

SEQ ID NO: 2074895 - RNA, 19 nt, Artificial Sequence
  Description of Artificial Sequence: Synthetic oligonucleotide
  Antisense strand to SEQ ID NO: 2074894
auacauaaaguagugcacc

SEQ ID NO: 2074896 - RNA, 19 nt, Artificial Sequence
  Description of Artificial Sequence: Synthetic oligonucleotide
  Sense strand starting at position 533 of SEQ ID NO: 1881835
ccuacauacuuggcaaaga

SEQ ID NO: 2074897 - RNA, 19 nt, Artificial Sequence
  Description of Artificial Sequence: Synthetic oligonucleotide
  Antisense strand to SEQ ID NO: 2074896
ucuuugccaaguauguagg

SEQ ID NO: 2074898 - RNA, 19 nt, Artificial Sequence
  Description of Artificial Sequence: Synthetic oligonucleotide
  Sense strand starting at position 534 of SEQ ID NO: 1881835
cuacauacuuggcaaagau

SEQ ID NO: 2074899 - RNA, 19 nt, Artificial Sequence
  Description of Artificial Sequence: Synthetic oligonucleotide
  Antisense strand to SEQ ID NO: 2074898
aucuuugccaaguauguag

SEQ ID NO: 2074900 - RNA, 19 nt, Artificial Sequence
  Description of Artificial Sequence: Synthetic oligonucleotide
  Sense strand starting at position 595 of SEQ ID NO: 1881835
uuuguaaugugacuucuca

SEQ ID NO: 2074901 - RNA, 19 nt, Artificial Sequence
  Description of Artificial Sequence: Synthetic oligonucleotide
  Antisense strand to SEQ ID NO: 2074900
ugagaagucacauuacaaa

SEQ ID NO: 2074902 - RNA, 19 nt, Artificial Sequence
  Description of Artificial Sequence: Synthetic oligonucleotide
  Sense strand starting at position 599 of SEQ ID NO: 1881835
uaaugugacuucucaguag

SEQ ID NO: 2074903 - RNA, 19 nt, Artificial Sequence
  Description of Artificial Sequence: Synthetic oligonucleotide
  Antisense strand to SEQ ID NO: 2074902
cuacugagaagucacauua

SEQ ID NO: 2074904 - RNA, 19 nt, Artificial Sequence
  Description of Artificial Sequence: Synthetic oligonucleotide
  Sense strand starting at position 602 of SEQ ID NO: 1881835
ugugacuucucaguaguac

SEQ ID NO: 2074905 - RNA, 19 nt, Artificial Sequence
  Description of Artificial Sequence: Synthetic oligonucleotide
  Antisense strand to SEQ ID NO: 2074904
guacuacugagaagucaca

SEQ ID NO: 2074906 - RNA, 19 nt, Artificial Sequence
  Description of Artificial Sequence: Synthetic oligonucleotide
  Sense strand starting at position 603 of SEQ ID NO: 1881835
gugacuucucaguaguaca

SEQ ID NO: 2074907 - RNA, 19 nt, Artificial Sequence
  Description of Artificial Sequence: Synthetic oligonucleotide
  Antisense strand to SEQ ID NO: 2074906
uguacuacugagaagucac

SEQ ID NO: 2074908 - RNA, 19 nt, Artificial Sequence
  Description of Artificial Sequence: Synthetic oligonucleotide
  Sense strand starting at position 623 of SEQ ID NO: 1881835
gcaagaguaccaugaccca

SEQ ID NO: 2074909 - RNA, 19 nt, Artificial Sequence
  Description of Artificial Sequence: Synthetic oligonucleotide
  Antisense strand to SEQ ID NO: 2074908
ugggucaugguacucuugc

SEQ ID NO: 2074910 - RNA, 19 nt, Artificial Sequence
  Description of Artificial Sequence: Synthetic oligonucleotide
  Sense strand starting at position 662 of SEQ ID NO: 1881835
uaaguaaauugccagaagu

SEQ ID NO: 2074911 - RNA, 19 nt, Artificial Sequence
  Description of Artificial Sequence: Synthetic oligonucleotide
  Antisense strand to SEQ ID NO: 2074910
acuucuggcaauuuacuua

SEQ ID NO: 2074912 - RNA, 19 nt, Artificial Sequence
  Description of Artificial Sequence: Synthetic oligonucleotide
  Sense strand starting at position 664 of SEQ ID NO: 1881835
aguaaauugccagaaguua

SEQ ID NO: 2074913 - RNA, 19 nt, Artificial Sequence
  Description of Artificial Sequence: Synthetic oligonucleotide
  Antisense strand to SEQ ID NO: 2074912
uaacuucuggcaauuuacu

SEQ ID NO: 2074914 - RNA, 19 nt, Artificial Sequence
  Description of Artificial Sequence: Synthetic oligonucleotide
  Sense strand starting at position 764 of SEQ ID NO: 1881835
ccuggacuuugucacaaca

SEQ ID NO: 2074915 - RNA, 19 nt, Artificial Sequence
  Description of Artificial Sequence: Synthetic oligonucleotide
  Antisense strand to SEQ ID NO: 2074914
uguugugacaaaguccagg

SEQ ID NO: 2074916 - RNA, 19 nt, Artificial Sequence
  Description of Artificial Sequence: Synthetic oligonucleotide
  Sense strand starting at position 813 of SEQ ID NO: 1881835
uuugauucugguggugauu

SEQ ID NO: 2074917 - RNA, 19 nt, Artificial Sequence
  Description of Artificial Sequence: Synthetic oligonucleotide
  Antisense strand to SEQ ID NO: 2074916
aaucaccaccagaaucaaa

SEQ ID NO: 2074918 - RNA, 19 nt, Artificial Sequence
  Description of Artificial Sequence: Synthetic oligonucleotide
  Sense strand starting at position 815 of SEQ ID NO: 1881835
ugauucugguggugauuua

SEQ ID NO: 2074919 - RNA, 19 nt, Artificial Sequence
  Description of Artificial Sequence: Synthetic oligonucleotide
  Antisense strand to SEQ ID NO: 2074918
uaaaucaccaccagaauca

SEQ ID NO: 2074920 - RNA, 19 nt, Artificial Sequence
  Description of Artificial Sequence: Synthetic oligonucleotide
  Sense strand starting at position 846 of SEQ ID NO: 1881835
ggaguucucagccaucuag

SEQ ID NO: 2074921 - RNA, 19 nt, Artificial Sequence
  Description of Artificial Sequence: Synthetic oligonucleotide
  Antisense strand to SEQ ID NO: 2074920
cuagauggcugagaacucc

SEQ ID NO: 2074922 - RNA, 19 nt, Artificial Sequence
  Description of Artificial Sequence: Synthetic oligonucleotide
  Sense strand starting at position 1009 of SEQ ID NO: 1881835
uugagaccgccugauuaau

SEQ ID NO: 2074923 - RNA, 19 nt, Artificial Sequence
  Description of Artificial Sequence: Synthetic oligonucleotide
  Antisense strand to SEQ ID NO: 2074922
auuaaucaggcggucucaa

SEQ ID NO: 2074924 - RNA, 19 nt, Artificial Sequence
  Description of Artificial Sequence: Synthetic oligonucleotide
  Sense strand starting at position 1011 of SEQ ID NO: 1881835
gagaccgccugauuaaucu

SEQ ID NO: 2074925 - RNA, 19 nt, Artificial Sequence
  Description of Artificial Sequence: Synthetic oligonucleotide
  Antisense strand to SEQ ID NO: 2074924
agauuaaucaggcggucuc

SEQ ID NO: 2074926 - RNA, 19 nt, Artificial Sequence
  Description of Artificial Sequence: Synthetic oligonucleotide
  Sense strand starting at position 1015 of SEQ ID NO: 1881835
ccgccugauuaaucuugca

SEQ ID NO: 2074927 - RNA, 19 nt, Artificial Sequence
  Description of Artificial Sequence: Synthetic oligonucleotide
  Antisense strand to SEQ ID NO: 2074926
ugcaagauuaaucaggcgg

SEQ ID NO: 2074928 - RNA, 19 nt, Artificial Sequence
  Description of Artificial Sequence: Synthetic oligonucleotide
  Sense strand starting at position 1139 of SEQ ID NO: 1881835
aacccaggugugggauauu

SEQ ID NO: 2074929 - RNA, 19 nt, Artificial Sequence
  Description of Artificial Sequence: Synthetic oligonucleotide
  Antisense strand to SEQ ID NO: 2074928
aauaucccacaccuggguu

SEQ ID NO: 2074930 - RNA, 19 nt, Artificial Sequence
  Description of Artificial Sequence: Synthetic oligonucleotide
  Sense strand starting at position 1196 of SEQ ID NO: 1881835
ccuccuguauccgcaaaua

SEQ ID NO: 2074931 - RNA, 19 nt, Artificial Sequence
  Description of Artificial Sequence: Synthetic oligonucleotide
  Antisense strand to SEQ ID NO: 2074930
uauuugcggauacaggagg

SEQ ID NO: 2074932 - RNA, 19 nt, Artificial Sequence
  Description of Artificial Sequence: Synthetic oligonucleotide
  Sense strand starting at position 1209 of SEQ ID NO: 1881835
caaauaaguuauuggcaga

SEQ ID NO: 2074933 - RNA, 19 nt, Artificial Sequence
  Description of Artificial Sequence: Synthetic oligonucleotide
  Antisense strand to SEQ ID NO: 2074932
ucugccaauaacuuauuug

SEQ ID NO: 2074934 - RNA, 19 nt, Artificial Sequence
  Description of Artificial Sequence: Synthetic oligonucleotide
  Sense strand starting at position 1212 of SEQ ID NO: 1881835
auaaguuauuggcagaaag

SEQ ID NO: 2074935 - RNA, 19 nt, Artificial Sequence
  Description of Artificial Sequence: Synthetic oligonucleotide
  Antisense strand to SEQ ID NO: 2074934
cuuucugccaauaacuuau

SEQ ID NO: 2074936 - RNA, 19 nt, Artificial Sequence
  Description of Artificial Sequence: Synthetic oligonucleotide
  Sense strand starting at position 1231 of SEQ ID NO: 1881835
gcauuaacgugacuuacaa

SEQ ID NO: 2074937 - RNA, 19 nt, Artificial Sequence
  Description of Artificial Sequence: Synthetic oligonucleotide
  Antisense strand to SEQ ID NO: 2074936
uuguaagucacguuaaugc

SEQ ID NO: 2074938 - RNA, 19 nt, Artificial Sequence
  Description of Artificial Sequence: Synthetic oligonucleotide
  Sense strand starting at position 1313 of SEQ ID NO: 1881835
ugaagaauacauuguguuc

SEQ ID NO: 2074939 - RNA, 19 nt, Artificial Sequence
  Description of Artificial Sequence: Synthetic oligonucleotide
  Antisense strand to SEQ ID NO: 2074938
gaacacaauguauucuuca

SEQ ID NO: 2074940 - RNA, 19 nt, Artificial Sequence
  Description of Artificial Sequence: Synthetic oligonucleotide
  Sense strand starting at position 1324 of SEQ ID NO: 1881835
uuguguucuuccuuggaag

SEQ ID NO: 2074941 - RNA, 19 nt, Artificial Sequence
  Description of Artificial Sequence: Synthetic oligonucleotide
  Antisense strand to SEQ ID NO: 2074940
cuuccaaggaagaacacaa

SEQ ID NO: 2074942 - RNA, 19 nt, Artificial Sequence
  Description of Artificial Sequence: Synthetic oligonucleotide
  Sense strand starting at position 1378 of SEQ ID NO: 1881835
cguagugugcauccauguu

SEQ ID NO: 2074943 - RNA, 19 nt, Artificial Sequence
  Description of Artificial Sequence: Synthetic oligonucleotide
  Antisense strand to SEQ ID NO: 2074942
aacauggaugcacacuacg

SEQ ID NO: 2074944 - RNA, 19 nt, Artificial Sequence
  Description of Artificial Sequence: Synthetic oligonucleotide
  Sense strand starting at position 1390 of SEQ ID NO: 1881835
ccauguuaccuuggaaauu

SEQ ID NO: 2074945 - RNA, 19 nt, Artificial Sequence
  Description of Artificial Sequence: Synthetic oligonucleotide
  Antisense strand to SEQ ID NO: 2074944
aauuuccaagguaacaugg

SEQ ID NO: 2074946 - RNA, 19 nt, Artificial Sequence
  Description of Artificial Sequence: Synthetic oligonucleotide
  Sense strand starting at position 1399 of SEQ ID NO: 1881835
cuuggaaauuauugaaugu

SEQ ID NO: 2074947 - RNA, 19 nt, Artificial Sequence
  Description of Artificial Sequence: Synthetic oligonucleotide
  Antisense strand to SEQ ID NO: 2074946
acauucaauaauuuccaag

SEQ ID NO: 2074948 - RNA, 19 nt, Artificial Sequence
  Description of Artificial Sequence: Synthetic oligonucleotide
  Sense strand starting at position 1403 of SEQ ID NO: 1881835
gaaauuauugaaugugcuu

SEQ ID NO: 2074949 - RNA, 19 nt, Artificial Sequence
  Description of Artificial Sequence: Synthetic oligonucleotide
  Antisense strand to SEQ ID NO: 2074948
aagcacauucaauaauuuc

SEQ ID NO: 2074950 - RNA, 19 nt, Artificial Sequence
  Description of Artificial Sequence: Synthetic oligonucleotide
  Sense strand starting at position 1427 of SEQ ID NO: 1881835
cgaguuuccuuuccuuuga

SEQ ID NO: 2074951 - RNA, 19 nt, Artificial Sequence
  Description of Artificial Sequence: Synthetic oligonucleotide
  Antisense strand to SEQ ID NO: 2074950
ucaaaggaaaggaaacucg

SEQ ID NO: 2074952 - RNA, 19 nt, Artificial Sequence
  Description of Artificial Sequence: Synthetic oligonucleotide
  Sense strand starting at position 1464 of SEQ ID NO: 1881835
uguuacuuuccauagacua

SEQ ID NO: 2074953 - RNA, 19 nt, Artificial Sequence
  Description of Artificial Sequence: Synthetic oligonucleotide
  Antisense strand to SEQ ID NO: 2074952
uagucuauggaaaguaaca

SEQ ID NO: 2074954 - RNA, 19 nt, Artificial Sequence
  Description of Artificial Sequence: Synthetic oligonucleotide
  Sense strand starting at position 1472 of SEQ ID NO: 1881835
uccauagacuacuaaggau

SEQ ID NO: 2074955 - RNA, 19 nt, Artificial Sequence
  Description of Artificial Sequence: Synthetic oligonucleotide
  Antisense strand to SEQ ID NO: 2074954
auccuuaguagucuaugga

SEQ ID NO: 2074956 - RNA, 19 nt, Artificial Sequence
  Description of Artificial Sequence: Synthetic oligonucleotide
  Sense strand starting at position 1684 of SEQ ID NO: 1881835
aaaugaaacuucugugguc

SEQ ID NO: 2074957 - RNA, 19 nt, Artificial Sequence
  Description of Artificial Sequence: Synthetic oligonucleotide
  Antisense strand to SEQ ID NO: 2074956
gaccacagaaguuucauuu

SEQ ID NO: 2074958 - RNA, 19 nt, Artificial Sequence
  Description of Artificial Sequence: Synthetic oligonucleotide
  Sense strand starting at position 1685 of SEQ ID NO: 1881835
aaugaaacuucuguggucu

SEQ ID NO: 2074959 - RNA, 19 nt, Artificial Sequence
  Description of Artificial Sequence: Synthetic oligonucleotide
  Antisense strand to SEQ ID NO: 2074958
agaccacagaaguuucauu

SEQ ID NO: 2074960 - RNA, 19 nt, Artificial Sequence
  Description of Artificial Sequence: Synthetic oligonucleotide
  Sense strand starting at position 1689 of SEQ ID NO: 1881835
aaacuucuguggucugaau

SEQ ID NO: 2074961 - RNA, 19 nt, Artificial Sequence
  Description of Artificial Sequence: Synthetic oligonucleotide
  Antisense strand to SEQ ID NO: 2074960
auucagaccacagaaguuu

SEQ ID NO: 2074962 - RNA, 19 nt, Artificial Sequence
  Description of Artificial Sequence: Synthetic oligonucleotide
  Sense strand starting at position 1691 of SEQ ID NO: 1881835
acuucuguggucugaaugu

SEQ ID NO: 2074963 - RNA, 19 nt, Artificial Sequence
  Description of Artificial Sequence: Synthetic oligonucleotide
  Antisense strand to SEQ ID NO: 2074962
acauucagaccacagaagu

SEQ ID NO: 2074964 - RNA, 19 nt, Artificial Sequence
  Description of Artificial Sequence: Synthetic oligonucleotide
  Sense strand starting at position 1706 of SEQ ID NO: 1881835
auguuugugucuuuccaac

SEQ ID NO: 2074965 - RNA, 19 nt, Artificial Sequence
  Description of Artificial Sequence: Synthetic oligonucleotide
  Antisense strand to SEQ ID NO: 2074964
guuggaaagacacaaacau

SEQ ID NO: 2074966 - RNA, 19 nt, Artificial Sequence
  Description of Artificial Sequence: Synthetic oligonucleotide
  Sense strand starting at position 1708 of SEQ ID NO: 1881835
guuugugucuuuccaacac

SEQ ID NO: 2074967 - RNA, 19 nt, Artificial Sequence
  Description of Artificial Sequence: Synthetic oligonucleotide
  Antisense strand to SEQ ID NO: 2074966
guguuggaaagacacaaac

SEQ ID NO: 2074968 - RNA, 19 nt, Artificial Sequence
  Description of Artificial Sequence: Synthetic oligonucleotide
  Sense strand starting at position 1712 of SEQ ID NO: 1881835
gugucuuuccaacacucuu

SEQ ID NO: 2074969 - RNA, 19 nt, Artificial Sequence
  Description of Artificial Sequence: Synthetic oligonucleotide
  Antisense strand to SEQ ID NO: 2074968
aagaguguuggaaagacac

SEQ ID NO: 2074970 - RNA, 19 nt, Artificial Sequence
  Description of Artificial Sequence: Synthetic oligonucleotide
  Sense strand starting at position 2091 of SEQ ID NO: 1881835
acgagauuauauccuacac

SEQ ID NO: 2074971 - RNA, 19 nt, Artificial Sequence
  Description of Artificial Sequence: Synthetic oligonucleotide
  Antisense strand to SEQ ID NO: 2074970
guguaggauauaaucucgu

SEQ ID NO: 2074972 - RNA, 19 nt, Artificial Sequence
  Description of Artificial Sequence: Synthetic oligonucleotide
  Sense strand starting at position 100 of SEQ ID NO: 1881836
gguauacuugcuggaagau

SEQ ID NO: 2074973 - RNA, 19 nt, Artificial Sequence
  Description of Artificial Sequence: Synthetic oligonucleotide
  Antisense strand to SEQ ID NO: 2074972
aucuuccagcaaguauacc

SEQ ID NO: 2074974 - RNA, 19 nt, Artificial Sequence
  Description of Artificial Sequence: Synthetic oligonucleotide
  Sense strand starting at position 101 of SEQ ID NO: 1881836
guauacuugcuggaagauu

SEQ ID NO: 2074975 - RNA, 19 nt, Artificial Sequence
  Description of Artificial Sequence: Synthetic oligonucleotide
  Antisense strand to SEQ ID NO: 2074974
aaucuuccagcaaguauac

SEQ ID NO: 2074976 - RNA, 19 nt, Artificial Sequence
  Description of Artificial Sequence: Synthetic oligonucleotide
  Sense strand starting at position 158 of SEQ ID NO: 1881836
augagucugcuaugauaac

SEQ ID NO: 2074977 - RNA, 19 nt, Artificial Sequence
  Description of Artificial Sequence: Synthetic oligonucleotide
  Antisense strand to SEQ ID NO: 2074976
guuaucauagcagacucau

SEQ ID NO: 2074978 - RNA, 19 nt, Artificial Sequence
  Description of Artificial Sequence: Synthetic oligonucleotide
  Sense strand starting at position 283 of SEQ ID NO: 1881836
gagagaauuugucacacag

SEQ ID NO: 2074979 - RNA, 19 nt, Artificial Sequence
  Description of Artificial Sequence: Synthetic oligonucleotide
  Antisense strand to SEQ ID NO: 2074978
cugugugacaaauucucuc

SEQ ID NO: 2074980 - RNA, 19 nt, Artificial Sequence
  Description of Artificial Sequence: Synthetic oligonucleotide
  Sense strand starting at position 442 of SEQ ID NO: 1881836
gcccuuguaagagaagacu

SEQ ID NO: 2074981 - RNA, 19 nt, Artificial Sequence
  Description of Artificial Sequence: Synthetic oligonucleotide
  Antisense strand to SEQ ID NO: 2074980
agucuucucuuacaagggc

SEQ ID NO: 2074982 - RNA, 19 nt, Artificial Sequence
  Description of Artificial Sequence: Synthetic oligonucleotide
  Sense strand starting at position 479 of SEQ ID NO: 1881836
cugaaaugccaaugaacca

SEQ ID NO: 2074983 - RNA, 19 nt, Artificial Sequence
  Description of Artificial Sequence: Synthetic oligonucleotide
  Antisense strand to SEQ ID NO: 2074982
ugguucauuggcauuucag

SEQ ID NO: 2074984 - RNA, 19 nt, Artificial Sequence
  Description of Artificial Sequence: Synthetic oligonucleotide
  Sense strand starting at position 727 of SEQ ID NO: 1881836
uuagccuuugcugaccaaa

SEQ ID NO: 2074985 - RNA, 19 nt, Artificial Sequence
  Description of Artificial Sequence: Synthetic oligonucleotide
  Antisense strand to SEQ ID NO: 2074984
uuuggucagcaaaggcuaa

SEQ ID NO: 2074986 - RNA, 19 nt, Artificial Sequence
  Description of Artificial Sequence: Synthetic oligonucleotide
  Sense strand starting at position 836 of SEQ ID NO: 1881836
gaguuucucauguggacag

SEQ ID NO: 2074987 - RNA, 19 nt, Artificial Sequence
  Description of Artificial Sequence: Synthetic oligonucleotide
  Antisense strand to SEQ ID NO: 2074986
cuguccacaugagaaacuc

SEQ ID NO: 2074988 - RNA, 19 nt, Artificial Sequence
  Description of Artificial Sequence: Synthetic oligonucleotide
  Sense strand starting at position 838 of SEQ ID NO: 1881836
guuucucauguggacagua

SEQ ID NO: 2074989 - RNA, 19 nt, Artificial Sequence
  Description of Artificial Sequence: Synthetic oligonucleotide
  Antisense strand to SEQ ID NO: 2074988
uacuguccacaugagaaac

SEQ ID NO: 2074990 - RNA, 19 nt, Artificial Sequence
  Description of Artificial Sequence: Synthetic oligonucleotide
  Sense strand starting at position 955 of SEQ ID NO: 1881836
uguguuucucaagagcaag

SEQ ID NO: 2074991 - RNA, 19 nt, Artificial Sequence
  Description of Artificial Sequence: Synthetic oligonucleotide
  Antisense strand to SEQ ID NO: 2074990
cuugcucuugagaaacaca

SEQ ID NO: 2074992 - RNA, 19 nt, Artificial Sequence
  Description of Artificial Sequence: Synthetic oligonucleotide
  Sense strand starting at position 975 of SEQ ID NO: 1881836
gcuacauucuauuuguuua

SEQ ID NO: 2074993 - RNA, 19 nt, Artificial Sequence
  Description of Artificial Sequence: Synthetic oligonucleotide
  Antisense strand to SEQ ID NO: 2074992
uaaacaaauagaauguagc

SEQ ID NO: 2074994 - RNA, 19 nt, Artificial Sequence
  Description of Artificial Sequence: Synthetic oligonucleotide
  Sense strand starting at position 1079 of SEQ ID NO: 1881836
agauauugcuaaucaagcu

SEQ ID NO: 2074995 - RNA, 19 nt, Artificial Sequence
  Description of Artificial Sequence: Synthetic oligonucleotide
  Antisense strand to SEQ ID NO: 2074994
agcuugauuagcaauaucu

SEQ ID NO: 2074996 - RNA, 19 nt, Artificial Sequence
  Description of Artificial Sequence: Synthetic oligonucleotide
  Sense strand starting at position 1187 of SEQ ID NO: 1881836
agcucucaccgugagauau

SEQ ID NO: 2074997 - RNA, 19 nt, Artificial Sequence
  Description of Artificial Sequence: Synthetic oligonucleotide
  Antisense strand to SEQ ID NO: 2074996
auaucucacggugagagcu

SEQ ID NO: 2074998 - RNA, 19 nt, Artificial Sequence
  Description of Artificial Sequence: Synthetic oligonucleotide
  Sense strand starting at position 1210 of SEQ ID NO: 1881836
ggauaagauaugugaugcu

SEQ ID NO: 2074999 - RNA, 19 nt, Artificial Sequence
  Description of Artificial Sequence: Synthetic oligonucleotide
  Antisense strand to SEQ ID NO: 2074998
agcaucacauaucuuaucc

SEQ ID NO: 2075000 - RNA, 19 nt, Artificial Sequence
  Description of Artificial Sequence: Synthetic oligonucleotide
  Sense strand starting at position 1252 of SEQ ID NO: 1881836
agaaacugcuguucuuaaa

SEQ ID NO: 2075001 - RNA, 19 nt, Artificial Sequence
  Description of Artificial Sequence: Synthetic oligonucleotide
  Antisense strand to SEQ ID NO: 2075000
uuuaagaacagcaguuucu

SEQ ID NO: 2075002 - RNA, 19 nt, Artificial Sequence
  Description of Artificial Sequence: Synthetic oligonucleotide
  Sense strand starting at position 1415 of SEQ ID NO: 1881836
ccuacuuuggguuauguua

SEQ ID NO: 2075003 - RNA, 19 nt, Artificial Sequence
  Description of Artificial Sequence: Synthetic oligonucleotide
  Antisense strand to SEQ ID NO: 2075002
uaacauaacccaaaguagg

SEQ ID NO: 2075004 - RNA, 19 nt, Artificial Sequence
  Description of Artificial Sequence: Synthetic oligonucleotide
  Sense strand starting at position 1509 of SEQ ID NO: 1881836
uaauuaguacacgguugaa

SEQ ID NO: 2075005 - RNA, 19 nt, Artificial Sequence
  Description of Artificial Sequence: Synthetic oligonucleotide
  Antisense strand to SEQ ID NO: 2075004
uucaaccguguacuaauua

SEQ ID NO: 2075006 - RNA, 19 nt, Artificial Sequence
  Description of Artificial Sequence: Synthetic oligonucleotide
  Sense strand starting at position 1512 of SEQ ID NO: 1881836
uuaguacacgguugaaaug

SEQ ID NO: 2075007 - RNA, 19 nt, Artificial Sequence
  Description of Artificial Sequence: Synthetic oligonucleotide
  Antisense strand to SEQ ID NO: 2075006
cauuucaaccguguacuaa

SEQ ID NO: 2075008 - RNA, 19 nt, Artificial Sequence
  Description of Artificial Sequence: Synthetic oligonucleotide
  Sense strand starting at position 1688 of SEQ ID NO: 1881836
ucuauuuauugccuguaga

SEQ ID NO: 2075009 - RNA, 19 nt, Artificial Sequence
  Description of Artificial Sequence: Synthetic oligonucleotide
  Antisense strand to SEQ ID NO: 2075008
ucuacaggcaauaaauaga

SEQ ID NO: 2075010 - RNA, 19 nt, Artificial Sequence
  Description of Artificial Sequence: Synthetic oligonucleotide
  Sense strand starting at position 2118 of SEQ ID NO: 1881836
aggauacauucccuugauc

SEQ ID NO: 2075011 - RNA, 19 nt, Artificial Sequence
  Description of Artificial Sequence: Synthetic oligonucleotide
  Antisense strand to SEQ ID NO: 2075010
gaucaagggaauguauccu

SEQ ID NO: 2075012 - RNA, 19 nt, Artificial Sequence
  Description of Artificial Sequence: Synthetic oligonucleotide
  Sense strand starting at position 2246 of SEQ ID NO: 1881836
uuugcuuaucaggaggcua

SEQ ID NO: 2075013 - RNA, 19 nt, Artificial Sequence
  Description of Artificial Sequence: Synthetic oligonucleotide
  Antisense strand to SEQ ID NO: 2075012
uagccuccugauaagcaaa

SEQ ID NO: 2075014 - RNA, 19 nt, Artificial Sequence
  Description of Artificial Sequence: Synthetic oligonucleotide
  Sense strand starting at position 2301 of SEQ ID NO: 1881836
acuugagugccugacacuu

SEQ ID NO: 2075015 - RNA, 19 nt, Artificial Sequence
  Description of Artificial Sequence: Synthetic oligonucleotide
  Antisense strand to SEQ ID NO: 2075014
aagugucaggcacucaagu

SEQ ID NO: 2075016 - RNA, 19 nt, Artificial Sequence
  Description of Artificial Sequence: Synthetic oligonucleotide
  Sense strand starting at position 2356 of SEQ ID NO: 1881836
uuguuuccacuggaguuaa

SEQ ID NO: 2075017 - RNA, 19 nt, Artificial Sequence
  Description of Artificial Sequence: Synthetic oligonucleotide
  Antisense strand to SEQ ID NO: 2075016
uuaacuccaguggaaacaa

SEQ ID NO: 2075018 - RNA, 19 nt, Artificial Sequence
  Description of Artificial Sequence: Synthetic oligonucleotide
  Sense strand starting at position 2367 of SEQ ID NO: 1881836
ggaguuaagggucaguaau

SEQ ID NO: 2075019 - RNA, 19 nt, Artificial Sequence
  Description of Artificial Sequence: Synthetic oligonucleotide
  Antisense strand to SEQ ID NO: 2075018
auuacugacccuuaacucc

SEQ ID NO: 2075020 - RNA, 19 nt, Artificial Sequence
  Description of Artificial Sequence: Synthetic oligonucleotide
  Sense strand starting at position 2369 of SEQ ID NO: 1881836
aguuaagggucaguaauga

SEQ ID NO: 2075021 - RNA, 19 nt, Artificial Sequence
  Description of Artificial Sequence: Synthetic oligonucleotide
  Antisense strand to SEQ ID NO: 2075020
ucauuacugacccuuaacu

SEQ ID NO: 2075022 - RNA, 19 nt, Artificial Sequence
  Description of Artificial Sequence: Synthetic oligonucleotide
  Sense strand starting at position 2734 of SEQ ID NO: 1881836
uggaauguugauugaucca

SEQ ID NO: 2075023 - RNA, 19 nt, Artificial Sequence
  Description of Artificial Sequence: Synthetic oligonucleotide
  Antisense strand to SEQ ID NO: 2075022
uggaucaaucaacauucca

SEQ ID NO: 2075024 - RNA, 19 nt, Artificial Sequence
  Description of Artificial Sequence: Synthetic oligonucleotide
  Sense strand starting at position 2842 of SEQ ID NO: 1881836
cugagaucaugugucauaa

SEQ ID NO: 2075025 - RNA, 19 nt, Artificial Sequence
  Description of Artificial Sequence: Synthetic oligonucleotide
  Antisense strand to SEQ ID NO: 2075024
uuaugacacaugaucucag

SEQ ID NO: 2075026 - RNA, 19 nt, Artificial Sequence
  Description of Artificial Sequence: Synthetic oligonucleotide
  Sense strand starting at position 2929 of SEQ ID NO: 1881836
gaacauccggacuacgauu

SEQ ID NO: 2075027 - RNA, 19 nt, Artificial Sequence
  Description of Artificial Sequence: Synthetic oligonucleotide
  Antisense strand to SEQ ID NO: 2075026
aaucguaguccggauguuc

SEQ ID NO: 2075028 - RNA, 19 nt, Artificial Sequence
  Description of Artificial Sequence: Synthetic oligonucleotide
  Sense strand starting at position 3001 of SEQ ID NO: 1881836
caaggaagguagucuaaac

SEQ ID NO: 2075029 - RNA, 19 nt, Artificial Sequence
  Description of Artificial Sequence: Synthetic oligonucleotide
  Antisense strand to SEQ ID NO: 2075028
guuuagacuaccuuccuug

SEQ ID NO: 2075030 - RNA, 19 nt, Artificial Sequence
  Description of Artificial Sequence: Synthetic oligonucleotide
  Sense strand starting at position 3012 of SEQ ID NO: 1881836
gucuaaaccagaggugaua

SEQ ID NO: 2075031 - RNA, 19 nt, Artificial Sequence
  Description of Artificial Sequence: Synthetic oligonucleotide
  Antisense strand to SEQ ID NO: 2075030
uaucaccucugguuuagac

SEQ ID NO: 2075032 - RNA, 19 nt, Artificial Sequence
  Description of Artificial Sequence: Synthetic oligonucleotide
  Sense strand starting at position 3086 of SEQ ID NO: 1881836
guacaugcauuuguuuaca

SEQ ID NO: 2075033 - RNA, 19 nt, Artificial Sequence
  Description of Artificial Sequence: Synthetic oligonucleotide
  Antisense strand to SEQ ID NO: 2075032
uguaaacaaaugcauguac

SEQ ID NO: 2075034 - RNA, 19 nt, Artificial Sequence
  Description of Artificial Sequence: Synthetic oligonucleotide
  Sense strand starting at position 3145 of SEQ ID NO: 1881836
agugguuguaauggagauu

SEQ ID NO: 2075035 - RNA, 19 nt, Artificial Sequence
  Description of Artificial Sequence: Synthetic oligonucleotide
  Antisense strand to SEQ ID NO: 2075034
aaucuccauuacaaccacu

SEQ ID NO: 2075036 - RNA, 19 nt, Artificial Sequence
  Description of Artificial Sequence: Synthetic oligonucleotide
  Sense strand starting at position 3148 of SEQ ID NO: 1881836
gguuguaauggagauugua

SEQ ID NO: 2075037 - RNA, 19 nt, Artificial Sequence
  Description of Artificial Sequence: Synthetic oligonucleotide
  Antisense strand to SEQ ID NO: 2075036
uacaaucuccauuacaacc

SEQ ID NO: 2075038 - RNA, 19 nt, Artificial Sequence
  Description of Artificial Sequence: Synthetic oligonucleotide
  Sense strand starting at position 3443 of SEQ ID NO: 1881836
uuucuaggcugacuuauau

SEQ ID NO: 2075039 - RNA, 19 nt, Artificial Sequence
  Description of Artificial Sequence: Synthetic oligonucleotide
  Antisense strand to SEQ ID NO: 2075038
auauaagucagccuagaaa

SEQ ID NO: 2075040 - RNA, 19 nt, Artificial Sequence
  Description of Artificial Sequence: Synthetic oligonucleotide
  Sense strand starting at position 3543 of SEQ ID NO: 1881836
ucauaauucgcagaacuua

SEQ ID NO: 2075041 - RNA, 19 nt, Artificial Sequence
  Description of Artificial Sequence: Synthetic oligonucleotide
  Antisense strand to SEQ ID NO: 2075040
uaaguucugcgaauuauga

SEQ ID NO: 2075042 - RNA, 19 nt, Artificial Sequence
  Description of Artificial Sequence: Synthetic oligonucleotide
  Sense strand starting at position 3570 of SEQ ID NO: 1881836
cuguauaaugcauaaugau

SEQ ID NO: 2075043 - RNA, 19 nt, Artificial Sequence
  Description of Artificial Sequence: Synthetic oligonucleotide
  Antisense strand to SEQ ID NO: 2075042
aucauuaugcauuauacag

SEQ ID NO: 2075044 - RNA, 19 nt, Artificial Sequence
  Description of Artificial Sequence: Synthetic oligonucleotide
  Sense strand starting at position 3589 of SEQ ID NO: 1881836
cugccucaucuagaguuau

SEQ ID NO: 2075045 - RNA, 19 nt, Artificial Sequence
  Description of Artificial Sequence: Synthetic oligonucleotide
  Antisense strand to SEQ ID NO: 2075044
auaacucuagaugaggcag

SEQ ID NO: 2075046 - RNA, 19 nt, Artificial Sequence
  Description of Artificial Sequence: Synthetic oligonucleotide
  Sense strand starting at position 3600 of SEQ ID NO: 1881836
agaguuauccaguauagua

SEQ ID NO: 2075047 - RNA, 19 nt, Artificial Sequence
  Description of Artificial Sequence: Synthetic oligonucleotide
  Antisense strand to SEQ ID NO: 2075046
uacuauacuggauaacucu

SEQ ID NO: 2075048 - RNA, 19 nt, Artificial Sequence
  Description of Artificial Sequence: Synthetic oligonucleotide
  Sense strand starting at position 3712 of SEQ ID NO: 1881836
gugagcaagcaugacaaau

SEQ ID NO: 2075049 - RNA, 19 nt, Artificial Sequence
  Description of Artificial Sequence: Synthetic oligonucleotide
  Antisense strand to SEQ ID NO: 2075048
auuugucaugcuugcucac

SEQ ID NO: 2075050 - RNA, 19 nt, Artificial Sequence
  Description of Artificial Sequence: Synthetic oligonucleotide
  Sense strand starting at position 3970 of SEQ ID NO: 1881836
aauguaguaugacugaaga

SEQ ID NO: 2075051 - RNA, 19 nt, Artificial Sequence
  Description of Artificial Sequence: Synthetic oligonucleotide
  Antisense strand to SEQ ID NO: 2075050
ucuucagucauacuacauu

SEQ ID NO: 2075052 - RNA, 19 nt, Artificial Sequence
  Description of Artificial Sequence: Synthetic oligonucleotide
  Sense strand starting at position 43 of SEQ ID NO: 1881837
aaggaaugagucugcacau

SEQ ID NO: 2075053 - RNA, 19 nt, Artificial Sequence
  Description of Artificial Sequence: Synthetic oligonucleotide
  Antisense strand to SEQ ID NO: 2075052
augugcagacucauuccuu

SEQ ID NO: 2075054 - RNA, 19 nt, Artificial Sequence
  Description of Artificial Sequence: Synthetic oligonucleotide
  Sense strand starting at position 44 of SEQ ID NO: 1881837
aggaaugagucugcacauu

SEQ ID NO: 2075055 - RNA, 19 nt, Artificial Sequence
  Description of Artificial Sequence: Synthetic oligonucleotide
  Antisense strand to SEQ ID NO: 2075054
aaugugcagacucauuccu

SEQ ID NO: 2075056 - RNA, 19 nt, Artificial Sequence
  Description of Artificial Sequence: Synthetic oligonucleotide
  Sense strand starting at position 54 of SEQ ID NO: 1881837
cugcacauucugggucaga

SEQ ID NO: 2075057 - RNA, 19 nt, Artificial Sequence
  Description of Artificial Sequence: Synthetic oligonucleotide
  Antisense strand to SEQ ID NO: 2075056
ucugacccagaaugugcag

SEQ ID NO: 2075058 - RNA, 19 nt, Artificial Sequence
  Description of Artificial Sequence: Synthetic oligonucleotide
  Sense strand starting at position 55 of SEQ ID NO: 1881837
ugcacauucugggucagau

SEQ ID NO: 2075059 - RNA, 19 nt, Artificial Sequence
  Description of Artificial Sequence: Synthetic oligonucleotide
  Antisense strand to SEQ ID NO: 2075058
aucugacccagaaugugca

SEQ ID NO: 2075060 - RNA, 19 nt, Artificial Sequence
  Description of Artificial Sequence: Synthetic oligonucleotide
  Sense strand starting at position 64 of SEQ ID NO: 1881837
ugggucagaugccuggaau

SEQ ID NO: 2075061 - RNA, 19 nt, Artificial Sequence
  Description of Artificial Sequence: Synthetic oligonucleotide
  Antisense strand to SEQ ID NO: 2075060
auuccaggcaucugaccca

SEQ ID NO: 2075062 - RNA, 19 nt, Artificial Sequence
  Description of Artificial Sequence: Synthetic oligonucleotide
  Sense strand starting at position 65 of SEQ ID NO: 1881837
gggucagaugccuggaaua

SEQ ID NO: 2075063 - RNA, 19 nt, Artificial Sequence
  Description of Artificial Sequence: Synthetic oligonucleotide
  Antisense strand to SEQ ID NO: 2075062
uauuccaggcaucugaccc

SEQ ID NO: 2075064 - RNA, 19 nt, Artificial Sequence
  Description of Artificial Sequence: Synthetic oligonucleotide
  Sense strand starting at position 67 of SEQ ID NO: 1881837
gucagaugccuggaauaau

SEQ ID NO: 2075065 - RNA, 19 nt, Artificial Sequence
  Description of Artificial Sequence: Synthetic oligonucleotide
  Antisense strand to SEQ ID NO: 2075064
auuauuccaggcaucugac

SEQ ID NO: 2075066 - RNA, 19 nt, Artificial Sequence
  Description of Artificial Sequence: Synthetic oligonucleotide
  Sense strand starting at position 137 of SEQ ID NO: 1881837
uuuguugaugcugaagaau

SEQ ID NO: 2075067 - RNA, 19 nt, Artificial Sequence
  Description of Artificial Sequence: Synthetic oligonucleotide
  Antisense strand to SEQ ID NO: 2075066
auucuucagcaucaacaaa

SEQ ID NO: 2075068 - RNA, 19 nt, Artificial Sequence
  Description of Artificial Sequence: Synthetic oligonucleotide
  Sense strand starting at position 181 of SEQ ID NO: 1881837
ggaagaaagucaggaauuu

SEQ ID NO: 2075069 - RNA, 19 nt, Artificial Sequence
  Description of Artificial Sequence: Synthetic oligonucleotide
  Antisense strand to SEQ ID NO: 2075068
aaauuccugacuuucuucc

SEQ ID NO: 2075070 - RNA, 19 nt, Artificial Sequence
  Description of Artificial Sequence: Synthetic oligonucleotide
  Sense strand starting at position 353 of SEQ ID NO: 1881837
ccuggaaagaaguagugua

SEQ ID NO: 2075071 - RNA, 19 nt, Artificial Sequence
  Description of Artificial Sequence: Synthetic oligonucleotide
  Antisense strand to SEQ ID NO: 2075070
uacacuacuucuuuccagg

SEQ ID NO: 2075072 - RNA, 19 nt, Artificial Sequence
  Description of Artificial Sequence: Synthetic oligonucleotide
  Sense strand starting at position 432 of SEQ ID NO: 1881837
guagguugggcagaucagu

SEQ ID NO: 2075073 - RNA, 19 nt, Artificial Sequence
  Description of Artificial Sequence: Synthetic oligonucleotide
  Antisense strand to SEQ ID NO: 2075072
acugaucugcccaaccuac

SEQ ID NO: 2075074 - RNA, 19 nt, Artificial Sequence
  Description of Artificial Sequence: Synthetic oligonucleotide
  Sense strand starting at position 438 of SEQ ID NO: 1881837
ugggcagaucagugucaag

SEQ ID NO: 2075075 - RNA, 19 nt, Artificial Sequence
  Description of Artificial Sequence: Synthetic oligonucleotide
  Antisense strand to SEQ ID NO: 2075074
cuugacacugaucugccca

SEQ ID NO: 2075076 - RNA, 19 nt, Artificial Sequence
  Description of Artificial Sequence: Synthetic oligonucleotide
  Sense strand starting at position 721 of SEQ ID NO: 1881837
auaugugcaguuuauagau

SEQ ID NO: 2075077 - RNA, 19 nt, Artificial Sequence
  Description of Artificial Sequence: Synthetic oligonucleotide
  Antisense strand to SEQ ID NO: 2075076
aucuauaaacugcacauau

SEQ ID NO: 2075078 - RNA, 19 nt, Artificial Sequence
  Description of Artificial Sequence: Synthetic oligonucleotide
  Sense strand starting at position 775 of SEQ ID NO: 1881837
gguguuaacggauauuauu

SEQ ID NO: 2075079 - RNA, 19 nt, Artificial Sequence
  Description of Artificial Sequence: Synthetic oligonucleotide
  Antisense strand to SEQ ID NO: 2075078
aauaauauccguuaacacc

SEQ ID NO: 2075080 - RNA, 19 nt, Artificial Sequence
  Description of Artificial Sequence: Synthetic oligonucleotide
  Sense strand starting at position 1331 of SEQ ID NO: 1881837
gucagaguguaaucuacac

SEQ ID NO: 2075081 - RNA, 19 nt, Artificial Sequence
  Description of Artificial Sequence: Synthetic oligonucleotide
  Antisense strand to SEQ ID NO: 2075080
guguagauuacacucugac

SEQ ID NO: 2075082 - RNA, 19 nt, Artificial Sequence
  Description of Artificial Sequence: Synthetic oligonucleotide
  Sense strand starting at position 1789 of SEQ ID NO: 1881837
uccucugugaagugagaua

SEQ ID NO: 2075083 - RNA, 19 nt, Artificial Sequence
  Description of Artificial Sequence: Synthetic oligonucleotide
  Antisense strand to SEQ ID NO: 2075082
uaucucacuucacagagga

SEQ ID NO: 2075084 - RNA, 19 nt, Artificial Sequence
  Description of Artificial Sequence: Synthetic oligonucleotide
  Sense strand starting at position 1800 of SEQ ID NO: 1881837
gugagauaauacuuaccuc

SEQ ID NO: 2075085 - RNA, 19 nt, Artificial Sequence
  Description of Artificial Sequence: Synthetic oligonucleotide
  Antisense strand to SEQ ID NO: 2075084
gagguaaguauuaucucac

SEQ ID NO: 2075086 - RNA, 19 nt, Artificial Sequence
  Description of Artificial Sequence: Synthetic oligonucleotide
  Sense strand starting at position 1803 of SEQ ID NO: 1881837
agauaauacuuaccucguu

SEQ ID NO: 2075087 - RNA, 19 nt, Artificial Sequence
  Description of Artificial Sequence: Synthetic oligonucleotide
  Antisense strand to SEQ ID NO: 2075086
aacgagguaaguauuaucu

SEQ ID NO: 2075088 - RNA, 19 nt, Artificial Sequence
  Description of Artificial Sequence: Synthetic oligonucleotide
  Sense strand starting at position 1992 of SEQ ID NO: 1881837
uuagcaagugccuaaagaa

SEQ ID NO: 2075089 - RNA, 19 nt, Artificial Sequence
  Description of Artificial Sequence: Synthetic oligonucleotide
  Antisense strand to SEQ ID NO: 2075088
uucuuuaggcacuugcuaa

SEQ ID NO: 2075090 - RNA, 19 nt, Artificial Sequence
  Description of Artificial Sequence: Synthetic oligonucleotide
  Sense strand starting at position 2119 of SEQ ID NO: 1881837
agcagugauuuggaauuga

SEQ ID NO: 2075091 - RNA, 19 nt, Artificial Sequence
  Description of Artificial Sequence: Synthetic oligonucleotide
  Antisense strand to SEQ ID NO: 2075090
ucaauuccaaaucacugcu

SEQ ID NO: 2075092 - RNA, 19 nt, Artificial Sequence
  Description of Artificial Sequence: Synthetic oligonucleotide
  Sense strand starting at position 2169 of SEQ ID NO: 1881837
ugagaaguguugguucauu

SEQ ID NO: 2075093 - RNA, 19 nt, Artificial Sequence
  Description of Artificial Sequence: Synthetic oligonucleotide
  Antisense strand to SEQ ID NO: 2075092
aaugaaccaacacuucuca

SEQ ID NO: 2075094 - RNA, 19 nt, Artificial Sequence
  Description of Artificial Sequence: Synthetic oligonucleotide
  Sense strand starting at position 2289 of SEQ ID NO: 1881837
gcuacaucuggugaagacu

SEQ ID NO: 2075095 - RNA, 19 nt, Artificial Sequence
  Description of Artificial Sequence: Synthetic oligonucleotide
  Antisense strand to SEQ ID NO: 2075094
agucuucaccagauguagc

SEQ ID NO: 2075096 - RNA, 19 nt, Artificial Sequence
  Description of Artificial Sequence: Synthetic oligonucleotide
  Sense strand starting at position 2309 of SEQ ID NO: 1881837
gcuuguugccucguaacag

SEQ ID NO: 2075097 - RNA, 19 nt, Artificial Sequence
  Description of Artificial Sequence: Synthetic oligonucleotide
  Antisense strand to SEQ ID NO: 2075096
cuguuacgaggcaacaagc

SEQ ID NO: 2075098 - RNA, 19 nt, Artificial Sequence
  Description of Artificial Sequence: Synthetic oligonucleotide
  Sense strand starting at position 2554 of SEQ ID NO: 1881837
uuuaguuaacuuggaaugu

SEQ ID NO: 2075099 - RNA, 19 nt, Artificial Sequence
  Description of Artificial Sequence: Synthetic oligonucleotide
  Antisense strand to SEQ ID NO: 2075098
acauuccaaguuaacuaaa

SEQ ID NO: 2075100 - RNA, 19 nt, Artificial Sequence
  Description of Artificial Sequence: Synthetic oligonucleotide
  Sense strand starting at position 2558 of SEQ ID NO: 1881837
guuaacuuggaaugugaua

SEQ ID NO: 2075101 - RNA, 19 nt, Artificial Sequence
  Description of Artificial Sequence: Synthetic oligonucleotide
  Antisense strand to SEQ ID NO: 2075100
uaucacauuccaaguuaac

SEQ ID NO: 2075102 - RNA, 19 nt, Artificial Sequence
  Description of Artificial Sequence: Synthetic oligonucleotide
  Sense strand starting at position 2680 of SEQ ID NO: 1881837
auugcaaguguugagaauu

SEQ ID NO: 2075103 - RNA, 19 nt, Artificial Sequence
  Description of Artificial Sequence: Synthetic oligonucleotide
  Antisense strand to SEQ ID NO: 2075102
aauucucaacacuugcaau

SEQ ID NO: 2075104 - RNA, 19 nt, Artificial Sequence
  Description of Artificial Sequence: Synthetic oligonucleotide
  Sense strand starting at position 2702 of SEQ ID NO: 1881837
gguucugugacuuagguga

SEQ ID NO: 2075105 - RNA, 19 nt, Artificial Sequence
  Description of Artificial Sequence: Synthetic oligonucleotide
  Antisense strand to SEQ ID NO: 2075104
ucaccuaagucacagaacc

SEQ ID NO: 2075106 - RNA, 19 nt, Artificial Sequence
  Description of Artificial Sequence: Synthetic oligonucleotide
  Sense strand starting at position 2748 of SEQ ID NO: 1881837
gcagucacccaacaaguau

SEQ ID NO: 2075107 - RNA, 19 nt, Artificial Sequence
  Description of Artificial Sequence: Synthetic oligonucleotide
  Antisense strand to SEQ ID NO: 2075106
auacuuguugggugacugc

SEQ ID NO: 2075108 - RNA, 19 nt, Artificial Sequence
  Description of Artificial Sequence: Synthetic oligonucleotide
  Sense strand starting at position 2794 of SEQ ID NO: 1881837
auaaguauguggguaguua

SEQ ID NO: 2075109 - RNA, 19 nt, Artificial Sequence
  Description of Artificial Sequence: Synthetic oligonucleotide
  Antisense strand to SEQ ID NO: 2075108
uaacuacccacauacuuau

SEQ ID NO: 2075110 - RNA, 19 nt, Artificial Sequence
  Description of Artificial Sequence: Synthetic oligonucleotide
  Sense strand starting at position 2795 of SEQ ID NO: 1881837
uaaguauguggguaguuaa

SEQ ID NO: 2075111 - RNA, 19 nt, Artificial Sequence
  Description of Artificial Sequence: Synthetic oligonucleotide
  Antisense strand to SEQ ID NO: 2075110
uuaacuacccacauacuua

SEQ ID NO: 2075112 - RNA, 19 nt, Artificial Sequence
  Description of Artificial Sequence: Synthetic oligonucleotide
  Sense strand starting at position 2805 of SEQ ID NO: 1881837
gguaguuaaggcuaaccau

SEQ ID NO: 2075113 - RNA, 19 nt, Artificial Sequence
  Description of Artificial Sequence: Synthetic oligonucleotide
  Antisense strand to SEQ ID NO: 2075112
augguuagccuuaacuacc

SEQ ID NO: 2075114 - RNA, 19 nt, Artificial Sequence
  Description of Artificial Sequence: Synthetic oligonucleotide
  Sense strand starting at position 2986 of SEQ ID NO: 1881837
auacacaccuugguugaau

SEQ ID NO: 2075115 - RNA, 19 nt, Artificial Sequence
  Description of Artificial Sequence: Synthetic oligonucleotide
  Antisense strand to SEQ ID NO: 2075114
auucaaccaagguguguau

SEQ ID NO: 2075116 - RNA, 19 nt, Artificial Sequence
  Description of Artificial Sequence: Synthetic oligonucleotide
  Sense strand starting at position 3010 of SEQ ID NO: 1881837
auuaaagaaggcuguuauu

SEQ ID NO: 2075117 - RNA, 19 nt, Artificial Sequence
  Description of Artificial Sequence: Synthetic oligonucleotide
  Antisense strand to SEQ ID NO: 2075116
aauaacagccuucuuuaau

SEQ ID NO: 2075118 - RNA, 19 nt, Artificial Sequence
  Description of Artificial Sequence: Synthetic oligonucleotide
  Sense strand starting at position 3113 of SEQ ID NO: 1881837
ucgacuaguuuauuaucau

SEQ ID NO: 2075119 - RNA, 19 nt, Artificial Sequence
  Description of Artificial Sequence: Synthetic oligonucleotide
  Antisense strand to SEQ ID NO: 2075118
augauaauaaacuagucga

SEQ ID NO: 2075120 - RNA, 19 nt, Artificial Sequence
  Description of Artificial Sequence: Synthetic oligonucleotide
  Sense strand starting at position 3185 of SEQ ID NO: 1881837
ggucucccuucuuugauuu

SEQ ID NO: 2075121 - RNA, 19 nt, Artificial Sequence
  Description of Artificial Sequence: Synthetic oligonucleotide
  Antisense strand to SEQ ID NO: 2075120
aaaucaaagaagggagacc

SEQ ID NO: 2075122 - RNA, 19 nt, Artificial Sequence
  Description of Artificial Sequence: Synthetic oligonucleotide
  Sense strand starting at position 3239 of SEQ ID NO: 1881837
cuucucaguuucucuggaa

SEQ ID NO: 2075123 - RNA, 19 nt, Artificial Sequence
  Description of Artificial Sequence: Synthetic oligonucleotide
  Antisense strand to SEQ ID NO: 2075122
uuccagagaaacugagaag

SEQ ID NO: 2075124 - RNA, 19 nt, Artificial Sequence
  Description of Artificial Sequence: Synthetic oligonucleotide
  Sense strand starting at position 3240 of SEQ ID NO: 1881837
uucucaguuucucuggaau

SEQ ID NO: 2075125 - RNA, 19 nt, Artificial Sequence
  Description of Artificial Sequence: Synthetic oligonucleotide
  Antisense strand to SEQ ID NO: 2075124
auuccagagaaacugagaa

SEQ ID NO: 2075126 - RNA, 19 nt, Artificial Sequence
  Description of Artificial Sequence: Synthetic oligonucleotide
  Sense strand starting at position 3587 of SEQ ID NO: 1881837
cuugacuuauuugggaaau

SEQ ID NO: 2075127 - RNA, 19 nt, Artificial Sequence
  Description of Artificial Sequence: Synthetic oligonucleotide
  Antisense strand to SEQ ID NO: 2075126
auuucccaaauaagucaag

SEQ ID NO: 2075128 - RNA, 19 nt, Artificial Sequence
  Description of Artificial Sequence: Synthetic oligonucleotide
  Sense strand starting at position 3588 of SEQ ID NO: 1881837
uugacuuauuugggaaauu

SEQ ID NO: 2075129 - RNA, 19 nt, Artificial Sequence
  Description of Artificial Sequence: Synthetic oligonucleotide
  Antisense strand to SEQ ID NO: 2075128
aauuucccaaauaagucaa

SEQ ID NO: 2075130 - RNA, 19 nt, Artificial Sequence
  Description of Artificial Sequence: Synthetic oligonucleotide
  Sense strand starting at position 3598 of SEQ ID NO: 1881837
ugggaaauuugauauaguu

SEQ ID NO: 2075131 - RNA, 19 nt, Artificial Sequence
  Description of Artificial Sequence: Synthetic oligonucleotide
  Antisense strand to SEQ ID NO: 2075130
aacuauaucaaauuuccca

SEQ ID NO: 2075132 - RNA, 19 nt, Artificial Sequence
  Description of Artificial Sequence: Synthetic oligonucleotide
  Sense strand starting at position 79 of SEQ ID NO: 1881838
gagcaagugucagaaucac

SEQ ID NO: 2075133 - RNA, 19 nt, Artificial Sequence
  Description of Artificial Sequence: Synthetic oligonucleotide
  Antisense strand to SEQ ID NO: 2075132
gugauucugacacuugcuc

SEQ ID NO: 2075134 - RNA, 19 nt, Artificial Sequence
  Description of Artificial Sequence: Synthetic oligonucleotide
  Sense strand starting at position 297 of SEQ ID NO: 1881838
ugagguagucagugcacaa

SEQ ID NO: 2075135 - RNA, 19 nt, Artificial Sequence
  Description of Artificial Sequence: Synthetic oligonucleotide
  Antisense strand to SEQ ID NO: 2075134
uugugcacugacuaccuca

SEQ ID NO: 2075136 - RNA, 19 nt, Artificial Sequence
  Description of Artificial Sequence: Synthetic oligonucleotide
  Sense strand starting at position 301 of SEQ ID NO: 1881838
guagucagugcacaagaua

SEQ ID NO: 2075137 - RNA, 19 nt, Artificial Sequence
  Description of Artificial Sequence: Synthetic oligonucleotide
  Antisense strand to SEQ ID NO: 2075136
uaucuugugcacugacuac

SEQ ID NO: 2075138 - RNA, 19 nt, Artificial Sequence
  Description of Artificial Sequence: Synthetic oligonucleotide
  Sense strand starting at position 304 of SEQ ID NO: 1881838
gucagugcacaagauagaa

SEQ ID NO: 2075139 - RNA, 19 nt, Artificial Sequence
  Description of Artificial Sequence: Synthetic oligonucleotide
  Antisense strand to SEQ ID NO: 2075138
uucuaucuugugcacugac

SEQ ID NO: 2075140 - RNA, 19 nt, Artificial Sequence
  Description of Artificial Sequence: Synthetic oligonucleotide
  Sense strand starting at position 426 of SEQ ID NO: 1881838
gcuguaacagauuacuaca

SEQ ID NO: 2075141 - RNA, 19 nt, Artificial Sequence
  Description of Artificial Sequence: Synthetic oligonucleotide
  Antisense strand to SEQ ID NO: 2075140
uguaguaaucuguuacagc

SEQ ID NO: 2075142 - RNA, 19 nt, Artificial Sequence
  Description of Artificial Sequence: Synthetic oligonucleotide
  Sense strand starting at position 439 of SEQ ID NO: 1881838
acuacaauuugguggcuua

SEQ ID NO: 2075143 - RNA, 19 nt, Artificial Sequence
  Description of Artificial Sequence: Synthetic oligonucleotide
  Antisense strand to SEQ ID NO: 2075142
uaagccaccaaauuguagu

SEQ ID NO: 2075144 - RNA, 19 nt, Artificial Sequence
  Description of Artificial Sequence: Synthetic oligonucleotide
  Sense strand starting at position 703 of SEQ ID NO: 1881838
acuugaguccaggaagguu

SEQ ID NO: 2075145 - RNA, 19 nt, Artificial Sequence
  Description of Artificial Sequence: Synthetic oligonucleotide
  Antisense strand to SEQ ID NO: 2075144
aaccuuccuggacucaagu

SEQ ID NO: 2075146 - RNA, 19 nt, Artificial Sequence
  Description of Artificial Sequence: Synthetic oligonucleotide
  Sense strand starting at position 806 of SEQ ID NO: 1881838
agugaaucucacugggcua

SEQ ID NO: 2075147 - RNA, 19 nt, Artificial Sequence
  Description of Artificial Sequence: Synthetic oligonucleotide
  Antisense strand to SEQ ID NO: 2075146
uagcccagugagauucacu

SEQ ID NO: 2075148 - RNA, 19 nt, Artificial Sequence
  Description of Artificial Sequence: Synthetic oligonucleotide
  Sense strand starting at position 807 of SEQ ID NO: 1881838
gugaaucucacugggcuaa

SEQ ID NO: 2075149 - RNA, 19 nt, Artificial Sequence
  Description of Artificial Sequence: Synthetic oligonucleotide
  Antisense strand to SEQ ID NO: 2075148
uuagcccagugagauucac

SEQ ID NO: 2075150 - RNA, 19 nt, Artificial Sequence
  Description of Artificial Sequence: Synthetic oligonucleotide
  Sense strand starting at position 808 of SEQ ID NO: 1881838
ugaaucucacugggcuaaa

SEQ ID NO: 2075151 - RNA, 19 nt, Artificial Sequence
  Description of Artificial Sequence: Synthetic oligonucleotide
  Antisense strand to SEQ ID NO: 2075150
uuuagcccagugagauuca

SEQ ID NO: 2075152 - RNA, 19 nt, Artificial Sequence
  Description of Artificial Sequence: Synthetic oligonucleotide
  Sense strand starting at position 835 of SEQ ID NO: 1881838
gccagcaagaguuguguuu

SEQ ID NO: 2075153 - RNA, 19 nt, Artificial Sequence
  Description of Artificial Sequence: Synthetic oligonucleotide
  Antisense strand to SEQ ID NO: 2075152
aaacacaacucuugcuggc

SEQ ID NO: 2075154 - RNA, 19 nt, Artificial Sequence
  Description of Artificial Sequence: Synthetic oligonucleotide
  Sense strand starting at position 1390 of SEQ ID NO: 1881838
gcgcauaggccgguucuaa

SEQ ID NO: 2075155 - RNA, 19 nt, Artificial Sequence
  Description of Artificial Sequence: Synthetic oligonucleotide
  Antisense strand to SEQ ID NO: 2075154
uuagaaccggccuaugcgc

SEQ ID NO: 2075156 - RNA, 19 nt, Artificial Sequence
  Description of Artificial Sequence: Synthetic oligonucleotide
  Sense strand starting at position 1391 of SEQ ID NO: 1881838
cgcauaggccgguucuaau

SEQ ID NO: 2075157 - RNA, 19 nt, Artificial Sequence
  Description of Artificial Sequence: Synthetic oligonucleotide
  Antisense strand to SEQ ID NO: 2075156
auuagaaccggccuaugcg

SEQ ID NO: 2075158 - RNA, 19 nt, Artificial Sequence
  Description of Artificial Sequence: Synthetic oligonucleotide
  Sense strand starting at position 1394 of SEQ ID NO: 1881838
auaggccgguucuaauuua

SEQ ID NO: 2075159 - RNA, 19 nt, Artificial Sequence
  Description of Artificial Sequence: Synthetic oligonucleotide
  Antisense strand to SEQ ID NO: 2075158
uaaauuagaaccggccuau

SEQ ID NO: 2075160 - RNA, 19 nt, Artificial Sequence
  Description of Artificial Sequence: Synthetic oligonucleotide
  Sense strand starting at position 1401 of SEQ ID NO: 1881838
gguucuaauuuacaagaac

SEQ ID NO: 2075161 - RNA, 19 nt, Artificial Sequence
  Description of Artificial Sequence: Synthetic oligonucleotide
  Antisense strand to SEQ ID NO: 2075160
guucuuguaaauuagaacc

SEQ ID NO: 2075162 - RNA, 19 nt, Artificial Sequence
  Description of Artificial Sequence: Synthetic oligonucleotide
  Sense strand starting at position 1594 of SEQ ID NO: 1881838
ggccuguguccggaagguu

SEQ ID NO: 2075163 - RNA, 19 nt, Artificial Sequence
  Description of Artificial Sequence: Synthetic oligonucleotide
  Antisense strand to SEQ ID NO: 2075162
aaccuuccggacacaggcc

SEQ ID NO: 2075164 - RNA, 19 nt, Artificial Sequence
  Description of Artificial Sequence: Synthetic oligonucleotide
  Sense strand starting at position 1595 of SEQ ID NO: 1881838
gccuguguccggaagguuu

SEQ ID NO: 2075165 - RNA, 19 nt, Artificial Sequence
  Description of Artificial Sequence: Synthetic oligonucleotide
  Antisense strand to SEQ ID NO: 2075164
aaaccuuccggacacaggc

SEQ ID NO: 2075166 - RNA, 19 nt, Artificial Sequence
  Description of Artificial Sequence: Synthetic oligonucleotide
  Sense strand starting at position 2141 of SEQ ID NO: 1881838
ggaaguugaguucgguuca

SEQ ID NO: 2075167 - RNA, 19 nt, Artificial Sequence
  Description of Artificial Sequence: Synthetic oligonucleotide
  Antisense strand to SEQ ID NO: 2075166
ugaaccgaacucaacuucc

SEQ ID NO: 2075168 - RNA, 19 nt, Artificial Sequence
  Description of Artificial Sequence: Synthetic oligonucleotide
  Sense strand starting at position 2216 of SEQ ID NO: 1881838
agcugcuguucugcuuaau

SEQ ID NO: 2075169 - RNA, 19 nt, Artificial Sequence
  Description of Artificial Sequence: Synthetic oligonucleotide
  Antisense strand to SEQ ID NO: 2075168
auuaagcagaacagcagcu

SEQ ID NO: 2075170 - RNA, 19 nt, Artificial Sequence
  Description of Artificial Sequence: Synthetic oligonucleotide
  Sense strand starting at position 2222 of SEQ ID NO: 1881838
uguucugcuuaaucucaga

SEQ ID NO: 2075171 - RNA, 19 nt, Artificial Sequence
  Description of Artificial Sequence: Synthetic oligonucleotide
  Antisense strand to SEQ ID NO: 2075170
ucugagauuaagcagaaca

SEQ ID NO: 2075172 - RNA, 19 nt, Artificial Sequence
  Description of Artificial Sequence: Synthetic oligonucleotide
  Sense strand starting at position 2277 of SEQ ID NO: 1881838
ccgaguaaaugagaaugau

SEQ ID NO: 2075173 - RNA, 19 nt, Artificial Sequence
  Description of Artificial Sequence: Synthetic oligonucleotide
  Antisense strand to SEQ ID NO: 2075172
aucauucucauuuacucgg

SEQ ID NO: 2075174 - RNA, 19 nt, Artificial Sequence
  Description of Artificial Sequence: Synthetic oligonucleotide
  Sense strand starting at position 2283 of SEQ ID NO: 1881838
aaaugagaaugaugacuga

SEQ ID NO: 2075175 - RNA, 19 nt, Artificial Sequence
  Description of Artificial Sequence: Synthetic oligonucleotide
  Antisense strand to SEQ ID NO: 2075174
ucagucaucauucucauuu

SEQ ID NO: 2075176 - RNA, 19 nt, Artificial Sequence
  Description of Artificial Sequence: Synthetic oligonucleotide
  Sense strand starting at position 2475 of SEQ ID NO: 1881838
uguagucaucagggaggga

SEQ ID NO: 2075177 - RNA, 19 nt, Artificial Sequence
  Description of Artificial Sequence: Synthetic oligonucleotide
  Antisense strand to SEQ ID NO: 2075176
ucccucccugaugacuaca

SEQ ID NO: 2075178 - RNA, 19 nt, Artificial Sequence
  Description of Artificial Sequence: Synthetic oligonucleotide
  Sense strand starting at position 2548 of SEQ ID NO: 1881838
uaagaagguugcuccggau

SEQ ID NO: 2075179 - RNA, 19 nt, Artificial Sequence
  Description of Artificial Sequence: Synthetic oligonucleotide
  Antisense strand to SEQ ID NO: 2075178
auccggagcaaccuucuua

SEQ ID NO: 2075180 - RNA, 19 nt, Artificial Sequence
  Description of Artificial Sequence: Synthetic oligonucleotide
  Sense strand starting at position 2664 of SEQ ID NO: 1881838
cagggaagcucaggaaaua

SEQ ID NO: 2075181 - RNA, 19 nt, Artificial Sequence
  Description of Artificial Sequence: Synthetic oligonucleotide
  Antisense strand to SEQ ID NO: 2075180
uauuuccugagcuucccug

SEQ ID NO: 2075182 - RNA, 19 nt, Artificial Sequence
  Description of Artificial Sequence: Synthetic oligonucleotide
  Sense strand starting at position 2777 of SEQ ID NO: 1881838
caagcuguuccacgauaau

SEQ ID NO: 2075183 - RNA, 19 nt, Artificial Sequence
  Description of Artificial Sequence: Synthetic oligonucleotide
  Antisense strand to SEQ ID NO: 2075182
auuaucguggaacagcuug

SEQ ID NO: 2075184 - RNA, 19 nt, Artificial Sequence
  Description of Artificial Sequence: Synthetic oligonucleotide
  Sense strand starting at position 2780 of SEQ ID NO: 1881838
gcuguuccacgauaauucu

SEQ ID NO: 2075185 - RNA, 19 nt, Artificial Sequence
  Description of Artificial Sequence: Synthetic oligonucleotide
  Antisense strand to SEQ ID NO: 2075184
agaauuaucguggaacagc

SEQ ID NO: 2075186 - RNA, 19 nt, Artificial Sequence
  Description of Artificial Sequence: Synthetic oligonucleotide
  Sense strand starting at position 2790 of SEQ ID NO: 1881838
gauaauucuugugucagaa

SEQ ID NO: 2075187 - RNA, 19 nt, Artificial Sequence
  Description of Artificial Sequence: Synthetic oligonucleotide
  Antisense strand to SEQ ID NO: 2075186
uucugacacaagaauuauc

SEQ ID NO: 2075188 - RNA, 19 nt, Artificial Sequence
  Description of Artificial Sequence: Synthetic oligonucleotide
  Sense strand starting at position 2850 of SEQ ID NO: 1881838
ccuccauucugaguacacu

SEQ ID NO: 2075189 - RNA, 19 nt, Artificial Sequence
  Description of Artificial Sequence: Synthetic oligonucleotide
  Antisense strand to SEQ ID NO: 2075188
aguguacucagaauggagg

SEQ ID NO: 2075190 - RNA, 19 nt, Artificial Sequence
  Description of Artificial Sequence: Synthetic oligonucleotide
  Sense strand starting at position 2851 of SEQ ID NO: 1881838
cuccauucugaguacacuu

SEQ ID NO: 2075191 - RNA, 19 nt, Artificial Sequence
  Description of Artificial Sequence: Synthetic oligonucleotide
  Antisense strand to SEQ ID NO: 2075190
aaguguacucagaauggag

SEQ ID NO: 2075192 - RNA, 19 nt, Artificial Sequence
  Description of Artificial Sequence: Synthetic oligonucleotide
  Sense strand starting at position 2913 of SEQ ID NO: 1881838
agaguaaaggucuagcaca

SEQ ID NO: 2075193 - RNA, 19 nt, Artificial Sequence
  Description of Artificial Sequence: Synthetic oligonucleotide
  Antisense strand to SEQ ID NO: 2075192
ugugcuagaccuuuacucu

SEQ ID NO: 2075194 - RNA, 19 nt, Artificial Sequence
  Description of Artificial Sequence: Synthetic oligonucleotide
  Sense strand starting at position 2974 of SEQ ID NO: 1881838
cuugaaguaaagugggauu

SEQ ID NO: 2075195 - RNA, 19 nt, Artificial Sequence
  Description of Artificial Sequence: Synthetic oligonucleotide
  Antisense strand to SEQ ID NO: 2075194
aaucccacuuuacuucaag

SEQ ID NO: 2075196 - RNA, 19 nt, Artificial Sequence
  Description of Artificial Sequence: Synthetic oligonucleotide
  Sense strand starting at position 3019 of SEQ ID NO: 1881838
uugguaugcguguggaaga

SEQ ID NO: 2075197 - RNA, 19 nt, Artificial Sequence
  Description of Artificial Sequence: Synthetic oligonucleotide
  Antisense strand to SEQ ID NO: 2075196
ucuuccacacgcauaccaa

SEQ ID NO: 2075198 - RNA, 19 nt, Artificial Sequence
  Description of Artificial Sequence: Synthetic oligonucleotide
  Sense strand starting at position 3022 of SEQ ID NO: 1881838
guaugcguguggaagaagu

SEQ ID NO: 2075199 - RNA, 19 nt, Artificial Sequence
  Description of Artificial Sequence: Synthetic oligonucleotide
  Antisense strand to SEQ ID NO: 2075198
acuucuuccacacgcauac

SEQ ID NO: 2075200 - RNA, 19 nt, Artificial Sequence
  Description of Artificial Sequence: Synthetic oligonucleotide
  Sense strand starting at position 3024 of SEQ ID NO: 1881838
augcguguggaagaaguau

SEQ ID NO: 2075201 - RNA, 19 nt, Artificial Sequence
  Description of Artificial Sequence: Synthetic oligonucleotide
  Antisense strand to SEQ ID NO: 2075200
auacuucuuccacacgcau

SEQ ID NO: 2075202 - RNA, 19 nt, Artificial Sequence
  Description of Artificial Sequence: Synthetic oligonucleotide
  Sense strand starting at position 3066 of SEQ ID NO: 1881838
gcaaaugagcuguguguau

SEQ ID NO: 2075203 - RNA, 19 nt, Artificial Sequence
  Description of Artificial Sequence: Synthetic oligonucleotide
  Antisense strand to SEQ ID NO: 2075202
auacacacagcucauuugc

SEQ ID NO: 2075204 - RNA, 19 nt, Artificial Sequence
  Description of Artificial Sequence: Synthetic oligonucleotide
  Sense strand starting at position 3068 of SEQ ID NO: 1881838
aaaugagcuguguguauga

SEQ ID NO: 2075205 - RNA, 19 nt, Artificial Sequence
  Description of Artificial Sequence: Synthetic oligonucleotide
  Antisense strand to SEQ ID NO: 2075204
ucauacacacagcucauuu

SEQ ID NO: 2075206 - RNA, 19 nt, Artificial Sequence
  Description of Artificial Sequence: Synthetic oligonucleotide
  Sense strand starting at position 3679 of SEQ ID NO: 1881838
aucacaugccucugaggaa

SEQ ID NO: 2075207 - RNA, 19 nt, Artificial Sequence
  Description of Artificial Sequence: Synthetic oligonucleotide
  Antisense strand to SEQ ID NO: 2075206
uuccucagaggcaugugau

SEQ ID NO: 2075208 - RNA, 19 nt, Artificial Sequence
  Description of Artificial Sequence: Synthetic oligonucleotide
  Sense strand starting at position 3680 of SEQ ID NO: 1881838
ucacaugccucugaggaaa

SEQ ID NO: 2075209 - RNA, 19 nt, Artificial Sequence
  Description of Artificial Sequence: Synthetic oligonucleotide
  Antisense strand to SEQ ID NO: 2075208
uuuccucagaggcauguga

SEQ ID NO: 2075210 - RNA, 19 nt, Artificial Sequence
  Description of Artificial Sequence: Synthetic oligonucleotide
  Sense strand starting at position 3976 of SEQ ID NO: 1881838
ggacguaucucaguccuua

SEQ ID NO: 2075211 - RNA, 19 nt, Artificial Sequence
  Description of Artificial Sequence: Synthetic oligonucleotide
  Antisense strand to SEQ ID NO: 2075210
uaaggacugagauacgucc

SEQ ID NO: 2075212 - RNA, 19 nt, Artificial Sequence
  Description of Artificial Sequence: Synthetic oligonucleotide
  Sense strand starting at position 19 of SEQ ID NO: 1881839
uuaggaugugaagguuaau

SEQ ID NO: 2075213 - RNA, 19 nt, Artificial Sequence
  Description of Artificial Sequence: Synthetic oligonucleotide
  Antisense strand to SEQ ID NO: 2075212
auuaaccuucacauccuaa

SEQ ID NO: 2075214 - RNA, 19 nt, Artificial Sequence
  Description of Artificial Sequence: Synthetic oligonucleotide
  Sense strand starting at position 194 of SEQ ID NO: 1881839
cgaaauaccugagcaaauc

SEQ ID NO: 2075215 - RNA, 19 nt, Artificial Sequence
  Description of Artificial Sequence: Synthetic oligonucleotide
  Antisense strand to SEQ ID NO: 2075214
gauuugcucagguauuucg

SEQ ID NO: 2075216 - RNA, 19 nt, Artificial Sequence
  Description of Artificial Sequence: Synthetic oligonucleotide
  Sense strand starting at position 537 of SEQ ID NO: 1881839
caaagcguguuacucauuu

SEQ ID NO: 2075217 - RNA, 19 nt, Artificial Sequence
  Description of Artificial Sequence: Synthetic oligonucleotide
  Antisense strand to SEQ ID NO: 2075216
aaaugaguaacacgcuuug

SEQ ID NO: 2075218 - RNA, 19 nt, Artificial Sequence
  Description of Artificial Sequence: Synthetic oligonucleotide
  Sense strand starting at position 541 of SEQ ID NO: 1881839
gcguguuacucauuuaacu

SEQ ID NO: 2075219 - RNA, 19 nt, Artificial Sequence
  Description of Artificial Sequence: Synthetic oligonucleotide
  Antisense strand to SEQ ID NO: 2075218
aguuaaaugaguaacacgc

SEQ ID NO: 2075220 - RNA, 19 nt, Artificial Sequence
  Description of Artificial Sequence: Synthetic oligonucleotide
  Sense strand starting at position 600 of SEQ ID NO: 1881839
agcacaugugcuggauuua

SEQ ID NO: 2075221 - RNA, 19 nt, Artificial Sequence
  Description of Artificial Sequence: Synthetic oligonucleotide
  Antisense strand to SEQ ID NO: 2075220
uaaauccagcacaugugcu

SEQ ID NO: 2075222 - RNA, 19 nt, Artificial Sequence
  Description of Artificial Sequence: Synthetic oligonucleotide
  Sense strand starting at position 611 of SEQ ID NO: 1881839
uggauuuaauuguagauag

SEQ ID NO: 2075223 - RNA, 19 nt, Artificial Sequence
  Description of Artificial Sequence: Synthetic oligonucleotide
  Antisense strand to SEQ ID NO: 2075222
cuaucuacaauuaaaucca

SEQ ID NO: 2075224 - RNA, 19 nt, Artificial Sequence
  Description of Artificial Sequence: Synthetic oligonucleotide
  Sense strand starting at position 708 of SEQ ID NO: 1881839
gccagauugccugccuguu

SEQ ID NO: 2075225 - RNA, 19 nt, Artificial Sequence
  Description of Artificial Sequence: Synthetic oligonucleotide
  Antisense strand to SEQ ID NO: 2075224
aacaggcaggcaaucuggc

SEQ ID NO: 2075226 - RNA, 19 nt, Artificial Sequence
  Description of Artificial Sequence: Synthetic oligonucleotide
  Sense strand starting at position 718 of SEQ ID NO: 1881839
cugccuguucucuucguaa

SEQ ID NO: 2075227 - RNA, 19 nt, Artificial Sequence
  Description of Artificial Sequence: Synthetic oligonucleotide
  Antisense strand to SEQ ID NO: 2075226
uuacgaagagaacaggcag

SEQ ID NO: 2075228 - RNA, 19 nt, Artificial Sequence
  Description of Artificial Sequence: Synthetic oligonucleotide
  Sense strand starting at position 829 of SEQ ID NO: 1881839
gucagacaaucuguuugga

SEQ ID NO: 2075229 - RNA, 19 nt, Artificial Sequence
  Description of Artificial Sequence: Synthetic oligonucleotide
  Antisense strand to SEQ ID NO: 2075228
uccaaacagauugucugac

SEQ ID NO: 2075230 - RNA, 19 nt, Artificial Sequence
  Description of Artificial Sequence: Synthetic oligonucleotide
  Sense strand starting at position 831 of SEQ ID NO: 1881839
cagacaaucuguuuggauu

SEQ ID NO: 2075231 - RNA, 19 nt, Artificial Sequence
  Description of Artificial Sequence: Synthetic oligonucleotide
  Antisense strand to SEQ ID NO: 2075230
aauccaaacagauugucug

SEQ ID NO: 2075232 - RNA, 19 nt, Artificial Sequence
  Description of Artificial Sequence: Synthetic oligonucleotide
  Sense strand starting at position 832 of SEQ ID NO: 1881839
agacaaucuguuuggauug

SEQ ID NO: 2075233 - RNA, 19 nt, Artificial Sequence
  Description of Artificial Sequence: Synthetic oligonucleotide
  Antisense strand to SEQ ID NO: 2075232
caauccaaacagauugucu

SEQ ID NO: 2075234 - RNA, 19 nt, Artificial Sequence
  Description of Artificial Sequence: Synthetic oligonucleotide
  Sense strand starting at position 1145 of SEQ ID NO: 1881839
uuacaaugauuugaggauu

SEQ ID NO: 2075235 - RNA, 19 nt, Artificial Sequence
  Description of Artificial Sequence: Synthetic oligonucleotide
  Antisense strand to SEQ ID NO: 2075234
aauccucaaaucauuguaa

SEQ ID NO: 2075236 - RNA, 19 nt, Artificial Sequence
  Description of Artificial Sequence: Synthetic oligonucleotide
  Sense strand starting at position 1164 of SEQ ID NO: 1881839
ugaagcacugucuguauuu

SEQ ID NO: 2075237 - RNA, 19 nt, Artificial Sequence
  Description of Artificial Sequence: Synthetic oligonucleotide
  Antisense strand to SEQ ID NO: 2075236
aaauacagacagugcuuca

SEQ ID NO: 2075238 - RNA, 19 nt, Artificial Sequence
  Description of Artificial Sequence: Synthetic oligonucleotide
  Sense strand starting at position 1350 of SEQ ID NO: 1881839
agucaacaguaaucucauu

SEQ ID NO: 2075239 - RNA, 19 nt, Artificial Sequence
  Description of Artificial Sequence: Synthetic oligonucleotide
  Antisense strand to SEQ ID NO: 2075238
aaugagauuacuguugacu

SEQ ID NO: 2075240 - RNA, 19 nt, Artificial Sequence
  Description of Artificial Sequence: Synthetic oligonucleotide
  Sense strand starting at position 1712 of SEQ ID NO: 1881839
cuugacaucuacuugaugu

SEQ ID NO: 2075241 - RNA, 19 nt, Artificial Sequence
  Description of Artificial Sequence: Synthetic oligonucleotide
  Antisense strand to SEQ ID NO: 2075240
acaucaaguagaugucaag

SEQ ID NO: 2075242 - RNA, 19 nt, Artificial Sequence
  Description of Artificial Sequence: Synthetic oligonucleotide
  Sense strand starting at position 1725 of SEQ ID NO: 1881839
ugaugucucaaaggugacu

SEQ ID NO: 2075243 - RNA, 19 nt, Artificial Sequence
  Description of Artificial Sequence: Synthetic oligonucleotide
  Antisense strand to SEQ ID NO: 2075242
agucaccuuugagacauca

SEQ ID NO: 2075244 - RNA, 19 nt, Artificial Sequence
  Description of Artificial Sequence: Synthetic oligonucleotide
  Sense strand starting at position 2065 of SEQ ID NO: 1881839
caggauuccguagaacuua

SEQ ID NO: 2075245 - RNA, 19 nt, Artificial Sequence
  Description of Artificial Sequence: Synthetic oligonucleotide
  Antisense strand to SEQ ID NO: 2075244
uaaguucuacggaauccug

SEQ ID NO: 2075246 - RNA, 19 nt, Artificial Sequence
  Description of Artificial Sequence: Synthetic oligonucleotide
  Sense strand starting at position 2230 of SEQ ID NO: 1881839
aagucaugauuggcuagau

SEQ ID NO: 2075247 - RNA, 19 nt, Artificial Sequence
  Description of Artificial Sequence: Synthetic oligonucleotide
  Antisense strand to SEQ ID NO: 2075246
aucuagccaaucaugacuu

SEQ ID NO: 2075248 - RNA, 19 nt, Artificial Sequence
  Description of Artificial Sequence: Synthetic oligonucleotide
  Sense strand starting at position 2265 of SEQ ID NO: 1881839
acgucagaaucuccaugau

SEQ ID NO: 2075249 - RNA, 19 nt, Artificial Sequence
  Description of Artificial Sequence: Synthetic oligonucleotide
  Antisense strand to SEQ ID NO: 2075248
aucauggagauucugacgu

SEQ ID NO: 2075250 - RNA, 19 nt, Artificial Sequence
  Description of Artificial Sequence: Synthetic oligonucleotide
  Sense strand starting at position 2324 of SEQ ID NO: 1881839
uaucuuggauggcuaagaa

SEQ ID NO: 2075251 - RNA, 19 nt, Artificial Sequence
  Description of Artificial Sequence: Synthetic oligonucleotide
  Antisense strand to SEQ ID NO: 2075250
uucuuagccauccaagaua

SEQ ID NO: 2075252 - RNA, 19 nt, Artificial Sequence
  Description of Artificial Sequence: Synthetic oligonucleotide
  Sense strand starting at position 2412 of SEQ ID NO: 1881839
cuggguauauugucagaga

SEQ ID NO: 2075253 - RNA, 19 nt, Artificial Sequence
  Description of Artificial Sequence: Synthetic oligonucleotide
  Antisense strand to SEQ ID NO: 2075252
ucucugacaauauacccag

SEQ ID NO: 2075254 - RNA, 19 nt, Artificial Sequence
  Description of Artificial Sequence: Synthetic oligonucleotide
  Sense strand starting at position 2482 of SEQ ID NO: 1881839
aauauuauggcucagaagu

SEQ ID NO: 2075255 - RNA, 19 nt, Artificial Sequence
  Description of Artificial Sequence: Synthetic oligonucleotide
  Antisense strand to SEQ ID NO: 2075254
acuucugagccauaauauu

SEQ ID NO: 2075256 - RNA, 19 nt, Artificial Sequence
  Description of Artificial Sequence: Synthetic oligonucleotide
  Sense strand starting at position 2610 of SEQ ID NO: 1881839
ucugaugagccauauuaau

SEQ ID NO: 2075257 - RNA, 19 nt, Artificial Sequence
  Description of Artificial Sequence: Synthetic oligonucleotide
  Antisense strand to SEQ ID NO: 2075256
auuaauauggcucaucaga

SEQ ID NO: 2075258 - RNA, 19 nt, Artificial Sequence
  Description of Artificial Sequence: Synthetic oligonucleotide
  Sense strand starting at position 2703 of SEQ ID NO: 1881839
uuggauggcuaauccuauu

SEQ ID NO: 2075259 - RNA, 19 nt, Artificial Sequence
  Description of Artificial Sequence: Synthetic oligonucleotide
  Antisense strand to SEQ ID NO: 2075258
aauaggauuagccauccaa

SEQ ID NO: 2075260 - RNA, 19 nt, Artificial Sequence
  Description of Artificial Sequence: Synthetic oligonucleotide
  Sense strand starting at position 2754 of SEQ ID NO: 1881839
guauaaggaagucaguauu

SEQ ID NO: 2075261 - RNA, 19 nt, Artificial Sequence
  Description of Artificial Sequence: Synthetic oligonucleotide
  Antisense strand to SEQ ID NO: 2075260
aauacugacuuccuuauac

SEQ ID NO: 2075262 - RNA, 19 nt, Artificial Sequence
  Description of Artificial Sequence: Synthetic oligonucleotide
  Sense strand starting at position 2955 of SEQ ID NO: 1881839
agucuuacuucuuuggaaa

SEQ ID NO: 2075263 - RNA, 19 nt, Artificial Sequence
  Description of Artificial Sequence: Synthetic oligonucleotide
  Antisense strand to SEQ ID NO: 2075262
uuuccaaagaaguaagacu

SEQ ID NO: 2075264 - RNA, 19 nt, Artificial Sequence
  Description of Artificial Sequence: Synthetic oligonucleotide
  Sense strand starting at position 2956 of SEQ ID NO: 1881839
gucuuacuucuuuggaaau

SEQ ID NO: 2075265 - RNA, 19 nt, Artificial Sequence
  Description of Artificial Sequence: Synthetic oligonucleotide
  Antisense strand to SEQ ID NO: 2075264
auuuccaaagaaguaagac

SEQ ID NO: 2075266 - RNA, 19 nt, Artificial Sequence
  Description of Artificial Sequence: Synthetic oligonucleotide
  Sense strand starting at position 2969 of SEQ ID NO: 1881839
ggaaauaagguccguugaa

SEQ ID NO: 2075267 - RNA, 19 nt, Artificial Sequence
  Description of Artificial Sequence: Synthetic oligonucleotide
  Antisense strand to SEQ ID NO: 2075266
uucaacggaccuuauuucc

SEQ ID NO: 2075268 - RNA, 19 nt, Artificial Sequence
  Description of Artificial Sequence: Synthetic oligonucleotide
  Sense strand starting at position 2970 of SEQ ID NO: 1881839
gaaauaagguccguugaaa

SEQ ID NO: 2075269 - RNA, 19 nt, Artificial Sequence
  Description of Artificial Sequence: Synthetic oligonucleotide
  Antisense strand to SEQ ID NO: 2075268
uuucaacggaccuuauuuc

SEQ ID NO: 2075270 - RNA, 19 nt, Artificial Sequence
  Description of Artificial Sequence: Synthetic oligonucleotide
  Sense strand starting at position 3029 of SEQ ID NO: 1881839
uucguagugguagaaagaa

SEQ ID NO: 2075271 - RNA, 19 nt, Artificial Sequence
  Description of Artificial Sequence: Synthetic oligonucleotide
  Antisense strand to SEQ ID NO: 2075270
uucuuucuaccacuacgaa

SEQ ID NO: 2075272 - RNA, 19 nt, Artificial Sequence
  Description of Artificial Sequence: Synthetic oligonucleotide
  Sense strand starting at position 3523 of SEQ ID NO: 1881839
ucuauuauuggaggguaau

SEQ ID NO: 2075273 - RNA, 19 nt, Artificial Sequence
  Description of Artificial Sequence: Synthetic oligonucleotide
  Antisense strand to SEQ ID NO: 2075272
auuacccuccaauaauaga

SEQ ID NO: 2075274 - RNA, 19 nt, Artificial Sequence
  Description of Artificial Sequence: Synthetic oligonucleotide
  Sense strand starting at position 3524 of SEQ ID NO: 1881839
cuauuauuggaggguaaua

SEQ ID NO: 2075275 - RNA, 19 nt, Artificial Sequence
  Description of Artificial Sequence: Synthetic oligonucleotide
  Antisense strand to SEQ ID NO: 2075274
uauuacccuccaauaauag

SEQ ID NO: 2075276 - RNA, 19 nt, Artificial Sequence
  Description of Artificial Sequence: Synthetic oligonucleotide
  Sense strand starting at position 3534 of SEQ ID NO: 1881839
aggguaauaugccugauug

SEQ ID NO: 2075277 - RNA, 19 nt, Artificial Sequence
  Description of Artificial Sequence: Synthetic oligonucleotide
  Antisense strand to SEQ ID NO: 2075276
caaucaggcauauuacccu

SEQ ID NO: 2075278 - RNA, 19 nt, Artificial Sequence
  Description of Artificial Sequence: Synthetic oligonucleotide
  Sense strand starting at position 3535 of SEQ ID NO: 1881839
ggguaauaugccugauugg

SEQ ID NO: 2075279 - RNA, 19 nt, Artificial Sequence
  Description of Artificial Sequence: Synthetic oligonucleotide
  Antisense strand to SEQ ID NO: 2075278
ccaaucaggcauauuaccc

SEQ ID NO: 2075280 - RNA, 19 nt, Artificial Sequence
  Description of Artificial Sequence: Synthetic oligonucleotide
  Sense strand starting at position 3690 of SEQ ID NO: 1881839
uggcaagucccguaagaaa

SEQ ID NO: 2075281 - RNA, 19 nt, Artificial Sequence
  Description of Artificial Sequence: Synthetic oligonucleotide
  Antisense strand to SEQ ID NO: 2075280
uuucuuacgggacuugcca

SEQ ID NO: 2075282 - RNA, 19 nt, Artificial Sequence
  Description of Artificial Sequence: Synthetic oligonucleotide
  Sense strand starting at position 3740 of SEQ ID NO: 1881839
gugacuuacacguucgcau

SEQ ID NO: 2075283 - RNA, 19 nt, Artificial Sequence
  Description of Artificial Sequence: Synthetic oligonucleotide
  Antisense strand to SEQ ID NO: 2075282
augcgaacguguaagucac

SEQ ID NO: 2075284 - RNA, 19 nt, Artificial Sequence
  Description of Artificial Sequence: Synthetic oligonucleotide
  Sense strand starting at position 3800 of SEQ ID NO: 1881839
auaauaggugcucaacuuu

SEQ ID NO: 2075285 - RNA, 19 nt, Artificial Sequence
  Description of Artificial Sequence: Synthetic oligonucleotide
  Antisense strand to SEQ ID NO: 2075284
aaaguugagcaccuauuau

SEQ ID NO: 2075286 - RNA, 19 nt, Artificial Sequence
  Description of Artificial Sequence: Synthetic oligonucleotide
  Sense strand starting at position 3815 of SEQ ID NO: 1881839
cuuugugaacuccaugauc

SEQ ID NO: 2075287 - RNA, 19 nt, Artificial Sequence
  Description of Artificial Sequence: Synthetic oligonucleotide
  Antisense strand to SEQ ID NO: 2075286
gaucauggaguucacaaag

SEQ ID NO: 2075288 - RNA, 19 nt, Artificial Sequence
  Description of Artificial Sequence: Synthetic oligonucleotide
  Sense strand starting at position 3817 of SEQ ID NO: 1881839
uugugaacuccaugaucac

SEQ ID NO: 2075289 - RNA, 19 nt, Artificial Sequence
  Description of Artificial Sequence: Synthetic oligonucleotide
  Antisense strand to SEQ ID NO: 2075288
gugaucauggaguucacaa

SEQ ID NO: 2075290 - RNA, 19 nt, Artificial Sequence
  Description of Artificial Sequence: Synthetic oligonucleotide
  Sense strand starting at position 3877 of SEQ ID NO: 1881839
gcaaacuaucacugagguu

SEQ ID NO: 2075291 - RNA, 19 nt, Artificial Sequence
  Description of Artificial Sequence: Synthetic oligonucleotide
  Antisense strand to SEQ ID NO: 2075290
aaccucagugauaguuugc

SEQ ID NO: 2075292 - RNA, 19 nt, Artificial Sequence
  Description of Artificial Sequence: Synthetic oligonucleotide
  Sense strand starting at position 69 of SEQ ID NO: 1881840
cucugcgaugacgagaauu

SEQ ID NO: 2075293 - RNA, 19 nt, Artificial Sequence
  Description of Artificial Sequence: Synthetic oligonucleotide
  Antisense strand to SEQ ID NO: 2075292
aauucucgucaucgcagag

SEQ ID NO: 2075294 - RNA, 19 nt, Artificial Sequence
  Description of Artificial Sequence: Synthetic oligonucleotide
  Sense strand starting at position 163 of SEQ ID NO: 1881840
guguauuguauuguuugca

SEQ ID NO: 2075295 - RNA, 19 nt, Artificial Sequence
  Description of Artificial Sequence: Synthetic oligonucleotide
  Antisense strand to SEQ ID NO: 2075294
ugcaaacaauacaauacac

SEQ ID NO: 2075296 - RNA, 19 nt, Artificial Sequence
  Description of Artificial Sequence: Synthetic oligonucleotide
  Sense strand starting at position 556 of SEQ ID NO: 1881840
gcaauucuagaagguaagu

SEQ ID NO: 2075297 - RNA, 19 nt, Artificial Sequence
  Description of Artificial Sequence: Synthetic oligonucleotide
  Antisense strand to SEQ ID NO: 2075296
acuuaccuucuagaauugc

SEQ ID NO: 2075298 - RNA, 19 nt, Artificial Sequence
  Description of Artificial Sequence: Synthetic oligonucleotide
  Sense strand starting at position 690 of SEQ ID NO: 1881840
ccuggugagugacugauaa

SEQ ID NO: 2075299 - RNA, 19 nt, Artificial Sequence
  Description of Artificial Sequence: Synthetic oligonucleotide
  Antisense strand to SEQ ID NO: 2075298
uuaucagucacucaccagg

SEQ ID NO: 2075300 - RNA, 19 nt, Artificial Sequence
  Description of Artificial Sequence: Synthetic oligonucleotide
  Sense strand starting at position 702 of SEQ ID NO: 1881840
cugauaaggugauuccuuu

SEQ ID NO: 2075301 - RNA, 19 nt, Artificial Sequence
  Description of Artificial Sequence: Synthetic oligonucleotide
  Antisense strand to SEQ ID NO: 2075300
aaaggaaucaccuuaucag

SEQ ID NO: 2075302 - RNA, 19 nt, Artificial Sequence
  Description of Artificial Sequence: Synthetic oligonucleotide
  Sense strand starting at position 862 of SEQ ID NO: 1881840
ugucgaugccuuuaaauaa

SEQ ID NO: 2075303 - RNA, 19 nt, Artificial Sequence
  Description of Artificial Sequence: Synthetic oligonucleotide
  Antisense strand to SEQ ID NO: 2075302
uuauuuaaaggcaucgaca

SEQ ID NO: 2075304 - RNA, 19 nt, Artificial Sequence
  Description of Artificial Sequence: Synthetic oligonucleotide
  Sense strand starting at position 990 of SEQ ID NO: 1881840
uaauaugguauggguugau

SEQ ID NO: 2075305 - RNA, 19 nt, Artificial Sequence
  Description of Artificial Sequence: Synthetic oligonucleotide
  Antisense strand to SEQ ID NO: 2075304
aucaacccauaccauauua

SEQ ID NO: 2075306 - RNA, 19 nt, Artificial Sequence
  Description of Artificial Sequence: Synthetic oligonucleotide
  Sense strand starting at position 1067 of SEQ ID NO: 1881840
agaggcagcccucaguaaa

SEQ ID NO: 2075307 - RNA, 19 nt, Artificial Sequence
  Description of Artificial Sequence: Synthetic oligonucleotide
  Antisense strand to SEQ ID NO: 2075306
uuuacugagggcugccucu

SEQ ID NO: 2075308 - RNA, 19 nt, Artificial Sequence
  Description of Artificial Sequence: Synthetic oligonucleotide
  Sense strand starting at position 1093 of SEQ ID NO: 1881840
aggacccugucaguaaaua

SEQ ID NO: 2075309 - RNA, 19 nt, Artificial Sequence
  Description of Artificial Sequence: Synthetic oligonucleotide
  Antisense strand to SEQ ID NO: 2075308
uauuuacugacaggguccu

SEQ ID NO: 2075310 - RNA, 19 nt, Artificial Sequence
  Description of Artificial Sequence: Synthetic oligonucleotide
  Sense strand starting at position 1102 of SEQ ID NO: 1881840
ucaguaaauacggaaguau

SEQ ID NO: 2075311 - RNA, 19 nt, Artificial Sequence
  Description of Artificial Sequence: Synthetic oligonucleotide
  Antisense strand to SEQ ID NO: 2075310
auacuuccguauuuacuga

SEQ ID NO: 2075312 - RNA, 19 nt, Artificial Sequence
  Description of Artificial Sequence: Synthetic oligonucleotide
  Sense strand starting at position 1348 of SEQ ID NO: 1881840
gaagaaugacucugugcuc

SEQ ID NO: 2075313 - RNA, 19 nt, Artificial Sequence
  Description of Artificial Sequence: Synthetic oligonucleotide
  Antisense strand to SEQ ID NO: 2075312
gagcacagagucauucuuc

SEQ ID NO: 2075314 - RNA, 19 nt, Artificial Sequence
  Description of Artificial Sequence: Synthetic oligonucleotide
  Sense strand starting at position 1527 of SEQ ID NO: 1881840
cuaacaugugucugacuga

SEQ ID NO: 2075315 - RNA, 19 nt, Artificial Sequence
  Description of Artificial Sequence: Synthetic oligonucleotide
  Antisense strand to SEQ ID NO: 2075314
ucagucagacacauguuag

SEQ ID NO: 2075316 - RNA, 19 nt, Artificial Sequence
  Description of Artificial Sequence: Synthetic oligonucleotide
  Sense strand starting at position 1532 of SEQ ID NO: 1881840
augugucugacugauggga

SEQ ID NO: 2075317 - RNA, 19 nt, Artificial Sequence
  Description of Artificial Sequence: Synthetic oligonucleotide
  Antisense strand to SEQ ID NO: 2075316
ucccaucagucagacacau

SEQ ID NO: 2075318 - RNA, 19 nt, Artificial Sequence
  Description of Artificial Sequence: Synthetic oligonucleotide
  Sense strand starting at position 1659 of SEQ ID NO: 1881840
ugccgucugccuucugaua

SEQ ID NO: 2075319 - RNA, 19 nt, Artificial Sequence
  Description of Artificial Sequence: Synthetic oligonucleotide
  Antisense strand to SEQ ID NO: 2075318
uaucagaaggcagacggca

SEQ ID NO: 2075320 - RNA, 19 nt, Artificial Sequence
  Description of Artificial Sequence: Synthetic oligonucleotide
  Sense strand starting at position 1944 of SEQ ID NO: 1881840
gguaucuccucucuugaaa

SEQ ID NO: 2075321 - RNA, 19 nt, Artificial Sequence
  Description of Artificial Sequence: Synthetic oligonucleotide
  Antisense strand to SEQ ID NO: 2075320
uuucaagagaggagauacc

SEQ ID NO: 2075322 - RNA, 19 nt, Artificial Sequence
  Description of Artificial Sequence: Synthetic oligonucleotide
  Sense strand starting at position 2108 of SEQ ID NO: 1881840
ucacaagaccuuugccaga

SEQ ID NO: 2075323 - RNA, 19 nt, Artificial Sequence
  Description of Artificial Sequence: Synthetic oligonucleotide
  Antisense strand to SEQ ID NO: 2075322
ucuggcaaaggucuuguga

SEQ ID NO: 2075324 - RNA, 19 nt, Artificial Sequence
  Description of Artificial Sequence: Synthetic oligonucleotide
  Sense strand starting at position 2110 of SEQ ID NO: 1881840
acaagaccuuugccagaaa

SEQ ID NO: 2075325 - RNA, 19 nt, Artificial Sequence
  Description of Artificial Sequence: Synthetic oligonucleotide
  Antisense strand to SEQ ID NO: 2075324
uuucuggcaaaggucuugu

SEQ ID NO: 2075326 - RNA, 19 nt, Artificial Sequence
  Description of Artificial Sequence: Synthetic oligonucleotide
  Sense strand starting at position 2113 of SEQ ID NO: 1881840
agaccuuugccagaaacuc

SEQ ID NO: 2075327 - RNA, 19 nt, Artificial Sequence
  Description of Artificial Sequence: Synthetic oligonucleotide
  Antisense strand to SEQ ID NO: 2075326
gaguuucuggcaaaggucu

SEQ ID NO: 2075328 - RNA, 19 nt, Artificial Sequence
  Description of Artificial Sequence: Synthetic oligonucleotide
  Sense strand starting at position 2121 of SEQ ID NO: 1881840
gccagaaacuccucccuga

SEQ ID NO: 2075329 - RNA, 19 nt, Artificial Sequence
  Description of Artificial Sequence: Synthetic oligonucleotide
  Antisense strand to SEQ ID NO: 2075328
ucagggaggaguuucuggc

SEQ ID NO: 2075330 - RNA, 19 nt, Artificial Sequence
  Description of Artificial Sequence: Synthetic oligonucleotide
  Sense strand starting at position 2637 of SEQ ID NO: 1881840
acugauauguuucuguaac

SEQ ID NO: 2075331 - RNA, 19 nt, Artificial Sequence
  Description of Artificial Sequence: Synthetic oligonucleotide
  Antisense strand to SEQ ID NO: 2075330
guuacagaaacauaucagu

SEQ ID NO: 2075332 - RNA, 19 nt, Artificial Sequence
  Description of Artificial Sequence: Synthetic oligonucleotide
  Sense strand starting at position 2639 of SEQ ID NO: 1881840
ugauauguuucuguaacag

SEQ ID NO: 2075333 - RNA, 19 nt, Artificial Sequence
  Description of Artificial Sequence: Synthetic oligonucleotide
  Antisense strand to SEQ ID NO: 2075332
cuguuacagaaacauauca

SEQ ID NO: 2075334 - RNA, 19 nt, Artificial Sequence
  Description of Artificial Sequence: Synthetic oligonucleotide
  Sense strand starting at position 2651 of SEQ ID NO: 1881840
guaacagaauccuuguagu

SEQ ID NO: 2075335 - RNA, 19 nt, Artificial Sequence
  Description of Artificial Sequence: Synthetic oligonucleotide
  Antisense strand to SEQ ID NO: 2075334
acuacaaggauucuguuac

SEQ ID NO: 2075336 - RNA, 19 nt, Artificial Sequence
  Description of Artificial Sequence: Synthetic oligonucleotide
  Sense strand starting at position 2770 of SEQ ID NO: 1881840
gugugagcugcgcuccaaa

SEQ ID NO: 2075337 - RNA, 19 nt, Artificial Sequence
  Description of Artificial Sequence: Synthetic oligonucleotide
  Antisense strand to SEQ ID NO: 2075336
uuuggagcgcagcucacac

SEQ ID NO: 2075338 - RNA, 19 nt, Artificial Sequence
  Description of Artificial Sequence: Synthetic oligonucleotide
  Sense strand starting at position 2772 of SEQ ID NO: 1881840
gugagcugcgcuccaaaca

SEQ ID NO: 2075339 - RNA, 19 nt, Artificial Sequence
  Description of Artificial Sequence: Synthetic oligonucleotide
  Antisense strand to SEQ ID NO: 2075338
uguuuggagcgcagcucac

SEQ ID NO: 2075340 - RNA, 19 nt, Artificial Sequence
  Description of Artificial Sequence: Synthetic oligonucleotide
  Sense strand starting at position 2961 of SEQ ID NO: 1881840
guaccuauauguccacaua

SEQ ID NO: 2075341 - RNA, 19 nt, Artificial Sequence
  Description of Artificial Sequence: Synthetic oligonucleotide
  Antisense strand to SEQ ID NO: 2075340
uauguggacauauagguac

SEQ ID NO: 2075342 - RNA, 19 nt, Artificial Sequence
  Description of Artificial Sequence: Synthetic oligonucleotide
  Sense strand starting at position 3061 of SEQ ID NO: 1881840
uguaauuccucucuuggau

SEQ ID NO: 2075343 - RNA, 19 nt, Artificial Sequence
  Description of Artificial Sequence: Synthetic oligonucleotide
  Antisense strand to SEQ ID NO: 2075342
auccaagagaggaauuaca

SEQ ID NO: 2075344 - RNA, 19 nt, Artificial Sequence
  Description of Artificial Sequence: Synthetic oligonucleotide
  Sense strand starting at position 3086 of SEQ ID NO: 1881840
uucuaugauguccaacuga

SEQ ID NO: 2075345 - RNA, 19 nt, Artificial Sequence
  Description of Artificial Sequence: Synthetic oligonucleotide
  Antisense strand to SEQ ID NO: 2075344
ucaguuggacaucauagaa

SEQ ID NO: 2075346 - RNA, 19 nt, Artificial Sequence
  Description of Artificial Sequence: Synthetic oligonucleotide
  Sense strand starting at position 3109 of SEQ ID NO: 1881840
gauggugcucuuuaugaca

SEQ ID NO: 2075347 - RNA, 19 nt, Artificial Sequence
  Description of Artificial Sequence: Synthetic oligonucleotide
  Antisense strand to SEQ ID NO: 2075346
ugucauaaagagcaccauc

SEQ ID NO: 2075348 - RNA, 19 nt, Artificial Sequence
  Description of Artificial Sequence: Synthetic oligonucleotide
  Sense strand starting at position 3198 of SEQ ID NO: 1881840
ggugguauccuugagaacu

SEQ ID NO: 2075349 - RNA, 19 nt, Artificial Sequence
  Description of Artificial Sequence: Synthetic oligonucleotide
  Antisense strand to SEQ ID NO: 2075348
aguucucaaggauaccacc

SEQ ID NO: 2075350 - RNA, 19 nt, Artificial Sequence
  Description of Artificial Sequence: Synthetic oligonucleotide
  Sense strand starting at position 3249 of SEQ ID NO: 1881840
gguggaacuucuucaguga

SEQ ID NO: 2075351 - RNA, 19 nt, Artificial Sequence
  Description of Artificial Sequence: Synthetic oligonucleotide
  Antisense strand to SEQ ID NO: 2075350
ucacugaagaaguuccacc

SEQ ID NO: 2075352 - RNA, 19 nt, Artificial Sequence
  Description of Artificial Sequence: Synthetic oligonucleotide
  Sense strand starting at position 3303 of SEQ ID NO: 1881840
aaggcaagaucuguauucu

SEQ ID NO: 2075353 - RNA, 19 nt, Artificial Sequence
  Description of Artificial Sequence: Synthetic oligonucleotide
  Antisense strand to SEQ ID NO: 2075352
agaauacagaucuugccuu

SEQ ID NO: 2075354 - RNA, 19 nt, Artificial Sequence
  Description of Artificial Sequence: Synthetic oligonucleotide
  Sense strand starting at position 3304 of SEQ ID NO: 1881840
aggcaagaucuguauucuc

SEQ ID NO: 2075355 - RNA, 19 nt, Artificial Sequence
  Description of Artificial Sequence: Synthetic oligonucleotide
  Antisense strand to SEQ ID NO: 2075354
gagaauacagaucuugccu

SEQ ID NO: 2075356 - RNA, 19 nt, Artificial Sequence
  Description of Artificial Sequence: Synthetic oligonucleotide
  Sense strand starting at position 3350 of SEQ ID NO: 1881840
cuuucuuagcacugaagau

SEQ ID NO: 2075357 - RNA, 19 nt, Artificial Sequence
  Description of Artificial Sequence: Synthetic oligonucleotide
  Antisense strand to SEQ ID NO: 2075356
aucuucagugcuaagaaag

SEQ ID NO: 2075358 - RNA, 19 nt, Artificial Sequence
  Description of Artificial Sequence: Synthetic oligonucleotide
  Sense strand starting at position 3489 of SEQ ID NO: 1881840
ccuacacaguguuuaaauu

SEQ ID NO: 2075359 - RNA, 19 nt, Artificial Sequence
  Description of Artificial Sequence: Synthetic oligonucleotide
  Antisense strand to SEQ ID NO: 2075358
aauuuaaacacuguguagg

SEQ ID NO: 2075360 - RNA, 19 nt, Artificial Sequence
  Description of Artificial Sequence: Synthetic oligonucleotide
  Sense strand starting at position 3524 of SEQ ID NO: 1881840
aaaugauggucacugucuu

SEQ ID NO: 2075361 - RNA, 19 nt, Artificial Sequence
  Description of Artificial Sequence: Synthetic oligonucleotide
  Antisense strand to SEQ ID NO: 2075360
aagacagugaccaucauuu

SEQ ID NO: 2075362 - RNA, 19 nt, Artificial Sequence
  Description of Artificial Sequence: Synthetic oligonucleotide
  Sense strand starting at position 3722 of SEQ ID NO: 1881840
aagugucuucugcagagga

SEQ ID NO: 2075363 - RNA, 19 nt, Artificial Sequence
  Description of Artificial Sequence: Synthetic oligonucleotide
  Antisense strand to SEQ ID NO: 2075362
uccucugcagaagacacuu

SEQ ID NO: 2075364 - RNA, 19 nt, Artificial Sequence
  Description of Artificial Sequence: Synthetic oligonucleotide
  Sense strand starting at position 3724 of SEQ ID NO: 1881840
gugucuucugcagaggauc

SEQ ID NO: 2075365 - RNA, 19 nt, Artificial Sequence
  Description of Artificial Sequence: Synthetic oligonucleotide
  Antisense strand to SEQ ID NO: 2075364
gauccucugcagaagacac

SEQ ID NO: 2075366 - RNA, 19 nt, Artificial Sequence
  Description of Artificial Sequence: Synthetic oligonucleotide
  Sense strand starting at position 3799 of SEQ ID NO: 1881840
cucugcauuucugcugcaa

SEQ ID NO: 2075367 - RNA, 19 nt, Artificial Sequence
  Description of Artificial Sequence: Synthetic oligonucleotide
  Antisense strand to SEQ ID NO: 2075366
uugcagcagaaaugcagag

SEQ ID NO: 2075368 - RNA, 19 nt, Artificial Sequence
  Description of Artificial Sequence: Synthetic oligonucleotide
  Sense strand starting at position 3803 of SEQ ID NO: 1881840
gcauuucugcugcaacaca

SEQ ID NO: 2075369 - RNA, 19 nt, Artificial Sequence
  Description of Artificial Sequence: Synthetic oligonucleotide
  Antisense strand to SEQ ID NO: 2075368
uguguugcagcagaaaugc

SEQ ID NO: 2075370 - RNA, 19 nt, Artificial Sequence
  Description of Artificial Sequence: Synthetic oligonucleotide
  Sense strand starting at position 3814 of SEQ ID NO: 1881840
gcaacacagccucagauaa

SEQ ID NO: 2075371 - RNA, 19 nt, Artificial Sequence
  Description of Artificial Sequence: Synthetic oligonucleotide
  Antisense strand to SEQ ID NO: 2075370
uuaucugaggcuguguugc

SEQ ID NO: 2075372 - RNA, 19 nt, Artificial Sequence
  Description of Artificial Sequence: Synthetic oligonucleotide
  Sense strand starting at position 158 of SEQ ID NO: 1881841
gcauuaugaguauaaauuc

SEQ ID NO: 2075373 - RNA, 19 nt, Artificial Sequence
  Description of Artificial Sequence: Synthetic oligonucleotide
  Antisense strand to SEQ ID NO: 2075372
gaauuuauacucauaaugc

SEQ ID NO: 2075374 - RNA, 19 nt, Artificial Sequence
  Description of Artificial Sequence: Synthetic oligonucleotide
  Sense strand starting at position 167 of SEQ ID NO: 1881841
guauaaauucugcauuaag

SEQ ID NO: 2075375 - RNA, 19 nt, Artificial Sequence
  Description of Artificial Sequence: Synthetic oligonucleotide
  Antisense strand to SEQ ID NO: 2075374
cuuaaugcagaauuuauac

SEQ ID NO: 2075376 - RNA, 19 nt, Artificial Sequence
  Description of Artificial Sequence: Synthetic oligonucleotide
  Sense strand starting at position 209 of SEQ ID NO: 1881841
uauaaauucuacguuugga

SEQ ID NO: 2075377 - RNA, 19 nt, Artificial Sequence
  Description of Artificial Sequence: Synthetic oligonucleotide
  Antisense strand to SEQ ID NO: 2075376
uccaaacguagaauuuaua

SEQ ID NO: 2075378 - RNA, 19 nt, Artificial Sequence
  Description of Artificial Sequence: Synthetic oligonucleotide
  Sense strand starting at position 212 of SEQ ID NO: 1881841
aaauucuacguuuggaaga

SEQ ID NO: 2075379 - RNA, 19 nt, Artificial Sequence
  Description of Artificial Sequence: Synthetic oligonucleotide
  Antisense strand to SEQ ID NO: 2075378
ucuuccaaacguagaauuu

SEQ ID NO: 2075380 - RNA, 19 nt, Artificial Sequence
  Description of Artificial Sequence: Synthetic oligonucleotide
  Sense strand starting at position 286 of SEQ ID NO: 1881841
ugccuuguggagcauagaa

SEQ ID NO: 2075381 - RNA, 19 nt, Artificial Sequence
  Description of Artificial Sequence: Synthetic oligonucleotide
  Antisense strand to SEQ ID NO: 2075380
uucuaugcuccacaaggca

SEQ ID NO: 2075382 - RNA, 19 nt, Artificial Sequence
  Description of Artificial Sequence: Synthetic oligonucleotide
  Sense strand starting at position 1246 of SEQ ID NO: 1881841
gccgcacgcaccuuaauau

SEQ ID NO: 2075383 - RNA, 19 nt, Artificial Sequence
  Description of Artificial Sequence: Synthetic oligonucleotide
  Antisense strand to SEQ ID NO: 2075382
auauuaaggugcgugcggc

SEQ ID NO: 2075384 - RNA, 19 nt, Artificial Sequence
  Description of Artificial Sequence: Synthetic oligonucleotide
  Sense strand starting at position 1257 of SEQ ID NO: 1881841
cuuaauaugcagugaauaa

SEQ ID NO: 2075385 - RNA, 19 nt, Artificial Sequence
  Description of Artificial Sequence: Synthetic oligonucleotide
  Antisense strand to SEQ ID NO: 2075384
uuauucacugcauauuaag

SEQ ID NO: 2075386 - RNA, 19 nt, Artificial Sequence
  Description of Artificial Sequence: Synthetic oligonucleotide
  Sense strand starting at position 1296 of SEQ ID NO: 1881841
gguugaugacgccaucuga

SEQ ID NO: 2075387 - RNA, 19 nt, Artificial Sequence
  Description of Artificial Sequence: Synthetic oligonucleotide
  Antisense strand to SEQ ID NO: 2075386
ucagauggcgucaucaacc

SEQ ID NO: 2075388 - RNA, 19 nt, Artificial Sequence
  Description of Artificial Sequence: Synthetic oligonucleotide
  Sense strand starting at position 1728 of SEQ ID NO: 1881841
aaaguuagguuauugauga

SEQ ID NO: 2075389 - RNA, 19 nt, Artificial Sequence
  Description of Artificial Sequence: Synthetic oligonucleotide
  Antisense strand to SEQ ID NO: 2075388
ucaucaauaaccuaacuuu

SEQ ID NO: 2075390 - RNA, 19 nt, Artificial Sequence
  Description of Artificial Sequence: Synthetic oligonucleotide
  Sense strand starting at position 1733 of SEQ ID NO: 1881841
uagguuauugaugagguua

SEQ ID NO: 2075391 - RNA, 19 nt, Artificial Sequence
  Description of Artificial Sequence: Synthetic oligonucleotide
  Antisense strand to SEQ ID NO: 2075390
uaaccucaucaauaaccua

SEQ ID NO: 2075392 - RNA, 19 nt, Artificial Sequence
  Description of Artificial Sequence: Synthetic oligonucleotide
  Sense strand starting at position 1777 of SEQ ID NO: 1881841
gagaacgagcaguaguuaa

SEQ ID NO: 2075393 - RNA, 19 nt, Artificial Sequence
  Description of Artificial Sequence: Synthetic oligonucleotide
  Antisense strand to SEQ ID NO: 2075392
uuaacuacugcucguucuc

SEQ ID NO: 2075394 - RNA, 19 nt, Artificial Sequence
  Description of Artificial Sequence: Synthetic oligonucleotide
  Sense strand starting at position 2040 of SEQ ID NO: 1881841
aggaauuggcaguaaacgu

SEQ ID NO: 2075395 - RNA, 19 nt, Artificial Sequence
  Description of Artificial Sequence: Synthetic oligonucleotide
  Antisense strand to SEQ ID NO: 2075394
acguuuacugccaauuccu

SEQ ID NO: 2075396 - RNA, 19 nt, Artificial Sequence
  Description of Artificial Sequence: Synthetic oligonucleotide
  Sense strand starting at position 2048 of SEQ ID NO: 1881841
gcaguaaacguguuucucu

SEQ ID NO: 2075397 - RNA, 19 nt, Artificial Sequence
  Description of Artificial Sequence: Synthetic oligonucleotide
  Antisense strand to SEQ ID NO: 2075396
agagaaacacguuuacugc

SEQ ID NO: 2075398 - RNA, 19 nt, Artificial Sequence
  Description of Artificial Sequence: Synthetic oligonucleotide
  Sense strand starting at position 2377 of SEQ ID NO: 1881841
gcgggugggaccuauggau

SEQ ID NO: 2075399 - RNA, 19 nt, Artificial Sequence
  Description of Artificial Sequence: Synthetic oligonucleotide
  Antisense strand to SEQ ID NO: 2075398
auccauaggucccacccgc

SEQ ID NO: 2075400 - RNA, 19 nt, Artificial Sequence
  Description of Artificial Sequence: Synthetic oligonucleotide
  Sense strand starting at position 2544 of SEQ ID NO: 1881841
ucgugaaucccucagaucu

SEQ ID NO: 2075401 - RNA, 19 nt, Artificial Sequence
  Description of Artificial Sequence: Synthetic oligonucleotide
  Antisense strand to SEQ ID NO: 2075400
agaucugagggauucacga

SEQ ID NO: 2075402 - RNA, 19 nt, Artificial Sequence
  Description of Artificial Sequence: Synthetic oligonucleotide
  Sense strand starting at position 2790 of SEQ ID NO: 1881841
ggcccugauuugucucuga

SEQ ID NO: 2075403 - RNA, 19 nt, Artificial Sequence
  Description of Artificial Sequence: Synthetic oligonucleotide
  Antisense strand to SEQ ID NO: 2075402
ucagagacaaaucagggcc

SEQ ID NO: 2075404 - RNA, 19 nt, Artificial Sequence
  Description of Artificial Sequence: Synthetic oligonucleotide
  Sense strand starting at position 2825 of SEQ ID NO: 1881841
aguugucuugcagauagaa

SEQ ID NO: 2075405 - RNA, 19 nt, Artificial Sequence
  Description of Artificial Sequence: Synthetic oligonucleotide
  Antisense strand to SEQ ID NO: 2075404
uucuaucugcaagacaacu

SEQ ID NO: 2075406 - RNA, 19 nt, Artificial Sequence
  Description of Artificial Sequence: Synthetic oligonucleotide
  Sense strand starting at position 2827 of SEQ ID NO: 1881841
uugucuugcagauagaaug

SEQ ID NO: 2075407 - RNA, 19 nt, Artificial Sequence
  Description of Artificial Sequence: Synthetic oligonucleotide
  Antisense strand to SEQ ID NO: 2075406
cauucuaucugcaagacaa

SEQ ID NO: 2075408 - RNA, 19 nt, Artificial Sequence
  Description of Artificial Sequence: Synthetic oligonucleotide
  Sense strand starting at position 2837 of SEQ ID NO: 1881841
gauagaaugcuuuagcaug

SEQ ID NO: 2075409 - RNA, 19 nt, Artificial Sequence
  Description of Artificial Sequence: Synthetic oligonucleotide
  Antisense strand to SEQ ID NO: 2075408
caugcuaaagcauucuauc

SEQ ID NO: 2075410 - RNA, 19 nt, Artificial Sequence
  Description of Artificial Sequence: Synthetic oligonucleotide
  Sense strand starting at position 2854 of SEQ ID NO: 1881841
uguguuuguguuguaaucu

SEQ ID NO: 2075411 - RNA, 19 nt, Artificial Sequence
  Description of Artificial Sequence: Synthetic oligonucleotide
  Antisense strand to SEQ ID NO: 2075410
agauuacaacacaaacaca

SEQ ID NO: 2075412 - RNA, 19 nt, Artificial Sequence
  Description of Artificial Sequence: Synthetic oligonucleotide
  Sense strand starting at position 2884 of SEQ ID NO: 1881841
uuguaaccucuuugggaca

SEQ ID NO: 2075413 - RNA, 19 nt, Artificial Sequence
  Description of Artificial Sequence: Synthetic oligonucleotide
  Antisense strand to SEQ ID NO: 2075412
ugucccaaagagguuacaa

SEQ ID NO: 2075414 - RNA, 19 nt, Artificial Sequence
  Description of Artificial Sequence: Synthetic oligonucleotide
  Sense strand starting at position 2983 of SEQ ID NO: 1881841
cuauucugacccuggaaca

SEQ ID NO: 2075415 - RNA, 19 nt, Artificial Sequence
  Description of Artificial Sequence: Synthetic oligonucleotide
  Antisense strand to SEQ ID NO: 2075414
uguuccagggucagaauag

SEQ ID NO: 2075416 - RNA, 19 nt, Artificial Sequence
  Description of Artificial Sequence: Synthetic oligonucleotide
  Sense strand starting at position 3011 of SEQ ID NO: 1881841
uuuggcuuccaguaaaccu

SEQ ID NO: 2075417 - RNA, 19 nt, Artificial Sequence
  Description of Artificial Sequence: Synthetic oligonucleotide
  Antisense strand to SEQ ID NO: 2075416
agguuuacuggaagccaaa

SEQ ID NO: 2075418 - RNA, 19 nt, Artificial Sequence
  Description of Artificial Sequence: Synthetic oligonucleotide
  Sense strand starting at position 3081 of SEQ ID NO: 1881841
gcaguuuaacugcaauaga

SEQ ID NO: 2075419 - RNA, 19 nt, Artificial Sequence
  Description of Artificial Sequence: Synthetic oligonucleotide
  Antisense strand to SEQ ID NO: 2075418
ucuauugcaguuaaacugc

SEQ ID NO: 2075420 - RNA, 19 nt, Artificial Sequence
  Description of Artificial Sequence: Synthetic oligonucleotide
  Sense strand starting at position 3084 of SEQ ID NO: 1881841
guuuaacugcaauagaguu

SEQ ID NO: 2075421 - RNA, 19 nt, Artificial Sequence
  Description of Artificial Sequence: Synthetic oligonucleotide
  Antisense strand to SEQ ID NO: 2075420
aacucuauugcaguuaaac

SEQ ID NO: 2075422 - RNA, 19 nt, Artificial Sequence
  Description of Artificial Sequence: Synthetic oligonucleotide
  Sense strand starting at position 3500 of SEQ ID NO: 1881841
aaaguugaaccaugagcuu

SEQ ID NO: 2075423 - RNA, 19 nt, Artificial Sequence
  Description of Artificial Sequence: Synthetic oligonucleotide
  Antisense strand to SEQ ID NO: 2075422
aagcucaugguucaacuuu

SEQ ID NO: 2075424 - RNA, 19 nt, Artificial Sequence
  Description of Artificial Sequence: Synthetic oligonucleotide
  Sense strand starting at position 3556 of SEQ ID NO: 1881841
ugcagaugaggguaugcau

SEQ ID NO: 2075425 - RNA, 19 nt, Artificial Sequence
  Description of Artificial Sequence: Synthetic oligonucleotide
  Antisense strand to SEQ ID NO: 2075424
augcauacccucaucugca

SEQ ID NO: 2075426 - RNA, 19 nt, Artificial Sequence
  Description of Artificial Sequence: Synthetic oligonucleotide
  Sense strand starting at position 3563 of SEQ ID NO: 1881841
gaggguaugcauugauuaa

SEQ ID NO: 2075427 - RNA, 19 nt, Artificial Sequence
  Description of Artificial Sequence: Synthetic oligonucleotide
  Antisense strand to SEQ ID NO: 2075426
uuaaucaaugcauacccuc

SEQ ID NO: 2075428 - RNA, 19 nt, Artificial Sequence
  Description of Artificial Sequence: Synthetic oligonucleotide
  Sense strand starting at position 3567 of SEQ ID NO: 1881841
guaugcauugauuaaaccu

SEQ ID NO: 2075429 - RNA, 19 nt, Artificial Sequence
  Description of Artificial Sequence: Synthetic oligonucleotide
  Antisense strand to SEQ ID NO: 2075428
agguuuaaucaaugcauac

SEQ ID NO: 2075430 - RNA, 19 nt, Artificial Sequence
  Description of Artificial Sequence: Synthetic oligonucleotide
  Sense strand starting at position 3580 of SEQ ID NO: 1881841
aaaccuacuggcugguaau

SEQ ID NO: 2075431 - RNA, 19 nt, Artificial Sequence
  Description of Artificial Sequence: Synthetic oligonucleotide
  Antisense strand to SEQ ID NO: 2075430
auuaccagccaguagguuu

SEQ ID NO: 2075432 - RNA, 19 nt, Artificial Sequence
  Description of Artificial Sequence: Synthetic oligonucleotide
  Sense strand starting at position 3581 of SEQ ID NO: 1881841
aaccuacuggcugguaaua

SEQ ID NO: 2075433 - RNA, 19 nt, Artificial Sequence
  Description of Artificial Sequence: Synthetic oligonucleotide
  Antisense strand to SEQ ID NO: 2075432
uauuaccagccaguagguu

SEQ ID NO: 2075434 - RNA, 19 nt, Artificial Sequence
  Description of Artificial Sequence: Synthetic oligonucleotide
  Sense strand starting at position 3694 of SEQ ID NO: 1881841
gugcaaaguuaaucacaca

SEQ ID NO: 2075435 - RNA, 19 nt, Artificial Sequence
  Description of Artificial Sequence: Synthetic oligonucleotide
  Antisense strand to SEQ ID NO: 2075434
ugugugauuaacuuugcac

SEQ ID NO: 2075436 - RNA, 19 nt, Artificial Sequence
  Description of Artificial Sequence: Synthetic oligonucleotide
  Sense strand starting at position 3710 of SEQ ID NO: 1881841
acagcaucgcaagagugaa

SEQ ID NO: 2075437 - RNA, 19 nt, Artificial Sequence
  Description of Artificial Sequence: Synthetic oligonucleotide
  Antisense strand to SEQ ID NO: 2075436
uucacucuugcgaugcugu

SEQ ID NO: 2075438 - RNA, 19 nt, Artificial Sequence
  Description of Artificial Sequence: Synthetic oligonucleotide
  Sense strand starting at position 3816 of SEQ ID NO: 1881841
gcgucaggcagcucuguau

SEQ ID NO: 2075439 - RNA, 19 nt, Artificial Sequence
  Description of Artificial Sequence: Synthetic oligonucleotide
  Antisense strand to SEQ ID NO: 2075438
auacagagcugccugacgc

SEQ ID NO: 2075440 - RNA, 19 nt, Artificial Sequence
  Description of Artificial Sequence: Synthetic oligonucleotide
  Sense strand starting at position 3828 of SEQ ID NO: 1881841
ucuguauuugcugaugcau

SEQ ID NO: 2075441 - RNA, 19 nt, Artificial Sequence
  Description of Artificial Sequence: Synthetic oligonucleotide
  Antisense strand to SEQ ID NO: 2075440
augcaucagcaaauacaga

SEQ ID NO: 2075442 - RNA, 19 nt, Artificial Sequence
  Description of Artificial Sequence: Synthetic oligonucleotide
  Sense strand starting at position 3851 of SEQ ID NO: 1881841
cuaauauaucuuggugaau

SEQ ID NO: 2075443 - RNA, 19 nt, Artificial Sequence
  Description of Artificial Sequence: Synthetic oligonucleotide
  Antisense strand to SEQ ID NO: 2075442
auucaccaagauauauuag

SEQ ID NO: 2075444 - RNA, 19 nt, Artificial Sequence
  Description of Artificial Sequence: Synthetic oligonucleotide
  Sense strand starting at position 3852 of SEQ ID NO: 1881841
uaauauaucuuggugaaug

SEQ ID NO: 2075445 - RNA, 19 nt, Artificial Sequence
  Description of Artificial Sequence: Synthetic oligonucleotide
  Antisense strand to SEQ ID NO: 2075444
cauucaccaagauauauua

SEQ ID NO: 2075446 - RNA, 19 nt, Artificial Sequence
  Description of Artificial Sequence: Synthetic oligonucleotide
  Sense strand starting at position 3857 of SEQ ID NO: 1881841
uaucuuggugaaugcagaa

SEQ ID NO: 2075447 - RNA, 19 nt, Artificial Sequence
  Description of Artificial Sequence: Synthetic oligonucleotide
  Antisense strand to SEQ ID NO: 2075446
uucugcauucaccaagaua

SEQ ID NO: 2075448 - RNA, 19 nt, Artificial Sequence
  Description of Artificial Sequence: Synthetic oligonucleotide
  Sense strand starting at position 3962 of SEQ ID NO: 1881841
ggcucaucucucgagagga

SEQ ID NO: 2075449 - RNA, 19 nt, Artificial Sequence
  Description of Artificial Sequence: Synthetic oligonucleotide
  Antisense strand to SEQ ID NO: 2075448
uccucucgagagaugagcc

SEQ ID NO: 2075450 - RNA, 19 nt, Artificial Sequence
  Description of Artificial Sequence: Synthetic oligonucleotide
  Sense strand starting at position 3981 of SEQ ID NO: 1881841
gacugagugccucauggau

SEQ ID NO: 2075451 - RNA, 19 nt, Artificial Sequence
  Description of Artificial Sequence: Synthetic oligonucleotide
  Antisense strand to SEQ ID NO: 2075450
auccaugaggcacucaguc

SEQ ID NO: 2075452 - RNA, 19 nt, Artificial Sequence
  Description of Artificial Sequence: Synthetic oligonucleotide
  Sense strand starting at position 31 of SEQ ID NO: 1881842
uuggcuuguccaugaccau

SEQ ID NO: 2075453 - RNA, 19 nt, Artificial Sequence
  Description of Artificial Sequence: Synthetic oligonucleotide
  Antisense strand to SEQ ID NO: 2075452
auggucauggacaagccaa

SEQ ID NO: 2075454 - RNA, 19 nt, Artificial Sequence
  Description of Artificial Sequence: Synthetic oligonucleotide
  Sense strand starting at position 161 of SEQ ID NO: 1881842
gauuuaacuugguaaagac

SEQ ID NO: 2075455 - RNA, 19 nt, Artificial Sequence
  Description of Artificial Sequence: Synthetic oligonucleotide
  Antisense strand to SEQ ID NO: 2075454
gucuuuaccaaguuaaauc

SEQ ID NO: 2075456 - RNA, 19 nt, Artificial Sequence
  Description of Artificial Sequence: Synthetic oligonucleotide
  Sense strand starting at position 426 of SEQ ID NO: 1881842
guuugugaugcugacuguu

SEQ ID NO: 2075457 - RNA, 19 nt, Artificial Sequence
  Description of Artificial Sequence: Synthetic oligonucleotide
  Antisense strand to SEQ ID NO: 2075456
aacagucagcaucacaaac

SEQ ID NO: 2075458 - RNA, 19 nt, Artificial Sequence
  Description of Artificial Sequence: Synthetic oligonucleotide
  Sense strand starting at position 567 of SEQ ID NO: 1881842
gcagaaauugcauaccaug

SEQ ID NO: 2075459 - RNA, 19 nt, Artificial Sequence
  Description of Artificial Sequence: Synthetic oligonucleotide
  Antisense strand to SEQ ID NO: 2075458
caugguaugcaauuucugc

SEQ ID NO: 2075460 - RNA, 19 nt, Artificial Sequence
  Description of Artificial Sequence: Synthetic oligonucleotide
  Sense strand starting at position 697 of SEQ ID NO: 1881842
ggcagagugguuuggacua

SEQ ID NO: 2075461 - RNA, 19 nt, Artificial Sequence
  Description of Artificial Sequence: Synthetic oligonucleotide
  Antisense strand to SEQ ID NO: 2075460
uaguccaaaccacucugcc

SEQ ID NO: 2075462 - RNA, 19 nt, Artificial Sequence
  Description of Artificial Sequence: Synthetic oligonucleotide
  Sense strand starting at position 939 of SEQ ID NO: 1881842
gguccuucccucuagucua

SEQ ID NO: 2075463 - RNA, 19 nt, Artificial Sequence
  Description of Artificial Sequence: Synthetic oligonucleotide
  Antisense strand to SEQ ID NO: 2075462
uagacuagagggaaggacc

SEQ ID NO: 2075464 - RNA, 19 nt, Artificial Sequence
  Description of Artificial Sequence: Synthetic oligonucleotide
  Sense strand starting at position 1071 of SEQ ID NO: 1881842
cauguaucaugggcauacu

SEQ ID NO: 2075465 - RNA, 19 nt, Artificial Sequence
  Description of Artificial Sequence: Synthetic oligonucleotide
  Antisense strand to SEQ ID NO: 2075464
aguaugcccaugauacaug

SEQ ID NO: 2075466 - RNA, 19 nt, Artificial Sequence
  Description of Artificial Sequence: Synthetic oligonucleotide
  Sense strand starting at position 1072 of SEQ ID NO: 1881842
auguaucaugggcauacua

SEQ ID NO: 2075467 - RNA, 19 nt, Artificial Sequence
  Description of Artificial Sequence: Synthetic oligonucleotide
  Antisense strand to SEQ ID NO: 2075466
uaguaugcccaugauacau

SEQ ID NO: 2075468 - RNA, 19 nt, Artificial Sequence
  Description of Artificial Sequence: Synthetic oligonucleotide
  Sense strand starting at position 1074 of SEQ ID NO: 1881842
guaucaugggcauacuaua

SEQ ID NO: 2075469 - RNA, 19 nt, Artificial Sequence
  Description of Artificial Sequence: Synthetic oligonucleotide
  Antisense strand to SEQ ID NO: 2075468
uauaguaugcccaugauac

SEQ ID NO: 2075470 - RNA, 19 nt, Artificial Sequence
  Description of Artificial Sequence: Synthetic oligonucleotide
  Sense strand starting at position 1102 of SEQ ID NO: 1881842
acauaugugauguauaugu

SEQ ID NO: 2075471 - RNA, 19 nt, Artificial Sequence
  Description of Artificial Sequence: Synthetic oligonucleotide
  Antisense strand to SEQ ID NO: 2075470
acauauacaucacauaugu

SEQ ID NO: 2075472 - RNA, 19 nt, Artificial Sequence
  Description of Artificial Sequence: Synthetic oligonucleotide
  Sense strand starting at position 1121 of SEQ ID NO: 1881842
auauguguuagguaacauc

SEQ ID NO: 2075473 - RNA, 19 nt, Artificial Sequence
  Description of Artificial Sequence: Synthetic oligonucleotide
  Antisense strand to SEQ ID NO: 2075472
gauguuaccuaacacauau

SEQ ID NO: 2075474 - RNA, 19 nt, Artificial Sequence
  Description of Artificial Sequence: Synthetic oligonucleotide
  Sense strand starting at position 1137 of SEQ ID NO: 1881842
auccaaugauaucauggaa

SEQ ID NO: 2075475 - RNA, 19 nt, Artificial Sequence
  Description of Artificial Sequence: Synthetic oligonucleotide
  Antisense strand to SEQ ID NO: 2075474
uuccaugauaucauuggau

SEQ ID NO: 2075476 - RNA, 19 nt, Artificial Sequence
  Description of Artificial Sequence: Synthetic oligonucleotide
  Sense strand starting at position 1243 of SEQ ID NO: 1881842
gagagacugccucgugcuu

SEQ ID NO: 2075477 - RNA, 19 nt, Artificial Sequence
  Description of Artificial Sequence: Synthetic oligonucleotide
  Antisense strand to SEQ ID NO: 2075476
aagcacgaggcagucucuc

SEQ ID NO: 2075478 - RNA, 19 nt, Artificial Sequence
  Description of Artificial Sequence: Synthetic oligonucleotide
  Sense strand starting at position 1298 of SEQ ID NO: 1881842
gcauuaugaguauaaauuc

SEQ ID NO: 2075479 - RNA, 19 nt, Artificial Sequence
  Description of Artificial Sequence: Synthetic oligonucleotide
  Antisense strand to SEQ ID NO: 2075478
gaauuuauacucauaaugc

SEQ ID NO: 2075480 - RNA, 19 nt, Artificial Sequence
  Description of Artificial Sequence: Synthetic oligonucleotide
  Sense strand starting at position 1307 of SEQ ID NO: 1881842
guauaaauucugcauuaag

SEQ ID NO: 2075481 - RNA, 19 nt, Artificial Sequence
  Description of Artificial Sequence: Synthetic oligonucleotide
  Antisense strand to SEQ ID NO: 2075480
cuuaaugcagaauuuauac

SEQ ID NO: 2075482 - RNA, 19 nt, Artificial Sequence
  Description of Artificial Sequence: Synthetic oligonucleotide
  Sense strand starting at position 1349 of SEQ ID NO: 1881842
uauaaauucuacguuugga

SEQ ID NO: 2075483 - RNA, 19 nt, Artificial Sequence
  Description of Artificial Sequence: Synthetic oligonucleotide
  Antisense strand to SEQ ID NO: 2075482
uccaaacguagaauuuaua

SEQ ID NO: 2075484 - RNA, 19 nt, Artificial Sequence
  Description of Artificial Sequence: Synthetic oligonucleotide
  Sense strand starting at position 1352 of SEQ ID NO: 1881842
aaauucuacguuuggaaga

SEQ ID NO: 2075485 - RNA, 19 nt, Artificial Sequence
  Description of Artificial Sequence: Synthetic oligonucleotide
  Antisense strand to SEQ ID NO: 2075484
ucuuccaaacguagaauuu

SEQ ID NO: 2075486 - RNA, 19 nt, Artificial Sequence
  Description of Artificial Sequence: Synthetic oligonucleotide
  Sense strand starting at position 1426 of SEQ ID NO: 1881842
ugccuuguggagcauagaa

SEQ ID NO: 2075487 - RNA, 19 nt, Artificial Sequence
  Description of Artificial Sequence: Synthetic oligonucleotide
  Antisense strand to SEQ ID NO: 2075486
uucuaugcuccacaaggca

SEQ ID NO: 2075488 - RNA, 19 nt, Artificial Sequence
  Description of Artificial Sequence: Synthetic oligonucleotide
  Sense strand starting at position 2386 of SEQ ID NO: 1881842
gccgcacgcaccuuaauau

SEQ ID NO: 2075489 - RNA, 19 nt, Artificial Sequence
  Description of Artificial Sequence: Synthetic oligonucleotide
  Antisense strand to SEQ ID NO: 2075488
auauuaaggugcgugcggc

SEQ ID NO: 2075490 - RNA, 19 nt, Artificial Sequence
  Description of Artificial Sequence: Synthetic oligonucleotide
  Sense strand starting at position 2397 of SEQ ID NO: 1881842
cuuaauaugcagugaauaa

SEQ ID NO: 2075491 - RNA, 19 nt, Artificial Sequence
  Description of Artificial Sequence: Synthetic oligonucleotide
  Antisense strand to SEQ ID NO: 2075490
uuauucacugcauauuaag

SEQ ID NO: 2075492 - RNA, 19 nt, Artificial Sequence
  Description of Artificial Sequence: Synthetic oligonucleotide
  Sense strand starting at position 2436 of SEQ ID NO: 1881842
gguugaugacgccaucuga

SEQ ID NO: 2075493 - RNA, 19 nt, Artificial Sequence
  Description of Artificial Sequence: Synthetic oligonucleotide
  Antisense strand to SEQ ID NO: 2075492
ucagauggcgucaucaacc

SEQ ID NO: 2075494 - RNA, 19 nt, Artificial Sequence
  Description of Artificial Sequence: Synthetic oligonucleotide
  Sense strand starting at position 2625 of SEQ ID NO: 1881842
ggaguuaggguguguccau

SEQ ID NO: 2075495 - RNA, 19 nt, Artificial Sequence
  Description of Artificial Sequence: Synthetic oligonucleotide
  Antisense strand to SEQ ID NO: 2075494
auggacacacccuaacucc

SEQ ID NO: 2075496 - RNA, 19 nt, Artificial Sequence
  Description of Artificial Sequence: Synthetic oligonucleotide
  Sense strand starting at position 2664 of SEQ ID NO: 1881842
ggagguacucaccguguca

SEQ ID NO: 2075497 - RNA, 19 nt, Artificial Sequence
  Description of Artificial Sequence: Synthetic oligonucleotide
  Antisense strand to SEQ ID NO: 2075496
ugacacggugaguaccucc

SEQ ID NO: 2075498 - RNA, 19 nt, Artificial Sequence
  Description of Artificial Sequence: Synthetic oligonucleotide
  Sense strand starting at position 2868 of SEQ ID NO: 1881842
aaaguuagguuauugauga

SEQ ID NO: 2075499 - RNA, 19 nt, Artificial Sequence
  Description of Artificial Sequence: Synthetic oligonucleotide
  Antisense strand to SEQ ID NO: 2075498
ucaucaauaaccuaacuuu

SEQ ID NO: 2075500 - RNA, 19 nt, Artificial Sequence
  Description of Artificial Sequence: Synthetic oligonucleotide
  Sense strand starting at position 2873 of SEQ ID NO: 1881842
uagguuauugaugagguua

SEQ ID NO: 2075501 - RNA, 19 nt, Artificial Sequence
  Description of Artificial Sequence: Synthetic oligonucleotide
  Antisense strand to SEQ ID NO: 2075500
uaaccucaucaauaaccua

SEQ ID NO: 2075502 - RNA, 19 nt, Artificial Sequence
  Description of Artificial Sequence: Synthetic oligonucleotide
  Sense strand starting at position 2917 of SEQ ID NO: 1881842
gagaacgagcaguaguuaa

SEQ ID NO: 2075503 - RNA, 19 nt, Artificial Sequence
  Description of Artificial Sequence: Synthetic oligonucleotide
  Antisense strand to SEQ ID NO: 2075502
uuaacuacugcucguucuc

SEQ ID NO: 2075504 - RNA, 19 nt, Artificial Sequence
  Description of Artificial Sequence: Synthetic oligonucleotide
  Sense strand starting at position 3180 of SEQ ID NO: 1881842
aggaauuggcaguaaacgu

SEQ ID NO: 2075505 - RNA, 19 nt, Artificial Sequence
  Description of Artificial Sequence: Synthetic oligonucleotide
  Antisense strand to SEQ ID NO: 2075504
acguuuacugccaauuccu

SEQ ID NO: 2075506 - RNA, 19 nt, Artificial Sequence
  Description of Artificial Sequence: Synthetic oligonucleotide
  Sense strand starting at position 3188 of SEQ ID NO: 1881842
gcaguaaacguguuucucu

SEQ ID NO: 2075507 - RNA, 19 nt, Artificial Sequence
  Description of Artificial Sequence: Synthetic oligonucleotide
  Antisense strand to SEQ ID NO: 2075506
agagaaacacguuuacugc

SEQ ID NO: 2075508 - RNA, 19 nt, Artificial Sequence
  Description of Artificial Sequence: Synthetic oligonucleotide
  Sense strand starting at position 3189 of SEQ ID NO: 1881842
caguaaacguguuucucuu

SEQ ID NO: 2075509 - RNA, 19 nt, Artificial Sequence
  Description of Artificial Sequence: Synthetic oligonucleotide
  Antisense strand to SEQ ID NO: 2075508
aagagaaacacguuuacug

SEQ ID NO: 2075510 - RNA, 19 nt, Artificial Sequence
  Description of Artificial Sequence: Synthetic oligonucleotide
  Sense strand starting at position 3259 of SEQ ID NO: 1881842
aaucuaaggcgaugcauua

SEQ ID NO: 2075511 - RNA, 19 nt, Artificial Sequence
  Description of Artificial Sequence: Synthetic oligonucleotide
  Antisense strand to SEQ ID NO: 2075510
uaaugcaucgccuuagauu

SEQ ID NO: 2075512 - RNA, 19 nt, Artificial Sequence
  Description of Artificial Sequence: Synthetic oligonucleotide
  Sense strand starting at position 3312 of SEQ ID NO: 1881842
augugaacauuauaaagca

SEQ ID NO: 2075513 - RNA, 19 nt, Artificial Sequence
  Description of Artificial Sequence: Synthetic oligonucleotide
  Antisense strand to SEQ ID NO: 2075512
ugcuuuauaauguucacau

SEQ ID NO: 2075514 - RNA, 19 nt, Artificial Sequence
  Description of Artificial Sequence: Synthetic oligonucleotide
  Sense strand starting at position 3517 of SEQ ID NO: 1881842
gcgggugggaccuauggau

SEQ ID NO: 2075515 - RNA, 19 nt, Artificial Sequence
  Description of Artificial Sequence: Synthetic oligonucleotide
  Antisense strand to SEQ ID NO: 2075514
auccauaggucccacccgc

SEQ ID NO: 2075516 - RNA, 19 nt, Artificial Sequence
  Description of Artificial Sequence: Synthetic oligonucleotide
  Sense strand starting at position 3682 of SEQ ID NO: 1881842
ucucgugaaucccucagau

SEQ ID NO: 2075517 - RNA, 19 nt, Artificial Sequence
  Description of Artificial Sequence: Synthetic oligonucleotide
  Antisense strand to SEQ ID NO: 2075516
aucugagggauucacgaga

SEQ ID NO: 2075518 - RNA, 19 nt, Artificial Sequence
  Description of Artificial Sequence: Synthetic oligonucleotide
  Sense strand starting at position 3684 of SEQ ID NO: 1881842
ucgugaaucccucagaucu

SEQ ID NO: 2075519 - RNA, 19 nt, Artificial Sequence
  Description of Artificial Sequence: Synthetic oligonucleotide
  Antisense strand to SEQ ID NO: 2075518
agaucugagggauucacga

SEQ ID NO: 2075520 - RNA, 19 nt, Artificial Sequence
  Description of Artificial Sequence: Synthetic oligonucleotide
  Sense strand starting at position 3691 of SEQ ID NO: 1881842
ucccucagaucuucucgua

SEQ ID NO: 2075521 - RNA, 19 nt, Artificial Sequence
  Description of Artificial Sequence: Synthetic oligonucleotide
  Antisense strand to SEQ ID NO: 2075520
uacgagaagaucugaggga

SEQ ID NO: 2075522 - RNA, 19 nt, Artificial Sequence
  Description of Artificial Sequence: Synthetic oligonucleotide
  Sense strand starting at position 3930 of SEQ ID NO: 1881842
ggcccugauuugucucuga

SEQ ID NO: 2075523 - RNA, 19 nt, Artificial Sequence
  Description of Artificial Sequence: Synthetic oligonucleotide
  Antisense strand to SEQ ID NO: 2075522
ucagagacaaaucagggcc

SEQ ID NO: 2075524 - RNA, 19 nt, Artificial Sequence
  Description of Artificial Sequence: Synthetic oligonucleotide
  Sense strand starting at position 3935 of SEQ ID NO: 1881842
ugauuugucucugaaucau

SEQ ID NO: 2075525 - RNA, 19 nt, Artificial Sequence
  Description of Artificial Sequence: Synthetic oligonucleotide
  Antisense strand to SEQ ID NO: 2075524
augauucagagacaaauca

SEQ ID NO: 2075526 - RNA, 19 nt, Artificial Sequence
  Description of Artificial Sequence: Synthetic oligonucleotide
  Sense strand starting at position 3965 of SEQ ID NO: 1881842
aguugucuugcagauagaa

SEQ ID NO: 2075527 - RNA, 19 nt, Artificial Sequence
  Description of Artificial Sequence: Synthetic oligonucleotide
  Antisense strand to SEQ ID NO: 2075526
uucuaucugcaagacaacu

SEQ ID NO: 2075528 - RNA, 19 nt, Artificial Sequence
  Description of Artificial Sequence: Synthetic oligonucleotide
  Sense strand starting at position 3967 of SEQ ID NO: 1881842
uugucuugcagauagaaug

SEQ ID NO: 2075529 - RNA, 19 nt, Artificial Sequence
  Description of Artificial Sequence: Synthetic oligonucleotide
  Antisense strand to SEQ ID NO: 2075528
cauucuaucugcaagacaa

SEQ ID NO: 2075530 - RNA, 19 nt, Artificial Sequence
  Description of Artificial Sequence: Synthetic oligonucleotide
  Sense strand starting at position 3977 of SEQ ID NO: 1881842
gauagaaugcuuuagcaug

SEQ ID NO: 2075531 - RNA, 19 nt, Artificial Sequence
  Description of Artificial Sequence: Synthetic oligonucleotide
  Antisense strand to SEQ ID NO: 2075530
caugcuaaagcauucuauc

SEQ ID NO: 2075532 - RNA, 19 nt, Artificial Sequence
  Description of Artificial Sequence: Synthetic oligonucleotide
  Sense strand starting at position 18 of SEQ ID NO: 1881843
uggauaaaucccugucuga

SEQ ID NO: 2075533 - RNA, 19 nt, Artificial Sequence
  Description of Artificial Sequence: Synthetic oligonucleotide
  Antisense strand to SEQ ID NO: 2075532
ucagacagggauuuaucca

SEQ ID NO: 2075534 - RNA, 19 nt, Artificial Sequence
  Description of Artificial Sequence: Synthetic oligonucleotide
  Sense strand starting at position 28 of SEQ ID NO: 1881843
ccugucugaucaccucauu

SEQ ID NO: 2075535 - RNA, 19 nt, Artificial Sequence
  Description of Artificial Sequence: Synthetic oligonucleotide
  Antisense strand to SEQ ID NO: 2075534
aaugaggugaucagacagg

SEQ ID NO: 2075536 - RNA, 19 nt, Artificial Sequence
  Description of Artificial Sequence: Synthetic oligonucleotide
  Sense strand starting at position 31 of SEQ ID NO: 1881843
gucugaucaccucauuaga

SEQ ID NO: 2075537 - RNA, 19 nt, Artificial Sequence
  Description of Artificial Sequence: Synthetic oligonucleotide
  Antisense strand to SEQ ID NO: 2075536
ucuaaugaggugaucagac

SEQ ID NO: 2075538 - RNA, 19 nt, Artificial Sequence
  Description of Artificial Sequence: Synthetic oligonucleotide
  Sense strand starting at position 39 of SEQ ID NO: 1881843
accucauuagacuguuaca

SEQ ID NO: 2075539 - RNA, 19 nt, Artificial Sequence
  Description of Artificial Sequence: Synthetic oligonucleotide
  Antisense strand to SEQ ID NO: 2075538
uguaacagucuaaugaggu

SEQ ID NO: 2075540 - RNA, 19 nt, Artificial Sequence
  Description of Artificial Sequence: Synthetic oligonucleotide
  Sense strand starting at position 275 of SEQ ID NO: 1881843
gagucaaauucugcaugug

SEQ ID NO: 2075541 - RNA, 19 nt, Artificial Sequence
  Description of Artificial Sequence: Synthetic oligonucleotide
  Antisense strand to SEQ ID NO: 2075540
cacaugcagaauuugacuc

SEQ ID NO: 2075542 - RNA, 19 nt, Artificial Sequence
  Description of Artificial Sequence: Synthetic oligonucleotide
  Sense strand starting at position 276 of SEQ ID NO: 1881843
agucaaauucugcauguga

SEQ ID NO: 2075543 - RNA, 19 nt, Artificial Sequence
  Description of Artificial Sequence: Synthetic oligonucleotide
  Antisense strand to SEQ ID NO: 2075542
ucacaugcagaauuugacu

SEQ ID NO: 2075544 - RNA, 19 nt, Artificial Sequence
  Description of Artificial Sequence: Synthetic oligonucleotide
  Sense strand starting at position 884 of SEQ ID NO: 1881843
uugagccuuccuuacugaa

SEQ ID NO: 2075545 - RNA, 19 nt, Artificial Sequence
  Description of Artificial Sequence: Synthetic oligonucleotide
  Antisense strand to SEQ ID NO: 2075544
uucaguaaggaaggcucaa

SEQ ID NO: 2075546 - RNA, 19 nt, Artificial Sequence
  Description of Artificial Sequence: Synthetic oligonucleotide
  Sense strand starting at position 945 of SEQ ID NO: 1881843
cugguuuggaccugacauu

SEQ ID NO: 2075547 - RNA, 19 nt, Artificial Sequence
  Description of Artificial Sequence: Synthetic oligonucleotide
  Antisense strand to SEQ ID NO: 2075546
aaugucagguccaaaccag

SEQ ID NO: 2075548 - RNA, 19 nt, Artificial Sequence
  Description of Artificial Sequence: Synthetic oligonucleotide
  Sense strand starting at position 1005 of SEQ ID NO: 1881843
guagacaugugaccugacu

SEQ ID NO: 2075549 - RNA, 19 nt, Artificial Sequence
  Description of Artificial Sequence: Synthetic oligonucleotide
  Antisense strand to SEQ ID NO: 2075548
agucaggucacaugucuac

SEQ ID NO: 2075550 - RNA, 19 nt, Artificial Sequence
  Description of Artificial Sequence: Synthetic oligonucleotide
  Sense strand starting at position 1032 of SEQ ID NO: 1881843
ccaugaaucgcugagucac

SEQ ID NO: 2075551 - RNA, 19 nt, Artificial Sequence
  Description of Artificial Sequence: Synthetic oligonucleotide
  Antisense strand to SEQ ID NO: 2075550
gugacucagcgauucaugg

SEQ ID NO: 2075552 - RNA, 19 nt, Artificial Sequence
  Description of Artificial Sequence: Synthetic oligonucleotide
  Sense strand starting at position 1083 of SEQ ID NO: 1881843
acaccugugggcuaagaau

SEQ ID NO: 2075553 - RNA, 19 nt, Artificial Sequence
  Description of Artificial Sequence: Synthetic oligonucleotide
  Antisense strand to SEQ ID NO: 2075552
auucuuagcccacaggugu

SEQ ID NO: 2075554 - RNA, 19 nt, Artificial Sequence
  Description of Artificial Sequence: Synthetic oligonucleotide
  Sense strand starting at position 1294 of SEQ ID NO: 1881843
aagagcguucgcguguaaa

SEQ ID NO: 2075555 - RNA, 19 nt, Artificial Sequence
  Description of Artificial Sequence: Synthetic oligonucleotide
  Antisense strand to SEQ ID NO: 2075554
uuuacacgcgaacgcucuu

SEQ ID NO: 2075556 - RNA, 19 nt, Artificial Sequence
  Description of Artificial Sequence: Synthetic oligonucleotide
  Sense strand starting at position 1311 of SEQ ID NO: 1881843
aaauguguuguguaccauu

SEQ ID NO: 2075557 - RNA, 19 nt, Artificial Sequence
  Description of Artificial Sequence: Synthetic oligonucleotide
  Antisense strand to SEQ ID NO: 2075556
aaugguacacaacacauuu

SEQ ID NO: 2075558 - RNA, 19 nt, Artificial Sequence
  Description of Artificial Sequence: Synthetic oligonucleotide
  Sense strand starting at position 1376 of SEQ ID NO: 1881843
gugcaauaagcauaggcau

SEQ ID NO: 2075559 - RNA, 19 nt, Artificial Sequence
  Description of Artificial Sequence: Synthetic oligonucleotide
  Antisense strand to SEQ ID NO: 2075558
augccuaugcuuauugcac

SEQ ID NO: 2075560 - RNA, 19 nt, Artificial Sequence
  Description of Artificial Sequence: Synthetic oligonucleotide
  Sense strand starting at position 2194 of SEQ ID NO: 1881843
acuagcuuugagggaugaa

SEQ ID NO: 2075561 - RNA, 19 nt, Artificial Sequence
  Description of Artificial Sequence: Synthetic oligonucleotide
  Antisense strand to SEQ ID NO: 2075560
uucaucccucaaagcuagu

SEQ ID NO: 2075562 - RNA, 19 nt, Artificial Sequence
  Description of Artificial Sequence: Synthetic oligonucleotide
  Sense strand starting at position 2231 of SEQ ID NO: 1881843
gggucugauguuuauggaa

SEQ ID NO: 2075563 - RNA, 19 nt, Artificial Sequence
  Description of Artificial Sequence: Synthetic oligonucleotide
  Antisense strand to SEQ ID NO: 2075562
uuccauaaacaucagaccc

SEQ ID NO: 2075564 - RNA, 19 nt, Artificial Sequence
  Description of Artificial Sequence: Synthetic oligonucleotide
  Sense strand starting at position 2284 of SEQ ID NO: 1881843
ccugaagaucgcugggaua

SEQ ID NO: 2075565 - RNA, 19 nt, Artificial Sequence
  Description of Artificial Sequence: Synthetic oligonucleotide
  Antisense strand to SEQ ID NO: 2075564
uaucccagcgaucuucagg

SEQ ID NO: 2075566 - RNA, 19 nt, Artificial Sequence
  Description of Artificial Sequence: Synthetic oligonucleotide
  Sense strand starting at position 2286 of SEQ ID NO: 1881843
ugaagaucgcugggauaau

SEQ ID NO: 2075567 - RNA, 19 nt, Artificial Sequence
  Description of Artificial Sequence: Synthetic oligonucleotide
  Antisense strand to SEQ ID NO: 2075566
auuaucccagcgaucuuca

SEQ ID NO: 2075568 - RNA, 19 nt, Artificial Sequence
  Description of Artificial Sequence: Synthetic oligonucleotide
  Sense strand starting at position 2349 of SEQ ID NO: 1881843
ugcauuaggguuuggaagu

SEQ ID NO: 2075569 - RNA, 19 nt, Artificial Sequence
  Description of Artificial Sequence: Synthetic oligonucleotide
  Antisense strand to SEQ ID NO: 2075568
acuuccaaacccuaaugca

SEQ ID NO: 2075570 - RNA, 19 nt, Artificial Sequence
  Description of Artificial Sequence: Synthetic oligonucleotide
  Sense strand starting at position 2356 of SEQ ID NO: 1881843
ggguuuggaaguuggauaa

SEQ ID NO: 2075571 - RNA, 19 nt, Artificial Sequence
  Description of Artificial Sequence: Synthetic oligonucleotide
  Antisense strand to SEQ ID NO: 2075570
uuauccaacuuccaaaccc

SEQ ID NO: 2075572 - RNA, 19 nt, Artificial Sequence
  Description of Artificial Sequence: Synthetic oligonucleotide
  Sense strand starting at position 2423 of SEQ ID NO: 1881843
ugaguaauuugagagcacu

SEQ ID NO: 2075573 - RNA, 19 nt, Artificial Sequence
  Description of Artificial Sequence: Synthetic oligonucleotide
  Antisense strand to SEQ ID NO: 2075572
agugcucucaaauuacuca

SEQ ID NO: 2075574 - RNA, 19 nt, Artificial Sequence
  Description of Artificial Sequence: Synthetic oligonucleotide
  Sense strand starting at position 2513 of SEQ ID NO: 1881843
aagaauaucugucuaggcu

SEQ ID NO: 2075575 - RNA, 19 nt, Artificial Sequence
  Description of Artificial Sequence: Synthetic oligonucleotide
  Antisense strand to SEQ ID NO: 2075574
agccuagacagauauucuu

SEQ ID NO: 2075576 - RNA, 19 nt, Artificial Sequence
  Description of Artificial Sequence: Synthetic oligonucleotide
  Sense strand starting at position 2780 of SEQ ID NO: 1881843
auuugagcuugcuugguau

SEQ ID NO: 2075577 - RNA, 19 nt, Artificial Sequence
  Description of Artificial Sequence: Synthetic oligonucleotide
  Antisense strand to SEQ ID NO: 2075576
auaccaagcaagcucaaau

SEQ ID NO: 2075578 - RNA, 19 nt, Artificial Sequence
  Description of Artificial Sequence: Synthetic oligonucleotide
  Sense strand starting at position 2794 of SEQ ID NO: 1881843
gguauagugauaugaagug

SEQ ID NO: 2075579 - RNA, 19 nt, Artificial Sequence
  Description of Artificial Sequence: Synthetic oligonucleotide
  Antisense strand to SEQ ID NO: 2075578
cacuucauaucacuauacc

SEQ ID NO: 2075580 - RNA, 19 nt, Artificial Sequence
  Description of Artificial Sequence: Synthetic oligonucleotide
  Sense strand starting at position 2861 of SEQ ID NO: 1881843
acuagacuucgggaugcuu

SEQ ID NO: 2075581 - RNA, 19 nt, Artificial Sequence
  Description of Artificial Sequence: Synthetic oligonucleotide
  Antisense strand to SEQ ID NO: 2075580
aagcaucccgaagucuagu

SEQ ID NO: 2075582 - RNA, 19 nt, Artificial Sequence
  Description of Artificial Sequence: Synthetic oligonucleotide
  Sense strand starting at position 3046 of SEQ ID NO: 1881843
gaaggauaacccuguuuag

SEQ ID NO: 2075583 - RNA, 19 nt, Artificial Sequence
  Description of Artificial Sequence: Synthetic oligonucleotide
  Antisense strand to SEQ ID NO: 2075582
cuaaacaggguuauccuuc

SEQ ID NO: 2075584 - RNA, 19 nt, Artificial Sequence
  Description of Artificial Sequence: Synthetic oligonucleotide
  Sense strand starting at position 3049 of SEQ ID NO: 1881843
ggauaacccuguuuaguuu

SEQ ID NO: 2075585 - RNA, 19 nt, Artificial Sequence
  Description of Artificial Sequence: Synthetic oligonucleotide
  Antisense strand to SEQ ID NO: 2075584
aaacuaaacaggguuaucc

SEQ ID NO: 2075586 - RNA, 19 nt, Artificial Sequence
  Description of Artificial Sequence: Synthetic oligonucleotide
  Sense strand starting at position 3086 of SEQ ID NO: 1881843
cuuagauucccgcaaugca

SEQ ID NO: 2075587 - RNA, 19 nt, Artificial Sequence
  Description of Artificial Sequence: Synthetic oligonucleotide
  Antisense strand to SEQ ID NO: 2075586
ugcauugcgggaaucuaag

SEQ ID NO: 2075588 - RNA, 19 nt, Artificial Sequence
  Description of Artificial Sequence: Synthetic oligonucleotide
  Sense strand starting at position 3095 of SEQ ID NO: 1881843
ccgcaaugcaaggaucaga

SEQ ID NO: 2075589 - RNA, 19 nt, Artificial Sequence
  Description of Artificial Sequence: Synthetic oligonucleotide
  Antisense strand to SEQ ID NO: 2075588
ucugauccuugcauugcgg

SEQ ID NO: 2075590 - RNA, 19 nt, Artificial Sequence
  Description of Artificial Sequence: Synthetic oligonucleotide
  Sense strand starting at position 3111 of SEQ ID NO: 1881843
agaagaggcuuuccuauug

SEQ ID NO: 2075591 - RNA, 19 nt, Artificial Sequence
  Description of Artificial Sequence: Synthetic oligonucleotide
  Antisense strand to SEQ ID NO: 2075590
caauaggaaagccucuucu

SEQ ID NO: 2075592 - RNA, 19 nt, Artificial Sequence
  Description of Artificial Sequence: Synthetic oligonucleotide
  Sense strand starting at position 3164 of SEQ ID NO: 1881843
aaaggaggcucagacauuu

SEQ ID NO: 2075593 - RNA, 19 nt, Artificial Sequence
  Description of Artificial Sequence: Synthetic oligonucleotide
  Antisense strand to SEQ ID NO: 2075592
aaaugucugagccuccuuu

SEQ ID NO: 2075594 - RNA, 19 nt, Artificial Sequence
  Description of Artificial Sequence: Synthetic oligonucleotide
  Sense strand starting at position 3290 of SEQ ID NO: 1881843
agaauuguggaaggugauu

SEQ ID NO: 2075595 - RNA, 19 nt, Artificial Sequence
  Description of Artificial Sequence: Synthetic oligonucleotide
  Antisense strand to SEQ ID NO: 2075594
aaucaccuuccacaauucu

SEQ ID NO: 2075596 - RNA, 19 nt, Artificial Sequence
  Description of Artificial Sequence: Synthetic oligonucleotide
  Sense strand starting at position 3331 of SEQ ID NO: 1881843
ugugcugcuccugugauua

SEQ ID NO: 2075597 - RNA, 19 nt, Artificial Sequence
  Description of Artificial Sequence: Synthetic oligonucleotide
  Antisense strand to SEQ ID NO: 2075596
uaaucacaggagcagcaca

SEQ ID NO: 2075598 - RNA, 19 nt, Artificial Sequence
  Description of Artificial Sequence: Synthetic oligonucleotide
  Sense strand starting at position 3336 of SEQ ID NO: 1881843
ugcuccugugauuaugagu

SEQ ID NO: 2075599 - RNA, 19 nt, Artificial Sequence
  Description of Artificial Sequence: Synthetic oligonucleotide
  Antisense strand to SEQ ID NO: 2075598
acucauaaucacaggagca

SEQ ID NO: 2075600 - RNA, 19 nt, Artificial Sequence
  Description of Artificial Sequence: Synthetic oligonucleotide
  Sense strand starting at position 3341 of SEQ ID NO: 1881843
cugugauuaugagugaguu

SEQ ID NO: 2075601 - RNA, 19 nt, Artificial Sequence
  Description of Artificial Sequence: Synthetic oligonucleotide
  Antisense strand to SEQ ID NO: 2075600
aacucacucauaaucacag

SEQ ID NO: 2075602 - RNA, 19 nt, Artificial Sequence
  Description of Artificial Sequence: Synthetic oligonucleotide
  Sense strand starting at position 3642 of SEQ ID NO: 1881843
acuccugucccuuagggaa

SEQ ID NO: 2075603 - RNA, 19 nt, Artificial Sequence
  Description of Artificial Sequence: Synthetic oligonucleotide
  Antisense strand to SEQ ID NO: 2075602
uucccuaagggacaggagu

SEQ ID NO: 2075604 - RNA, 19 nt, Artificial Sequence
  Description of Artificial Sequence: Synthetic oligonucleotide
  Sense strand starting at position 3673 of SEQ ID NO: 1881843
ccaccagucucccugauau

SEQ ID NO: 2075605 - RNA, 19 nt, Artificial Sequence
  Description of Artificial Sequence: Synthetic oligonucleotide
  Antisense strand to SEQ ID NO: 2075604
auaucagggagacuggugg

SEQ ID NO: 2075606 - RNA, 19 nt, Artificial Sequence
  Description of Artificial Sequence: Synthetic oligonucleotide
  Sense strand starting at position 3675 of SEQ ID NO: 1881843
accagucucccugauauac

SEQ ID NO: 2075607 - RNA, 19 nt, Artificial Sequence
  Description of Artificial Sequence: Synthetic oligonucleotide
  Antisense strand to SEQ ID NO: 2075606
guauaucagggagacuggu

SEQ ID NO: 2075608 - RNA, 19 nt, Artificial Sequence
  Description of Artificial Sequence: Synthetic oligonucleotide
  Sense strand starting at position 3874 of SEQ ID NO: 1881843
cucacucugugauuaugaa

SEQ ID NO: 2075609 - RNA, 19 nt, Artificial Sequence
  Description of Artificial Sequence: Synthetic oligonucleotide
  Antisense strand to SEQ ID NO: 2075608
uucauaaucacagagugag

SEQ ID NO: 2075610 - RNA, 19 nt, Artificial Sequence
  Description of Artificial Sequence: Synthetic oligonucleotide
  Sense strand starting at position 3958 of SEQ ID NO: 1881843
cuuauacucugugcaaaug

SEQ ID NO: 2075611 - RNA, 19 nt, Artificial Sequence
  Description of Artificial Sequence: Synthetic oligonucleotide
  Antisense strand to SEQ ID NO: 2075610
cauuugcacagaguauaag

SEQ ID NO: 2075612 - RNA, 19 nt, Artificial Sequence
  Description of Artificial Sequence: Synthetic oligonucleotide
  Sense strand starting at position 97 of SEQ ID NO: 1881844
agagguagcaaagguuuau

SEQ ID NO: 2075613 - RNA, 19 nt, Artificial Sequence
  Description of Artificial Sequence: Synthetic oligonucleotide
  Antisense strand to SEQ ID NO: 2075612
auaaaccuuugcuaccucu

SEQ ID NO: 2075614 - RNA, 19 nt, Artificial Sequence
  Description of Artificial Sequence: Synthetic oligonucleotide
  Sense strand starting at position 101 of SEQ ID NO: 1881844
guagcaaagguuuauuaag

SEQ ID NO: 2075615 - RNA, 19 nt, Artificial Sequence
  Description of Artificial Sequence: Synthetic oligonucleotide
  Antisense strand to SEQ ID NO: 2075614
cuuaauaaaccuuugcuac

SEQ ID NO: 2075616 - RNA, 19 nt, Artificial Sequence
  Description of Artificial Sequence: Synthetic oligonucleotide
  Sense strand starting at position 116 of SEQ ID NO: 1881844
uaagcaggagccugacaua

SEQ ID NO: 2075617 - RNA, 19 nt, Artificial Sequence
  Description of Artificial Sequence: Synthetic oligonucleotide
  Antisense strand to SEQ ID NO: 2075616
uaugucaggcuccugcuua

SEQ ID NO: 2075618 - RNA, 19 nt, Artificial Sequence
  Description of Artificial Sequence: Synthetic oligonucleotide
  Sense strand starting at position 129 of SEQ ID NO: 1881844
gacauaaagugaguugcau

SEQ ID NO: 2075619 - RNA, 19 nt, Artificial Sequence
  Description of Artificial Sequence: Synthetic oligonucleotide
  Antisense strand to SEQ ID NO: 2075618
augcaacucacuuuauguc

SEQ ID NO: 2075620 - RNA, 19 nt, Artificial Sequence
  Description of Artificial Sequence: Synthetic oligonucleotide
  Sense strand starting at position 507 of SEQ ID NO: 1881844
ugaauuuauugacauucga

SEQ ID NO: 2075621 - RNA, 19 nt, Artificial Sequence
  Description of Artificial Sequence: Synthetic oligonucleotide
  Antisense strand to SEQ ID NO: 2075620
ucgaaugucaauaaauuca

SEQ ID NO: 2075622 - RNA, 19 nt, Artificial Sequence
  Description of Artificial Sequence: Synthetic oligonucleotide
  Sense strand starting at position 781 of SEQ ID NO: 1881844
acagaaucuuguuaauuug

SEQ ID NO: 2075623 - RNA, 19 nt, Artificial Sequence
  Description of Artificial Sequence: Synthetic oligonucleotide
  Antisense strand to SEQ ID NO: 2075622
caaauuaacaagauucugu

SEQ ID NO: 2075624 - RNA, 19 nt, Artificial Sequence
  Description of Artificial Sequence: Synthetic oligonucleotide
  Sense strand starting at position 799 of SEQ ID NO: 1881844
gacuccuauugacuuguga

SEQ ID NO: 2075625 - RNA, 19 nt, Artificial Sequence
  Description of Artificial Sequence: Synthetic oligonucleotide
  Antisense strand to SEQ ID NO: 2075624
ucacaagucaauaggaguc

SEQ ID NO: 2075626 - RNA, 19 nt, Artificial Sequence
  Description of Artificial Sequence: Synthetic oligonucleotide
  Sense strand starting at position 953 of SEQ ID NO: 1881844
aucuguaugcaucagcuaa

SEQ ID NO: 2075627 - RNA, 19 nt, Artificial Sequence
  Description of Artificial Sequence: Synthetic oligonucleotide
  Antisense strand to SEQ ID NO: 2075626
uuagcugaugcauacagau

SEQ ID NO: 2075628 - RNA, 19 nt, Artificial Sequence
  Description of Artificial Sequence: Synthetic oligonucleotide
  Sense strand starting at position 1187 of SEQ ID NO: 1881844
aaggaucuguucucccaga

SEQ ID NO: 2075629 - RNA, 19 nt, Artificial Sequence
  Description of Artificial Sequence: Synthetic oligonucleotide
  Antisense strand to SEQ ID NO: 2075628
ucugggagaacagauccuu

SEQ ID NO: 2075630 - RNA, 19 nt, Artificial Sequence
  Description of Artificial Sequence: Synthetic oligonucleotide
  Sense strand starting at position 1188 of SEQ ID NO: 1881844
aggaucuguucucccagau

SEQ ID NO: 2075631 - RNA, 19 nt, Artificial Sequence
  Description of Artificial Sequence: Synthetic oligonucleotide
  Antisense strand to SEQ ID NO: 2075630
aucugggagaacagauccu

SEQ ID NO: 2075632 - RNA, 19 nt, Artificial Sequence
  Description of Artificial Sequence: Synthetic oligonucleotide
  Sense strand starting at position 1192 of SEQ ID NO: 1881844
ucuguucucccagauguga

SEQ ID NO: 2075633 - RNA, 19 nt, Artificial Sequence
  Description of Artificial Sequence: Synthetic oligonucleotide
  Antisense strand to SEQ ID NO: 2075632
ucacaucugggagaacaga

SEQ ID NO: 2075634 - RNA, 19 nt, Artificial Sequence
  Description of Artificial Sequence: Synthetic oligonucleotide
  Sense strand starting at position 1229 of SEQ ID NO: 1881844
uggcauuaccaaugagagc

SEQ ID NO: 2075635 - RNA, 19 nt, Artificial Sequence
  Description of Artificial Sequence: Synthetic oligonucleotide
  Antisense strand to SEQ ID NO: 2075634
gcucucauugguaaugcca

SEQ ID NO: 2075636 - RNA, 19 nt, Artificial Sequence
  Description of Artificial Sequence: Synthetic oligonucleotide
  Sense strand starting at position 1230 of SEQ ID NO: 1881844
ggcauuaccaaugagagca

SEQ ID NO: 2075637 - RNA, 19 nt, Artificial Sequence
  Description of Artificial Sequence: Synthetic oligonucleotide
  Antisense strand to SEQ ID NO: 2075636
ugcucucauugguaaugcc

SEQ ID NO: 2075638 - RNA, 19 nt, Artificial Sequence
  Description of Artificial Sequence: Synthetic oligonucleotide
  Sense strand starting at position 1342 of SEQ ID NO: 1881844
ccaugaaauguuugacacu

SEQ ID NO: 2075639 - RNA, 19 nt, Artificial Sequence
  Description of Artificial Sequence: Synthetic oligonucleotide
  Antisense strand to SEQ ID NO: 2075638
agugucaaacauuucaugg

SEQ ID NO: 2075640 - RNA, 19 nt, Artificial Sequence
  Description of Artificial Sequence: Synthetic oligonucleotide
  Sense strand starting at position 1424 of SEQ ID NO: 1881844
aacgguauacaucaugcau

SEQ ID NO: 2075641 - RNA, 19 nt, Artificial Sequence
  Description of Artificial Sequence: Synthetic oligonucleotide
  Antisense strand to SEQ ID NO: 2075640
augcaugauguauaccguu

SEQ ID NO: 2075642 - RNA, 19 nt, Artificial Sequence
  Description of Artificial Sequence: Synthetic oligonucleotide
  Sense strand starting at position 1459 of SEQ ID NO: 1881844
cauuauuucugugaaugag

SEQ ID NO: 2075643 - RNA, 19 nt, Artificial Sequence
  Description of Artificial Sequence: Synthetic oligonucleotide
  Antisense strand to SEQ ID NO: 2075642
cucauucacagaaauaaug

SEQ ID NO: 2075644 - RNA, 19 nt, Artificial Sequence
  Description of Artificial Sequence: Synthetic oligonucleotide
  Sense strand starting at position 1467 of SEQ ID NO: 1881844
cugugaaugaguugugaac

SEQ ID NO: 2075645 - RNA, 19 nt, Artificial Sequence
  Description of Artificial Sequence: Synthetic oligonucleotide
  Antisense strand to SEQ ID NO: 2075644
guucacaacucauucacag

SEQ ID NO: 2075646 - RNA, 19 nt, Artificial Sequence
  Description of Artificial Sequence: Synthetic oligonucleotide
  Sense strand starting at position 1473 of SEQ ID NO: 1881844
augaguugugaacagguau

SEQ ID NO: 2075647 - RNA, 19 nt, Artificial Sequence
  Description of Artificial Sequence: Synthetic oligonucleotide
  Antisense strand to SEQ ID NO: 2075646
auaccuguucacaacucau

SEQ ID NO: 2075648 - RNA, 19 nt, Artificial Sequence
  Description of Artificial Sequence: Synthetic oligonucleotide
  Sense strand starting at position 2033 of SEQ ID NO: 1881844
acagaauguuuggugcaua

SEQ ID NO: 2075649 - RNA, 19 nt, Artificial Sequence
  Description of Artificial Sequence: Synthetic oligonucleotide
  Antisense strand to SEQ ID NO: 2075648
uaugcaccaaacauucugu

SEQ ID NO: 2075650 - RNA, 19 nt, Artificial Sequence
  Description of Artificial Sequence: Synthetic oligonucleotide
  Sense strand starting at position 2036 of SEQ ID NO: 1881844
gaauguuuggugcauaaua

SEQ ID NO: 2075651 - RNA, 19 nt, Artificial Sequence
  Description of Artificial Sequence: Synthetic oligonucleotide
  Antisense strand to SEQ ID NO: 2075650
uauuaugcaccaaacauuc

SEQ ID NO: 2075652 - RNA, 19 nt, Artificial Sequence
  Description of Artificial Sequence: Synthetic oligonucleotide
  Sense strand starting at position 2038 of SEQ ID NO: 1881844
auguuuggugcauaauaag

SEQ ID NO: 2075653 - RNA, 19 nt, Artificial Sequence
  Description of Artificial Sequence: Synthetic oligonucleotide
  Antisense strand to SEQ ID NO: 2075652
cuuauuaugcaccaaacau

SEQ ID NO: 2075654 - RNA, 19 nt, Artificial Sequence
  Description of Artificial Sequence: Synthetic oligonucleotide
  Sense strand starting at position 2166 of SEQ ID NO: 1881844
aagcguccaguccagaaua

SEQ ID NO: 2075655 - RNA, 19 nt, Artificial Sequence
  Description of Artificial Sequence: Synthetic oligonucleotide
  Antisense strand to SEQ ID NO: 2075654
uauucuggacuggacgcuu

SEQ ID NO: 2075656 - RNA, 19 nt, Artificial Sequence
  Description of Artificial Sequence: Synthetic oligonucleotide
  Sense strand starting at position 2168 of SEQ ID NO: 1881844
gcguccaguccagaauaau

SEQ ID NO: 2075657 - RNA, 19 nt, Artificial Sequence
  Description of Artificial Sequence: Synthetic oligonucleotide
  Antisense strand to SEQ ID NO: 2075656
auuauucuggacuggacgc

SEQ ID NO: 2075658 - RNA, 19 nt, Artificial Sequence
  Description of Artificial Sequence: Synthetic oligonucleotide
  Sense strand starting at position 2420 of SEQ ID NO: 1881844
aguccugauuuccaaagga

SEQ ID NO: 2075659 - RNA, 19 nt, Artificial Sequence
  Description of Artificial Sequence: Synthetic oligonucleotide
  Antisense strand to SEQ ID NO: 2075658
uccuuuggaaaucaggacu

SEQ ID NO: 2075660 - RNA, 19 nt, Artificial Sequence
  Description of Artificial Sequence: Synthetic oligonucleotide
  Sense strand starting at position 2444 of SEQ ID NO: 1881844
ucagaauuccacugaaugc

SEQ ID NO: 2075661 - RNA, 19 nt, Artificial Sequence
  Description of Artificial Sequence: Synthetic oligonucleotide
  Antisense strand to SEQ ID NO: 2075660
gcauucaguggaauucuga

SEQ ID NO: 2075662 - RNA, 19 nt, Artificial Sequence
  Description of Artificial Sequence: Synthetic oligonucleotide
  Sense strand starting at position 2518 of SEQ ID NO: 1881844
ccucuuacagaaugacuga

SEQ ID NO: 2075663 - RNA, 19 nt, Artificial Sequence
  Description of Artificial Sequence: Synthetic oligonucleotide
  Antisense strand to SEQ ID NO: 2075662
ucagucauucuguaagagg

SEQ ID NO: 2075664 - RNA, 19 nt, Artificial Sequence
  Description of Artificial Sequence: Synthetic oligonucleotide
  Sense strand starting at position 2532 of SEQ ID NO: 1881844
acugauucccaguauggca

SEQ ID NO: 2075665 - RNA, 19 nt, Artificial Sequence
  Description of Artificial Sequence: Synthetic oligonucleotide
  Antisense strand to SEQ ID NO: 2075664
ugccauacugggaaucagu

SEQ ID NO: 2075666 - RNA, 19 nt, Artificial Sequence
  Description of Artificial Sequence: Synthetic oligonucleotide
  Sense strand starting at position 2755 of SEQ ID NO: 1881844
aggacuuucuucuccaguu

SEQ ID NO: 2075667 - RNA, 19 nt, Artificial Sequence
  Description of Artificial Sequence: Synthetic oligonucleotide
  Antisense strand to SEQ ID NO: 2075666
aacuggagaagaaaguccu

SEQ ID NO: 2075668 - RNA, 19 nt, Artificial Sequence
  Description of Artificial Sequence: Synthetic oligonucleotide
  Sense strand starting at position 2869 of SEQ ID NO: 1881844
aagagaugcuguccaagug

SEQ ID NO: 2075669 - RNA, 19 nt, Artificial Sequence
  Description of Artificial Sequence: Synthetic oligonucleotide
  Antisense strand to SEQ ID NO: 2075668
cacuuggacagcaucucuu

SEQ ID NO: 2075670 - RNA, 19 nt, Artificial Sequence
  Description of Artificial Sequence: Synthetic oligonucleotide
  Sense strand starting at position 2870 of SEQ ID NO: 1881844
agagaugcuguccaagugu

SEQ ID NO: 2075671 - RNA, 19 nt, Artificial Sequence
  Description of Artificial Sequence: Synthetic oligonucleotide
  Antisense strand to SEQ ID NO: 2075670
acacuuggacagcaucucu

SEQ ID NO: 2075672 - RNA, 19 nt, Artificial Sequence
  Description of Artificial Sequence: Synthetic oligonucleotide
  Sense strand starting at position 2923 of SEQ ID NO: 1881844
ugagcaucauuugaagauu

SEQ ID NO: 2075673 - RNA, 19 nt, Artificial Sequence
  Description of Artificial Sequence: Synthetic oligonucleotide
  Antisense strand to SEQ ID NO: 2075672
aaucuucaaaugaugcuca

SEQ ID NO: 2075674 - RNA, 19 nt, Artificial Sequence
  Description of Artificial Sequence: Synthetic oligonucleotide
  Sense strand starting at position 2937 of SEQ ID NO: 1881844
agauuugaggcuggcugua

SEQ ID NO: 2075675 - RNA, 19 nt, Artificial Sequence
  Description of Artificial Sequence: Synthetic oligonucleotide
  Antisense strand to SEQ ID NO: 2075674
uacagccagccucaaaucu

SEQ ID NO: 2075676 - RNA, 19 nt, Artificial Sequence
  Description of Artificial Sequence: Synthetic oligonucleotide
  Sense strand starting at position 3190 of SEQ ID NO: 1881844
ggaauugccuuggcugaga

SEQ ID NO: 2075677 - RNA, 19 nt, Artificial Sequence
  Description of Artificial Sequence: Synthetic oligonucleotide
  Antisense strand to SEQ ID NO: 2075676
ucucagccaaggcaauucc

SEQ ID NO: 2075678 - RNA, 19 nt, Artificial Sequence
  Description of Artificial Sequence: Synthetic oligonucleotide
  Sense strand starting at position 3245 of SEQ ID NO: 1881844
ccuugacaaugacugguua

SEQ ID NO: 2075679 - RNA, 19 nt, Artificial Sequence
  Description of Artificial Sequence: Synthetic oligonucleotide
  Antisense strand to SEQ ID NO: 2075678
uaaccagucauugucaagg

SEQ ID NO: 2075680 - RNA, 19 nt, Artificial Sequence
  Description of Artificial Sequence: Synthetic oligonucleotide
  Sense strand starting at position 3246 of SEQ ID NO: 1881844
cuugacaaugacugguuaa

SEQ ID NO: 2075681 - RNA, 19 nt, Artificial Sequence
  Description of Artificial Sequence: Synthetic oligonucleotide
  Antisense strand to SEQ ID NO: 2075680
uuaaccagucauugucaag

SEQ ID NO: 2075682 - RNA, 19 nt, Artificial Sequence
  Description of Artificial Sequence: Synthetic oligonucleotide
  Sense strand starting at position 3258 of SEQ ID NO: 1881844
ugguuaaugcaguaguaua

SEQ ID NO: 2075683 - RNA, 19 nt, Artificial Sequence
  Description of Artificial Sequence: Synthetic oligonucleotide
  Antisense strand to SEQ ID NO: 2075682
uauacuacugcauuaacca

SEQ ID NO: 2075684 - RNA, 19 nt, Artificial Sequence
  Description of Artificial Sequence: Synthetic oligonucleotide
  Sense strand starting at position 3857 of SEQ ID NO: 1881844
ggccaaguuaaguaugcaa

SEQ ID NO: 2075685 - RNA, 19 nt, Artificial Sequence
  Description of Artificial Sequence: Synthetic oligonucleotide
  Antisense strand to SEQ ID NO: 2075684
uugcauacuuaacuuggcc

SEQ ID NO: 2075686 - RNA, 19 nt, Artificial Sequence
  Description of Artificial Sequence: Synthetic oligonucleotide
  Sense strand starting at position 3859 of SEQ ID NO: 1881844
ccaaguuaaguaugcaaca

SEQ ID NO: 2075687 - RNA, 19 nt, Artificial Sequence
  Description of Artificial Sequence: Synthetic oligonucleotide
  Antisense strand to SEQ ID NO: 2075686
uguugcauacuuaacuugg

SEQ ID NO: 2075688 - RNA, 19 nt, Artificial Sequence
  Description of Artificial Sequence: Synthetic oligonucleotide
  Sense strand starting at position 3906 of SEQ ID NO: 1881844
aagauuuagagucgugucu

SEQ ID NO: 2075689 - RNA, 19 nt, Artificial Sequence
  Description of Artificial Sequence: Synthetic oligonucleotide
  Antisense strand to SEQ ID NO: 2075688
agacacgacucuaaaucuu

SEQ ID NO: 2075690 - RNA, 19 nt, Artificial Sequence
  Description of Artificial Sequence: Synthetic oligonucleotide
  Sense strand starting at position 3912 of SEQ ID NO: 1881844
uagagucgugucuacagaa

SEQ ID NO: 2075691 - RNA, 19 nt, Artificial Sequence
  Description of Artificial Sequence: Synthetic oligonucleotide
  Antisense strand to SEQ ID NO: 2075690
uucuguagacacgacucua

SEQ ID NO: 2075692 - RNA, 19 nt, Artificial Sequence
  Description of Artificial Sequence: Synthetic oligonucleotide
  Sense strand starting at position 173 of SEQ ID NO: 1881845
ugguuaguaacauaugucu

SEQ ID NO: 2075693 - RNA, 19 nt, Artificial Sequence
  Description of Artificial Sequence: Synthetic oligonucleotide
  Antisense strand to SEQ ID NO: 2075692
agacauauguuacuaacca

SEQ ID NO: 2075694 - RNA, 19 nt, Artificial Sequence
  Description of Artificial Sequence: Synthetic oligonucleotide
  Sense strand starting at position 274 of SEQ ID NO: 1881845
guaucugacgugcauaauu

SEQ ID NO: 2075695 - RNA, 19 nt, Artificial Sequence
  Description of Artificial Sequence: Synthetic oligonucleotide
  Antisense strand to SEQ ID NO: 2075694
aauuaugcacgucagauac

SEQ ID NO: 2075696 - RNA, 19 nt, Artificial Sequence
  Description of Artificial Sequence: Synthetic oligonucleotide
  Sense strand starting at position 566 of SEQ ID NO: 1881845
auaggauuauuguccucca

SEQ ID NO: 2075697 - RNA, 19 nt, Artificial Sequence
  Description of Artificial Sequence: Synthetic oligonucleotide
  Antisense strand to SEQ ID NO: 2075696
uggaggacaauaauccuau

SEQ ID NO: 2075698 - RNA, 19 nt, Artificial Sequence
  Description of Artificial Sequence: Synthetic oligonucleotide
  Sense strand starting at position 585 of SEQ ID NO: 1881845
ggcggaucccuuuaagaga

SEQ ID NO: 2075699 - RNA, 19 nt, Artificial Sequence
  Description of Artificial Sequence: Synthetic oligonucleotide
  Antisense strand to SEQ ID NO: 2075698
ucucuuaaagggauccgcc

SEQ ID NO: 2075700 - RNA, 19 nt, Artificial Sequence
  Description of Artificial Sequence: Synthetic oligonucleotide
  Sense strand starting at position 621 of SEQ ID NO: 1881845
gcugcuucuagggcguaau

SEQ ID NO: 2075701 - RNA, 19 nt, Artificial Sequence
  Description of Artificial Sequence: Synthetic oligonucleotide
  Antisense strand to SEQ ID NO: 2075700
auuacgcccuagaagcagc

SEQ ID NO: 2075702 - RNA, 19 nt, Artificial Sequence
  Description of Artificial Sequence: Synthetic oligonucleotide
  Sense strand starting at position 624 of SEQ ID NO: 1881845
gcuucuagggcguaauaaa

SEQ ID NO: 2075703 - RNA, 19 nt, Artificial Sequence
  Description of Artificial Sequence: Synthetic oligonucleotide
  Antisense strand to SEQ ID NO: 2075702
uuuauuacgcccuagaagc

SEQ ID NO: 2075704 - RNA, 19 nt, Artificial Sequence
  Description of Artificial Sequence: Synthetic oligonucleotide
  Sense strand starting at position 633 of SEQ ID NO: 1881845
gcguaauaaacaggcauaa

SEQ ID NO: 2075705 - RNA, 19 nt, Artificial Sequence
  Description of Artificial Sequence: Synthetic oligonucleotide
  Antisense strand to SEQ ID NO: 2075704
uuaugccuguuuauuacgc

SEQ ID NO: 2075706 - RNA, 19 nt, Artificial Sequence
  Description of Artificial Sequence: Synthetic oligonucleotide
  Sense strand starting at position 933 of SEQ ID NO: 1881845
ugccuauaacuuggauaua

SEQ ID NO: 2075707 - RNA, 19 nt, Artificial Sequence
  Description of Artificial Sequence: Synthetic oligonucleotide
  Antisense strand to SEQ ID NO: 2075706
uauauccaaguuauaggca

SEQ ID NO: 2075708 - RNA, 19 nt, Artificial Sequence
  Description of Artificial Sequence: Synthetic oligonucleotide
  Sense strand starting at position 961 of SEQ ID NO: 1881845
uuaagcugugugcucuuua

SEQ ID NO: 2075709 - RNA, 19 nt, Artificial Sequence
  Description of Artificial Sequence: Synthetic oligonucleotide
  Antisense strand to SEQ ID NO: 2075708
uaaagagcacacagcuuaa

SEQ ID NO: 2075710 - RNA, 19 nt, Artificial Sequence
  Description of Artificial Sequence: Synthetic oligonucleotide
  Sense strand starting at position 966 of SEQ ID NO: 1881845
cugugugcucuuuaagaaa

SEQ ID NO: 2075711 - RNA, 19 nt, Artificial Sequence
  Description of Artificial Sequence: Synthetic oligonucleotide
  Antisense strand to SEQ ID NO: 2075710
uuucuuaaagagcacacag

SEQ ID NO: 2075712 - RNA, 19 nt, Artificial Sequence
  Description of Artificial Sequence: Synthetic oligonucleotide
  Sense strand starting at position 1112 of SEQ ID NO: 1881845
uugcaaaggucauccagau

SEQ ID NO: 2075713 - RNA, 19 nt, Artificial Sequence
  Description of Artificial Sequence: Synthetic oligonucleotide
  Antisense strand to SEQ ID NO: 2075712
aucuggaugaccuuugcaa

SEQ ID NO: 2075714 - RNA, 19 nt, Artificial Sequence
  Description of Artificial Sequence: Synthetic oligonucleotide
  Sense strand starting at position 1140 of SEQ ID NO: 1881845
gaaggaguuuauuccuuaa

SEQ ID NO: 2075715 - RNA, 19 nt, Artificial Sequence
  Description of Artificial Sequence: Synthetic oligonucleotide
  Antisense strand to SEQ ID NO: 2075714
uuaaggaauaaacuccuuc

SEQ ID NO: 2075716 - RNA, 19 nt, Artificial Sequence
  Description of Artificial Sequence: Synthetic oligonucleotide
  Sense strand starting at position 1143 of SEQ ID NO: 1881845
ggaguuuauuccuuaagcc

SEQ ID NO: 2075717 - RNA, 19 nt, Artificial Sequence
  Description of Artificial Sequence: Synthetic oligonucleotide
  Antisense strand to SEQ ID NO: 2075716
ggcuuaaggaauaaacucc

SEQ ID NO: 2075718 - RNA, 19 nt, Artificial Sequence
  Description of Artificial Sequence: Synthetic oligonucleotide
  Sense strand starting at position 1151 of SEQ ID NO: 1881845
uuccuuaagccaggauuga

SEQ ID NO: 2075719 - RNA, 19 nt, Artificial Sequence
  Description of Artificial Sequence: Synthetic oligonucleotide
  Antisense strand to SEQ ID NO: 2075718
ucaauccuggcuuaaggaa

SEQ ID NO: 2075720 - RNA, 19 nt, Artificial Sequence
  Description of Artificial Sequence: Synthetic oligonucleotide
  Sense strand starting at position 1206 of SEQ ID NO: 1881845
aaacauugccaugagguua

SEQ ID NO: 2075721 - RNA, 19 nt, Artificial Sequence
  Description of Artificial Sequence: Synthetic oligonucleotide
  Antisense strand to SEQ ID NO: 2075720
uaaccucauggcaauguuu

SEQ ID NO: 2075722 - RNA, 19 nt, Artificial Sequence
  Description of Artificial Sequence: Synthetic oligonucleotide
  Sense strand starting at position 1306 of SEQ ID NO: 1881845
acacuagauuggcuacaga

SEQ ID NO: 2075723 - RNA, 19 nt, Artificial Sequence
  Description of Artificial Sequence: Synthetic oligonucleotide
  Antisense strand to SEQ ID NO: 2075722
ucuguagccaaucuagugu

SEQ ID NO: 2075724 - RNA, 19 nt, Artificial Sequence
  Description of Artificial Sequence: Synthetic oligonucleotide
  Sense strand starting at position 1507 of SEQ ID NO: 1881845
uggaaagaugccugcagga

SEQ ID NO: 2075725 - RNA, 19 nt, Artificial Sequence
  Description of Artificial Sequence: Synthetic oligonucleotide
  Antisense strand to SEQ ID NO: 2075724
uccugcaggcaucuuucca

SEQ ID NO: 2075726 - RNA, 19 nt, Artificial Sequence
  Description of Artificial Sequence: Synthetic oligonucleotide
  Sense strand starting at position 2046 of SEQ ID NO: 1881845
gcaugaauuccucauggcu

SEQ ID NO: 2075727 - RNA, 19 nt, Artificial Sequence
  Description of Artificial Sequence: Synthetic oligonucleotide
  Antisense strand to SEQ ID NO: 2075726
agccaugaggaauucaugc

SEQ ID NO: 2075728 - RNA, 19 nt, Artificial Sequence
  Description of Artificial Sequence: Synthetic oligonucleotide
  Sense strand starting at position 2184 of SEQ ID NO: 1881845
gccagaaauucucuaggga

SEQ ID NO: 2075729 - RNA, 19 nt, Artificial Sequence
  Description of Artificial Sequence: Synthetic oligonucleotide
  Antisense strand to SEQ ID NO: 2075728
ucccuagagaauuucuggc

SEQ ID NO: 2075730 - RNA, 19 nt, Artificial Sequence
  Description of Artificial Sequence: Synthetic oligonucleotide
  Sense strand starting at position 2275 of SEQ ID NO: 1881845
aaauguaugucauugacug

SEQ ID NO: 2075731 - RNA, 19 nt, Artificial Sequence
  Description of Artificial Sequence: Synthetic oligonucleotide
  Antisense strand to SEQ ID NO: 2075730
cagucaaugacauacauuu

SEQ ID NO: 2075732 - RNA, 19 nt, Artificial Sequence
  Description of Artificial Sequence: Synthetic oligonucleotide
  Sense strand starting at position 2276 of SEQ ID NO: 1881845
aauguaugucauugacugu

SEQ ID NO: 2075733 - RNA, 19 nt, Artificial Sequence
  Description of Artificial Sequence: Synthetic oligonucleotide
  Antisense strand to SEQ ID NO: 2075732
acagucaaugacauacauu

SEQ ID NO: 2075734 - RNA, 19 nt, Artificial Sequence
  Description of Artificial Sequence: Synthetic oligonucleotide
  Sense strand starting at position 2277 of SEQ ID NO: 1881845
auguaugucauugacugua

SEQ ID NO: 2075735 - RNA, 19 nt, Artificial Sequence
  Description of Artificial Sequence: Synthetic oligonucleotide
  Antisense strand to SEQ ID NO: 2075734
uacagucaaugacauacau

SEQ ID NO: 2075736 - RNA, 19 nt, Artificial Sequence
  Description of Artificial Sequence: Synthetic oligonucleotide
  Sense strand starting at position 2279 of SEQ ID NO: 1881845
guaugucauugacuguacu

SEQ ID NO: 2075737 - RNA, 19 nt, Artificial Sequence
  Description of Artificial Sequence: Synthetic oligonucleotide
  Antisense strand to SEQ ID NO: 2075736
aguacagucaaugacauac

SEQ ID NO: 2075738 - RNA, 19 nt, Artificial Sequence
  Description of Artificial Sequence: Synthetic oligonucleotide
  Sense strand starting at position 2304 of SEQ ID NO: 1881845
uuugaaagucuuuggguau

SEQ ID NO: 2075739 - RNA, 19 nt, Artificial Sequence
  Description of Artificial Sequence: Synthetic oligonucleotide
  Antisense strand to SEQ ID NO: 2075738
auacccaaagacuuucaaa

SEQ ID NO: 2075740 - RNA, 19 nt, Artificial Sequence
  Description of Artificial Sequence: Synthetic oligonucleotide
  Sense strand starting at position 2454 of SEQ ID NO: 1881845
uucuguguucuuuauauug

SEQ ID NO: 2075741 - RNA, 19 nt, Artificial Sequence
  Description of Artificial Sequence: Synthetic oligonucleotide
  Antisense strand to SEQ ID NO: 2075740
caauauaaagaacacagaa

SEQ ID NO: 2075742 - RNA, 19 nt, Artificial Sequence
  Description of Artificial Sequence: Synthetic oligonucleotide
  Sense strand starting at position 2524 of SEQ ID NO: 1881845
ugauuccuuguaggcaaua

SEQ ID NO: 2075743 - RNA, 19 nt, Artificial Sequence
  Description of Artificial Sequence: Synthetic oligonucleotide
  Antisense strand to SEQ ID NO: 2075742
uauugccuacaaggaauca

SEQ ID NO: 2075744 - RNA, 19 nt, Artificial Sequence
  Description of Artificial Sequence: Synthetic oligonucleotide
  Sense strand starting at position 2525 of SEQ ID NO: 1881845
gauuccuuguaggcaauaa

SEQ ID NO: 2075745 - RNA, 19 nt, Artificial Sequence
  Description of Artificial Sequence: Synthetic oligonucleotide
  Antisense strand to SEQ ID NO: 2075744
uuauugccuacaaggaauc

SEQ ID NO: 2075746 - RNA, 19 nt, Artificial Sequence
  Description of Artificial Sequence: Synthetic oligonucleotide
  Sense strand starting at position 2543 of SEQ ID NO: 1881845
agaaguuagaucuggcuuu

SEQ ID NO: 2075747 - RNA, 19 nt, Artificial Sequence
  Description of Artificial Sequence: Synthetic oligonucleotide
  Antisense strand to SEQ ID NO: 2075746
aaagccagaucuaacuucu

SEQ ID NO: 2075748 - RNA, 19 nt, Artificial Sequence
  Description of Artificial Sequence: Synthetic oligonucleotide
  Sense strand starting at position 2671 of SEQ ID NO: 1881845
uccauuugcuuccuuugua

SEQ ID NO: 2075749 - RNA, 19 nt, Artificial Sequence
  Description of Artificial Sequence: Synthetic oligonucleotide
  Antisense strand to SEQ ID NO: 2075748
uacaaaggaagcaaaugga

SEQ ID NO: 2075750 - RNA, 19 nt, Artificial Sequence
  Description of Artificial Sequence: Synthetic oligonucleotide
  Sense strand starting at position 2717 of SEQ ID NO: 1881845
cugaauguccauuacuugu

SEQ ID NO: 2075751 - RNA, 19 nt, Artificial Sequence
  Description of Artificial Sequence: Synthetic oligonucleotide
  Antisense strand to SEQ ID NO: 2075750
acaaguaauggacauucag

SEQ ID NO: 2075752 - RNA, 19 nt, Artificial Sequence
  Description of Artificial Sequence: Synthetic oligonucleotide
  Sense strand starting at position 2809 of SEQ ID NO: 1881845
ccacucugugaaugggaaa

SEQ ID NO: 2075753 - RNA, 19 nt, Artificial Sequence
  Description of Artificial Sequence: Synthetic oligonucleotide
  Antisense strand to SEQ ID NO: 2075752
uuucccauucacagagugg

SEQ ID NO: 2075754 - RNA, 19 nt, Artificial Sequence
  Description of Artificial Sequence: Synthetic oligonucleotide
  Sense strand starting at position 3195 of SEQ ID NO: 1881845
uaguuacaauuaguaggau

SEQ ID NO: 2075755 - RNA, 19 nt, Artificial Sequence
  Description of Artificial Sequence: Synthetic oligonucleotide
  Antisense strand to SEQ ID NO: 2075754
auccuacuaauuguaacua

SEQ ID NO: 2075756 - RNA, 19 nt, Artificial Sequence
  Description of Artificial Sequence: Synthetic oligonucleotide
  Sense strand starting at position 3510 of SEQ ID NO: 1881845
uguuccauuugaucgugua

SEQ ID NO: 2075757 - RNA, 19 nt, Artificial Sequence
  Description of Artificial Sequence: Synthetic oligonucleotide
  Antisense strand to SEQ ID NO: 2075756
uacacgaucaaauggaaca

SEQ ID NO: 2075758 - RNA, 19 nt, Artificial Sequence
  Description of Artificial Sequence: Synthetic oligonucleotide
  Sense strand starting at position 3511 of SEQ ID NO: 1881845
guuccauuugaucguguau

SEQ ID NO: 2075759 - RNA, 19 nt, Artificial Sequence
  Description of Artificial Sequence: Synthetic oligonucleotide
  Antisense strand to SEQ ID NO: 2075758
auacacgaucaaauggaac

SEQ ID NO: 2075760 - RNA, 19 nt, Artificial Sequence
  Description of Artificial Sequence: Synthetic oligonucleotide
  Sense strand starting at position 3520 of SEQ ID NO: 1881845
gaucguguauuugucuuau

SEQ ID NO: 2075761 - RNA, 19 nt, Artificial Sequence
  Description of Artificial Sequence: Synthetic oligonucleotide
  Antisense strand to SEQ ID NO: 2075760
auaagacaaauacacgauc

SEQ ID NO: 2075762 - RNA, 19 nt, Artificial Sequence
  Description of Artificial Sequence: Synthetic oligonucleotide
  Sense strand starting at position 3522 of SEQ ID NO: 1881845
ucguguauuugucuuauag

SEQ ID NO: 2075763 - RNA, 19 nt, Artificial Sequence
  Description of Artificial Sequence: Synthetic oligonucleotide
  Antisense strand to SEQ ID NO: 2075762
cuauaagacaaauacacga

SEQ ID NO: 2075764 - RNA, 19 nt, Artificial Sequence
  Description of Artificial Sequence: Synthetic oligonucleotide
  Sense strand starting at position 3526 of SEQ ID NO: 1881845
guauuugucuuauagaacc

SEQ ID NO: 2075765 - RNA, 19 nt, Artificial Sequence
  Description of Artificial Sequence: Synthetic oligonucleotide
  Antisense strand to SEQ ID NO: 2075764
gguucuauaagacaaauac

SEQ ID NO: 2075766 - RNA, 19 nt, Artificial Sequence
  Description of Artificial Sequence: Synthetic oligonucleotide
  Sense strand starting at position 3629 of SEQ ID NO: 1881845
gguauaaggacagguuaua

SEQ ID NO: 2075767 - RNA, 19 nt, Artificial Sequence
  Description of Artificial Sequence: Synthetic oligonucleotide
  Antisense strand to SEQ ID NO: 2075766
uauaaccuguccuuauacc

SEQ ID NO: 2075768 - RNA, 19 nt, Artificial Sequence
  Description of Artificial Sequence: Synthetic oligonucleotide
  Sense strand starting at position 3734 of SEQ ID NO: 1881845
guaucaggcuuuccaauuu

SEQ ID NO: 2075769 - RNA, 19 nt, Artificial Sequence
  Description of Artificial Sequence: Synthetic oligonucleotide
  Antisense strand to SEQ ID NO: 2075768
aaauuggaaagccugauac

SEQ ID NO: 2075770 - RNA, 19 nt, Artificial Sequence
  Description of Artificial Sequence: Synthetic oligonucleotide
  Sense strand starting at position 3848 of SEQ ID NO: 1881845
uguagcauccauugaaaua

SEQ ID NO: 2075771 - RNA, 19 nt, Artificial Sequence
  Description of Artificial Sequence: Synthetic oligonucleotide
  Antisense strand to SEQ ID NO: 2075770
uauuucaauggaugcuaca

SEQ ID NO: 2075772 - RNA, 19 nt, Artificial Sequence
  Description of Artificial Sequence: Synthetic oligonucleotide
  Sense strand starting at position 115 of SEQ ID NO: 1881846
ggaacugaguuucuuacua

SEQ ID NO: 2075773 - RNA, 19 nt, Artificial Sequence
  Description of Artificial Sequence: Synthetic oligonucleotide
  Antisense strand to SEQ ID NO: 2075772
uaguaagaaacucaguucc

SEQ ID NO: 2075774 - RNA, 19 nt, Artificial Sequence
  Description of Artificial Sequence: Synthetic oligonucleotide
  Sense strand starting at position 130 of SEQ ID NO: 1881846
acuaguauccuauagcaua

SEQ ID NO: 2075775 - RNA, 19 nt, Artificial Sequence
  Description of Artificial Sequence: Synthetic oligonucleotide
  Antisense strand to SEQ ID NO: 2075774
uaugcuauaggauacuagu

SEQ ID NO: 2075776 - RNA, 19 nt, Artificial Sequence
  Description of Artificial Sequence: Synthetic oligonucleotide
  Sense strand starting at position 265 of SEQ ID NO: 1881846
acagaaggugccuaaagua

SEQ ID NO: 2075777 - RNA, 19 nt, Artificial Sequence
  Description of Artificial Sequence: Synthetic oligonucleotide
  Antisense strand to SEQ ID NO: 2075776
uacuuuaggcaccuucugu

SEQ ID NO: 2075778 - RNA, 19 nt, Artificial Sequence
  Description of Artificial Sequence: Synthetic oligonucleotide
  Sense strand starting at position 325 of SEQ ID NO: 1881846
aggauaagcuauguacaaa

SEQ ID NO: 2075779 - RNA, 19 nt, Artificial Sequence
  Description of Artificial Sequence: Synthetic oligonucleotide
  Antisense strand to SEQ ID NO: 2075778
uuuguacauagcuuauccu

SEQ ID NO: 2075780 - RNA, 19 nt, Artificial Sequence
  Description of Artificial Sequence: Synthetic oligonucleotide
  Sense strand starting at position 404 of SEQ ID NO: 1881846
accaucagaugguucucaa

SEQ ID NO: 2075781 - RNA, 19 nt, Artificial Sequence
  Description of Artificial Sequence: Synthetic oligonucleotide
  Antisense strand to SEQ ID NO: 2075780
uugagaaccaucugauggu

SEQ ID NO: 2075782 - RNA, 19 nt, Artificial Sequence
  Description of Artificial Sequence: Synthetic oligonucleotide
  Sense strand starting at position 407 of SEQ ID NO: 1881846
aucagaugguucucaaaug

SEQ ID NO: 2075783 - RNA, 19 nt, Artificial Sequence
  Description of Artificial Sequence: Synthetic oligonucleotide
  Antisense strand to SEQ ID NO: 2075782
cauuugagaaccaucugau

SEQ ID NO: 2075784 - RNA, 19 nt, Artificial Sequence
  Description of Artificial Sequence: Synthetic oligonucleotide
  Sense strand starting at position 502 of SEQ ID NO: 1881846
agcaaauuguaccuuggau

SEQ ID NO: 2075785 - RNA, 19 nt, Artificial Sequence
  Description of Artificial Sequence: Synthetic oligonucleotide
  Antisense strand to SEQ ID NO: 2075784
auccaagguacaauuugcu

SEQ ID NO: 2075786 - RNA, 19 nt, Artificial Sequence
  Description of Artificial Sequence: Synthetic oligonucleotide
  Sense strand starting at position 509 of SEQ ID NO: 1881846
uguaccuuggauugggaua

SEQ ID NO: 2075787 - RNA, 19 nt, Artificial Sequence
  Description of Artificial Sequence: Synthetic oligonucleotide
  Antisense strand to SEQ ID NO: 2075786
uaucccaauccaagguaca

SEQ ID NO: 2075788 - RNA, 19 nt, Artificial Sequence
  Description of Artificial Sequence: Synthetic oligonucleotide
  Sense strand starting at position 591 of SEQ ID NO: 1881846
ccuacuguauuaucaggaa

SEQ ID NO: 2075789 - RNA, 19 nt, Artificial Sequence
  Description of Artificial Sequence: Synthetic oligonucleotide
  Antisense strand to SEQ ID NO: 2075788
uuccugauaauacaguagg

SEQ ID NO: 2075790 - RNA, 19 nt, Artificial Sequence
  Description of Artificial Sequence: Synthetic oligonucleotide
  Sense strand starting at position 599 of SEQ ID NO: 1881846
auuaucaggaagugguuaa

SEQ ID NO: 2075791 - RNA, 19 nt, Artificial Sequence
  Description of Artificial Sequence: Synthetic oligonucleotide
  Antisense strand to SEQ ID NO: 2075790
uuaaccacuuccugauaau

SEQ ID NO: 2075792 - RNA, 19 nt, Artificial Sequence
  Description of Artificial Sequence: Synthetic oligonucleotide
  Sense strand starting at position 619 of SEQ ID NO: 1881846
gaguaaacauguucuggag

SEQ ID NO: 2075793 - RNA, 19 nt, Artificial Sequence
  Description of Artificial Sequence: Synthetic oligonucleotide
  Antisense strand to SEQ ID NO: 2075792
cuccagaacauguuuacuc

SEQ ID NO: 2075794 - RNA, 19 nt, Artificial Sequence
  Description of Artificial Sequence: Synthetic oligonucleotide
  Sense strand starting at position 663 of SEQ ID NO: 1881846
augagcgugcugaguaaga

SEQ ID NO: 2075795 - RNA, 19 nt, Artificial Sequence
  Description of Artificial Sequence: Synthetic oligonucleotide
  Antisense strand to SEQ ID NO: 2075794
ucuuacucagcacgcucau

SEQ ID NO: 2075796 - RNA, 19 nt, Artificial Sequence
  Description of Artificial Sequence: Synthetic oligonucleotide
  Sense strand starting at position 773 of SEQ ID NO: 1881846
cagaguguaaguuggaauu

SEQ ID NO: 2075797 - RNA, 19 nt, Artificial Sequence
  Description of Artificial Sequence: Synthetic oligonucleotide
  Antisense strand to SEQ ID NO: 2075796
aauuccaacuuacacucug

SEQ ID NO: 2075798 - RNA, 19 nt, Artificial Sequence
  Description of Artificial Sequence: Synthetic oligonucleotide
  Sense strand starting at position 839 of SEQ ID NO: 1881846
guuuauaucugacuuagaa

SEQ ID NO: 2075799 - RNA, 19 nt, Artificial Sequence
  Description of Artificial Sequence: Synthetic oligonucleotide
  Antisense strand to SEQ ID NO: 2075798
uucuaagucagauauaaac

SEQ ID NO: 2075800 - RNA, 19 nt, Artificial Sequence
  Description of Artificial Sequence: Synthetic oligonucleotide
  Sense strand starting at position 1455 of SEQ ID NO: 1881846
gcaguauugacaggaaagu

SEQ ID NO: 2075801 - RNA, 19 nt, Artificial Sequence
  Description of Artificial Sequence: Synthetic oligonucleotide
  Antisense strand to SEQ ID NO: 2075800
acuuuccugucaauacugc

SEQ ID NO: 2075802 - RNA, 19 nt, Artificial Sequence
  Description of Artificial Sequence: Synthetic oligonucleotide
  Sense strand starting at position 1468 of SEQ ID NO: 1881846
gaaagucacugaguagcaa

SEQ ID NO: 2075803 - RNA, 19 nt, Artificial Sequence
  Description of Artificial Sequence: Synthetic oligonucleotide
  Antisense strand to SEQ ID NO: 2075802
uugcuacucagugacuuuc

SEQ ID NO: 2075804 - RNA, 19 nt, Artificial Sequence
  Description of Artificial Sequence: Synthetic oligonucleotide
  Sense strand starting at position 1552 of SEQ ID NO: 1881846
caaugauugguguucgcgu

SEQ ID NO: 2075805 - RNA, 19 nt, Artificial Sequence
  Description of Artificial Sequence: Synthetic oligonucleotide
  Antisense strand to SEQ ID NO: 2075804
acgcgaacaccaaucauug

SEQ ID NO: 2075806 - RNA, 19 nt, Artificial Sequence
  Description of Artificial Sequence: Synthetic oligonucleotide
  Sense strand starting at position 1557 of SEQ ID NO: 1881846
auugguguucgcguucauu

SEQ ID NO: 2075807 - RNA, 19 nt, Artificial Sequence
  Description of Artificial Sequence: Synthetic oligonucleotide
  Antisense strand to SEQ ID NO: 2075806
aaugaacgcgaacaccaau

SEQ ID NO: 2075808 - RNA, 19 nt, Artificial Sequence
  Description of Artificial Sequence: Synthetic oligonucleotide
  Sense strand starting at position 1559 of SEQ ID NO: 1881846
ugguguucgcguucauuau

SEQ ID NO: 2075809 - RNA, 19 nt, Artificial Sequence
  Description of Artificial Sequence: Synthetic oligonucleotide
  Antisense strand to SEQ ID NO: 2075808
auaaugaacgcgaacacca

SEQ ID NO: 2075810 - RNA, 19 nt, Artificial Sequence
  Description of Artificial Sequence: Synthetic oligonucleotide
  Sense strand starting at position 2182 of SEQ ID NO: 1881846
ggagaagucucgaagaagu

SEQ ID NO: 2075811 - RNA, 19 nt, Artificial Sequence
  Description of Artificial Sequence: Synthetic oligonucleotide
  Antisense strand to SEQ ID NO: 2075810
acuucuucgagacuucucc

SEQ ID NO: 2075812 - RNA, 19 nt, Artificial Sequence
  Description of Artificial Sequence: Synthetic oligonucleotide
  Sense strand starting at position 2330 of SEQ ID NO: 1881846
agcuauuucuuguuuccuu

SEQ ID NO: 2075813 - RNA, 19 nt, Artificial Sequence
  Description of Artificial Sequence: Synthetic oligonucleotide
  Antisense strand to SEQ ID NO: 2075812
aaggaaacaagaaauagcu

SEQ ID NO: 2075814 - RNA, 19 nt, Artificial Sequence
  Description of Artificial Sequence: Synthetic oligonucleotide
  Sense strand starting at position 2707 of SEQ ID NO: 1881846
guaugagguaaacggaaau

SEQ ID NO: 2075815 - RNA, 19 nt, Artificial Sequence
  Description of Artificial Sequence: Synthetic oligonucleotide
  Antisense strand to SEQ ID NO: 2075814
auuuccguuuaccucauac

SEQ ID NO: 2075816 - RNA, 19 nt, Artificial Sequence
  Description of Artificial Sequence: Synthetic oligonucleotide
  Sense strand starting at position 2798 of SEQ ID NO: 1881846
ugauuagguuuauugaggu

SEQ ID NO: 2075817 - RNA, 19 nt, Artificial Sequence
  Description of Artificial Sequence: Synthetic oligonucleotide
  Antisense strand to SEQ ID NO: 2075816
accucaauaaaccuaauca

SEQ ID NO: 2075818 - RNA, 19 nt, Artificial Sequence
  Description of Artificial Sequence: Synthetic oligonucleotide
  Sense strand starting at position 2804 of SEQ ID NO: 1881846
gguuuauugaggugacaug

SEQ ID NO: 2075819 - RNA, 19 nt, Artificial Sequence
  Description of Artificial Sequence: Synthetic oligonucleotide
  Antisense strand to SEQ ID NO: 2075818
caugucaccucaauaaacc

SEQ ID NO: 2075820 - RNA, 19 nt, Artificial Sequence
  Description of Artificial Sequence: Synthetic oligonucleotide
  Sense strand starting at position 2814 of SEQ ID NO: 1881846
ggugacaugcaauaauucu

SEQ ID NO: 2075821 - RNA, 19 nt, Artificial Sequence
  Description of Artificial Sequence: Synthetic oligonucleotide
  Antisense strand to SEQ ID NO: 2075820
agaauuauugcaugucacc

SEQ ID NO: 2075822 - RNA, 19 nt, Artificial Sequence
  Description of Artificial Sequence: Synthetic oligonucleotide
  Sense strand starting at position 2832 of SEQ ID NO: 1881846
uuaaauguucugcaauuag

SEQ ID NO: 2075823 - RNA, 19 nt, Artificial Sequence
  Description of Artificial Sequence: Synthetic oligonucleotide
  Antisense strand to SEQ ID NO: 2075822
cuaauugcagaacauuuaa

SEQ ID NO: 2075824 - RNA, 19 nt, Artificial Sequence
  Description of Artificial Sequence: Synthetic oligonucleotide
  Sense strand starting at position 2851 of SEQ ID NO: 1881846
aaguuucuacgucaugaag

SEQ ID NO: 2075825 - RNA, 19 nt, Artificial Sequence
  Description of Artificial Sequence: Synthetic oligonucleotide
  Antisense strand to SEQ ID NO: 2075824
cuucaugacguagaaacuu

SEQ ID NO: 2075826 - RNA, 19 nt, Artificial Sequence
  Description of Artificial Sequence: Synthetic oligonucleotide
  Sense strand starting at position 2984 of SEQ ID NO: 1881846
uuugaagaguacucugaua

SEQ ID NO: 2075827 - RNA, 19 nt, Artificial Sequence
  Description of Artificial Sequence: Synthetic oligonucleotide
  Antisense strand to SEQ ID NO: 2075826
uaucagaguacucuucaaa

SEQ ID NO: 2075828 - RNA, 19 nt, Artificial Sequence
  Description of Artificial Sequence: Synthetic oligonucleotide
  Sense strand starting at position 3073 of SEQ ID NO: 1881846
agcaaagagguauggguaa

SEQ ID NO: 2075829 - RNA, 19 nt, Artificial Sequence
  Description of Artificial Sequence: Synthetic oligonucleotide
  Antisense strand to SEQ ID NO: 2075828
uuacccauaccucuuugcu

SEQ ID NO: 2075830 - RNA, 19 nt, Artificial Sequence
  Description of Artificial Sequence: Synthetic oligonucleotide
  Sense strand starting at position 3173 of SEQ ID NO: 1881846
gcuauuucgcaauacuuau

SEQ ID NO: 2075831 - RNA, 19 nt, Artificial Sequence
  Description of Artificial Sequence: Synthetic oligonucleotide
  Antisense strand to SEQ ID NO: 2075830
auaaguauugcgaaauagc

SEQ ID NO: 2075832 - RNA, 19 nt, Artificial Sequence
  Description of Artificial Sequence: Synthetic oligonucleotide
  Sense strand starting at position 3298 of SEQ ID NO: 1881846
uguucuuuaguauauccaa

SEQ ID NO: 2075833 - RNA, 19 nt, Artificial Sequence
  Description of Artificial Sequence: Synthetic oligonucleotide
  Antisense strand to SEQ ID NO: 2075832
uuggauauacuaaagaaca

SEQ ID NO: 2075834 - RNA, 19 nt, Artificial Sequence
  Description of Artificial Sequence: Synthetic oligonucleotide
  Sense strand starting at position 3301 of SEQ ID NO: 1881846
ucuuuaguauauccaagag

SEQ ID NO: 2075835 - RNA, 19 nt, Artificial Sequence
  Description of Artificial Sequence: Synthetic oligonucleotide
  Antisense strand to SEQ ID NO: 2075834
cucuuggauauacuaaaga

SEQ ID NO: 2075836 - RNA, 19 nt, Artificial Sequence
  Description of Artificial Sequence: Synthetic oligonucleotide
  Sense strand starting at position 3445 of SEQ ID NO: 1881846
uugauauuguucuucuaga

SEQ ID NO: 2075837 - RNA, 19 nt, Artificial Sequence
  Description of Artificial Sequence: Synthetic oligonucleotide
  Antisense strand to SEQ ID NO: 2075836
ucuagaagaacaauaucaa

SEQ ID NO: 2075838 - RNA, 19 nt, Artificial Sequence
  Description of Artificial Sequence: Synthetic oligonucleotide
  Sense strand starting at position 3446 of SEQ ID NO: 1881846
ugauauuguucuucuagau

SEQ ID NO: 2075839 - RNA, 19 nt, Artificial Sequence
  Description of Artificial Sequence: Synthetic oligonucleotide
  Antisense strand to SEQ ID NO: 2075838
aucuagaagaacaauauca

SEQ ID NO: 2075840 - RNA, 19 nt, Artificial Sequence
  Description of Artificial Sequence: Synthetic oligonucleotide
  Sense strand starting at position 3482 of SEQ ID NO: 1881846
aauggaaagcaaugauugu

SEQ ID NO: 2075841 - RNA, 19 nt, Artificial Sequence
  Description of Artificial Sequence: Synthetic oligonucleotide
  Antisense strand to SEQ ID NO: 2075840
acaaucauugcuuuccauu

SEQ ID NO: 2075842 - RNA, 19 nt, Artificial Sequence
  Description of Artificial Sequence: Synthetic oligonucleotide
  Sense strand starting at position 3550 of SEQ ID NO: 1881846
gcaaacucugaagguauca

SEQ ID NO: 2075843 - RNA, 19 nt, Artificial Sequence
  Description of Artificial Sequence: Synthetic oligonucleotide
  Antisense strand to SEQ ID NO: 2075842
ugauaccuucagaguuugc

SEQ ID NO: 2075844 - RNA, 19 nt, Artificial Sequence
  Description of Artificial Sequence: Synthetic oligonucleotide
  Sense strand starting at position 3655 of SEQ ID NO: 1881846
gcacuaaaucaguagugau

SEQ ID NO: 2075845 - RNA, 19 nt, Artificial Sequence
  Description of Artificial Sequence: Synthetic oligonucleotide
  Antisense strand to SEQ ID NO: 2075844
aucacuacugauuuagugc

SEQ ID NO: 2075846 - RNA, 19 nt, Artificial Sequence
  Description of Artificial Sequence: Synthetic oligonucleotide
  Sense strand starting at position 3670 of SEQ ID NO: 1881846
ugauauaguggguggcaaa

SEQ ID NO: 2075847 - RNA, 19 nt, Artificial Sequence
  Description of Artificial Sequence: Synthetic oligonucleotide
  Antisense strand to SEQ ID NO: 2075846
uuugccacccacuauauca

SEQ ID NO: 2075848 - RNA, 19 nt, Artificial Sequence
  Description of Artificial Sequence: Synthetic oligonucleotide
  Sense strand starting at position 3677 of SEQ ID NO: 1881846
guggguggcaaauagaauu

SEQ ID NO: 2075849 - RNA, 19 nt, Artificial Sequence
  Description of Artificial Sequence: Synthetic oligonucleotide
  Antisense strand to SEQ ID NO: 2075848
aauucuauuugccacccac

SEQ ID NO: 2075850 - RNA, 19 nt, Artificial Sequence
  Description of Artificial Sequence: Synthetic oligonucleotide
  Sense strand starting at position 3951 of SEQ ID NO: 1881846
gcugucauugcccuuguuu

SEQ ID NO: 2075851 - RNA, 19 nt, Artificial Sequence
  Description of Artificial Sequence: Synthetic oligonucleotide
  Antisense strand to SEQ ID NO: 2075850
aaacaagggcaaugacagc

SEQ ID NO: 2075852 - RNA, 19 nt, Artificial Sequence
  Description of Artificial Sequence: Synthetic oligonucleotide
  Sense strand starting at position 6 of SEQ ID NO: 1881847
uuauuaaugugucugauag

SEQ ID NO: 2075853 - RNA, 19 nt, Artificial Sequence
  Description of Artificial Sequence: Synthetic oligonucleotide
  Antisense strand to SEQ ID NO: 2075852
cuaucagacacauuaauaa

SEQ ID NO: 2075854 - RNA, 19 nt, Artificial Sequence
  Description of Artificial Sequence: Synthetic oligonucleotide
  Sense strand starting at position 121 of SEQ ID NO: 1881847
uggaaacauuuaggacaga

SEQ ID NO: 2075855 - RNA, 19 nt, Artificial Sequence
  Description of Artificial Sequence: Synthetic oligonucleotide
  Antisense strand to SEQ ID NO: 2075854
ucuguccuaaauguuucca

SEQ ID NO: 2075856 - RNA, 19 nt, Artificial Sequence
  Description of Artificial Sequence: Synthetic oligonucleotide
  Sense strand starting at position 164 of SEQ ID NO: 1881847
agaagacuguacuucgaag

SEQ ID NO: 2075857 - RNA, 19 nt, Artificial Sequence
  Description of Artificial Sequence: Synthetic oligonucleotide
  Antisense strand to SEQ ID NO: 2075856
cuucgaaguacagucuucu

SEQ ID NO: 2075858 - RNA, 19 nt, Artificial Sequence
  Description of Artificial Sequence: Synthetic oligonucleotide
  Sense strand starting at position 166 of SEQ ID NO: 1881847
aagacuguacuucgaagga

SEQ ID NO: 2075859 - RNA, 19 nt, Artificial Sequence
  Description of Artificial Sequence: Synthetic oligonucleotide
  Antisense strand to SEQ ID NO: 2075858
uccuucgaaguacagucuu

SEQ ID NO: 2075860 - RNA, 19 nt, Artificial Sequence
  Description of Artificial Sequence: Synthetic oligonucleotide
  Sense strand starting at position 170 of SEQ ID NO: 1881847
cuguacuucgaaggauauu

SEQ ID NO: 2075861 - RNA, 19 nt, Artificial Sequence
  Description of Artificial Sequence: Synthetic oligonucleotide
  Antisense strand to SEQ ID NO: 2075860
aauauccuucgaaguacag

SEQ ID NO: 2075862 - RNA, 19 nt, Artificial Sequence
  Description of Artificial Sequence: Synthetic oligonucleotide
  Sense strand starting at position 297 of SEQ ID NO: 1881847
uuaauaagcguguugcugu

SEQ ID NO: 2075863 - RNA, 19 nt, Artificial Sequence
  Description of Artificial Sequence: Synthetic oligonucleotide
  Antisense strand to SEQ ID NO: 2075862
acagcaacacgcuuauuaa

SEQ ID NO: 2075864 - RNA, 19 nt, Artificial Sequence
  Description of Artificial Sequence: Synthetic oligonucleotide
  Sense strand starting at position 321 of SEQ ID NO: 1881847
uugucauuaacagggaagu

SEQ ID NO: 2075865 - RNA, 19 nt, Artificial Sequence
  Description of Artificial Sequence: Synthetic oligonucleotide
  Antisense strand to SEQ ID NO: 2075864
acuucccuguuaaugacaa

SEQ ID NO: 2075866 - RNA, 19 nt, Artificial Sequence
  Description of Artificial Sequence: Synthetic oligonucleotide
  Sense strand starting at position 322 of SEQ ID NO: 1881847
ugucauuaacagggaaguu

SEQ ID NO: 2075867 - RNA, 19 nt, Artificial Sequence
  Description of Artificial Sequence: Synthetic oligonucleotide
  Antisense strand to SEQ ID NO: 2075866
aacuucccuguuaaugaca

SEQ ID NO: 2075868 - RNA, 19 nt, Artificial Sequence
  Description of Artificial Sequence: Synthetic oligonucleotide
  Sense strand starting at position 376 of SEQ ID NO: 1881847
uccucugugccagauaauu

SEQ ID NO: 2075869 - RNA, 19 nt, Artificial Sequence
  Description of Artificial Sequence: Synthetic oligonucleotide
  Antisense strand to SEQ ID NO: 2075868
aauuaucuggcacagagga

SEQ ID NO: 2075870 - RNA, 19 nt, Artificial Sequence
  Description of Artificial Sequence: Synthetic oligonucleotide
  Sense strand starting at position 506 of SEQ ID NO: 1881847
ugguuuagugaauaaagca

SEQ ID NO: 2075871 - RNA, 19 nt, Artificial Sequence
  Description of Artificial Sequence: Synthetic oligonucleotide
  Antisense strand to SEQ ID NO: 2075870
ugcuuuauucacuaaacca

SEQ ID NO: 2075872 - RNA, 19 nt, Artificial Sequence
  Description of Artificial Sequence: Synthetic oligonucleotide
  Sense strand starting at position 547 of SEQ ID NO: 1881847
uucccuuuaucagugauag

SEQ ID NO: 2075873 - RNA, 19 nt, Artificial Sequence
  Description of Artificial Sequence: Synthetic oligonucleotide
  Antisense strand to SEQ ID NO: 2075872
cuaucacugauaaagggaa

SEQ ID NO: 2075874 - RNA, 19 nt, Artificial Sequence
  Description of Artificial Sequence: Synthetic oligonucleotide
  Sense strand starting at position 559 of SEQ ID NO: 1881847
gugauagacuccucacaau

SEQ ID NO: 2075875 - RNA, 19 nt, Artificial Sequence
  Description of Artificial Sequence: Synthetic oligonucleotide
  Antisense strand to SEQ ID NO: 2075874
auugugaggagucuaucac

SEQ ID NO: 2075876 - RNA, 19 nt, Artificial Sequence
  Description of Artificial Sequence: Synthetic oligonucleotide
  Sense strand starting at position 631 of SEQ ID NO: 1881847
guaauuauaccuuaguccu

SEQ ID NO: 2075877 - RNA, 19 nt, Artificial Sequence
  Description of Artificial Sequence: Synthetic oligonucleotide
  Antisense strand to SEQ ID NO: 2075876
aggacuaagguauaauuac

SEQ ID NO: 2075878 - RNA, 19 nt, Artificial Sequence
  Description of Artificial Sequence: Synthetic oligonucleotide
  Sense strand starting at position 694 of SEQ ID NO: 1881847
ucuaacaagugaguuuaaa

SEQ ID NO: 2075879 - RNA, 19 nt, Artificial Sequence
  Description of Artificial Sequence: Synthetic oligonucleotide
  Antisense strand to SEQ ID NO: 2075878
uuuaaacucacuuguuaga

SEQ ID NO: 2075880 - RNA, 19 nt, Artificial Sequence
  Description of Artificial Sequence: Synthetic oligonucleotide
  Sense strand starting at position 743 of SEQ ID NO: 1881847
ugugguauauuugcaaagu

SEQ ID NO: 2075881 - RNA, 19 nt, Artificial Sequence
  Description of Artificial Sequence: Synthetic oligonucleotide
  Antisense strand to SEQ ID NO: 2075880
acuuugcaaauauaccaca

SEQ ID NO: 2075882 - RNA, 19 nt, Artificial Sequence
  Description of Artificial Sequence: Synthetic oligonucleotide
  Sense strand starting at position 779 of SEQ ID NO: 1881847
guuaaauagguugaggcaa

SEQ ID NO: 2075883 - RNA, 19 nt, Artificial Sequence
  Description of Artificial Sequence: Synthetic oligonucleotide
  Antisense strand to SEQ ID NO: 2075882
uugccucaaccuauuuaac

SEQ ID NO: 2075884 - RNA, 19 nt, Artificial Sequence
  Description of Artificial Sequence: Synthetic oligonucleotide
  Sense strand starting at position 790 of SEQ ID NO: 1881847
ugaggcaaugauuaaguuu

SEQ ID NO: 2075885 - RNA, 19 nt, Artificial Sequence
  Description of Artificial Sequence: Synthetic oligonucleotide
  Antisense strand to SEQ ID NO: 2075884
aaacuuaaucauugccuca

SEQ ID NO: 2075886 - RNA, 19 nt, Artificial Sequence
  Description of Artificial Sequence: Synthetic oligonucleotide
  Sense strand starting at position 824 of SEQ ID NO: 1881847
ugacuucucggaggucuau

SEQ ID NO: 2075887 - RNA, 19 nt, Artificial Sequence
  Description of Artificial Sequence: Synthetic oligonucleotide
  Antisense strand to SEQ ID NO: 2075886
auagaccuccgagaaguca

SEQ ID NO: 2075888 - RNA, 19 nt, Artificial Sequence
  Description of Artificial Sequence: Synthetic oligonucleotide
  Sense strand starting at position 1044 of SEQ ID NO: 1881847
acauuuagcccuugcauag

SEQ ID NO: 2075889 - RNA, 19 nt, Artificial Sequence
  Description of Artificial Sequence: Synthetic oligonucleotide
  Antisense strand to SEQ ID NO: 2075888
cuaugcaagggcuaaaugu

SEQ ID NO: 2075890 - RNA, 19 nt, Artificial Sequence
  Description of Artificial Sequence: Synthetic oligonucleotide
  Sense strand starting at position 2280 of SEQ ID NO: 1881847
gcucucucagcccaggaau

SEQ ID NO: 2075891 - RNA, 19 nt, Artificial Sequence
  Description of Artificial Sequence: Synthetic oligonucleotide
  Antisense strand to SEQ ID NO: 2075890
auuccugggcugagagagc

SEQ ID NO: 2075892 - RNA, 19 nt, Artificial Sequence
  Description of Artificial Sequence: Synthetic oligonucleotide
  Sense strand starting at position 2282 of SEQ ID NO: 1881847
ucucucagcccaggaauaa

SEQ ID NO: 2075893 - RNA, 19 nt, Artificial Sequence
  Description of Artificial Sequence: Synthetic oligonucleotide
  Antisense strand to SEQ ID NO: 2075892
uuauuccugggcugagaga

SEQ ID NO: 2075894 - RNA, 19 nt, Artificial Sequence
  Description of Artificial Sequence: Synthetic oligonucleotide
  Sense strand starting at position 2283 of SEQ ID NO: 1881847
cucucagcccaggaauaau

SEQ ID NO: 2075895 - RNA, 19 nt, Artificial Sequence
  Description of Artificial Sequence: Synthetic oligonucleotide
  Antisense strand to SEQ ID NO: 2075894
auuauuccugggcugagag

SEQ ID NO: 2075896 - RNA, 19 nt, Artificial Sequence
  Description of Artificial Sequence: Synthetic oligonucleotide
  Sense strand starting at position 2471 of SEQ ID NO: 1881847
gcuggagaccaccagugau

SEQ ID NO: 2075897 - RNA, 19 nt, Artificial Sequence
  Description of Artificial Sequence: Synthetic oligonucleotide
  Antisense strand to SEQ ID NO: 2075896
aucacugguggucuccagc

SEQ ID NO: 2075898 - RNA, 19 nt, Artificial Sequence
  Description of Artificial Sequence: Synthetic oligonucleotide
  Sense strand starting at position 2481 of SEQ ID NO: 1881847
accagugaugcguuugcuu

SEQ ID NO: 2075899 - RNA, 19 nt, Artificial Sequence
  Description of Artificial Sequence: Synthetic oligonucleotide
  Antisense strand to SEQ ID NO: 2075898
aagcaaacgcaucacuggu

SEQ ID NO: 2075900 - RNA, 19 nt, Artificial Sequence
  Description of Artificial Sequence: Synthetic oligonucleotide
  Sense strand starting at position 2924 of SEQ ID NO: 1881847
gcgggcugugauguuugua

SEQ ID NO: 2075901 - RNA, 19 nt, Artificial Sequence
  Description of Artificial Sequence: Synthetic oligonucleotide
  Antisense strand to SEQ ID NO: 2075900
uacaaacaucacagcccgc

SEQ ID NO: 2075902 - RNA, 19 nt, Artificial Sequence
  Description of Artificial Sequence: Synthetic oligonucleotide
  Sense strand starting at position 3203 of SEQ ID NO: 1881847
gucccagagcuuuacaaua

SEQ ID NO: 2075903 - RNA, 19 nt, Artificial Sequence
  Description of Artificial Sequence: Synthetic oligonucleotide
  Antisense strand to SEQ ID NO: 2075902
uauuguaaagcucugggac

SEQ ID NO: 2075904 - RNA, 19 nt, Artificial Sequence
  Description of Artificial Sequence: Synthetic oligonucleotide
  Sense strand starting at position 3225 of SEQ ID NO: 1881847
uggauuugguuugacaucu

SEQ ID NO: 2075905 - RNA, 19 nt, Artificial Sequence
  Description of Artificial Sequence: Synthetic oligonucleotide
  Antisense strand to SEQ ID NO: 2075904
agaugucaaaccaaaucca

SEQ ID NO: 2075906 - RNA, 19 nt, Artificial Sequence
  Description of Artificial Sequence: Synthetic oligonucleotide
  Sense strand starting at position 3336 of SEQ ID NO: 1881847
uggaaauuggaguguugac

SEQ ID NO: 2075907 - RNA, 19 nt, Artificial Sequence
  Description of Artificial Sequence: Synthetic oligonucleotide
  Antisense strand to SEQ ID NO: 2075906
gucaacacuccaauuucca

SEQ ID NO: 2075908 - RNA, 19 nt, Artificial Sequence
  Description of Artificial Sequence: Synthetic oligonucleotide
  Sense strand starting at position 3383 of SEQ ID NO: 1881847
cauugcuuugaguacuagu

SEQ ID NO: 2075909 - RNA, 19 nt, Artificial Sequence
  Description of Artificial Sequence: Synthetic oligonucleotide
  Antisense strand to SEQ ID NO: 2075908
acuaguacucaaagcaaug

SEQ ID NO: 2075910 - RNA, 19 nt, Artificial Sequence
  Description of Artificial Sequence: Synthetic oligonucleotide
  Sense strand starting at position 3512 of SEQ ID NO: 1881847
uuuagaaugucugcuacau

SEQ ID NO: 2075911 - RNA, 19 nt, Artificial Sequence
  Description of Artificial Sequence: Synthetic oligonucleotide
  Antisense strand to SEQ ID NO: 2075910
auguagcagacauucuaaa

SEQ ID NO: 2075912 - RNA, 19 nt, Artificial Sequence
  Description of Artificial Sequence: Synthetic oligonucleotide
  Sense strand starting at position 3822 of SEQ ID NO: 1881847
ggcuaauuccuccacuuug

SEQ ID NO: 2075913 - RNA, 19 nt, Artificial Sequence
  Description of Artificial Sequence: Synthetic oligonucleotide
  Antisense strand to SEQ ID NO: 2075912
caaaguggaggaauuagcc

SEQ ID NO: 2075914 - RNA, 19 nt, Artificial Sequence
  Description of Artificial Sequence: Synthetic oligonucleotide
  Sense strand starting at position 3879 of SEQ ID NO: 1881847
uuggguauugaagauaguu

SEQ ID NO: 2075915 - RNA, 19 nt, Artificial Sequence
  Description of Artificial Sequence: Synthetic oligonucleotide
  Antisense strand to SEQ ID NO: 2075914
aacuaucuucaauacccaa

SEQ ID NO: 2075916 - RNA, 19 nt, Artificial Sequence
  Description of Artificial Sequence: Synthetic oligonucleotide
  Sense strand starting at position 3881 of SEQ ID NO: 1881847
ggguauugaagauaguugu

SEQ ID NO: 2075917 - RNA, 19 nt, Artificial Sequence
  Description of Artificial Sequence: Synthetic oligonucleotide
  Antisense strand to SEQ ID NO: 2075916
acaacuaucuucaauaccc

SEQ ID NO: 2075918 - RNA, 19 nt, Artificial Sequence
  Description of Artificial Sequence: Synthetic oligonucleotide
  Sense strand starting at position 3887 of SEQ ID NO: 1881847
ugaagauaguugucugguu

SEQ ID NO: 2075919 - RNA, 19 nt, Artificial Sequence
  Description of Artificial Sequence: Synthetic oligonucleotide
  Antisense strand to SEQ ID NO: 2075918
aaccagacaacuaucuuca

SEQ ID NO: 2075920 - RNA, 19 nt, Artificial Sequence
  Description of Artificial Sequence: Synthetic oligonucleotide
  Sense strand starting at position 3888 of SEQ ID NO: 1881847
gaagauaguugucugguuu

SEQ ID NO: 2075921 - RNA, 19 nt, Artificial Sequence
  Description of Artificial Sequence: Synthetic oligonucleotide
  Antisense strand to SEQ ID NO: 2075920
aaaccagacaacuaucuuc

SEQ ID NO: 2075922 - RNA, 19 nt, Artificial Sequence
  Description of Artificial Sequence: Synthetic oligonucleotide
  Sense strand starting at position 3889 of SEQ ID NO: 1881847
aagauaguugucugguuua

SEQ ID NO: 2075923 - RNA, 19 nt, Artificial Sequence
  Description of Artificial Sequence: Synthetic oligonucleotide
  Antisense strand to SEQ ID NO: 2075922
uaaaccagacaacuaucuu

SEQ ID NO: 2075924 - RNA, 19 nt, Artificial Sequence
  Description of Artificial Sequence: Synthetic oligonucleotide
  Sense strand starting at position 3892 of SEQ ID NO: 1881847
auaguugucugguuuaaga

SEQ ID NO: 2075925 - RNA, 19 nt, Artificial Sequence
  Description of Artificial Sequence: Synthetic oligonucleotide
  Antisense strand to SEQ ID NO: 2075924
ucuuaaaccagacaacuau

SEQ ID NO: 2075926 - RNA, 19 nt, Artificial Sequence
  Description of Artificial Sequence: Synthetic oligonucleotide
  Sense strand starting at position 3894 of SEQ ID NO: 1881847
aguugucugguuuaagacu

SEQ ID NO: 2075927 - RNA, 19 nt, Artificial Sequence
  Description of Artificial Sequence: Synthetic oligonucleotide
  Antisense strand to SEQ ID NO: 2075926
agucuuaaaccagacaacu

SEQ ID NO: 2075928 - RNA, 19 nt, Artificial Sequence
  Description of Artificial Sequence: Synthetic oligonucleotide
  Sense strand starting at position 3900 of SEQ ID NO: 1881847
cugguuuaagacugguauu

SEQ ID NO: 2075929 - RNA, 19 nt, Artificial Sequence
  Description of Artificial Sequence: Synthetic oligonucleotide
  Antisense strand to SEQ ID NO: 2075928
aauaccagucuuaaaccag

SEQ ID NO: 2075930 - RNA, 19 nt, Artificial Sequence
  Description of Artificial Sequence: Synthetic oligonucleotide
  Sense strand starting at position 3903 of SEQ ID NO: 1881847
guuuaagacugguauuuaa

SEQ ID NO: 2075931 - RNA, 19 nt, Artificial Sequence
  Description of Artificial Sequence: Synthetic oligonucleotide
  Antisense strand to SEQ ID NO: 2075930
uuaaauaccagucuuaaac

SEQ ID NO: 2075932 - RNA, 19 nt, Artificial Sequence
  Description of Artificial Sequence: Synthetic oligonucleotide
  Sense strand starting at position 9 of SEQ ID NO: 1881848
auugaucacucacuuuagu

SEQ ID NO: 2075933 - RNA, 19 nt, Artificial Sequence
  Description of Artificial Sequence: Synthetic oligonucleotide
  Antisense strand to SEQ ID NO: 2075932
acuaaagugagugaucaau

SEQ ID NO: 2075934 - RNA, 19 nt, Artificial Sequence
  Description of Artificial Sequence: Synthetic oligonucleotide
  Sense strand starting at position 111 of SEQ ID NO: 1881848
agcuuacuauuccuggauu

SEQ ID NO: 2075935 - RNA, 19 nt, Artificial Sequence
  Description of Artificial Sequence: Synthetic oligonucleotide
  Antisense strand to SEQ ID NO: 2075934
aauccaggaauaguaagcu

SEQ ID NO: 2075936 - RNA, 19 nt, Artificial Sequence
  Description of Artificial Sequence: Synthetic oligonucleotide
  Sense strand starting at position 156 of SEQ ID NO: 1881848
ugaguuaugcugcagagaa

SEQ ID NO: 2075937 - RNA, 19 nt, Artificial Sequence
  Description of Artificial Sequence: Synthetic oligonucleotide
  Antisense strand to SEQ ID NO: 2075936
uucucugcagcauaacuca

SEQ ID NO: 2075938 - RNA, 19 nt, Artificial Sequence
  Description of Artificial Sequence: Synthetic oligonucleotide
  Sense strand starting at position 158 of SEQ ID NO: 1881848
aguuaugcugcagagaaga

SEQ ID NO: 2075939 - RNA, 19 nt, Artificial Sequence
  Description of Artificial Sequence: Synthetic oligonucleotide
  Antisense strand to SEQ ID NO: 2075938
ucuucucugcagcauaacu

SEQ ID NO: 2075940 - RNA, 19 nt, Artificial Sequence
  Description of Artificial Sequence: Synthetic oligonucleotide
  Sense strand starting at position 889 of SEQ ID NO: 1881848
agcaccugggauugaaauu

SEQ ID NO: 2075941 - RNA, 19 nt, Artificial Sequence
  Description of Artificial Sequence: Synthetic oligonucleotide
  Antisense strand to SEQ ID NO: 2075940
aauuucaaucccaggugcu

SEQ ID NO: 2075942 - RNA, 19 nt, Artificial Sequence
  Description of Artificial Sequence: Synthetic oligonucleotide
  Sense strand starting at position 919 of SEQ ID NO: 1881848
ucugacaaagcuugaucuu

SEQ ID NO: 2075943 - RNA, 19 nt, Artificial Sequence
  Description of Artificial Sequence: Synthetic oligonucleotide
  Antisense strand to SEQ ID NO: 2075942
aagaucaagcuuugucaga

SEQ ID NO: 2075944 - RNA, 19 nt, Artificial Sequence
  Description of Artificial Sequence: Synthetic oligonucleotide
  Sense strand starting at position 920 of SEQ ID NO: 1881848
cugacaaagcuugaucuua

SEQ ID NO: 2075945 - RNA, 19 nt, Artificial Sequence
  Description of Artificial Sequence: Synthetic oligonucleotide
  Antisense strand to SEQ ID NO: 2075944
uaagaucaagcuuugucag

SEQ ID NO: 2075946 - RNA, 19 nt, Artificial Sequence
  Description of Artificial Sequence: Synthetic oligonucleotide
  Sense strand starting at position 928 of SEQ ID NO: 1881848
gcuugaucuuaacccuuga

SEQ ID NO: 2075947 - RNA, 19 nt, Artificial Sequence
  Description of Artificial Sequence: Synthetic oligonucleotide
  Antisense strand to SEQ ID NO: 2075946
ucaaggguuaagaucaagc

SEQ ID NO: 2075948 - RNA, 19 nt, Artificial Sequence
  Description of Artificial Sequence: Synthetic oligonucleotide
  Sense strand starting at position 978 of SEQ ID NO: 1881848
gugccaccgcaugugauua

SEQ ID NO: 2075949 - RNA, 19 nt, Artificial Sequence
  Description of Artificial Sequence: Synthetic oligonucleotide
  Antisense strand to SEQ ID NO: 2075948
uaaucacaugcgguggcac

SEQ ID NO: 2075950 - RNA, 19 nt, Artificial Sequence
  Description of Artificial Sequence: Synthetic oligonucleotide
  Sense strand starting at position 1102 of SEQ ID NO: 1881848
ccucuuagucuguaacauu

SEQ ID NO: 2075951 - RNA, 19 nt, Artificial Sequence
  Description of Artificial Sequence: Synthetic oligonucleotide
  Antisense strand to SEQ ID NO: 2075950
aauguuacagacuaagagg

SEQ ID NO: 2075952 - RNA, 19 nt, Artificial Sequence
  Description of Artificial Sequence: Synthetic oligonucleotide
  Sense strand starting at position 1200 of SEQ ID NO: 1881848
gccugagaaguaggaagau

SEQ ID NO: 2075953 - RNA, 19 nt, Artificial Sequence
  Description of Artificial Sequence: Synthetic oligonucleotide
  Antisense strand to SEQ ID NO: 2075952
aucuuccuacuucucaggc

SEQ ID NO: 2075954 - RNA, 19 nt, Artificial Sequence
  Description of Artificial Sequence: Synthetic oligonucleotide
  Sense strand starting at position 1219 of SEQ ID NO: 1881848
augguauaauaucuagcau

SEQ ID NO: 2075955 - RNA, 19 nt, Artificial Sequence
  Description of Artificial Sequence: Synthetic oligonucleotide
  Antisense strand to SEQ ID NO: 2075954
augcuagauauuauaccau

SEQ ID NO: 2075956 - RNA, 19 nt, Artificial Sequence
  Description of Artificial Sequence: Synthetic oligonucleotide
  Sense strand starting at position 1297 of SEQ ID NO: 1881848
agccauaacguguaccaga

SEQ ID NO: 2075957 - RNA, 19 nt, Artificial Sequence
  Description of Artificial Sequence: Synthetic oligonucleotide
  Antisense strand to SEQ ID NO: 2075956
ucugguacacguuauggcu

SEQ ID NO: 2075958 - RNA, 19 nt, Artificial Sequence
  Description of Artificial Sequence: Synthetic oligonucleotide
  Sense strand starting at position 1302 of SEQ ID NO: 1881848
uaacguguaccagaacaua

SEQ ID NO: 2075959 - RNA, 19 nt, Artificial Sequence
  Description of Artificial Sequence: Synthetic oligonucleotide
  Antisense strand to SEQ ID NO: 2075958
uauguucugguacacguua

SEQ ID NO: 2075960 - RNA, 19 nt, Artificial Sequence
  Description of Artificial Sequence: Synthetic oligonucleotide
  Sense strand starting at position 1340 of SEQ ID NO: 1881848
aagagaggccuugguggaa

SEQ ID NO: 2075961 - RNA, 19 nt, Artificial Sequence
  Description of Artificial Sequence: Synthetic oligonucleotide
  Antisense strand to SEQ ID NO: 2075960
uuccaccaaggccucucuu

SEQ ID NO: 2075962 - RNA, 19 nt, Artificial Sequence
  Description of Artificial Sequence: Synthetic oligonucleotide
  Sense strand starting at position 1428 of SEQ ID NO: 1881848
gcucucauuugcccagaga

SEQ ID NO: 2075963 - RNA, 19 nt, Artificial Sequence
  Description of Artificial Sequence: Synthetic oligonucleotide
  Antisense strand to SEQ ID NO: 2075962
ucucugggcaaaugagagc

SEQ ID NO: 2075964 - RNA, 19 nt, Artificial Sequence
  Description of Artificial Sequence: Synthetic oligonucleotide
  Sense strand starting at position 1485 of SEQ ID NO: 1881848
guuagagauuccuauuuga

SEQ ID NO: 2075965 - RNA, 19 nt, Artificial Sequence
  Description of Artificial Sequence: Synthetic oligonucleotide
  Antisense strand to SEQ ID NO: 2075964
ucaaauaggaaucucuaac

SEQ ID NO: 2075966 - RNA, 19 nt, Artificial Sequence
  Description of Artificial Sequence: Synthetic oligonucleotide
  Sense strand starting at position 1490 of SEQ ID NO: 1881848
agauuccuauuugaagaaa

SEQ ID NO: 2075967 - RNA, 19 nt, Artificial Sequence
  Description of Artificial Sequence: Synthetic oligonucleotide
  Antisense strand to SEQ ID NO: 2075966
uuucuucaaauaggaaucu

SEQ ID NO: 2075968 - RNA, 19 nt, Artificial Sequence
  Description of Artificial Sequence: Synthetic oligonucleotide
  Sense strand starting at position 1748 of SEQ ID NO: 1881848
uaacgucagguuuaagcaa

SEQ ID NO: 2075969 - RNA, 19 nt, Artificial Sequence
  Description of Artificial Sequence: Synthetic oligonucleotide
  Antisense strand to SEQ ID NO: 2075968
uugcuuaaaccugacguua

SEQ ID NO: 2075970 - RNA, 19 nt, Artificial Sequence
  Description of Artificial Sequence: Synthetic oligonucleotide
  Sense strand starting at position 2398 of SEQ ID NO: 1881848
aaggaauuguggucagguu

SEQ ID NO: 2075971 - RNA, 19 nt, Artificial Sequence
  Description of Artificial Sequence: Synthetic oligonucleotide
  Antisense strand to SEQ ID NO: 2075970
aaccugaccacaauuccuu

SEQ ID NO: 2075972 - RNA, 19 nt, Artificial Sequence
  Description of Artificial Sequence: Synthetic oligonucleotide
  Sense strand starting at position 2399 of SEQ ID NO: 1881848
aggaauuguggucagguua

SEQ ID NO: 2075973 - RNA, 19 nt, Artificial Sequence
  Description of Artificial Sequence: Synthetic oligonucleotide
  Antisense strand to SEQ ID NO: 2075972
uaaccugaccacaauuccu

SEQ ID NO: 2075974 - RNA, 19 nt, Artificial Sequence
  Description of Artificial Sequence: Synthetic oligonucleotide
  Sense strand starting at position 2498 of SEQ ID NO: 1881848
ggcagagucauguauagaa

SEQ ID NO: 2075975 - RNA, 19 nt, Artificial Sequence
  Description of Artificial Sequence: Synthetic oligonucleotide
  Antisense strand to SEQ ID NO: 2075974
uucuauacaugacucugcc

SEQ ID NO: 2075976 - RNA, 19 nt, Artificial Sequence
  Description of Artificial Sequence: Synthetic oligonucleotide
  Sense strand starting at position 2502 of SEQ ID NO: 1881848
gagucauguauagaaggca

SEQ ID NO: 2075977 - RNA, 19 nt, Artificial Sequence
  Description of Artificial Sequence: Synthetic oligonucleotide
  Antisense strand to SEQ ID NO: 2075976
ugccuucuauacaugacuc

SEQ ID NO: 2075978 - RNA, 19 nt, Artificial Sequence
  Description of Artificial Sequence: Synthetic oligonucleotide
  Sense strand starting at position 2565 of SEQ ID NO: 1881848
augaauuguuuagcagaug

SEQ ID NO: 2075979 - RNA, 19 nt, Artificial Sequence
  Description of Artificial Sequence: Synthetic oligonucleotide
  Antisense strand to SEQ ID NO: 2075978
caucugcuaaacaauucau

SEQ ID NO: 2075980 - RNA, 19 nt, Artificial Sequence
  Description of Artificial Sequence: Synthetic oligonucleotide
  Sense strand starting at position 2568 of SEQ ID NO: 1881848
aauuguuuagcagauguuu

SEQ ID NO: 2075981 - RNA, 19 nt, Artificial Sequence
  Description of Artificial Sequence: Synthetic oligonucleotide
  Antisense strand to SEQ ID NO: 2075980
aaacaucugcuaaacaauu

SEQ ID NO: 2075982 - RNA, 19 nt, Artificial Sequence
  Description of Artificial Sequence: Synthetic oligonucleotide
  Sense strand starting at position 2587 of SEQ ID NO: 1881848
uuggaaaccugguuaaaca

SEQ ID NO: 2075983 - RNA, 19 nt, Artificial Sequence
  Description of Artificial Sequence: Synthetic oligonucleotide
  Antisense strand to SEQ ID NO: 2075982
uguuuaaccagguuuccaa

SEQ ID NO: 2075984 - RNA, 19 nt, Artificial Sequence
  Description of Artificial Sequence: Synthetic oligonucleotide
  Sense strand starting at position 2684 of SEQ ID NO: 1881848
ugcuauaaaguuuacugaa

SEQ ID NO: 2075985 - RNA, 19 nt, Artificial Sequence
  Description of Artificial Sequence: Synthetic oligonucleotide
  Antisense strand to SEQ ID NO: 2075984
uucaguaaacuuuauagca

SEQ ID NO: 2075986 - RNA, 19 nt, Artificial Sequence
  Description of Artificial Sequence: Synthetic oligonucleotide
  Sense strand starting at position 2702 of SEQ ID NO: 1881848
agcuguggcuucuugauuu

SEQ ID NO: 2075987 - RNA, 19 nt, Artificial Sequence
  Description of Artificial Sequence: Synthetic oligonucleotide
  Antisense strand to SEQ ID NO: 2075986
aaaucaagaagccacagcu

SEQ ID NO: 2075988 - RNA, 19 nt, Artificial Sequence
  Description of Artificial Sequence: Synthetic oligonucleotide
  Sense strand starting at position 2758 of SEQ ID NO: 1881848
agcccuuagguuuaaaguu

SEQ ID NO: 2075989 - RNA, 19 nt, Artificial Sequence
  Description of Artificial Sequence: Synthetic oligonucleotide
  Antisense strand to SEQ ID NO: 2075988
aacuuuaaaccuaagggcu

SEQ ID NO: 2075990 - RNA, 19 nt, Artificial Sequence
  Description of Artificial Sequence: Synthetic oligonucleotide
  Sense strand starting at position 2765 of SEQ ID NO: 1881848
agguuuaaaguugguggaa

SEQ ID NO: 2075991 - RNA, 19 nt, Artificial Sequence
  Description of Artificial Sequence: Synthetic oligonucleotide
  Antisense strand to SEQ ID NO: 2075990
uuccaccaacuuuaaaccu

SEQ ID NO: 2075992 - RNA, 19 nt, Artificial Sequence
  Description of Artificial Sequence: Synthetic oligonucleotide
  Sense strand starting at position 2881 of SEQ ID NO: 1881848
augauuuccuguuagagga

SEQ ID NO: 2075993 - RNA, 19 nt, Artificial Sequence
  Description of Artificial Sequence: Synthetic oligonucleotide
  Antisense strand to SEQ ID NO: 2075992
uccucuaacaggaaaucau

SEQ ID NO: 2075994 - RNA, 19 nt, Artificial Sequence
  Description of Artificial Sequence: Synthetic oligonucleotide
  Sense strand starting at position 2956 of SEQ ID NO: 1881848
gcuguuguggaccaaugau

SEQ ID NO: 2075995 - RNA, 19 nt, Artificial Sequence
  Description of Artificial Sequence: Synthetic oligonucleotide
  Antisense strand to SEQ ID NO: 2075994
aucauugguccacaacagc

SEQ ID NO: 2075996 - RNA, 19 nt, Artificial Sequence
  Description of Artificial Sequence: Synthetic oligonucleotide
  Sense strand starting at position 3026 of SEQ ID NO: 1881848
ccuugaguaccaugauaau

SEQ ID NO: 2075997 - RNA, 19 nt, Artificial Sequence
  Description of Artificial Sequence: Synthetic oligonucleotide
  Antisense strand to SEQ ID NO: 2075996
auuaucaugguacucaagg

SEQ ID NO: 2075998 - RNA, 19 nt, Artificial Sequence
  Description of Artificial Sequence: Synthetic oligonucleotide
  Sense strand starting at position 3140 of SEQ ID NO: 1881848
uggaucaugcuuuggacau

SEQ ID NO: 2075999 - RNA, 19 nt, Artificial Sequence
  Description of Artificial Sequence: Synthetic oligonucleotide
  Antisense strand to SEQ ID NO: 2075998
auguccaaagcaugaucca

SEQ ID NO: 2076000 - RNA, 19 nt, Artificial Sequence
  Description of Artificial Sequence: Synthetic oligonucleotide
  Sense strand starting at position 3321 of SEQ ID NO: 1881848
ugcacaauccaaugagaca

SEQ ID NO: 2076001 - RNA, 19 nt, Artificial Sequence
  Description of Artificial Sequence: Synthetic oligonucleotide
  Antisense strand to SEQ ID NO: 2076000
ugucucauuggauugugca

SEQ ID NO: 2076002 - RNA, 19 nt, Artificial Sequence
  Description of Artificial Sequence: Synthetic oligonucleotide
  Sense strand starting at position 3444 of SEQ ID NO: 1881848
ucuaauguacgacauuaac

SEQ ID NO: 2076003 - RNA, 19 nt, Artificial Sequence
  Description of Artificial Sequence: Synthetic oligonucleotide
  Antisense strand to SEQ ID NO: 2076002
guuaaugucguacauuaga

SEQ ID NO: 2076004 - RNA, 19 nt, Artificial Sequence
  Description of Artificial Sequence: Synthetic oligonucleotide
  Sense strand starting at position 3450 of SEQ ID NO: 1881848
guacgacauuaacuauuaa

SEQ ID NO: 2076005 - RNA, 19 nt, Artificial Sequence
  Description of Artificial Sequence: Synthetic oligonucleotide
  Antisense strand to SEQ ID NO: 2076004
uuaauaguuaaugucguac

SEQ ID NO: 2076006 - RNA, 19 nt, Artificial Sequence
  Description of Artificial Sequence: Synthetic oligonucleotide
  Sense strand starting at position 3498 of SEQ ID NO: 1881848
gcuauuuguuuccuaccua

SEQ ID NO: 2076007 - RNA, 19 nt, Artificial Sequence
  Description of Artificial Sequence: Synthetic oligonucleotide
  Antisense strand to SEQ ID NO: 2076006
uagguaggaaacaaauagc

SEQ ID NO: 2076008 - RNA, 19 nt, Artificial Sequence
  Description of Artificial Sequence: Synthetic oligonucleotide
  Sense strand starting at position 3526 of SEQ ID NO: 1881848
guaaauaaguuacugagau

SEQ ID NO: 2076009 - RNA, 19 nt, Artificial Sequence
  Description of Artificial Sequence: Synthetic oligonucleotide
  Antisense strand to SEQ ID NO: 2076008
aucucaguaacuuauuuac

SEQ ID NO: 2076010 - RNA, 19 nt, Artificial Sequence
  Description of Artificial Sequence: Synthetic oligonucleotide
  Sense strand starting at position 3982 of SEQ ID NO: 1881848
guugcuaaguaacuagaaa

SEQ ID NO: 2076011 - RNA, 19 nt, Artificial Sequence
  Description of Artificial Sequence: Synthetic oligonucleotide
  Antisense strand to SEQ ID NO: 2076010
uuucuaguuacuuagcaac

SEQ ID NO: 2076012 - RNA, 19 nt, Artificial Sequence
  Description of Artificial Sequence: Synthetic oligonucleotide
  Sense strand starting at position 364 of SEQ ID NO: 1881849
cagcuuggugaccauaauu

SEQ ID NO: 2076013 - RNA, 19 nt, Artificial Sequence
  Description of Artificial Sequence: Synthetic oligonucleotide
  Antisense strand to SEQ ID NO: 2076012
aauuauggucaccaagcug

SEQ ID NO: 2076014 - RNA, 19 nt, Artificial Sequence
  Description of Artificial Sequence: Synthetic oligonucleotide
  Sense strand starting at position 369 of SEQ ID NO: 1881849
uggugaccauaauuaguaa

SEQ ID NO: 2076015 - RNA, 19 nt, Artificial Sequence
  Description of Artificial Sequence: Synthetic oligonucleotide
  Antisense strand to SEQ ID NO: 2076014
uuacuaauuauggucacca

SEQ ID NO: 2076016 - RNA, 19 nt, Artificial Sequence
  Description of Artificial Sequence: Synthetic oligonucleotide
  Sense strand starting at position 432 of SEQ ID NO: 1881849
guguucucaccagggaaac

SEQ ID NO: 2076017 - RNA, 19 nt, Artificial Sequence
  Description of Artificial Sequence: Synthetic oligonucleotide
  Antisense strand to SEQ ID NO: 2076016
guuucccuggugagaacac

SEQ ID NO: 2076018 - RNA, 19 nt, Artificial Sequence
  Description of Artificial Sequence: Synthetic oligonucleotide
  Sense strand starting at position 473 of SEQ ID NO: 1881849
ggauguuagcuugauugug

SEQ ID NO: 2076019 - RNA, 19 nt, Artificial Sequence
  Description of Artificial Sequence: Synthetic oligonucleotide
  Antisense strand to SEQ ID NO: 2076018
cacaaucaagcuaacaucc

SEQ ID NO: 2076020 - RNA, 19 nt, Artificial Sequence
  Description of Artificial Sequence: Synthetic oligonucleotide
  Sense strand starting at position 583 of SEQ ID NO: 1881849
ggaggauauugccuccaaa

SEQ ID NO: 2076021 - RNA, 19 nt, Artificial Sequence
  Description of Artificial Sequence: Synthetic oligonucleotide
  Antisense strand to SEQ ID NO: 2076020
uuuggaggcaauauccucc

SEQ ID NO: 2076022 - RNA, 19 nt, Artificial Sequence
  Description of Artificial Sequence: Synthetic oligonucleotide
  Sense strand starting at position 586 of SEQ ID NO: 1881849
ggauauugccuccaaauca

SEQ ID NO: 2076023 - RNA, 19 nt, Artificial Sequence
  Description of Artificial Sequence: Synthetic oligonucleotide
  Antisense strand to SEQ ID NO: 2076022
ugauuuggaggcaauaucc

SEQ ID NO: 2076024 - RNA, 19 nt, Artificial Sequence
  Description of Artificial Sequence: Synthetic oligonucleotide
  Sense strand starting at position 594 of SEQ ID NO: 1881849
ccuccaaaucagggucuau

SEQ ID NO: 2076025 - RNA, 19 nt, Artificial Sequence
  Description of Artificial Sequence: Synthetic oligonucleotide
  Antisense strand to SEQ ID NO: 2076024
auagacccugauuuggagg

SEQ ID NO: 2076026 - RNA, 19 nt, Artificial Sequence
  Description of Artificial Sequence: Synthetic oligonucleotide
  Sense strand starting at position 755 of SEQ ID NO: 1881849
gucuuugaucccuacaucu

SEQ ID NO: 2076027 - RNA, 19 nt, Artificial Sequence
  Description of Artificial Sequence: Synthetic oligonucleotide
  Antisense strand to SEQ ID NO: 2076026
agauguagggaucaaagac

SEQ ID NO: 2076028 - RNA, 19 nt, Artificial Sequence
  Description of Artificial Sequence: Synthetic oligonucleotide
  Sense strand starting at position 786 of SEQ ID NO: 1881849
uguuccacucacuggaaua

SEQ ID NO: 2076029 - RNA, 19 nt, Artificial Sequence
  Description of Artificial Sequence: Synthetic oligonucleotide
  Antisense strand to SEQ ID NO: 2076028
uauuccagugaguggaaca

SEQ ID NO: 2076030 - RNA, 19 nt, Artificial Sequence
  Description of Artificial Sequence: Synthetic oligonucleotide
  Sense strand starting at position 925 of SEQ ID NO: 1881849
ggaaguuagaucugauucc

SEQ ID NO: 2076031 - RNA, 19 nt, Artificial Sequence
  Description of Artificial Sequence: Synthetic oligonucleotide
  Antisense strand to SEQ ID NO: 2076030
ggaaucagaucuaacuucc

SEQ ID NO: 2076032 - RNA, 19 nt, Artificial Sequence
  Description of Artificial Sequence: Synthetic oligonucleotide
  Sense strand starting at position 966 of SEQ ID NO: 1881849
uuuggaauccaguaaugua

SEQ ID NO: 2076033 - RNA, 19 nt, Artificial Sequence
  Description of Artificial Sequence: Synthetic oligonucleotide
  Antisense strand to SEQ ID NO: 2076032
uacauuacuggauuccaaa

SEQ ID NO: 2076034 - RNA, 19 nt, Artificial Sequence
  Description of Artificial Sequence: Synthetic oligonucleotide
  Sense strand starting at position 974 of SEQ ID NO: 1881849
ccaguaauguaaguacauu

SEQ ID NO: 2076035 - RNA, 19 nt, Artificial Sequence
  Description of Artificial Sequence: Synthetic oligonucleotide
  Antisense strand to SEQ ID NO: 2076034
aauguacuuacauuacugg

SEQ ID NO: 2076036 - RNA, 19 nt, Artificial Sequence
  Description of Artificial Sequence: Synthetic oligonucleotide
  Sense strand starting at position 986 of SEQ ID NO: 1881849
guacauuuaugcuuguguu

SEQ ID NO: 2076037 - RNA, 19 nt, Artificial Sequence
  Description of Artificial Sequence: Synthetic oligonucleotide
  Antisense strand to SEQ ID NO: 2076036
aacacaagcauaaauguac

SEQ ID NO: 2076038 - RNA, 19 nt, Artificial Sequence
  Description of Artificial Sequence: Synthetic oligonucleotide
  Sense strand starting at position 1713 of SEQ ID NO: 1881849
uguguaguuaaucagauua

SEQ ID NO: 2076039 - RNA, 19 nt, Artificial Sequence
  Description of Artificial Sequence: Synthetic oligonucleotide
  Antisense strand to SEQ ID NO: 2076038
uaaucugauuaacuacaca

SEQ ID NO: 2076040 - RNA, 19 nt, Artificial Sequence
  Description of Artificial Sequence: Synthetic oligonucleotide
  Sense strand starting at position 1860 of SEQ ID NO: 1881849
gagacuuacccguaccugu

SEQ ID NO: 2076041 - RNA, 19 nt, Artificial Sequence
  Description of Artificial Sequence: Synthetic oligonucleotide
  Antisense strand to SEQ ID NO: 2076040
acagguacggguaagucuc

SEQ ID NO: 2076042 - RNA, 19 nt, Artificial Sequence
  Description of Artificial Sequence: Synthetic oligonucleotide
  Sense strand starting at position 2089 of SEQ ID NO: 1881849
gugacaucucgggauguga

SEQ ID NO: 2076043 - RNA, 19 nt, Artificial Sequence
  Description of Artificial Sequence: Synthetic oligonucleotide
  Antisense strand to SEQ ID NO: 2076042
ucacaucccgagaugucac

SEQ ID NO: 2076044 - RNA, 19 nt, Artificial Sequence
  Description of Artificial Sequence: Synthetic oligonucleotide
  Sense strand starting at position 2091 of SEQ ID NO: 1881849
gacaucucgggaugugauc

SEQ ID NO: 2076045 - RNA, 19 nt, Artificial Sequence
  Description of Artificial Sequence: Synthetic oligonucleotide
  Antisense strand to SEQ ID NO: 2076044
gaucacaucccgagauguc

SEQ ID NO: 2076046 - RNA, 19 nt, Artificial Sequence
  Description of Artificial Sequence: Synthetic oligonucleotide
  Sense strand starting at position 2128 of SEQ ID NO: 1881849
agauccauguguuuggaga

SEQ ID NO: 2076047 - RNA, 19 nt, Artificial Sequence
  Description of Artificial Sequence: Synthetic oligonucleotide
  Antisense strand to SEQ ID NO: 2076046
ucuccaaacacauggaucu

SEQ ID NO: 2076048 - RNA, 19 nt, Artificial Sequence
  Description of Artificial Sequence: Synthetic oligonucleotide
  Sense strand starting at position 2129 of SEQ ID NO: 1881849
gauccauguguuuggagaa

SEQ ID NO: 2076049 - RNA, 19 nt, Artificial Sequence
  Description of Artificial Sequence: Synthetic oligonucleotide
  Antisense strand to SEQ ID NO: 2076048
uucuccaaacacauggauc

SEQ ID NO: 2076050 - RNA, 19 nt, Artificial Sequence
  Description of Artificial Sequence: Synthetic oligonucleotide
  Sense strand starting at position 2356 of SEQ ID NO: 1881849
ccuugaaaguugcuuaaau

SEQ ID NO: 2076051 - RNA, 19 nt, Artificial Sequence
  Description of Artificial Sequence: Synthetic oligonucleotide
  Antisense strand to SEQ ID NO: 2076050
auuuaagcaacuuucaagg

SEQ ID NO: 2076052 - RNA, 19 nt, Artificial Sequence
  Description of Artificial Sequence: Synthetic oligonucleotide
  Sense strand starting at position 2357 of SEQ ID NO: 1881849
cuugaaaguugcuuaaaug

SEQ ID NO: 2076053 - RNA, 19 nt, Artificial Sequence
  Description of Artificial Sequence: Synthetic oligonucleotide
  Antisense strand to SEQ ID NO: 2076052
cauuuaagcaacuuucaag

SEQ ID NO: 2076054 - RNA, 19 nt, Artificial Sequence
  Description of Artificial Sequence: Synthetic oligonucleotide
  Sense strand starting at position 2358 of SEQ ID NO: 1881849
uugaaaguugcuuaaaugu

SEQ ID NO: 2076055 - RNA, 19 nt, Artificial Sequence
  Description of Artificial Sequence: Synthetic oligonucleotide
  Antisense strand to SEQ ID NO: 2076054
acauuuaagcaacuuucaa

SEQ ID NO: 2076056 - RNA, 19 nt, Artificial Sequence
  Description of Artificial Sequence: Synthetic oligonucleotide
  Sense strand starting at position 2381 of SEQ ID NO: 1881849
ugaucacuuugaucuaaug

SEQ ID NO: 2076057 - RNA, 19 nt, Artificial Sequence
  Description of Artificial Sequence: Synthetic oligonucleotide
  Antisense strand to SEQ ID NO: 2076056
cauuagaucaaagugauca

SEQ ID NO: 2076058 - RNA, 19 nt, Artificial Sequence
  Description of Artificial Sequence: Synthetic oligonucleotide
  Sense strand starting at position 2434 of SEQ ID NO: 1881849
gcucuaaucuauuugugug

SEQ ID NO: 2076059 - RNA, 19 nt, Artificial Sequence
  Description of Artificial Sequence: Synthetic oligonucleotide
  Antisense strand to SEQ ID NO: 2076058
cacacaaauagauuagagc

SEQ ID NO: 2076060 - RNA, 19 nt, Artificial Sequence
  Description of Artificial Sequence: Synthetic oligonucleotide
  Sense strand starting at position 2666 of SEQ ID NO: 1881849
cugccugaagccuaauuau

SEQ ID NO: 2076061 - RNA, 19 nt, Artificial Sequence
  Description of Artificial Sequence: Synthetic oligonucleotide
  Antisense strand to SEQ ID NO: 2076060
auaauuaggcuucaggcag

SEQ ID NO: 2076062 - RNA, 19 nt, Artificial Sequence
  Description of Artificial Sequence: Synthetic oligonucleotide
  Sense strand starting at position 2862 of SEQ ID NO: 1881849
gaaggagucccuugccaau

SEQ ID NO: 2076063 - RNA, 19 nt, Artificial Sequence
  Description of Artificial Sequence: Synthetic oligonucleotide
  Antisense strand to SEQ ID NO: 2076062
auuggcaagggacuccuuc

SEQ ID NO: 2076064 - RNA, 19 nt, Artificial Sequence
  Description of Artificial Sequence: Synthetic oligonucleotide
  Sense strand starting at position 2888 of SEQ ID NO: 1881849
gccucugagaucugagaag

SEQ ID NO: 2076065 - RNA, 19 nt, Artificial Sequence
  Description of Artificial Sequence: Synthetic oligonucleotide
  Antisense strand to SEQ ID NO: 2076064
cuucucagaucucagaggc

SEQ ID NO: 2076066 - RNA, 19 nt, Artificial Sequence
  Description of Artificial Sequence: Synthetic oligonucleotide
  Sense strand starting at position 3094 of SEQ ID NO: 1881849
agaggaauaucagaacuaa

SEQ ID NO: 2076067 - RNA, 19 nt, Artificial Sequence
  Description of Artificial Sequence: Synthetic oligonucleotide
  Antisense strand to SEQ ID NO: 2076066
uuaguucugauauuccucu

SEQ ID NO: 2076068 - RNA, 19 nt, Artificial Sequence
  Description of Artificial Sequence: Synthetic oligonucleotide
  Sense strand starting at position 3159 of SEQ ID NO: 1881849
auuuguuaagcaugugcau

SEQ ID NO: 2076069 - RNA, 19 nt, Artificial Sequence
  Description of Artificial Sequence: Synthetic oligonucleotide
  Antisense strand to SEQ ID NO: 2076068
augcacaugcuuaacaaau

SEQ ID NO: 2076070 - RNA, 19 nt, Artificial Sequence
  Description of Artificial Sequence: Synthetic oligonucleotide
  Sense strand starting at position 3253 of SEQ ID NO: 1881849
cucaucugagagugugaaa

SEQ ID NO: 2076071 - RNA, 19 nt, Artificial Sequence
  Description of Artificial Sequence: Synthetic oligonucleotide
  Antisense strand to SEQ ID NO: 2076070
uuucacacucucagaugag

SEQ ID NO: 2076072 - RNA, 19 nt, Artificial Sequence
  Description of Artificial Sequence: Synthetic oligonucleotide
  Sense strand starting at position 3521 of SEQ ID NO: 1881849
gguauuuauuucugaggua

SEQ ID NO: 2076073 - RNA, 19 nt, Artificial Sequence
  Description of Artificial Sequence: Synthetic oligonucleotide
  Antisense strand to SEQ ID NO: 2076072
uaccucagaaauaaauacc

SEQ ID NO: 2076074 - RNA, 19 nt, Artificial Sequence
  Description of Artificial Sequence: Synthetic oligonucleotide
  Sense strand starting at position 3522 of SEQ ID NO: 1881849
guauuuauuucugagguac

SEQ ID NO: 2076075 - RNA, 19 nt, Artificial Sequence
  Description of Artificial Sequence: Synthetic oligonucleotide
  Antisense strand to SEQ ID NO: 2076074
guaccucagaaauaaauac

SEQ ID NO: 2076076 - RNA, 19 nt, Artificial Sequence
  Description of Artificial Sequence: Synthetic oligonucleotide
  Sense strand starting at position 3524 of SEQ ID NO: 1881849
auuuauuucugagguacua

SEQ ID NO: 2076077 - RNA, 19 nt, Artificial Sequence
  Description of Artificial Sequence: Synthetic oligonucleotide
  Antisense strand to SEQ ID NO: 2076076
uaguaccucagaaauaaau

SEQ ID NO: 2076078 - RNA, 19 nt, Artificial Sequence
  Description of Artificial Sequence: Synthetic oligonucleotide
  Sense strand starting at position 3726 of SEQ ID NO: 1881849
aaaucauugggugagcauu

SEQ ID NO: 2076079 - RNA, 19 nt, Artificial Sequence
  Description of Artificial Sequence: Synthetic oligonucleotide
  Antisense strand to SEQ ID NO: 2076078
aaugcucacccaaugauuu

SEQ ID NO: 2076080 - RNA, 19 nt, Artificial Sequence
  Description of Artificial Sequence: Synthetic oligonucleotide
  Sense strand starting at position 3734 of SEQ ID NO: 1881849
gggugagcauuugucauuc

SEQ ID NO: 2076081 - RNA, 19 nt, Artificial Sequence
  Description of Artificial Sequence: Synthetic oligonucleotide
  Antisense strand to SEQ ID NO: 2076080
gaaugacaaaugcucaccc

SEQ ID NO: 2076082 - RNA, 19 nt, Artificial Sequence
  Description of Artificial Sequence: Synthetic oligonucleotide
  Sense strand starting at position 3758 of SEQ ID NO: 1881849
gacuacuucuguuugaaga

SEQ ID NO: 2076083 - RNA, 19 nt, Artificial Sequence
  Description of Artificial Sequence: Synthetic oligonucleotide
  Antisense strand to SEQ ID NO: 2076082
ucuucaaacagaaguaguc

SEQ ID NO: 2076084 - RNA, 19 nt, Artificial Sequence
  Description of Artificial Sequence: Synthetic oligonucleotide
  Sense strand starting at position 3759 of SEQ ID NO: 1881849
acuacuucuguuugaagag

SEQ ID NO: 2076085 - RNA, 19 nt, Artificial Sequence
  Description of Artificial Sequence: Synthetic oligonucleotide
  Antisense strand to SEQ ID NO: 2076084
cucuucaaacagaaguagu

SEQ ID NO: 2076086 - RNA, 19 nt, Artificial Sequence
  Description of Artificial Sequence: Synthetic oligonucleotide
  Sense strand starting at position 3766 of SEQ ID NO: 1881849
cuguuugaagaguaauucu

SEQ ID NO: 2076087 - RNA, 19 nt, Artificial Sequence
  Description of Artificial Sequence: Synthetic oligonucleotide
  Antisense strand to SEQ ID NO: 2076086
agaauuacucuucaaacag

SEQ ID NO: 2076088 - RNA, 19 nt, Artificial Sequence
  Description of Artificial Sequence: Synthetic oligonucleotide
  Sense strand starting at position 3929 of SEQ ID NO: 1881849
ugggcucaacauugaauau

SEQ ID NO: 2076089 - RNA, 19 nt, Artificial Sequence
  Description of Artificial Sequence: Synthetic oligonucleotide
  Antisense strand to SEQ ID NO: 2076088
auauucaauguugagccca

SEQ ID NO: 2076090 - RNA, 19 nt, Artificial Sequence
  Description of Artificial Sequence: Synthetic oligonucleotide
  Sense strand starting at position 3955 of SEQ ID NO: 1881849
agugaagauuuauagugag

SEQ ID NO: 2076091 - RNA, 19 nt, Artificial Sequence
  Description of Artificial Sequence: Synthetic oligonucleotide
  Antisense strand to SEQ ID NO: 2076090
cucacuauaaaucuucacu

SEQ ID NO: 2076092 - RNA, 19 nt, Artificial Sequence
  Description of Artificial Sequence: Synthetic oligonucleotide
  Sense strand starting at position 173 of SEQ ID NO: 1881850
ugauguaauugccuuugau

SEQ ID NO: 2076093 - RNA, 19 nt, Artificial Sequence
  Description of Artificial Sequence: Synthetic oligonucleotide
  Antisense strand to SEQ ID NO: 2076092
aucaaaggcaauuacauca

SEQ ID NO: 2076094 - RNA, 19 nt, Artificial Sequence
  Description of Artificial Sequence: Synthetic oligonucleotide
  Sense strand starting at position 176 of SEQ ID NO: 1881850
uguaauugccuuugauucu

SEQ ID NO: 2076095 - RNA, 19 nt, Artificial Sequence
  Description of Artificial Sequence: Synthetic oligonucleotide
  Antisense strand to SEQ ID NO: 2076094
agaaucaaaggcaauuaca

SEQ ID NO: 2076096 - RNA, 19 nt, Artificial Sequence
  Description of Artificial Sequence: Synthetic oligonucleotide
  Sense strand starting at position 232 of SEQ ID NO: 1881850
caugcaauuccgugagcau

SEQ ID NO: 2076097 - RNA, 19 nt, Artificial Sequence
  Description of Artificial Sequence: Synthetic oligonucleotide
  Antisense strand to SEQ ID NO: 2076096
augcucacggaauugcaug

SEQ ID NO: 2076098 - RNA, 19 nt, Artificial Sequence
  Description of Artificial Sequence: Synthetic oligonucleotide
  Sense strand starting at position 233 of SEQ ID NO: 1881850
augcaauuccgugagcaug

SEQ ID NO: 2076099 - RNA, 19 nt, Artificial Sequence
  Description of Artificial Sequence: Synthetic oligonucleotide
  Antisense strand to SEQ ID NO: 2076098
caugcucacggaauugcau

SEQ ID NO: 2076100 - RNA, 19 nt, Artificial Sequence
  Description of Artificial Sequence: Synthetic oligonucleotide
  Sense strand starting at position 499 of SEQ ID NO: 1881850
ccaugagagaugggauugu

SEQ ID NO: 2076101 - RNA, 19 nt, Artificial Sequence
  Description of Artificial Sequence: Synthetic oligonucleotide
  Antisense strand to SEQ ID NO: 2076100
acaaucccaucucucaugg

SEQ ID NO: 2076102 - RNA, 19 nt, Artificial Sequence
  Description of Artificial Sequence: Synthetic oligonucleotide
  Sense strand starting at position 503 of SEQ ID NO: 1881850
gagagaugggauuguccgu

SEQ ID NO: 2076103 - RNA, 19 nt, Artificial Sequence
  Description of Artificial Sequence: Synthetic oligonucleotide
  Antisense strand to SEQ ID NO: 2076102
acggacaaucccaucucuc

SEQ ID NO: 2076104 - RNA, 19 nt, Artificial Sequence
  Description of Artificial Sequence: Synthetic oligonucleotide
  Sense strand starting at position 531 of SEQ ID NO: 1881850
ugcuauaucccguaaauac

SEQ ID NO: 2076105 - RNA, 19 nt, Artificial Sequence
  Description of Artificial Sequence: Synthetic oligonucleotide
  Antisense strand to SEQ ID NO: 2076104
guauuuacgggauauagca

SEQ ID NO: 2076106 - RNA, 19 nt, Artificial Sequence
  Description of Artificial Sequence: Synthetic oligonucleotide
  Sense strand starting at position 547 of SEQ ID NO: 1881850
uacagaguagcucauagua

SEQ ID NO: 2076107 - RNA, 19 nt, Artificial Sequence
  Description of Artificial Sequence: Synthetic oligonucleotide
  Antisense strand to SEQ ID NO: 2076106
uacuaugagcuacucugua

SEQ ID NO: 2076108 - RNA, 19 nt, Artificial Sequence
  Description of Artificial Sequence: Synthetic oligonucleotide
  Sense strand starting at position 612 of SEQ ID NO: 1881850
ggcagaauucguuguggag

SEQ ID NO: 2076109 - RNA, 19 nt, Artificial Sequence
  Description of Artificial Sequence: Synthetic oligonucleotide
  Antisense strand to SEQ ID NO: 2076108
cuccacaacgaauucugcc

SEQ ID NO: 2076110 - RNA, 19 nt, Artificial Sequence
  Description of Artificial Sequence: Synthetic oligonucleotide
  Sense strand starting at position 662 of SEQ ID NO: 1881850
gcagcaauucccuaguaga

SEQ ID NO: 2076111 - RNA, 19 nt, Artificial Sequence
  Description of Artificial Sequence: Synthetic oligonucleotide
  Antisense strand to SEQ ID NO: 2076110
ucuacuagggaauugcugc

SEQ ID NO: 2076112 - RNA, 19 nt, Artificial Sequence
  Description of Artificial Sequence: Synthetic oligonucleotide
  Sense strand starting at position 717 of SEQ ID NO: 1881850
gccuccucugguuauuacu

SEQ ID NO: 2076113 - RNA, 19 nt, Artificial Sequence
  Description of Artificial Sequence: Synthetic oligonucleotide
  Antisense strand to SEQ ID NO: 2076112
aguaauaaccagaggaggc

SEQ ID NO: 2076114 - RNA, 19 nt, Artificial Sequence
  Description of Artificial Sequence: Synthetic oligonucleotide
  Sense strand starting at position 845 of SEQ ID NO: 1881850
agaucauguuuaugacaau

SEQ ID NO: 2076115 - RNA, 19 nt, Artificial Sequence
  Description of Artificial Sequence: Synthetic oligonucleotide
  Antisense strand to SEQ ID NO: 2076114
auugucauaaacaugaucu

SEQ ID NO: 2076116 - RNA, 19 nt, Artificial Sequence
  Description of Artificial Sequence: Synthetic oligonucleotide
  Sense strand starting at position 965 of SEQ ID NO: 1881850
ugguguucgucuccauaaa

SEQ ID NO: 2076117 - RNA, 19 nt, Artificial Sequence
  Description of Artificial Sequence: Synthetic oligonucleotide
  Antisense strand to SEQ ID NO: 2076116
uuuauggagacgaacacca

SEQ ID NO: 2076118 - RNA, 19 nt, Artificial Sequence
  Description of Artificial Sequence: Synthetic oligonucleotide
  Sense strand starting at position 966 of SEQ ID NO: 1881850
gguguucgucuccauaaag

SEQ ID NO: 2076119 - RNA, 19 nt, Artificial Sequence
  Description of Artificial Sequence: Synthetic oligonucleotide
  Antisense strand to SEQ ID NO: 2076118
cuuuauggagacgaacacc

SEQ ID NO: 2076120 - RNA, 19 nt, Artificial Sequence
  Description of Artificial Sequence: Synthetic oligonucleotide
  Sense strand starting at position 1366 of SEQ ID NO: 1881850
gggcauaaucuauagguuu

SEQ ID NO: 2076121 - RNA, 19 nt, Artificial Sequence
  Description of Artificial Sequence: Synthetic oligonucleotide
  Antisense strand to SEQ ID NO: 2076120
aaaccuauagauuaugccc

SEQ ID NO: 2076122 - RNA, 19 nt, Artificial Sequence
  Description of Artificial Sequence: Synthetic oligonucleotide
  Sense strand starting at position 1466 of SEQ ID NO: 1881850
guaccuuucuguuucuaua

SEQ ID NO: 2076123 - RNA, 19 nt, Artificial Sequence
  Description of Artificial Sequence: Synthetic oligonucleotide
  Antisense strand to SEQ ID NO: 2076122
uauagaaacagaaagguac

SEQ ID NO: 2076124 - RNA, 19 nt, Artificial Sequence
  Description of Artificial Sequence: Synthetic oligonucleotide
  Sense strand starting at position 1535 of SEQ ID NO: 1881850
ggacuccacggguaguuau

SEQ ID NO: 2076125 - RNA, 19 nt, Artificial Sequence
  Description of Artificial Sequence: Synthetic oligonucleotide
  Antisense strand to SEQ ID NO: 2076124
auaacuacccguggagucc

SEQ ID NO: 2076126 - RNA, 19 nt, Artificial Sequence
  Description of Artificial Sequence: Synthetic oligonucleotide
  Sense strand starting at position 1547 of SEQ ID NO: 1881850
uaguuauugccggcauugu

SEQ ID NO: 2076127 - RNA, 19 nt, Artificial Sequence
  Description of Artificial Sequence: Synthetic oligonucleotide
  Antisense strand to SEQ ID NO: 2076126
acaaugccggcaauaacua

SEQ ID NO: 2076128 - RNA, 19 nt, Artificial Sequence
  Description of Artificial Sequence: Synthetic oligonucleotide
  Sense strand starting at position 1548 of SEQ ID NO: 1881850
aguuauugccggcauugua

SEQ ID NO: 2076129 - RNA, 19 nt, Artificial Sequence
  Description of Artificial Sequence: Synthetic oligonucleotide
  Antisense strand to SEQ ID NO: 2076128
uacaaugccggcaauaacu

SEQ ID NO: 2076130 - RNA, 19 nt, Artificial Sequence
  Description of Artificial Sequence: Synthetic oligonucleotide
  Sense strand starting at position 1556 of SEQ ID NO: 1881850
ccggcauuguauucugaga

SEQ ID NO: 2076131 - RNA, 19 nt, Artificial Sequence
  Description of Artificial Sequence: Synthetic oligonucleotide
  Antisense strand to SEQ ID NO: 2076130
ucucagaauacaaugccgg

SEQ ID NO: 2076132 - RNA, 19 nt, Artificial Sequence
  Description of Artificial Sequence: Synthetic oligonucleotide
  Sense strand starting at position 1572 of SEQ ID NO: 1881850
agagaugagcugcauauca

SEQ ID NO: 2076133 - RNA, 19 nt, Artificial Sequence
  Description of Artificial Sequence: Synthetic oligonucleotide
  Antisense strand to SEQ ID NO: 2076132
ugauaugcagcucaucucu

SEQ ID NO: 2076134 - RNA, 19 nt, Artificial Sequence
  Description of Artificial Sequence: Synthetic oligonucleotide
  Sense strand starting at position 1574 of SEQ ID NO: 1881850
agaugagcugcauaucacu

SEQ ID NO: 2076135 - RNA, 19 nt, Artificial Sequence
  Description of Artificial Sequence: Synthetic oligonucleotide
  Antisense strand to SEQ ID NO: 2076134
agugauaugcagcucaucu

SEQ ID NO: 2076136 - RNA, 19 nt, Artificial Sequence
  Description of Artificial Sequence: Synthetic oligonucleotide
  Sense strand starting at position 1680 of SEQ ID NO: 1881850
aaauaaaggugucaucaga

SEQ ID NO: 2076137 - RNA, 19 nt, Artificial Sequence
  Description of Artificial Sequence: Synthetic oligonucleotide
  Antisense strand to SEQ ID NO: 2076136
ucugaugacaccuuuauuu

SEQ ID NO: 2076138 - RNA, 19 nt, Artificial Sequence
  Description of Artificial Sequence: Synthetic oligonucleotide
  Sense strand starting at position 1727 of SEQ ID NO: 1881850
uggaacugaucucugguua

SEQ ID NO: 2076139 - RNA, 19 nt, Artificial Sequence
  Description of Artificial Sequence: Synthetic oligonucleotide
  Antisense strand to SEQ ID NO: 2076138
uaaccagagaucaguucca

SEQ ID NO: 2076140 - RNA, 19 nt, Artificial Sequence
  Description of Artificial Sequence: Synthetic oligonucleotide
  Sense strand starting at position 1728 of SEQ ID NO: 1881850
ggaacugaucucugguuau

SEQ ID NO: 2076141 - RNA, 19 nt, Artificial Sequence
  Description of Artificial Sequence: Synthetic oligonucleotide
  Antisense strand to SEQ ID NO: 2076140
auaaccagagaucaguucc

SEQ ID NO: 2076142 - RNA, 19 nt, Artificial Sequence
  Description of Artificial Sequence: Synthetic oligonucleotide
  Sense strand starting at position 1829 of SEQ ID NO: 1881850
cggaguuacgagcggagau

SEQ ID NO: 2076143 - RNA, 19 nt, Artificial Sequence
  Description of Artificial Sequence: Synthetic oligonucleotide
  Antisense strand to SEQ ID NO: 2076142
aucuccgcucguaacuccg

SEQ ID NO: 2076144 - RNA, 19 nt, Artificial Sequence
  Description of Artificial Sequence: Synthetic oligonucleotide
  Sense strand starting at position 1830 of SEQ ID NO: 1881850
ggaguuacgagcggagauu

SEQ ID NO: 2076145 - RNA, 19 nt, Artificial Sequence
  Description of Artificial Sequence: Synthetic oligonucleotide
  Antisense strand to SEQ ID NO: 2076144
aaucuccgcucguaacucc

SEQ ID NO: 2076146 - RNA, 19 nt, Artificial Sequence
  Description of Artificial Sequence: Synthetic oligonucleotide
  Sense strand starting at position 2031 of SEQ ID NO: 1881850
gcagcaucucgcgagauuu

SEQ ID NO: 2076147 - RNA, 19 nt, Artificial Sequence
  Description of Artificial Sequence: Synthetic oligonucleotide
  Antisense strand to SEQ ID NO: 2076146
aaaucucgcgagaugcugc

SEQ ID NO: 2076148 - RNA, 19 nt, Artificial Sequence
  Description of Artificial Sequence: Synthetic oligonucleotide
  Sense strand starting at position 3700 of SEQ ID NO: 1881850
ugcagacucuucccgaguu

SEQ ID NO: 2076149 - RNA, 19 nt, Artificial Sequence
  Description of Artificial Sequence: Synthetic oligonucleotide
  Antisense strand to SEQ ID NO: 2076148
aacucgggaagagucugca

SEQ ID NO: 2076150 - RNA, 19 nt, Artificial Sequence
  Description of Artificial Sequence: Synthetic oligonucleotide
  Sense strand starting at position 3702 of SEQ ID NO: 1881850
cagacucuucccgaguuga

SEQ ID NO: 2076151 - RNA, 19 nt, Artificial Sequence
  Description of Artificial Sequence: Synthetic oligonucleotide
  Antisense strand to SEQ ID NO: 2076150
ucaacucgggaagagucug

SEQ ID NO: 2076152 - RNA, 19 nt, Artificial Sequence
  Description of Artificial Sequence: Synthetic oligonucleotide
  Sense strand starting at position 3769 of SEQ ID NO: 1881850
agcugucaaggguggaauu

SEQ ID NO: 2076153 - RNA, 19 nt, Artificial Sequence
  Description of Artificial Sequence: Synthetic oligonucleotide
  Antisense strand to SEQ ID NO: 2076152
aauuccacccuugacagcu

SEQ ID NO: 2076154 - RNA, 19 nt, Artificial Sequence
  Description of Artificial Sequence: Synthetic oligonucleotide
  Sense strand starting at position 3779 of SEQ ID NO: 1881850
gguggaauugccgaggaau

SEQ ID NO: 2076155 - RNA, 19 nt, Artificial Sequence
  Description of Artificial Sequence: Synthetic oligonucleotide
  Antisense strand to SEQ ID NO: 2076154
auuccucggcaauuccacc

SEQ ID NO: 2076156 - RNA, 19 nt, Artificial Sequence
  Description of Artificial Sequence: Synthetic oligonucleotide
  Sense strand starting at position 3781 of SEQ ID NO: 1881850
uggaauugccgaggaaugu

SEQ ID NO: 2076157 - RNA, 19 nt, Artificial Sequence
  Description of Artificial Sequence: Synthetic oligonucleotide
  Antisense strand to SEQ ID NO: 2076156
acauuccucggcaauucca

SEQ ID NO: 2076158 - RNA, 19 nt, Artificial Sequence
  Description of Artificial Sequence: Synthetic oligonucleotide
  Sense strand starting at position 3782 of SEQ ID NO: 1881850
ggaauugccgaggaauguu

SEQ ID NO: 2076159 - RNA, 19 nt, Artificial Sequence
  Description of Artificial Sequence: Synthetic oligonucleotide
  Antisense strand to SEQ ID NO: 2076158
aacauuccucggcaauucc

SEQ ID NO: 2076160 - RNA, 19 nt, Artificial Sequence
  Description of Artificial Sequence: Synthetic oligonucleotide
  Sense strand starting at position 3885 of SEQ ID NO: 1881850
uagguaucucgugugcacu

SEQ ID NO: 2076161 - RNA, 19 nt, Artificial Sequence
  Description of Artificial Sequence: Synthetic oligonucleotide
  Antisense strand to SEQ ID NO: 2076160
agugcacacgagauaccua

SEQ ID NO: 2076162 - RNA, 19 nt, Artificial Sequence
  Description of Artificial Sequence: Synthetic oligonucleotide
  Sense strand starting at position 3886 of SEQ ID NO: 1881850
agguaucucgugugcacuu

SEQ ID NO: 2076163 - RNA, 19 nt, Artificial Sequence
  Description of Artificial Sequence: Synthetic oligonucleotide
  Antisense strand to SEQ ID NO: 2076162
aagugcacacgagauaccu

SEQ ID NO: 2076164 - RNA, 19 nt, Artificial Sequence
  Description of Artificial Sequence: Synthetic oligonucleotide
  Sense strand starting at position 3938 of SEQ ID NO: 1881850
ucugaaugacaguaguguu

SEQ ID NO: 2076165 - RNA, 19 nt, Artificial Sequence
  Description of Artificial Sequence: Synthetic oligonucleotide
  Antisense strand to SEQ ID NO: 2076164
aacacuacugucauucaga

SEQ ID NO: 2076166 - RNA, 19 nt, Artificial Sequence
  Description of Artificial Sequence: Synthetic oligonucleotide
  Sense strand starting at position 3960 of SEQ ID NO: 1881850
gggcccuuuagaggagaau

SEQ ID NO: 2076167 - RNA, 19 nt, Artificial Sequence
  Description of Artificial Sequence: Synthetic oligonucleotide
  Antisense strand to SEQ ID NO: 2076166
auucuccucuaaagggccc

SEQ ID NO: 2076168 - RNA, 19 nt, Artificial Sequence
  Description of Artificial Sequence: Synthetic oligonucleotide
  Sense strand starting at position 3973 of SEQ ID NO: 1881850
gagaaugugcagugaggau

SEQ ID NO: 2076169 - RNA, 19 nt, Artificial Sequence
  Description of Artificial Sequence: Synthetic oligonucleotide
  Antisense strand to SEQ ID NO: 2076168
auccucacugcacauucuc

SEQ ID NO: 2076170 - RNA, 19 nt, Artificial Sequence
  Description of Artificial Sequence: Synthetic oligonucleotide
  Sense strand starting at position 3982 of SEQ ID NO: 1881850
cagugaggaucucucgaga

SEQ ID NO: 2076171 - RNA, 19 nt, Artificial Sequence
  Description of Artificial Sequence: Synthetic oligonucleotide
  Antisense strand to SEQ ID NO: 2076170
ucucgagagauccucacug

SEQ ID NO: 2076172 - RNA, 19 nt, Artificial Sequence
  Description of Artificial Sequence: Synthetic oligonucleotide
  Sense strand starting at position 2 of SEQ ID NO: 1881851
ucuaaagcccuaggaguaa

SEQ ID NO: 2076173 - RNA, 19 nt, Artificial Sequence
  Description of Artificial Sequence: Synthetic oligonucleotide
  Antisense strand to SEQ ID NO: 2076172
uuacuccuagggcuuuaga

SEQ ID NO: 2076174 - RNA, 19 nt, Artificial Sequence
  Description of Artificial Sequence: Synthetic oligonucleotide
  Sense strand starting at position 13 of SEQ ID NO: 1881851
aggaguaaggcuugaucug

SEQ ID NO: 2076175 - RNA, 19 nt, Artificial Sequence
  Description of Artificial Sequence: Synthetic oligonucleotide
  Antisense strand to SEQ ID NO: 2076174
cagaucaagccuuacuccu

SEQ ID NO: 2076176 - RNA, 19 nt, Artificial Sequence
  Description of Artificial Sequence: Synthetic oligonucleotide
  Sense strand starting at position 23 of SEQ ID NO: 1881851
cuugaucugccugacuuua

SEQ ID NO: 2076177 - RNA, 19 nt, Artificial Sequence
  Description of Artificial Sequence: Synthetic oligonucleotide
  Antisense strand to SEQ ID NO: 2076176
uaaagucaggcagaucaag

SEQ ID NO: 2076178 - RNA, 19 nt, Artificial Sequence
  Description of Artificial Sequence: Synthetic oligonucleotide
  Sense strand starting at position 25 of SEQ ID NO: 1881851
ugaucugccugacuuuaaa

SEQ ID NO: 2076179 - RNA, 19 nt, Artificial Sequence
  Description of Artificial Sequence: Synthetic oligonucleotide
  Antisense strand to SEQ ID NO: 2076178
uuuaaagucaggcagauca

SEQ ID NO: 2076180 - RNA, 19 nt, Artificial Sequence
  Description of Artificial Sequence: Synthetic oligonucleotide
  Sense strand starting at position 85 of SEQ ID NO: 1881851
cugagacuuugucccuaac

SEQ ID NO: 2076181 - RNA, 19 nt, Artificial Sequence
  Description of Artificial Sequence: Synthetic oligonucleotide
  Antisense strand to SEQ ID NO: 2076180
guuagggacaaagucucag

SEQ ID NO: 2076182 - RNA, 19 nt, Artificial Sequence
  Description of Artificial Sequence: Synthetic oligonucleotide
  Sense strand starting at position 96 of SEQ ID NO: 1881851
ucccuaacauaaucggaaa

SEQ ID NO: 2076183 - RNA, 19 nt, Artificial Sequence
  Description of Artificial Sequence: Synthetic oligonucleotide
  Antisense strand to SEQ ID NO: 2076182
uuuccgauuauguuaggga

SEQ ID NO: 2076184 - RNA, 19 nt, Artificial Sequence
  Description of Artificial Sequence: Synthetic oligonucleotide
  Sense strand starting at position 137 of SEQ ID NO: 1881851
cauuguguugcuccgugau

SEQ ID NO: 2076185 - RNA, 19 nt, Artificial Sequence
  Description of Artificial Sequence: Synthetic oligonucleotide
  Antisense strand to SEQ ID NO: 2076184
aucacggagcaacacaaug

SEQ ID NO: 2076186 - RNA, 19 nt, Artificial Sequence
  Description of Artificial Sequence: Synthetic oligonucleotide
  Sense strand starting at position 257 of SEQ ID NO: 1881851
cagggaccucuggguaaua

SEQ ID NO: 2076187 - RNA, 19 nt, Artificial Sequence
  Description of Artificial Sequence: Synthetic oligonucleotide
  Antisense strand to SEQ ID NO: 2076186
uauuacccagaggucccug

SEQ ID NO: 2076188 - RNA, 19 nt, Artificial Sequence
  Description of Artificial Sequence: Synthetic oligonucleotide
  Sense strand starting at position 476 of SEQ ID NO: 1881851
augccuuugccacacuaga

SEQ ID NO: 2076189 - RNA, 19 nt, Artificial Sequence
  Description of Artificial Sequence: Synthetic oligonucleotide
  Antisense strand to SEQ ID NO: 2076188
ucuaguguggcaaaggcau

SEQ ID NO: 2076190 - RNA, 19 nt, Artificial Sequence
  Description of Artificial Sequence: Synthetic oligonucleotide
  Sense strand starting at position 759 of SEQ ID NO: 1881851
gugagucuuccuuagacuc

SEQ ID NO: 2076191 - RNA, 19 nt, Artificial Sequence
  Description of Artificial Sequence: Synthetic oligonucleotide
  Antisense strand to SEQ ID NO: 2076190
gagucuaaggaagacucac

SEQ ID NO: 2076192 - RNA, 19 nt, Artificial Sequence
  Description of Artificial Sequence: Synthetic oligonucleotide
  Sense strand starting at position 1021 of SEQ ID NO: 1881851
cucugagaugcccaauaca

SEQ ID NO: 2076193 - RNA, 19 nt, Artificial Sequence
  Description of Artificial Sequence: Synthetic oligonucleotide
  Antisense strand to SEQ ID NO: 2076192
uguauugggcaucucagag

SEQ ID NO: 2076194 - RNA, 19 nt, Artificial Sequence
  Description of Artificial Sequence: Synthetic oligonucleotide
  Sense strand starting at position 1084 of SEQ ID NO: 1881851
agauaauagccuugauuga

SEQ ID NO: 2076195 - RNA, 19 nt, Artificial Sequence
  Description of Artificial Sequence: Synthetic oligonucleotide
  Antisense strand to SEQ ID NO: 2076194
ucaaucaaggcuauuaucu

SEQ ID NO: 2076196 - RNA, 19 nt, Artificial Sequence
  Description of Artificial Sequence: Synthetic oligonucleotide
  Sense strand starting at position 1099 of SEQ ID NO: 1881851
uugaaauagaaaggcguua

SEQ ID NO: 2076197 - RNA, 19 nt, Artificial Sequence
  Description of Artificial Sequence: Synthetic oligonucleotide
  Antisense strand to SEQ ID NO: 2076196
uaacgccuuucuauuucaa

SEQ ID NO: 2076198 - RNA, 19 nt, Artificial Sequence
  Description of Artificial Sequence: Synthetic oligonucleotide
  Sense strand starting at position 1248 of SEQ ID NO: 1881851
augguuucccaaggcaaau

SEQ ID NO: 2076199 - RNA, 19 nt, Artificial Sequence
  Description of Artificial Sequence: Synthetic oligonucleotide
  Antisense strand to SEQ ID NO: 2076198
auuugccuugggaaaccau

SEQ ID NO: 2076200 - RNA, 19 nt, Artificial Sequence
  Description of Artificial Sequence: Synthetic oligonucleotide
  Sense strand starting at position 1306 of SEQ ID NO: 1881851
cagacucuccagugguuga

SEQ ID NO: 2076201 - RNA, 19 nt, Artificial Sequence
  Description of Artificial Sequence: Synthetic oligonucleotide
  Antisense strand to SEQ ID NO: 2076200
ucaaccacuggagagucug

SEQ ID NO: 2076202 - RNA, 19 nt, Artificial Sequence
  Description of Artificial Sequence: Synthetic oligonucleotide
  Sense strand starting at position 1307 of SEQ ID NO: 1881851
agacucuccagugguugaa

SEQ ID NO: 2076203 - RNA, 19 nt, Artificial Sequence
  Description of Artificial Sequence: Synthetic oligonucleotide
  Antisense strand to SEQ ID NO: 2076202
uucaaccacuggagagucu

SEQ ID NO: 2076204 - RNA, 19 nt, Artificial Sequence
  Description of Artificial Sequence: Synthetic oligonucleotide
  Sense strand starting at position 1406 of SEQ ID NO: 1881851
accucauaagauugcugua

SEQ ID NO: 2076205 - RNA, 19 nt, Artificial Sequence
  Description of Artificial Sequence: Synthetic oligonucleotide
  Antisense strand to SEQ ID NO: 2076204
uacagcaaucuuaugaggu

SEQ ID NO: 2076206 - RNA, 19 nt, Artificial Sequence
  Description of Artificial Sequence: Synthetic oligonucleotide
  Sense strand starting at position 1434 of SEQ ID NO: 1881851
ugagauagugcuuagcaca

SEQ ID NO: 2076207 - RNA, 19 nt, Artificial Sequence
  Description of Artificial Sequence: Synthetic oligonucleotide
  Antisense strand to SEQ ID NO: 2076206
ugugcuaagcacuaucuca

SEQ ID NO: 2076208 - RNA, 19 nt, Artificial Sequence
  Description of Artificial Sequence: Synthetic oligonucleotide
  Sense strand starting at position 1500 of SEQ ID NO: 1881851
gaacacuggcucgagcuua

SEQ ID NO: 2076209 - RNA, 19 nt, Artificial Sequence
  Description of Artificial Sequence: Synthetic oligonucleotide
  Antisense strand to SEQ ID NO: 2076208
uaagcucgagccaguguuc

SEQ ID NO: 2076210 - RNA, 19 nt, Artificial Sequence
  Description of Artificial Sequence: Synthetic oligonucleotide
  Sense strand starting at position 1688 of SEQ ID NO: 1881851
gagcucuagccagaguuga

SEQ ID NO: 2076211 - RNA, 19 nt, Artificial Sequence
  Description of Artificial Sequence: Synthetic oligonucleotide
  Antisense strand to SEQ ID NO: 2076210
ucaacucuggcuagagcuc

SEQ ID NO: 2076212 - RNA, 19 nt, Artificial Sequence
  Description of Artificial Sequence: Synthetic oligonucleotide
  Sense strand starting at position 1714 of SEQ ID NO: 1881851
gcugaucacuuuccugaca

SEQ ID NO: 2076213 - RNA, 19 nt, Artificial Sequence
  Description of Artificial Sequence: Synthetic oligonucleotide
  Antisense strand to SEQ ID NO: 2076212
ugucaggaaagugaucagc

SEQ ID NO: 2076214 - RNA, 19 nt, Artificial Sequence
  Description of Artificial Sequence: Synthetic oligonucleotide
  Sense strand starting at position 1994 of SEQ ID NO: 1881851
cugagugaagcuuaaugca

SEQ ID NO: 2076215 - RNA, 19 nt, Artificial Sequence
  Description of Artificial Sequence: Synthetic oligonucleotide
  Antisense strand to SEQ ID NO: 2076214
ugcauuaagcuucacucag

SEQ ID NO: 2076216 - RNA, 19 nt, Artificial Sequence
  Description of Artificial Sequence: Synthetic oligonucleotide
  Sense strand starting at position 2443 of SEQ ID NO: 1881851
gcauuugaguaguugcuga

SEQ ID NO: 2076217 - RNA, 19 nt, Artificial Sequence
  Description of Artificial Sequence: Synthetic oligonucleotide
  Antisense strand to SEQ ID NO: 2076216
ucagcaacuacucaaaugc

SEQ ID NO: 2076218 - RNA, 19 nt, Artificial Sequence
  Description of Artificial Sequence: Synthetic oligonucleotide
  Sense strand starting at position 2485 of SEQ ID NO: 1881851
ugugguggagguugauuaa

SEQ ID NO: 2076219 - RNA, 19 nt, Artificial Sequence
  Description of Artificial Sequence: Synthetic oligonucleotide
  Antisense strand to SEQ ID NO: 2076218
uuaaucaaccuccaccaca

SEQ ID NO: 2076220 - RNA, 19 nt, Artificial Sequence
  Description of Artificial Sequence: Synthetic oligonucleotide
  Sense strand starting at position 2488 of SEQ ID NO: 1881851
gguggagguugauuaaaca

SEQ ID NO: 2076221 - RNA, 19 nt, Artificial Sequence
  Description of Artificial Sequence: Synthetic oligonucleotide
  Antisense strand to SEQ ID NO: 2076220
uguuuaaucaaccuccacc

SEQ ID NO: 2076222 - RNA, 19 nt, Artificial Sequence
  Description of Artificial Sequence: Synthetic oligonucleotide
  Sense strand starting at position 2498 of SEQ ID NO: 1881851
gauuaaacagaugguccau

SEQ ID NO: 2076223 - RNA, 19 nt, Artificial Sequence
  Description of Artificial Sequence: Synthetic oligonucleotide
  Antisense strand to SEQ ID NO: 2076222
auggaccaucuguuuaauc

SEQ ID NO: 2076224 - RNA, 19 nt, Artificial Sequence
  Description of Artificial Sequence: Synthetic oligonucleotide
  Sense strand starting at position 2570 of SEQ ID NO: 1881851
aggugacaacuccaucuuu

SEQ ID NO: 2076225 - RNA, 19 nt, Artificial Sequence
  Description of Artificial Sequence: Synthetic oligonucleotide
  Antisense strand to SEQ ID NO: 2076224
aaagauggaguugucaccu

SEQ ID NO: 2076226 - RNA, 19 nt, Artificial Sequence
  Description of Artificial Sequence: Synthetic oligonucleotide
  Sense strand starting at position 2628 of SEQ ID NO: 1881851
aggucauuccaccaaugcu

SEQ ID NO: 2076227 - RNA, 19 nt, Artificial Sequence
  Description of Artificial Sequence: Synthetic oligonucleotide
  Antisense strand to SEQ ID NO: 2076226
agcauugguggaaugaccu

SEQ ID NO: 2076228 - RNA, 19 nt, Artificial Sequence
  Description of Artificial Sequence: Synthetic oligonucleotide
  Sense strand starting at position 2691 of SEQ ID NO: 1881851
acugauuuguuugaaugau

SEQ ID NO: 2076229 - RNA, 19 nt, Artificial Sequence
  Description of Artificial Sequence: Synthetic oligonucleotide
  Antisense strand to SEQ ID NO: 2076228
aucauucaaacaaaucagu

SEQ ID NO: 2076230 - RNA, 19 nt, Artificial Sequence
  Description of Artificial Sequence: Synthetic oligonucleotide
  Sense strand starting at position 2946 of SEQ ID NO: 1881851
ggugaagcacauuauccau

SEQ ID NO: 2076231 - RNA, 19 nt, Artificial Sequence
  Description of Artificial Sequence: Synthetic oligonucleotide
  Antisense strand to SEQ ID NO: 2076230
auggauaaugugcuucacc

SEQ ID NO: 2076232 - RNA, 19 nt, Artificial Sequence
  Description of Artificial Sequence: Synthetic oligonucleotide
  Sense strand starting at position 3177 of SEQ ID NO: 1881851
agauguauauagcuugacu

SEQ ID NO: 2076233 - RNA, 19 nt, Artificial Sequence
  Description of Artificial Sequence: Synthetic oligonucleotide
  Antisense strand to SEQ ID NO: 2076232
agucaagcuauauacaucu

SEQ ID NO: 2076234 - RNA, 19 nt, Artificial Sequence
  Description of Artificial Sequence: Synthetic oligonucleotide
  Sense strand starting at position 3180 of SEQ ID NO: 1881851
uguauauagcuugacugga

SEQ ID NO: 2076235 - RNA, 19 nt, Artificial Sequence
  Description of Artificial Sequence: Synthetic oligonucleotide
  Antisense strand to SEQ ID NO: 2076234
uccagucaagcuauauaca

SEQ ID NO: 2076236 - RNA, 19 nt, Artificial Sequence
  Description of Artificial Sequence: Synthetic oligonucleotide
  Sense strand starting at position 3182 of SEQ ID NO: 1881851
uauauagcuugacuggauu

SEQ ID NO: 2076237 - RNA, 19 nt, Artificial Sequence
  Description of Artificial Sequence: Synthetic oligonucleotide
  Antisense strand to SEQ ID NO: 2076236
aauccagucaagcuauaua

SEQ ID NO: 2076238 - RNA, 19 nt, Artificial Sequence
  Description of Artificial Sequence: Synthetic oligonucleotide
  Sense strand starting at position 3507 of SEQ ID NO: 1881851
ggaaaccauauccgagagu

SEQ ID NO: 2076239 - RNA, 19 nt, Artificial Sequence
  Description of Artificial Sequence: Synthetic oligonucleotide
  Antisense strand to SEQ ID NO: 2076238
acucucggauaugguuucc

SEQ ID NO: 2076240 - RNA, 19 nt, Artificial Sequence
  Description of Artificial Sequence: Synthetic oligonucleotide
  Sense strand starting at position 3718 of SEQ ID NO: 1881851
auuggugaccaaugaaauu

SEQ ID NO: 2076241 - RNA, 19 nt, Artificial Sequence
  Description of Artificial Sequence: Synthetic oligonucleotide
  Antisense strand to SEQ ID NO: 2076240
aauuucauuggucaccaau

SEQ ID NO: 2076242 - RNA, 19 nt, Artificial Sequence
  Description of Artificial Sequence: Synthetic oligonucleotide
  Sense strand starting at position 3759 of SEQ ID NO: 1881851
gggcauucaguggagagua

SEQ ID NO: 2076243 - RNA, 19 nt, Artificial Sequence
  Description of Artificial Sequence: Synthetic oligonucleotide
  Antisense strand to SEQ ID NO: 2076242
uacucuccacugaaugccc

SEQ ID NO: 2076244 - RNA, 19 nt, Artificial Sequence
  Description of Artificial Sequence: Synthetic oligonucleotide
  Sense strand starting at position 3782 of SEQ ID NO: 1881851
aggcaacuucccugacauc

SEQ ID NO: 2076245 - RNA, 19 nt, Artificial Sequence
  Description of Artificial Sequence: Synthetic oligonucleotide
  Antisense strand to SEQ ID NO: 2076244
gaugucagggaaguugccu

SEQ ID NO: 2076246 - RNA, 19 nt, Artificial Sequence
  Description of Artificial Sequence: Synthetic oligonucleotide
  Sense strand starting at position 3783 of SEQ ID NO: 1881851
ggcaacuucccugacaucu

SEQ ID NO: 2076247 - RNA, 19 nt, Artificial Sequence
  Description of Artificial Sequence: Synthetic oligonucleotide
  Antisense strand to SEQ ID NO: 2076246
agaugucagggaaguugcc

SEQ ID NO: 2076248 - RNA, 19 nt, Artificial Sequence
  Description of Artificial Sequence: Synthetic oligonucleotide
  Sense strand starting at position 3863 of SEQ ID NO: 1881851
gagugcuaagcagacauua

SEQ ID NO: 2076249 - RNA, 19 nt, Artificial Sequence
  Description of Artificial Sequence: Synthetic oligonucleotide
  Antisense strand to SEQ ID NO: 2076248
uaaugucugcuuagcacuc

SEQ ID NO: 2076250 - RNA, 19 nt, Artificial Sequence
  Description of Artificial Sequence: Synthetic oligonucleotide
  Sense strand starting at position 3953 of SEQ ID NO: 1881851
ccgacuugcccuggaaaga

SEQ ID NO: 2076251 - RNA, 19 nt, Artificial Sequence
  Description of Artificial Sequence: Synthetic oligonucleotide
  Antisense strand to SEQ ID NO: 2076250
ucuuuccagggcaagucgg

SEQ ID NO: 2076252 - RNA, 19 nt, Artificial Sequence
  Description of Artificial Sequence: Synthetic oligonucleotide
  Sense strand starting at position 1138 of SEQ ID NO: 1881852
gguaaacauguauaaugua

SEQ ID NO: 2076253 - RNA, 19 nt, Artificial Sequence
  Description of Artificial Sequence: Synthetic oligonucleotide
  Antisense strand to SEQ ID NO: 2076252
uacauuauacauguuuacc

SEQ ID NO: 2076254 - RNA, 19 nt, Artificial Sequence
  Description of Artificial Sequence: Synthetic oligonucleotide
  Sense strand starting at position 1166 of SEQ ID NO: 1881852
uagcauguguuccuuuaag

SEQ ID NO: 2076255 - RNA, 19 nt, Artificial Sequence
  Description of Artificial Sequence: Synthetic oligonucleotide
  Antisense strand to SEQ ID NO: 2076254
cuuaaaggaacacaugcua

SEQ ID NO: 2076256 - RNA, 19 nt, Artificial Sequence
  Description of Artificial Sequence: Synthetic oligonucleotide
  Sense strand starting at position 1262 of SEQ ID NO: 1881852
auguuuguaugcuuacaga

SEQ ID NO: 2076257 - RNA, 19 nt, Artificial Sequence
  Description of Artificial Sequence: Synthetic oligonucleotide
  Antisense strand to SEQ ID NO: 2076256
ucuguaagcauacaaacau

SEQ ID NO: 2076258 - RNA, 19 nt, Artificial Sequence
  Description of Artificial Sequence: Synthetic oligonucleotide
  Sense strand starting at position 1297 of SEQ ID NO: 1881852
uuuggcuaguuaucaauca

SEQ ID NO: 2076259 - RNA, 19 nt, Artificial Sequence
  Description of Artificial Sequence: Synthetic oligonucleotide
  Antisense strand to SEQ ID NO: 2076258
ugauugauaacuagccaaa

SEQ ID NO: 2076260 - RNA, 19 nt, Artificial Sequence
  Description of Artificial Sequence: Synthetic oligonucleotide
  Sense strand starting at position 1386 of SEQ ID NO: 1881852
ugcaguagguguucuuaca

SEQ ID NO: 2076261 - RNA, 19 nt, Artificial Sequence
  Description of Artificial Sequence: Synthetic oligonucleotide
  Antisense strand to SEQ ID NO: 2076260
uguaagaacaccuacugca

SEQ ID NO: 2076262 - RNA, 19 nt, Artificial Sequence
  Description of Artificial Sequence: Synthetic oligonucleotide
  Sense strand starting at position 1431 of SEQ ID NO: 1881852
gacuuaaguuaguucuuga

SEQ ID NO: 2076263 - RNA, 19 nt, Artificial Sequence
  Description of Artificial Sequence: Synthetic oligonucleotide
  Antisense strand to SEQ ID NO: 2076262
ucaagaacuaacuuaaguc

SEQ ID NO: 2076264 - RNA, 19 nt, Artificial Sequence
  Description of Artificial Sequence: Synthetic oligonucleotide
  Sense strand starting at position 1434 of SEQ ID NO: 1881852
uuaaguuaguucuugaauc

SEQ ID NO: 2076265 - RNA, 19 nt, Artificial Sequence
  Description of Artificial Sequence: Synthetic oligonucleotide
  Antisense strand to SEQ ID NO: 2076264
gauucaagaacuaacuuaa

SEQ ID NO: 2076266 - RNA, 19 nt, Artificial Sequence
  Description of Artificial Sequence: Synthetic oligonucleotide
  Sense strand starting at position 1442 of SEQ ID NO: 1881852
guucuugaaucauuaguua

SEQ ID NO: 2076267 - RNA, 19 nt, Artificial Sequence
  Description of Artificial Sequence: Synthetic oligonucleotide
  Antisense strand to SEQ ID NO: 2076266
uaacuaaugauucaagaac

SEQ ID NO: 2076268 - RNA, 19 nt, Artificial Sequence
  Description of Artificial Sequence: Synthetic oligonucleotide
  Sense strand starting at position 1480 of SEQ ID NO: 1881852
ccucauacagauuggaauu

SEQ ID NO: 2076269 - RNA, 19 nt, Artificial Sequence
  Description of Artificial Sequence: Synthetic oligonucleotide
  Antisense strand to SEQ ID NO: 2076268
aauuccaaucuguaugagg

SEQ ID NO: 2076270 - RNA, 19 nt, Artificial Sequence
  Description of Artificial Sequence: Synthetic oligonucleotide
  Sense strand starting at position 1517 of SEQ ID NO: 1881852
uucccaugaucaguauaag

SEQ ID NO: 2076271 - RNA, 19 nt, Artificial Sequence
  Description of Artificial Sequence: Synthetic oligonucleotide
  Antisense strand to SEQ ID NO: 2076270
cuuauacugaucaugggaa

SEQ ID NO: 2076272 - RNA, 19 nt, Artificial Sequence
  Description of Artificial Sequence: Synthetic oligonucleotide
  Sense strand starting at position 1523 of SEQ ID NO: 1881852
ugaucaguauaagacaauu

SEQ ID NO: 2076273 - RNA, 19 nt, Artificial Sequence
  Description of Artificial Sequence: Synthetic oligonucleotide
  Antisense strand to SEQ ID NO: 2076272
aauugucuuauacugauca

SEQ ID NO: 2076274 - RNA, 19 nt, Artificial Sequence
  Description of Artificial Sequence: Synthetic oligonucleotide
  Sense strand starting at position 1605 of SEQ ID NO: 1881852
ucuguaagaagagguuuau

SEQ ID NO: 2076275 - RNA, 19 nt, Artificial Sequence
  Description of Artificial Sequence: Synthetic oligonucleotide
  Antisense strand to SEQ ID NO: 2076274
auaaaccucuucuuacaga

SEQ ID NO: 2076276 - RNA, 19 nt, Artificial Sequence
  Description of Artificial Sequence: Synthetic oligonucleotide
  Sense strand starting at position 1690 of SEQ ID NO: 1881852
gcaauagaguuacucugga

SEQ ID NO: 2076277 - RNA, 19 nt, Artificial Sequence
  Description of Artificial Sequence: Synthetic oligonucleotide
  Antisense strand to SEQ ID NO: 2076276
uccagaguaacucuauugc

SEQ ID NO: 2076278 - RNA, 19 nt, Artificial Sequence
  Description of Artificial Sequence: Synthetic oligonucleotide
  Sense strand starting at position 1751 of SEQ ID NO: 1881852
guuguaguacacuaagcaa

SEQ ID NO: 2076279 - RNA, 19 nt, Artificial Sequence
  Description of Artificial Sequence: Synthetic oligonucleotide
  Antisense strand to SEQ ID NO: 2076278
uugcuuaguguacuacaac

SEQ ID NO: 2076280 - RNA, 19 nt, Artificial Sequence
  Description of Artificial Sequence: Synthetic oligonucleotide
  Sense strand starting at position 2906 of SEQ ID NO: 1881852
ugaggaguguccucucuua

SEQ ID NO: 2076281 - RNA, 19 nt, Artificial Sequence
  Description of Artificial Sequence: Synthetic oligonucleotide
  Antisense strand to SEQ ID NO: 2076280
uaagagaggacacuccuca

SEQ ID NO: 2076282 - RNA, 19 nt, Artificial Sequence
  Description of Artificial Sequence: Synthetic oligonucleotide
  Sense strand starting at position 2913 of SEQ ID NO: 1881852
uguccucucuuagcacaua

SEQ ID NO: 2076283 - RNA, 19 nt, Artificial Sequence
  Description of Artificial Sequence: Synthetic oligonucleotide
  Antisense strand to SEQ ID NO: 2076282
uaugugcuaagagaggaca

SEQ ID NO: 2076284 - RNA, 19 nt, Artificial Sequence
  Description of Artificial Sequence: Synthetic oligonucleotide
  Sense strand starting at position 2981 of SEQ ID NO: 1881852
ugcacuuacauuggagaga

SEQ ID NO: 2076285 - RNA, 19 nt, Artificial Sequence
  Description of Artificial Sequence: Synthetic oligonucleotide
  Antisense strand to SEQ ID NO: 2076284
ucucuccaauguaagugca

SEQ ID NO: 2076286 - RNA, 19 nt, Artificial Sequence
  Description of Artificial Sequence: Synthetic oligonucleotide
  Sense strand starting at position 2982 of SEQ ID NO: 1881852
gcacuuacauuggagagaa

SEQ ID NO: 2076287 - RNA, 19 nt, Artificial Sequence
  Description of Artificial Sequence: Synthetic oligonucleotide
  Antisense strand to SEQ ID NO: 2076286
uucucuccaauguaagugc

SEQ ID NO: 2076288 - RNA, 19 nt, Artificial Sequence
  Description of Artificial Sequence: Synthetic oligonucleotide
  Sense strand starting at position 3052 of SEQ ID NO: 1881852
uaaauaagcucugaggaag

SEQ ID NO: 2076289 - RNA, 19 nt, Artificial Sequence
  Description of Artificial Sequence: Synthetic oligonucleotide
  Antisense strand to SEQ ID NO: 2076288
cuuccucagagcuuauuua

SEQ ID NO: 2076290 - RNA, 19 nt, Artificial Sequence
  Description of Artificial Sequence: Synthetic oligonucleotide
  Sense strand starting at position 3155 of SEQ ID NO: 1881852
uuguacaugugcccagaua

SEQ ID NO: 2076291 - RNA, 19 nt, Artificial Sequence
  Description of Artificial Sequence: Synthetic oligonucleotide
  Antisense strand to SEQ ID NO: 2076290
uaucugggcacauguacaa

SEQ ID NO: 2076292 - RNA, 19 nt, Artificial Sequence
  Description of Artificial Sequence: Synthetic oligonucleotide
  Sense strand starting at position 3301 of SEQ ID NO: 1881852
uuacauguccucuguggau

SEQ ID NO: 2076293 - RNA, 19 nt, Artificial Sequence
  Description of Artificial Sequence: Synthetic oligonucleotide
  Antisense strand to SEQ ID NO: 2076292
auccacagaggacauguaa

SEQ ID NO: 2076294 - RNA, 19 nt, Artificial Sequence
  Description of Artificial Sequence: Synthetic oligonucleotide
  Sense strand starting at position 3388 of SEQ ID NO: 1881852
uaguuagaauuagcagagu

SEQ ID NO: 2076295 - RNA, 19 nt, Artificial Sequence
  Description of Artificial Sequence: Synthetic oligonucleotide
  Antisense strand to SEQ ID NO: 2076294
acucugcuaauucuaacua

SEQ ID NO: 2076296 - RNA, 19 nt, Artificial Sequence
  Description of Artificial Sequence: Synthetic oligonucleotide
  Sense strand starting at position 3444 of SEQ ID NO: 1881852
aggcaaauaucagcuguuu

SEQ ID NO: 2076297 - RNA, 19 nt, Artificial Sequence
  Description of Artificial Sequence: Synthetic oligonucleotide
  Antisense strand to SEQ ID NO: 2076296
aaacagcugauauuugccu

SEQ ID NO: 2076298 - RNA, 19 nt, Artificial Sequence
  Description of Artificial Sequence: Synthetic oligonucleotide
  Sense strand starting at position 3524 of SEQ ID NO: 1881852
gaacauaagugcucaagag

SEQ ID NO: 2076299 - RNA, 19 nt, Artificial Sequence
  Description of Artificial Sequence: Synthetic oligonucleotide
  Antisense strand to SEQ ID NO: 2076298
cucuugagcacuuauguuc

SEQ ID NO: 2076300 - RNA, 19 nt, Artificial Sequence
  Description of Artificial Sequence: Synthetic oligonucleotide
  Sense strand starting at position 3629 of SEQ ID NO: 1881852
uggagcuccuuguccuuaa

SEQ ID NO: 2076301 - RNA, 19 nt, Artificial Sequence
  Description of Artificial Sequence: Synthetic oligonucleotide
  Antisense strand to SEQ ID NO: 2076300
uuaaggacaaggagcucca

SEQ ID NO: 2076302 - RNA, 19 nt, Artificial Sequence
  Description of Artificial Sequence: Synthetic oligonucleotide
  Sense strand starting at position 3630 of SEQ ID NO: 1881852
ggagcuccuuguccuuaaa

SEQ ID NO: 2076303 - RNA, 19 nt, Artificial Sequence
  Description of Artificial Sequence: Synthetic oligonucleotide
  Antisense strand to SEQ ID NO: 2076302
uuuaaggacaaggagcucc

SEQ ID NO: 2076304 - RNA, 19 nt, Artificial Sequence
  Description of Artificial Sequence: Synthetic oligonucleotide
  Sense strand starting at position 3632 of SEQ ID NO: 1881852
agcuccuuguccuuaaaga

SEQ ID NO: 2076305 - RNA, 19 nt, Artificial Sequence
  Description of Artificial Sequence: Synthetic oligonucleotide
  Antisense strand to SEQ ID NO: 2076304
ucuuuaaggacaaggagcu

SEQ ID NO: 2076306 - RNA, 19 nt, Artificial Sequence
  Description of Artificial Sequence: Synthetic oligonucleotide
  Sense strand starting at position 3633 of SEQ ID NO: 1881852
gcuccuuguccuuaaagau

SEQ ID NO: 2076307 - RNA, 19 nt, Artificial Sequence
  Description of Artificial Sequence: Synthetic oligonucleotide
  Antisense strand to SEQ ID NO: 2076306
aucuuuaaggacaaggagc

SEQ ID NO: 2076308 - RNA, 19 nt, Artificial Sequence
  Description of Artificial Sequence: Synthetic oligonucleotide
  Sense strand starting at position 3754 of SEQ ID NO: 1881852
guuaaaggaucacaugauu

SEQ ID NO: 2076309 - RNA, 19 nt, Artificial Sequence
  Description of Artificial Sequence: Synthetic oligonucleotide
  Antisense strand to SEQ ID NO: 2076308
aaucaugugauccuuuaac

SEQ ID NO: 2076310 - RNA, 19 nt, Artificial Sequence
  Description of Artificial Sequence: Synthetic oligonucleotide
  Sense strand starting at position 3805 of SEQ ID NO: 1881852
gaagaaaugcuauguacag

SEQ ID NO: 2076311 - RNA, 19 nt, Artificial Sequence
  Description of Artificial Sequence: Synthetic oligonucleotide
  Antisense strand to SEQ ID NO: 2076310
cuguacauagcauuucuuc

SEQ ID NO: 2076312 - RNA, 19 nt, Artificial Sequence
  Description of Artificial Sequence: Synthetic oligonucleotide
  Sense strand starting at position 3811 of SEQ ID NO: 1881852
augcuauguacaggagcua

SEQ ID NO: 2076313 - RNA, 19 nt, Artificial Sequence
  Description of Artificial Sequence: Synthetic oligonucleotide
  Antisense strand to SEQ ID NO: 2076312
uagcuccuguacauagcau

SEQ ID NO: 2076314 - RNA, 19 nt, Artificial Sequence
  Description of Artificial Sequence: Synthetic oligonucleotide
  Sense strand starting at position 3823 of SEQ ID NO: 1881852
ggagcuaugcuagacucuu

SEQ ID NO: 2076315 - RNA, 19 nt, Artificial Sequence
  Description of Artificial Sequence: Synthetic oligonucleotide
  Antisense strand to SEQ ID NO: 2076314
aagagucuagcauagcucc

SEQ ID NO: 2076316 - RNA, 19 nt, Artificial Sequence
  Description of Artificial Sequence: Synthetic oligonucleotide
  Sense strand starting at position 3835 of SEQ ID NO: 1881852
gacucuugagucuagugca

SEQ ID NO: 2076317 - RNA, 19 nt, Artificial Sequence
  Description of Artificial Sequence: Synthetic oligonucleotide
  Antisense strand to SEQ ID NO: 2076316
ugcacuagacucaagaguc

SEQ ID NO: 2076318 - RNA, 19 nt, Artificial Sequence
  Description of Artificial Sequence: Synthetic oligonucleotide
  Sense strand starting at position 3840 of SEQ ID NO: 1881852
uugagucuagugcauguau

SEQ ID NO: 2076319 - RNA, 19 nt, Artificial Sequence
  Description of Artificial Sequence: Synthetic oligonucleotide
  Antisense strand to SEQ ID NO: 2076318
auacaugcacuagacucaa

SEQ ID NO: 2076320 - RNA, 19 nt, Artificial Sequence
  Description of Artificial Sequence: Synthetic oligonucleotide
  Sense strand starting at position 3842 of SEQ ID NO: 1881852
gagucuagugcauguauau

SEQ ID NO: 2076321 - RNA, 19 nt, Artificial Sequence
  Description of Artificial Sequence: Synthetic oligonucleotide
  Antisense strand to SEQ ID NO: 2076320
auauacaugcacuagacuc

SEQ ID NO: 2076322 - RNA, 19 nt, Artificial Sequence
  Description of Artificial Sequence: Synthetic oligonucleotide
  Sense strand starting at position 3851 of SEQ ID NO: 1881852
gcauguauauuacucugaa

SEQ ID NO: 2076323 - RNA, 19 nt, Artificial Sequence
  Description of Artificial Sequence: Synthetic oligonucleotide
  Antisense strand to SEQ ID NO: 2076322
uucagaguaauauacaugc

SEQ ID NO: 2076324 - RNA, 19 nt, Artificial Sequence
  Description of Artificial Sequence: Synthetic oligonucleotide
  Sense strand starting at position 3874 of SEQ ID NO: 1881852
aggcaaugcuuauuacuua

SEQ ID NO: 2076325 - RNA, 19 nt, Artificial Sequence
  Description of Artificial Sequence: Synthetic oligonucleotide
  Antisense strand to SEQ ID NO: 2076324
uaaguaauaagcauugccu

SEQ ID NO: 2076326 - RNA, 19 nt, Artificial Sequence
  Description of Artificial Sequence: Synthetic oligonucleotide
  Sense strand starting at position 3979 of SEQ ID NO: 1881852
cucucauauuguguuugaa

SEQ ID NO: 2076327 - RNA, 19 nt, Artificial Sequence
  Description of Artificial Sequence: Synthetic oligonucleotide
  Antisense strand to SEQ ID NO: 2076326
uucaaacacaauaugagag

SEQ ID NO: 2076328 - RNA, 19 nt, Artificial Sequence
  Description of Artificial Sequence: Synthetic oligonucleotide
  Sense strand starting at position 3981 of SEQ ID NO: 1881852
cucauauuguguuugaaua

SEQ ID NO: 2076329 - RNA, 19 nt, Artificial Sequence
  Description of Artificial Sequence: Synthetic oligonucleotide
  Antisense strand to SEQ ID NO: 2076328
uauucaaacacaauaugag

SEQ ID NO: 2076330 - RNA, 19 nt, Artificial Sequence
  Description of Artificial Sequence: Synthetic oligonucleotide
  Sense strand starting at position 3982 of SEQ ID NO: 1881852
ucauauuguguuugaauac

SEQ ID NO: 2076331 - RNA, 19 nt, Artificial Sequence
  Description of Artificial Sequence: Synthetic oligonucleotide
  Antisense strand to SEQ ID NO: 2076330
guauucaaacacaauauga

SEQ ID NO: 2076332 - RNA, 19 nt, Artificial Sequence
  Description of Artificial Sequence: Synthetic oligonucleotide
  Sense strand starting at position 53 of SEQ ID NO: 1881853
gugugugaccuuaguggau

SEQ ID NO: 2076333 - RNA, 19 nt, Artificial Sequence
  Description of Artificial Sequence: Synthetic oligonucleotide
  Antisense strand to SEQ ID NO: 2076332
auccacuaaggucacacac

SEQ ID NO: 2076334 - RNA, 19 nt, Artificial Sequence
  Description of Artificial Sequence: Synthetic oligonucleotide
  Sense strand starting at position 124 of SEQ ID NO: 1881853
ugugaaaccucauuagaga

SEQ ID NO: 2076335 - RNA, 19 nt, Artificial Sequence
  Description of Artificial Sequence: Synthetic oligonucleotide
  Antisense strand to SEQ ID NO: 2076334
ucucuaaugagguuucaca

SEQ ID NO: 2076336 - RNA, 19 nt, Artificial Sequence
  Description of Artificial Sequence: Synthetic oligonucleotide
  Sense strand starting at position 288 of SEQ ID NO: 1881853
guauaaguaucuccucaua

SEQ ID NO: 2076337 - RNA, 19 nt, Artificial Sequence
  Description of Artificial Sequence: Synthetic oligonucleotide
  Antisense strand to SEQ ID NO: 2076336
uaugaggagauacuuauac

SEQ ID NO: 2076338 - RNA, 19 nt, Artificial Sequence
  Description of Artificial Sequence: Synthetic oligonucleotide
  Sense strand starting at position 398 of SEQ ID NO: 1881853
gugagauccucccucuuaa

SEQ ID NO: 2076339 - RNA, 19 nt, Artificial Sequence
  Description of Artificial Sequence: Synthetic oligonucleotide
  Antisense strand to SEQ ID NO: 2076338
uuaagagggaggaucucac

SEQ ID NO: 2076340 - RNA, 19 nt, Artificial Sequence
  Description of Artificial Sequence: Synthetic oligonucleotide
  Sense strand starting at position 605 of SEQ ID NO: 1881853
cuuaauauagaguaggcau

SEQ ID NO: 2076341 - RNA, 19 nt, Artificial Sequence
  Description of Artificial Sequence: Synthetic oligonucleotide
  Antisense strand to SEQ ID NO: 2076340
augccuacucuauauuaag

SEQ ID NO: 2076342 - RNA, 19 nt, Artificial Sequence
  Description of Artificial Sequence: Synthetic oligonucleotide
  Sense strand starting at position 607 of SEQ ID NO: 1881853
uaauauagaguaggcauaa

SEQ ID NO: 2076343 - RNA, 19 nt, Artificial Sequence
  Description of Artificial Sequence: Synthetic oligonucleotide
  Antisense strand to SEQ ID NO: 2076342
uuaugccuacucuauauua

SEQ ID NO: 2076344 - RNA, 19 nt, Artificial Sequence
  Description of Artificial Sequence: Synthetic oligonucleotide
  Sense strand starting at position 643 of SEQ ID NO: 1881853
ugggccaugcuuuagguaa

SEQ ID NO: 2076345 - RNA, 19 nt, Artificial Sequence
  Description of Artificial Sequence: Synthetic oligonucleotide
  Antisense strand to SEQ ID NO: 2076344
uuaccuaaagcauggccca

SEQ ID NO: 2076346 - RNA, 19 nt, Artificial Sequence
  Description of Artificial Sequence: Synthetic oligonucleotide
  Sense strand starting at position 647 of SEQ ID NO: 1881853
ccaugcuuuagguaagagu

SEQ ID NO: 2076347 - RNA, 19 nt, Artificial Sequence
  Description of Artificial Sequence: Synthetic oligonucleotide
  Antisense strand to SEQ ID NO: 2076346
acucuuaccuaaagcaugg

SEQ ID NO: 2076348 - RNA, 19 nt, Artificial Sequence
  Description of Artificial Sequence: Synthetic oligonucleotide
  Sense strand starting at position 710 of SEQ ID NO: 1881853
aauuauuuguuguaggaga

SEQ ID NO: 2076349 - RNA, 19 nt, Artificial Sequence
  Description of Artificial Sequence: Synthetic oligonucleotide
  Antisense strand to SEQ ID NO: 2076348
ucuccuacaacaaauaauu

SEQ ID NO: 2076350 - RNA, 19 nt, Artificial Sequence
  Description of Artificial Sequence: Synthetic oligonucleotide
  Sense strand starting at position 726 of SEQ ID NO: 1881853
agaguuguauggaggauug

SEQ ID NO: 2076351 - RNA, 19 nt, Artificial Sequence
  Description of Artificial Sequence: Synthetic oligonucleotide
  Antisense strand to SEQ ID NO: 2076350
caauccuccauacaacucu

SEQ ID NO: 2076352 - RNA, 19 nt, Artificial Sequence
  Description of Artificial Sequence: Synthetic oligonucleotide
  Sense strand starting at position 728 of SEQ ID NO: 1881853
aguuguauggaggauugua

SEQ ID NO: 2076353 - RNA, 19 nt, Artificial Sequence
  Description of Artificial Sequence: Synthetic oligonucleotide
  Antisense strand to SEQ ID NO: 2076352
uacaauccuccauacaacu

SEQ ID NO: 2076354 - RNA, 19 nt, Artificial Sequence
  Description of Artificial Sequence: Synthetic oligonucleotide
  Sense strand starting at position 736 of SEQ ID NO: 1881853
ggaggauuguaggauauuu

SEQ ID NO: 2076355 - RNA, 19 nt, Artificial Sequence
  Description of Artificial Sequence: Synthetic oligonucleotide
  Antisense strand to SEQ ID NO: 2076354
aaauauccuacaauccucc

SEQ ID NO: 2076356 - RNA, 19 nt, Artificial Sequence
  Description of Artificial Sequence: Synthetic oligonucleotide
  Sense strand starting at position 800 of SEQ ID NO: 1881853
cccuccaaggucugacaau

SEQ ID NO: 2076357 - RNA, 19 nt, Artificial Sequence
  Description of Artificial Sequence: Synthetic oligonucleotide
  Antisense strand to SEQ ID NO: 2076356
auugucagaccuuggaggg

SEQ ID NO: 2076358 - RNA, 19 nt, Artificial Sequence
  Description of Artificial Sequence: Synthetic oligonucleotide
  Sense strand starting at position 826 of SEQ ID NO: 1881853
gucuccagaaguggucaaa

SEQ ID NO: 2076359 - RNA, 19 nt, Artificial Sequence
  Description of Artificial Sequence: Synthetic oligonucleotide
  Antisense strand to SEQ ID NO: 2076358
uuugaccacuucuggagac

SEQ ID NO: 2076360 - RNA, 19 nt, Artificial Sequence
  Description of Artificial Sequence: Synthetic oligonucleotide
  Sense strand starting at position 829 of SEQ ID NO: 1881853
uccagaaguggucaaaugu

SEQ ID NO: 2076361 - RNA, 19 nt, Artificial Sequence
  Description of Artificial Sequence: Synthetic oligonucleotide
  Antisense strand to SEQ ID NO: 2076360
acauuugaccacuucugga

SEQ ID NO: 2076362 - RNA, 19 nt, Artificial Sequence
  Description of Artificial Sequence: Synthetic oligonucleotide
  Sense strand starting at position 838 of SEQ ID NO: 1881853
ggucaaauguuuccaagag

SEQ ID NO: 2076363 - RNA, 19 nt, Artificial Sequence
  Description of Artificial Sequence: Synthetic oligonucleotide
  Antisense strand to SEQ ID NO: 2076362
cucuuggaaacauuugacc

SEQ ID NO: 2076364 - RNA, 19 nt, Artificial Sequence
  Description of Artificial Sequence: Synthetic oligonucleotide
  Sense strand starting at position 886 of SEQ ID NO: 1881853
uuuaauguccuguauuaug

SEQ ID NO: 2076365 - RNA, 19 nt, Artificial Sequence
  Description of Artificial Sequence: Synthetic oligonucleotide
  Antisense strand to SEQ ID NO: 2076364
cauaauacaggacauuaaa

SEQ ID NO: 2076366 - RNA, 19 nt, Artificial Sequence
  Description of Artificial Sequence: Synthetic oligonucleotide
  Sense strand starting at position 1033 of SEQ ID NO: 1881853
guagcacucagugauaugu

SEQ ID NO: 2076367 - RNA, 19 nt, Artificial Sequence
  Description of Artificial Sequence: Synthetic oligonucleotide
  Antisense strand to SEQ ID NO: 2076366
acauaucacugagugcuac

SEQ ID NO: 2076368 - RNA, 19 nt, Artificial Sequence
  Description of Artificial Sequence: Synthetic oligonucleotide
  Sense strand starting at position 1087 of SEQ ID NO: 1881853
ggcaaucaaucauugcuga

SEQ ID NO: 2076369 - RNA, 19 nt, Artificial Sequence
  Description of Artificial Sequence: Synthetic oligonucleotide
  Antisense strand to SEQ ID NO: 2076368
ucagcaaugauugauugcc

SEQ ID NO: 2076370 - RNA, 19 nt, Artificial Sequence
  Description of Artificial Sequence: Synthetic oligonucleotide
  Sense strand starting at position 1104 of SEQ ID NO: 1881853
gaucaugguccuggacagu

SEQ ID NO: 2076371 - RNA, 19 nt, Artificial Sequence
  Description of Artificial Sequence: Synthetic oligonucleotide
  Antisense strand to SEQ ID NO: 2076370
acuguccaggaccaugauc

SEQ ID NO: 2076372 - RNA, 19 nt, Artificial Sequence
  Description of Artificial Sequence: Synthetic oligonucleotide
  Sense strand starting at position 1232 of SEQ ID NO: 1881853
accuguuucuagucuauaa

SEQ ID NO: 2076373 - RNA, 19 nt, Artificial Sequence
  Description of Artificial Sequence: Synthetic oligonucleotide
  Antisense strand to SEQ ID NO: 2076372
uuauagacuagaaacaggu

SEQ ID NO: 2076374 - RNA, 19 nt, Artificial Sequence
  Description of Artificial Sequence: Synthetic oligonucleotide
  Sense strand starting at position 1234 of SEQ ID NO: 1881853
cuguuucuagucuauaaua

SEQ ID NO: 2076375 - RNA, 19 nt, Artificial Sequence
  Description of Artificial Sequence: Synthetic oligonucleotide
  Antisense strand to SEQ ID NO: 2076374
uauuauagacuagaaacag

SEQ ID NO: 2076376 - RNA, 19 nt, Artificial Sequence
  Description of Artificial Sequence: Synthetic oligonucleotide
  Sense strand starting at position 1344 of SEQ ID NO: 1881853
aguuaacaagcuuguacaa

SEQ ID NO: 2076377 - RNA, 19 nt, Artificial Sequence
  Description of Artificial Sequence: Synthetic oligonucleotide
  Antisense strand to SEQ ID NO: 2076376
uuguacaagcuuguuaacu

SEQ ID NO: 2076378 - RNA, 19 nt, Artificial Sequence
  Description of Artificial Sequence: Synthetic oligonucleotide
  Sense strand starting at position 1618 of SEQ ID NO: 1881853
cugugaaaucugggucaca

SEQ ID NO: 2076379 - RNA, 19 nt, Artificial Sequence
  Description of Artificial Sequence: Synthetic oligonucleotide
  Antisense strand to SEQ ID NO: 2076378
ugugacccagauuucacag

SEQ ID NO: 2076380 - RNA, 19 nt, Artificial Sequence
  Description of Artificial Sequence: Synthetic oligonucleotide
  Sense strand starting at position 1619 of SEQ ID NO: 1881853
ugugaaaucugggucacau

SEQ ID NO: 2076381 - RNA, 19 nt, Artificial Sequence
  Description of Artificial Sequence: Synthetic oligonucleotide
  Antisense strand to SEQ ID NO: 2076380
augugacccagauuucaca

SEQ ID NO: 2076382 - RNA, 19 nt, Artificial Sequence
  Description of Artificial Sequence: Synthetic oligonucleotide
  Sense strand starting at position 1628 of SEQ ID NO: 1881853
ugggucacauuauuaugaa

SEQ ID NO: 2076383 - RNA, 19 nt, Artificial Sequence
  Description of Artificial Sequence: Synthetic oligonucleotide
  Antisense strand to SEQ ID NO: 2076382
uucauaauaaugugaccca

SEQ ID NO: 2076384 - RNA, 19 nt, Artificial Sequence
  Description of Artificial Sequence: Synthetic oligonucleotide
  Sense strand starting at position 1640 of SEQ ID NO: 1881853
uuaugaagccaugacucau

SEQ ID NO: 2076385 - RNA, 19 nt, Artificial Sequence
  Description of Artificial Sequence: Synthetic oligonucleotide
  Antisense strand to SEQ ID NO: 2076384
augagucauggcuucauaa

SEQ ID NO: 2076386 - RNA, 19 nt, Artificial Sequence
  Description of Artificial Sequence: Synthetic oligonucleotide
  Sense strand starting at position 1766 of SEQ ID NO: 1881853
gguccaaaucauuaacugu

SEQ ID NO: 2076387 - RNA, 19 nt, Artificial Sequence
  Description of Artificial Sequence: Synthetic oligonucleotide
  Antisense strand to SEQ ID NO: 2076386
acaguuaaugauuuggacc

SEQ ID NO: 2076388 - RNA, 19 nt, Artificial Sequence
  Description of Artificial Sequence: Synthetic oligonucleotide
  Sense strand starting at position 1934 of SEQ ID NO: 1881853
gggcaacacuuuccuauau

SEQ ID NO: 2076389 - RNA, 19 nt, Artificial Sequence
  Description of Artificial Sequence: Synthetic oligonucleotide
  Antisense strand to SEQ ID NO: 2076388
auauaggaaaguguugccc

SEQ ID NO: 2076390 - RNA, 19 nt, Artificial Sequence
  Description of Artificial Sequence: Synthetic oligonucleotide
  Sense strand starting at position 2013 of SEQ ID NO: 1881853
gggaaaggcucagcacaua

SEQ ID NO: 2076391 - RNA, 19 nt, Artificial Sequence
  Description of Artificial Sequence: Synthetic oligonucleotide
  Antisense strand to SEQ ID NO: 2076390
uaugugcugagccuuuccc

SEQ ID NO: 2076392 - RNA, 19 nt, Artificial Sequence
  Description of Artificial Sequence: Synthetic oligonucleotide
  Sense strand starting at position 2074 of SEQ ID NO: 1881853
aaggaaguucuccaucugu

SEQ ID NO: 2076393 - RNA, 19 nt, Artificial Sequence
  Description of Artificial Sequence: Synthetic oligonucleotide
  Antisense strand to SEQ ID NO: 2076392
acagauggagaacuuccuu

SEQ ID NO: 2076394 - RNA, 19 nt, Artificial Sequence
  Description of Artificial Sequence: Synthetic oligonucleotide
  Sense strand starting at position 2375 of SEQ ID NO: 1881853
cuacuacagcuggguaaua

SEQ ID NO: 2076395 - RNA, 19 nt, Artificial Sequence
  Description of Artificial Sequence: Synthetic oligonucleotide
  Antisense strand to SEQ ID NO: 2076394
uauuacccagcuguaguag

SEQ ID NO: 2076396 - RNA, 19 nt, Artificial Sequence
  Description of Artificial Sequence: Synthetic oligonucleotide
  Sense strand starting at position 2376 of SEQ ID NO: 1881853
uacuacagcuggguaauau

SEQ ID NO: 2076397 - RNA, 19 nt, Artificial Sequence
  Description of Artificial Sequence: Synthetic oligonucleotide
  Antisense strand to SEQ ID NO: 2076396
auauuacccagcuguagua

SEQ ID NO: 2076398 - RNA, 19 nt, Artificial Sequence
  Description of Artificial Sequence: Synthetic oligonucleotide
  Sense strand starting at position 2377 of SEQ ID NO: 1881853
acuacagcuggguaauauu

SEQ ID NO: 2076399 - RNA, 19 nt, Artificial Sequence
  Description of Artificial Sequence: Synthetic oligonucleotide
  Antisense strand to SEQ ID NO: 2076398
aauauuacccagcuguagu

SEQ ID NO: 2076400 - RNA, 19 nt, Artificial Sequence
  Description of Artificial Sequence: Synthetic oligonucleotide
  Sense strand starting at position 2622 of SEQ ID NO: 1881853
ggucucuucccuuauauua

SEQ ID NO: 2076401 - RNA, 19 nt, Artificial Sequence
  Description of Artificial Sequence: Synthetic oligonucleotide
  Antisense strand to SEQ ID NO: 2076400
uaauauaagggaagagacc

SEQ ID NO: 2076402 - RNA, 19 nt, Artificial Sequence
  Description of Artificial Sequence: Synthetic oligonucleotide
  Sense strand starting at position 2863 of SEQ ID NO: 1881853
ucauguggagcuuggaaua

SEQ ID NO: 2076403 - RNA, 19 nt, Artificial Sequence
  Description of Artificial Sequence: Synthetic oligonucleotide
  Antisense strand to SEQ ID NO: 2076402
uauuccaagcuccacauga

SEQ ID NO: 2076404 - RNA, 19 nt, Artificial Sequence
  Description of Artificial Sequence: Synthetic oligonucleotide
  Sense strand starting at position 2927 of SEQ ID NO: 1881853
uuugcagauuagucaacau

SEQ ID NO: 2076405 - RNA, 19 nt, Artificial Sequence
  Description of Artificial Sequence: Synthetic oligonucleotide
  Antisense strand to SEQ ID NO: 2076404
auguugacuaaucugcaaa

SEQ ID NO: 2076406 - RNA, 19 nt, Artificial Sequence
  Description of Artificial Sequence: Synthetic oligonucleotide
  Sense strand starting at position 3436 of SEQ ID NO: 1881853
uccaaaguaguugaaaguu

SEQ ID NO: 2076407 - RNA, 19 nt, Artificial Sequence
  Description of Artificial Sequence: Synthetic oligonucleotide
  Antisense strand to SEQ ID NO: 2076406
aacuuucaacuacuuugga

SEQ ID NO: 2076408 - RNA, 19 nt, Artificial Sequence
  Description of Artificial Sequence: Synthetic oligonucleotide
  Sense strand starting at position 3824 of SEQ ID NO: 1881853
acgugacuccuacaccuua

SEQ ID NO: 2076409 - RNA, 19 nt, Artificial Sequence
  Description of Artificial Sequence: Synthetic oligonucleotide
  Antisense strand to SEQ ID NO: 2076408
uaagguguaggagucacgu

SEQ ID NO: 2076410 - RNA, 19 nt, Artificial Sequence
  Description of Artificial Sequence: Synthetic oligonucleotide
  Sense strand starting at position 3954 of SEQ ID NO: 1881853
ugcauuugugcaugggaag

SEQ ID NO: 2076411 - RNA, 19 nt, Artificial Sequence
  Description of Artificial Sequence: Synthetic oligonucleotide
  Antisense strand to SEQ ID NO: 2076410
cuucccaugcacaaaugca

SEQ ID NO: 2076412 - RNA, 19 nt, Artificial Sequence
  Description of Artificial Sequence: Synthetic oligonucleotide
  Sense strand starting at position 54 of SEQ ID NO: 1881854
cucugucacccucaucaga

SEQ ID NO: 2076413 - RNA, 19 nt, Artificial Sequence
  Description of Artificial Sequence: Synthetic oligonucleotide
  Antisense strand to SEQ ID NO: 2076412
ucugaugagggugacagag

SEQ ID NO: 2076414 - RNA, 19 nt, Artificial Sequence
  Description of Artificial Sequence: Synthetic oligonucleotide
  Sense strand starting at position 123 of SEQ ID NO: 1881854
ucuggcauggucuaucuga

SEQ ID NO: 2076415 - RNA, 19 nt, Artificial Sequence
  Description of Artificial Sequence: Synthetic oligonucleotide
  Antisense strand to SEQ ID NO: 2076414
ucagauagaccaugccaga

SEQ ID NO: 2076416 - RNA, 19 nt, Artificial Sequence
  Description of Artificial Sequence: Synthetic oligonucleotide
  Sense strand starting at position 197 of SEQ ID NO: 1881854
ugguuucuuccuggagaag

SEQ ID NO: 2076417 - RNA, 19 nt, Artificial Sequence
  Description of Artificial Sequence: Synthetic oligonucleotide
  Antisense strand to SEQ ID NO: 2076416
cuucuccaggaagaaacca

SEQ ID NO: 2076418 - RNA, 19 nt, Artificial Sequence
  Description of Artificial Sequence: Synthetic oligonucleotide
  Sense strand starting at position 198 of SEQ ID NO: 1881854
gguuucuuccuggagaagu

SEQ ID NO: 2076419 - RNA, 19 nt, Artificial Sequence
  Description of Artificial Sequence: Synthetic oligonucleotide
  Antisense strand to SEQ ID NO: 2076418
acuucuccaggaagaaacc

SEQ ID NO: 2076420 - RNA, 19 nt, Artificial Sequence
  Description of Artificial Sequence: Synthetic oligonucleotide
  Sense strand starting at position 343 of SEQ ID NO: 1881854
gugcaagugguacaauaua

SEQ ID NO: 2076421 - RNA, 19 nt, Artificial Sequence
  Description of Artificial Sequence: Synthetic oligonucleotide
  Antisense strand to SEQ ID NO: 2076420
uauauuguaccacuugcac

SEQ ID NO: 2076422 - RNA, 19 nt, Artificial Sequence
  Description of Artificial Sequence: Synthetic oligonucleotide
  Sense strand starting at position 444 of SEQ ID NO: 1881854
aaauguacacguggagaau

SEQ ID NO: 2076423 - RNA, 19 nt, Artificial Sequence
  Description of Artificial Sequence: Synthetic oligonucleotide
  Antisense strand to SEQ ID NO: 2076422
auucuccacguguacauuu

SEQ ID NO: 2076424 - RNA, 19 nt, Artificial Sequence
  Description of Artificial Sequence: Synthetic oligonucleotide
  Sense strand starting at position 456 of SEQ ID NO: 1881854
ggagaaucauucuccucuu

SEQ ID NO: 2076425 - RNA, 19 nt, Artificial Sequence
  Description of Artificial Sequence: Synthetic oligonucleotide
  Antisense strand to SEQ ID NO: 2076424
aagaggagaaugauucucc

SEQ ID NO: 2076426 - RNA, 19 nt, Artificial Sequence
  Description of Artificial Sequence: Synthetic oligonucleotide
  Sense strand starting at position 703 of SEQ ID NO: 1881854
gggaaaugcaucugccaag

SEQ ID NO: 2076427 - RNA, 19 nt, Artificial Sequence
  Description of Artificial Sequence: Synthetic oligonucleotide
  Antisense strand to SEQ ID NO: 2076426
cuuggcagaugcauuuccc

SEQ ID NO: 2076428 - RNA, 19 nt, Artificial Sequence
  Description of Artificial Sequence: Synthetic oligonucleotide
  Sense strand starting at position 912 of SEQ ID NO: 1881854
gguguugugaaaugaaaca

SEQ ID NO: 2076429 - RNA, 19 nt, Artificial Sequence
  Description of Artificial Sequence: Synthetic oligonucleotide
  Antisense strand to SEQ ID NO: 2076428
uguuucauuucacaacacc

SEQ ID NO: 2076430 - RNA, 19 nt, Artificial Sequence
  Description of Artificial Sequence: Synthetic oligonucleotide
  Sense strand starting at position 930 of SEQ ID NO: 1881854
agugaaaucccugggagca

SEQ ID NO: 2076431 - RNA, 19 nt, Artificial Sequence
  Description of Artificial Sequence: Synthetic oligonucleotide
  Antisense strand to SEQ ID NO: 2076430
ugcucccagggauuucacu

SEQ ID NO: 2076432 - RNA, 19 nt, Artificial Sequence
  Description of Artificial Sequence: Synthetic oligonucleotide
  Sense strand starting at position 1191 of SEQ ID NO: 1881854
uuugcaugugaguagauca

SEQ ID NO: 2076433 - RNA, 19 nt, Artificial Sequence
  Description of Artificial Sequence: Synthetic oligonucleotide
  Antisense strand to SEQ ID NO: 2076432
ugaucuacucacaugcaaa

SEQ ID NO: 2076434 - RNA, 19 nt, Artificial Sequence
  Description of Artificial Sequence: Synthetic oligonucleotide
  Sense strand starting at position 1196 of SEQ ID NO: 1881854
augugaguagaucaaucuu

SEQ ID NO: 2076435 - RNA, 19 nt, Artificial Sequence
  Description of Artificial Sequence: Synthetic oligonucleotide
  Antisense strand to SEQ ID NO: 2076434
aagauugaucuacucacau

SEQ ID NO: 2076436 - RNA, 19 nt, Artificial Sequence
  Description of Artificial Sequence: Synthetic oligonucleotide
  Sense strand starting at position 1517 of SEQ ID NO: 1881854
gaaucugggucacuagaau

SEQ ID NO: 2076437 - RNA, 19 nt, Artificial Sequence
  Description of Artificial Sequence: Synthetic oligonucleotide
  Antisense strand to SEQ ID NO: 2076436
auucuagugacccagauuc

SEQ ID NO: 2076438 - RNA, 19 nt, Artificial Sequence
  Description of Artificial Sequence: Synthetic oligonucleotide
  Sense strand starting at position 1546 of SEQ ID NO: 1881854
uuccuuucucuguagacua

SEQ ID NO: 2076439 - RNA, 19 nt, Artificial Sequence
  Description of Artificial Sequence: Synthetic oligonucleotide
  Antisense strand to SEQ ID NO: 2076438
uagucuacagagaaaggaa

SEQ ID NO: 2076440 - RNA, 19 nt, Artificial Sequence
  Description of Artificial Sequence: Synthetic oligonucleotide
  Sense strand starting at position 1548 of SEQ ID NO: 1881854
ccuuucucuguagacuaua

SEQ ID NO: 2076441 - RNA, 19 nt, Artificial Sequence
  Description of Artificial Sequence: Synthetic oligonucleotide
  Antisense strand to SEQ ID NO: 2076440
uauagucuacagagaaagg

SEQ ID NO: 2076442 - RNA, 19 nt, Artificial Sequence
  Description of Artificial Sequence: Synthetic oligonucleotide
  Sense strand starting at position 1649 of SEQ ID NO: 1881854
cauauaguugugcaaauug

SEQ ID NO: 2076443 - RNA, 19 nt, Artificial Sequence
  Description of Artificial Sequence: Synthetic oligonucleotide
  Antisense strand to SEQ ID NO: 2076442
caauuugcacaacuauaug

SEQ ID NO: 2076444 - RNA, 19 nt, Artificial Sequence
  Description of Artificial Sequence: Synthetic oligonucleotide
  Sense strand starting at position 2038 of SEQ ID NO: 1881854
gugacaagcagugauuaua

SEQ ID NO: 2076445 - RNA, 19 nt, Artificial Sequence
  Description of Artificial Sequence: Synthetic oligonucleotide
  Antisense strand to SEQ ID NO: 2076444
uauaaucacugcuugucac

SEQ ID NO: 2076446 - RNA, 19 nt, Artificial Sequence
  Description of Artificial Sequence: Synthetic oligonucleotide
  Sense strand starting at position 2110 of SEQ ID NO: 1881854
guuuauugcaaaggaaaga

SEQ ID NO: 2076447 - RNA, 19 nt, Artificial Sequence
  Description of Artificial Sequence: Synthetic oligonucleotide
  Antisense strand to SEQ ID NO: 2076446
ucuuuccuuugcaauaaac

SEQ ID NO: 2076448 - RNA, 19 nt, Artificial Sequence
  Description of Artificial Sequence: Synthetic oligonucleotide
  Sense strand starting at position 2299 of SEQ ID NO: 1881854
gcugauauacgcuauagaa

SEQ ID NO: 2076449 - RNA, 19 nt, Artificial Sequence
  Description of Artificial Sequence: Synthetic oligonucleotide
  Antisense strand to SEQ ID NO: 2076448
uucuauagcguauaucagc

SEQ ID NO: 2076450 - RNA, 19 nt, Artificial Sequence
  Description of Artificial Sequence: Synthetic oligonucleotide
  Sense strand starting at position 2301 of SEQ ID NO: 1881854
ugauauacgcuauagaagu

SEQ ID NO: 2076451 - RNA, 19 nt, Artificial Sequence
  Description of Artificial Sequence: Synthetic oligonucleotide
  Antisense strand to SEQ ID NO: 2076450
acuucuauagcguauauca

SEQ ID NO: 2076452 - RNA, 19 nt, Artificial Sequence
  Description of Artificial Sequence: Synthetic oligonucleotide
  Sense strand starting at position 2307 of SEQ ID NO: 1881854
acgcuauagaaguaagauu

SEQ ID NO: 2076453 - RNA, 19 nt, Artificial Sequence
  Description of Artificial Sequence: Synthetic oligonucleotide
  Antisense strand to SEQ ID NO: 2076452
aaucuuacuucuauagcgu

SEQ ID NO: 2076454 - RNA, 19 nt, Artificial Sequence
  Description of Artificial Sequence: Synthetic oligonucleotide
  Sense strand starting at position 2352 of SEQ ID NO: 1881854
agguucuuuguuuaaucua

SEQ ID NO: 2076455 - RNA, 19 nt, Artificial Sequence
  Description of Artificial Sequence: Synthetic oligonucleotide
  Antisense strand to SEQ ID NO: 2076454
uagauuaaacaaagaaccu

SEQ ID NO: 2076456 - RNA, 19 nt, Artificial Sequence
  Description of Artificial Sequence: Synthetic oligonucleotide
  Sense strand starting at position 2517 of SEQ ID NO: 1881854
agaagaaacuaagaagaua

SEQ ID NO: 2076457 - RNA, 19 nt, Artificial Sequence
  Description of Artificial Sequence: Synthetic oligonucleotide
  Antisense strand to SEQ ID NO: 2076456
uaucuucuuaguuucuucu

SEQ ID NO: 2076458 - RNA, 19 nt, Artificial Sequence
  Description of Artificial Sequence: Synthetic oligonucleotide
  Sense strand starting at position 2564 of SEQ ID NO: 1881854
gaaggaaauuagcuagcau

SEQ ID NO: 2076459 - RNA, 19 nt, Artificial Sequence
  Description of Artificial Sequence: Synthetic oligonucleotide
  Antisense strand to SEQ ID NO: 2076458
augcuagcuaauuuccuuc

SEQ ID NO: 2076460 - RNA, 19 nt, Artificial Sequence
  Description of Artificial Sequence: Synthetic oligonucleotide
  Sense strand starting at position 2571 of SEQ ID NO: 1881854
auuagcuagcauggaaaua

SEQ ID NO: 2076461 - RNA, 19 nt, Artificial Sequence
  Description of Artificial Sequence: Synthetic oligonucleotide
  Antisense strand to SEQ ID NO: 2076460
uauuuccaugcuagcuaau

SEQ ID NO: 2076462 - RNA, 19 nt, Artificial Sequence
  Description of Artificial Sequence: Synthetic oligonucleotide
  Sense strand starting at position 2627 of SEQ ID NO: 1881854
aaguuaguggagcauauua

SEQ ID NO: 2076463 - RNA, 19 nt, Artificial Sequence
  Description of Artificial Sequence: Synthetic oligonucleotide
  Antisense strand to SEQ ID NO: 2076462
uaauaugcuccacuaacuu

SEQ ID NO: 2076464 - RNA, 19 nt, Artificial Sequence
  Description of Artificial Sequence: Synthetic oligonucleotide
  Sense strand starting at position 2872 of SEQ ID NO: 1881854
acaagaucucgugagagcu

SEQ ID NO: 2076465 - RNA, 19 nt, Artificial Sequence
  Description of Artificial Sequence: Synthetic oligonucleotide
  Antisense strand to SEQ ID NO: 2076464
agcucucacgagaucuugu

SEQ ID NO: 2076466 - RNA, 19 nt, Artificial Sequence
  Description of Artificial Sequence: Synthetic oligonucleotide
  Sense strand starting at position 2998 of SEQ ID NO: 1881854
gguguuaacacagagcuaa

SEQ ID NO: 2076467 - RNA, 19 nt, Artificial Sequence
  Description of Artificial Sequence: Synthetic oligonucleotide
  Antisense strand to SEQ ID NO: 2076466
uuagcucuguguuaacacc

SEQ ID NO: 2076468 - RNA, 19 nt, Artificial Sequence
  Description of Artificial Sequence: Synthetic oligonucleotide
  Sense strand starting at position 3036 of SEQ ID NO: 1881854
cauguaaggcccuggagaa

SEQ ID NO: 2076469 - RNA, 19 nt, Artificial Sequence
  Description of Artificial Sequence: Synthetic oligonucleotide
  Antisense strand to SEQ ID NO: 2076468
uucuccagggccuuacaug

SEQ ID NO: 2076470 - RNA, 19 nt, Artificial Sequence
  Description of Artificial Sequence: Synthetic oligonucleotide
  Sense strand starting at position 3090 of SEQ ID NO: 1881854
ugggacugauguuccugaa

SEQ ID NO: 2076471 - RNA, 19 nt, Artificial Sequence
  Description of Artificial Sequence: Synthetic oligonucleotide
  Antisense strand to SEQ ID NO: 2076470
uucaggaacaucaguccca

SEQ ID NO: 2076472 - RNA, 19 nt, Artificial Sequence
  Description of Artificial Sequence: Synthetic oligonucleotide
  Sense strand starting at position 3127 of SEQ ID NO: 1881854
guguuugucagggaucaag

SEQ ID NO: 2076473 - RNA, 19 nt, Artificial Sequence
  Description of Artificial Sequence: Synthetic oligonucleotide
  Antisense strand to SEQ ID NO: 2076472
cuugaucccugacaaacac

SEQ ID NO: 2076474 - RNA, 19 nt, Artificial Sequence
  Description of Artificial Sequence: Synthetic oligonucleotide
  Sense strand starting at position 3145 of SEQ ID NO: 1881854
gguggaauguaagcaauga

SEQ ID NO: 2076475 - RNA, 19 nt, Artificial Sequence
  Description of Artificial Sequence: Synthetic oligonucleotide
  Antisense strand to SEQ ID NO: 2076474
ucauugcuuacauuccacc

SEQ ID NO: 2076476 - RNA, 19 nt, Artificial Sequence
  Description of Artificial Sequence: Synthetic oligonucleotide
  Sense strand starting at position 3196 of SEQ ID NO: 1881854
ggguuauauucuguauaaa

SEQ ID NO: 2076477 - RNA, 19 nt, Artificial Sequence
  Description of Artificial Sequence: Synthetic oligonucleotide
  Antisense strand to SEQ ID NO: 2076476
uuuauacagaauauaaccc

SEQ ID NO: 2076478 - RNA, 19 nt, Artificial Sequence
  Description of Artificial Sequence: Synthetic oligonucleotide
  Sense strand starting at position 3270 of SEQ ID NO: 1881854
uggauugcuuaacuacaga

SEQ ID NO: 2076479 - RNA, 19 nt, Artificial Sequence
  Description of Artificial Sequence: Synthetic oligonucleotide
  Antisense strand to SEQ ID NO: 2076478
ucuguaguuaagcaaucca

SEQ ID NO: 2076480 - RNA, 19 nt, Artificial Sequence
  Description of Artificial Sequence: Synthetic oligonucleotide
  Sense strand starting at position 3275 of SEQ ID NO: 1881854
ugcuuaacuacagaggagu

SEQ ID NO: 2076481 - RNA, 19 nt, Artificial Sequence
  Description of Artificial Sequence: Synthetic oligonucleotide
  Antisense strand to SEQ ID NO: 2076480
acuccucuguaguuaagca

SEQ ID NO: 2076482 - RNA, 19 nt, Artificial Sequence
  Description of Artificial Sequence: Synthetic oligonucleotide
  Sense strand starting at position 3423 of SEQ ID NO: 1881854
ugggcucugaacuagacuu

SEQ ID NO: 2076483 - RNA, 19 nt, Artificial Sequence
  Description of Artificial Sequence: Synthetic oligonucleotide
  Antisense strand to SEQ ID NO: 2076482
aagucuaguucagagccca

SEQ ID NO: 2076484 - RNA, 19 nt, Artificial Sequence
  Description of Artificial Sequence: Synthetic oligonucleotide
  Sense strand starting at position 3425 of SEQ ID NO: 1881854
ggcucugaacuagacuuau

SEQ ID NO: 2076485 - RNA, 19 nt, Artificial Sequence
  Description of Artificial Sequence: Synthetic oligonucleotide
  Antisense strand to SEQ ID NO: 2076484
auaagucuaguucagagcc

SEQ ID NO: 2076486 - RNA, 19 nt, Artificial Sequence
  Description of Artificial Sequence: Synthetic oligonucleotide
  Sense strand starting at position 3509 of SEQ ID NO: 1881854
ugcugaauucugggaagag

SEQ ID NO: 2076487 - RNA, 19 nt, Artificial Sequence
  Description of Artificial Sequence: Synthetic oligonucleotide
  Antisense strand to SEQ ID NO: 2076486
cucuucccagaauucagca

SEQ ID NO: 2076488 - RNA, 19 nt, Artificial Sequence
  Description of Artificial Sequence: Synthetic oligonucleotide
  Sense strand starting at position 3877 of SEQ ID NO: 1881854
ggacaaauuucucagggca

SEQ ID NO: 2076489 - RNA, 19 nt, Artificial Sequence
  Description of Artificial Sequence: Synthetic oligonucleotide
  Antisense strand to SEQ ID NO: 2076488
ugcccugagaaauuugucc

SEQ ID NO: 2076490 - RNA, 19 nt, Artificial Sequence
  Description of Artificial Sequence: Synthetic oligonucleotide
  Sense strand starting at position 3927 of SEQ ID NO: 1881854
acuggauugcuuuauggau

SEQ ID NO: 2076491 - RNA, 19 nt, Artificial Sequence
  Description of Artificial Sequence: Synthetic oligonucleotide
  Antisense strand to SEQ ID NO: 2076490
auccauaaagcaauccagu

SEQ ID NO: 2076492 - RNA, 19 nt, Artificial Sequence
  Description of Artificial Sequence: Synthetic oligonucleotide
  Sense strand starting at position 156 of SEQ ID NO: 1881855
auagcaauacuaugggagu

SEQ ID NO: 2076493 - RNA, 19 nt, Artificial Sequence
  Description of Artificial Sequence: Synthetic oligonucleotide
  Antisense strand to SEQ ID NO: 2076492
acucccauaguauugcuau

SEQ ID NO: 2076494 - RNA, 19 nt, Artificial Sequence
  Description of Artificial Sequence: Synthetic oligonucleotide
  Sense strand starting at position 162 of SEQ ID NO: 1881855
auacuaugggaguggcauu

SEQ ID NO: 2076495 - RNA, 19 nt, Artificial Sequence
  Description of Artificial Sequence: Synthetic oligonucleotide
  Antisense strand to SEQ ID NO: 2076494
aaugccacucccauaguau

SEQ ID NO: 2076496 - RNA, 19 nt, Artificial Sequence
  Description of Artificial Sequence: Synthetic oligonucleotide
  Sense strand starting at position 199 of SEQ ID NO: 1881855
ugguaaguuccuuaacccu

SEQ ID NO: 2076497 - RNA, 19 nt, Artificial Sequence
  Description of Artificial Sequence: Synthetic oligonucleotide
  Antisense strand to SEQ ID NO: 2076496
aggguuaaggaacuuacca

SEQ ID NO: 2076498 - RNA, 19 nt, Artificial Sequence
  Description of Artificial Sequence: Synthetic oligonucleotide
  Sense strand starting at position 229 of SEQ ID NO: 1881855
agagauaguuaaucauucu

SEQ ID NO: 2076499 - RNA, 19 nt, Artificial Sequence
  Description of Artificial Sequence: Synthetic oligonucleotide
  Antisense strand to SEQ ID NO: 2076498
agaaugauuaacuaucucu

SEQ ID NO: 2076500 - RNA, 19 nt, Artificial Sequence
  Description of Artificial Sequence: Synthetic oligonucleotide
  Sense strand starting at position 580 of SEQ ID NO: 1881855
gucgcuauugauuaucaga

SEQ ID NO: 2076501 - RNA, 19 nt, Artificial Sequence
  Description of Artificial Sequence: Synthetic oligonucleotide
  Antisense strand to SEQ ID NO: 2076500
ucugauaaucaauagcgac

SEQ ID NO: 2076502 - RNA, 19 nt, Artificial Sequence
  Description of Artificial Sequence: Synthetic oligonucleotide
  Sense strand starting at position 582 of SEQ ID NO: 1881855
cgcuauugauuaucagaua

SEQ ID NO: 2076503 - RNA, 19 nt, Artificial Sequence
  Description of Artificial Sequence: Synthetic oligonucleotide
  Antisense strand to SEQ ID NO: 2076502
uaucugauaaucaauagcg

SEQ ID NO: 2076504 - RNA, 19 nt, Artificial Sequence
  Description of Artificial Sequence: Synthetic oligonucleotide
  Sense strand starting at position 630 of SEQ ID NO: 1881855
cuacuugaccauugaugag

SEQ ID NO: 2076505 - RNA, 19 nt, Artificial Sequence
  Description of Artificial Sequence: Synthetic oligonucleotide
  Antisense strand to SEQ ID NO: 2076504
cucaucaauggucaaguag

SEQ ID NO: 2076506 - RNA, 19 nt, Artificial Sequence
  Description of Artificial Sequence: Synthetic oligonucleotide
  Sense strand starting at position 747 of SEQ ID NO: 1881855
ggacucuuccaaggaagcu

SEQ ID NO: 2076507 - RNA, 19 nt, Artificial Sequence
  Description of Artificial Sequence: Synthetic oligonucleotide
  Antisense strand to SEQ ID NO: 2076506
agcuuccuuggaagagucc

SEQ ID NO: 2076508 - RNA, 19 nt, Artificial Sequence
  Description of Artificial Sequence: Synthetic oligonucleotide
  Sense strand starting at position 886 of SEQ ID NO: 1881855
cugaaauguugacugagua

SEQ ID NO: 2076509 - RNA, 19 nt, Artificial Sequence
  Description of Artificial Sequence: Synthetic oligonucleotide
  Antisense strand to SEQ ID NO: 2076508
uacucagucaacauuucag

SEQ ID NO: 2076510 - RNA, 19 nt, Artificial Sequence
  Description of Artificial Sequence: Synthetic oligonucleotide
  Sense strand starting at position 887 of SEQ ID NO: 1881855
ugaaauguugacugaguaa

SEQ ID NO: 2076511 - RNA, 19 nt, Artificial Sequence
  Description of Artificial Sequence: Synthetic oligonucleotide
  Antisense strand to SEQ ID NO: 2076510
uuacucagucaacauuuca

SEQ ID NO: 2076512 - RNA, 19 nt, Artificial Sequence
  Description of Artificial Sequence: Synthetic oligonucleotide
  Sense strand starting at position 1024 of SEQ ID NO: 1881855
ugaguuaaauacuuguuga

SEQ ID NO: 2076513 - RNA, 19 nt, Artificial Sequence
  Description of Artificial Sequence: Synthetic oligonucleotide
  Antisense strand to SEQ ID NO: 2076512
ucaacaaguauuuaacuca

SEQ ID NO: 2076514 - RNA, 19 nt, Artificial Sequence
  Description of Artificial Sequence: Synthetic oligonucleotide
  Sense strand starting at position 1027 of SEQ ID NO: 1881855
guuaaauacuuguugaauc

SEQ ID NO: 2076515 - RNA, 19 nt, Artificial Sequence
  Description of Artificial Sequence: Synthetic oligonucleotide
  Antisense strand to SEQ ID NO: 2076514
gauucaacaaguauuuaac

SEQ ID NO: 2076516 - RNA, 19 nt, Artificial Sequence
  Description of Artificial Sequence: Synthetic oligonucleotide
  Sense strand starting at position 1038 of SEQ ID NO: 1881855
guugaauccuaaucuagaa

SEQ ID NO: 2076517 - RNA, 19 nt, Artificial Sequence
  Description of Artificial Sequence: Synthetic oligonucleotide
  Antisense strand to SEQ ID NO: 2076516
uucuagauuaggauucaac

SEQ ID NO: 2076518 - RNA, 19 nt, Artificial Sequence
  Description of Artificial Sequence: Synthetic oligonucleotide
  Sense strand starting at position 1090 of SEQ ID NO: 1881855
gguaauuagcuuugagacu

SEQ ID NO: 2076519 - RNA, 19 nt, Artificial Sequence
  Description of Artificial Sequence: Synthetic oligonucleotide
  Antisense strand to SEQ ID NO: 2076518
agucucaaagcuaauuacc

SEQ ID NO: 2076520 - RNA, 19 nt, Artificial Sequence
  Description of Artificial Sequence: Synthetic oligonucleotide
  Sense strand starting at position 1225 of SEQ ID NO: 1881855
augggauugugggccagua

SEQ ID NO: 2076521 - RNA, 19 nt, Artificial Sequence
  Description of Artificial Sequence: Synthetic oligonucleotide
  Antisense strand to SEQ ID NO: 2076520
uacuggcccacaaucccau

SEQ ID NO: 2076522 - RNA, 19 nt, Artificial Sequence
  Description of Artificial Sequence: Synthetic oligonucleotide
  Sense strand starting at position 1227 of SEQ ID NO: 1881855
gggauugugggccaguaau

SEQ ID NO: 2076523 - RNA, 19 nt, Artificial Sequence
  Description of Artificial Sequence: Synthetic oligonucleotide
  Antisense strand to SEQ ID NO: 2076522
auuacuggcccacaauccc

SEQ ID NO: 2076524 - RNA, 19 nt, Artificial Sequence
  Description of Artificial Sequence: Synthetic oligonucleotide
  Sense strand starting at position 1255 of SEQ ID NO: 1881855
cuuuauagauucuucgaaa

SEQ ID NO: 2076525 - RNA, 19 nt, Artificial Sequence
  Description of Artificial Sequence: Synthetic oligonucleotide
  Antisense strand to SEQ ID NO: 2076524
uuucgaagaaucuauaaag

SEQ ID NO: 2076526 - RNA, 19 nt, Artificial Sequence
  Description of Artificial Sequence: Synthetic oligonucleotide
  Sense strand starting at position 1256 of SEQ ID NO: 1881855
uuuauagauucuucgaaag

SEQ ID NO: 2076527 - RNA, 19 nt, Artificial Sequence
  Description of Artificial Sequence: Synthetic oligonucleotide
  Antisense strand to SEQ ID NO: 2076526
cuuucgaagaaucuauaaa

SEQ ID NO: 2076528 - RNA, 19 nt, Artificial Sequence
  Description of Artificial Sequence: Synthetic oligonucleotide
  Sense strand starting at position 1334 of SEQ ID NO: 1881855
acauuaaugcugcagagag

SEQ ID NO: 2076529 - RNA, 19 nt, Artificial Sequence
  Description of Artificial Sequence: Synthetic oligonucleotide
  Antisense strand to SEQ ID NO: 2076528
cucucugcagcauuaaugu

SEQ ID NO: 2076530 - RNA, 19 nt, Artificial Sequence
  Description of Artificial Sequence: Synthetic oligonucleotide
  Sense strand starting at position 1353 of SEQ ID NO: 1881855
gcagguucugagugagaca

SEQ ID NO: 2076531 - RNA, 19 nt, Artificial Sequence
  Description of Artificial Sequence: Synthetic oligonucleotide
  Antisense strand to SEQ ID NO: 2076530
ugucucacucagaaccugc

SEQ ID NO: 2076532 - RNA, 19 nt, Artificial Sequence
  Description of Artificial Sequence: Synthetic oligonucleotide
  Sense strand starting at position 1557 of SEQ ID NO: 1881855
agauuugauucccaagcua

SEQ ID NO: 2076533 - RNA, 19 nt, Artificial Sequence
  Description of Artificial Sequence: Synthetic oligonucleotide
  Antisense strand to SEQ ID NO: 2076532
uagcuugggaaucaaaucu

SEQ ID NO: 2076534 - RNA, 19 nt, Artificial Sequence
  Description of Artificial Sequence: Synthetic oligonucleotide
  Sense strand starting at position 1598 of SEQ ID NO: 1881855
gcuacaaauccugggaaau

SEQ ID NO: 2076535 - RNA, 19 nt, Artificial Sequence
  Description of Artificial Sequence: Synthetic oligonucleotide
  Antisense strand to SEQ ID NO: 2076534
auuucccaggauuuguagc

SEQ ID NO: 2076536 - RNA, 19 nt, Artificial Sequence
  Description of Artificial Sequence: Synthetic oligonucleotide
  Sense strand starting at position 1747 of SEQ ID NO: 1881855
cuuggauuccuccagcaau

SEQ ID NO: 2076537 - RNA, 19 nt, Artificial Sequence
  Description of Artificial Sequence: Synthetic oligonucleotide
  Antisense strand to SEQ ID NO: 2076536
auugcuggaggaauccaag

SEQ ID NO: 2076538 - RNA, 19 nt, Artificial Sequence
  Description of Artificial Sequence: Synthetic oligonucleotide
  Sense strand starting at position 2179 of SEQ ID NO: 1881855
caaaguaaagcaggucaua

SEQ ID NO: 2076539 - RNA, 19 nt, Artificial Sequence
  Description of Artificial Sequence: Synthetic oligonucleotide
  Antisense strand to SEQ ID NO: 2076538
uaugaccugcuuuacuuug

SEQ ID NO: 2076540 - RNA, 19 nt, Artificial Sequence
  Description of Artificial Sequence: Synthetic oligonucleotide
  Sense strand starting at position 2244 of SEQ ID NO: 1881855
ugaagucuuccuuauggac

SEQ ID NO: 2076541 - RNA, 19 nt, Artificial Sequence
  Description of Artificial Sequence: Synthetic oligonucleotide
  Antisense strand to SEQ ID NO: 2076540
guccauaaggaagacuuca

SEQ ID NO: 2076542 - RNA, 19 nt, Artificial Sequence
  Description of Artificial Sequence: Synthetic oligonucleotide
  Sense strand starting at position 2773 of SEQ ID NO: 1881855
ggcccaaaugcccaguuaa

SEQ ID NO: 2076543 - RNA, 19 nt, Artificial Sequence
  Description of Artificial Sequence: Synthetic oligonucleotide
  Antisense strand to SEQ ID NO: 2076542
uuaacugggcauuugggcc

SEQ ID NO: 2076544 - RNA, 19 nt, Artificial Sequence
  Description of Artificial Sequence: Synthetic oligonucleotide
  Sense strand starting at position 2810 of SEQ ID NO: 1881855
ggguguuggcugaguguuu

SEQ ID NO: 2076545 - RNA, 19 nt, Artificial Sequence
  Description of Artificial Sequence: Synthetic oligonucleotide
  Antisense strand to SEQ ID NO: 2076544
aaacacucagccaacaccc

SEQ ID NO: 2076546 - RNA, 19 nt, Artificial Sequence
  Description of Artificial Sequence: Synthetic oligonucleotide
  Sense strand starting at position 3132 of SEQ ID NO: 1881855
auuucucugcuuugguaua

SEQ ID NO: 2076547 - RNA, 19 nt, Artificial Sequence
  Description of Artificial Sequence: Synthetic oligonucleotide
  Antisense strand to SEQ ID NO: 2076546
uauaccaaagcagagaaau

SEQ ID NO: 2076548 - RNA, 19 nt, Artificial Sequence
  Description of Artificial Sequence: Synthetic oligonucleotide
  Sense strand starting at position 3166 of SEQ ID NO: 1881855
ugggauuugugugaaauau

SEQ ID NO: 2076549 - RNA, 19 nt, Artificial Sequence
  Description of Artificial Sequence: Synthetic oligonucleotide
  Antisense strand to SEQ ID NO: 2076548
auauuucacacaaauccca

SEQ ID NO: 2076550 - RNA, 19 nt, Artificial Sequence
  Description of Artificial Sequence: Synthetic oligonucleotide
  Sense strand starting at position 3296 of SEQ ID NO: 1881855
gauuucacugaguggcgua

SEQ ID NO: 2076551 - RNA, 19 nt, Artificial Sequence
  Description of Artificial Sequence: Synthetic oligonucleotide
  Antisense strand to SEQ ID NO: 2076550
uacgccacucagugaaauc

SEQ ID NO: 2076552 - RNA, 19 nt, Artificial Sequence
  Description of Artificial Sequence: Synthetic oligonucleotide
  Sense strand starting at position 3338 of SEQ ID NO: 1881855
uggcaaacacaguguugau

SEQ ID NO: 2076553 - RNA, 19 nt, Artificial Sequence
  Description of Artificial Sequence: Synthetic oligonucleotide
  Antisense strand to SEQ ID NO: 2076552
aucaacacuguguuugcca

SEQ ID NO: 2076554 - RNA, 19 nt, Artificial Sequence
  Description of Artificial Sequence: Synthetic oligonucleotide
  Sense strand starting at position 3348 of SEQ ID NO: 1881855
aguguugaucuauacuugu

SEQ ID NO: 2076555 - RNA, 19 nt, Artificial Sequence
  Description of Artificial Sequence: Synthetic oligonucleotide
  Antisense strand to SEQ ID NO: 2076554
acaaguauagaucaacacu

SEQ ID NO: 2076556 - RNA, 19 nt, Artificial Sequence
  Description of Artificial Sequence: Synthetic oligonucleotide
  Sense strand starting at position 3467 of SEQ ID NO: 1881855
ggaugcaggguuuauguca

SEQ ID NO: 2076557 - RNA, 19 nt, Artificial Sequence
  Description of Artificial Sequence: Synthetic oligonucleotide
  Antisense strand to SEQ ID NO: 2076556
ugacauaaacccugcaucc

SEQ ID NO: 2076558 - RNA, 19 nt, Artificial Sequence
  Description of Artificial Sequence: Synthetic oligonucleotide
  Sense strand starting at position 3595 of SEQ ID NO: 1881855
ugcuaaacagcucaauguu

SEQ ID NO: 2076559 - RNA, 19 nt, Artificial Sequence
  Description of Artificial Sequence: Synthetic oligonucleotide
  Antisense strand to SEQ ID NO: 2076558
aacauugagcuguuuagca

SEQ ID NO: 2076560 - RNA, 19 nt, Artificial Sequence
  Description of Artificial Sequence: Synthetic oligonucleotide
  Sense strand starting at position 3616 of SEQ ID NO: 1881855
guucuccauccucaguaau

SEQ ID NO: 2076561 - RNA, 19 nt, Artificial Sequence
  Description of Artificial Sequence: Synthetic oligonucleotide
  Antisense strand to SEQ ID NO: 2076560
auuacugaggauggagaac

SEQ ID NO: 2076562 - RNA, 19 nt, Artificial Sequence
  Description of Artificial Sequence: Synthetic oligonucleotide
  Sense strand starting at position 3627 of SEQ ID NO: 1881855
ucaguaauauucuugucac

SEQ ID NO: 2076563 - RNA, 19 nt, Artificial Sequence
  Description of Artificial Sequence: Synthetic oligonucleotide
  Antisense strand to SEQ ID NO: 2076562
gugacaagaauauuacuga

SEQ ID NO: 2076564 - RNA, 19 nt, Artificial Sequence
  Description of Artificial Sequence: Synthetic oligonucleotide
  Sense strand starting at position 3630 of SEQ ID NO: 1881855
guaauauucuugucacuga

SEQ ID NO: 2076565 - RNA, 19 nt, Artificial Sequence
  Description of Artificial Sequence: Synthetic oligonucleotide
  Antisense strand to SEQ ID NO: 2076564
ucagugacaagaauauuac

SEQ ID NO: 2076566 - RNA, 19 nt, Artificial Sequence
  Description of Artificial Sequence: Synthetic oligonucleotide
  Sense strand starting at position 3648 of SEQ ID NO: 1881855
agccaauggccucaucaaa

SEQ ID NO: 2076567 - RNA, 19 nt, Artificial Sequence
  Description of Artificial Sequence: Synthetic oligonucleotide
  Antisense strand to SEQ ID NO: 2076566
uuugaugaggccauuggcu

SEQ ID NO: 2076568 - RNA, 19 nt, Artificial Sequence
  Description of Artificial Sequence: Synthetic oligonucleotide
  Sense strand starting at position 3724 of SEQ ID NO: 1881855
aauuguggguucccuauaa

SEQ ID NO: 2076569 - RNA, 19 nt, Artificial Sequence
  Description of Artificial Sequence: Synthetic oligonucleotide
  Antisense strand to SEQ ID NO: 2076568
uuauagggaacccacaauu

SEQ ID NO: 2076570 - RNA, 19 nt, Artificial Sequence
  Description of Artificial Sequence: Synthetic oligonucleotide
  Sense strand starting at position 3728 of SEQ ID NO: 1881855
guggguucccuauaacaag

SEQ ID NO: 2076571 - RNA, 19 nt, Artificial Sequence
  Description of Artificial Sequence: Synthetic oligonucleotide
  Antisense strand to SEQ ID NO: 2076570
cuuguuauagggaacccac

SEQ ID NO: 2076572 - RNA, 19 nt, Artificial Sequence
  Description of Artificial Sequence: Synthetic oligonucleotide
  Sense strand starting at position 70 of SEQ ID NO: 1881856
cagaaacuacucuggaugu

SEQ ID NO: 2076573 - RNA, 19 nt, Artificial Sequence
  Description of Artificial Sequence: Synthetic oligonucleotide
  Antisense strand to SEQ ID NO: 2076572
acauccagaguaguuucug

SEQ ID NO: 2076574 - RNA, 19 nt, Artificial Sequence
  Description of Artificial Sequence: Synthetic oligonucleotide
  Sense strand starting at position 112 of SEQ ID NO: 1881856
gaaagaauguuaccaaggu

SEQ ID NO: 2076575 - RNA, 19 nt, Artificial Sequence
  Description of Artificial Sequence: Synthetic oligonucleotide
  Antisense strand to SEQ ID NO: 2076574
accuugguaacauucuuuc

SEQ ID NO: 2076576 - RNA, 19 nt, Artificial Sequence
  Description of Artificial Sequence: Synthetic oligonucleotide
  Sense strand starting at position 735 of SEQ ID NO: 1881856
ugguuucugagaggaauac

SEQ ID NO: 2076577 - RNA, 19 nt, Artificial Sequence
  Description of Artificial Sequence: Synthetic oligonucleotide
  Antisense strand to SEQ ID NO: 2076576
guauuccucucagaaacca

SEQ ID NO: 2076578 - RNA, 19 nt, Artificial Sequence
  Description of Artificial Sequence: Synthetic oligonucleotide
  Sense strand starting at position 863 of SEQ ID NO: 1881856
gguugauugaauuggucaa

SEQ ID NO: 2076579 - RNA, 19 nt, Artificial Sequence
  Description of Artificial Sequence: Synthetic oligonucleotide
  Antisense strand to SEQ ID NO: 2076578
uugaccaauucaaucaacc

SEQ ID NO: 2076580 - RNA, 19 nt, Artificial Sequence
  Description of Artificial Sequence: Synthetic oligonucleotide
  Sense strand starting at position 864 of SEQ ID NO: 1881856
guugauugaauuggucaaa

SEQ ID NO: 2076581 - RNA, 19 nt, Artificial Sequence
  Description of Artificial Sequence: Synthetic oligonucleotide
  Antisense strand to SEQ ID NO: 2076580
uuugaccaauucaaucaac

SEQ ID NO: 2076582 - RNA, 19 nt, Artificial Sequence
  Description of Artificial Sequence: Synthetic oligonucleotide
  Sense strand starting at position 865 of SEQ ID NO: 1881856
uugauugaauuggucaaau

SEQ ID NO: 2076583 - RNA, 19 nt, Artificial Sequence
  Description of Artificial Sequence: Synthetic oligonucleotide
  Antisense strand to SEQ ID NO: 2076582
auuugaccaauucaaucaa

SEQ ID NO: 2076584 - RNA, 19 nt, Artificial Sequence
  Description of Artificial Sequence: Synthetic oligonucleotide
  Sense strand starting at position 882 of SEQ ID NO: 1881856
auaaauguucucuggacac

SEQ ID NO: 2076585 - RNA, 19 nt, Artificial Sequence
  Description of Artificial Sequence: Synthetic oligonucleotide
  Antisense strand to SEQ ID NO: 2076584
guguccagagaacauuuau

SEQ ID NO: 2076586 - RNA, 19 nt, Artificial Sequence
  Description of Artificial Sequence: Synthetic oligonucleotide
  Sense strand starting at position 1200 of SEQ ID NO: 1881856
aggaguugauagcuacuaa

SEQ ID NO: 2076587 - RNA, 19 nt, Artificial Sequence
  Description of Artificial Sequence: Synthetic oligonucleotide
  Antisense strand to SEQ ID NO: 2076586
uuaguagcuaucaacuccu

SEQ ID NO: 2076588 - RNA, 19 nt, Artificial Sequence
  Description of Artificial Sequence: Synthetic oligonucleotide
  Sense strand starting at position 1390 of SEQ ID NO: 1881856
uugcaucagcucuaagauu

SEQ ID NO: 2076589 - RNA, 19 nt, Artificial Sequence
  Description of Artificial Sequence: Synthetic oligonucleotide
  Antisense strand to SEQ ID NO: 2076588
aaucuuagagcugaugcaa

SEQ ID NO: 2076590 - RNA, 19 nt, Artificial Sequence
  Description of Artificial Sequence: Synthetic oligonucleotide
  Sense strand starting at position 1470 of SEQ ID NO: 1881856
uaagguuaccuugaagugu

SEQ ID NO: 2076591 - RNA, 19 nt, Artificial Sequence
  Description of Artificial Sequence: Synthetic oligonucleotide
  Antisense strand to SEQ ID NO: 2076590
acacuucaagguaaccuua

SEQ ID NO: 2076592 - RNA, 19 nt, Artificial Sequence
  Description of Artificial Sequence: Synthetic oligonucleotide
  Sense strand starting at position 2019 of SEQ ID NO: 1881856
gaccacugugcucaacaga

SEQ ID NO: 2076593 - RNA, 19 nt, Artificial Sequence
  Description of Artificial Sequence: Synthetic oligonucleotide
  Antisense strand to SEQ ID NO: 2076592
ucuguugagcacagugguc

SEQ ID NO: 2076594 - RNA, 19 nt, Artificial Sequence
  Description of Artificial Sequence: Synthetic oligonucleotide
  Sense strand starting at position 2181 of SEQ ID NO: 1881856
gggacaguuguccagcuca

SEQ ID NO: 2076595 - RNA, 19 nt, Artificial Sequence
  Description of Artificial Sequence: Synthetic oligonucleotide
  Antisense strand to SEQ ID NO: 2076594
ugagcuggacaacuguccc

SEQ ID NO: 2076596 - RNA, 19 nt, Artificial Sequence
  Description of Artificial Sequence: Synthetic oligonucleotide
  Sense strand starting at position 2186 of SEQ ID NO: 1881856
aguuguccagcucaugaaa

SEQ ID NO: 2076597 - RNA, 19 nt, Artificial Sequence
  Description of Artificial Sequence: Synthetic oligonucleotide
  Antisense strand to SEQ ID NO: 2076596
uuucaugagcuggacaacu

SEQ ID NO: 2076598 - RNA, 19 nt, Artificial Sequence
  Description of Artificial Sequence: Synthetic oligonucleotide
  Sense strand starting at position 2189 of SEQ ID NO: 1881856
uguccagcucaugaaagau

SEQ ID NO: 2076599 - RNA, 19 nt, Artificial Sequence
  Description of Artificial Sequence: Synthetic oligonucleotide
  Antisense strand to SEQ ID NO: 2076598
aucuuucaugagcuggaca

SEQ ID NO: 2076600 - RNA, 19 nt, Artificial Sequence
  Description of Artificial Sequence: Synthetic oligonucleotide
  Sense strand starting at position 2387 of SEQ ID NO: 1881856
ugggcuuaauuugaaauga

SEQ ID NO: 2076601 - RNA, 19 nt, Artificial Sequence
  Description of Artificial Sequence: Synthetic oligonucleotide
  Antisense strand to SEQ ID NO: 2076600
ucauuucaaauuaagccca

SEQ ID NO: 2076602 - RNA, 19 nt, Artificial Sequence
  Description of Artificial Sequence: Synthetic oligonucleotide
  Sense strand starting at position 2511 of SEQ ID NO: 1881856
ugauuucgauuguuucuca

SEQ ID NO: 2076603 - RNA, 19 nt, Artificial Sequence
  Description of Artificial Sequence: Synthetic oligonucleotide
  Antisense strand to SEQ ID NO: 2076602
ugagaaacaaucgaaauca

SEQ ID NO: 2076604 - RNA, 19 nt, Artificial Sequence
  Description of Artificial Sequence: Synthetic oligonucleotide
  Sense strand starting at position 2512 of SEQ ID NO: 1881856
gauuucgauuguuucucau

SEQ ID NO: 2076605 - RNA, 19 nt, Artificial Sequence
  Description of Artificial Sequence: Synthetic oligonucleotide
  Antisense strand to SEQ ID NO: 2076604
augagaaacaaucgaaauc

SEQ ID NO: 2076606 - RNA, 19 nt, Artificial Sequence
  Description of Artificial Sequence: Synthetic oligonucleotide
  Sense strand starting at position 2514 of SEQ ID NO: 1881856
uuucgauuguuucucauuu

SEQ ID NO: 2076607 - RNA, 19 nt, Artificial Sequence
  Description of Artificial Sequence: Synthetic oligonucleotide
  Antisense strand to SEQ ID NO: 2076606
aaaugagaaacaaucgaaa

SEQ ID NO: 2076608 - RNA, 19 nt, Artificial Sequence
  Description of Artificial Sequence: Synthetic oligonucleotide
  Sense strand starting at position 2550 of SEQ ID NO: 1881856
agaaaucaaucccuagugu

SEQ ID NO: 2076609 - RNA, 19 nt, Artificial Sequence
  Description of Artificial Sequence: Synthetic oligonucleotide
  Antisense strand to SEQ ID NO: 2076608
acacuagggauugauuucu

SEQ ID NO: 2076610 - RNA, 19 nt, Artificial Sequence
  Description of Artificial Sequence: Synthetic oligonucleotide
  Sense strand starting at position 2635 of SEQ ID NO: 1881856
cagguuccugacuagucau

SEQ ID NO: 2076611 - RNA, 19 nt, Artificial Sequence
  Description of Artificial Sequence: Synthetic oligonucleotide
  Antisense strand to SEQ ID NO: 2076610
augacuagucaggaaccug

SEQ ID NO: 2076612 - RNA, 19 nt, Artificial Sequence
  Description of Artificial Sequence: Synthetic oligonucleotide
  Sense strand starting at position 2655 of SEQ ID NO: 1881856
cacugcugucaggacuuaa

SEQ ID NO: 2076613 - RNA, 19 nt, Artificial Sequence
  Description of Artificial Sequence: Synthetic oligonucleotide
  Antisense strand to SEQ ID NO: 2076612
uuaaguccugacagcagug

SEQ ID NO: 2076614 - RNA, 19 nt, Artificial Sequence
  Description of Artificial Sequence: Synthetic oligonucleotide
  Sense strand starting at position 2659 of SEQ ID NO: 1881856
gcugucaggacuuaaggau

SEQ ID NO: 2076615 - RNA, 19 nt, Artificial Sequence
  Description of Artificial Sequence: Synthetic oligonucleotide
  Antisense strand to SEQ ID NO: 2076614
auccuuaaguccugacagc

SEQ ID NO: 2076616 - RNA, 19 nt, Artificial Sequence
  Description of Artificial Sequence: Synthetic oligonucleotide
  Sense strand starting at position 2674 of SEQ ID NO: 1881856
ggaugaugcuuaucaaggu

SEQ ID NO: 2076617 - RNA, 19 nt, Artificial Sequence
  Description of Artificial Sequence: Synthetic oligonucleotide
  Antisense strand to SEQ ID NO: 2076616
accuugauaagcaucaucc

SEQ ID NO: 2076618 - RNA, 19 nt, Artificial Sequence
  Description of Artificial Sequence: Synthetic oligonucleotide
  Sense strand starting at position 2730 of SEQ ID NO: 1881856
cagagauucuuuccugggu

SEQ ID NO: 2076619 - RNA, 19 nt, Artificial Sequence
  Description of Artificial Sequence: Synthetic oligonucleotide
  Antisense strand to SEQ ID NO: 2076618
acccaggaaagaaucucug

SEQ ID NO: 2076620 - RNA, 19 nt, Artificial Sequence
  Description of Artificial Sequence: Synthetic oligonucleotide
  Sense strand starting at position 2731 of SEQ ID NO: 1881856
agagauucuuuccugggua

SEQ ID NO: 2076621 - RNA, 19 nt, Artificial Sequence
  Description of Artificial Sequence: Synthetic oligonucleotide
  Antisense strand to SEQ ID NO: 2076620
uacccaggaaagaaucucu

SEQ ID NO: 2076622 - RNA, 19 nt, Artificial Sequence
  Description of Artificial Sequence: Synthetic oligonucleotide
  Sense strand starting at position 2733 of SEQ ID NO: 1881856
agauucuuuccuggguaga

SEQ ID NO: 2076623 - RNA, 19 nt, Artificial Sequence
  Description of Artificial Sequence: Synthetic oligonucleotide
  Antisense strand to SEQ ID NO: 2076622
ucuacccaggaaagaaucu

SEQ ID NO: 2076624 - RNA, 19 nt, Artificial Sequence
  Description of Artificial Sequence: Synthetic oligonucleotide
  Sense strand starting at position 2734 of SEQ ID NO: 1881856
gauucuuuccuggguagag

SEQ ID NO: 2076625 - RNA, 19 nt, Artificial Sequence
  Description of Artificial Sequence: Synthetic oligonucleotide
  Antisense strand to SEQ ID NO: 2076624
cucuacccaggaaagaauc

SEQ ID NO: 2076626 - RNA, 19 nt, Artificial Sequence
  Description of Artificial Sequence: Synthetic oligonucleotide
  Sense strand starting at position 2746 of SEQ ID NO: 1881856
gguagagguaccuaaaugu

SEQ ID NO: 2076627 - RNA, 19 nt, Artificial Sequence
  Description of Artificial Sequence: Synthetic oligonucleotide
  Antisense strand to SEQ ID NO: 2076626
acauuuagguaccucuacc

SEQ ID NO: 2076628 - RNA, 19 nt, Artificial Sequence
  Description of Artificial Sequence: Synthetic oligonucleotide
  Sense strand starting at position 2781 of SEQ ID NO: 1881856
gagugugauagccaccaga

SEQ ID NO: 2076629 - RNA, 19 nt, Artificial Sequence
  Description of Artificial Sequence: Synthetic oligonucleotide
  Antisense strand to SEQ ID NO: 2076628
ucugguggcuaucacacuc

SEQ ID NO: 2076630 - RNA, 19 nt, Artificial Sequence
  Description of Artificial Sequence: Synthetic oligonucleotide
  Sense strand starting at position 3301 of SEQ ID NO: 1881856
uggugaugugaaggcaaga

SEQ ID NO: 2076631 - RNA, 19 nt, Artificial Sequence
  Description of Artificial Sequence: Synthetic oligonucleotide
  Antisense strand to SEQ ID NO: 2076630
ucuugccuucacaucacca

SEQ ID NO: 2076632 - RNA, 19 nt, Artificial Sequence
  Description of Artificial Sequence: Synthetic oligonucleotide
  Sense strand starting at position 3370 of SEQ ID NO: 1881856
aguggugagguuuauucaa

SEQ ID NO: 2076633 - RNA, 19 nt, Artificial Sequence
  Description of Artificial Sequence: Synthetic oligonucleotide
  Antisense strand to SEQ ID NO: 2076632
uugaauaaaccucaccacu

SEQ ID NO: 2076634 - RNA, 19 nt, Artificial Sequence
  Description of Artificial Sequence: Synthetic oligonucleotide
  Sense strand starting at position 3507 of SEQ ID NO: 1881856
gucagagucacugggaaag

SEQ ID NO: 2076635 - RNA, 19 nt, Artificial Sequence
  Description of Artificial Sequence: Synthetic oligonucleotide
  Antisense strand to SEQ ID NO: 2076634
cuuucccagugacucugac

SEQ ID NO: 2076636 - RNA, 19 nt, Artificial Sequence
  Description of Artificial Sequence: Synthetic oligonucleotide
  Sense strand starting at position 3573 of SEQ ID NO: 1881856
ucugauaggucccugauau

SEQ ID NO: 2076637 - RNA, 19 nt, Artificial Sequence
  Description of Artificial Sequence: Synthetic oligonucleotide
  Antisense strand to SEQ ID NO: 2076636
auaucagggaccuaucaga

SEQ ID NO: 2076638 - RNA, 19 nt, Artificial Sequence
  Description of Artificial Sequence: Synthetic oligonucleotide
  Sense strand starting at position 3574 of SEQ ID NO: 1881856
cugauaggucccugauauu

SEQ ID NO: 2076639 - RNA, 19 nt, Artificial Sequence
  Description of Artificial Sequence: Synthetic oligonucleotide
  Antisense strand to SEQ ID NO: 2076638
aauaucagggaccuaucag

SEQ ID NO: 2076640 - RNA, 19 nt, Artificial Sequence
  Description of Artificial Sequence: Synthetic oligonucleotide
  Sense strand starting at position 3811 of SEQ ID NO: 1881856
guggcuuucgaauacauga

SEQ ID NO: 2076641 - RNA, 19 nt, Artificial Sequence
  Description of Artificial Sequence: Synthetic oligonucleotide
  Antisense strand to SEQ ID NO: 2076640
ucauguauucgaaagccac

SEQ ID NO: 2076642 - RNA, 19 nt, Artificial Sequence
  Description of Artificial Sequence: Synthetic oligonucleotide
  Sense strand starting at position 3890 of SEQ ID NO: 1881856
uggugaagaaucuguucca

SEQ ID NO: 2076643 - RNA, 19 nt, Artificial Sequence
  Description of Artificial Sequence: Synthetic oligonucleotide
  Antisense strand to SEQ ID NO: 2076642
uggaacagauucuucacca

SEQ ID NO: 2076644 - RNA, 19 nt, Artificial Sequence
  Description of Artificial Sequence: Synthetic oligonucleotide
  Sense strand starting at position 3891 of SEQ ID NO: 1881856
ggugaagaaucuguuccag

SEQ ID NO: 2076645 - RNA, 19 nt, Artificial Sequence
  Description of Artificial Sequence: Synthetic oligonucleotide
  Antisense strand to SEQ ID NO: 2076644
cuggaacagauucuucacc

SEQ ID NO: 2076646 - RNA, 19 nt, Artificial Sequence
  Description of Artificial Sequence: Synthetic oligonucleotide
  Sense strand starting at position 3899 of SEQ ID NO: 1881856
aucuguuccagcuaggaug

SEQ ID NO: 2076647 - RNA, 19 nt, Artificial Sequence
  Description of Artificial Sequence: Synthetic oligonucleotide
  Antisense strand to SEQ ID NO: 2076646
cauccuagcuggaacagau

SEQ ID NO: 2076648 - RNA, 19 nt, Artificial Sequence
  Description of Artificial Sequence: Synthetic oligonucleotide
  Sense strand starting at position 3913 of SEQ ID NO: 1881856
ggaugaaaguucguggaag

SEQ ID NO: 2076649 - RNA, 19 nt, Artificial Sequence
  Description of Artificial Sequence: Synthetic oligonucleotide
  Antisense strand to SEQ ID NO: 2076648
cuuccacgaacuuucaucc

SEQ ID NO: 2076650 - RNA, 19 nt, Artificial Sequence
  Description of Artificial Sequence: Synthetic oligonucleotide
  Sense strand starting at position 3915 of SEQ ID NO: 1881856
augaaaguucguggaagga

SEQ ID NO: 2076651 - RNA, 19 nt, Artificial Sequence
  Description of Artificial Sequence: Synthetic oligonucleotide
  Antisense strand to SEQ ID NO: 2076650
uccuuccacgaacuuucau

SEQ ID NO: 2076652 - RNA, 19 nt, Artificial Sequence
  Description of Artificial Sequence: Synthetic oligonucleotide
  Sense strand starting at position 418 of SEQ ID NO: 1881857
acugucuuucucuacagau

SEQ ID NO: 2076653 - RNA, 19 nt, Artificial Sequence
  Description of Artificial Sequence: Synthetic oligonucleotide
  Antisense strand to SEQ ID NO: 2076652
aucuguagagaaagacagu

SEQ ID NO: 2076654 - RNA, 19 nt, Artificial Sequence
  Description of Artificial Sequence: Synthetic oligonucleotide
  Sense strand starting at position 420 of SEQ ID NO: 1881857
ugucuuucucuacagauuc

SEQ ID NO: 2076655 - RNA, 19 nt, Artificial Sequence
  Description of Artificial Sequence: Synthetic oligonucleotide
  Antisense strand to SEQ ID NO: 2076654
gaaucuguagagaaagaca

SEQ ID NO: 2076656 - RNA, 19 nt, Artificial Sequence
  Description of Artificial Sequence: Synthetic oligonucleotide
  Sense strand starting at position 486 of SEQ ID NO: 1881857
cccuuuccucuauggaaag

SEQ ID NO: 2076657 - RNA, 19 nt, Artificial Sequence
  Description of Artificial Sequence: Synthetic oligonucleotide
  Antisense strand to SEQ ID NO: 2076656
cuuuccauagaggaaaggg

SEQ ID NO: 2076658 - RNA, 19 nt, Artificial Sequence
  Description of Artificial Sequence: Synthetic oligonucleotide
  Sense strand starting at position 496 of SEQ ID NO: 1881857
uauggaaaguaucuaagua

SEQ ID NO: 2076659 - RNA, 19 nt, Artificial Sequence
  Description of Artificial Sequence: Synthetic oligonucleotide
  Antisense strand to SEQ ID NO: 2076658
uacuuagauacuuuccaua

SEQ ID NO: 2076660 - RNA, 19 nt, Artificial Sequence
  Description of Artificial Sequence: Synthetic oligonucleotide
  Sense strand starting at position 500 of SEQ ID NO: 1881857
gaaaguaucuaaguaguga

SEQ ID NO: 2076661 - RNA, 19 nt, Artificial Sequence
  Description of Artificial Sequence: Synthetic oligonucleotide
  Antisense strand to SEQ ID NO: 2076660
ucacuacuuagauacuuuc

SEQ ID NO: 2076662 - RNA, 19 nt, Artificial Sequence
  Description of Artificial Sequence: Synthetic oligonucleotide
  Sense strand starting at position 511 of SEQ ID NO: 1881857
aguagugaccacuagaguu

SEQ ID NO: 2076663 - RNA, 19 nt, Artificial Sequence
  Description of Artificial Sequence: Synthetic oligonucleotide
  Antisense strand to SEQ ID NO: 2076662
aacucuaguggucacuacu

SEQ ID NO: 2076664 - RNA, 19 nt, Artificial Sequence
  Description of Artificial Sequence: Synthetic oligonucleotide
  Sense strand starting at position 518 of SEQ ID NO: 1881857
accacuagaguuuggauau

SEQ ID NO: 2076665 - RNA, 19 nt, Artificial Sequence
  Description of Artificial Sequence: Synthetic oligonucleotide
  Antisense strand to SEQ ID NO: 2076664
auauccaaacucuaguggu

SEQ ID NO: 2076666 - RNA, 19 nt, Artificial Sequence
  Description of Artificial Sequence: Synthetic oligonucleotide
  Sense strand starting at position 718 of SEQ ID NO: 1881857
ccacaagaauugguuguua

SEQ ID NO: 2076667 - RNA, 19 nt, Artificial Sequence
  Description of Artificial Sequence: Synthetic oligonucleotide
  Antisense strand to SEQ ID NO: 2076666
uaacaaccaauucuugugg

SEQ ID NO: 2076668 - RNA, 19 nt, Artificial Sequence
  Description of Artificial Sequence: Synthetic oligonucleotide
  Sense strand starting at position 720 of SEQ ID NO: 1881857
acaagaauugguuguuaaa

SEQ ID NO: 2076669 - RNA, 19 nt, Artificial Sequence
  Description of Artificial Sequence: Synthetic oligonucleotide
  Antisense strand to SEQ ID NO: 2076668
uuuaacaaccaauucuugu

SEQ ID NO: 2076670 - RNA, 19 nt, Artificial Sequence
  Description of Artificial Sequence: Synthetic oligonucleotide
  Sense strand starting at position 1015 of SEQ ID NO: 1881857
cugguuauauuccuacuga

SEQ ID NO: 2076671 - RNA, 19 nt, Artificial Sequence
  Description of Artificial Sequence: Synthetic oligonucleotide
  Antisense strand to SEQ ID NO: 2076670
ucaguaggaauauaaccag

SEQ ID NO: 2076672 - RNA, 19 nt, Artificial Sequence
  Description of Artificial Sequence: Synthetic oligonucleotide
  Sense strand starting at position 1219 of SEQ ID NO: 1881857
cuuacuggacuguaucuaa

SEQ ID NO: 2076673 - RNA, 19 nt, Artificial Sequence
  Description of Artificial Sequence: Synthetic oligonucleotide
  Antisense strand to SEQ ID NO: 2076672
uuagauacaguccaguaag

SEQ ID NO: 2076674 - RNA, 19 nt, Artificial Sequence
  Description of Artificial Sequence: Synthetic oligonucleotide
  Sense strand starting at position 1467 of SEQ ID NO: 1881857
agaucucacuucuuuagua

SEQ ID NO: 2076675 - RNA, 19 nt, Artificial Sequence
  Description of Artificial Sequence: Synthetic oligonucleotide
  Antisense strand to SEQ ID NO: 2076674
uacuaaagaagugagaucu

SEQ ID NO: 2076676 - RNA, 19 nt, Artificial Sequence
  Description of Artificial Sequence: Synthetic oligonucleotide
  Sense strand starting at position 1741 of SEQ ID NO: 1881857
gaguaacuuguacaaugua

SEQ ID NO: 2076677 - RNA, 19 nt, Artificial Sequence
  Description of Artificial Sequence: Synthetic oligonucleotide
  Antisense strand to SEQ ID NO: 2076676
uacauuguacaaguuacuc

SEQ ID NO: 2076678 - RNA, 19 nt, Artificial Sequence
  Description of Artificial Sequence: Synthetic oligonucleotide
  Sense strand starting at position 1860 of SEQ ID NO: 1881857
uccucagagcuuugagaaa

SEQ ID NO: 2076679 - RNA, 19 nt, Artificial Sequence
  Description of Artificial Sequence: Synthetic oligonucleotide
  Antisense strand to SEQ ID NO: 2076678
uuucucaaagcucugagga

SEQ ID NO: 2076680 - RNA, 19 nt, Artificial Sequence
  Description of Artificial Sequence: Synthetic oligonucleotide
  Sense strand starting at position 1898 of SEQ ID NO: 1881857
guguguauucugucauggu

SEQ ID NO: 2076681 - RNA, 19 nt, Artificial Sequence
  Description of Artificial Sequence: Synthetic oligonucleotide
  Antisense strand to SEQ ID NO: 2076680
accaugacagaauacacac

SEQ ID NO: 2076682 - RNA, 19 nt, Artificial Sequence
  Description of Artificial Sequence: Synthetic oligonucleotide
  Sense strand starting at position 1957 of SEQ ID NO: 1881857
ggccuuuaacuauauggca

SEQ ID NO: 2076683 - RNA, 19 nt, Artificial Sequence
  Description of Artificial Sequence: Synthetic oligonucleotide
  Antisense strand to SEQ ID NO: 2076682
ugccauauaguuaaaggcc

SEQ ID NO: 2076684 - RNA, 19 nt, Artificial Sequence
  Description of Artificial Sequence: Synthetic oligonucleotide
  Sense strand starting at position 2127 of SEQ ID NO: 1881857
aaaugugggcuugauuacu

SEQ ID NO: 2076685 - RNA, 19 nt, Artificial Sequence
  Description of Artificial Sequence: Synthetic oligonucleotide
  Antisense strand to SEQ ID NO: 2076684
aguaaucaagcccacauuu

SEQ ID NO: 2076686 - RNA, 19 nt, Artificial Sequence
  Description of Artificial Sequence: Synthetic oligonucleotide
  Sense strand starting at position 2217 of SEQ ID NO: 1881857
uugaccuauuuguaagaag

SEQ ID NO: 2076687 - RNA, 19 nt, Artificial Sequence
  Description of Artificial Sequence: Synthetic oligonucleotide
  Antisense strand to SEQ ID NO: 2076686
cuucuuacaaauaggucaa

SEQ ID NO: 2076688 - RNA, 19 nt, Artificial Sequence
  Description of Artificial Sequence: Synthetic oligonucleotide
  Sense strand starting at position 2298 of SEQ ID NO: 1881857
uuaccuuaugacuagugau

SEQ ID NO: 2076689 - RNA, 19 nt, Artificial Sequence
  Description of Artificial Sequence: Synthetic oligonucleotide
  Antisense strand to SEQ ID NO: 2076688
aucacuagucauaagguaa

SEQ ID NO: 2076690 - RNA, 19 nt, Artificial Sequence
  Description of Artificial Sequence: Synthetic oligonucleotide
  Sense strand starting at position 2459 of SEQ ID NO: 1881857
gccaaucuccguugauuug

SEQ ID NO: 2076691 - RNA, 19 nt, Artificial Sequence
  Description of Artificial Sequence: Synthetic oligonucleotide
  Antisense strand to SEQ ID NO: 2076690
caaaucaacggagauuggc

SEQ ID NO: 2076692 - RNA, 19 nt, Artificial Sequence
  Description of Artificial Sequence: Synthetic oligonucleotide
  Sense strand starting at position 2534 of SEQ ID NO: 1881857
ucaggaaaggccuauuagu

SEQ ID NO: 2076693 - RNA, 19 nt, Artificial Sequence
  Description of Artificial Sequence: Synthetic oligonucleotide
  Antisense strand to SEQ ID NO: 2076692
acuaauaggccuuuccuga

SEQ ID NO: 2076694 - RNA, 19 nt, Artificial Sequence
  Description of Artificial Sequence: Synthetic oligonucleotide
  Sense strand starting at position 2557 of SEQ ID NO: 1881857
cugcuaugagcacaagaca

SEQ ID NO: 2076695 - RNA, 19 nt, Artificial Sequence
  Description of Artificial Sequence: Synthetic oligonucleotide
  Antisense strand to SEQ ID NO: 2076694
ugucuugugcucauagcag

SEQ ID NO: 2076696 - RNA, 19 nt, Artificial Sequence
  Description of Artificial Sequence: Synthetic oligonucleotide
  Sense strand starting at position 2640 of SEQ ID NO: 1881857
guuucuuguagggaccaaa

SEQ ID NO: 2076697 - RNA, 19 nt, Artificial Sequence
  Description of Artificial Sequence: Synthetic oligonucleotide
  Antisense strand to SEQ ID NO: 2076696
uuuggucccuacaagaaac

SEQ ID NO: 2076698 - RNA, 19 nt, Artificial Sequence
  Description of Artificial Sequence: Synthetic oligonucleotide
  Sense strand starting at position 2849 of SEQ ID NO: 1881857
agcaguaaguaauuaggga

SEQ ID NO: 2076699 - RNA, 19 nt, Artificial Sequence
  Description of Artificial Sequence: Synthetic oligonucleotide
  Antisense strand to SEQ ID NO: 2076698
ucccuaauuacuuacugcu

SEQ ID NO: 2076700 - RNA, 19 nt, Artificial Sequence
  Description of Artificial Sequence: Synthetic oligonucleotide
  Sense strand starting at position 2983 of SEQ ID NO: 1881857
agcugcucucaggagaaua

SEQ ID NO: 2076701 - RNA, 19 nt, Artificial Sequence
  Description of Artificial Sequence: Synthetic oligonucleotide
  Antisense strand to SEQ ID NO: 2076700
uauucuccugagagcagcu

SEQ ID NO: 2076702 - RNA, 19 nt, Artificial Sequence
  Description of Artificial Sequence: Synthetic oligonucleotide
  Sense strand starting at position 3023 of SEQ ID NO: 1881857
gggugaagauucccagucu

SEQ ID NO: 2076703 - RNA, 19 nt, Artificial Sequence
  Description of Artificial Sequence: Synthetic oligonucleotide
  Antisense strand to SEQ ID NO: 2076702
agacugggaaucuucaccc

SEQ ID NO: 2076704 - RNA, 19 nt, Artificial Sequence
  Description of Artificial Sequence: Synthetic oligonucleotide
  Sense strand starting at position 3045 of SEQ ID NO: 1881857
cucuucucaggugauuaau

SEQ ID NO: 2076705 - RNA, 19 nt, Artificial Sequence
  Description of Artificial Sequence: Synthetic oligonucleotide
  Antisense strand to SEQ ID NO: 2076704
auuaaucaccugagaagag

SEQ ID NO: 2076706 - RNA, 19 nt, Artificial Sequence
  Description of Artificial Sequence: Synthetic oligonucleotide
  Sense strand starting at position 3047 of SEQ ID NO: 1881857
cuucucaggugauuaaucu

SEQ ID NO: 2076707 - RNA, 19 nt, Artificial Sequence
  Description of Artificial Sequence: Synthetic oligonucleotide
  Antisense strand to SEQ ID NO: 2076706
agauuaaucaccugagaag

SEQ ID NO: 2076708 - RNA, 19 nt, Artificial Sequence
  Description of Artificial Sequence: Synthetic oligonucleotide
  Sense strand starting at position 3048 of SEQ ID NO: 1881857
uucucaggugauuaaucuu

SEQ ID NO: 2076709 - RNA, 19 nt, Artificial Sequence
  Description of Artificial Sequence: Synthetic oligonucleotide
  Antisense strand to SEQ ID NO: 2076708
aagauuaaucaccugagaa

SEQ ID NO: 2076710 - RNA, 19 nt, Artificial Sequence
  Description of Artificial Sequence: Synthetic oligonucleotide
  Sense strand starting at position 3131 of SEQ ID NO: 1881857
agcuuucuuggucacauaa

SEQ ID NO: 2076711 - RNA, 19 nt, Artificial Sequence
  Description of Artificial Sequence: Synthetic oligonucleotide
  Antisense strand to SEQ ID NO: 2076710
uuaugugaccaagaaagcu

SEQ ID NO: 2076712 - RNA, 19 nt, Artificial Sequence
  Description of Artificial Sequence: Synthetic oligonucleotide
  Sense strand starting at position 3169 of SEQ ID NO: 1881857
cuuccuugugcuuaagaga

SEQ ID NO: 2076713 - RNA, 19 nt, Artificial Sequence
  Description of Artificial Sequence: Synthetic oligonucleotide
  Antisense strand to SEQ ID NO: 2076712
ucucuuaagcacaaggaag

SEQ ID NO: 2076714 - RNA, 19 nt, Artificial Sequence
  Description of Artificial Sequence: Synthetic oligonucleotide
  Sense strand starting at position 3346 of SEQ ID NO: 1881857
uuacuaagucauggcagau

SEQ ID NO: 2076715 - RNA, 19 nt, Artificial Sequence
  Description of Artificial Sequence: Synthetic oligonucleotide
  Antisense strand to SEQ ID NO: 2076714
aucugccaugacuuaguaa

SEQ ID NO: 2076716 - RNA, 19 nt, Artificial Sequence
  Description of Artificial Sequence: Synthetic oligonucleotide
  Sense strand starting at position 3376 of SEQ ID NO: 1881857
ugaaguuggcaccauuaga

SEQ ID NO: 2076717 - RNA, 19 nt, Artificial Sequence
  Description of Artificial Sequence: Synthetic oligonucleotide
  Antisense strand to SEQ ID NO: 2076716
ucuaauggugccaacuuca

SEQ ID NO: 2076718 - RNA, 19 nt, Artificial Sequence
  Description of Artificial Sequence: Synthetic oligonucleotide
  Sense strand starting at position 3429 of SEQ ID NO: 1881857
agugaacauguguacucuu

SEQ ID NO: 2076719 - RNA, 19 nt, Artificial Sequence
  Description of Artificial Sequence: Synthetic oligonucleotide
  Antisense strand to SEQ ID NO: 2076718
aagaguacacauguucacu

SEQ ID NO: 2076720 - RNA, 19 nt, Artificial Sequence
  Description of Artificial Sequence: Synthetic oligonucleotide
  Sense strand starting at position 3558 of SEQ ID NO: 1881857
acacaagcucauugugaca

SEQ ID NO: 2076721 - RNA, 19 nt, Artificial Sequence
  Description of Artificial Sequence: Synthetic oligonucleotide
  Antisense strand to SEQ ID NO: 2076720
ugucacaaugagcuugugu

SEQ ID NO: 2076722 - RNA, 19 nt, Artificial Sequence
  Description of Artificial Sequence: Synthetic oligonucleotide
  Sense strand starting at position 3682 of SEQ ID NO: 1881857
gguguuugugagggaaaga

SEQ ID NO: 2076723 - RNA, 19 nt, Artificial Sequence
  Description of Artificial Sequence: Synthetic oligonucleotide
  Antisense strand to SEQ ID NO: 2076722
ucuuucccucacaaacacc

SEQ ID NO: 2076724 - RNA, 19 nt, Artificial Sequence
  Description of Artificial Sequence: Synthetic oligonucleotide
  Sense strand starting at position 3683 of SEQ ID NO: 1881857
guguuugugagggaaagag

SEQ ID NO: 2076725 - RNA, 19 nt, Artificial Sequence
  Description of Artificial Sequence: Synthetic oligonucleotide
  Antisense strand to SEQ ID NO: 2076724
cucuuucccucacaaacac

SEQ ID NO: 2076726 - RNA, 19 nt, Artificial Sequence
  Description of Artificial Sequence: Synthetic oligonucleotide
  Sense strand starting at position 3693 of SEQ ID NO: 1881857
gggaaagagucacucuuau

SEQ ID NO: 2076727 - RNA, 19 nt, Artificial Sequence
  Description of Artificial Sequence: Synthetic oligonucleotide
  Antisense strand to SEQ ID NO: 2076726
auaagagugacucuuuccc

SEQ ID NO: 2076728 - RNA, 19 nt, Artificial Sequence
  Description of Artificial Sequence: Synthetic oligonucleotide
  Sense strand starting at position 3747 of SEQ ID NO: 1881857
gucacauggaguugacacu

SEQ ID NO: 2076729 - RNA, 19 nt, Artificial Sequence
  Description of Artificial Sequence: Synthetic oligonucleotide
  Antisense strand to SEQ ID NO: 2076728
agugucaacuccaugugac

SEQ ID NO: 2076730 - RNA, 19 nt, Artificial Sequence
  Description of Artificial Sequence: Synthetic oligonucleotide
  Sense strand starting at position 3816 of SEQ ID NO: 1881857
aguugugauuaacuaaccu

SEQ ID NO: 2076731 - RNA, 19 nt, Artificial Sequence
  Description of Artificial Sequence: Synthetic oligonucleotide
  Antisense strand to SEQ ID NO: 2076730
agguuaguuaaucacaacu

SEQ ID NO: 2076732 - RNA, 19 nt, Artificial Sequence
  Description of Artificial Sequence: Synthetic oligonucleotide
  Sense strand starting at position 9 of SEQ ID NO: 1881858
ccuccaauguucccuguuu

SEQ ID NO: 2076733 - RNA, 19 nt, Artificial Sequence
  Description of Artificial Sequence: Synthetic oligonucleotide
  Antisense strand to SEQ ID NO: 2076732
aaacagggaacauuggagg

SEQ ID NO: 2076734 - RNA, 19 nt, Artificial Sequence
  Description of Artificial Sequence: Synthetic oligonucleotide
  Sense strand starting at position 18 of SEQ ID NO: 1881858
uucccuguuuccguaaaua

SEQ ID NO: 2076735 - RNA, 19 nt, Artificial Sequence
  Description of Artificial Sequence: Synthetic oligonucleotide
  Antisense strand to SEQ ID NO: 2076734
uauuuacggaaacagggaa

SEQ ID NO: 2076736 - RNA, 19 nt, Artificial Sequence
  Description of Artificial Sequence: Synthetic oligonucleotide
  Sense strand starting at position 176 of SEQ ID NO: 1881858
ggcacuaccucagucucaa

SEQ ID NO: 2076737 - RNA, 19 nt, Artificial Sequence
  Description of Artificial Sequence: Synthetic oligonucleotide
  Antisense strand to SEQ ID NO: 2076736
uugagacugagguagugcc

SEQ ID NO: 2076738 - RNA, 19 nt, Artificial Sequence
  Description of Artificial Sequence: Synthetic oligonucleotide
  Sense strand starting at position 296 of SEQ ID NO: 1881858
auaucucaucugcguacua

SEQ ID NO: 2076739 - RNA, 19 nt, Artificial Sequence
  Description of Artificial Sequence: Synthetic oligonucleotide
  Antisense strand to SEQ ID NO: 2076738
uaguacgcagaugagauau

SEQ ID NO: 2076740 - RNA, 19 nt, Artificial Sequence
  Description of Artificial Sequence: Synthetic oligonucleotide
  Sense strand starting at position 298 of SEQ ID NO: 1881858
aucucaucugcguacuauc

SEQ ID NO: 2076741 - RNA, 19 nt, Artificial Sequence
  Description of Artificial Sequence: Synthetic oligonucleotide
  Antisense strand to SEQ ID NO: 2076740
gauaguacgcagaugagau

SEQ ID NO: 2076742 - RNA, 19 nt, Artificial Sequence
  Description of Artificial Sequence: Synthetic oligonucleotide
  Sense strand starting at position 308 of SEQ ID NO: 1881858
cguacuaucaggugugaaa

SEQ ID NO: 2076743 - RNA, 19 nt, Artificial Sequence
  Description of Artificial Sequence: Synthetic oligonucleotide
  Antisense strand to SEQ ID NO: 2076742
uuucacaccugauaguacg

SEQ ID NO: 2076744 - RNA, 19 nt, Artificial Sequence
  Description of Artificial Sequence: Synthetic oligonucleotide
  Sense strand starting at position 310 of SEQ ID NO: 1881858
uacuaucaggugugaaacu

SEQ ID NO: 2076745 - RNA, 19 nt, Artificial Sequence
  Description of Artificial Sequence: Synthetic oligonucleotide
  Antisense strand to SEQ ID NO: 2076744
aguuucacaccugauagua

SEQ ID NO: 2076746 - RNA, 19 nt, Artificial Sequence
  Description of Artificial Sequence: Synthetic oligonucleotide
  Sense strand starting at position 660 of SEQ ID NO: 1881858
cgcuguucacauugggaca

SEQ ID NO: 2076747 - RNA, 19 nt, Artificial Sequence
  Description of Artificial Sequence: Synthetic oligonucleotide
  Antisense strand to SEQ ID NO: 2076746
ugucccaaugugaacagcg

SEQ ID NO: 2076748 - RNA, 19 nt, Artificial Sequence
  Description of Artificial Sequence: Synthetic oligonucleotide
  Sense strand starting at position 770 of SEQ ID NO: 1881858
gcuuucuucccgccuugua

SEQ ID NO: 2076749 - RNA, 19 nt, Artificial Sequence
  Description of Artificial Sequence: Synthetic oligonucleotide
  Antisense strand to SEQ ID NO: 2076748
uacaaggcgggaagaaagc

SEQ ID NO: 2076750 - RNA, 19 nt, Artificial Sequence
  Description of Artificial Sequence: Synthetic oligonucleotide
  Sense strand starting at position 780 of SEQ ID NO: 1881858
cgccuuguagccuaagaag

SEQ ID NO: 2076751 - RNA, 19 nt, Artificial Sequence
  Description of Artificial Sequence: Synthetic oligonucleotide
  Antisense strand to SEQ ID NO: 2076750
cuucuuaggcuacaaggcg

SEQ ID NO: 2076752 - RNA, 19 nt, Artificial Sequence
  Description of Artificial Sequence: Synthetic oligonucleotide
  Sense strand starting at position 1005 of SEQ ID NO: 1881858
guauuuauggccugcuuau

SEQ ID NO: 2076753 - RNA, 19 nt, Artificial Sequence
  Description of Artificial Sequence: Synthetic oligonucleotide
  Antisense strand to SEQ ID NO: 2076752
auaagcaggccauaaauac

SEQ ID NO: 2076754 - RNA, 19 nt, Artificial Sequence
  Description of Artificial Sequence: Synthetic oligonucleotide
  Sense strand starting at position 1246 of SEQ ID NO: 1881858
gcuauuguuucucuccuga

SEQ ID NO: 2076755 - RNA, 19 nt, Artificial Sequence
  Description of Artificial Sequence: Synthetic oligonucleotide
  Antisense strand to SEQ ID NO: 2076754
ucaggagagaaacaauagc

SEQ ID NO: 2076756 - RNA, 19 nt, Artificial Sequence
  Description of Artificial Sequence: Synthetic oligonucleotide
  Sense strand starting at position 1251 of SEQ ID NO: 1881858
uguuucucuccugauacca

SEQ ID NO: 2076757 - RNA, 19 nt, Artificial Sequence
  Description of Artificial Sequence: Synthetic oligonucleotide
  Antisense strand to SEQ ID NO: 2076756
ugguaucaggagagaaaca

SEQ ID NO: 2076758 - RNA, 19 nt, Artificial Sequence
  Description of Artificial Sequence: Synthetic oligonucleotide
  Sense strand starting at position 1319 of SEQ ID NO: 1881858
auuggauccuuagaaagug

SEQ ID NO: 2076759 - RNA, 19 nt, Artificial Sequence
  Description of Artificial Sequence: Synthetic oligonucleotide
  Antisense strand to SEQ ID NO: 2076758
cacuuucuaaggauccaau

SEQ ID NO: 2076760 - RNA, 19 nt, Artificial Sequence
  Description of Artificial Sequence: Synthetic oligonucleotide
  Sense strand starting at position 1344 of SEQ ID NO: 1881858
aggauaugcucucuauaau

SEQ ID NO: 2076761 - RNA, 19 nt, Artificial Sequence
  Description of Artificial Sequence: Synthetic oligonucleotide
  Antisense strand to SEQ ID NO: 2076760
auuauagagagcauauccu

SEQ ID NO: 2076762 - RNA, 19 nt, Artificial Sequence
  Description of Artificial Sequence: Synthetic oligonucleotide
  Sense strand starting at position 1345 of SEQ ID NO: 1881858
ggauaugcucucuauaaug

SEQ ID NO: 2076763 - RNA, 19 nt, Artificial Sequence
  Description of Artificial Sequence: Synthetic oligonucleotide
  Antisense strand to SEQ ID NO: 2076762
cauuauagagagcauaucc

SEQ ID NO: 2076764 - RNA, 19 nt, Artificial Sequence
  Description of Artificial Sequence: Synthetic oligonucleotide
  Sense strand starting at position 1420 of SEQ ID NO: 1881858
gucagaaugaacuguuagu

SEQ ID NO: 2076765 - RNA, 19 nt, Artificial Sequence
  Description of Artificial Sequence: Synthetic oligonucleotide
  Antisense strand to SEQ ID NO: 2076764
acuaacaguucauucugac

SEQ ID NO: 2076766 - RNA, 19 nt, Artificial Sequence
  Description of Artificial Sequence: Synthetic oligonucleotide
  Sense strand starting at position 1455 of SEQ ID NO: 1881858
gcuuauugaugcuuuaaua

SEQ ID NO: 2076767 - RNA, 19 nt, Artificial Sequence
  Description of Artificial Sequence: Synthetic oligonucleotide
  Antisense strand to SEQ ID NO: 2076766
uauuaaagcaucaauaagc

SEQ ID NO: 2076768 - RNA, 19 nt, Artificial Sequence
  Description of Artificial Sequence: Synthetic oligonucleotide
  Sense strand starting at position 1464 of SEQ ID NO: 1881858
ugcuuuaauagggacaugu

SEQ ID NO: 2076769 - RNA, 19 nt, Artificial Sequence
  Description of Artificial Sequence: Synthetic oligonucleotide
  Antisense strand to SEQ ID NO: 2076768
acaugucccuauuaaagca

SEQ ID NO: 2076770 - RNA, 19 nt, Artificial Sequence
  Description of Artificial Sequence: Synthetic oligonucleotide
  Sense strand starting at position 1506 of SEQ ID NO: 1881858
ggcgacuucugucuacuca

SEQ ID NO: 2076771 - RNA, 19 nt, Artificial Sequence
  Description of Artificial Sequence: Synthetic oligonucleotide
  Antisense strand to SEQ ID NO: 2076770
ugaguagacagaagucgcc

SEQ ID NO: 2076772 - RNA, 19 nt, Artificial Sequence
  Description of Artificial Sequence: Synthetic oligonucleotide
  Sense strand starting at position 1559 of SEQ ID NO: 1881858
cucuguuaaucuucugguu

SEQ ID NO: 2076773 - RNA, 19 nt, Artificial Sequence
  Description of Artificial Sequence: Synthetic oligonucleotide
  Antisense strand to SEQ ID NO: 2076772
aaccagaagauuaacagag

SEQ ID NO: 2076774 - RNA, 19 nt, Artificial Sequence
  Description of Artificial Sequence: Synthetic oligonucleotide
  Sense strand starting at position 1575 of SEQ ID NO: 1881858
guuuguuguucuuccauuu

SEQ ID NO: 2076775 - RNA, 19 nt, Artificial Sequence
  Description of Artificial Sequence: Synthetic oligonucleotide
  Antisense strand to SEQ ID NO: 2076774
aaauggaagaacaacaaac

SEQ ID NO: 2076776 - RNA, 19 nt, Artificial Sequence
  Description of Artificial Sequence: Synthetic oligonucleotide
  Sense strand starting at position 1736 of SEQ ID NO: 1881858
agggaaagcugagucuuua

SEQ ID NO: 2076777 - RNA, 19 nt, Artificial Sequence
  Description of Artificial Sequence: Synthetic oligonucleotide
  Antisense strand to SEQ ID NO: 2076776
uaaagacucagcuuucccu

SEQ ID NO: 2076778 - RNA, 19 nt, Artificial Sequence
  Description of Artificial Sequence: Synthetic oligonucleotide
  Sense strand starting at position 1790 of SEQ ID NO: 1881858
caccguuuccuacgugaag

SEQ ID NO: 2076779 - RNA, 19 nt, Artificial Sequence
  Description of Artificial Sequence: Synthetic oligonucleotide
  Antisense strand to SEQ ID NO: 2076778
cuucacguaggaaacggug

SEQ ID NO: 2076780 - RNA, 19 nt, Artificial Sequence
  Description of Artificial Sequence: Synthetic oligonucleotide
  Sense strand starting at position 1791 of SEQ ID NO: 1881858
accguuuccuacgugaaga

SEQ ID NO: 2076781 - RNA, 19 nt, Artificial Sequence
  Description of Artificial Sequence: Synthetic oligonucleotide
  Antisense strand to SEQ ID NO: 2076780
ucuucacguaggaaacggu

SEQ ID NO: 2076782 - RNA, 19 nt, Artificial Sequence
  Description of Artificial Sequence: Synthetic oligonucleotide
  Sense strand starting at position 1792 of SEQ ID NO: 1881858
ccguuuccuacgugaagac

SEQ ID NO: 2076783 - RNA, 19 nt, Artificial Sequence
  Description of Artificial Sequence: Synthetic oligonucleotide
  Antisense strand to SEQ ID NO: 2076782
gucuucacguaggaaacgg

SEQ ID NO: 2076784 - RNA, 19 nt, Artificial Sequence
  Description of Artificial Sequence: Synthetic oligonucleotide
  Sense strand starting at position 1793 of SEQ ID NO: 1881858
cguuuccuacgugaagacu

SEQ ID NO: 2076785 - RNA, 19 nt, Artificial Sequence
  Description of Artificial Sequence: Synthetic oligonucleotide
  Antisense strand to SEQ ID NO: 2076784
agucuucacguaggaaacg

SEQ ID NO: 2076786 - RNA, 19 nt, Artificial Sequence
  Description of Artificial Sequence: Synthetic oligonucleotide
  Sense strand starting at position 1799 of SEQ ID NO: 1881858
cuacgugaagacugcaaau

SEQ ID NO: 2076787 - RNA, 19 nt, Artificial Sequence
  Description of Artificial Sequence: Synthetic oligonucleotide
  Antisense strand to SEQ ID NO: 2076786
auuugcagucuucacguag

SEQ ID NO: 2076788 - RNA, 19 nt, Artificial Sequence
  Description of Artificial Sequence: Synthetic oligonucleotide
  Sense strand starting at position 3136 of SEQ ID NO: 1881858
ccgcgcuucggacaaaguu

SEQ ID NO: 2076789 - RNA, 19 nt, Artificial Sequence
  Description of Artificial Sequence: Synthetic oligonucleotide
  Antisense strand to SEQ ID NO: 2076788
aacuuuguccgaagcgcgg

SEQ ID NO: 2076790 - RNA, 19 nt, Artificial Sequence
  Description of Artificial Sequence: Synthetic oligonucleotide
  Sense strand starting at position 3198 of SEQ ID NO: 1881858
gcgucauccacguucgguu

SEQ ID NO: 2076791 - RNA, 19 nt, Artificial Sequence
  Description of Artificial Sequence: Synthetic oligonucleotide
  Antisense strand to SEQ ID NO: 2076790
aaccgaacguggaugacgc

SEQ ID NO: 2076792 - RNA, 19 nt, Artificial Sequence
  Description of Artificial Sequence: Synthetic oligonucleotide
  Sense strand starting at position 3213 of SEQ ID NO: 1881858
gguucccucccacauuaga

SEQ ID NO: 2076793 - RNA, 19 nt, Artificial Sequence
  Description of Artificial Sequence: Synthetic oligonucleotide
  Antisense strand to SEQ ID NO: 2076792
ucuaaugugggagggaacc

SEQ ID NO: 2076794 - RNA, 19 nt, Artificial Sequence
  Description of Artificial Sequence: Synthetic oligonucleotide
  Sense strand starting at position 3391 of SEQ ID NO: 1881858
cucgcucucaugggugaga

SEQ ID NO: 2076795 - RNA, 19 nt, Artificial Sequence
  Description of Artificial Sequence: Synthetic oligonucleotide
  Antisense strand to SEQ ID NO: 2076794
ucucacccaugagagcgag

SEQ ID NO: 2076796 - RNA, 19 nt, Artificial Sequence
  Description of Artificial Sequence: Synthetic oligonucleotide
  Sense strand starting at position 3432 of SEQ ID NO: 1881858
cgagaaauauuaucagcag

SEQ ID NO: 2076797 - RNA, 19 nt, Artificial Sequence
  Description of Artificial Sequence: Synthetic oligonucleotide
  Antisense strand to SEQ ID NO: 2076796
cugcugauaauauuucucg

SEQ ID NO: 2076798 - RNA, 19 nt, Artificial Sequence
  Description of Artificial Sequence: Synthetic oligonucleotide
  Sense strand starting at position 3435 of SEQ ID NO: 1881858
gaaauauuaucagcagcgu

SEQ ID NO: 2076799 - RNA, 19 nt, Artificial Sequence
  Description of Artificial Sequence: Synthetic oligonucleotide
  Antisense strand to SEQ ID NO: 2076798
acgcugcugauaauauuuc

SEQ ID NO: 2076800 - RNA, 19 nt, Artificial Sequence
  Description of Artificial Sequence: Synthetic oligonucleotide
  Sense strand starting at position 3517 of SEQ ID NO: 1881858
ugccaaaucggcuugcuuu

SEQ ID NO: 2076801 - RNA, 19 nt, Artificial Sequence
  Description of Artificial Sequence: Synthetic oligonucleotide
  Antisense strand to SEQ ID NO: 2076800
aaagcaagccgauuuggca

SEQ ID NO: 2076802 - RNA, 19 nt, Artificial Sequence
  Description of Artificial Sequence: Synthetic oligonucleotide
  Sense strand starting at position 3666 of SEQ ID NO: 1881858
gguucuugugaauaugcua

SEQ ID NO: 2076803 - RNA, 19 nt, Artificial Sequence
  Description of Artificial Sequence: Synthetic oligonucleotide
  Antisense strand to SEQ ID NO: 2076802
uagcauauucacaagaacc

SEQ ID NO: 2076804 - RNA, 19 nt, Artificial Sequence
  Description of Artificial Sequence: Synthetic oligonucleotide
  Sense strand starting at position 3674 of SEQ ID NO: 1881858
ugaauaugcuaacuuugua

SEQ ID NO: 2076805 - RNA, 19 nt, Artificial Sequence
  Description of Artificial Sequence: Synthetic oligonucleotide
  Antisense strand to SEQ ID NO: 2076804
uacaaaguuagcauauuca

SEQ ID NO: 2076806 - RNA, 19 nt, Artificial Sequence
  Description of Artificial Sequence: Synthetic oligonucleotide
  Sense strand starting at position 3677 of SEQ ID NO: 1881858
auaugcuaacuuuguaaag

SEQ ID NO: 2076807 - RNA, 19 nt, Artificial Sequence
  Description of Artificial Sequence: Synthetic oligonucleotide
  Antisense strand to SEQ ID NO: 2076806
cuuuacaaaguuagcauau

SEQ ID NO: 2076808 - RNA, 19 nt, Artificial Sequence
  Description of Artificial Sequence: Synthetic oligonucleotide
  Sense strand starting at position 3839 of SEQ ID NO: 1881858
uccuuuaucccuugcguca

SEQ ID NO: 2076809 - RNA, 19 nt, Artificial Sequence
  Description of Artificial Sequence: Synthetic oligonucleotide
  Antisense strand to SEQ ID NO: 2076808
ugacgcaagggauaaagga

SEQ ID NO: 2076810 - RNA, 19 nt, Artificial Sequence
  Description of Artificial Sequence: Synthetic oligonucleotide
  Sense strand starting at position 3850 of SEQ ID NO: 1881858
uugcgucaaucaguguuga

SEQ ID NO: 2076811 - RNA, 19 nt, Artificial Sequence
  Description of Artificial Sequence: Synthetic oligonucleotide
  Antisense strand to SEQ ID NO: 2076810
ucaacacugauugacgcaa

SEQ ID NO: 2076812 - RNA, 19 nt, Artificial Sequence
  Description of Artificial Sequence: Synthetic oligonucleotide
  Sense strand starting at position 164 of SEQ ID NO: 1881859
uaguuacuguaaguuagau

SEQ ID NO: 2076813 - RNA, 19 nt, Artificial Sequence
  Description of Artificial Sequence: Synthetic oligonucleotide
  Antisense strand to SEQ ID NO: 2076812
aucuaacuuacaguaacua

SEQ ID NO: 2076814 - RNA, 19 nt, Artificial Sequence
  Description of Artificial Sequence: Synthetic oligonucleotide
  Sense strand starting at position 288 of SEQ ID NO: 1881859
ugcugcaugguucagaaga

SEQ ID NO: 2076815 - RNA, 19 nt, Artificial Sequence
  Description of Artificial Sequence: Synthetic oligonucleotide
  Antisense strand to SEQ ID NO: 2076814
ucuucugaaccaugcagca

SEQ ID NO: 2076816 - RNA, 19 nt, Artificial Sequence
  Description of Artificial Sequence: Synthetic oligonucleotide
  Sense strand starting at position 348 of SEQ ID NO: 1881859
uggguugggcuuugaggaa

SEQ ID NO: 2076817 - RNA, 19 nt, Artificial Sequence
  Description of Artificial Sequence: Synthetic oligonucleotide
  Antisense strand to SEQ ID NO: 2076816
uuccucaaagcccaaccca

SEQ ID NO: 2076818 - RNA, 19 nt, Artificial Sequence
  Description of Artificial Sequence: Synthetic oligonucleotide
  Sense strand starting at position 545 of SEQ ID NO: 1881859
gguuaaugccacuguagag

SEQ ID NO: 2076819 - RNA, 19 nt, Artificial Sequence
  Description of Artificial Sequence: Synthetic oligonucleotide
  Antisense strand to SEQ ID NO: 2076818
cucuacaguggcauuaacc

SEQ ID NO: 2076820 - RNA, 19 nt, Artificial Sequence
  Description of Artificial Sequence: Synthetic oligonucleotide
  Sense strand starting at position 603 of SEQ ID NO: 1881859
gagcauuaaggaggcaaga

SEQ ID NO: 2076821 - RNA, 19 nt, Artificial Sequence
  Description of Artificial Sequence: Synthetic oligonucleotide
  Antisense strand to SEQ ID NO: 2076820
ucuugccuccuuaaugcuc

SEQ ID NO: 2076822 - RNA, 19 nt, Artificial Sequence
  Description of Artificial Sequence: Synthetic oligonucleotide
  Sense strand starting at position 983 of SEQ ID NO: 1881859
uguggccauguuuaugaga

SEQ ID NO: 2076823 - RNA, 19 nt, Artificial Sequence
  Description of Artificial Sequence: Synthetic oligonucleotide
  Antisense strand to SEQ ID NO: 2076822
ucucauaaacauggccaca

SEQ ID NO: 2076824 - RNA, 19 nt, Artificial Sequence
  Description of Artificial Sequence: Synthetic oligonucleotide
  Sense strand starting at position 990 of SEQ ID NO: 1881859
auguuuaugagagacuguu

SEQ ID NO: 2076825 - RNA, 19 nt, Artificial Sequence
  Description of Artificial Sequence: Synthetic oligonucleotide
  Antisense strand to SEQ ID NO: 2076824
aacagucucucauaaacau

SEQ ID NO: 2076826 - RNA, 19 nt, Artificial Sequence
  Description of Artificial Sequence: Synthetic oligonucleotide
  Sense strand starting at position 1002 of SEQ ID NO: 1881859
gacuguuggagacggagau

SEQ ID NO: 2076827 - RNA, 19 nt, Artificial Sequence
  Description of Artificial Sequence: Synthetic oligonucleotide
  Antisense strand to SEQ ID NO: 2076826
aucuccgucuccaacaguc

SEQ ID NO: 2076828 - RNA, 19 nt, Artificial Sequence
  Description of Artificial Sequence: Synthetic oligonucleotide
  Sense strand starting at position 1019 of SEQ ID NO: 1881859
aucagagauugagaaacua

SEQ ID NO: 2076829 - RNA, 19 nt, Artificial Sequence
  Description of Artificial Sequence: Synthetic oligonucleotide
  Antisense strand to SEQ ID NO: 2076828
uaguuucucaaucucugau

SEQ ID NO: 2076830 - RNA, 19 nt, Artificial Sequence
  Description of Artificial Sequence: Synthetic oligonucleotide
  Sense strand starting at position 1029 of SEQ ID NO: 1881859
gagaaacuaucaguuuagu

SEQ ID NO: 2076831 - RNA, 19 nt, Artificial Sequence
  Description of Artificial Sequence: Synthetic oligonucleotide
  Antisense strand to SEQ ID NO: 2076830
acuaaacugauaguuucuc

SEQ ID NO: 2076832 - RNA, 19 nt, Artificial Sequence
  Description of Artificial Sequence: Synthetic oligonucleotide
  Sense strand starting at position 1086 of SEQ ID NO: 1881859
acuagaugcgguuaugaaa

SEQ ID NO: 2076833 - RNA, 19 nt, Artificial Sequence
  Description of Artificial Sequence: Synthetic oligonucleotide
  Antisense strand to SEQ ID NO: 2076832
uuucauaaccgcaucuagu

SEQ ID NO: 2076834 - RNA, 19 nt, Artificial Sequence
  Description of Artificial Sequence: Synthetic oligonucleotide
  Sense strand starting at position 1157 of SEQ ID NO: 1881859
cuggauaagguuuggcuau

SEQ ID NO: 2076835 - RNA, 19 nt, Artificial Sequence
  Description of Artificial Sequence: Synthetic oligonucleotide
  Antisense strand to SEQ ID NO: 2076834
auagccaaaccuuauccag

SEQ ID NO: 2076836 - RNA, 19 nt, Artificial Sequence
  Description of Artificial Sequence: Synthetic oligonucleotide
  Sense strand starting at position 1159 of SEQ ID NO: 1881859
ggauaagguuuggcuaugu

SEQ ID NO: 2076837 - RNA, 19 nt, Artificial Sequence
  Description of Artificial Sequence: Synthetic oligonucleotide
  Antisense strand to SEQ ID NO: 2076836
acauagccaaaccuuaucc

SEQ ID NO: 2076838 - RNA, 19 nt, Artificial Sequence
  Description of Artificial Sequence: Synthetic oligonucleotide
  Sense strand starting at position 1851 of SEQ ID NO: 1881859
ggacuaauauaggccuaau

SEQ ID NO: 2076839 - RNA, 19 nt, Artificial Sequence
  Description of Artificial Sequence: Synthetic oligonucleotide
  Antisense strand to SEQ ID NO: 2076838
auuaggccuauauuagucc

SEQ ID NO: 2076840 - RNA, 19 nt, Artificial Sequence
  Description of Artificial Sequence: Synthetic oligonucleotide
  Sense strand starting at position 1971 of SEQ ID NO: 1881859
uguccugacccuuagucau

SEQ ID NO: 2076841 - RNA, 19 nt, Artificial Sequence
  Description of Artificial Sequence: Synthetic oligonucleotide
  Antisense strand to SEQ ID NO: 2076840
augacuaagggucaggaca

SEQ ID NO: 2076842 - RNA, 19 nt, Artificial Sequence
  Description of Artificial Sequence: Synthetic oligonucleotide
  Sense strand starting at position 2055 of SEQ ID NO: 1881859
acuggcacaucuguacaau

SEQ ID NO: 2076843 - RNA, 19 nt, Artificial Sequence
  Description of Artificial Sequence: Synthetic oligonucleotide
  Antisense strand to SEQ ID NO: 2076842
auuguacagaugugccagu

SEQ ID NO: 2076844 - RNA, 19 nt, Artificial Sequence
  Description of Artificial Sequence: Synthetic oligonucleotide
  Sense strand starting at position 2140 of SEQ ID NO: 1881859
caguuaagccuuggacaca

SEQ ID NO: 2076845 - RNA, 19 nt, Artificial Sequence
  Description of Artificial Sequence: Synthetic oligonucleotide
  Antisense strand to SEQ ID NO: 2076844
uguguccaaggcuuaacug

SEQ ID NO: 2076846 - RNA, 19 nt, Artificial Sequence
  Description of Artificial Sequence: Synthetic oligonucleotide
  Sense strand starting at position 2426 of SEQ ID NO: 1881859
uugugaauugcuguuugcu

SEQ ID NO: 2076847 - RNA, 19 nt, Artificial Sequence
  Description of Artificial Sequence: Synthetic oligonucleotide
  Antisense strand to SEQ ID NO: 2076846
agcaaacagcaauucacaa

SEQ ID NO: 2076848 - RNA, 19 nt, Artificial Sequence
  Description of Artificial Sequence: Synthetic oligonucleotide
  Sense strand starting at position 2427 of SEQ ID NO: 1881859
ugugaauugcuguuugcuc

SEQ ID NO: 2076849 - RNA, 19 nt, Artificial Sequence
  Description of Artificial Sequence: Synthetic oligonucleotide
  Antisense strand to SEQ ID NO: 2076848
gagcaaacagcaauucaca

SEQ ID NO: 2076850 - RNA, 19 nt, Artificial Sequence
  Description of Artificial Sequence: Synthetic oligonucleotide
  Sense strand starting at position 2718 of SEQ ID NO: 1881859
gugauaagagauuggguua

SEQ ID NO: 2076851 - RNA, 19 nt, Artificial Sequence
  Description of Artificial Sequence: Synthetic oligonucleotide
  Antisense strand to SEQ ID NO: 2076850
uaacccaaucucuuaucac

SEQ ID NO: 2076852 - RNA, 19 nt, Artificial Sequence
  Description of Artificial Sequence: Synthetic oligonucleotide
  Sense strand starting at position 2731 of SEQ ID NO: 1881859
ggguuauagaaagguauau

SEQ ID NO: 2076853 - RNA, 19 nt, Artificial Sequence
  Description of Artificial Sequence: Synthetic oligonucleotide
  Antisense strand to SEQ ID NO: 2076852
auauaccuuucuauaaccc

SEQ ID NO: 2076854 - RNA, 19 nt, Artificial Sequence
  Description of Artificial Sequence: Synthetic oligonucleotide
  Sense strand starting at position 2743 of SEQ ID NO: 1881859
gguauaugccauuaucaaa

SEQ ID NO: 2076855 - RNA, 19 nt, Artificial Sequence
  Description of Artificial Sequence: Synthetic oligonucleotide
  Antisense strand to SEQ ID NO: 2076854
uuugauaauggcauauacc

SEQ ID NO: 2076856 - RNA, 19 nt, Artificial Sequence
  Description of Artificial Sequence: Synthetic oligonucleotide
  Sense strand starting at position 2766 of SEQ ID NO: 1881859
guaggauguuauccuuaag

SEQ ID NO: 2076857 - RNA, 19 nt, Artificial Sequence
  Description of Artificial Sequence: Synthetic oligonucleotide
  Antisense strand to SEQ ID NO: 2076856
cuuaaggauaacauccuac

SEQ ID NO: 2076858 - RNA, 19 nt, Artificial Sequence
  Description of Artificial Sequence: Synthetic oligonucleotide
  Sense strand starting at position 2843 of SEQ ID NO: 1881859
ugaagaauguaggcaugaa

SEQ ID NO: 2076859 - RNA, 19 nt, Artificial Sequence
  Description of Artificial Sequence: Synthetic oligonucleotide
  Antisense strand to SEQ ID NO: 2076858
uucaugccuacauucuuca

SEQ ID NO: 2076860 - RNA, 19 nt, Artificial Sequence
  Description of Artificial Sequence: Synthetic oligonucleotide
  Sense strand starting at position 2908 of SEQ ID NO: 1881859
auagauggauggcuccaua

SEQ ID NO: 2076861 - RNA, 19 nt, Artificial Sequence
  Description of Artificial Sequence: Synthetic oligonucleotide
  Antisense strand to SEQ ID NO: 2076860
uauggagccauccaucuau

SEQ ID NO: 2076862 - RNA, 19 nt, Artificial Sequence
  Description of Artificial Sequence: Synthetic oligonucleotide
  Sense strand starting at position 2911 of SEQ ID NO: 1881859
gauggauggcuccauaugu

SEQ ID NO: 2076863 - RNA, 19 nt, Artificial Sequence
  Description of Artificial Sequence: Synthetic oligonucleotide
  Antisense strand to SEQ ID NO: 2076862
acauauggagccauccauc

SEQ ID NO: 2076864 - RNA, 19 nt, Artificial Sequence
  Description of Artificial Sequence: Synthetic oligonucleotide
  Sense strand starting at position 2916 of SEQ ID NO: 1881859
auggcuccauaugugauaa

SEQ ID NO: 2076865 - RNA, 19 nt, Artificial Sequence
  Description of Artificial Sequence: Synthetic oligonucleotide
  Antisense strand to SEQ ID NO: 2076864
uuaucacauauggagccau

SEQ ID NO: 2076866 - RNA, 19 nt, Artificial Sequence
  Description of Artificial Sequence: Synthetic oligonucleotide
  Sense strand starting at position 2937 of SEQ ID NO: 1881859
cagagauagcaguguuaau

SEQ ID NO: 2076867 - RNA, 19 nt, Artificial Sequence
  Description of Artificial Sequence: Synthetic oligonucleotide
  Antisense strand to SEQ ID NO: 2076866
auuaacacugcuaucucug

SEQ ID NO: 2076868 - RNA, 19 nt, Artificial Sequence
  Description of Artificial Sequence: Synthetic oligonucleotide
  Sense strand starting at position 2944 of SEQ ID NO: 1881859
agcaguguuaaugauagga

SEQ ID NO: 2076869 - RNA, 19 nt, Artificial Sequence
  Description of Artificial Sequence: Synthetic oligonucleotide
  Antisense strand to SEQ ID NO: 2076868
uccuaucauuaacacugcu

SEQ ID NO: 2076870 - RNA, 19 nt, Artificial Sequence
  Description of Artificial Sequence: Synthetic oligonucleotide
  Sense strand starting at position 2948 of SEQ ID NO: 1881859
guguuaaugauaggaucua

SEQ ID NO: 2076871 - RNA, 19 nt, Artificial Sequence
  Description of Artificial Sequence: Synthetic oligonucleotide
  Antisense strand to SEQ ID NO: 2076870
uagauccuaucauuaacac

SEQ ID NO: 2076872 - RNA, 19 nt, Artificial Sequence
  Description of Artificial Sequence: Synthetic oligonucleotide
  Sense strand starting at position 2971 of SEQ ID NO: 1881859
auagguaaaugggugcuua

SEQ ID NO: 2076873 - RNA, 19 nt, Artificial Sequence
  Description of Artificial Sequence: Synthetic oligonucleotide
  Antisense strand to SEQ ID NO: 2076872
uaagcacccauuuaccuau

SEQ ID NO: 2076874 - RNA, 19 nt, Artificial Sequence
  Description of Artificial Sequence: Synthetic oligonucleotide
  Sense strand starting at position 3007 of SEQ ID NO: 1881859
ccuuuccgugugcuugaau

SEQ ID NO: 2076875 - RNA, 19 nt, Artificial Sequence
  Description of Artificial Sequence: Synthetic oligonucleotide
  Antisense strand to SEQ ID NO: 2076874
auucaagcacacggaaagg

SEQ ID NO: 2076876 - RNA, 19 nt, Artificial Sequence
  Description of Artificial Sequence: Synthetic oligonucleotide
  Sense strand starting at position 3072 of SEQ ID NO: 1881859
aggaaucccuagucuaagu

SEQ ID NO: 2076877 - RNA, 19 nt, Artificial Sequence
  Description of Artificial Sequence: Synthetic oligonucleotide
  Antisense strand to SEQ ID NO: 2076876
acuuagacuagggauuccu

SEQ ID NO: 2076878 - RNA, 19 nt, Artificial Sequence
  Description of Artificial Sequence: Synthetic oligonucleotide
  Sense strand starting at position 3257 of SEQ ID NO: 1881859
cuaauuacuuuagcuggua

SEQ ID NO: 2076879 - RNA, 19 nt, Artificial Sequence
  Description of Artificial Sequence: Synthetic oligonucleotide
  Antisense strand to SEQ ID NO: 2076878
uaccagcuaaaguaauuag

SEQ ID NO: 2076880 - RNA, 19 nt, Artificial Sequence
  Description of Artificial Sequence: Synthetic oligonucleotide
  Sense strand starting at position 3534 of SEQ ID NO: 1881859
acagaaaugucacuguauu

SEQ ID NO: 2076881 - RNA, 19 nt, Artificial Sequence
  Description of Artificial Sequence: Synthetic oligonucleotide
  Antisense strand to SEQ ID NO: 2076880
aauacagugacauuucugu

SEQ ID NO: 2076882 - RNA, 19 nt, Artificial Sequence
  Description of Artificial Sequence: Synthetic oligonucleotide
  Sense strand starting at position 3557 of SEQ ID NO: 1881859
gaguaacuuccugguacac

SEQ ID NO: 2076883 - RNA, 19 nt, Artificial Sequence
  Description of Artificial Sequence: Synthetic oligonucleotide
  Antisense strand to SEQ ID NO: 2076882
guguaccaggaaguuacuc

SEQ ID NO: 2076884 - RNA, 19 nt, Artificial Sequence
  Description of Artificial Sequence: Synthetic oligonucleotide
  Sense strand starting at position 3612 of SEQ ID NO: 1881859
augauuagaaacggucauu

SEQ ID NO: 2076885 - RNA, 19 nt, Artificial Sequence
  Description of Artificial Sequence: Synthetic oligonucleotide
  Antisense strand to SEQ ID NO: 2076884
aaugaccguuucuaaucau

SEQ ID NO: 2076886 - RNA, 19 nt, Artificial Sequence
  Description of Artificial Sequence: Synthetic oligonucleotide
  Sense strand starting at position 3617 of SEQ ID NO: 1881859
uagaaacggucauuaaagu

SEQ ID NO: 2076887 - RNA, 19 nt, Artificial Sequence
  Description of Artificial Sequence: Synthetic oligonucleotide
  Antisense strand to SEQ ID NO: 2076886
acuuuaaugaccguuucua

SEQ ID NO: 2076888 - RNA, 19 nt, Artificial Sequence
  Description of Artificial Sequence: Synthetic oligonucleotide
  Sense strand starting at position 3823 of SEQ ID NO: 1881859
aggccaggaguugaucauu

SEQ ID NO: 2076889 - RNA, 19 nt, Artificial Sequence
  Description of Artificial Sequence: Synthetic oligonucleotide
  Antisense strand to SEQ ID NO: 2076888
aaugaucaacuccuggccu

SEQ ID NO: 2076890 - RNA, 19 nt, Artificial Sequence
  Description of Artificial Sequence: Synthetic oligonucleotide
  Sense strand starting at position 3831 of SEQ ID NO: 1881859
aguugaucauuugagacca

SEQ ID NO: 2076891 - RNA, 19 nt, Artificial Sequence
  Description of Artificial Sequence: Synthetic oligonucleotide
  Antisense strand to SEQ ID NO: 2076890
uggucucaaaugaucaacu

SEQ ID NO: 2076892 - RNA, 19 nt, Artificial Sequence
  Description of Artificial Sequence: Synthetic oligonucleotide
  Sense strand starting at position 3 of SEQ ID NO: 1881860
aggguuugaacucagucuu

SEQ ID NO: 2076893 - RNA, 19 nt, Artificial Sequence
  Description of Artificial Sequence: Synthetic oligonucleotide
  Antisense strand to SEQ ID NO: 2076892
aagacugaguucaaacccu

SEQ ID NO: 2076894 - RNA, 19 nt, Artificial Sequence
  Description of Artificial Sequence: Synthetic oligonucleotide
  Sense strand starting at position 14 of SEQ ID NO: 1881860
ucagucuugcuccagaaau

SEQ ID NO: 2076895 - RNA, 19 nt, Artificial Sequence
  Description of Artificial Sequence: Synthetic oligonucleotide
  Antisense strand to SEQ ID NO: 2076894
auuucuggagcaagacuga

SEQ ID NO: 2076896 - RNA, 19 nt, Artificial Sequence
  Description of Artificial Sequence: Synthetic oligonucleotide
  Sense strand starting at position 24 of SEQ ID NO: 1881860
uccagaaauuaugcagagu

SEQ ID NO: 2076897 - RNA, 19 nt, Artificial Sequence
  Description of Artificial Sequence: Synthetic oligonucleotide
  Antisense strand to SEQ ID NO: 2076896
acucugcauaauuucugga

SEQ ID NO: 2076898 - RNA, 19 nt, Artificial Sequence
  Description of Artificial Sequence: Synthetic oligonucleotide
  Sense strand starting at position 35 of SEQ ID NO: 1881860
ugcagagucaguuaagacu

SEQ ID NO: 2076899 - RNA, 19 nt, Artificial Sequence
  Description of Artificial Sequence: Synthetic oligonucleotide
  Antisense strand to SEQ ID NO: 2076898
agucuuaacugacucugca

SEQ ID NO: 2076900 - RNA, 19 nt, Artificial Sequence
  Description of Artificial Sequence: Synthetic oligonucleotide
  Sense strand starting at position 154 of SEQ ID NO: 1881860
agaaauugacucuggcuua

SEQ ID NO: 2076901 - RNA, 19 nt, Artificial Sequence
  Description of Artificial Sequence: Synthetic oligonucleotide
  Antisense strand to SEQ ID NO: 2076900
uaagccagagucaauuucu

SEQ ID NO: 2076902 - RNA, 19 nt, Artificial Sequence
  Description of Artificial Sequence: Synthetic oligonucleotide
  Sense strand starting at position 426 of SEQ ID NO: 1881860
cagagauucugauugcaag

SEQ ID NO: 2076903 - RNA, 19 nt, Artificial Sequence
  Description of Artificial Sequence: Synthetic oligonucleotide
  Antisense strand to SEQ ID NO: 2076902
cuugcaaucagaaucucug

SEQ ID NO: 2076904 - RNA, 19 nt, Artificial Sequence
  Description of Artificial Sequence: Synthetic oligonucleotide
  Sense strand starting at position 427 of SEQ ID NO: 1881860
agagauucugauugcaaga

SEQ ID NO: 2076905 - RNA, 19 nt, Artificial Sequence
  Description of Artificial Sequence: Synthetic oligonucleotide
  Antisense strand to SEQ ID NO: 2076904
ucuugcaaucagaaucucu

SEQ ID NO: 2076906 - RNA, 19 nt, Artificial Sequence
  Description of Artificial Sequence: Synthetic oligonucleotide
  Sense strand starting at position 432 of SEQ ID NO: 1881860
uucugauugcaagaaucug

SEQ ID NO: 2076907 - RNA, 19 nt, Artificial Sequence
  Description of Artificial Sequence: Synthetic oligonucleotide
  Antisense strand to SEQ ID NO: 2076906
cagauucuugcaaucagaa

SEQ ID NO: 2076908 - RNA, 19 nt, Artificial Sequence
  Description of Artificial Sequence: Synthetic oligonucleotide
  Sense strand starting at position 578 of SEQ ID NO: 1881860
gaagaauacuugccuguac

SEQ ID NO: 2076909 - RNA, 19 nt, Artificial Sequence
  Description of Artificial Sequence: Synthetic oligonucleotide
  Antisense strand to SEQ ID NO: 2076908
guacaggcaaguauucuuc

SEQ ID NO: 2076910 - RNA, 19 nt, Artificial Sequence
  Description of Artificial Sequence: Synthetic oligonucleotide
  Sense strand starting at position 672 of SEQ ID NO: 1881860
ggaacuugauugagagggu

SEQ ID NO: 2076911 - RNA, 19 nt, Artificial Sequence
  Description of Artificial Sequence: Synthetic oligonucleotide
  Antisense strand to SEQ ID NO: 2076910
acccucucaaucaaguucc

SEQ ID NO: 2076912 - RNA, 19 nt, Artificial Sequence
  Description of Artificial Sequence: Synthetic oligonucleotide
  Sense strand starting at position 675 of SEQ ID NO: 1881860
acuugauugagaggguauu

SEQ ID NO: 2076913 - RNA, 19 nt, Artificial Sequence
  Description of Artificial Sequence: Synthetic oligonucleotide
  Antisense strand to SEQ ID NO: 2076912
aauacccucucaaucaagu

SEQ ID NO: 2076914 - RNA, 19 nt, Artificial Sequence
  Description of Artificial Sequence: Synthetic oligonucleotide
  Sense strand starting at position 836 of SEQ ID NO: 1881860
aucauucugcccugaggga

SEQ ID NO: 2076915 - RNA, 19 nt, Artificial Sequence
  Description of Artificial Sequence: Synthetic oligonucleotide
  Antisense strand to SEQ ID NO: 2076914
ucccucagggcagaaugau

SEQ ID NO: 2076916 - RNA, 19 nt, Artificial Sequence
  Description of Artificial Sequence: Synthetic oligonucleotide
  Sense strand starting at position 945 of SEQ ID NO: 1881860
gagagaagcccugauuggu

SEQ ID NO: 2076917 - RNA, 19 nt, Artificial Sequence
  Description of Artificial Sequence: Synthetic oligonucleotide
  Antisense strand to SEQ ID NO: 2076916
accaaucagggcuucucuc

SEQ ID NO: 2076918 - RNA, 19 nt, Artificial Sequence
  Description of Artificial Sequence: Synthetic oligonucleotide
  Sense strand starting at position 1094 of SEQ ID NO: 1881860
uccgaugacccagaauucu

SEQ ID NO: 2076919 - RNA, 19 nt, Artificial Sequence
  Description of Artificial Sequence: Synthetic oligonucleotide
  Antisense strand to SEQ ID NO: 2076918
agaauucugggucaucgga

SEQ ID NO: 2076920 - RNA, 19 nt, Artificial Sequence
  Description of Artificial Sequence: Synthetic oligonucleotide
  Sense strand starting at position 1105 of SEQ ID NO: 1881860
agaauucugccauaaagug

SEQ ID NO: 2076921 - RNA, 19 nt, Artificial Sequence
  Description of Artificial Sequence: Synthetic oligonucleotide
  Antisense strand to SEQ ID NO: 2076920
cacuuuauggcagaauucu

SEQ ID NO: 2076922 - RNA, 19 nt, Artificial Sequence
  Description of Artificial Sequence: Synthetic oligonucleotide
  Sense strand starting at position 1311 of SEQ ID NO: 1881860
uuaccuuucgcugaacuaa

SEQ ID NO: 2076923 - RNA, 19 nt, Artificial Sequence
  Description of Artificial Sequence: Synthetic oligonucleotide
  Antisense strand to SEQ ID NO: 2076922
uuaguucagcgaaagguaa

SEQ ID NO: 2076924 - RNA, 19 nt, Artificial Sequence
  Description of Artificial Sequence: Synthetic oligonucleotide
  Sense strand starting at position 1360 of SEQ ID NO: 1881860
uggcaucgugauuaagauu

SEQ ID NO: 2076925 - RNA, 19 nt, Artificial Sequence
  Description of Artificial Sequence: Synthetic oligonucleotide
  Antisense strand to SEQ ID NO: 2076924
aaucuuaaucacgaugcca

SEQ ID NO: 2076926 - RNA, 19 nt, Artificial Sequence
  Description of Artificial Sequence: Synthetic oligonucleotide
  Sense strand starting at position 1875 of SEQ ID NO: 1881860
ugagauaccgaauguggau

SEQ ID NO: 2076927 - RNA, 19 nt, Artificial Sequence
  Description of Artificial Sequence: Synthetic oligonucleotide
  Antisense strand to SEQ ID NO: 2076926
auccacauucgguaucuca

SEQ ID NO: 2076928 - RNA, 19 nt, Artificial Sequence
  Description of Artificial Sequence: Synthetic oligonucleotide
  Sense strand starting at position 1882 of SEQ ID NO: 1881860
ccgaauguggauuagaagu

SEQ ID NO: 2076929 - RNA, 19 nt, Artificial Sequence
  Description of Artificial Sequence: Synthetic oligonucleotide
  Antisense strand to SEQ ID NO: 2076928
acuucuaauccacauucgg

SEQ ID NO: 2076930 - RNA, 19 nt, Artificial Sequence
  Description of Artificial Sequence: Synthetic oligonucleotide
  Sense strand starting at position 1895 of SEQ ID NO: 1881860
agaaguuucuuaccaauag

SEQ ID NO: 2076931 - RNA, 19 nt, Artificial Sequence
  Description of Artificial Sequence: Synthetic oligonucleotide
  Antisense strand to SEQ ID NO: 2076930
cuauugguaagaaacuucu

SEQ ID NO: 2076932 - RNA, 19 nt, Artificial Sequence
  Description of Artificial Sequence: Synthetic oligonucleotide
  Sense strand starting at position 2086 of SEQ ID NO: 1881860
ugcugacagccgucucauu

SEQ ID NO: 2076933 - RNA, 19 nt, Artificial Sequence
  Description of Artificial Sequence: Synthetic oligonucleotide
  Antisense strand to SEQ ID NO: 2076932
aaugagacggcugucagca

SEQ ID NO: 2076934 - RNA, 19 nt, Artificial Sequence
  Description of Artificial Sequence: Synthetic oligonucleotide
  Sense strand starting at position 2159 of SEQ ID NO: 1881860
caggguuacuaagcaacua

SEQ ID NO: 2076935 - RNA, 19 nt, Artificial Sequence
  Description of Artificial Sequence: Synthetic oligonucleotide
  Antisense strand to SEQ ID NO: 2076934
uaguugcuuaguaacccug

SEQ ID NO: 2076936 - RNA, 19 nt, Artificial Sequence
  Description of Artificial Sequence: Synthetic oligonucleotide
  Sense strand starting at position 2175 of SEQ ID NO: 1881860
cuauacucccacugaggua

SEQ ID NO: 2076937 - RNA, 19 nt, Artificial Sequence
  Description of Artificial Sequence: Synthetic oligonucleotide
  Antisense strand to SEQ ID NO: 2076936
uaccucagugggaguauag

SEQ ID NO: 2076938 - RNA, 19 nt, Artificial Sequence
  Description of Artificial Sequence: Synthetic oligonucleotide
  Sense strand starting at position 2284 of SEQ ID NO: 1881860
ugaguauguuaacccucaa

SEQ ID NO: 2076939 - RNA, 19 nt, Artificial Sequence
  Description of Artificial Sequence: Synthetic oligonucleotide
  Antisense strand to SEQ ID NO: 2076938
uugaggguuaacauacuca

SEQ ID NO: 2076940 - RNA, 19 nt, Artificial Sequence
  Description of Artificial Sequence: Synthetic oligonucleotide
  Sense strand starting at position 2475 of SEQ ID NO: 1881860
accuuaauggagggcgauu

SEQ ID NO: 2076941 - RNA, 19 nt, Artificial Sequence
  Description of Artificial Sequence: Synthetic oligonucleotide
  Antisense strand to SEQ ID NO: 2076940
aaucgcccuccauuaaggu

SEQ ID NO: 2076942 - RNA, 19 nt, Artificial Sequence
  Description of Artificial Sequence: Synthetic oligonucleotide
  Sense strand starting at position 2572 of SEQ ID NO: 1881860
aguuauacauucuuaugac

SEQ ID NO: 2076943 - RNA, 19 nt, Artificial Sequence
  Description of Artificial Sequence: Synthetic oligonucleotide
  Antisense strand to SEQ ID NO: 2076942
gucauaagaauguauaacu

SEQ ID NO: 2076944 - RNA, 19 nt, Artificial Sequence
  Description of Artificial Sequence: Synthetic oligonucleotide
  Sense strand starting at position 2642 of SEQ ID NO: 1881860
uugacuggaucuuuagagu

SEQ ID NO: 2076945 - RNA, 19 nt, Artificial Sequence
  Description of Artificial Sequence: Synthetic oligonucleotide
  Antisense strand to SEQ ID NO: 2076944
acucuaaagauccagucaa

SEQ ID NO: 2076946 - RNA, 19 nt, Artificial Sequence
  Description of Artificial Sequence: Synthetic oligonucleotide
  Sense strand starting at position 2670 of SEQ ID NO: 1881860
ccaaauaguucuguacaug

SEQ ID NO: 2076947 - RNA, 19 nt, Artificial Sequence
  Description of Artificial Sequence: Synthetic oligonucleotide
  Antisense strand to SEQ ID NO: 2076946
cauguacagaacuauuugg

SEQ ID NO: 2076948 - RNA, 19 nt, Artificial Sequence
  Description of Artificial Sequence: Synthetic oligonucleotide
  Sense strand starting at position 2786 of SEQ ID NO: 1881860
ugcagagaacuaugugaga

SEQ ID NO: 2076949 - RNA, 19 nt, Artificial Sequence
  Description of Artificial Sequence: Synthetic oligonucleotide
  Antisense strand to SEQ ID NO: 2076948
ucucacauaguucucugca

SEQ ID NO: 2076950 - RNA, 19 nt, Artificial Sequence
  Description of Artificial Sequence: Synthetic oligonucleotide
  Sense strand starting at position 2947 of SEQ ID NO: 1881860
agauauucugaaugaugua

SEQ ID NO: 2076951 - RNA, 19 nt, Artificial Sequence
  Description of Artificial Sequence: Synthetic oligonucleotide
  Antisense strand to SEQ ID NO: 2076950
uacaucauucagaauaucu

SEQ ID NO: 2076952 - RNA, 19 nt, Artificial Sequence
  Description of Artificial Sequence: Synthetic oligonucleotide
  Sense strand starting at position 3409 of SEQ ID NO: 1881860
uggguaugacagcauucua

SEQ ID NO: 2076953 - RNA, 19 nt, Artificial Sequence
  Description of Artificial Sequence: Synthetic oligonucleotide
  Antisense strand to SEQ ID NO: 2076952
uagaaugcugucauaccca

SEQ ID NO: 2076954 - RNA, 19 nt, Artificial Sequence
  Description of Artificial Sequence: Synthetic oligonucleotide
  Sense strand starting at position 3517 of SEQ ID NO: 1881860
guguaaaggauuuguguca

SEQ ID NO: 2076955 - RNA, 19 nt, Artificial Sequence
  Description of Artificial Sequence: Synthetic oligonucleotide
  Antisense strand to SEQ ID NO: 2076954
ugacacaaauccuuuacac

SEQ ID NO: 2076956 - RNA, 19 nt, Artificial Sequence
  Description of Artificial Sequence: Synthetic oligonucleotide
  Sense strand starting at position 3522 of SEQ ID NO: 1881860
aaggauuugugucagagga

SEQ ID NO: 2076957 - RNA, 19 nt, Artificial Sequence
  Description of Artificial Sequence: Synthetic oligonucleotide
  Antisense strand to SEQ ID NO: 2076956
uccucugacacaaauccuu

SEQ ID NO: 2076958 - RNA, 19 nt, Artificial Sequence
  Description of Artificial Sequence: Synthetic oligonucleotide
  Sense strand starting at position 3524 of SEQ ID NO: 1881860
ggauuugugucagaggaaa

SEQ ID NO: 2076959 - RNA, 19 nt, Artificial Sequence
  Description of Artificial Sequence: Synthetic oligonucleotide
  Antisense strand to SEQ ID NO: 2076958
uuuccucugacacaaaucc

SEQ ID NO: 2076960 - RNA, 19 nt, Artificial Sequence
  Description of Artificial Sequence: Synthetic oligonucleotide
  Sense strand starting at position 3643 of SEQ ID NO: 1881860
gagacaugcuccuuacaug

SEQ ID NO: 2076961 - RNA, 19 nt, Artificial Sequence
  Description of Artificial Sequence: Synthetic oligonucleotide
  Antisense strand to SEQ ID NO: 2076960
cauguaaggagcaugucuc

SEQ ID NO: 2076962 - RNA, 19 nt, Artificial Sequence
  Description of Artificial Sequence: Synthetic oligonucleotide
  Sense strand starting at position 3702 of SEQ ID NO: 1881860
aaggaauguuggcccaaca

SEQ ID NO: 2076963 - RNA, 19 nt, Artificial Sequence
  Description of Artificial Sequence: Synthetic oligonucleotide
  Antisense strand to SEQ ID NO: 2076962
uguugggccaacauuccuu

SEQ ID NO: 2076964 - RNA, 19 nt, Artificial Sequence
  Description of Artificial Sequence: Synthetic oligonucleotide
  Sense strand starting at position 3719 of SEQ ID NO: 1881860
cauaguugaccaugguaca

SEQ ID NO: 2076965 - RNA, 19 nt, Artificial Sequence
  Description of Artificial Sequence: Synthetic oligonucleotide
  Antisense strand to SEQ ID NO: 2076964
uguaccauggucaacuaug

SEQ ID NO: 2076966 - RNA, 19 nt, Artificial Sequence
  Description of Artificial Sequence: Synthetic oligonucleotide
  Sense strand starting at position 3720 of SEQ ID NO: 1881860
auaguugaccaugguacau

SEQ ID NO: 2076967 - RNA, 19 nt, Artificial Sequence
  Description of Artificial Sequence: Synthetic oligonucleotide
  Antisense strand to SEQ ID NO: 2076966
auguaccauggucaacuau

SEQ ID NO: 2076968 - RNA, 19 nt, Artificial Sequence
  Description of Artificial Sequence: Synthetic oligonucleotide
  Sense strand starting at position 3966 of SEQ ID NO: 1881860
ggaauaguuaacuggagcu

SEQ ID NO: 2076969 - RNA, 19 nt, Artificial Sequence
  Description of Artificial Sequence: Synthetic oligonucleotide
  Antisense strand to SEQ ID NO: 2076968
agcuccaguuaacuauucc

SEQ ID NO: 2076970 - RNA, 19 nt, Artificial Sequence
  Description of Artificial Sequence: Synthetic oligonucleotide
  Sense strand starting at position 3968 of SEQ ID NO: 1881860
aauaguuaacuggagcuuu

SEQ ID NO: 2076971 - RNA, 19 nt, Artificial Sequence
  Description of Artificial Sequence: Synthetic oligonucleotide
  Antisense strand to SEQ ID NO: 2076970
aaagcuccaguuaacuauu

SEQ ID NO: 2076972 - RNA, 19 nt, Artificial Sequence
  Description of Artificial Sequence: Synthetic oligonucleotide
  Sense strand starting at position 116 of SEQ ID NO: 1881861
ggauccauauugcugcaaa

SEQ ID NO: 2076973 - RNA, 19 nt, Artificial Sequence
  Description of Artificial Sequence: Synthetic oligonucleotide
  Antisense strand to SEQ ID NO: 2076972
uuugcagcaauauggaucc

SEQ ID NO: 2076974 - RNA, 19 nt, Artificial Sequence
  Description of Artificial Sequence: Synthetic oligonucleotide
  Sense strand starting at position 235 of SEQ ID NO: 1881861
ugugaauagcacugggaug

SEQ ID NO: 2076975 - RNA, 19 nt, Artificial Sequence
  Description of Artificial Sequence: Synthetic oligonucleotide
  Antisense strand to SEQ ID NO: 2076974
caucccagugcuauucaca

SEQ ID NO: 2076976 - RNA, 19 nt, Artificial Sequence
  Description of Artificial Sequence: Synthetic oligonucleotide
  Sense strand starting at position 236 of SEQ ID NO: 1881861
gugaauagcacugggauga

SEQ ID NO: 2076977 - RNA, 19 nt, Artificial Sequence
  Description of Artificial Sequence: Synthetic oligonucleotide
  Antisense strand to SEQ ID NO: 2076976
ucaucccagugcuauucac

SEQ ID NO: 2076978 - RNA, 19 nt, Artificial Sequence
  Description of Artificial Sequence: Synthetic oligonucleotide
  Sense strand starting at position 409 of SEQ ID NO: 1881861
ccaucaauaguguaugaac

SEQ ID NO: 2076979 - RNA, 19 nt, Artificial Sequence
  Description of Artificial Sequence: Synthetic oligonucleotide
  Antisense strand to SEQ ID NO: 2076978
guucauacacuauugaugg

SEQ ID NO: 2076980 - RNA, 19 nt, Artificial Sequence
  Description of Artificial Sequence: Synthetic oligonucleotide
  Sense strand starting at position 411 of SEQ ID NO: 1881861
aucaauaguguaugaacau

SEQ ID NO: 2076981 - RNA, 19 nt, Artificial Sequence
  Description of Artificial Sequence: Synthetic oligonucleotide
  Antisense strand to SEQ ID NO: 2076980
auguucauacacuauugau

SEQ ID NO: 2076982 - RNA, 19 nt, Artificial Sequence
  Description of Artificial Sequence: Synthetic oligonucleotide
  Sense strand starting at position 607 of SEQ ID NO: 1881861
cuuuauuuagcuugucuuu

SEQ ID NO: 2076983 - RNA, 19 nt, Artificial Sequence
  Description of Artificial Sequence: Synthetic oligonucleotide
  Antisense strand to SEQ ID NO: 2076982
aaagacaagcuaaauaaag

SEQ ID NO: 2076984 - RNA, 19 nt, Artificial Sequence
  Description of Artificial Sequence: Synthetic oligonucleotide
  Sense strand starting at position 693 of SEQ ID NO: 1881861
cauuguuauuaguugggaa

SEQ ID NO: 2076985 - RNA, 19 nt, Artificial Sequence
  Description of Artificial Sequence: Synthetic oligonucleotide
  Antisense strand to SEQ ID NO: 2076984
uucccaacuaauaacaaug

SEQ ID NO: 2076986 - RNA, 19 nt, Artificial Sequence
  Description of Artificial Sequence: Synthetic oligonucleotide
  Sense strand starting at position 694 of SEQ ID NO: 1881861
auuguuauuaguugggaaa

SEQ ID NO: 2076987 - RNA, 19 nt, Artificial Sequence
  Description of Artificial Sequence: Synthetic oligonucleotide
  Antisense strand to SEQ ID NO: 2076986
uuucccaacuaauaacaau

SEQ ID NO: 2076988 - RNA, 19 nt, Artificial Sequence
  Description of Artificial Sequence: Synthetic oligonucleotide
  Sense strand starting at position 695 of SEQ ID NO: 1881861
uuguuauuaguugggaaau

SEQ ID NO: 2076989 - RNA, 19 nt, Artificial Sequence
  Description of Artificial Sequence: Synthetic oligonucleotide
  Antisense strand to SEQ ID NO: 2076988
auuucccaacuaauaacaa

SEQ ID NO: 2076990 - RNA, 19 nt, Artificial Sequence
  Description of Artificial Sequence: Synthetic oligonucleotide
  Sense strand starting at position 865 of SEQ ID NO: 1881861
aguagaaacucagcugaaa

SEQ ID NO: 2076991 - RNA, 19 nt, Artificial Sequence
  Description of Artificial Sequence: Synthetic oligonucleotide
  Antisense strand to SEQ ID NO: 2076990
uuucagcugaguuucuacu

SEQ ID NO: 2076992 - RNA, 19 nt, Artificial Sequence
  Description of Artificial Sequence: Synthetic oligonucleotide
  Sense strand starting at position 942 of SEQ ID NO: 1881861
uguauauguaaggauaugu

SEQ ID NO: 2076993 - RNA, 19 nt, Artificial Sequence
  Description of Artificial Sequence: Synthetic oligonucleotide
  Antisense strand to SEQ ID NO: 2076992
acauauccuuacauauaca

SEQ ID NO: 2076994 - RNA, 19 nt, Artificial Sequence
  Description of Artificial Sequence: Synthetic oligonucleotide
  Sense strand starting at position 969 of SEQ ID NO: 1881861
ucaauugcuuuauuggaau

SEQ ID NO: 2076995 - RNA, 19 nt, Artificial Sequence
  Description of Artificial Sequence: Synthetic oligonucleotide
  Antisense strand to SEQ ID NO: 2076994
auuccaauaaagcaauuga

SEQ ID NO: 2076996 - RNA, 19 nt, Artificial Sequence
  Description of Artificial Sequence: Synthetic oligonucleotide
  Sense strand starting at position 1031 of SEQ ID NO: 1881861
guauguucacgggauggua

SEQ ID NO: 2076997 - RNA, 19 nt, Artificial Sequence
  Description of Artificial Sequence: Synthetic oligonucleotide
  Antisense strand to SEQ ID NO: 2076996
uaccaucccgugaacauac

SEQ ID NO: 2076998 - RNA, 19 nt, Artificial Sequence
  Description of Artificial Sequence: Synthetic oligonucleotide
  Sense strand starting at position 1508 of SEQ ID NO: 1881861
uggguaauacgguaacucu

SEQ ID NO: 2076999 - RNA, 19 nt, Artificial Sequence
  Description of Artificial Sequence: Synthetic oligonucleotide
  Antisense strand to SEQ ID NO: 2076998
agaguuaccguauuaccca

SEQ ID NO: 2077000 - RNA, 19 nt, Artificial Sequence
  Description of Artificial Sequence: Synthetic oligonucleotide
  Sense strand starting at position 1642 of SEQ ID NO: 1881861
guucuuauuguauauaggu

SEQ ID NO: 2077001 - RNA, 19 nt, Artificial Sequence
  Description of Artificial Sequence: Synthetic oligonucleotide
  Antisense strand to SEQ ID NO: 2077000
accuauauacaauaagaac

SEQ ID NO: 2077002 - RNA, 19 nt, Artificial Sequence
  Description of Artificial Sequence: Synthetic oligonucleotide
  Sense strand starting at position 1783 of SEQ ID NO: 1881861
cacaguuuaggugauguaa

SEQ ID NO: 2077003 - RNA, 19 nt, Artificial Sequence
  Description of Artificial Sequence: Synthetic oligonucleotide
  Antisense strand to SEQ ID NO: 2077002
uuacaucaccuaaacugug

SEQ ID NO: 2077004 - RNA, 19 nt, Artificial Sequence
  Description of Artificial Sequence: Synthetic oligonucleotide
  Sense strand starting at position 1909 of SEQ ID NO: 1881861
guacuuuguccucagauga

SEQ ID NO: 2077005 - RNA, 19 nt, Artificial Sequence
  Description of Artificial Sequence: Synthetic oligonucleotide
  Antisense strand to SEQ ID NO: 2077004
ucaucugaggacaaaguac

SEQ ID NO: 2077006 - RNA, 19 nt, Artificial Sequence
  Description of Artificial Sequence: Synthetic oligonucleotide
  Sense strand starting at position 2430 of SEQ ID NO: 1881861
ccauuucuaugcuagagaa

SEQ ID NO: 2077007 - RNA, 19 nt, Artificial Sequence
  Description of Artificial Sequence: Synthetic oligonucleotide
  Antisense strand to SEQ ID NO: 2077006
uucucuagcauagaaaugg

SEQ ID NO: 2077008 - RNA, 19 nt, Artificial Sequence
  Description of Artificial Sequence: Synthetic oligonucleotide
  Sense strand starting at position 2472 of SEQ ID NO: 1881861
gagccuguauaaucuugaa

SEQ ID NO: 2077009 - RNA, 19 nt, Artificial Sequence
  Description of Artificial Sequence: Synthetic oligonucleotide
  Antisense strand to SEQ ID NO: 2077008
uucaagauuauacaggcuc

SEQ ID NO: 2077010 - RNA, 19 nt, Artificial Sequence
  Description of Artificial Sequence: Synthetic oligonucleotide
  Sense strand starting at position 2476 of SEQ ID NO: 1881861
cuguauaaucuugaaaguu

SEQ ID NO: 2077011 - RNA, 19 nt, Artificial Sequence
  Description of Artificial Sequence: Synthetic oligonucleotide
  Antisense strand to SEQ ID NO: 2077010
aacuuucaagauuauacag

SEQ ID NO: 2077012 - RNA, 19 nt, Artificial Sequence
  Description of Artificial Sequence: Synthetic oligonucleotide
  Sense strand starting at position 2529 of SEQ ID NO: 1881861
uagaguuagcuuuauugga

SEQ ID NO: 2077013 - RNA, 19 nt, Artificial Sequence
  Description of Artificial Sequence: Synthetic oligonucleotide
  Antisense strand to SEQ ID NO: 2077012
uccaauaaagcuaacucua

SEQ ID NO: 2077014 - RNA, 19 nt, Artificial Sequence
  Description of Artificial Sequence: Synthetic oligonucleotide
  Sense strand starting at position 2531 of SEQ ID NO: 1881861
gaguuagcuuuauuggaag

SEQ ID NO: 2077015 - RNA, 19 nt, Artificial Sequence
  Description of Artificial Sequence: Synthetic oligonucleotide
  Antisense strand to SEQ ID NO: 2077014
cuuccaauaaagcuaacuc

SEQ ID NO: 2077016 - RNA, 19 nt, Artificial Sequence
  Description of Artificial Sequence: Synthetic oligonucleotide
  Sense strand starting at position 2664 of SEQ ID NO: 1881861
gaggcaacgauggaguuaa

SEQ ID NO: 2077017 - RNA, 19 nt, Artificial Sequence
  Description of Artificial Sequence: Synthetic oligonucleotide
  Antisense strand to SEQ ID NO: 2077016
uuaacuccaucguugccuc

SEQ ID NO: 2077018 - RNA, 19 nt, Artificial Sequence
  Description of Artificial Sequence: Synthetic oligonucleotide
  Sense strand starting at position 2763 of SEQ ID NO: 1881861
auagaauaugcugaucucu

SEQ ID NO: 2077019 - RNA, 19 nt, Artificial Sequence
  Description of Artificial Sequence: Synthetic oligonucleotide
  Antisense strand to SEQ ID NO: 2077018
agagaucagcauauucuau

SEQ ID NO: 2077020 - RNA, 19 nt, Artificial Sequence
  Description of Artificial Sequence: Synthetic oligonucleotide
  Sense strand starting at position 2768 of SEQ ID NO: 1881861
auaugcugaucucugcaaa

SEQ ID NO: 2077021 - RNA, 19 nt, Artificial Sequence
  Description of Artificial Sequence: Synthetic oligonucleotide
  Antisense strand to SEQ ID NO: 2077020
uuugcagagaucagcauau

SEQ ID NO: 2077022 - RNA, 19 nt, Artificial Sequence
  Description of Artificial Sequence: Synthetic oligonucleotide
  Sense strand starting at position 2980 of SEQ ID NO: 1881861
uucuuaauugggugacacu

SEQ ID NO: 2077023 - RNA, 19 nt, Artificial Sequence
  Description of Artificial Sequence: Synthetic oligonucleotide
  Antisense strand to SEQ ID NO: 2077022
agugucacccaauuaagaa

SEQ ID NO: 2077024 - RNA, 19 nt, Artificial Sequence
  Description of Artificial Sequence: Synthetic oligonucleotide
  Sense strand starting at position 3136 of SEQ ID NO: 1881861
gggcuauuacuccacuaug

SEQ ID NO: 2077025 - RNA, 19 nt, Artificial Sequence
  Description of Artificial Sequence: Synthetic oligonucleotide
  Antisense strand to SEQ ID NO: 2077024
cauaguggaguaauagccc

SEQ ID NO: 2077026 - RNA, 19 nt, Artificial Sequence
  Description of Artificial Sequence: Synthetic oligonucleotide
  Sense strand starting at position 3139 of SEQ ID NO: 1881861
cuauuacuccacuaugugu

SEQ ID NO: 2077027 - RNA, 19 nt, Artificial Sequence
  Description of Artificial Sequence: Synthetic oligonucleotide
  Antisense strand to SEQ ID NO: 2077026
acacauaguggaguaauag

SEQ ID NO: 2077028 - RNA, 19 nt, Artificial Sequence
  Description of Artificial Sequence: Synthetic oligonucleotide
  Sense strand starting at position 3268 of SEQ ID NO: 1881861
acauguaguuuguccauuu

SEQ ID NO: 2077029 - RNA, 19 nt, Artificial Sequence
  Description of Artificial Sequence: Synthetic oligonucleotide
  Antisense strand to SEQ ID NO: 2077028
aaauggacaaacuacaugu

SEQ ID NO: 2077030 - RNA, 19 nt, Artificial Sequence
  Description of Artificial Sequence: Synthetic oligonucleotide
  Sense strand starting at position 3381 of SEQ ID NO: 1881861
ugcuuucugguccaaauau

SEQ ID NO: 2077031 - RNA, 19 nt, Artificial Sequence
  Description of Artificial Sequence: Synthetic oligonucleotide
  Antisense strand to SEQ ID NO: 2077030
auauuuggaccagaaagca

SEQ ID NO: 2077032 - RNA, 19 nt, Artificial Sequence
  Description of Artificial Sequence: Synthetic oligonucleotide
  Sense strand starting at position 3432 of SEQ ID NO: 1881861
auuguaagaaauuguagag

SEQ ID NO: 2077033 - RNA, 19 nt, Artificial Sequence
  Description of Artificial Sequence: Synthetic oligonucleotide
  Antisense strand to SEQ ID NO: 2077032
cucuacaauuucuuacaau

SEQ ID NO: 2077034 - RNA, 19 nt, Artificial Sequence
  Description of Artificial Sequence: Synthetic oligonucleotide
  Sense strand starting at position 3514 of SEQ ID NO: 1881861
auuuccgaaucauauagau

SEQ ID NO: 2077035 - RNA, 19 nt, Artificial Sequence
  Description of Artificial Sequence: Synthetic oligonucleotide
  Antisense strand to SEQ ID NO: 2077034
aucuauaugauucggaaau

SEQ ID NO: 2077036 - RNA, 19 nt, Artificial Sequence
  Description of Artificial Sequence: Synthetic oligonucleotide
  Sense strand starting at position 3549 of SEQ ID NO: 1881861
gcccacagauuagaaauuu

SEQ ID NO: 2077037 - RNA, 19 nt, Artificial Sequence
  Description of Artificial Sequence: Synthetic oligonucleotide
  Antisense strand to SEQ ID NO: 2077036
aaauuucuaaucugugggc

SEQ ID NO: 2077038 - RNA, 19 nt, Artificial Sequence
  Description of Artificial Sequence: Synthetic oligonucleotide
  Sense strand starting at position 3593 of SEQ ID NO: 1881861
ugaaauaauccaggucuac

SEQ ID NO: 2077039 - RNA, 19 nt, Artificial Sequence
  Description of Artificial Sequence: Synthetic oligonucleotide
  Antisense strand to SEQ ID NO: 2077038
guagaccuggauuauuuca

SEQ ID NO: 2077040 - RNA, 19 nt, Artificial Sequence
  Description of Artificial Sequence: Synthetic oligonucleotide
  Sense strand starting at position 3640 of SEQ ID NO: 1881861
gcaaguuugauuugcugua

SEQ ID NO: 2077041 - RNA, 19 nt, Artificial Sequence
  Description of Artificial Sequence: Synthetic oligonucleotide
  Antisense strand to SEQ ID NO: 2077040
uacagcaaaucaaacuugc

SEQ ID NO: 2077042 - RNA, 19 nt, Artificial Sequence
  Description of Artificial Sequence: Synthetic oligonucleotide
  Sense strand starting at position 3722 of SEQ ID NO: 1881861
cagagaugucaccgggcaa

SEQ ID NO: 2077043 - RNA, 19 nt, Artificial Sequence
  Description of Artificial Sequence: Synthetic oligonucleotide
  Antisense strand to SEQ ID NO: 2077042
uugcccggugacaucucug

SEQ ID NO: 2077044 - RNA, 19 nt, Artificial Sequence
  Description of Artificial Sequence: Synthetic oligonucleotide
  Sense strand starting at position 3723 of SEQ ID NO: 1881861
agagaugucaccgggcaag

SEQ ID NO: 2077045 - RNA, 19 nt, Artificial Sequence
  Description of Artificial Sequence: Synthetic oligonucleotide
  Antisense strand to SEQ ID NO: 2077044
cuugcccggugacaucucu

SEQ ID NO: 2077046 - RNA, 19 nt, Artificial Sequence
  Description of Artificial Sequence: Synthetic oligonucleotide
  Sense strand starting at position 3773 of SEQ ID NO: 1881861
cuaguccuacagugaucaa

SEQ ID NO: 2077047 - RNA, 19 nt, Artificial Sequence
  Description of Artificial Sequence: Synthetic oligonucleotide
  Antisense strand to SEQ ID NO: 2077046
uugaucacuguaggacuag

SEQ ID NO: 2077048 - RNA, 19 nt, Artificial Sequence
  Description of Artificial Sequence: Synthetic oligonucleotide
  Sense strand starting at position 3776 of SEQ ID NO: 1881861
guccuacagugaucaagaa

SEQ ID NO: 2077049 - RNA, 19 nt, Artificial Sequence
  Description of Artificial Sequence: Synthetic oligonucleotide
  Antisense strand to SEQ ID NO: 2077048
uucuugaucacuguaggac

SEQ ID NO: 2077050 - RNA, 19 nt, Artificial Sequence
  Description of Artificial Sequence: Synthetic oligonucleotide
  Sense strand starting at position 3788 of SEQ ID NO: 1881861
ucaagaauguaagauuucu

SEQ ID NO: 2077051 - RNA, 19 nt, Artificial Sequence
  Description of Artificial Sequence: Synthetic oligonucleotide
  Antisense strand to SEQ ID NO: 2077050
agaaaucuuacauucuuga

SEQ ID NO: 2077052 - RNA, 19 nt, Artificial Sequence
  Description of Artificial Sequence: Synthetic oligonucleotide
  Sense strand starting at position 33 of SEQ ID NO: 1881862
uugcaaauuguccaccuga

SEQ ID NO: 2077053 - RNA, 19 nt, Artificial Sequence
  Description of Artificial Sequence: Synthetic oligonucleotide
  Antisense strand to SEQ ID NO: 2077052
ucagguggacaauuugcaa

SEQ ID NO: 2077054 - RNA, 19 nt, Artificial Sequence
  Description of Artificial Sequence: Synthetic oligonucleotide
  Sense strand starting at position 62 of SEQ ID NO: 1881862
gcuaccagaacguauaaga

SEQ ID NO: 2077055 - RNA, 19 nt, Artificial Sequence
  Description of Artificial Sequence: Synthetic oligonucleotide
  Antisense strand to SEQ ID NO: 2077054
ucuuauacguucugguagc

SEQ ID NO: 2077056 - RNA, 19 nt, Artificial Sequence
  Description of Artificial Sequence: Synthetic oligonucleotide
  Sense strand starting at position 932 of SEQ ID NO: 1881862
ugggacagccagcaugaua

SEQ ID NO: 2077057 - RNA, 19 nt, Artificial Sequence
  Description of Artificial Sequence: Synthetic oligonucleotide
  Antisense strand to SEQ ID NO: 2077056
uaucaugcuggcuguccca

SEQ ID NO: 2077058 - RNA, 19 nt, Artificial Sequence
  Description of Artificial Sequence: Synthetic oligonucleotide
  Sense strand starting at position 943 of SEQ ID NO: 1881862
gcaugauaaucacuugagg

SEQ ID NO: 2077059 - RNA, 19 nt, Artificial Sequence
  Description of Artificial Sequence: Synthetic oligonucleotide
  Antisense strand to SEQ ID NO: 2077058
ccucaagugauuaucaugc

SEQ ID NO: 2077060 - RNA, 19 nt, Artificial Sequence
  Description of Artificial Sequence: Synthetic oligonucleotide
  Sense strand starting at position 954 of SEQ ID NO: 1881862
acuugagguuacucauuac

SEQ ID NO: 2077061 - RNA, 19 nt, Artificial Sequence
  Description of Artificial Sequence: Synthetic oligonucleotide
  Antisense strand to SEQ ID NO: 2077060
guaaugaguaaccucaagu

SEQ ID NO: 2077062 - RNA, 19 nt, Artificial Sequence
  Description of Artificial Sequence: Synthetic oligonucleotide
  Sense strand starting at position 957 of SEQ ID NO: 1881862
ugagguuacucauuacaaa

SEQ ID NO: 2077063 - RNA, 19 nt, Artificial Sequence
  Description of Artificial Sequence: Synthetic oligonucleotide
  Antisense strand to SEQ ID NO: 2077062
uuuguaaugaguaaccuca

SEQ ID NO: 2077064 - RNA, 19 nt, Artificial Sequence
  Description of Artificial Sequence: Synthetic oligonucleotide
  Sense strand starting at position 1163 of SEQ ID NO: 1881862
ugguuucucuuaucagaga

SEQ ID NO: 2077065 - RNA, 19 nt, Artificial Sequence
  Description of Artificial Sequence: Synthetic oligonucleotide
  Antisense strand to SEQ ID NO: 2077064
ucucugauaagagaaacca

SEQ ID NO: 2077066 - RNA, 19 nt, Artificial Sequence
  Description of Artificial Sequence: Synthetic oligonucleotide
  Sense strand starting at position 1216 of SEQ ID NO: 1881862
ugaagaggcacuuguuaga

SEQ ID NO: 2077067 - RNA, 19 nt, Artificial Sequence
  Description of Artificial Sequence: Synthetic oligonucleotide
  Antisense strand to SEQ ID NO: 2077066
ucuaacaagugccucuuca

SEQ ID NO: 2077068 - RNA, 19 nt, Artificial Sequence
  Description of Artificial Sequence: Synthetic oligonucleotide
  Sense strand starting at position 1378 of SEQ ID NO: 1881862
ugcacugcacuggaagaau

SEQ ID NO: 2077069 - RNA, 19 nt, Artificial Sequence
  Description of Artificial Sequence: Synthetic oligonucleotide
  Antisense strand to SEQ ID NO: 2077068
auucuuccagugcagugca

SEQ ID NO: 2077070 - RNA, 19 nt, Artificial Sequence
  Description of Artificial Sequence: Synthetic oligonucleotide
  Sense strand starting at position 1417 of SEQ ID NO: 1881862
agccgucuucuguuaguca

SEQ ID NO: 2077071 - RNA, 19 nt, Artificial Sequence
  Description of Artificial Sequence: Synthetic oligonucleotide
  Antisense strand to SEQ ID NO: 2077070
ugacuaacagaagacggcu

SEQ ID NO: 2077072 - RNA, 19 nt, Artificial Sequence
  Description of Artificial Sequence: Synthetic oligonucleotide
  Sense strand starting at position 1734 of SEQ ID NO: 1881862
agcauaaucuuguuaagau

SEQ ID NO: 2077073 - RNA, 19 nt, Artificial Sequence
  Description of Artificial Sequence: Synthetic oligonucleotide
  Antisense strand to SEQ ID NO: 2077072
aucuuaacaagauuaugcu

SEQ ID NO: 2077074 - RNA, 19 nt, Artificial Sequence
  Description of Artificial Sequence: Synthetic oligonucleotide
  Sense strand starting at position 1770 of SEQ ID NO: 1881862
gugaaugaauagcuauuaa

SEQ ID NO: 2077075 - RNA, 19 nt, Artificial Sequence
  Description of Artificial Sequence: Synthetic oligonucleotide
  Antisense strand to SEQ ID NO: 2077074
uuaauagcuauucauucac

SEQ ID NO: 2077076 - RNA, 19 nt, Artificial Sequence
  Description of Artificial Sequence: Synthetic oligonucleotide
  Sense strand starting at position 1790 of SEQ ID NO: 1881862
augugaaagcaaugaaaug

SEQ ID NO: 2077077 - RNA, 19 nt, Artificial Sequence
  Description of Artificial Sequence: Synthetic oligonucleotide
  Antisense strand to SEQ ID NO: 2077076
cauuucauugcuuucacau

SEQ ID NO: 2077078 - RNA, 19 nt, Artificial Sequence
  Description of Artificial Sequence: Synthetic oligonucleotide
  Sense strand starting at position 1890 of SEQ ID NO: 1881862
ugagguaagacuuacuugu

SEQ ID NO: 2077079 - RNA, 19 nt, Artificial Sequence
  Description of Artificial Sequence: Synthetic oligonucleotide
  Antisense strand to SEQ ID NO: 2077078
acaaguaagucuuaccuca

SEQ ID NO: 2077080 - RNA, 19 nt, Artificial Sequence
  Description of Artificial Sequence: Synthetic oligonucleotide
  Sense strand starting at position 1894 of SEQ ID NO: 1881862
guaagacuuacuuguggag

SEQ ID NO: 2077081 - RNA, 19 nt, Artificial Sequence
  Description of Artificial Sequence: Synthetic oligonucleotide
  Antisense strand to SEQ ID NO: 2077080
cuccacaaguaagucuuac

SEQ ID NO: 2077082 - RNA, 19 nt, Artificial Sequence
  Description of Artificial Sequence: Synthetic oligonucleotide
  Sense strand starting at position 1898 of SEQ ID NO: 1881862
gacuuacuuguggaguaac

SEQ ID NO: 2077083 - RNA, 19 nt, Artificial Sequence
  Description of Artificial Sequence: Synthetic oligonucleotide
  Antisense strand to SEQ ID NO: 2077082
guuacuccacaaguaaguc

SEQ ID NO: 2077084 - RNA, 19 nt, Artificial Sequence
  Description of Artificial Sequence: Synthetic oligonucleotide
  Sense strand starting at position 1901 of SEQ ID NO: 1881862
uuacuuguggaguaacuga

SEQ ID NO: 2077085 - RNA, 19 nt, Artificial Sequence
  Description of Artificial Sequence: Synthetic oligonucleotide
  Antisense strand to SEQ ID NO: 2077084
ucaguuacuccacaaguaa

SEQ ID NO: 2077086 - RNA, 19 nt, Artificial Sequence
  Description of Artificial Sequence: Synthetic oligonucleotide
  Sense strand starting at position 2057 of SEQ ID NO: 1881862
agaacuugguguucugaua

SEQ ID NO: 2077087 - RNA, 19 nt, Artificial Sequence
  Description of Artificial Sequence: Synthetic oligonucleotide
  Antisense strand to SEQ ID NO: 2077086
uaucagaacaccaaguucu

SEQ ID NO: 2077088 - RNA, 19 nt, Artificial Sequence
  Description of Artificial Sequence: Synthetic oligonucleotide
  Sense strand starting at position 2330 of SEQ ID NO: 1881862
ugccaugagcacuaaggaa

SEQ ID NO: 2077089 - RNA, 19 nt, Artificial Sequence
  Description of Artificial Sequence: Synthetic oligonucleotide
  Antisense strand to SEQ ID NO: 2077088
uuccuuagugcucauggca

SEQ ID NO: 2077090 - RNA, 19 nt, Artificial Sequence
  Description of Artificial Sequence: Synthetic oligonucleotide
  Sense strand starting at position 2444 of SEQ ID NO: 1881862
ccaucaaggccuuauuaag

SEQ ID NO: 2077091 - RNA, 19 nt, Artificial Sequence
  Description of Artificial Sequence: Synthetic oligonucleotide
  Antisense strand to SEQ ID NO: 2077090
cuuaauaaggccuugaugg

SEQ ID NO: 2077092 - RNA, 19 nt, Artificial Sequence
  Description of Artificial Sequence: Synthetic oligonucleotide
  Sense strand starting at position 2453 of SEQ ID NO: 1881862
ccuuauuaaguuuagucua

SEQ ID NO: 2077093 - RNA, 19 nt, Artificial Sequence
  Description of Artificial Sequence: Synthetic oligonucleotide
  Antisense strand to SEQ ID NO: 2077092
uagacuaaacuuaauaagg

SEQ ID NO: 2077094 - RNA, 19 nt, Artificial Sequence
  Description of Artificial Sequence: Synthetic oligonucleotide
  Sense strand starting at position 2556 of SEQ ID NO: 1881862
augaucaaaucuuuaguga

SEQ ID NO: 2077095 - RNA, 19 nt, Artificial Sequence
  Description of Artificial Sequence: Synthetic oligonucleotide
  Antisense strand to SEQ ID NO: 2077094
ucacuaaagauuugaucau

SEQ ID NO: 2077096 - RNA, 19 nt, Artificial Sequence
  Description of Artificial Sequence: Synthetic oligonucleotide
  Sense strand starting at position 2559 of SEQ ID NO: 1881862
aucaaaucuuuagugauug

SEQ ID NO: 2077097 - RNA, 19 nt, Artificial Sequence
  Description of Artificial Sequence: Synthetic oligonucleotide
  Antisense strand to SEQ ID NO: 2077096
caaucacuaaagauuugau

SEQ ID NO: 2077098 - RNA, 19 nt, Artificial Sequence
  Description of Artificial Sequence: Synthetic oligonucleotide
  Sense strand starting at position 2661 of SEQ ID NO: 1881862
acuacuguacgguacaauu

SEQ ID NO: 2077099 - RNA, 19 nt, Artificial Sequence
  Description of Artificial Sequence: Synthetic oligonucleotide
  Antisense strand to SEQ ID NO: 2077098
aauuguaccguacaguagu

SEQ ID NO: 2077100 - RNA, 19 nt, Artificial Sequence
  Description of Artificial Sequence: Synthetic oligonucleotide
  Sense strand starting at position 2663 of SEQ ID NO: 1881862
uacuguacgguacaauuau

SEQ ID NO: 2077101 - RNA, 19 nt, Artificial Sequence
  Description of Artificial Sequence: Synthetic oligonucleotide
  Antisense strand to SEQ ID NO: 2077100
auaauuguaccguacagua

SEQ ID NO: 2077102 - RNA, 19 nt, Artificial Sequence
  Description of Artificial Sequence: Synthetic oligonucleotide
  Sense strand starting at position 2698 of SEQ ID NO: 1881862
uguagaagucuuugaauau

SEQ ID NO: 2077103 - RNA, 19 nt, Artificial Sequence
  Description of Artificial Sequence: Synthetic oligonucleotide
  Antisense strand to SEQ ID NO: 2077102
auauucaaagacuucuaca

SEQ ID NO: 2077104 - RNA, 19 nt, Artificial Sequence
  Description of Artificial Sequence: Synthetic oligonucleotide
  Sense strand starting at position 2761 of SEQ ID NO: 1881862
agggaagguuucucacucu

SEQ ID NO: 2077105 - RNA, 19 nt, Artificial Sequence
  Description of Artificial Sequence: Synthetic oligonucleotide
  Antisense strand to SEQ ID NO: 2077104
agagugagaaaccuucccu

SEQ ID NO: 2077106 - RNA, 19 nt, Artificial Sequence
  Description of Artificial Sequence: Synthetic oligonucleotide
  Sense strand starting at position 2764 of SEQ ID NO: 1881862
gaagguuucucacucuuga

SEQ ID NO: 2077107 - RNA, 19 nt, Artificial Sequence
  Description of Artificial Sequence: Synthetic oligonucleotide
  Antisense strand to SEQ ID NO: 2077106
ucaagagugagaaaccuuc

SEQ ID NO: 2077108 - RNA, 19 nt, Artificial Sequence
  Description of Artificial Sequence: Synthetic oligonucleotide
  Sense strand starting at position 3149 of SEQ ID NO: 1881862
uguuuaaugcaugauuaug

SEQ ID NO: 2077109 - RNA, 19 nt, Artificial Sequence
  Description of Artificial Sequence: Synthetic oligonucleotide
  Antisense strand to SEQ ID NO: 2077108
cauaaucaugcauuaaaca

SEQ ID NO: 2077110 - RNA, 19 nt, Artificial Sequence
  Description of Artificial Sequence: Synthetic oligonucleotide
  Sense strand starting at position 3222 of SEQ ID NO: 1881862
agagauuguucagcaaagg

SEQ ID NO: 2077111 - RNA, 19 nt, Artificial Sequence
  Description of Artificial Sequence: Synthetic oligonucleotide
  Antisense strand to SEQ ID NO: 2077110
ccuuugcugaacaaucucu

SEQ ID NO: 2077112 - RNA, 19 nt, Artificial Sequence
  Description of Artificial Sequence: Synthetic oligonucleotide
  Sense strand starting at position 3398 of SEQ ID NO: 1881862
agacuaguauagcuaagau

SEQ ID NO: 2077113 - RNA, 19 nt, Artificial Sequence
  Description of Artificial Sequence: Synthetic oligonucleotide
  Antisense strand to SEQ ID NO: 2077112
aucuuagcuauacuagucu

SEQ ID NO: 2077114 - RNA, 19 nt, Artificial Sequence
  Description of Artificial Sequence: Synthetic oligonucleotide
  Sense strand starting at position 3495 of SEQ ID NO: 1881862
aggaauagcugccuuaaag

SEQ ID NO: 2077115 - RNA, 19 nt, Artificial Sequence
  Description of Artificial Sequence: Synthetic oligonucleotide
  Antisense strand to SEQ ID NO: 2077114
cuuuaaggcagcuauuccu

SEQ ID NO: 2077116 - RNA, 19 nt, Artificial Sequence
  Description of Artificial Sequence: Synthetic oligonucleotide
  Sense strand starting at position 3512 of SEQ ID NO: 1881862
aguaaacggcaauauaagu

SEQ ID NO: 2077117 - RNA, 19 nt, Artificial Sequence
  Description of Artificial Sequence: Synthetic oligonucleotide
  Antisense strand to SEQ ID NO: 2077116
acuuauauugccguuuacu

SEQ ID NO: 2077118 - RNA, 19 nt, Artificial Sequence
  Description of Artificial Sequence: Synthetic oligonucleotide
  Sense strand starting at position 3579 of SEQ ID NO: 1881862
ccagauguuugaguuaaau

SEQ ID NO: 2077119 - RNA, 19 nt, Artificial Sequence
  Description of Artificial Sequence: Synthetic oligonucleotide
  Antisense strand to SEQ ID NO: 2077118
auuuaacucaaacaucugg

SEQ ID NO: 2077120 - RNA, 19 nt, Artificial Sequence
  Description of Artificial Sequence: Synthetic oligonucleotide
  Sense strand starting at position 3637 of SEQ ID NO: 1881862
ugucuaguaugucuuauuu

SEQ ID NO: 2077121 - RNA, 19 nt, Artificial Sequence
  Description of Artificial Sequence: Synthetic oligonucleotide
  Antisense strand to SEQ ID NO: 2077120
aaauaagacauacuagaca

SEQ ID NO: 2077122 - RNA, 19 nt, Artificial Sequence
  Description of Artificial Sequence: Synthetic oligonucleotide
  Sense strand starting at position 3672 of SEQ ID NO: 1881862
ugugauuucccuuggcuga

SEQ ID NO: 2077123 - RNA, 19 nt, Artificial Sequence
  Description of Artificial Sequence: Synthetic oligonucleotide
  Antisense strand to SEQ ID NO: 2077122
ucagccaagggaaaucaca

SEQ ID NO: 2077124 - RNA, 19 nt, Artificial Sequence
  Description of Artificial Sequence: Synthetic oligonucleotide
  Sense strand starting at position 3673 of SEQ ID NO: 1881862
gugauuucccuuggcugau

SEQ ID NO: 2077125 - RNA, 19 nt, Artificial Sequence
  Description of Artificial Sequence: Synthetic oligonucleotide
  Antisense strand to SEQ ID NO: 2077124
aucagccaagggaaaucac

SEQ ID NO: 2077126 - RNA, 19 nt, Artificial Sequence
  Description of Artificial Sequence: Synthetic oligonucleotide
  Sense strand starting at position 3687 of SEQ ID NO: 1881862
cugaucauuucuuauagga

SEQ ID NO: 2077127 - RNA, 19 nt, Artificial Sequence
  Description of Artificial Sequence: Synthetic oligonucleotide
  Antisense strand to SEQ ID NO: 2077126
uccuauaagaaaugaucag

SEQ ID NO: 2077128 - RNA, 19 nt, Artificial Sequence
  Description of Artificial Sequence: Synthetic oligonucleotide
  Sense strand starting at position 3828 of SEQ ID NO: 1881862
uucuguggaguucaaggaa

SEQ ID NO: 2077129 - RNA, 19 nt, Artificial Sequence
  Description of Artificial Sequence: Synthetic oligonucleotide
  Antisense strand to SEQ ID NO: 2077128
uuccuugaacuccacagaa

SEQ ID NO: 2077130 - RNA, 19 nt, Artificial Sequence
  Description of Artificial Sequence: Synthetic oligonucleotide
  Sense strand starting at position 3922 of SEQ ID NO: 1881862
agguguugaagcuaccaau

SEQ ID NO: 2077131 - RNA, 19 nt, Artificial Sequence
  Description of Artificial Sequence: Synthetic oligonucleotide
  Antisense strand to SEQ ID NO: 2077130
auugguagcuucaacaccu

SEQ ID NO: 2077132 - RNA, 19 nt, Artificial Sequence
  Description of Artificial Sequence: Synthetic oligonucleotide
  Sense strand starting at position 254 of SEQ ID NO: 1881863
cagugaccuguguaaacca

SEQ ID NO: 2077133 - RNA, 19 nt, Artificial Sequence
  Description of Artificial Sequence: Synthetic oligonucleotide
  Antisense strand to SEQ ID NO: 2077132
ugguuuacacaggucacug

SEQ ID NO: 2077134 - RNA, 19 nt, Artificial Sequence
  Description of Artificial Sequence: Synthetic oligonucleotide
  Sense strand starting at position 381 of SEQ ID NO: 1881863
gucgaacgugccucauuau

SEQ ID NO: 2077135 - RNA, 19 nt, Artificial Sequence
  Description of Artificial Sequence: Synthetic oligonucleotide
  Antisense strand to SEQ ID NO: 2077134
auaaugaggcacguucgac

SEQ ID NO: 2077136 - RNA, 19 nt, Artificial Sequence
  Description of Artificial Sequence: Synthetic oligonucleotide
  Sense strand starting at position 384 of SEQ ID NO: 1881863
gaacgugccucauuauuuc

SEQ ID NO: 2077137 - RNA, 19 nt, Artificial Sequence
  Description of Artificial Sequence: Synthetic oligonucleotide
  Antisense strand to SEQ ID NO: 2077136
gaaauaaugaggcacguuc

SEQ ID NO: 2077138 - RNA, 19 nt, Artificial Sequence
  Description of Artificial Sequence: Synthetic oligonucleotide
  Sense strand starting at position 585 of SEQ ID NO: 1881863
guuuauuugcuguaucuca

SEQ ID NO: 2077139 - RNA, 19 nt, Artificial Sequence
  Description of Artificial Sequence: Synthetic oligonucleotide
  Antisense strand to SEQ ID NO: 2077138
ugagauacagcaaauaaac

SEQ ID NO: 2077140 - RNA, 19 nt, Artificial Sequence
  Description of Artificial Sequence: Synthetic oligonucleotide
  Sense strand starting at position 670 of SEQ ID NO: 1881863
cgugcuccaggagagaauu

SEQ ID NO: 2077141 - RNA, 19 nt, Artificial Sequence
  Description of Artificial Sequence: Synthetic oligonucleotide
  Antisense strand to SEQ ID NO: 2077140
aauucucuccuggagcacg

SEQ ID NO: 2077142 - RNA, 19 nt, Artificial Sequence
  Description of Artificial Sequence: Synthetic oligonucleotide
  Sense strand starting at position 811 of SEQ ID NO: 1881863
gauucuaggucuuuagaug

SEQ ID NO: 2077143 - RNA, 19 nt, Artificial Sequence
  Description of Artificial Sequence: Synthetic oligonucleotide
  Antisense strand to SEQ ID NO: 2077142
caucuaaagaccuagaauc

SEQ ID NO: 2077144 - RNA, 19 nt, Artificial Sequence
  Description of Artificial Sequence: Synthetic oligonucleotide
  Sense strand starting at position 868 of SEQ ID NO: 1881863
cuuugaauguaucuaugac

SEQ ID NO: 2077145 - RNA, 19 nt, Artificial Sequence
  Description of Artificial Sequence: Synthetic oligonucleotide
  Antisense strand to SEQ ID NO: 2077144
gucauagauacauucaaag

SEQ ID NO: 2077146 - RNA, 19 nt, Artificial Sequence
  Description of Artificial Sequence: Synthetic oligonucleotide
  Sense strand starting at position 1012 of SEQ ID NO: 1881863
gcaggaucuccugaggucu

SEQ ID NO: 2077147 - RNA, 19 nt, Artificial Sequence
  Description of Artificial Sequence: Synthetic oligonucleotide
  Antisense strand to SEQ ID NO: 2077146
agaccucaggagauccugc

SEQ ID NO: 2077148 - RNA, 19 nt, Artificial Sequence
  Description of Artificial Sequence: Synthetic oligonucleotide
  Sense strand starting at position 1123 of SEQ ID NO: 1881863
gaacucuuggcagagcaga

SEQ ID NO: 2077149 - RNA, 19 nt, Artificial Sequence
  Description of Artificial Sequence: Synthetic oligonucleotide
  Antisense strand to SEQ ID NO: 2077148
ucugcucugccaagaguuc

SEQ ID NO: 2077150 - RNA, 19 nt, Artificial Sequence
  Description of Artificial Sequence: Synthetic oligonucleotide
  Sense strand starting at position 1473 of SEQ ID NO: 1881863
aaaggagagcacuguauga

SEQ ID NO: 2077151 - RNA, 19 nt, Artificial Sequence
  Description of Artificial Sequence: Synthetic oligonucleotide
  Antisense strand to SEQ ID NO: 2077150
ucauacagugcucuccuuu

SEQ ID NO: 2077152 - RNA, 19 nt, Artificial Sequence
  Description of Artificial Sequence: Synthetic oligonucleotide
  Sense strand starting at position 1475 of SEQ ID NO: 1881863
aggagagcacuguaugagu

SEQ ID NO: 2077153 - RNA, 19 nt, Artificial Sequence
  Description of Artificial Sequence: Synthetic oligonucleotide
  Antisense strand to SEQ ID NO: 2077152
acucauacagugcucuccu

SEQ ID NO: 2077154 - RNA, 19 nt, Artificial Sequence
  Description of Artificial Sequence: Synthetic oligonucleotide
  Sense strand starting at position 2042 of SEQ ID NO: 1881863
ugagaaaucuacuuccggu

SEQ ID NO: 2077155 - RNA, 19 nt, Artificial Sequence
  Description of Artificial Sequence: Synthetic oligonucleotide
  Antisense strand to SEQ ID NO: 2077154
accggaaguagauuucuca

SEQ ID NO: 2077156 - RNA, 19 nt, Artificial Sequence
  Description of Artificial Sequence: Synthetic oligonucleotide
  Sense strand starting at position 2339 of SEQ ID NO: 1881863
ccacgugaagcugaauuau

SEQ ID NO: 2077157 - RNA, 19 nt, Artificial Sequence
  Description of Artificial Sequence: Synthetic oligonucleotide
  Antisense strand to SEQ ID NO: 2077156
auaauucagcuucacgugg

SEQ ID NO: 2077158 - RNA, 19 nt, Artificial Sequence
  Description of Artificial Sequence: Synthetic oligonucleotide
  Sense strand starting at position 2384 of SEQ ID NO: 1881863
agagaagggugcuuccuaa

SEQ ID NO: 2077159 - RNA, 19 nt, Artificial Sequence
  Description of Artificial Sequence: Synthetic oligonucleotide
  Antisense strand to SEQ ID NO: 2077158
uuaggaagcacccuucucu

SEQ ID NO: 2077160 - RNA, 19 nt, Artificial Sequence
  Description of Artificial Sequence: Synthetic oligonucleotide
  Sense strand starting at position 2501 of SEQ ID NO: 1881863
cccagugugccuucugcaa

SEQ ID NO: 2077161 - RNA, 19 nt, Artificial Sequence
  Description of Artificial Sequence: Synthetic oligonucleotide
  Antisense strand to SEQ ID NO: 2077160
uugcagaaggcacacuggg

SEQ ID NO: 2077162 - RNA, 19 nt, Artificial Sequence
  Description of Artificial Sequence: Synthetic oligonucleotide
  Sense strand starting at position 2629 of SEQ ID NO: 1881863
guuguuguuacugucgcaa

SEQ ID NO: 2077163 - RNA, 19 nt, Artificial Sequence
  Description of Artificial Sequence: Synthetic oligonucleotide
  Antisense strand to SEQ ID NO: 2077162
uugcgacaguaacaacaac

SEQ ID NO: 2077164 - RNA, 19 nt, Artificial Sequence
  Description of Artificial Sequence: Synthetic oligonucleotide
  Sense strand starting at position 2780 of SEQ ID NO: 1881863
agguaacagcaucauuaua

SEQ ID NO: 2077165 - RNA, 19 nt, Artificial Sequence
  Description of Artificial Sequence: Synthetic oligonucleotide
  Antisense strand to SEQ ID NO: 2077164
uauaaugaugcuguuaccu

SEQ ID NO: 2077166 - RNA, 19 nt, Artificial Sequence
  Description of Artificial Sequence: Synthetic oligonucleotide
  Sense strand starting at position 2782 of SEQ ID NO: 1881863
guaacagcaucauuauaug

SEQ ID NO: 2077167 - RNA, 19 nt, Artificial Sequence
  Description of Artificial Sequence: Synthetic oligonucleotide
  Antisense strand to SEQ ID NO: 2077166
cauauaaugaugcuguuac

SEQ ID NO: 2077168 - RNA, 19 nt, Artificial Sequence
  Description of Artificial Sequence: Synthetic oligonucleotide
  Sense strand starting at position 2959 of SEQ ID NO: 1881863
aggucauacguguagagau

SEQ ID NO: 2077169 - RNA, 19 nt, Artificial Sequence
  Description of Artificial Sequence: Synthetic oligonucleotide
  Antisense strand to SEQ ID NO: 2077168
aucucuacacguaugaccu

SEQ ID NO: 2077170 - RNA, 19 nt, Artificial Sequence
  Description of Artificial Sequence: Synthetic oligonucleotide
  Sense strand starting at position 2961 of SEQ ID NO: 1881863
gucauacguguagagauga

SEQ ID NO: 2077171 - RNA, 19 nt, Artificial Sequence
  Description of Artificial Sequence: Synthetic oligonucleotide
  Antisense strand to SEQ ID NO: 2077170
ucaucucuacacguaugac

SEQ ID NO: 2077172 - RNA, 19 nt, Artificial Sequence
  Description of Artificial Sequence: Synthetic oligonucleotide
  Sense strand starting at position 2969 of SEQ ID NO: 1881863
uguagagaugaaugcuaga

SEQ ID NO: 2077173 - RNA, 19 nt, Artificial Sequence
  Description of Artificial Sequence: Synthetic oligonucleotide
  Antisense strand to SEQ ID NO: 2077172
ucuagcauucaucucuaca

SEQ ID NO: 2077174 - RNA, 19 nt, Artificial Sequence
  Description of Artificial Sequence: Synthetic oligonucleotide
  Sense strand starting at position 3243 of SEQ ID NO: 1881863
aguaguacccucugggaua

SEQ ID NO: 2077175 - RNA, 19 nt, Artificial Sequence
  Description of Artificial Sequence: Synthetic oligonucleotide
  Antisense strand to SEQ ID NO: 2077174
uaucccagaggguacuacu

SEQ ID NO: 2077176 - RNA, 19 nt, Artificial Sequence
  Description of Artificial Sequence: Synthetic oligonucleotide
  Sense strand starting at position 3245 of SEQ ID NO: 1881863
uaguacccucugggauauu

SEQ ID NO: 2077177 - RNA, 19 nt, Artificial Sequence
  Description of Artificial Sequence: Synthetic oligonucleotide
  Antisense strand to SEQ ID NO: 2077176
aauaucccagaggguacua

SEQ ID NO: 2077178 - RNA, 19 nt, Artificial Sequence
  Description of Artificial Sequence: Synthetic oligonucleotide
  Sense strand starting at position 3306 of SEQ ID NO: 1881863
uguuuauuuccguagucug

SEQ ID NO: 2077179 - RNA, 19 nt, Artificial Sequence
  Description of Artificial Sequence: Synthetic oligonucleotide
  Antisense strand to SEQ ID NO: 2077178
cagacuacggaaauaaaca

SEQ ID NO: 2077180 - RNA, 19 nt, Artificial Sequence
  Description of Artificial Sequence: Synthetic oligonucleotide
  Sense strand starting at position 3309 of SEQ ID NO: 1881863
uuauuuccguagucuguga

SEQ ID NO: 2077181 - RNA, 19 nt, Artificial Sequence
  Description of Artificial Sequence: Synthetic oligonucleotide
  Antisense strand to SEQ ID NO: 2077180
ucacagacuacggaaauaa

SEQ ID NO: 2077182 - RNA, 19 nt, Artificial Sequence
  Description of Artificial Sequence: Synthetic oligonucleotide
  Sense strand starting at position 3517 of SEQ ID NO: 1881863
ugaguagacggaugaguga

SEQ ID NO: 2077183 - RNA, 19 nt, Artificial Sequence
  Description of Artificial Sequence: Synthetic oligonucleotide
  Antisense strand to SEQ ID NO: 2077182
ucacucauccgucuacuca

SEQ ID NO: 2077184 - RNA, 19 nt, Artificial Sequence
  Description of Artificial Sequence: Synthetic oligonucleotide
  Sense strand starting at position 3587 of SEQ ID NO: 1881863
gacggauggguagguaaau

SEQ ID NO: 2077185 - RNA, 19 nt, Artificial Sequence
  Description of Artificial Sequence: Synthetic oligonucleotide
  Antisense strand to SEQ ID NO: 2077184
auuuaccuacccauccguc

SEQ ID NO: 2077186 - RNA, 19 nt, Artificial Sequence
  Description of Artificial Sequence: Synthetic oligonucleotide
  Sense strand starting at position 3648 of SEQ ID NO: 1881863
augaguagaugguuaaaug

SEQ ID NO: 2077187 - RNA, 19 nt, Artificial Sequence
  Description of Artificial Sequence: Synthetic oligonucleotide
  Antisense strand to SEQ ID NO: 2077186
cauuuaaccaucuacucau

SEQ ID NO: 2077188 - RNA, 19 nt, Artificial Sequence
  Description of Artificial Sequence: Synthetic oligonucleotide
  Sense strand starting at position 3717 of SEQ ID NO: 1881863
ugaguagguagauggauua

SEQ ID NO: 2077189 - RNA, 19 nt, Artificial Sequence
  Description of Artificial Sequence: Synthetic oligonucleotide
  Antisense strand to SEQ ID NO: 2077188
uaauccaucuaccuacuca

SEQ ID NO: 2077190 - RNA, 19 nt, Artificial Sequence
  Description of Artificial Sequence: Synthetic oligonucleotide
  Sense strand starting at position 3724 of SEQ ID NO: 1881863
guagauggauuagugagua

SEQ ID NO: 2077191 - RNA, 19 nt, Artificial Sequence
  Description of Artificial Sequence: Synthetic oligonucleotide
  Antisense strand to SEQ ID NO: 2077190
uacucacuaauccaucuac

SEQ ID NO: 2077192 - RNA, 19 nt, Artificial Sequence
  Description of Artificial Sequence: Synthetic oligonucleotide
  Sense strand starting at position 3728 of SEQ ID NO: 1881863
auggauuagugaguagaua

SEQ ID NO: 2077193 - RNA, 19 nt, Artificial Sequence
  Description of Artificial Sequence: Synthetic oligonucleotide
  Antisense strand to SEQ ID NO: 2077192
uaucuacucacuaauccau

SEQ ID NO: 2077194 - RNA, 19 nt, Artificial Sequence
  Description of Artificial Sequence: Synthetic oligonucleotide
  Sense strand starting at position 3784 of SEQ ID NO: 1881863
agaugaaugaguuggugaa

SEQ ID NO: 2077195 - RNA, 19 nt, Artificial Sequence
  Description of Artificial Sequence: Synthetic oligonucleotide
  Antisense strand to SEQ ID NO: 2077194
uucaccaacucauucaucu

SEQ ID NO: 2077196 - RNA, 19 nt, Artificial Sequence
  Description of Artificial Sequence: Synthetic oligonucleotide
  Sense strand starting at position 3785 of SEQ ID NO: 1881863
gaugaaugaguuggugaau

SEQ ID NO: 2077197 - RNA, 19 nt, Artificial Sequence
  Description of Artificial Sequence: Synthetic oligonucleotide
  Antisense strand to SEQ ID NO: 2077196
auucaccaacucauucauc

SEQ ID NO: 2077198 - RNA, 19 nt, Artificial Sequence
  Description of Artificial Sequence: Synthetic oligonucleotide
  Sense strand starting at position 3788 of SEQ ID NO: 1881863
gaaugaguuggugaaugua

SEQ ID NO: 2077199 - RNA, 19 nt, Artificial Sequence
  Description of Artificial Sequence: Synthetic oligonucleotide
  Antisense strand to SEQ ID NO: 2077198
uacauucaccaacucauuc

SEQ ID NO: 2077200 - RNA, 19 nt, Artificial Sequence
  Description of Artificial Sequence: Synthetic oligonucleotide
  Sense strand starting at position 3818 of SEQ ID NO: 1881863
auguauggugucuacuaua

SEQ ID NO: 2077201 - RNA, 19 nt, Artificial Sequence
  Description of Artificial Sequence: Synthetic oligonucleotide
  Antisense strand to SEQ ID NO: 2077200
uauaguagacaccauacau

SEQ ID NO: 2077202 - RNA, 19 nt, Artificial Sequence
  Description of Artificial Sequence: Synthetic oligonucleotide
  Sense strand starting at position 3839 of SEQ ID NO: 1881863
gcagguuccagugaggaug

SEQ ID NO: 2077203 - RNA, 19 nt, Artificial Sequence
  Description of Artificial Sequence: Synthetic oligonucleotide
  Antisense strand to SEQ ID NO: 2077202
cauccucacuggaaccugc

SEQ ID NO: 2077204 - RNA, 19 nt, Artificial Sequence
  Description of Artificial Sequence: Synthetic oligonucleotide
  Sense strand starting at position 3895 of SEQ ID NO: 1881863
uuugcuuugaaaugaggga

SEQ ID NO: 2077205 - RNA, 19 nt, Artificial Sequence
  Description of Artificial Sequence: Synthetic oligonucleotide
  Antisense strand to SEQ ID NO: 2077204
ucccucauuucaaagcaaa

SEQ ID NO: 2077206 - RNA, 19 nt, Artificial Sequence
  Description of Artificial Sequence: Synthetic oligonucleotide
  Sense strand starting at position 3953 of SEQ ID NO: 1881863
agguguucugagggaauau

SEQ ID NO: 2077207 - RNA, 19 nt, Artificial Sequence
  Description of Artificial Sequence: Synthetic oligonucleotide
  Antisense strand to SEQ ID NO: 2077206
auauucccucagaacaccu

SEQ ID NO: 2077208 - RNA, 19 nt, Artificial Sequence
  Description of Artificial Sequence: Synthetic oligonucleotide
  Sense strand starting at position 3954 of SEQ ID NO: 1881863
gguguucugagggaauauc

SEQ ID NO: 2077209 - RNA, 19 nt, Artificial Sequence
  Description of Artificial Sequence: Synthetic oligonucleotide
  Antisense strand to SEQ ID NO: 2077208
gauauucccucagaacacc

SEQ ID NO: 2077210 - RNA, 19 nt, Artificial Sequence
  Description of Artificial Sequence: Synthetic oligonucleotide
  Sense strand starting at position 3982 of SEQ ID NO: 1881863
aagcacauuugggauagaa

SEQ ID NO: 2077211 - RNA, 19 nt, Artificial Sequence
  Description of Artificial Sequence: Synthetic oligonucleotide
  Antisense strand to SEQ ID NO: 2077210
uucuaucccaaaugugcuu

SEQ ID NO: 2077212 - RNA, 19 nt, Artificial Sequence
  Description of Artificial Sequence: Synthetic oligonucleotide
  Sense strand starting at position 174 of SEQ ID NO: 1881864
aggaguuucuaauuaaauc

SEQ ID NO: 2077213 - RNA, 19 nt, Artificial Sequence
  Description of Artificial Sequence: Synthetic oligonucleotide
  Antisense strand to SEQ ID NO: 2077212
gauuuaauuagaaacuccu

SEQ ID NO: 2077214 - RNA, 19 nt, Artificial Sequence
  Description of Artificial Sequence: Synthetic oligonucleotide
  Sense strand starting at position 215 of SEQ ID NO: 1881864
uuugaaacagcauaguuau

SEQ ID NO: 2077215 - RNA, 19 nt, Artificial Sequence
  Description of Artificial Sequence: Synthetic oligonucleotide
  Antisense strand to SEQ ID NO: 2077214
auaacuaugcuguuucaaa

SEQ ID NO: 2077216 - RNA, 19 nt, Artificial Sequence
  Description of Artificial Sequence: Synthetic oligonucleotide
  Sense strand starting at position 281 of SEQ ID NO: 1881864
ggagucuguaauggaaguu

SEQ ID NO: 2077217 - RNA, 19 nt, Artificial Sequence
  Description of Artificial Sequence: Synthetic oligonucleotide
  Antisense strand to SEQ ID NO: 2077216
aacuuccauuacagacucc

SEQ ID NO: 2077218 - RNA, 19 nt, Artificial Sequence
  Description of Artificial Sequence: Synthetic oligonucleotide
  Sense strand starting at position 344 of SEQ ID NO: 1881864
acaagucuccugcagguua

SEQ ID NO: 2077219 - RNA, 19 nt, Artificial Sequence
  Description of Artificial Sequence: Synthetic oligonucleotide
  Antisense strand to SEQ ID NO: 2077218
uaaccugcaggagacuugu

SEQ ID NO: 2077220 - RNA, 19 nt, Artificial Sequence
  Description of Artificial Sequence: Synthetic oligonucleotide
  Sense strand starting at position 489 of SEQ ID NO: 1881864
ggcuucuugcccuagaaac

SEQ ID NO: 2077221 - RNA, 19 nt, Artificial Sequence
  Description of Artificial Sequence: Synthetic oligonucleotide
  Antisense strand to SEQ ID NO: 2077220
guuucuagggcaagaagcc

SEQ ID NO: 2077222 - RNA, 19 nt, Artificial Sequence
  Description of Artificial Sequence: Synthetic oligonucleotide
  Sense strand starting at position 568 of SEQ ID NO: 1881864
ggacaucugucccugacuu

SEQ ID NO: 2077223 - RNA, 19 nt, Artificial Sequence
  Description of Artificial Sequence: Synthetic oligonucleotide
  Antisense strand to SEQ ID NO: 2077222
aagucagggacagaugucc

SEQ ID NO: 2077224 - RNA, 19 nt, Artificial Sequence
  Description of Artificial Sequence: Synthetic oligonucleotide
  Sense strand starting at position 570 of SEQ ID NO: 1881864
acaucugucccugacuuau

SEQ ID NO: 2077225 - RNA, 19 nt, Artificial Sequence
  Description of Artificial Sequence: Synthetic oligonucleotide
  Antisense strand to SEQ ID NO: 2077224
auaagucagggacagaugu

SEQ ID NO: 2077226 - RNA, 19 nt, Artificial Sequence
  Description of Artificial Sequence: Synthetic oligonucleotide
  Sense strand starting at position 663 of SEQ ID NO: 1881864
auagaugaggcuuauucuu

SEQ ID NO: 2077227 - RNA, 19 nt, Artificial Sequence
  Description of Artificial Sequence: Synthetic oligonucleotide
  Antisense strand to SEQ ID NO: 2077226
aagaauaagccucaucuau

SEQ ID NO: 2077228 - RNA, 19 nt, Artificial Sequence
  Description of Artificial Sequence: Synthetic oligonucleotide
  Sense strand starting at position 665 of SEQ ID NO: 1881864
agaugaggcuuauucuuaa

SEQ ID NO: 2077229 - RNA, 19 nt, Artificial Sequence
  Description of Artificial Sequence: Synthetic oligonucleotide
  Antisense strand to SEQ ID NO: 2077228
uuaagaauaagccucaucu

SEQ ID NO: 2077230 - RNA, 19 nt, Artificial Sequence
  Description of Artificial Sequence: Synthetic oligonucleotide
  Sense strand starting at position 720 of SEQ ID NO: 1881864
cagggcugucccgacagaa

SEQ ID NO: 2077231 - RNA, 19 nt, Artificial Sequence
  Description of Artificial Sequence: Synthetic oligonucleotide
  Antisense strand to SEQ ID NO: 2077230
uucugucgggacagcccug

SEQ ID NO: 2077232 - RNA, 19 nt, Artificial Sequence
  Description of Artificial Sequence: Synthetic oligonucleotide
  Sense strand starting at position 733 of SEQ ID NO: 1881864
acagaagaguccuccggua

SEQ ID NO: 2077233 - RNA, 19 nt, Artificial Sequence
  Description of Artificial Sequence: Synthetic oligonucleotide
  Antisense strand to SEQ ID NO: 2077232
uaccggaggacucuucugu

SEQ ID NO: 2077234 - RNA, 19 nt, Artificial Sequence
  Description of Artificial Sequence: Synthetic oligonucleotide
  Sense strand starting at position 1041 of SEQ ID NO: 1881864
gcugauuuauccuuuguac

SEQ ID NO: 2077235 - RNA, 19 nt, Artificial Sequence
  Description of Artificial Sequence: Synthetic oligonucleotide
  Antisense strand to SEQ ID NO: 2077234
guacaaaggauaaaucagc

SEQ ID NO: 2077236 - RNA, 19 nt, Artificial Sequence
  Description of Artificial Sequence: Synthetic oligonucleotide
  Sense strand starting at position 1136 of SEQ ID NO: 1881864
uucuuugugacuuggaaug

SEQ ID NO: 2077237 - RNA, 19 nt, Artificial Sequence
  Description of Artificial Sequence: Synthetic oligonucleotide
  Antisense strand to SEQ ID NO: 2077236
cauuccaagucacaaagaa

SEQ ID NO: 2077238 - RNA, 19 nt, Artificial Sequence
  Description of Artificial Sequence: Synthetic oligonucleotide
  Sense strand starting at position 1180 of SEQ ID NO: 1881864
acacucuggaauugagagu

SEQ ID NO: 2077239 - RNA, 19 nt, Artificial Sequence
  Description of Artificial Sequence: Synthetic oligonucleotide
  Antisense strand to SEQ ID NO: 2077238
acucucaauuccagagugu

SEQ ID NO: 2077240 - RNA, 19 nt, Artificial Sequence
  Description of Artificial Sequence: Synthetic oligonucleotide
  Sense strand starting at position 1187 of SEQ ID NO: 1881864
ggaauugagaguuggcuua

SEQ ID NO: 2077241 - RNA, 19 nt, Artificial Sequence
  Description of Artificial Sequence: Synthetic oligonucleotide
  Antisense strand to SEQ ID NO: 2077240
uaagccaacucucaauucc

SEQ ID NO: 2077242 - RNA, 19 nt, Artificial Sequence
  Description of Artificial Sequence: Synthetic oligonucleotide
  Sense strand starting at position 1189 of SEQ ID NO: 1881864
aauugagaguuggcuuauu

SEQ ID NO: 2077243 - RNA, 19 nt, Artificial Sequence
  Description of Artificial Sequence: Synthetic oligonucleotide
  Antisense strand to SEQ ID NO: 2077242
aauaagccaacucucaauu

SEQ ID NO: 2077244 - RNA, 19 nt, Artificial Sequence
  Description of Artificial Sequence: Synthetic oligonucleotide
  Sense strand starting at position 1220 of SEQ ID NO: 1881864
gucuuuagauaauuggcaa

SEQ ID NO: 2077245 - RNA, 19 nt, Artificial Sequence
  Description of Artificial Sequence: Synthetic oligonucleotide
  Antisense strand to SEQ ID NO: 2077244
uugccaauuaucuaaagac

SEQ ID NO: 2077246 - RNA, 19 nt, Artificial Sequence
  Description of Artificial Sequence: Synthetic oligonucleotide
  Sense strand starting at position 1240 of SEQ ID NO: 1881864
augagaucuauuggugacu

SEQ ID NO: 2077247 - RNA, 19 nt, Artificial Sequence
  Description of Artificial Sequence: Synthetic oligonucleotide
  Antisense strand to SEQ ID NO: 2077246
agucaccaauagaucucau

SEQ ID NO: 2077248 - RNA, 19 nt, Artificial Sequence
  Description of Artificial Sequence: Synthetic oligonucleotide
  Sense strand starting at position 1243 of SEQ ID NO: 1881864
agaucuauuggugacucuu

SEQ ID NO: 2077249 - RNA, 19 nt, Artificial Sequence
  Description of Artificial Sequence: Synthetic oligonucleotide
  Antisense strand to SEQ ID NO: 2077248
aagagucaccaauagaucu

SEQ ID NO: 2077250 - RNA, 19 nt, Artificial Sequence
  Description of Artificial Sequence: Synthetic oligonucleotide
  Sense strand starting at position 1245 of SEQ ID NO: 1881864
aucuauuggugacucuuua

SEQ ID NO: 2077251 - RNA, 19 nt, Artificial Sequence
  Description of Artificial Sequence: Synthetic oligonucleotide
  Antisense strand to SEQ ID NO: 2077250
uaaagagucaccaauagau

SEQ ID NO: 2077252 - RNA, 19 nt, Artificial Sequence
  Description of Artificial Sequence: Synthetic oligonucleotide
  Sense strand starting at position 1249 of SEQ ID NO: 1881864
auuggugacucuuuaugaa

SEQ ID NO: 2077253 - RNA, 19 nt, Artificial Sequence
  Description of Artificial Sequence: Synthetic oligonucleotide
  Antisense strand to SEQ ID NO: 2077252
uucauaaagagucaccaau

SEQ ID NO: 2077254 - RNA, 19 nt, Artificial Sequence
  Description of Artificial Sequence: Synthetic oligonucleotide
  Sense strand starting at position 1393 of SEQ ID NO: 1881864
acgucucauuucgcuaaca

SEQ ID NO: 2077255 - RNA, 19 nt, Artificial Sequence
  Description of Artificial Sequence: Synthetic oligonucleotide
  Antisense strand to SEQ ID NO: 2077254
uguuagcgaaaugagacgu

SEQ ID NO: 2077256 - RNA, 19 nt, Artificial Sequence
  Description of Artificial Sequence: Synthetic oligonucleotide
  Sense strand starting at position 1394 of SEQ ID NO: 1881864
cgucucauuucgcuaacaa

SEQ ID NO: 2077257 - RNA, 19 nt, Artificial Sequence
  Description of Artificial Sequence: Synthetic oligonucleotide
  Antisense strand to SEQ ID NO: 2077256
uuguuagcgaaaugagacg

SEQ ID NO: 2077258 - RNA, 19 nt, Artificial Sequence
  Description of Artificial Sequence: Synthetic oligonucleotide
  Sense strand starting at position 1635 of SEQ ID NO: 1881864
cuuacaggugucuauaacu

SEQ ID NO: 2077259 - RNA, 19 nt, Artificial Sequence
  Description of Artificial Sequence: Synthetic oligonucleotide
  Antisense strand to SEQ ID NO: 2077258
aguuauagacaccuguaag

SEQ ID NO: 2077260 - RNA, 19 nt, Artificial Sequence
  Description of Artificial Sequence: Synthetic oligonucleotide
  Sense strand starting at position 2224 of SEQ ID NO: 1881864
gguacauugccaggaggaa

SEQ ID NO: 2077261 - RNA, 19 nt, Artificial Sequence
  Description of Artificial Sequence: Synthetic oligonucleotide
  Antisense strand to SEQ ID NO: 2077260
uuccuccuggcaauguacc

SEQ ID NO: 2077262 - RNA, 19 nt, Artificial Sequence
  Description of Artificial Sequence: Synthetic oligonucleotide
  Sense strand starting at position 2439 of SEQ ID NO: 1881864
uggucuugccuggauuaag

SEQ ID NO: 2077263 - RNA, 19 nt, Artificial Sequence
  Description of Artificial Sequence: Synthetic oligonucleotide
  Antisense strand to SEQ ID NO: 2077262
cuuaauccaggcaagacca

SEQ ID NO: 2077264 - RNA, 19 nt, Artificial Sequence
  Description of Artificial Sequence: Synthetic oligonucleotide
  Sense strand starting at position 2502 of SEQ ID NO: 1881864
aagacuuauugcucagggu

SEQ ID NO: 2077265 - RNA, 19 nt, Artificial Sequence
  Description of Artificial Sequence: Synthetic oligonucleotide
  Antisense strand to SEQ ID NO: 2077264
acccugagcaauaagucuu

SEQ ID NO: 2077266 - RNA, 19 nt, Artificial Sequence
  Description of Artificial Sequence: Synthetic oligonucleotide
  Sense strand starting at position 2503 of SEQ ID NO: 1881864
agacuuauugcucaggguu

SEQ ID NO: 2077267 - RNA, 19 nt, Artificial Sequence
  Description of Artificial Sequence: Synthetic oligonucleotide
  Antisense strand to SEQ ID NO: 2077266
aacccugagcaauaagucu

SEQ ID NO: 2077268 - RNA, 19 nt, Artificial Sequence
  Description of Artificial Sequence: Synthetic oligonucleotide
  Sense strand starting at position 2733 of SEQ ID NO: 1881864
uguccuuugcaugaaucau

SEQ ID NO: 2077269 - RNA, 19 nt, Artificial Sequence
  Description of Artificial Sequence: Synthetic oligonucleotide
  Antisense strand to SEQ ID NO: 2077268
augauucaugcaaaggaca

SEQ ID NO: 2077270 - RNA, 19 nt, Artificial Sequence
  Description of Artificial Sequence: Synthetic oligonucleotide
  Sense strand starting at position 2916 of SEQ ID NO: 1881864
ccuuguuuggauugaauau

SEQ ID NO: 2077271 - RNA, 19 nt, Artificial Sequence
  Description of Artificial Sequence: Synthetic oligonucleotide
  Antisense strand to SEQ ID NO: 2077270
auauucaauccaaacaagg

SEQ ID NO: 2077272 - RNA, 19 nt, Artificial Sequence
  Description of Artificial Sequence: Synthetic oligonucleotide
  Sense strand starting at position 3237 of SEQ ID NO: 1881864
aagaacauugcaggucauu

SEQ ID NO: 2077273 - RNA, 19 nt, Artificial Sequence
  Description of Artificial Sequence: Synthetic oligonucleotide
  Antisense strand to SEQ ID NO: 2077272
aaugaccugcaauguucuu

SEQ ID NO: 2077274 - RNA, 19 nt, Artificial Sequence
  Description of Artificial Sequence: Synthetic oligonucleotide
  Sense strand starting at position 3290 of SEQ ID NO: 1881864
cucacauaucuuuaguugu

SEQ ID NO: 2077275 - RNA, 19 nt, Artificial Sequence
  Description of Artificial Sequence: Synthetic oligonucleotide
  Antisense strand to SEQ ID NO: 2077274
acaacuaaagauaugugag

SEQ ID NO: 2077276 - RNA, 19 nt, Artificial Sequence
  Description of Artificial Sequence: Synthetic oligonucleotide
  Sense strand starting at position 3303 of SEQ ID NO: 1881864
aguuguugccaauagaaac

SEQ ID NO: 2077277 - RNA, 19 nt, Artificial Sequence
  Description of Artificial Sequence: Synthetic oligonucleotide
  Antisense strand to SEQ ID NO: 2077276
guuucuauuggcaacaacu

SEQ ID NO: 2077278 - RNA, 19 nt, Artificial Sequence
  Description of Artificial Sequence: Synthetic oligonucleotide
  Sense strand starting at position 3368 of SEQ ID NO: 1881864
uuuagaguugucuggacag

SEQ ID NO: 2077279 - RNA, 19 nt, Artificial Sequence
  Description of Artificial Sequence: Synthetic oligonucleotide
  Antisense strand to SEQ ID NO: 2077278
cuguccagacaacucuaaa

SEQ ID NO: 2077280 - RNA, 19 nt, Artificial Sequence
  Description of Artificial Sequence: Synthetic oligonucleotide
  Sense strand starting at position 3384 of SEQ ID NO: 1881864
caggcaauugagugggaaa

SEQ ID NO: 2077281 - RNA, 19 nt, Artificial Sequence
  Description of Artificial Sequence: Synthetic oligonucleotide
  Antisense strand to SEQ ID NO: 2077280
uuucccacucaauugccug

SEQ ID NO: 2077282 - RNA, 19 nt, Artificial Sequence
  Description of Artificial Sequence: Synthetic oligonucleotide
  Sense strand starting at position 3416 of SEQ ID NO: 1881864
ccuggagucugaucaccuu

SEQ ID NO: 2077283 - RNA, 19 nt, Artificial Sequence
  Description of Artificial Sequence: Synthetic oligonucleotide
  Antisense strand to SEQ ID NO: 2077282
aaggugaucagacuccagg

SEQ ID NO: 2077284 - RNA, 19 nt, Artificial Sequence
  Description of Artificial Sequence: Synthetic oligonucleotide
  Sense strand starting at position 3419 of SEQ ID NO: 1881864
ggagucugaucaccuuuau

SEQ ID NO: 2077285 - RNA, 19 nt, Artificial Sequence
  Description of Artificial Sequence: Synthetic oligonucleotide
  Antisense strand to SEQ ID NO: 2077284
auaaaggugaucagacucc

SEQ ID NO: 2077286 - RNA, 19 nt, Artificial Sequence
  Description of Artificial Sequence: Synthetic oligonucleotide
  Sense strand starting at position 3569 of SEQ ID NO: 1881864
gcaaacauaucacugguuu

SEQ ID NO: 2077287 - RNA, 19 nt, Artificial Sequence
  Description of Artificial Sequence: Synthetic oligonucleotide
  Antisense strand to SEQ ID NO: 2077286
aaaccagugauauguuugc

SEQ ID NO: 2077288 - RNA, 19 nt, Artificial Sequence
  Description of Artificial Sequence: Synthetic oligonucleotide
  Sense strand starting at position 3791 of SEQ ID NO: 1881864
gugguaguagcuuaauaau

SEQ ID NO: 2077289 - RNA, 19 nt, Artificial Sequence
  Description of Artificial Sequence: Synthetic oligonucleotide
  Antisense strand to SEQ ID NO: 2077288
auuauuaagcuacuaccac

SEQ ID NO: 2077290 - RNA, 19 nt, Artificial Sequence
  Description of Artificial Sequence: Synthetic oligonucleotide
  Sense strand starting at position 3906 of SEQ ID NO: 1881864
ugagguggauuugacauau

SEQ ID NO: 2077291 - RNA, 19 nt, Artificial Sequence
  Description of Artificial Sequence: Synthetic oligonucleotide
  Antisense strand to SEQ ID NO: 2077290
auaugucaaauccaccuca

SEQ ID NO: 2077292 - RNA, 19 nt, Artificial Sequence
  Description of Artificial Sequence: Synthetic oligonucleotide
  Sense strand starting at position 291 of SEQ ID NO: 1881865
ggauuacauguacaugcua

SEQ ID NO: 2077293 - RNA, 19 nt, Artificial Sequence
  Description of Artificial Sequence: Synthetic oligonucleotide
  Antisense strand to SEQ ID NO: 2077292
uagcauguacauguaaucc

SEQ ID NO: 2077294 - RNA, 19 nt, Artificial Sequence
  Description of Artificial Sequence: Synthetic oligonucleotide
  Sense strand starting at position 484 of SEQ ID NO: 1881865
uccucuuugggccagugaa

SEQ ID NO: 2077295 - RNA, 19 nt, Artificial Sequence
  Description of Artificial Sequence: Synthetic oligonucleotide
  Antisense strand to SEQ ID NO: 2077294
uucacuggcccaaagagga

SEQ ID NO: 2077296 - RNA, 19 nt, Artificial Sequence
  Description of Artificial Sequence: Synthetic oligonucleotide
  Sense strand starting at position 596 of SEQ ID NO: 1881865
cuguauugccaguaacaac

SEQ ID NO: 2077297 - RNA, 19 nt, Artificial Sequence
  Description of Artificial Sequence: Synthetic oligonucleotide
  Antisense strand to SEQ ID NO: 2077296
guuguuacuggcaauacag

SEQ ID NO: 2077298 - RNA, 19 nt, Artificial Sequence
  Description of Artificial Sequence: Synthetic oligonucleotide
  Sense strand starting at position 737 of SEQ ID NO: 1881865
gggacuaucugggacagaa

SEQ ID NO: 2077299 - RNA, 19 nt, Artificial Sequence
  Description of Artificial Sequence: Synthetic oligonucleotide
  Antisense strand to SEQ ID NO: 2077298
uucugucccagauaguccc

SEQ ID NO: 2077300 - RNA, 19 nt, Artificial Sequence
  Description of Artificial Sequence: Synthetic oligonucleotide
  Sense strand starting at position 752 of SEQ ID NO: 1881865
agaagaucucucugcagcu

SEQ ID NO: 2077301 - RNA, 19 nt, Artificial Sequence
  Description of Artificial Sequence: Synthetic oligonucleotide
  Antisense strand to SEQ ID NO: 2077300
agcugcagagagaucuucu

SEQ ID NO: 2077302 - RNA, 19 nt, Artificial Sequence
  Description of Artificial Sequence: Synthetic oligonucleotide
  Sense strand starting at position 770 of SEQ ID NO: 1881865
ucuuguagaccugagcauu

SEQ ID NO: 2077303 - RNA, 19 nt, Artificial Sequence
  Description of Artificial Sequence: Synthetic oligonucleotide
  Antisense strand to SEQ ID NO: 2077302
aaugcucaggucuacaaga

SEQ ID NO: 2077304 - RNA, 19 nt, Artificial Sequence
  Description of Artificial Sequence: Synthetic oligonucleotide
  Sense strand starting at position 814 of SEQ ID NO: 1881865
agaggagucugggauaaau

SEQ ID NO: 2077305 - RNA, 19 nt, Artificial Sequence
  Description of Artificial Sequence: Synthetic oligonucleotide
  Antisense strand to SEQ ID NO: 2077304
auuuaucccagacuccucu

SEQ ID NO: 2077306 - RNA, 19 nt, Artificial Sequence
  Description of Artificial Sequence: Synthetic oligonucleotide
  Sense strand starting at position 823 of SEQ ID NO: 1881865
ugggauaaaugugaggaaa

SEQ ID NO: 2077307 - RNA, 19 nt, Artificial Sequence
  Description of Artificial Sequence: Synthetic oligonucleotide
  Antisense strand to SEQ ID NO: 2077306
uuuccucacauuuauccca

SEQ ID NO: 2077308 - RNA, 19 nt, Artificial Sequence
  Description of Artificial Sequence: Synthetic oligonucleotide
  Sense strand starting at position 844 of SEQ ID NO: 1881865
ggaugaauguugccaagac

SEQ ID NO: 2077309 - RNA, 19 nt, Artificial Sequence
  Description of Artificial Sequence: Synthetic oligonucleotide
  Antisense strand to SEQ ID NO: 2077308
gucuuggcaacauucaucc

SEQ ID NO: 2077310 - RNA, 19 nt, Artificial Sequence
  Description of Artificial Sequence: Synthetic oligonucleotide
  Sense strand starting at position 851 of SEQ ID NO: 1881865
uguugccaagacuaauauu

SEQ ID NO: 2077311 - RNA, 19 nt, Artificial Sequence
  Description of Artificial Sequence: Synthetic oligonucleotide
  Antisense strand to SEQ ID NO: 2077310
aauauuagucuuggcaaca

SEQ ID NO: 2077312 - RNA, 19 nt, Artificial Sequence
  Description of Artificial Sequence: Synthetic oligonucleotide
  Sense strand starting at position 1202 of SEQ ID NO: 1881865
auguaauguguguaccauc

SEQ ID NO: 2077313 - RNA, 19 nt, Artificial Sequence
  Description of Artificial Sequence: Synthetic oligonucleotide
  Antisense strand to SEQ ID NO: 2077312
gaugguacacacauuacau

SEQ ID NO: 2077314 - RNA, 19 nt, Artificial Sequence
  Description of Artificial Sequence: Synthetic oligonucleotide
  Sense strand starting at position 1252 of SEQ ID NO: 1881865
auguuacauguagaaacuu

SEQ ID NO: 2077315 - RNA, 19 nt, Artificial Sequence
  Description of Artificial Sequence: Synthetic oligonucleotide
  Antisense strand to SEQ ID NO: 2077314
aaguuucuacauguaacau

SEQ ID NO: 2077316 - RNA, 19 nt, Artificial Sequence
  Description of Artificial Sequence: Synthetic oligonucleotide
  Sense strand starting at position 1396 of SEQ ID NO: 1881865
cuccaaaugguaugaauua

SEQ ID NO: 2077317 - RNA, 19 nt, Artificial Sequence
  Description of Artificial Sequence: Synthetic oligonucleotide
  Antisense strand to SEQ ID NO: 2077316
uaauucauaccauuuggag

SEQ ID NO: 2077318 - RNA, 19 nt, Artificial Sequence
  Description of Artificial Sequence: Synthetic oligonucleotide
  Sense strand starting at position 1429 of SEQ ID NO: 1881865
agucaauucucacugagua

SEQ ID NO: 2077319 - RNA, 19 nt, Artificial Sequence
  Description of Artificial Sequence: Synthetic oligonucleotide
  Antisense strand to SEQ ID NO: 2077318
uacucagugagaauugacu

SEQ ID NO: 2077320 - RNA, 19 nt, Artificial Sequence
  Description of Artificial Sequence: Synthetic oligonucleotide
  Sense strand starting at position 1430 of SEQ ID NO: 1881865
gucaauucucacugaguaa

SEQ ID NO: 2077321 - RNA, 19 nt, Artificial Sequence
  Description of Artificial Sequence: Synthetic oligonucleotide
  Antisense strand to SEQ ID NO: 2077320
uuacucagugagaauugac

SEQ ID NO: 2077322 - RNA, 19 nt, Artificial Sequence
  Description of Artificial Sequence: Synthetic oligonucleotide
  Sense strand starting at position 1443 of SEQ ID NO: 1881865
gaguaaaggauucggccaa

SEQ ID NO: 2077323 - RNA, 19 nt, Artificial Sequence
  Description of Artificial Sequence: Synthetic oligonucleotide
  Antisense strand to SEQ ID NO: 2077322
uuggccgaauccuuuacuc

SEQ ID NO: 2077324 - RNA, 19 nt, Artificial Sequence
  Description of Artificial Sequence: Synthetic oligonucleotide
  Sense strand starting at position 1447 of SEQ ID NO: 1881865
aaaggauucggccaaaugu

SEQ ID NO: 2077325 - RNA, 19 nt, Artificial Sequence
  Description of Artificial Sequence: Synthetic oligonucleotide
  Antisense strand to SEQ ID NO: 2077324
acauuuggccgaauccuuu

SEQ ID NO: 2077326 - RNA, 19 nt, Artificial Sequence
  Description of Artificial Sequence: Synthetic oligonucleotide
  Sense strand starting at position 1621 of SEQ ID NO: 1881865
auuguauuaugggcaugaa

SEQ ID NO: 2077327 - RNA, 19 nt, Artificial Sequence
  Description of Artificial Sequence: Synthetic oligonucleotide
  Antisense strand to SEQ ID NO: 2077326
uucaugcccauaauacaau

SEQ ID NO: 2077328 - RNA, 19 nt, Artificial Sequence
  Description of Artificial Sequence: Synthetic oligonucleotide
  Sense strand starting at position 1622 of SEQ ID NO: 1881865
uuguauuaugggcaugaaa

SEQ ID NO: 2077329 - RNA, 19 nt, Artificial Sequence
  Description of Artificial Sequence: Synthetic oligonucleotide
  Antisense strand to SEQ ID NO: 2077328
uuucaugcccauaauacaa

SEQ ID NO: 2077330 - RNA, 19 nt, Artificial Sequence
  Description of Artificial Sequence: Synthetic oligonucleotide
  Sense strand starting at position 1694 of SEQ ID NO: 1881865
uuuacaguguaugcugaua

SEQ ID NO: 2077331 - RNA, 19 nt, Artificial Sequence
  Description of Artificial Sequence: Synthetic oligonucleotide
  Antisense strand to SEQ ID NO: 2077330
uaucagcauacacuguaaa

SEQ ID NO: 2077332 - RNA, 19 nt, Artificial Sequence
  Description of Artificial Sequence: Synthetic oligonucleotide
  Sense strand starting at position 1732 of SEQ ID NO: 1881865
ucaggugccaaguguauuu

SEQ ID NO: 2077333 - RNA, 19 nt, Artificial Sequence
  Description of Artificial Sequence: Synthetic oligonucleotide
  Antisense strand to SEQ ID NO: 2077332
aaauacacuuggcaccuga

SEQ ID NO: 2077334 - RNA, 19 nt, Artificial Sequence
  Description of Artificial Sequence: Synthetic oligonucleotide
  Sense strand starting at position 1812 of SEQ ID NO: 1881865
ggcaauggaagaugcauaa

SEQ ID NO: 2077335 - RNA, 19 nt, Artificial Sequence
  Description of Artificial Sequence: Synthetic oligonucleotide
  Antisense strand to SEQ ID NO: 2077334
uuaugcaucuuccauugcc

SEQ ID NO: 2077336 - RNA, 19 nt, Artificial Sequence
  Description of Artificial Sequence: Synthetic oligonucleotide
  Sense strand starting at position 1855 of SEQ ID NO: 1881865
agguaaagcuuagauuuac

SEQ ID NO: 2077337 - RNA, 19 nt, Artificial Sequence
  Description of Artificial Sequence: Synthetic oligonucleotide
  Antisense strand to SEQ ID NO: 2077336
guaaaucuaagcuuuaccu

SEQ ID NO: 2077338 - RNA, 19 nt, Artificial Sequence
  Description of Artificial Sequence: Synthetic oligonucleotide
  Sense strand starting at position 2031 of SEQ ID NO: 1881865
augauagaaucagaaucuu

SEQ ID NO: 2077339 - RNA, 19 nt, Artificial Sequence
  Description of Artificial Sequence: Synthetic oligonucleotide
  Antisense strand to SEQ ID NO: 2077338
aagauucugauucuaucau

SEQ ID NO: 2077340 - RNA, 19 nt, Artificial Sequence
  Description of Artificial Sequence: Synthetic oligonucleotide
  Sense strand starting at position 2077 of SEQ ID NO: 1881865
gggagauucuaauaaugaa

SEQ ID NO: 2077341 - RNA, 19 nt, Artificial Sequence
  Description of Artificial Sequence: Synthetic oligonucleotide
  Antisense strand to SEQ ID NO: 2077340
uucauuauuagaaucuccc

SEQ ID NO: 2077342 - RNA, 19 nt, Artificial Sequence
  Description of Artificial Sequence: Synthetic oligonucleotide
  Sense strand starting at position 2122 of SEQ ID NO: 1881865
accuauguuccaggaacaa

SEQ ID NO: 2077343 - RNA, 19 nt, Artificial Sequence
  Description of Artificial Sequence: Synthetic oligonucleotide
  Antisense strand to SEQ ID NO: 2077342
uuguuccuggaacauaggu

SEQ ID NO: 2077344 - RNA, 19 nt, Artificial Sequence
  Description of Artificial Sequence: Synthetic oligonucleotide
  Sense strand starting at position 2165 of SEQ ID NO: 1881865
aggaaaggcuuagggauuu

SEQ ID NO: 2077345 - RNA, 19 nt, Artificial Sequence
  Description of Artificial Sequence: Synthetic oligonucleotide
  Antisense strand to SEQ ID NO: 2077344
aaaucccuaagccuuuccu

SEQ ID NO: 2077346 - RNA, 19 nt, Artificial Sequence
  Description of Artificial Sequence: Synthetic oligonucleotide
  Sense strand starting at position 2552 of SEQ ID NO: 1881865
gcaaucuuagacuguguua

SEQ ID NO: 2077347 - RNA, 19 nt, Artificial Sequence
  Description of Artificial Sequence: Synthetic oligonucleotide
  Antisense strand to SEQ ID NO: 2077346
uaacacagucuaagauugc

SEQ ID NO: 2077348 - RNA, 19 nt, Artificial Sequence
  Description of Artificial Sequence: Synthetic oligonucleotide
  Sense strand starting at position 2555 of SEQ ID NO: 1881865
aucuuagacuguguuacua

SEQ ID NO: 2077349 - RNA, 19 nt, Artificial Sequence
  Description of Artificial Sequence: Synthetic oligonucleotide
  Antisense strand to SEQ ID NO: 2077348
uaguaacacagucuaagau

SEQ ID NO: 2077350 - RNA, 19 nt, Artificial Sequence
  Description of Artificial Sequence: Synthetic oligonucleotide
  Sense strand starting at position 2559 of SEQ ID NO: 1881865
uagacuguguuacuagaua

SEQ ID NO: 2077351 - RNA, 19 nt, Artificial Sequence
  Description of Artificial Sequence: Synthetic oligonucleotide
  Antisense strand to SEQ ID NO: 2077350
uaucuaguaacacagucua

SEQ ID NO: 2077352 - RNA, 19 nt, Artificial Sequence
  Description of Artificial Sequence: Synthetic oligonucleotide
  Sense strand starting at position 2613 of SEQ ID NO: 1881865
ucuccacuuugugucagaa

SEQ ID NO: 2077353 - RNA, 19 nt, Artificial Sequence
  Description of Artificial Sequence: Synthetic oligonucleotide
  Antisense strand to SEQ ID NO: 2077352
uucugacacaaaguggaga

SEQ ID NO: 2077354 - RNA, 19 nt, Artificial Sequence
  Description of Artificial Sequence: Synthetic oligonucleotide
  Sense strand starting at position 2749 of SEQ ID NO: 1881865
uugguauugacauagcaga

SEQ ID NO: 2077355 - RNA, 19 nt, Artificial Sequence
  Description of Artificial Sequence: Synthetic oligonucleotide
  Antisense strand to SEQ ID NO: 2077354
ucugcuaugucaauaccaa

SEQ ID NO: 2077356 - RNA, 19 nt, Artificial Sequence
  Description of Artificial Sequence: Synthetic oligonucleotide
  Sense strand starting at position 2774 of SEQ ID NO: 1881865
aaauguauucuagauuggu

SEQ ID NO: 2077357 - RNA, 19 nt, Artificial Sequence
  Description of Artificial Sequence: Synthetic oligonucleotide
  Antisense strand to SEQ ID NO: 2077356
accaaucuagaauacauuu

SEQ ID NO: 2077358 - RNA, 19 nt, Artificial Sequence
  Description of Artificial Sequence: Synthetic oligonucleotide
  Sense strand starting at position 2797 of SEQ ID NO: 1881865
aaacuauggugaguagaug

SEQ ID NO: 2077359 - RNA, 19 nt, Artificial Sequence
  Description of Artificial Sequence: Synthetic oligonucleotide
  Antisense strand to SEQ ID NO: 2077358
caucuacucaccauaguuu

SEQ ID NO: 2077360 - RNA, 19 nt, Artificial Sequence
  Description of Artificial Sequence: Synthetic oligonucleotide
  Sense strand starting at position 2806 of SEQ ID NO: 1881865
ugaguagauggcugugacu

SEQ ID NO: 2077361 - RNA, 19 nt, Artificial Sequence
  Description of Artificial Sequence: Synthetic oligonucleotide
  Antisense strand to SEQ ID NO: 2077360
agucacagccaucuacuca

SEQ ID NO: 2077362 - RNA, 19 nt, Artificial Sequence
  Description of Artificial Sequence: Synthetic oligonucleotide
  Sense strand starting at position 2838 of SEQ ID NO: 1881865
auugauugcucaguccauu

SEQ ID NO: 2077363 - RNA, 19 nt, Artificial Sequence
  Description of Artificial Sequence: Synthetic oligonucleotide
  Antisense strand to SEQ ID NO: 2077362
aauggacugagcaaucaau

SEQ ID NO: 2077364 - RNA, 19 nt, Artificial Sequence
  Description of Artificial Sequence: Synthetic oligonucleotide
  Sense strand starting at position 2841 of SEQ ID NO: 1881865
gauugcucaguccauuaga

SEQ ID NO: 2077365 - RNA, 19 nt, Artificial Sequence
  Description of Artificial Sequence: Synthetic oligonucleotide
  Antisense strand to SEQ ID NO: 2077364
ucuaauggacugagcaauc

SEQ ID NO: 2077366 - RNA, 19 nt, Artificial Sequence
  Description of Artificial Sequence: Synthetic oligonucleotide
  Sense strand starting at position 2844 of SEQ ID NO: 1881865
ugcucaguccauuagaggu

SEQ ID NO: 2077367 - RNA, 19 nt, Artificial Sequence
  Description of Artificial Sequence: Synthetic oligonucleotide
  Antisense strand to SEQ ID NO: 2077366
accucuaauggacugagca

SEQ ID NO: 2077368 - RNA, 19 nt, Artificial Sequence
  Description of Artificial Sequence: Synthetic oligonucleotide
  Sense strand starting at position 2888 of SEQ ID NO: 1881865
aucggcugccuugaguaua

SEQ ID NO: 2077369 - RNA, 19 nt, Artificial Sequence
  Description of Artificial Sequence: Synthetic oligonucleotide
  Antisense strand to SEQ ID NO: 2077368
uauacucaaggcagccgau

SEQ ID NO: 2077370 - RNA, 19 nt, Artificial Sequence
  Description of Artificial Sequence: Synthetic oligonucleotide
  Sense strand starting at position 3048 of SEQ ID NO: 1881865
ucaacaauaucggaauaaa

SEQ ID NO: 2077371 - RNA, 19 nt, Artificial Sequence
  Description of Artificial Sequence: Synthetic oligonucleotide
  Antisense strand to SEQ ID NO: 2077370
uuuauuccgauauuguuga

SEQ ID NO: 2077372 - RNA, 19 nt, Artificial Sequence
  Description of Artificial Sequence: Synthetic oligonucleotide
  Sense strand starting at position 336 of SEQ ID NO: 1881866
acagcuugccgggaagaaa

SEQ ID NO: 2077373 - RNA, 19 nt, Artificial Sequence
  Description of Artificial Sequence: Synthetic oligonucleotide
  Antisense strand to SEQ ID NO: 2077372
uuucuucccggcaagcugu

SEQ ID NO: 2077374 - RNA, 19 nt, Artificial Sequence
  Description of Artificial Sequence: Synthetic oligonucleotide
  Sense strand starting at position 766 of SEQ ID NO: 1881866
cuugcuuaaucaucugaga

SEQ ID NO: 2077375 - RNA, 19 nt, Artificial Sequence
  Description of Artificial Sequence: Synthetic oligonucleotide
  Antisense strand to SEQ ID NO: 2077374
ucucagaugauuaagcaag

SEQ ID NO: 2077376 - RNA, 19 nt, Artificial Sequence
  Description of Artificial Sequence: Synthetic oligonucleotide
  Sense strand starting at position 795 of SEQ ID NO: 1881866
uggcuuucugaacacugaa

SEQ ID NO: 2077377 - RNA, 19 nt, Artificial Sequence
  Description of Artificial Sequence: Synthetic oligonucleotide
  Antisense strand to SEQ ID NO: 2077376
uucaguguucagaaagcca

SEQ ID NO: 2077378 - RNA, 19 nt, Artificial Sequence
  Description of Artificial Sequence: Synthetic oligonucleotide
  Sense strand starting at position 937 of SEQ ID NO: 1881866
cugguaucuacaggagaug

SEQ ID NO: 2077379 - RNA, 19 nt, Artificial Sequence
  Description of Artificial Sequence: Synthetic oligonucleotide
  Antisense strand to SEQ ID NO: 2077378
caucuccuguagauaccag

SEQ ID NO: 2077380 - RNA, 19 nt, Artificial Sequence
  Description of Artificial Sequence: Synthetic oligonucleotide
  Sense strand starting at position 1041 of SEQ ID NO: 1881866
cgcaaaucuacuugggaug

SEQ ID NO: 2077381 - RNA, 19 nt, Artificial Sequence
  Description of Artificial Sequence: Synthetic oligonucleotide
  Antisense strand to SEQ ID NO: 2077380
caucccaaguagauuugcg

SEQ ID NO: 2077382 - RNA, 19 nt, Artificial Sequence
  Description of Artificial Sequence: Synthetic oligonucleotide
  Sense strand starting at position 1042 of SEQ ID NO: 1881866
gcaaaucuacuugggaugu

SEQ ID NO: 2077383 - RNA, 19 nt, Artificial Sequence
  Description of Artificial Sequence: Synthetic oligonucleotide
  Antisense strand to SEQ ID NO: 2077382
acaucccaaguagauuugc

SEQ ID NO: 2077384 - RNA, 19 nt, Artificial Sequence
  Description of Artificial Sequence: Synthetic oligonucleotide
  Sense strand starting at position 1052 of SEQ ID NO: 1881866
uugggaugucugcaaacaa

SEQ ID NO: 2077385 - RNA, 19 nt, Artificial Sequence
  Description of Artificial Sequence: Synthetic oligonucleotide
  Antisense strand to SEQ ID NO: 2077384
uuguuugcagacaucccaa

SEQ ID NO: 2077386 - RNA, 19 nt, Artificial Sequence
  Description of Artificial Sequence: Synthetic oligonucleotide
  Sense strand starting at position 1313 of SEQ ID NO: 1881866
agggcauugaugggucaca

SEQ ID NO: 2077387 - RNA, 19 nt, Artificial Sequence
  Description of Artificial Sequence: Synthetic oligonucleotide
  Antisense strand to SEQ ID NO: 2077386
ugugacccaucaaugcccu

SEQ ID NO: 2077388 - RNA, 19 nt, Artificial Sequence
  Description of Artificial Sequence: Synthetic oligonucleotide
  Sense strand starting at position 1505 of SEQ ID NO: 1881866
caguucuucccagaagggu

SEQ ID NO: 2077389 - RNA, 19 nt, Artificial Sequence
  Description of Artificial Sequence: Synthetic oligonucleotide
  Antisense strand to SEQ ID NO: 2077388
acccuucugggaagaacug

SEQ ID NO: 2077390 - RNA, 19 nt, Artificial Sequence
  Description of Artificial Sequence: Synthetic oligonucleotide
  Sense strand starting at position 2084 of SEQ ID NO: 1881866
cccgaagaaugcucaggaa

SEQ ID NO: 2077391 - RNA, 19 nt, Artificial Sequence
  Description of Artificial Sequence: Synthetic oligonucleotide
  Antisense strand to SEQ ID NO: 2077390
uuccugagcauucuucggg

SEQ ID NO: 2077392 - RNA, 19 nt, Artificial Sequence
  Description of Artificial Sequence: Synthetic oligonucleotide
  Sense strand starting at position 2466 of SEQ ID NO: 1881866
uaacucauucguuaguuga

SEQ ID NO: 2077393 - RNA, 19 nt, Artificial Sequence
  Description of Artificial Sequence: Synthetic oligonucleotide
  Antisense strand to SEQ ID NO: 2077392
ucaacuaacgaaugaguua

SEQ ID NO: 2077394 - RNA, 19 nt, Artificial Sequence
  Description of Artificial Sequence: Synthetic oligonucleotide
  Sense strand starting at position 2474 of SEQ ID NO: 1881866
ucguuaguugauccgcuua

SEQ ID NO: 2077395 - RNA, 19 nt, Artificial Sequence
  Description of Artificial Sequence: Synthetic oligonucleotide
  Antisense strand to SEQ ID NO: 2077394
uaagcggaucaacuaacga

SEQ ID NO: 2077396 - RNA, 19 nt, Artificial Sequence
  Description of Artificial Sequence: Synthetic oligonucleotide
  Sense strand starting at position 2479 of SEQ ID NO: 1881866
aguugauccgcuuaaauaa

SEQ ID NO: 2077397 - RNA, 19 nt, Artificial Sequence
  Description of Artificial Sequence: Synthetic oligonucleotide
  Antisense strand to SEQ ID NO: 2077396
uuauuuaagcggaucaacu

SEQ ID NO: 2077398 - RNA, 19 nt, Artificial Sequence
  Description of Artificial Sequence: Synthetic oligonucleotide
  Sense strand starting at position 2545 of SEQ ID NO: 1881866
ccauccauuugucugugua

SEQ ID NO: 2077399 - RNA, 19 nt, Artificial Sequence
  Description of Artificial Sequence: Synthetic oligonucleotide
  Antisense strand to SEQ ID NO: 2077398
uacacagacaaauggaugg

SEQ ID NO: 2077400 - RNA, 19 nt, Artificial Sequence
  Description of Artificial Sequence: Synthetic oligonucleotide
  Sense strand starting at position 2546 of SEQ ID NO: 1881866
cauccauuugucuguguag

SEQ ID NO: 2077401 - RNA, 19 nt, Artificial Sequence
  Description of Artificial Sequence: Synthetic oligonucleotide
  Antisense strand to SEQ ID NO: 2077400
cuacacagacaaauggaug

SEQ ID NO: 2077402 - RNA, 19 nt, Artificial Sequence
  Description of Artificial Sequence: Synthetic oligonucleotide
  Sense strand starting at position 2547 of SEQ ID NO: 1881866
auccauuugucuguguagu

SEQ ID NO: 2077403 - RNA, 19 nt, Artificial Sequence
  Description of Artificial Sequence: Synthetic oligonucleotide
  Antisense strand to SEQ ID NO: 2077402
acuacacagacaaauggau

SEQ ID NO: 2077404 - RNA, 19 nt, Artificial Sequence
  Description of Artificial Sequence: Synthetic oligonucleotide
  Sense strand starting at position 2548 of SEQ ID NO: 1881866
uccauuugucuguguaguc

SEQ ID NO: 2077405 - RNA, 19 nt, Artificial Sequence
  Description of Artificial Sequence: Synthetic oligonucleotide
  Antisense strand to SEQ ID NO: 2077404
gacuacacagacaaaugga

SEQ ID NO: 2077406 - RNA, 19 nt, Artificial Sequence
  Description of Artificial Sequence: Synthetic oligonucleotide
  Sense strand starting at position 2604 of SEQ ID NO: 1881866
gggcuaaguucugcauuua

SEQ ID NO: 2077407 - RNA, 19 nt, Artificial Sequence
  Description of Artificial Sequence: Synthetic oligonucleotide
  Antisense strand to SEQ ID NO: 2077406
uaaaugcagaacuuagccc

SEQ ID NO: 2077408 - RNA, 19 nt, Artificial Sequence
  Description of Artificial Sequence: Synthetic oligonucleotide
  Sense strand starting at position 2618 of SEQ ID NO: 1881866
auuuacauguuggagcaaa

SEQ ID NO: 2077409 - RNA, 19 nt, Artificial Sequence
  Description of Artificial Sequence: Synthetic oligonucleotide
  Antisense strand to SEQ ID NO: 2077408
uuugcuccaacauguaaau

SEQ ID NO: 2077410 - RNA, 19 nt, Artificial Sequence
  Description of Artificial Sequence: Synthetic oligonucleotide
  Sense strand starting at position 2647 of SEQ ID NO: 1881866
cuguaucuugcagagcuga

SEQ ID NO: 2077411 - RNA, 19 nt, Artificial Sequence
  Description of Artificial Sequence: Synthetic oligonucleotide
  Antisense strand to SEQ ID NO: 2077410
ucagcucugcaagauacag

SEQ ID NO: 2077412 - RNA, 19 nt, Artificial Sequence
  Description of Artificial Sequence: Synthetic oligonucleotide
  Sense strand starting at position 2672 of SEQ ID NO: 1881866
gcuggagaacacuggcauu

SEQ ID NO: 2077413 - RNA, 19 nt, Artificial Sequence
  Description of Artificial Sequence: Synthetic oligonucleotide
  Antisense strand to SEQ ID NO: 2077412
aaugccaguguucuccagc

SEQ ID NO: 2077414 - RNA, 19 nt, Artificial Sequence
  Description of Artificial Sequence: Synthetic oligonucleotide
  Sense strand starting at position 2786 of SEQ ID NO: 1881866
uuuagucuggucuagagau

SEQ ID NO: 2077415 - RNA, 19 nt, Artificial Sequence
  Description of Artificial Sequence: Synthetic oligonucleotide
  Antisense strand to SEQ ID NO: 2077414
aucucuagaccagacuaaa

SEQ ID NO: 2077416 - RNA, 19 nt, Artificial Sequence
  Description of Artificial Sequence: Synthetic oligonucleotide
  Sense strand starting at position 2788 of SEQ ID NO: 1881866
uagucuggucuagagaucu

SEQ ID NO: 2077417 - RNA, 19 nt, Artificial Sequence
  Description of Artificial Sequence: Synthetic oligonucleotide
  Antisense strand to SEQ ID NO: 2077416
agaucucuagaccagacua

SEQ ID NO: 2077418 - RNA, 19 nt, Artificial Sequence
  Description of Artificial Sequence: Synthetic oligonucleotide
  Sense strand starting at position 2806 of SEQ ID NO: 1881866
ugaggaagcuucuccaaag

SEQ ID NO: 2077419 - RNA, 19 nt, Artificial Sequence
  Description of Artificial Sequence: Synthetic oligonucleotide
  Antisense strand to SEQ ID NO: 2077418
cuuuggagaagcuuccuca

SEQ ID NO: 2077420 - RNA, 19 nt, Artificial Sequence
  Description of Artificial Sequence: Synthetic oligonucleotide
  Sense strand starting at position 2807 of SEQ ID NO: 1881866
gaggaagcuucuccaaaga

SEQ ID NO: 2077421 - RNA, 19 nt, Artificial Sequence
  Description of Artificial Sequence: Synthetic oligonucleotide
  Antisense strand to SEQ ID NO: 2077420
ucuuuggagaagcuuccuc

SEQ ID NO: 2077422 - RNA, 19 nt, Artificial Sequence
  Description of Artificial Sequence: Synthetic oligonucleotide
  Sense strand starting at position 2828 of SEQ ID NO: 1881866
ugcuaaugcggguaagaua

SEQ ID NO: 2077423 - RNA, 19 nt, Artificial Sequence
  Description of Artificial Sequence: Synthetic oligonucleotide
  Antisense strand to SEQ ID NO: 2077422
uaucuuacccgcauuagca

SEQ ID NO: 2077424 - RNA, 19 nt, Artificial Sequence
  Description of Artificial Sequence: Synthetic oligonucleotide
  Sense strand starting at position 2840 of SEQ ID NO: 1881866
uaagauauuugaggaacug

SEQ ID NO: 2077425 - RNA, 19 nt, Artificial Sequence
  Description of Artificial Sequence: Synthetic oligonucleotide
  Antisense strand to SEQ ID NO: 2077424
caguuccucaaauaucuua

SEQ ID NO: 2077426 - RNA, 19 nt, Artificial Sequence
  Description of Artificial Sequence: Synthetic oligonucleotide
  Sense strand starting at position 2958 of SEQ ID NO: 1881866
gaaguccgucucuacuaaa

SEQ ID NO: 2077427 - RNA, 19 nt, Artificial Sequence
  Description of Artificial Sequence: Synthetic oligonucleotide
  Antisense strand to SEQ ID NO: 2077426
uuuaguagagacggacuuc

SEQ ID NO: 2077428 - RNA, 19 nt, Artificial Sequence
  Description of Artificial Sequence: Synthetic oligonucleotide
  Sense strand starting at position 3156 of SEQ ID NO: 1881866
ugaugaacuaggugaagua

SEQ ID NO: 2077429 - RNA, 19 nt, Artificial Sequence
  Description of Artificial Sequence: Synthetic oligonucleotide
  Antisense strand to SEQ ID NO: 2077428
uacuucaccuaguucauca

SEQ ID NO: 2077430 - RNA, 19 nt, Artificial Sequence
  Description of Artificial Sequence: Synthetic oligonucleotide
  Sense strand starting at position 3198 of SEQ ID NO: 1881866
uugcaaaggcccugagaua

SEQ ID NO: 2077431 - RNA, 19 nt, Artificial Sequence
  Description of Artificial Sequence: Synthetic oligonucleotide
  Antisense strand to SEQ ID NO: 2077430
uaucucagggccuuugcaa

SEQ ID NO: 2077432 - RNA, 19 nt, Artificial Sequence
  Description of Artificial Sequence: Synthetic oligonucleotide
  Sense strand starting at position 3220 of SEQ ID NO: 1881866
ggcugaugaguuugagaaa

SEQ ID NO: 2077433 - RNA, 19 nt, Artificial Sequence
  Description of Artificial Sequence: Synthetic oligonucleotide
  Antisense strand to SEQ ID NO: 2077432
uuucucaaacucaucagcc

SEQ ID NO: 2077434 - RNA, 19 nt, Artificial Sequence
  Description of Artificial Sequence: Synthetic oligonucleotide
  Sense strand starting at position 3298 of SEQ ID NO: 1881866
gcugaagagguaugaauac

SEQ ID NO: 2077435 - RNA, 19 nt, Artificial Sequence
  Description of Artificial Sequence: Synthetic oligonucleotide
  Antisense strand to SEQ ID NO: 2077434
guauucauaccucuucagc

SEQ ID NO: 2077436 - RNA, 19 nt, Artificial Sequence
  Description of Artificial Sequence: Synthetic oligonucleotide
  Sense strand starting at position 3360 of SEQ ID NO: 1881866
uggagcuugacaugaucau

SEQ ID NO: 2077437 - RNA, 19 nt, Artificial Sequence
  Description of Artificial Sequence: Synthetic oligonucleotide
  Antisense strand to SEQ ID NO: 2077436
augaucaugucaagcucca

SEQ ID NO: 2077438 - RNA, 19 nt, Artificial Sequence
  Description of Artificial Sequence: Synthetic oligonucleotide
  Sense strand starting at position 3373 of SEQ ID NO: 1881866
gaucauccugacugcagua

SEQ ID NO: 2077439 - RNA, 19 nt, Artificial Sequence
  Description of Artificial Sequence: Synthetic oligonucleotide
  Antisense strand to SEQ ID NO: 2077438
uacugcagucaggaugauc

SEQ ID NO: 2077440 - RNA, 19 nt, Artificial Sequence
  Description of Artificial Sequence: Synthetic oligonucleotide
  Sense strand starting at position 3523 of SEQ ID NO: 1881866
uauagcuaugacugggaca

SEQ ID NO: 2077441 - RNA, 19 nt, Artificial Sequence
  Description of Artificial Sequence: Synthetic oligonucleotide
  Antisense strand to SEQ ID NO: 2077440
ugucccagucauagcuaua

SEQ ID NO: 2077442 - RNA, 19 nt, Artificial Sequence
  Description of Artificial Sequence: Synthetic oligonucleotide
  Sense strand starting at position 3626 of SEQ ID NO: 1881866
uugcuauuugccgaccuua

SEQ ID NO: 2077443 - RNA, 19 nt, Artificial Sequence
  Description of Artificial Sequence: Synthetic oligonucleotide
  Antisense strand to SEQ ID NO: 2077442
uaaggucggcaaauagcaa

SEQ ID NO: 2077444 - RNA, 19 nt, Artificial Sequence
  Description of Artificial Sequence: Synthetic oligonucleotide
  Sense strand starting at position 3684 of SEQ ID NO: 1881866
gguacuccucaagagcuua

SEQ ID NO: 2077445 - RNA, 19 nt, Artificial Sequence
  Description of Artificial Sequence: Synthetic oligonucleotide
  Antisense strand to SEQ ID NO: 2077444
uaagcucuugaggaguacc

SEQ ID NO: 2077446 - RNA, 19 nt, Artificial Sequence
  Description of Artificial Sequence: Synthetic oligonucleotide
  Sense strand starting at position 3870 of SEQ ID NO: 1881866
gcaguugccgggccaaauu

SEQ ID NO: 2077447 - RNA, 19 nt, Artificial Sequence
  Description of Artificial Sequence: Synthetic oligonucleotide
  Antisense strand to SEQ ID NO: 2077446
aauuuggcccggcaacugc

SEQ ID NO: 2077448 - RNA, 19 nt, Artificial Sequence
  Description of Artificial Sequence: Synthetic oligonucleotide
  Sense strand starting at position 3912 of SEQ ID NO: 1881866
uccacuuucguggauuaaa

SEQ ID NO: 2077449 - RNA, 19 nt, Artificial Sequence
  Description of Artificial Sequence: Synthetic oligonucleotide
  Antisense strand to SEQ ID NO: 2077448
uuuaauccacgaaagugga

SEQ ID NO: 2077450 - RNA, 19 nt, Artificial Sequence
  Description of Artificial Sequence: Synthetic oligonucleotide
  Sense strand starting at position 3915 of SEQ ID NO: 1881866
acuuucguggauuaaagau

SEQ ID NO: 2077451 - RNA, 19 nt, Artificial Sequence
  Description of Artificial Sequence: Synthetic oligonucleotide
  Antisense strand to SEQ ID NO: 2077450
aucuuuaauccacgaaagu

SEQ ID NO: 2077452 - RNA, 19 nt, Artificial Sequence
  Description of Artificial Sequence: Synthetic oligonucleotide
  Sense strand starting at position 629 of SEQ ID NO: 1881867
ucgaccaaugagugaauaa

SEQ ID NO: 2077453 - RNA, 19 nt, Artificial Sequence
  Description of Artificial Sequence: Synthetic oligonucleotide
  Antisense strand to SEQ ID NO: 2077452
uuauucacucauuggucga

SEQ ID NO: 2077454 - RNA, 19 nt, Artificial Sequence
  Description of Artificial Sequence: Synthetic oligonucleotide
  Sense strand starting at position 684 of SEQ ID NO: 1881867
uccaguacaccauggaaua

SEQ ID NO: 2077455 - RNA, 19 nt, Artificial Sequence
  Description of Artificial Sequence: Synthetic oligonucleotide
  Antisense strand to SEQ ID NO: 2077454
uauuccaugguguacugga

SEQ ID NO: 2077456 - RNA, 19 nt, Artificial Sequence
  Description of Artificial Sequence: Synthetic oligonucleotide
  Sense strand starting at position 814 of SEQ ID NO: 1881867
uuucucuuauaagugggaa

SEQ ID NO: 2077457 - RNA, 19 nt, Artificial Sequence
  Description of Artificial Sequence: Synthetic oligonucleotide
  Antisense strand to SEQ ID NO: 2077456
uucccacuuauaagagaaa

SEQ ID NO: 2077458 - RNA, 19 nt, Artificial Sequence
  Description of Artificial Sequence: Synthetic oligonucleotide
  Sense strand starting at position 903 of SEQ ID NO: 1881867
ggaggugguuaaaggauua

SEQ ID NO: 2077459 - RNA, 19 nt, Artificial Sequence
  Description of Artificial Sequence: Synthetic oligonucleotide
  Antisense strand to SEQ ID NO: 2077458
uaauccuuuaaccaccucc

SEQ ID NO: 2077460 - RNA, 19 nt, Artificial Sequence
  Description of Artificial Sequence: Synthetic oligonucleotide
  Sense strand starting at position 929 of SEQ ID NO: 1881867
uacauauugguaugaugua

SEQ ID NO: 2077461 - RNA, 19 nt, Artificial Sequence
  Description of Artificial Sequence: Synthetic oligonucleotide
  Antisense strand to SEQ ID NO: 2077460
uacaucauaccaauaugua

SEQ ID NO: 2077462 - RNA, 19 nt, Artificial Sequence
  Description of Artificial Sequence: Synthetic oligonucleotide
  Sense strand starting at position 1125 of SEQ ID NO: 1881867
gugauucuuugaucuauau

SEQ ID NO: 2077463 - RNA, 19 nt, Artificial Sequence
  Description of Artificial Sequence: Synthetic oligonucleotide
  Antisense strand to SEQ ID NO: 2077462
auauagaucaaagaaucac

SEQ ID NO: 2077464 - RNA, 19 nt, Artificial Sequence
  Description of Artificial Sequence: Synthetic oligonucleotide
  Sense strand starting at position 1129 of SEQ ID NO: 1881867
uucuuugaucuauauguac

SEQ ID NO: 2077465 - RNA, 19 nt, Artificial Sequence
  Description of Artificial Sequence: Synthetic oligonucleotide
  Antisense strand to SEQ ID NO: 2077464
guacauauagaucaaagaa

SEQ ID NO: 2077466 - RNA, 19 nt, Artificial Sequence
  Description of Artificial Sequence: Synthetic oligonucleotide
  Sense strand starting at position 1156 of SEQ ID NO: 1881867
gagaaaguaggcugucaga

SEQ ID NO: 2077467 - RNA, 19 nt, Artificial Sequence
  Description of Artificial Sequence: Synthetic oligonucleotide
  Antisense strand to SEQ ID NO: 2077466
ucugacagccuacuuucuc

SEQ ID NO: 2077468 - RNA, 19 nt, Artificial Sequence
  Description of Artificial Sequence: Synthetic oligonucleotide
  Sense strand starting at position 1181 of SEQ ID NO: 1881867
gaauaaagacaguguuucu

SEQ ID NO: 2077469 - RNA, 19 nt, Artificial Sequence
  Description of Artificial Sequence: Synthetic oligonucleotide
  Antisense strand to SEQ ID NO: 2077468
agaaacacugucuuuauuc

SEQ ID NO: 2077470 - RNA, 19 nt, Artificial Sequence
  Description of Artificial Sequence: Synthetic oligonucleotide
  Sense strand starting at position 1208 of SEQ ID NO: 1881867
ugauuaugccuacagccau

SEQ ID NO: 2077471 - RNA, 19 nt, Artificial Sequence
  Description of Artificial Sequence: Synthetic oligonucleotide
  Antisense strand to SEQ ID NO: 2077470
auggcuguaggcauaauca

SEQ ID NO: 2077472 - RNA, 19 nt, Artificial Sequence
  Description of Artificial Sequence: Synthetic oligonucleotide
  Sense strand starting at position 1215 of SEQ ID NO: 1881867
gccuacagccauuagcaua

SEQ ID NO: 2077473 - RNA, 19 nt, Artificial Sequence
  Description of Artificial Sequence: Synthetic oligonucleotide
  Antisense strand to SEQ ID NO: 2077472
uaugcuaauggcuguaggc

SEQ ID NO: 2077474 - RNA, 19 nt, Artificial Sequence
  Description of Artificial Sequence: Synthetic oligonucleotide
  Sense strand starting at position 1239 of SEQ ID NO: 1881867
uauauuagguucucgauaa

SEQ ID NO: 2077475 - RNA, 19 nt, Artificial Sequence
  Description of Artificial Sequence: Synthetic oligonucleotide
  Antisense strand to SEQ ID NO: 2077474
uuaucgagaaccuaauaua

SEQ ID NO: 2077476 - RNA, 19 nt, Artificial Sequence
  Description of Artificial Sequence: Synthetic oligonucleotide
  Sense strand starting at position 1243 of SEQ ID NO: 1881867
uuagguucucgauaaauau

SEQ ID NO: 2077477 - RNA, 19 nt, Artificial Sequence
  Description of Artificial Sequence: Synthetic oligonucleotide
  Antisense strand to SEQ ID NO: 2077476
auauuuaucgagaaccuaa

SEQ ID NO: 2077478 - RNA, 19 nt, Artificial Sequence
  Description of Artificial Sequence: Synthetic oligonucleotide
  Sense strand starting at position 1593 of SEQ ID NO: 1881867
guuccauuucuaugcuguu

SEQ ID NO: 2077479 - RNA, 19 nt, Artificial Sequence
  Description of Artificial Sequence: Synthetic oligonucleotide
  Antisense strand to SEQ ID NO: 2077478
aacagcauagaaauggaac

SEQ ID NO: 2077480 - RNA, 19 nt, Artificial Sequence
  Description of Artificial Sequence: Synthetic oligonucleotide
  Sense strand starting at position 1594 of SEQ ID NO: 1881867
uuccauuucuaugcuguua

SEQ ID NO: 2077481 - RNA, 19 nt, Artificial Sequence
  Description of Artificial Sequence: Synthetic oligonucleotide
  Antisense strand to SEQ ID NO: 2077480
uaacagcauagaaauggaa

SEQ ID NO: 2077482 - RNA, 19 nt, Artificial Sequence
  Description of Artificial Sequence: Synthetic oligonucleotide
  Sense strand starting at position 1661 of SEQ ID NO: 1881867
guaccugguaucuauuguu

SEQ ID NO: 2077483 - RNA, 19 nt, Artificial Sequence
  Description of Artificial Sequence: Synthetic oligonucleotide
  Antisense strand to SEQ ID NO: 2077482
aacaauagauaccagguac

SEQ ID NO: 2077484 - RNA, 19 nt, Artificial Sequence
  Description of Artificial Sequence: Synthetic oligonucleotide
  Sense strand starting at position 1683 of SEQ ID NO: 1881867
uucugaauaugcccauuga

SEQ ID NO: 2077485 - RNA, 19 nt, Artificial Sequence
  Description of Artificial Sequence: Synthetic oligonucleotide
  Antisense strand to SEQ ID NO: 2077484
ucaaugggcauauucagaa

SEQ ID NO: 2077486 - RNA, 19 nt, Artificial Sequence
  Description of Artificial Sequence: Synthetic oligonucleotide
  Sense strand starting at position 1742 of SEQ ID NO: 1881867
agaacugacuuguuccacu

SEQ ID NO: 2077487 - RNA, 19 nt, Artificial Sequence
  Description of Artificial Sequence: Synthetic oligonucleotide
  Antisense strand to SEQ ID NO: 2077486
aguggaacaagucaguucu

SEQ ID NO: 2077488 - RNA, 19 nt, Artificial Sequence
  Description of Artificial Sequence: Synthetic oligonucleotide
  Sense strand starting at position 2163 of SEQ ID NO: 1881867
agauuuaaauagggacaca

SEQ ID NO: 2077489 - RNA, 19 nt, Artificial Sequence
  Description of Artificial Sequence: Synthetic oligonucleotide
  Antisense strand to SEQ ID NO: 2077488
ugugucccuauuuaaaucu

SEQ ID NO: 2077490 - RNA, 19 nt, Artificial Sequence
  Description of Artificial Sequence: Synthetic oligonucleotide
  Sense strand starting at position 2187 of SEQ ID NO: 1881867
accauaucacuggguaaau

SEQ ID NO: 2077491 - RNA, 19 nt, Artificial Sequence
  Description of Artificial Sequence: Synthetic oligonucleotide
  Antisense strand to SEQ ID NO: 2077490
auuuacccagugauauggu

SEQ ID NO: 2077492 - RNA, 19 nt, Artificial Sequence
  Description of Artificial Sequence: Synthetic oligonucleotide
  Sense strand starting at position 2188 of SEQ ID NO: 1881867
ccauaucacuggguaaauu

SEQ ID NO: 2077493 - RNA, 19 nt, Artificial Sequence
  Description of Artificial Sequence: Synthetic oligonucleotide
  Antisense strand to SEQ ID NO: 2077492
aauuuacccagugauaugg

SEQ ID NO: 2077494 - RNA, 19 nt, Artificial Sequence
  Description of Artificial Sequence: Synthetic oligonucleotide
  Sense strand starting at position 2343 of SEQ ID NO: 1881867
uggauagcugucuauguaa

SEQ ID NO: 2077495 - RNA, 19 nt, Artificial Sequence
  Description of Artificial Sequence: Synthetic oligonucleotide
  Antisense strand to SEQ ID NO: 2077494
uuacauagacagcuaucca

SEQ ID NO: 2077496 - RNA, 19 nt, Artificial Sequence
  Description of Artificial Sequence: Synthetic oligonucleotide
  Sense strand starting at position 2345 of SEQ ID NO: 1881867
gauagcugucuauguaaga

SEQ ID NO: 2077497 - RNA, 19 nt, Artificial Sequence
  Description of Artificial Sequence: Synthetic oligonucleotide
  Antisense strand to SEQ ID NO: 2077496
ucuuacauagacagcuauc

SEQ ID NO: 2077498 - RNA, 19 nt, Artificial Sequence
  Description of Artificial Sequence: Synthetic oligonucleotide
  Sense strand starting at position 2407 of SEQ ID NO: 1881867
ccaauaaauguauggcuca

SEQ ID NO: 2077499 - RNA, 19 nt, Artificial Sequence
  Description of Artificial Sequence: Synthetic oligonucleotide
  Antisense strand to SEQ ID NO: 2077498
ugagccauacauuuauugg

SEQ ID NO: 2077500 - RNA, 19 nt, Artificial Sequence
  Description of Artificial Sequence: Synthetic oligonucleotide
  Sense strand starting at position 2495 of SEQ ID NO: 1881867
ucuauugagucagcaggaa

SEQ ID NO: 2077501 - RNA, 19 nt, Artificial Sequence
  Description of Artificial Sequence: Synthetic oligonucleotide
  Antisense strand to SEQ ID NO: 2077500
uuccugcugacucaauaga

SEQ ID NO: 2077502 - RNA, 19 nt, Artificial Sequence
  Description of Artificial Sequence: Synthetic oligonucleotide
  Sense strand starting at position 2524 of SEQ ID NO: 1881867
acgauauagaccuggcaaa

SEQ ID NO: 2077503 - RNA, 19 nt, Artificial Sequence
  Description of Artificial Sequence: Synthetic oligonucleotide
  Antisense strand to SEQ ID NO: 2077502
uuugccaggucuauaucgu

SEQ ID NO: 2077504 - RNA, 19 nt, Artificial Sequence
  Description of Artificial Sequence: Synthetic oligonucleotide
  Sense strand starting at position 2603 of SEQ ID NO: 1881867
gaacauuaggaaugccgua

SEQ ID NO: 2077505 - RNA, 19 nt, Artificial Sequence
  Description of Artificial Sequence: Synthetic oligonucleotide
  Antisense strand to SEQ ID NO: 2077504
uacggcauuccuaauguuc

SEQ ID NO: 2077506 - RNA, 19 nt, Artificial Sequence
  Description of Artificial Sequence: Synthetic oligonucleotide
  Sense strand starting at position 2608 of SEQ ID NO: 1881867
uuaggaaugccguagcaga

SEQ ID NO: 2077507 - RNA, 19 nt, Artificial Sequence
  Description of Artificial Sequence: Synthetic oligonucleotide
  Antisense strand to SEQ ID NO: 2077506
ucugcuacggcauuccuaa

SEQ ID NO: 2077508 - RNA, 19 nt, Artificial Sequence
  Description of Artificial Sequence: Synthetic oligonucleotide
  Sense strand starting at position 2760 of SEQ ID NO: 1881867
caucacugaguuuggauua

SEQ ID NO: 2077509 - RNA, 19 nt, Artificial Sequence
  Description of Artificial Sequence: Synthetic oligonucleotide
  Antisense strand to SEQ ID NO: 2077508
uaauccaaacucagugaug

SEQ ID NO: 2077510 - RNA, 19 nt, Artificial Sequence
  Description of Artificial Sequence: Synthetic oligonucleotide
  Sense strand starting at position 3336 of SEQ ID NO: 1881867
uggaauaacugcccuaauc

SEQ ID NO: 2077511 - RNA, 19 nt, Artificial Sequence
  Description of Artificial Sequence: Synthetic oligonucleotide
  Antisense strand to SEQ ID NO: 2077510
gauuagggcaguuauucca

SEQ ID NO: 2077512 - RNA, 19 nt, Artificial Sequence
  Description of Artificial Sequence: Synthetic oligonucleotide
  Sense strand starting at position 3346 of SEQ ID NO: 1881867
gcccuaauccaugaguucu

SEQ ID NO: 2077513 - RNA, 19 nt, Artificial Sequence
  Description of Artificial Sequence: Synthetic oligonucleotide
  Antisense strand to SEQ ID NO: 2077512
agaacucauggauuagggc

SEQ ID NO: 2077514 - RNA, 19 nt, Artificial Sequence
  Description of Artificial Sequence: Synthetic oligonucleotide
  Sense strand starting at position 3352 of SEQ ID NO: 1881867
auccaugaguucuuuacuc

SEQ ID NO: 2077515 - RNA, 19 nt, Artificial Sequence
  Description of Artificial Sequence: Synthetic oligonucleotide
  Antisense strand to SEQ ID NO: 2077514
gaguaaagaacucauggau

SEQ ID NO: 2077516 - RNA, 19 nt, Artificial Sequence
  Description of Artificial Sequence: Synthetic oligonucleotide
  Sense strand starting at position 3354 of SEQ ID NO: 1881867
ccaugaguucuuuacucuc

SEQ ID NO: 2077517 - RNA, 19 nt, Artificial Sequence
  Description of Artificial Sequence: Synthetic oligonucleotide
  Antisense strand to SEQ ID NO: 2077516
gagaguaaagaacucaugg

SEQ ID NO: 2077518 - RNA, 19 nt, Artificial Sequence
  Description of Artificial Sequence: Synthetic oligonucleotide
  Sense strand starting at position 3357 of SEQ ID NO: 1881867
ugaguucuuuacucuccca

SEQ ID NO: 2077519 - RNA, 19 nt, Artificial Sequence
  Description of Artificial Sequence: Synthetic oligonucleotide
  Antisense strand to SEQ ID NO: 2077518
ugggagaguaaagaacuca

SEQ ID NO: 2077520 - RNA, 19 nt, Artificial Sequence
  Description of Artificial Sequence: Synthetic oligonucleotide
  Sense strand starting at position 3570 of SEQ ID NO: 1881867
uuaggagucuuacuccuua

SEQ ID NO: 2077521 - RNA, 19 nt, Artificial Sequence
  Description of Artificial Sequence: Synthetic oligonucleotide
  Antisense strand to SEQ ID NO: 2077520
uaaggaguaagacuccuaa

SEQ ID NO: 2077522 - RNA, 19 nt, Artificial Sequence
  Description of Artificial Sequence: Synthetic oligonucleotide
  Sense strand starting at position 3598 of SEQ ID NO: 1881867
ccgacuagacuagggauua

SEQ ID NO: 2077523 - RNA, 19 nt, Artificial Sequence
  Description of Artificial Sequence: Synthetic oligonucleotide
  Antisense strand to SEQ ID NO: 2077522
uaaucccuagucuagucgg

SEQ ID NO: 2077524 - RNA, 19 nt, Artificial Sequence
  Description of Artificial Sequence: Synthetic oligonucleotide
  Sense strand starting at position 3648 of SEQ ID NO: 1881867
gaguuacuggcagacuuua

SEQ ID NO: 2077525 - RNA, 19 nt, Artificial Sequence
  Description of Artificial Sequence: Synthetic oligonucleotide
  Antisense strand to SEQ ID NO: 2077524
uaaagucugccaguaacuc

SEQ ID NO: 2077526 - RNA, 19 nt, Artificial Sequence
  Description of Artificial Sequence: Synthetic oligonucleotide
  Sense strand starting at position 3747 of SEQ ID NO: 1881867
agaccuagucauggauaug

SEQ ID NO: 2077527 - RNA, 19 nt, Artificial Sequence
  Description of Artificial Sequence: Synthetic oligonucleotide
  Antisense strand to SEQ ID NO: 2077526
cauauccaugacuaggucu

SEQ ID NO: 2077528 - RNA, 19 nt, Artificial Sequence
  Description of Artificial Sequence: Synthetic oligonucleotide
  Sense strand starting at position 3774 of SEQ ID NO: 1881867
ucuuuaggucuugaauuaa

SEQ ID NO: 2077529 - RNA, 19 nt, Artificial Sequence
  Description of Artificial Sequence: Synthetic oligonucleotide
  Antisense strand to SEQ ID NO: 2077528
uuaauucaagaccuaaaga

SEQ ID NO: 2077530 - RNA, 19 nt, Artificial Sequence
  Description of Artificial Sequence: Synthetic oligonucleotide
  Sense strand starting at position 3785 of SEQ ID NO: 1881867
ugaauuaagucucucagac

SEQ ID NO: 2077531 - RNA, 19 nt, Artificial Sequence
  Description of Artificial Sequence: Synthetic oligonucleotide
  Antisense strand to SEQ ID NO: 2077530
gucugagagacuuaauuca

SEQ ID NO: 2077532 - RNA, 19 nt, Artificial Sequence
  Description of Artificial Sequence: Synthetic oligonucleotide
  Sense strand starting at position 334 of SEQ ID NO: 1881868
guagcagguacuggauaaa

SEQ ID NO: 2077533 - RNA, 19 nt, Artificial Sequence
  Description of Artificial Sequence: Synthetic oligonucleotide
  Antisense strand to SEQ ID NO: 2077532
uuuauccaguaccugcuac

SEQ ID NO: 2077534 - RNA, 19 nt, Artificial Sequence
  Description of Artificial Sequence: Synthetic oligonucleotide
  Sense strand starting at position 421 of SEQ ID NO: 1881868
guguguagcgccucuuuaa

SEQ ID NO: 2077535 - RNA, 19 nt, Artificial Sequence
  Description of Artificial Sequence: Synthetic oligonucleotide
  Antisense strand to SEQ ID NO: 2077534
uuaaagaggcgcuacacac

SEQ ID NO: 2077536 - RNA, 19 nt, Artificial Sequence
  Description of Artificial Sequence: Synthetic oligonucleotide
  Sense strand starting at position 583 of SEQ ID NO: 1881868
ucagaaacgucccucccaa

SEQ ID NO: 2077537 - RNA, 19 nt, Artificial Sequence
  Description of Artificial Sequence: Synthetic oligonucleotide
  Antisense strand to SEQ ID NO: 2077536
uugggagggacguuucuga

SEQ ID NO: 2077538 - RNA, 19 nt, Artificial Sequence
  Description of Artificial Sequence: Synthetic oligonucleotide
  Sense strand starting at position 639 of SEQ ID NO: 1881868
gaaauugucagaggcagug

SEQ ID NO: 2077539 - RNA, 19 nt, Artificial Sequence
  Description of Artificial Sequence: Synthetic oligonucleotide
  Antisense strand to SEQ ID NO: 2077538
cacugccucugacaauuuc

SEQ ID NO: 2077540 - RNA, 19 nt, Artificial Sequence
  Description of Artificial Sequence: Synthetic oligonucleotide
  Sense strand starting at position 744 of SEQ ID NO: 1881868
gagauuagcuccuuggaaa

SEQ ID NO: 2077541 - RNA, 19 nt, Artificial Sequence
  Description of Artificial Sequence: Synthetic oligonucleotide
  Antisense strand to SEQ ID NO: 2077540
uuuccaaggagcuaaucuc

SEQ ID NO: 2077542 - RNA, 19 nt, Artificial Sequence
  Description of Artificial Sequence: Synthetic oligonucleotide
  Sense strand starting at position 920 of SEQ ID NO: 1881868
uuaacuggauguccugaau

SEQ ID NO: 2077543 - RNA, 19 nt, Artificial Sequence
  Description of Artificial Sequence: Synthetic oligonucleotide
  Antisense strand to SEQ ID NO: 2077542
auucaggacauccaguuaa

SEQ ID NO: 2077544 - RNA, 19 nt, Artificial Sequence
  Description of Artificial Sequence: Synthetic oligonucleotide
  Sense strand starting at position 1053 of SEQ ID NO: 1881868
cagaauaaccaguggcaga

SEQ ID NO: 2077545 - RNA, 19 nt, Artificial Sequence
  Description of Artificial Sequence: Synthetic oligonucleotide
  Antisense strand to SEQ ID NO: 2077544
ucugccacugguuauucug

SEQ ID NO: 2077546 - RNA, 19 nt, Artificial Sequence
  Description of Artificial Sequence: Synthetic oligonucleotide
  Sense strand starting at position 1388 of SEQ ID NO: 1881868
cacauuugagagcgcucaa

SEQ ID NO: 2077547 - RNA, 19 nt, Artificial Sequence
  Description of Artificial Sequence: Synthetic oligonucleotide
  Antisense strand to SEQ ID NO: 2077546
uugagcgcucucaaaugug

SEQ ID NO: 2077548 - RNA, 19 nt, Artificial Sequence
  Description of Artificial Sequence: Synthetic oligonucleotide
  Sense strand starting at position 1489 of SEQ ID NO: 1881868
ugaccugugcacuguagaa

SEQ ID NO: 2077549 - RNA, 19 nt, Artificial Sequence
  Description of Artificial Sequence: Synthetic oligonucleotide
  Antisense strand to SEQ ID NO: 2077548
uucuacagugcacagguca

SEQ ID NO: 2077550 - RNA, 19 nt, Artificial Sequence
  Description of Artificial Sequence: Synthetic oligonucleotide
  Sense strand starting at position 1644 of SEQ ID NO: 1881868
gcucuagaauaaucacugu

SEQ ID NO: 2077551 - RNA, 19 nt, Artificial Sequence
  Description of Artificial Sequence: Synthetic oligonucleotide
  Antisense strand to SEQ ID NO: 2077550
acagugauuauucuagagc

SEQ ID NO: 2077552 - RNA, 19 nt, Artificial Sequence
  Description of Artificial Sequence: Synthetic oligonucleotide
  Sense strand starting at position 1957 of SEQ ID NO: 1881868
gaagcaaaugccuauccga

SEQ ID NO: 2077553 - RNA, 19 nt, Artificial Sequence
  Description of Artificial Sequence: Synthetic oligonucleotide
  Antisense strand to SEQ ID NO: 2077552
ucggauaggcauuugcuuc

SEQ ID NO: 2077554 - RNA, 19 nt, Artificial Sequence
  Description of Artificial Sequence: Synthetic oligonucleotide
  Sense strand starting at position 2124 of SEQ ID NO: 1881868
gcgacuauuugucucuugu

SEQ ID NO: 2077555 - RNA, 19 nt, Artificial Sequence
  Description of Artificial Sequence: Synthetic oligonucleotide
  Antisense strand to SEQ ID NO: 2077554
acaagagacaaauagucgc

SEQ ID NO: 2077556 - RNA, 19 nt, Artificial Sequence
  Description of Artificial Sequence: Synthetic oligonucleotide
  Sense strand starting at position 2352 of SEQ ID NO: 1881868
acugauuaagacugucuca

SEQ ID NO: 2077557 - RNA, 19 nt, Artificial Sequence
  Description of Artificial Sequence: Synthetic oligonucleotide
  Antisense strand to SEQ ID NO: 2077556
ugagacagucuuaaucagu

SEQ ID NO: 2077558 - RNA, 19 nt, Artificial Sequence
  Description of Artificial Sequence: Synthetic oligonucleotide
  Sense strand starting at position 2355 of SEQ ID NO: 1881868
gauuaagacugucucagau

SEQ ID NO: 2077559 - RNA, 19 nt, Artificial Sequence
  Description of Artificial Sequence: Synthetic oligonucleotide
  Antisense strand to SEQ ID NO: 2077558
aucugagacagucuuaauc

SEQ ID NO: 2077560 - RNA, 19 nt, Artificial Sequence
  Description of Artificial Sequence: Synthetic oligonucleotide
  Sense strand starting at position 2801 of SEQ ID NO: 1881868
aucaguauaccuuggacau

SEQ ID NO: 2077561 - RNA, 19 nt, Artificial Sequence
  Description of Artificial Sequence: Synthetic oligonucleotide
  Antisense strand to SEQ ID NO: 2077560
auguccaagguauacugau

SEQ ID NO: 2077562 - RNA, 19 nt, Artificial Sequence
  Description of Artificial Sequence: Synthetic oligonucleotide
  Sense strand starting at position 2802 of SEQ ID NO: 1881868
ucaguauaccuuggacauc

SEQ ID NO: 2077563 - RNA, 19 nt, Artificial Sequence
  Description of Artificial Sequence: Synthetic oligonucleotide
  Antisense strand to SEQ ID NO: 2077562
gauguccaagguauacuga

SEQ ID NO: 2077564 - RNA, 19 nt, Artificial Sequence
  Description of Artificial Sequence: Synthetic oligonucleotide
  Sense strand starting at position 2814 of SEQ ID NO: 1881868
ggacaucuuucuguacauc

SEQ ID NO: 2077565 - RNA, 19 nt, Artificial Sequence
  Description of Artificial Sequence: Synthetic oligonucleotide
  Antisense strand to SEQ ID NO: 2077564
gauguacagaaagaugucc

SEQ ID NO: 2077566 - RNA, 19 nt, Artificial Sequence
  Description of Artificial Sequence: Synthetic oligonucleotide
  Sense strand starting at position 2869 of SEQ ID NO: 1881868
guggcauuucuuugugggu

SEQ ID NO: 2077567 - RNA, 19 nt, Artificial Sequence
  Description of Artificial Sequence: Synthetic oligonucleotide
  Antisense strand to SEQ ID NO: 2077566
acccacaaagaaaugccac

SEQ ID NO: 2077568 - RNA, 19 nt, Artificial Sequence
  Description of Artificial Sequence: Synthetic oligonucleotide
  Sense strand starting at position 2870 of SEQ ID NO: 1881868
uggcauuucuuugugggua

SEQ ID NO: 2077569 - RNA, 19 nt, Artificial Sequence
  Description of Artificial Sequence: Synthetic oligonucleotide
  Antisense strand to SEQ ID NO: 2077568
uacccacaaagaaaugcca

SEQ ID NO: 2077570 - RNA, 19 nt, Artificial Sequence
  Description of Artificial Sequence: Synthetic oligonucleotide
  Sense strand starting at position 2903 of SEQ ID NO: 1881868
guaaccaguucccucacua

SEQ ID NO: 2077571 - RNA, 19 nt, Artificial Sequence
  Description of Artificial Sequence: Synthetic oligonucleotide
  Antisense strand to SEQ ID NO: 2077570
uagugagggaacugguuac

SEQ ID NO: 2077572 - RNA, 19 nt, Artificial Sequence
  Description of Artificial Sequence: Synthetic oligonucleotide
  Sense strand starting at position 2983 of SEQ ID NO: 1881868
ucacacauguaucuugaua

SEQ ID NO: 2077573 - RNA, 19 nt, Artificial Sequence
  Description of Artificial Sequence: Synthetic oligonucleotide
  Antisense strand to SEQ ID NO: 2077572
uaucaagauacauguguga

SEQ ID NO: 2077574 - RNA, 19 nt, Artificial Sequence
  Description of Artificial Sequence: Synthetic oligonucleotide
  Sense strand starting at position 3025 of SEQ ID NO: 1881868
aguggaaucacugggccau

SEQ ID NO: 2077575 - RNA, 19 nt, Artificial Sequence
  Description of Artificial Sequence: Synthetic oligonucleotide
  Antisense strand to SEQ ID NO: 2077574
auggcccagugauuccacu

SEQ ID NO: 2077576 - RNA, 19 nt, Artificial Sequence
  Description of Artificial Sequence: Synthetic oligonucleotide
  Sense strand starting at position 3026 of SEQ ID NO: 1881868
guggaaucacugggccaua

SEQ ID NO: 2077577 - RNA, 19 nt, Artificial Sequence
  Description of Artificial Sequence: Synthetic oligonucleotide
  Antisense strand to SEQ ID NO: 2077576
uauggcccagugauuccac

SEQ ID NO: 2077578 - RNA, 19 nt, Artificial Sequence
  Description of Artificial Sequence: Synthetic oligonucleotide
  Sense strand starting at position 3062 of SEQ ID NO: 1881868
uuugaugugccacauuaua

SEQ ID NO: 2077579 - RNA, 19 nt, Artificial Sequence
  Description of Artificial Sequence: Synthetic oligonucleotide
  Antisense strand to SEQ ID NO: 2077578
uauaauguggcacaucaaa

SEQ ID NO: 2077580 - RNA, 19 nt, Artificial Sequence
  Description of Artificial Sequence: Synthetic oligonucleotide
  Sense strand starting at position 3113 of SEQ ID NO: 1881868
cgcuaacaucuugaugaaa

SEQ ID NO: 2077581 - RNA, 19 nt, Artificial Sequence
  Description of Artificial Sequence: Synthetic oligonucleotide
  Antisense strand to SEQ ID NO: 2077580
uuucaucaagauguuagcg

SEQ ID NO: 2077582 - RNA, 19 nt, Artificial Sequence
  Description of Artificial Sequence: Synthetic oligonucleotide
  Sense strand starting at position 3147 of SEQ ID NO: 1881868
gugagcauugacuguauuu

SEQ ID NO: 2077583 - RNA, 19 nt, Artificial Sequence
  Description of Artificial Sequence: Synthetic oligonucleotide
  Antisense strand to SEQ ID NO: 2077582
aaauacagucaaugcucac

SEQ ID NO: 2077584 - RNA, 19 nt, Artificial Sequence
  Description of Artificial Sequence: Synthetic oligonucleotide
  Sense strand starting at position 3258 of SEQ ID NO: 1881868
augaaagaacuuuggcuua

SEQ ID NO: 2077585 - RNA, 19 nt, Artificial Sequence
  Description of Artificial Sequence: Synthetic oligonucleotide
  Antisense strand to SEQ ID NO: 2077584
uaagccaaaguucuuucau

SEQ ID NO: 2077586 - RNA, 19 nt, Artificial Sequence
  Description of Artificial Sequence: Synthetic oligonucleotide
  Sense strand starting at position 3260 of SEQ ID NO: 1881868
gaaagaacuuuggcuuaga

SEQ ID NO: 2077587 - RNA, 19 nt, Artificial Sequence
  Description of Artificial Sequence: Synthetic oligonucleotide
  Antisense strand to SEQ ID NO: 2077586
ucuaagccaaaguucuuuc

SEQ ID NO: 2077588 - RNA, 19 nt, Artificial Sequence
  Description of Artificial Sequence: Synthetic oligonucleotide
  Sense strand starting at position 3268 of SEQ ID NO: 1881868
uuuggcuuagagugauuaa

SEQ ID NO: 2077589 - RNA, 19 nt, Artificial Sequence
  Description of Artificial Sequence: Synthetic oligonucleotide
  Antisense strand to SEQ ID NO: 2077588
uuaaucacucuaagccaaa

SEQ ID NO: 2077590 - RNA, 19 nt, Artificial Sequence
  Description of Artificial Sequence: Synthetic oligonucleotide
  Sense strand starting at position 3269 of SEQ ID NO: 1881868
uuggcuuagagugauuaag

SEQ ID NO: 2077591 - RNA, 19 nt, Artificial Sequence
  Description of Artificial Sequence: Synthetic oligonucleotide
  Antisense strand to SEQ ID NO: 2077590
cuuaaucacucuaagccaa

SEQ ID NO: 2077592 - RNA, 19 nt, Artificial Sequence
  Description of Artificial Sequence: Synthetic oligonucleotide
  Sense strand starting at position 3271 of SEQ ID NO: 1881868
ggcuuagagugauuaagag

SEQ ID NO: 2077593 - RNA, 19 nt, Artificial Sequence
  Description of Artificial Sequence: Synthetic oligonucleotide
  Antisense strand to SEQ ID NO: 2077592
cucuuaaucacucuaagcc

SEQ ID NO: 2077594 - RNA, 19 nt, Artificial Sequence
  Description of Artificial Sequence: Synthetic oligonucleotide
  Sense strand starting at position 3645 of SEQ ID NO: 1881868
agagcucucucagucuaaa

SEQ ID NO: 2077595 - RNA, 19 nt, Artificial Sequence
  Description of Artificial Sequence: Synthetic oligonucleotide
  Antisense strand to SEQ ID NO: 2077594
uuuagacugagagagcucu

SEQ ID NO: 2077596 - RNA, 19 nt, Artificial Sequence
  Description of Artificial Sequence: Synthetic oligonucleotide
  Sense strand starting at position 3747 of SEQ ID NO: 1881868
ugaggcuccaaguaguuaa

SEQ ID NO: 2077597 - RNA, 19 nt, Artificial Sequence
  Description of Artificial Sequence: Synthetic oligonucleotide
  Antisense strand to SEQ ID NO: 2077596
uuaacuacuuggagccuca

SEQ ID NO: 2077598 - RNA, 19 nt, Artificial Sequence
  Description of Artificial Sequence: Synthetic oligonucleotide
  Sense strand starting at position 3761 of SEQ ID NO: 1881868
guuaaagugacuugcucag

SEQ ID NO: 2077599 - RNA, 19 nt, Artificial Sequence
  Description of Artificial Sequence: Synthetic oligonucleotide
  Antisense strand to SEQ ID NO: 2077598
cugagcaagucacuuuaac

SEQ ID NO: 2077600 - RNA, 19 nt, Artificial Sequence
  Description of Artificial Sequence: Synthetic oligonucleotide
  Sense strand starting at position 3768 of SEQ ID NO: 1881868
ugacuugcucagggacaua

SEQ ID NO: 2077601 - RNA, 19 nt, Artificial Sequence
  Description of Artificial Sequence: Synthetic oligonucleotide
  Antisense strand to SEQ ID NO: 2077600
uaugucccugagcaaguca

SEQ ID NO: 2077602 - RNA, 19 nt, Artificial Sequence
  Description of Artificial Sequence: Synthetic oligonucleotide
  Sense strand starting at position 3814 of SEQ ID NO: 1881868
uccagaaucuguguucuuc

SEQ ID NO: 2077603 - RNA, 19 nt, Artificial Sequence
  Description of Artificial Sequence: Synthetic oligonucleotide
  Antisense strand to SEQ ID NO: 2077602
gaagaacacagauucugga

SEQ ID NO: 2077604 - RNA, 19 nt, Artificial Sequence
  Description of Artificial Sequence: Synthetic oligonucleotide
  Sense strand starting at position 3857 of SEQ ID NO: 1881868
ccaggaagcucucugggau

SEQ ID NO: 2077605 - RNA, 19 nt, Artificial Sequence
  Description of Artificial Sequence: Synthetic oligonucleotide
  Antisense strand to SEQ ID NO: 2077604
aucccagagagcuuccugg

SEQ ID NO: 2077606 - RNA, 19 nt, Artificial Sequence
  Description of Artificial Sequence: Synthetic oligonucleotide
  Sense strand starting at position 3858 of SEQ ID NO: 1881868
caggaagcucucugggauu

SEQ ID NO: 2077607 - RNA, 19 nt, Artificial Sequence
  Description of Artificial Sequence: Synthetic oligonucleotide
  Antisense strand to SEQ ID NO: 2077606
aaucccagagagcuuccug

SEQ ID NO: 2077608 - RNA, 19 nt, Artificial Sequence
  Description of Artificial Sequence: Synthetic oligonucleotide
  Sense strand starting at position 3869 of SEQ ID NO: 1881868
cugggauuacuccagccau

SEQ ID NO: 2077609 - RNA, 19 nt, Artificial Sequence
  Description of Artificial Sequence: Synthetic oligonucleotide
  Antisense strand to SEQ ID NO: 2077608
auggcuggaguaaucccag

SEQ ID NO: 2077610 - RNA, 19 nt, Artificial Sequence
  Description of Artificial Sequence: Synthetic oligonucleotide
  Sense strand starting at position 3982 of SEQ ID NO: 1881868
ggaucucacagauguugaa

SEQ ID NO: 2077611 - RNA, 19 nt, Artificial Sequence
  Description of Artificial Sequence: Synthetic oligonucleotide
  Antisense strand to SEQ ID NO: 2077610
uucaacaucugugagaucc

SEQ ID NO: 2077612 - RNA, 19 nt, Artificial Sequence
  Description of Artificial Sequence: Synthetic oligonucleotide
  Sense strand starting at position 16 of SEQ ID NO: 1881869
gugugucuuccagaaggag

SEQ ID NO: 2077613 - RNA, 19 nt, Artificial Sequence
  Description of Artificial Sequence: Synthetic oligonucleotide
  Antisense strand to SEQ ID NO: 2077612
cuccuucuggaagacacac

SEQ ID NO: 2077614 - RNA, 19 nt, Artificial Sequence
  Description of Artificial Sequence: Synthetic oligonucleotide
  Sense strand starting at position 20 of SEQ ID NO: 1881869
gucuuccagaaggaguuua

SEQ ID NO: 2077615 - RNA, 19 nt, Artificial Sequence
  Description of Artificial Sequence: Synthetic oligonucleotide
  Antisense strand to SEQ ID NO: 2077614
uaaacuccuucuggaagac

SEQ ID NO: 2077616 - RNA, 19 nt, Artificial Sequence
  Description of Artificial Sequence: Synthetic oligonucleotide
  Sense strand starting at position 25 of SEQ ID NO: 1881869
ccagaaggaguuuagccau

SEQ ID NO: 2077617 - RNA, 19 nt, Artificial Sequence
  Description of Artificial Sequence: Synthetic oligonucleotide
  Antisense strand to SEQ ID NO: 2077616
auggcuaaacuccuucugg

SEQ ID NO: 2077618 - RNA, 19 nt, Artificial Sequence
  Description of Artificial Sequence: Synthetic oligonucleotide
  Sense strand starting at position 28 of SEQ ID NO: 1881869
gaaggaguuuagccaucca

SEQ ID NO: 2077619 - RNA, 19 nt, Artificial Sequence
  Description of Artificial Sequence: Synthetic oligonucleotide
  Antisense strand to SEQ ID NO: 2077618
uggauggcuaaacuccuuc

SEQ ID NO: 2077620 - RNA, 19 nt, Artificial Sequence
  Description of Artificial Sequence: Synthetic oligonucleotide
  Sense strand starting at position 77 of SEQ ID NO: 1881869
ucaauagagucagcacuaa

SEQ ID NO: 2077621 - RNA, 19 nt, Artificial Sequence
  Description of Artificial Sequence: Synthetic oligonucleotide
  Antisense strand to SEQ ID NO: 2077620
uuagugcugacucuauuga

SEQ ID NO: 2077622 - RNA, 19 nt, Artificial Sequence
  Description of Artificial Sequence: Synthetic oligonucleotide
  Sense strand starting at position 148 of SEQ ID NO: 1881869
aagcaugacucagugguga

SEQ ID NO: 2077623 - RNA, 19 nt, Artificial Sequence
  Description of Artificial Sequence: Synthetic oligonucleotide
  Antisense strand to SEQ ID NO: 2077622
ucaccacugagucaugcuu

SEQ ID NO: 2077624 - RNA, 19 nt, Artificial Sequence
  Description of Artificial Sequence: Synthetic oligonucleotide
  Sense strand starting at position 293 of SEQ ID NO: 1881869
cuggaaaggucuuugaucu

SEQ ID NO: 2077625 - RNA, 19 nt, Artificial Sequence
  Description of Artificial Sequence: Synthetic oligonucleotide
  Antisense strand to SEQ ID NO: 2077624
agaucaaagaccuuuccag

SEQ ID NO: 2077626 - RNA, 19 nt, Artificial Sequence
  Description of Artificial Sequence: Synthetic oligonucleotide
  Sense strand starting at position 294 of SEQ ID NO: 1881869
uggaaaggucuuugaucuc

SEQ ID NO: 2077627 - RNA, 19 nt, Artificial Sequence
  Description of Artificial Sequence: Synthetic oligonucleotide
  Antisense strand to SEQ ID NO: 2077626
gagaucaaagaccuuucca

SEQ ID NO: 2077628 - RNA, 19 nt, Artificial Sequence
  Description of Artificial Sequence: Synthetic oligonucleotide
  Sense strand starting at position 394 of SEQ ID NO: 1881869
uugcaauuugcugggucau

SEQ ID NO: 2077629 - RNA, 19 nt, Artificial Sequence
  Description of Artificial Sequence: Synthetic oligonucleotide
  Antisense strand to SEQ ID NO: 2077628
augacccagcaaauugcaa

SEQ ID NO: 2077630 - RNA, 19 nt, Artificial Sequence
  Description of Artificial Sequence: Synthetic oligonucleotide
  Sense strand starting at position 404 of SEQ ID NO: 1881869
cugggucauccuggaacaa

SEQ ID NO: 2077631 - RNA, 19 nt, Artificial Sequence
  Description of Artificial Sequence: Synthetic oligonucleotide
  Antisense strand to SEQ ID NO: 2077630
uuguuccaggaugacccag

SEQ ID NO: 2077632 - RNA, 19 nt, Artificial Sequence
  Description of Artificial Sequence: Synthetic oligonucleotide
  Sense strand starting at position 549 of SEQ ID NO: 1881869
agugcuuauccacagugau

SEQ ID NO: 2077633 - RNA, 19 nt, Artificial Sequence
  Description of Artificial Sequence: Synthetic oligonucleotide
  Antisense strand to SEQ ID NO: 2077632
aucacuguggauaagcacu

SEQ ID NO: 2077634 - RNA, 19 nt, Artificial Sequence
  Description of Artificial Sequence: Synthetic oligonucleotide
  Sense strand starting at position 552 of SEQ ID NO: 1881869
gcuuauccacagugauaaa

SEQ ID NO: 2077635 - RNA, 19 nt, Artificial Sequence
  Description of Artificial Sequence: Synthetic oligonucleotide
  Antisense strand to SEQ ID NO: 2077634
uuuaucacuguggauaagc

SEQ ID NO: 2077636 - RNA, 19 nt, Artificial Sequence
  Description of Artificial Sequence: Synthetic oligonucleotide
  Sense strand starting at position 568 of SEQ ID NO: 1881869
aaaugaggucaucauagcu

SEQ ID NO: 2077637 - RNA, 19 nt, Artificial Sequence
  Description of Artificial Sequence: Synthetic oligonucleotide
  Antisense strand to SEQ ID NO: 2077636
agcuaugaugaccucauuu

SEQ ID NO: 2077638 - RNA, 19 nt, Artificial Sequence
  Description of Artificial Sequence: Synthetic oligonucleotide
  Sense strand starting at position 608 of SEQ ID NO: 1881869
gcauguaaacagcaaauaa

SEQ ID NO: 2077639 - RNA, 19 nt, Artificial Sequence
  Description of Artificial Sequence: Synthetic oligonucleotide
  Antisense strand to SEQ ID NO: 2077638
uuauuugcuguuuacaugc

SEQ ID NO: 2077640 - RNA, 19 nt, Artificial Sequence
  Description of Artificial Sequence: Synthetic oligonucleotide
  Sense strand starting at position 618 of SEQ ID NO: 1881869
agcaaauaagcucaugauu

SEQ ID NO: 2077641 - RNA, 19 nt, Artificial Sequence
  Description of Artificial Sequence: Synthetic oligonucleotide
  Antisense strand to SEQ ID NO: 2077640
aaucaugagcuuauuugcu

SEQ ID NO: 2077642 - RNA, 19 nt, Artificial Sequence
  Description of Artificial Sequence: Synthetic oligonucleotide
  Sense strand starting at position 623 of SEQ ID NO: 1881869
auaagcucaugauuggaga

SEQ ID NO: 2077643 - RNA, 19 nt, Artificial Sequence
  Description of Artificial Sequence: Synthetic oligonucleotide
  Antisense strand to SEQ ID NO: 2077642
ucuccaaucaugagcuuau

SEQ ID NO: 2077644 - RNA, 19 nt, Artificial Sequence
  Description of Artificial Sequence: Synthetic oligonucleotide
  Sense strand starting at position 624 of SEQ ID NO: 1881869
uaagcucaugauuggagaa

SEQ ID NO: 2077645 - RNA, 19 nt, Artificial Sequence
  Description of Artificial Sequence: Synthetic oligonucleotide
  Antisense strand to SEQ ID NO: 2077644
uucuccaaucaugagcuua

SEQ ID NO: 2077646 - RNA, 19 nt, Artificial Sequence
  Description of Artificial Sequence: Synthetic oligonucleotide
  Sense strand starting at position 670 of SEQ ID NO: 1881869
ugcagaagauccuuccuga

SEQ ID NO: 2077647 - RNA, 19 nt, Artificial Sequence
  Description of Artificial Sequence: Synthetic oligonucleotide
  Antisense strand to SEQ ID NO: 2077646
ucaggaaggaucuucugca

SEQ ID NO: 2077648 - RNA, 19 nt, Artificial Sequence
  Description of Artificial Sequence: Synthetic oligonucleotide
  Sense strand starting at position 673 of SEQ ID NO: 1881869
agaagauccuuccugagca

SEQ ID NO: 2077649 - RNA, 19 nt, Artificial Sequence
  Description of Artificial Sequence: Synthetic oligonucleotide
  Antisense strand to SEQ ID NO: 2077648
ugcucaggaaggaucuucu

SEQ ID NO: 2077650 - RNA, 19 nt, Artificial Sequence
  Description of Artificial Sequence: Synthetic oligonucleotide
  Sense strand starting at position 818 of SEQ ID NO: 1881869
cacagagucuguuuauaga

SEQ ID NO: 2077651 - RNA, 19 nt, Artificial Sequence
  Description of Artificial Sequence: Synthetic oligonucleotide
  Antisense strand to SEQ ID NO: 2077650
ucuauaaacagacucugug

SEQ ID NO: 2077652 - RNA, 19 nt, Artificial Sequence
  Description of Artificial Sequence: Synthetic oligonucleotide
  Sense strand starting at position 975 of SEQ ID NO: 1881869
ccauccauccuggguggaa

SEQ ID NO: 2077653 - RNA, 19 nt, Artificial Sequence
  Description of Artificial Sequence: Synthetic oligonucleotide
  Antisense strand to SEQ ID NO: 2077652
uuccacccaggauggaugg

SEQ ID NO: 2077654 - RNA, 19 nt, Artificial Sequence
  Description of Artificial Sequence: Synthetic oligonucleotide
  Sense strand starting at position 1133 of SEQ ID NO: 1881869
aggucugguccagacucau

SEQ ID NO: 2077655 - RNA, 19 nt, Artificial Sequence
  Description of Artificial Sequence: Synthetic oligonucleotide
  Antisense strand to SEQ ID NO: 2077654
augagucuggaccagaccu

SEQ ID NO: 2077656 - RNA, 19 nt, Artificial Sequence
  Description of Artificial Sequence: Synthetic oligonucleotide
  Sense strand starting at position 1153 of SEQ ID NO: 1881869
cccucugguccagaucauu

SEQ ID NO: 2077657 - RNA, 19 nt, Artificial Sequence
  Description of Artificial Sequence: Synthetic oligonucleotide
  Antisense strand to SEQ ID NO: 2077656
aaugaucuggaccagaggg

SEQ ID NO: 2077658 - RNA, 19 nt, Artificial Sequence
  Description of Artificial Sequence: Synthetic oligonucleotide
  Sense strand starting at position 1211 of SEQ ID NO: 1881869
ugucucccuccauaggaaa

SEQ ID NO: 2077659 - RNA, 19 nt, Artificial Sequence
  Description of Artificial Sequence: Synthetic oligonucleotide
  Antisense strand to SEQ ID NO: 2077658
uuuccuauggagggagaca

SEQ ID NO: 2077660 - RNA, 19 nt, Artificial Sequence
  Description of Artificial Sequence: Synthetic oligonucleotide
  Sense strand starting at position 1226 of SEQ ID NO: 1881869
gaaaucgucuuagcaagga

SEQ ID NO: 2077661 - RNA, 19 nt, Artificial Sequence
  Description of Artificial Sequence: Synthetic oligonucleotide
  Antisense strand to SEQ ID NO: 2077660
uccuugcuaagacgauuuc

SEQ ID NO: 2077662 - RNA, 19 nt, Artificial Sequence
  Description of Artificial Sequence: Synthetic oligonucleotide
  Sense strand starting at position 1262 of SEQ ID NO: 1881869
aagcuaaagggauguguga

SEQ ID NO: 2077663 - RNA, 19 nt, Artificial Sequence
  Description of Artificial Sequence: Synthetic oligonucleotide
  Antisense strand to SEQ ID NO: 2077662
ucacacaucccuuuagcuu

SEQ ID NO: 2077664 - RNA, 19 nt, Artificial Sequence
  Description of Artificial Sequence: Synthetic oligonucleotide
  Sense strand starting at position 2099 of SEQ ID NO: 1881869
ugugguucacacuagggaa

SEQ ID NO: 2077665 - RNA, 19 nt, Artificial Sequence
  Description of Artificial Sequence: Synthetic oligonucleotide
  Antisense strand to SEQ ID NO: 2077664
uucccuagugugaaccaca

SEQ ID NO: 2077666 - RNA, 19 nt, Artificial Sequence
  Description of Artificial Sequence: Synthetic oligonucleotide
  Sense strand starting at position 2209 of SEQ ID NO: 1881869
ggaggcaugugaguuccaa

SEQ ID NO: 2077667 - RNA, 19 nt, Artificial Sequence
  Description of Artificial Sequence: Synthetic oligonucleotide
  Antisense strand to SEQ ID NO: 2077666
uuggaacucacaugccucc

SEQ ID NO: 2077668 - RNA, 19 nt, Artificial Sequence
  Description of Artificial Sequence: Synthetic oligonucleotide
  Sense strand starting at position 2325 of SEQ ID NO: 1881869
cucuuacccugaucagaga

SEQ ID NO: 2077669 - RNA, 19 nt, Artificial Sequence
  Description of Artificial Sequence: Synthetic oligonucleotide
  Antisense strand to SEQ ID NO: 2077668
ucucugaucaggguaagag

SEQ ID NO: 2077670 - RNA, 19 nt, Artificial Sequence
  Description of Artificial Sequence: Synthetic oligonucleotide
  Sense strand starting at position 2745 of SEQ ID NO: 1881869
ccaagugagaucugaagua

SEQ ID NO: 2077671 - RNA, 19 nt, Artificial Sequence
  Description of Artificial Sequence: Synthetic oligonucleotide
  Antisense strand to SEQ ID NO: 2077670
uacuucagaucucacuugg

SEQ ID NO: 2077672 - RNA, 19 nt, Artificial Sequence
  Description of Artificial Sequence: Synthetic oligonucleotide
  Sense strand starting at position 2868 of SEQ ID NO: 1881869
uccuaaggccaguggauau

SEQ ID NO: 2077673 - RNA, 19 nt, Artificial Sequence
  Description of Artificial Sequence: Synthetic oligonucleotide
  Antisense strand to SEQ ID NO: 2077672
auauccacuggccuuagga

SEQ ID NO: 2077674 - RNA, 19 nt, Artificial Sequence
  Description of Artificial Sequence: Synthetic oligonucleotide
  Sense strand starting at position 2881 of SEQ ID NO: 1881869
ggauaugggucaucagcuu

SEQ ID NO: 2077675 - RNA, 19 nt, Artificial Sequence
  Description of Artificial Sequence: Synthetic oligonucleotide
  Antisense strand to SEQ ID NO: 2077674
aagcugaugacccauaucc

SEQ ID NO: 2077676 - RNA, 19 nt, Artificial Sequence
  Description of Artificial Sequence: Synthetic oligonucleotide
  Sense strand starting at position 3033 of SEQ ID NO: 1881869
accugugaccugggaucau

SEQ ID NO: 2077677 - RNA, 19 nt, Artificial Sequence
  Description of Artificial Sequence: Synthetic oligonucleotide
  Antisense strand to SEQ ID NO: 2077676
augaucccaggucacaggu

SEQ ID NO: 2077678 - RNA, 19 nt, Artificial Sequence
  Description of Artificial Sequence: Synthetic oligonucleotide
  Sense strand starting at position 3158 of SEQ ID NO: 1881869
ccaggucugucaucaggau

SEQ ID NO: 2077679 - RNA, 19 nt, Artificial Sequence
  Description of Artificial Sequence: Synthetic oligonucleotide
  Antisense strand to SEQ ID NO: 2077678
auccugaugacagaccugg

SEQ ID NO: 2077680 - RNA, 19 nt, Artificial Sequence
  Description of Artificial Sequence: Synthetic oligonucleotide
  Sense strand starting at position 3162 of SEQ ID NO: 1881869
gucugucaucaggaucuuu

SEQ ID NO: 2077681 - RNA, 19 nt, Artificial Sequence
  Description of Artificial Sequence: Synthetic oligonucleotide
  Antisense strand to SEQ ID NO: 2077680
aaagauccugaugacagac

SEQ ID NO: 2077682 - RNA, 19 nt, Artificial Sequence
  Description of Artificial Sequence: Synthetic oligonucleotide
  Sense strand starting at position 3249 of SEQ ID NO: 1881869
guguaugggcccguaaguu

SEQ ID NO: 2077683 - RNA, 19 nt, Artificial Sequence
  Description of Artificial Sequence: Synthetic oligonucleotide
  Antisense strand to SEQ ID NO: 2077682
aacuuacgggcccauacac

SEQ ID NO: 2077684 - RNA, 19 nt, Artificial Sequence
  Description of Artificial Sequence: Synthetic oligonucleotide
  Sense strand starting at position 3335 of SEQ ID NO: 1881869
ggagaauaauuauuacugu

SEQ ID NO: 2077685 - RNA, 19 nt, Artificial Sequence
  Description of Artificial Sequence: Synthetic oligonucleotide
  Antisense strand to SEQ ID NO: 2077684
acaguaauaauuauucucc

SEQ ID NO: 2077686 - RNA, 19 nt, Artificial Sequence
  Description of Artificial Sequence: Synthetic oligonucleotide
  Sense strand starting at position 3373 of SEQ ID NO: 1881869
gccauaauacguguugcuu

SEQ ID NO: 2077687 - RNA, 19 nt, Artificial Sequence
  Description of Artificial Sequence: Synthetic oligonucleotide
  Antisense strand to SEQ ID NO: 2077686
aagcaacacguauuauggc

SEQ ID NO: 2077688 - RNA, 19 nt, Artificial Sequence
  Description of Artificial Sequence: Synthetic oligonucleotide
  Sense strand starting at position 3746 of SEQ ID NO: 1881869
cucauagaccagugaaauc

SEQ ID NO: 2077689 - RNA, 19 nt, Artificial Sequence
  Description of Artificial Sequence: Synthetic oligonucleotide
  Antisense strand to SEQ ID NO: 2077688
gauuucacuggucuaugag

SEQ ID NO: 2077690 - RNA, 19 nt, Artificial Sequence
  Description of Artificial Sequence: Synthetic oligonucleotide
  Sense strand starting at position 3872 of SEQ ID NO: 1881869
guugacaaauacuuaucga

SEQ ID NO: 2077691 - RNA, 19 nt, Artificial Sequence
  Description of Artificial Sequence: Synthetic oligonucleotide
  Antisense strand to SEQ ID NO: 2077690
ucgauaaguauuugucaac

SEQ ID NO: 2077692 - RNA, 19 nt, Artificial Sequence
  Description of Artificial Sequence: Synthetic oligonucleotide
  Sense strand starting at position 17 of SEQ ID NO: 1881870
agugccugaccuggagaaa

SEQ ID NO: 2077693 - RNA, 19 nt, Artificial Sequence
  Description of Artificial Sequence: Synthetic oligonucleotide
  Antisense strand to SEQ ID NO: 2077692
uuucuccaggucaggcacu

SEQ ID NO: 2077694 - RNA, 19 nt, Artificial Sequence
  Description of Artificial Sequence: Synthetic oligonucleotide
  Sense strand starting at position 26 of SEQ ID NO: 1881870
ccuggagaaagauguuagu

SEQ ID NO: 2077695 - RNA, 19 nt, Artificial Sequence
  Description of Artificial Sequence: Synthetic oligonucleotide
  Antisense strand to SEQ ID NO: 2077694
acuaacaucuuucuccagg

SEQ ID NO: 2077696 - RNA, 19 nt, Artificial Sequence
  Description of Artificial Sequence: Synthetic oligonucleotide
  Sense strand starting at position 35 of SEQ ID NO: 1881870
agauguuagugcccgagau

SEQ ID NO: 2077697 - RNA, 19 nt, Artificial Sequence
  Description of Artificial Sequence: Synthetic oligonucleotide
  Antisense strand to SEQ ID NO: 2077696
aucucgggcacuaacaucu

SEQ ID NO: 2077698 - RNA, 19 nt, Artificial Sequence
  Description of Artificial Sequence: Synthetic oligonucleotide
  Sense strand starting at position 36 of SEQ ID NO: 1881870
gauguuagugcccgagauc

SEQ ID NO: 2077699 - RNA, 19 nt, Artificial Sequence
  Description of Artificial Sequence: Synthetic oligonucleotide
  Antisense strand to SEQ ID NO: 2077698
gaucucgggcacuaacauc

SEQ ID NO: 2077700 - RNA, 19 nt, Artificial Sequence
  Description of Artificial Sequence: Synthetic oligonucleotide
  Sense strand starting at position 115 of SEQ ID NO: 1881870
agcuaaagccucggugaga

SEQ ID NO: 2077701 - RNA, 19 nt, Artificial Sequence
  Description of Artificial Sequence: Synthetic oligonucleotide
  Antisense strand to SEQ ID NO: 2077700
ucucaccgaggcuuuagcu

SEQ ID NO: 2077702 - RNA, 19 nt, Artificial Sequence
  Description of Artificial Sequence: Synthetic oligonucleotide
  Sense strand starting at position 116 of SEQ ID NO: 1881870
gcuaaagccucggugagaa

SEQ ID NO: 2077703 - RNA, 19 nt, Artificial Sequence
  Description of Artificial Sequence: Synthetic oligonucleotide
  Antisense strand to SEQ ID NO: 2077702
uucucaccgaggcuuuagc

SEQ ID NO: 2077704 - RNA, 19 nt, Artificial Sequence
  Description of Artificial Sequence: Synthetic oligonucleotide
  Sense strand starting at position 358 of SEQ ID NO: 1881870
cgccauccuuaaguucuua

SEQ ID NO: 2077705 - RNA, 19 nt, Artificial Sequence
  Description of Artificial Sequence: Synthetic oligonucleotide
  Antisense strand to SEQ ID NO: 2077704
uaagaacuuaaggauggcg

SEQ ID NO: 2077706 - RNA, 19 nt, Artificial Sequence
  Description of Artificial Sequence: Synthetic oligonucleotide
  Sense strand starting at position 396 of SEQ ID NO: 1881870
ccugcaaucucauuucgca

SEQ ID NO: 2077707 - RNA, 19 nt, Artificial Sequence
  Description of Artificial Sequence: Synthetic oligonucleotide
  Antisense strand to SEQ ID NO: 2077706
ugcgaaaugagauugcagg

SEQ ID NO: 2077708 - RNA, 19 nt, Artificial Sequence
  Description of Artificial Sequence: Synthetic oligonucleotide
  Sense strand starting at position 573 of SEQ ID NO: 1881870
ugucuuacagcccaugaua

SEQ ID NO: 2077709 - RNA, 19 nt, Artificial Sequence
  Description of Artificial Sequence: Synthetic oligonucleotide
  Antisense strand to SEQ ID NO: 2077708
uaucaugggcuguaagaca

SEQ ID NO: 2077710 - RNA, 19 nt, Artificial Sequence
  Description of Artificial Sequence: Synthetic oligonucleotide
  Sense strand starting at position 586 of SEQ ID NO: 1881870
augauacugucuuccaaag

SEQ ID NO: 2077711 - RNA, 19 nt, Artificial Sequence
  Description of Artificial Sequence: Synthetic oligonucleotide
  Antisense strand to SEQ ID NO: 2077710
cuuuggaagacaguaucau

SEQ ID NO: 2077712 - RNA, 19 nt, Artificial Sequence
  Description of Artificial Sequence: Synthetic oligonucleotide
  Sense strand starting at position 637 of SEQ ID NO: 1881870
cgaugagguucaccuguua

SEQ ID NO: 2077713 - RNA, 19 nt, Artificial Sequence
  Description of Artificial Sequence: Synthetic oligonucleotide
  Antisense strand to SEQ ID NO: 2077712
uaacaggugaaccucaucg

SEQ ID NO: 2077714 - RNA, 19 nt, Artificial Sequence
  Description of Artificial Sequence: Synthetic oligonucleotide
  Sense strand starting at position 648 of SEQ ID NO: 1881870
accuguuacugcuuauauu

SEQ ID NO: 2077715 - RNA, 19 nt, Artificial Sequence
  Description of Artificial Sequence: Synthetic oligonucleotide
  Antisense strand to SEQ ID NO: 2077714
aauauaagcaguaacaggu

SEQ ID NO: 2077716 - RNA, 19 nt, Artificial Sequence
  Description of Artificial Sequence: Synthetic oligonucleotide
  Sense strand starting at position 731 of SEQ ID NO: 1881870
gguauauuucugugguccu

SEQ ID NO: 2077717 - RNA, 19 nt, Artificial Sequence
  Description of Artificial Sequence: Synthetic oligonucleotide
  Antisense strand to SEQ ID NO: 2077716
aggaccacagaaauauacc

SEQ ID NO: 2077718 - RNA, 19 nt, Artificial Sequence
  Description of Artificial Sequence: Synthetic oligonucleotide
  Sense strand starting at position 738 of SEQ ID NO: 1881870
uucugugguccuggaagga

SEQ ID NO: 2077719 - RNA, 19 nt, Artificial Sequence
  Description of Artificial Sequence: Synthetic oligonucleotide
  Antisense strand to SEQ ID NO: 2077718
uccuuccaggaccacagaa

SEQ ID NO: 2077720 - RNA, 19 nt, Artificial Sequence
  Description of Artificial Sequence: Synthetic oligonucleotide
  Sense strand starting at position 764 of SEQ ID NO: 1881870
agcugcagccuccauaaua

SEQ ID NO: 2077721 - RNA, 19 nt, Artificial Sequence
  Description of Artificial Sequence: Synthetic oligonucleotide
  Antisense strand to SEQ ID NO: 2077720
uauuauggaggcugcagcu

SEQ ID NO: 2077722 - RNA, 19 nt, Artificial Sequence
  Description of Artificial Sequence: Synthetic oligonucleotide
  Sense strand starting at position 1213 of SEQ ID NO: 1881870
gacuaaggaguguguugua

SEQ ID NO: 2077723 - RNA, 19 nt, Artificial Sequence
  Description of Artificial Sequence: Synthetic oligonucleotide
  Antisense strand to SEQ ID NO: 2077722
uacaacacacuccuuaguc

SEQ ID NO: 2077724 - RNA, 19 nt, Artificial Sequence
  Description of Artificial Sequence: Synthetic oligonucleotide
  Sense strand starting at position 1295 of SEQ ID NO: 1881870
gagacaguggguuguauca

SEQ ID NO: 2077725 - RNA, 19 nt, Artificial Sequence
  Description of Artificial Sequence: Synthetic oligonucleotide
  Antisense strand to SEQ ID NO: 2077724
ugauacaacccacugucuc

SEQ ID NO: 2077726 - RNA, 19 nt, Artificial Sequence
  Description of Artificial Sequence: Synthetic oligonucleotide
  Sense strand starting at position 1307 of SEQ ID NO: 1881870
uguaucacucccgagaaga

SEQ ID NO: 2077727 - RNA, 19 nt, Artificial Sequence
  Description of Artificial Sequence: Synthetic oligonucleotide
  Antisense strand to SEQ ID NO: 2077726
ucuucucgggagugauaca

SEQ ID NO: 2077728 - RNA, 19 nt, Artificial Sequence
  Description of Artificial Sequence: Synthetic oligonucleotide
  Sense strand starting at position 1445 of SEQ ID NO: 1881870
gcagccuccauggaggaau

SEQ ID NO: 2077729 - RNA, 19 nt, Artificial Sequence
  Description of Artificial Sequence: Synthetic oligonucleotide
  Antisense strand to SEQ ID NO: 2077728
auuccuccauggaggcugc

SEQ ID NO: 2077730 - RNA, 19 nt, Artificial Sequence
  Description of Artificial Sequence: Synthetic oligonucleotide
  Sense strand starting at position 1547 of SEQ ID NO: 1881870
acacuuucguggucuuuau

SEQ ID NO: 2077731 - RNA, 19 nt, Artificial Sequence
  Description of Artificial Sequence: Synthetic oligonucleotide
  Antisense strand to SEQ ID NO: 2077730
auaaagaccacgaaagugu

SEQ ID NO: 2077732 - RNA, 19 nt, Artificial Sequence
  Description of Artificial Sequence: Synthetic oligonucleotide
  Sense strand starting at position 1614 of SEQ ID NO: 1881870
agaaguugguggguucuua

SEQ ID NO: 2077733 - RNA, 19 nt, Artificial Sequence
  Description of Artificial Sequence: Synthetic oligonucleotide
  Antisense strand to SEQ ID NO: 2077732
uaagaacccaccaacuucu

SEQ ID NO: 2077734 - RNA, 19 nt, Artificial Sequence
  Description of Artificial Sequence: Synthetic oligonucleotide
  Sense strand starting at position 1671 of SEQ ID NO: 1881870
acauguuacgguuaccuaa

SEQ ID NO: 2077735 - RNA, 19 nt, Artificial Sequence
  Description of Artificial Sequence: Synthetic oligonucleotide
  Antisense strand to SEQ ID NO: 2077734
uuagguaaccguaacaugu

SEQ ID NO: 2077736 - RNA, 19 nt, Artificial Sequence
  Description of Artificial Sequence: Synthetic oligonucleotide
  Sense strand starting at position 1719 of SEQ ID NO: 1881870
ggugcguucguggucuaca

SEQ ID NO: 2077737 - RNA, 19 nt, Artificial Sequence
  Description of Artificial Sequence: Synthetic oligonucleotide
  Antisense strand to SEQ ID NO: 2077736
uguagaccacgaacgcacc

SEQ ID NO: 2077738 - RNA, 19 nt, Artificial Sequence
  Description of Artificial Sequence: Synthetic oligonucleotide
  Sense strand starting at position 1724 of SEQ ID NO: 1881870
guucguggucuacacugau

SEQ ID NO: 2077739 - RNA, 19 nt, Artificial Sequence
  Description of Artificial Sequence: Synthetic oligonucleotide
  Antisense strand to SEQ ID NO: 2077738
aucaguguagaccacgaac

SEQ ID NO: 2077740 - RNA, 19 nt, Artificial Sequence
  Description of Artificial Sequence: Synthetic oligonucleotide
  Sense strand starting at position 1866 of SEQ ID NO: 1881870
gaccuuuaccgugagcguu

SEQ ID NO: 2077741 - RNA, 19 nt, Artificial Sequence
  Description of Artificial Sequence: Synthetic oligonucleotide
  Antisense strand to SEQ ID NO: 2077740
aacgcucacgguaaagguc

SEQ ID NO: 2077742 - RNA, 19 nt, Artificial Sequence
  Description of Artificial Sequence: Synthetic oligonucleotide
  Sense strand starting at position 2068 of SEQ ID NO: 1881870
cggagaacugauuggucca

SEQ ID NO: 2077743 - RNA, 19 nt, Artificial Sequence
  Description of Artificial Sequence: Synthetic oligonucleotide
  Antisense strand to SEQ ID NO: 2077742
uggaccaaucaguucuccg

SEQ ID NO: 2077744 - RNA, 19 nt, Artificial Sequence
  Description of Artificial Sequence: Synthetic oligonucleotide
  Sense strand starting at position 2069 of SEQ ID NO: 1881870
ggagaacugauugguccau

SEQ ID NO: 2077745 - RNA, 19 nt, Artificial Sequence
  Description of Artificial Sequence: Synthetic oligonucleotide
  Antisense strand to SEQ ID NO: 2077744
auggaccaaucaguucucc

SEQ ID NO: 2077746 - RNA, 19 nt, Artificial Sequence
  Description of Artificial Sequence: Synthetic oligonucleotide
  Sense strand starting at position 2167 of SEQ ID NO: 1881870
accuuuagcuggcuacaga

SEQ ID NO: 2077747 - RNA, 19 nt, Artificial Sequence
  Description of Artificial Sequence: Synthetic oligonucleotide
  Antisense strand to SEQ ID NO: 2077746
ucuguagccagcuaaaggu

SEQ ID NO: 2077748 - RNA, 19 nt, Artificial Sequence
  Description of Artificial Sequence: Synthetic oligonucleotide
  Sense strand starting at position 2697 of SEQ ID NO: 1881870
acccaaugugaugguguua

SEQ ID NO: 2077749 - RNA, 19 nt, Artificial Sequence
  Description of Artificial Sequence: Synthetic oligonucleotide
  Antisense strand to SEQ ID NO: 2077748
uaacaccaucacauugggu

SEQ ID NO: 2077750 - RNA, 19 nt, Artificial Sequence
  Description of Artificial Sequence: Synthetic oligonucleotide
  Sense strand starting at position 2773 of SEQ ID NO: 1881870
augaguggcccggguagaa

SEQ ID NO: 2077751 - RNA, 19 nt, Artificial Sequence
  Description of Artificial Sequence: Synthetic oligonucleotide
  Antisense strand to SEQ ID NO: 2077750
uucuacccgggccacucau

SEQ ID NO: 2077752 - RNA, 19 nt, Artificial Sequence
  Description of Artificial Sequence: Synthetic oligonucleotide
  Sense strand starting at position 2823 of SEQ ID NO: 1881870
cccugagccuugucaagag

SEQ ID NO: 2077753 - RNA, 19 nt, Artificial Sequence
  Description of Artificial Sequence: Synthetic oligonucleotide
  Antisense strand to SEQ ID NO: 2077752
cucuugacaaggcucaggg

SEQ ID NO: 2077754 - RNA, 19 nt, Artificial Sequence
  Description of Artificial Sequence: Synthetic oligonucleotide
  Sense strand starting at position 2934 of SEQ ID NO: 1881870
aaaugucuguuguugacaa

SEQ ID NO: 2077755 - RNA, 19 nt, Artificial Sequence
  Description of Artificial Sequence: Synthetic oligonucleotide
  Antisense strand to SEQ ID NO: 2077754
uugucaacaacagacauuu

SEQ ID NO: 2077756 - RNA, 19 nt, Artificial Sequence
  Description of Artificial Sequence: Synthetic oligonucleotide
  Sense strand starting at position 2936 of SEQ ID NO: 1881870
augucuguuguugacaagu

SEQ ID NO: 2077757 - RNA, 19 nt, Artificial Sequence
  Description of Artificial Sequence: Synthetic oligonucleotide
  Antisense strand to SEQ ID NO: 2077756
acuugucaacaacagacau

SEQ ID NO: 2077758 - RNA, 19 nt, Artificial Sequence
  Description of Artificial Sequence: Synthetic oligonucleotide
  Sense strand starting at position 2960 of SEQ ID NO: 1881870
aggcuuaggcguguuguca

SEQ ID NO: 2077759 - RNA, 19 nt, Artificial Sequence
  Description of Artificial Sequence: Synthetic oligonucleotide
  Antisense strand to SEQ ID NO: 2077758
ugacaacacgccuaagccu

SEQ ID NO: 2077760 - RNA, 19 nt, Artificial Sequence
  Description of Artificial Sequence: Synthetic oligonucleotide
  Sense strand starting at position 3123 of SEQ ID NO: 1881870
cccugauugcuauguucuc

SEQ ID NO: 2077761 - RNA, 19 nt, Artificial Sequence
  Description of Artificial Sequence: Synthetic oligonucleotide
  Antisense strand to SEQ ID NO: 2077760
gagaacauagcaaucaggg

SEQ ID NO: 2077762 - RNA, 19 nt, Artificial Sequence
  Description of Artificial Sequence: Synthetic oligonucleotide
  Sense strand starting at position 3130 of SEQ ID NO: 1881870
ugcuauguucuccagcuga

SEQ ID NO: 2077763 - RNA, 19 nt, Artificial Sequence
  Description of Artificial Sequence: Synthetic oligonucleotide
  Antisense strand to SEQ ID NO: 2077762
ucagcuggagaacauagca

SEQ ID NO: 2077764 - RNA, 19 nt, Artificial Sequence
  Description of Artificial Sequence: Synthetic oligonucleotide
  Sense strand starting at position 3253 of SEQ ID NO: 1881870
gcugguuucuacuccggau

SEQ ID NO: 2077765 - RNA, 19 nt, Artificial Sequence
  Description of Artificial Sequence: Synthetic oligonucleotide
  Antisense strand to SEQ ID NO: 2077764
auccggaguagaaaccagc

SEQ ID NO: 2077766 - RNA, 19 nt, Artificial Sequence
  Description of Artificial Sequence: Synthetic oligonucleotide
  Sense strand starting at position 3904 of SEQ ID NO: 1881870
uccugaagcuuucuaggca

SEQ ID NO: 2077767 - RNA, 19 nt, Artificial Sequence
  Description of Artificial Sequence: Synthetic oligonucleotide
  Antisense strand to SEQ ID NO: 2077766
ugccuagaaagcuucagga

SEQ ID NO: 2077768 - RNA, 19 nt, Artificial Sequence
  Description of Artificial Sequence: Synthetic oligonucleotide
  Sense strand starting at position 3907 of SEQ ID NO: 1881870
ugaagcuuucuaggcauuu

SEQ ID NO: 2077769 - RNA, 19 nt, Artificial Sequence
  Description of Artificial Sequence: Synthetic oligonucleotide
  Antisense strand to SEQ ID NO: 2077768
aaaugccuagaaagcuuca

SEQ ID NO: 2077770 - RNA, 19 nt, Artificial Sequence
  Description of Artificial Sequence: Synthetic oligonucleotide
  Sense strand starting at position 3942 of SEQ ID NO: 1881870
uugaucgugugguuccaga

SEQ ID NO: 2077771 - RNA, 19 nt, Artificial Sequence
  Description of Artificial Sequence: Synthetic oligonucleotide
  Antisense strand to SEQ ID NO: 2077770
ucuggaaccacacgaucaa

SEQ ID NO: 2077772 - RNA, 19 nt, Artificial Sequence
  Description of Artificial Sequence: Synthetic oligonucleotide
  Sense strand starting at position 27 of SEQ ID NO: 1881871
gugugaguuccuuaccaac

SEQ ID NO: 2077773 - RNA, 19 nt, Artificial Sequence
  Description of Artificial Sequence: Synthetic oligonucleotide
  Antisense strand to SEQ ID NO: 2077772
guugguaaggaacucacac

SEQ ID NO: 2077774 - RNA, 19 nt, Artificial Sequence
  Description of Artificial Sequence: Synthetic oligonucleotide
  Sense strand starting at position 29 of SEQ ID NO: 1881871
gugaguuccuuaccaacaa

SEQ ID NO: 2077775 - RNA, 19 nt, Artificial Sequence
  Description of Artificial Sequence: Synthetic oligonucleotide
  Antisense strand to SEQ ID NO: 2077774
uuguugguaaggaacucac

SEQ ID NO: 2077776 - RNA, 19 nt, Artificial Sequence
  Description of Artificial Sequence: Synthetic oligonucleotide
  Sense strand starting at position 93 of SEQ ID NO: 1881871
ggucauuuauuaugaaaca

SEQ ID NO: 2077777 - RNA, 19 nt, Artificial Sequence
  Description of Artificial Sequence: Synthetic oligonucleotide
  Antisense strand to SEQ ID NO: 2077776
uguuucauaauaaaugacc

SEQ ID NO: 2077778 - RNA, 19 nt, Artificial Sequence
  Description of Artificial Sequence: Synthetic oligonucleotide
  Sense strand starting at position 132 of SEQ ID NO: 1881871
uuacuaaauguuugcuaug

SEQ ID NO: 2077779 - RNA, 19 nt, Artificial Sequence
  Description of Artificial Sequence: Synthetic oligonucleotide
  Antisense strand to SEQ ID NO: 2077778
cauagcaaacauuuaguaa

SEQ ID NO: 2077780 - RNA, 19 nt, Artificial Sequence
  Description of Artificial Sequence: Synthetic oligonucleotide
  Sense strand starting at position 134 of SEQ ID NO: 1881871
acuaaauguuugcuaugga

SEQ ID NO: 2077781 - RNA, 19 nt, Artificial Sequence
  Description of Artificial Sequence: Synthetic oligonucleotide
  Antisense strand to SEQ ID NO: 2077780
uccauagcaaacauuuagu

SEQ ID NO: 2077782 - RNA, 19 nt, Artificial Sequence
  Description of Artificial Sequence: Synthetic oligonucleotide
  Sense strand starting at position 139 of SEQ ID NO: 1881871
auguuugcuauggauggau

SEQ ID NO: 2077783 - RNA, 19 nt, Artificial Sequence
  Description of Artificial Sequence: Synthetic oligonucleotide
  Antisense strand to SEQ ID NO: 2077782
auccauccauagcaaacau

SEQ ID NO: 2077784 - RNA, 19 nt, Artificial Sequence
  Description of Artificial Sequence: Synthetic oligonucleotide
  Sense strand starting at position 141 of SEQ ID NO: 1881871
guuugcuauggauggauaa

SEQ ID NO: 2077785 - RNA, 19 nt, Artificial Sequence
  Description of Artificial Sequence: Synthetic oligonucleotide
  Antisense strand to SEQ ID NO: 2077784
uuauccauccauagcaaac

SEQ ID NO: 2077786 - RNA, 19 nt, Artificial Sequence
  Description of Artificial Sequence: Synthetic oligonucleotide
  Sense strand starting at position 142 of SEQ ID NO: 1881871
uuugcuauggauggauaaa

SEQ ID NO: 2077787 - RNA, 19 nt, Artificial Sequence
  Description of Artificial Sequence: Synthetic oligonucleotide
  Antisense strand to SEQ ID NO: 2077786
uuuauccauccauagcaaa

SEQ ID NO: 2077788 - RNA, 19 nt, Artificial Sequence
  Description of Artificial Sequence: Synthetic oligonucleotide
  Sense strand starting at position 259 of SEQ ID NO: 1881871
guaguaagcauuugucauu

SEQ ID NO: 2077789 - RNA, 19 nt, Artificial Sequence
  Description of Artificial Sequence: Synthetic oligonucleotide
  Antisense strand to SEQ ID NO: 2077788
aaugacaaaugcuuacuac

SEQ ID NO: 2077790 - RNA, 19 nt, Artificial Sequence
  Description of Artificial Sequence: Synthetic oligonucleotide
  Sense strand starting at position 329 of SEQ ID NO: 1881871
ugucuuauuagguagagcu

SEQ ID NO: 2077791 - RNA, 19 nt, Artificial Sequence
  Description of Artificial Sequence: Synthetic oligonucleotide
  Antisense strand to SEQ ID NO: 2077790
agcucuaccuaauaagaca

SEQ ID NO: 2077792 - RNA, 19 nt, Artificial Sequence
  Description of Artificial Sequence: Synthetic oligonucleotide
  Sense strand starting at position 448 of SEQ ID NO: 1881871
ccugccucagacugugaau

SEQ ID NO: 2077793 - RNA, 19 nt, Artificial Sequence
  Description of Artificial Sequence: Synthetic oligonucleotide
  Antisense strand to SEQ ID NO: 2077792
auucacagucugaggcagg

SEQ ID NO: 2077794 - RNA, 19 nt, Artificial Sequence
  Description of Artificial Sequence: Synthetic oligonucleotide
  Sense strand starting at position 450 of SEQ ID NO: 1881871
ugccucagacugugaauca

SEQ ID NO: 2077795 - RNA, 19 nt, Artificial Sequence
  Description of Artificial Sequence: Synthetic oligonucleotide
  Antisense strand to SEQ ID NO: 2077794
ugauucacagucugaggca

SEQ ID NO: 2077796 - RNA, 19 nt, Artificial Sequence
  Description of Artificial Sequence: Synthetic oligonucleotide
  Sense strand starting at position 620 of SEQ ID NO: 1881871
agugauaugagccagaguu

SEQ ID NO: 2077797 - RNA, 19 nt, Artificial Sequence
  Description of Artificial Sequence: Synthetic oligonucleotide
  Antisense strand to SEQ ID NO: 2077796
aacucuggcucauaucacu

SEQ ID NO: 2077798 - RNA, 19 nt, Artificial Sequence
  Description of Artificial Sequence: Synthetic oligonucleotide
  Sense strand starting at position 799 of SEQ ID NO: 1881871
gacaguaccagauguggau

SEQ ID NO: 2077799 - RNA, 19 nt, Artificial Sequence
  Description of Artificial Sequence: Synthetic oligonucleotide
  Antisense strand to SEQ ID NO: 2077798
auccacaucugguacuguc

SEQ ID NO: 2077800 - RNA, 19 nt, Artificial Sequence
  Description of Artificial Sequence: Synthetic oligonucleotide
  Sense strand starting at position 815 of SEQ ID NO: 1881871
gauuucucauucuaggaug

SEQ ID NO: 2077801 - RNA, 19 nt, Artificial Sequence
  Description of Artificial Sequence: Synthetic oligonucleotide
  Antisense strand to SEQ ID NO: 2077800
cauccuagaaugagaaauc

SEQ ID NO: 2077802 - RNA, 19 nt, Artificial Sequence
  Description of Artificial Sequence: Synthetic oligonucleotide
  Sense strand starting at position 830 of SEQ ID NO: 1881871
gaugccauguucuccauga

SEQ ID NO: 2077803 - RNA, 19 nt, Artificial Sequence
  Description of Artificial Sequence: Synthetic oligonucleotide
  Antisense strand to SEQ ID NO: 2077802
ucauggagaacauggcauc

SEQ ID NO: 2077804 - RNA, 19 nt, Artificial Sequence
  Description of Artificial Sequence: Synthetic oligonucleotide
  Sense strand starting at position 832 of SEQ ID NO: 1881871
ugccauguucuccaugaau

SEQ ID NO: 2077805 - RNA, 19 nt, Artificial Sequence
  Description of Artificial Sequence: Synthetic oligonucleotide
  Antisense strand to SEQ ID NO: 2077804
auucauggagaacauggca

SEQ ID NO: 2077806 - RNA, 19 nt, Artificial Sequence
  Description of Artificial Sequence: Synthetic oligonucleotide
  Sense strand starting at position 878 of SEQ ID NO: 1881871
uaggguucuccugggcaua

SEQ ID NO: 2077807 - RNA, 19 nt, Artificial Sequence
  Description of Artificial Sequence: Synthetic oligonucleotide
  Antisense strand to SEQ ID NO: 2077806
uaugcccaggagaacccua

SEQ ID NO: 2077808 - RNA, 19 nt, Artificial Sequence
  Description of Artificial Sequence: Synthetic oligonucleotide
  Sense strand starting at position 1041 of SEQ ID NO: 1881871
gucuguuugcucuaauauu

SEQ ID NO: 2077809 - RNA, 19 nt, Artificial Sequence
  Description of Artificial Sequence: Synthetic oligonucleotide
  Antisense strand to SEQ ID NO: 2077808
aauauuagagcaaacagac

SEQ ID NO: 2077810 - RNA, 19 nt, Artificial Sequence
  Description of Artificial Sequence: Synthetic oligonucleotide
  Sense strand starting at position 1070 of SEQ ID NO: 1881871
gugguauguauuguugucu

SEQ ID NO: 2077811 - RNA, 19 nt, Artificial Sequence
  Description of Artificial Sequence: Synthetic oligonucleotide
  Antisense strand to SEQ ID NO: 2077810
agacaacaauacauaccac

SEQ ID NO: 2077812 - RNA, 19 nt, Artificial Sequence
  Description of Artificial Sequence: Synthetic oligonucleotide
  Sense strand starting at position 1188 of SEQ ID NO: 1881871
ggcacucugcaucaggaaa

SEQ ID NO: 2077813 - RNA, 19 nt, Artificial Sequence
  Description of Artificial Sequence: Synthetic oligonucleotide
  Antisense strand to SEQ ID NO: 2077812
uuuccugaugcagagugcc

SEQ ID NO: 2077814 - RNA, 19 nt, Artificial Sequence
  Description of Artificial Sequence: Synthetic oligonucleotide
  Sense strand starting at position 1451 of SEQ ID NO: 1881871
aguggagauucugaauaaa

SEQ ID NO: 2077815 - RNA, 19 nt, Artificial Sequence
  Description of Artificial Sequence: Synthetic oligonucleotide
  Antisense strand to SEQ ID NO: 2077814
uuuauucagaaucuccacu

SEQ ID NO: 2077816 - RNA, 19 nt, Artificial Sequence
  Description of Artificial Sequence: Synthetic oligonucleotide
  Sense strand starting at position 1993 of SEQ ID NO: 1881871
uggguugccagugaugguu

SEQ ID NO: 2077817 - RNA, 19 nt, Artificial Sequence
  Description of Artificial Sequence: Synthetic oligonucleotide
  Antisense strand to SEQ ID NO: 2077816
aaccaucacuggcaaccca

SEQ ID NO: 2077818 - RNA, 19 nt, Artificial Sequence
  Description of Artificial Sequence: Synthetic oligonucleotide
  Sense strand starting at position 2309 of SEQ ID NO: 1881871
auugguguaugucccugaa

SEQ ID NO: 2077819 - RNA, 19 nt, Artificial Sequence
  Description of Artificial Sequence: Synthetic oligonucleotide
  Antisense strand to SEQ ID NO: 2077818
uucagggacauacaccaau

SEQ ID NO: 2077820 - RNA, 19 nt, Artificial Sequence
  Description of Artificial Sequence: Synthetic oligonucleotide
  Sense strand starting at position 2311 of SEQ ID NO: 1881871
ugguguaugucccugaacu

SEQ ID NO: 2077821 - RNA, 19 nt, Artificial Sequence
  Description of Artificial Sequence: Synthetic oligonucleotide
  Antisense strand to SEQ ID NO: 2077820
aguucagggacauacacca

SEQ ID NO: 2077822 - RNA, 19 nt, Artificial Sequence
  Description of Artificial Sequence: Synthetic oligonucleotide
  Sense strand starting at position 2312 of SEQ ID NO: 1881871
gguguaugucccugaacua

SEQ ID NO: 2077823 - RNA, 19 nt, Artificial Sequence
  Description of Artificial Sequence: Synthetic oligonucleotide
  Antisense strand to SEQ ID NO: 2077822
uaguucagggacauacacc

SEQ ID NO: 2077824 - RNA, 19 nt, Artificial Sequence
  Description of Artificial Sequence: Synthetic oligonucleotide
  Sense strand starting at position 2313 of SEQ ID NO: 1881871
guguaugucccugaacuag

SEQ ID NO: 2077825 - RNA, 19 nt, Artificial Sequence
  Description of Artificial Sequence: Synthetic oligonucleotide
  Antisense strand to SEQ ID NO: 2077824
cuaguucagggacauacac

SEQ ID NO: 2077826 - RNA, 19 nt, Artificial Sequence
  Description of Artificial Sequence: Synthetic oligonucleotide
  Sense strand starting at position 3250 of SEQ ID NO: 1881871
ccacuaucaucuucgucau

SEQ ID NO: 2077827 - RNA, 19 nt, Artificial Sequence
  Description of Artificial Sequence: Synthetic oligonucleotide
  Antisense strand to SEQ ID NO: 2077826
augacgaagaugauagugg

SEQ ID NO: 2077828 - RNA, 19 nt, Artificial Sequence
  Description of Artificial Sequence: Synthetic oligonucleotide
  Sense strand starting at position 3333 of SEQ ID NO: 1881871
ccuagaguuccugaccuca

SEQ ID NO: 2077829 - RNA, 19 nt, Artificial Sequence
  Description of Artificial Sequence: Synthetic oligonucleotide
  Antisense strand to SEQ ID NO: 2077828
ugaggucaggaacucuagg

SEQ ID NO: 2077830 - RNA, 19 nt, Artificial Sequence
  Description of Artificial Sequence: Synthetic oligonucleotide
  Sense strand starting at position 3335 of SEQ ID NO: 1881871
uagaguuccugaccucagu

SEQ ID NO: 2077831 - RNA, 19 nt, Artificial Sequence
  Description of Artificial Sequence: Synthetic oligonucleotide
  Antisense strand to SEQ ID NO: 2077830
acugaggucaggaacucua

SEQ ID NO: 2077832 - RNA, 19 nt, Artificial Sequence
  Description of Artificial Sequence: Synthetic oligonucleotide
  Sense strand starting at position 3360 of SEQ ID NO: 1881871
auugauuccuguguuuaaa

SEQ ID NO: 2077833 - RNA, 19 nt, Artificial Sequence
  Description of Artificial Sequence: Synthetic oligonucleotide
  Antisense strand to SEQ ID NO: 2077832
uuuaaacacaggaaucaau

SEQ ID NO: 2077834 - RNA, 19 nt, Artificial Sequence
  Description of Artificial Sequence: Synthetic oligonucleotide
  Sense strand starting at position 3363 of SEQ ID NO: 1881871
gauuccuguguuuaaaguu

SEQ ID NO: 2077835 - RNA, 19 nt, Artificial Sequence
  Description of Artificial Sequence: Synthetic oligonucleotide
  Antisense strand to SEQ ID NO: 2077834
aacuuuaaacacaggaauc

SEQ ID NO: 2077836 - RNA, 19 nt, Artificial Sequence
  Description of Artificial Sequence: Synthetic oligonucleotide
  Sense strand starting at position 3371 of SEQ ID NO: 1881871
uguuuaaaguuucugagga

SEQ ID NO: 2077837 - RNA, 19 nt, Artificial Sequence
  Description of Artificial Sequence: Synthetic oligonucleotide
  Antisense strand to SEQ ID NO: 2077836
uccucagaaacuuuaaaca

SEQ ID NO: 2077838 - RNA, 19 nt, Artificial Sequence
  Description of Artificial Sequence: Synthetic oligonucleotide
  Sense strand starting at position 3449 of SEQ ID NO: 1881871
gccacaauugccuaggcaa

SEQ ID NO: 2077839 - RNA, 19 nt, Artificial Sequence
  Description of Artificial Sequence: Synthetic oligonucleotide
  Antisense strand to SEQ ID NO: 2077838
uugccuaggcaauuguggc

SEQ ID NO: 2077840 - RNA, 19 nt, Artificial Sequence
  Description of Artificial Sequence: Synthetic oligonucleotide
  Sense strand starting at position 3452 of SEQ ID NO: 1881871
acaauugccuaggcaagua

SEQ ID NO: 2077841 - RNA, 19 nt, Artificial Sequence
  Description of Artificial Sequence: Synthetic oligonucleotide
  Antisense strand to SEQ ID NO: 2077840
uacuugccuaggcaauugu

SEQ ID NO: 2077842 - RNA, 19 nt, Artificial Sequence
  Description of Artificial Sequence: Synthetic oligonucleotide
  Sense strand starting at position 3623 of SEQ ID NO: 1881871
agagaaguguccucaaugu

SEQ ID NO: 2077843 - RNA, 19 nt, Artificial Sequence
  Description of Artificial Sequence: Synthetic oligonucleotide
  Antisense strand to SEQ ID NO: 2077842
acauugaggacacuucucu

SEQ ID NO: 2077844 - RNA, 19 nt, Artificial Sequence
  Description of Artificial Sequence: Synthetic oligonucleotide
  Sense strand starting at position 3662 of SEQ ID NO: 1881871
agccauuuccuuggcaaca

SEQ ID NO: 2077845 - RNA, 19 nt, Artificial Sequence
  Description of Artificial Sequence: Synthetic oligonucleotide
  Antisense strand to SEQ ID NO: 2077844
uguugccaaggaaauggcu

SEQ ID NO: 2077846 - RNA, 19 nt, Artificial Sequence
  Description of Artificial Sequence: Synthetic oligonucleotide
  Sense strand starting at position 3729 of SEQ ID NO: 1881871
ggcugauugcaugugugca

SEQ ID NO: 2077847 - RNA, 19 nt, Artificial Sequence
  Description of Artificial Sequence: Synthetic oligonucleotide
  Antisense strand to SEQ ID NO: 2077846
ugcacacaugcaaucagcc

SEQ ID NO: 2077848 - RNA, 19 nt, Artificial Sequence
  Description of Artificial Sequence: Synthetic oligonucleotide
  Sense strand starting at position 3737 of SEQ ID NO: 1881871
gcaugugugcacucaugcu

SEQ ID NO: 2077849 - RNA, 19 nt, Artificial Sequence
  Description of Artificial Sequence: Synthetic oligonucleotide
  Antisense strand to SEQ ID NO: 2077848
agcaugagugcacacaugc

SEQ ID NO: 2077850 - RNA, 19 nt, Artificial Sequence
  Description of Artificial Sequence: Synthetic oligonucleotide
  Sense strand starting at position 3806 of SEQ ID NO: 1881871
uuaacccuguguccuuaaa

SEQ ID NO: 2077851 - RNA, 19 nt, Artificial Sequence
  Description of Artificial Sequence: Synthetic oligonucleotide
  Antisense strand to SEQ ID NO: 2077850
uuuaaggacacaggguuaa

SEQ ID NO: 2077852 - RNA, 19 nt, Artificial Sequence
  Description of Artificial Sequence: Synthetic oligonucleotide
  Sense strand starting at position 48 of SEQ ID NO: 1881872
ggcagaacugcagguuuga

SEQ ID NO: 2077853 - RNA, 19 nt, Artificial Sequence
  Description of Artificial Sequence: Synthetic oligonucleotide
  Antisense strand to SEQ ID NO: 2077852
ucaaaccugcaguucugcc

SEQ ID NO: 2077854 - RNA, 19 nt, Artificial Sequence
  Description of Artificial Sequence: Synthetic oligonucleotide
  Sense strand starting at position 120 of SEQ ID NO: 1881872
ugccuuaugcuuuagaauu

SEQ ID NO: 2077855 - RNA, 19 nt, Artificial Sequence
  Description of Artificial Sequence: Synthetic oligonucleotide
  Antisense strand to SEQ ID NO: 2077854
aauucuaaagcauaaggca

SEQ ID NO: 2077856 - RNA, 19 nt, Artificial Sequence
  Description of Artificial Sequence: Synthetic oligonucleotide
  Sense strand starting at position 128 of SEQ ID NO: 1881872
gcuuuagaauucccauuag

SEQ ID NO: 2077857 - RNA, 19 nt, Artificial Sequence
  Description of Artificial Sequence: Synthetic oligonucleotide
  Antisense strand to SEQ ID NO: 2077856
cuaaugggaauucuaaagc

SEQ ID NO: 2077858 - RNA, 19 nt, Artificial Sequence
  Description of Artificial Sequence: Synthetic oligonucleotide
  Sense strand starting at position 178 of SEQ ID NO: 1881872
uuagcaguucuuugggaga

SEQ ID NO: 2077859 - RNA, 19 nt, Artificial Sequence
  Description of Artificial Sequence: Synthetic oligonucleotide
  Antisense strand to SEQ ID NO: 2077858
ucucccaaagaacugcuaa

SEQ ID NO: 2077860 - RNA, 19 nt, Artificial Sequence
  Description of Artificial Sequence: Synthetic oligonucleotide
  Sense strand starting at position 208 of SEQ ID NO: 1881872
ugguaugcaucuguuaaca

SEQ ID NO: 2077861 - RNA, 19 nt, Artificial Sequence
  Description of Artificial Sequence: Synthetic oligonucleotide
  Antisense strand to SEQ ID NO: 2077860
uguuaacagaugcauacca

SEQ ID NO: 2077862 - RNA, 19 nt, Artificial Sequence
  Description of Artificial Sequence: Synthetic oligonucleotide
  Sense strand starting at position 235 of SEQ ID NO: 1881872
uucugagccuuucuuguaa

SEQ ID NO: 2077863 - RNA, 19 nt, Artificial Sequence
  Description of Artificial Sequence: Synthetic oligonucleotide
  Antisense strand to SEQ ID NO: 2077862
uuacaagaaaggcucagaa

SEQ ID NO: 2077864 - RNA, 19 nt, Artificial Sequence
  Description of Artificial Sequence: Synthetic oligonucleotide
  Sense strand starting at position 283 of SEQ ID NO: 1881872
cgaaacagaucggauuuau

SEQ ID NO: 2077865 - RNA, 19 nt, Artificial Sequence
  Description of Artificial Sequence: Synthetic oligonucleotide
  Antisense strand to SEQ ID NO: 2077864
auaaauccgaucuguuucg

SEQ ID NO: 2077866 - RNA, 19 nt, Artificial Sequence
  Description of Artificial Sequence: Synthetic oligonucleotide
  Sense strand starting at position 310 of SEQ ID NO: 1881872
ccagguauucugcagaaca

SEQ ID NO: 2077867 - RNA, 19 nt, Artificial Sequence
  Description of Artificial Sequence: Synthetic oligonucleotide
  Antisense strand to SEQ ID NO: 2077866
uguucugcagaauaccugg

SEQ ID NO: 2077868 - RNA, 19 nt, Artificial Sequence
  Description of Artificial Sequence: Synthetic oligonucleotide
  Sense strand starting at position 312 of SEQ ID NO: 1881872
agguauucugcagaacauc

SEQ ID NO: 2077869 - RNA, 19 nt, Artificial Sequence
  Description of Artificial Sequence: Synthetic oligonucleotide
  Antisense strand to SEQ ID NO: 2077868
gauguucugcagaauaccu

SEQ ID NO: 2077870 - RNA, 19 nt, Artificial Sequence
  Description of Artificial Sequence: Synthetic oligonucleotide
  Sense strand starting at position 323 of SEQ ID NO: 1881872
agaacaucacuuggccaau

SEQ ID NO: 2077871 - RNA, 19 nt, Artificial Sequence
  Description of Artificial Sequence: Synthetic oligonucleotide
  Antisense strand to SEQ ID NO: 2077870
auuggccaagugauguucu

SEQ ID NO: 2077872 - RNA, 19 nt, Artificial Sequence
  Description of Artificial Sequence: Synthetic oligonucleotide
  Sense strand starting at position 351 of SEQ ID NO: 1881872
ccagccaauguugaaagua

SEQ ID NO: 2077873 - RNA, 19 nt, Artificial Sequence
  Description of Artificial Sequence: Synthetic oligonucleotide
  Antisense strand to SEQ ID NO: 2077872
uacuuucaacauuggcugg

SEQ ID NO: 2077874 - RNA, 19 nt, Artificial Sequence
  Description of Artificial Sequence: Synthetic oligonucleotide
  Sense strand starting at position 457 of SEQ ID NO: 1881872
agugcuaaguccuuuagag

SEQ ID NO: 2077875 - RNA, 19 nt, Artificial Sequence
  Description of Artificial Sequence: Synthetic oligonucleotide
  Antisense strand to SEQ ID NO: 2077874
cucuaaaggacuuagcacu

SEQ ID NO: 2077876 - RNA, 19 nt, Artificial Sequence
  Description of Artificial Sequence: Synthetic oligonucleotide
  Sense strand starting at position 746 of SEQ ID NO: 1881872
acgugcagucuggauguaa

SEQ ID NO: 2077877 - RNA, 19 nt, Artificial Sequence
  Description of Artificial Sequence: Synthetic oligonucleotide
  Antisense strand to SEQ ID NO: 2077876
uuacauccagacugcacgu

SEQ ID NO: 2077878 - RNA, 19 nt, Artificial Sequence
  Description of Artificial Sequence: Synthetic oligonucleotide
  Sense strand starting at position 750 of SEQ ID NO: 1881872
gcagucuggauguaaaugu

SEQ ID NO: 2077879 - RNA, 19 nt, Artificial Sequence
  Description of Artificial Sequence: Synthetic oligonucleotide
  Antisense strand to SEQ ID NO: 2077878
acauuuacauccagacugc

SEQ ID NO: 2077880 - RNA, 19 nt, Artificial Sequence
  Description of Artificial Sequence: Synthetic oligonucleotide
  Sense strand starting at position 758 of SEQ ID NO: 1881872
gauguaaaugugggucuaa

SEQ ID NO: 2077881 - RNA, 19 nt, Artificial Sequence
  Description of Artificial Sequence: Synthetic oligonucleotide
  Antisense strand to SEQ ID NO: 2077880
uuagacccacauuuacauc

SEQ ID NO: 2077882 - RNA, 19 nt, Artificial Sequence
  Description of Artificial Sequence: Synthetic oligonucleotide
  Sense strand starting at position 759 of SEQ ID NO: 1881872
auguaaaugugggucuaag

SEQ ID NO: 2077883 - RNA, 19 nt, Artificial Sequence
  Description of Artificial Sequence: Synthetic oligonucleotide
  Antisense strand to SEQ ID NO: 2077882
cuuagacccacauuuacau

SEQ ID NO: 2077884 - RNA, 19 nt, Artificial Sequence
  Description of Artificial Sequence: Synthetic oligonucleotide
  Sense strand starting at position 1190 of SEQ ID NO: 1881872
cgagccagacaauaguaaa

SEQ ID NO: 2077885 - RNA, 19 nt, Artificial Sequence
  Description of Artificial Sequence: Synthetic oligonucleotide
  Antisense strand to SEQ ID NO: 2077884
uuuacuauugucuggcucg

SEQ ID NO: 2077886 - RNA, 19 nt, Artificial Sequence
  Description of Artificial Sequence: Synthetic oligonucleotide
  Sense strand starting at position 1741 of SEQ ID NO: 1881872
agagaauucuggucccaga

SEQ ID NO: 2077887 - RNA, 19 nt, Artificial Sequence
  Description of Artificial Sequence: Synthetic oligonucleotide
  Antisense strand to SEQ ID NO: 2077886
ucugggaccagaauucucu

SEQ ID NO: 2077888 - RNA, 19 nt, Artificial Sequence
  Description of Artificial Sequence: Synthetic oligonucleotide
  Sense strand starting at position 2165 of SEQ ID NO: 1881872
gguagaagccagugaucug

SEQ ID NO: 2077889 - RNA, 19 nt, Artificial Sequence
  Description of Artificial Sequence: Synthetic oligonucleotide
  Antisense strand to SEQ ID NO: 2077888
cagaucacuggcuucuacc

SEQ ID NO: 2077890 - RNA, 19 nt, Artificial Sequence
  Description of Artificial Sequence: Synthetic oligonucleotide
  Sense strand starting at position 2166 of SEQ ID NO: 1881872
guagaagccagugaucuga

SEQ ID NO: 2077891 - RNA, 19 nt, Artificial Sequence
  Description of Artificial Sequence: Synthetic oligonucleotide
  Antisense strand to SEQ ID NO: 2077890
ucagaucacuggcuucuac

SEQ ID NO: 2077892 - RNA, 19 nt, Artificial Sequence
  Description of Artificial Sequence: Synthetic oligonucleotide
  Sense strand starting at position 2168 of SEQ ID NO: 1881872
agaagccagugaucugaau

SEQ ID NO: 2077893 - RNA, 19 nt, Artificial Sequence
  Description of Artificial Sequence: Synthetic oligonucleotide
  Antisense strand to SEQ ID NO: 2077892
auucagaucacuggcuucu

SEQ ID NO: 2077894 - RNA, 19 nt, Artificial Sequence
  Description of Artificial Sequence: Synthetic oligonucleotide
  Sense strand starting at position 2198 of SEQ ID NO: 1881872
gacgucuuugaauggauca

SEQ ID NO: 2077895 - RNA, 19 nt, Artificial Sequence
  Description of Artificial Sequence: Synthetic oligonucleotide
  Antisense strand to SEQ ID NO: 2077894
ugauccauucaaagacguc

SEQ ID NO: 2077896 - RNA, 19 nt, Artificial Sequence
  Description of Artificial Sequence: Synthetic oligonucleotide
  Sense strand starting at position 2200 of SEQ ID NO: 1881872
cgucuuugaauggaucaca

SEQ ID NO: 2077897 - RNA, 19 nt, Artificial Sequence
  Description of Artificial Sequence: Synthetic oligonucleotide
  Antisense strand to SEQ ID NO: 2077896
ugugauccauucaaagacg

SEQ ID NO: 2077898 - RNA, 19 nt, Artificial Sequence
  Description of Artificial Sequence: Synthetic oligonucleotide
  Sense strand starting at position 2266 of SEQ ID NO: 1881872
gcuccaagucaccauguaa

SEQ ID NO: 2077899 - RNA, 19 nt, Artificial Sequence
  Description of Artificial Sequence: Synthetic oligonucleotide
  Antisense strand to SEQ ID NO: 2077898
uuacauggugacuuggagc

SEQ ID NO: 2077900 - RNA, 19 nt, Artificial Sequence
  Description of Artificial Sequence: Synthetic oligonucleotide
  Sense strand starting at position 2345 of SEQ ID NO: 1881872
agcacuaacccugguacua

SEQ ID NO: 2077901 - RNA, 19 nt, Artificial Sequence
  Description of Artificial Sequence: Synthetic oligonucleotide
  Antisense strand to SEQ ID NO: 2077900
uaguaccaggguuagugcu

SEQ ID NO: 2077902 - RNA, 19 nt, Artificial Sequence
  Description of Artificial Sequence: Synthetic oligonucleotide
  Sense strand starting at position 2402 of SEQ ID NO: 1881872
gggagaagcugcccaucaa

SEQ ID NO: 2077903 - RNA, 19 nt, Artificial Sequence
  Description of Artificial Sequence: Synthetic oligonucleotide
  Antisense strand to SEQ ID NO: 2077902
uugaugggcagcuucuccc

SEQ ID NO: 2077904 - RNA, 19 nt, Artificial Sequence
  Description of Artificial Sequence: Synthetic oligonucleotide
  Sense strand starting at position 2403 of SEQ ID NO: 1881872
ggagaagcugcccaucaaa

SEQ ID NO: 2077905 - RNA, 19 nt, Artificial Sequence
  Description of Artificial Sequence: Synthetic oligonucleotide
  Antisense strand to SEQ ID NO: 2077904
uuugaugggcagcuucucc

SEQ ID NO: 2077906 - RNA, 19 nt, Artificial Sequence
  Description of Artificial Sequence: Synthetic oligonucleotide
  Sense strand starting at position 2708 of SEQ ID NO: 1881872
uguugucugcguccugaca

SEQ ID NO: 2077907 - RNA, 19 nt, Artificial Sequence
  Description of Artificial Sequence: Synthetic oligonucleotide
  Antisense strand to SEQ ID NO: 2077906
ugucaggacgcagacaaca

SEQ ID NO: 2077908 - RNA, 19 nt, Artificial Sequence
  Description of Artificial Sequence: Synthetic oligonucleotide
  Sense strand starting at position 2780 of SEQ ID NO: 1881872
auggaucauacagguguga

SEQ ID NO: 2077909 - RNA, 19 nt, Artificial Sequence
  Description of Artificial Sequence: Synthetic oligonucleotide
  Antisense strand to SEQ ID NO: 2077908
ucacaccuguaugauccau

SEQ ID NO: 2077910 - RNA, 19 nt, Artificial Sequence
  Description of Artificial Sequence: Synthetic oligonucleotide
  Sense strand starting at position 3078 of SEQ ID NO: 1881872
acagcuuuaaguggcagaa

SEQ ID NO: 2077911 - RNA, 19 nt, Artificial Sequence
  Description of Artificial Sequence: Synthetic oligonucleotide
  Antisense strand to SEQ ID NO: 2077910
uucugccacuuaaagcugu

SEQ ID NO: 2077912 - RNA, 19 nt, Artificial Sequence
  Description of Artificial Sequence: Synthetic oligonucleotide
  Sense strand starting at position 3214 of SEQ ID NO: 1881872
caucgaucacugcagucau

SEQ ID NO: 2077913 - RNA, 19 nt, Artificial Sequence
  Description of Artificial Sequence: Synthetic oligonucleotide
  Antisense strand to SEQ ID NO: 2077912
augacugcagugaucgaug

SEQ ID NO: 2077914 - RNA, 19 nt, Artificial Sequence
  Description of Artificial Sequence: Synthetic oligonucleotide
  Sense strand starting at position 3299 of SEQ ID NO: 1881872
uggagucuguauguuuaac

SEQ ID NO: 2077915 - RNA, 19 nt, Artificial Sequence
  Description of Artificial Sequence: Synthetic oligonucleotide
  Antisense strand to SEQ ID NO: 2077914
guuaaacauacagacucca

SEQ ID NO: 2077916 - RNA, 19 nt, Artificial Sequence
  Description of Artificial Sequence: Synthetic oligonucleotide
  Sense strand starting at position 3301 of SEQ ID NO: 1881872
gagucuguauguuuaacaa

SEQ ID NO: 2077917 - RNA, 19 nt, Artificial Sequence
  Description of Artificial Sequence: Synthetic oligonucleotide
  Antisense strand to SEQ ID NO: 2077916
uuguuaaacauacagacuc

SEQ ID NO: 2077918 - RNA, 19 nt, Artificial Sequence
  Description of Artificial Sequence: Synthetic oligonucleotide
  Sense strand starting at position 3421 of SEQ ID NO: 1881872
gaagccaccucuguaaugu

SEQ ID NO: 2077919 - RNA, 19 nt, Artificial Sequence
  Description of Artificial Sequence: Synthetic oligonucleotide
  Antisense strand to SEQ ID NO: 2077918
acauuacagagguggcuuc

SEQ ID NO: 2077920 - RNA, 19 nt, Artificial Sequence
  Description of Artificial Sequence: Synthetic oligonucleotide
  Sense strand starting at position 3430 of SEQ ID NO: 1881872
ucuguaauguucccuccaa

SEQ ID NO: 2077921 - RNA, 19 nt, Artificial Sequence
  Description of Artificial Sequence: Synthetic oligonucleotide
  Antisense strand to SEQ ID NO: 2077920
uuggagggaacauuacaga

SEQ ID NO: 2077922 - RNA, 19 nt, Artificial Sequence
  Description of Artificial Sequence: Synthetic oligonucleotide
  Sense strand starting at position 3431 of SEQ ID NO: 1881872
cuguaauguucccuccaag

SEQ ID NO: 2077923 - RNA, 19 nt, Artificial Sequence
  Description of Artificial Sequence: Synthetic oligonucleotide
  Antisense strand to SEQ ID NO: 2077922
cuuggagggaacauuacag

SEQ ID NO: 2077924 - RNA, 19 nt, Artificial Sequence
  Description of Artificial Sequence: Synthetic oligonucleotide
  Sense strand starting at position 3562 of SEQ ID NO: 1881872
uugaaaguccucugcagag

SEQ ID NO: 2077925 - RNA, 19 nt, Artificial Sequence
  Description of Artificial Sequence: Synthetic oligonucleotide
  Antisense strand to SEQ ID NO: 2077924
cucugcagaggacuuucaa

SEQ ID NO: 2077926 - RNA, 19 nt, Artificial Sequence
  Description of Artificial Sequence: Synthetic oligonucleotide
  Sense strand starting at position 3604 of SEQ ID NO: 1881872
aaagacaucuggucaaguu

SEQ ID NO: 2077927 - RNA, 19 nt, Artificial Sequence
  Description of Artificial Sequence: Synthetic oligonucleotide
  Antisense strand to SEQ ID NO: 2077926
aacuugaccagaugucuuu

SEQ ID NO: 2077928 - RNA, 19 nt, Artificial Sequence
  Description of Artificial Sequence: Synthetic oligonucleotide
  Sense strand starting at position 3605 of SEQ ID NO: 1881872
aagacaucuggucaaguuc

SEQ ID NO: 2077929 - RNA, 19 nt, Artificial Sequence
  Description of Artificial Sequence: Synthetic oligonucleotide
  Antisense strand to SEQ ID NO: 2077928
gaacuugaccagaugucuu

SEQ ID NO: 2077930 - RNA, 19 nt, Artificial Sequence
  Description of Artificial Sequence: Synthetic oligonucleotide
  Sense strand starting at position 3773 of SEQ ID NO: 1881872
ggagaaugcuucuugcagg

SEQ ID NO: 2077931 - RNA, 19 nt, Artificial Sequence
  Description of Artificial Sequence: Synthetic oligonucleotide
  Antisense strand to SEQ ID NO: 2077930
ccugcaagaagcauucucc

SEQ ID NO: 2077932 - RNA, 19 nt, Artificial Sequence
  Description of Artificial Sequence: Synthetic oligonucleotide
  Sense strand starting at position 98 of SEQ ID NO: 1881873
ugcuguauuuguuccauau

SEQ ID NO: 2077933 - RNA, 19 nt, Artificial Sequence
  Description of Artificial Sequence: Synthetic oligonucleotide
  Antisense strand to SEQ ID NO: 2077932
auauggaacaaauacagca

SEQ ID NO: 2077934 - RNA, 19 nt, Artificial Sequence
  Description of Artificial Sequence: Synthetic oligonucleotide
  Sense strand starting at position 129 of SEQ ID NO: 1881873
aagcauuguguuggaacaa

SEQ ID NO: 2077935 - RNA, 19 nt, Artificial Sequence
  Description of Artificial Sequence: Synthetic oligonucleotide
  Antisense strand to SEQ ID NO: 2077934
uuguuccaacacaaugcuu

SEQ ID NO: 2077936 - RNA, 19 nt, Artificial Sequence
  Description of Artificial Sequence: Synthetic oligonucleotide
  Sense strand starting at position 206 of SEQ ID NO: 1881873
gggaucugguaagugagaa

SEQ ID NO: 2077937 - RNA, 19 nt, Artificial Sequence
  Description of Artificial Sequence: Synthetic oligonucleotide
  Antisense strand to SEQ ID NO: 2077936
uucucacuuaccagauccc

SEQ ID NO: 2077938 - RNA, 19 nt, Artificial Sequence
  Description of Artificial Sequence: Synthetic oligonucleotide
  Sense strand starting at position 207 of SEQ ID NO: 1881873
ggaucugguaagugagaaa

SEQ ID NO: 2077939 - RNA, 19 nt, Artificial Sequence
  Description of Artificial Sequence: Synthetic oligonucleotide
  Antisense strand to SEQ ID NO: 2077938
uuucucacuuaccagaucc

SEQ ID NO: 2077940 - RNA, 19 nt, Artificial Sequence
  Description of Artificial Sequence: Synthetic oligonucleotide
  Sense strand starting at position 522 of SEQ ID NO: 1881873
gaggauugguccuuccaua

SEQ ID NO: 2077941 - RNA, 19 nt, Artificial Sequence
  Description of Artificial Sequence: Synthetic oligonucleotide
  Antisense strand to SEQ ID NO: 2077940
uauggaaggaccaauccuc

SEQ ID NO: 2077942 - RNA, 19 nt, Artificial Sequence
  Description of Artificial Sequence: Synthetic oligonucleotide
  Sense strand starting at position 561 of SEQ ID NO: 1881873
uucucuaguccugaucaga

SEQ ID NO: 2077943 - RNA, 19 nt, Artificial Sequence
  Description of Artificial Sequence: Synthetic oligonucleotide
  Antisense strand to SEQ ID NO: 2077942
ucugaucaggacuagagaa

SEQ ID NO: 2077944 - RNA, 19 nt, Artificial Sequence
  Description of Artificial Sequence: Synthetic oligonucleotide
  Sense strand starting at position 819 of SEQ ID NO: 1881873
uucuguaacugcuuaggga

SEQ ID NO: 2077945 - RNA, 19 nt, Artificial Sequence
  Description of Artificial Sequence: Synthetic oligonucleotide
  Antisense strand to SEQ ID NO: 2077944
ucccuaagcaguuacagaa

SEQ ID NO: 2077946 - RNA, 19 nt, Artificial Sequence
  Description of Artificial Sequence: Synthetic oligonucleotide
  Sense strand starting at position 820 of SEQ ID NO: 1881873
ucuguaacugcuuagggaa

SEQ ID NO: 2077947 - RNA, 19 nt, Artificial Sequence
  Description of Artificial Sequence: Synthetic oligonucleotide
  Antisense strand to SEQ ID NO: 2077946
uucccuaagcaguuacaga

SEQ ID NO: 2077948 - RNA, 19 nt, Artificial Sequence
  Description of Artificial Sequence: Synthetic oligonucleotide
  Sense strand starting at position 924 of SEQ ID NO: 1881873
uagugauuccacgaccaaa

SEQ ID NO: 2077949 - RNA, 19 nt, Artificial Sequence
  Description of Artificial Sequence: Synthetic oligonucleotide
  Antisense strand to SEQ ID NO: 2077948
uuuggucguggaaucacua

SEQ ID NO: 2077950 - RNA, 19 nt, Artificial Sequence
  Description of Artificial Sequence: Synthetic oligonucleotide
  Sense strand starting at position 966 of SEQ ID NO: 1881873
agagguucuugggcauuca

SEQ ID NO: 2077951 - RNA, 19 nt, Artificial Sequence
  Description of Artificial Sequence: Synthetic oligonucleotide
  Antisense strand to SEQ ID NO: 2077950
ugaaugcccaagaaccucu

SEQ ID NO: 2077952 - RNA, 19 nt, Artificial Sequence
  Description of Artificial Sequence: Synthetic oligonucleotide
  Sense strand starting at position 1101 of SEQ ID NO: 1881873
ggcaauuuauagcuccgaa

SEQ ID NO: 2077953 - RNA, 19 nt, Artificial Sequence
  Description of Artificial Sequence: Synthetic oligonucleotide
  Antisense strand to SEQ ID NO: 2077952
uucggagcuauaaauugcc

SEQ ID NO: 2077954 - RNA, 19 nt, Artificial Sequence
  Description of Artificial Sequence: Synthetic oligonucleotide
  Sense strand starting at position 1330 of SEQ ID NO: 1881873
ucagaaagguaauuccagu

SEQ ID NO: 2077955 - RNA, 19 nt, Artificial Sequence
  Description of Artificial Sequence: Synthetic oligonucleotide
  Antisense strand to SEQ ID NO: 2077954
acuggaauuaccuuucuga

SEQ ID NO: 2077956 - RNA, 19 nt, Artificial Sequence
  Description of Artificial Sequence: Synthetic oligonucleotide
  Sense strand starting at position 1336 of SEQ ID NO: 1881873
agguaauuccaguauccau

SEQ ID NO: 2077957 - RNA, 19 nt, Artificial Sequence
  Description of Artificial Sequence: Synthetic oligonucleotide
  Antisense strand to SEQ ID NO: 2077956
auggauacuggaauuaccu

SEQ ID NO: 2077958 - RNA, 19 nt, Artificial Sequence
  Description of Artificial Sequence: Synthetic oligonucleotide
  Sense strand starting at position 1752 of SEQ ID NO: 1881873
ggauaaugguguaggauga

SEQ ID NO: 2077959 - RNA, 19 nt, Artificial Sequence
  Description of Artificial Sequence: Synthetic oligonucleotide
  Antisense strand to SEQ ID NO: 2077958
ucauccuacaccauuaucc

SEQ ID NO: 2077960 - RNA, 19 nt, Artificial Sequence
  Description of Artificial Sequence: Synthetic oligonucleotide
  Sense strand starting at position 1753 of SEQ ID NO: 1881873
gauaaugguguaggaugaa

SEQ ID NO: 2077961 - RNA, 19 nt, Artificial Sequence
  Description of Artificial Sequence: Synthetic oligonucleotide
  Antisense strand to SEQ ID NO: 2077960
uucauccuacaccauuauc

SEQ ID NO: 2077962 - RNA, 19 nt, Artificial Sequence
  Description of Artificial Sequence: Synthetic oligonucleotide
  Sense strand starting at position 1756 of SEQ ID NO: 1881873
aaugguguaggaugaauga

SEQ ID NO: 2077963 - RNA, 19 nt, Artificial Sequence
  Description of Artificial Sequence: Synthetic oligonucleotide
  Antisense strand to SEQ ID NO: 2077962
ucauucauccuacaccauu

SEQ ID NO: 2077964 - RNA, 19 nt, Artificial Sequence
  Description of Artificial Sequence: Synthetic oligonucleotide
  Sense strand starting at position 1837 of SEQ ID NO: 1881873
agggcagauucucuacuga

SEQ ID NO: 2077965 - RNA, 19 nt, Artificial Sequence
  Description of Artificial Sequence: Synthetic oligonucleotide
  Antisense strand to SEQ ID NO: 2077964
ucaguagagaaucugcccu

SEQ ID NO: 2077966 - RNA, 19 nt, Artificial Sequence
  Description of Artificial Sequence: Synthetic oligonucleotide
  Sense strand starting at position 1937 of SEQ ID NO: 1881873
guaacaaauuuggaagcau

SEQ ID NO: 2077967 - RNA, 19 nt, Artificial Sequence
  Description of Artificial Sequence: Synthetic oligonucleotide
  Antisense strand to SEQ ID NO: 2077966
augcuuccaaauuuguuac

SEQ ID NO: 2077968 - RNA, 19 nt, Artificial Sequence
  Description of Artificial Sequence: Synthetic oligonucleotide
  Sense strand starting at position 1948 of SEQ ID NO: 1881873
ggaagcaucucaccaguca

SEQ ID NO: 2077969 - RNA, 19 nt, Artificial Sequence
  Description of Artificial Sequence: Synthetic oligonucleotide
  Antisense strand to SEQ ID NO: 2077968
ugacuggugagaugcuucc

SEQ ID NO: 2077970 - RNA, 19 nt, Artificial Sequence
  Description of Artificial Sequence: Synthetic oligonucleotide
  Sense strand starting at position 1986 of SEQ ID NO: 1881873
ggaagugcuuauguauaac

SEQ ID NO: 2077971 - RNA, 19 nt, Artificial Sequence
  Description of Artificial Sequence: Synthetic oligonucleotide
  Antisense strand to SEQ ID NO: 2077970
guuauacauaagcacuucc

SEQ ID NO: 2077972 - RNA, 19 nt, Artificial Sequence
  Description of Artificial Sequence: Synthetic oligonucleotide
  Sense strand starting at position 1989 of SEQ ID NO: 1881873
agugcuuauguauaacauu

SEQ ID NO: 2077973 - RNA, 19 nt, Artificial Sequence
  Description of Artificial Sequence: Synthetic oligonucleotide
  Antisense strand to SEQ ID NO: 2077972
aauguuauacauaagcacu

SEQ ID NO: 2077974 - RNA, 19 nt, Artificial Sequence
  Description of Artificial Sequence: Synthetic oligonucleotide
  Sense strand starting at position 2012 of SEQ ID NO: 1881873
gccuccuaauugucaagau

SEQ ID NO: 2077975 - RNA, 19 nt, Artificial Sequence
  Description of Artificial Sequence: Synthetic oligonucleotide
  Antisense strand to SEQ ID NO: 2077974
aucuugacaauuaggaggc

SEQ ID NO: 2077976 - RNA, 19 nt, Artificial Sequence
  Description of Artificial Sequence: Synthetic oligonucleotide
  Sense strand starting at position 2239 of SEQ ID NO: 1881873
aaaucaugugguuaugcau

SEQ ID NO: 2077977 - RNA, 19 nt, Artificial Sequence
  Description of Artificial Sequence: Synthetic oligonucleotide
  Antisense strand to SEQ ID NO: 2077976
augcauaaccacaugauuu

SEQ ID NO: 2077978 - RNA, 19 nt, Artificial Sequence
  Description of Artificial Sequence: Synthetic oligonucleotide
  Sense strand starting at position 2369 of SEQ ID NO: 1881873
caauguuaucgcugaggaa

SEQ ID NO: 2077979 - RNA, 19 nt, Artificial Sequence
  Description of Artificial Sequence: Synthetic oligonucleotide
  Antisense strand to SEQ ID NO: 2077978
uuccucagcgauaacauug

SEQ ID NO: 2077980 - RNA, 19 nt, Artificial Sequence
  Description of Artificial Sequence: Synthetic oligonucleotide
  Sense strand starting at position 2370 of SEQ ID NO: 1881873
aauguuaucgcugaggaau

SEQ ID NO: 2077981 - RNA, 19 nt, Artificial Sequence
  Description of Artificial Sequence: Synthetic oligonucleotide
  Antisense strand to SEQ ID NO: 2077980
auuccucagcgauaacauu

SEQ ID NO: 2077982 - RNA, 19 nt, Artificial Sequence
  Description of Artificial Sequence: Synthetic oligonucleotide
  Sense strand starting at position 2922 of SEQ ID NO: 1881873
gaaagagaauaguaugaaa

SEQ ID NO: 2077983 - RNA, 19 nt, Artificial Sequence
  Description of Artificial Sequence: Synthetic oligonucleotide
  Antisense strand to SEQ ID NO: 2077982
uuucauacuauucucuuuc

SEQ ID NO: 2077984 - RNA, 19 nt, Artificial Sequence
  Description of Artificial Sequence: Synthetic oligonucleotide
  Sense strand starting at position 2935 of SEQ ID NO: 1881873
augaaaguagcauggauca

SEQ ID NO: 2077985 - RNA, 19 nt, Artificial Sequence
  Description of Artificial Sequence: Synthetic oligonucleotide
  Antisense strand to SEQ ID NO: 2077984
ugauccaugcuacuuucau

SEQ ID NO: 2077986 - RNA, 19 nt, Artificial Sequence
  Description of Artificial Sequence: Synthetic oligonucleotide
  Sense strand starting at position 2942 of SEQ ID NO: 1881873
uagcauggaucacuggaaa

SEQ ID NO: 2077987 - RNA, 19 nt, Artificial Sequence
  Description of Artificial Sequence: Synthetic oligonucleotide
  Antisense strand to SEQ ID NO: 2077986
uuuccagugauccaugcua

SEQ ID NO: 2077988 - RNA, 19 nt, Artificial Sequence
  Description of Artificial Sequence: Synthetic oligonucleotide
  Sense strand starting at position 3003 of SEQ ID NO: 1881873
cuaagugcuuuauugggau

SEQ ID NO: 2077989 - RNA, 19 nt, Artificial Sequence
  Description of Artificial Sequence: Synthetic oligonucleotide
  Antisense strand to SEQ ID NO: 2077988
aucccaauaaagcacuuag

SEQ ID NO: 2077990 - RNA, 19 nt, Artificial Sequence
  Description of Artificial Sequence: Synthetic oligonucleotide
  Sense strand starting at position 3074 of SEQ ID NO: 1881873
gauuaaaugcaucaguuag

SEQ ID NO: 2077991 - RNA, 19 nt, Artificial Sequence
  Description of Artificial Sequence: Synthetic oligonucleotide
  Antisense strand to SEQ ID NO: 2077990
cuaacugaugcauuuaauc

SEQ ID NO: 2077992 - RNA, 19 nt, Artificial Sequence
  Description of Artificial Sequence: Synthetic oligonucleotide
  Sense strand starting at position 3076 of SEQ ID NO: 1881873
uuaaaugcaucaguuagaa

SEQ ID NO: 2077993 - RNA, 19 nt, Artificial Sequence
  Description of Artificial Sequence: Synthetic oligonucleotide
  Antisense strand to SEQ ID NO: 2077992
uucuaacugaugcauuuaa

SEQ ID NO: 2077994 - RNA, 19 nt, Artificial Sequence
  Description of Artificial Sequence: Synthetic oligonucleotide
  Sense strand starting at position 3145 of SEQ ID NO: 1881873
guuaguuaaauacauggua

SEQ ID NO: 2077995 - RNA, 19 nt, Artificial Sequence
  Description of Artificial Sequence: Synthetic oligonucleotide
  Antisense strand to SEQ ID NO: 2077994
uaccauguauuuaacuaac

SEQ ID NO: 2077996 - RNA, 19 nt, Artificial Sequence
  Description of Artificial Sequence: Synthetic oligonucleotide
  Sense strand starting at position 3148 of SEQ ID NO: 1881873
aguuaaauacaugguagaa

SEQ ID NO: 2077997 - RNA, 19 nt, Artificial Sequence
  Description of Artificial Sequence: Synthetic oligonucleotide
  Antisense strand to SEQ ID NO: 2077996
uucuaccauguauuuaacu

SEQ ID NO: 2077998 - RNA, 19 nt, Artificial Sequence
  Description of Artificial Sequence: Synthetic oligonucleotide
  Sense strand starting at position 3256 of SEQ ID NO: 1881873
gccaacucaugguuuaaga

SEQ ID NO: 2077999 - RNA, 19 nt, Artificial Sequence
  Description of Artificial Sequence: Synthetic oligonucleotide
  Antisense strand to SEQ ID NO: 2077998
ucuuaaaccaugaguuggc

SEQ ID NO: 2078000 - RNA, 19 nt, Artificial Sequence
  Description of Artificial Sequence: Synthetic oligonucleotide
  Sense strand starting at position 3270 of SEQ ID NO: 1881873
uaagauggcuccuugagca

SEQ ID NO: 2078001 - RNA, 19 nt, Artificial Sequence
  Description of Artificial Sequence: Synthetic oligonucleotide
  Antisense strand to SEQ ID NO: 2078000
ugcucaaggagccaucuua

SEQ ID NO: 2078002 - RNA, 19 nt, Artificial Sequence
  Description of Artificial Sequence: Synthetic oligonucleotide
  Sense strand starting at position 3344 of SEQ ID NO: 1881873
augugcucucuccauugaa

SEQ ID NO: 2078003 - RNA, 19 nt, Artificial Sequence
  Description of Artificial Sequence: Synthetic oligonucleotide
  Antisense strand to SEQ ID NO: 2078002
uucaauggagagagcacau

SEQ ID NO: 2078004 - RNA, 19 nt, Artificial Sequence
  Description of Artificial Sequence: Synthetic oligonucleotide
  Sense strand starting at position 3347 of SEQ ID NO: 1881873
ugcucucuccauugaaaga

SEQ ID NO: 2078005 - RNA, 19 nt, Artificial Sequence
  Description of Artificial Sequence: Synthetic oligonucleotide
  Antisense strand to SEQ ID NO: 2078004
ucuuucaauggagagagca

SEQ ID NO: 2078006 - RNA, 19 nt, Artificial Sequence
  Description of Artificial Sequence: Synthetic oligonucleotide
  Sense strand starting at position 3568 of SEQ ID NO: 1881873
auuuaaaugugucaaugag

SEQ ID NO: 2078007 - RNA, 19 nt, Artificial Sequence
  Description of Artificial Sequence: Synthetic oligonucleotide
  Antisense strand to SEQ ID NO: 2078006
cucauugacacauuuaaau

SEQ ID NO: 2078008 - RNA, 19 nt, Artificial Sequence
  Description of Artificial Sequence: Synthetic oligonucleotide
  Sense strand starting at position 3810 of SEQ ID NO: 1881873
agaagacacuuucuggcaa

SEQ ID NO: 2078009 - RNA, 19 nt, Artificial Sequence
  Description of Artificial Sequence: Synthetic oligonucleotide
  Antisense strand to SEQ ID NO: 2078008
uugccagaaagugucuucu

SEQ ID NO: 2078010 - RNA, 19 nt, Artificial Sequence
  Description of Artificial Sequence: Synthetic oligonucleotide
  Sense strand starting at position 3865 of SEQ ID NO: 1881873
cuagaaguaacugguaaug

SEQ ID NO: 2078011 - RNA, 19 nt, Artificial Sequence
  Description of Artificial Sequence: Synthetic oligonucleotide
  Antisense strand to SEQ ID NO: 2078010
cauuaccaguuacuucuag

SEQ ID NO: 2078012 - RNA, 19 nt, Artificial Sequence
  Description of Artificial Sequence: Synthetic oligonucleotide
  Sense strand starting at position 2026 of SEQ ID NO: 1881874
gacagucccuuugaagagu

SEQ ID NO: 2078013 - RNA, 19 nt, Artificial Sequence
  Description of Artificial Sequence: Synthetic oligonucleotide
  Antisense strand to SEQ ID NO: 2078012
acucuucaaagggacuguc

SEQ ID NO: 2078014 - RNA, 19 nt, Artificial Sequence
  Description of Artificial Sequence: Synthetic oligonucleotide
  Sense strand starting at position 2081 of SEQ ID NO: 1881874
ucagaaagccagcguagau

SEQ ID NO: 2078015 - RNA, 19 nt, Artificial Sequence
  Description of Artificial Sequence: Synthetic oligonucleotide
  Antisense strand to SEQ ID NO: 2078014
aucuacgcuggcuuucuga

SEQ ID NO: 2078016 - RNA, 19 nt, Artificial Sequence
  Description of Artificial Sequence: Synthetic oligonucleotide
  Sense strand starting at position 2101 of SEQ ID NO: 1881874
gggcgaaauucagccuaug

SEQ ID NO: 2078017 - RNA, 19 nt, Artificial Sequence
  Description of Artificial Sequence: Synthetic oligonucleotide
  Antisense strand to SEQ ID NO: 2078016
cauaggcugaauuucgccc

SEQ ID NO: 2078018 - RNA, 19 nt, Artificial Sequence
  Description of Artificial Sequence: Synthetic oligonucleotide
  Sense strand starting at position 2174 of SEQ ID NO: 1881874
cagugauaccaauguggcu

SEQ ID NO: 2078019 - RNA, 19 nt, Artificial Sequence
  Description of Artificial Sequence: Synthetic oligonucleotide
  Antisense strand to SEQ ID NO: 2078018
agccacauugguaucacug

SEQ ID NO: 2078020 - RNA, 19 nt, Artificial Sequence
  Description of Artificial Sequence: Synthetic oligonucleotide
  Sense strand starting at position 2285 of SEQ ID NO: 1881874
gggcccuucugaucacuuu

SEQ ID NO: 2078021 - RNA, 19 nt, Artificial Sequence
  Description of Artificial Sequence: Synthetic oligonucleotide
  Antisense strand to SEQ ID NO: 2078020
aaagugaucagaagggccc

SEQ ID NO: 2078022 - RNA, 19 nt, Artificial Sequence
  Description of Artificial Sequence: Synthetic oligonucleotide
  Sense strand starting at position 2327 of SEQ ID NO: 1881874
gccacaucauugucugaga

SEQ ID NO: 2078023 - RNA, 19 nt, Artificial Sequence
  Description of Artificial Sequence: Synthetic oligonucleotide
  Antisense strand to SEQ ID NO: 2078022
ucucagacaaugauguggc

SEQ ID NO: 2078024 - RNA, 19 nt, Artificial Sequence
  Description of Artificial Sequence: Synthetic oligonucleotide
  Sense strand starting at position 2328 of SEQ ID NO: 1881874
ccacaucauugucugagaa

SEQ ID NO: 2078025 - RNA, 19 nt, Artificial Sequence
  Description of Artificial Sequence: Synthetic oligonucleotide
  Antisense strand to SEQ ID NO: 2078024
uucucagacaaugaugugg

SEQ ID NO: 2078026 - RNA, 19 nt, Artificial Sequence
  Description of Artificial Sequence: Synthetic oligonucleotide
  Sense strand starting at position 2394 of SEQ ID NO: 1881874
acaguuggucaagagagua

SEQ ID NO: 2078027 - RNA, 19 nt, Artificial Sequence
  Description of Artificial Sequence: Synthetic oligonucleotide
  Antisense strand to SEQ ID NO: 2078026
uacucucuugaccaacugu

SEQ ID NO: 2078028 - RNA, 19 nt, Artificial Sequence
  Description of Artificial Sequence: Synthetic oligonucleotide
  Sense strand starting at position 2597 of SEQ ID NO: 1881874
uggcaaauauaaugaaaga

SEQ ID NO: 2078029 - RNA, 19 nt, Artificial Sequence
  Description of Artificial Sequence: Synthetic oligonucleotide
  Antisense strand to SEQ ID NO: 2078028
ucuuucauuauauuugcca

SEQ ID NO: 2078030 - RNA, 19 nt, Artificial Sequence
  Description of Artificial Sequence: Synthetic oligonucleotide
  Sense strand starting at position 2630 of SEQ ID NO: 1881874
aaaugauggucauuacuga

SEQ ID NO: 2078031 - RNA, 19 nt, Artificial Sequence
  Description of Artificial Sequence: Synthetic oligonucleotide
  Antisense strand to SEQ ID NO: 2078030
ucaguaaugaccaucauuu

SEQ ID NO: 2078032 - RNA, 19 nt, Artificial Sequence
  Description of Artificial Sequence: Synthetic oligonucleotide
  Sense strand starting at position 2634 of SEQ ID NO: 1881874
gauggucauuacugagcau

SEQ ID NO: 2078033 - RNA, 19 nt, Artificial Sequence
  Description of Artificial Sequence: Synthetic oligonucleotide
  Antisense strand to SEQ ID NO: 2078032
augcucaguaaugaccauc

SEQ ID NO: 2078034 - RNA, 19 nt, Artificial Sequence
  Description of Artificial Sequence: Synthetic oligonucleotide
  Sense strand starting at position 2638 of SEQ ID NO: 1881874
gucauuacugagcauguca

SEQ ID NO: 2078035 - RNA, 19 nt, Artificial Sequence
  Description of Artificial Sequence: Synthetic oligonucleotide
  Antisense strand to SEQ ID NO: 2078034
ugacaugcucaguaaugac

SEQ ID NO: 2078036 - RNA, 19 nt, Artificial Sequence
  Description of Artificial Sequence: Synthetic oligonucleotide
  Sense strand starting at position 2643 of SEQ ID NO: 1881874
uacugagcaugucauguaa

SEQ ID NO: 2078037 - RNA, 19 nt, Artificial Sequence
  Description of Artificial Sequence: Synthetic oligonucleotide
  Antisense strand to SEQ ID NO: 2078036
uuacaugacaugcucagua

SEQ ID NO: 2078038 - RNA, 19 nt, Artificial Sequence
  Description of Artificial Sequence: Synthetic oligonucleotide
  Sense strand starting at position 2652 of SEQ ID NO: 1881874
ugucauguaagcugaggaa

SEQ ID NO: 2078039 - RNA, 19 nt, Artificial Sequence
  Description of Artificial Sequence: Synthetic oligonucleotide
  Antisense strand to SEQ ID NO: 2078038
uuccucagcuuacaugaca

SEQ ID NO: 2078040 - RNA, 19 nt, Artificial Sequence
  Description of Artificial Sequence: Synthetic oligonucleotide
  Sense strand starting at position 2757 of SEQ ID NO: 1881874
aggacaauguccuugccuu

SEQ ID NO: 2078041 - RNA, 19 nt, Artificial Sequence
  Description of Artificial Sequence: Synthetic oligonucleotide
  Antisense strand to SEQ ID NO: 2078040
aaggcaaggacauuguccu

SEQ ID NO: 2078042 - RNA, 19 nt, Artificial Sequence
  Description of Artificial Sequence: Synthetic oligonucleotide
  Sense strand starting at position 2776 of SEQ ID NO: 1881874
ggccuguuggugugucgau

SEQ ID NO: 2078043 - RNA, 19 nt, Artificial Sequence
  Description of Artificial Sequence: Synthetic oligonucleotide
  Antisense strand to SEQ ID NO: 2078042
aucgacacaccaacaggcc

SEQ ID NO: 2078044 - RNA, 19 nt, Artificial Sequence
  Description of Artificial Sequence: Synthetic oligonucleotide
  Sense strand starting at position 2777 of SEQ ID NO: 1881874
gccuguuggugugucgaua

SEQ ID NO: 2078045 - RNA, 19 nt, Artificial Sequence
  Description of Artificial Sequence: Synthetic oligonucleotide
  Antisense strand to SEQ ID NO: 2078044
uaucgacacaccaacaggc

SEQ ID NO: 2078046 - RNA, 19 nt, Artificial Sequence
  Description of Artificial Sequence: Synthetic oligonucleotide
  Sense strand starting at position 2843 of SEQ ID NO: 1881874
cugagaaccugaucccuga

SEQ ID NO: 2078047 - RNA, 19 nt, Artificial Sequence
  Description of Artificial Sequence: Synthetic oligonucleotide
  Antisense strand to SEQ ID NO: 2078046
ucagggaucagguucucag

SEQ ID NO: 2078048 - RNA, 19 nt, Artificial Sequence
  Description of Artificial Sequence: Synthetic oligonucleotide
  Sense strand starting at position 2862 of SEQ ID NO: 1881874
gaggccauuuauuguaaga

SEQ ID NO: 2078049 - RNA, 19 nt, Artificial Sequence
  Description of Artificial Sequence: Synthetic oligonucleotide
  Antisense strand to SEQ ID NO: 2078048
ucuuacaauaaauggccuc

SEQ ID NO: 2078050 - RNA, 19 nt, Artificial Sequence
  Description of Artificial Sequence: Synthetic oligonucleotide
  Sense strand starting at position 2864 of SEQ ID NO: 1881874
ggccauuuauuguaagaac

SEQ ID NO: 2078051 - RNA, 19 nt, Artificial Sequence
  Description of Artificial Sequence: Synthetic oligonucleotide
  Antisense strand to SEQ ID NO: 2078050
guucuuacaauaaauggcc

SEQ ID NO: 2078052 - RNA, 19 nt, Artificial Sequence
  Description of Artificial Sequence: Synthetic oligonucleotide
  Sense strand starting at position 2952 of SEQ ID NO: 1881874
ggagcugucccagagguga

SEQ ID NO: 2078053 - RNA, 19 nt, Artificial Sequence
  Description of Artificial Sequence: Synthetic oligonucleotide
  Antisense strand to SEQ ID NO: 2078052
ucaccucugggacagcucc

SEQ ID NO: 2078054 - RNA, 19 nt, Artificial Sequence
  Description of Artificial Sequence: Synthetic oligonucleotide
  Sense strand starting at position 3000 of SEQ ID NO: 1881874
uugauaaugugagauucca

SEQ ID NO: 2078055 - RNA, 19 nt, Artificial Sequence
  Description of Artificial Sequence: Synthetic oligonucleotide
  Antisense strand to SEQ ID NO: 2078054
uggaaucucacauuaucaa

SEQ ID NO: 2078056 - RNA, 19 nt, Artificial Sequence
  Description of Artificial Sequence: Synthetic oligonucleotide
  Sense strand starting at position 3363 of SEQ ID NO: 1881874
ugaugagucuucuuugguc

SEQ ID NO: 2078057 - RNA, 19 nt, Artificial Sequence
  Description of Artificial Sequence: Synthetic oligonucleotide
  Antisense strand to SEQ ID NO: 2078056
gaccaaagaagacucauca

SEQ ID NO: 2078058 - RNA, 19 nt, Artificial Sequence
  Description of Artificial Sequence: Synthetic oligonucleotide
  Sense strand starting at position 3420 of SEQ ID NO: 1881874
ggaagacucugccaugaca

SEQ ID NO: 2078059 - RNA, 19 nt, Artificial Sequence
  Description of Artificial Sequence: Synthetic oligonucleotide
  Antisense strand to SEQ ID NO: 2078058
ugucauggcagagucuucc

SEQ ID NO: 2078060 - RNA, 19 nt, Artificial Sequence
  Description of Artificial Sequence: Synthetic oligonucleotide
  Sense strand starting at position 3437 of SEQ ID NO: 1881874
cagacaugccuccgacaga

SEQ ID NO: 2078061 - RNA, 19 nt, Artificial Sequence
  Description of Artificial Sequence: Synthetic oligonucleotide
  Antisense strand to SEQ ID NO: 2078060
ucugucggaggcaugucug

SEQ ID NO: 2078062 - RNA, 19 nt, Artificial Sequence
  Description of Artificial Sequence: Synthetic oligonucleotide
  Sense strand starting at position 3459 of SEQ ID NO: 1881874
ggugacagacaucguggaa

SEQ ID NO: 2078063 - RNA, 19 nt, Artificial Sequence
  Description of Artificial Sequence: Synthetic oligonucleotide
  Antisense strand to SEQ ID NO: 2078062
uuccacgaugucugucacc

SEQ ID NO: 2078064 - RNA, 19 nt, Artificial Sequence
  Description of Artificial Sequence: Synthetic oligonucleotide
  Sense strand starting at position 3462 of SEQ ID NO: 1881874
gacagacaucguggaaaug

SEQ ID NO: 2078065 - RNA, 19 nt, Artificial Sequence
  Description of Artificial Sequence: Synthetic oligonucleotide
  Antisense strand to SEQ ID NO: 2078064
cauuuccacgaugucuguc

SEQ ID NO: 2078066 - RNA, 19 nt, Artificial Sequence
  Description of Artificial Sequence: Synthetic oligonucleotide
  Sense strand starting at position 3539 of SEQ ID NO: 1881874
gaugacacuucggcaucau

SEQ ID NO: 2078067 - RNA, 19 nt, Artificial Sequence
  Description of Artificial Sequence: Synthetic oligonucleotide
  Antisense strand to SEQ ID NO: 2078066
augaugccgaagugucauc

SEQ ID NO: 2078068 - RNA, 19 nt, Artificial Sequence
  Description of Artificial Sequence: Synthetic oligonucleotide
  Sense strand starting at position 3625 of SEQ ID NO: 1881874
auuuaaagguuucguguca

SEQ ID NO: 2078069 - RNA, 19 nt, Artificial Sequence
  Description of Artificial Sequence: Synthetic oligonucleotide
  Antisense strand to SEQ ID NO: 2078068
ugacacgaaaccuuuaaau

SEQ ID NO: 2078070 - RNA, 19 nt, Artificial Sequence
  Description of Artificial Sequence: Synthetic oligonucleotide
  Sense strand starting at position 3626 of SEQ ID NO: 1881874
uuuaaagguuucgugucaa

SEQ ID NO: 2078071 - RNA, 19 nt, Artificial Sequence
  Description of Artificial Sequence: Synthetic oligonucleotide
  Antisense strand to SEQ ID NO: 2078070
uugacacgaaaccuuuaaa

SEQ ID NO: 2078072 - RNA, 19 nt, Artificial Sequence
  Description of Artificial Sequence: Synthetic oligonucleotide
  Sense strand starting at position 3636 of SEQ ID NO: 1881874
ucgugucaauucucuagca

SEQ ID NO: 2078073 - RNA, 19 nt, Artificial Sequence
  Description of Artificial Sequence: Synthetic oligonucleotide
  Antisense strand to SEQ ID NO: 2078072
ugcuagagaauugacacga

SEQ ID NO: 2078074 - RNA, 19 nt, Artificial Sequence
  Description of Artificial Sequence: Synthetic oligonucleotide
  Sense strand starting at position 3637 of SEQ ID NO: 1881874
cgugucaauucucuagcau

SEQ ID NO: 2078075 - RNA, 19 nt, Artificial Sequence
  Description of Artificial Sequence: Synthetic oligonucleotide
  Antisense strand to SEQ ID NO: 2078074
augcuagagaauugacacg

SEQ ID NO: 2078076 - RNA, 19 nt, Artificial Sequence
  Description of Artificial Sequence: Synthetic oligonucleotide
  Sense strand starting at position 3638 of SEQ ID NO: 1881874
gugucaauucucuagcaua

SEQ ID NO: 2078077 - RNA, 19 nt, Artificial Sequence
  Description of Artificial Sequence: Synthetic oligonucleotide
  Antisense strand to SEQ ID NO: 2078076
uaugcuagagaauugacac

SEQ ID NO: 2078078 - RNA, 19 nt, Artificial Sequence
  Description of Artificial Sequence: Synthetic oligonucleotide
  Sense strand starting at position 3681 of SEQ ID NO: 1881874
ggaccuagugaauggucuu

SEQ ID NO: 2078079 - RNA, 19 nt, Artificial Sequence
  Description of Artificial Sequence: Synthetic oligonucleotide
  Antisense strand to SEQ ID NO: 2078078
aagaccauucacuaggucc

SEQ ID NO: 2078080 - RNA, 19 nt, Artificial Sequence
  Description of Artificial Sequence: Synthetic oligonucleotide
  Sense strand starting at position 3684 of SEQ ID NO: 1881874
ccuagugaauggucuuuac

SEQ ID NO: 2078081 - RNA, 19 nt, Artificial Sequence
  Description of Artificial Sequence: Synthetic oligonucleotide
  Antisense strand to SEQ ID NO: 2078080
guaaagaccauucacuagg

SEQ ID NO: 2078082 - RNA, 19 nt, Artificial Sequence
  Description of Artificial Sequence: Synthetic oligonucleotide
  Sense strand starting at position 3687 of SEQ ID NO: 1881874
agugaauggucuuuacugu

SEQ ID NO: 2078083 - RNA, 19 nt, Artificial Sequence
  Description of Artificial Sequence: Synthetic oligonucleotide
  Antisense strand to SEQ ID NO: 2078082
acaguaaagaccauucacu

SEQ ID NO: 2078084 - RNA, 19 nt, Artificial Sequence
  Description of Artificial Sequence: Synthetic oligonucleotide
  Sense strand starting at position 3688 of SEQ ID NO: 1881874
gugaauggucuuuacuguu

SEQ ID NO: 2078085 - RNA, 19 nt, Artificial Sequence
  Description of Artificial Sequence: Synthetic oligonucleotide
  Antisense strand to SEQ ID NO: 2078084
aacaguaaagaccauucac

SEQ ID NO: 2078086 - RNA, 19 nt, Artificial Sequence
  Description of Artificial Sequence: Synthetic oligonucleotide
  Sense strand starting at position 3696 of SEQ ID NO: 1881874
ucuuuacuguugcuaugua

SEQ ID NO: 2078087 - RNA, 19 nt, Artificial Sequence
  Description of Artificial Sequence: Synthetic oligonucleotide
  Antisense strand to SEQ ID NO: 2078086
uacauagcaacaguaaaga

SEQ ID NO: 2078088 - RNA, 19 nt, Artificial Sequence
  Description of Artificial Sequence: Synthetic oligonucleotide
  Sense strand starting at position 3806 of SEQ ID NO: 1881874
uggacaaucuccucuugga

SEQ ID NO: 2078089 - RNA, 19 nt, Artificial Sequence
  Description of Artificial Sequence: Synthetic oligonucleotide
  Antisense strand to SEQ ID NO: 2078088
uccaagaggagauugucca

SEQ ID NO: 2078090 - RNA, 19 nt, Artificial Sequence
  Description of Artificial Sequence: Synthetic oligonucleotide
  Sense strand starting at position 3939 of SEQ ID NO: 1881874
uugauuugcuucccaguca

SEQ ID NO: 2078091 - RNA, 19 nt, Artificial Sequence
  Description of Artificial Sequence: Synthetic oligonucleotide
  Antisense strand to SEQ ID NO: 2078090
ugacugggaagcaaaucaa

SEQ ID NO: 2078092 - RNA, 19 nt, Artificial Sequence
  Description of Artificial Sequence: Synthetic oligonucleotide
  Sense strand starting at position 2759 of SEQ ID NO: 1881875
ugggcaccuucuuauacua

SEQ ID NO: 2078093 - RNA, 19 nt, Artificial Sequence
  Description of Artificial Sequence: Synthetic oligonucleotide
  Antisense strand to SEQ ID NO: 2078092
uaguauaagaaggugccca

SEQ ID NO: 2078094 - RNA, 19 nt, Artificial Sequence
  Description of Artificial Sequence: Synthetic oligonucleotide
  Sense strand starting at position 3556 of SEQ ID NO: 1881875
guauguaucccacagcaua

SEQ ID NO: 2078095 - RNA, 19 nt, Artificial Sequence
  Description of Artificial Sequence: Synthetic oligonucleotide
  Antisense strand to SEQ ID NO: 2078094
uaugcugugggauacauac

SEQ ID NO: 2078096 - RNA, 19 nt, Artificial Sequence
  Description of Artificial Sequence: Synthetic oligonucleotide
  Sense strand starting at position 2759 of SEQ ID NO: 1881876
ugggcaccuucuuauacua

SEQ ID NO: 2078097 - RNA, 19 nt, Artificial Sequence
  Description of Artificial Sequence: Synthetic oligonucleotide
  Antisense strand to SEQ ID NO: 2078096
uaguauaagaaggugccca

SEQ ID NO: 2078098 - RNA, 19 nt, Artificial Sequence
  Description of Artificial Sequence: Synthetic oligonucleotide
  Sense strand starting at position 3556 of SEQ ID NO: 1881876
guauguaucccacagcaua

SEQ ID NO: 2078099 - RNA, 19 nt, Artificial Sequence
  Description of Artificial Sequence: Synthetic oligonucleotide
  Antisense strand to SEQ ID NO: 2078098
uaugcugugggauacauac

SEQ ID NO: 2078100 - RNA, 19 nt, Artificial Sequence
  Description of Artificial Sequence: Synthetic oligonucleotide
  Sense strand starting at position 188 of SEQ ID NO: 1881877
gaaagaaccugagacguga

SEQ ID NO: 2078101 - RNA, 19 nt, Artificial Sequence
  Description of Artificial Sequence: Synthetic oligonucleotide
  Antisense strand to SEQ ID NO: 2078100
ucacgucucagguucuuuc

SEQ ID NO: 2078102 - RNA, 19 nt, Artificial Sequence
  Description of Artificial Sequence: Synthetic oligonucleotide
  Sense strand starting at position 507 of SEQ ID NO: 1881877
auccgaaguuuccucggau

SEQ ID NO: 2078103 - RNA, 19 nt, Artificial Sequence
  Description of Artificial Sequence: Synthetic oligonucleotide
  Antisense strand to SEQ ID NO: 2078102
auccgaggaaacuucggau

SEQ ID NO: 2078104 - RNA, 19 nt, Artificial Sequence
  Description of Artificial Sequence: Synthetic oligonucleotide
  Sense strand starting at position 508 of SEQ ID NO: 1881877
uccgaaguuuccucggauu

SEQ ID NO: 2078105 - RNA, 19 nt, Artificial Sequence
  Description of Artificial Sequence: Synthetic oligonucleotide
  Antisense strand to SEQ ID NO: 2078104
aauccgaggaaacuucgga

SEQ ID NO: 2078106 - RNA, 19 nt, Artificial Sequence
  Description of Artificial Sequence: Synthetic oligonucleotide
  Sense strand starting at position 510 of SEQ ID NO: 1881877
cgaaguuuccucggauuaa

SEQ ID NO: 2078107 - RNA, 19 nt, Artificial Sequence
  Description of Artificial Sequence: Synthetic oligonucleotide
  Antisense strand to SEQ ID NO: 2078106
uuaauccgaggaaacuucg

SEQ ID NO: 2078108 - RNA, 19 nt, Artificial Sequence
  Description of Artificial Sequence: Synthetic oligonucleotide
  Sense strand starting at position 514 of SEQ ID NO: 1881877
guuuccucggauuaagaag

SEQ ID NO: 2078109 - RNA, 19 nt, Artificial Sequence
  Description of Artificial Sequence: Synthetic oligonucleotide
  Antisense strand to SEQ ID NO: 2078108
cuucuuaauccgaggaaac

SEQ ID NO: 2078110 - RNA, 19 nt, Artificial Sequence
  Description of Artificial Sequence: Synthetic oligonucleotide
  Sense strand starting at position 531 of SEQ ID NO: 1881877
agaaacagccaugguuaaa

SEQ ID NO: 2078111 - RNA, 19 nt, Artificial Sequence
  Description of Artificial Sequence: Synthetic oligonucleotide
  Antisense strand to SEQ ID NO: 2078110
uuuaaccauggcuguuucu

SEQ ID NO: 2078112 - RNA, 19 nt, Artificial Sequence
  Description of Artificial Sequence: Synthetic oligonucleotide
  Sense strand starting at position 557 of SEQ ID NO: 1881877
uugcgacaccaacaauuau

SEQ ID NO: 2078113 - RNA, 19 nt, Artificial Sequence
  Description of Artificial Sequence: Synthetic oligonucleotide
  Antisense strand to SEQ ID NO: 2078112
auaauuguuggugucgcaa

SEQ ID NO: 2078114 - RNA, 19 nt, Artificial Sequence
  Description of Artificial Sequence: Synthetic oligonucleotide
  Sense strand starting at position 567 of SEQ ID NO: 1881877
aacaauuaucuguagccga

SEQ ID NO: 2078115 - RNA, 19 nt, Artificial Sequence
  Description of Artificial Sequence: Synthetic oligonucleotide
  Antisense strand to SEQ ID NO: 2078114
ucggcuacagauaauuguu

SEQ ID NO: 2078116 - RNA, 19 nt, Artificial Sequence
  Description of Artificial Sequence: Synthetic oligonucleotide
  Sense strand starting at position 642 of SEQ ID NO: 1881877
ugcgaauucuaacuuggua

SEQ ID NO: 2078117 - RNA, 19 nt, Artificial Sequence
  Description of Artificial Sequence: Synthetic oligonucleotide
  Antisense strand to SEQ ID NO: 2078116
uaccaaguuagaauucgca

SEQ ID NO: 2078118 - RNA, 19 nt, Artificial Sequence
  Description of Artificial Sequence: Synthetic oligonucleotide
  Sense strand starting at position 644 of SEQ ID NO: 1881877
cgaauucuaacuugguaug

SEQ ID NO: 2078119 - RNA, 19 nt, Artificial Sequence
  Description of Artificial Sequence: Synthetic oligonucleotide
  Antisense strand to SEQ ID NO: 2078118
cauaccaaguuagaauucg

SEQ ID NO: 2078120 - RNA, 19 nt, Artificial Sequence
  Description of Artificial Sequence: Synthetic oligonucleotide
  Sense strand starting at position 645 of SEQ ID NO: 1881877
gaauucuaacuugguauga

SEQ ID NO: 2078121 - RNA, 19 nt, Artificial Sequence
  Description of Artificial Sequence: Synthetic oligonucleotide
  Antisense strand to SEQ ID NO: 2078120
ucauaccaaguuagaauuc

SEQ ID NO: 2078122 - RNA, 19 nt, Artificial Sequence
  Description of Artificial Sequence: Synthetic oligonucleotide
  Sense strand starting at position 650 of SEQ ID NO: 1881877
cuaacuugguaugauuuaa

SEQ ID NO: 2078123 - RNA, 19 nt, Artificial Sequence
  Description of Artificial Sequence: Synthetic oligonucleotide
  Antisense strand to SEQ ID NO: 2078122
uuaaaucauaccaaguuag

SEQ ID NO: 2078124 - RNA, 19 nt, Artificial Sequence
  Description of Artificial Sequence: Synthetic oligonucleotide
  Sense strand starting at position 779 of SEQ ID NO: 1881877
ggaauuugcuacuacuaaa

SEQ ID NO: 2078125 - RNA, 19 nt, Artificial Sequence
  Description of Artificial Sequence: Synthetic oligonucleotide
  Antisense strand to SEQ ID NO: 2078124
uuuaguaguagcaaauucc

SEQ ID NO: 2078126 - RNA, 19 nt, Artificial Sequence
  Description of Artificial Sequence: Synthetic oligonucleotide
  Sense strand starting at position 799 of SEQ ID NO: 1881877
uuauguaggcaugguuaaa

SEQ ID NO: 2078127 - RNA, 19 nt, Artificial Sequence
  Description of Artificial Sequence: Synthetic oligonucleotide
  Antisense strand to SEQ ID NO: 2078126
uuuaaccaugccuacauaa

SEQ ID NO: 2078128 - RNA, 19 nt, Artificial Sequence
  Description of Artificial Sequence: Synthetic oligonucleotide
  Sense strand starting at position 810 of SEQ ID NO: 1881877
ugguuaaagccagaauugu

SEQ ID NO: 2078129 - RNA, 19 nt, Artificial Sequence
  Description of Artificial Sequence: Synthetic oligonucleotide
  Antisense strand to SEQ ID NO: 2078128
acaauucuggcuuuaacca

SEQ ID NO: 2078130 - RNA, 19 nt, Artificial Sequence
  Description of Artificial Sequence: Synthetic oligonucleotide
  Sense strand starting at position 849 of SEQ ID NO: 1881877
uggaauaacucucaacuug

SEQ ID NO: 2078131 - RNA, 19 nt, Artificial Sequence
  Description of Artificial Sequence: Synthetic oligonucleotide
  Antisense strand to SEQ ID NO: 2078130
caaguugagaguuauucca

SEQ ID NO: 2078132 - RNA, 19 nt, Artificial Sequence
  Description of Artificial Sequence: Synthetic oligonucleotide
  Sense strand starting at position 886 of SEQ ID NO: 1881877
aaacucugacuuggucaga

SEQ ID NO: 2078133 - RNA, 19 nt, Artificial Sequence
  Description of Artificial Sequence: Synthetic oligonucleotide
  Antisense strand to SEQ ID NO: 2078132
ucugaccaagucagaguuu

SEQ ID NO: 2078134 - RNA, 19 nt, Artificial Sequence
  Description of Artificial Sequence: Synthetic oligonucleotide
  Sense strand starting at position 889 of SEQ ID NO: 1881877
cucugacuuggucagacua

SEQ ID NO: 2078135 - RNA, 19 nt, Artificial Sequence
  Description of Artificial Sequence: Synthetic oligonucleotide
  Antisense strand to SEQ ID NO: 2078134
uagucugaccaagucagag

SEQ ID NO: 2078136 - RNA, 19 nt, Artificial Sequence
  Description of Artificial Sequence: Synthetic oligonucleotide
  Sense strand starting at position 897 of SEQ ID NO: 1881877
uggucagacuaagaaauca

SEQ ID NO: 2078137 - RNA, 19 nt, Artificial Sequence
  Description of Artificial Sequence: Synthetic oligonucleotide
  Antisense strand to SEQ ID NO: 2078136
ugauuucuuagucugacca

SEQ ID NO: 2078138 - RNA, 19 nt, Artificial Sequence
  Description of Artificial Sequence: Synthetic oligonucleotide
  Sense strand starting at position 944 of SEQ ID NO: 1881877
gcgaaauccugucucuagg

SEQ ID NO: 2078139 - RNA, 19 nt, Artificial Sequence
  Description of Artificial Sequence: Synthetic oligonucleotide
  Antisense strand to SEQ ID NO: 2078138
ccuagagacaggauuucgc

SEQ ID NO: 2078140 - RNA, 19 nt, Artificial Sequence
  Description of Artificial Sequence: Synthetic oligonucleotide
  Sense strand starting at position 946 of SEQ ID NO: 1881877
gaaauccugucucuaggaa

SEQ ID NO: 2078141 - RNA, 19 nt, Artificial Sequence
  Description of Artificial Sequence: Synthetic oligonucleotide
  Antisense strand to SEQ ID NO: 2078140
uuccuagagacaggauuuc

SEQ ID NO: 2078142 - RNA, 19 nt, Artificial Sequence
  Description of Artificial Sequence: Synthetic oligonucleotide
  Sense strand starting at position 1202 of SEQ ID NO: 1881877
gcuaaacagugacuuccua

SEQ ID NO: 2078143 - RNA, 19 nt, Artificial Sequence
  Description of Artificial Sequence: Synthetic oligonucleotide
  Antisense strand to SEQ ID NO: 2078142
uaggaagucacuguuuagc

SEQ ID NO: 2078144 - RNA, 19 nt, Artificial Sequence
  Description of Artificial Sequence: Synthetic oligonucleotide
  Sense strand starting at position 1209 of SEQ ID NO: 1881877
agugacuuccuaggaccaa

SEQ ID NO: 2078145 - RNA, 19 nt, Artificial Sequence
  Description of Artificial Sequence: Synthetic oligonucleotide
  Antisense strand to SEQ ID NO: 2078144
uugguccuaggaagucacu

SEQ ID NO: 2078146 - RNA, 19 nt, Artificial Sequence
  Description of Artificial Sequence: Synthetic oligonucleotide
  Sense strand starting at position 1265 of SEQ ID NO: 1881877
ggacuugcuuaggcugaga

SEQ ID NO: 2078147 - RNA, 19 nt, Artificial Sequence
  Description of Artificial Sequence: Synthetic oligonucleotide
  Antisense strand to SEQ ID NO: 2078146
ucucagccuaagcaagucc

SEQ ID NO: 2078148 - RNA, 19 nt, Artificial Sequence
  Description of Artificial Sequence: Synthetic oligonucleotide
  Sense strand starting at position 1267 of SEQ ID NO: 1881877
acuugcuuaggcugagaaa

SEQ ID NO: 2078149 - RNA, 19 nt, Artificial Sequence
  Description of Artificial Sequence: Synthetic oligonucleotide
  Antisense strand to SEQ ID NO: 2078148
uuucucagccuaagcaagu

SEQ ID NO: 2078150 - RNA, 19 nt, Artificial Sequence
  Description of Artificial Sequence: Synthetic oligonucleotide
  Sense strand starting at position 1268 of SEQ ID NO: 1881877
cuugcuuaggcugagaaau

SEQ ID NO: 2078151 - RNA, 19 nt, Artificial Sequence
  Description of Artificial Sequence: Synthetic oligonucleotide
  Antisense strand to SEQ ID NO: 2078150
auuucucagccuaagcaag

SEQ ID NO: 2078152 - RNA, 19 nt, Artificial Sequence
  Description of Artificial Sequence: Synthetic oligonucleotide
  Sense strand starting at position 1296 of SEQ ID NO: 1881877
gcuaguuauuuggacaaga

SEQ ID NO: 2078153 - RNA, 19 nt, Artificial Sequence
  Description of Artificial Sequence: Synthetic oligonucleotide
  Antisense strand to SEQ ID NO: 2078152
ucuuguccaaauaacuagc

SEQ ID NO: 2078154 - RNA, 19 nt, Artificial Sequence
  Description of Artificial Sequence: Synthetic oligonucleotide
  Sense strand starting at position 1807 of SEQ ID NO: 1881877
agguucugcgaccgagaaa

SEQ ID NO: 2078155 - RNA, 19 nt, Artificial Sequence
  Description of Artificial Sequence: Synthetic oligonucleotide
  Antisense strand to SEQ ID NO: 2078154
uuucucggucgcagaaccu

SEQ ID NO: 2078156 - RNA, 19 nt, Artificial Sequence
  Description of Artificial Sequence: Synthetic oligonucleotide
  Sense strand starting at position 1808 of SEQ ID NO: 1881877
gguucugcgaccgagaaau

SEQ ID NO: 2078157 - RNA, 19 nt, Artificial Sequence
  Description of Artificial Sequence: Synthetic oligonucleotide
  Antisense strand to SEQ ID NO: 2078156
auuucucggucgcagaacc

SEQ ID NO: 2078158 - RNA, 19 nt, Artificial Sequence
  Description of Artificial Sequence: Synthetic oligonucleotide
  Sense strand starting at position 1818 of SEQ ID NO: 1881877
ccgagaaauucggugcaac

SEQ ID NO: 2078159 - RNA, 19 nt, Artificial Sequence
  Description of Artificial Sequence: Synthetic oligonucleotide
  Antisense strand to SEQ ID NO: 2078158
guugcaccgaauuucucgg

SEQ ID NO: 2078160 - RNA, 19 nt, Artificial Sequence
  Description of Artificial Sequence: Synthetic oligonucleotide
  Sense strand starting at position 1819 of SEQ ID NO: 1881877
cgagaaauucggugcaaca

SEQ ID NO: 2078161 - RNA, 19 nt, Artificial Sequence
  Description of Artificial Sequence: Synthetic oligonucleotide
  Antisense strand to SEQ ID NO: 2078160
uguugcaccgaauuucucg

SEQ ID NO: 2078162 - RNA, 19 nt, Artificial Sequence
  Description of Artificial Sequence: Synthetic oligonucleotide
  Sense strand starting at position 1833 of SEQ ID NO: 1881877
caacaagugcugugacaga

SEQ ID NO: 2078163 - RNA, 19 nt, Artificial Sequence
  Description of Artificial Sequence: Synthetic oligonucleotide
  Antisense strand to SEQ ID NO: 2078162
ucugucacagcacuuguug

SEQ ID NO: 2078164 - RNA, 19 nt, Artificial Sequence
  Description of Artificial Sequence: Synthetic oligonucleotide
  Sense strand starting at position 2893 of SEQ ID NO: 1881877
ugaugucuucuccaucuuu

SEQ ID NO: 2078165 - RNA, 19 nt, Artificial Sequence
  Description of Artificial Sequence: Synthetic oligonucleotide
  Antisense strand to SEQ ID NO: 2078164
aaagauggagaagacauca

SEQ ID NO: 2078166 - RNA, 19 nt, Artificial Sequence
  Description of Artificial Sequence: Synthetic oligonucleotide
  Sense strand starting at position 2911 of SEQ ID NO: 1881877
ugggaagugcaaugcaauu

SEQ ID NO: 2078167 - RNA, 19 nt, Artificial Sequence
  Description of Artificial Sequence: Synthetic oligonucleotide
  Antisense strand to SEQ ID NO: 2078166
aauugcauugcacuuccca

SEQ ID NO: 2078168 - RNA, 19 nt, Artificial Sequence
  Description of Artificial Sequence: Synthetic oligonucleotide
  Sense strand starting at position 3405 of SEQ ID NO: 1881877
gaaagagggcagugucaau

SEQ ID NO: 2078169 - RNA, 19 nt, Artificial Sequence
  Description of Artificial Sequence: Synthetic oligonucleotide
  Antisense strand to SEQ ID NO: 2078168
auugacacugcccucuuuc

SEQ ID NO: 2078170 - RNA, 19 nt, Artificial Sequence
  Description of Artificial Sequence: Synthetic oligonucleotide
  Sense strand starting at position 3613 of SEQ ID NO: 1881877
ggagcuuacuucccuaaag

SEQ ID NO: 2078171 - RNA, 19 nt, Artificial Sequence
  Description of Artificial Sequence: Synthetic oligonucleotide
  Antisense strand to SEQ ID NO: 2078170
cuuuagggaaguaagcucc

SEQ ID NO: 2078172 - RNA, 19 nt, Artificial Sequence
  Description of Artificial Sequence: Synthetic oligonucleotide
  Sense strand starting at position 3615 of SEQ ID NO: 1881877
agcuuacuucccuaaagga

SEQ ID NO: 2078173 - RNA, 19 nt, Artificial Sequence
  Description of Artificial Sequence: Synthetic oligonucleotide
  Antisense strand to SEQ ID NO: 2078172
uccuuuagggaaguaagcu

SEQ ID NO: 2078174 - RNA, 19 nt, Artificial Sequence
  Description of Artificial Sequence: Synthetic oligonucleotide
  Sense strand starting at position 3665 of SEQ ID NO: 1881877
gucugauuccaauauggug

SEQ ID NO: 2078175 - RNA, 19 nt, Artificial Sequence
  Description of Artificial Sequence: Synthetic oligonucleotide
  Antisense strand to SEQ ID NO: 2078174
caccauauuggaaucagac

SEQ ID NO: 2078176 - RNA, 19 nt, Artificial Sequence
  Description of Artificial Sequence: Synthetic oligonucleotide
  Sense strand starting at position 3721 of SEQ ID NO: 1881877
cuguauauuccucagcaag

SEQ ID NO: 2078177 - RNA, 19 nt, Artificial Sequence
  Description of Artificial Sequence: Synthetic oligonucleotide
  Antisense strand to SEQ ID NO: 2078176
cuugcugaggaauauacag

SEQ ID NO: 2078178 - RNA, 19 nt, Artificial Sequence
  Description of Artificial Sequence: Synthetic oligonucleotide
  Sense strand starting at position 3723 of SEQ ID NO: 1881877
guauauuccucagcaagag

SEQ ID NO: 2078179 - RNA, 19 nt, Artificial Sequence
  Description of Artificial Sequence: Synthetic oligonucleotide
  Antisense strand to SEQ ID NO: 2078178
cucuugcugaggaauauac

SEQ ID NO: 2078180 - RNA, 19 nt, Artificial Sequence
  Description of Artificial Sequence: Synthetic oligonucleotide
  Sense strand starting at position 129 of SEQ ID NO: 1881878
ugaagucacucuuacuaug

SEQ ID NO: 2078181 - RNA, 19 nt, Artificial Sequence
  Description of Artificial Sequence: Synthetic oligonucleotide
  Antisense strand to SEQ ID NO: 2078180
cauaguaagagugacuuca

SEQ ID NO: 2078182 - RNA, 19 nt, Artificial Sequence
  Description of Artificial Sequence: Synthetic oligonucleotide
  Sense strand starting at position 468 of SEQ ID NO: 1881878
guauccagggcauguuaga

SEQ ID NO: 2078183 - RNA, 19 nt, Artificial Sequence
  Description of Artificial Sequence: Synthetic oligonucleotide
  Antisense strand to SEQ ID NO: 2078182
ucuaacaugcccuggauac

SEQ ID NO: 2078184 - RNA, 19 nt, Artificial Sequence
  Description of Artificial Sequence: Synthetic oligonucleotide
  Sense strand starting at position 702 of SEQ ID NO: 1881878
ugcagaugcucugaaguua

SEQ ID NO: 2078185 - RNA, 19 nt, Artificial Sequence
  Description of Artificial Sequence: Synthetic oligonucleotide
  Antisense strand to SEQ ID NO: 2078184
uaacuucagagcaucugca

SEQ ID NO: 2078186 - RNA, 19 nt, Artificial Sequence
  Description of Artificial Sequence: Synthetic oligonucleotide
  Sense strand starting at position 710 of SEQ ID NO: 1881878
cucugaaguuaagaauuaa

SEQ ID NO: 2078187 - RNA, 19 nt, Artificial Sequence
  Description of Artificial Sequence: Synthetic oligonucleotide
  Antisense strand to SEQ ID NO: 2078186
uuaauucuuaacuucagag

SEQ ID NO: 2078188 - RNA, 19 nt, Artificial Sequence
  Description of Artificial Sequence: Synthetic oligonucleotide
  Sense strand starting at position 893 of SEQ ID NO: 1881878
gguacugccaagcagagau

SEQ ID NO: 2078189 - RNA, 19 nt, Artificial Sequence
  Description of Artificial Sequence: Synthetic oligonucleotide
  Antisense strand to SEQ ID NO: 2078188
aucucugcuuggcaguacc

SEQ ID NO: 2078190 - RNA, 19 nt, Artificial Sequence
  Description of Artificial Sequence: Synthetic oligonucleotide
  Sense strand starting at position 2137 of SEQ ID NO: 1881878
agaagagucugcuggcuua

SEQ ID NO: 2078191 - RNA, 19 nt, Artificial Sequence
  Description of Artificial Sequence: Synthetic oligonucleotide
  Antisense strand to SEQ ID NO: 2078190
uaagccagcagacucuucu

SEQ ID NO: 2078192 - RNA, 19 nt, Artificial Sequence
  Description of Artificial Sequence: Synthetic oligonucleotide
  Sense strand starting at position 2969 of SEQ ID NO: 1881878
cuccuauagcuccguggga

SEQ ID NO: 2078193 - RNA, 19 nt, Artificial Sequence
  Description of Artificial Sequence: Synthetic oligonucleotide
  Antisense strand to SEQ ID NO: 2078192
ucccacggagcuauaggag

SEQ ID NO: 2078194 - RNA, 19 nt, Artificial Sequence
  Description of Artificial Sequence: Synthetic oligonucleotide
  Sense strand starting at position 3370 of SEQ ID NO: 1881878
ucaguuacgcaaugacagu

SEQ ID NO: 2078195 - RNA, 19 nt, Artificial Sequence
  Description of Artificial Sequence: Synthetic oligonucleotide
  Antisense strand to SEQ ID NO: 2078194
acugucauugcguaacuga

SEQ ID NO: 2078196 - RNA, 19 nt, Artificial Sequence
  Description of Artificial Sequence: Synthetic oligonucleotide
  Sense strand starting at position 3376 of SEQ ID NO: 1881878
acgcaaugacagugaguga

SEQ ID NO: 2078197 - RNA, 19 nt, Artificial Sequence
  Description of Artificial Sequence: Synthetic oligonucleotide
  Antisense strand to SEQ ID NO: 2078196
ucacucacugucauugcgu

SEQ ID NO: 2078198 - RNA, 19 nt, Artificial Sequence
  Description of Artificial Sequence: Synthetic oligonucleotide
  Sense strand starting at position 1 of SEQ ID NO: 1881880
cauggauacuccuugauga

SEQ ID NO: 2078199 - RNA, 19 nt, Artificial Sequence
  Description of Artificial Sequence: Synthetic oligonucleotide
  Antisense strand to SEQ ID NO: 2078198
ucaucaaggaguauccaug

SEQ ID NO: 2078200 - RNA, 19 nt, Artificial Sequence
  Description of Artificial Sequence: Synthetic oligonucleotide
  Sense strand starting at position 2 of SEQ ID NO: 1881880
auggauacuccuugaugau

SEQ ID NO: 2078201 - RNA, 19 nt, Artificial Sequence
  Description of Artificial Sequence: Synthetic oligonucleotide
  Antisense strand to SEQ ID NO: 2078200
aucaucaaggaguauccau

SEQ ID NO: 2078202 - RNA, 19 nt, Artificial Sequence
  Description of Artificial Sequence: Synthetic oligonucleotide
  Sense strand starting at position 14 of SEQ ID NO: 1881880
ugaugaucuuggguucuca

SEQ ID NO: 2078203 - RNA, 19 nt, Artificial Sequence
  Description of Artificial Sequence: Synthetic oligonucleotide
  Antisense strand to SEQ ID NO: 2078202
ugagaacccaagaucauca

SEQ ID NO: 2078204 - RNA, 19 nt, Artificial Sequence
  Description of Artificial Sequence: Synthetic oligonucleotide
  Sense strand starting at position 18 of SEQ ID NO: 1881880
gaucuuggguucucaagau

SEQ ID NO: 2078205 - RNA, 19 nt, Artificial Sequence
  Description of Artificial Sequence: Synthetic oligonucleotide
  Antisense strand to SEQ ID NO: 2078204
aucuugagaacccaagauc

SEQ ID NO: 2078206 - RNA, 19 nt, Artificial Sequence
  Description of Artificial Sequence: Synthetic oligonucleotide
  Sense strand starting at position 22 of SEQ ID NO: 1881880
uuggguucucaagaucugu

SEQ ID NO: 2078207 - RNA, 19 nt, Artificial Sequence
  Description of Artificial Sequence: Synthetic oligonucleotide
  Antisense strand to SEQ ID NO: 2078206
acagaucuugagaacccaa

SEQ ID NO: 2078208 - RNA, 19 nt, Artificial Sequence
  Description of Artificial Sequence: Synthetic oligonucleotide
  Sense strand starting at position 175 of SEQ ID NO: 1881880
gaguaaauaagugggugaa

SEQ ID NO: 2078209 - RNA, 19 nt, Artificial Sequence
  Description of Artificial Sequence: Synthetic oligonucleotide
  Antisense strand to SEQ ID NO: 2078208
uucacccacuuauuuacuc

SEQ ID NO: 2078210 - RNA, 19 nt, Artificial Sequence
  Description of Artificial Sequence: Synthetic oligonucleotide
  Sense strand starting at position 295 of SEQ ID NO: 1881880
agggcauggguuugacuaa

SEQ ID NO: 2078211 - RNA, 19 nt, Artificial Sequence
  Description of Artificial Sequence: Synthetic oligonucleotide
  Antisense strand to SEQ ID NO: 2078210
uuagucaaacccaugcccu

SEQ ID NO: 2078212 - RNA, 19 nt, Artificial Sequence
  Description of Artificial Sequence: Synthetic oligonucleotide
  Sense strand starting at position 321 of SEQ ID NO: 1881880
ggacuauucuaagaagaac

SEQ ID NO: 2078213 - RNA, 19 nt, Artificial Sequence
  Description of Artificial Sequence: Synthetic oligonucleotide
  Antisense strand to SEQ ID NO: 2078212
guucuucuuagaauagucc

SEQ ID NO: 2078214 - RNA, 19 nt, Artificial Sequence
  Description of Artificial Sequence: Synthetic oligonucleotide
  Sense strand starting at position 384 of SEQ ID NO: 1881880
cuggguugccgauagguaa

SEQ ID NO: 2078215 - RNA, 19 nt, Artificial Sequence
  Description of Artificial Sequence: Synthetic oligonucleotide
  Antisense strand to SEQ ID NO: 2078214
uuaccuaucggcaacccag

SEQ ID NO: 2078216 - RNA, 19 nt, Artificial Sequence
  Description of Artificial Sequence: Synthetic oligonucleotide
  Sense strand starting at position 398 of SEQ ID NO: 1881880
gguaaugacuuccuuucuu

SEQ ID NO: 2078217 - RNA, 19 nt, Artificial Sequence
  Description of Artificial Sequence: Synthetic oligonucleotide
  Antisense strand to SEQ ID NO: 2078216
aagaaaggaagucauuacc

SEQ ID NO: 2078218 - RNA, 19 nt, Artificial Sequence
  Description of Artificial Sequence: Synthetic oligonucleotide
  Sense strand starting at position 402 of SEQ ID NO: 1881880
augacuuccuuucuuagga

SEQ ID NO: 2078219 - RNA, 19 nt, Artificial Sequence
  Description of Artificial Sequence: Synthetic oligonucleotide
  Antisense strand to SEQ ID NO: 2078218
uccuaagaaaggaagucau

SEQ ID NO: 2078220 - RNA, 19 nt, Artificial Sequence
  Description of Artificial Sequence: Synthetic oligonucleotide
  Sense strand starting at position 559 of SEQ ID NO: 1881880
uccagaggccuccaacauu

SEQ ID NO: 2078221 - RNA, 19 nt, Artificial Sequence
  Description of Artificial Sequence: Synthetic oligonucleotide
  Antisense strand to SEQ ID NO: 2078220
aauguuggaggccucugga

SEQ ID NO: 2078222 - RNA, 19 nt, Artificial Sequence
  Description of Artificial Sequence: Synthetic oligonucleotide
  Sense strand starting at position 580 of SEQ ID NO: 1881880
cugugaagggcccggaaua

SEQ ID NO: 2078223 - RNA, 19 nt, Artificial Sequence
  Description of Artificial Sequence: Synthetic oligonucleotide
  Antisense strand to SEQ ID NO: 2078222
uauuccgggcccuucacag

SEQ ID NO: 2078224 - RNA, 19 nt, Artificial Sequence
  Description of Artificial Sequence: Synthetic oligonucleotide
  Sense strand starting at position 929 of SEQ ID NO: 1881880
aaacgcagguguuuaacaa

SEQ ID NO: 2078225 - RNA, 19 nt, Artificial Sequence
  Description of Artificial Sequence: Synthetic oligonucleotide
  Antisense strand to SEQ ID NO: 2078224
uuguuaaacaccugcguuu

SEQ ID NO: 2078226 - RNA, 19 nt, Artificial Sequence
  Description of Artificial Sequence: Synthetic oligonucleotide
  Sense strand starting at position 930 of SEQ ID NO: 1881880
aacgcagguguuuaacaau

SEQ ID NO: 2078227 - RNA, 19 nt, Artificial Sequence
  Description of Artificial Sequence: Synthetic oligonucleotide
  Antisense strand to SEQ ID NO: 2078226
auuguuaaacaccugcguu

SEQ ID NO: 2078228 - RNA, 19 nt, Artificial Sequence
  Description of Artificial Sequence: Synthetic oligonucleotide
  Sense strand starting at position 965 of SEQ ID NO: 1881880
agggaacacugauaaacua

SEQ ID NO: 2078229 - RNA, 19 nt, Artificial Sequence
  Description of Artificial Sequence: Synthetic oligonucleotide
  Antisense strand to SEQ ID NO: 2078228
uaguuuaucaguguucccu

SEQ ID NO: 2078230 - RNA, 19 nt, Artificial Sequence
  Description of Artificial Sequence: Synthetic oligonucleotide
  Sense strand starting at position 1540 of SEQ ID NO: 1881880
cguuuagucccagagauag

SEQ ID NO: 2078231 - RNA, 19 nt, Artificial Sequence
  Description of Artificial Sequence: Synthetic oligonucleotide
  Antisense strand to SEQ ID NO: 2078230
cuaucucugggacuaaacg

SEQ ID NO: 2078232 - RNA, 19 nt, Artificial Sequence
  Description of Artificial Sequence: Synthetic oligonucleotide
  Sense strand starting at position 2157 of SEQ ID NO: 1881880
gcccuaugugucgcgggaa

SEQ ID NO: 2078233 - RNA, 19 nt, Artificial Sequence
  Description of Artificial Sequence: Synthetic oligonucleotide
  Antisense strand to SEQ ID NO: 2078232
uucccgcgacacauagggc

SEQ ID NO: 2078234 - RNA, 19 nt, Artificial Sequence
  Description of Artificial Sequence: Synthetic oligonucleotide
  Sense strand starting at position 2188 of SEQ ID NO: 1881880
cacagcucucuuugaguga

SEQ ID NO: 2078235 - RNA, 19 nt, Artificial Sequence
  Description of Artificial Sequence: Synthetic oligonucleotide
  Antisense strand to SEQ ID NO: 2078234
ucacucaaagagagcugug

SEQ ID NO: 2078236 - RNA, 19 nt, Artificial Sequence
  Description of Artificial Sequence: Synthetic oligonucleotide
  Sense strand starting at position 2420 of SEQ ID NO: 1881880
ggagugucuugggucgaga

SEQ ID NO: 2078237 - RNA, 19 nt, Artificial Sequence
  Description of Artificial Sequence: Synthetic oligonucleotide
  Antisense strand to SEQ ID NO: 2078236
ucucgacccaagacacucc

SEQ ID NO: 2078238 - RNA, 19 nt, Artificial Sequence
  Description of Artificial Sequence: Synthetic oligonucleotide
  Sense strand starting at position 2790 of SEQ ID NO: 1881880
uguguuaggccagagauag

SEQ ID NO: 2078239 - RNA, 19 nt, Artificial Sequence
  Description of Artificial Sequence: Synthetic oligonucleotide
  Antisense strand to SEQ ID NO: 2078238
cuaucucuggccuaacaca

SEQ ID NO: 2078240 - RNA, 19 nt, Artificial Sequence
  Description of Artificial Sequence: Synthetic oligonucleotide
  Sense strand starting at position 3159 of SEQ ID NO: 1881880
uaguguauuuggguguagu

SEQ ID NO: 2078241 - RNA, 19 nt, Artificial Sequence
  Description of Artificial Sequence: Synthetic oligonucleotide
  Antisense strand to SEQ ID NO: 2078240
acuacacccaaauacacua

SEQ ID NO: 2078242 - RNA, 19 nt, Artificial Sequence
  Description of Artificial Sequence: Synthetic oligonucleotide
  Sense strand starting at position 3160 of SEQ ID NO: 1881880
aguguauuuggguguagug

SEQ ID NO: 2078243 - RNA, 19 nt, Artificial Sequence
  Description of Artificial Sequence: Synthetic oligonucleotide
  Antisense strand to SEQ ID NO: 2078242
cacuacacccaaauacacu

SEQ ID NO: 2078244 - RNA, 19 nt, Artificial Sequence
  Description of Artificial Sequence: Synthetic oligonucleotide
  Sense strand starting at position 3171 of SEQ ID NO: 1881880
guguagugggauugaugga

SEQ ID NO: 2078245 - RNA, 19 nt, Artificial Sequence
  Description of Artificial Sequence: Synthetic oligonucleotide
  Antisense strand to SEQ ID NO: 2078244
uccaucaaucccacuacac

SEQ ID NO: 2078246 - RNA, 19 nt, Artificial Sequence
  Description of Artificial Sequence: Synthetic oligonucleotide
  Sense strand starting at position 3201 of SEQ ID NO: 1881880
gggagcuggccaugugaua

SEQ ID NO: 2078247 - RNA, 19 nt, Artificial Sequence
  Description of Artificial Sequence: Synthetic oligonucleotide
  Antisense strand to SEQ ID NO: 2078246
uaucacauggccagcuccc

SEQ ID NO: 2078248 - RNA, 19 nt, Artificial Sequence
  Description of Artificial Sequence: Synthetic oligonucleotide
  Sense strand starting at position 3281 of SEQ ID NO: 1881880
aagacuggcccaugugaga

SEQ ID NO: 2078249 - RNA, 19 nt, Artificial Sequence
  Description of Artificial Sequence: Synthetic oligonucleotide
  Antisense strand to SEQ ID NO: 2078248
ucucacaugggccagucuu

SEQ ID NO: 2078250 - RNA, 19 nt, Artificial Sequence
  Description of Artificial Sequence: Synthetic oligonucleotide
  Sense strand starting at position 3322 of SEQ ID NO: 1881880
gugauuggagcuuagaaug

SEQ ID NO: 2078251 - RNA, 19 nt, Artificial Sequence
  Description of Artificial Sequence: Synthetic oligonucleotide
  Antisense strand to SEQ ID NO: 2078250
cauucuaagcuccaaucac

SEQ ID NO: 2078252 - RNA, 19 nt, Artificial Sequence
  Description of Artificial Sequence: Synthetic oligonucleotide
  Sense strand starting at position 3356 of SEQ ID NO: 1881880
gggaguuggauaugaguga

SEQ ID NO: 2078253 - RNA, 19 nt, Artificial Sequence
  Description of Artificial Sequence: Synthetic oligonucleotide
  Antisense strand to SEQ ID NO: 2078252
ucacucauauccaacuccc

SEQ ID NO: 2078254 - RNA, 19 nt, Artificial Sequence
  Description of Artificial Sequence: Synthetic oligonucleotide
  Sense strand starting at position 3360 of SEQ ID NO: 1881880
guuggauaugagugaaaua

SEQ ID NO: 2078255 - RNA, 19 nt, Artificial Sequence
  Description of Artificial Sequence: Synthetic oligonucleotide
  Antisense strand to SEQ ID NO: 2078254
uauuucacucauauccaac

SEQ ID NO: 2078256 - RNA, 19 nt, Artificial Sequence
  Description of Artificial Sequence: Synthetic oligonucleotide
  Sense strand starting at position 3403 of SEQ ID NO: 1881880
aaggaauauuuauggagca

SEQ ID NO: 2078257 - RNA, 19 nt, Artificial Sequence
  Description of Artificial Sequence: Synthetic oligonucleotide
  Antisense strand to SEQ ID NO: 2078256
ugcuccauaaauauuccuu

SEQ ID NO: 2078258 - RNA, 19 nt, Artificial Sequence
  Description of Artificial Sequence: Synthetic oligonucleotide
  Sense strand starting at position 3422 of SEQ ID NO: 1881880
cuuaccagagauuguucua

SEQ ID NO: 2078259 - RNA, 19 nt, Artificial Sequence
  Description of Artificial Sequence: Synthetic oligonucleotide
  Antisense strand to SEQ ID NO: 2078258
uagaacaaucucugguaag

SEQ ID NO: 2078260 - RNA, 19 nt, Artificial Sequence
  Description of Artificial Sequence: Synthetic oligonucleotide
  Sense strand starting at position 3425 of SEQ ID NO: 1881880
accagagauuguucuagga

SEQ ID NO: 2078261 - RNA, 19 nt, Artificial Sequence
  Description of Artificial Sequence: Synthetic oligonucleotide
  Antisense strand to SEQ ID NO: 2078260
uccuagaacaaucucuggu

SEQ ID NO: 2078262 - RNA, 19 nt, Artificial Sequence
  Description of Artificial Sequence: Synthetic oligonucleotide
  Sense strand starting at position 3459 of SEQ ID NO: 1881880
ccuuguucucauggagauc

SEQ ID NO: 2078263 - RNA, 19 nt, Artificial Sequence
  Description of Artificial Sequence: Synthetic oligonucleotide
  Antisense strand to SEQ ID NO: 2078262
gaucuccaugagaacaagg

SEQ ID NO: 2078264 - RNA, 19 nt, Artificial Sequence
  Description of Artificial Sequence: Synthetic oligonucleotide
  Sense strand starting at position 3507 of SEQ ID NO: 1881880
gcucuauugauauguugga

SEQ ID NO: 2078265 - RNA, 19 nt, Artificial Sequence
  Description of Artificial Sequence: Synthetic oligonucleotide
  Antisense strand to SEQ ID NO: 2078264
uccaacauaucaauagagc

SEQ ID NO: 2078266 - RNA, 19 nt, Artificial Sequence
  Description of Artificial Sequence: Synthetic oligonucleotide
  Sense strand starting at position 3516 of SEQ ID NO: 1881880
auauguuggacuggauaau

SEQ ID NO: 2078267 - RNA, 19 nt, Artificial Sequence
  Description of Artificial Sequence: Synthetic oligonucleotide
  Antisense strand to SEQ ID NO: 2078266
auuauccaguccaacauau

SEQ ID NO: 2078268 - RNA, 19 nt, Artificial Sequence
  Description of Artificial Sequence: Synthetic oligonucleotide
  Sense strand starting at position 3718 of SEQ ID NO: 1881880
aagagcuauugucuuagag

SEQ ID NO: 2078269 - RNA, 19 nt, Artificial Sequence
  Description of Artificial Sequence: Synthetic oligonucleotide
  Antisense strand to SEQ ID NO: 2078268
cucuaagacaauagcucuu

SEQ ID NO: 2078270 - RNA, 19 nt, Artificial Sequence
  Description of Artificial Sequence: Synthetic oligonucleotide
  Sense strand starting at position 3762 of SEQ ID NO: 1881880
cuugguguaucaucugaga

SEQ ID NO: 2078271 - RNA, 19 nt, Artificial Sequence
  Description of Artificial Sequence: Synthetic oligonucleotide
  Antisense strand to SEQ ID NO: 2078270
ucucagaugauacaccaag

SEQ ID NO: 2078272 - RNA, 19 nt, Artificial Sequence
  Description of Artificial Sequence: Synthetic oligonucleotide
  Sense strand starting at position 3764 of SEQ ID NO: 1881880
ugguguaucaucugagaca

SEQ ID NO: 2078273 - RNA, 19 nt, Artificial Sequence
  Description of Artificial Sequence: Synthetic oligonucleotide
  Antisense strand to SEQ ID NO: 2078272
ugucucagaugauacacca

SEQ ID NO: 2078274 - RNA, 19 nt, Artificial Sequence
  Description of Artificial Sequence: Synthetic oligonucleotide
  Sense strand starting at position 3830 of SEQ ID NO: 1881880
ggaguuaagccggaagugu

SEQ ID NO: 2078275 - RNA, 19 nt, Artificial Sequence
  Description of Artificial Sequence: Synthetic oligonucleotide
  Antisense strand to SEQ ID NO: 2078274
acacuuccggcuuaacucc

SEQ ID NO: 2078276 - RNA, 19 nt, Artificial Sequence
  Description of Artificial Sequence: Synthetic oligonucleotide
  Sense strand starting at position 3876 of SEQ ID NO: 1881880
gagguaugaucagcaguuu

SEQ ID NO: 2078277 - RNA, 19 nt, Artificial Sequence
  Description of Artificial Sequence: Synthetic oligonucleotide
  Antisense strand to SEQ ID NO: 2078276
aaacugcugaucauaccuc

SEQ ID NO: 2078278 - RNA, 19 nt, Artificial Sequence
  Description of Artificial Sequence: Synthetic oligonucleotide
  Sense strand starting at position 245 of SEQ ID NO: 1881879
ugaccaagaggcugaauau

SEQ ID NO: 2078279 - RNA, 19 nt, Artificial Sequence
  Description of Artificial Sequence: Synthetic oligonucleotide
  Antisense strand to SEQ ID NO: 2078278
auauucagccucuugguca

SEQ ID NO: 2078280 - RNA, 19 nt, Artificial Sequence
  Description of Artificial Sequence: Synthetic oligonucleotide
  Sense strand starting at position 348 of SEQ ID NO: 1881879
agccacugccucgagaaau

SEQ ID NO: 2078281 - RNA, 19 nt, Artificial Sequence
  Description of Artificial Sequence: Synthetic oligonucleotide
  Antisense strand to SEQ ID NO: 2078280
auuucucgaggcaguggcu

SEQ ID NO: 2078282 - RNA, 19 nt, Artificial Sequence
  Description of Artificial Sequence: Synthetic oligonucleotide
  Sense strand starting at position 393 of SEQ ID NO: 1881879
gugcuaggugcuuugaguu

SEQ ID NO: 2078283 - RNA, 19 nt, Artificial Sequence
  Description of Artificial Sequence: Synthetic oligonucleotide
  Antisense strand to SEQ ID NO: 2078282
aacucaaagcaccuagcac

SEQ ID NO: 2078284 - RNA, 19 nt, Artificial Sequence
  Description of Artificial Sequence: Synthetic oligonucleotide
  Sense strand starting at position 403 of SEQ ID NO: 1881879
cuuugaguuccugcgcaug

SEQ ID NO: 2078285 - RNA, 19 nt, Artificial Sequence
  Description of Artificial Sequence: Synthetic oligonucleotide
  Antisense strand to SEQ ID NO: 2078284
caugcgcaggaacucaaag

SEQ ID NO: 2078286 - RNA, 19 nt, Artificial Sequence
  Description of Artificial Sequence: Synthetic oligonucleotide
  Sense strand starting at position 454 of SEQ ID NO: 1881879
gucucacuacauuguuaga

SEQ ID NO: 2078287 - RNA, 19 nt, Artificial Sequence
  Description of Artificial Sequence: Synthetic oligonucleotide
  Antisense strand to SEQ ID NO: 2078286
ucuaacaauguagugagac

SEQ ID NO: 2078288 - RNA, 19 nt, Artificial Sequence
  Description of Artificial Sequence: Synthetic oligonucleotide
  Sense strand starting at position 484 of SEQ ID NO: 1881879
cagcucuugucauccagga

SEQ ID NO: 2078289 - RNA, 19 nt, Artificial Sequence
  Description of Artificial Sequence: Synthetic oligonucleotide
  Antisense strand to SEQ ID NO: 2078288
uccuggaugacaagagcug

SEQ ID NO: 2078290 - RNA, 19 nt, Artificial Sequence
  Description of Artificial Sequence: Synthetic oligonucleotide
  Sense strand starting at position 488 of SEQ ID NO: 1881879
ucuugucauccaggauauc

SEQ ID NO: 2078291 - RNA, 19 nt, Artificial Sequence
  Description of Artificial Sequence: Synthetic oligonucleotide
  Antisense strand to SEQ ID NO: 2078290
gauauccuggaugacaaga

SEQ ID NO: 2078292 - RNA, 19 nt, Artificial Sequence
  Description of Artificial Sequence: Synthetic oligonucleotide
  Sense strand starting at position 489 of SEQ ID NO: 1881879
cuugucauccaggauauca

SEQ ID NO: 2078293 - RNA, 19 nt, Artificial Sequence
  Description of Artificial Sequence: Synthetic oligonucleotide
  Antisense strand to SEQ ID NO: 2078292
ugauauccuggaugacaag

SEQ ID NO: 2078294 - RNA, 19 nt, Artificial Sequence
  Description of Artificial Sequence: Synthetic oligonucleotide
  Sense strand starting at position 491 of SEQ ID NO: 1881879
ugucauccaggauaucauu

SEQ ID NO: 2078295 - RNA, 19 nt, Artificial Sequence
  Description of Artificial Sequence: Synthetic oligonucleotide
  Antisense strand to SEQ ID NO: 2078294
aaugauauccuggaugaca

SEQ ID NO: 2078296 - RNA, 19 nt, Artificial Sequence
  Description of Artificial Sequence: Synthetic oligonucleotide
  Sense strand starting at position 497 of SEQ ID NO: 1881879
ccaggauaucauugugccu

SEQ ID NO: 2078297 - RNA, 19 nt, Artificial Sequence
  Description of Artificial Sequence: Synthetic oligonucleotide
  Antisense strand to SEQ ID NO: 2078296
aggcacaaugauauccugg

SEQ ID NO: 2078298 - RNA, 19 nt, Artificial Sequence
  Description of Artificial Sequence: Synthetic oligonucleotide
  Sense strand starting at position 585 of SEQ ID NO: 1881879
cugcuugaucauggauacu

SEQ ID NO: 2078299 - RNA, 19 nt, Artificial Sequence
  Description of Artificial Sequence: Synthetic oligonucleotide
  Antisense strand to SEQ ID NO: 2078298
aguauccaugaucaagcag

SEQ ID NO: 2078300 - RNA, 19 nt, Artificial Sequence
  Description of Artificial Sequence: Synthetic oligonucleotide
  Sense strand starting at position 594 of SEQ ID NO: 1881879
cauggauacuccuugauga

SEQ ID NO: 2078301 - RNA, 19 nt, Artificial Sequence
  Description of Artificial Sequence: Synthetic oligonucleotide
  Antisense strand to SEQ ID NO: 2078300
ucaucaaggaguauccaug

SEQ ID NO: 2078302 - RNA, 19 nt, Artificial Sequence
  Description of Artificial Sequence: Synthetic oligonucleotide
  Sense strand starting at position 595 of SEQ ID NO: 1881879
auggauacuccuugaugau

SEQ ID NO: 2078303 - RNA, 19 nt, Artificial Sequence
  Description of Artificial Sequence: Synthetic oligonucleotide
  Antisense strand to SEQ ID NO: 2078302
aucaucaaggaguauccau

SEQ ID NO: 2078304 - RNA, 19 nt, Artificial Sequence
  Description of Artificial Sequence: Synthetic oligonucleotide
  Sense strand starting at position 607 of SEQ ID NO: 1881879
ugaugaucuuggguucuca

SEQ ID NO: 2078305 - RNA, 19 nt, Artificial Sequence
  Description of Artificial Sequence: Synthetic oligonucleotide
  Antisense strand to SEQ ID NO: 2078304
ugagaacccaagaucauca

SEQ ID NO: 2078306 - RNA, 19 nt, Artificial Sequence
  Description of Artificial Sequence: Synthetic oligonucleotide
  Sense strand starting at position 611 of SEQ ID NO: 1881879
gaucuuggguucucaagau

SEQ ID NO: 2078307 - RNA, 19 nt, Artificial Sequence
  Description of Artificial Sequence: Synthetic oligonucleotide
  Antisense strand to SEQ ID NO: 2078306
aucuugagaacccaagauc

SEQ ID NO: 2078308 - RNA, 19 nt, Artificial Sequence
  Description of Artificial Sequence: Synthetic oligonucleotide
  Sense strand starting at position 615 of SEQ ID NO: 1881879
uuggguucucaagaucugu

SEQ ID NO: 2078309 - RNA, 19 nt, Artificial Sequence
  Description of Artificial Sequence: Synthetic oligonucleotide
  Antisense strand to SEQ ID NO: 2078308
acagaucuugagaacccaa

SEQ ID NO: 2078310 - RNA, 19 nt, Artificial Sequence
  Description of Artificial Sequence: Synthetic oligonucleotide
  Sense strand starting at position 768 of SEQ ID NO: 1881879
gaguaaauaagugggugaa

SEQ ID NO: 2078311 - RNA, 19 nt, Artificial Sequence
  Description of Artificial Sequence: Synthetic oligonucleotide
  Antisense strand to SEQ ID NO: 2078310
uucacccacuuauuuacuc

SEQ ID NO: 2078312 - RNA, 19 nt, Artificial Sequence
  Description of Artificial Sequence: Synthetic oligonucleotide
  Sense strand starting at position 888 of SEQ ID NO: 1881879
agggcauggguuugacuaa

SEQ ID NO: 2078313 - RNA, 19 nt, Artificial Sequence
  Description of Artificial Sequence: Synthetic oligonucleotide
  Antisense strand to SEQ ID NO: 2078312
uuagucaaacccaugcccu

SEQ ID NO: 2078314 - RNA, 19 nt, Artificial Sequence
  Description of Artificial Sequence: Synthetic oligonucleotide
  Sense strand starting at position 914 of SEQ ID NO: 1881879
ggacuauucuaagaagaac

SEQ ID NO: 2078315 - RNA, 19 nt, Artificial Sequence
  Description of Artificial Sequence: Synthetic oligonucleotide
  Antisense strand to SEQ ID NO: 2078314
guucuucuuagaauagucc

SEQ ID NO: 2078316 - RNA, 19 nt, Artificial Sequence
  Description of Artificial Sequence: Synthetic oligonucleotide
  Sense strand starting at position 977 of SEQ ID NO: 1881879
cuggguugccgauagguaa

SEQ ID NO: 2078317 - RNA, 19 nt, Artificial Sequence
  Description of Artificial Sequence: Synthetic oligonucleotide
  Antisense strand to SEQ ID NO: 2078316
uuaccuaucggcaacccag

SEQ ID NO: 2078318 - RNA, 19 nt, Artificial Sequence
  Description of Artificial Sequence: Synthetic oligonucleotide
  Sense strand starting at position 991 of SEQ ID NO: 1881879
gguaaugacuuccuuucuu

SEQ ID NO: 2078319 - RNA, 19 nt, Artificial Sequence
  Description of Artificial Sequence: Synthetic oligonucleotide
  Antisense strand to SEQ ID NO: 2078318
aagaaaggaagucauuacc

SEQ ID NO: 2078320 - RNA, 19 nt, Artificial Sequence
  Description of Artificial Sequence: Synthetic oligonucleotide
  Sense strand starting at position 995 of SEQ ID NO: 1881879
augacuuccuuucuuagga

SEQ ID NO: 2078321 - RNA, 19 nt, Artificial Sequence
  Description of Artificial Sequence: Synthetic oligonucleotide
  Antisense strand to SEQ ID NO: 2078320
uccuaagaaaggaagucau

SEQ ID NO: 2078322 - RNA, 19 nt, Artificial Sequence
  Description of Artificial Sequence: Synthetic oligonucleotide
  Sense strand starting at position 1152 of SEQ ID NO: 1881879
uccagaggccuccaacauu

SEQ ID NO: 2078323 - RNA, 19 nt, Artificial Sequence
  Description of Artificial Sequence: Synthetic oligonucleotide
  Antisense strand to SEQ ID NO: 2078322
aauguuggaggccucugga

SEQ ID NO: 2078324 - RNA, 19 nt, Artificial Sequence
  Description of Artificial Sequence: Synthetic oligonucleotide
  Sense strand starting at position 1173 of SEQ ID NO: 1881879
cugugaagggcccggaaua

SEQ ID NO: 2078325 - RNA, 19 nt, Artificial Sequence
  Description of Artificial Sequence: Synthetic oligonucleotide
  Antisense strand to SEQ ID NO: 2078324
uauuccgggcccuucacag

SEQ ID NO: 2078326 - RNA, 19 nt, Artificial Sequence
  Description of Artificial Sequence: Synthetic oligonucleotide
  Sense strand starting at position 1522 of SEQ ID NO: 1881879
aaacgcagguguuuaacaa

SEQ ID NO: 2078327 - RNA, 19 nt, Artificial Sequence
  Description of Artificial Sequence: Synthetic oligonucleotide
  Antisense strand to SEQ ID NO: 2078326
uuguuaaacaccugcguuu

SEQ ID NO: 2078328 - RNA, 19 nt, Artificial Sequence
  Description of Artificial Sequence: Synthetic oligonucleotide
  Sense strand starting at position 1523 of SEQ ID NO: 1881879
aacgcagguguuuaacaau

SEQ ID NO: 2078329 - RNA, 19 nt, Artificial Sequence
  Description of Artificial Sequence: Synthetic oligonucleotide
  Antisense strand to SEQ ID NO: 2078328
auuguuaaacaccugcguu

SEQ ID NO: 2078330 - RNA, 19 nt, Artificial Sequence
  Description of Artificial Sequence: Synthetic oligonucleotide
  Sense strand starting at position 1558 of SEQ ID NO: 1881879
agggaacacugauaaacua

SEQ ID NO: 2078331 - RNA, 19 nt, Artificial Sequence
  Description of Artificial Sequence: Synthetic oligonucleotide
  Antisense strand to SEQ ID NO: 2078330
uaguuuaucaguguucccu

SEQ ID NO: 2078332 - RNA, 19 nt, Artificial Sequence
  Description of Artificial Sequence: Synthetic oligonucleotide
  Sense strand starting at position 2133 of SEQ ID NO: 1881879
cguuuagucccagagauag

SEQ ID NO: 2078333 - RNA, 19 nt, Artificial Sequence
  Description of Artificial Sequence: Synthetic oligonucleotide
  Antisense strand to SEQ ID NO: 2078332
cuaucucugggacuaaacg

SEQ ID NO: 2078334 - RNA, 19 nt, Artificial Sequence
  Description of Artificial Sequence: Synthetic oligonucleotide
  Sense strand starting at position 2750 of SEQ ID NO: 1881879
gcccuaugugucgcgggaa

SEQ ID NO: 2078335 - RNA, 19 nt, Artificial Sequence
  Description of Artificial Sequence: Synthetic oligonucleotide
  Antisense strand to SEQ ID NO: 2078334
uucccgcgacacauagggc

SEQ ID NO: 2078336 - RNA, 19 nt, Artificial Sequence
  Description of Artificial Sequence: Synthetic oligonucleotide
  Sense strand starting at position 2781 of SEQ ID NO: 1881879
cacagcucucuuugaguga

SEQ ID NO: 2078337 - RNA, 19 nt, Artificial Sequence
  Description of Artificial Sequence: Synthetic oligonucleotide
  Antisense strand to SEQ ID NO: 2078336
ucacucaaagagagcugug

SEQ ID NO: 2078338 - RNA, 19 nt, Artificial Sequence
  Description of Artificial Sequence: Synthetic oligonucleotide
  Sense strand starting at position 3013 of SEQ ID NO: 1881879
ggagugucuugggucgaga

SEQ ID NO: 2078339 - RNA, 19 nt, Artificial Sequence
  Description of Artificial Sequence: Synthetic oligonucleotide
  Antisense strand to SEQ ID NO: 2078338
ucucgacccaagacacucc

SEQ ID NO: 2078340 - RNA, 19 nt, Artificial Sequence
  Description of Artificial Sequence: Synthetic oligonucleotide
  Sense strand starting at position 3383 of SEQ ID NO: 1881879
uguguuaggccagagauag

SEQ ID NO: 2078341 - RNA, 19 nt, Artificial Sequence
  Description of Artificial Sequence: Synthetic oligonucleotide
  Antisense strand to SEQ ID NO: 2078340
cuaucucuggccuaacaca

SEQ ID NO: 2078342 - RNA, 19 nt, Artificial Sequence
  Description of Artificial Sequence: Synthetic oligonucleotide
  Sense strand starting at position 3752 of SEQ ID NO: 1881879
uaguguauuuggguguagu

SEQ ID NO: 2078343 - RNA, 19 nt, Artificial Sequence
  Description of Artificial Sequence: Synthetic oligonucleotide
  Antisense strand to SEQ ID NO: 2078342
acuacacccaaauacacua

SEQ ID NO: 2078344 - RNA, 19 nt, Artificial Sequence
  Description of Artificial Sequence: Synthetic oligonucleotide
  Sense strand starting at position 3753 of SEQ ID NO: 1881879
aguguauuuggguguagug

SEQ ID NO: 2078345 - RNA, 19 nt, Artificial Sequence
  Description of Artificial Sequence: Synthetic oligonucleotide
  Antisense strand to SEQ ID NO: 2078344
cacuacacccaaauacacu

SEQ ID NO: 2078346 - RNA, 19 nt, Artificial Sequence
  Description of Artificial Sequence: Synthetic oligonucleotide
  Sense strand starting at position 3764 of SEQ ID NO: 1881879
guguagugggauugaugga

SEQ ID NO: 2078347 - RNA, 19 nt, Artificial Sequence
  Description of Artificial Sequence: Synthetic oligonucleotide
  Antisense strand to SEQ ID NO: 2078346
uccaucaaucccacuacac

SEQ ID NO: 2078348 - RNA, 19 nt, Artificial Sequence
  Description of Artificial Sequence: Synthetic oligonucleotide
  Sense strand starting at position 3794 of SEQ ID NO: 1881879
gggagcuggccaugugaua

SEQ ID NO: 2078349 - RNA, 19 nt, Artificial Sequence
  Description of Artificial Sequence: Synthetic oligonucleotide
  Antisense strand to SEQ ID NO: 2078348
uaucacauggccagcuccc

SEQ ID NO: 2078350 - RNA, 19 nt, Artificial Sequence
  Description of Artificial Sequence: Synthetic oligonucleotide
  Sense strand starting at position 3874 of SEQ ID NO: 1881879
aagacuggcccaugugaga

SEQ ID NO: 2078351 - RNA, 19 nt, Artificial Sequence
  Description of Artificial Sequence: Synthetic oligonucleotide
  Antisense strand to SEQ ID NO: 2078350
ucucacaugggccagucuu

SEQ ID NO: 2078352 - RNA, 19 nt, Artificial Sequence
  Description of Artificial Sequence: Synthetic oligonucleotide
  Sense strand starting at position 3915 of SEQ ID NO: 1881879
gugauuggagcuuagaaug

SEQ ID NO: 2078353 - RNA, 19 nt, Artificial Sequence
  Description of Artificial Sequence: Synthetic oligonucleotide
  Antisense strand to SEQ ID NO: 2078352
cauucuaagcuccaaucac

SEQ ID NO: 2078354 - RNA, 19 nt, Artificial Sequence
  Description of Artificial Sequence: Synthetic oligonucleotide
  Sense strand starting at position 3949 of SEQ ID NO: 1881879
gggaguuggauaugaguga

SEQ ID NO: 2078355 - RNA, 19 nt, Artificial Sequence
  Description of Artificial Sequence: Synthetic oligonucleotide
  Antisense strand to SEQ ID NO: 2078354
ucacucauauccaacuccc

SEQ ID NO: 2078356 - RNA, 19 nt, Artificial Sequence
  Description of Artificial Sequence: Synthetic oligonucleotide
  Sense strand starting at position 3953 of SEQ ID NO: 1881879
guuggauaugagugaaaua

SEQ ID NO: 2078357 - RNA, 19 nt, Artificial Sequence
  Description of Artificial Sequence: Synthetic oligonucleotide
  Antisense strand to SEQ ID NO: 2078356
uauuucacucauauccaac

SEQ ID NO: 2078358 - RNA, 19 nt, Artificial Sequence
  Description of Artificial Sequence: Synthetic oligonucleotide
  Sense strand starting at position 44 of SEQ ID NO: 1881883
cccagugauuucuucuugu

SEQ ID NO: 2078359 - RNA, 19 nt, Artificial Sequence
  Description of Artificial Sequence: Synthetic oligonucleotide
  Antisense strand to SEQ ID NO: 2078358
acaagaagaaaucacuggg

SEQ ID NO: 2078360 - RNA, 19 nt, Artificial Sequence
  Description of Artificial Sequence: Synthetic oligonucleotide
  Sense strand starting at position 47 of SEQ ID NO: 1881883
agugauuucuucuuguagu

SEQ ID NO: 2078361 - RNA, 19 nt, Artificial Sequence
  Description of Artificial Sequence: Synthetic oligonucleotide
  Antisense strand to SEQ ID NO: 2078360
acuacaagaagaaaucacu

SEQ ID NO: 2078362 - RNA, 19 nt, Artificial Sequence
  Description of Artificial Sequence: Synthetic oligonucleotide
  Sense strand starting at position 57 of SEQ ID NO: 1881883
ucuuguaguccagacacau

SEQ ID NO: 2078363 - RNA, 19 nt, Artificial Sequence
  Description of Artificial Sequence: Synthetic oligonucleotide
  Antisense strand to SEQ ID NO: 2078362
augugucuggacuacaaga

SEQ ID NO: 2078364 - RNA, 19 nt, Artificial Sequence
  Description of Artificial Sequence: Synthetic oligonucleotide
  Sense strand starting at position 580 of SEQ ID NO: 1881883
aaguaaaguguccaggacu

SEQ ID NO: 2078365 - RNA, 19 nt, Artificial Sequence
  Description of Artificial Sequence: Synthetic oligonucleotide
  Antisense strand to SEQ ID NO: 2078364
aguccuggacacuuuacuu

SEQ ID NO: 2078366 - RNA, 19 nt, Artificial Sequence
  Description of Artificial Sequence: Synthetic oligonucleotide
  Sense strand starting at position 653 of SEQ ID NO: 1881883
uuuccuugacugcaggaaa

SEQ ID NO: 2078367 - RNA, 19 nt, Artificial Sequence
  Description of Artificial Sequence: Synthetic oligonucleotide
  Antisense strand to SEQ ID NO: 2078366
uuuccugcagucaaggaaa

SEQ ID NO: 2078368 - RNA, 19 nt, Artificial Sequence
  Description of Artificial Sequence: Synthetic oligonucleotide
  Sense strand starting at position 778 of SEQ ID NO: 1881883
gcugaauugcugcaagauc

SEQ ID NO: 2078369 - RNA, 19 nt, Artificial Sequence
  Description of Artificial Sequence: Synthetic oligonucleotide
  Antisense strand to SEQ ID NO: 2078368
gaucuugcagcaauucagc

SEQ ID NO: 2078370 - RNA, 19 nt, Artificial Sequence
  Description of Artificial Sequence: Synthetic oligonucleotide
  Sense strand starting at position 911 of SEQ ID NO: 1881883
agaguuuaaagcugcagga

SEQ ID NO: 2078371 - RNA, 19 nt, Artificial Sequence
  Description of Artificial Sequence: Synthetic oligonucleotide
  Antisense strand to SEQ ID NO: 2078370
uccugcagcuuuaaacucu

SEQ ID NO: 2078372 - RNA, 19 nt, Artificial Sequence
  Description of Artificial Sequence: Synthetic oligonucleotide
  Sense strand starting at position 913 of SEQ ID NO: 1881883
aguuuaaagcugcaggaau

SEQ ID NO: 2078373 - RNA, 19 nt, Artificial Sequence
  Description of Artificial Sequence: Synthetic oligonucleotide
  Antisense strand to SEQ ID NO: 2078372
auuccugcagcuuuaaacu

SEQ ID NO: 2078374 - RNA, 19 nt, Artificial Sequence
  Description of Artificial Sequence: Synthetic oligonucleotide
  Sense strand starting at position 942 of SEQ ID NO: 1881883
gagugagauuaucugauua

SEQ ID NO: 2078375 - RNA, 19 nt, Artificial Sequence
  Description of Artificial Sequence: Synthetic oligonucleotide
  Antisense strand to SEQ ID NO: 2078374
uaaucagauaaucucacuc

SEQ ID NO: 2078376 - RNA, 19 nt, Artificial Sequence
  Description of Artificial Sequence: Synthetic oligonucleotide
  Sense strand starting at position 946 of SEQ ID NO: 1881883
gagauuaucugauuacgga

SEQ ID NO: 2078377 - RNA, 19 nt, Artificial Sequence
  Description of Artificial Sequence: Synthetic oligonucleotide
  Antisense strand to SEQ ID NO: 2078376
uccguaaucagauaaucuc

SEQ ID NO: 2078378 - RNA, 19 nt, Artificial Sequence
  Description of Artificial Sequence: Synthetic oligonucleotide
  Sense strand starting at position 1758 of SEQ ID NO: 1881883
caauccaaucgugagcuuu

SEQ ID NO: 2078379 - RNA, 19 nt, Artificial Sequence
  Description of Artificial Sequence: Synthetic oligonucleotide
  Antisense strand to SEQ ID NO: 2078378
aaagcucacgauuggauug

SEQ ID NO: 2078380 - RNA, 19 nt, Artificial Sequence
  Description of Artificial Sequence: Synthetic oligonucleotide
  Sense strand starting at position 1771 of SEQ ID NO: 1881883
agcuuuccucugggaggga

SEQ ID NO: 2078381 - RNA, 19 nt, Artificial Sequence
  Description of Artificial Sequence: Synthetic oligonucleotide
  Antisense strand to SEQ ID NO: 2078380
ucccucccagaggaaagcu

SEQ ID NO: 2078382 - RNA, 19 nt, Artificial Sequence
  Description of Artificial Sequence: Synthetic oligonucleotide
  Sense strand starting at position 1824 of SEQ ID NO: 1881883
gggcgaaucccacaguaau

SEQ ID NO: 2078383 - RNA, 19 nt, Artificial Sequence
  Description of Artificial Sequence: Synthetic oligonucleotide
  Antisense strand to SEQ ID NO: 2078382
auuacugugggauucgccc

SEQ ID NO: 2078384 - RNA, 19 nt, Artificial Sequence
  Description of Artificial Sequence: Synthetic oligonucleotide
  Sense strand starting at position 1835 of SEQ ID NO: 1881883
acaguaauugcgcauuucu

SEQ ID NO: 2078385 - RNA, 19 nt, Artificial Sequence
  Description of Artificial Sequence: Synthetic oligonucleotide
  Antisense strand to SEQ ID NO: 2078384
agaaaugcgcaauuacugu

SEQ ID NO: 2078386 - RNA, 19 nt, Artificial Sequence
  Description of Artificial Sequence: Synthetic oligonucleotide
  Sense strand starting at position 1846 of SEQ ID NO: 1881883
gcauuucucucccuuuagu

SEQ ID NO: 2078387 - RNA, 19 nt, Artificial Sequence
  Description of Artificial Sequence: Synthetic oligonucleotide
  Antisense strand to SEQ ID NO: 2078386
acuaaagggagagaaaugc

SEQ ID NO: 2078388 - RNA, 19 nt, Artificial Sequence
  Description of Artificial Sequence: Synthetic oligonucleotide
  Sense strand starting at position 1917 of SEQ ID NO: 1881883
cccuuugcugauuagagaa

SEQ ID NO: 2078389 - RNA, 19 nt, Artificial Sequence
  Description of Artificial Sequence: Synthetic oligonucleotide
  Antisense strand to SEQ ID NO: 2078388
uucucuaaucagcaaaggg

SEQ ID NO: 2078390 - RNA, 19 nt, Artificial Sequence
  Description of Artificial Sequence: Synthetic oligonucleotide
  Sense strand starting at position 2069 of SEQ ID NO: 1881883
ucugccaaucgaugggaaa

SEQ ID NO: 2078391 - RNA, 19 nt, Artificial Sequence
  Description of Artificial Sequence: Synthetic oligonucleotide
  Antisense strand to SEQ ID NO: 2078390
uuucccaucgauuggcaga

SEQ ID NO: 2078392 - RNA, 19 nt, Artificial Sequence
  Description of Artificial Sequence: Synthetic oligonucleotide
  Sense strand starting at position 2071 of SEQ ID NO: 1881883
ugccaaucgaugggaaaga

SEQ ID NO: 2078393 - RNA, 19 nt, Artificial Sequence
  Description of Artificial Sequence: Synthetic oligonucleotide
  Antisense strand to SEQ ID NO: 2078392
ucuuucccaucgauuggca

SEQ ID NO: 2078394 - RNA, 19 nt, Artificial Sequence
  Description of Artificial Sequence: Synthetic oligonucleotide
  Sense strand starting at position 2163 of SEQ ID NO: 1881883
accaaaucaguucguauuu

SEQ ID NO: 2078395 - RNA, 19 nt, Artificial Sequence
  Description of Artificial Sequence: Synthetic oligonucleotide
  Antisense strand to SEQ ID NO: 2078394
aaauacgaacugauuuggu

SEQ ID NO: 2078396 - RNA, 19 nt, Artificial Sequence
  Description of Artificial Sequence: Synthetic oligonucleotide
  Sense strand starting at position 2270 of SEQ ID NO: 1881883
gaaggaucagcucacguua

SEQ ID NO: 2078397 - RNA, 19 nt, Artificial Sequence
  Description of Artificial Sequence: Synthetic oligonucleotide
  Antisense strand to SEQ ID NO: 2078396
uaacgugagcugauccuuc

SEQ ID NO: 2078398 - RNA, 19 nt, Artificial Sequence
  Description of Artificial Sequence: Synthetic oligonucleotide
  Sense strand starting at position 2469 of SEQ ID NO: 1881883
auccaaugucccugguuga

SEQ ID NO: 2078399 - RNA, 19 nt, Artificial Sequence
  Description of Artificial Sequence: Synthetic oligonucleotide
  Antisense strand to SEQ ID NO: 2078398
ucaaccagggacauuggau

SEQ ID NO: 2078400 - RNA, 19 nt, Artificial Sequence
  Description of Artificial Sequence: Synthetic oligonucleotide
  Sense strand starting at position 2470 of SEQ ID NO: 1881883
uccaaugucccugguugaa

SEQ ID NO: 2078401 - RNA, 19 nt, Artificial Sequence
  Description of Artificial Sequence: Synthetic oligonucleotide
  Antisense strand to SEQ ID NO: 2078400
uucaaccagggacauugga

SEQ ID NO: 2078402 - RNA, 19 nt, Artificial Sequence
  Description of Artificial Sequence: Synthetic oligonucleotide
  Sense strand starting at position 2472 of SEQ ID NO: 1881883
caaugucccugguugaaga

SEQ ID NO: 2078403 - RNA, 19 nt, Artificial Sequence
  Description of Artificial Sequence: Synthetic oligonucleotide
  Antisense strand to SEQ ID NO: 2078402
ucuucaaccagggacauug

SEQ ID NO: 2078404 - RNA, 19 nt, Artificial Sequence
  Description of Artificial Sequence: Synthetic oligonucleotide
  Sense strand starting at position 2485 of SEQ ID NO: 1881883
ugaagauaauacguaguca

SEQ ID NO: 2078405 - RNA, 19 nt, Artificial Sequence
  Description of Artificial Sequence: Synthetic oligonucleotide
  Antisense strand to SEQ ID NO: 2078404
ugacuacguauuaucuuca

SEQ ID NO: 2078406 - RNA, 19 nt, Artificial Sequence
  Description of Artificial Sequence: Synthetic oligonucleotide
  Sense strand starting at position 2608 of SEQ ID NO: 1881883
uuuaauauggcugagugau

SEQ ID NO: 2078407 - RNA, 19 nt, Artificial Sequence
  Description of Artificial Sequence: Synthetic oligonucleotide
  Antisense strand to SEQ ID NO: 2078406
aucacucagccauauuaaa

SEQ ID NO: 2078408 - RNA, 19 nt, Artificial Sequence
  Description of Artificial Sequence: Synthetic oligonucleotide
  Sense strand starting at position 2704 of SEQ ID NO: 1881883
auggaagcuuccucaauaa

SEQ ID NO: 2078409 - RNA, 19 nt, Artificial Sequence
  Description of Artificial Sequence: Synthetic oligonucleotide
  Antisense strand to SEQ ID NO: 2078408
uuauugaggaagcuuccau

SEQ ID NO: 2078410 - RNA, 19 nt, Artificial Sequence
  Description of Artificial Sequence: Synthetic oligonucleotide
  Sense strand starting at position 2734 of SEQ ID NO: 1881883
ucaagaaaugauugagcuu

SEQ ID NO: 2078411 - RNA, 19 nt, Artificial Sequence
  Description of Artificial Sequence: Synthetic oligonucleotide
  Antisense strand to SEQ ID NO: 2078410
aagcucaaucauuucuuga

SEQ ID NO: 2078412 - RNA, 19 nt, Artificial Sequence
  Description of Artificial Sequence: Synthetic oligonucleotide
  Sense strand starting at position 2942 of SEQ ID NO: 1881883
aagagcuuugucuauguaa

SEQ ID NO: 2078413 - RNA, 19 nt, Artificial Sequence
  Description of Artificial Sequence: Synthetic oligonucleotide
  Antisense strand to SEQ ID NO: 2078412
uuacauagacaaagcucuu

SEQ ID NO: 2078414 - RNA, 19 nt, Artificial Sequence
  Description of Artificial Sequence: Synthetic oligonucleotide
  Sense strand starting at position 3066 of SEQ ID NO: 1881883
uuauaaagguauccuuaga

SEQ ID NO: 2078415 - RNA, 19 nt, Artificial Sequence
  Description of Artificial Sequence: Synthetic oligonucleotide
  Antisense strand to SEQ ID NO: 2078414
ucuaaggauaccuuuauaa

SEQ ID NO: 2078416 - RNA, 19 nt, Artificial Sequence
  Description of Artificial Sequence: Synthetic oligonucleotide
  Sense strand starting at position 3303 of SEQ ID NO: 1881883
auaauaaguucccugacag

SEQ ID NO: 2078417 - RNA, 19 nt, Artificial Sequence
  Description of Artificial Sequence: Synthetic oligonucleotide
  Antisense strand to SEQ ID NO: 2078416
cugucagggaacuuauuau

SEQ ID NO: 2078418 - RNA, 19 nt, Artificial Sequence
  Description of Artificial Sequence: Synthetic oligonucleotide
  Sense strand starting at position 3419 of SEQ ID NO: 1881883
ugggcagagugagucaaua

SEQ ID NO: 2078419 - RNA, 19 nt, Artificial Sequence
  Description of Artificial Sequence: Synthetic oligonucleotide
  Antisense strand to SEQ ID NO: 2078418
uauugacucacucugccca

SEQ ID NO: 2078420 - RNA, 19 nt, Artificial Sequence
  Description of Artificial Sequence: Synthetic oligonucleotide
  Sense strand starting at position 3533 of SEQ ID NO: 1881883
ggucuucugagcugauaga

SEQ ID NO: 2078421 - RNA, 19 nt, Artificial Sequence
  Description of Artificial Sequence: Synthetic oligonucleotide
  Antisense strand to SEQ ID NO: 2078420
ucuaucagcucagaagacc

SEQ ID NO: 2078422 - RNA, 19 nt, Artificial Sequence
  Description of Artificial Sequence: Synthetic oligonucleotide
  Sense strand starting at position 3554 of SEQ ID NO: 1881883
guuagauuauaaccugauu

SEQ ID NO: 2078423 - RNA, 19 nt, Artificial Sequence
  Description of Artificial Sequence: Synthetic oligonucleotide
  Antisense strand to SEQ ID NO: 2078422
aaucagguuauaaucuaac

SEQ ID NO: 2078424 - RNA, 19 nt, Artificial Sequence
  Description of Artificial Sequence: Synthetic oligonucleotide
  Sense strand starting at position 3597 of SEQ ID NO: 1881883
gacacaauugaugguguau

SEQ ID NO: 2078425 - RNA, 19 nt, Artificial Sequence
  Description of Artificial Sequence: Synthetic oligonucleotide
  Antisense strand to SEQ ID NO: 2078424
auacaccaucaauuguguc

SEQ ID NO: 2078426 - RNA, 19 nt, Artificial Sequence
  Description of Artificial Sequence: Synthetic oligonucleotide
  Sense strand starting at position 3741 of SEQ ID NO: 1881883
ugcuaaguaaugggaaugu

SEQ ID NO: 2078427 - RNA, 19 nt, Artificial Sequence
  Description of Artificial Sequence: Synthetic oligonucleotide
  Antisense strand to SEQ ID NO: 2078426
acauucccauuacuuagca

SEQ ID NO: 2078428 - RNA, 19 nt, Artificial Sequence
  Description of Artificial Sequence: Synthetic oligonucleotide
  Sense strand starting at position 3882 of SEQ ID NO: 1881883
aauggauucuggucuuaau

SEQ ID NO: 2078429 - RNA, 19 nt, Artificial Sequence
  Description of Artificial Sequence: Synthetic oligonucleotide
  Antisense strand to SEQ ID NO: 2078428
auuaagaccagaauccauu

SEQ ID NO: 2078430 - RNA, 19 nt, Artificial Sequence
  Description of Artificial Sequence: Synthetic oligonucleotide
  Sense strand starting at position 3894 of SEQ ID NO: 1881883
ucuuaaucacugugguuaa

SEQ ID NO: 2078431 - RNA, 19 nt, Artificial Sequence
  Description of Artificial Sequence: Synthetic oligonucleotide
  Antisense strand to SEQ ID NO: 2078430
uuaaccacagugauuaaga

SEQ ID NO: 2078432 - RNA, 19 nt, Artificial Sequence
  Description of Artificial Sequence: Synthetic oligonucleotide
  Sense strand starting at position 3897 of SEQ ID NO: 1881883
uaaucacugugguuaaagu

SEQ ID NO: 2078433 - RNA, 19 nt, Artificial Sequence
  Description of Artificial Sequence: Synthetic oligonucleotide
  Antisense strand to SEQ ID NO: 2078432
acuuuaaccacagugauua

SEQ ID NO: 2078434 - RNA, 19 nt, Artificial Sequence
  Description of Artificial Sequence: Synthetic oligonucleotide
  Sense strand starting at position 3927 of SEQ ID NO: 1881883
gagagacaguuugcuaaga

SEQ ID NO: 2078435 - RNA, 19 nt, Artificial Sequence
  Description of Artificial Sequence: Synthetic oligonucleotide
  Antisense strand to SEQ ID NO: 2078434
ucuuagcaaacugucucuc

SEQ ID NO: 2078436 - RNA, 19 nt, Artificial Sequence
  Description of Artificial Sequence: Synthetic oligonucleotide
  Sense strand starting at position 3937 of SEQ ID NO: 1881883
uugcuaagaagucagguuu

SEQ ID NO: 2078437 - RNA, 19 nt, Artificial Sequence
  Description of Artificial Sequence: Synthetic oligonucleotide
  Antisense strand to SEQ ID NO: 2078436
aaaccugacuucuuagcaa

SEQ ID NO: 2078438 - RNA, 19 nt, Artificial Sequence
  Description of Artificial Sequence: Synthetic oligonucleotide
  Sense strand starting at position 90 of SEQ ID NO: 1881884
ugcccucucuccuaggaau

SEQ ID NO: 2078439 - RNA, 19 nt, Artificial Sequence
  Description of Artificial Sequence: Synthetic oligonucleotide
  Antisense strand to SEQ ID NO: 2078438
auuccuaggagagagggca

SEQ ID NO: 2078440 - RNA, 19 nt, Artificial Sequence
  Description of Artificial Sequence: Synthetic oligonucleotide
  Sense strand starting at position 93 of SEQ ID NO: 1881884
ccucucuccuaggaauuga

SEQ ID NO: 2078441 - RNA, 19 nt, Artificial Sequence
  Description of Artificial Sequence: Synthetic oligonucleotide
  Antisense strand to SEQ ID NO: 2078440
ucaauuccuaggagagagg

SEQ ID NO: 2078442 - RNA, 19 nt, Artificial Sequence
  Description of Artificial Sequence: Synthetic oligonucleotide
  Sense strand starting at position 1209 of SEQ ID NO: 1881884
cagagauacucuggcgucu

SEQ ID NO: 2078443 - RNA, 19 nt, Artificial Sequence
  Description of Artificial Sequence: Synthetic oligonucleotide
  Antisense strand to SEQ ID NO: 2078442
agacgccagaguaucucug

SEQ ID NO: 2078444 - RNA, 19 nt, Artificial Sequence
  Description of Artificial Sequence: Synthetic oligonucleotide
  Sense strand starting at position 1292 of SEQ ID NO: 1881884
gcuaguccgcgaguccaaa

SEQ ID NO: 2078445 - RNA, 19 nt, Artificial Sequence
  Description of Artificial Sequence: Synthetic oligonucleotide
  Antisense strand to SEQ ID NO: 2078444
uuuggacucgcggacuagc

SEQ ID NO: 2078446 - RNA, 19 nt, Artificial Sequence
  Description of Artificial Sequence: Synthetic oligonucleotide
  Sense strand starting at position 1517 of SEQ ID NO: 1881884
ggcgguuugagauggagga

SEQ ID NO: 2078447 - RNA, 19 nt, Artificial Sequence
  Description of Artificial Sequence: Synthetic oligonucleotide
  Antisense strand to SEQ ID NO: 2078446
uccuccaucucaaaccgcc

SEQ ID NO: 2078448 - RNA, 19 nt, Artificial Sequence
  Description of Artificial Sequence: Synthetic oligonucleotide
  Sense strand starting at position 1518 of SEQ ID NO: 1881884
gcgguuugagauggaggaa

SEQ ID NO: 2078449 - RNA, 19 nt, Artificial Sequence
  Description of Artificial Sequence: Synthetic oligonucleotide
  Antisense strand to SEQ ID NO: 2078448
uuccuccaucucaaaccgc

SEQ ID NO: 2078450 - RNA, 19 nt, Artificial Sequence
  Description of Artificial Sequence: Synthetic oligonucleotide
  Sense strand starting at position 2358 of SEQ ID NO: 1881884
aacggauuugcgugaaacc

SEQ ID NO: 2078451 - RNA, 19 nt, Artificial Sequence
  Description of Artificial Sequence: Synthetic oligonucleotide
  Antisense strand to SEQ ID NO: 2078450
gguuucacgcaaauccguu

SEQ ID NO: 2078452 - RNA, 19 nt, Artificial Sequence
  Description of Artificial Sequence: Synthetic oligonucleotide
  Sense strand starting at position 2544 of SEQ ID NO: 1881884
gucuuugaacugcagguaa

SEQ ID NO: 2078453 - RNA, 19 nt, Artificial Sequence
  Description of Artificial Sequence: Synthetic oligonucleotide
  Antisense strand to SEQ ID NO: 2078452
uuaccugcaguucaaagac

SEQ ID NO: 2078454 - RNA, 19 nt, Artificial Sequence
  Description of Artificial Sequence: Synthetic oligonucleotide
  Sense strand starting at position 2785 of SEQ ID NO: 1881884
ggcggagcuugccaagaau

SEQ ID NO: 2078455 - RNA, 19 nt, Artificial Sequence
  Description of Artificial Sequence: Synthetic oligonucleotide
  Antisense strand to SEQ ID NO: 2078454
auucuuggcaagcuccgcc

SEQ ID NO: 2078456 - RNA, 19 nt, Artificial Sequence
  Description of Artificial Sequence: Synthetic oligonucleotide
  Sense strand starting at position 3269 of SEQ ID NO: 1881884
cagaucaaguguugacagu

SEQ ID NO: 2078457 - RNA, 19 nt, Artificial Sequence
  Description of Artificial Sequence: Synthetic oligonucleotide
  Antisense strand to SEQ ID NO: 2078456
acugucaacacuugaucug

SEQ ID NO: 2078458 - RNA, 19 nt, Artificial Sequence
  Description of Artificial Sequence: Synthetic oligonucleotide
  Sense strand starting at position 3351 of SEQ ID NO: 1881884
uugagucccuggugggaaa

SEQ ID NO: 2078459 - RNA, 19 nt, Artificial Sequence
  Description of Artificial Sequence: Synthetic oligonucleotide
  Antisense strand to SEQ ID NO: 2078458
uuucccaccagggacucaa

SEQ ID NO: 2078460 - RNA, 19 nt, Artificial Sequence
  Description of Artificial Sequence: Synthetic oligonucleotide
  Sense strand starting at position 3455 of SEQ ID NO: 1881884
ggagaagcucucgacccua

SEQ ID NO: 2078461 - RNA, 19 nt, Artificial Sequence
  Description of Artificial Sequence: Synthetic oligonucleotide
  Antisense strand to SEQ ID NO: 2078460
uagggucgagagcuucucc

SEQ ID NO: 2078462 - RNA, 19 nt, Artificial Sequence
  Description of Artificial Sequence: Synthetic oligonucleotide
  Sense strand starting at position 3482 of SEQ ID NO: 1881884
cacuguuacuuggaucaga

SEQ ID NO: 2078463 - RNA, 19 nt, Artificial Sequence
  Description of Artificial Sequence: Synthetic oligonucleotide
  Antisense strand to SEQ ID NO: 2078462
ucugauccaaguaacagug

SEQ ID NO: 2078464 - RNA, 19 nt, Artificial Sequence
  Description of Artificial Sequence: Synthetic oligonucleotide
  Sense strand starting at position 3520 of SEQ ID NO: 1881884
gggauucagugguuauucu

SEQ ID NO: 2078465 - RNA, 19 nt, Artificial Sequence
  Description of Artificial Sequence: Synthetic oligonucleotide
  Antisense strand to SEQ ID NO: 2078464
agaauaaccacugaauccc

SEQ ID NO: 2078466 - RNA, 19 nt, Artificial Sequence
  Description of Artificial Sequence: Synthetic oligonucleotide
  Sense strand starting at position 3527 of SEQ ID NO: 1881884
agugguuauucuccacacu

SEQ ID NO: 2078467 - RNA, 19 nt, Artificial Sequence
  Description of Artificial Sequence: Synthetic oligonucleotide
  Antisense strand to SEQ ID NO: 2078466
aguguggagaauaaccacu

SEQ ID NO: 2078468 - RNA, 19 nt, Artificial Sequence
  Description of Artificial Sequence: Synthetic oligonucleotide
  Sense strand starting at position 3713 of SEQ ID NO: 1881884
acaaguggcuguucugaca

SEQ ID NO: 2078469 - RNA, 19 nt, Artificial Sequence
  Description of Artificial Sequence: Synthetic oligonucleotide
  Antisense strand to SEQ ID NO: 2078468
ugucagaacagccacuugu

SEQ ID NO: 2078470 - RNA, 19 nt, Artificial Sequence
  Description of Artificial Sequence: Synthetic oligonucleotide
  Sense strand starting at position 3736 of SEQ ID NO: 1881884
cccaguuugucccaucuga

SEQ ID NO: 2078471 - RNA, 19 nt, Artificial Sequence
  Description of Artificial Sequence: Synthetic oligonucleotide
  Antisense strand to SEQ ID NO: 2078470
ucagaugggacaaacuggg

SEQ ID NO: 2078472 - RNA, 19 nt, Artificial Sequence
  Description of Artificial Sequence: Synthetic oligonucleotide
  Sense strand starting at position 3806 of SEQ ID NO: 1881884
ccugucugugccugggaga

SEQ ID NO: 2078473 - RNA, 19 nt, Artificial Sequence
  Description of Artificial Sequence: Synthetic oligonucleotide
  Antisense strand to SEQ ID NO: 2078472
ucucccaggcacagacagg

SEQ ID NO: 2078474 - RNA, 19 nt, Artificial Sequence
  Description of Artificial Sequence: Synthetic oligonucleotide
  Sense strand starting at position 3807 of SEQ ID NO: 1881884
cugucugugccugggagaa

SEQ ID NO: 2078475 - RNA, 19 nt, Artificial Sequence
  Description of Artificial Sequence: Synthetic oligonucleotide
  Antisense strand to SEQ ID NO: 2078474
uucucccaggcacagacag

SEQ ID NO: 2078476 - RNA, 19 nt, Artificial Sequence
  Description of Artificial Sequence: Synthetic oligonucleotide
  Sense strand starting at position 3809 of SEQ ID NO: 1881884
gucugugccugggagaaca

SEQ ID NO: 2078477 - RNA, 19 nt, Artificial Sequence
  Description of Artificial Sequence: Synthetic oligonucleotide
  Antisense strand to SEQ ID NO: 2078476
uguucucccaggcacagac

SEQ ID NO: 2078478 - RNA, 19 nt, Artificial Sequence
  Description of Artificial Sequence: Synthetic oligonucleotide
  Sense strand starting at position 3 of SEQ ID NO: 1881885
aaagguaucuuuggauuac

SEQ ID NO: 2078479 - RNA, 19 nt, Artificial Sequence
  Description of Artificial Sequence: Synthetic oligonucleotide
  Antisense strand to SEQ ID NO: 2078478
guaauccaaagauaccuuu

SEQ ID NO: 2078480 - RNA, 19 nt, Artificial Sequence
  Description of Artificial Sequence: Synthetic oligonucleotide
  Sense strand starting at position 45 of SEQ ID NO: 1881885
cuggcaagauuguugcaau

SEQ ID NO: 2078481 - RNA, 19 nt, Artificial Sequence
  Description of Artificial Sequence: Synthetic oligonucleotide
  Antisense strand to SEQ ID NO: 2078480
auugcaacaaucuugccag

SEQ ID NO: 2078482 - RNA, 19 nt, Artificial Sequence
  Description of Artificial Sequence: Synthetic oligonucleotide
  Sense strand starting at position 75 of SEQ ID NO: 1881885
uguguacuucugcaaagca

SEQ ID NO: 2078483 - RNA, 19 nt, Artificial Sequence
  Description of Artificial Sequence: Synthetic oligonucleotide
  Antisense strand to SEQ ID NO: 2078482
ugcuuugcagaaguacaca

SEQ ID NO: 2078484 - RNA, 19 nt, Artificial Sequence
  Description of Artificial Sequence: Synthetic oligonucleotide
  Sense strand starting at position 2241 of SEQ ID NO: 1881885
cuugcuuucucggcgucau

SEQ ID NO: 2078485 - RNA, 19 nt, Artificial Sequence
  Description of Artificial Sequence: Synthetic oligonucleotide
  Antisense strand to SEQ ID NO: 2078484
augacgccgagaaagcaag

SEQ ID NO: 2078486 - RNA, 19 nt, Artificial Sequence
  Description of Artificial Sequence: Synthetic oligonucleotide
  Sense strand starting at position 2325 of SEQ ID NO: 1881885
ggcgacgacugguuacuua

SEQ ID NO: 2078487 - RNA, 19 nt, Artificial Sequence
  Description of Artificial Sequence: Synthetic oligonucleotide
  Antisense strand to SEQ ID NO: 2078486
uaaguaaccagucgucgcc

SEQ ID NO: 2078488 - RNA, 19 nt, Artificial Sequence
  Description of Artificial Sequence: Synthetic oligonucleotide
  Sense strand starting at position 2379 of SEQ ID NO: 1881885
augaauuguuagcuccacu

SEQ ID NO: 2078489 - RNA, 19 nt, Artificial Sequence
  Description of Artificial Sequence: Synthetic oligonucleotide
  Antisense strand to SEQ ID NO: 2078488
aguggagcuaacaauucau

SEQ ID NO: 2078490 - RNA, 19 nt, Artificial Sequence
  Description of Artificial Sequence: Synthetic oligonucleotide
  Sense strand starting at position 2991 of SEQ ID NO: 1881885
gcgggucugcgggaaguuu

SEQ ID NO: 2078491 - RNA, 19 nt, Artificial Sequence
  Description of Artificial Sequence: Synthetic oligonucleotide
  Antisense strand to SEQ ID NO: 2078490
aaacuucccgcagacccgc

SEQ ID NO: 2078492 - RNA, 19 nt, Artificial Sequence
  Description of Artificial Sequence: Synthetic oligonucleotide
  Sense strand starting at position 3003 of SEQ ID NO: 1881885
gaaguuugaggcgggaaga

SEQ ID NO: 2078493 - RNA, 19 nt, Artificial Sequence
  Description of Artificial Sequence: Synthetic oligonucleotide
  Antisense strand to SEQ ID NO: 2078492
ucuucccgccucaaacuuc

SEQ ID NO: 2078494 - RNA, 19 nt, Artificial Sequence
  Description of Artificial Sequence: Synthetic oligonucleotide
  Sense strand starting at position 3107 of SEQ ID NO: 1881885
gaggaugguuuccaaaccu

SEQ ID NO: 2078495 - RNA, 19 nt, Artificial Sequence
  Description of Artificial Sequence: Synthetic oligonucleotide
  Antisense strand to SEQ ID NO: 2078494
agguuuggaaaccauccuc

SEQ ID NO: 2078496 - RNA, 19 nt, Artificial Sequence
  Description of Artificial Sequence: Synthetic oligonucleotide
  Sense strand starting at position 3116 of SEQ ID NO: 1881885
uuccaaaccucuuucgagu

SEQ ID NO: 2078497 - RNA, 19 nt, Artificial Sequence
  Description of Artificial Sequence: Synthetic oligonucleotide
  Antisense strand to SEQ ID NO: 2078496
acucgaaagagguuuggaa

SEQ ID NO: 2078498 - RNA, 19 nt, Artificial Sequence
  Description of Artificial Sequence: Synthetic oligonucleotide
  Sense strand starting at position 3127 of SEQ ID NO: 1881885
uuucgagugccgcuuuaaa

SEQ ID NO: 2078499 - RNA, 19 nt, Artificial Sequence
  Description of Artificial Sequence: Synthetic oligonucleotide
  Antisense strand to SEQ ID NO: 2078498
uuuaaagcggcacucgaaa

SEQ ID NO: 2078500 - RNA, 19 nt, Artificial Sequence
  Description of Artificial Sequence: Synthetic oligonucleotide
  Sense strand starting at position 3263 of SEQ ID NO: 1881885
agaacucaggguugugaaa

SEQ ID NO: 2078501 - RNA, 19 nt, Artificial Sequence
  Description of Artificial Sequence: Synthetic oligonucleotide
  Antisense strand to SEQ ID NO: 2078500
uuucacaacccugaguucu

SEQ ID NO: 2078502 - RNA, 19 nt, Artificial Sequence
  Description of Artificial Sequence: Synthetic oligonucleotide
  Sense strand starting at position 3291 of SEQ ID NO: 1881885
gaggacuuauucggauaag

SEQ ID NO: 2078503 - RNA, 19 nt, Artificial Sequence
  Description of Artificial Sequence: Synthetic oligonucleotide
  Antisense strand to SEQ ID NO: 2078502
cuuauccgaauaaguccuc

SEQ ID NO: 2078504 - RNA, 19 nt, Artificial Sequence
  Description of Artificial Sequence: Synthetic oligonucleotide
  Sense strand starting at position 3292 of SEQ ID NO: 1881885
aggacuuauucggauaagg

SEQ ID NO: 2078505 - RNA, 19 nt, Artificial Sequence
  Description of Artificial Sequence: Synthetic oligonucleotide
  Antisense strand to SEQ ID NO: 2078504
ccuuauccgaauaaguccu

SEQ ID NO: 2078506 - RNA, 19 nt, Artificial Sequence
  Description of Artificial Sequence: Synthetic oligonucleotide
  Sense strand starting at position 3425 of SEQ ID NO: 1881885
aaaggcaguuuguuaacau

SEQ ID NO: 2078507 - RNA, 19 nt, Artificial Sequence
  Description of Artificial Sequence: Synthetic oligonucleotide
  Antisense strand to SEQ ID NO: 2078506
auguuaacaaacugccuuu

SEQ ID NO: 2078508 - RNA, 19 nt, Artificial Sequence
  Description of Artificial Sequence: Synthetic oligonucleotide
  Sense strand starting at position 3426 of SEQ ID NO: 1881885
aaggcaguuuguuaacaua

SEQ ID NO: 2078509 - RNA, 19 nt, Artificial Sequence
  Description of Artificial Sequence: Synthetic oligonucleotide
  Antisense strand to SEQ ID NO: 2078508
uauguuaacaaacugccuu

SEQ ID NO: 2078510 - RNA, 19 nt, Artificial Sequence
  Description of Artificial Sequence: Synthetic oligonucleotide
  Sense strand starting at position 3478 of SEQ ID NO: 1881885
gcacuuugacuaggguuga

SEQ ID NO: 2078511 - RNA, 19 nt, Artificial Sequence
  Description of Artificial Sequence: Synthetic oligonucleotide
  Antisense strand to SEQ ID NO: 2078510
ucaacccuagucaaagugc

SEQ ID NO: 2078512 - RNA, 19 nt, Artificial Sequence
  Description of Artificial Sequence: Synthetic oligonucleotide
  Sense strand starting at position 3482 of SEQ ID NO: 1881885
uuugacuaggguugagauu

SEQ ID NO: 2078513 - RNA, 19 nt, Artificial Sequence
  Description of Artificial Sequence: Synthetic oligonucleotide
  Antisense strand to SEQ ID NO: 2078512
aaucucaacccuagucaaa

SEQ ID NO: 2078514 - RNA, 19 nt, Artificial Sequence
  Description of Artificial Sequence: Synthetic oligonucleotide
  Sense strand starting at position 3548 of SEQ ID NO: 1881885
gauaaccuguucuugcaga

SEQ ID NO: 2078515 - RNA, 19 nt, Artificial Sequence
  Description of Artificial Sequence: Synthetic oligonucleotide
  Antisense strand to SEQ ID NO: 2078514
ucugcaagaacagguuauc

SEQ ID NO: 2078516 - RNA, 19 nt, Artificial Sequence
  Description of Artificial Sequence: Synthetic oligonucleotide
  Sense strand starting at position 3553 of SEQ ID NO: 1881885
ccuguucuugcagagucua

SEQ ID NO: 2078517 - RNA, 19 nt, Artificial Sequence
  Description of Artificial Sequence: Synthetic oligonucleotide
  Antisense strand to SEQ ID NO: 2078516
uagacucugcaagaacagg

SEQ ID NO: 2078518 - RNA, 19 nt, Artificial Sequence
  Description of Artificial Sequence: Synthetic oligonucleotide
  Sense strand starting at position 3608 of SEQ ID NO: 1881885
gaugcagacuuugcuauca

SEQ ID NO: 2078519 - RNA, 19 nt, Artificial Sequence
  Description of Artificial Sequence: Synthetic oligonucleotide
  Antisense strand to SEQ ID NO: 2078518
ugauagcaaagucugcauc

SEQ ID NO: 2078520 - RNA, 19 nt, Artificial Sequence
  Description of Artificial Sequence: Synthetic oligonucleotide
  Sense strand starting at position 3613 of SEQ ID NO: 1881885
agacuuugcuaucauugag

SEQ ID NO: 2078521 - RNA, 19 nt, Artificial Sequence
  Description of Artificial Sequence: Synthetic oligonucleotide
  Antisense strand to SEQ ID NO: 2078520
cucaaugauagcaaagucu

SEQ ID NO: 2078522 - RNA, 19 nt, Artificial Sequence
  Description of Artificial Sequence: Synthetic oligonucleotide
  Sense strand starting at position 3619 of SEQ ID NO: 1881885
ugcuaucauugaguuggua

SEQ ID NO: 2078523 - RNA, 19 nt, Artificial Sequence
  Description of Artificial Sequence: Synthetic oligonucleotide
  Antisense strand to SEQ ID NO: 2078522
uaccaacucaaugauagca

SEQ ID NO: 2078524 - RNA, 19 nt, Artificial Sequence
  Description of Artificial Sequence: Synthetic oligonucleotide
  Sense strand starting at position 3622 of SEQ ID NO: 1881885
uaucauugaguugguaaca

SEQ ID NO: 2078525 - RNA, 19 nt, Artificial Sequence
  Description of Artificial Sequence: Synthetic oligonucleotide
  Antisense strand to SEQ ID NO: 2078524
uguuaccaacucaaugaua

SEQ ID NO: 2078526 - RNA, 19 nt, Artificial Sequence
  Description of Artificial Sequence: Synthetic oligonucleotide
  Sense strand starting at position 3623 of SEQ ID NO: 1881885
aucauugaguugguaacaa

SEQ ID NO: 2078527 - RNA, 19 nt, Artificial Sequence
  Description of Artificial Sequence: Synthetic oligonucleotide
  Antisense strand to SEQ ID NO: 2078526
uuguuaccaacucaaugau

SEQ ID NO: 2078528 - RNA, 19 nt, Artificial Sequence
  Description of Artificial Sequence: Synthetic oligonucleotide
  Sense strand starting at position 3656 of SEQ ID NO: 1881885
ucucuuguggaauggaaau

SEQ ID NO: 2078529 - RNA, 19 nt, Artificial Sequence
  Description of Artificial Sequence: Synthetic oligonucleotide
  Antisense strand to SEQ ID NO: 2078528
auuuccauuccacaagaga

SEQ ID NO: 2078530 - RNA, 19 nt, Artificial Sequence
  Description of Artificial Sequence: Synthetic oligonucleotide
  Sense strand starting at position 3662 of SEQ ID NO: 1881885
guggaauggaaauaaucgu

SEQ ID NO: 2078531 - RNA, 19 nt, Artificial Sequence
  Description of Artificial Sequence: Synthetic oligonucleotide
  Antisense strand to SEQ ID NO: 2078530
acgauuauuuccauuccac

SEQ ID NO: 2078532 - RNA, 19 nt, Artificial Sequence
  Description of Artificial Sequence: Synthetic oligonucleotide
  Sense strand starting at position 3668 of SEQ ID NO: 1881885
uggaaauaaucguaggagu

SEQ ID NO: 2078533 - RNA, 19 nt, Artificial Sequence
  Description of Artificial Sequence: Synthetic oligonucleotide
  Antisense strand to SEQ ID NO: 2078532
acuccuacgauuauuucca

SEQ ID NO: 2078534 - RNA, 19 nt, Artificial Sequence
  Description of Artificial Sequence: Synthetic oligonucleotide
  Sense strand starting at position 3670 of SEQ ID NO: 1881885
gaaauaaucguaggaguga

SEQ ID NO: 2078535 - RNA, 19 nt, Artificial Sequence
  Description of Artificial Sequence: Synthetic oligonucleotide
  Antisense strand to SEQ ID NO: 2078534
ucacuccuacgauuauuuc

SEQ ID NO: 2078536 - RNA, 19 nt, Artificial Sequence
  Description of Artificial Sequence: Synthetic oligonucleotide
  Sense strand starting at position 3671 of SEQ ID NO: 1881885
aaauaaucguaggagugaa

SEQ ID NO: 2078537 - RNA, 19 nt, Artificial Sequence
  Description of Artificial Sequence: Synthetic oligonucleotide
  Antisense strand to SEQ ID NO: 2078536
uucacuccuacgauuauuu

SEQ ID NO: 2078538 - RNA, 19 nt, Artificial Sequence
  Description of Artificial Sequence: Synthetic oligonucleotide
  Sense strand starting at position 3684 of SEQ ID NO: 1881885
agugaauucucuuugcuga

SEQ ID NO: 2078539 - RNA, 19 nt, Artificial Sequence
  Description of Artificial Sequence: Synthetic oligonucleotide
  Antisense strand to SEQ ID NO: 2078538
ucagcaaagagaauucacu

SEQ ID NO: 2078540 - RNA, 19 nt, Artificial Sequence
  Description of Artificial Sequence: Synthetic oligonucleotide
  Sense strand starting at position 3685 of SEQ ID NO: 1881885
gugaauucucuuugcugag

SEQ ID NO: 2078541 - RNA, 19 nt, Artificial Sequence
  Description of Artificial Sequence: Synthetic oligonucleotide
  Antisense strand to SEQ ID NO: 2078540
cucagcaaagagaauucac

SEQ ID NO: 2078542 - RNA, 19 nt, Artificial Sequence
  Description of Artificial Sequence: Synthetic oligonucleotide
  Sense strand starting at position 3805 of SEQ ID NO: 1881885
agagaucuccuuuguuuau

SEQ ID NO: 2078543 - RNA, 19 nt, Artificial Sequence
  Description of Artificial Sequence: Synthetic oligonucleotide
  Antisense strand to SEQ ID NO: 2078542
auaaacaaaggagaucucu

SEQ ID NO: 2078544 - RNA, 19 nt, Artificial Sequence
  Description of Artificial Sequence: Synthetic oligonucleotide
  Sense strand starting at position 3817 of SEQ ID NO: 1881885
uguuuauucguggauggcu

SEQ ID NO: 2078545 - RNA, 19 nt, Artificial Sequence
  Description of Artificial Sequence: Synthetic oligonucleotide
  Antisense strand to SEQ ID NO: 2078544
agccauccacgaauaaaca

SEQ ID NO: 2078546 - RNA, 19 nt, Artificial Sequence
  Description of Artificial Sequence: Synthetic oligonucleotide
  Sense strand starting at position 3837 of SEQ ID NO: 1881885
guaggugauucuucagugu

SEQ ID NO: 2078547 - RNA, 19 nt, Artificial Sequence
  Description of Artificial Sequence: Synthetic oligonucleotide
  Antisense strand to SEQ ID NO: 2078546
acacugaagaaucaccuac

SEQ ID NO: 2078548 - RNA, 19 nt, Artificial Sequence
  Description of Artificial Sequence: Synthetic oligonucleotide
  Sense strand starting at position 3840 of SEQ ID NO: 1881885
ggugauucuucaguguugu

SEQ ID NO: 2078549 - RNA, 19 nt, Artificial Sequence
  Description of Artificial Sequence: Synthetic oligonucleotide
  Antisense strand to SEQ ID NO: 2078548
acaacacugaagaaucacc

SEQ ID NO: 2078550 - RNA, 19 nt, Artificial Sequence
  Description of Artificial Sequence: Synthetic oligonucleotide
  Sense strand starting at position 3841 of SEQ ID NO: 1881885
gugauucuucaguguugua

SEQ ID NO: 2078551 - RNA, 19 nt, Artificial Sequence
  Description of Artificial Sequence: Synthetic oligonucleotide
  Antisense strand to SEQ ID NO: 2078550
uacaacacugaagaaucac

SEQ ID NO: 2078552 - RNA, 19 nt, Artificial Sequence
  Description of Artificial Sequence: Synthetic oligonucleotide
  Sense strand starting at position 3875 of SEQ ID NO: 1881885
guggaaauggugugucuug

SEQ ID NO: 2078553 - RNA, 19 nt, Artificial Sequence
  Description of Artificial Sequence: Synthetic oligonucleotide
  Antisense strand to SEQ ID NO: 2078552
caagacacaccauuuccac

SEQ ID NO: 2078554 - RNA, 19 nt, Artificial Sequence
  Description of Artificial Sequence: Synthetic oligonucleotide
  Sense strand starting at position 3882 of SEQ ID NO: 1881885
uggugugucuugguucauu

SEQ ID NO: 2078555 - RNA, 19 nt, Artificial Sequence
  Description of Artificial Sequence: Synthetic oligonucleotide
  Antisense strand to SEQ ID NO: 2078554
aaugaaccaagacacacca

SEQ ID NO: 2078556 - RNA, 19 nt, Artificial Sequence
  Description of Artificial Sequence: Synthetic oligonucleotide
  Sense strand starting at position 3931 of SEQ ID NO: 1881885
ucagauauaguguauauuc

SEQ ID NO: 2078557 - RNA, 19 nt, Artificial Sequence
  Description of Artificial Sequence: Synthetic oligonucleotide
  Antisense strand to SEQ ID NO: 2078556
gaauauacacuauaucuga

SEQ ID NO: 2078558 - RNA, 19 nt, Artificial Sequence
  Description of Artificial Sequence: Synthetic oligonucleotide
  Sense strand starting at position 1103 of SEQ ID NO: 1881886
cuggauucuugcuuugaaa

SEQ ID NO: 2078559 - RNA, 19 nt, Artificial Sequence
  Description of Artificial Sequence: Synthetic oligonucleotide
  Antisense strand to SEQ ID NO: 2078558
uuucaaagcaagaauccag

SEQ ID NO: 2078560 - RNA, 19 nt, Artificial Sequence
  Description of Artificial Sequence: Synthetic oligonucleotide
  Sense strand starting at position 1140 of SEQ ID NO: 1881886
aguuacagaucccugauga

SEQ ID NO: 2078561 - RNA, 19 nt, Artificial Sequence
  Description of Artificial Sequence: Synthetic oligonucleotide
  Antisense strand to SEQ ID NO: 2078560
ucaucagggaucuguaacu

SEQ ID NO: 2078562 - RNA, 19 nt, Artificial Sequence
  Description of Artificial Sequence: Synthetic oligonucleotide
  Sense strand starting at position 1141 of SEQ ID NO: 1881886
guuacagaucccugaugau

SEQ ID NO: 2078563 - RNA, 19 nt, Artificial Sequence
  Description of Artificial Sequence: Synthetic oligonucleotide
  Antisense strand to SEQ ID NO: 2078562
aucaucagggaucuguaac

SEQ ID NO: 2078564 - RNA, 19 nt, Artificial Sequence
  Description of Artificial Sequence: Synthetic oligonucleotide
  Sense strand starting at position 1428 of SEQ ID NO: 1881886
acaugaugugucuauccca

SEQ ID NO: 2078565 - RNA, 19 nt, Artificial Sequence
  Description of Artificial Sequence: Synthetic oligonucleotide
  Antisense strand to SEQ ID NO: 2078564
ugggauagacacaucaugu

SEQ ID NO: 2078566 - RNA, 19 nt, Artificial Sequence
  Description of Artificial Sequence: Synthetic oligonucleotide
  Sense strand starting at position 1431 of SEQ ID NO: 1881886
ugaugugucuaucccaaau

SEQ ID NO: 2078567 - RNA, 19 nt, Artificial Sequence
  Description of Artificial Sequence: Synthetic oligonucleotide
  Antisense strand to SEQ ID NO: 2078566
auuugggauagacacauca

SEQ ID NO: 2078568 - RNA, 19 nt, Artificial Sequence
  Description of Artificial Sequence: Synthetic oligonucleotide
  Sense strand starting at position 1554 of SEQ ID NO: 1881886
cuuugucaacuuuggaaau

SEQ ID NO: 2078569 - RNA, 19 nt, Artificial Sequence
  Description of Artificial Sequence: Synthetic oligonucleotide
  Antisense strand to SEQ ID NO: 2078568
auuuccaaaguugacaaag

SEQ ID NO: 2078570 - RNA, 19 nt, Artificial Sequence
  Description of Artificial Sequence: Synthetic oligonucleotide
  Sense strand starting at position 1637 of SEQ ID NO: 1881886
cagagucuaucacuagaga

SEQ ID NO: 2078571 - RNA, 19 nt, Artificial Sequence
  Description of Artificial Sequence: Synthetic oligonucleotide
  Antisense strand to SEQ ID NO: 2078570
ucucuagugauagacucug

SEQ ID NO: 2078572 - RNA, 19 nt, Artificial Sequence
  Description of Artificial Sequence: Synthetic oligonucleotide
  Sense strand starting at position 1859 of SEQ ID NO: 1881886
gugcucgaugaauauaauu

SEQ ID NO: 2078573 - RNA, 19 nt, Artificial Sequence
  Description of Artificial Sequence: Synthetic oligonucleotide
  Antisense strand to SEQ ID NO: 2078572
aauuauauucaucgagcac

SEQ ID NO: 2078574 - RNA, 19 nt, Artificial Sequence
  Description of Artificial Sequence: Synthetic oligonucleotide
  Sense strand starting at position 2020 of SEQ ID NO: 1881886
gauucccaucacugugaga

SEQ ID NO: 2078575 - RNA, 19 nt, Artificial Sequence
  Description of Artificial Sequence: Synthetic oligonucleotide
  Antisense strand to SEQ ID NO: 2078574
ucucacagugaugggaauc

SEQ ID NO: 2078576 - RNA, 19 nt, Artificial Sequence
  Description of Artificial Sequence: Synthetic oligonucleotide
  Sense strand starting at position 2022 of SEQ ID NO: 1881886
uucccaucacugugagauu

SEQ ID NO: 2078577 - RNA, 19 nt, Artificial Sequence
  Description of Artificial Sequence: Synthetic oligonucleotide
  Antisense strand to SEQ ID NO: 2078576
aaucucacagugaugggaa

SEQ ID NO: 2078578 - RNA, 19 nt, Artificial Sequence
  Description of Artificial Sequence: Synthetic oligonucleotide
  Sense strand starting at position 2035 of SEQ ID NO: 1881886
gagauucuaugauucugau

SEQ ID NO: 2078579 - RNA, 19 nt, Artificial Sequence
  Description of Artificial Sequence: Synthetic oligonucleotide
  Antisense strand to SEQ ID NO: 2078578
aucagaaucauagaaucuc

SEQ ID NO: 2078580 - RNA, 19 nt, Artificial Sequence
  Description of Artificial Sequence: Synthetic oligonucleotide
  Sense strand starting at position 2073 of SEQ ID NO: 1881886
uaggucuaccauuaggagu

SEQ ID NO: 2078581 - RNA, 19 nt, Artificial Sequence
  Description of Artificial Sequence: Synthetic oligonucleotide
  Antisense strand to SEQ ID NO: 2078580
acuccuaaugguagaccua

SEQ ID NO: 2078582 - RNA, 19 nt, Artificial Sequence
  Description of Artificial Sequence: Synthetic oligonucleotide
  Sense strand starting at position 2105 of SEQ ID NO: 1881886
cuguuacuuggcuaaacau

SEQ ID NO: 2078583 - RNA, 19 nt, Artificial Sequence
  Description of Artificial Sequence: Synthetic oligonucleotide
  Antisense strand to SEQ ID NO: 2078582
auguuuagccaaguaacag

SEQ ID NO: 2078584 - RNA, 19 nt, Artificial Sequence
  Description of Artificial Sequence: Synthetic oligonucleotide
  Sense strand starting at position 2155 of SEQ ID NO: 1881886
uucuccaugugguuaagaa

SEQ ID NO: 2078585 - RNA, 19 nt, Artificial Sequence
  Description of Artificial Sequence: Synthetic oligonucleotide
  Antisense strand to SEQ ID NO: 2078584
uucuuaaccacauggagaa

SEQ ID NO: 2078586 - RNA, 19 nt, Artificial Sequence
  Description of Artificial Sequence: Synthetic oligonucleotide
  Sense strand starting at position 2156 of SEQ ID NO: 1881886
ucuccaugugguuaagaau

SEQ ID NO: 2078587 - RNA, 19 nt, Artificial Sequence
  Description of Artificial Sequence: Synthetic oligonucleotide
  Antisense strand to SEQ ID NO: 2078586
auucuuaaccacauggaga

SEQ ID NO: 2078588 - RNA, 19 nt, Artificial Sequence
  Description of Artificial Sequence: Synthetic oligonucleotide
  Sense strand starting at position 2162 of SEQ ID NO: 1881886
ugugguuaagaauguugau

SEQ ID NO: 2078589 - RNA, 19 nt, Artificial Sequence
  Description of Artificial Sequence: Synthetic oligonucleotide
  Antisense strand to SEQ ID NO: 2078588
aucaacauucuuaaccaca

SEQ ID NO: 2078590 - RNA, 19 nt, Artificial Sequence
  Description of Artificial Sequence: Synthetic oligonucleotide
  Sense strand starting at position 2332 of SEQ ID NO: 1881886
gacauacagguaugcuuau

SEQ ID NO: 2078591 - RNA, 19 nt, Artificial Sequence
  Description of Artificial Sequence: Synthetic oligonucleotide
  Antisense strand to SEQ ID NO: 2078590
auaagcauaccuguauguc

SEQ ID NO: 2078592 - RNA, 19 nt, Artificial Sequence
  Description of Artificial Sequence: Synthetic oligonucleotide
  Sense strand starting at position 2368 of SEQ ID NO: 1881886
aaugaauuguccuuaggga

SEQ ID NO: 2078593 - RNA, 19 nt, Artificial Sequence
  Description of Artificial Sequence: Synthetic oligonucleotide
  Antisense strand to SEQ ID NO: 2078592
ucccuaaggacaauucauu

SEQ ID NO: 2078594 - RNA, 19 nt, Artificial Sequence
  Description of Artificial Sequence: Synthetic oligonucleotide
  Sense strand starting at position 2385 of SEQ ID NO: 1881886
gauagauacugccucugag

SEQ ID NO: 2078595 - RNA, 19 nt, Artificial Sequence
  Description of Artificial Sequence: Synthetic oligonucleotide
  Antisense strand to SEQ ID NO: 2078594
cucagaggcaguaucuauc

SEQ ID NO: 2078596 - RNA, 19 nt, Artificial Sequence
  Description of Artificial Sequence: Synthetic oligonucleotide
  Sense strand starting at position 2437 of SEQ ID NO: 1881886
uggucuggugcccaggaaa

SEQ ID NO: 2078597 - RNA, 19 nt, Artificial Sequence
  Description of Artificial Sequence: Synthetic oligonucleotide
  Antisense strand to SEQ ID NO: 2078596
uuuccugggcaccagacca

SEQ ID NO: 2078598 - RNA, 19 nt, Artificial Sequence
  Description of Artificial Sequence: Synthetic oligonucleotide
  Sense strand starting at position 2643 of SEQ ID NO: 1881886
ugaggugauaucuaaagcu

SEQ ID NO: 2078599 - RNA, 19 nt, Artificial Sequence
  Description of Artificial Sequence: Synthetic oligonucleotide
  Antisense strand to SEQ ID NO: 2078598
agcuuuagauaucaccuca

SEQ ID NO: 2078600 - RNA, 19 nt, Artificial Sequence
  Description of Artificial Sequence: Synthetic oligonucleotide
  Sense strand starting at position 2929 of SEQ ID NO: 1881886
auagaaaugucccuugcag

SEQ ID NO: 2078601 - RNA, 19 nt, Artificial Sequence
  Description of Artificial Sequence: Synthetic oligonucleotide
  Antisense strand to SEQ ID NO: 2078600
cugcaagggacauuucuau

SEQ ID NO: 2078602 - RNA, 19 nt, Artificial Sequence
  Description of Artificial Sequence: Synthetic oligonucleotide
  Sense strand starting at position 2955 of SEQ ID NO: 1881886
uggucuucucuacauaaug

SEQ ID NO: 2078603 - RNA, 19 nt, Artificial Sequence
  Description of Artificial Sequence: Synthetic oligonucleotide
  Antisense strand to SEQ ID NO: 2078602
cauuauguagagaagacca

SEQ ID NO: 2078604 - RNA, 19 nt, Artificial Sequence
  Description of Artificial Sequence: Synthetic oligonucleotide
  Sense strand starting at position 3125 of SEQ ID NO: 1881886
uuccauugauggccaagaa

SEQ ID NO: 2078605 - RNA, 19 nt, Artificial Sequence
  Description of Artificial Sequence: Synthetic oligonucleotide
  Antisense strand to SEQ ID NO: 2078604
uucuuggccaucaauggaa

SEQ ID NO: 2078606 - RNA, 19 nt, Artificial Sequence
  Description of Artificial Sequence: Synthetic oligonucleotide
  Sense strand starting at position 3140 of SEQ ID NO: 1881886
agaaaugacuccucuguuc

SEQ ID NO: 2078607 - RNA, 19 nt, Artificial Sequence
  Description of Artificial Sequence: Synthetic oligonucleotide
  Antisense strand to SEQ ID NO: 2078606
gaacagaggagucauuucu

SEQ ID NO: 2078608 - RNA, 19 nt, Artificial Sequence
  Description of Artificial Sequence: Synthetic oligonucleotide
  Sense strand starting at position 3362 of SEQ ID NO: 1881886
auggcaaacugcuuaagau

SEQ ID NO: 2078609 - RNA, 19 nt, Artificial Sequence
  Description of Artificial Sequence: Synthetic oligonucleotide
  Antisense strand to SEQ ID NO: 2078608
aucuuaagcaguuugccau

SEQ ID NO: 2078610 - RNA, 19 nt, Artificial Sequence
  Description of Artificial Sequence: Synthetic oligonucleotide
  Sense strand starting at position 3363 of SEQ ID NO: 1881886
uggcaaacugcuuaagauc

SEQ ID NO: 2078611 - RNA, 19 nt, Artificial Sequence
  Description of Artificial Sequence: Synthetic oligonucleotide
  Antisense strand to SEQ ID NO: 2078610
gaucuuaagcaguuugcca

SEQ ID NO: 2078612 - RNA, 19 nt, Artificial Sequence
  Description of Artificial Sequence: Synthetic oligonucleotide
  Sense strand starting at position 3369 of SEQ ID NO: 1881886
acugcuuaagaucaaguau

SEQ ID NO: 2078613 - RNA, 19 nt, Artificial Sequence
  Description of Artificial Sequence: Synthetic oligonucleotide
  Antisense strand to SEQ ID NO: 2078612
auacuugaucuuaagcagu

SEQ ID NO: 2078614 - RNA, 19 nt, Artificial Sequence
  Description of Artificial Sequence: Synthetic oligonucleotide
  Sense strand starting at position 3378 of SEQ ID NO: 1881886
gaucaaguaucauugaguu

SEQ ID NO: 2078615 - RNA, 19 nt, Artificial Sequence
  Description of Artificial Sequence: Synthetic oligonucleotide
  Antisense strand to SEQ ID NO: 2078614
aacucaaugauacuugauc

SEQ ID NO: 2078616 - RNA, 19 nt, Artificial Sequence
  Description of Artificial Sequence: Synthetic oligonucleotide
  Sense strand starting at position 3456 of SEQ ID NO: 1881886
cuaagugauccugacagug

SEQ ID NO: 2078617 - RNA, 19 nt, Artificial Sequence
  Description of Artificial Sequence: Synthetic oligonucleotide
  Antisense strand to SEQ ID NO: 2078616
cacugucaggaucacuuag

SEQ ID NO: 2078618 - RNA, 19 nt, Artificial Sequence
  Description of Artificial Sequence: Synthetic oligonucleotide
  Sense strand starting at position 3461 of SEQ ID NO: 1881886
ugauccugacagugaaauu

SEQ ID NO: 2078619 - RNA, 19 nt, Artificial Sequence
  Description of Artificial Sequence: Synthetic oligonucleotide
  Antisense strand to SEQ ID NO: 2078618
aauuucacugucaggauca

SEQ ID NO: 2078620 - RNA, 19 nt, Artificial Sequence
  Description of Artificial Sequence: Synthetic oligonucleotide
  Sense strand starting at position 3471 of SEQ ID NO: 1881886
agugaaauuugacauaaug

SEQ ID NO: 2078621 - RNA, 19 nt, Artificial Sequence
  Description of Artificial Sequence: Synthetic oligonucleotide
  Antisense strand to SEQ ID NO: 2078620
cauuaugucaaauuucacu

SEQ ID NO: 2078622 - RNA, 19 nt, Artificial Sequence
  Description of Artificial Sequence: Synthetic oligonucleotide
  Sense strand starting at position 3649 of SEQ ID NO: 1881886
acugcauuccuauaucugu

SEQ ID NO: 2078623 - RNA, 19 nt, Artificial Sequence
  Description of Artificial Sequence: Synthetic oligonucleotide
  Antisense strand to SEQ ID NO: 2078622
acagauauaggaaugcagu

SEQ ID NO: 2078624 - RNA, 19 nt, Artificial Sequence
  Description of Artificial Sequence: Synthetic oligonucleotide
  Sense strand starting at position 3707 of SEQ ID NO: 1881886
gcaguagggcucuaaagau

SEQ ID NO: 2078625 - RNA, 19 nt, Artificial Sequence
  Description of Artificial Sequence: Synthetic oligonucleotide
  Antisense strand to SEQ ID NO: 2078624
aucuuuagagcccuacugc

SEQ ID NO: 2078626 - RNA, 19 nt, Artificial Sequence
  Description of Artificial Sequence: Synthetic oligonucleotide
  Sense strand starting at position 3743 of SEQ ID NO: 1881886
aggauuaagugaguaucaa

SEQ ID NO: 2078627 - RNA, 19 nt, Artificial Sequence
  Description of Artificial Sequence: Synthetic oligonucleotide
  Antisense strand to SEQ ID NO: 2078626
uugauacucacuuaauccu

SEQ ID NO: 2078628 - RNA, 19 nt, Artificial Sequence
  Description of Artificial Sequence: Synthetic oligonucleotide
  Sense strand starting at position 3800 of SEQ ID NO: 1881886
aaucauguguuguuacaag

SEQ ID NO: 2078629 - RNA, 19 nt, Artificial Sequence
  Description of Artificial Sequence: Synthetic oligonucleotide
  Antisense strand to SEQ ID NO: 2078628
cuuguaacaacacaugauu

SEQ ID NO: 2078630 - RNA, 19 nt, Artificial Sequence
  Description of Artificial Sequence: Synthetic oligonucleotide
  Sense strand starting at position 3809 of SEQ ID NO: 1881886
uuguuacaagaauggaagu

SEQ ID NO: 2078631 - RNA, 19 nt, Artificial Sequence
  Description of Artificial Sequence: Synthetic oligonucleotide
  Antisense strand to SEQ ID NO: 2078630
acuuccauucuuguaacaa

SEQ ID NO: 2078632 - RNA, 19 nt, Artificial Sequence
  Description of Artificial Sequence: Synthetic oligonucleotide
  Sense strand starting at position 3810 of SEQ ID NO: 1881886
uguuacaagaauggaagua

SEQ ID NO: 2078633 - RNA, 19 nt, Artificial Sequence
  Description of Artificial Sequence: Synthetic oligonucleotide
  Antisense strand to SEQ ID NO: 2078632
uacuuccauucuuguaaca

SEQ ID NO: 2078634 - RNA, 19 nt, Artificial Sequence
  Description of Artificial Sequence: Synthetic oligonucleotide
  Sense strand starting at position 3870 of SEQ ID NO: 1881886
ucauauugguaucuuacuu

SEQ ID NO: 2078635 - RNA, 19 nt, Artificial Sequence
  Description of Artificial Sequence: Synthetic oligonucleotide
  Antisense strand to SEQ ID NO: 2078634
aaguaagauaccaauauga

SEQ ID NO: 2078636 - RNA, 19 nt, Artificial Sequence
  Description of Artificial Sequence: Synthetic oligonucleotide
  Sense strand starting at position 3877 of SEQ ID NO: 1881886
gguaucuuacuuugaggga

SEQ ID NO: 2078637 - RNA, 19 nt, Artificial Sequence
  Description of Artificial Sequence: Synthetic oligonucleotide
  Antisense strand to SEQ ID NO: 2078636
ucccucaaaguaagauacc

SEQ ID NO: 2078638 - RNA, 19 nt, Artificial Sequence
  Description of Artificial Sequence: Synthetic oligonucleotide
  Sense strand starting at position 315 of SEQ ID NO: 1881887
acuuucugugucuauuauu

SEQ ID NO: 2078639 - RNA, 19 nt, Artificial Sequence
  Description of Artificial Sequence: Synthetic oligonucleotide
  Antisense strand to SEQ ID NO: 2078638
aauaauagacacagaaagu

SEQ ID NO: 2078640 - RNA, 19 nt, Artificial Sequence
  Description of Artificial Sequence: Synthetic oligonucleotide
  Sense strand starting at position 513 of SEQ ID NO: 1881887
uggauaaugcuguaugaac

SEQ ID NO: 2078641 - RNA, 19 nt, Artificial Sequence
  Description of Artificial Sequence: Synthetic oligonucleotide
  Antisense strand to SEQ ID NO: 2078640
guucauacagcauuaucca

SEQ ID NO: 2078642 - RNA, 19 nt, Artificial Sequence
  Description of Artificial Sequence: Synthetic oligonucleotide
  Sense strand starting at position 515 of SEQ ID NO: 1881887
gauaaugcuguaugaacau

SEQ ID NO: 2078643 - RNA, 19 nt, Artificial Sequence
  Description of Artificial Sequence: Synthetic oligonucleotide
  Antisense strand to SEQ ID NO: 2078642
auguucauacagcauuauc

SEQ ID NO: 2078644 - RNA, 19 nt, Artificial Sequence
  Description of Artificial Sequence: Synthetic oligonucleotide
  Sense strand starting at position 524 of SEQ ID NO: 1881887
guaugaacaugggucgaua

SEQ ID NO: 2078645 - RNA, 19 nt, Artificial Sequence
  Description of Artificial Sequence: Synthetic oligonucleotide
  Antisense strand to SEQ ID NO: 2078644
uaucgacccauguucauac

SEQ ID NO: 2078646 - RNA, 19 nt, Artificial Sequence
  Description of Artificial Sequence: Synthetic oligonucleotide
  Sense strand starting at position 526 of SEQ ID NO: 1881887
augaacaugggucgauaaa

SEQ ID NO: 2078647 - RNA, 19 nt, Artificial Sequence
  Description of Artificial Sequence: Synthetic oligonucleotide
  Antisense strand to SEQ ID NO: 2078646
uuuaucgacccauguucau

SEQ ID NO: 2078648 - RNA, 19 nt, Artificial Sequence
  Description of Artificial Sequence: Synthetic oligonucleotide
  Sense strand starting at position 538 of SEQ ID NO: 1881887
cgauaaauaucuccuugag

SEQ ID NO: 2078649 - RNA, 19 nt, Artificial Sequence
  Description of Artificial Sequence: Synthetic oligonucleotide
  Antisense strand to SEQ ID NO: 2078648
cucaaggagauauuuaucg

SEQ ID NO: 2078650 - RNA, 19 nt, Artificial Sequence
  Description of Artificial Sequence: Synthetic oligonucleotide
  Sense strand starting at position 1156 of SEQ ID NO: 1881887
gauaauuagagaugucgag

SEQ ID NO: 2078651 - RNA, 19 nt, Artificial Sequence
  Description of Artificial Sequence: Synthetic oligonucleotide
  Antisense strand to SEQ ID NO: 2078650
cucgacaucucuaauuauc

SEQ ID NO: 2078652 - RNA, 19 nt, Artificial Sequence
  Description of Artificial Sequence: Synthetic oligonucleotide
  Sense strand starting at position 1160 of SEQ ID NO: 1881887
auuagagaugucgaguauc

SEQ ID NO: 2078653 - RNA, 19 nt, Artificial Sequence
  Description of Artificial Sequence: Synthetic oligonucleotide
  Antisense strand to SEQ ID NO: 2078652
gauacucgacaucucuaau

SEQ ID NO: 2078654 - RNA, 19 nt, Artificial Sequence
  Description of Artificial Sequence: Synthetic oligonucleotide
  Sense strand starting at position 1163 of SEQ ID NO: 1881887
agagaugucgaguaucuuu

SEQ ID NO: 2078655 - RNA, 19 nt, Artificial Sequence
  Description of Artificial Sequence: Synthetic oligonucleotide
  Antisense strand to SEQ ID NO: 2078654
aaagauacucgacaucucu

SEQ ID NO: 2078656 - RNA, 19 nt, Artificial Sequence
  Description of Artificial Sequence: Synthetic oligonucleotide
  Sense strand starting at position 1296 of SEQ ID NO: 1881887
cccagucuguuacuagaua

SEQ ID NO: 2078657 - RNA, 19 nt, Artificial Sequence
  Description of Artificial Sequence: Synthetic oligonucleotide
  Antisense strand to SEQ ID NO: 2078656
uaucuaguaacagacuggg

SEQ ID NO: 2078658 - RNA, 19 nt, Artificial Sequence
  Description of Artificial Sequence: Synthetic oligonucleotide
  Sense strand starting at position 1421 of SEQ ID NO: 1881887
agcaaaugaucuccugaaa

SEQ ID NO: 2078659 - RNA, 19 nt, Artificial Sequence
  Description of Artificial Sequence: Synthetic oligonucleotide
  Antisense strand to SEQ ID NO: 2078658
uuucaggagaucauuugcu

SEQ ID NO: 2078660 - RNA, 19 nt, Artificial Sequence
  Description of Artificial Sequence: Synthetic oligonucleotide
  Sense strand starting at position 1444 of SEQ ID NO: 1881887
ucuguaucuugaucacauu

SEQ ID NO: 2078661 - RNA, 19 nt, Artificial Sequence
  Description of Artificial Sequence: Synthetic oligonucleotide
  Antisense strand to SEQ ID NO: 2078660
aaugugaucaagauacaga

SEQ ID NO: 2078662 - RNA, 19 nt, Artificial Sequence
  Description of Artificial Sequence: Synthetic oligonucleotide
  Sense strand starting at position 1512 of SEQ ID NO: 1881887
gugaguuaucugcaaaucu

SEQ ID NO: 2078663 - RNA, 19 nt, Artificial Sequence
  Description of Artificial Sequence: Synthetic oligonucleotide
  Antisense strand to SEQ ID NO: 2078662
agauuugcagauaacucac

SEQ ID NO: 2078664 - RNA, 19 nt, Artificial Sequence
  Description of Artificial Sequence: Synthetic oligonucleotide
  Sense strand starting at position 1533 of SEQ ID NO: 1881887
ucaguuuaggaguggaaga

SEQ ID NO: 2078665 - RNA, 19 nt, Artificial Sequence
  Description of Artificial Sequence: Synthetic oligonucleotide
  Antisense strand to SEQ ID NO: 2078664
ucuuccacuccuaaacuga

SEQ ID NO: 2078666 - RNA, 19 nt, Artificial Sequence
  Description of Artificial Sequence: Synthetic oligonucleotide
  Sense strand starting at position 1534 of SEQ ID NO: 1881887
caguuuaggaguggaagaa

SEQ ID NO: 2078667 - RNA, 19 nt, Artificial Sequence
  Description of Artificial Sequence: Synthetic oligonucleotide
  Antisense strand to SEQ ID NO: 2078666
uucuuccacuccuaaacug

SEQ ID NO: 2078668 - RNA, 19 nt, Artificial Sequence
  Description of Artificial Sequence: Synthetic oligonucleotide
  Sense strand starting at position 1546 of SEQ ID NO: 1881887
ggaagaaucguggagucau

SEQ ID NO: 2078669 - RNA, 19 nt, Artificial Sequence
  Description of Artificial Sequence: Synthetic oligonucleotide
  Antisense strand to SEQ ID NO: 2078668
augacuccacgauucuucc

SEQ ID NO: 2078670 - RNA, 19 nt, Artificial Sequence
  Description of Artificial Sequence: Synthetic oligonucleotide
  Sense strand starting at position 1651 of SEQ ID NO: 1881887
aggauaaauuccuuguuuc

SEQ ID NO: 2078671 - RNA, 19 nt, Artificial Sequence
  Description of Artificial Sequence: Synthetic oligonucleotide
  Antisense strand to SEQ ID NO: 2078670
gaaacaaggaauuuauccu

SEQ ID NO: 2078672 - RNA, 19 nt, Artificial Sequence
  Description of Artificial Sequence: Synthetic oligonucleotide
  Sense strand starting at position 1813 of SEQ ID NO: 1881887
uuuaaauguugaucacaug

SEQ ID NO: 2078673 - RNA, 19 nt, Artificial Sequence
  Description of Artificial Sequence: Synthetic oligonucleotide
  Antisense strand to SEQ ID NO: 2078672
caugugaucaacauuuaaa

SEQ ID NO: 2078674 - RNA, 19 nt, Artificial Sequence
  Description of Artificial Sequence: Synthetic oligonucleotide
  Sense strand starting at position 1846 of SEQ ID NO: 1881887
uuaaguucuuggucauuuc

SEQ ID NO: 2078675 - RNA, 19 nt, Artificial Sequence
  Description of Artificial Sequence: Synthetic oligonucleotide
  Antisense strand to SEQ ID NO: 2078674
gaaaugaccaagaacuuaa

SEQ ID NO: 2078676 - RNA, 19 nt, Artificial Sequence
  Description of Artificial Sequence: Synthetic oligonucleotide
  Sense strand starting at position 1889 of SEQ ID NO: 1881887
ccaggaugagccugaugga

SEQ ID NO: 2078677 - RNA, 19 nt, Artificial Sequence
  Description of Artificial Sequence: Synthetic oligonucleotide
  Antisense strand to SEQ ID NO: 2078676
uccaucaggcucauccugg

SEQ ID NO: 2078678 - RNA, 19 nt, Artificial Sequence
  Description of Artificial Sequence: Synthetic oligonucleotide
  Sense strand starting at position 1987 of SEQ ID NO: 1881887
uccuccucucucgaauagu

SEQ ID NO: 2078679 - RNA, 19 nt, Artificial Sequence
  Description of Artificial Sequence: Synthetic oligonucleotide
  Antisense strand to SEQ ID NO: 2078678
acuauucgagagaggagga

SEQ ID NO: 2078680 - RNA, 19 nt, Artificial Sequence
  Description of Artificial Sequence: Synthetic oligonucleotide
  Sense strand starting at position 2082 of SEQ ID NO: 1881887
uucuaauuguucuuggaua

SEQ ID NO: 2078681 - RNA, 19 nt, Artificial Sequence
  Description of Artificial Sequence: Synthetic oligonucleotide
  Antisense strand to SEQ ID NO: 2078680
uauccaagaacaauuagaa

SEQ ID NO: 2078682 - RNA, 19 nt, Artificial Sequence
  Description of Artificial Sequence: Synthetic oligonucleotide
  Sense strand starting at position 2084 of SEQ ID NO: 1881887
cuaauuguucuuggauauu

SEQ ID NO: 2078683 - RNA, 19 nt, Artificial Sequence
  Description of Artificial Sequence: Synthetic oligonucleotide
  Antisense strand to SEQ ID NO: 2078682
aauauccaagaacaauuag

SEQ ID NO: 2078684 - RNA, 19 nt, Artificial Sequence
  Description of Artificial Sequence: Synthetic oligonucleotide
  Sense strand starting at position 2698 of SEQ ID NO: 1881887
gagguauugcuugauccca

SEQ ID NO: 2078685 - RNA, 19 nt, Artificial Sequence
  Description of Artificial Sequence: Synthetic oligonucleotide
  Antisense strand to SEQ ID NO: 2078684
ugggaucaagcaauaccuc

SEQ ID NO: 2078686 - RNA, 19 nt, Artificial Sequence
  Description of Artificial Sequence: Synthetic oligonucleotide
  Sense strand starting at position 2911 of SEQ ID NO: 1881887
ugaguaguacuccauggca

SEQ ID NO: 2078687 - RNA, 19 nt, Artificial Sequence
  Description of Artificial Sequence: Synthetic oligonucleotide
  Antisense strand to SEQ ID NO: 2078686
ugccauggaguacuacuca

SEQ ID NO: 2078688 - RNA, 19 nt, Artificial Sequence
  Description of Artificial Sequence: Synthetic oligonucleotide
  Sense strand starting at position 2962 of SEQ ID NO: 1881887
uguugaaggucaucuggau

SEQ ID NO: 2078689 - RNA, 19 nt, Artificial Sequence
  Description of Artificial Sequence: Synthetic oligonucleotide
  Antisense strand to SEQ ID NO: 2078688
auccagaugaccuucaaca

SEQ ID NO: 2078690 - RNA, 19 nt, Artificial Sequence
  Description of Artificial Sequence: Synthetic oligonucleotide
  Sense strand starting at position 2966 of SEQ ID NO: 1881887
gaaggucaucuggauuguu

SEQ ID NO: 2078691 - RNA, 19 nt, Artificial Sequence
  Description of Artificial Sequence: Synthetic oligonucleotide
  Antisense strand to SEQ ID NO: 2078690
aacaauccagaugaccuuc

SEQ ID NO: 2078692 - RNA, 19 nt, Artificial Sequence
  Description of Artificial Sequence: Synthetic oligonucleotide
  Sense strand starting at position 3006 of SEQ ID NO: 1881887
auaaaccugcugugaauau

SEQ ID NO: 2078693 - RNA, 19 nt, Artificial Sequence
  Description of Artificial Sequence: Synthetic oligonucleotide
  Antisense strand to SEQ ID NO: 2078692
auauucacagcagguuuau

SEQ ID NO: 2078694 - RNA, 19 nt, Artificial Sequence
  Description of Artificial Sequence: Synthetic oligonucleotide
  Sense strand starting at position 3093 of SEQ ID NO: 1881887
cgguguaucggauagaaac

SEQ ID NO: 2078695 - RNA, 19 nt, Artificial Sequence
  Description of Artificial Sequence: Synthetic oligonucleotide
  Antisense strand to SEQ ID NO: 2078694
guuucuauccgauacaccg

SEQ ID NO: 2078696 - RNA, 19 nt, Artificial Sequence
  Description of Artificial Sequence: Synthetic oligonucleotide
  Sense strand starting at position 3262 of SEQ ID NO: 1881887
gaguauaucucaucauggu

SEQ ID NO: 2078697 - RNA, 19 nt, Artificial Sequence
  Description of Artificial Sequence: Synthetic oligonucleotide
  Antisense strand to SEQ ID NO: 2078696
accaugaugagauauacuc

SEQ ID NO: 2078698 - RNA, 19 nt, Artificial Sequence
  Description of Artificial Sequence: Synthetic oligonucleotide
  Sense strand starting at position 3263 of SEQ ID NO: 1881887
aguauaucucaucauggua

SEQ ID NO: 2078699 - RNA, 19 nt, Artificial Sequence
  Description of Artificial Sequence: Synthetic oligonucleotide
  Antisense strand to SEQ ID NO: 2078698
uaccaugaugagauauacu

SEQ ID NO: 2078700 - RNA, 19 nt, Artificial Sequence
  Description of Artificial Sequence: Synthetic oligonucleotide
  Sense strand starting at position 3303 of SEQ ID NO: 1881887
auggcuaauauguggaaca

SEQ ID NO: 2078701 - RNA, 19 nt, Artificial Sequence
  Description of Artificial Sequence: Synthetic oligonucleotide
  Antisense strand to SEQ ID NO: 2078700
uguuccacauauuagccau

SEQ ID NO: 2078702 - RNA, 19 nt, Artificial Sequence
  Description of Artificial Sequence: Synthetic oligonucleotide
  Sense strand starting at position 3305 of SEQ ID NO: 1881887
ggcuaauauguggaacauc

SEQ ID NO: 2078703 - RNA, 19 nt, Artificial Sequence
  Description of Artificial Sequence: Synthetic oligonucleotide
  Antisense strand to SEQ ID NO: 2078702
gauguuccacauauuagcc

SEQ ID NO: 2078704 - RNA, 19 nt, Artificial Sequence
  Description of Artificial Sequence: Synthetic oligonucleotide
  Sense strand starting at position 3313 of SEQ ID NO: 1881887
uguggaacaucuuuaacug

SEQ ID NO: 2078705 - RNA, 19 nt, Artificial Sequence
  Description of Artificial Sequence: Synthetic oligonucleotide
  Antisense strand to SEQ ID NO: 2078704
caguuaaagauguuccaca

SEQ ID NO: 2078706 - RNA, 19 nt, Artificial Sequence
  Description of Artificial Sequence: Synthetic oligonucleotide
  Sense strand starting at position 3314 of SEQ ID NO: 1881887
guggaacaucuuuaacugu

SEQ ID NO: 2078707 - RNA, 19 nt, Artificial Sequence
  Description of Artificial Sequence: Synthetic oligonucleotide
  Antisense strand to SEQ ID NO: 2078706
acaguuaaagauguuccac

SEQ ID NO: 2078708 - RNA, 19 nt, Artificial Sequence
  Description of Artificial Sequence: Synthetic oligonucleotide
  Sense strand starting at position 3439 of SEQ ID NO: 1881887
gauauauaguuugcaggua

SEQ ID NO: 2078709 - RNA, 19 nt, Artificial Sequence
  Description of Artificial Sequence: Synthetic oligonucleotide
  Antisense strand to SEQ ID NO: 2078708
uaccugcaaacuauauauc

SEQ ID NO: 2078710 - RNA, 19 nt, Artificial Sequence
  Description of Artificial Sequence: Synthetic oligonucleotide
  Sense strand starting at position 3560 of SEQ ID NO: 1881887
ugugcuucuguugugaagu

SEQ ID NO: 2078711 - RNA, 19 nt, Artificial Sequence
  Description of Artificial Sequence: Synthetic oligonucleotide
  Antisense strand to SEQ ID NO: 2078710
acuucacaacagaagcaca

SEQ ID NO: 2078712 - RNA, 19 nt, Artificial Sequence
  Description of Artificial Sequence: Synthetic oligonucleotide
  Sense strand starting at position 3570 of SEQ ID NO: 1881887
uugugaaguccaggacuuu

SEQ ID NO: 2078713 - RNA, 19 nt, Artificial Sequence
  Description of Artificial Sequence: Synthetic oligonucleotide
  Antisense strand to SEQ ID NO: 2078712
aaaguccuggacuucacaa

SEQ ID NO: 2078714 - RNA, 19 nt, Artificial Sequence
  Description of Artificial Sequence: Synthetic oligonucleotide
  Sense strand starting at position 3650 of SEQ ID NO: 1881887
ugcauuucccucugugauc

SEQ ID NO: 2078715 - RNA, 19 nt, Artificial Sequence
  Description of Artificial Sequence: Synthetic oligonucleotide
  Antisense strand to SEQ ID NO: 2078714
gaucacagagggaaaugca

SEQ ID NO: 2078716 - RNA, 19 nt, Artificial Sequence
  Description of Artificial Sequence: Synthetic oligonucleotide
  Sense strand starting at position 3853 of SEQ ID NO: 1881887
auaggaucccuguauguuc

SEQ ID NO: 2078717 - RNA, 19 nt, Artificial Sequence
  Description of Artificial Sequence: Synthetic oligonucleotide
  Antisense strand to SEQ ID NO: 2078716
gaacauacagggauccuau

SEQ ID NO: 2078718 - RNA, 19 nt, Artificial Sequence
  Description of Artificial Sequence: Synthetic oligonucleotide
  Sense strand starting at position 94 of SEQ ID NO: 1881888
uaauuccaggcaugaguua

SEQ ID NO: 2078719 - RNA, 19 nt, Artificial Sequence
  Description of Artificial Sequence: Synthetic oligonucleotide
  Antisense strand to SEQ ID NO: 2078718
uaacucaugccuggaauua

SEQ ID NO: 2078720 - RNA, 19 nt, Artificial Sequence
  Description of Artificial Sequence: Synthetic oligonucleotide
  Sense strand starting at position 163 of SEQ ID NO: 1881888
gccacauagcuaggaaaug

SEQ ID NO: 2078721 - RNA, 19 nt, Artificial Sequence
  Description of Artificial Sequence: Synthetic oligonucleotide
  Antisense strand to SEQ ID NO: 2078720
cauuuccuagcuauguggc

SEQ ID NO: 2078722 - RNA, 19 nt, Artificial Sequence
  Description of Artificial Sequence: Synthetic oligonucleotide
  Sense strand starting at position 307 of SEQ ID NO: 1881888
gcaaacuuacccugagaug

SEQ ID NO: 2078723 - RNA, 19 nt, Artificial Sequence
  Description of Artificial Sequence: Synthetic oligonucleotide
  Antisense strand to SEQ ID NO: 2078722
caucucaggguaaguuugc

SEQ ID NO: 2078724 - RNA, 19 nt, Artificial Sequence
  Description of Artificial Sequence: Synthetic oligonucleotide
  Sense strand starting at position 426 of SEQ ID NO: 1881888
ugccaaugaccucaguuau

SEQ ID NO: 2078725 - RNA, 19 nt, Artificial Sequence
  Description of Artificial Sequence: Synthetic oligonucleotide
  Antisense strand to SEQ ID NO: 2078724
auaacugaggucauuggca

SEQ ID NO: 2078726 - RNA, 19 nt, Artificial Sequence
  Description of Artificial Sequence: Synthetic oligonucleotide
  Sense strand starting at position 452 of SEQ ID NO: 1881888
ggcaaacuuggugacuuua

SEQ ID NO: 2078727 - RNA, 19 nt, Artificial Sequence
  Description of Artificial Sequence: Synthetic oligonucleotide
  Antisense strand to SEQ ID NO: 2078726
uaaagucaccaaguuugcc

SEQ ID NO: 2078728 - RNA, 19 nt, Artificial Sequence
  Description of Artificial Sequence: Synthetic oligonucleotide
  Sense strand starting at position 565 of SEQ ID NO: 1881888
gcagggagccgggagaaau

SEQ ID NO: 2078729 - RNA, 19 nt, Artificial Sequence
  Description of Artificial Sequence: Synthetic oligonucleotide
  Antisense strand to SEQ ID NO: 2078728
auuucucccggcucccugc

SEQ ID NO: 2078730 - RNA, 19 nt, Artificial Sequence
  Description of Artificial Sequence: Synthetic oligonucleotide
  Sense strand starting at position 745 of SEQ ID NO: 1881888
uguuaauacgggcagugaa

SEQ ID NO: 2078731 - RNA, 19 nt, Artificial Sequence
  Description of Artificial Sequence: Synthetic oligonucleotide
  Antisense strand to SEQ ID NO: 2078730
uucacugcccguauuaaca

SEQ ID NO: 2078732 - RNA, 19 nt, Artificial Sequence
  Description of Artificial Sequence: Synthetic oligonucleotide
  Sense strand starting at position 873 of SEQ ID NO: 1881888
cuggaagcucucugaacuu

SEQ ID NO: 2078733 - RNA, 19 nt, Artificial Sequence
  Description of Artificial Sequence: Synthetic oligonucleotide
  Antisense strand to SEQ ID NO: 2078732
aaguucagagagcuuccag

SEQ ID NO: 2078734 - RNA, 19 nt, Artificial Sequence
  Description of Artificial Sequence: Synthetic oligonucleotide
  Sense strand starting at position 910 of SEQ ID NO: 1881888
cguugaaucaauuacugag

SEQ ID NO: 2078735 - RNA, 19 nt, Artificial Sequence
  Description of Artificial Sequence: Synthetic oligonucleotide
  Antisense strand to SEQ ID NO: 2078734
cucaguaauugauucaacg

SEQ ID NO: 2078736 - RNA, 19 nt, Artificial Sequence
  Description of Artificial Sequence: Synthetic oligonucleotide
  Sense strand starting at position 1010 of SEQ ID NO: 1881888
ggcucucagcuggacuaua

SEQ ID NO: 2078737 - RNA, 19 nt, Artificial Sequence
  Description of Artificial Sequence: Synthetic oligonucleotide
  Antisense strand to SEQ ID NO: 2078736
uauaguccagcugagagcc

SEQ ID NO: 2078738 - RNA, 19 nt, Artificial Sequence
  Description of Artificial Sequence: Synthetic oligonucleotide
  Sense strand starting at position 1066 of SEQ ID NO: 1881888
cugaguucuggccaccaaa

SEQ ID NO: 2078739 - RNA, 19 nt, Artificial Sequence
  Description of Artificial Sequence: Synthetic oligonucleotide
  Antisense strand to SEQ ID NO: 2078738
uuugguggccagaacucag

SEQ ID NO: 2078740 - RNA, 19 nt, Artificial Sequence
  Description of Artificial Sequence: Synthetic oligonucleotide
  Sense strand starting at position 1230 of SEQ ID NO: 1881888
agaacuucugccugaaaga

SEQ ID NO: 2078741 - RNA, 19 nt, Artificial Sequence
  Description of Artificial Sequence: Synthetic oligonucleotide
  Antisense strand to SEQ ID NO: 2078740
ucuuucaggcagaaguucu

SEQ ID NO: 2078742 - RNA, 19 nt, Artificial Sequence
  Description of Artificial Sequence: Synthetic oligonucleotide
  Sense strand starting at position 1239 of SEQ ID NO: 1881888
gccugaaagagccaggauu

SEQ ID NO: 2078743 - RNA, 19 nt, Artificial Sequence
  Description of Artificial Sequence: Synthetic oligonucleotide
  Antisense strand to SEQ ID NO: 2078742
aauccuggcucuuucaggc

SEQ ID NO: 2078744 - RNA, 19 nt, Artificial Sequence
  Description of Artificial Sequence: Synthetic oligonucleotide
  Sense strand starting at position 1252 of SEQ ID NO: 1881888
aggauuccugaaugacugu

SEQ ID NO: 2078745 - RNA, 19 nt, Artificial Sequence
  Description of Artificial Sequence: Synthetic oligonucleotide
  Antisense strand to SEQ ID NO: 2078744
acagucauucaggaauccu

SEQ ID NO: 2078746 - RNA, 19 nt, Artificial Sequence
  Description of Artificial Sequence: Synthetic oligonucleotide
  Sense strand starting at position 1329 of SEQ ID NO: 1881888
ggaagugaauaagaaauaa

SEQ ID NO: 2078747 - RNA, 19 nt, Artificial Sequence
  Description of Artificial Sequence: Synthetic oligonucleotide
  Antisense strand to SEQ ID NO: 2078746
uuauuucuuauucacuucc

SEQ ID NO: 2078748 - RNA, 19 nt, Artificial Sequence
  Description of Artificial Sequence: Synthetic oligonucleotide
  Sense strand starting at position 1940 of SEQ ID NO: 1881888
cggaauuugucaccuguau

SEQ ID NO: 2078749 - RNA, 19 nt, Artificial Sequence
  Description of Artificial Sequence: Synthetic oligonucleotide
  Antisense strand to SEQ ID NO: 2078748
auacaggugacaaauuccg

SEQ ID NO: 2078750 - RNA, 19 nt, Artificial Sequence
  Description of Artificial Sequence: Synthetic oligonucleotide
  Sense strand starting at position 2026 of SEQ ID NO: 1881888
acaugugcccugggagaca

SEQ ID NO: 2078751 - RNA, 19 nt, Artificial Sequence
  Description of Artificial Sequence: Synthetic oligonucleotide
  Antisense strand to SEQ ID NO: 2078750
ugucucccagggcacaugu

SEQ ID NO: 2078752 - RNA, 19 nt, Artificial Sequence
  Description of Artificial Sequence: Synthetic oligonucleotide
  Sense strand starting at position 2059 of SEQ ID NO: 1881888
ugacaauccugcucuagag

SEQ ID NO: 2078753 - RNA, 19 nt, Artificial Sequence
  Description of Artificial Sequence: Synthetic oligonucleotide
  Antisense strand to SEQ ID NO: 2078752
cucuagagcaggauuguca

SEQ ID NO: 2078754 - RNA, 19 nt, Artificial Sequence
  Description of Artificial Sequence: Synthetic oligonucleotide
  Sense strand starting at position 2071 of SEQ ID NO: 1881888
ucuagagugguuggaaaga

SEQ ID NO: 2078755 - RNA, 19 nt, Artificial Sequence
  Description of Artificial Sequence: Synthetic oligonucleotide
  Antisense strand to SEQ ID NO: 2078754
ucuuuccaaccacucuaga

SEQ ID NO: 2078756 - RNA, 19 nt, Artificial Sequence
  Description of Artificial Sequence: Synthetic oligonucleotide
  Sense strand starting at position 2094 of SEQ ID NO: 1881888
gcauuucuuguggguugua

SEQ ID NO: 2078757 - RNA, 19 nt, Artificial Sequence
  Description of Artificial Sequence: Synthetic oligonucleotide
  Antisense strand to SEQ ID NO: 2078756
uacaacccacaagaaaugc

SEQ ID NO: 2078758 - RNA, 19 nt, Artificial Sequence
  Description of Artificial Sequence: Synthetic oligonucleotide
  Sense strand starting at position 2231 of SEQ ID NO: 1881888
acaagaccuuguuuggaaa

SEQ ID NO: 2078759 - RNA, 19 nt, Artificial Sequence
  Description of Artificial Sequence: Synthetic oligonucleotide
  Antisense strand to SEQ ID NO: 2078758
uuuccaaacaaggucuugu

SEQ ID NO: 2078760 - RNA, 19 nt, Artificial Sequence
  Description of Artificial Sequence: Synthetic oligonucleotide
  Sense strand starting at position 2300 of SEQ ID NO: 1881888
agagauugcagguggcaga

SEQ ID NO: 2078761 - RNA, 19 nt, Artificial Sequence
  Description of Artificial Sequence: Synthetic oligonucleotide
  Antisense strand to SEQ ID NO: 2078760
ucugccaccugcaaucucu

SEQ ID NO: 2078762 - RNA, 19 nt, Artificial Sequence
  Description of Artificial Sequence: Synthetic oligonucleotide
  Sense strand starting at position 2409 of SEQ ID NO: 1881888
ucacgauugguuuagguca

SEQ ID NO: 2078763 - RNA, 19 nt, Artificial Sequence
  Description of Artificial Sequence: Synthetic oligonucleotide
  Antisense strand to SEQ ID NO: 2078762
ugaccuaaaccaaucguga

SEQ ID NO: 2078764 - RNA, 19 nt, Artificial Sequence
  Description of Artificial Sequence: Synthetic oligonucleotide
  Sense strand starting at position 2526 of SEQ ID NO: 1881888
acaaaucuaacgugagguu

SEQ ID NO: 2078765 - RNA, 19 nt, Artificial Sequence
  Description of Artificial Sequence: Synthetic oligonucleotide
  Antisense strand to SEQ ID NO: 2078764
aaccucacguuagauuugu

SEQ ID NO: 2078766 - RNA, 19 nt, Artificial Sequence
  Description of Artificial Sequence: Synthetic oligonucleotide
  Sense strand starting at position 2527 of SEQ ID NO: 1881888
caaaucuaacgugagguuu

SEQ ID NO: 2078767 - RNA, 19 nt, Artificial Sequence
  Description of Artificial Sequence: Synthetic oligonucleotide
  Antisense strand to SEQ ID NO: 2078766
aaaccucacguuagauuug

SEQ ID NO: 2078768 - RNA, 19 nt, Artificial Sequence
  Description of Artificial Sequence: Synthetic oligonucleotide
  Sense strand starting at position 2742 of SEQ ID NO: 1881888
uucuuauuacgggagcaaa

SEQ ID NO: 2078769 - RNA, 19 nt, Artificial Sequence
  Description of Artificial Sequence: Synthetic oligonucleotide
  Antisense strand to SEQ ID NO: 2078768
uuugcucccguaauaagaa

SEQ ID NO: 2078770 - RNA, 19 nt, Artificial Sequence
  Description of Artificial Sequence: Synthetic oligonucleotide
  Sense strand starting at position 2899 of SEQ ID NO: 1881888
agggucuuuggagguauaa

SEQ ID NO: 2078771 - RNA, 19 nt, Artificial Sequence
  Description of Artificial Sequence: Synthetic oligonucleotide
  Antisense strand to SEQ ID NO: 2078770
uuauaccuccaaagacccu

SEQ ID NO: 2078772 - RNA, 19 nt, Artificial Sequence
  Description of Artificial Sequence: Synthetic oligonucleotide
  Sense strand starting at position 2901 of SEQ ID NO: 1881888
ggucuuuggagguauaauc

SEQ ID NO: 2078773 - RNA, 19 nt, Artificial Sequence
  Description of Artificial Sequence: Synthetic oligonucleotide
  Antisense strand to SEQ ID NO: 2078772
gauuauaccuccaaagacc

SEQ ID NO: 2078774 - RNA, 19 nt, Artificial Sequence
  Description of Artificial Sequence: Synthetic oligonucleotide
  Sense strand starting at position 2909 of SEQ ID NO: 1881888
gagguauaaucaguuaaga

SEQ ID NO: 2078775 - RNA, 19 nt, Artificial Sequence
  Description of Artificial Sequence: Synthetic oligonucleotide
  Antisense strand to SEQ ID NO: 2078774
ucuuaacugauuauaccuc

SEQ ID NO: 2078776 - RNA, 19 nt, Artificial Sequence
  Description of Artificial Sequence: Synthetic oligonucleotide
  Sense strand starting at position 3022 of SEQ ID NO: 1881888
gaggaugucaugugauaac

SEQ ID NO: 2078777 - RNA, 19 nt, Artificial Sequence
  Description of Artificial Sequence: Synthetic oligonucleotide
  Antisense strand to SEQ ID NO: 2078776
guuaucacaugacauccuc

SEQ ID NO: 2078778 - RNA, 19 nt, Artificial Sequence
  Description of Artificial Sequence: Synthetic oligonucleotide
  Sense strand starting at position 3309 of SEQ ID NO: 1881888
gacugaugguccuugucaa

SEQ ID NO: 2078779 - RNA, 19 nt, Artificial Sequence
  Description of Artificial Sequence: Synthetic oligonucleotide
  Antisense strand to SEQ ID NO: 2078778
uugacaaggaccaucaguc

SEQ ID NO: 2078780 - RNA, 19 nt, Artificial Sequence
  Description of Artificial Sequence: Synthetic oligonucleotide
  Sense strand starting at position 3463 of SEQ ID NO: 1881888
acuugugagcaauaccaaa

SEQ ID NO: 2078781 - RNA, 19 nt, Artificial Sequence
  Description of Artificial Sequence: Synthetic oligonucleotide
  Antisense strand to SEQ ID NO: 2078780
uuugguauugcucacaagu

SEQ ID NO: 2078782 - RNA, 19 nt, Artificial Sequence
  Description of Artificial Sequence: Synthetic oligonucleotide
  Sense strand starting at position 3558 of SEQ ID NO: 1881888
ggcaccugugagcaauuga

SEQ ID NO: 2078783 - RNA, 19 nt, Artificial Sequence
  Description of Artificial Sequence: Synthetic oligonucleotide
  Antisense strand to SEQ ID NO: 2078782
ucaauugcucacaggugcc

SEQ ID NO: 2078784 - RNA, 19 nt, Artificial Sequence
  Description of Artificial Sequence: Synthetic oligonucleotide
  Sense strand starting at position 3692 of SEQ ID NO: 1881888
uugggugagcucuagguau

SEQ ID NO: 2078785 - RNA, 19 nt, Artificial Sequence
  Description of Artificial Sequence: Synthetic oligonucleotide
  Antisense strand to SEQ ID NO: 2078784
auaccuagagcucacccaa

SEQ ID NO: 2078786 - RNA, 19 nt, Artificial Sequence
  Description of Artificial Sequence: Synthetic oligonucleotide
  Sense strand starting at position 3742 of SEQ ID NO: 1881888
auggguaguccauggaaua

SEQ ID NO: 2078787 - RNA, 19 nt, Artificial Sequence
  Description of Artificial Sequence: Synthetic oligonucleotide
  Antisense strand to SEQ ID NO: 2078786
uauuccauggacuacccau

SEQ ID NO: 2078788 - RNA, 19 nt, Artificial Sequence
  Description of Artificial Sequence: Synthetic oligonucleotide
  Sense strand starting at position 3743 of SEQ ID NO: 1881888
uggguaguccauggaauac

SEQ ID NO: 2078789 - RNA, 19 nt, Artificial Sequence
  Description of Artificial Sequence: Synthetic oligonucleotide
  Antisense strand to SEQ ID NO: 2078788
guauuccauggacuaccca

SEQ ID NO: 2078790 - RNA, 19 nt, Artificial Sequence
  Description of Artificial Sequence: Synthetic oligonucleotide
  Sense strand starting at position 3754 of SEQ ID NO: 1881888
uggaauacacuuuguaaac

SEQ ID NO: 2078791 - RNA, 19 nt, Artificial Sequence
  Description of Artificial Sequence: Synthetic oligonucleotide
  Antisense strand to SEQ ID NO: 2078790
guuuacaaaguguauucca

SEQ ID NO: 2078792 - RNA, 19 nt, Artificial Sequence
  Description of Artificial Sequence: Synthetic oligonucleotide
  Sense strand starting at position 3806 of SEQ ID NO: 1881888
ugguguaaucucuaauauu

SEQ ID NO: 2078793 - RNA, 19 nt, Artificial Sequence
  Description of Artificial Sequence: Synthetic oligonucleotide
  Antisense strand to SEQ ID NO: 2078792
aauauuagagauuacacca

SEQ ID NO: 2078794 - RNA, 19 nt, Artificial Sequence
  Description of Artificial Sequence: Synthetic oligonucleotide
  Sense strand starting at position 3876 of SEQ ID NO: 1881888
gggaaugggcugcacuuau

SEQ ID NO: 2078795 - RNA, 19 nt, Artificial Sequence
  Description of Artificial Sequence: Synthetic oligonucleotide
  Antisense strand to SEQ ID NO: 2078794
auaagugcagcccauuccc

SEQ ID NO: 2078796 - RNA, 19 nt, Artificial Sequence
  Description of Artificial Sequence: Synthetic oligonucleotide
  Sense strand starting at position 3886 of SEQ ID NO: 1881888
ugcacuuaucuguagaaau

SEQ ID NO: 2078797 - RNA, 19 nt, Artificial Sequence
  Description of Artificial Sequence: Synthetic oligonucleotide
  Antisense strand to SEQ ID NO: 2078796
auuucuacagauaagugca

SEQ ID NO: 2078798 - RNA, 19 nt, Artificial Sequence
  Description of Artificial Sequence: Synthetic oligonucleotide
  Sense strand starting at position 21 of SEQ ID NO: 1881889
ugugcuagugcuucuugau

SEQ ID NO: 2078799 - RNA, 19 nt, Artificial Sequence
  Description of Artificial Sequence: Synthetic oligonucleotide
  Antisense strand to SEQ ID NO: 2078798
aucaagaagcacuagcaca

SEQ ID NO: 2078800 - RNA, 19 nt, Artificial Sequence
  Description of Artificial Sequence: Synthetic oligonucleotide
  Sense strand starting at position 22 of SEQ ID NO: 1881889
gugcuagugcuucuugauu

SEQ ID NO: 2078801 - RNA, 19 nt, Artificial Sequence
  Description of Artificial Sequence: Synthetic oligonucleotide
  Antisense strand to SEQ ID NO: 2078800
aaucaagaagcacuagcac

SEQ ID NO: 2078802 - RNA, 19 nt, Artificial Sequence
  Description of Artificial Sequence: Synthetic oligonucleotide
  Sense strand starting at position 138 of SEQ ID NO: 1881889
uuuaucaaccaguacagua

SEQ ID NO: 2078803 - RNA, 19 nt, Artificial Sequence
  Description of Artificial Sequence: Synthetic oligonucleotide
  Antisense strand to SEQ ID NO: 2078802
uacuguacugguugauaaa

SEQ ID NO: 2078804 - RNA, 19 nt, Artificial Sequence
  Description of Artificial Sequence: Synthetic oligonucleotide
  Sense strand starting at position 208 of SEQ ID NO: 1881889
aguugagacagcuggaaau

SEQ ID NO: 2078805 - RNA, 19 nt, Artificial Sequence
  Description of Artificial Sequence: Synthetic oligonucleotide
  Antisense strand to SEQ ID NO: 2078804
auuuccagcugucucaacu

SEQ ID NO: 2078806 - RNA, 19 nt, Artificial Sequence
  Description of Artificial Sequence: Synthetic oligonucleotide
  Sense strand starting at position 299 of SEQ ID NO: 1881889
ggaucauuaugggauuuag

SEQ ID NO: 2078807 - RNA, 19 nt, Artificial Sequence
  Description of Artificial Sequence: Synthetic oligonucleotide
  Antisense strand to SEQ ID NO: 2078806
cuaaaucccauaaugaucc

SEQ ID NO: 2078808 - RNA, 19 nt, Artificial Sequence
  Description of Artificial Sequence: Synthetic oligonucleotide
  Sense strand starting at position 335 of SEQ ID NO: 1881889
aacagaauuggucacgagu

SEQ ID NO: 2078809 - RNA, 19 nt, Artificial Sequence
  Description of Artificial Sequence: Synthetic oligonucleotide
  Antisense strand to SEQ ID NO: 2078808
acucgugaccaauucuguu

SEQ ID NO: 2078810 - RNA, 19 nt, Artificial Sequence
  Description of Artificial Sequence: Synthetic oligonucleotide
  Sense strand starting at position 338 of SEQ ID NO: 1881889
agaauuggucacgagugga

SEQ ID NO: 2078811 - RNA, 19 nt, Artificial Sequence
  Description of Artificial Sequence: Synthetic oligonucleotide
  Antisense strand to SEQ ID NO: 2078810
uccacucgugaccaauucu

SEQ ID NO: 2078812 - RNA, 19 nt, Artificial Sequence
  Description of Artificial Sequence: Synthetic oligonucleotide
  Sense strand starting at position 341 of SEQ ID NO: 1881889
auuggucacgaguggauaa

SEQ ID NO: 2078813 - RNA, 19 nt, Artificial Sequence
  Description of Artificial Sequence: Synthetic oligonucleotide
  Antisense strand to SEQ ID NO: 2078812
uuauccacucgugaccaau

SEQ ID NO: 2078814 - RNA, 19 nt, Artificial Sequence
  Description of Artificial Sequence: Synthetic oligonucleotide
  Sense strand starting at position 362 of SEQ ID NO: 1881889
guugaaacugagugaugua

SEQ ID NO: 2078815 - RNA, 19 nt, Artificial Sequence
  Description of Artificial Sequence: Synthetic oligonucleotide
  Antisense strand to SEQ ID NO: 2078814
uacaucacucaguuucaac

SEQ ID NO: 2078816 - RNA, 19 nt, Artificial Sequence
  Description of Artificial Sequence: Synthetic oligonucleotide
  Sense strand starting at position 387 of SEQ ID NO: 1881889
gggauuaauaauuguguuu

SEQ ID NO: 2078817 - RNA, 19 nt, Artificial Sequence
  Description of Artificial Sequence: Synthetic oligonucleotide
  Antisense strand to SEQ ID NO: 2078816
aaacacaauuauuaauccc

SEQ ID NO: 2078818 - RNA, 19 nt, Artificial Sequence
  Description of Artificial Sequence: Synthetic oligonucleotide
  Sense strand starting at position 657 of SEQ ID NO: 1881889
ugggaaaguaucuguggga

SEQ ID NO: 2078819 - RNA, 19 nt, Artificial Sequence
  Description of Artificial Sequence: Synthetic oligonucleotide
  Antisense strand to SEQ ID NO: 2078818
ucccacagauacuuuccca

SEQ ID NO: 2078820 - RNA, 19 nt, Artificial Sequence
  Description of Artificial Sequence: Synthetic oligonucleotide
  Sense strand starting at position 658 of SEQ ID NO: 1881889
gggaaaguaucugugggaa

SEQ ID NO: 2078821 - RNA, 19 nt, Artificial Sequence
  Description of Artificial Sequence: Synthetic oligonucleotide
  Antisense strand to SEQ ID NO: 2078820
uucccacagauacuuuccc

SEQ ID NO: 2078822 - RNA, 19 nt, Artificial Sequence
  Description of Artificial Sequence: Synthetic oligonucleotide
  Sense strand starting at position 661 of SEQ ID NO: 1881889
aaaguaucugugggaaacu

SEQ ID NO: 2078823 - RNA, 19 nt, Artificial Sequence
  Description of Artificial Sequence: Synthetic oligonucleotide
  Antisense strand to SEQ ID NO: 2078822
aguuucccacagauacuuu

SEQ ID NO: 2078824 - RNA, 19 nt, Artificial Sequence
  Description of Artificial Sequence: Synthetic oligonucleotide
  Sense strand starting at position 700 of SEQ ID NO: 1881889
agaccaaaugcuuggugaa

SEQ ID NO: 2078825 - RNA, 19 nt, Artificial Sequence
  Description of Artificial Sequence: Synthetic oligonucleotide
  Antisense strand to SEQ ID NO: 2078824
uucaccaagcauuuggucu

SEQ ID NO: 2078826 - RNA, 19 nt, Artificial Sequence
  Description of Artificial Sequence: Synthetic oligonucleotide
  Sense strand starting at position 701 of SEQ ID NO: 1881889
gaccaaaugcuuggugaag

SEQ ID NO: 2078827 - RNA, 19 nt, Artificial Sequence
  Description of Artificial Sequence: Synthetic oligonucleotide
  Antisense strand to SEQ ID NO: 2078826
cuucaccaagcauuugguc

SEQ ID NO: 2078828 - RNA, 19 nt, Artificial Sequence
  Description of Artificial Sequence: Synthetic oligonucleotide
  Sense strand starting at position 963 of SEQ ID NO: 1881889
uaccuuugggcagggauaa

SEQ ID NO: 2078829 - RNA, 19 nt, Artificial Sequence
  Description of Artificial Sequence: Synthetic oligonucleotide
  Antisense strand to SEQ ID NO: 2078828
uuaucccugcccaaaggua

SEQ ID NO: 2078830 - RNA, 19 nt, Artificial Sequence
  Description of Artificial Sequence: Synthetic oligonucleotide
  Sense strand starting at position 1172 of SEQ ID NO: 1881889
gaauuagagaguugaugua

SEQ ID NO: 2078831 - RNA, 19 nt, Artificial Sequence
  Description of Artificial Sequence: Synthetic oligonucleotide
  Antisense strand to SEQ ID NO: 2078830
uacaucaacucucuaauuc

SEQ ID NO: 2078832 - RNA, 19 nt, Artificial Sequence
  Description of Artificial Sequence: Synthetic oligonucleotide
  Sense strand starting at position 1184 of SEQ ID NO: 1881889
ugauguagugcuuaauaga

SEQ ID NO: 2078833 - RNA, 19 nt, Artificial Sequence
  Description of Artificial Sequence: Synthetic oligonucleotide
  Antisense strand to SEQ ID NO: 2078832
ucuauuaagcacuacauca

SEQ ID NO: 2078834 - RNA, 19 nt, Artificial Sequence
  Description of Artificial Sequence: Synthetic oligonucleotide
  Sense strand starting at position 1194 of SEQ ID NO: 1881889
cuuaauagacauggcuuau

SEQ ID NO: 2078835 - RNA, 19 nt, Artificial Sequence
  Description of Artificial Sequence: Synthetic oligonucleotide
  Antisense strand to SEQ ID NO: 2078834
auaagccaugucuauuaag

SEQ ID NO: 2078836 - RNA, 19 nt, Artificial Sequence
  Description of Artificial Sequence: Synthetic oligonucleotide
  Sense strand starting at position 1198 of SEQ ID NO: 1881889
auagacauggcuuauugua

SEQ ID NO: 2078837 - RNA, 19 nt, Artificial Sequence
  Description of Artificial Sequence: Synthetic oligonucleotide
  Antisense strand to SEQ ID NO: 2078836
uacaauaagccaugucuau

SEQ ID NO: 2078838 - RNA, 19 nt, Artificial Sequence
  Description of Artificial Sequence: Synthetic oligonucleotide
  Sense strand starting at position 1423 of SEQ ID NO: 1881889
guuguauguguugccauua

SEQ ID NO: 2078839 - RNA, 19 nt, Artificial Sequence
  Description of Artificial Sequence: Synthetic oligonucleotide
  Antisense strand to SEQ ID NO: 2078838
uaauggcaacacauacaac

SEQ ID NO: 2078840 - RNA, 19 nt, Artificial Sequence
  Description of Artificial Sequence: Synthetic oligonucleotide
  Sense strand starting at position 1584 of SEQ ID NO: 1881889
agguacuuggcuuacucaa

SEQ ID NO: 2078841 - RNA, 19 nt, Artificial Sequence
  Description of Artificial Sequence: Synthetic oligonucleotide
  Antisense strand to SEQ ID NO: 2078840
uugaguaagccaaguaccu

SEQ ID NO: 2078842 - RNA, 19 nt, Artificial Sequence
  Description of Artificial Sequence: Synthetic oligonucleotide
  Sense strand starting at position 1609 of SEQ ID NO: 1881889
uguagcguaagauaaagau

SEQ ID NO: 2078843 - RNA, 19 nt, Artificial Sequence
  Description of Artificial Sequence: Synthetic oligonucleotide
  Antisense strand to SEQ ID NO: 2078842
aucuuuaucuuacgcuaca

SEQ ID NO: 2078844 - RNA, 19 nt, Artificial Sequence
  Description of Artificial Sequence: Synthetic oligonucleotide
  Sense strand starting at position 1634 of SEQ ID NO: 1881889
ggguguucccuguagaaua

SEQ ID NO: 2078845 - RNA, 19 nt, Artificial Sequence
  Description of Artificial Sequence: Synthetic oligonucleotide
  Antisense strand to SEQ ID NO: 2078844
uauucuacagggaacaccc

SEQ ID NO: 2078846 - RNA, 19 nt, Artificial Sequence
  Description of Artificial Sequence: Synthetic oligonucleotide
  Sense strand starting at position 1642 of SEQ ID NO: 1881889
ccuguagaauagguacaaa

SEQ ID NO: 2078847 - RNA, 19 nt, Artificial Sequence
  Description of Artificial Sequence: Synthetic oligonucleotide
  Antisense strand to SEQ ID NO: 2078846
uuuguaccuauucuacagg

SEQ ID NO: 2078848 - RNA, 19 nt, Artificial Sequence
  Description of Artificial Sequence: Synthetic oligonucleotide
  Sense strand starting at position 1697 of SEQ ID NO: 1881889
uuugguccugaguaaguga

SEQ ID NO: 2078849 - RNA, 19 nt, Artificial Sequence
  Description of Artificial Sequence: Synthetic oligonucleotide
  Antisense strand to SEQ ID NO: 2078848
ucacuuacucaggaccaaa

SEQ ID NO: 2078850 - RNA, 19 nt, Artificial Sequence
  Description of Artificial Sequence: Synthetic oligonucleotide
  Sense strand starting at position 1706 of SEQ ID NO: 1881889
gaguaagugagugagguua

SEQ ID NO: 2078851 - RNA, 19 nt, Artificial Sequence
  Description of Artificial Sequence: Synthetic oligonucleotide
  Antisense strand to SEQ ID NO: 2078850
uaaccucacucacuuacuc

SEQ ID NO: 2078852 - RNA, 19 nt, Artificial Sequence
  Description of Artificial Sequence: Synthetic oligonucleotide
  Sense strand starting at position 2025 of SEQ ID NO: 1881889
uguugucuccuagaaacua

SEQ ID NO: 2078853 - RNA, 19 nt, Artificial Sequence
  Description of Artificial Sequence: Synthetic oligonucleotide
  Antisense strand to SEQ ID NO: 2078852
uaguuucuaggagacaaca

SEQ ID NO: 2078854 - RNA, 19 nt, Artificial Sequence
  Description of Artificial Sequence: Synthetic oligonucleotide
  Sense strand starting at position 2205 of SEQ ID NO: 1881889
uaggacugauucguuugaa

SEQ ID NO: 2078855 - RNA, 19 nt, Artificial Sequence
  Description of Artificial Sequence: Synthetic oligonucleotide
  Antisense strand to SEQ ID NO: 2078854
uucaaacgaaucaguccua

SEQ ID NO: 2078856 - RNA, 19 nt, Artificial Sequence
  Description of Artificial Sequence: Synthetic oligonucleotide
  Sense strand starting at position 2206 of SEQ ID NO: 1881889
aggacugauucguuugaaa

SEQ ID NO: 2078857 - RNA, 19 nt, Artificial Sequence
  Description of Artificial Sequence: Synthetic oligonucleotide
  Antisense strand to SEQ ID NO: 2078856
uuucaaacgaaucaguccu

SEQ ID NO: 2078858 - RNA, 19 nt, Artificial Sequence
  Description of Artificial Sequence: Synthetic oligonucleotide
  Sense strand starting at position 2208 of SEQ ID NO: 1881889
gacugauucguuugaaaug

SEQ ID NO: 2078859 - RNA, 19 nt, Artificial Sequence
  Description of Artificial Sequence: Synthetic oligonucleotide
  Antisense strand to SEQ ID NO: 2078858
cauuucaaacgaaucaguc

SEQ ID NO: 2078860 - RNA, 19 nt, Artificial Sequence
  Description of Artificial Sequence: Synthetic oligonucleotide
  Sense strand starting at position 2649 of SEQ ID NO: 1881889
gacucuaauccuggguuua

SEQ ID NO: 2078861 - RNA, 19 nt, Artificial Sequence
  Description of Artificial Sequence: Synthetic oligonucleotide
  Antisense strand to SEQ ID NO: 2078860
uaaacccaggauuagaguc

SEQ ID NO: 2078862 - RNA, 19 nt, Artificial Sequence
  Description of Artificial Sequence: Synthetic oligonucleotide
  Sense strand starting at position 2769 of SEQ ID NO: 1881889
cuuagcugucugggaagaa

SEQ ID NO: 2078863 - RNA, 19 nt, Artificial Sequence
  Description of Artificial Sequence: Synthetic oligonucleotide
  Antisense strand to SEQ ID NO: 2078862
uucuucccagacagcuaag

SEQ ID NO: 2078864 - RNA, 19 nt, Artificial Sequence
  Description of Artificial Sequence: Synthetic oligonucleotide
  Sense strand starting at position 3692 of SEQ ID NO: 1881889
gagccucuucuuuaggauu

SEQ ID NO: 2078865 - RNA, 19 nt, Artificial Sequence
  Description of Artificial Sequence: Synthetic oligonucleotide
  Antisense strand to SEQ ID NO: 2078864
aauccuaaagaagaggcuc

SEQ ID NO: 2078866 - RNA, 19 nt, Artificial Sequence
  Description of Artificial Sequence: Synthetic oligonucleotide
  Sense strand starting at position 3721 of SEQ ID NO: 1881889
gcuauuggugaccaaguga

SEQ ID NO: 2078867 - RNA, 19 nt, Artificial Sequence
  Description of Artificial Sequence: Synthetic oligonucleotide
  Antisense strand to SEQ ID NO: 2078866
ucacuuggucaccaauagc

SEQ ID NO: 2078868 - RNA, 19 nt, Artificial Sequence
  Description of Artificial Sequence: Synthetic oligonucleotide
  Sense strand starting at position 3804 of SEQ ID NO: 1881889
auaaucuguuacccaaagu

SEQ ID NO: 2078869 - RNA, 19 nt, Artificial Sequence
  Description of Artificial Sequence: Synthetic oligonucleotide
  Antisense strand to SEQ ID NO: 2078868
acuuuggguaacagauuau

SEQ ID NO: 2078870 - RNA, 19 nt, Artificial Sequence
  Description of Artificial Sequence: Synthetic oligonucleotide
  Sense strand starting at position 3850 of SEQ ID NO: 1881889
aacggagaacauggucaua

SEQ ID NO: 2078871 - RNA, 19 nt, Artificial Sequence
  Description of Artificial Sequence: Synthetic oligonucleotide
  Antisense strand to SEQ ID NO: 2078870
uaugaccauguucuccguu

SEQ ID NO: 2078872 - RNA, 19 nt, Artificial Sequence
  Description of Artificial Sequence: Synthetic oligonucleotide
  Sense strand starting at position 3852 of SEQ ID NO: 1881889
cggagaacauggucauaga

SEQ ID NO: 2078873 - RNA, 19 nt, Artificial Sequence
  Description of Artificial Sequence: Synthetic oligonucleotide
  Antisense strand to SEQ ID NO: 2078872
ucuaugaccauguucuccg

SEQ ID NO: 2078874 - RNA, 19 nt, Artificial Sequence
  Description of Artificial Sequence: Synthetic oligonucleotide
  Sense strand starting at position 3926 of SEQ ID NO: 1881889
uguguuuggccacugugua

SEQ ID NO: 2078875 - RNA, 19 nt, Artificial Sequence
  Description of Artificial Sequence: Synthetic oligonucleotide
  Antisense strand to SEQ ID NO: 2078874
uacacaguggccaaacaca

SEQ ID NO: 2078876 - RNA, 19 nt, Artificial Sequence
  Description of Artificial Sequence: Synthetic oligonucleotide
  Sense strand starting at position 3954 of SEQ ID NO: 1881889
ucccuauggugauucuaga

SEQ ID NO: 2078877 - RNA, 19 nt, Artificial Sequence
  Description of Artificial Sequence: Synthetic oligonucleotide
  Antisense strand to SEQ ID NO: 2078876
ucuagaaucaccauaggga

SEQ ID NO: 2078878 - RNA, 19 nt, Artificial Sequence
  Description of Artificial Sequence: Synthetic oligonucleotide
  Sense strand starting at position 960 of SEQ ID NO: 1881890
aguauuaaucucugguauc

SEQ ID NO: 2078879 - RNA, 19 nt, Artificial Sequence
  Description of Artificial Sequence: Synthetic oligonucleotide
  Antisense strand to SEQ ID NO: 2078878
gauaccagagauuaauacu

SEQ ID NO: 2078880 - RNA, 19 nt, Artificial Sequence
  Description of Artificial Sequence: Synthetic oligonucleotide
  Sense strand starting at position 1237 of SEQ ID NO: 1881890
ccuccaaccgucuguuuaa

SEQ ID NO: 2078881 - RNA, 19 nt, Artificial Sequence
  Description of Artificial Sequence: Synthetic oligonucleotide
  Antisense strand to SEQ ID NO: 2078880
uuaaacagacgguuggagg

SEQ ID NO: 2078882 - RNA, 19 nt, Artificial Sequence
  Description of Artificial Sequence: Synthetic oligonucleotide
  Sense strand starting at position 1240 of SEQ ID NO: 1881890
ccaaccgucuguuuaacaa

SEQ ID NO: 2078883 - RNA, 19 nt, Artificial Sequence
  Description of Artificial Sequence: Synthetic oligonucleotide
  Antisense strand to SEQ ID NO: 2078882
uuguuaaacagacgguugg

SEQ ID NO: 2078884 - RNA, 19 nt, Artificial Sequence
  Description of Artificial Sequence: Synthetic oligonucleotide
  Sense strand starting at position 2707 of SEQ ID NO: 1881890
auaauagugcaauggauaa

SEQ ID NO: 2078885 - RNA, 19 nt, Artificial Sequence
  Description of Artificial Sequence: Synthetic oligonucleotide
  Antisense strand to SEQ ID NO: 2078884
uuauccauugcacuauuau

SEQ ID NO: 2078886 - RNA, 19 nt, Artificial Sequence
  Description of Artificial Sequence: Synthetic oligonucleotide
  Sense strand starting at position 2730 of SEQ ID NO: 1881890
guuauuauacaguggaaua

SEQ ID NO: 2078887 - RNA, 19 nt, Artificial Sequence
  Description of Artificial Sequence: Synthetic oligonucleotide
  Antisense strand to SEQ ID NO: 2078886
uauuccacuguauaauaac

SEQ ID NO: 2078888 - RNA, 19 nt, Artificial Sequence
  Description of Artificial Sequence: Synthetic oligonucleotide
  Sense strand starting at position 2749 of SEQ ID NO: 1881890
uuuauuaugcuguggaaua

SEQ ID NO: 2078889 - RNA, 19 nt, Artificial Sequence
  Description of Artificial Sequence: Synthetic oligonucleotide
  Antisense strand to SEQ ID NO: 2078888
uauuccacagcauaauaaa

SEQ ID NO: 2078890 - RNA, 19 nt, Artificial Sequence
  Description of Artificial Sequence: Synthetic oligonucleotide
  Sense strand starting at position 2773 of SEQ ID NO: 1881890
ucacaauuagaaugaagcu

SEQ ID NO: 2078891 - RNA, 19 nt, Artificial Sequence
  Description of Artificial Sequence: Synthetic oligonucleotide
  Antisense strand to SEQ ID NO: 2078890
agcuucauucuaauuguga

SEQ ID NO: 2078892 - RNA, 19 nt, Artificial Sequence
  Description of Artificial Sequence: Synthetic oligonucleotide
  Sense strand starting at position 2824 of SEQ ID NO: 1881890
auguaauguugaguaaaca

SEQ ID NO: 2078893 - RNA, 19 nt, Artificial Sequence
  Description of Artificial Sequence: Synthetic oligonucleotide
  Antisense strand to SEQ ID NO: 2078892
uguuuacucaacauuacau

SEQ ID NO: 2078894 - RNA, 19 nt, Artificial Sequence
  Description of Artificial Sequence: Synthetic oligonucleotide
  Sense strand starting at position 2825 of SEQ ID NO: 1881890
uguaauguugaguaaacaa

SEQ ID NO: 2078895 - RNA, 19 nt, Artificial Sequence
  Description of Artificial Sequence: Synthetic oligonucleotide
  Antisense strand to SEQ ID NO: 2078894
uuguuuacucaacauuaca

SEQ ID NO: 2078896 - RNA, 19 nt, Artificial Sequence
  Description of Artificial Sequence: Synthetic oligonucleotide
  Sense strand starting at position 2856 of SEQ ID NO: 1881890
acgaguacacaguauacaa

SEQ ID NO: 2078897 - RNA, 19 nt, Artificial Sequence
  Description of Artificial Sequence: Synthetic oligonucleotide
  Antisense strand to SEQ ID NO: 2078896
uuguauacuguguacucgu

SEQ ID NO: 2078898 - RNA, 19 nt, Artificial Sequence
  Description of Artificial Sequence: Synthetic oligonucleotide
  Sense strand starting at position 2868 of SEQ ID NO: 1881890
uauacaaauguguauggua

SEQ ID NO: 2078899 - RNA, 19 nt, Artificial Sequence
  Description of Artificial Sequence: Synthetic oligonucleotide
  Antisense strand to SEQ ID NO: 2078898
uaccauacacauuuguaua

SEQ ID NO: 2078900 - RNA, 19 nt, Artificial Sequence
  Description of Artificial Sequence: Synthetic oligonucleotide
  Sense strand starting at position 2870 of SEQ ID NO: 1881890
uacaaauguguaugguaua

SEQ ID NO: 2078901 - RNA, 19 nt, Artificial Sequence
  Description of Artificial Sequence: Synthetic oligonucleotide
  Antisense strand to SEQ ID NO: 2078900
uauaccauacacauuugua

SEQ ID NO: 2078902 - RNA, 19 nt, Artificial Sequence
  Description of Artificial Sequence: Synthetic oligonucleotide
  Sense strand starting at position 2937 of SEQ ID NO: 1881890
guuagcaaucagcauagga

SEQ ID NO: 2078903 - RNA, 19 nt, Artificial Sequence
  Description of Artificial Sequence: Synthetic oligonucleotide
  Antisense strand to SEQ ID NO: 2078902
uccuaugcugauugcuaac

SEQ ID NO: 2078904 - RNA, 19 nt, Artificial Sequence
  Description of Artificial Sequence: Synthetic oligonucleotide
  Sense strand starting at position 2954 of SEQ ID NO: 1881890
gaauuugccuuaggagaag

SEQ ID NO: 2078905 - RNA, 19 nt, Artificial Sequence
  Description of Artificial Sequence: Synthetic oligonucleotide
  Antisense strand to SEQ ID NO: 2078904
cuucuccuaaggcaaauuc

SEQ ID NO: 2078906 - RNA, 19 nt, Artificial Sequence
  Description of Artificial Sequence: Synthetic oligonucleotide
  Sense strand starting at position 2966 of SEQ ID NO: 1881890
ggagaagaauagugaauag

SEQ ID NO: 2078907 - RNA, 19 nt, Artificial Sequence
  Description of Artificial Sequence: Synthetic oligonucleotide
  Antisense strand to SEQ ID NO: 2078906
cuauucacuauucuucucc

SEQ ID NO: 2078908 - RNA, 19 nt, Artificial Sequence
  Description of Artificial Sequence: Synthetic oligonucleotide
  Sense strand starting at position 3000 of SEQ ID NO: 1881890
gaguuucugaaguaucggu

SEQ ID NO: 2078909 - RNA, 19 nt, Artificial Sequence
  Description of Artificial Sequence: Synthetic oligonucleotide
  Antisense strand to SEQ ID NO: 2078908
accgauacuucagaaacuc

SEQ ID NO: 2078910 - RNA, 19 nt, Artificial Sequence
  Description of Artificial Sequence: Synthetic oligonucleotide
  Sense strand starting at position 3004 of SEQ ID NO: 1881890
uucugaaguaucgguaaug

SEQ ID NO: 2078911 - RNA, 19 nt, Artificial Sequence
  Description of Artificial Sequence: Synthetic oligonucleotide
  Antisense strand to SEQ ID NO: 2078910
cauuaccgauacuucagaa

SEQ ID NO: 2078912 - RNA, 19 nt, Artificial Sequence
  Description of Artificial Sequence: Synthetic oligonucleotide
  Sense strand starting at position 3005 of SEQ ID NO: 1881890
ucugaaguaucgguaaugu

SEQ ID NO: 2078913 - RNA, 19 nt, Artificial Sequence
  Description of Artificial Sequence: Synthetic oligonucleotide
  Antisense strand to SEQ ID NO: 2078912
acauuaccgauacuucaga

SEQ ID NO: 2078914 - RNA, 19 nt, Artificial Sequence
  Description of Artificial Sequence: Synthetic oligonucleotide
  Sense strand starting at position 3055 of SEQ ID NO: 1881890
ggguguucaguuugugaua

SEQ ID NO: 2078915 - RNA, 19 nt, Artificial Sequence
  Description of Artificial Sequence: Synthetic oligonucleotide
  Antisense strand to SEQ ID NO: 2078914
uaucacaaacugaacaccc

SEQ ID NO: 2078916 - RNA, 19 nt, Artificial Sequence
  Description of Artificial Sequence: Synthetic oligonucleotide
  Sense strand starting at position 3056 of SEQ ID NO: 1881890
gguguucaguuugugauag

SEQ ID NO: 2078917 - RNA, 19 nt, Artificial Sequence
  Description of Artificial Sequence: Synthetic oligonucleotide
  Antisense strand to SEQ ID NO: 2078916
cuaucacaaacugaacacc

SEQ ID NO: 2078918 - RNA, 19 nt, Artificial Sequence
  Description of Artificial Sequence: Synthetic oligonucleotide
  Sense strand starting at position 3067 of SEQ ID NO: 1881890
ugugauaguucauuguguu

SEQ ID NO: 2078919 - RNA, 19 nt, Artificial Sequence
  Description of Artificial Sequence: Synthetic oligonucleotide
  Antisense strand to SEQ ID NO: 2078918
aacacaaugaacuaucaca

SEQ ID NO: 2078920 - RNA, 19 nt, Artificial Sequence
  Description of Artificial Sequence: Synthetic oligonucleotide
  Sense strand starting at position 3068 of SEQ ID NO: 1881890
gugauaguucauuguguug

SEQ ID NO: 2078921 - RNA, 19 nt, Artificial Sequence
  Description of Artificial Sequence: Synthetic oligonucleotide
  Antisense strand to SEQ ID NO: 2078920
caacacaaugaacuaucac

SEQ ID NO: 2078922 - RNA, 19 nt, Artificial Sequence
  Description of Artificial Sequence: Synthetic oligonucleotide
  Sense strand starting at position 3168 of SEQ ID NO: 1881890
gccacuaaauauguaagaa

SEQ ID NO: 2078923 - RNA, 19 nt, Artificial Sequence
  Description of Artificial Sequence: Synthetic oligonucleotide
  Antisense strand to SEQ ID NO: 2078922
uucuuacauauuuaguggc

SEQ ID NO: 2078924 - RNA, 19 nt, Artificial Sequence
  Description of Artificial Sequence: Synthetic oligonucleotide
  Sense strand starting at position 3196 of SEQ ID NO: 1881890
uggcaaguuuaggcacaaa

SEQ ID NO: 2078925 - RNA, 19 nt, Artificial Sequence
  Description of Artificial Sequence: Synthetic oligonucleotide
  Antisense strand to SEQ ID NO: 2078924
uuugugccuaaacuugcca

SEQ ID NO: 2078926 - RNA, 19 nt, Artificial Sequence
  Description of Artificial Sequence: Synthetic oligonucleotide
  Sense strand starting at position 3245 of SEQ ID NO: 1881890
agacaagaauuaccguauu

SEQ ID NO: 2078927 - RNA, 19 nt, Artificial Sequence
  Description of Artificial Sequence: Synthetic oligonucleotide
  Antisense strand to SEQ ID NO: 2078926
aauacgguaauucuugucu

SEQ ID NO: 2078928 - RNA, 19 nt, Artificial Sequence
  Description of Artificial Sequence: Synthetic oligonucleotide
  Sense strand starting at position 3349 of SEQ ID NO: 1881890
agugguuucucucuuuaaa

SEQ ID NO: 2078929 - RNA, 19 nt, Artificial Sequence
  Description of Artificial Sequence: Synthetic oligonucleotide
  Antisense strand to SEQ ID NO: 2078928
uuuaaagagagaaaccacu

SEQ ID NO: 2078930 - RNA, 19 nt, Artificial Sequence
  Description of Artificial Sequence: Synthetic oligonucleotide
  Sense strand starting at position 3352 of SEQ ID NO: 1881890
gguuucucucuuuaaauug

SEQ ID NO: 2078931 - RNA, 19 nt, Artificial Sequence
  Description of Artificial Sequence: Synthetic oligonucleotide
  Antisense strand to SEQ ID NO: 2078930
caauuuaaagagagaaacc

SEQ ID NO: 2078932 - RNA, 19 nt, Artificial Sequence
  Description of Artificial Sequence: Synthetic oligonucleotide
  Sense strand starting at position 3403 of SEQ ID NO: 1881890
uguacuagauuugaugaaa

SEQ ID NO: 2078933 - RNA, 19 nt, Artificial Sequence
  Description of Artificial Sequence: Synthetic oligonucleotide
  Antisense strand to SEQ ID NO: 2078932
uuucaucaaaucuaguaca

SEQ ID NO: 2078934 - RNA, 19 nt, Artificial Sequence
  Description of Artificial Sequence: Synthetic oligonucleotide
  Sense strand starting at position 3476 of SEQ ID NO: 1881890
gauggauauuuguaaggag

SEQ ID NO: 2078935 - RNA, 19 nt, Artificial Sequence
  Description of Artificial Sequence: Synthetic oligonucleotide
  Antisense strand to SEQ ID NO: 2078934
cuccuuacaaauauccauc

SEQ ID NO: 2078936 - RNA, 19 nt, Artificial Sequence
  Description of Artificial Sequence: Synthetic oligonucleotide
  Sense strand starting at position 3479 of SEQ ID NO: 1881890
ggauauuuguaaggagaug

SEQ ID NO: 2078937 - RNA, 19 nt, Artificial Sequence
  Description of Artificial Sequence: Synthetic oligonucleotide
  Antisense strand to SEQ ID NO: 2078936
caucuccuuacaaauaucc

SEQ ID NO: 2078938 - RNA, 19 nt, Artificial Sequence
  Description of Artificial Sequence: Synthetic oligonucleotide
  Sense strand starting at position 3537 of SEQ ID NO: 1881890
ucugguuuguguuuaugaa

SEQ ID NO: 2078939 - RNA, 19 nt, Artificial Sequence
  Description of Artificial Sequence: Synthetic oligonucleotide
  Antisense strand to SEQ ID NO: 2078938
uucauaaacacaaaccaga

SEQ ID NO: 2078940 - RNA, 19 nt, Artificial Sequence
  Description of Artificial Sequence: Synthetic oligonucleotide
  Sense strand starting at position 3538 of SEQ ID NO: 1881890
cugguuuguguuuaugaaa

SEQ ID NO: 2078941 - RNA, 19 nt, Artificial Sequence
  Description of Artificial Sequence: Synthetic oligonucleotide
  Antisense strand to SEQ ID NO: 2078940
uuucauaaacacaaaccag

SEQ ID NO: 2078942 - RNA, 19 nt, Artificial Sequence
  Description of Artificial Sequence: Synthetic oligonucleotide
  Sense strand starting at position 3560 of SEQ ID NO: 1881890
guuugaaguaauuaaugug

SEQ ID NO: 2078943 - RNA, 19 nt, Artificial Sequence
  Description of Artificial Sequence: Synthetic oligonucleotide
  Antisense strand to SEQ ID NO: 2078942
cacauuaauuacuucaaac

SEQ ID NO: 2078944 - RNA, 19 nt, Artificial Sequence
  Description of Artificial Sequence: Synthetic oligonucleotide
  Sense strand starting at position 3566 of SEQ ID NO: 1881890
aguaauuaauguguaagca

SEQ ID NO: 2078945 - RNA, 19 nt, Artificial Sequence
  Description of Artificial Sequence: Synthetic oligonucleotide
  Antisense strand to SEQ ID NO: 2078944
ugcuuacacauuaauuacu

SEQ ID NO: 2078946 - RNA, 19 nt, Artificial Sequence
  Description of Artificial Sequence: Synthetic oligonucleotide
  Sense strand starting at position 3567 of SEQ ID NO: 1881890
guaauuaauguguaagcaa

SEQ ID NO: 2078947 - RNA, 19 nt, Artificial Sequence
  Description of Artificial Sequence: Synthetic oligonucleotide
  Antisense strand to SEQ ID NO: 2078946
uugcuuacacauuaauuac

SEQ ID NO: 2078948 - RNA, 19 nt, Artificial Sequence
  Description of Artificial Sequence: Synthetic oligonucleotide
  Sense strand starting at position 3760 of SEQ ID NO: 1881890
guggaaaguucagagggaa

SEQ ID NO: 2078949 - RNA, 19 nt, Artificial Sequence
  Description of Artificial Sequence: Synthetic oligonucleotide
  Antisense strand to SEQ ID NO: 2078948
uucccucugaacuuuccac

SEQ ID NO: 2078950 - RNA, 19 nt, Artificial Sequence
  Description of Artificial Sequence: Synthetic oligonucleotide
  Sense strand starting at position 3828 of SEQ ID NO: 1881890
cuauguuuacaaggauuau

SEQ ID NO: 2078951 - RNA, 19 nt, Artificial Sequence
  Description of Artificial Sequence: Synthetic oligonucleotide
  Antisense strand to SEQ ID NO: 2078950
auaauccuuguaaacauag

SEQ ID NO: 2078952 - RNA, 19 nt, Artificial Sequence
  Description of Artificial Sequence: Synthetic oligonucleotide
  Sense strand starting at position 3832 of SEQ ID NO: 1881890
guuuacaaggauuaugcau

SEQ ID NO: 2078953 - RNA, 19 nt, Artificial Sequence
  Description of Artificial Sequence: Synthetic oligonucleotide
  Antisense strand to SEQ ID NO: 2078952
augcauaauccuuguaaac

SEQ ID NO: 2078954 - RNA, 19 nt, Artificial Sequence
  Description of Artificial Sequence: Synthetic oligonucleotide
  Sense strand starting at position 3856 of SEQ ID NO: 1881890
gcaagagauaacuggguuu

SEQ ID NO: 2078955 - RNA, 19 nt, Artificial Sequence
  Description of Artificial Sequence: Synthetic oligonucleotide
  Antisense strand to SEQ ID NO: 2078954
aaacccaguuaucucuugc

SEQ ID NO: 2078956 - RNA, 19 nt, Artificial Sequence
  Description of Artificial Sequence: Synthetic oligonucleotide
  Sense strand starting at position 3933 of SEQ ID NO: 1881890
uuaggaaguacuuguguuu

SEQ ID NO: 2078957 - RNA, 19 nt, Artificial Sequence
  Description of Artificial Sequence: Synthetic oligonucleotide
  Antisense strand to SEQ ID NO: 2078956
aaacacaaguacuuccuaa

SEQ ID NO: 2078958 - RNA, 19 nt, Artificial Sequence
  Description of Artificial Sequence: Synthetic oligonucleotide
  Sense strand starting at position 36 of SEQ ID NO: 1881891
uguauauggcaauagguga

SEQ ID NO: 2078959 - RNA, 19 nt, Artificial Sequence
  Description of Artificial Sequence: Synthetic oligonucleotide
  Antisense strand to SEQ ID NO: 2078958
ucaccuauugccauauaca

SEQ ID NO: 2078960 - RNA, 19 nt, Artificial Sequence
  Description of Artificial Sequence: Synthetic oligonucleotide
  Sense strand starting at position 43 of SEQ ID NO: 1881891
ggcaauaggugacugauua

SEQ ID NO: 2078961 - RNA, 19 nt, Artificial Sequence
  Description of Artificial Sequence: Synthetic oligonucleotide
  Antisense strand to SEQ ID NO: 2078960
uaaucagucaccuauugcc

SEQ ID NO: 2078962 - RNA, 19 nt, Artificial Sequence
  Description of Artificial Sequence: Synthetic oligonucleotide
  Sense strand starting at position 44 of SEQ ID NO: 1881891
gcaauaggugacugauuac

SEQ ID NO: 2078963 - RNA, 19 nt, Artificial Sequence
  Description of Artificial Sequence: Synthetic oligonucleotide
  Antisense strand to SEQ ID NO: 2078962
guaaucagucaccuauugc

SEQ ID NO: 2078964 - RNA, 19 nt, Artificial Sequence
  Description of Artificial Sequence: Synthetic oligonucleotide
  Sense strand starting at position 125 of SEQ ID NO: 1881891
ugauaauugugaguuugag

SEQ ID NO: 2078965 - RNA, 19 nt, Artificial Sequence
  Description of Artificial Sequence: Synthetic oligonucleotide
  Antisense strand to SEQ ID NO: 2078964
cucaaacucacaauuauca

SEQ ID NO: 2078966 - RNA, 19 nt, Artificial Sequence
  Description of Artificial Sequence: Synthetic oligonucleotide
  Sense strand starting at position 154 of SEQ ID NO: 1881891
cuugaagguaguuauguga

SEQ ID NO: 2078967 - RNA, 19 nt, Artificial Sequence
  Description of Artificial Sequence: Synthetic oligonucleotide
  Antisense strand to SEQ ID NO: 2078966
ucacauaacuaccuucaag

SEQ ID NO: 2078968 - RNA, 19 nt, Artificial Sequence
  Description of Artificial Sequence: Synthetic oligonucleotide
  Sense strand starting at position 157 of SEQ ID NO: 1881891
gaagguaguuaugugaaag

SEQ ID NO: 2078969 - RNA, 19 nt, Artificial Sequence
  Description of Artificial Sequence: Synthetic oligonucleotide
  Antisense strand to SEQ ID NO: 2078968
cuuucacauaacuaccuuc

SEQ ID NO: 2078970 - RNA, 19 nt, Artificial Sequence
  Description of Artificial Sequence: Synthetic oligonucleotide
  Sense strand starting at position 161 of SEQ ID NO: 1881891
guaguuaugugaaagggag

SEQ ID NO: 2078971 - RNA, 19 nt, Artificial Sequence
  Description of Artificial Sequence: Synthetic oligonucleotide
  Antisense strand to SEQ ID NO: 2078970
cucccuuucacauaacuac

SEQ ID NO: 2078972 - RNA, 19 nt, Artificial Sequence
  Description of Artificial Sequence: Synthetic oligonucleotide
  Sense strand starting at position 579 of SEQ ID NO: 1881891
caguaacuucguuaaauga

SEQ ID NO: 2078973 - RNA, 19 nt, Artificial Sequence
  Description of Artificial Sequence: Synthetic oligonucleotide
  Antisense strand to SEQ ID NO: 2078972
ucauuuaacgaaguuacug

SEQ ID NO: 2078974 - RNA, 19 nt, Artificial Sequence
  Description of Artificial Sequence: Synthetic oligonucleotide
  Sense strand starting at position 617 of SEQ ID NO: 1881891
ugcugauauuuggaaauga

SEQ ID NO: 2078975 - RNA, 19 nt, Artificial Sequence
  Description of Artificial Sequence: Synthetic oligonucleotide
  Antisense strand to SEQ ID NO: 2078974
ucauuuccaaauaucagca

SEQ ID NO: 2078976 - RNA, 19 nt, Artificial Sequence
  Description of Artificial Sequence: Synthetic oligonucleotide
  Sense strand starting at position 654 of SEQ ID NO: 1881891
gacaucuaacguuauggau

SEQ ID NO: 2078977 - RNA, 19 nt, Artificial Sequence
  Description of Artificial Sequence: Synthetic oligonucleotide
  Antisense strand to SEQ ID NO: 2078976
auccauaacguuagauguc

SEQ ID NO: 2078978 - RNA, 19 nt, Artificial Sequence
  Description of Artificial Sequence: Synthetic oligonucleotide
  Sense strand starting at position 679 of SEQ ID NO: 1881891
ucagucuuacuguaaauua

SEQ ID NO: 2078979 - RNA, 19 nt, Artificial Sequence
  Description of Artificial Sequence: Synthetic oligonucleotide
  Antisense strand to SEQ ID NO: 2078978
uaauuuacaguaagacuga

SEQ ID NO: 2078980 - RNA, 19 nt, Artificial Sequence
  Description of Artificial Sequence: Synthetic oligonucleotide
  Sense strand starting at position 706 of SEQ ID NO: 1881891
cucugaaacuuaguaagag

SEQ ID NO: 2078981 - RNA, 19 nt, Artificial Sequence
  Description of Artificial Sequence: Synthetic oligonucleotide
  Antisense strand to SEQ ID NO: 2078980
cucuuacuaaguuucagag

SEQ ID NO: 2078982 - RNA, 19 nt, Artificial Sequence
  Description of Artificial Sequence: Synthetic oligonucleotide
  Sense strand starting at position 732 of SEQ ID NO: 1881891
agcucuguaagaggaauaa

SEQ ID NO: 2078983 - RNA, 19 nt, Artificial Sequence
  Description of Artificial Sequence: Synthetic oligonucleotide
  Antisense strand to SEQ ID NO: 2078982
uuauuccucuuacagagcu

SEQ ID NO: 2078984 - RNA, 19 nt, Artificial Sequence
  Description of Artificial Sequence: Synthetic oligonucleotide
  Sense strand starting at position 972 of SEQ ID NO: 1881891
uaaugcucugaggagucua

SEQ ID NO: 2078985 - RNA, 19 nt, Artificial Sequence
  Description of Artificial Sequence: Synthetic oligonucleotide
  Antisense strand to SEQ ID NO: 2078984
uagacuccucagagcauua

SEQ ID NO: 2078986 - RNA, 19 nt, Artificial Sequence
  Description of Artificial Sequence: Synthetic oligonucleotide
  Sense strand starting at position 1054 of SEQ ID NO: 1881891
gacaacauagcucaugagu

SEQ ID NO: 2078987 - RNA, 19 nt, Artificial Sequence
  Description of Artificial Sequence: Synthetic oligonucleotide
  Antisense strand to SEQ ID NO: 2078986
acucaugagcuauguuguc

SEQ ID NO: 2078988 - RNA, 19 nt, Artificial Sequence
  Description of Artificial Sequence: Synthetic oligonucleotide
  Sense strand starting at position 1075 of SEQ ID NO: 1881891
aggaaaguaucuuuaaguc

SEQ ID NO: 2078989 - RNA, 19 nt, Artificial Sequence
  Description of Artificial Sequence: Synthetic oligonucleotide
  Antisense strand to SEQ ID NO: 2078988
gacuuaaagauacuuuccu

SEQ ID NO: 2078990 - RNA, 19 nt, Artificial Sequence
  Description of Artificial Sequence: Synthetic oligonucleotide
  Sense strand starting at position 1113 of SEQ ID NO: 1881891
aggagaacacucugguauc

SEQ ID NO: 2078991 - RNA, 19 nt, Artificial Sequence
  Description of Artificial Sequence: Synthetic oligonucleotide
  Antisense strand to SEQ ID NO: 2078990
gauaccagaguguucuccu

SEQ ID NO: 2078992 - RNA, 19 nt, Artificial Sequence
  Description of Artificial Sequence: Synthetic oligonucleotide
  Sense strand starting at position 1552 of SEQ ID NO: 1881891
acuugaagagguggcuaau

SEQ ID NO: 2078993 - RNA, 19 nt, Artificial Sequence
  Description of Artificial Sequence: Synthetic oligonucleotide
  Antisense strand to SEQ ID NO: 2078992
auuagccaccucuucaagu

SEQ ID NO: 2078994 - RNA, 19 nt, Artificial Sequence
  Description of Artificial Sequence: Synthetic oligonucleotide
  Sense strand starting at position 1555 of SEQ ID NO: 1881891
ugaagagguggcuaaucga

SEQ ID NO: 2078995 - RNA, 19 nt, Artificial Sequence
  Description of Artificial Sequence: Synthetic oligonucleotide
  Antisense strand to SEQ ID NO: 2078994
ucgauuagccaccucuuca

SEQ ID NO: 2078996 - RNA, 19 nt, Artificial Sequence
  Description of Artificial Sequence: Synthetic oligonucleotide
  Sense strand starting at position 1558 of SEQ ID NO: 1881891
agagguggcuaaucgauga

SEQ ID NO: 2078997 - RNA, 19 nt, Artificial Sequence
  Description of Artificial Sequence: Synthetic oligonucleotide
  Antisense strand to SEQ ID NO: 2078996
ucaucgauuagccaccucu

SEQ ID NO: 2078998 - RNA, 19 nt, Artificial Sequence
  Description of Artificial Sequence: Synthetic oligonucleotide
  Sense strand starting at position 1562 of SEQ ID NO: 1881891
guggcuaaucgaugagaag

SEQ ID NO: 2078999 - RNA, 19 nt, Artificial Sequence
  Description of Artificial Sequence: Synthetic oligonucleotide
  Antisense strand to SEQ ID NO: 2078998
cuucucaucgauuagccac

SEQ ID NO: 2079000 - RNA, 19 nt, Artificial Sequence
  Description of Artificial Sequence: Synthetic oligonucleotide
  Sense strand starting at position 1563 of SEQ ID NO: 1881891
uggcuaaucgaugagaagu

SEQ ID NO: 2079001 - RNA, 19 nt, Artificial Sequence
  Description of Artificial Sequence: Synthetic oligonucleotide
  Antisense strand to SEQ ID NO: 2079000
acuucucaucgauuagcca

SEQ ID NO: 2079002 - RNA, 19 nt, Artificial Sequence
  Description of Artificial Sequence: Synthetic oligonucleotide
  Sense strand starting at position 1585 of SEQ ID NO: 1881891
ggcucuauguauuugucca

SEQ ID NO: 2079003 - RNA, 19 nt, Artificial Sequence
  Description of Artificial Sequence: Synthetic oligonucleotide
  Antisense strand to SEQ ID NO: 2079002
uggacaaauacauagagcc

SEQ ID NO: 2079004 - RNA, 19 nt, Artificial Sequence
  Description of Artificial Sequence: Synthetic oligonucleotide
  Sense strand starting at position 1593 of SEQ ID NO: 1881891
guauuuguccagggagccu

SEQ ID NO: 2079005 - RNA, 19 nt, Artificial Sequence
  Description of Artificial Sequence: Synthetic oligonucleotide
  Antisense strand to SEQ ID NO: 2079004
aggcucccuggacaaauac

SEQ ID NO: 2079006 - RNA, 19 nt, Artificial Sequence
  Description of Artificial Sequence: Synthetic oligonucleotide
  Sense strand starting at position 2238 of SEQ ID NO: 1881891
uuguaugcacaugaugaau

SEQ ID NO: 2079007 - RNA, 19 nt, Artificial Sequence
  Description of Artificial Sequence: Synthetic oligonucleotide
  Antisense strand to SEQ ID NO: 2079006
auucaucaugugcauacaa

SEQ ID NO: 2079008 - RNA, 19 nt, Artificial Sequence
  Description of Artificial Sequence: Synthetic oligonucleotide
  Sense strand starting at position 2612 of SEQ ID NO: 1881891
auguaagauacaugagguu

SEQ ID NO: 2079009 - RNA, 19 nt, Artificial Sequence
  Description of Artificial Sequence: Synthetic oligonucleotide
  Antisense strand to SEQ ID NO: 2079008
aaccucauguaucuuacau

SEQ ID NO: 2079010 - RNA, 19 nt, Artificial Sequence
  Description of Artificial Sequence: Synthetic oligonucleotide
  Sense strand starting at position 2777 of SEQ ID NO: 1881891
aauggaaguuguuugaaca

SEQ ID NO: 2079011 - RNA, 19 nt, Artificial Sequence
  Description of Artificial Sequence: Synthetic oligonucleotide
  Antisense strand to SEQ ID NO: 2079010
uguucaaacaacuuccauu

SEQ ID NO: 2079012 - RNA, 19 nt, Artificial Sequence
  Description of Artificial Sequence: Synthetic oligonucleotide
  Sense strand starting at position 2778 of SEQ ID NO: 1881891
auggaaguuguuugaacau

SEQ ID NO: 2079013 - RNA, 19 nt, Artificial Sequence
  Description of Artificial Sequence: Synthetic oligonucleotide
  Antisense strand to SEQ ID NO: 2079012
auguucaaacaacuuccau

SEQ ID NO: 2079014 - RNA, 19 nt, Artificial Sequence
  Description of Artificial Sequence: Synthetic oligonucleotide
  Sense strand starting at position 2788 of SEQ ID NO: 1881891
uuugaacauuggucuugga

SEQ ID NO: 2079015 - RNA, 19 nt, Artificial Sequence
  Description of Artificial Sequence: Synthetic oligonucleotide
  Antisense strand to SEQ ID NO: 2079014
uccaagaccaauguucaaa

SEQ ID NO: 2079016 - RNA, 19 nt, Artificial Sequence
  Description of Artificial Sequence: Synthetic oligonucleotide
  Sense strand starting at position 2965 of SEQ ID NO: 1881891
gguggacuuacugaaguau

SEQ ID NO: 2079017 - RNA, 19 nt, Artificial Sequence
  Description of Artificial Sequence: Synthetic oligonucleotide
  Antisense strand to SEQ ID NO: 2079016
auacuucaguaaguccacc

SEQ ID NO: 2079018 - RNA, 19 nt, Artificial Sequence
  Description of Artificial Sequence: Synthetic oligonucleotide
  Sense strand starting at position 2979 of SEQ ID NO: 1881891
aguauaauuaccuggguug

SEQ ID NO: 2079019 - RNA, 19 nt, Artificial Sequence
  Description of Artificial Sequence: Synthetic oligonucleotide
  Antisense strand to SEQ ID NO: 2079018
caacccagguaauuauacu

SEQ ID NO: 2079020 - RNA, 19 nt, Artificial Sequence
  Description of Artificial Sequence: Synthetic oligonucleotide
  Sense strand starting at position 3027 of SEQ ID NO: 1881891
ccuugaauacucuggauca

SEQ ID NO: 2079021 - RNA, 19 nt, Artificial Sequence
  Description of Artificial Sequence: Synthetic oligonucleotide
  Antisense strand to SEQ ID NO: 2079020
ugauccagaguauucaagg

SEQ ID NO: 2079022 - RNA, 19 nt, Artificial Sequence
  Description of Artificial Sequence: Synthetic oligonucleotide
  Sense strand starting at position 3124 of SEQ ID NO: 1881891
auaccacucccuuguggaa

SEQ ID NO: 2079023 - RNA, 19 nt, Artificial Sequence
  Description of Artificial Sequence: Synthetic oligonucleotide
  Antisense strand to SEQ ID NO: 2079022
uuccacaagggagugguau

SEQ ID NO: 2079024 - RNA, 19 nt, Artificial Sequence
  Description of Artificial Sequence: Synthetic oligonucleotide
  Sense strand starting at position 3136 of SEQ ID NO: 1881891
uguggaacauuaguagaua

SEQ ID NO: 2079025 - RNA, 19 nt, Artificial Sequence
  Description of Artificial Sequence: Synthetic oligonucleotide
  Antisense strand to SEQ ID NO: 2079024
uaucuacuaauguuccaca

SEQ ID NO: 2079026 - RNA, 19 nt, Artificial Sequence
  Description of Artificial Sequence: Synthetic oligonucleotide
  Sense strand starting at position 3177 of SEQ ID NO: 1881891
aaauacgguuucuuagauu

SEQ ID NO: 2079027 - RNA, 19 nt, Artificial Sequence
  Description of Artificial Sequence: Synthetic oligonucleotide
  Antisense strand to SEQ ID NO: 2079026
aaucuaagaaaccguauuu

SEQ ID NO: 2079028 - RNA, 19 nt, Artificial Sequence
  Description of Artificial Sequence: Synthetic oligonucleotide
  Sense strand starting at position 3258 of SEQ ID NO: 1881891
aauugcucuggguauuaga

SEQ ID NO: 2079029 - RNA, 19 nt, Artificial Sequence
  Description of Artificial Sequence: Synthetic oligonucleotide
  Antisense strand to SEQ ID NO: 2079028
ucuaauacccagagcaauu

SEQ ID NO: 2079030 - RNA, 19 nt, Artificial Sequence
  Description of Artificial Sequence: Synthetic oligonucleotide
  Sense strand starting at position 3268 of SEQ ID NO: 1881891
gguauuagaauauggccaa

SEQ ID NO: 2079031 - RNA, 19 nt, Artificial Sequence
  Description of Artificial Sequence: Synthetic oligonucleotide
  Antisense strand to SEQ ID NO: 2079030
uuggccauauucuaauacc

SEQ ID NO: 2079032 - RNA, 19 nt, Artificial Sequence
  Description of Artificial Sequence: Synthetic oligonucleotide
  Sense strand starting at position 3304 of SEQ ID NO: 1881891
auauauaaagucugucuca

SEQ ID NO: 2079033 - RNA, 19 nt, Artificial Sequence
  Description of Artificial Sequence: Synthetic oligonucleotide
  Antisense strand to SEQ ID NO: 2079032
ugagacagacuuuauauau

SEQ ID NO: 2079034 - RNA, 19 nt, Artificial Sequence
  Description of Artificial Sequence: Synthetic oligonucleotide
  Sense strand starting at position 3764 of SEQ ID NO: 1881891
ccaguaagucuguauagaa

SEQ ID NO: 2079035 - RNA, 19 nt, Artificial Sequence
  Description of Artificial Sequence: Synthetic oligonucleotide
  Antisense strand to SEQ ID NO: 2079034
uucuauacagacuuacugg

SEQ ID NO: 2079036 - RNA, 19 nt, Artificial Sequence
  Description of Artificial Sequence: Synthetic oligonucleotide
  Sense strand starting at position 3793 of SEQ ID NO: 1881891
ccauaaauguuguugaaca

SEQ ID NO: 2079037 - RNA, 19 nt, Artificial Sequence
  Description of Artificial Sequence: Synthetic oligonucleotide
  Antisense strand to SEQ ID NO: 2079036
uguucaacaacauuuaugg

SEQ ID NO: 2079038 - RNA, 19 nt, Artificial Sequence
  Description of Artificial Sequence: Synthetic oligonucleotide
  Sense strand starting at position 9 of SEQ ID NO: 1881892
guagguucugaggauaauc

SEQ ID NO: 2079039 - RNA, 19 nt, Artificial Sequence
  Description of Artificial Sequence: Synthetic oligonucleotide
  Antisense strand to SEQ ID NO: 2079038
gauuauccucagaaccuac

SEQ ID NO: 2079040 - RNA, 19 nt, Artificial Sequence
  Description of Artificial Sequence: Synthetic oligonucleotide
  Sense strand starting at position 241 of SEQ ID NO: 1881892
cucaguuuagcagaagaua

SEQ ID NO: 2079041 - RNA, 19 nt, Artificial Sequence
  Description of Artificial Sequence: Synthetic oligonucleotide
  Antisense strand to SEQ ID NO: 2079040
uaucuucugcuaaacugag

SEQ ID NO: 2079042 - RNA, 19 nt, Artificial Sequence
  Description of Artificial Sequence: Synthetic oligonucleotide
  Sense strand starting at position 244 of SEQ ID NO: 1881892
aguuuagcagaagauacuu

SEQ ID NO: 2079043 - RNA, 19 nt, Artificial Sequence
  Description of Artificial Sequence: Synthetic oligonucleotide
  Antisense strand to SEQ ID NO: 2079042
aaguaucuucugcuaaacu

SEQ ID NO: 2079044 - RNA, 19 nt, Artificial Sequence
  Description of Artificial Sequence: Synthetic oligonucleotide
  Sense strand starting at position 344 of SEQ ID NO: 1881892
gcugaugacaaugggagau

SEQ ID NO: 2079045 - RNA, 19 nt, Artificial Sequence
  Description of Artificial Sequence: Synthetic oligonucleotide
  Antisense strand to SEQ ID NO: 2079044
aucucccauugucaucagc

SEQ ID NO: 2079046 - RNA, 19 nt, Artificial Sequence
  Description of Artificial Sequence: Synthetic oligonucleotide
  Sense strand starting at position 410 of SEQ ID NO: 1881892
ggagcuugaacuuggaauu

SEQ ID NO: 2079047 - RNA, 19 nt, Artificial Sequence
  Description of Artificial Sequence: Synthetic oligonucleotide
  Antisense strand to SEQ ID NO: 2079046
aauuccaaguucaagcucc

SEQ ID NO: 2079048 - RNA, 19 nt, Artificial Sequence
  Description of Artificial Sequence: Synthetic oligonucleotide
  Sense strand starting at position 478 of SEQ ID NO: 1881892
agcagucauccucauuaca

SEQ ID NO: 2079049 - RNA, 19 nt, Artificial Sequence
  Description of Artificial Sequence: Synthetic oligonucleotide
  Antisense strand to SEQ ID NO: 2079048
uguaaugaggaugacugcu

SEQ ID NO: 2079050 - RNA, 19 nt, Artificial Sequence
  Description of Artificial Sequence: Synthetic oligonucleotide
  Sense strand starting at position 559 of SEQ ID NO: 1881892
auauuugauuaggaaucca

SEQ ID NO: 2079051 - RNA, 19 nt, Artificial Sequence
  Description of Artificial Sequence: Synthetic oligonucleotide
  Antisense strand to SEQ ID NO: 2079050
uggauuccuaaucaaauau

SEQ ID NO: 2079052 - RNA, 19 nt, Artificial Sequence
  Description of Artificial Sequence: Synthetic oligonucleotide
  Sense strand starting at position 605 of SEQ ID NO: 1881892
cguauuacaccauagacua

SEQ ID NO: 2079053 - RNA, 19 nt, Artificial Sequence
  Description of Artificial Sequence: Synthetic oligonucleotide
  Antisense strand to SEQ ID NO: 2079052
uagucuaugguguaauacg

SEQ ID NO: 2079054 - RNA, 19 nt, Artificial Sequence
  Description of Artificial Sequence: Synthetic oligonucleotide
  Sense strand starting at position 631 of SEQ ID NO: 1881892
cuucuuuaccacuggaaag

SEQ ID NO: 2079055 - RNA, 19 nt, Artificial Sequence
  Description of Artificial Sequence: Synthetic oligonucleotide
  Antisense strand to SEQ ID NO: 2079054
cuuuccagugguaaagaag

SEQ ID NO: 2079056 - RNA, 19 nt, Artificial Sequence
  Description of Artificial Sequence: Synthetic oligonucleotide
  Sense strand starting at position 791 of SEQ ID NO: 1881892
gcuuaaguacuccagagau

SEQ ID NO: 2079057 - RNA, 19 nt, Artificial Sequence
  Description of Artificial Sequence: Synthetic oligonucleotide
  Antisense strand to SEQ ID NO: 2079056
aucucuggaguacuuaagc

SEQ ID NO: 2079058 - RNA, 19 nt, Artificial Sequence
  Description of Artificial Sequence: Synthetic oligonucleotide
  Sense strand starting at position 1103 of SEQ ID NO: 1881892
ugagguugcccuggaagaa

SEQ ID NO: 2079059 - RNA, 19 nt, Artificial Sequence
  Description of Artificial Sequence: Synthetic oligonucleotide
  Antisense strand to SEQ ID NO: 2079058
uucuuccagggcaaccuca

SEQ ID NO: 2079060 - RNA, 19 nt, Artificial Sequence
  Description of Artificial Sequence: Synthetic oligonucleotide
  Sense strand starting at position 1135 of SEQ ID NO: 1881892
ugcuuaauucugggacaau

SEQ ID NO: 2079061 - RNA, 19 nt, Artificial Sequence
  Description of Artificial Sequence: Synthetic oligonucleotide
  Antisense strand to SEQ ID NO: 2079060
auugucccagaauuaagca

SEQ ID NO: 2079062 - RNA, 19 nt, Artificial Sequence
  Description of Artificial Sequence: Synthetic oligonucleotide
  Sense strand starting at position 1194 of SEQ ID NO: 1881892
guauacucccugcagauau

SEQ ID NO: 2079063 - RNA, 19 nt, Artificial Sequence
  Description of Artificial Sequence: Synthetic oligonucleotide
  Antisense strand to SEQ ID NO: 2079062
auaucugcagggaguauac

SEQ ID NO: 2079064 - RNA, 19 nt, Artificial Sequence
  Description of Artificial Sequence: Synthetic oligonucleotide
  Sense strand starting at position 1244 of SEQ ID NO: 1881892
gaaagaacuugccuaguag

SEQ ID NO: 2079065 - RNA, 19 nt, Artificial Sequence
  Description of Artificial Sequence: Synthetic oligonucleotide
  Antisense strand to SEQ ID NO: 2079064
cuacuaggcaaguucuuuc

SEQ ID NO: 2079066 - RNA, 19 nt, Artificial Sequence
  Description of Artificial Sequence: Synthetic oligonucleotide
  Sense strand starting at position 1245 of SEQ ID NO: 1881892
aaagaacuugccuaguagu

SEQ ID NO: 2079067 - RNA, 19 nt, Artificial Sequence
  Description of Artificial Sequence: Synthetic oligonucleotide
  Antisense strand to SEQ ID NO: 2079066
acuacuaggcaaguucuuu

SEQ ID NO: 2079068 - RNA, 19 nt, Artificial Sequence
  Description of Artificial Sequence: Synthetic oligonucleotide
  Sense strand starting at position 1303 of SEQ ID NO: 1881892
guucuuauacugcaaggau

SEQ ID NO: 2079069 - RNA, 19 nt, Artificial Sequence
  Description of Artificial Sequence: Synthetic oligonucleotide
  Antisense strand to SEQ ID NO: 2079068
auccuugcaguauaagaac

SEQ ID NO: 2079070 - RNA, 19 nt, Artificial Sequence
  Description of Artificial Sequence: Synthetic oligonucleotide
  Sense strand starting at position 1343 of SEQ ID NO: 1881892
guuauauacagagaugugu

SEQ ID NO: 2079071 - RNA, 19 nt, Artificial Sequence
  Description of Artificial Sequence: Synthetic oligonucleotide
  Antisense strand to SEQ ID NO: 2079070
acacaucucuguauauaac

SEQ ID NO: 2079072 - RNA, 19 nt, Artificial Sequence
  Description of Artificial Sequence: Synthetic oligonucleotide
  Sense strand starting at position 1436 of SEQ ID NO: 1881892
aggucugaaucaccacuaa

SEQ ID NO: 2079073 - RNA, 19 nt, Artificial Sequence
  Description of Artificial Sequence: Synthetic oligonucleotide
  Antisense strand to SEQ ID NO: 2079072
uuaguggugauucagaccu

SEQ ID NO: 2079074 - RNA, 19 nt, Artificial Sequence
  Description of Artificial Sequence: Synthetic oligonucleotide
  Sense strand starting at position 1538 of SEQ ID NO: 1881892
gagagcauaguguagauau

SEQ ID NO: 2079075 - RNA, 19 nt, Artificial Sequence
  Description of Artificial Sequence: Synthetic oligonucleotide
  Antisense strand to SEQ ID NO: 2079074
auaucuacacuaugcucuc

SEQ ID NO: 2079076 - RNA, 19 nt, Artificial Sequence
  Description of Artificial Sequence: Synthetic oligonucleotide
  Sense strand starting at position 1687 of SEQ ID NO: 1881892
augacauccucugcaaaug

SEQ ID NO: 2079077 - RNA, 19 nt, Artificial Sequence
  Description of Artificial Sequence: Synthetic oligonucleotide
  Antisense strand to SEQ ID NO: 2079076
cauuugcagaggaugucau

SEQ ID NO: 2079078 - RNA, 19 nt, Artificial Sequence
  Description of Artificial Sequence: Synthetic oligonucleotide
  Sense strand starting at position 1854 of SEQ ID NO: 1881892
agaagacaaugugcugaau

SEQ ID NO: 2079079 - RNA, 19 nt, Artificial Sequence
  Description of Artificial Sequence: Synthetic oligonucleotide
  Antisense strand to SEQ ID NO: 2079078
auucagcacauugucuucu

SEQ ID NO: 2079080 - RNA, 19 nt, Artificial Sequence
  Description of Artificial Sequence: Synthetic oligonucleotide
  Sense strand starting at position 1857 of SEQ ID NO: 1881892
agacaaugugcugaauacu

SEQ ID NO: 2079081 - RNA, 19 nt, Artificial Sequence
  Description of Artificial Sequence: Synthetic oligonucleotide
  Antisense strand to SEQ ID NO: 2079080
aguauucagcacauugucu

SEQ ID NO: 2079082 - RNA, 19 nt, Artificial Sequence
  Description of Artificial Sequence: Synthetic oligonucleotide
  Sense strand starting at position 2004 of SEQ ID NO: 1881892
gcaacaggaguguaaacuu

SEQ ID NO: 2079083 - RNA, 19 nt, Artificial Sequence
  Description of Artificial Sequence: Synthetic oligonucleotide
  Antisense strand to SEQ ID NO: 2079082
aaguuuacacuccuguugc

SEQ ID NO: 2079084 - RNA, 19 nt, Artificial Sequence
  Description of Artificial Sequence: Synthetic oligonucleotide
  Sense strand starting at position 2038 of SEQ ID NO: 1881892
cagaguagagauugacagu

SEQ ID NO: 2079085 - RNA, 19 nt, Artificial Sequence
  Description of Artificial Sequence: Synthetic oligonucleotide
  Antisense strand to SEQ ID NO: 2079084
acugucaaucucuacucug

SEQ ID NO: 2079086 - RNA, 19 nt, Artificial Sequence
  Description of Artificial Sequence: Synthetic oligonucleotide
  Sense strand starting at position 2378 of SEQ ID NO: 1881892
uugagaguucuuggacuag

SEQ ID NO: 2079087 - RNA, 19 nt, Artificial Sequence
  Description of Artificial Sequence: Synthetic oligonucleotide
  Antisense strand to SEQ ID NO: 2079086
cuaguccaagaacucucaa

SEQ ID NO: 2079088 - RNA, 19 nt, Artificial Sequence
  Description of Artificial Sequence: Synthetic oligonucleotide
  Sense strand starting at position 2425 of SEQ ID NO: 1881892
gaggaaagagcuugguacu

SEQ ID NO: 2079089 - RNA, 19 nt, Artificial Sequence
  Description of Artificial Sequence: Synthetic oligonucleotide
  Antisense strand to SEQ ID NO: 2079088
aguaccaagcucuuuccuc

SEQ ID NO: 2079090 - RNA, 19 nt, Artificial Sequence
  Description of Artificial Sequence: Synthetic oligonucleotide
  Sense strand starting at position 2553 of SEQ ID NO: 1881892
guacuagguauuugagugu

SEQ ID NO: 2079091 - RNA, 19 nt, Artificial Sequence
  Description of Artificial Sequence: Synthetic oligonucleotide
  Antisense strand to SEQ ID NO: 2079090
acacucaaauaccuaguac

SEQ ID NO: 2079092 - RNA, 19 nt, Artificial Sequence
  Description of Artificial Sequence: Synthetic oligonucleotide
  Sense strand starting at position 2848 of SEQ ID NO: 1881892
uuacguucucauuaaagga

SEQ ID NO: 2079093 - RNA, 19 nt, Artificial Sequence
  Description of Artificial Sequence: Synthetic oligonucleotide
  Antisense strand to SEQ ID NO: 2079092
uccuuuaaugagaacguaa

SEQ ID NO: 2079094 - RNA, 19 nt, Artificial Sequence
  Description of Artificial Sequence: Synthetic oligonucleotide
  Sense strand starting at position 3046 of SEQ ID NO: 1881892
ggcauacauuuguauuuau

SEQ ID NO: 2079095 - RNA, 19 nt, Artificial Sequence
  Description of Artificial Sequence: Synthetic oligonucleotide
  Antisense strand to SEQ ID NO: 2079094
auaaauacaaauguaugcc

SEQ ID NO: 2079096 - RNA, 19 nt, Artificial Sequence
  Description of Artificial Sequence: Synthetic oligonucleotide
  Sense strand starting at position 3129 of SEQ ID NO: 1881892
cugcuaagcccugaugaua

SEQ ID NO: 2079097 - RNA, 19 nt, Artificial Sequence
  Description of Artificial Sequence: Synthetic oligonucleotide
  Antisense strand to SEQ ID NO: 2079096
uaucaucagggcuuagcag

SEQ ID NO: 2079098 - RNA, 19 nt, Artificial Sequence
  Description of Artificial Sequence: Synthetic oligonucleotide
  Sense strand starting at position 3208 of SEQ ID NO: 1881892
cagggcaaguaauucgaaa

SEQ ID NO: 2079099 - RNA, 19 nt, Artificial Sequence
  Description of Artificial Sequence: Synthetic oligonucleotide
  Antisense strand to SEQ ID NO: 2079098
uuucgaauuacuugcccug

SEQ ID NO: 2079100 - RNA, 19 nt, Artificial Sequence
  Description of Artificial Sequence: Synthetic oligonucleotide
  Sense strand starting at position 3295 of SEQ ID NO: 1881892
ggacuucucugggccaaca

SEQ ID NO: 2079101 - RNA, 19 nt, Artificial Sequence
  Description of Artificial Sequence: Synthetic oligonucleotide
  Antisense strand to SEQ ID NO: 2079100
uguuggcccagagaagucc

SEQ ID NO: 2079102 - RNA, 19 nt, Artificial Sequence
  Description of Artificial Sequence: Synthetic oligonucleotide
  Sense strand starting at position 3391 of SEQ ID NO: 1881892
gaaugugagugaguagaga

SEQ ID NO: 2079103 - RNA, 19 nt, Artificial Sequence
  Description of Artificial Sequence: Synthetic oligonucleotide
  Antisense strand to SEQ ID NO: 2079102
ucucuacucacucacauuc

SEQ ID NO: 2079104 - RNA, 19 nt, Artificial Sequence
  Description of Artificial Sequence: Synthetic oligonucleotide
  Sense strand starting at position 3693 of SEQ ID NO: 1881892
uauccauggcaauggagau

SEQ ID NO: 2079105 - RNA, 19 nt, Artificial Sequence
  Description of Artificial Sequence: Synthetic oligonucleotide
  Antisense strand to SEQ ID NO: 2079104
aucuccauugccauggaua

SEQ ID NO: 2079106 - RNA, 19 nt, Artificial Sequence
  Description of Artificial Sequence: Synthetic oligonucleotide
  Sense strand starting at position 3797 of SEQ ID NO: 1881892
cuaggauaauggucaguua

SEQ ID NO: 2079107 - RNA, 19 nt, Artificial Sequence
  Description of Artificial Sequence: Synthetic oligonucleotide
  Antisense strand to SEQ ID NO: 2079106
uaacugaccauuauccuag

SEQ ID NO: 2079108 - RNA, 19 nt, Artificial Sequence
  Description of Artificial Sequence: Synthetic oligonucleotide
  Sense strand starting at position 3800 of SEQ ID NO: 1881892
ggauaauggucaguuaaug

SEQ ID NO: 2079109 - RNA, 19 nt, Artificial Sequence
  Description of Artificial Sequence: Synthetic oligonucleotide
  Antisense strand to SEQ ID NO: 2079108
cauuaacugaccauuaucc

SEQ ID NO: 2079110 - RNA, 19 nt, Artificial Sequence
  Description of Artificial Sequence: Synthetic oligonucleotide
  Sense strand starting at position 3812 of SEQ ID NO: 1881892
guuaaugacccagguaaau

SEQ ID NO: 2079111 - RNA, 19 nt, Artificial Sequence
  Description of Artificial Sequence: Synthetic oligonucleotide
  Antisense strand to SEQ ID NO: 2079110
auuuaccugggucauuaac

SEQ ID NO: 2079112 - RNA, 19 nt, Artificial Sequence
  Description of Artificial Sequence: Synthetic oligonucleotide
  Sense strand starting at position 3937 of SEQ ID NO: 1881892
ugagaaaucuggcuccaga

SEQ ID NO: 2079113 - RNA, 19 nt, Artificial Sequence
  Description of Artificial Sequence: Synthetic oligonucleotide
  Antisense strand to SEQ ID NO: 2079112
ucuggagccagauuucuca

SEQ ID NO: 2079114 - RNA, 19 nt, Artificial Sequence
  Description of Artificial Sequence: Synthetic oligonucleotide
  Sense strand starting at position 3956 of SEQ ID NO: 1881892
gagugccuacauuggaaua

SEQ ID NO: 2079115 - RNA, 19 nt, Artificial Sequence
  Description of Artificial Sequence: Synthetic oligonucleotide
  Antisense strand to SEQ ID NO: 2079114
uauuccaauguaggcacuc

SEQ ID NO: 2079116 - RNA, 19 nt, Artificial Sequence
  Description of Artificial Sequence: Synthetic oligonucleotide
  Sense strand starting at position 3978 of SEQ ID NO: 1881892
auuuguuagucaucauugu

SEQ ID NO: 2079117 - RNA, 19 nt, Artificial Sequence
  Description of Artificial Sequence: Synthetic oligonucleotide
  Antisense strand to SEQ ID NO: 2079116
acaaugaugacuaacaaau

SEQ ID NO: 2079118 - RNA, 19 nt, Artificial Sequence
  Description of Artificial Sequence: Synthetic oligonucleotide
  Sense strand starting at position 303 of SEQ ID NO: 1881893
aaaguagacuucccugguu

SEQ ID NO: 2079119 - RNA, 19 nt, Artificial Sequence
  Description of Artificial Sequence: Synthetic oligonucleotide
  Antisense strand to SEQ ID NO: 2079118
aaccagggaagucuacuuu

SEQ ID NO: 2079120 - RNA, 19 nt, Artificial Sequence
  Description of Artificial Sequence: Synthetic oligonucleotide
  Sense strand starting at position 322 of SEQ ID NO: 1881893
guaacuaccuugucauaaa

SEQ ID NO: 2079121 - RNA, 19 nt, Artificial Sequence
  Description of Artificial Sequence: Synthetic oligonucleotide
  Antisense strand to SEQ ID NO: 2079120
uuuaugacaagguaguuac

SEQ ID NO: 2079122 - RNA, 19 nt, Artificial Sequence
  Description of Artificial Sequence: Synthetic oligonucleotide
  Sense strand starting at position 421 of SEQ ID NO: 1881893
ugaauugaaaguuguugau

SEQ ID NO: 2079123 - RNA, 19 nt, Artificial Sequence
  Description of Artificial Sequence: Synthetic oligonucleotide
  Antisense strand to SEQ ID NO: 2079122
aucaacaacuuucaauuca

SEQ ID NO: 2079124 - RNA, 19 nt, Artificial Sequence
  Description of Artificial Sequence: Synthetic oligonucleotide
  Sense strand starting at position 433 of SEQ ID NO: 1881893
uguugauagcgcucugcau

SEQ ID NO: 2079125 - RNA, 19 nt, Artificial Sequence
  Description of Artificial Sequence: Synthetic oligonucleotide
  Antisense strand to SEQ ID NO: 2079124
augcagagcgcuaucaaca

SEQ ID NO: 2079126 - RNA, 19 nt, Artificial Sequence
  Description of Artificial Sequence: Synthetic oligonucleotide
  Sense strand starting at position 434 of SEQ ID NO: 1881893
guugauagcgcucugcauu

SEQ ID NO: 2079127 - RNA, 19 nt, Artificial Sequence
  Description of Artificial Sequence: Synthetic oligonucleotide
  Antisense strand to SEQ ID NO: 2079126
aaugcagagcgcuaucaac

SEQ ID NO: 2079128 - RNA, 19 nt, Artificial Sequence
  Description of Artificial Sequence: Synthetic oligonucleotide
  Sense strand starting at position 531 of SEQ ID NO: 1881893
cuguucuuccuggaggcaa

SEQ ID NO: 2079129 - RNA, 19 nt, Artificial Sequence
  Description of Artificial Sequence: Synthetic oligonucleotide
  Antisense strand to SEQ ID NO: 2079128
uugccuccaggaagaacag

SEQ ID NO: 2079130 - RNA, 19 nt, Artificial Sequence
  Description of Artificial Sequence: Synthetic oligonucleotide
  Sense strand starting at position 1094 of SEQ ID NO: 1881893
uagaguuuggcuuacuuag

SEQ ID NO: 2079131 - RNA, 19 nt, Artificial Sequence
  Description of Artificial Sequence: Synthetic oligonucleotide
  Antisense strand to SEQ ID NO: 2079130
cuaaguaagccaaacucua

SEQ ID NO: 2079132 - RNA, 19 nt, Artificial Sequence
  Description of Artificial Sequence: Synthetic oligonucleotide
  Sense strand starting at position 1121 of SEQ ID NO: 1881893
accacauucuggucaaagu

SEQ ID NO: 2079133 - RNA, 19 nt, Artificial Sequence
  Description of Artificial Sequence: Synthetic oligonucleotide
  Antisense strand to SEQ ID NO: 2079132
acuuugaccagaauguggu

SEQ ID NO: 2079134 - RNA, 19 nt, Artificial Sequence
  Description of Artificial Sequence: Synthetic oligonucleotide
  Sense strand starting at position 1191 of SEQ ID NO: 1881893
gguuguugagacugauuac

SEQ ID NO: 2079135 - RNA, 19 nt, Artificial Sequence
  Description of Artificial Sequence: Synthetic oligonucleotide
  Antisense strand to SEQ ID NO: 2079134
guaaucagucucaacaacc

SEQ ID NO: 2079136 - RNA, 19 nt, Artificial Sequence
  Description of Artificial Sequence: Synthetic oligonucleotide
  Sense strand starting at position 1197 of SEQ ID NO: 1881893
ugagacugauuaccuguua

SEQ ID NO: 2079137 - RNA, 19 nt, Artificial Sequence
  Description of Artificial Sequence: Synthetic oligonucleotide
  Antisense strand to SEQ ID NO: 2079136
uaacagguaaucagucuca

SEQ ID NO: 2079138 - RNA, 19 nt, Artificial Sequence
  Description of Artificial Sequence: Synthetic oligonucleotide
  Sense strand starting at position 1198 of SEQ ID NO: 1881893
gagacugauuaccuguuaa

SEQ ID NO: 2079139 - RNA, 19 nt, Artificial Sequence
  Description of Artificial Sequence: Synthetic oligonucleotide
  Antisense strand to SEQ ID NO: 2079138
uuaacagguaaucagucuc

SEQ ID NO: 2079140 - RNA, 19 nt, Artificial Sequence
  Description of Artificial Sequence: Synthetic oligonucleotide
  Sense strand starting at position 1340 of SEQ ID NO: 1881893
aguaaagcuggugauucuu

SEQ ID NO: 2079141 - RNA, 19 nt, Artificial Sequence
  Description of Artificial Sequence: Synthetic oligonucleotide
  Antisense strand to SEQ ID NO: 2079140
aagaaucaccagcuuuacu

SEQ ID NO: 2079142 - RNA, 19 nt, Artificial Sequence
  Description of Artificial Sequence: Synthetic oligonucleotide
  Sense strand starting at position 1415 of SEQ ID NO: 1881893
aaguuagagaguuacguuu

SEQ ID NO: 2079143 - RNA, 19 nt, Artificial Sequence
  Description of Artificial Sequence: Synthetic oligonucleotide
  Antisense strand to SEQ ID NO: 2079142
aaacguaacucucuaacuu

SEQ ID NO: 2079144 - RNA, 19 nt, Artificial Sequence
  Description of Artificial Sequence: Synthetic oligonucleotide
  Sense strand starting at position 1480 of SEQ ID NO: 1881893
ucccgcuuccuaggaauuu

SEQ ID NO: 2079145 - RNA, 19 nt, Artificial Sequence
  Description of Artificial Sequence: Synthetic oligonucleotide
  Antisense strand to SEQ ID NO: 2079144
aaauuccuaggaagcggga

SEQ ID NO: 2079146 - RNA, 19 nt, Artificial Sequence
  Description of Artificial Sequence: Synthetic oligonucleotide
  Sense strand starting at position 1634 of SEQ ID NO: 1881893
cuuucugaaguauggaagu

SEQ ID NO: 2079147 - RNA, 19 nt, Artificial Sequence
  Description of Artificial Sequence: Synthetic oligonucleotide
  Antisense strand to SEQ ID NO: 2079146
acuuccauacuucagaaag

SEQ ID NO: 2079148 - RNA, 19 nt, Artificial Sequence
  Description of Artificial Sequence: Synthetic oligonucleotide
  Sense strand starting at position 1736 of SEQ ID NO: 1881893
auauccugguccucugaga

SEQ ID NO: 2079149 - RNA, 19 nt, Artificial Sequence
  Description of Artificial Sequence: Synthetic oligonucleotide
  Antisense strand to SEQ ID NO: 2079148
ucucagaggaccaggauau

SEQ ID NO: 2079150 - RNA, 19 nt, Artificial Sequence
  Description of Artificial Sequence: Synthetic oligonucleotide
  Sense strand starting at position 1811 of SEQ ID NO: 1881893
gcguauugugggucugauc

SEQ ID NO: 2079151 - RNA, 19 nt, Artificial Sequence
  Description of Artificial Sequence: Synthetic oligonucleotide
  Antisense strand to SEQ ID NO: 2079150
gaucagacccacaauacgc

SEQ ID NO: 2079152 - RNA, 19 nt, Artificial Sequence
  Description of Artificial Sequence: Synthetic oligonucleotide
  Sense strand starting at position 1822 of SEQ ID NO: 1881893
gucugaucugcuggaagag

SEQ ID NO: 2079153 - RNA, 19 nt, Artificial Sequence
  Description of Artificial Sequence: Synthetic oligonucleotide
  Antisense strand to SEQ ID NO: 2079152
cucuuccagcagaucagac

SEQ ID NO: 2079154 - RNA, 19 nt, Artificial Sequence
  Description of Artificial Sequence: Synthetic oligonucleotide
  Sense strand starting at position 1888 of SEQ ID NO: 1881893
ugaaguugaaguuauggua

SEQ ID NO: 2079155 - RNA, 19 nt, Artificial Sequence
  Description of Artificial Sequence: Synthetic oligonucleotide
  Antisense strand to SEQ ID NO: 2079154
uaccauaacuucaacuuca

SEQ ID NO: 2079156 - RNA, 19 nt, Artificial Sequence
  Description of Artificial Sequence: Synthetic oligonucleotide
  Sense strand starting at position 1897 of SEQ ID NO: 1881893
aguuaugguaaauggucaa

SEQ ID NO: 2079157 - RNA, 19 nt, Artificial Sequence
  Description of Artificial Sequence: Synthetic oligonucleotide
  Antisense strand to SEQ ID NO: 2079156
uugaccauuuaccauaacu

SEQ ID NO: 2079158 - RNA, 19 nt, Artificial Sequence
  Description of Artificial Sequence: Synthetic oligonucleotide
  Sense strand starting at position 1925 of SEQ ID NO: 1881893
gcaaucagagguugagaac

SEQ ID NO: 2079159 - RNA, 19 nt, Artificial Sequence
  Description of Artificial Sequence: Synthetic oligonucleotide
  Antisense strand to SEQ ID NO: 2079158
guucucaaccucugauugc

SEQ ID NO: 2079160 - RNA, 19 nt, Artificial Sequence
  Description of Artificial Sequence: Synthetic oligonucleotide
  Sense strand starting at position 1936 of SEQ ID NO: 1881893
uugagaacuuucucucaug

SEQ ID NO: 2079161 - RNA, 19 nt, Artificial Sequence
  Description of Artificial Sequence: Synthetic oligonucleotide
  Antisense strand to SEQ ID NO: 2079160
caugagagaaaguucucaa

SEQ ID NO: 2079162 - RNA, 19 nt, Artificial Sequence
  Description of Artificial Sequence: Synthetic oligonucleotide
  Sense strand starting at position 1942 of SEQ ID NO: 1881893
acuuucucucauggagauu

SEQ ID NO: 2079163 - RNA, 19 nt, Artificial Sequence
  Description of Artificial Sequence: Synthetic oligonucleotide
  Antisense strand to SEQ ID NO: 2079162
aaucuccaugagagaaagu

SEQ ID NO: 2079164 - RNA, 19 nt, Artificial Sequence
  Description of Artificial Sequence: Synthetic oligonucleotide
  Sense strand starting at position 2073 of SEQ ID NO: 1881893
ugggaaugguguuugagaa

SEQ ID NO: 2079165 - RNA, 19 nt, Artificial Sequence
  Description of Artificial Sequence: Synthetic oligonucleotide
  Antisense strand to SEQ ID NO: 2079164
uucucaaacaccauuccca

SEQ ID NO: 2079166 - RNA, 19 nt, Artificial Sequence
  Description of Artificial Sequence: Synthetic oligonucleotide
  Sense strand starting at position 2074 of SEQ ID NO: 1881893
gggaaugguguuugagaaa

SEQ ID NO: 2079167 - RNA, 19 nt, Artificial Sequence
  Description of Artificial Sequence: Synthetic oligonucleotide
  Antisense strand to SEQ ID NO: 2079166
uuucucaaacaccauuccc

SEQ ID NO: 2079168 - RNA, 19 nt, Artificial Sequence
  Description of Artificial Sequence: Synthetic oligonucleotide
  Sense strand starting at position 2244 of SEQ ID NO: 1881893
cagugauaacccugguuua

SEQ ID NO: 2079169 - RNA, 19 nt, Artificial Sequence
  Description of Artificial Sequence: Synthetic oligonucleotide
  Antisense strand to SEQ ID NO: 2079168
uaaaccaggguuaucacug

SEQ ID NO: 2079170 - RNA, 19 nt, Artificial Sequence
  Description of Artificial Sequence: Synthetic oligonucleotide
  Sense strand starting at position 2245 of SEQ ID NO: 1881893
agugauaacccugguuuaa

SEQ ID NO: 2079171 - RNA, 19 nt, Artificial Sequence
  Description of Artificial Sequence: Synthetic oligonucleotide
  Antisense strand to SEQ ID NO: 2079170
uuaaaccaggguuaucacu

SEQ ID NO: 2079172 - RNA, 19 nt, Artificial Sequence
  Description of Artificial Sequence: Synthetic oligonucleotide
  Sense strand starting at position 2247 of SEQ ID NO: 1881893
ugauaacccugguuuaauc

SEQ ID NO: 2079173 - RNA, 19 nt, Artificial Sequence
  Description of Artificial Sequence: Synthetic oligonucleotide
  Antisense strand to SEQ ID NO: 2079172
gauuaaaccaggguuauca

SEQ ID NO: 2079174 - RNA, 19 nt, Artificial Sequence
  Description of Artificial Sequence: Synthetic oligonucleotide
  Sense strand starting at position 2331 of SEQ ID NO: 1881893
agcaaauucucagugauac

SEQ ID NO: 2079175 - RNA, 19 nt, Artificial Sequence
  Description of Artificial Sequence: Synthetic oligonucleotide
  Antisense strand to SEQ ID NO: 2079174
guaucacugagaauuugcu

SEQ ID NO: 2079176 - RNA, 19 nt, Artificial Sequence
  Description of Artificial Sequence: Synthetic oligonucleotide
  Sense strand starting at position 2389 of SEQ ID NO: 1881893
ggcuauggaucacuaugua

SEQ ID NO: 2079177 - RNA, 19 nt, Artificial Sequence
  Description of Artificial Sequence: Synthetic oligonucleotide
  Antisense strand to SEQ ID NO: 2079176
uacauagugauccauagcc

SEQ ID NO: 2079178 - RNA, 19 nt, Artificial Sequence
  Description of Artificial Sequence: Synthetic oligonucleotide
  Sense strand starting at position 2393 of SEQ ID NO: 1881893
auggaucacuauguacaau

SEQ ID NO: 2079179 - RNA, 19 nt, Artificial Sequence
  Description of Artificial Sequence: Synthetic oligonucleotide
  Antisense strand to SEQ ID NO: 2079178
auuguacauagugauccau

SEQ ID NO: 2079180 - RNA, 19 nt, Artificial Sequence
  Description of Artificial Sequence: Synthetic oligonucleotide
  Sense strand starting at position 2422 of SEQ ID NO: 1881893
agcaauuagguuuggaaag

SEQ ID NO: 2079181 - RNA, 19 nt, Artificial Sequence
  Description of Artificial Sequence: Synthetic oligonucleotide
  Antisense strand to SEQ ID NO: 2079180
cuuuccaaaccuaauugcu

SEQ ID NO: 2079182 - RNA, 19 nt, Artificial Sequence
  Description of Artificial Sequence: Synthetic oligonucleotide
  Sense strand starting at position 2470 of SEQ ID NO: 1881893
aguaaucaucuuggaaguc

SEQ ID NO: 2079183 - RNA, 19 nt, Artificial Sequence
  Description of Artificial Sequence: Synthetic oligonucleotide
  Antisense strand to SEQ ID NO: 2079182
gacuuccaagaugauuacu

SEQ ID NO: 2079184 - RNA, 19 nt, Artificial Sequence
  Description of Artificial Sequence: Synthetic oligonucleotide
  Sense strand starting at position 2664 of SEQ ID NO: 1881893
gguuucuuugaguaucaca

SEQ ID NO: 2079185 - RNA, 19 nt, Artificial Sequence
  Description of Artificial Sequence: Synthetic oligonucleotide
  Antisense strand to SEQ ID NO: 2079184
ugugauacucaaagaaacc

SEQ ID NO: 2079186 - RNA, 19 nt, Artificial Sequence
  Description of Artificial Sequence: Synthetic oligonucleotide
  Sense strand starting at position 3058 of SEQ ID NO: 1881893
auugacuuguuuccugaca

SEQ ID NO: 2079187 - RNA, 19 nt, Artificial Sequence
  Description of Artificial Sequence: Synthetic oligonucleotide
  Antisense strand to SEQ ID NO: 2079186
ugucaggaaacaagucaau

SEQ ID NO: 2079188 - RNA, 19 nt, Artificial Sequence
  Description of Artificial Sequence: Synthetic oligonucleotide
  Sense strand starting at position 3137 of SEQ ID NO: 1881893
ggccucugggauugaauaa

SEQ ID NO: 2079189 - RNA, 19 nt, Artificial Sequence
  Description of Artificial Sequence: Synthetic oligonucleotide
  Antisense strand to SEQ ID NO: 2079188
uuauucaaucccagaggcc

SEQ ID NO: 2079190 - RNA, 19 nt, Artificial Sequence
  Description of Artificial Sequence: Synthetic oligonucleotide
  Sense strand starting at position 3203 of SEQ ID NO: 1881893
gauaaagagugucugaugu

SEQ ID NO: 2079191 - RNA, 19 nt, Artificial Sequence
  Description of Artificial Sequence: Synthetic oligonucleotide
  Antisense strand to SEQ ID NO: 2079190
acaucagacacucuuuauc

SEQ ID NO: 2079192 - RNA, 19 nt, Artificial Sequence
  Description of Artificial Sequence: Synthetic oligonucleotide
  Sense strand starting at position 3674 of SEQ ID NO: 1881893
cugucugaggaucaauagu

SEQ ID NO: 2079193 - RNA, 19 nt, Artificial Sequence
  Description of Artificial Sequence: Synthetic oligonucleotide
  Antisense strand to SEQ ID NO: 2079192
acuauugauccucagacag

SEQ ID NO: 2079194 - RNA, 19 nt, Artificial Sequence
  Description of Artificial Sequence: Synthetic oligonucleotide
  Sense strand starting at position 3687 of SEQ ID NO: 1881893
aauagugggucuguaagga

SEQ ID NO: 2079195 - RNA, 19 nt, Artificial Sequence
  Description of Artificial Sequence: Synthetic oligonucleotide
  Antisense strand to SEQ ID NO: 2079194
uccuuacagacccacuauu

SEQ ID NO: 2079196 - RNA, 19 nt, Artificial Sequence
  Description of Artificial Sequence: Synthetic oligonucleotide
  Sense strand starting at position 3867 of SEQ ID NO: 1881893
gugcaugucccguuuccaa

SEQ ID NO: 2079197 - RNA, 19 nt, Artificial Sequence
  Description of Artificial Sequence: Synthetic oligonucleotide
  Antisense strand to SEQ ID NO: 2079196
uuggaaacgggacaugcac

SEQ ID NO: 2079198 - RNA, 19 nt, Artificial Sequence
  Description of Artificial Sequence: Synthetic oligonucleotide
  Sense strand starting at position 10 of SEQ ID NO: 1881894
acaaaugccugagacagaa

SEQ ID NO: 2079199 - RNA, 19 nt, Artificial Sequence
  Description of Artificial Sequence: Synthetic oligonucleotide
  Antisense strand to SEQ ID NO: 2079198
uucugucucaggcauuugu

SEQ ID NO: 2079200 - RNA, 19 nt, Artificial Sequence
  Description of Artificial Sequence: Synthetic oligonucleotide
  Sense strand starting at position 262 of SEQ ID NO: 1881894
uuaccuucugacgauuaca

SEQ ID NO: 2079201 - RNA, 19 nt, Artificial Sequence
  Description of Artificial Sequence: Synthetic oligonucleotide
  Antisense strand to SEQ ID NO: 2079200
uguaaucgucagaagguaa

SEQ ID NO: 2079202 - RNA, 19 nt, Artificial Sequence
  Description of Artificial Sequence: Synthetic oligonucleotide
  Sense strand starting at position 348 of SEQ ID NO: 1881894
uguuaucugugaguaaucu

SEQ ID NO: 2079203 - RNA, 19 nt, Artificial Sequence
  Description of Artificial Sequence: Synthetic oligonucleotide
  Antisense strand to SEQ ID NO: 2079202
agauuacucacagauaaca

SEQ ID NO: 2079204 - RNA, 19 nt, Artificial Sequence
  Description of Artificial Sequence: Synthetic oligonucleotide
  Sense strand starting at position 349 of SEQ ID NO: 1881894
guuaucugugaguaaucua

SEQ ID NO: 2079205 - RNA, 19 nt, Artificial Sequence
  Description of Artificial Sequence: Synthetic oligonucleotide
  Antisense strand to SEQ ID NO: 2079204
uagauuacucacagauaac

SEQ ID NO: 2079206 - RNA, 19 nt, Artificial Sequence
  Description of Artificial Sequence: Synthetic oligonucleotide
  Sense strand starting at position 411 of SEQ ID NO: 1881894
guauacucccaccguauaa

SEQ ID NO: 2079207 - RNA, 19 nt, Artificial Sequence
  Description of Artificial Sequence: Synthetic oligonucleotide
  Antisense strand to SEQ ID NO: 2079206
uuauacggugggaguauac

SEQ ID NO: 2079208 - RNA, 19 nt, Artificial Sequence
  Description of Artificial Sequence: Synthetic oligonucleotide
  Sense strand starting at position 474 of SEQ ID NO: 1881894
acacgaugcuuauucuaca

SEQ ID NO: 2079209 - RNA, 19 nt, Artificial Sequence
  Description of Artificial Sequence: Synthetic oligonucleotide
  Antisense strand to SEQ ID NO: 2079208
uguagaauaagcaucgugu

SEQ ID NO: 2079210 - RNA, 19 nt, Artificial Sequence
  Description of Artificial Sequence: Synthetic oligonucleotide
  Sense strand starting at position 489 of SEQ ID NO: 1881894
uacauacucguguacauga

SEQ ID NO: 2079211 - RNA, 19 nt, Artificial Sequence
  Description of Artificial Sequence: Synthetic oligonucleotide
  Antisense strand to SEQ ID NO: 2079210
ucauguacacgaguaugua

SEQ ID NO: 2079212 - RNA, 19 nt, Artificial Sequence
  Description of Artificial Sequence: Synthetic oligonucleotide
  Sense strand starting at position 491 of SEQ ID NO: 1881894
cauacucguguacaugaga

SEQ ID NO: 2079213 - RNA, 19 nt, Artificial Sequence
  Description of Artificial Sequence: Synthetic oligonucleotide
  Antisense strand to SEQ ID NO: 2079212
ucucauguacacgaguaug

SEQ ID NO: 2079214 - RNA, 19 nt, Artificial Sequence
  Description of Artificial Sequence: Synthetic oligonucleotide
  Sense strand starting at position 740 of SEQ ID NO: 1881894
uuccauucuuaguucuuga

SEQ ID NO: 2079215 - RNA, 19 nt, Artificial Sequence
  Description of Artificial Sequence: Synthetic oligonucleotide
  Antisense strand to SEQ ID NO: 2079214
ucaagaacuaagaauggaa

SEQ ID NO: 2079216 - RNA, 19 nt, Artificial Sequence
  Description of Artificial Sequence: Synthetic oligonucleotide
  Sense strand starting at position 743 of SEQ ID NO: 1881894
cauucuuaguucuugaggu

SEQ ID NO: 2079217 - RNA, 19 nt, Artificial Sequence
  Description of Artificial Sequence: Synthetic oligonucleotide
  Antisense strand to SEQ ID NO: 2079216
accucaagaacuaagaaug

SEQ ID NO: 2079218 - RNA, 19 nt, Artificial Sequence
  Description of Artificial Sequence: Synthetic oligonucleotide
  Sense strand starting at position 745 of SEQ ID NO: 1881894
uucuuaguucuugagguua

SEQ ID NO: 2079219 - RNA, 19 nt, Artificial Sequence
  Description of Artificial Sequence: Synthetic oligonucleotide
  Antisense strand to SEQ ID NO: 2079218
uaaccucaagaacuaagaa

SEQ ID NO: 2079220 - RNA, 19 nt, Artificial Sequence
  Description of Artificial Sequence: Synthetic oligonucleotide
  Sense strand starting at position 936 of SEQ ID NO: 1881894
acaugaaguuaugcuauua

SEQ ID NO: 2079221 - RNA, 19 nt, Artificial Sequence
  Description of Artificial Sequence: Synthetic oligonucleotide
  Antisense strand to SEQ ID NO: 2079220
uaauagcauaacuucaugu

SEQ ID NO: 2079222 - RNA, 19 nt, Artificial Sequence
  Description of Artificial Sequence: Synthetic oligonucleotide
  Sense strand starting at position 980 of SEQ ID NO: 1881894
agguuaaacucugcaagca

SEQ ID NO: 2079223 - RNA, 19 nt, Artificial Sequence
  Description of Artificial Sequence: Synthetic oligonucleotide
  Antisense strand to SEQ ID NO: 2079222
ugcuugcagaguuuaaccu

SEQ ID NO: 2079224 - RNA, 19 nt, Artificial Sequence
  Description of Artificial Sequence: Synthetic oligonucleotide
  Sense strand starting at position 981 of SEQ ID NO: 1881894
gguuaaacucugcaagcaa

SEQ ID NO: 2079225 - RNA, 19 nt, Artificial Sequence
  Description of Artificial Sequence: Synthetic oligonucleotide
  Antisense strand to SEQ ID NO: 2079224
uugcuugcagaguuuaacc

SEQ ID NO: 2079226 - RNA, 19 nt, Artificial Sequence
  Description of Artificial Sequence: Synthetic oligonucleotide
  Sense strand starting at position 1108 of SEQ ID NO: 1881894
ucuauuacgcucgugguau

SEQ ID NO: 2079227 - RNA, 19 nt, Artificial Sequence
  Description of Artificial Sequence: Synthetic oligonucleotide
  Antisense strand to SEQ ID NO: 2079226
auaccacgagcguaauaga

SEQ ID NO: 2079228 - RNA, 19 nt, Artificial Sequence
  Description of Artificial Sequence: Synthetic oligonucleotide
  Sense strand starting at position 1151 of SEQ ID NO: 1881894
ucugcaauugucuauuaug

SEQ ID NO: 2079229 - RNA, 19 nt, Artificial Sequence
  Description of Artificial Sequence: Synthetic oligonucleotide
  Antisense strand to SEQ ID NO: 2079228
cauaauagacaauugcaga

SEQ ID NO: 2079230 - RNA, 19 nt, Artificial Sequence
  Description of Artificial Sequence: Synthetic oligonucleotide
  Sense strand starting at position 1452 of SEQ ID NO: 1881894
gcugcucuaacaugagaga

SEQ ID NO: 2079231 - RNA, 19 nt, Artificial Sequence
  Description of Artificial Sequence: Synthetic oligonucleotide
  Antisense strand to SEQ ID NO: 2079230
ucucucauguuagagcagc

SEQ ID NO: 2079232 - RNA, 19 nt, Artificial Sequence
  Description of Artificial Sequence: Synthetic oligonucleotide
  Sense strand starting at position 1482 of SEQ ID NO: 1881894
aguaaagacuagccuaaau

SEQ ID NO: 2079233 - RNA, 19 nt, Artificial Sequence
  Description of Artificial Sequence: Synthetic oligonucleotide
  Antisense strand to SEQ ID NO: 2079232
auuuaggcuagucuuuacu

SEQ ID NO: 2079234 - RNA, 19 nt, Artificial Sequence
  Description of Artificial Sequence: Synthetic oligonucleotide
  Sense strand starting at position 1613 of SEQ ID NO: 1881894
auucuaguuccugggcuaa

SEQ ID NO: 2079235 - RNA, 19 nt, Artificial Sequence
  Description of Artificial Sequence: Synthetic oligonucleotide
  Antisense strand to SEQ ID NO: 2079234
uuagcccaggaacuagaau

SEQ ID NO: 2079236 - RNA, 19 nt, Artificial Sequence
  Description of Artificial Sequence: Synthetic oligonucleotide
  Sense strand starting at position 1615 of SEQ ID NO: 1881894
ucuaguuccugggcuaauu

SEQ ID NO: 2079237 - RNA, 19 nt, Artificial Sequence
  Description of Artificial Sequence: Synthetic oligonucleotide
  Antisense strand to SEQ ID NO: 2079236
aauuagcccaggaacuaga

SEQ ID NO: 2079238 - RNA, 19 nt, Artificial Sequence
  Description of Artificial Sequence: Synthetic oligonucleotide
  Sense strand starting at position 1624 of SEQ ID NO: 1881894
ugggcuaauucugcaacca

SEQ ID NO: 2079239 - RNA, 19 nt, Artificial Sequence
  Description of Artificial Sequence: Synthetic oligonucleotide
  Antisense strand to SEQ ID NO: 2079238
ugguugcagaauuagccca

SEQ ID NO: 2079240 - RNA, 19 nt, Artificial Sequence
  Description of Artificial Sequence: Synthetic oligonucleotide
  Sense strand starting at position 1625 of SEQ ID NO: 1881894
gggcuaauucugcaaccac

SEQ ID NO: 2079241 - RNA, 19 nt, Artificial Sequence
  Description of Artificial Sequence: Synthetic oligonucleotide
  Antisense strand to SEQ ID NO: 2079240
gugguugcagaauuagccc

SEQ ID NO: 2079242 - RNA, 19 nt, Artificial Sequence
  Description of Artificial Sequence: Synthetic oligonucleotide
  Sense strand starting at position 1712 of SEQ ID NO: 1881894
guaggugcaccauacauaa

SEQ ID NO: 2079243 - RNA, 19 nt, Artificial Sequence
  Description of Artificial Sequence: Synthetic oligonucleotide
  Antisense strand to SEQ ID NO: 2079242
uuauguauggugcaccuac

SEQ ID NO: 2079244 - RNA, 19 nt, Artificial Sequence
  Description of Artificial Sequence: Synthetic oligonucleotide
  Sense strand starting at position 1765 of SEQ ID NO: 1881894
uucugucuccaauggacau

SEQ ID NO: 2079245 - RNA, 19 nt, Artificial Sequence
  Description of Artificial Sequence: Synthetic oligonucleotide
  Antisense strand to SEQ ID NO: 2079244
auguccauuggagacagaa

SEQ ID NO: 2079246 - RNA, 19 nt, Artificial Sequence
  Description of Artificial Sequence: Synthetic oligonucleotide
  Sense strand starting at position 1861 of SEQ ID NO: 1881894
auacuaagucaaggauagu

SEQ ID NO: 2079247 - RNA, 19 nt, Artificial Sequence
  Description of Artificial Sequence: Synthetic oligonucleotide
  Antisense strand to SEQ ID NO: 2079246
acuauccuugacuuaguau

SEQ ID NO: 2079248 - RNA, 19 nt, Artificial Sequence
  Description of Artificial Sequence: Synthetic oligonucleotide
  Sense strand starting at position 1937 of SEQ ID NO: 1881894
aucaaaucucaguguucuc

SEQ ID NO: 2079249 - RNA, 19 nt, Artificial Sequence
  Description of Artificial Sequence: Synthetic oligonucleotide
  Antisense strand to SEQ ID NO: 2079248
gagaacacugagauuugau

SEQ ID NO: 2079250 - RNA, 19 nt, Artificial Sequence
  Description of Artificial Sequence: Synthetic oligonucleotide
  Sense strand starting at position 2199 of SEQ ID NO: 1881894
ugguuuaaauccucuguaa

SEQ ID NO: 2079251 - RNA, 19 nt, Artificial Sequence
  Description of Artificial Sequence: Synthetic oligonucleotide
  Antisense strand to SEQ ID NO: 2079250
uuacagaggauuuaaacca

SEQ ID NO: 2079252 - RNA, 19 nt, Artificial Sequence
  Description of Artificial Sequence: Synthetic oligonucleotide
  Sense strand starting at position 2201 of SEQ ID NO: 1881894
guuuaaauccucuguaauu

SEQ ID NO: 2079253 - RNA, 19 nt, Artificial Sequence
  Description of Artificial Sequence: Synthetic oligonucleotide
  Antisense strand to SEQ ID NO: 2079252
aauuacagaggauuuaaac

SEQ ID NO: 2079254 - RNA, 19 nt, Artificial Sequence
  Description of Artificial Sequence: Synthetic oligonucleotide
  Sense strand starting at position 2338 of SEQ ID NO: 1881894
uccucugacugguuaccau

SEQ ID NO: 2079255 - RNA, 19 nt, Artificial Sequence
  Description of Artificial Sequence: Synthetic oligonucleotide
  Antisense strand to SEQ ID NO: 2079254
augguaaccagucagagga

SEQ ID NO: 2079256 - RNA, 19 nt, Artificial Sequence
  Description of Artificial Sequence: Synthetic oligonucleotide
  Sense strand starting at position 2345 of SEQ ID NO: 1881894
acugguuaccauuauguca

SEQ ID NO: 2079257 - RNA, 19 nt, Artificial Sequence
  Description of Artificial Sequence: Synthetic oligonucleotide
  Antisense strand to SEQ ID NO: 2079256
ugacauaaugguaaccagu

SEQ ID NO: 2079258 - RNA, 19 nt, Artificial Sequence
  Description of Artificial Sequence: Synthetic oligonucleotide
  Sense strand starting at position 2454 of SEQ ID NO: 1881894
ucaccuauugagugacaaa

SEQ ID NO: 2079259 - RNA, 19 nt, Artificial Sequence
  Description of Artificial Sequence: Synthetic oligonucleotide
  Antisense strand to SEQ ID NO: 2079258
uuugucacucaauagguga

SEQ ID NO: 2079260 - RNA, 19 nt, Artificial Sequence
  Description of Artificial Sequence: Synthetic oligonucleotide
  Sense strand starting at position 2570 of SEQ ID NO: 1881894
uugugucucaauuagaggu

SEQ ID NO: 2079261 - RNA, 19 nt, Artificial Sequence
  Description of Artificial Sequence: Synthetic oligonucleotide
  Antisense strand to SEQ ID NO: 2079260
accucuaauugagacacaa

SEQ ID NO: 2079262 - RNA, 19 nt, Artificial Sequence
  Description of Artificial Sequence: Synthetic oligonucleotide
  Sense strand starting at position 2803 of SEQ ID NO: 1881894
gacuauaggacgugagcua

SEQ ID NO: 2079263 - RNA, 19 nt, Artificial Sequence
  Description of Artificial Sequence: Synthetic oligonucleotide
  Antisense strand to SEQ ID NO: 2079262
uagcucacguccuauaguc

SEQ ID NO: 2079264 - RNA, 19 nt, Artificial Sequence
  Description of Artificial Sequence: Synthetic oligonucleotide
  Sense strand starting at position 2896 of SEQ ID NO: 1881894
cagguagucugcuuugaca

SEQ ID NO: 2079265 - RNA, 19 nt, Artificial Sequence
  Description of Artificial Sequence: Synthetic oligonucleotide
  Antisense strand to SEQ ID NO: 2079264
ugucaaagcagacuaccug

SEQ ID NO: 2079266 - RNA, 19 nt, Artificial Sequence
  Description of Artificial Sequence: Synthetic oligonucleotide
  Sense strand starting at position 3104 of SEQ ID NO: 1881894
aaaguauaauggguaucua

SEQ ID NO: 2079267 - RNA, 19 nt, Artificial Sequence
  Description of Artificial Sequence: Synthetic oligonucleotide
  Antisense strand to SEQ ID NO: 2079266
uagauacccauuauacuuu

SEQ ID NO: 2079268 - RNA, 19 nt, Artificial Sequence
  Description of Artificial Sequence: Synthetic oligonucleotide
  Sense strand starting at position 3152 of SEQ ID NO: 1881894
agugcuguuaaagauagaa

SEQ ID NO: 2079269 - RNA, 19 nt, Artificial Sequence
  Description of Artificial Sequence: Synthetic oligonucleotide
  Antisense strand to SEQ ID NO: 2079268
uucuaucuuuaacagcacu

SEQ ID NO: 2079270 - RNA, 19 nt, Artificial Sequence
  Description of Artificial Sequence: Synthetic oligonucleotide
  Sense strand starting at position 3559 of SEQ ID NO: 1881894
gggccagggugaucucgau

SEQ ID NO: 2079271 - RNA, 19 nt, Artificial Sequence
  Description of Artificial Sequence: Synthetic oligonucleotide
  Antisense strand to SEQ ID NO: 2079270
aucgagaucacccuggccc

SEQ ID NO: 2079272 - RNA, 19 nt, Artificial Sequence
  Description of Artificial Sequence: Synthetic oligonucleotide
  Sense strand starting at position 3648 of SEQ ID NO: 1881894
ggccucaaggguuguuuau

SEQ ID NO: 2079273 - RNA, 19 nt, Artificial Sequence
  Description of Artificial Sequence: Synthetic oligonucleotide
  Antisense strand to SEQ ID NO: 2079272
auaaacaacccuugaggcc

SEQ ID NO: 2079274 - RNA, 19 nt, Artificial Sequence
  Description of Artificial Sequence: Synthetic oligonucleotide
  Sense strand starting at position 3650 of SEQ ID NO: 1881894
ccucaaggguuguuuauau

SEQ ID NO: 2079275 - RNA, 19 nt, Artificial Sequence
  Description of Artificial Sequence: Synthetic oligonucleotide
  Antisense strand to SEQ ID NO: 2079274
auauaaacaacccuugagg

SEQ ID NO: 2079276 - RNA, 19 nt, Artificial Sequence
  Description of Artificial Sequence: Synthetic oligonucleotide
  Sense strand starting at position 3951 of SEQ ID NO: 1881894
gaauuagucgagugaaucu

SEQ ID NO: 2079277 - RNA, 19 nt, Artificial Sequence
  Description of Artificial Sequence: Synthetic oligonucleotide
  Antisense strand to SEQ ID NO: 2079276
agauucacucgacuaauuc

SEQ ID NO: 2079278 - RNA, 19 nt, Artificial Sequence
  Description of Artificial Sequence: Synthetic oligonucleotide
  Sense strand starting at position 306 of SEQ ID NO: 1881895
uauagucucuugcugagga

SEQ ID NO: 2079279 - RNA, 19 nt, Artificial Sequence
  Description of Artificial Sequence: Synthetic oligonucleotide
  Antisense strand to SEQ ID NO: 2079278
uccucagcaagagacuaua

SEQ ID NO: 2079280 - RNA, 19 nt, Artificial Sequence
  Description of Artificial Sequence: Synthetic oligonucleotide
  Sense strand starting at position 308 of SEQ ID NO: 1881895
uagucucuugcugaggaau

SEQ ID NO: 2079281 - RNA, 19 nt, Artificial Sequence
  Description of Artificial Sequence: Synthetic oligonucleotide
  Antisense strand to SEQ ID NO: 2079280
auuccucagcaagagacua

SEQ ID NO: 2079282 - RNA, 19 nt, Artificial Sequence
  Description of Artificial Sequence: Synthetic oligonucleotide
  Sense strand starting at position 311 of SEQ ID NO: 1881895
ucucuugcugaggaauaua

SEQ ID NO: 2079283 - RNA, 19 nt, Artificial Sequence
  Description of Artificial Sequence: Synthetic oligonucleotide
  Antisense strand to SEQ ID NO: 2079282
uauauuccucagcaagaga

SEQ ID NO: 2079284 - RNA, 19 nt, Artificial Sequence
  Description of Artificial Sequence: Synthetic oligonucleotide
  Sense strand starting at position 428 of SEQ ID NO: 1881895
ggaaguaagcuccauaacu

SEQ ID NO: 2079285 - RNA, 19 nt, Artificial Sequence
  Description of Artificial Sequence: Synthetic oligonucleotide
  Antisense strand to SEQ ID NO: 2079284
aguuauggagcuuacuucc

SEQ ID NO: 2079286 - RNA, 19 nt, Artificial Sequence
  Description of Artificial Sequence: Synthetic oligonucleotide
  Sense strand starting at position 549 of SEQ ID NO: 1881895
aauggugggugagauauuu

SEQ ID NO: 2079287 - RNA, 19 nt, Artificial Sequence
  Description of Artificial Sequence: Synthetic oligonucleotide
  Antisense strand to SEQ ID NO: 2079286
aaauaucucacccaccauu

SEQ ID NO: 2079288 - RNA, 19 nt, Artificial Sequence
  Description of Artificial Sequence: Synthetic oligonucleotide
  Sense strand starting at position 1046 of SEQ ID NO: 1881895
ucagguuuccuguaagaaa

SEQ ID NO: 2079289 - RNA, 19 nt, Artificial Sequence
  Description of Artificial Sequence: Synthetic oligonucleotide
  Antisense strand to SEQ ID NO: 2079288
uuucuuacaggaaaccuga

SEQ ID NO: 2079290 - RNA, 19 nt, Artificial Sequence
  Description of Artificial Sequence: Synthetic oligonucleotide
  Sense strand starting at position 1053 of SEQ ID NO: 1881895
uccuguaagaaaggaguuu

SEQ ID NO: 2079291 - RNA, 19 nt, Artificial Sequence
  Description of Artificial Sequence: Synthetic oligonucleotide
  Antisense strand to SEQ ID NO: 2079290
aaacuccuuucuuacagga

SEQ ID NO: 2079292 - RNA, 19 nt, Artificial Sequence
  Description of Artificial Sequence: Synthetic oligonucleotide
  Sense strand starting at position 1065 of SEQ ID NO: 1881895
ggaguuuguagcgucagua

SEQ ID NO: 2079293 - RNA, 19 nt, Artificial Sequence
  Description of Artificial Sequence: Synthetic oligonucleotide
  Antisense strand to SEQ ID NO: 2079292
uacugacgcuacaaacucc

SEQ ID NO: 2079294 - RNA, 19 nt, Artificial Sequence
  Description of Artificial Sequence: Synthetic oligonucleotide
  Sense strand starting at position 1066 of SEQ ID NO: 1881895
gaguuuguagcgucaguau

SEQ ID NO: 2079295 - RNA, 19 nt, Artificial Sequence
  Description of Artificial Sequence: Synthetic oligonucleotide
  Antisense strand to SEQ ID NO: 2079294
auacugacgcuacaaacuc

SEQ ID NO: 2079296 - RNA, 19 nt, Artificial Sequence
  Description of Artificial Sequence: Synthetic oligonucleotide
  Sense strand starting at position 1075 of SEQ ID NO: 1881895
gcgucaguauauuugacaa

SEQ ID NO: 2079297 - RNA, 19 nt, Artificial Sequence
  Description of Artificial Sequence: Synthetic oligonucleotide
  Antisense strand to SEQ ID NO: 2079296
uugucaaauauacugacgc

SEQ ID NO: 2079298 - RNA, 19 nt, Artificial Sequence
  Description of Artificial Sequence: Synthetic oligonucleotide
  Sense strand starting at position 1077 of SEQ ID NO: 1881895
gucaguauauuugacaaau

SEQ ID NO: 2079299 - RNA, 19 nt, Artificial Sequence
  Description of Artificial Sequence: Synthetic oligonucleotide
  Antisense strand to SEQ ID NO: 2079298
auuugucaaauauacugac

SEQ ID NO: 2079300 - RNA, 19 nt, Artificial Sequence
  Description of Artificial Sequence: Synthetic oligonucleotide
  Sense strand starting at position 1177 of SEQ ID NO: 1881895
gugauagaaaucgggaacu

SEQ ID NO: 2079301 - RNA, 19 nt, Artificial Sequence
  Description of Artificial Sequence: Synthetic oligonucleotide
  Antisense strand to SEQ ID NO: 2079300
aguucccgauuucuaucac

SEQ ID NO: 2079302 - RNA, 19 nt, Artificial Sequence
  Description of Artificial Sequence: Synthetic oligonucleotide
  Sense strand starting at position 1190 of SEQ ID NO: 1881895
ggaacugcccuuugaggau

SEQ ID NO: 2079303 - RNA, 19 nt, Artificial Sequence
  Description of Artificial Sequence: Synthetic oligonucleotide
  Antisense strand to SEQ ID NO: 2079302
auccucaaagggcaguucc

SEQ ID NO: 2079304 - RNA, 19 nt, Artificial Sequence
  Description of Artificial Sequence: Synthetic oligonucleotide
  Sense strand starting at position 2049 of SEQ ID NO: 1881895
uagcacuuucgcuauuuga

SEQ ID NO: 2079305 - RNA, 19 nt, Artificial Sequence
  Description of Artificial Sequence: Synthetic oligonucleotide
  Antisense strand to SEQ ID NO: 2079304
ucaaauagcgaaagugcua

SEQ ID NO: 2079306 - RNA, 19 nt, Artificial Sequence
  Description of Artificial Sequence: Synthetic oligonucleotide
  Sense strand starting at position 2222 of SEQ ID NO: 1881895
accgaauuucucggucgca

SEQ ID NO: 2079307 - RNA, 19 nt, Artificial Sequence
  Description of Artificial Sequence: Synthetic oligonucleotide
  Antisense strand to SEQ ID NO: 2079306
ugcgaccgagaaauucggu

SEQ ID NO: 2079308 - RNA, 19 nt, Artificial Sequence
  Description of Artificial Sequence: Synthetic oligonucleotide
  Sense strand starting at position 2225 of SEQ ID NO: 1881895
gaauuucucggucgcagaa

SEQ ID NO: 2079309 - RNA, 19 nt, Artificial Sequence
  Description of Artificial Sequence: Synthetic oligonucleotide
  Antisense strand to SEQ ID NO: 2079308
uucugcgaccgagaaauuc

SEQ ID NO: 2079310 - RNA, 19 nt, Artificial Sequence
  Description of Artificial Sequence: Synthetic oligonucleotide
  Sense strand starting at position 2303 of SEQ ID NO: 1881895
ggauguuguccuugggaac

SEQ ID NO: 2079311 - RNA, 19 nt, Artificial Sequence
  Description of Artificial Sequence: Synthetic oligonucleotide
  Antisense strand to SEQ ID NO: 2079310
guucccaaggacaacaucc

SEQ ID NO: 2079312 - RNA, 19 nt, Artificial Sequence
  Description of Artificial Sequence: Synthetic oligonucleotide
  Sense strand starting at position 2304 of SEQ ID NO: 1881895
gauguuguccuugggaacu

SEQ ID NO: 2079313 - RNA, 19 nt, Artificial Sequence
  Description of Artificial Sequence: Synthetic oligonucleotide
  Antisense strand to SEQ ID NO: 2079312
aguucccaaggacaacauc

SEQ ID NO: 2079314 - RNA, 19 nt, Artificial Sequence
  Description of Artificial Sequence: Synthetic oligonucleotide
  Sense strand starting at position 2790 of SEQ ID NO: 1881895
gauuuagggcaucggucua

SEQ ID NO: 2079315 - RNA, 19 nt, Artificial Sequence
  Description of Artificial Sequence: Synthetic oligonucleotide
  Antisense strand to SEQ ID NO: 2079314
uagaccgaugcccuaaauc

SEQ ID NO: 2079316 - RNA, 19 nt, Artificial Sequence
  Description of Artificial Sequence: Synthetic oligonucleotide
  Sense strand starting at position 2816 of SEQ ID NO: 1881895
cugcgauuucuugguccua

SEQ ID NO: 2079317 - RNA, 19 nt, Artificial Sequence
  Description of Artificial Sequence: Synthetic oligonucleotide
  Antisense strand to SEQ ID NO: 2079316
uaggaccaagaaaucgcag

SEQ ID NO: 2079318 - RNA, 19 nt, Artificial Sequence
  Description of Artificial Sequence: Synthetic oligonucleotide
  Sense strand starting at position 2821 of SEQ ID NO: 1881895
auuucuugguccuaggaag

SEQ ID NO: 2079319 - RNA, 19 nt, Artificial Sequence
  Description of Artificial Sequence: Synthetic oligonucleotide
  Antisense strand to SEQ ID NO: 2079318
cuuccuaggaccaagaaau

SEQ ID NO: 2079320 - RNA, 19 nt, Artificial Sequence
  Description of Artificial Sequence: Synthetic oligonucleotide
  Sense strand starting at position 2832 of SEQ ID NO: 1881895
cuaggaagucacuguuuag

SEQ ID NO: 2079321 - RNA, 19 nt, Artificial Sequence
  Description of Artificial Sequence: Synthetic oligonucleotide
  Antisense strand to SEQ ID NO: 2079320
cuaaacagugacuuccuag

SEQ ID NO: 2079322 - RNA, 19 nt, Artificial Sequence
  Description of Artificial Sequence: Synthetic oligonucleotide
  Sense strand starting at position 2842 of SEQ ID NO: 1881895
acuguuuagcuguagcaag

SEQ ID NO: 2079323 - RNA, 19 nt, Artificial Sequence
  Description of Artificial Sequence: Synthetic oligonucleotide
  Antisense strand to SEQ ID NO: 2079322
cuugcuacagcuaaacagu

SEQ ID NO: 2079324 - RNA, 19 nt, Artificial Sequence
  Description of Artificial Sequence: Synthetic oligonucleotide
  Sense strand starting at position 3148 of SEQ ID NO: 1881895
gucugaccaagucagaguu

SEQ ID NO: 2079325 - RNA, 19 nt, Artificial Sequence
  Description of Artificial Sequence: Synthetic oligonucleotide
  Antisense strand to SEQ ID NO: 2079324
aacucugacuuggucagac

SEQ ID NO: 2079326 - RNA, 19 nt, Artificial Sequence
  Description of Artificial Sequence: Synthetic oligonucleotide
  Sense strand starting at position 3155 of SEQ ID NO: 1881895
caagucagaguuuaguuau

SEQ ID NO: 2079327 - RNA, 19 nt, Artificial Sequence
  Description of Artificial Sequence: Synthetic oligonucleotide
  Antisense strand to SEQ ID NO: 2079326
auaacuaaacucugacuug

SEQ ID NO: 2079328 - RNA, 19 nt, Artificial Sequence
  Description of Artificial Sequence: Synthetic oligonucleotide
  Sense strand starting at position 3158 of SEQ ID NO: 1881895
gucagaguuuaguuauuuc

SEQ ID NO: 2079329 - RNA, 19 nt, Artificial Sequence
  Description of Artificial Sequence: Synthetic oligonucleotide
  Antisense strand to SEQ ID NO: 2079328
gaaauaacuaaacucugac

SEQ ID NO: 2079330 - RNA, 19 nt, Artificial Sequence
  Description of Artificial Sequence: Synthetic oligonucleotide
  Sense strand starting at position 3165 of SEQ ID NO: 1881895
uuuaguuauuucuuaccgu

SEQ ID NO: 2079331 - RNA, 19 nt, Artificial Sequence
  Description of Artificial Sequence: Synthetic oligonucleotide
  Antisense strand to SEQ ID NO: 2079330
acgguaagaaauaacuaaa

SEQ ID NO: 2079332 - RNA, 19 nt, Artificial Sequence
  Description of Artificial Sequence: Synthetic oligonucleotide
  Sense strand starting at position 3188 of SEQ ID NO: 1881895
aguugagaguuauuccagu

SEQ ID NO: 2079333 - RNA, 19 nt, Artificial Sequence
  Description of Artificial Sequence: Synthetic oligonucleotide
  Antisense strand to SEQ ID NO: 2079332
acuggaauaacucucaacu

SEQ ID NO: 2079334 - RNA, 19 nt, Artificial Sequence
  Description of Artificial Sequence: Synthetic oligonucleotide
  Sense strand starting at position 3208 of SEQ ID NO: 1881895
ugcgauuucugguuguaac

SEQ ID NO: 2079335 - RNA, 19 nt, Artificial Sequence
  Description of Artificial Sequence: Synthetic oligonucleotide
  Antisense strand to SEQ ID NO: 2079334
guuacaaccagaaaucgca

SEQ ID NO: 2079336 - RNA, 19 nt, Artificial Sequence
  Description of Artificial Sequence: Synthetic oligonucleotide
  Sense strand starting at position 3209 of SEQ ID NO: 1881895
gcgauuucugguuguaaca

SEQ ID NO: 2079337 - RNA, 19 nt, Artificial Sequence
  Description of Artificial Sequence: Synthetic oligonucleotide
  Antisense strand to SEQ ID NO: 2079336
uguuacaaccagaaaucgc

SEQ ID NO: 2079338 - RNA, 19 nt, Artificial Sequence
  Description of Artificial Sequence: Synthetic oligonucleotide
  Sense strand starting at position 3303 of SEQ ID NO: 1881895
ccaugcgugcgguuuauaa

SEQ ID NO: 2079339 - RNA, 19 nt, Artificial Sequence
  Description of Artificial Sequence: Synthetic oligonucleotide
  Antisense strand to SEQ ID NO: 2079338
uuauaaaccgcacgcaugg

SEQ ID NO: 2079340 - RNA, 19 nt, Artificial Sequence
  Description of Artificial Sequence: Synthetic oligonucleotide
  Sense strand starting at position 3326 of SEQ ID NO: 1881895
uguauuaaucuagguacug

SEQ ID NO: 2079341 - RNA, 19 nt, Artificial Sequence
  Description of Artificial Sequence: Synthetic oligonucleotide
  Antisense strand to SEQ ID NO: 2079340
caguaccuagauuaauaca

SEQ ID NO: 2079342 - RNA, 19 nt, Artificial Sequence
  Description of Artificial Sequence: Synthetic oligonucleotide
  Sense strand starting at position 3327 of SEQ ID NO: 1881895
guauuaaucuagguacuga

SEQ ID NO: 2079343 - RNA, 19 nt, Artificial Sequence
  Description of Artificial Sequence: Synthetic oligonucleotide
  Antisense strand to SEQ ID NO: 2079342
ucaguaccuagauuaauac

SEQ ID NO: 2079344 - RNA, 19 nt, Artificial Sequence
  Description of Artificial Sequence: Synthetic oligonucleotide
  Sense strand starting at position 3338 of SEQ ID NO: 1881895
gguacugaagaaugcaauu

SEQ ID NO: 2079345 - RNA, 19 nt, Artificial Sequence
  Description of Artificial Sequence: Synthetic oligonucleotide
  Antisense strand to SEQ ID NO: 2079344
aauugcauucuucaguacc

SEQ ID NO: 2079346 - RNA, 19 nt, Artificial Sequence
  Description of Artificial Sequence: Synthetic oligonucleotide
  Sense strand starting at position 3397 of SEQ ID NO: 1881895
aaguuagaauucgcaauag

SEQ ID NO: 2079347 - RNA, 19 nt, Artificial Sequence
  Description of Artificial Sequence: Synthetic oligonucleotide
  Antisense strand to SEQ ID NO: 2079346
cuauugcgaauucuaacuu

SEQ ID NO: 2079348 - RNA, 19 nt, Artificial Sequence
  Description of Artificial Sequence: Synthetic oligonucleotide
  Sense strand starting at position 3522 of SEQ ID NO: 1881895
uucuuaauccgaggaaacu

SEQ ID NO: 2079349 - RNA, 19 nt, Artificial Sequence
  Description of Artificial Sequence: Synthetic oligonucleotide
  Antisense strand to SEQ ID NO: 2079348
aguuuccucggauuaagaa

SEQ ID NO: 2079350 - RNA, 19 nt, Artificial Sequence
  Description of Artificial Sequence: Synthetic oligonucleotide
  Sense strand starting at position 3562 of SEQ ID NO: 1881895
ggguuuagugcugacaaau

SEQ ID NO: 2079351 - RNA, 19 nt, Artificial Sequence
  Description of Artificial Sequence: Synthetic oligonucleotide
  Antisense strand to SEQ ID NO: 2079350
auuugucagcacuaaaccc

SEQ ID NO: 2079352 - RNA, 19 nt, Artificial Sequence
  Description of Artificial Sequence: Synthetic oligonucleotide
  Sense strand starting at position 3587 of SEQ ID NO: 1881895
guaggaucucaccauucga

SEQ ID NO: 2079353 - RNA, 19 nt, Artificial Sequence
  Description of Artificial Sequence: Synthetic oligonucleotide
  Antisense strand to SEQ ID NO: 2079352
ucgaauggugagauccuac

SEQ ID NO: 2079354 - RNA, 19 nt, Artificial Sequence
  Description of Artificial Sequence: Synthetic oligonucleotide
  Sense strand starting at position 3700 of SEQ ID NO: 1881895
cgagguuaucaguguauuu

SEQ ID NO: 2079355 - RNA, 19 nt, Artificial Sequence
  Description of Artificial Sequence: Synthetic oligonucleotide
  Antisense strand to SEQ ID NO: 2079354
aaauacacugauaaccucg

SEQ ID NO: 2079356 - RNA, 19 nt, Artificial Sequence
  Description of Artificial Sequence: Synthetic oligonucleotide
  Sense strand starting at position 3870 of SEQ ID NO: 1881895
uugccuucucccgugagca

SEQ ID NO: 2079357 - RNA, 19 nt, Artificial Sequence
  Description of Artificial Sequence: Synthetic oligonucleotide
  Antisense strand to SEQ ID NO: 2079356
ugcucacgggagaaggcaa

SEQ ID NO: 2079358 - RNA, 19 nt, Artificial Sequence
  Description of Artificial Sequence: Synthetic oligonucleotide
  Sense strand starting at position 199 of SEQ ID NO: 1881896
uugcuagaagaauguaauc

SEQ ID NO: 2079359 - RNA, 19 nt, Artificial Sequence
  Description of Artificial Sequence: Synthetic oligonucleotide
  Antisense strand to SEQ ID NO: 2079358
gauuacauucuucuagcaa

SEQ ID NO: 2079360 - RNA, 19 nt, Artificial Sequence
  Description of Artificial Sequence: Synthetic oligonucleotide
  Sense strand starting at position 204 of SEQ ID NO: 1881896
agaagaauguaauccuuuc

SEQ ID NO: 2079361 - RNA, 19 nt, Artificial Sequence
  Description of Artificial Sequence: Synthetic oligonucleotide
  Antisense strand to SEQ ID NO: 2079360
gaaaggauuacauucuucu

SEQ ID NO: 2079362 - RNA, 19 nt, Artificial Sequence
  Description of Artificial Sequence: Synthetic oligonucleotide
  Sense strand starting at position 383 of SEQ ID NO: 1881896
ccuguuagagugcaaacuu

SEQ ID NO: 2079363 - RNA, 19 nt, Artificial Sequence
  Description of Artificial Sequence: Synthetic oligonucleotide
  Antisense strand to SEQ ID NO: 2079362
aaguuugcacucuaacagg

SEQ ID NO: 2079364 - RNA, 19 nt, Artificial Sequence
  Description of Artificial Sequence: Synthetic oligonucleotide
  Sense strand starting at position 554 of SEQ ID NO: 1881896
gcuuuaugucuguuuccuu

SEQ ID NO: 2079365 - RNA, 19 nt, Artificial Sequence
  Description of Artificial Sequence: Synthetic oligonucleotide
  Antisense strand to SEQ ID NO: 2079364
aaggaaacagacauaaagc

SEQ ID NO: 2079366 - RNA, 19 nt, Artificial Sequence
  Description of Artificial Sequence: Synthetic oligonucleotide
  Sense strand starting at position 753 of SEQ ID NO: 1881896
cauaauguugaugaucagu

SEQ ID NO: 2079367 - RNA, 19 nt, Artificial Sequence
  Description of Artificial Sequence: Synthetic oligonucleotide
  Antisense strand to SEQ ID NO: 2079366
acugaucaucaacauuaug

SEQ ID NO: 2079368 - RNA, 19 nt, Artificial Sequence
  Description of Artificial Sequence: Synthetic oligonucleotide
  Sense strand starting at position 755 of SEQ ID NO: 1881896
uaauguugaugaucaguaa

SEQ ID NO: 2079369 - RNA, 19 nt, Artificial Sequence
  Description of Artificial Sequence: Synthetic oligonucleotide
  Antisense strand to SEQ ID NO: 2079368
uuacugaucaucaacauua

SEQ ID NO: 2079370 - RNA, 19 nt, Artificial Sequence
  Description of Artificial Sequence: Synthetic oligonucleotide
  Sense strand starting at position 758 of SEQ ID NO: 1881896
uguugaugaucaguaagua

SEQ ID NO: 2079371 - RNA, 19 nt, Artificial Sequence
  Description of Artificial Sequence: Synthetic oligonucleotide
  Antisense strand to SEQ ID NO: 2079370
uacuuacugaucaucaaca

SEQ ID NO: 2079372 - RNA, 19 nt, Artificial Sequence
  Description of Artificial Sequence: Synthetic oligonucleotide
  Sense strand starting at position 759 of SEQ ID NO: 1881896
guugaugaucaguaaguau

SEQ ID NO: 2079373 - RNA, 19 nt, Artificial Sequence
  Description of Artificial Sequence: Synthetic oligonucleotide
  Antisense strand to SEQ ID NO: 2079372
auacuuacugaucaucaac

SEQ ID NO: 2079374 - RNA, 19 nt, Artificial Sequence
  Description of Artificial Sequence: Synthetic oligonucleotide
  Sense strand starting at position 762 of SEQ ID NO: 1881896
gaugaucaguaaguauuga

SEQ ID NO: 2079375 - RNA, 19 nt, Artificial Sequence
  Description of Artificial Sequence: Synthetic oligonucleotide
  Antisense strand to SEQ ID NO: 2079374
ucaauacuuacugaucauc

SEQ ID NO: 2079376 - RNA, 19 nt, Artificial Sequence
  Description of Artificial Sequence: Synthetic oligonucleotide
  Sense strand starting at position 896 of SEQ ID NO: 1881896
gcuguaauacuauaagaau

SEQ ID NO: 2079377 - RNA, 19 nt, Artificial Sequence
  Description of Artificial Sequence: Synthetic oligonucleotide
  Antisense strand to SEQ ID NO: 2079376
auucuuauaguauuacagc

SEQ ID NO: 2079378 - RNA, 19 nt, Artificial Sequence
  Description of Artificial Sequence: Synthetic oligonucleotide
  Sense strand starting at position 933 of SEQ ID NO: 1881896
ggauuucuaugauacauuc

SEQ ID NO: 2079379 - RNA, 19 nt, Artificial Sequence
  Description of Artificial Sequence: Synthetic oligonucleotide
  Antisense strand to SEQ ID NO: 2079378
gaauguaucauagaaaucc

SEQ ID NO: 2079380 - RNA, 19 nt, Artificial Sequence
  Description of Artificial Sequence: Synthetic oligonucleotide
  Sense strand starting at position 1165 of SEQ ID NO: 1881896
uucuaaaggucaguuuaau

SEQ ID NO: 2079381 - RNA, 19 nt, Artificial Sequence
  Description of Artificial Sequence: Synthetic oligonucleotide
  Antisense strand to SEQ ID NO: 2079380
auuaaacugaccuuuagaa

SEQ ID NO: 2079382 - RNA, 19 nt, Artificial Sequence
  Description of Artificial Sequence: Synthetic oligonucleotide
  Sense strand starting at position 1310 of SEQ ID NO: 1881896
ucuggucccuaauuacaga

SEQ ID NO: 2079383 - RNA, 19 nt, Artificial Sequence
  Description of Artificial Sequence: Synthetic oligonucleotide
  Antisense strand to SEQ ID NO: 2079382
ucuguaauuagggaccaga

SEQ ID NO: 2079384 - RNA, 19 nt, Artificial Sequence
  Description of Artificial Sequence: Synthetic oligonucleotide
  Sense strand starting at position 1362 of SEQ ID NO: 1881896
agacuuuggugacuucuua

SEQ ID NO: 2079385 - RNA, 19 nt, Artificial Sequence
  Description of Artificial Sequence: Synthetic oligonucleotide
  Antisense strand to SEQ ID NO: 2079384
uaagaagucaccaaagucu

SEQ ID NO: 2079386 - RNA, 19 nt, Artificial Sequence
  Description of Artificial Sequence: Synthetic oligonucleotide
  Sense strand starting at position 1412 of SEQ ID NO: 1881896
aguauugauuuguugcuga

SEQ ID NO: 2079387 - RNA, 19 nt, Artificial Sequence
  Description of Artificial Sequence: Synthetic oligonucleotide
  Antisense strand to SEQ ID NO: 2079386
ucagcaacaaaucaauacu

SEQ ID NO: 2079388 - RNA, 19 nt, Artificial Sequence
  Description of Artificial Sequence: Synthetic oligonucleotide
  Sense strand starting at position 1464 of SEQ ID NO: 1881896
gcucacagauuaguaagaa

SEQ ID NO: 2079389 - RNA, 19 nt, Artificial Sequence
  Description of Artificial Sequence: Synthetic oligonucleotide
  Antisense strand to SEQ ID NO: 2079388
uucuuacuaaucugugagc

SEQ ID NO: 2079390 - RNA, 19 nt, Artificial Sequence
  Description of Artificial Sequence: Synthetic oligonucleotide
  Sense strand starting at position 1678 of SEQ ID NO: 1881896
ugaauaguaggucacgagu

SEQ ID NO: 2079391 - RNA, 19 nt, Artificial Sequence
  Description of Artificial Sequence: Synthetic oligonucleotide
  Antisense strand to SEQ ID NO: 2079390
acucgugaccuacuauuca

SEQ ID NO: 2079392 - RNA, 19 nt, Artificial Sequence
  Description of Artificial Sequence: Synthetic oligonucleotide
  Sense strand starting at position 1681 of SEQ ID NO: 1881896
auaguaggucacgagugau

SEQ ID NO: 2079393 - RNA, 19 nt, Artificial Sequence
  Description of Artificial Sequence: Synthetic oligonucleotide
  Antisense strand to SEQ ID NO: 2079392
aucacucgugaccuacuau

SEQ ID NO: 2079394 - RNA, 19 nt, Artificial Sequence
  Description of Artificial Sequence: Synthetic oligonucleotide
  Sense strand starting at position 1764 of SEQ ID NO: 1881896
guaaguuucuauuccuaga

SEQ ID NO: 2079395 - RNA, 19 nt, Artificial Sequence
  Description of Artificial Sequence: Synthetic oligonucleotide
  Antisense strand to SEQ ID NO: 2079394
ucuaggaauagaaacuuac

SEQ ID NO: 2079396 - RNA, 19 nt, Artificial Sequence
  Description of Artificial Sequence: Synthetic oligonucleotide
  Sense strand starting at position 1799 of SEQ ID NO: 1881896
aguguugugagauacauaa

SEQ ID NO: 2079397 - RNA, 19 nt, Artificial Sequence
  Description of Artificial Sequence: Synthetic oligonucleotide
  Antisense strand to SEQ ID NO: 2079396
uuauguaucucacaacacu

SEQ ID NO: 2079398 - RNA, 19 nt, Artificial Sequence
  Description of Artificial Sequence: Synthetic oligonucleotide
  Sense strand starting at position 1855 of SEQ ID NO: 1881896
ccugcaggauguuuauaaa

SEQ ID NO: 2079399 - RNA, 19 nt, Artificial Sequence
  Description of Artificial Sequence: Synthetic oligonucleotide
  Antisense strand to SEQ ID NO: 2079398
uuuauaaacauccugcagg

SEQ ID NO: 2079400 - RNA, 19 nt, Artificial Sequence
  Description of Artificial Sequence: Synthetic oligonucleotide
  Sense strand starting at position 1870 of SEQ ID NO: 1881896
uaaauaguuccuggcaaag

SEQ ID NO: 2079401 - RNA, 19 nt, Artificial Sequence
  Description of Artificial Sequence: Synthetic oligonucleotide
  Antisense strand to SEQ ID NO: 2079400
cuuugccaggaacuauuua

SEQ ID NO: 2079402 - RNA, 19 nt, Artificial Sequence
  Description of Artificial Sequence: Synthetic oligonucleotide
  Sense strand starting at position 2004 of SEQ ID NO: 1881896
gaaguuauaugauuggcua

SEQ ID NO: 2079403 - RNA, 19 nt, Artificial Sequence
  Description of Artificial Sequence: Synthetic oligonucleotide
  Antisense strand to SEQ ID NO: 2079402
uagccaaucauauaacuuc

SEQ ID NO: 2079404 - RNA, 19 nt, Artificial Sequence
  Description of Artificial Sequence: Synthetic oligonucleotide
  Sense strand starting at position 2005 of SEQ ID NO: 1881896
aaguuauaugauuggcuaa

SEQ ID NO: 2079405 - RNA, 19 nt, Artificial Sequence
  Description of Artificial Sequence: Synthetic oligonucleotide
  Antisense strand to SEQ ID NO: 2079404
uuagccaaucauauaacuu

SEQ ID NO: 2079406 - RNA, 19 nt, Artificial Sequence
  Description of Artificial Sequence: Synthetic oligonucleotide
  Sense strand starting at position 2016 of SEQ ID NO: 1881896
uuggcuaaaccaugaauga

SEQ ID NO: 2079407 - RNA, 19 nt, Artificial Sequence
  Description of Artificial Sequence: Synthetic oligonucleotide
  Antisense strand to SEQ ID NO: 2079406
ucauucaugguuuagccaa

SEQ ID NO: 2079408 - RNA, 19 nt, Artificial Sequence
  Description of Artificial Sequence: Synthetic oligonucleotide
  Sense strand starting at position 2123 of SEQ ID NO: 1881896
aggacaauugcuuaaguug

SEQ ID NO: 2079409 - RNA, 19 nt, Artificial Sequence
  Description of Artificial Sequence: Synthetic oligonucleotide
  Antisense strand to SEQ ID NO: 2079408
caacuuaagcaauuguccu

SEQ ID NO: 2079410 - RNA, 19 nt, Artificial Sequence
  Description of Artificial Sequence: Synthetic oligonucleotide
  Sense strand starting at position 2811 of SEQ ID NO: 1881896
gggauuguacuggguuacu

SEQ ID NO: 2079411 - RNA, 19 nt, Artificial Sequence
  Description of Artificial Sequence: Synthetic oligonucleotide
  Antisense strand to SEQ ID NO: 2079410
aguaacccaguacaauccc

SEQ ID NO: 2079412 - RNA, 19 nt, Artificial Sequence
  Description of Artificial Sequence: Synthetic oligonucleotide
  Sense strand starting at position 2824 of SEQ ID NO: 1881896
guuacucugccgcagauuu

SEQ ID NO: 2079413 - RNA, 19 nt, Artificial Sequence
  Description of Artificial Sequence: Synthetic oligonucleotide
  Antisense strand to SEQ ID NO: 2079412
aaaucugcggcagaguaac

SEQ ID NO: 2079414 - RNA, 19 nt, Artificial Sequence
  Description of Artificial Sequence: Synthetic oligonucleotide
  Sense strand starting at position 2933 of SEQ ID NO: 1881896
gcguuaggaaucuagagac

SEQ ID NO: 2079415 - RNA, 19 nt, Artificial Sequence
  Description of Artificial Sequence: Synthetic oligonucleotide
  Antisense strand to SEQ ID NO: 2079414
gucucuagauuccuaacgc

SEQ ID NO: 2079416 - RNA, 19 nt, Artificial Sequence
  Description of Artificial Sequence: Synthetic oligonucleotide
  Sense strand starting at position 3000 of SEQ ID NO: 1881896
gccugagcucuccaggauu

SEQ ID NO: 2079417 - RNA, 19 nt, Artificial Sequence
  Description of Artificial Sequence: Synthetic oligonucleotide
  Antisense strand to SEQ ID NO: 2079416
aauccuggagagcucaggc

SEQ ID NO: 2079418 - RNA, 19 nt, Artificial Sequence
  Description of Artificial Sequence: Synthetic oligonucleotide
  Sense strand starting at position 3016 of SEQ ID NO: 1881896
auuccaguccuggauucua

SEQ ID NO: 2079419 - RNA, 19 nt, Artificial Sequence
  Description of Artificial Sequence: Synthetic oligonucleotide
  Antisense strand to SEQ ID NO: 2079418
uagaauccaggacuggaau

SEQ ID NO: 2079420 - RNA, 19 nt, Artificial Sequence
  Description of Artificial Sequence: Synthetic oligonucleotide
  Sense strand starting at position 3024 of SEQ ID NO: 1881896
ccuggauucuacuuuguga

SEQ ID NO: 2079421 - RNA, 19 nt, Artificial Sequence
  Description of Artificial Sequence: Synthetic oligonucleotide
  Antisense strand to SEQ ID NO: 2079420
ucacaaaguagaauccagg

SEQ ID NO: 2079422 - RNA, 19 nt, Artificial Sequence
  Description of Artificial Sequence: Synthetic oligonucleotide
  Sense strand starting at position 3681 of SEQ ID NO: 1881896
uaauguuaggacuguagau

SEQ ID NO: 2079423 - RNA, 19 nt, Artificial Sequence
  Description of Artificial Sequence: Synthetic oligonucleotide
  Antisense strand to SEQ ID NO: 2079422
aucuacaguccuaacauua

SEQ ID NO: 2079424 - RNA, 19 nt, Artificial Sequence
  Description of Artificial Sequence: Synthetic oligonucleotide
  Sense strand starting at position 3748 of SEQ ID NO: 1881896
uugagaaagaaguggucuu

SEQ ID NO: 2079425 - RNA, 19 nt, Artificial Sequence
  Description of Artificial Sequence: Synthetic oligonucleotide
  Antisense strand to SEQ ID NO: 2079424
aagaccacuucuuucucaa

SEQ ID NO: 2079426 - RNA, 19 nt, Artificial Sequence
  Description of Artificial Sequence: Synthetic oligonucleotide
  Sense strand starting at position 3774 of SEQ ID NO: 1881896
gcgucauggacuuagacua

SEQ ID NO: 2079427 - RNA, 19 nt, Artificial Sequence
  Description of Artificial Sequence: Synthetic oligonucleotide
  Antisense strand to SEQ ID NO: 2079426
uagucuaaguccaugacgc

SEQ ID NO: 2079428 - RNA, 19 nt, Artificial Sequence
  Description of Artificial Sequence: Synthetic oligonucleotide
  Sense strand starting at position 3795 of SEQ ID NO: 1881896
ccugauggauggccuagaa

SEQ ID NO: 2079429 - RNA, 19 nt, Artificial Sequence
  Description of Artificial Sequence: Synthetic oligonucleotide
  Antisense strand to SEQ ID NO: 2079428
uucuaggccauccaucagg

SEQ ID NO: 2079430 - RNA, 19 nt, Artificial Sequence
  Description of Artificial Sequence: Synthetic oligonucleotide
  Sense strand starting at position 3817 of SEQ ID NO: 1881896
cuguuuaacuuugucaaga

SEQ ID NO: 2079431 - RNA, 19 nt, Artificial Sequence
  Description of Artificial Sequence: Synthetic oligonucleotide
  Antisense strand to SEQ ID NO: 2079430
ucuugacaaaguuaaacag

SEQ ID NO: 2079432 - RNA, 19 nt, Artificial Sequence
  Description of Artificial Sequence: Synthetic oligonucleotide
  Sense strand starting at position 3818 of SEQ ID NO: 1881896
uguuuaacuuugucaagac

SEQ ID NO: 2079433 - RNA, 19 nt, Artificial Sequence
  Description of Artificial Sequence: Synthetic oligonucleotide
  Antisense strand to SEQ ID NO: 2079432
gucuugacaaaguuaaaca

SEQ ID NO: 2079434 - RNA, 19 nt, Artificial Sequence
  Description of Artificial Sequence: Synthetic oligonucleotide
  Sense strand starting at position 3874 of SEQ ID NO: 1881896
uauacauaccuuugggagu

SEQ ID NO: 2079435 - RNA, 19 nt, Artificial Sequence
  Description of Artificial Sequence: Synthetic oligonucleotide
  Antisense strand to SEQ ID NO: 2079434
acucccaaagguauguaua

SEQ ID NO: 2079436 - RNA, 19 nt, Artificial Sequence
  Description of Artificial Sequence: Synthetic oligonucleotide
  Sense strand starting at position 3944 of SEQ ID NO: 1881896
ggugaaugauauucuuguu

SEQ ID NO: 2079437 - RNA, 19 nt, Artificial Sequence
  Description of Artificial Sequence: Synthetic oligonucleotide
  Antisense strand to SEQ ID NO: 2079436
aacaagaauaucauucacc

SEQ ID NO: 2079438 - RNA, 19 nt, Artificial Sequence
  Description of Artificial Sequence: Synthetic oligonucleotide
  Sense strand starting at position 121 of SEQ ID NO: 1881897
gugaauguccugugcucua

SEQ ID NO: 2079439 - RNA, 19 nt, Artificial Sequence
  Description of Artificial Sequence: Synthetic oligonucleotide
  Antisense strand to SEQ ID NO: 2079438
uagagcacaggacauucac

SEQ ID NO: 2079440 - RNA, 19 nt, Artificial Sequence
  Description of Artificial Sequence: Synthetic oligonucleotide
  Sense strand starting at position 275 of SEQ ID NO: 1881897
cguuucuagcagcaaauga

SEQ ID NO: 2079441 - RNA, 19 nt, Artificial Sequence
  Description of Artificial Sequence: Synthetic oligonucleotide
  Antisense strand to SEQ ID NO: 2079440
ucauuugcugcuagaaacg

SEQ ID NO: 2079442 - RNA, 19 nt, Artificial Sequence
  Description of Artificial Sequence: Synthetic oligonucleotide
  Sense strand starting at position 286 of SEQ ID NO: 1881897
gcaaaugagucagaaggga

SEQ ID NO: 2079443 - RNA, 19 nt, Artificial Sequence
  Description of Artificial Sequence: Synthetic oligonucleotide
  Antisense strand to SEQ ID NO: 2079442
ucccuucugacucauuugc

SEQ ID NO: 2079444 - RNA, 19 nt, Artificial Sequence
  Description of Artificial Sequence: Synthetic oligonucleotide
  Sense strand starting at position 497 of SEQ ID NO: 1881897
agcccauuccaauggcaaa

SEQ ID NO: 2079445 - RNA, 19 nt, Artificial Sequence
  Description of Artificial Sequence: Synthetic oligonucleotide
  Antisense strand to SEQ ID NO: 2079444
uuugccauuggaaugggcu

SEQ ID NO: 2079446 - RNA, 19 nt, Artificial Sequence
  Description of Artificial Sequence: Synthetic oligonucleotide
  Sense strand starting at position 509 of SEQ ID NO: 1881897
uggcaaagauucccgauua

SEQ ID NO: 2079447 - RNA, 19 nt, Artificial Sequence
  Description of Artificial Sequence: Synthetic oligonucleotide
  Antisense strand to SEQ ID NO: 2079446
uaaucgggaaucuuugcca

SEQ ID NO: 2079448 - RNA, 19 nt, Artificial Sequence
  Description of Artificial Sequence: Synthetic oligonucleotide
  Sense strand starting at position 572 of SEQ ID NO: 1881897
uagagauguuaagcuucua

SEQ ID NO: 2079449 - RNA, 19 nt, Artificial Sequence
  Description of Artificial Sequence: Synthetic oligonucleotide
  Antisense strand to SEQ ID NO: 2079448
uagaagcuuaacaucucua

SEQ ID NO: 2079450 - RNA, 19 nt, Artificial Sequence
  Description of Artificial Sequence: Synthetic oligonucleotide
  Sense strand starting at position 938 of SEQ ID NO: 1881897
gggugaauguuugcagcaa

SEQ ID NO: 2079451 - RNA, 19 nt, Artificial Sequence
  Description of Artificial Sequence: Synthetic oligonucleotide
  Antisense strand to SEQ ID NO: 2079450
uugcugcaaacauucaccc

SEQ ID NO: 2079452 - RNA, 19 nt, Artificial Sequence
  Description of Artificial Sequence: Synthetic oligonucleotide
  Sense strand starting at position 1093 of SEQ ID NO: 1881897
cugaaaccaucaugagacu

SEQ ID NO: 2079453 - RNA, 19 nt, Artificial Sequence
  Description of Artificial Sequence: Synthetic oligonucleotide
  Antisense strand to SEQ ID NO: 2079452
agucucaugaugguuucag

SEQ ID NO: 2079454 - RNA, 19 nt, Artificial Sequence
  Description of Artificial Sequence: Synthetic oligonucleotide
  Sense strand starting at position 1267 of SEQ ID NO: 1881897
aggaaucacuuagaaacau

SEQ ID NO: 2079455 - RNA, 19 nt, Artificial Sequence
  Description of Artificial Sequence: Synthetic oligonucleotide
  Antisense strand to SEQ ID NO: 2079454
auguuucuaagugauuccu

SEQ ID NO: 2079456 - RNA, 19 nt, Artificial Sequence
  Description of Artificial Sequence: Synthetic oligonucleotide
  Sense strand starting at position 1288 of SEQ ID NO: 1881897
acaggaauuugugaaggag

SEQ ID NO: 2079457 - RNA, 19 nt, Artificial Sequence
  Description of Artificial Sequence: Synthetic oligonucleotide
  Antisense strand to SEQ ID NO: 2079456
cuccuucacaaauuccugu

SEQ ID NO: 2079458 - RNA, 19 nt, Artificial Sequence
  Description of Artificial Sequence: Synthetic oligonucleotide
  Sense strand starting at position 1353 of SEQ ID NO: 1881897
agcugcuugaugggaagaa

SEQ ID NO: 2079459 - RNA, 19 nt, Artificial Sequence
  Description of Artificial Sequence: Synthetic oligonucleotide
  Antisense strand to SEQ ID NO: 2079458
uucuucccaucaagcagcu

SEQ ID NO: 2079460 - RNA, 19 nt, Artificial Sequence
  Description of Artificial Sequence: Synthetic oligonucleotide
  Sense strand starting at position 1741 of SEQ ID NO: 1881897
acugguucuagcuggugua

SEQ ID NO: 2079461 - RNA, 19 nt, Artificial Sequence
  Description of Artificial Sequence: Synthetic oligonucleotide
  Antisense strand to SEQ ID NO: 2079460
uacaccagcuagaaccagu

SEQ ID NO: 2079462 - RNA, 19 nt, Artificial Sequence
  Description of Artificial Sequence: Synthetic oligonucleotide
  Sense strand starting at position 1882 of SEQ ID NO: 1881897
augugagcucacugugcau

SEQ ID NO: 2079463 - RNA, 19 nt, Artificial Sequence
  Description of Artificial Sequence: Synthetic oligonucleotide
  Antisense strand to SEQ ID NO: 2079462
augcacagugagcucacau

SEQ ID NO: 2079464 - RNA, 19 nt, Artificial Sequence
  Description of Artificial Sequence: Synthetic oligonucleotide
  Sense strand starting at position 1915 of SEQ ID NO: 1881897
cuuguagaguacucacagu

SEQ ID NO: 2079465 - RNA, 19 nt, Artificial Sequence
  Description of Artificial Sequence: Synthetic oligonucleotide
  Antisense strand to SEQ ID NO: 2079464
acugugaguacucuacaag

SEQ ID NO: 2079466 - RNA, 19 nt, Artificial Sequence
  Description of Artificial Sequence: Synthetic oligonucleotide
  Sense strand starting at position 2058 of SEQ ID NO: 1881897
ggcugcaacucuuuagaga

SEQ ID NO: 2079467 - RNA, 19 nt, Artificial Sequence
  Description of Artificial Sequence: Synthetic oligonucleotide
  Antisense strand to SEQ ID NO: 2079466
ucucuaaagaguugcagcc

SEQ ID NO: 2079468 - RNA, 19 nt, Artificial Sequence
  Description of Artificial Sequence: Synthetic oligonucleotide
  Sense strand starting at position 2059 of SEQ ID NO: 1881897
gcugcaacucuuuagagaa

SEQ ID NO: 2079469 - RNA, 19 nt, Artificial Sequence
  Description of Artificial Sequence: Synthetic oligonucleotide
  Antisense strand to SEQ ID NO: 2079468
uucucuaaagaguugcagc

SEQ ID NO: 2079470 - RNA, 19 nt, Artificial Sequence
  Description of Artificial Sequence: Synthetic oligonucleotide
  Sense strand starting at position 2061 of SEQ ID NO: 1881897
ugcaacucuuuagagaaau

SEQ ID NO: 2079471 - RNA, 19 nt, Artificial Sequence
  Description of Artificial Sequence: Synthetic oligonucleotide
  Antisense strand to SEQ ID NO: 2079470
auuucucuaaagaguugca

SEQ ID NO: 2079472 - RNA, 19 nt, Artificial Sequence
  Description of Artificial Sequence: Synthetic oligonucleotide
  Sense strand starting at position 2097 of SEQ ID NO: 1881897
guuuaugaaucucaugaau

SEQ ID NO: 2079473 - RNA, 19 nt, Artificial Sequence
  Description of Artificial Sequence: Synthetic oligonucleotide
  Antisense strand to SEQ ID NO: 2079472
auucaugagauucauaaac

SEQ ID NO: 2079474 - RNA, 19 nt, Artificial Sequence
  Description of Artificial Sequence: Synthetic oligonucleotide
  Sense strand starting at position 2185 of SEQ ID NO: 1881897
gcagauaauuaggugauua

SEQ ID NO: 2079475 - RNA, 19 nt, Artificial Sequence
  Description of Artificial Sequence: Synthetic oligonucleotide
  Antisense strand to SEQ ID NO: 2079474
uaaucaccuaauuaucugc

SEQ ID NO: 2079476 - RNA, 19 nt, Artificial Sequence
  Description of Artificial Sequence: Synthetic oligonucleotide
  Sense strand starting at position 2193 of SEQ ID NO: 1881897
uuaggugauuaucuuggga

SEQ ID NO: 2079477 - RNA, 19 nt, Artificial Sequence
  Description of Artificial Sequence: Synthetic oligonucleotide
  Antisense strand to SEQ ID NO: 2079476
ucccaagauaaucaccuaa

SEQ ID NO: 2079478 - RNA, 19 nt, Artificial Sequence
  Description of Artificial Sequence: Synthetic oligonucleotide
  Sense strand starting at position 2196 of SEQ ID NO: 1881897
ggugauuaucuugggagau

SEQ ID NO: 2079479 - RNA, 19 nt, Artificial Sequence
  Description of Artificial Sequence: Synthetic oligonucleotide
  Antisense strand to SEQ ID NO: 2079478
aucucccaagauaaucacc

SEQ ID NO: 2079480 - RNA, 19 nt, Artificial Sequence
  Description of Artificial Sequence: Synthetic oligonucleotide
  Sense strand starting at position 2358 of SEQ ID NO: 1881897
agugauaaaugucuauaag

SEQ ID NO: 2079481 - RNA, 19 nt, Artificial Sequence
  Description of Artificial Sequence: Synthetic oligonucleotide
  Antisense strand to SEQ ID NO: 2079480
cuuauagacauuuaucacu

SEQ ID NO: 2079482 - RNA, 19 nt, Artificial Sequence
  Description of Artificial Sequence: Synthetic oligonucleotide
  Sense strand starting at position 2359 of SEQ ID NO: 1881897
gugauaaaugucuauaagu

SEQ ID NO: 2079483 - RNA, 19 nt, Artificial Sequence
  Description of Artificial Sequence: Synthetic oligonucleotide
  Antisense strand to SEQ ID NO: 2079482
acuuauagacauuuaucac

SEQ ID NO: 2079484 - RNA, 19 nt, Artificial Sequence
  Description of Artificial Sequence: Synthetic oligonucleotide
  Sense strand starting at position 2376 of SEQ ID NO: 1881897
gugaauauuccauagcggu

SEQ ID NO: 2079485 - RNA, 19 nt, Artificial Sequence
  Description of Artificial Sequence: Synthetic oligonucleotide
  Antisense strand to SEQ ID NO: 2079484
accgcuauggaauauucac

SEQ ID NO: 2079486 - RNA, 19 nt, Artificial Sequence
  Description of Artificial Sequence: Synthetic oligonucleotide
  Sense strand starting at position 2380 of SEQ ID NO: 1881897
auauuccauagcgguaaga

SEQ ID NO: 2079487 - RNA, 19 nt, Artificial Sequence
  Description of Artificial Sequence: Synthetic oligonucleotide
  Antisense strand to SEQ ID NO: 2079486
ucuuaccgcuauggaauau

SEQ ID NO: 2079488 - RNA, 19 nt, Artificial Sequence
  Description of Artificial Sequence: Synthetic oligonucleotide
  Sense strand starting at position 2382 of SEQ ID NO: 1881897
auuccauagcgguaagaau

SEQ ID NO: 2079489 - RNA, 19 nt, Artificial Sequence
  Description of Artificial Sequence: Synthetic oligonucleotide
  Antisense strand to SEQ ID NO: 2079488
auucuuaccgcuauggaau

SEQ ID NO: 2079490 - RNA, 19 nt, Artificial Sequence
  Description of Artificial Sequence: Synthetic oligonucleotide
  Sense strand starting at position 2558 of SEQ ID NO: 1881897
aggcaucaggucugggaaa

SEQ ID NO: 2079491 - RNA, 19 nt, Artificial Sequence
  Description of Artificial Sequence: Synthetic oligonucleotide
  Antisense strand to SEQ ID NO: 2079490
uuucccagaccugaugccu

SEQ ID NO: 2079492 - RNA, 19 nt, Artificial Sequence
  Description of Artificial Sequence: Synthetic oligonucleotide
  Sense strand starting at position 2682 of SEQ ID NO: 1881897
ucguguugccuccaaggca

SEQ ID NO: 2079493 - RNA, 19 nt, Artificial Sequence
  Description of Artificial Sequence: Synthetic oligonucleotide
  Antisense strand to SEQ ID NO: 2079492
ugccuuggaggcaacacga

SEQ ID NO: 2079494 - RNA, 19 nt, Artificial Sequence
  Description of Artificial Sequence: Synthetic oligonucleotide
  Sense strand starting at position 2784 of SEQ ID NO: 1881897
ucaauaauagcuugaguca

SEQ ID NO: 2079495 - RNA, 19 nt, Artificial Sequence
  Description of Artificial Sequence: Synthetic oligonucleotide
  Antisense strand to SEQ ID NO: 2079494
ugacucaagcuauuauuga

SEQ ID NO: 2079496 - RNA, 19 nt, Artificial Sequence
  Description of Artificial Sequence: Synthetic oligonucleotide
  Sense strand starting at position 2797 of SEQ ID NO: 1881897
gagucagucucacuugguu

SEQ ID NO: 2079497 - RNA, 19 nt, Artificial Sequence
  Description of Artificial Sequence: Synthetic oligonucleotide
  Antisense strand to SEQ ID NO: 2079496
aaccaagugagacugacuc

SEQ ID NO: 2079498 - RNA, 19 nt, Artificial Sequence
  Description of Artificial Sequence: Synthetic oligonucleotide
  Sense strand starting at position 2802 of SEQ ID NO: 1881897
agucucacuugguugugau

SEQ ID NO: 2079499 - RNA, 19 nt, Artificial Sequence
  Description of Artificial Sequence: Synthetic oligonucleotide
  Antisense strand to SEQ ID NO: 2079498
aucacaaccaagugagacu

SEQ ID NO: 2079500 - RNA, 19 nt, Artificial Sequence
  Description of Artificial Sequence: Synthetic oligonucleotide
  Sense strand starting at position 2815 of SEQ ID NO: 1881897
ugugauaacucagaagacu

SEQ ID NO: 2079501 - RNA, 19 nt, Artificial Sequence
  Description of Artificial Sequence: Synthetic oligonucleotide
  Antisense strand to SEQ ID NO: 2079500
agucuucugaguuaucaca

SEQ ID NO: 2079502 - RNA, 19 nt, Artificial Sequence
  Description of Artificial Sequence: Synthetic oligonucleotide
  Sense strand starting at position 2941 of SEQ ID NO: 1881897
ggagguuucuuggcaugcu

SEQ ID NO: 2079503 - RNA, 19 nt, Artificial Sequence
  Description of Artificial Sequence: Synthetic oligonucleotide
  Antisense strand to SEQ ID NO: 2079502
agcaugccaagaaaccucc

SEQ ID NO: 2079504 - RNA, 19 nt, Artificial Sequence
  Description of Artificial Sequence: Synthetic oligonucleotide
  Sense strand starting at position 3280 of SEQ ID NO: 1881897
ugcaguccuggccaguuua

SEQ ID NO: 2079505 - RNA, 19 nt, Artificial Sequence
  Description of Artificial Sequence: Synthetic oligonucleotide
  Antisense strand to SEQ ID NO: 2079504
uaaacuggccaggacugca

SEQ ID NO: 2079506 - RNA, 19 nt, Artificial Sequence
  Description of Artificial Sequence: Synthetic oligonucleotide
  Sense strand starting at position 3513 of SEQ ID NO: 1881897
uugagacucucggaaacaa

SEQ ID NO: 2079507 - RNA, 19 nt, Artificial Sequence
  Description of Artificial Sequence: Synthetic oligonucleotide
  Antisense strand to SEQ ID NO: 2079506
uuguuuccgagagucucaa

SEQ ID NO: 2079508 - RNA, 19 nt, Artificial Sequence
  Description of Artificial Sequence: Synthetic oligonucleotide
  Sense strand starting at position 3552 of SEQ ID NO: 1881897
aguggaaucugacaccaau

SEQ ID NO: 2079509 - RNA, 19 nt, Artificial Sequence
  Description of Artificial Sequence: Synthetic oligonucleotide
  Antisense strand to SEQ ID NO: 2079508
auuggugucagauuccacu

SEQ ID NO: 2079510 - RNA, 19 nt, Artificial Sequence
  Description of Artificial Sequence: Synthetic oligonucleotide
  Sense strand starting at position 3600 of SEQ ID NO: 1881897
gugacaaacuuuccgagua

SEQ ID NO: 2079511 - RNA, 19 nt, Artificial Sequence
  Description of Artificial Sequence: Synthetic oligonucleotide
  Antisense strand to SEQ ID NO: 2079510
uacucggaaaguuugucac

SEQ ID NO: 2079512 - RNA, 19 nt, Artificial Sequence
  Description of Artificial Sequence: Synthetic oligonucleotide
  Sense strand starting at position 3739 of SEQ ID NO: 1881897
cccuguuugcuggaagugu

SEQ ID NO: 2079513 - RNA, 19 nt, Artificial Sequence
  Description of Artificial Sequence: Synthetic oligonucleotide
  Antisense strand to SEQ ID NO: 2079512
acacuuccagcaaacaggg

SEQ ID NO: 2079514 - RNA, 19 nt, Artificial Sequence
  Description of Artificial Sequence: Synthetic oligonucleotide
  Sense strand starting at position 3771 of SEQ ID NO: 1881897
ggauguguuggcagagcca

SEQ ID NO: 2079515 - RNA, 19 nt, Artificial Sequence
  Description of Artificial Sequence: Synthetic oligonucleotide
  Antisense strand to SEQ ID NO: 2079514
uggcucugccaacacaucc

SEQ ID NO: 2079516 - RNA, 19 nt, Artificial Sequence
  Description of Artificial Sequence: Synthetic oligonucleotide
  Sense strand starting at position 3837 of SEQ ID NO: 1881897
guuuacaaggcccaagaau

SEQ ID NO: 2079517 - RNA, 19 nt, Artificial Sequence
  Description of Artificial Sequence: Synthetic oligonucleotide
  Antisense strand to SEQ ID NO: 2079516
auucuugggccuuguaaac

SEQ ID NO: 2079518 - RNA, 19 nt, Artificial Sequence
  Description of Artificial Sequence: Synthetic oligonucleotide
  Sense strand starting at position 121 of SEQ ID NO: 1881898
gccugaauugauggcugau

SEQ ID NO: 2079519 - RNA, 19 nt, Artificial Sequence
  Description of Artificial Sequence: Synthetic oligonucleotide
  Antisense strand to SEQ ID NO: 2079518
aucagccaucaauucaggc

SEQ ID NO: 2079520 - RNA, 19 nt, Artificial Sequence
  Description of Artificial Sequence: Synthetic oligonucleotide
  Sense strand starting at position 248 of SEQ ID NO: 1881898
ccaggaugcuuggucuaug

SEQ ID NO: 2079521 - RNA, 19 nt, Artificial Sequence
  Description of Artificial Sequence: Synthetic oligonucleotide
  Antisense strand to SEQ ID NO: 2079520
cauagaccaagcauccugg

SEQ ID NO: 2079522 - RNA, 19 nt, Artificial Sequence
  Description of Artificial Sequence: Synthetic oligonucleotide
  Sense strand starting at position 251 of SEQ ID NO: 1881898
ggaugcuuggucuauguca

SEQ ID NO: 2079523 - RNA, 19 nt, Artificial Sequence
  Description of Artificial Sequence: Synthetic oligonucleotide
  Antisense strand to SEQ ID NO: 2079522
ugacauagaccaagcaucc

SEQ ID NO: 2079524 - RNA, 19 nt, Artificial Sequence
  Description of Artificial Sequence: Synthetic oligonucleotide
  Sense strand starting at position 491 of SEQ ID NO: 1881898
ugguacuuugguuagcaau

SEQ ID NO: 2079525 - RNA, 19 nt, Artificial Sequence
  Description of Artificial Sequence: Synthetic oligonucleotide
  Antisense strand to SEQ ID NO: 2079524
auugcuaaccaaaguacca

SEQ ID NO: 2079526 - RNA, 19 nt, Artificial Sequence
  Description of Artificial Sequence: Synthetic oligonucleotide
  Sense strand starting at position 526 of SEQ ID NO: 1881898
uuguacuuugguuagcaau

SEQ ID NO: 2079527 - RNA, 19 nt, Artificial Sequence
  Description of Artificial Sequence: Synthetic oligonucleotide
  Antisense strand to SEQ ID NO: 2079526
auugcuaaccaaaguacaa

SEQ ID NO: 2079528 - RNA, 19 nt, Artificial Sequence
  Description of Artificial Sequence: Synthetic oligonucleotide
  Sense strand starting at position 594 of SEQ ID NO: 1881898
ucaguugcccaaggauuaa

SEQ ID NO: 2079529 - RNA, 19 nt, Artificial Sequence
  Description of Artificial Sequence: Synthetic oligonucleotide
  Antisense strand to SEQ ID NO: 2079528
uuaauccuugggcaacuga

SEQ ID NO: 2079530 - RNA, 19 nt, Artificial Sequence
  Description of Artificial Sequence: Synthetic oligonucleotide
  Sense strand starting at position 764 of SEQ ID NO: 1881898
ggaaacaguucugcgaauc

SEQ ID NO: 2079531 - RNA, 19 nt, Artificial Sequence
  Description of Artificial Sequence: Synthetic oligonucleotide
  Antisense strand to SEQ ID NO: 2079530
gauucgcagaacuguuucc

SEQ ID NO: 2079532 - RNA, 19 nt, Artificial Sequence
  Description of Artificial Sequence: Synthetic oligonucleotide
  Sense strand starting at position 793 of SEQ ID NO: 1881898
cauucugucacgggagaga

SEQ ID NO: 2079533 - RNA, 19 nt, Artificial Sequence
  Description of Artificial Sequence: Synthetic oligonucleotide
  Antisense strand to SEQ ID NO: 2079532
ucucucccgugacagaaug

SEQ ID NO: 2079534 - RNA, 19 nt, Artificial Sequence
  Description of Artificial Sequence: Synthetic oligonucleotide
  Sense strand starting at position 806 of SEQ ID NO: 1881898
gagagagucucugcacuuc

SEQ ID NO: 2079535 - RNA, 19 nt, Artificial Sequence
  Description of Artificial Sequence: Synthetic oligonucleotide
  Antisense strand to SEQ ID NO: 2079534
gaagugcagagacucucuc

SEQ ID NO: 2079536 - RNA, 19 nt, Artificial Sequence
  Description of Artificial Sequence: Synthetic oligonucleotide
  Sense strand starting at position 837 of SEQ ID NO: 1881898
gccaacauuucucuguguu

SEQ ID NO: 2079537 - RNA, 19 nt, Artificial Sequence
  Description of Artificial Sequence: Synthetic oligonucleotide
  Antisense strand to SEQ ID NO: 2079536
aacacagagaaauguuggc

SEQ ID NO: 2079538 - RNA, 19 nt, Artificial Sequence
  Description of Artificial Sequence: Synthetic oligonucleotide
  Sense strand starting at position 838 of SEQ ID NO: 1881898
ccaacauuucucuguguug

SEQ ID NO: 2079539 - RNA, 19 nt, Artificial Sequence
  Description of Artificial Sequence: Synthetic oligonucleotide
  Antisense strand to SEQ ID NO: 2079538
caacacagagaaauguugg

SEQ ID NO: 2079540 - RNA, 19 nt, Artificial Sequence
  Description of Artificial Sequence: Synthetic oligonucleotide
  Sense strand starting at position 853 of SEQ ID NO: 1881898
guugcuugugaugaucuua

SEQ ID NO: 2079541 - RNA, 19 nt, Artificial Sequence
  Description of Artificial Sequence: Synthetic oligonucleotide
  Antisense strand to SEQ ID NO: 2079540
uaagaucaucacaagcaac

SEQ ID NO: 2079542 - RNA, 19 nt, Artificial Sequence
  Description of Artificial Sequence: Synthetic oligonucleotide
  Sense strand starting at position 1058 of SEQ ID NO: 1881898
ggacuauauugugcucauc

SEQ ID NO: 2079543 - RNA, 19 nt, Artificial Sequence
  Description of Artificial Sequence: Synthetic oligonucleotide
  Antisense strand to SEQ ID NO: 2079542
gaugagcacaauauagucc

SEQ ID NO: 2079544 - RNA, 19 nt, Artificial Sequence
  Description of Artificial Sequence: Synthetic oligonucleotide
  Sense strand starting at position 1136 of SEQ ID NO: 1881898
cuguguauuuccucugugu

SEQ ID NO: 2079545 - RNA, 19 nt, Artificial Sequence
  Description of Artificial Sequence: Synthetic oligonucleotide
  Antisense strand to SEQ ID NO: 2079544
acacagaggaaauacacag

SEQ ID NO: 2079546 - RNA, 19 nt, Artificial Sequence
  Description of Artificial Sequence: Synthetic oligonucleotide
  Sense strand starting at position 1494 of SEQ ID NO: 1881898
gacuuuaaacgugaccuuu

SEQ ID NO: 2079547 - RNA, 19 nt, Artificial Sequence
  Description of Artificial Sequence: Synthetic oligonucleotide
  Antisense strand to SEQ ID NO: 2079546
aaaggucacguuuaaaguc

SEQ ID NO: 2079548 - RNA, 19 nt, Artificial Sequence
  Description of Artificial Sequence: Synthetic oligonucleotide
  Sense strand starting at position 1514 of SEQ ID NO: 1881898
cgcucaagcaucuuguagu

SEQ ID NO: 2079549 - RNA, 19 nt, Artificial Sequence
  Description of Artificial Sequence: Synthetic oligonucleotide
  Antisense strand to SEQ ID NO: 2079548
acuacaagaugcuugagcg

SEQ ID NO: 2079550 - RNA, 19 nt, Artificial Sequence
  Description of Artificial Sequence: Synthetic oligonucleotide
  Sense strand starting at position 1522 of SEQ ID NO: 1881898
caucuuguagucuagauga

SEQ ID NO: 2079551 - RNA, 19 nt, Artificial Sequence
  Description of Artificial Sequence: Synthetic oligonucleotide
  Antisense strand to SEQ ID NO: 2079550
ucaucuagacuacaagaug

SEQ ID NO: 2079552 - RNA, 19 nt, Artificial Sequence
  Description of Artificial Sequence: Synthetic oligonucleotide
  Sense strand starting at position 1579 of SEQ ID NO: 1881898
ccaggugcuaugggaaagu

SEQ ID NO: 2079553 - RNA, 19 nt, Artificial Sequence
  Description of Artificial Sequence: Synthetic oligonucleotide
  Antisense strand to SEQ ID NO: 2079552
acuuucccauagcaccugg

SEQ ID NO: 2079554 - RNA, 19 nt, Artificial Sequence
  Description of Artificial Sequence: Synthetic oligonucleotide
  Sense strand starting at position 1631 of SEQ ID NO: 1881898
agcuauugugaucaccacu

SEQ ID NO: 2079555 - RNA, 19 nt, Artificial Sequence
  Description of Artificial Sequence: Synthetic oligonucleotide
  Antisense strand to SEQ ID NO: 2079554
aguggugaucacaauagcu

SEQ ID NO: 2079556 - RNA, 19 nt, Artificial Sequence
  Description of Artificial Sequence: Synthetic oligonucleotide
  Sense strand starting at position 1647 of SEQ ID NO: 1881898
acuuuauagugaccagaau

SEQ ID NO: 2079557 - RNA, 19 nt, Artificial Sequence
  Description of Artificial Sequence: Synthetic oligonucleotide
  Antisense strand to SEQ ID NO: 2079556
auucuggucacuauaaagu

SEQ ID NO: 2079558 - RNA, 19 nt, Artificial Sequence
  Description of Artificial Sequence: Synthetic oligonucleotide
  Sense strand starting at position 1766 of SEQ ID NO: 1881898
ugauaugugccagggagac

SEQ ID NO: 2079559 - RNA, 19 nt, Artificial Sequence
  Description of Artificial Sequence: Synthetic oligonucleotide
  Antisense strand to SEQ ID NO: 2079558
gucucccuggcacauauca

SEQ ID NO: 2079560 - RNA, 19 nt, Artificial Sequence
  Description of Artificial Sequence: Synthetic oligonucleotide
  Sense strand starting at position 1768 of SEQ ID NO: 1881898
auaugugccagggagacuu

SEQ ID NO: 2079561 - RNA, 19 nt, Artificial Sequence
  Description of Artificial Sequence: Synthetic oligonucleotide
  Antisense strand to SEQ ID NO: 2079560
aagucucccuggcacauau

SEQ ID NO: 2079562 - RNA, 19 nt, Artificial Sequence
  Description of Artificial Sequence: Synthetic oligonucleotide
  Sense strand starting at position 1786 of SEQ ID NO: 1881898
uguccugcuguuuauggaa

SEQ ID NO: 2079563 - RNA, 19 nt, Artificial Sequence
  Description of Artificial Sequence: Synthetic oligonucleotide
  Antisense strand to SEQ ID NO: 2079562
uuccauaaacagcaggaca

SEQ ID NO: 2079564 - RNA, 19 nt, Artificial Sequence
  Description of Artificial Sequence: Synthetic oligonucleotide
  Sense strand starting at position 1941 of SEQ ID NO: 1881898
caguguuccugggcaagga

SEQ ID NO: 2079565 - RNA, 19 nt, Artificial Sequence
  Description of Artificial Sequence: Synthetic oligonucleotide
  Antisense strand to SEQ ID NO: 2079564
uccuugcccaggaacacug

SEQ ID NO: 2079566 - RNA, 19 nt, Artificial Sequence
  Description of Artificial Sequence: Synthetic oligonucleotide
  Sense strand starting at position 2085 of SEQ ID NO: 1881898
cugcucggauuauucuaaa

SEQ ID NO: 2079567 - RNA, 19 nt, Artificial Sequence
  Description of Artificial Sequence: Synthetic oligonucleotide
  Antisense strand to SEQ ID NO: 2079566
uuuagaauaauccgagcag

SEQ ID NO: 2079568 - RNA, 19 nt, Artificial Sequence
  Description of Artificial Sequence: Synthetic oligonucleotide
  Sense strand starting at position 2171 of SEQ ID NO: 1881898
cuguuuagauuuccuggca

SEQ ID NO: 2079569 - RNA, 19 nt, Artificial Sequence
  Description of Artificial Sequence: Synthetic oligonucleotide
  Antisense strand to SEQ ID NO: 2079568
ugccaggaaaucuaaacag

SEQ ID NO: 2079570 - RNA, 19 nt, Artificial Sequence
  Description of Artificial Sequence: Synthetic oligonucleotide
  Sense strand starting at position 2184 of SEQ ID NO: 1881898
cuggcaauauccuugcaag

SEQ ID NO: 2079571 - RNA, 19 nt, Artificial Sequence
  Description of Artificial Sequence: Synthetic oligonucleotide
  Antisense strand to SEQ ID NO: 2079570
cuugcaaggauauugccag

SEQ ID NO: 2079572 - RNA, 19 nt, Artificial Sequence
  Description of Artificial Sequence: Synthetic oligonucleotide
  Sense strand starting at position 2335 of SEQ ID NO: 1881898
ggaacugccaaauguuaug

SEQ ID NO: 2079573 - RNA, 19 nt, Artificial Sequence
  Description of Artificial Sequence: Synthetic oligonucleotide
  Antisense strand to SEQ ID NO: 2079572
cauaacauuuggcaguucc

SEQ ID NO: 2079574 - RNA, 19 nt, Artificial Sequence
  Description of Artificial Sequence: Synthetic oligonucleotide
  Sense strand starting at position 2347 of SEQ ID NO: 1881898
uguuauguugcucacagaa

SEQ ID NO: 2079575 - RNA, 19 nt, Artificial Sequence
  Description of Artificial Sequence: Synthetic oligonucleotide
  Antisense strand to SEQ ID NO: 2079574
uucugugagcaacauaaca

SEQ ID NO: 2079576 - RNA, 19 nt, Artificial Sequence
  Description of Artificial Sequence: Synthetic oligonucleotide
  Sense strand starting at position 2601 of SEQ ID NO: 1881898
cccugcuuuguaggaaaua

SEQ ID NO: 2079577 - RNA, 19 nt, Artificial Sequence
  Description of Artificial Sequence: Synthetic oligonucleotide
  Antisense strand to SEQ ID NO: 2079576
uauuuccuacaaagcaggg

SEQ ID NO: 2079578 - RNA, 19 nt, Artificial Sequence
  Description of Artificial Sequence: Synthetic oligonucleotide
  Sense strand starting at position 2998 of SEQ ID NO: 1881898
acuguaguacaauguaaca

SEQ ID NO: 2079579 - RNA, 19 nt, Artificial Sequence
  Description of Artificial Sequence: Synthetic oligonucleotide
  Antisense strand to SEQ ID NO: 2079578
uguuacauuguacuacagu

SEQ ID NO: 2079580 - RNA, 19 nt, Artificial Sequence
  Description of Artificial Sequence: Synthetic oligonucleotide
  Sense strand starting at position 3180 of SEQ ID NO: 1881898
guaaucacacagcauguaa

SEQ ID NO: 2079581 - RNA, 19 nt, Artificial Sequence
  Description of Artificial Sequence: Synthetic oligonucleotide
  Antisense strand to SEQ ID NO: 2079580
uuacaugcugugugauuac

SEQ ID NO: 2079582 - RNA, 19 nt, Artificial Sequence
  Description of Artificial Sequence: Synthetic oligonucleotide
  Sense strand starting at position 3191 of SEQ ID NO: 1881898
gcauguaacuuugugaaau

SEQ ID NO: 2079583 - RNA, 19 nt, Artificial Sequence
  Description of Artificial Sequence: Synthetic oligonucleotide
  Antisense strand to SEQ ID NO: 2079582
auuucacaaaguuacaugc

SEQ ID NO: 2079584 - RNA, 19 nt, Artificial Sequence
  Description of Artificial Sequence: Synthetic oligonucleotide
  Sense strand starting at position 3255 of SEQ ID NO: 1881898
gcugcauggaucuauaguu

SEQ ID NO: 2079585 - RNA, 19 nt, Artificial Sequence
  Description of Artificial Sequence: Synthetic oligonucleotide
  Antisense strand to SEQ ID NO: 2079584
aacuauagauccaugcagc

SEQ ID NO: 2079586 - RNA, 19 nt, Artificial Sequence
  Description of Artificial Sequence: Synthetic oligonucleotide
  Sense strand starting at position 3679 of SEQ ID NO: 1881898
acgauauuccuguaagaac

SEQ ID NO: 2079587 - RNA, 19 nt, Artificial Sequence
  Description of Artificial Sequence: Synthetic oligonucleotide
  Antisense strand to SEQ ID NO: 2079586
guucuuacaggaauaucgu

SEQ ID NO: 2079588 - RNA, 19 nt, Artificial Sequence
  Description of Artificial Sequence: Synthetic oligonucleotide
  Sense strand starting at position 3746 of SEQ ID NO: 1881898
accuguagccaaggguaau

SEQ ID NO: 2079589 - RNA, 19 nt, Artificial Sequence
  Description of Artificial Sequence: Synthetic oligonucleotide
  Antisense strand to SEQ ID NO: 2079588
auuacccuuggcuacaggu

SEQ ID NO: 2079590 - RNA, 19 nt, Artificial Sequence
  Description of Artificial Sequence: Synthetic oligonucleotide
  Sense strand starting at position 3876 of SEQ ID NO: 1881898
cguccuauuccugaauaau

SEQ ID NO: 2079591 - RNA, 19 nt, Artificial Sequence
  Description of Artificial Sequence: Synthetic oligonucleotide
  Antisense strand to SEQ ID NO: 2079590
auuauucaggaauaggacg

SEQ ID NO: 2079592 - RNA, 19 nt, Artificial Sequence
  Description of Artificial Sequence: Synthetic oligonucleotide
  Sense strand starting at position 3913 of SEQ ID NO: 1881898
gccucucuguuguuauuua

SEQ ID NO: 2079593 - RNA, 19 nt, Artificial Sequence
  Description of Artificial Sequence: Synthetic oligonucleotide
  Antisense strand to SEQ ID NO: 2079592
uaaauaacaacagagaggc

SEQ ID NO: 2079594 - RNA, 19 nt, Artificial Sequence
  Description of Artificial Sequence: Synthetic oligonucleotide
  Sense strand starting at position 3934 of SEQ ID NO: 1881898
uugacacguuucccuaaca

SEQ ID NO: 2079595 - RNA, 19 nt, Artificial Sequence
  Description of Artificial Sequence: Synthetic oligonucleotide
  Antisense strand to SEQ ID NO: 2079594
uguuagggaaacgugucaa

SEQ ID NO: 2079596 - RNA, 19 nt, Artificial Sequence
  Description of Artificial Sequence: Synthetic oligonucleotide
  Sense strand starting at position 3935 of SEQ ID NO: 1881898
ugacacguuucccuaacaa

SEQ ID NO: 2079597 - RNA, 19 nt, Artificial Sequence
  Description of Artificial Sequence: Synthetic oligonucleotide
  Antisense strand to SEQ ID NO: 2079596
uuguuagggaaacguguca

SEQ ID NO: 2079598 - RNA, 19 nt, Artificial Sequence
  Description of Artificial Sequence: Synthetic oligonucleotide
  Sense strand starting at position 116 of SEQ ID NO: 1881899
uugacauaugcauaaagcu

SEQ ID NO: 2079599 - RNA, 19 nt, Artificial Sequence
  Description of Artificial Sequence: Synthetic oligonucleotide
  Antisense strand to SEQ ID NO: 2079598
agcuuuaugcauaugucaa

SEQ ID NO: 2079600 - RNA, 19 nt, Artificial Sequence
  Description of Artificial Sequence: Synthetic oligonucleotide
  Sense strand starting at position 405 of SEQ ID NO: 1881899
uguagagucuggucucaaa

SEQ ID NO: 2079601 - RNA, 19 nt, Artificial Sequence
  Description of Artificial Sequence: Synthetic oligonucleotide
  Antisense strand to SEQ ID NO: 2079600
uuugagaccagacucuaca

SEQ ID NO: 2079602 - RNA, 19 nt, Artificial Sequence
  Description of Artificial Sequence: Synthetic oligonucleotide
  Sense strand starting at position 893 of SEQ ID NO: 1881899
gaaaccagcucgugaaguu

SEQ ID NO: 2079603 - RNA, 19 nt, Artificial Sequence
  Description of Artificial Sequence: Synthetic oligonucleotide
  Antisense strand to SEQ ID NO: 2079602
aacuucacgagcugguuuc

SEQ ID NO: 2079604 - RNA, 19 nt, Artificial Sequence
  Description of Artificial Sequence: Synthetic oligonucleotide
  Sense strand starting at position 894 of SEQ ID NO: 1881899
aaaccagcucgugaaguuu

SEQ ID NO: 2079605 - RNA, 19 nt, Artificial Sequence
  Description of Artificial Sequence: Synthetic oligonucleotide
  Antisense strand to SEQ ID NO: 2079604
aaacuucacgagcugguuu

SEQ ID NO: 2079606 - RNA, 19 nt, Artificial Sequence
  Description of Artificial Sequence: Synthetic oligonucleotide
  Sense strand starting at position 939 of SEQ ID NO: 1881899
uuugaugucucauuccaca

SEQ ID NO: 2079607 - RNA, 19 nt, Artificial Sequence
  Description of Artificial Sequence: Synthetic oligonucleotide
  Antisense strand to SEQ ID NO: 2079606
uguggaaugagacaucaaa

SEQ ID NO: 2079608 - RNA, 19 nt, Artificial Sequence
  Description of Artificial Sequence: Synthetic oligonucleotide
  Sense strand starting at position 944 of SEQ ID NO: 1881899
ugucucauuccacagauga

SEQ ID NO: 2079609 - RNA, 19 nt, Artificial Sequence
  Description of Artificial Sequence: Synthetic oligonucleotide
  Antisense strand to SEQ ID NO: 2079608
ucaucuguggaaugagaca

SEQ ID NO: 2079610 - RNA, 19 nt, Artificial Sequence
  Description of Artificial Sequence: Synthetic oligonucleotide
  Sense strand starting at position 1088 of SEQ ID NO: 1881899
gugguaaguacgcaacacu

SEQ ID NO: 2079611 - RNA, 19 nt, Artificial Sequence
  Description of Artificial Sequence: Synthetic oligonucleotide
  Antisense strand to SEQ ID NO: 2079610
aguguugcguacuuaccac

SEQ ID NO: 2079612 - RNA, 19 nt, Artificial Sequence
  Description of Artificial Sequence: Synthetic oligonucleotide
  Sense strand starting at position 1133 of SEQ ID NO: 1881899
cuguuuaaucuggauccau

SEQ ID NO: 2079613 - RNA, 19 nt, Artificial Sequence
  Description of Artificial Sequence: Synthetic oligonucleotide
  Antisense strand to SEQ ID NO: 2079612
auggauccagauuaaacag

SEQ ID NO: 2079614 - RNA, 19 nt, Artificial Sequence
  Description of Artificial Sequence: Synthetic oligonucleotide
  Sense strand starting at position 1197 of SEQ ID NO: 1881899
cuauucuagucagaagaaa

SEQ ID NO: 2079615 - RNA, 19 nt, Artificial Sequence
  Description of Artificial Sequence: Synthetic oligonucleotide
  Antisense strand to SEQ ID NO: 2079614
uuucuucugacuagaauag

SEQ ID NO: 2079616 - RNA, 19 nt, Artificial Sequence
  Description of Artificial Sequence: Synthetic oligonucleotide
  Sense strand starting at position 1236 of SEQ ID NO: 1881899
gauuaugggucacuccaca

SEQ ID NO: 2079617 - RNA, 19 nt, Artificial Sequence
  Description of Artificial Sequence: Synthetic oligonucleotide
  Antisense strand to SEQ ID NO: 2079616
uguggagugacccauaauc

SEQ ID NO: 2079618 - RNA, 19 nt, Artificial Sequence
  Description of Artificial Sequence: Synthetic oligonucleotide
  Sense strand starting at position 2036 of SEQ ID NO: 1881899
gcucuaaggcagugacuaa

SEQ ID NO: 2079619 - RNA, 19 nt, Artificial Sequence
  Description of Artificial Sequence: Synthetic oligonucleotide
  Antisense strand to SEQ ID NO: 2079618
uuagucacugccuuagagc

SEQ ID NO: 2079620 - RNA, 19 nt, Artificial Sequence
  Description of Artificial Sequence: Synthetic oligonucleotide
  Sense strand starting at position 2209 of SEQ ID NO: 1881899
uaaagcaggcuuuaaagua

SEQ ID NO: 2079621 - RNA, 19 nt, Artificial Sequence
  Description of Artificial Sequence: Synthetic oligonucleotide
  Antisense strand to SEQ ID NO: 2079620
uacuuuaaagccugcuuua

SEQ ID NO: 2079622 - RNA, 19 nt, Artificial Sequence
  Description of Artificial Sequence: Synthetic oligonucleotide
  Sense strand starting at position 3562 of SEQ ID NO: 1881899
gggcuuauuuaccaacgca

SEQ ID NO: 2079623 - RNA, 19 nt, Artificial Sequence
  Description of Artificial Sequence: Synthetic oligonucleotide
  Antisense strand to SEQ ID NO: 2079622
ugcguugguaaauaagccc

SEQ ID NO: 2079624 - RNA, 19 nt, Artificial Sequence
  Description of Artificial Sequence: Synthetic oligonucleotide
  Sense strand starting at position 3976 of SEQ ID NO: 1881899
auguuaaacugagggauga

SEQ ID NO: 2079625 - RNA, 19 nt, Artificial Sequence
  Description of Artificial Sequence: Synthetic oligonucleotide
  Antisense strand to SEQ ID NO: 2079624
ucaucccucaguuuaacau

SEQ ID NO: 2079626 - RNA, 19 nt, Artificial Sequence
  Description of Artificial Sequence: Synthetic oligonucleotide
  Sense strand starting at position 51 of SEQ ID NO: 1881900
cggguuugcagcuugucaa

SEQ ID NO: 2079627 - RNA, 19 nt, Artificial Sequence
  Description of Artificial Sequence: Synthetic oligonucleotide
  Antisense strand to SEQ ID NO: 2079626
uugacaagcugcaaacccg

SEQ ID NO: 2079628 - RNA, 19 nt, Artificial Sequence
  Description of Artificial Sequence: Synthetic oligonucleotide
  Sense strand starting at position 125 of SEQ ID NO: 1881900
acgucuugggcugaacaga

SEQ ID NO: 2079629 - RNA, 19 nt, Artificial Sequence
  Description of Artificial Sequence: Synthetic oligonucleotide
  Antisense strand to SEQ ID NO: 2079628
ucuguucagcccaagacgu

SEQ ID NO: 2079630 - RNA, 19 nt, Artificial Sequence
  Description of Artificial Sequence: Synthetic oligonucleotide
  Sense strand starting at position 817 of SEQ ID NO: 1881900
gcacauacacccuguauau

SEQ ID NO: 2079631 - RNA, 19 nt, Artificial Sequence
  Description of Artificial Sequence: Synthetic oligonucleotide
  Antisense strand to SEQ ID NO: 2079630
auauacaggguguaugugc

SEQ ID NO: 2079632 - RNA, 19 nt, Artificial Sequence
  Description of Artificial Sequence: Synthetic oligonucleotide
  Sense strand starting at position 841 of SEQ ID NO: 1881900
cugcauacuccuuauguac

SEQ ID NO: 2079633 - RNA, 19 nt, Artificial Sequence
  Description of Artificial Sequence: Synthetic oligonucleotide
  Antisense strand to SEQ ID NO: 2079632
guacauaaggaguaugcag

SEQ ID NO: 2079634 - RNA, 19 nt, Artificial Sequence
  Description of Artificial Sequence: Synthetic oligonucleotide
  Sense strand starting at position 1228 of SEQ ID NO: 1881900
gugacauaccagggauguu

SEQ ID NO: 2079635 - RNA, 19 nt, Artificial Sequence
  Description of Artificial Sequence: Synthetic oligonucleotide
  Antisense strand to SEQ ID NO: 2079634
aacaucccugguaugucac

SEQ ID NO: 2079636 - RNA, 19 nt, Artificial Sequence
  Description of Artificial Sequence: Synthetic oligonucleotide
  Sense strand starting at position 1383 of SEQ ID NO: 1881900
agaugucuugagcaggauu

SEQ ID NO: 2079637 - RNA, 19 nt, Artificial Sequence
  Description of Artificial Sequence: Synthetic oligonucleotide
  Antisense strand to SEQ ID NO: 2079636
aauccugcucaagacaucu

SEQ ID NO: 2079638 - RNA, 19 nt, Artificial Sequence
  Description of Artificial Sequence: Synthetic oligonucleotide
  Sense strand starting at position 1385 of SEQ ID NO: 1881900
augucuugagcaggauuaa

SEQ ID NO: 2079639 - RNA, 19 nt, Artificial Sequence
  Description of Artificial Sequence: Synthetic oligonucleotide
  Antisense strand to SEQ ID NO: 2079638
uuaauccugcucaagacau

SEQ ID NO: 2079640 - RNA, 19 nt, Artificial Sequence
  Description of Artificial Sequence: Synthetic oligonucleotide
  Sense strand starting at position 1386 of SEQ ID NO: 1881900
ugucuugagcaggauuaaa

SEQ ID NO: 2079641 - RNA, 19 nt, Artificial Sequence
  Description of Artificial Sequence: Synthetic oligonucleotide
  Antisense strand to SEQ ID NO: 2079640
uuuaauccugcucaagaca

SEQ ID NO: 2079642 - RNA, 19 nt, Artificial Sequence
  Description of Artificial Sequence: Synthetic oligonucleotide
  Sense strand starting at position 1397 of SEQ ID NO: 1881900
ggauuaaagucuucccaau

SEQ ID NO: 2079643 - RNA, 19 nt, Artificial Sequence
  Description of Artificial Sequence: Synthetic oligonucleotide
  Antisense strand to SEQ ID NO: 2079642
auugggaagacuuuaaucc

SEQ ID NO: 2079644 - RNA, 19 nt, Artificial Sequence
  Description of Artificial Sequence: Synthetic oligonucleotide
  Sense strand starting at position 1424 of SEQ ID NO: 1881900
ugaacucugucuuccuuga

SEQ ID NO: 2079645 - RNA, 19 nt, Artificial Sequence
  Description of Artificial Sequence: Synthetic oligonucleotide
  Antisense strand to SEQ ID NO: 2079644
ucaaggaagacagaguuca

SEQ ID NO: 2079646 - RNA, 19 nt, Artificial Sequence
  Description of Artificial Sequence: Synthetic oligonucleotide
  Sense strand starting at position 1429 of SEQ ID NO: 1881900
ucugucuuccuugaaagcu

SEQ ID NO: 2079647 - RNA, 19 nt, Artificial Sequence
  Description of Artificial Sequence: Synthetic oligonucleotide
  Antisense strand to SEQ ID NO: 2079646
agcuuucaaggaagacaga

SEQ ID NO: 2079648 - RNA, 19 nt, Artificial Sequence
  Description of Artificial Sequence: Synthetic oligonucleotide
  Sense strand starting at position 1437 of SEQ ID NO: 1881900
ccuugaaagcucuguagaa

SEQ ID NO: 2079649 - RNA, 19 nt, Artificial Sequence
  Description of Artificial Sequence: Synthetic oligonucleotide
  Antisense strand to SEQ ID NO: 2079648
uucuacagagcuuucaagg

SEQ ID NO: 2079650 - RNA, 19 nt, Artificial Sequence
  Description of Artificial Sequence: Synthetic oligonucleotide
  Sense strand starting at position 1438 of SEQ ID NO: 1881900
cuugaaagcucuguagaag

SEQ ID NO: 2079651 - RNA, 19 nt, Artificial Sequence
  Description of Artificial Sequence: Synthetic oligonucleotide
  Antisense strand to SEQ ID NO: 2079650
cuucuacagagcuuucaag

SEQ ID NO: 2079652 - RNA, 19 nt, Artificial Sequence
  Description of Artificial Sequence: Synthetic oligonucleotide
  Sense strand starting at position 1524 of SEQ ID NO: 1881900
cugugacaucucuggaggu

SEQ ID NO: 2079653 - RNA, 19 nt, Artificial Sequence
  Description of Artificial Sequence: Synthetic oligonucleotide
  Antisense strand to SEQ ID NO: 2079652
accuccagagaugucacag

SEQ ID NO: 2079654 - RNA, 19 nt, Artificial Sequence
  Description of Artificial Sequence: Synthetic oligonucleotide
  Sense strand starting at position 2495 of SEQ ID NO: 1881900
gguuacauccgcugagaag

SEQ ID NO: 2079655 - RNA, 19 nt, Artificial Sequence
  Description of Artificial Sequence: Synthetic oligonucleotide
  Antisense strand to SEQ ID NO: 2079654
cuucucagcggauguaacc

SEQ ID NO: 2079656 - RNA, 19 nt, Artificial Sequence
  Description of Artificial Sequence: Synthetic oligonucleotide
  Sense strand starting at position 2496 of SEQ ID NO: 1881900
guuacauccgcugagaaga

SEQ ID NO: 2079657 - RNA, 19 nt, Artificial Sequence
  Description of Artificial Sequence: Synthetic oligonucleotide
  Antisense strand to SEQ ID NO: 2079656
ucuucucagcggauguaac

SEQ ID NO: 2079658 - RNA, 19 nt, Artificial Sequence
  Description of Artificial Sequence: Synthetic oligonucleotide
  Sense strand starting at position 2694 of SEQ ID NO: 1881900
ucauaaacugcugagaagu

SEQ ID NO: 2079659 - RNA, 19 nt, Artificial Sequence
  Description of Artificial Sequence: Synthetic oligonucleotide
  Antisense strand to SEQ ID NO: 2079658
acuucucagcaguuuauga

SEQ ID NO: 2079660 - RNA, 19 nt, Artificial Sequence
  Description of Artificial Sequence: Synthetic oligonucleotide
  Sense strand starting at position 2732 of SEQ ID NO: 1881900
agaagagguucuguagagu

SEQ ID NO: 2079661 - RNA, 19 nt, Artificial Sequence
  Description of Artificial Sequence: Synthetic oligonucleotide
  Antisense strand to SEQ ID NO: 2079660
acucuacagaaccucuucu

SEQ ID NO: 2079662 - RNA, 19 nt, Artificial Sequence
  Description of Artificial Sequence: Synthetic oligonucleotide
  Sense strand starting at position 2762 of SEQ ID NO: 1881900
guuugaauguuuccuggaa

SEQ ID NO: 2079663 - RNA, 19 nt, Artificial Sequence
  Description of Artificial Sequence: Synthetic oligonucleotide
  Antisense strand to SEQ ID NO: 2079662
uuccaggaaacauucaaac

SEQ ID NO: 2079664 - RNA, 19 nt, Artificial Sequence
  Description of Artificial Sequence: Synthetic oligonucleotide
  Sense strand starting at position 2763 of SEQ ID NO: 1881900
uuugaauguuuccuggaau

SEQ ID NO: 2079665 - RNA, 19 nt, Artificial Sequence
  Description of Artificial Sequence: Synthetic oligonucleotide
  Antisense strand to SEQ ID NO: 2079664
auuccaggaaacauucaaa

SEQ ID NO: 2079666 - RNA, 19 nt, Artificial Sequence
  Description of Artificial Sequence: Synthetic oligonucleotide
  Sense strand starting at position 2846 of SEQ ID NO: 1881900
uaucucugguuguuagaga

SEQ ID NO: 2079667 - RNA, 19 nt, Artificial Sequence
  Description of Artificial Sequence: Synthetic oligonucleotide
  Antisense strand to SEQ ID NO: 2079666
ucucuaacaaccagagaua

SEQ ID NO: 2079668 - RNA, 19 nt, Artificial Sequence
  Description of Artificial Sequence: Synthetic oligonucleotide
  Sense strand starting at position 2917 of SEQ ID NO: 1881900
uggcuuauuugagcuaacu

SEQ ID NO: 2079669 - RNA, 19 nt, Artificial Sequence
  Description of Artificial Sequence: Synthetic oligonucleotide
  Antisense strand to SEQ ID NO: 2079668
aguuagcucaaauaagcca

SEQ ID NO: 2079670 - RNA, 19 nt, Artificial Sequence
  Description of Artificial Sequence: Synthetic oligonucleotide
  Sense strand starting at position 2972 of SEQ ID NO: 1881900
guuguuagccuguuaaugu

SEQ ID NO: 2079671 - RNA, 19 nt, Artificial Sequence
  Description of Artificial Sequence: Synthetic oligonucleotide
  Antisense strand to SEQ ID NO: 2079670
acauuaacaggcuaacaac

SEQ ID NO: 2079672 - RNA, 19 nt, Artificial Sequence
  Description of Artificial Sequence: Synthetic oligonucleotide
  Sense strand starting at position 3004 of SEQ ID NO: 1881900
gcagguguuacuggaccaa

SEQ ID NO: 2079673 - RNA, 19 nt, Artificial Sequence
  Description of Artificial Sequence: Synthetic oligonucleotide
  Antisense strand to SEQ ID NO: 2079672
uugguccaguaacaccugc

SEQ ID NO: 2079674 - RNA, 19 nt, Artificial Sequence
  Description of Artificial Sequence: Synthetic oligonucleotide
  Sense strand starting at position 3052 of SEQ ID NO: 1881900
aggccaauacacugagaca

SEQ ID NO: 2079675 - RNA, 19 nt, Artificial Sequence
  Description of Artificial Sequence: Synthetic oligonucleotide
  Antisense strand to SEQ ID NO: 2079674
ugucucaguguauuggccu

SEQ ID NO: 2079676 - RNA, 19 nt, Artificial Sequence
  Description of Artificial Sequence: Synthetic oligonucleotide
  Sense strand starting at position 3523 of SEQ ID NO: 1881900
agguaagggccauggaauu

SEQ ID NO: 2079677 - RNA, 19 nt, Artificial Sequence
  Description of Artificial Sequence: Synthetic oligonucleotide
  Antisense strand to SEQ ID NO: 2079676
aauuccauggcccuuaccu

SEQ ID NO: 2079678 - RNA, 19 nt, Artificial Sequence
  Description of Artificial Sequence: Synthetic oligonucleotide
  Sense strand starting at position 3537 of SEQ ID NO: 1881900
gaauuaucaggguguggaa

SEQ ID NO: 2079679 - RNA, 19 nt, Artificial Sequence
  Description of Artificial Sequence: Synthetic oligonucleotide
  Antisense strand to SEQ ID NO: 2079678
uuccacacccugauaauuc

SEQ ID NO: 2079680 - RNA, 19 nt, Artificial Sequence
  Description of Artificial Sequence: Synthetic oligonucleotide
  Sense strand starting at position 3652 of SEQ ID NO: 1881900
guuuauaauguccagguua

SEQ ID NO: 2079681 - RNA, 19 nt, Artificial Sequence
  Description of Artificial Sequence: Synthetic oligonucleotide
  Antisense strand to SEQ ID NO: 2079680
uaaccuggacauuauaaac

SEQ ID NO: 2079682 - RNA, 19 nt, Artificial Sequence
  Description of Artificial Sequence: Synthetic oligonucleotide
  Sense strand starting at position 3654 of SEQ ID NO: 1881900
uuauaauguccagguuauu

SEQ ID NO: 2079683 - RNA, 19 nt, Artificial Sequence
  Description of Artificial Sequence: Synthetic oligonucleotide
  Antisense strand to SEQ ID NO: 2079682
aauaaccuggacauuauaa

SEQ ID NO: 2079684 - RNA, 19 nt, Artificial Sequence
  Description of Artificial Sequence: Synthetic oligonucleotide
  Sense strand starting at position 3663 of SEQ ID NO: 1881900
ccagguuauuaucuguaga

SEQ ID NO: 2079685 - RNA, 19 nt, Artificial Sequence
  Description of Artificial Sequence: Synthetic oligonucleotide
  Antisense strand to SEQ ID NO: 2079684
ucuacagauaauaaccugg

SEQ ID NO: 2079686 - RNA, 19 nt, Artificial Sequence
  Description of Artificial Sequence: Synthetic oligonucleotide
  Sense strand starting at position 3665 of SEQ ID NO: 1881900
agguuauuaucuguagagu

SEQ ID NO: 2079687 - RNA, 19 nt, Artificial Sequence
  Description of Artificial Sequence: Synthetic oligonucleotide
  Antisense strand to SEQ ID NO: 2079686
acucuacagauaauaaccu

SEQ ID NO: 2079688 - RNA, 19 nt, Artificial Sequence
  Description of Artificial Sequence: Synthetic oligonucleotide
  Sense strand starting at position 3666 of SEQ ID NO: 1881900
gguuauuaucuguagagug

SEQ ID NO: 2079689 - RNA, 19 nt, Artificial Sequence
  Description of Artificial Sequence: Synthetic oligonucleotide
  Antisense strand to SEQ ID NO: 2079688
cacucuacagauaauaacc

SEQ ID NO: 2079690 - RNA, 19 nt, Artificial Sequence
  Description of Artificial Sequence: Synthetic oligonucleotide
  Sense strand starting at position 3668 of SEQ ID NO: 1881900
uuauuaucuguagaguggu

SEQ ID NO: 2079691 - RNA, 19 nt, Artificial Sequence
  Description of Artificial Sequence: Synthetic oligonucleotide
  Antisense strand to SEQ ID NO: 2079690
accacucuacagauaauaa

SEQ ID NO: 2079692 - RNA, 19 nt, Artificial Sequence
  Description of Artificial Sequence: Synthetic oligonucleotide
  Sense strand starting at position 3671 of SEQ ID NO: 1881900
uuaucuguagagugguuaa

SEQ ID NO: 2079693 - RNA, 19 nt, Artificial Sequence
  Description of Artificial Sequence: Synthetic oligonucleotide
  Antisense strand to SEQ ID NO: 2079692
uuaaccacucuacagauaa

SEQ ID NO: 2079694 - RNA, 19 nt, Artificial Sequence
  Description of Artificial Sequence: Synthetic oligonucleotide
  Sense strand starting at position 3800 of SEQ ID NO: 1881900
cccuucuucccugauuagu

SEQ ID NO: 2079695 - RNA, 19 nt, Artificial Sequence
  Description of Artificial Sequence: Synthetic oligonucleotide
  Antisense strand to SEQ ID NO: 2079694
acuaaucagggaagaaggg

SEQ ID NO: 2079696 - RNA, 19 nt, Artificial Sequence
  Description of Artificial Sequence: Synthetic oligonucleotide
  Sense strand starting at position 3811 of SEQ ID NO: 1881900
ugauuagugcuacaagguu

SEQ ID NO: 2079697 - RNA, 19 nt, Artificial Sequence
  Description of Artificial Sequence: Synthetic oligonucleotide
  Antisense strand to SEQ ID NO: 2079696
aaccuuguagcacuaauca

SEQ ID NO: 2079698 - RNA, 19 nt, Artificial Sequence
  Description of Artificial Sequence: Synthetic oligonucleotide
  Sense strand starting at position 3823 of SEQ ID NO: 1881900
caagguuuacagggauauc

SEQ ID NO: 2079699 - RNA, 19 nt, Artificial Sequence
  Description of Artificial Sequence: Synthetic oligonucleotide
  Antisense strand to SEQ ID NO: 2079698
gauaucccuguaaaccuug

SEQ ID NO: 2079700 - RNA, 19 nt, Artificial Sequence
  Description of Artificial Sequence: Synthetic oligonucleotide
  Sense strand starting at position 3850 of SEQ ID NO: 1881900
guuccugauguugauaauc

SEQ ID NO: 2079701 - RNA, 19 nt, Artificial Sequence
  Description of Artificial Sequence: Synthetic oligonucleotide
  Antisense strand to SEQ ID NO: 2079700
gauuaucaacaucaggaac

SEQ ID NO: 2079702 - RNA, 19 nt, Artificial Sequence
  Description of Artificial Sequence: Synthetic oligonucleotide
  Sense strand starting at position 3861 of SEQ ID NO: 1881900
ugauaaucuguguauucuu

SEQ ID NO: 2079703 - RNA, 19 nt, Artificial Sequence
  Description of Artificial Sequence: Synthetic oligonucleotide
  Antisense strand to SEQ ID NO: 2079702
aagaauacacagauuauca

SEQ ID NO: 2079704 - RNA, 19 nt, Artificial Sequence
  Description of Artificial Sequence: Synthetic oligonucleotide
  Sense strand starting at position 3905 of SEQ ID NO: 1881900
gugaauguuauugauaguu

SEQ ID NO: 2079705 - RNA, 19 nt, Artificial Sequence
  Description of Artificial Sequence: Synthetic oligonucleotide
  Antisense strand to SEQ ID NO: 2079704
aacuaucaauaacauucac

SEQ ID NO: 2079706 - RNA, 19 nt, Artificial Sequence
  Description of Artificial Sequence: Synthetic oligonucleotide
  Sense strand starting at position 34 of SEQ ID NO: 1881901
aucuuacuauagugauugu

SEQ ID NO: 2079707 - RNA, 19 nt, Artificial Sequence
  Description of Artificial Sequence: Synthetic oligonucleotide
  Antisense strand to SEQ ID NO: 2079706
acaaucacuauaguaagau

SEQ ID NO: 2079708 - RNA, 19 nt, Artificial Sequence
  Description of Artificial Sequence: Synthetic oligonucleotide
  Sense strand starting at position 152 of SEQ ID NO: 1881901
auccaagaguugccauuga

SEQ ID NO: 2079709 - RNA, 19 nt, Artificial Sequence
  Description of Artificial Sequence: Synthetic oligonucleotide
  Antisense strand to SEQ ID NO: 2079708
ucaauggcaacucuuggau

SEQ ID NO: 2079710 - RNA, 19 nt, Artificial Sequence
  Description of Artificial Sequence: Synthetic oligonucleotide
  Sense strand starting at position 1475 of SEQ ID NO: 1881901
guuuggaucgcggauugga

SEQ ID NO: 2079711 - RNA, 19 nt, Artificial Sequence
  Description of Artificial Sequence: Synthetic oligonucleotide
  Antisense strand to SEQ ID NO: 2079710
uccaauccgcgauccaaac

SEQ ID NO: 2079712 - RNA, 19 nt, Artificial Sequence
  Description of Artificial Sequence: Synthetic oligonucleotide
  Sense strand starting at position 1645 of SEQ ID NO: 1881901
ugaagaaguucuucggcuu

SEQ ID NO: 2079713 - RNA, 19 nt, Artificial Sequence
  Description of Artificial Sequence: Synthetic oligonucleotide
  Antisense strand to SEQ ID NO: 2079712
aagccgaagaacuucuuca

SEQ ID NO: 2079714 - RNA, 19 nt, Artificial Sequence
  Description of Artificial Sequence: Synthetic oligonucleotide
  Sense strand starting at position 1646 of SEQ ID NO: 1881901
gaagaaguucuucggcuuu

SEQ ID NO: 2079715 - RNA, 19 nt, Artificial Sequence
  Description of Artificial Sequence: Synthetic oligonucleotide
  Antisense strand to SEQ ID NO: 2079714
aaagccgaagaacuucuuc

SEQ ID NO: 2079716 - RNA, 19 nt, Artificial Sequence
  Description of Artificial Sequence: Synthetic oligonucleotide
  Sense strand starting at position 3502 of SEQ ID NO: 1881901
guacguugaugugcgaaga

SEQ ID NO: 2079717 - RNA, 19 nt, Artificial Sequence
  Description of Artificial Sequence: Synthetic oligonucleotide
  Antisense strand to SEQ ID NO: 2079716
ucuucgcacaucaacguac

SEQ ID NO: 2079718 - RNA, 19 nt, Artificial Sequence
  Description of Artificial Sequence: Synthetic oligonucleotide
  Sense strand starting at position 3503 of SEQ ID NO: 1881901
uacguugaugugcgaagau

SEQ ID NO: 2079719 - RNA, 19 nt, Artificial Sequence
  Description of Artificial Sequence: Synthetic oligonucleotide
  Antisense strand to SEQ ID NO: 2079718
aucuucgcacaucaacgua

SEQ ID NO: 2079720 - RNA, 19 nt, Artificial Sequence
  Description of Artificial Sequence: Synthetic oligonucleotide
  Sense strand starting at position 3505 of SEQ ID NO: 1881901
cguugaugugcgaagaugu

SEQ ID NO: 2079721 - RNA, 19 nt, Artificial Sequence
  Description of Artificial Sequence: Synthetic oligonucleotide
  Antisense strand to SEQ ID NO: 2079720
acaucuucgcacaucaacg

SEQ ID NO: 2079722 - RNA, 19 nt, Artificial Sequence
  Description of Artificial Sequence: Synthetic oligonucleotide
  Sense strand starting at position 3506 of SEQ ID NO: 1881901
guugaugugcgaagaugua

SEQ ID NO: 2079723 - RNA, 19 nt, Artificial Sequence
  Description of Artificial Sequence: Synthetic oligonucleotide
  Antisense strand to SEQ ID NO: 2079722
uacaucuucgcacaucaac

SEQ ID NO: 2079724 - RNA, 19 nt, Artificial Sequence
  Description of Artificial Sequence: Synthetic oligonucleotide
  Sense strand starting at position 86 of SEQ ID NO: 1881902
auaccuucugauugugaua

SEQ ID NO: 2079725 - RNA, 19 nt, Artificial Sequence
  Description of Artificial Sequence: Synthetic oligonucleotide
  Antisense strand to SEQ ID NO: 2079724
uaucacaaucagaagguau

SEQ ID NO: 2079726 - RNA, 19 nt, Artificial Sequence
  Description of Artificial Sequence: Synthetic oligonucleotide
  Sense strand starting at position 163 of SEQ ID NO: 1881902
cuuuguacaugguuacauu

SEQ ID NO: 2079727 - RNA, 19 nt, Artificial Sequence
  Description of Artificial Sequence: Synthetic oligonucleotide
  Antisense strand to SEQ ID NO: 2079726
aauguaaccauguacaaag

SEQ ID NO: 2079728 - RNA, 19 nt, Artificial Sequence
  Description of Artificial Sequence: Synthetic oligonucleotide
  Sense strand starting at position 649 of SEQ ID NO: 1881902
gaaagaguaguuugcucua

SEQ ID NO: 2079729 - RNA, 19 nt, Artificial Sequence
  Description of Artificial Sequence: Synthetic oligonucleotide
  Antisense strand to SEQ ID NO: 2079728
uagagcaaacuacucuuuc

SEQ ID NO: 2079730 - RNA, 19 nt, Artificial Sequence
  Description of Artificial Sequence: Synthetic oligonucleotide
  Sense strand starting at position 654 of SEQ ID NO: 1881902
aguaguuugcucuaccuac

SEQ ID NO: 2079731 - RNA, 19 nt, Artificial Sequence
  Description of Artificial Sequence: Synthetic oligonucleotide
  Antisense strand to SEQ ID NO: 2079730
guagguagagcaaacuacu

SEQ ID NO: 2079732 - RNA, 19 nt, Artificial Sequence
  Description of Artificial Sequence: Synthetic oligonucleotide
  Sense strand starting at position 734 of SEQ ID NO: 1881902
guacaccuucuugaaaguu

SEQ ID NO: 2079733 - RNA, 19 nt, Artificial Sequence
  Description of Artificial Sequence: Synthetic oligonucleotide
  Antisense strand to SEQ ID NO: 2079732
aacuuucaagaagguguac

SEQ ID NO: 2079734 - RNA, 19 nt, Artificial Sequence
  Description of Artificial Sequence: Synthetic oligonucleotide
  Sense strand starting at position 790 of SEQ ID NO: 1881902
ggauaauucuuccuagacg

SEQ ID NO: 2079735 - RNA, 19 nt, Artificial Sequence
  Description of Artificial Sequence: Synthetic oligonucleotide
  Antisense strand to SEQ ID NO: 2079734
cgucuaggaagaauuaucc

SEQ ID NO: 2079736 - RNA, 19 nt, Artificial Sequence
  Description of Artificial Sequence: Synthetic oligonucleotide
  Sense strand starting at position 1049 of SEQ ID NO: 1881902
aauuaacuggguuguguaa

SEQ ID NO: 2079737 - RNA, 19 nt, Artificial Sequence
  Description of Artificial Sequence: Synthetic oligonucleotide
  Antisense strand to SEQ ID NO: 2079736
uuacacaacccaguuaauu

SEQ ID NO: 2079738 - RNA, 19 nt, Artificial Sequence
  Description of Artificial Sequence: Synthetic oligonucleotide
  Sense strand starting at position 1056 of SEQ ID NO: 1881902
uggguuguguaauuuccua

SEQ ID NO: 2079739 - RNA, 19 nt, Artificial Sequence
  Description of Artificial Sequence: Synthetic oligonucleotide
  Antisense strand to SEQ ID NO: 2079738
uaggaaauuacacaaccca

SEQ ID NO: 2079740 - RNA, 19 nt, Artificial Sequence
  Description of Artificial Sequence: Synthetic oligonucleotide
  Sense strand starting at position 1064 of SEQ ID NO: 1881902
guaauuuccuaacucguag

SEQ ID NO: 2079741 - RNA, 19 nt, Artificial Sequence
  Description of Artificial Sequence: Synthetic oligonucleotide
  Antisense strand to SEQ ID NO: 2079740
cuacgaguuaggaaauuac

SEQ ID NO: 2079742 - RNA, 19 nt, Artificial Sequence
  Description of Artificial Sequence: Synthetic oligonucleotide
  Sense strand starting at position 1237 of SEQ ID NO: 1881902
cugugauuccagcaagcga

SEQ ID NO: 2079743 - RNA, 19 nt, Artificial Sequence
  Description of Artificial Sequence: Synthetic oligonucleotide
  Antisense strand to SEQ ID NO: 2079742
ucgcuugcuggaaucacag

SEQ ID NO: 2079744 - RNA, 19 nt, Artificial Sequence
  Description of Artificial Sequence: Synthetic oligonucleotide
  Sense strand starting at position 1731 of SEQ ID NO: 1881902
uucgacuuugcuuacacaa

SEQ ID NO: 2079745 - RNA, 19 nt, Artificial Sequence
  Description of Artificial Sequence: Synthetic oligonucleotide
  Antisense strand to SEQ ID NO: 2079744
uuguguaagcaaagucgaa

SEQ ID NO: 2079746 - RNA, 19 nt, Artificial Sequence
  Description of Artificial Sequence: Synthetic oligonucleotide
  Sense strand starting at position 1880 of SEQ ID NO: 1881902
agcuaaacuuagguaucaa

SEQ ID NO: 2079747 - RNA, 19 nt, Artificial Sequence
  Description of Artificial Sequence: Synthetic oligonucleotide
  Antisense strand to SEQ ID NO: 2079746
uugauaccuaaguuuagcu

SEQ ID NO: 2079748 - RNA, 19 nt, Artificial Sequence
  Description of Artificial Sequence: Synthetic oligonucleotide
  Sense strand starting at position 1931 of SEQ ID NO: 1881902
acaagaaaguccgcggaau

SEQ ID NO: 2079749 - RNA, 19 nt, Artificial Sequence
  Description of Artificial Sequence: Synthetic oligonucleotide
  Antisense strand to SEQ ID NO: 2079748
auuccgcggacuuucuugu

SEQ ID NO: 2079750 - RNA, 19 nt, Artificial Sequence
  Description of Artificial Sequence: Synthetic oligonucleotide
  Sense strand starting at position 2064 of SEQ ID NO: 1881902
uggaguagcuccuuauaga

SEQ ID NO: 2079751 - RNA, 19 nt, Artificial Sequence
  Description of Artificial Sequence: Synthetic oligonucleotide
  Antisense strand to SEQ ID NO: 2079750
ucuauaaggagcuacucca

SEQ ID NO: 2079752 - RNA, 19 nt, Artificial Sequence
  Description of Artificial Sequence: Synthetic oligonucleotide
  Sense strand starting at position 2065 of SEQ ID NO: 1881902
ggaguagcuccuuauagaa

SEQ ID NO: 2079753 - RNA, 19 nt, Artificial Sequence
  Description of Artificial Sequence: Synthetic oligonucleotide
  Antisense strand to SEQ ID NO: 2079752
uucuauaaggagcuacucc

SEQ ID NO: 2079754 - RNA, 19 nt, Artificial Sequence
  Description of Artificial Sequence: Synthetic oligonucleotide
  Sense strand starting at position 2084 of SEQ ID NO: 1881902
caggguuucucuccuggau

SEQ ID NO: 2079755 - RNA, 19 nt, Artificial Sequence
  Description of Artificial Sequence: Synthetic oligonucleotide
  Antisense strand to SEQ ID NO: 2079754
auccaggagagaaacccug

SEQ ID NO: 2079756 - RNA, 19 nt, Artificial Sequence
  Description of Artificial Sequence: Synthetic oligonucleotide
  Sense strand starting at position 2087 of SEQ ID NO: 1881902
gguuucucuccuggaugua

SEQ ID NO: 2079757 - RNA, 19 nt, Artificial Sequence
  Description of Artificial Sequence: Synthetic oligonucleotide
  Antisense strand to SEQ ID NO: 2079756
uacauccaggagagaaacc

SEQ ID NO: 2079758 - RNA, 19 nt, Artificial Sequence
  Description of Artificial Sequence: Synthetic oligonucleotide
  Sense strand starting at position 2101 of SEQ ID NO: 1881902
auguauaauuuaggagaug

SEQ ID NO: 2079759 - RNA, 19 nt, Artificial Sequence
  Description of Artificial Sequence: Synthetic oligonucleotide
  Antisense strand to SEQ ID NO: 2079758
caucuccuaaauuauacau

SEQ ID NO: 2079760 - RNA, 19 nt, Artificial Sequence
  Description of Artificial Sequence: Synthetic oligonucleotide
  Sense strand starting at position 2155 of SEQ ID NO: 1881902
ccaacagaugucuaacugu

SEQ ID NO: 2079761 - RNA, 19 nt, Artificial Sequence
  Description of Artificial Sequence: Synthetic oligonucleotide
  Antisense strand to SEQ ID NO: 2079760
acaguuagacaucuguugg

SEQ ID NO: 2079762 - RNA, 19 nt, Artificial Sequence
  Description of Artificial Sequence: Synthetic oligonucleotide
  Sense strand starting at position 3132 of SEQ ID NO: 1881902
cuguucucucugcaugaau

SEQ ID NO: 2079763 - RNA, 19 nt, Artificial Sequence
  Description of Artificial Sequence: Synthetic oligonucleotide
  Antisense strand to SEQ ID NO: 2079762
auucaugcagagagaacag

SEQ ID NO: 2079764 - RNA, 19 nt, Artificial Sequence
  Description of Artificial Sequence: Synthetic oligonucleotide
  Sense strand starting at position 3211 of SEQ ID NO: 1881902
gacugcucugacuggauaa

SEQ ID NO: 2079765 - RNA, 19 nt, Artificial Sequence
  Description of Artificial Sequence: Synthetic oligonucleotide
  Antisense strand to SEQ ID NO: 2079764
uuauccagucagagcaguc

SEQ ID NO: 2079766 - RNA, 19 nt, Artificial Sequence
  Description of Artificial Sequence: Synthetic oligonucleotide
  Sense strand starting at position 3309 of SEQ ID NO: 1881902
auccauuugugggaugauu

SEQ ID NO: 2079767 - RNA, 19 nt, Artificial Sequence
  Description of Artificial Sequence: Synthetic oligonucleotide
  Antisense strand to SEQ ID NO: 2079766
aaucaucccacaaauggau

SEQ ID NO: 2079768 - RNA, 19 nt, Artificial Sequence
  Description of Artificial Sequence: Synthetic oligonucleotide
  Sense strand starting at position 3317 of SEQ ID NO: 1881902
gugggaugauuugauuaaa

SEQ ID NO: 2079769 - RNA, 19 nt, Artificial Sequence
  Description of Artificial Sequence: Synthetic oligonucleotide
  Antisense strand to SEQ ID NO: 2079768
uuuaaucaaaucaucccac

SEQ ID NO: 2079770 - RNA, 19 nt, Artificial Sequence
  Description of Artificial Sequence: Synthetic oligonucleotide
  Sense strand starting at position 3349 of SEQ ID NO: 1881902
aucagaucaugcuuccuga

SEQ ID NO: 2079771 - RNA, 19 nt, Artificial Sequence
  Description of Artificial Sequence: Synthetic oligonucleotide
  Antisense strand to SEQ ID NO: 2079770
ucaggaagcaugaucugau

SEQ ID NO: 2079772 - RNA, 19 nt, Artificial Sequence
  Description of Artificial Sequence: Synthetic oligonucleotide
  Sense strand starting at position 3371 of SEQ ID NO: 1881902
uagggauaguguuugguuu

SEQ ID NO: 2079773 - RNA, 19 nt, Artificial Sequence
  Description of Artificial Sequence: Synthetic oligonucleotide
  Antisense strand to SEQ ID NO: 2079772
aaaccaaacacuaucccua

SEQ ID NO: 2079774 - RNA, 19 nt, Artificial Sequence
  Description of Artificial Sequence: Synthetic oligonucleotide
  Sense strand starting at position 3398 of SEQ ID NO: 1881902
guuuguauuccucagagau

SEQ ID NO: 2079775 - RNA, 19 nt, Artificial Sequence
  Description of Artificial Sequence: Synthetic oligonucleotide
  Antisense strand to SEQ ID NO: 2079774
aucucugaggaauacaaac

SEQ ID NO: 2079776 - RNA, 19 nt, Artificial Sequence
  Description of Artificial Sequence: Synthetic oligonucleotide
  Sense strand starting at position 3470 of SEQ ID NO: 1881902
guuaguaaacacugauauu

SEQ ID NO: 2079777 - RNA, 19 nt, Artificial Sequence
  Description of Artificial Sequence: Synthetic oligonucleotide
  Antisense strand to SEQ ID NO: 2079776
aauaucaguguuuacuaac

SEQ ID NO: 2079778 - RNA, 19 nt, Artificial Sequence
  Description of Artificial Sequence: Synthetic oligonucleotide
  Sense strand starting at position 3512 of SEQ ID NO: 1881902
gaguauagauuacugcaaa

SEQ ID NO: 2079779 - RNA, 19 nt, Artificial Sequence
  Description of Artificial Sequence: Synthetic oligonucleotide
  Antisense strand to SEQ ID NO: 2079778
uuugcaguaaucuauacuc

SEQ ID NO: 2079780 - RNA, 19 nt, Artificial Sequence
  Description of Artificial Sequence: Synthetic oligonucleotide
  Sense strand starting at position 3532 of SEQ ID NO: 1881902
ccuaaauaggguugaaauu

SEQ ID NO: 2079781 - RNA, 19 nt, Artificial Sequence
  Description of Artificial Sequence: Synthetic oligonucleotide
  Antisense strand to SEQ ID NO: 2079780
aauuucaacccuauuuagg

SEQ ID NO: 2079782 - RNA, 19 nt, Artificial Sequence
  Description of Artificial Sequence: Synthetic oligonucleotide
  Sense strand starting at position 3596 of SEQ ID NO: 1881902
uuaucagaucucuguggac

SEQ ID NO: 2079783 - RNA, 19 nt, Artificial Sequence
  Description of Artificial Sequence: Synthetic oligonucleotide
  Antisense strand to SEQ ID NO: 2079782
guccacagagaucugauaa

SEQ ID NO: 2079784 - RNA, 19 nt, Artificial Sequence
  Description of Artificial Sequence: Synthetic oligonucleotide
  Sense strand starting at position 3598 of SEQ ID NO: 1881902
aucagaucucuguggacca

SEQ ID NO: 2079785 - RNA, 19 nt, Artificial Sequence
  Description of Artificial Sequence: Synthetic oligonucleotide
  Antisense strand to SEQ ID NO: 2079784
ugguccacagagaucugau

SEQ ID NO: 2079786 - RNA, 19 nt, Artificial Sequence
  Description of Artificial Sequence: Synthetic oligonucleotide
  Sense strand starting at position 3659 of SEQ ID NO: 1881902
uaagucugagacugaacua

SEQ ID NO: 2079787 - RNA, 19 nt, Artificial Sequence
  Description of Artificial Sequence: Synthetic oligonucleotide
  Antisense strand to SEQ ID NO: 2079786
uaguucagucucagacuua

SEQ ID NO: 2079788 - RNA, 19 nt, Artificial Sequence
  Description of Artificial Sequence: Synthetic oligonucleotide
  Sense strand starting at position 3672 of SEQ ID NO: 1881902
gaacuauggugauauuuaa

SEQ ID NO: 2079789 - RNA, 19 nt, Artificial Sequence
  Description of Artificial Sequence: Synthetic oligonucleotide
  Antisense strand to SEQ ID NO: 2079788
uuaaauaucaccauaguuc

SEQ ID NO: 2079790 - RNA, 19 nt, Artificial Sequence
  Description of Artificial Sequence: Synthetic oligonucleotide
  Sense strand starting at position 3755 of SEQ ID NO: 1881902
ggaggauauuagucggcuu

SEQ ID NO: 2079791 - RNA, 19 nt, Artificial Sequence
  Description of Artificial Sequence: Synthetic oligonucleotide
  Antisense strand to SEQ ID NO: 2079790
aagccgacuaauauccucc

SEQ ID NO: 2079792 - RNA, 19 nt, Artificial Sequence
  Description of Artificial Sequence: Synthetic oligonucleotide
  Sense strand starting at position 3757 of SEQ ID NO: 1881902
aggauauuagucggcuuca

SEQ ID NO: 2079793 - RNA, 19 nt, Artificial Sequence
  Description of Artificial Sequence: Synthetic oligonucleotide
  Antisense strand to SEQ ID NO: 2079792
ugaagccgacuaauauccu

SEQ ID NO: 2079794 - RNA, 19 nt, Artificial Sequence
  Description of Artificial Sequence: Synthetic oligonucleotide
  Sense strand starting at position 3839 of SEQ ID NO: 1881902
ucagaacaugcuugucaca

SEQ ID NO: 2079795 - RNA, 19 nt, Artificial Sequence
  Description of Artificial Sequence: Synthetic oligonucleotide
  Antisense strand to SEQ ID NO: 2079794
ugugacaagcauguucuga

SEQ ID NO: 2079796 - RNA, 19 nt, Artificial Sequence
  Description of Artificial Sequence: Synthetic oligonucleotide
  Sense strand starting at position 3841 of SEQ ID NO: 1881902
agaacaugcuugucacauu

SEQ ID NO: 2079797 - RNA, 19 nt, Artificial Sequence
  Description of Artificial Sequence: Synthetic oligonucleotide
  Antisense strand to SEQ ID NO: 2079796
aaugugacaagcauguucu

SEQ ID NO: 2079798 - RNA, 19 nt, Artificial Sequence
  Description of Artificial Sequence: Synthetic oligonucleotide
  Sense strand starting at position 3852 of SEQ ID NO: 1881902
gucacauuauacuccagua

SEQ ID NO: 2079799 - RNA, 19 nt, Artificial Sequence
  Description of Artificial Sequence: Synthetic oligonucleotide
  Antisense strand to SEQ ID NO: 2079798
uacuggaguauaaugugac

SEQ ID NO: 2079800 - RNA, 19 nt, Artificial Sequence
  Description of Artificial Sequence: Synthetic oligonucleotide
  Sense strand starting at position 3960 of SEQ ID NO: 1881902
ugcugucauggcgcuuaua

SEQ ID NO: 2079801 - RNA, 19 nt, Artificial Sequence
  Description of Artificial Sequence: Synthetic oligonucleotide
  Antisense strand to SEQ ID NO: 2079800
uauaagcgccaugacagca

SEQ ID NO: 2079802 - RNA, 19 nt, Artificial Sequence
  Description of Artificial Sequence: Synthetic oligonucleotide
  Sense strand starting at position 3962 of SEQ ID NO: 1881902
cugucauggcgcuuauagu

SEQ ID NO: 2079803 - RNA, 19 nt, Artificial Sequence
  Description of Artificial Sequence: Synthetic oligonucleotide
  Antisense strand to SEQ ID NO: 2079802
acuauaagcgccaugacag

SEQ ID NO: 2079804 - RNA, 19 nt, Artificial Sequence
  Description of Artificial Sequence: Synthetic oligonucleotide
  Sense strand starting at position 137 of SEQ ID NO: 1881903
auaggaguuuaaguagauu

SEQ ID NO: 2079805 - RNA, 19 nt, Artificial Sequence
  Description of Artificial Sequence: Synthetic oligonucleotide
  Antisense strand to SEQ ID NO: 2079804
aaucuacuuaaacuccuau

SEQ ID NO: 2079806 - RNA, 19 nt, Artificial Sequence
  Description of Artificial Sequence: Synthetic oligonucleotide
  Sense strand starting at position 150 of SEQ ID NO: 1881903
uagauugcugcuuagauga

SEQ ID NO: 2079807 - RNA, 19 nt, Artificial Sequence
  Description of Artificial Sequence: Synthetic oligonucleotide
  Antisense strand to SEQ ID NO: 2079806
ucaucuaagcagcaaucua

SEQ ID NO: 2079808 - RNA, 19 nt, Artificial Sequence
  Description of Artificial Sequence: Synthetic oligonucleotide
  Sense strand starting at position 191 of SEQ ID NO: 1881903
ccaagaaaguuugaagaga

SEQ ID NO: 2079809 - RNA, 19 nt, Artificial Sequence
  Description of Artificial Sequence: Synthetic oligonucleotide
  Antisense strand to SEQ ID NO: 2079808
ucucuucaaacuuucuugg

SEQ ID NO: 2079810 - RNA, 19 nt, Artificial Sequence
  Description of Artificial Sequence: Synthetic oligonucleotide
  Sense strand starting at position 1233 of SEQ ID NO: 1881903
cacuuacaaguuggaguua

SEQ ID NO: 2079811 - RNA, 19 nt, Artificial Sequence
  Description of Artificial Sequence: Synthetic oligonucleotide
  Antisense strand to SEQ ID NO: 2079810
uaacuccaacuuguaagug

SEQ ID NO: 2079812 - RNA, 19 nt, Artificial Sequence
  Description of Artificial Sequence: Synthetic oligonucleotide
  Sense strand starting at position 1242 of SEQ ID NO: 1881903
guuggaguuaaaugaucag

SEQ ID NO: 2079813 - RNA, 19 nt, Artificial Sequence
  Description of Artificial Sequence: Synthetic oligonucleotide
  Antisense strand to SEQ ID NO: 2079812
cugaucauuuaacuccaac

SEQ ID NO: 2079814 - RNA, 19 nt, Artificial Sequence
  Description of Artificial Sequence: Synthetic oligonucleotide
  Sense strand starting at position 1297 of SEQ ID NO: 1881903
gagucuauuagaggauagu

SEQ ID NO: 2079815 - RNA, 19 nt, Artificial Sequence
  Description of Artificial Sequence: Synthetic oligonucleotide
  Antisense strand to SEQ ID NO: 2079814
acuauccucuaauagacuc

SEQ ID NO: 2079816 - RNA, 19 nt, Artificial Sequence
  Description of Artificial Sequence: Synthetic oligonucleotide
  Sense strand starting at position 1379 of SEQ ID NO: 1881903
aaugaaauaguguguauag

SEQ ID NO: 2079817 - RNA, 19 nt, Artificial Sequence
  Description of Artificial Sequence: Synthetic oligonucleotide
  Antisense strand to SEQ ID NO: 2079816
cuauacacacuauuucauu

SEQ ID NO: 2079818 - RNA, 19 nt, Artificial Sequence
  Description of Artificial Sequence: Synthetic oligonucleotide
  Sense strand starting at position 1381 of SEQ ID NO: 1881903
ugaaauaguguguauagca

SEQ ID NO: 2079819 - RNA, 19 nt, Artificial Sequence
  Description of Artificial Sequence: Synthetic oligonucleotide
  Antisense strand to SEQ ID NO: 2079818
ugcuauacacacuauuuca

SEQ ID NO: 2079820 - RNA, 19 nt, Artificial Sequence
  Description of Artificial Sequence: Synthetic oligonucleotide
  Sense strand starting at position 1618 of SEQ ID NO: 1881903
uaugucuguccggaauuau

SEQ ID NO: 2079821 - RNA, 19 nt, Artificial Sequence
  Description of Artificial Sequence: Synthetic oligonucleotide
  Antisense strand to SEQ ID NO: 2079820
auaauuccggacagacaua

SEQ ID NO: 2079822 - RNA, 19 nt, Artificial Sequence
  Description of Artificial Sequence: Synthetic oligonucleotide
  Sense strand starting at position 1627 of SEQ ID NO: 1881903
ccggaauuauuuccaugcu

SEQ ID NO: 2079823 - RNA, 19 nt, Artificial Sequence
  Description of Artificial Sequence: Synthetic oligonucleotide
  Antisense strand to SEQ ID NO: 2079822
agcauggaaauaauuccgg

SEQ ID NO: 2079824 - RNA, 19 nt, Artificial Sequence
  Description of Artificial Sequence: Synthetic oligonucleotide
  Sense strand starting at position 1703 of SEQ ID NO: 1881903
ucaaguccauucuuggaua

SEQ ID NO: 2079825 - RNA, 19 nt, Artificial Sequence
  Description of Artificial Sequence: Synthetic oligonucleotide
  Antisense strand to SEQ ID NO: 2079824
uauccaagaauggacuuga

SEQ ID NO: 2079826 - RNA, 19 nt, Artificial Sequence
  Description of Artificial Sequence: Synthetic oligonucleotide
  Sense strand starting at position 1717 of SEQ ID NO: 1881903
ggauauuaaguaggucaga

SEQ ID NO: 2079827 - RNA, 19 nt, Artificial Sequence
  Description of Artificial Sequence: Synthetic oligonucleotide
  Antisense strand to SEQ ID NO: 2079826
ucugaccuacuuaauaucc

SEQ ID NO: 2079828 - RNA, 19 nt, Artificial Sequence
  Description of Artificial Sequence: Synthetic oligonucleotide
  Sense strand starting at position 1718 of SEQ ID NO: 1881903
gauauuaaguaggucagaa

SEQ ID NO: 2079829 - RNA, 19 nt, Artificial Sequence
  Description of Artificial Sequence: Synthetic oligonucleotide
  Antisense strand to SEQ ID NO: 2079828
uucugaccuacuuaauauc

SEQ ID NO: 2079830 - RNA, 19 nt, Artificial Sequence
  Description of Artificial Sequence: Synthetic oligonucleotide
  Sense strand starting at position 1752 of SEQ ID NO: 1881903
agcacauucugaccagauu

SEQ ID NO: 2079831 - RNA, 19 nt, Artificial Sequence
  Description of Artificial Sequence: Synthetic oligonucleotide
  Antisense strand to SEQ ID NO: 2079830
aaucuggucagaaugugcu

SEQ ID NO: 2079832 - RNA, 19 nt, Artificial Sequence
  Description of Artificial Sequence: Synthetic oligonucleotide
  Sense strand starting at position 1834 of SEQ ID NO: 1881903
cccaaaguagauugugcaa

SEQ ID NO: 2079833 - RNA, 19 nt, Artificial Sequence
  Description of Artificial Sequence: Synthetic oligonucleotide
  Antisense strand to SEQ ID NO: 2079832
uugcacaaucuacuuuggg

SEQ ID NO: 2079834 - RNA, 19 nt, Artificial Sequence
  Description of Artificial Sequence: Synthetic oligonucleotide
  Sense strand starting at position 1837 of SEQ ID NO: 1881903
aaaguagauugugcaaaua

SEQ ID NO: 2079835 - RNA, 19 nt, Artificial Sequence
  Description of Artificial Sequence: Synthetic oligonucleotide
  Antisense strand to SEQ ID NO: 2079834
uauuugcacaaucuacuuu

SEQ ID NO: 2079836 - RNA, 19 nt, Artificial Sequence
  Description of Artificial Sequence: Synthetic oligonucleotide
  Sense strand starting at position 2111 of SEQ ID NO: 1881903
guguaaaugccagaaagug

SEQ ID NO: 2079837 - RNA, 19 nt, Artificial Sequence
  Description of Artificial Sequence: Synthetic oligonucleotide
  Antisense strand to SEQ ID NO: 2079836
cacuuucuggcauuuacac

SEQ ID NO: 2079838 - RNA, 19 nt, Artificial Sequence
  Description of Artificial Sequence: Synthetic oligonucleotide
  Sense strand starting at position 2204 of SEQ ID NO: 1881903
uauggacuuguguggauca

SEQ ID NO: 2079839 - RNA, 19 nt, Artificial Sequence
  Description of Artificial Sequence: Synthetic oligonucleotide
  Antisense strand to SEQ ID NO: 2079838
ugauccacacaaguccaua

SEQ ID NO: 2079840 - RNA, 19 nt, Artificial Sequence
  Description of Artificial Sequence: Synthetic oligonucleotide
  Sense strand starting at position 2206 of SEQ ID NO: 1881903
uggacuuguguggaucauu

SEQ ID NO: 2079841 - RNA, 19 nt, Artificial Sequence
  Description of Artificial Sequence: Synthetic oligonucleotide
  Antisense strand to SEQ ID NO: 2079840
aaugauccacacaagucca

SEQ ID NO: 2079842 - RNA, 19 nt, Artificial Sequence
  Description of Artificial Sequence: Synthetic oligonucleotide
  Sense strand starting at position 2214 of SEQ ID NO: 1881903
uguggaucauucuugucau

SEQ ID NO: 2079843 - RNA, 19 nt, Artificial Sequence
  Description of Artificial Sequence: Synthetic oligonucleotide
  Antisense strand to SEQ ID NO: 2079842
augacaagaaugauccaca

SEQ ID NO: 2079844 - RNA, 19 nt, Artificial Sequence
  Description of Artificial Sequence: Synthetic oligonucleotide
  Sense strand starting at position 2324 of SEQ ID NO: 1881903
gagcaucacguugggagaa

SEQ ID NO: 2079845 - RNA, 19 nt, Artificial Sequence
  Description of Artificial Sequence: Synthetic oligonucleotide
  Antisense strand to SEQ ID NO: 2079844
uucucccaacgugaugcuc

SEQ ID NO: 2079846 - RNA, 19 nt, Artificial Sequence
  Description of Artificial Sequence: Synthetic oligonucleotide
  Sense strand starting at position 2355 of SEQ ID NO: 1881903
aagagugguccauacagug

SEQ ID NO: 2079847 - RNA, 19 nt, Artificial Sequence
  Description of Artificial Sequence: Synthetic oligonucleotide
  Antisense strand to SEQ ID NO: 2079846
cacuguauggaccacucuu

SEQ ID NO: 2079848 - RNA, 19 nt, Artificial Sequence
  Description of Artificial Sequence: Synthetic oligonucleotide
  Sense strand starting at position 2413 of SEQ ID NO: 1881903
uguaacugucaggaaguuu

SEQ ID NO: 2079849 - RNA, 19 nt, Artificial Sequence
  Description of Artificial Sequence: Synthetic oligonucleotide
  Antisense strand to SEQ ID NO: 2079848
aaacuuccugacaguuaca

SEQ ID NO: 2079850 - RNA, 19 nt, Artificial Sequence
  Description of Artificial Sequence: Synthetic oligonucleotide
  Sense strand starting at position 2466 of SEQ ID NO: 1881903
uccauccuaugauccgaaa

SEQ ID NO: 2079851 - RNA, 19 nt, Artificial Sequence
  Description of Artificial Sequence: Synthetic oligonucleotide
  Antisense strand to SEQ ID NO: 2079850
uuucggaucauaggaugga

SEQ ID NO: 2079852 - RNA, 19 nt, Artificial Sequence
  Description of Artificial Sequence: Synthetic oligonucleotide
  Sense strand starting at position 2574 of SEQ ID NO: 1881903
acuuaaauguagcuacaga

SEQ ID NO: 2079853 - RNA, 19 nt, Artificial Sequence
  Description of Artificial Sequence: Synthetic oligonucleotide
  Antisense strand to SEQ ID NO: 2079852
ucuguagcuacauuuaagu

SEQ ID NO: 2079854 - RNA, 19 nt, Artificial Sequence
  Description of Artificial Sequence: Synthetic oligonucleotide
  Sense strand starting at position 3042 of SEQ ID NO: 1881903
agaugacaugggugucaau

SEQ ID NO: 2079855 - RNA, 19 nt, Artificial Sequence
  Description of Artificial Sequence: Synthetic oligonucleotide
  Antisense strand to SEQ ID NO: 2079854
auugacacccaugucaucu

SEQ ID NO: 2079856 - RNA, 19 nt, Artificial Sequence
  Description of Artificial Sequence: Synthetic oligonucleotide
  Sense strand starting at position 3077 of SEQ ID NO: 1881903
aggguaagcuaaucauugu

SEQ ID NO: 2079857 - RNA, 19 nt, Artificial Sequence
  Description of Artificial Sequence: Synthetic oligonucleotide
  Antisense strand to SEQ ID NO: 2079856
acaaugauuagcuuacccu

SEQ ID NO: 2079858 - RNA, 19 nt, Artificial Sequence
  Description of Artificial Sequence: Synthetic oligonucleotide
  Sense strand starting at position 3172 of SEQ ID NO: 1881903
uggugaaauuuccacaagu

SEQ ID NO: 2079859 - RNA, 19 nt, Artificial Sequence
  Description of Artificial Sequence: Synthetic oligonucleotide
  Antisense strand to SEQ ID NO: 2079858
acuuguggaaauuucacca

SEQ ID NO: 2079860 - RNA, 19 nt, Artificial Sequence
  Description of Artificial Sequence: Synthetic oligonucleotide
  Sense strand starting at position 3295 of SEQ ID NO: 1881903
gugcuagaagugggugaua

SEQ ID NO: 2079861 - RNA, 19 nt, Artificial Sequence
  Description of Artificial Sequence: Synthetic oligonucleotide
  Antisense strand to SEQ ID NO: 2079860
uaucacccacuucuagcac

SEQ ID NO: 2079862 - RNA, 19 nt, Artificial Sequence
  Description of Artificial Sequence: Synthetic oligonucleotide
  Sense strand starting at position 3297 of SEQ ID NO: 1881903
gcuagaagugggugauaaa

SEQ ID NO: 2079863 - RNA, 19 nt, Artificial Sequence
  Description of Artificial Sequence: Synthetic oligonucleotide
  Antisense strand to SEQ ID NO: 2079862
uuuaucacccacuucuagc

SEQ ID NO: 2079864 - RNA, 19 nt, Artificial Sequence
  Description of Artificial Sequence: Synthetic oligonucleotide
  Sense strand starting at position 3423 of SEQ ID NO: 1881903
auacuugaauuacaggaaa

SEQ ID NO: 2079865 - RNA, 19 nt, Artificial Sequence
  Description of Artificial Sequence: Synthetic oligonucleotide
  Antisense strand to SEQ ID NO: 2079864
uuuccuguaauucaaguau

SEQ ID NO: 2079866 - RNA, 19 nt, Artificial Sequence
  Description of Artificial Sequence: Synthetic oligonucleotide
  Sense strand starting at position 3516 of SEQ ID NO: 1881903
gcuaccuuuagguaggauu

SEQ ID NO: 2079867 - RNA, 19 nt, Artificial Sequence
  Description of Artificial Sequence: Synthetic oligonucleotide
  Antisense strand to SEQ ID NO: 2079866
aauccuaccuaaagguagc

SEQ ID NO: 2079868 - RNA, 19 nt, Artificial Sequence
  Description of Artificial Sequence: Synthetic oligonucleotide
  Sense strand starting at position 3518 of SEQ ID NO: 1881903
uaccuuuagguaggauuau

SEQ ID NO: 2079869 - RNA, 19 nt, Artificial Sequence
  Description of Artificial Sequence: Synthetic oligonucleotide
  Antisense strand to SEQ ID NO: 2079868
auaauccuaccuaaaggua

SEQ ID NO: 2079870 - RNA, 19 nt, Artificial Sequence
  Description of Artificial Sequence: Synthetic oligonucleotide
  Sense strand starting at position 3527 of SEQ ID NO: 1881903
guaggauuauguccucaaa

SEQ ID NO: 2079871 - RNA, 19 nt, Artificial Sequence
  Description of Artificial Sequence: Synthetic oligonucleotide
  Antisense strand to SEQ ID NO: 2079870
uuugaggacauaauccuac

SEQ ID NO: 2079872 - RNA, 19 nt, Artificial Sequence
  Description of Artificial Sequence: Synthetic oligonucleotide
  Sense strand starting at position 3690 of SEQ ID NO: 1881903
auacacaucguuuagcauu

SEQ ID NO: 2079873 - RNA, 19 nt, Artificial Sequence
  Description of Artificial Sequence: Synthetic oligonucleotide
  Antisense strand to SEQ ID NO: 2079872
aaugcuaaacgauguguau

SEQ ID NO: 2079874 - RNA, 19 nt, Artificial Sequence
  Description of Artificial Sequence: Synthetic oligonucleotide
  Sense strand starting at position 3825 of SEQ ID NO: 1881903
uuuggaaugugagaauuuc

SEQ ID NO: 2079875 - RNA, 19 nt, Artificial Sequence
  Description of Artificial Sequence: Synthetic oligonucleotide
  Antisense strand to SEQ ID NO: 2079874
gaaauucucacauuccaaa

SEQ ID NO: 2079876 - RNA, 19 nt, Artificial Sequence
  Description of Artificial Sequence: Synthetic oligonucleotide
  Sense strand starting at position 3833 of SEQ ID NO: 1881903
gugagaauuucuuugcugc

SEQ ID NO: 2079877 - RNA, 19 nt, Artificial Sequence
  Description of Artificial Sequence: Synthetic oligonucleotide
  Antisense strand to SEQ ID NO: 2079876
gcagcaaagaaauucucac

SEQ ID NO: 2079878 - RNA, 19 nt, Artificial Sequence
  Description of Artificial Sequence: Synthetic oligonucleotide
  Sense strand starting at position 3932 of SEQ ID NO: 1881903
aucucaauggugggacuuu

SEQ ID NO: 2079879 - RNA, 19 nt, Artificial Sequence
  Description of Artificial Sequence: Synthetic oligonucleotide
  Antisense strand to SEQ ID NO: 2079878
aaagucccaccauugagau

SEQ ID NO: 2079880 - RNA, 19 nt, Artificial Sequence
  Description of Artificial Sequence: Synthetic oligonucleotide
  Sense strand starting at position 3977 of SEQ ID NO: 1881903
caucuaauguagguguuga

SEQ ID NO: 2079881 - RNA, 19 nt, Artificial Sequence
  Description of Artificial Sequence: Synthetic oligonucleotide
  Antisense strand to SEQ ID NO: 2079880
ucaacaccuacauuagaug

SEQ ID NO: 2079882 - RNA, 19 nt, Artificial Sequence
  Description of Artificial Sequence: Synthetic oligonucleotide
  Sense strand starting at position 3978 of SEQ ID NO: 1881903
aucuaauguagguguugaa

SEQ ID NO: 2079883 - RNA, 19 nt, Artificial Sequence
  Description of Artificial Sequence: Synthetic oligonucleotide
  Antisense strand to SEQ ID NO: 2079882
uucaacaccuacauuagau

SEQ ID NO: 2079884 - RNA, 19 nt, Artificial Sequence
  Description of Artificial Sequence: Synthetic oligonucleotide
  Sense strand starting at position 88 of SEQ ID NO: 1881904
gagaaagacuaugaaaugu

SEQ ID NO: 2079885 - RNA, 19 nt, Artificial Sequence
  Description of Artificial Sequence: Synthetic oligonucleotide
  Antisense strand to SEQ ID NO: 2079884
acauuucauagucuuucuc

SEQ ID NO: 2079886 - RNA, 19 nt, Artificial Sequence
  Description of Artificial Sequence: Synthetic oligonucleotide
  Sense strand starting at position 299 of SEQ ID NO: 1881904
gcuuaaaugacaugcgaga

SEQ ID NO: 2079887 - RNA, 19 nt, Artificial Sequence
  Description of Artificial Sequence: Synthetic oligonucleotide
  Antisense strand to SEQ ID NO: 2079886
ucucgcaugucauuuaagc

SEQ ID NO: 2079888 - RNA, 19 nt, Artificial Sequence
  Description of Artificial Sequence: Synthetic oligonucleotide
  Sense strand starting at position 333 of SEQ ID NO: 1881904
cugugaugcugagaagggu

SEQ ID NO: 2079889 - RNA, 19 nt, Artificial Sequence
  Description of Artificial Sequence: Synthetic oligonucleotide
  Antisense strand to SEQ ID NO: 2079888
acccuucucagcaucacag

SEQ ID NO: 2079890 - RNA, 19 nt, Artificial Sequence
  Description of Artificial Sequence: Synthetic oligonucleotide
  Sense strand starting at position 346 of SEQ ID NO: 1881904
aaggguugguagcaaagua

SEQ ID NO: 2079891 - RNA, 19 nt, Artificial Sequence
  Description of Artificial Sequence: Synthetic oligonucleotide
  Antisense strand to SEQ ID NO: 2079890
uacuuugcuaccaacccuu

SEQ ID NO: 2079892 - RNA, 19 nt, Artificial Sequence
  Description of Artificial Sequence: Synthetic oligonucleotide
  Sense strand starting at position 528 of SEQ ID NO: 1881904
ggcgaagaguucucuuggu

SEQ ID NO: 2079893 - RNA, 19 nt, Artificial Sequence
  Description of Artificial Sequence: Synthetic oligonucleotide
  Antisense strand to SEQ ID NO: 2079892
accaagagaacucuucgcc

SEQ ID NO: 2079894 - RNA, 19 nt, Artificial Sequence
  Description of Artificial Sequence: Synthetic oligonucleotide
  Sense strand starting at position 532 of SEQ ID NO: 1881904
aagaguucucuuggucuua

SEQ ID NO: 2079895 - RNA, 19 nt, Artificial Sequence
  Description of Artificial Sequence: Synthetic oligonucleotide
  Antisense strand to SEQ ID NO: 2079894
uaagaccaagagaacucuu

SEQ ID NO: 2079896 - RNA, 19 nt, Artificial Sequence
  Description of Artificial Sequence: Synthetic oligonucleotide
  Sense strand starting at position 533 of SEQ ID NO: 1881904
agaguucucuuggucuuag

SEQ ID NO: 2079897 - RNA, 19 nt, Artificial Sequence
  Description of Artificial Sequence: Synthetic oligonucleotide
  Antisense strand to SEQ ID NO: 2079896
cuaagaccaagagaacucu

SEQ ID NO: 2079898 - RNA, 19 nt, Artificial Sequence
  Description of Artificial Sequence: Synthetic oligonucleotide
  Sense strand starting at position 537 of SEQ ID NO: 1881904
uucucuuggucuuagagaa

SEQ ID NO: 2079899 - RNA, 19 nt, Artificial Sequence
  Description of Artificial Sequence: Synthetic oligonucleotide
  Antisense strand to SEQ ID NO: 2079898
uucucuaagaccaagagaa

SEQ ID NO: 2079900 - RNA, 19 nt, Artificial Sequence
  Description of Artificial Sequence: Synthetic oligonucleotide
  Sense strand starting at position 541 of SEQ ID NO: 1881904
cuuggucuuagagaaaggu

SEQ ID NO: 2079901 - RNA, 19 nt, Artificial Sequence
  Description of Artificial Sequence: Synthetic oligonucleotide
  Antisense strand to SEQ ID NO: 2079900
accuuucucuaagaccaag

SEQ ID NO: 2079902 - RNA, 19 nt, Artificial Sequence
  Description of Artificial Sequence: Synthetic oligonucleotide
  Sense strand starting at position 756 of SEQ ID NO: 1881904
auugguuccucugacaaca

SEQ ID NO: 2079903 - RNA, 19 nt, Artificial Sequence
  Description of Artificial Sequence: Synthetic oligonucleotide
  Antisense strand to SEQ ID NO: 2079902
uguugucagaggaaccaau

SEQ ID NO: 2079904 - RNA, 19 nt, Artificial Sequence
  Description of Artificial Sequence: Synthetic oligonucleotide
  Sense strand starting at position 897 of SEQ ID NO: 1881904
ugcucuuauccacgcauca

SEQ ID NO: 2079905 - RNA, 19 nt, Artificial Sequence
  Description of Artificial Sequence: Synthetic oligonucleotide
  Antisense strand to SEQ ID NO: 2079904
ugaugcguggauaagagca

SEQ ID NO: 2079906 - RNA, 19 nt, Artificial Sequence
  Description of Artificial Sequence: Synthetic oligonucleotide
  Sense strand starting at position 1339 of SEQ ID NO: 1881904
uccugugagggcugggaaa

SEQ ID NO: 2079907 - RNA, 19 nt, Artificial Sequence
  Description of Artificial Sequence: Synthetic oligonucleotide
  Antisense strand to SEQ ID NO: 2079906
uuucccagcccucacagga

SEQ ID NO: 2079908 - RNA, 19 nt, Artificial Sequence
  Description of Artificial Sequence: Synthetic oligonucleotide
  Sense strand starting at position 1483 of SEQ ID NO: 1881904
cuggcugaguugccagaau

SEQ ID NO: 2079909 - RNA, 19 nt, Artificial Sequence
  Description of Artificial Sequence: Synthetic oligonucleotide
  Antisense strand to SEQ ID NO: 2079908
auucuggcaacucagccag

SEQ ID NO: 2079910 - RNA, 19 nt, Artificial Sequence
  Description of Artificial Sequence: Synthetic oligonucleotide
  Sense strand starting at position 1578 of SEQ ID NO: 1881904
gccagcacucacgagagau

SEQ ID NO: 2079911 - RNA, 19 nt, Artificial Sequence
  Description of Artificial Sequence: Synthetic oligonucleotide
  Antisense strand to SEQ ID NO: 2079910
aucucucgugagugcuggc

SEQ ID NO: 2079912 - RNA, 19 nt, Artificial Sequence
  Description of Artificial Sequence: Synthetic oligonucleotide
  Sense strand starting at position 1643 of SEQ ID NO: 1881904
acccuuugauaugaaugau

SEQ ID NO: 2079913 - RNA, 19 nt, Artificial Sequence
  Description of Artificial Sequence: Synthetic oligonucleotide
  Antisense strand to SEQ ID NO: 2079912
aucauucauaucaaagggu

SEQ ID NO: 2079914 - RNA, 19 nt, Artificial Sequence
  Description of Artificial Sequence: Synthetic oligonucleotide
  Sense strand starting at position 1649 of SEQ ID NO: 1881904
ugauaugaaugauggacau

SEQ ID NO: 2079915 - RNA, 19 nt, Artificial Sequence
  Description of Artificial Sequence: Synthetic oligonucleotide
  Antisense strand to SEQ ID NO: 2079914
auguccaucauucauauca

SEQ ID NO: 2079916 - RNA, 19 nt, Artificial Sequence
  Description of Artificial Sequence: Synthetic oligonucleotide
  Sense strand starting at position 2095 of SEQ ID NO: 1881904
cccagcaaucacggguuaa

SEQ ID NO: 2079917 - RNA, 19 nt, Artificial Sequence
  Description of Artificial Sequence: Synthetic oligonucleotide
  Antisense strand to SEQ ID NO: 2079916
uuaacccgugauugcuggg

SEQ ID NO: 2079918 - RNA, 19 nt, Artificial Sequence
  Description of Artificial Sequence: Synthetic oligonucleotide
  Sense strand starting at position 2096 of SEQ ID NO: 1881904
ccagcaaucacggguuaag

SEQ ID NO: 2079919 - RNA, 19 nt, Artificial Sequence
  Description of Artificial Sequence: Synthetic oligonucleotide
  Antisense strand to SEQ ID NO: 2079918
cuuaacccgugauugcugg

SEQ ID NO: 2079920 - RNA, 19 nt, Artificial Sequence
  Description of Artificial Sequence: Synthetic oligonucleotide
  Sense strand starting at position 2099 of SEQ ID NO: 1881904
gcaaucacggguuaagauc

SEQ ID NO: 2079921 - RNA, 19 nt, Artificial Sequence
  Description of Artificial Sequence: Synthetic oligonucleotide
  Antisense strand to SEQ ID NO: 2079920
gaucuuaacccgugauugc

SEQ ID NO: 2079922 - RNA, 19 nt, Artificial Sequence
  Description of Artificial Sequence: Synthetic oligonucleotide
  Sense strand starting at position 2524 of SEQ ID NO: 1881904
gggcaaauggugcgcuauu

SEQ ID NO: 2079923 - RNA, 19 nt, Artificial Sequence
  Description of Artificial Sequence: Synthetic oligonucleotide
  Antisense strand to SEQ ID NO: 2079922
aauagcgcaccauuugccc

SEQ ID NO: 2079924 - RNA, 19 nt, Artificial Sequence
  Description of Artificial Sequence: Synthetic oligonucleotide
  Sense strand starting at position 2525 of SEQ ID NO: 1881904
ggcaaauggugcgcuauuu

SEQ ID NO: 2079925 - RNA, 19 nt, Artificial Sequence
  Description of Artificial Sequence: Synthetic oligonucleotide
  Antisense strand to SEQ ID NO: 2079924
aaauagcgcaccauuugcc

SEQ ID NO: 2079926 - RNA, 19 nt, Artificial Sequence
  Description of Artificial Sequence: Synthetic oligonucleotide
  Sense strand starting at position 2937 of SEQ ID NO: 1881904
ggccuaugcucgacguaga

SEQ ID NO: 2079927 - RNA, 19 nt, Artificial Sequence
  Description of Artificial Sequence: Synthetic oligonucleotide
  Antisense strand to SEQ ID NO: 2079926
ucuacgucgagcauaggcc

SEQ ID NO: 2079928 - RNA, 19 nt, Artificial Sequence
  Description of Artificial Sequence: Synthetic oligonucleotide
  Sense strand starting at position 2938 of SEQ ID NO: 1881904
gccuaugcucgacguagau

SEQ ID NO: 2079929 - RNA, 19 nt, Artificial Sequence
  Description of Artificial Sequence: Synthetic oligonucleotide
  Antisense strand to SEQ ID NO: 2079928
aucuacgucgagcauaggc

SEQ ID NO: 2079930 - RNA, 19 nt, Artificial Sequence
  Description of Artificial Sequence: Synthetic oligonucleotide
  Sense strand starting at position 2940 of SEQ ID NO: 1881904
cuaugcucgacguagauuu

SEQ ID NO: 2079931 - RNA, 19 nt, Artificial Sequence
  Description of Artificial Sequence: Synthetic oligonucleotide
  Antisense strand to SEQ ID NO: 2079930
aaaucuacgucgagcauag

SEQ ID NO: 2079932 - RNA, 19 nt, Artificial Sequence
  Description of Artificial Sequence: Synthetic oligonucleotide
  Sense strand starting at position 3263 of SEQ ID NO: 1881904
gguugaaggugcguuuaca

SEQ ID NO: 2079933 - RNA, 19 nt, Artificial Sequence
  Description of Artificial Sequence: Synthetic oligonucleotide
  Antisense strand to SEQ ID NO: 2079932
uguaaacgcaccuucaacc

SEQ ID NO: 2079934 - RNA, 19 nt, Artificial Sequence
  Description of Artificial Sequence: Synthetic oligonucleotide
  Sense strand starting at position 3304 of SEQ ID NO: 1881904
ggaggaagagguugcgaau

SEQ ID NO: 2079935 - RNA, 19 nt, Artificial Sequence
  Description of Artificial Sequence: Synthetic oligonucleotide
  Antisense strand to SEQ ID NO: 2079934
auucgcaaccucuuccucc

SEQ ID NO: 2079936 - RNA, 19 nt, Artificial Sequence
  Description of Artificial Sequence: Synthetic oligonucleotide
  Sense strand starting at position 3307 of SEQ ID NO: 1881904
ggaagagguugcgaaugua

SEQ ID NO: 2079937 - RNA, 19 nt, Artificial Sequence
  Description of Artificial Sequence: Synthetic oligonucleotide
  Antisense strand to SEQ ID NO: 2079936
uacauucgcaaccucuucc

SEQ ID NO: 2079938 - RNA, 19 nt, Artificial Sequence
  Description of Artificial Sequence: Synthetic oligonucleotide
  Sense strand starting at position 3310 of SEQ ID NO: 1881904
agagguugcgaauguagga

SEQ ID NO: 2079939 - RNA, 19 nt, Artificial Sequence
  Description of Artificial Sequence: Synthetic oligonucleotide
  Antisense strand to SEQ ID NO: 2079938
uccuacauucgcaaccucu

SEQ ID NO: 2079940 - RNA, 19 nt, Artificial Sequence
  Description of Artificial Sequence: Synthetic oligonucleotide
  Sense strand starting at position 3315 of SEQ ID NO: 1881904
uugcgaauguaggagagau

SEQ ID NO: 2079941 - RNA, 19 nt, Artificial Sequence
  Description of Artificial Sequence: Synthetic oligonucleotide
  Antisense strand to SEQ ID NO: 2079940
aucucuccuacauucgcaa

SEQ ID NO: 2079942 - RNA, 19 nt, Artificial Sequence
  Description of Artificial Sequence: Synthetic oligonucleotide
  Sense strand starting at position 3402 of SEQ ID NO: 1881904
acgguauguucugacaaau

SEQ ID NO: 2079943 - RNA, 19 nt, Artificial Sequence
  Description of Artificial Sequence: Synthetic oligonucleotide
  Antisense strand to SEQ ID NO: 2079942
auuugucagaacauaccgu

SEQ ID NO: 2079944 - RNA, 19 nt, Artificial Sequence
  Description of Artificial Sequence: Synthetic oligonucleotide
  Sense strand starting at position 3566 of SEQ ID NO: 1881904
agcugcucuugugcaagaa

SEQ ID NO: 2079945 - RNA, 19 nt, Artificial Sequence
  Description of Artificial Sequence: Synthetic oligonucleotide
  Antisense strand to SEQ ID NO: 2079944
uucuugcacaagagcagcu

SEQ ID NO: 2079946 - RNA, 19 nt, Artificial Sequence
  Description of Artificial Sequence: Synthetic oligonucleotide
  Sense strand starting at position 3581 of SEQ ID NO: 1881904
agaagacgguuucucaauu

SEQ ID NO: 2079947 - RNA, 19 nt, Artificial Sequence
  Description of Artificial Sequence: Synthetic oligonucleotide
  Antisense strand to SEQ ID NO: 2079946
aauugagaaaccgucuucu

SEQ ID NO: 2079948 - RNA, 19 nt, Artificial Sequence
  Description of Artificial Sequence: Synthetic oligonucleotide
  Sense strand starting at position 3663 of SEQ ID NO: 1881904
ggcuuauagggcugaagga

SEQ ID NO: 2079949 - RNA, 19 nt, Artificial Sequence
  Description of Artificial Sequence: Synthetic oligonucleotide
  Antisense strand to SEQ ID NO: 2079948
uccuucagcccuauaagcc

SEQ ID NO: 2079950 - RNA, 19 nt, Artificial Sequence
  Description of Artificial Sequence: Synthetic oligonucleotide
  Sense strand starting at position 3664 of SEQ ID NO: 1881904
gcuuauagggcugaaggau

SEQ ID NO: 2079951 - RNA, 19 nt, Artificial Sequence
  Description of Artificial Sequence: Synthetic oligonucleotide
  Antisense strand to SEQ ID NO: 2079950
auccuucagcccuauaagc

SEQ ID NO: 2079952 - RNA, 19 nt, Artificial Sequence
  Description of Artificial Sequence: Synthetic oligonucleotide
  Sense strand starting at position 3844 of SEQ ID NO: 1881904
gcgcgguuagugcuggaaa

SEQ ID NO: 2079953 - RNA, 19 nt, Artificial Sequence
  Description of Artificial Sequence: Synthetic oligonucleotide
  Antisense strand to SEQ ID NO: 2079952
uuuccagcacuaaccgcgc

SEQ ID NO: 2079954 - RNA, 19 nt, Artificial Sequence
  Description of Artificial Sequence: Synthetic oligonucleotide
  Sense strand starting at position 3846 of SEQ ID NO: 1881904
gcgguuagugcuggaaaga

SEQ ID NO: 2079955 - RNA, 19 nt, Artificial Sequence
  Description of Artificial Sequence: Synthetic oligonucleotide
  Antisense strand to SEQ ID NO: 2079954
ucuuuccagcacuaaccgc

SEQ ID NO: 2079956 - RNA, 19 nt, Artificial Sequence
  Description of Artificial Sequence: Synthetic oligonucleotide
  Sense strand starting at position 3847 of SEQ ID NO: 1881904
cgguuagugcuggaaagaa

SEQ ID NO: 2079957 - RNA, 19 nt, Artificial Sequence
  Description of Artificial Sequence: Synthetic oligonucleotide
  Antisense strand to SEQ ID NO: 2079956
uucuuuccagcacuaaccg

SEQ ID NO: 2079958 - RNA, 19 nt, Artificial Sequence
  Description of Artificial Sequence: Synthetic oligonucleotide
  Sense strand starting at position 3919 of SEQ ID NO: 1881904
aaaucaguggcgugauucu

SEQ ID NO: 2079959 - RNA, 19 nt, Artificial Sequence
  Description of Artificial Sequence: Synthetic oligonucleotide
  Antisense strand to SEQ ID NO: 2079958
agaaucacgccacugauuu

SEQ ID NO: 2079960 - RNA, 19 nt, Artificial Sequence
  Description of Artificial Sequence: Synthetic oligonucleotide
  Sense strand starting at position 3926 of SEQ ID NO: 1881904
uggcgugauucucuccagu

SEQ ID NO: 2079961 - RNA, 19 nt, Artificial Sequence
  Description of Artificial Sequence: Synthetic oligonucleotide
  Antisense strand to SEQ ID NO: 2079960
acuggagagaaucacgcca

SEQ ID NO: 2079962 - RNA, 19 nt, Artificial Sequence
  Description of Artificial Sequence: Synthetic oligonucleotide
  Sense strand starting at position 3928 of SEQ ID NO: 1881904
gcgugauucucuccaguuu

SEQ ID NO: 2079963 - RNA, 19 nt, Artificial Sequence
  Description of Artificial Sequence: Synthetic oligonucleotide
  Antisense strand to SEQ ID NO: 2079962
aaacuggagagaaucacgc

SEQ ID NO: 2079964 - RNA, 19 nt, Artificial Sequence
  Description of Artificial Sequence: Synthetic oligonucleotide
  Sense strand starting at position 24 of SEQ ID NO: 1881905
gguuacaguccucauguga

SEQ ID NO: 2079965 - RNA, 19 nt, Artificial Sequence
  Description of Artificial Sequence: Synthetic oligonucleotide
  Antisense strand to SEQ ID NO: 2079964
ucacaugaggacuguaacc

SEQ ID NO: 2079966 - RNA, 19 nt, Artificial Sequence
  Description of Artificial Sequence: Synthetic oligonucleotide
  Sense strand starting at position 58 of SEQ ID NO: 1881905
aaucuuagugcagggcaaa

SEQ ID NO: 2079967 - RNA, 19 nt, Artificial Sequence
  Description of Artificial Sequence: Synthetic oligonucleotide
  Antisense strand to SEQ ID NO: 2079966
uuugcccugcacuaagauu

SEQ ID NO: 2079968 - RNA, 19 nt, Artificial Sequence
  Description of Artificial Sequence: Synthetic oligonucleotide
  Sense strand starting at position 87 of SEQ ID NO: 1881905
cugucauacugaguacauu

SEQ ID NO: 2079969 - RNA, 19 nt, Artificial Sequence
  Description of Artificial Sequence: Synthetic oligonucleotide
  Antisense strand to SEQ ID NO: 2079968
aauguacucaguaugacag

SEQ ID NO: 2079970 - RNA, 19 nt, Artificial Sequence
  Description of Artificial Sequence: Synthetic oligonucleotide
  Sense strand starting at position 252 of SEQ ID NO: 1881905
uuggguguacuagauaaug

SEQ ID NO: 2079971 - RNA, 19 nt, Artificial Sequence
  Description of Artificial Sequence: Synthetic oligonucleotide
  Antisense strand to SEQ ID NO: 2079970
cauuaucuaguacacccaa

SEQ ID NO: 2079972 - RNA, 19 nt, Artificial Sequence
  Description of Artificial Sequence: Synthetic oligonucleotide
  Sense strand starting at position 254 of SEQ ID NO: 1881905
ggguguacuagauaaugua

SEQ ID NO: 2079973 - RNA, 19 nt, Artificial Sequence
  Description of Artificial Sequence: Synthetic oligonucleotide
  Antisense strand to SEQ ID NO: 2079972
uacauuaucuaguacaccc

SEQ ID NO: 2079974 - RNA, 19 nt, Artificial Sequence
  Description of Artificial Sequence: Synthetic oligonucleotide
  Sense strand starting at position 274 of SEQ ID NO: 1881905
aguauauugcagcaaugau

SEQ ID NO: 2079975 - RNA, 19 nt, Artificial Sequence
  Description of Artificial Sequence: Synthetic oligonucleotide
  Antisense strand to SEQ ID NO: 2079974
aucauugcugcaauauacu

SEQ ID NO: 2079976 - RNA, 19 nt, Artificial Sequence
  Description of Artificial Sequence: Synthetic oligonucleotide
  Sense strand starting at position 289 of SEQ ID NO: 1881905
ugauguuacuaguuacauu

SEQ ID NO: 2079977 - RNA, 19 nt, Artificial Sequence
  Description of Artificial Sequence: Synthetic oligonucleotide
  Antisense strand to SEQ ID NO: 2079976
aauguaacuaguaacauca

SEQ ID NO: 2079978 - RNA, 19 nt, Artificial Sequence
  Description of Artificial Sequence: Synthetic oligonucleotide
  Sense strand starting at position 350 of SEQ ID NO: 1881905
guggcuuaucaggauuaau

SEQ ID NO: 2079979 - RNA, 19 nt, Artificial Sequence
  Description of Artificial Sequence: Synthetic oligonucleotide
  Antisense strand to SEQ ID NO: 2079978
auuaauccugauaagccac

SEQ ID NO: 2079980 - RNA, 19 nt, Artificial Sequence
  Description of Artificial Sequence: Synthetic oligonucleotide
  Sense strand starting at position 360 of SEQ ID NO: 1881905
aggauuaauuaguugugua

SEQ ID NO: 2079981 - RNA, 19 nt, Artificial Sequence
  Description of Artificial Sequence: Synthetic oligonucleotide
  Antisense strand to SEQ ID NO: 2079980
uacacaacuaauuaauccu

SEQ ID NO: 2079982 - RNA, 19 nt, Artificial Sequence
  Description of Artificial Sequence: Synthetic oligonucleotide
  Sense strand starting at position 361 of SEQ ID NO: 1881905
ggauuaauuaguuguguac

SEQ ID NO: 2079983 - RNA, 19 nt, Artificial Sequence
  Description of Artificial Sequence: Synthetic oligonucleotide
  Antisense strand to SEQ ID NO: 2079982
guacacaacuaauuaaucc

SEQ ID NO: 2079984 - RNA, 19 nt, Artificial Sequence
  Description of Artificial Sequence: Synthetic oligonucleotide
  Sense strand starting at position 472 of SEQ ID NO: 1881905
aucccauugucuguaagau

SEQ ID NO: 2079985 - RNA, 19 nt, Artificial Sequence
  Description of Artificial Sequence: Synthetic oligonucleotide
  Antisense strand to SEQ ID NO: 2079984
aucuuacagacaaugggau

SEQ ID NO: 2079986 - RNA, 19 nt, Artificial Sequence
  Description of Artificial Sequence: Synthetic oligonucleotide
  Sense strand starting at position 473 of SEQ ID NO: 1881905
ucccauugucuguaagauu

SEQ ID NO: 2079987 - RNA, 19 nt, Artificial Sequence
  Description of Artificial Sequence: Synthetic oligonucleotide
  Antisense strand to SEQ ID NO: 2079986
aaucuuacagacaauggga

SEQ ID NO: 2079988 - RNA, 19 nt, Artificial Sequence
  Description of Artificial Sequence: Synthetic oligonucleotide
  Sense strand starting at position 768 of SEQ ID NO: 1881905
guacuccuucuuuauguca

SEQ ID NO: 2079989 - RNA, 19 nt, Artificial Sequence
  Description of Artificial Sequence: Synthetic oligonucleotide
  Antisense strand to SEQ ID NO: 2079988
ugacauaaagaaggaguac

SEQ ID NO: 2079990 - RNA, 19 nt, Artificial Sequence
  Description of Artificial Sequence: Synthetic oligonucleotide
  Sense strand starting at position 790 of SEQ ID NO: 1881905
cugaguuucuaucuuuauc

SEQ ID NO: 2079991 - RNA, 19 nt, Artificial Sequence
  Description of Artificial Sequence: Synthetic oligonucleotide
  Antisense strand to SEQ ID NO: 2079990
gauaaagauagaaacucag

SEQ ID NO: 2079992 - RNA, 19 nt, Artificial Sequence
  Description of Artificial Sequence: Synthetic oligonucleotide
  Sense strand starting at position 813 of SEQ ID NO: 1881905
ugcagauaaguguaaguau

SEQ ID NO: 2079993 - RNA, 19 nt, Artificial Sequence
  Description of Artificial Sequence: Synthetic oligonucleotide
  Antisense strand to SEQ ID NO: 2079992
auacuuacacuuaucugca

SEQ ID NO: 2079994 - RNA, 19 nt, Artificial Sequence
  Description of Artificial Sequence: Synthetic oligonucleotide
  Sense strand starting at position 927 of SEQ ID NO: 1881905
caguguuuggcucaucaga

SEQ ID NO: 2079995 - RNA, 19 nt, Artificial Sequence
  Description of Artificial Sequence: Synthetic oligonucleotide
  Antisense strand to SEQ ID NO: 2079994
ucugaugagccaaacacug

SEQ ID NO: 2079996 - RNA, 19 nt, Artificial Sequence
  Description of Artificial Sequence: Synthetic oligonucleotide
  Sense strand starting at position 951 of SEQ ID NO: 1881905
caggaaauguuagcugguu

SEQ ID NO: 2079997 - RNA, 19 nt, Artificial Sequence
  Description of Artificial Sequence: Synthetic oligonucleotide
  Antisense strand to SEQ ID NO: 2079996
aaccagcuaacauuuccug

SEQ ID NO: 2079998 - RNA, 19 nt, Artificial Sequence
  Description of Artificial Sequence: Synthetic oligonucleotide
  Sense strand starting at position 953 of SEQ ID NO: 1881905
ggaaauguuagcugguuga

SEQ ID NO: 2079999 - RNA, 19 nt, Artificial Sequence
  Description of Artificial Sequence: Synthetic oligonucleotide
  Antisense strand to SEQ ID NO: 2079998
ucaaccagcuaacauuucc

SEQ ID NO: 2080000 - RNA, 19 nt, Artificial Sequence
  Description of Artificial Sequence: Synthetic oligonucleotide
  Sense strand starting at position 957 of SEQ ID NO: 1881905
auguuagcugguugaauaa

SEQ ID NO: 2080001 - RNA, 19 nt, Artificial Sequence
  Description of Artificial Sequence: Synthetic oligonucleotide
  Antisense strand to SEQ ID NO: 2080000
uuauucaaccagcuaacau

SEQ ID NO: 2080002 - RNA, 19 nt, Artificial Sequence
  Description of Artificial Sequence: Synthetic oligonucleotide
  Sense strand starting at position 1079 of SEQ ID NO: 1881905
gugauuacuuacuuauuac

SEQ ID NO: 2080003 - RNA, 19 nt, Artificial Sequence
  Description of Artificial Sequence: Synthetic oligonucleotide
  Antisense strand to SEQ ID NO: 2080002
guaauaaguaaguaaucac

SEQ ID NO: 2080004 - RNA, 19 nt, Artificial Sequence
  Description of Artificial Sequence: Synthetic oligonucleotide
  Sense strand starting at position 1151 of SEQ ID NO: 1881905
aacugaagcugguuugaua

SEQ ID NO: 2080005 - RNA, 19 nt, Artificial Sequence
  Description of Artificial Sequence: Synthetic oligonucleotide
  Antisense strand to SEQ ID NO: 2080004
uaucaaaccagcuucaguu

SEQ ID NO: 2080006 - RNA, 19 nt, Artificial Sequence
  Description of Artificial Sequence: Synthetic oligonucleotide
  Sense strand starting at position 1170 of SEQ ID NO: 1881905
uuacuuugguuccuugauu

SEQ ID NO: 2080007 - RNA, 19 nt, Artificial Sequence
  Description of Artificial Sequence: Synthetic oligonucleotide
  Antisense strand to SEQ ID NO: 2080006
aaucaaggaaccaaaguaa

SEQ ID NO: 2080008 - RNA, 19 nt, Artificial Sequence
  Description of Artificial Sequence: Synthetic oligonucleotide
  Sense strand starting at position 1426 of SEQ ID NO: 1881905
augaaaccauguuucugau

SEQ ID NO: 2080009 - RNA, 19 nt, Artificial Sequence
  Description of Artificial Sequence: Synthetic oligonucleotide
  Antisense strand to SEQ ID NO: 2080008
aucagaaacaugguuucau

SEQ ID NO: 2080010 - RNA, 19 nt, Artificial Sequence
  Description of Artificial Sequence: Synthetic oligonucleotide
  Sense strand starting at position 1485 of SEQ ID NO: 1881905
gauggagaauaucuugcaa

SEQ ID NO: 2080011 - RNA, 19 nt, Artificial Sequence
  Description of Artificial Sequence: Synthetic oligonucleotide
  Antisense strand to SEQ ID NO: 2080010
uugcaagauauucuccauc

SEQ ID NO: 2080012 - RNA, 19 nt, Artificial Sequence
  Description of Artificial Sequence: Synthetic oligonucleotide
  Sense strand starting at position 1656 of SEQ ID NO: 1881905
gcaagaagagcaugagauc

SEQ ID NO: 2080013 - RNA, 19 nt, Artificial Sequence
  Description of Artificial Sequence: Synthetic oligonucleotide
  Antisense strand to SEQ ID NO: 2080012
gaucucaugcucuucuugc

SEQ ID NO: 2080014 - RNA, 19 nt, Artificial Sequence
  Description of Artificial Sequence: Synthetic oligonucleotide
  Sense strand starting at position 1668 of SEQ ID NO: 1881905
ugagaucaugucuguauag

SEQ ID NO: 2080015 - RNA, 19 nt, Artificial Sequence
  Description of Artificial Sequence: Synthetic oligonucleotide
  Antisense strand to SEQ ID NO: 2080014
cuauacagacaugaucuca

SEQ ID NO: 2080016 - RNA, 19 nt, Artificial Sequence
  Description of Artificial Sequence: Synthetic oligonucleotide
  Sense strand starting at position 1669 of SEQ ID NO: 1881905
gagaucaugucuguauaga

SEQ ID NO: 2080017 - RNA, 19 nt, Artificial Sequence
  Description of Artificial Sequence: Synthetic oligonucleotide
  Antisense strand to SEQ ID NO: 2080016
ucuauacagacaugaucuc

SEQ ID NO: 2080018 - RNA, 19 nt, Artificial Sequence
  Description of Artificial Sequence: Synthetic oligonucleotide
  Sense strand starting at position 1712 of SEQ ID NO: 1881905
ucaaauagucaguaauucu

SEQ ID NO: 2080019 - RNA, 19 nt, Artificial Sequence
  Description of Artificial Sequence: Synthetic oligonucleotide
  Antisense strand to SEQ ID NO: 2080018
agaauuacugacuauuuga

SEQ ID NO: 2080020 - RNA, 19 nt, Artificial Sequence
  Description of Artificial Sequence: Synthetic oligonucleotide
  Sense strand starting at position 1749 of SEQ ID NO: 1881905
gcuguaacugaauacuuga

SEQ ID NO: 2080021 - RNA, 19 nt, Artificial Sequence
  Description of Artificial Sequence: Synthetic oligonucleotide
  Antisense strand to SEQ ID NO: 2080020
ucaaguauucaguuacagc

SEQ ID NO: 2080022 - RNA, 19 nt, Artificial Sequence
  Description of Artificial Sequence: Synthetic oligonucleotide
  Sense strand starting at position 1991 of SEQ ID NO: 1881905
cgcaaagagucauuaucaa

SEQ ID NO: 2080023 - RNA, 19 nt, Artificial Sequence
  Description of Artificial Sequence: Synthetic oligonucleotide
  Antisense strand to SEQ ID NO: 2080022
uugauaaugacucuuugcg

SEQ ID NO: 2080024 - RNA, 19 nt, Artificial Sequence
  Description of Artificial Sequence: Synthetic oligonucleotide
  Sense strand starting at position 2139 of SEQ ID NO: 1881905
agauaauaccaguggccaa

SEQ ID NO: 2080025 - RNA, 19 nt, Artificial Sequence
  Description of Artificial Sequence: Synthetic oligonucleotide
  Antisense strand to SEQ ID NO: 2080024
uuggccacugguauuaucu

SEQ ID NO: 2080026 - RNA, 19 nt, Artificial Sequence
  Description of Artificial Sequence: Synthetic oligonucleotide
  Sense strand starting at position 2172 of SEQ ID NO: 1881905
auugcuucuuuauuaggau

SEQ ID NO: 2080027 - RNA, 19 nt, Artificial Sequence
  Description of Artificial Sequence: Synthetic oligonucleotide
  Antisense strand to SEQ ID NO: 2080026
auccuaauaaagaagcaau

SEQ ID NO: 2080028 - RNA, 19 nt, Artificial Sequence
  Description of Artificial Sequence: Synthetic oligonucleotide
  Sense strand starting at position 2236 of SEQ ID NO: 1881905
ccagaacauuauguauagu

SEQ ID NO: 2080029 - RNA, 19 nt, Artificial Sequence
  Description of Artificial Sequence: Synthetic oligonucleotide
  Antisense strand to SEQ ID NO: 2080028
acuauacauaauguucugg

SEQ ID NO: 2080030 - RNA, 19 nt, Artificial Sequence
  Description of Artificial Sequence: Synthetic oligonucleotide
  Sense strand starting at position 2313 of SEQ ID NO: 1881905
uagagauugucugcuuaaa

SEQ ID NO: 2080031 - RNA, 19 nt, Artificial Sequence
  Description of Artificial Sequence: Synthetic oligonucleotide
  Antisense strand to SEQ ID NO: 2080030
uuuaagcagacaaucucua

SEQ ID NO: 2080032 - RNA, 19 nt, Artificial Sequence
  Description of Artificial Sequence: Synthetic oligonucleotide
  Sense strand starting at position 2431 of SEQ ID NO: 1881905
auaguagagcucuaaacuu

SEQ ID NO: 2080033 - RNA, 19 nt, Artificial Sequence
  Description of Artificial Sequence: Synthetic oligonucleotide
  Antisense strand to SEQ ID NO: 2080032
aaguuuagagcucuacuau

SEQ ID NO: 2080034 - RNA, 19 nt, Artificial Sequence
  Description of Artificial Sequence: Synthetic oligonucleotide
  Sense strand starting at position 2625 of SEQ ID NO: 1881905
cccauucuuuggcuuauga

SEQ ID NO: 2080035 - RNA, 19 nt, Artificial Sequence
  Description of Artificial Sequence: Synthetic oligonucleotide
  Antisense strand to SEQ ID NO: 2080034
ucauaagccaaagaauggg

SEQ ID NO: 2080036 - RNA, 19 nt, Artificial Sequence
  Description of Artificial Sequence: Synthetic oligonucleotide
  Sense strand starting at position 2667 of SEQ ID NO: 1881905
gccagaaggacuugacacu

SEQ ID NO: 2080037 - RNA, 19 nt, Artificial Sequence
  Description of Artificial Sequence: Synthetic oligonucleotide
  Antisense strand to SEQ ID NO: 2080036
agugucaaguccuucuggc

SEQ ID NO: 2080038 - RNA, 19 nt, Artificial Sequence
  Description of Artificial Sequence: Synthetic oligonucleotide
  Sense strand starting at position 3312 of SEQ ID NO: 1881905
gaggguaauugcuuccaug

SEQ ID NO: 2080039 - RNA, 19 nt, Artificial Sequence
  Description of Artificial Sequence: Synthetic oligonucleotide
  Antisense strand to SEQ ID NO: 2080038
cauggaagcaauuacccuc

SEQ ID NO: 2080040 - RNA, 19 nt, Artificial Sequence
  Description of Artificial Sequence: Synthetic oligonucleotide
  Sense strand starting at position 3321 of SEQ ID NO: 1881905
ugcuuccaugguuaaauua

SEQ ID NO: 2080041 - RNA, 19 nt, Artificial Sequence
  Description of Artificial Sequence: Synthetic oligonucleotide
  Antisense strand to SEQ ID NO: 2080040
uaauuuaaccauggaagca

SEQ ID NO: 2080042 - RNA, 19 nt, Artificial Sequence
  Description of Artificial Sequence: Synthetic oligonucleotide
  Sense strand starting at position 3637 of SEQ ID NO: 1881905
cauacaggccuugaguaaa

SEQ ID NO: 2080043 - RNA, 19 nt, Artificial Sequence
  Description of Artificial Sequence: Synthetic oligonucleotide
  Antisense strand to SEQ ID NO: 2080042
uuuacucaaggccuguaug

SEQ ID NO: 2080044 - RNA, 19 nt, Artificial Sequence
  Description of Artificial Sequence: Synthetic oligonucleotide
  Sense strand starting at position 202 of SEQ ID NO: 1881906
gugaauauccuauaggguc

SEQ ID NO: 2080045 - RNA, 19 nt, Artificial Sequence
  Description of Artificial Sequence: Synthetic oligonucleotide
  Antisense strand to SEQ ID NO: 2080044
gacccuauaggauauucac

SEQ ID NO: 2080046 - RNA, 19 nt, Artificial Sequence
  Description of Artificial Sequence: Synthetic oligonucleotide
  Sense strand starting at position 210 of SEQ ID NO: 1881906
ccuauaggguccucagaau

SEQ ID NO: 2080047 - RNA, 19 nt, Artificial Sequence
  Description of Artificial Sequence: Synthetic oligonucleotide
  Antisense strand to SEQ ID NO: 2080046
auucugaggacccuauagg

SEQ ID NO: 2080048 - RNA, 19 nt, Artificial Sequence
  Description of Artificial Sequence: Synthetic oligonucleotide
  Sense strand starting at position 540 of SEQ ID NO: 1881906
agcucaaauccagggauca

SEQ ID NO: 2080049 - RNA, 19 nt, Artificial Sequence
  Description of Artificial Sequence: Synthetic oligonucleotide
  Antisense strand to SEQ ID NO: 2080048
ugaucccuggauuugagcu

SEQ ID NO: 2080050 - RNA, 19 nt, Artificial Sequence
  Description of Artificial Sequence: Synthetic oligonucleotide
  Sense strand starting at position 541 of SEQ ID NO: 1881906
gcucaaauccagggaucaa

SEQ ID NO: 2080051 - RNA, 19 nt, Artificial Sequence
  Description of Artificial Sequence: Synthetic oligonucleotide
  Antisense strand to SEQ ID NO: 2080050
uugaucccuggauuugagc

SEQ ID NO: 2080052 - RNA, 19 nt, Artificial Sequence
  Description of Artificial Sequence: Synthetic oligonucleotide
  Sense strand starting at position 553 of SEQ ID NO: 1881906
ggaucaagcucuccaucaa

SEQ ID NO: 2080053 - RNA, 19 nt, Artificial Sequence
  Description of Artificial Sequence: Synthetic oligonucleotide
  Antisense strand to SEQ ID NO: 2080052
uugauggagagcuugaucc

SEQ ID NO: 2080054 - RNA, 19 nt, Artificial Sequence
  Description of Artificial Sequence: Synthetic oligonucleotide
  Sense strand starting at position 625 of SEQ ID NO: 1881906
auuucugguugacauaaga

SEQ ID NO: 2080055 - RNA, 19 nt, Artificial Sequence
  Description of Artificial Sequence: Synthetic oligonucleotide
  Antisense strand to SEQ ID NO: 2080054
ucuuaugucaaccagaaau

SEQ ID NO: 2080056 - RNA, 19 nt, Artificial Sequence
  Description of Artificial Sequence: Synthetic oligonucleotide
  Sense strand starting at position 647 of SEQ ID NO: 1881906
acaacuuauccuugaguga

SEQ ID NO: 2080057 - RNA, 19 nt, Artificial Sequence
  Description of Artificial Sequence: Synthetic oligonucleotide
  Antisense strand to SEQ ID NO: 2080056
ucacucaaggauaaguugu

SEQ ID NO: 2080058 - RNA, 19 nt, Artificial Sequence
  Description of Artificial Sequence: Synthetic oligonucleotide
  Sense strand starting at position 873 of SEQ ID NO: 1881906
ccacgugaccuugaacaga

SEQ ID NO: 2080059 - RNA, 19 nt, Artificial Sequence
  Description of Artificial Sequence: Synthetic oligonucleotide
  Antisense strand to SEQ ID NO: 2080058
ucuguucaaggucacgugg

SEQ ID NO: 2080060 - RNA, 19 nt, Artificial Sequence
  Description of Artificial Sequence: Synthetic oligonucleotide
  Sense strand starting at position 947 of SEQ ID NO: 1881906
ugauaauguguuuaaugug

SEQ ID NO: 2080061 - RNA, 19 nt, Artificial Sequence
  Description of Artificial Sequence: Synthetic oligonucleotide
  Antisense strand to SEQ ID NO: 2080060
cacauuaaacacauuauca

SEQ ID NO: 2080062 - RNA, 19 nt, Artificial Sequence
  Description of Artificial Sequence: Synthetic oligonucleotide
  Sense strand starting at position 1006 of SEQ ID NO: 1881906
agugacuuacagugauauu

SEQ ID NO: 2080063 - RNA, 19 nt, Artificial Sequence
  Description of Artificial Sequence: Synthetic oligonucleotide
  Antisense strand to SEQ ID NO: 2080062
aauaucacuguaagucacu

SEQ ID NO: 2080064 - RNA, 19 nt, Artificial Sequence
  Description of Artificial Sequence: Synthetic oligonucleotide
  Sense strand starting at position 1016 of SEQ ID NO: 1881906
agugauauuucugcuggcu

SEQ ID NO: 2080065 - RNA, 19 nt, Artificial Sequence
  Description of Artificial Sequence: Synthetic oligonucleotide
  Antisense strand to SEQ ID NO: 2080064
agccagcagaaauaucacu

SEQ ID NO: 2080066 - RNA, 19 nt, Artificial Sequence
  Description of Artificial Sequence: Synthetic oligonucleotide
  Sense strand starting at position 1127 of SEQ ID NO: 1881906
aguggauuaguuuaucaac

SEQ ID NO: 2080067 - RNA, 19 nt, Artificial Sequence
  Description of Artificial Sequence: Synthetic oligonucleotide
  Antisense strand to SEQ ID NO: 2080066
guugauaaacuaauccacu

SEQ ID NO: 2080068 - RNA, 19 nt, Artificial Sequence
  Description of Artificial Sequence: Synthetic oligonucleotide
  Sense strand starting at position 1129 of SEQ ID NO: 1881906
uggauuaguuuaucaacuu

SEQ ID NO: 2080069 - RNA, 19 nt, Artificial Sequence
  Description of Artificial Sequence: Synthetic oligonucleotide
  Antisense strand to SEQ ID NO: 2080068
aaguugauaaacuaaucca

SEQ ID NO: 2080070 - RNA, 19 nt, Artificial Sequence
  Description of Artificial Sequence: Synthetic oligonucleotide
  Sense strand starting at position 1206 of SEQ ID NO: 1881906
ugaaacaucuguccugauc

SEQ ID NO: 2080071 - RNA, 19 nt, Artificial Sequence
  Description of Artificial Sequence: Synthetic oligonucleotide
  Antisense strand to SEQ ID NO: 2080070
gaucaggacagauguuuca

SEQ ID NO: 2080072 - RNA, 19 nt, Artificial Sequence
  Description of Artificial Sequence: Synthetic oligonucleotide
  Sense strand starting at position 1324 of SEQ ID NO: 1881906
uguucuauuguccaaacuu

SEQ ID NO: 2080073 - RNA, 19 nt, Artificial Sequence
  Description of Artificial Sequence: Synthetic oligonucleotide
  Antisense strand to SEQ ID NO: 2080072
aaguuuggacaauagaaca

SEQ ID NO: 2080074 - RNA, 19 nt, Artificial Sequence
  Description of Artificial Sequence: Synthetic oligonucleotide
  Sense strand starting at position 1432 of SEQ ID NO: 1881906
aagagauucuuagcaggca

SEQ ID NO: 2080075 - RNA, 19 nt, Artificial Sequence
  Description of Artificial Sequence: Synthetic oligonucleotide
  Antisense strand to SEQ ID NO: 2080074
ugccugcuaagaaucucuu

SEQ ID NO: 2080076 - RNA, 19 nt, Artificial Sequence
  Description of Artificial Sequence: Synthetic oligonucleotide
  Sense strand starting at position 1629 of SEQ ID NO: 1881906
ggcuaaggaucuguuugag

SEQ ID NO: 2080077 - RNA, 19 nt, Artificial Sequence
  Description of Artificial Sequence: Synthetic oligonucleotide
  Antisense strand to SEQ ID NO: 2080076
cucaaacagauccuuagcc

SEQ ID NO: 2080078 - RNA, 19 nt, Artificial Sequence
  Description of Artificial Sequence: Synthetic oligonucleotide
  Sense strand starting at position 1637 of SEQ ID NO: 1881906
aucuguuugagcuauugga

SEQ ID NO: 2080079 - RNA, 19 nt, Artificial Sequence
  Description of Artificial Sequence: Synthetic oligonucleotide
  Antisense strand to SEQ ID NO: 2080078
uccaauagcucaaacagau

SEQ ID NO: 2080080 - RNA, 19 nt, Artificial Sequence
  Description of Artificial Sequence: Synthetic oligonucleotide
  Sense strand starting at position 1654 of SEQ ID NO: 1881906
gaauaugggcaguaguuua

SEQ ID NO: 2080081 - RNA, 19 nt, Artificial Sequence
  Description of Artificial Sequence: Synthetic oligonucleotide
  Antisense strand to SEQ ID NO: 2080080
uaaacuacugcccauauuc

SEQ ID NO: 2080082 - RNA, 19 nt, Artificial Sequence
  Description of Artificial Sequence: Synthetic oligonucleotide
  Sense strand starting at position 1665 of SEQ ID NO: 1881906
guaguuuauaaguaucaga

SEQ ID NO: 2080083 - RNA, 19 nt, Artificial Sequence
  Description of Artificial Sequence: Synthetic oligonucleotide
  Antisense strand to SEQ ID NO: 2080082
ucugauacuuauaaacuac

SEQ ID NO: 2080084 - RNA, 19 nt, Artificial Sequence
  Description of Artificial Sequence: Synthetic oligonucleotide
  Sense strand starting at position 1855 of SEQ ID NO: 1881906
aguugauauguguaacaga

SEQ ID NO: 2080085 - RNA, 19 nt, Artificial Sequence
  Description of Artificial Sequence: Synthetic oligonucleotide
  Antisense strand to SEQ ID NO: 2080084
ucuguuacacauaucaacu

SEQ ID NO: 2080086 - RNA, 19 nt, Artificial Sequence
  Description of Artificial Sequence: Synthetic oligonucleotide
  Sense strand starting at position 2024 of SEQ ID NO: 1881906
ucuucuaugucaucaugag

SEQ ID NO: 2080087 - RNA, 19 nt, Artificial Sequence
  Description of Artificial Sequence: Synthetic oligonucleotide
  Antisense strand to SEQ ID NO: 2080086
cucaugaugacauagaaga

SEQ ID NO: 2080088 - RNA, 19 nt, Artificial Sequence
  Description of Artificial Sequence: Synthetic oligonucleotide
  Sense strand starting at position 2025 of SEQ ID NO: 1881906
cuucuaugucaucaugaga

SEQ ID NO: 2080089 - RNA, 19 nt, Artificial Sequence
  Description of Artificial Sequence: Synthetic oligonucleotide
  Antisense strand to SEQ ID NO: 2080088
ucucaugaugacauagaag

SEQ ID NO: 2080090 - RNA, 19 nt, Artificial Sequence
  Description of Artificial Sequence: Synthetic oligonucleotide
  Sense strand starting at position 2028 of SEQ ID NO: 1881906
cuaugucaucaugagagug

SEQ ID NO: 2080091 - RNA, 19 nt, Artificial Sequence
  Description of Artificial Sequence: Synthetic oligonucleotide
  Antisense strand to SEQ ID NO: 2080090
cacucucaugaugacauag

SEQ ID NO: 2080092 - RNA, 19 nt, Artificial Sequence
  Description of Artificial Sequence: Synthetic oligonucleotide
  Sense strand starting at position 2078 of SEQ ID NO: 1881906
cuggaauucucaucuguca

SEQ ID NO: 2080093 - RNA, 19 nt, Artificial Sequence
  Description of Artificial Sequence: Synthetic oligonucleotide
  Antisense strand to SEQ ID NO: 2080092
ugacagaugagaauuccag

SEQ ID NO: 2080094 - RNA, 19 nt, Artificial Sequence
  Description of Artificial Sequence: Synthetic oligonucleotide
  Sense strand starting at position 2275 of SEQ ID NO: 1881906
guaucucaaguccacaaau

SEQ ID NO: 2080095 - RNA, 19 nt, Artificial Sequence
  Description of Artificial Sequence: Synthetic oligonucleotide
  Antisense strand to SEQ ID NO: 2080094
auuuguggacuugagauac

SEQ ID NO: 2080096 - RNA, 19 nt, Artificial Sequence
  Description of Artificial Sequence: Synthetic oligonucleotide
  Sense strand starting at position 2357 of SEQ ID NO: 1881906
aggaaucagugaucuucca

SEQ ID NO: 2080097 - RNA, 19 nt, Artificial Sequence
  Description of Artificial Sequence: Synthetic oligonucleotide
  Antisense strand to SEQ ID NO: 2080096
uggaagaucacugauuccu

SEQ ID NO: 2080098 - RNA, 19 nt, Artificial Sequence
  Description of Artificial Sequence: Synthetic oligonucleotide
  Sense strand starting at position 2482 of SEQ ID NO: 1881906
gagggcuuguuauuuggca

SEQ ID NO: 2080099 - RNA, 19 nt, Artificial Sequence
  Description of Artificial Sequence: Synthetic oligonucleotide
  Antisense strand to SEQ ID NO: 2080098
ugccaaauaacaagcccuc

SEQ ID NO: 2080100 - RNA, 19 nt, Artificial Sequence
  Description of Artificial Sequence: Synthetic oligonucleotide
  Sense strand starting at position 2484 of SEQ ID NO: 1881906
gggcuuguuauuuggcacu

SEQ ID NO: 2080101 - RNA, 19 nt, Artificial Sequence
  Description of Artificial Sequence: Synthetic oligonucleotide
  Antisense strand to SEQ ID NO: 2080100
agugccaaauaacaagccc

SEQ ID NO: 2080102 - RNA, 19 nt, Artificial Sequence
  Description of Artificial Sequence: Synthetic oligonucleotide
  Sense strand starting at position 2621 of SEQ ID NO: 1881906
auagaauuggcucaugcag

SEQ ID NO: 2080103 - RNA, 19 nt, Artificial Sequence
  Description of Artificial Sequence: Synthetic oligonucleotide
  Antisense strand to SEQ ID NO: 2080102
cugcaugagccaauucuau

SEQ ID NO: 2080104 - RNA, 19 nt, Artificial Sequence
  Description of Artificial Sequence: Synthetic oligonucleotide
  Sense strand starting at position 2636 of SEQ ID NO: 1881906
gcaguuacggaggaugaga

SEQ ID NO: 2080105 - RNA, 19 nt, Artificial Sequence
  Description of Artificial Sequence: Synthetic oligonucleotide
  Antisense strand to SEQ ID NO: 2080104
ucucauccuccguaacugc

SEQ ID NO: 2080106 - RNA, 19 nt, Artificial Sequence
  Description of Artificial Sequence: Synthetic oligonucleotide
  Sense strand starting at position 2959 of SEQ ID NO: 1881906
cauugaugagggugaaucu

SEQ ID NO: 2080107 - RNA, 19 nt, Artificial Sequence
  Description of Artificial Sequence: Synthetic oligonucleotide
  Antisense strand to SEQ ID NO: 2080106
agauucacccucaucaaug

SEQ ID NO: 2080108 - RNA, 19 nt, Artificial Sequence
  Description of Artificial Sequence: Synthetic oligonucleotide
  Sense strand starting at position 3059 of SEQ ID NO: 1881906
gcuauuugggcaugccuua

SEQ ID NO: 2080109 - RNA, 19 nt, Artificial Sequence
  Description of Artificial Sequence: Synthetic oligonucleotide
  Antisense strand to SEQ ID NO: 2080108
uaaggcaugcccaaauagc

SEQ ID NO: 2080110 - RNA, 19 nt, Artificial Sequence
  Description of Artificial Sequence: Synthetic oligonucleotide
  Sense strand starting at position 3148 of SEQ ID NO: 1881906
accuuaaaguggucaagua

SEQ ID NO: 2080111 - RNA, 19 nt, Artificial Sequence
  Description of Artificial Sequence: Synthetic oligonucleotide
  Antisense strand to SEQ ID NO: 2080110
uacuugaccacuuuaaggu

SEQ ID NO: 2080112 - RNA, 19 nt, Artificial Sequence
  Description of Artificial Sequence: Synthetic oligonucleotide
  Sense strand starting at position 3149 of SEQ ID NO: 1881906
ccuuaaaguggucaaguaa

SEQ ID NO: 2080113 - RNA, 19 nt, Artificial Sequence
  Description of Artificial Sequence: Synthetic oligonucleotide
  Antisense strand to SEQ ID NO: 2080112
uuacuugaccacuuuaagg

SEQ ID NO: 2080114 - RNA, 19 nt, Artificial Sequence
  Description of Artificial Sequence: Synthetic oligonucleotide
  Sense strand starting at position 3291 of SEQ ID NO: 1881906
agauauaaacccuggaguu

SEQ ID NO: 2080115 - RNA, 19 nt, Artificial Sequence
  Description of Artificial Sequence: Synthetic oligonucleotide
  Antisense strand to SEQ ID NO: 2080114
aacuccaggguuuauaucu

SEQ ID NO: 2080116 - RNA, 19 nt, Artificial Sequence
  Description of Artificial Sequence: Synthetic oligonucleotide
  Sense strand starting at position 3292 of SEQ ID NO: 1881906
gauauaaacccuggaguuu

SEQ ID NO: 2080117 - RNA, 19 nt, Artificial Sequence
  Description of Artificial Sequence: Synthetic oligonucleotide
  Antisense strand to SEQ ID NO: 2080116
aaacuccaggguuuauauc

SEQ ID NO: 2080118 - RNA, 19 nt, Artificial Sequence
  Description of Artificial Sequence: Synthetic oligonucleotide
  Sense strand starting at position 3532 of SEQ ID NO: 1881906
ugauaauucuguguaacua

SEQ ID NO: 2080119 - RNA, 19 nt, Artificial Sequence
  Description of Artificial Sequence: Synthetic oligonucleotide
  Antisense strand to SEQ ID NO: 2080118
uaguuacacagaauuauca

SEQ ID NO: 2080120 - RNA, 19 nt, Artificial Sequence
  Description of Artificial Sequence: Synthetic oligonucleotide
  Sense strand starting at position 3533 of SEQ ID NO: 1881906
gauaauucuguguaacuag

SEQ ID NO: 2080121 - RNA, 19 nt, Artificial Sequence
  Description of Artificial Sequence: Synthetic oligonucleotide
  Antisense strand to SEQ ID NO: 2080120
cuaguuacacagaauuauc

SEQ ID NO: 2080122 - RNA, 19 nt, Artificial Sequence
  Description of Artificial Sequence: Synthetic oligonucleotide
  Sense strand starting at position 3931 of SEQ ID NO: 1881906
gggccagaaucaucucaug

SEQ ID NO: 2080123 - RNA, 19 nt, Artificial Sequence
  Description of Artificial Sequence: Synthetic oligonucleotide
  Antisense strand to SEQ ID NO: 2080122
caugagaugauucuggccc

SEQ ID NO: 2080124 - RNA, 19 nt, Artificial Sequence
  Description of Artificial Sequence: Synthetic oligonucleotide
  Sense strand starting at position 576 of SEQ ID NO: 1881907
ccuggagaccguuacucua

SEQ ID NO: 2080125 - RNA, 19 nt, Artificial Sequence
  Description of Artificial Sequence: Synthetic oligonucleotide
  Antisense strand to SEQ ID NO: 2080124
uagaguaacggucuccagg

SEQ ID NO: 2080126 - RNA, 19 nt, Artificial Sequence
  Description of Artificial Sequence: Synthetic oligonucleotide
  Sense strand starting at position 1323 of SEQ ID NO: 1881907
agccauuguguuuagaauu

SEQ ID NO: 2080127 - RNA, 19 nt, Artificial Sequence
  Description of Artificial Sequence: Synthetic oligonucleotide
  Antisense strand to SEQ ID NO: 2080126
aauucuaaacacaauggcu

SEQ ID NO: 2080128 - RNA, 19 nt, Artificial Sequence
  Description of Artificial Sequence: Synthetic oligonucleotide
  Sense strand starting at position 1331 of SEQ ID NO: 1881907
uguuuagaauuugccaagu

SEQ ID NO: 2080129 - RNA, 19 nt, Artificial Sequence
  Description of Artificial Sequence: Synthetic oligonucleotide
  Antisense strand to SEQ ID NO: 2080128
acuuggcaaauucuaaaca

SEQ ID NO: 2080130 - RNA, 19 nt, Artificial Sequence
  Description of Artificial Sequence: Synthetic oligonucleotide
  Sense strand starting at position 1577 of SEQ ID NO: 1881907
acaguuggauuccugucaa

SEQ ID NO: 2080131 - RNA, 19 nt, Artificial Sequence
  Description of Artificial Sequence: Synthetic oligonucleotide
  Antisense strand to SEQ ID NO: 2080130
uugacaggaauccaacugu

SEQ ID NO: 2080132 - RNA, 19 nt, Artificial Sequence
  Description of Artificial Sequence: Synthetic oligonucleotide
  Sense strand starting at position 1601 of SEQ ID NO: 1881907
aucgucucugcuguaagua

SEQ ID NO: 2080133 - RNA, 19 nt, Artificial Sequence
  Description of Artificial Sequence: Synthetic oligonucleotide
  Antisense strand to SEQ ID NO: 2080132
uacuuacagcagagacgau

SEQ ID NO: 2080134 - RNA, 19 nt, Artificial Sequence
  Description of Artificial Sequence: Synthetic oligonucleotide
  Sense strand starting at position 1610 of SEQ ID NO: 1881907
gcuguaaguaggcaaugaa

SEQ ID NO: 2080135 - RNA, 19 nt, Artificial Sequence
  Description of Artificial Sequence: Synthetic oligonucleotide
  Antisense strand to SEQ ID NO: 2080134
uucauugccuacuuacagc

SEQ ID NO: 2080136 - RNA, 19 nt, Artificial Sequence
  Description of Artificial Sequence: Synthetic oligonucleotide
  Sense strand starting at position 1680 of SEQ ID NO: 1881907
gaagccauuugggauggau

SEQ ID NO: 2080137 - RNA, 19 nt, Artificial Sequence
  Description of Artificial Sequence: Synthetic oligonucleotide
  Antisense strand to SEQ ID NO: 2080136
auccaucccaaauggcuuc

SEQ ID NO: 2080138 - RNA, 19 nt, Artificial Sequence
  Description of Artificial Sequence: Synthetic oligonucleotide
  Sense strand starting at position 1704 of SEQ ID NO: 1881907
aggcuuugauuaucugaug

SEQ ID NO: 2080139 - RNA, 19 nt, Artificial Sequence
  Description of Artificial Sequence: Synthetic oligonucleotide
  Antisense strand to SEQ ID NO: 2080138
caucagauaaucaaagccu

SEQ ID NO: 2080140 - RNA, 19 nt, Artificial Sequence
  Description of Artificial Sequence: Synthetic oligonucleotide
  Sense strand starting at position 1878 of SEQ ID NO: 1881907
aaugauuucugagaggaug

SEQ ID NO: 2080141 - RNA, 19 nt, Artificial Sequence
  Description of Artificial Sequence: Synthetic oligonucleotide
  Antisense strand to SEQ ID NO: 2080140
cauccucucagaaaucauu

SEQ ID NO: 2080142 - RNA, 19 nt, Artificial Sequence
  Description of Artificial Sequence: Synthetic oligonucleotide
  Sense strand starting at position 1889 of SEQ ID NO: 1881907
agaggaugguuugugcaca

SEQ ID NO: 2080143 - RNA, 19 nt, Artificial Sequence
  Description of Artificial Sequence: Synthetic oligonucleotide
  Antisense strand to SEQ ID NO: 2080142
ugugcacaaaccauccucu

SEQ ID NO: 2080144 - RNA, 19 nt, Artificial Sequence
  Description of Artificial Sequence: Synthetic oligonucleotide
  Sense strand starting at position 2174 of SEQ ID NO: 1881907
guugaucuaccaugugaca

SEQ ID NO: 2080145 - RNA, 19 nt, Artificial Sequence
  Description of Artificial Sequence: Synthetic oligonucleotide
  Antisense strand to SEQ ID NO: 2080144
ugucacaugguagaucaac

SEQ ID NO: 2080146 - RNA, 19 nt, Artificial Sequence
  Description of Artificial Sequence: Synthetic oligonucleotide
  Sense strand starting at position 2242 of SEQ ID NO: 1881907
agcaaucacgacuauguuu

SEQ ID NO: 2080147 - RNA, 19 nt, Artificial Sequence
  Description of Artificial Sequence: Synthetic oligonucleotide
  Antisense strand to SEQ ID NO: 2080146
aaacauagucgugauugcu

SEQ ID NO: 2080148 - RNA, 19 nt, Artificial Sequence
  Description of Artificial Sequence: Synthetic oligonucleotide
  Sense strand starting at position 2244 of SEQ ID NO: 1881907
caaucacgacuauguuuga

SEQ ID NO: 2080149 - RNA, 19 nt, Artificial Sequence
  Description of Artificial Sequence: Synthetic oligonucleotide
  Antisense strand to SEQ ID NO: 2080148
ucaaacauagucgugauug

SEQ ID NO: 2080150 - RNA, 19 nt, Artificial Sequence
  Description of Artificial Sequence: Synthetic oligonucleotide
  Sense strand starting at position 2272 of SEQ ID NO: 1881907
uccauuacuccagacguga

SEQ ID NO: 2080151 - RNA, 19 nt, Artificial Sequence
  Description of Artificial Sequence: Synthetic oligonucleotide
  Antisense strand to SEQ ID NO: 2080150
ucacgucuggaguaaugga

SEQ ID NO: 2080152 - RNA, 19 nt, Artificial Sequence
  Description of Artificial Sequence: Synthetic oligonucleotide
  Sense strand starting at position 2383 of SEQ ID NO: 1881907
guagcuaaccagcaucuau

SEQ ID NO: 2080153 - RNA, 19 nt, Artificial Sequence
  Description of Artificial Sequence: Synthetic oligonucleotide
  Antisense strand to SEQ ID NO: 2080152
auagaugcugguuagcuac

SEQ ID NO: 2080154 - RNA, 19 nt, Artificial Sequence
  Description of Artificial Sequence: Synthetic oligonucleotide
  Sense strand starting at position 2394 of SEQ ID NO: 1881907
gcaucuauuguugacccaa

SEQ ID NO: 2080155 - RNA, 19 nt, Artificial Sequence
  Description of Artificial Sequence: Synthetic oligonucleotide
  Antisense strand to SEQ ID NO: 2080154
uugggucaacaauagaugc

SEQ ID NO: 2080156 - RNA, 19 nt, Artificial Sequence
  Description of Artificial Sequence: Synthetic oligonucleotide
  Sense strand starting at position 2628 of SEQ ID NO: 1881907
gaggaaaggugaguuaucu

SEQ ID NO: 2080157 - RNA, 19 nt, Artificial Sequence
  Description of Artificial Sequence: Synthetic oligonucleotide
  Antisense strand to SEQ ID NO: 2080156
agauaacucaccuuuccuc

SEQ ID NO: 2080158 - RNA, 19 nt, Artificial Sequence
  Description of Artificial Sequence: Synthetic oligonucleotide
  Sense strand starting at position 2632 of SEQ ID NO: 1881907
aaaggugaguuaucugaau

SEQ ID NO: 2080159 - RNA, 19 nt, Artificial Sequence
  Description of Artificial Sequence: Synthetic oligonucleotide
  Antisense strand to SEQ ID NO: 2080158
auucagauaacucaccuuu

SEQ ID NO: 2080160 - RNA, 19 nt, Artificial Sequence
  Description of Artificial Sequence: Synthetic oligonucleotide
  Sense strand starting at position 2634 of SEQ ID NO: 1881907
aggugaguuaucugaauag

SEQ ID NO: 2080161 - RNA, 19 nt, Artificial Sequence
  Description of Artificial Sequence: Synthetic oligonucleotide
  Antisense strand to SEQ ID NO: 2080160
cuauucagauaacucaccu

SEQ ID NO: 2080162 - RNA, 19 nt, Artificial Sequence
  Description of Artificial Sequence: Synthetic oligonucleotide
  Sense strand starting at position 2645 of SEQ ID NO: 1881907
cugaauagagacggaugua

SEQ ID NO: 2080163 - RNA, 19 nt, Artificial Sequence
  Description of Artificial Sequence: Synthetic oligonucleotide
  Antisense strand to SEQ ID NO: 2080162
uacauccgucucuauucag

SEQ ID NO: 2080164 - RNA, 19 nt, Artificial Sequence
  Description of Artificial Sequence: Synthetic oligonucleotide
  Sense strand starting at position 2648 of SEQ ID NO: 1881907
aauagagacggauguauca

SEQ ID NO: 2080165 - RNA, 19 nt, Artificial Sequence
  Description of Artificial Sequence: Synthetic oligonucleotide
  Antisense strand to SEQ ID NO: 2080164
ugauacauccgucucuauu

SEQ ID NO: 2080166 - RNA, 19 nt, Artificial Sequence
  Description of Artificial Sequence: Synthetic oligonucleotide
  Sense strand starting at position 2650 of SEQ ID NO: 1881907
uagagacggauguaucagu

SEQ ID NO: 2080167 - RNA, 19 nt, Artificial Sequence
  Description of Artificial Sequence: Synthetic oligonucleotide
  Antisense strand to SEQ ID NO: 2080166
acugauacauccgucucua

SEQ ID NO: 2080168 - RNA, 19 nt, Artificial Sequence
  Description of Artificial Sequence: Synthetic oligonucleotide
  Sense strand starting at position 2757 of SEQ ID NO: 1881907
cagcuugagccuugauuuc

SEQ ID NO: 2080169 - RNA, 19 nt, Artificial Sequence
  Description of Artificial Sequence: Synthetic oligonucleotide
  Antisense strand to SEQ ID NO: 2080168
gaaaucaaggcucaagcug

SEQ ID NO: 2080170 - RNA, 19 nt, Artificial Sequence
  Description of Artificial Sequence: Synthetic oligonucleotide
  Sense strand starting at position 2777 of SEQ ID NO: 1881907
ucaucugucagaugaguug

SEQ ID NO: 2080171 - RNA, 19 nt, Artificial Sequence
  Description of Artificial Sequence: Synthetic oligonucleotide
  Antisense strand to SEQ ID NO: 2080170
caacucaucugacagauga

SEQ ID NO: 2080172 - RNA, 19 nt, Artificial Sequence
  Description of Artificial Sequence: Synthetic oligonucleotide
  Sense strand starting at position 2812 of SEQ ID NO: 1881907
ucugaaaugggcugaguau

SEQ ID NO: 2080173 - RNA, 19 nt, Artificial Sequence
  Description of Artificial Sequence: Synthetic oligonucleotide
  Antisense strand to SEQ ID NO: 2080172
auacucagcccauuucaga

SEQ ID NO: 2080174 - RNA, 19 nt, Artificial Sequence
  Description of Artificial Sequence: Synthetic oligonucleotide
  Sense strand starting at position 2813 of SEQ ID NO: 1881907
cugaaaugggcugaguauc

SEQ ID NO: 2080175 - RNA, 19 nt, Artificial Sequence
  Description of Artificial Sequence: Synthetic oligonucleotide
  Antisense strand to SEQ ID NO: 2080174
gauacucagcccauuucag

SEQ ID NO: 2080176 - RNA, 19 nt, Artificial Sequence
  Description of Artificial Sequence: Synthetic oligonucleotide
  Sense strand starting at position 2823 of SEQ ID NO: 1881907
cugaguaucuugucagaac

SEQ ID NO: 2080177 - RNA, 19 nt, Artificial Sequence
  Description of Artificial Sequence: Synthetic oligonucleotide
  Antisense strand to SEQ ID NO: 2080176
guucugacaagauacucag

SEQ ID NO: 2080178 - RNA, 19 nt, Artificial Sequence
  Description of Artificial Sequence: Synthetic oligonucleotide
  Sense strand starting at position 2918 of SEQ ID NO: 1881907
gugaauccaucugucaaug

SEQ ID NO: 2080179 - RNA, 19 nt, Artificial Sequence
  Description of Artificial Sequence: Synthetic oligonucleotide
  Antisense strand to SEQ ID NO: 2080178
cauugacagauggauucac

SEQ ID NO: 2080180 - RNA, 19 nt, Artificial Sequence
  Description of Artificial Sequence: Synthetic oligonucleotide
  Sense strand starting at position 3106 of SEQ ID NO: 1881907
guauaaaucgagugugaag

SEQ ID NO: 2080181 - RNA, 19 nt, Artificial Sequence
  Description of Artificial Sequence: Synthetic oligonucleotide
  Antisense strand to SEQ ID NO: 2080180
cuucacacucgauuuauac

SEQ ID NO: 2080182 - RNA, 19 nt, Artificial Sequence
  Description of Artificial Sequence: Synthetic oligonucleotide
  Sense strand starting at position 3108 of SEQ ID NO: 1881907
auaaaucgagugugaagaa

SEQ ID NO: 2080183 - RNA, 19 nt, Artificial Sequence
  Description of Artificial Sequence: Synthetic oligonucleotide
  Antisense strand to SEQ ID NO: 2080182
uucuucacacucgauuuau

SEQ ID NO: 2080184 - RNA, 19 nt, Artificial Sequence
  Description of Artificial Sequence: Synthetic oligonucleotide
  Sense strand starting at position 3139 of SEQ ID NO: 1881907
gagcauacuaugugaaggu

SEQ ID NO: 2080185 - RNA, 19 nt, Artificial Sequence
  Description of Artificial Sequence: Synthetic oligonucleotide
  Antisense strand to SEQ ID NO: 2080184
accuucacauaguaugcuc

SEQ ID NO: 2080186 - RNA, 19 nt, Artificial Sequence
  Description of Artificial Sequence: Synthetic oligonucleotide
  Sense strand starting at position 3198 of SEQ ID NO: 1881907
gcagcuguugggagcagua

SEQ ID NO: 2080187 - RNA, 19 nt, Artificial Sequence
  Description of Artificial Sequence: Synthetic oligonucleotide
  Antisense strand to SEQ ID NO: 2080186
uacugcucccaacagcugc

SEQ ID NO: 2080188 - RNA, 19 nt, Artificial Sequence
  Description of Artificial Sequence: Synthetic oligonucleotide
  Sense strand starting at position 3658 of SEQ ID NO: 1881907
uuucuaugacuaugaauug

SEQ ID NO: 2080189 - RNA, 19 nt, Artificial Sequence
  Description of Artificial Sequence: Synthetic oligonucleotide
  Antisense strand to SEQ ID NO: 2080188
caauucauagucauagaaa

SEQ ID NO: 2080190 - RNA, 19 nt, Artificial Sequence
  Description of Artificial Sequence: Synthetic oligonucleotide
  Sense strand starting at position 3665 of SEQ ID NO: 1881907
gacuaugaauuggaaagaa

SEQ ID NO: 2080191 - RNA, 19 nt, Artificial Sequence
  Description of Artificial Sequence: Synthetic oligonucleotide
  Antisense strand to SEQ ID NO: 2080190
uucuuuccaauucauaguc

SEQ ID NO: 2080192 - RNA, 19 nt, Artificial Sequence
  Description of Artificial Sequence: Synthetic oligonucleotide
  Sense strand starting at position 3713 of SEQ ID NO: 1881907
ugaugacauugugugauaa

SEQ ID NO: 2080193 - RNA, 19 nt, Artificial Sequence
  Description of Artificial Sequence: Synthetic oligonucleotide
  Antisense strand to SEQ ID NO: 2080192
uuaucacacaaugucauca

SEQ ID NO: 2080194 - RNA, 19 nt, Artificial Sequence
  Description of Artificial Sequence: Synthetic oligonucleotide
  Sense strand starting at position 3714 of SEQ ID NO: 1881907
gaugacauugugugauaau

SEQ ID NO: 2080195 - RNA, 19 nt, Artificial Sequence
  Description of Artificial Sequence: Synthetic oligonucleotide
  Antisense strand to SEQ ID NO: 2080194
auuaucacacaaugucauc

SEQ ID NO: 2080196 - RNA, 19 nt, Artificial Sequence
  Description of Artificial Sequence: Synthetic oligonucleotide
  Sense strand starting at position 3807 of SEQ ID NO: 1881907
ggccuaccugagugcauuu

SEQ ID NO: 2080197 - RNA, 19 nt, Artificial Sequence
  Description of Artificial Sequence: Synthetic oligonucleotide
  Antisense strand to SEQ ID NO: 2080196
aaaugcacucagguaggcc

SEQ ID NO: 2080198 - RNA, 19 nt, Artificial Sequence
  Description of Artificial Sequence: Synthetic oligonucleotide
  Sense strand starting at position 3827 of SEQ ID NO: 1881907
ucauguuaagcagacaaua

SEQ ID NO: 2080199 - RNA, 19 nt, Artificial Sequence
  Description of Artificial Sequence: Synthetic oligonucleotide
  Antisense strand to SEQ ID NO: 2080198
uauugucugcuuaacauga

SEQ ID NO: 2080200 - RNA, 19 nt, Artificial Sequence
  Description of Artificial Sequence: Synthetic oligonucleotide
  Sense strand starting at position 3970 of SEQ ID NO: 1881907
cucugaguuuguccaggaa

SEQ ID NO: 2080201 - RNA, 19 nt, Artificial Sequence
  Description of Artificial Sequence: Synthetic oligonucleotide
  Antisense strand to SEQ ID NO: 2080200
uuccuggacaaacucagag

SEQ ID NO: 2080202 - RNA, 19 nt, Artificial Sequence
  Description of Artificial Sequence: Synthetic oligonucleotide
  Sense strand starting at position 3973 of SEQ ID NO: 1881907
ugaguuuguccaggaagau

SEQ ID NO: 2080203 - RNA, 19 nt, Artificial Sequence
  Description of Artificial Sequence: Synthetic oligonucleotide
  Antisense strand to SEQ ID NO: 2080202
aucuuccuggacaaacuca

SEQ ID NO: 2080204 - RNA, 19 nt, Artificial Sequence
  Description of Artificial Sequence: Synthetic oligonucleotide
  Sense strand starting at position 30 of SEQ ID NO: 1881908
ucuugaacauuuggagaga

SEQ ID NO: 2080205 - RNA, 19 nt, Artificial Sequence
  Description of Artificial Sequence: Synthetic oligonucleotide
  Antisense strand to SEQ ID NO: 2080204
ucucuccaaauguucaaga

SEQ ID NO: 2080206 - RNA, 19 nt, Artificial Sequence
  Description of Artificial Sequence: Synthetic oligonucleotide
  Sense strand starting at position 230 of SEQ ID NO: 1881908
gaaguacguguuuauggaa

SEQ ID NO: 2080207 - RNA, 19 nt, Artificial Sequence
  Description of Artificial Sequence: Synthetic oligonucleotide
  Antisense strand to SEQ ID NO: 2080206
uuccauaaacacguacuuc

SEQ ID NO: 2080208 - RNA, 19 nt, Artificial Sequence
  Description of Artificial Sequence: Synthetic oligonucleotide
  Sense strand starting at position 249 of SEQ ID NO: 1881908
ucugucauuggugguauuu

SEQ ID NO: 2080209 - RNA, 19 nt, Artificial Sequence
  Description of Artificial Sequence: Synthetic oligonucleotide
  Antisense strand to SEQ ID NO: 2080208
aaauaccaccaaugacaga

SEQ ID NO: 2080210 - RNA, 19 nt, Artificial Sequence
  Description of Artificial Sequence: Synthetic oligonucleotide
  Sense strand starting at position 693 of SEQ ID NO: 1881908
gggaaacaauggucgacuu

SEQ ID NO: 2080211 - RNA, 19 nt, Artificial Sequence
  Description of Artificial Sequence: Synthetic oligonucleotide
  Antisense strand to SEQ ID NO: 2080210
aagucgaccauuguuuccc

SEQ ID NO: 2080212 - RNA, 19 nt, Artificial Sequence
  Description of Artificial Sequence: Synthetic oligonucleotide
  Sense strand starting at position 694 of SEQ ID NO: 1881908
ggaaacaauggucgacuuu

SEQ ID NO: 2080213 - RNA, 19 nt, Artificial Sequence
  Description of Artificial Sequence: Synthetic oligonucleotide
  Antisense strand to SEQ ID NO: 2080212
aaagucgaccauuguuucc

SEQ ID NO: 2080214 - RNA, 19 nt, Artificial Sequence
  Description of Artificial Sequence: Synthetic oligonucleotide
  Sense strand starting at position 801 of SEQ ID NO: 1881908
gguagaauuguugggaggu

SEQ ID NO: 2080215 - RNA, 19 nt, Artificial Sequence
  Description of Artificial Sequence: Synthetic oligonucleotide
  Antisense strand to SEQ ID NO: 2080214
accucccaacaauucuacc

SEQ ID NO: 2080216 - RNA, 19 nt, Artificial Sequence
  Description of Artificial Sequence: Synthetic oligonucleotide
  Sense strand starting at position 830 of SEQ ID NO: 1881908
gagaaucaacuccgugaau

SEQ ID NO: 2080217 - RNA, 19 nt, Artificial Sequence
  Description of Artificial Sequence: Synthetic oligonucleotide
  Antisense strand to SEQ ID NO: 2080216
auucacggaguugauucuc

SEQ ID NO: 2080218 - RNA, 19 nt, Artificial Sequence
  Description of Artificial Sequence: Synthetic oligonucleotide
  Sense strand starting at position 831 of SEQ ID NO: 1881908
agaaucaacuccgugaaua

SEQ ID NO: 2080219 - RNA, 19 nt, Artificial Sequence
  Description of Artificial Sequence: Synthetic oligonucleotide
  Antisense strand to SEQ ID NO: 2080218
uauucacggaguugauucu

SEQ ID NO: 2080220 - RNA, 19 nt, Artificial Sequence
  Description of Artificial Sequence: Synthetic oligonucleotide
  Sense strand starting at position 844 of SEQ ID NO: 1881908
ugaauaaugaauuguguug

SEQ ID NO: 2080221 - RNA, 19 nt, Artificial Sequence
  Description of Artificial Sequence: Synthetic oligonucleotide
  Antisense strand to SEQ ID NO: 2080220
caacacaauucauuauuca

SEQ ID NO: 2080222 - RNA, 19 nt, Artificial Sequence
  Description of Artificial Sequence: Synthetic oligonucleotide
  Sense strand starting at position 859 of SEQ ID NO: 1881908
guugacacgguacauaaua

SEQ ID NO: 2080223 - RNA, 19 nt, Artificial Sequence
  Description of Artificial Sequence: Synthetic oligonucleotide
  Antisense strand to SEQ ID NO: 2080222
uauuauguaccgugucaac

SEQ ID NO: 2080224 - RNA, 19 nt, Artificial Sequence
  Description of Artificial Sequence: Synthetic oligonucleotide
  Sense strand starting at position 897 of SEQ ID NO: 1881908
ggcggcauuucacuaagua

SEQ ID NO: 2080225 - RNA, 19 nt, Artificial Sequence
  Description of Artificial Sequence: Synthetic oligonucleotide
  Antisense strand to SEQ ID NO: 2080224
uacuuagugaaaugccgcc

SEQ ID NO: 2080226 - RNA, 19 nt, Artificial Sequence
  Description of Artificial Sequence: Synthetic oligonucleotide
  Sense strand starting at position 912 of SEQ ID NO: 1881908
aguaauuacuaccugaagu

SEQ ID NO: 2080227 - RNA, 19 nt, Artificial Sequence
  Description of Artificial Sequence: Synthetic oligonucleotide
  Antisense strand to SEQ ID NO: 2080226
acuucagguaguaauuacu

SEQ ID NO: 2080228 - RNA, 19 nt, Artificial Sequence
  Description of Artificial Sequence: Synthetic oligonucleotide
  Sense strand starting at position 1096 of SEQ ID NO: 1881908
gggaguagggauugccuga

SEQ ID NO: 2080229 - RNA, 19 nt, Artificial Sequence
  Description of Artificial Sequence: Synthetic oligonucleotide
  Antisense strand to SEQ ID NO: 2080228
ucaggcaaucccuacuccc

SEQ ID NO: 2080230 - RNA, 19 nt, Artificial Sequence
  Description of Artificial Sequence: Synthetic oligonucleotide
  Sense strand starting at position 1147 of SEQ ID NO: 1881908
gaccucuuagguuaugacu

SEQ ID NO: 2080231 - RNA, 19 nt, Artificial Sequence
  Description of Artificial Sequence: Synthetic oligonucleotide
  Antisense strand to SEQ ID NO: 2080230
agucauaaccuaagagguc

SEQ ID NO: 2080232 - RNA, 19 nt, Artificial Sequence
  Description of Artificial Sequence: Synthetic oligonucleotide
  Sense strand starting at position 1269 of SEQ ID NO: 1881908
uucgguuguggagaacgaa

SEQ ID NO: 2080233 - RNA, 19 nt, Artificial Sequence
  Description of Artificial Sequence: Synthetic oligonucleotide
  Antisense strand to SEQ ID NO: 2080232
uucguucuccacaaccgaa

SEQ ID NO: 2080234 - RNA, 19 nt, Artificial Sequence
  Description of Artificial Sequence: Synthetic oligonucleotide
  Sense strand starting at position 1449 of SEQ ID NO: 1881908
cucugaaagaucuacgguu

SEQ ID NO: 2080235 - RNA, 19 nt, Artificial Sequence
  Description of Artificial Sequence: Synthetic oligonucleotide
  Antisense strand to SEQ ID NO: 2080234
aaccguagaucuuucagag

SEQ ID NO: 2080236 - RNA, 19 nt, Artificial Sequence
  Description of Artificial Sequence: Synthetic oligonucleotide
  Sense strand starting at position 1462 of SEQ ID NO: 1881908
acgguuugucuggucugua

SEQ ID NO: 2080237 - RNA, 19 nt, Artificial Sequence
  Description of Artificial Sequence: Synthetic oligonucleotide
  Antisense strand to SEQ ID NO: 2080236
uacagaccagacaaaccgu

SEQ ID NO: 2080238 - RNA, 19 nt, Artificial Sequence
  Description of Artificial Sequence: Synthetic oligonucleotide
  Sense strand starting at position 1483 of SEQ ID NO: 1881908
gagcaaacacgguggaauu

SEQ ID NO: 2080239 - RNA, 19 nt, Artificial Sequence
  Description of Artificial Sequence: Synthetic oligonucleotide
  Antisense strand to SEQ ID NO: 2080238
aauuccaccguguuugcuc

SEQ ID NO: 2080240 - RNA, 19 nt, Artificial Sequence
  Description of Artificial Sequence: Synthetic oligonucleotide
  Sense strand starting at position 1495 of SEQ ID NO: 1881908
uggaauuccuuuccagauu

SEQ ID NO: 2080241 - RNA, 19 nt, Artificial Sequence
  Description of Artificial Sequence: Synthetic oligonucleotide
  Antisense strand to SEQ ID NO: 2080240
aaucuggaaaggaauucca

SEQ ID NO: 2080242 - RNA, 19 nt, Artificial Sequence
  Description of Artificial Sequence: Synthetic oligonucleotide
  Sense strand starting at position 2341 of SEQ ID NO: 1881908
gcaaauagcccagagucuu

SEQ ID NO: 2080243 - RNA, 19 nt, Artificial Sequence
  Description of Artificial Sequence: Synthetic oligonucleotide
  Antisense strand to SEQ ID NO: 2080242
aagacucugggcuauuugc

SEQ ID NO: 2080244 - RNA, 19 nt, Artificial Sequence
  Description of Artificial Sequence: Synthetic oligonucleotide
  Sense strand starting at position 2354 of SEQ ID NO: 1881908
agucuuaaaugcucuaaag

SEQ ID NO: 2080245 - RNA, 19 nt, Artificial Sequence
  Description of Artificial Sequence: Synthetic oligonucleotide
  Antisense strand to SEQ ID NO: 2080244
cuuuagagcauuuaagacu

SEQ ID NO: 2080246 - RNA, 19 nt, Artificial Sequence
  Description of Artificial Sequence: Synthetic oligonucleotide
  Sense strand starting at position 2483 of SEQ ID NO: 1881908
ggcagcugugagcuaguuu

SEQ ID NO: 2080247 - RNA, 19 nt, Artificial Sequence
  Description of Artificial Sequence: Synthetic oligonucleotide
  Antisense strand to SEQ ID NO: 2080246
aaacuagcucacagcugcc

SEQ ID NO: 2080248 - RNA, 19 nt, Artificial Sequence
  Description of Artificial Sequence: Synthetic oligonucleotide
  Sense strand starting at position 2534 of SEQ ID NO: 1881908
guaguaaacuucuuaaaga

SEQ ID NO: 2080249 - RNA, 19 nt, Artificial Sequence
  Description of Artificial Sequence: Synthetic oligonucleotide
  Antisense strand to SEQ ID NO: 2080248
ucuuuaagaaguuuacuac

SEQ ID NO: 2080250 - RNA, 19 nt, Artificial Sequence
  Description of Artificial Sequence: Synthetic oligonucleotide
  Sense strand starting at position 2630 of SEQ ID NO: 1881908
ggcuauaugaucuggaggu

SEQ ID NO: 2080251 - RNA, 19 nt, Artificial Sequence
  Description of Artificial Sequence: Synthetic oligonucleotide
  Antisense strand to SEQ ID NO: 2080250
accuccagaucauauagcc

SEQ ID NO: 2080252 - RNA, 19 nt, Artificial Sequence
  Description of Artificial Sequence: Synthetic oligonucleotide
  Sense strand starting at position 2660 of SEQ ID NO: 1881908
auuauauagaguugaagug

SEQ ID NO: 2080253 - RNA, 19 nt, Artificial Sequence
  Description of Artificial Sequence: Synthetic oligonucleotide
  Antisense strand to SEQ ID NO: 2080252
cacuucaacucuauauaau

SEQ ID NO: 2080254 - RNA, 19 nt, Artificial Sequence
  Description of Artificial Sequence: Synthetic oligonucleotide
  Sense strand starting at position 2711 of SEQ ID NO: 1881908
aggagaagaacuuguccuu

SEQ ID NO: 2080255 - RNA, 19 nt, Artificial Sequence
  Description of Artificial Sequence: Synthetic oligonucleotide
  Antisense strand to SEQ ID NO: 2080254
aaggacaaguucuucuccu

SEQ ID NO: 2080256 - RNA, 19 nt, Artificial Sequence
  Description of Artificial Sequence: Synthetic oligonucleotide
  Sense strand starting at position 3007 of SEQ ID NO: 1881908
gaaguaguaggaugguuau

SEQ ID NO: 2080257 - RNA, 19 nt, Artificial Sequence
  Description of Artificial Sequence: Synthetic oligonucleotide
  Antisense strand to SEQ ID NO: 2080256
auaaccauccuacuacuuc

SEQ ID NO: 2080258 - RNA, 19 nt, Artificial Sequence
  Description of Artificial Sequence: Synthetic oligonucleotide
  Sense strand starting at position 3010 of SEQ ID NO: 1881908
guaguaggaugguuauaaa

SEQ ID NO: 2080259 - RNA, 19 nt, Artificial Sequence
  Description of Artificial Sequence: Synthetic oligonucleotide
  Antisense strand to SEQ ID NO: 2080258
uuuauaaccauccuacuac

SEQ ID NO: 2080260 - RNA, 19 nt, Artificial Sequence
  Description of Artificial Sequence: Synthetic oligonucleotide
  Sense strand starting at position 3017 of SEQ ID NO: 1881908
gaugguuauaaauggaguu

SEQ ID NO: 2080261 - RNA, 19 nt, Artificial Sequence
  Description of Artificial Sequence: Synthetic oligonucleotide
  Antisense strand to SEQ ID NO: 2080260
aacuccauuuauaaccauc

SEQ ID NO: 2080262 - RNA, 19 nt, Artificial Sequence
  Description of Artificial Sequence: Synthetic oligonucleotide
  Sense strand starting at position 3018 of SEQ ID NO: 1881908
augguuauaaauggaguua

SEQ ID NO: 2080263 - RNA, 19 nt, Artificial Sequence
  Description of Artificial Sequence: Synthetic oligonucleotide
  Antisense strand to SEQ ID NO: 2080262
uaacuccauuuauaaccau

SEQ ID NO: 2080264 - RNA, 19 nt, Artificial Sequence
  Description of Artificial Sequence: Synthetic oligonucleotide
  Sense strand starting at position 3167 of SEQ ID NO: 1881908
guuuacacuguugaaucau

SEQ ID NO: 2080265 - RNA, 19 nt, Artificial Sequence
  Description of Artificial Sequence: Synthetic oligonucleotide
  Antisense strand to SEQ ID NO: 2080264
augauucaacaguguaaac

SEQ ID NO: 2080266 - RNA, 19 nt, Artificial Sequence
  Description of Artificial Sequence: Synthetic oligonucleotide
  Sense strand starting at position 3193 of SEQ ID NO: 1881908
uguguugagucauuuguuc

SEQ ID NO: 2080267 - RNA, 19 nt, Artificial Sequence
  Description of Artificial Sequence: Synthetic oligonucleotide
  Antisense strand to SEQ ID NO: 2080266
gaacaaaugacucaacaca

SEQ ID NO: 2080268 - RNA, 19 nt, Artificial Sequence
  Description of Artificial Sequence: Synthetic oligonucleotide
  Sense strand starting at position 3195 of SEQ ID NO: 1881908
uguugagucauuuguuccu

SEQ ID NO: 2080269 - RNA, 19 nt, Artificial Sequence
  Description of Artificial Sequence: Synthetic oligonucleotide
  Antisense strand to SEQ ID NO: 2080268
aggaacaaaugacucaaca

SEQ ID NO: 2080270 - RNA, 19 nt, Artificial Sequence
  Description of Artificial Sequence: Synthetic oligonucleotide
  Sense strand starting at position 3197 of SEQ ID NO: 1881908
uugagucauuuguuccuua

SEQ ID NO: 2080271 - RNA, 19 nt, Artificial Sequence
  Description of Artificial Sequence: Synthetic oligonucleotide
  Antisense strand to SEQ ID NO: 2080270
uaaggaacaaaugacucaa

SEQ ID NO: 2080272 - RNA, 19 nt, Artificial Sequence
  Description of Artificial Sequence: Synthetic oligonucleotide
  Sense strand starting at position 3198 of SEQ ID NO: 1881908
ugagucauuuguuccuuau

SEQ ID NO: 2080273 - RNA, 19 nt, Artificial Sequence
  Description of Artificial Sequence: Synthetic oligonucleotide
  Antisense strand to SEQ ID NO: 2080272
auaaggaacaaaugacuca

SEQ ID NO: 2080274 - RNA, 19 nt, Artificial Sequence
  Description of Artificial Sequence: Synthetic oligonucleotide
  Sense strand starting at position 3201 of SEQ ID NO: 1881908
gucauuuguuccuuaugcu

SEQ ID NO: 2080275 - RNA, 19 nt, Artificial Sequence
  Description of Artificial Sequence: Synthetic oligonucleotide
  Antisense strand to SEQ ID NO: 2080274
agcauaaggaacaaaugac

SEQ ID NO: 2080276 - RNA, 19 nt, Artificial Sequence
  Description of Artificial Sequence: Synthetic oligonucleotide
  Sense strand starting at position 3804 of SEQ ID NO: 1881908
gcuuuaguucgcuucugag

SEQ ID NO: 2080277 - RNA, 19 nt, Artificial Sequence
  Description of Artificial Sequence: Synthetic oligonucleotide
  Antisense strand to SEQ ID NO: 2080276
cucagaagcgaacuaaagc

SEQ ID NO: 2080278 - RNA, 19 nt, Artificial Sequence
  Description of Artificial Sequence: Synthetic oligonucleotide
  Sense strand starting at position 3816 of SEQ ID NO: 1881908
uucugagcuccagauguau

SEQ ID NO: 2080279 - RNA, 19 nt, Artificial Sequence
  Description of Artificial Sequence: Synthetic oligonucleotide
  Antisense strand to SEQ ID NO: 2080278
auacaucuggagcucagaa

SEQ ID NO: 2080280 - RNA, 19 nt, Artificial Sequence
  Description of Artificial Sequence: Synthetic oligonucleotide
  Sense strand starting at position 3834 of SEQ ID NO: 1881908
uguguauguccagcuguuu

SEQ ID NO: 2080281 - RNA, 19 nt, Artificial Sequence
  Description of Artificial Sequence: Synthetic oligonucleotide
  Antisense strand to SEQ ID NO: 2080280
aaacagcuggacauacaca

SEQ ID NO: 2080282 - RNA, 19 nt, Artificial Sequence
  Description of Artificial Sequence: Synthetic oligonucleotide
  Sense strand starting at position 3835 of SEQ ID NO: 1881908
guguauguccagcuguuua

SEQ ID NO: 2080283 - RNA, 19 nt, Artificial Sequence
  Description of Artificial Sequence: Synthetic oligonucleotide
  Antisense strand to SEQ ID NO: 2080282
uaaacagcuggacauacac

SEQ ID NO: 2080284 - RNA, 19 nt, Artificial Sequence
  Description of Artificial Sequence: Synthetic oligonucleotide
  Sense strand starting at position 16 of SEQ ID NO: 1881909
aaaugaugauaauucguca

SEQ ID NO: 2080285 - RNA, 19 nt, Artificial Sequence
  Description of Artificial Sequence: Synthetic oligonucleotide
  Antisense strand to SEQ ID NO: 2080284
ugacgaauuaucaucauuu

SEQ ID NO: 2080286 - RNA, 19 nt, Artificial Sequence
  Description of Artificial Sequence: Synthetic oligonucleotide
  Sense strand starting at position 19 of SEQ ID NO: 1881909
ugaugauaauucgucauua

SEQ ID NO: 2080287 - RNA, 19 nt, Artificial Sequence
  Description of Artificial Sequence: Synthetic oligonucleotide
  Antisense strand to SEQ ID NO: 2080286
uaaugacgaauuaucauca

SEQ ID NO: 2080288 - RNA, 19 nt, Artificial Sequence
  Description of Artificial Sequence: Synthetic oligonucleotide
  Sense strand starting at position 20 of SEQ ID NO: 1881909
gaugauaauucgucauuaa

SEQ ID NO: 2080289 - RNA, 19 nt, Artificial Sequence
  Description of Artificial Sequence: Synthetic oligonucleotide
  Antisense strand to SEQ ID NO: 2080288
uuaaugacgaauuaucauc

SEQ ID NO: 2080290 - RNA, 19 nt, Artificial Sequence
  Description of Artificial Sequence: Synthetic oligonucleotide
  Sense strand starting at position 88 of SEQ ID NO: 1881909
acugaauguuucuuaguau

SEQ ID NO: 2080291 - RNA, 19 nt, Artificial Sequence
  Description of Artificial Sequence: Synthetic oligonucleotide
  Antisense strand to SEQ ID NO: 2080290
auacuaagaaacauucagu

SEQ ID NO: 2080292 - RNA, 19 nt, Artificial Sequence
  Description of Artificial Sequence: Synthetic oligonucleotide
  Sense strand starting at position 149 of SEQ ID NO: 1881909
aauugcauugcuggaauga

SEQ ID NO: 2080293 - RNA, 19 nt, Artificial Sequence
  Description of Artificial Sequence: Synthetic oligonucleotide
  Antisense strand to SEQ ID NO: 2080292
ucauuccagcaaugcaauu

SEQ ID NO: 2080294 - RNA, 19 nt, Artificial Sequence
  Description of Artificial Sequence: Synthetic oligonucleotide
  Sense strand starting at position 272 of SEQ ID NO: 1881909
gccagcuuucucuagaauu

SEQ ID NO: 2080295 - RNA, 19 nt, Artificial Sequence
  Description of Artificial Sequence: Synthetic oligonucleotide
  Antisense strand to SEQ ID NO: 2080294
aauucuagagaaagcuggc

SEQ ID NO: 2080296 - RNA, 19 nt, Artificial Sequence
  Description of Artificial Sequence: Synthetic oligonucleotide
  Sense strand starting at position 321 of SEQ ID NO: 1881909
auugguuugaaguggagaa

SEQ ID NO: 2080297 - RNA, 19 nt, Artificial Sequence
  Description of Artificial Sequence: Synthetic oligonucleotide
  Antisense strand to SEQ ID NO: 2080296
uucuccacuucaaaccaau

SEQ ID NO: 2080298 - RNA, 19 nt, Artificial Sequence
  Description of Artificial Sequence: Synthetic oligonucleotide
  Sense strand starting at position 406 of SEQ ID NO: 1881909
gaaggaaacccuggugagu

SEQ ID NO: 2080299 - RNA, 19 nt, Artificial Sequence
  Description of Artificial Sequence: Synthetic oligonucleotide
  Antisense strand to SEQ ID NO: 2080298
acucaccaggguuuccuuc

SEQ ID NO: 2080300 - RNA, 19 nt, Artificial Sequence
  Description of Artificial Sequence: Synthetic oligonucleotide
  Sense strand starting at position 419 of SEQ ID NO: 1881909
gugaguuuauccuugauaa

SEQ ID NO: 2080301 - RNA, 19 nt, Artificial Sequence
  Description of Artificial Sequence: Synthetic oligonucleotide
  Antisense strand to SEQ ID NO: 2080300
uuaucaaggauaaacucac

SEQ ID NO: 2080302 - RNA, 19 nt, Artificial Sequence
  Description of Artificial Sequence: Synthetic oligonucleotide
  Sense strand starting at position 420 of SEQ ID NO: 1881909
ugaguuuauccuugauaag

SEQ ID NO: 2080303 - RNA, 19 nt, Artificial Sequence
  Description of Artificial Sequence: Synthetic oligonucleotide
  Antisense strand to SEQ ID NO: 2080302
cuuaucaaggauaaacuca

SEQ ID NO: 2080304 - RNA, 19 nt, Artificial Sequence
  Description of Artificial Sequence: Synthetic oligonucleotide
  Sense strand starting at position 421 of SEQ ID NO: 1881909
gaguuuauccuugauaagu

SEQ ID NO: 2080305 - RNA, 19 nt, Artificial Sequence
  Description of Artificial Sequence: Synthetic oligonucleotide
  Antisense strand to SEQ ID NO: 2080304
acuuaucaaggauaaacuc

SEQ ID NO: 2080306 - RNA, 19 nt, Artificial Sequence
  Description of Artificial Sequence: Synthetic oligonucleotide
  Sense strand starting at position 499 of SEQ ID NO: 1881909
cucacaauccaguagugua

SEQ ID NO: 2080307 - RNA, 19 nt, Artificial Sequence
  Description of Artificial Sequence: Synthetic oligonucleotide
  Antisense strand to SEQ ID NO: 2080306
uacacuacuggauugugag

SEQ ID NO: 2080308 - RNA, 19 nt, Artificial Sequence
  Description of Artificial Sequence: Synthetic oligonucleotide
  Sense strand starting at position 553 of SEQ ID NO: 1881909
uccagagauguuuacuucu

SEQ ID NO: 2080309 - RNA, 19 nt, Artificial Sequence
  Description of Artificial Sequence: Synthetic oligonucleotide
  Antisense strand to SEQ ID NO: 2080308
agaaguaaacaucucugga

SEQ ID NO: 2080310 - RNA, 19 nt, Artificial Sequence
  Description of Artificial Sequence: Synthetic oligonucleotide
  Sense strand starting at position 797 of SEQ ID NO: 1881909
auacaauuauggguucuua

SEQ ID NO: 2080311 - RNA, 19 nt, Artificial Sequence
  Description of Artificial Sequence: Synthetic oligonucleotide
  Antisense strand to SEQ ID NO: 2080310
uaagaacccauaauuguau

SEQ ID NO: 2080312 - RNA, 19 nt, Artificial Sequence
  Description of Artificial Sequence: Synthetic oligonucleotide
  Sense strand starting at position 1050 of SEQ ID NO: 1881909
aguuuaaagucauugauca

SEQ ID NO: 2080313 - RNA, 19 nt, Artificial Sequence
  Description of Artificial Sequence: Synthetic oligonucleotide
  Antisense strand to SEQ ID NO: 2080312
ugaucaaugacuuuaaacu

SEQ ID NO: 2080314 - RNA, 19 nt, Artificial Sequence
  Description of Artificial Sequence: Synthetic oligonucleotide
  Sense strand starting at position 1051 of SEQ ID NO: 1881909
guuuaaagucauugaucac

SEQ ID NO: 2080315 - RNA, 19 nt, Artificial Sequence
  Description of Artificial Sequence: Synthetic oligonucleotide
  Antisense strand to SEQ ID NO: 2080314
gugaucaaugacuuuaaac

SEQ ID NO: 2080316 - RNA, 19 nt, Artificial Sequence
  Description of Artificial Sequence: Synthetic oligonucleotide
  Sense strand starting at position 1060 of SEQ ID NO: 1881909
cauugaucaccgugaacau

SEQ ID NO: 2080317 - RNA, 19 nt, Artificial Sequence
  Description of Artificial Sequence: Synthetic oligonucleotide
  Antisense strand to SEQ ID NO: 2080316
auguucacggugaucaaug

SEQ ID NO: 2080318 - RNA, 19 nt, Artificial Sequence
  Description of Artificial Sequence: Synthetic oligonucleotide
  Sense strand starting at position 1061 of SEQ ID NO: 1881909
auugaucaccgugaacauu

SEQ ID NO: 2080319 - RNA, 19 nt, Artificial Sequence
  Description of Artificial Sequence: Synthetic oligonucleotide
  Antisense strand to SEQ ID NO: 2080318
aauguucacggugaucaau

SEQ ID NO: 2080320 - RNA, 19 nt, Artificial Sequence
  Description of Artificial Sequence: Synthetic oligonucleotide
  Sense strand starting at position 1181 of SEQ ID NO: 1881909
cagguuugacaaugagauu

SEQ ID NO: 2080321 - RNA, 19 nt, Artificial Sequence
  Description of Artificial Sequence: Synthetic oligonucleotide
  Antisense strand to SEQ ID NO: 2080320
aaucucauugucaaaccug

SEQ ID NO: 2080322 - RNA, 19 nt, Artificial Sequence
  Description of Artificial Sequence: Synthetic oligonucleotide
  Sense strand starting at position 1227 of SEQ ID NO: 1881909
guguaucccagccagaaga

SEQ ID NO: 2080323 - RNA, 19 nt, Artificial Sequence
  Description of Artificial Sequence: Synthetic oligonucleotide
  Antisense strand to SEQ ID NO: 2080322
ucuucuggcugggauacac

SEQ ID NO: 2080324 - RNA, 19 nt, Artificial Sequence
  Description of Artificial Sequence: Synthetic oligonucleotide
  Sense strand starting at position 1335 of SEQ ID NO: 1881909
gucacauauuggcuuauga

SEQ ID NO: 2080325 - RNA, 19 nt, Artificial Sequence
  Description of Artificial Sequence: Synthetic oligonucleotide
  Antisense strand to SEQ ID NO: 2080324
ucauaagccaauaugugac

SEQ ID NO: 2080326 - RNA, 19 nt, Artificial Sequence
  Description of Artificial Sequence: Synthetic oligonucleotide
  Sense strand starting at position 1337 of SEQ ID NO: 1881909
cacauauuggcuuaugaug

SEQ ID NO: 2080327 - RNA, 19 nt, Artificial Sequence
  Description of Artificial Sequence: Synthetic oligonucleotide
  Antisense strand to SEQ ID NO: 2080326
caucauaagccaauaugug

SEQ ID NO: 2080328 - RNA, 19 nt, Artificial Sequence
  Description of Artificial Sequence: Synthetic oligonucleotide
  Sense strand starting at position 1441 of SEQ ID NO: 1881909
acaauuaguugguucuaag

SEQ ID NO: 2080329 - RNA, 19 nt, Artificial Sequence
  Description of Artificial Sequence: Synthetic oligonucleotide
  Antisense strand to SEQ ID NO: 2080328
cuuagaaccaacuaauugu

SEQ ID NO: 2080330 - RNA, 19 nt, Artificial Sequence
  Description of Artificial Sequence: Synthetic oligonucleotide
  Sense strand starting at position 1448 of SEQ ID NO: 1881909
guugguucuaagcagaaug

SEQ ID NO: 2080331 - RNA, 19 nt, Artificial Sequence
  Description of Artificial Sequence: Synthetic oligonucleotide
  Antisense strand to SEQ ID NO: 2080330
cauucugcuuagaaccaac

SEQ ID NO: 2080332 - RNA, 19 nt, Artificial Sequence
  Description of Artificial Sequence: Synthetic oligonucleotide
  Sense strand starting at position 1543 of SEQ ID NO: 1881909
ucaugaagugacuguuauc

SEQ ID NO: 2080333 - RNA, 19 nt, Artificial Sequence
  Description of Artificial Sequence: Synthetic oligonucleotide
  Antisense strand to SEQ ID NO: 2080332
gauaacagucacuucauga

SEQ ID NO: 2080334 - RNA, 19 nt, Artificial Sequence
  Description of Artificial Sequence: Synthetic oligonucleotide
  Sense strand starting at position 1650 of SEQ ID NO: 1881909
uuuccaugucaguaacaaa

SEQ ID NO: 2080335 - RNA, 19 nt, Artificial Sequence
  Description of Artificial Sequence: Synthetic oligonucleotide
  Antisense strand to SEQ ID NO: 2080334
uuuguuacugacauggaaa

SEQ ID NO: 2080336 - RNA, 19 nt, Artificial Sequence
  Description of Artificial Sequence: Synthetic oligonucleotide
  Sense strand starting at position 2028 of SEQ ID NO: 1881909
gagagaucuugugcaggaa

SEQ ID NO: 2080337 - RNA, 19 nt, Artificial Sequence
  Description of Artificial Sequence: Synthetic oligonucleotide
  Antisense strand to SEQ ID NO: 2080336
uuccugcacaagaucucuc

SEQ ID NO: 2080338 - RNA, 19 nt, Artificial Sequence
  Description of Artificial Sequence: Synthetic oligonucleotide
  Sense strand starting at position 2421 of SEQ ID NO: 1881909
gcuggucuucuuuccgagu

SEQ ID NO: 2080339 - RNA, 19 nt, Artificial Sequence
  Description of Artificial Sequence: Synthetic oligonucleotide
  Antisense strand to SEQ ID NO: 2080338
acucggaaagaagaccagc

SEQ ID NO: 2080340 - RNA, 19 nt, Artificial Sequence
  Description of Artificial Sequence: Synthetic oligonucleotide
  Sense strand starting at position 2721 of SEQ ID NO: 1881909
ugacaaauguaucugagau

SEQ ID NO: 2080341 - RNA, 19 nt, Artificial Sequence
  Description of Artificial Sequence: Synthetic oligonucleotide
  Antisense strand to SEQ ID NO: 2080340
aucucagauacauuuguca

SEQ ID NO: 2080342 - RNA, 19 nt, Artificial Sequence
  Description of Artificial Sequence: Synthetic oligonucleotide
  Sense strand starting at position 2770 of SEQ ID NO: 1881909
auggguggcuuaucaggaa

SEQ ID NO: 2080343 - RNA, 19 nt, Artificial Sequence
  Description of Artificial Sequence: Synthetic oligonucleotide
  Antisense strand to SEQ ID NO: 2080342
uuccugauaagccacccau

SEQ ID NO: 2080344 - RNA, 19 nt, Artificial Sequence
  Description of Artificial Sequence: Synthetic oligonucleotide
  Sense strand starting at position 2774 of SEQ ID NO: 1881909
guggcuuaucaggaagacu

SEQ ID NO: 2080345 - RNA, 19 nt, Artificial Sequence
  Description of Artificial Sequence: Synthetic oligonucleotide
  Antisense strand to SEQ ID NO: 2080344
agucuuccugauaagccac

SEQ ID NO: 2080346 - RNA, 19 nt, Artificial Sequence
  Description of Artificial Sequence: Synthetic oligonucleotide
  Sense strand starting at position 3051 of SEQ ID NO: 1881909
ccuagucucguguuguacu

SEQ ID NO: 2080347 - RNA, 19 nt, Artificial Sequence
  Description of Artificial Sequence: Synthetic oligonucleotide
  Antisense strand to SEQ ID NO: 2080346
aguacaacacgagacuagg

SEQ ID NO: 2080348 - RNA, 19 nt, Artificial Sequence
  Description of Artificial Sequence: Synthetic oligonucleotide
  Sense strand starting at position 3059 of SEQ ID NO: 1881909
cguguuguacuauacaaga

SEQ ID NO: 2080349 - RNA, 19 nt, Artificial Sequence
  Description of Artificial Sequence: Synthetic oligonucleotide
  Antisense strand to SEQ ID NO: 2080348
ucuuguauaguacaacacg

SEQ ID NO: 2080350 - RNA, 19 nt, Artificial Sequence
  Description of Artificial Sequence: Synthetic oligonucleotide
  Sense strand starting at position 3104 of SEQ ID NO: 1881909
agcaaagcugguuauaauu

SEQ ID NO: 2080351 - RNA, 19 nt, Artificial Sequence
  Description of Artificial Sequence: Synthetic oligonucleotide
  Antisense strand to SEQ ID NO: 2080350
aauuauaaccagcuuugcu

SEQ ID NO: 2080352 - RNA, 19 nt, Artificial Sequence
  Description of Artificial Sequence: Synthetic oligonucleotide
  Sense strand starting at position 3123 of SEQ ID NO: 1881909
aguguaauccuauaaucuc

SEQ ID NO: 2080353 - RNA, 19 nt, Artificial Sequence
  Description of Artificial Sequence: Synthetic oligonucleotide
  Antisense strand to SEQ ID NO: 2080352
gagauuauaggauuacacu

SEQ ID NO: 2080354 - RNA, 19 nt, Artificial Sequence
  Description of Artificial Sequence: Synthetic oligonucleotide
  Sense strand starting at position 3266 of SEQ ID NO: 1881909
gacucaaagccuugaagug

SEQ ID NO: 2080355 - RNA, 19 nt, Artificial Sequence
  Description of Artificial Sequence: Synthetic oligonucleotide
  Antisense strand to SEQ ID NO: 2080354
cacuucaaggcuuugaguc

SEQ ID NO: 2080356 - RNA, 19 nt, Artificial Sequence
  Description of Artificial Sequence: Synthetic oligonucleotide
  Sense strand starting at position 3267 of SEQ ID NO: 1881909
acucaaagccuugaaguga

SEQ ID NO: 2080357 - RNA, 19 nt, Artificial Sequence
  Description of Artificial Sequence: Synthetic oligonucleotide
  Antisense strand to SEQ ID NO: 2080356
ucacuucaaggcuuugagu

SEQ ID NO: 2080358 - RNA, 19 nt, Artificial Sequence
  Description of Artificial Sequence: Synthetic oligonucleotide
  Sense strand starting at position 3386 of SEQ ID NO: 1881909
aaagcauagugguugauca

SEQ ID NO: 2080359 - RNA, 19 nt, Artificial Sequence
  Description of Artificial Sequence: Synthetic oligonucleotide
  Antisense strand to SEQ ID NO: 2080358
ugaucaaccacuaugcuuu

SEQ ID NO: 2080360 - RNA, 19 nt, Artificial Sequence
  Description of Artificial Sequence: Synthetic oligonucleotide
  Sense strand starting at position 3388 of SEQ ID NO: 1881909
agcauagugguugaucaca

SEQ ID NO: 2080361 - RNA, 19 nt, Artificial Sequence
  Description of Artificial Sequence: Synthetic oligonucleotide
  Antisense strand to SEQ ID NO: 2080360
ugugaucaaccacuaugcu

SEQ ID NO: 2080362 - RNA, 19 nt, Artificial Sequence
  Description of Artificial Sequence: Synthetic oligonucleotide
  Sense strand starting at position 3595 of SEQ ID NO: 1881909
ucuuuccauguguaacuau

SEQ ID NO: 2080363 - RNA, 19 nt, Artificial Sequence
  Description of Artificial Sequence: Synthetic oligonucleotide
  Antisense strand to SEQ ID NO: 2080362
auaguuacacauggaaaga

SEQ ID NO: 2080364 - RNA, 19 nt, Artificial Sequence
  Description of Artificial Sequence: Synthetic oligonucleotide
  Sense strand starting at position 128 of SEQ ID NO: 1881910
gugggaauccugggaaagu

SEQ ID NO: 2080365 - RNA, 19 nt, Artificial Sequence
  Description of Artificial Sequence: Synthetic oligonucleotide
  Antisense strand to SEQ ID NO: 2080364
acuuucccaggauucccac

SEQ ID NO: 2080366 - RNA, 19 nt, Artificial Sequence
  Description of Artificial Sequence: Synthetic oligonucleotide
  Sense strand starting at position 660 of SEQ ID NO: 1881910
ggugcauuugacugcccaa

SEQ ID NO: 2080367 - RNA, 19 nt, Artificial Sequence
  Description of Artificial Sequence: Synthetic oligonucleotide
  Antisense strand to SEQ ID NO: 2080366
uugggcagucaaaugcacc

SEQ ID NO: 2080368 - RNA, 19 nt, Artificial Sequence
  Description of Artificial Sequence: Synthetic oligonucleotide
  Sense strand starting at position 721 of SEQ ID NO: 1881910
ugaacauagguguguuuaa

SEQ ID NO: 2080369 - RNA, 19 nt, Artificial Sequence
  Description of Artificial Sequence: Synthetic oligonucleotide
  Antisense strand to SEQ ID NO: 2080368
uuaaacacaccuauguuca

SEQ ID NO: 2080370 - RNA, 19 nt, Artificial Sequence
  Description of Artificial Sequence: Synthetic oligonucleotide
  Sense strand starting at position 722 of SEQ ID NO: 1881910
gaacauagguguguuuaaa

SEQ ID NO: 2080371 - RNA, 19 nt, Artificial Sequence
  Description of Artificial Sequence: Synthetic oligonucleotide
  Antisense strand to SEQ ID NO: 2080370
uuuaaacacaccuauguuc

SEQ ID NO: 2080372 - RNA, 19 nt, Artificial Sequence
  Description of Artificial Sequence: Synthetic oligonucleotide
  Sense strand starting at position 742 of SEQ ID NO: 1881910
uuaucagagcuuugaggaa

SEQ ID NO: 2080373 - RNA, 19 nt, Artificial Sequence
  Description of Artificial Sequence: Synthetic oligonucleotide
  Antisense strand to SEQ ID NO: 2080372
uuccucaaagcucugauaa

SEQ ID NO: 2080374 - RNA, 19 nt, Artificial Sequence
  Description of Artificial Sequence: Synthetic oligonucleotide
  Sense strand starting at position 823 of SEQ ID NO: 1881910
uuuggagugaagugaaauc

SEQ ID NO: 2080375 - RNA, 19 nt, Artificial Sequence
  Description of Artificial Sequence: Synthetic oligonucleotide
  Antisense strand to SEQ ID NO: 2080374
gauuucacuucacuccaaa

SEQ ID NO: 2080376 - RNA, 19 nt, Artificial Sequence
  Description of Artificial Sequence: Synthetic oligonucleotide
  Sense strand starting at position 935 of SEQ ID NO: 1881910
acagaugagacauguaggu

SEQ ID NO: 2080377 - RNA, 19 nt, Artificial Sequence
  Description of Artificial Sequence: Synthetic oligonucleotide
  Antisense strand to SEQ ID NO: 2080376
accuacaugucucaucugu

SEQ ID NO: 2080378 - RNA, 19 nt, Artificial Sequence
  Description of Artificial Sequence: Synthetic oligonucleotide
  Sense strand starting at position 939 of SEQ ID NO: 1881910
augagacauguaggucaaa

SEQ ID NO: 2080379 - RNA, 19 nt, Artificial Sequence
  Description of Artificial Sequence: Synthetic oligonucleotide
  Antisense strand to SEQ ID NO: 2080378
uuugaccuacaugucucau

SEQ ID NO: 2080380 - RNA, 19 nt, Artificial Sequence
  Description of Artificial Sequence: Synthetic oligonucleotide
  Sense strand starting at position 940 of SEQ ID NO: 1881910
ugagacauguaggucaaau

SEQ ID NO: 2080381 - RNA, 19 nt, Artificial Sequence
  Description of Artificial Sequence: Synthetic oligonucleotide
  Antisense strand to SEQ ID NO: 2080380
auuugaccuacaugucuca

SEQ ID NO: 2080382 - RNA, 19 nt, Artificial Sequence
  Description of Artificial Sequence: Synthetic oligonucleotide
  Sense strand starting at position 980 of SEQ ID NO: 1881910
ccuuguucucaugggagaa

SEQ ID NO: 2080383 - RNA, 19 nt, Artificial Sequence
  Description of Artificial Sequence: Synthetic oligonucleotide
  Antisense strand to SEQ ID NO: 2080382
uucucccaugagaacaagg

SEQ ID NO: 2080384 - RNA, 19 nt, Artificial Sequence
  Description of Artificial Sequence: Synthetic oligonucleotide
  Sense strand starting at position 1085 of SEQ ID NO: 1881910
uuuccuuggcaugaauuau

SEQ ID NO: 2080385 - RNA, 19 nt, Artificial Sequence
  Description of Artificial Sequence: Synthetic oligonucleotide
  Antisense strand to SEQ ID NO: 2080384
auaauucaugccaaggaaa

SEQ ID NO: 2080386 - RNA, 19 nt, Artificial Sequence
  Description of Artificial Sequence: Synthetic oligonucleotide
  Sense strand starting at position 1091 of SEQ ID NO: 1881910
uggcaugaauuaucucauu

SEQ ID NO: 2080387 - RNA, 19 nt, Artificial Sequence
  Description of Artificial Sequence: Synthetic oligonucleotide
  Antisense strand to SEQ ID NO: 2080386
aaugagauaauucaugcca

SEQ ID NO: 2080388 - RNA, 19 nt, Artificial Sequence
  Description of Artificial Sequence: Synthetic oligonucleotide
  Sense strand starting at position 1177 of SEQ ID NO: 1881910
aguuaaaguagaugaagua

SEQ ID NO: 2080389 - RNA, 19 nt, Artificial Sequence
  Description of Artificial Sequence: Synthetic oligonucleotide
  Antisense strand to SEQ ID NO: 2080388
uacuucaucuacuuuaacu

SEQ ID NO: 2080390 - RNA, 19 nt, Artificial Sequence
  Description of Artificial Sequence: Synthetic oligonucleotide
  Sense strand starting at position 1270 of SEQ ID NO: 1881910
cuuugugauggcuaauacu

SEQ ID NO: 2080391 - RNA, 19 nt, Artificial Sequence
  Description of Artificial Sequence: Synthetic oligonucleotide
  Antisense strand to SEQ ID NO: 2080390
aguauuagccaucacaaag

SEQ ID NO: 2080392 - RNA, 19 nt, Artificial Sequence
  Description of Artificial Sequence: Synthetic oligonucleotide
  Sense strand starting at position 1883 of SEQ ID NO: 1881910
ugacuaauacaacguuaca

SEQ ID NO: 2080393 - RNA, 19 nt, Artificial Sequence
  Description of Artificial Sequence: Synthetic oligonucleotide
  Antisense strand to SEQ ID NO: 2080392
uguaacguuguauuaguca

SEQ ID NO: 2080394 - RNA, 19 nt, Artificial Sequence
  Description of Artificial Sequence: Synthetic oligonucleotide
  Sense strand starting at position 1910 of SEQ ID NO: 1881910
accuguuacacuggaugga

SEQ ID NO: 2080395 - RNA, 19 nt, Artificial Sequence
  Description of Artificial Sequence: Synthetic oligonucleotide
  Antisense strand to SEQ ID NO: 2080394
uccauccaguguaacaggu

SEQ ID NO: 2080396 - RNA, 19 nt, Artificial Sequence
  Description of Artificial Sequence: Synthetic oligonucleotide
  Sense strand starting at position 2109 of SEQ ID NO: 1881910
ggaagaacuccuggguuug

SEQ ID NO: 2080397 - RNA, 19 nt, Artificial Sequence
  Description of Artificial Sequence: Synthetic oligonucleotide
  Antisense strand to SEQ ID NO: 2080396
caaacccaggaguucuucc

SEQ ID NO: 2080398 - RNA, 19 nt, Artificial Sequence
  Description of Artificial Sequence: Synthetic oligonucleotide
  Sense strand starting at position 2110 of SEQ ID NO: 1881910
gaagaacuccuggguuugu

SEQ ID NO: 2080399 - RNA, 19 nt, Artificial Sequence
  Description of Artificial Sequence: Synthetic oligonucleotide
  Antisense strand to SEQ ID NO: 2080398
acaaacccaggaguucuuc

SEQ ID NO: 2080400 - RNA, 19 nt, Artificial Sequence
  Description of Artificial Sequence: Synthetic oligonucleotide
  Sense strand starting at position 2133 of SEQ ID NO: 1881910
cuuggaauuaagggucuga

SEQ ID NO: 2080401 - RNA, 19 nt, Artificial Sequence
  Description of Artificial Sequence: Synthetic oligonucleotide
  Antisense strand to SEQ ID NO: 2080400
ucagacccuuaauuccaag

SEQ ID NO: 2080402 - RNA, 19 nt, Artificial Sequence
  Description of Artificial Sequence: Synthetic oligonucleotide
  Sense strand starting at position 2266 of SEQ ID NO: 1881910
ucuuucuguggcuaaagga

SEQ ID NO: 2080403 - RNA, 19 nt, Artificial Sequence
  Description of Artificial Sequence: Synthetic oligonucleotide
  Antisense strand to SEQ ID NO: 2080402
uccuuuagccacagaaaga

SEQ ID NO: 2080404 - RNA, 19 nt, Artificial Sequence
  Description of Artificial Sequence: Synthetic oligonucleotide
  Sense strand starting at position 2287 of SEQ ID NO: 1881910
agcuuugugagcuagaacu

SEQ ID NO: 2080405 - RNA, 19 nt, Artificial Sequence
  Description of Artificial Sequence: Synthetic oligonucleotide
  Antisense strand to SEQ ID NO: 2080404
aguucuagcucacaaagcu

SEQ ID NO: 2080406 - RNA, 19 nt, Artificial Sequence
  Description of Artificial Sequence: Synthetic oligonucleotide
  Sense strand starting at position 2406 of SEQ ID NO: 1881910
ccuggaguucagggcuaaa

SEQ ID NO: 2080407 - RNA, 19 nt, Artificial Sequence
  Description of Artificial Sequence: Synthetic oligonucleotide
  Antisense strand to SEQ ID NO: 2080406
uuuagcccugaacuccagg

SEQ ID NO: 2080408 - RNA, 19 nt, Artificial Sequence
  Description of Artificial Sequence: Synthetic oligonucleotide
  Sense strand starting at position 2432 of SEQ ID NO: 1881910
acaagcagccucuaaguuu

SEQ ID NO: 2080409 - RNA, 19 nt, Artificial Sequence
  Description of Artificial Sequence: Synthetic oligonucleotide
  Antisense strand to SEQ ID NO: 2080408
aaacuuagaggcugcuugu

SEQ ID NO: 2080410 - RNA, 19 nt, Artificial Sequence
  Description of Artificial Sequence: Synthetic oligonucleotide
  Sense strand starting at position 2476 of SEQ ID NO: 1881910
uuggaagugagcuaaucuu

SEQ ID NO: 2080411 - RNA, 19 nt, Artificial Sequence
  Description of Artificial Sequence: Synthetic oligonucleotide
  Antisense strand to SEQ ID NO: 2080410
aagauuagcucacuuccaa

SEQ ID NO: 2080412 - RNA, 19 nt, Artificial Sequence
  Description of Artificial Sequence: Synthetic oligonucleotide
  Sense strand starting at position 2482 of SEQ ID NO: 1881910
gugagcuaaucuuuagaga

SEQ ID NO: 2080413 - RNA, 19 nt, Artificial Sequence
  Description of Artificial Sequence: Synthetic oligonucleotide
  Antisense strand to SEQ ID NO: 2080412
ucucuaaagauuagcucac

SEQ ID NO: 2080414 - RNA, 19 nt, Artificial Sequence
  Description of Artificial Sequence: Synthetic oligonucleotide
  Sense strand starting at position 2582 of SEQ ID NO: 1881910
agggucauuccuugaguga

SEQ ID NO: 2080415 - RNA, 19 nt, Artificial Sequence
  Description of Artificial Sequence: Synthetic oligonucleotide
  Antisense strand to SEQ ID NO: 2080414
ucacucaaggaaugacccu

SEQ ID NO: 2080416 - RNA, 19 nt, Artificial Sequence
  Description of Artificial Sequence: Synthetic oligonucleotide
  Sense strand starting at position 2583 of SEQ ID NO: 1881910
gggucauuccuugagugac

SEQ ID NO: 2080417 - RNA, 19 nt, Artificial Sequence
  Description of Artificial Sequence: Synthetic oligonucleotide
  Antisense strand to SEQ ID NO: 2080416
gucacucaaggaaugaccc

SEQ ID NO: 2080418 - RNA, 19 nt, Artificial Sequence
  Description of Artificial Sequence: Synthetic oligonucleotide
  Sense strand starting at position 2663 of SEQ ID NO: 1881910
uguccaauggcucacucau

SEQ ID NO: 2080419 - RNA, 19 nt, Artificial Sequence
  Description of Artificial Sequence: Synthetic oligonucleotide
  Antisense strand to SEQ ID NO: 2080418
augagugagccauuggaca

SEQ ID NO: 2080420 - RNA, 19 nt, Artificial Sequence
  Description of Artificial Sequence: Synthetic oligonucleotide
  Sense strand starting at position 2795 of SEQ ID NO: 1881910
aaugauuagugucucauag

SEQ ID NO: 2080421 - RNA, 19 nt, Artificial Sequence
  Description of Artificial Sequence: Synthetic oligonucleotide
  Antisense strand to SEQ ID NO: 2080420
cuaugagacacuaaucauu

SEQ ID NO: 2080422 - RNA, 19 nt, Artificial Sequence
  Description of Artificial Sequence: Synthetic oligonucleotide
  Sense strand starting at position 2857 of SEQ ID NO: 1881910
acagaaacuucucuuguug

SEQ ID NO: 2080423 - RNA, 19 nt, Artificial Sequence
  Description of Artificial Sequence: Synthetic oligonucleotide
  Antisense strand to SEQ ID NO: 2080422
caacaagagaaguuucugu

SEQ ID NO: 2080424 - RNA, 19 nt, Artificial Sequence
  Description of Artificial Sequence: Synthetic oligonucleotide
  Sense strand starting at position 2915 of SEQ ID NO: 1881910
guaaguagaguuuaaugag

SEQ ID NO: 2080425 - RNA, 19 nt, Artificial Sequence
  Description of Artificial Sequence: Synthetic oligonucleotide
  Antisense strand to SEQ ID NO: 2080424
cucauuaaacucuacuuac

SEQ ID NO: 2080426 - RNA, 19 nt, Artificial Sequence
  Description of Artificial Sequence: Synthetic oligonucleotide
  Sense strand starting at position 2921 of SEQ ID NO: 1881910
agaguuuaaugagcauaac

SEQ ID NO: 2080427 - RNA, 19 nt, Artificial Sequence
  Description of Artificial Sequence: Synthetic oligonucleotide
  Antisense strand to SEQ ID NO: 2080426
guuaugcucauuaaacucu

SEQ ID NO: 2080428 - RNA, 19 nt, Artificial Sequence
  Description of Artificial Sequence: Synthetic oligonucleotide
  Sense strand starting at position 2924 of SEQ ID NO: 1881910
guuuaaugagcauaacauu

SEQ ID NO: 2080429 - RNA, 19 nt, Artificial Sequence
  Description of Artificial Sequence: Synthetic oligonucleotide
  Antisense strand to SEQ ID NO: 2080428
aauguuaugcucauuaaac

SEQ ID NO: 2080430 - RNA, 19 nt, Artificial Sequence
  Description of Artificial Sequence: Synthetic oligonucleotide
  Sense strand starting at position 2975 of SEQ ID NO: 1881910
gucaucauccuagaggucu

SEQ ID NO: 2080431 - RNA, 19 nt, Artificial Sequence
  Description of Artificial Sequence: Synthetic oligonucleotide
  Antisense strand to SEQ ID NO: 2080430
agaccucuaggaugaugac

SEQ ID NO: 2080432 - RNA, 19 nt, Artificial Sequence
  Description of Artificial Sequence: Synthetic oligonucleotide
  Sense strand starting at position 3011 of SEQ ID NO: 1881910
guuauaaccuaguuugaca

SEQ ID NO: 2080433 - RNA, 19 nt, Artificial Sequence
  Description of Artificial Sequence: Synthetic oligonucleotide
  Antisense strand to SEQ ID NO: 2080432
ugucaaacuagguuauaac

SEQ ID NO: 2080434 - RNA, 19 nt, Artificial Sequence
  Description of Artificial Sequence: Synthetic oligonucleotide
  Sense strand starting at position 3094 of SEQ ID NO: 1881910
aauugagagguauggguuu

SEQ ID NO: 2080435 - RNA, 19 nt, Artificial Sequence
  Description of Artificial Sequence: Synthetic oligonucleotide
  Antisense strand to SEQ ID NO: 2080434
aaacccauaccucucaauu

SEQ ID NO: 2080436 - RNA, 19 nt, Artificial Sequence
  Description of Artificial Sequence: Synthetic oligonucleotide
  Sense strand starting at position 3100 of SEQ ID NO: 1881910
gagguauggguuuguuaaa

SEQ ID NO: 2080437 - RNA, 19 nt, Artificial Sequence
  Description of Artificial Sequence: Synthetic oligonucleotide
  Antisense strand to SEQ ID NO: 2080436
uuuaacaaacccauaccuc

SEQ ID NO: 2080438 - RNA, 19 nt, Artificial Sequence
  Description of Artificial Sequence: Synthetic oligonucleotide
  Sense strand starting at position 3101 of SEQ ID NO: 1881910
agguauggguuuguuaaau

SEQ ID NO: 2080439 - RNA, 19 nt, Artificial Sequence
  Description of Artificial Sequence: Synthetic oligonucleotide
  Antisense strand to SEQ ID NO: 2080438
auuuaacaaacccauaccu

SEQ ID NO: 2080440 - RNA, 19 nt, Artificial Sequence
  Description of Artificial Sequence: Synthetic oligonucleotide
  Sense strand starting at position 3146 of SEQ ID NO: 1881910
caguauauggacugcucaa

SEQ ID NO: 2080441 - RNA, 19 nt, Artificial Sequence
  Description of Artificial Sequence: Synthetic oligonucleotide
  Antisense strand to SEQ ID NO: 2080440
uugagcaguccauauacug

SEQ ID NO: 2080442 - RNA, 19 nt, Artificial Sequence
  Description of Artificial Sequence: Synthetic oligonucleotide
  Sense strand starting at position 3916 of SEQ ID NO: 1881910
auagcugggucaccugaaa

SEQ ID NO: 2080443 - RNA, 19 nt, Artificial Sequence
  Description of Artificial Sequence: Synthetic oligonucleotide
  Antisense strand to SEQ ID NO: 2080442
uuucaggugacccagcuau

SEQ ID NO: 2080444 - RNA, 19 nt, Artificial Sequence
  Description of Artificial Sequence: Synthetic oligonucleotide
  Sense strand starting at position 26 of SEQ ID NO: 1881911
gacuaucuggagugaugug

SEQ ID NO: 2080445 - RNA, 19 nt, Artificial Sequence
  Description of Artificial Sequence: Synthetic oligonucleotide
  Antisense strand to SEQ ID NO: 2080444
cacaucacuccagauaguc

SEQ ID NO: 2080446 - RNA, 19 nt, Artificial Sequence
  Description of Artificial Sequence: Synthetic oligonucleotide
  Sense strand starting at position 56 of SEQ ID NO: 1881911
caccacuguuggguugaua

SEQ ID NO: 2080447 - RNA, 19 nt, Artificial Sequence
  Description of Artificial Sequence: Synthetic oligonucleotide
  Antisense strand to SEQ ID NO: 2080446
uaucaacccaacaguggug

SEQ ID NO: 2080448 - RNA, 19 nt, Artificial Sequence
  Description of Artificial Sequence: Synthetic oligonucleotide
  Sense strand starting at position 59 of SEQ ID NO: 1881911
cacuguuggguugauauca

SEQ ID NO: 2080449 - RNA, 19 nt, Artificial Sequence
  Description of Artificial Sequence: Synthetic oligonucleotide
  Antisense strand to SEQ ID NO: 2080448
ugauaucaacccaacagug

SEQ ID NO: 2080450 - RNA, 19 nt, Artificial Sequence
  Description of Artificial Sequence: Synthetic oligonucleotide
  Sense strand starting at position 224 of SEQ ID NO: 1881911
ugugaaauaauguggauac

SEQ ID NO: 2080451 - RNA, 19 nt, Artificial Sequence
  Description of Artificial Sequence: Synthetic oligonucleotide
  Antisense strand to SEQ ID NO: 2080450
guauccacauuauuucaca

SEQ ID NO: 2080452 - RNA, 19 nt, Artificial Sequence
  Description of Artificial Sequence: Synthetic oligonucleotide
  Sense strand starting at position 277 of SEQ ID NO: 1881911
ccauucuauccagaacguu

SEQ ID NO: 2080453 - RNA, 19 nt, Artificial Sequence
  Description of Artificial Sequence: Synthetic oligonucleotide
  Antisense strand to SEQ ID NO: 2080452
aacguucuggauagaaugg

SEQ ID NO: 2080454 - RNA, 19 nt, Artificial Sequence
  Description of Artificial Sequence: Synthetic oligonucleotide
  Sense strand starting at position 626 of SEQ ID NO: 1881911
aagagaucauagucuaagu

SEQ ID NO: 2080455 - RNA, 19 nt, Artificial Sequence
  Description of Artificial Sequence: Synthetic oligonucleotide
  Antisense strand to SEQ ID NO: 2080454
acuuagacuaugaucucuu

SEQ ID NO: 2080456 - RNA, 19 nt, Artificial Sequence
  Description of Artificial Sequence: Synthetic oligonucleotide
  Sense strand starting at position 636 of SEQ ID NO: 1881911
agucuaaguuacucaaaga

SEQ ID NO: 2080457 - RNA, 19 nt, Artificial Sequence
  Description of Artificial Sequence: Synthetic oligonucleotide
  Antisense strand to SEQ ID NO: 2080456
ucuuugaguaacuuagacu

SEQ ID NO: 2080458 - RNA, 19 nt, Artificial Sequence
  Description of Artificial Sequence: Synthetic oligonucleotide
  Sense strand starting at position 674 of SEQ ID NO: 1881911
ugguaauuauggucccuaa

SEQ ID NO: 2080459 - RNA, 19 nt, Artificial Sequence
  Description of Artificial Sequence: Synthetic oligonucleotide
  Antisense strand to SEQ ID NO: 2080458
uuagggaccauaauuacca

SEQ ID NO: 2080460 - RNA, 19 nt, Artificial Sequence
  Description of Artificial Sequence: Synthetic oligonucleotide
  Sense strand starting at position 870 of SEQ ID NO: 1881911
aucagauauucugugagac

SEQ ID NO: 2080461 - RNA, 19 nt, Artificial Sequence
  Description of Artificial Sequence: Synthetic oligonucleotide
  Antisense strand to SEQ ID NO: 2080460
gucucacagaauaucugau

SEQ ID NO: 2080462 - RNA, 19 nt, Artificial Sequence
  Description of Artificial Sequence: Synthetic oligonucleotide
  Sense strand starting at position 871 of SEQ ID NO: 1881911
ucagauauucugugagaca

SEQ ID NO: 2080463 - RNA, 19 nt, Artificial Sequence
  Description of Artificial Sequence: Synthetic oligonucleotide
  Antisense strand to SEQ ID NO: 2080462
ugucucacagaauaucuga

SEQ ID NO: 2080464 - RNA, 19 nt, Artificial Sequence
  Description of Artificial Sequence: Synthetic oligonucleotide
  Sense strand starting at position 902 of SEQ ID NO: 1881911
ucaguaucaguuuaggguu

SEQ ID NO: 2080465 - RNA, 19 nt, Artificial Sequence
  Description of Artificial Sequence: Synthetic oligonucleotide
  Antisense strand to SEQ ID NO: 2080464
aacccuaaacugauacuga

SEQ ID NO: 2080466 - RNA, 19 nt, Artificial Sequence
  Description of Artificial Sequence: Synthetic oligonucleotide
  Sense strand starting at position 944 of SEQ ID NO: 1881911
aaaggauauuuguaaaguc

SEQ ID NO: 2080467 - RNA, 19 nt, Artificial Sequence
  Description of Artificial Sequence: Synthetic oligonucleotide
  Antisense strand to SEQ ID NO: 2080466
gacuuuacaaauauccuuu

SEQ ID NO: 2080468 - RNA, 19 nt, Artificial Sequence
  Description of Artificial Sequence: Synthetic oligonucleotide
  Sense strand starting at position 964 of SEQ ID NO: 1881911
aggauuuauucucaaggag

SEQ ID NO: 2080469 - RNA, 19 nt, Artificial Sequence
  Description of Artificial Sequence: Synthetic oligonucleotide
  Antisense strand to SEQ ID NO: 2080468
cuccuugagaauaaauccu

SEQ ID NO: 2080470 - RNA, 19 nt, Artificial Sequence
  Description of Artificial Sequence: Synthetic oligonucleotide
  Sense strand starting at position 1079 of SEQ ID NO: 1881911
cugucaaaucuagauguac

SEQ ID NO: 2080471 - RNA, 19 nt, Artificial Sequence
  Description of Artificial Sequence: Synthetic oligonucleotide
  Antisense strand to SEQ ID NO: 2080470
guacaucuagauuugacag

SEQ ID NO: 2080472 - RNA, 19 nt, Artificial Sequence
  Description of Artificial Sequence: Synthetic oligonucleotide
  Sense strand starting at position 1101 of SEQ ID NO: 1881911
gcuugcaauagagaaaugu

SEQ ID NO: 2080473 - RNA, 19 nt, Artificial Sequence
  Description of Artificial Sequence: Synthetic oligonucleotide
  Antisense strand to SEQ ID NO: 2080472
acauuucucuauugcaagc

SEQ ID NO: 2080474 - RNA, 19 nt, Artificial Sequence
  Description of Artificial Sequence: Synthetic oligonucleotide
  Sense strand starting at position 1238 of SEQ ID NO: 1881911
cccagaacuugggcuauau

SEQ ID NO: 2080475 - RNA, 19 nt, Artificial Sequence
  Description of Artificial Sequence: Synthetic oligonucleotide
  Antisense strand to SEQ ID NO: 2080474
auauagcccaaguucuggg

SEQ ID NO: 2080476 - RNA, 19 nt, Artificial Sequence
  Description of Artificial Sequence: Synthetic oligonucleotide
  Sense strand starting at position 1246 of SEQ ID NO: 1881911
uugggcuauaucugaaagu

SEQ ID NO: 2080477 - RNA, 19 nt, Artificial Sequence
  Description of Artificial Sequence: Synthetic oligonucleotide
  Antisense strand to SEQ ID NO: 2080476
acuuucagauauagcccaa

SEQ ID NO: 2080478 - RNA, 19 nt, Artificial Sequence
  Description of Artificial Sequence: Synthetic oligonucleotide
  Sense strand starting at position 1273 of SEQ ID NO: 1881911
acaucuguccagcacugaa

SEQ ID NO: 2080479 - RNA, 19 nt, Artificial Sequence
  Description of Artificial Sequence: Synthetic oligonucleotide
  Antisense strand to SEQ ID NO: 2080478
uucagugcuggacagaugu

SEQ ID NO: 2080480 - RNA, 19 nt, Artificial Sequence
  Description of Artificial Sequence: Synthetic oligonucleotide
  Sense strand starting at position 1340 of SEQ ID NO: 1881911
acaaguacccuuggaagau

SEQ ID NO: 2080481 - RNA, 19 nt, Artificial Sequence
  Description of Artificial Sequence: Synthetic oligonucleotide
  Antisense strand to SEQ ID NO: 2080480
aucuuccaaggguacuugu

SEQ ID NO: 2080482 - RNA, 19 nt, Artificial Sequence
  Description of Artificial Sequence: Synthetic oligonucleotide
  Sense strand starting at position 1397 of SEQ ID NO: 1881911
ccugcaaaucuuggaacuu

SEQ ID NO: 2080483 - RNA, 19 nt, Artificial Sequence
  Description of Artificial Sequence: Synthetic oligonucleotide
  Antisense strand to SEQ ID NO: 2080482
aaguuccaagauuugcagg

SEQ ID NO: 2080484 - RNA, 19 nt, Artificial Sequence
  Description of Artificial Sequence: Synthetic oligonucleotide
  Sense strand starting at position 1565 of SEQ ID NO: 1881911
augaucuggucuccaagaa

SEQ ID NO: 2080485 - RNA, 19 nt, Artificial Sequence
  Description of Artificial Sequence: Synthetic oligonucleotide
  Antisense strand to SEQ ID NO: 2080484
uucuuggagaccagaucau

SEQ ID NO: 2080486 - RNA, 19 nt, Artificial Sequence
  Description of Artificial Sequence: Synthetic oligonucleotide
  Sense strand starting at position 1580 of SEQ ID NO: 1881911
agaacuucucguuauuauc

SEQ ID NO: 2080487 - RNA, 19 nt, Artificial Sequence
  Description of Artificial Sequence: Synthetic oligonucleotide
  Antisense strand to SEQ ID NO: 2080486
gauaauaacgagaaguucu

SEQ ID NO: 2080488 - RNA, 19 nt, Artificial Sequence
  Description of Artificial Sequence: Synthetic oligonucleotide
  Sense strand starting at position 1818 of SEQ ID NO: 1881911
cucacuucggaguauaguu

SEQ ID NO: 2080489 - RNA, 19 nt, Artificial Sequence
  Description of Artificial Sequence: Synthetic oligonucleotide
  Antisense strand to SEQ ID NO: 2080488
aacuauacuccgaagugag

SEQ ID NO: 2080490 - RNA, 19 nt, Artificial Sequence
  Description of Artificial Sequence: Synthetic oligonucleotide
  Sense strand starting at position 1826 of SEQ ID NO: 1881911
ggaguauaguuucugagau

SEQ ID NO: 2080491 - RNA, 19 nt, Artificial Sequence
  Description of Artificial Sequence: Synthetic oligonucleotide
  Antisense strand to SEQ ID NO: 2080490
aucucagaaacuauacucc

SEQ ID NO: 2080492 - RNA, 19 nt, Artificial Sequence
  Description of Artificial Sequence: Synthetic oligonucleotide
  Sense strand starting at position 1899 of SEQ ID NO: 1881911
cagauaauagcauguagaa

SEQ ID NO: 2080493 - RNA, 19 nt, Artificial Sequence
  Description of Artificial Sequence: Synthetic oligonucleotide
  Antisense strand to SEQ ID NO: 2080492
uucuacaugcuauuaucug

SEQ ID NO: 2080494 - RNA, 19 nt, Artificial Sequence
  Description of Artificial Sequence: Synthetic oligonucleotide
  Sense strand starting at position 1949 of SEQ ID NO: 1881911
agagcaacucaaggcauau

SEQ ID NO: 2080495 - RNA, 19 nt, Artificial Sequence
  Description of Artificial Sequence: Synthetic oligonucleotide
  Antisense strand to SEQ ID NO: 2080494
auaugccuugaguugcucu

SEQ ID NO: 2080496 - RNA, 19 nt, Artificial Sequence
  Description of Artificial Sequence: Synthetic oligonucleotide
  Sense strand starting at position 2027 of SEQ ID NO: 1881911
uguguauaaccucagaucu

SEQ ID NO: 2080497 - RNA, 19 nt, Artificial Sequence
  Description of Artificial Sequence: Synthetic oligonucleotide
  Antisense strand to SEQ ID NO: 2080496
agaucugagguuauacaca

SEQ ID NO: 2080498 - RNA, 19 nt, Artificial Sequence
  Description of Artificial Sequence: Synthetic oligonucleotide
  Sense strand starting at position 2135 of SEQ ID NO: 1881911
agaagugggccggagauau

SEQ ID NO: 2080499 - RNA, 19 nt, Artificial Sequence
  Description of Artificial Sequence: Synthetic oligonucleotide
  Antisense strand to SEQ ID NO: 2080498
auaucuccggcccacuucu

SEQ ID NO: 2080500 - RNA, 19 nt, Artificial Sequence
  Description of Artificial Sequence: Synthetic oligonucleotide
  Sense strand starting at position 2348 of SEQ ID NO: 1881911
uuauguguaccggacuaca

SEQ ID NO: 2080501 - RNA, 19 nt, Artificial Sequence
  Description of Artificial Sequence: Synthetic oligonucleotide
  Antisense strand to SEQ ID NO: 2080500
uguaguccgguacacauaa

SEQ ID NO: 2080502 - RNA, 19 nt, Artificial Sequence
  Description of Artificial Sequence: Synthetic oligonucleotide
  Sense strand starting at position 2415 of SEQ ID NO: 1881911
cgcccucacggauauaaca

SEQ ID NO: 2080503 - RNA, 19 nt, Artificial Sequence
  Description of Artificial Sequence: Synthetic oligonucleotide
  Antisense strand to SEQ ID NO: 2080502
uguuauauccgugagggcg

SEQ ID NO: 2080504 - RNA, 19 nt, Artificial Sequence
  Description of Artificial Sequence: Synthetic oligonucleotide
  Sense strand starting at position 2554 of SEQ ID NO: 1881911
auaaauauuccacgugaaa

SEQ ID NO: 2080505 - RNA, 19 nt, Artificial Sequence
  Description of Artificial Sequence: Synthetic oligonucleotide
  Antisense strand to SEQ ID NO: 2080504
uuucacguggaauauuuau

SEQ ID NO: 2080506 - RNA, 19 nt, Artificial Sequence
  Description of Artificial Sequence: Synthetic oligonucleotide
  Sense strand starting at position 2557 of SEQ ID NO: 1881911
aauauuccacgugaaagcu

SEQ ID NO: 2080507 - RNA, 19 nt, Artificial Sequence
  Description of Artificial Sequence: Synthetic oligonucleotide
  Antisense strand to SEQ ID NO: 2080506
agcuuucacguggaauauu

SEQ ID NO: 2080508 - RNA, 19 nt, Artificial Sequence
  Description of Artificial Sequence: Synthetic oligonucleotide
  Sense strand starting at position 2566 of SEQ ID NO: 1881911
cgugaaagcuaucuauuuc

SEQ ID NO: 2080509 - RNA, 19 nt, Artificial Sequence
  Description of Artificial Sequence: Synthetic oligonucleotide
  Antisense strand to SEQ ID NO: 2080508
gaaauagauagcuuucacg

SEQ ID NO: 2080510 - RNA, 19 nt, Artificial Sequence
  Description of Artificial Sequence: Synthetic oligonucleotide
  Sense strand starting at position 2744 of SEQ ID NO: 1881911
uagacuugugaugguaaua

SEQ ID NO: 2080511 - RNA, 19 nt, Artificial Sequence
  Description of Artificial Sequence: Synthetic oligonucleotide
  Antisense strand to SEQ ID NO: 2080510
uauuaccaucacaagucua

SEQ ID NO: 2080512 - RNA, 19 nt, Artificial Sequence
  Description of Artificial Sequence: Synthetic oligonucleotide
  Sense strand starting at position 2910 of SEQ ID NO: 1881911
ucccaauaggcucaaugau

SEQ ID NO: 2080513 - RNA, 19 nt, Artificial Sequence
  Description of Artificial Sequence: Synthetic oligonucleotide
  Antisense strand to SEQ ID NO: 2080512
aucauugagccuauuggga

SEQ ID NO: 2080514 - RNA, 19 nt, Artificial Sequence
  Description of Artificial Sequence: Synthetic oligonucleotide
  Sense strand starting at position 3024 of SEQ ID NO: 1881911
auggcuuuacacugagagu

SEQ ID NO: 2080515 - RNA, 19 nt, Artificial Sequence
  Description of Artificial Sequence: Synthetic oligonucleotide
  Antisense strand to SEQ ID NO: 2080514
acucucaguguaaagccau

SEQ ID NO: 2080516 - RNA, 19 nt, Artificial Sequence
  Description of Artificial Sequence: Synthetic oligonucleotide
  Sense strand starting at position 3117 of SEQ ID NO: 1881911
uguugaaauagguguauaa

SEQ ID NO: 2080517 - RNA, 19 nt, Artificial Sequence
  Description of Artificial Sequence: Synthetic oligonucleotide
  Antisense strand to SEQ ID NO: 2080516
uuauacaccuauuucaaca

SEQ ID NO: 2080518 - RNA, 19 nt, Artificial Sequence
  Description of Artificial Sequence: Synthetic oligonucleotide
  Sense strand starting at position 3124 of SEQ ID NO: 1881911
auagguguauaaucuccua

SEQ ID NO: 2080519 - RNA, 19 nt, Artificial Sequence
  Description of Artificial Sequence: Synthetic oligonucleotide
  Antisense strand to SEQ ID NO: 2080518
uaggagauuauacaccuau

SEQ ID NO: 2080520 - RNA, 19 nt, Artificial Sequence
  Description of Artificial Sequence: Synthetic oligonucleotide
  Sense strand starting at position 3256 of SEQ ID NO: 1881911
ggacucuacuccuugugau

SEQ ID NO: 2080521 - RNA, 19 nt, Artificial Sequence
  Description of Artificial Sequence: Synthetic oligonucleotide
  Antisense strand to SEQ ID NO: 2080520
aucacaaggaguagagucc

SEQ ID NO: 2080522 - RNA, 19 nt, Artificial Sequence
  Description of Artificial Sequence: Synthetic oligonucleotide
  Sense strand starting at position 3604 of SEQ ID NO: 1881911
auuauauggucacuaccau

SEQ ID NO: 2080523 - RNA, 19 nt, Artificial Sequence
  Description of Artificial Sequence: Synthetic oligonucleotide
  Antisense strand to SEQ ID NO: 2080522
augguagugaccauauaau

SEQ ID NO: 2080524 - RNA, 19 nt, Artificial Sequence
  Description of Artificial Sequence: Synthetic oligonucleotide
  Sense strand starting at position 230 of SEQ ID NO: 1881912
uugauuuguuccuccguga

SEQ ID NO: 2080525 - RNA, 19 nt, Artificial Sequence
  Description of Artificial Sequence: Synthetic oligonucleotide
  Antisense strand to SEQ ID NO: 2080524
ucacggaggaacaaaucaa

SEQ ID NO: 2080526 - RNA, 19 nt, Artificial Sequence
  Description of Artificial Sequence: Synthetic oligonucleotide
  Sense strand starting at position 233 of SEQ ID NO: 1881912
auuuguuccuccgugauag

SEQ ID NO: 2080527 - RNA, 19 nt, Artificial Sequence
  Description of Artificial Sequence: Synthetic oligonucleotide
  Antisense strand to SEQ ID NO: 2080526
cuaucacggaggaacaaau

SEQ ID NO: 2080528 - RNA, 19 nt, Artificial Sequence
  Description of Artificial Sequence: Synthetic oligonucleotide
  Sense strand starting at position 481 of SEQ ID NO: 1881912
ggucauuucucuguccuca

SEQ ID NO: 2080529 - RNA, 19 nt, Artificial Sequence
  Description of Artificial Sequence: Synthetic oligonucleotide
  Antisense strand to SEQ ID NO: 2080528
ugaggacagagaaaugacc

SEQ ID NO: 2080530 - RNA, 19 nt, Artificial Sequence
  Description of Artificial Sequence: Synthetic oligonucleotide
  Sense strand starting at position 796 of SEQ ID NO: 1881912
auuaguggcagugaaagua

SEQ ID NO: 2080531 - RNA, 19 nt, Artificial Sequence
  Description of Artificial Sequence: Synthetic oligonucleotide
  Antisense strand to SEQ ID NO: 2080530
uacuuucacugccacuaau

SEQ ID NO: 2080532 - RNA, 19 nt, Artificial Sequence
  Description of Artificial Sequence: Synthetic oligonucleotide
  Sense strand starting at position 808 of SEQ ID NO: 1881912
gaaaguaguuauccuggaa

SEQ ID NO: 2080533 - RNA, 19 nt, Artificial Sequence
  Description of Artificial Sequence: Synthetic oligonucleotide
  Antisense strand to SEQ ID NO: 2080532
uuccaggauaacuacuuuc

SEQ ID NO: 2080534 - RNA, 19 nt, Artificial Sequence
  Description of Artificial Sequence: Synthetic oligonucleotide
  Sense strand starting at position 811 of SEQ ID NO: 1881912
aguaguuauccuggaaaua

SEQ ID NO: 2080535 - RNA, 19 nt, Artificial Sequence
  Description of Artificial Sequence: Synthetic oligonucleotide
  Antisense strand to SEQ ID NO: 2080534
uauuuccaggauaacuacu

SEQ ID NO: 2080536 - RNA, 19 nt, Artificial Sequence
  Description of Artificial Sequence: Synthetic oligonucleotide
  Sense strand starting at position 886 of SEQ ID NO: 1881912
cucuucucuggucauuaua

SEQ ID NO: 2080537 - RNA, 19 nt, Artificial Sequence
  Description of Artificial Sequence: Synthetic oligonucleotide
  Antisense strand to SEQ ID NO: 2080536
uauaaugaccagagaagag

SEQ ID NO: 2080538 - RNA, 19 nt, Artificial Sequence
  Description of Artificial Sequence: Synthetic oligonucleotide
  Sense strand starting at position 889 of SEQ ID NO: 1881912
uucucuggucauuauauua

SEQ ID NO: 2080539 - RNA, 19 nt, Artificial Sequence
  Description of Artificial Sequence: Synthetic oligonucleotide
  Antisense strand to SEQ ID NO: 2080538
uaauauaaugaccagagaa

SEQ ID NO: 2080540 - RNA, 19 nt, Artificial Sequence
  Description of Artificial Sequence: Synthetic oligonucleotide
  Sense strand starting at position 896 of SEQ ID NO: 1881912
gucauuauauuacuagaga

SEQ ID NO: 2080541 - RNA, 19 nt, Artificial Sequence
  Description of Artificial Sequence: Synthetic oligonucleotide
  Antisense strand to SEQ ID NO: 2080540
ucucuaguaauauaaugac

SEQ ID NO: 2080542 - RNA, 19 nt, Artificial Sequence
  Description of Artificial Sequence: Synthetic oligonucleotide
  Sense strand starting at position 962 of SEQ ID NO: 1881912
aaaggaacuuucguaguaa

SEQ ID NO: 2080543 - RNA, 19 nt, Artificial Sequence
  Description of Artificial Sequence: Synthetic oligonucleotide
  Antisense strand to SEQ ID NO: 2080542
uuacuacgaaaguuccuuu

SEQ ID NO: 2080544 - RNA, 19 nt, Artificial Sequence
  Description of Artificial Sequence: Synthetic oligonucleotide
  Sense strand starting at position 986 of SEQ ID NO: 1881912
cccacaaagucuccaaagu

SEQ ID NO: 2080545 - RNA, 19 nt, Artificial Sequence
  Description of Artificial Sequence: Synthetic oligonucleotide
  Antisense strand to SEQ ID NO: 2080544
acuuuggagacuuuguggg

SEQ ID NO: 2080546 - RNA, 19 nt, Artificial Sequence
  Description of Artificial Sequence: Synthetic oligonucleotide
  Sense strand starting at position 1186 of SEQ ID NO: 1881912
auagauuaggugcaagcau

SEQ ID NO: 2080547 - RNA, 19 nt, Artificial Sequence
  Description of Artificial Sequence: Synthetic oligonucleotide
  Antisense strand to SEQ ID NO: 2080546
augcuugcaccuaaucuau

SEQ ID NO: 2080548 - RNA, 19 nt, Artificial Sequence
  Description of Artificial Sequence: Synthetic oligonucleotide
  Sense strand starting at position 1241 of SEQ ID NO: 1881912
ugacucaaaucucugugau

SEQ ID NO: 2080549 - RNA, 19 nt, Artificial Sequence
  Description of Artificial Sequence: Synthetic oligonucleotide
  Antisense strand to SEQ ID NO: 2080548
aucacagagauuugaguca

SEQ ID NO: 2080550 - RNA, 19 nt, Artificial Sequence
  Description of Artificial Sequence: Synthetic oligonucleotide
  Sense strand starting at position 1255 of SEQ ID NO: 1881912
gugauacucccagaagugu

SEQ ID NO: 2080551 - RNA, 19 nt, Artificial Sequence
  Description of Artificial Sequence: Synthetic oligonucleotide
  Antisense strand to SEQ ID NO: 2080550
acacuucugggaguaucac

SEQ ID NO: 2080552 - RNA, 19 nt, Artificial Sequence
  Description of Artificial Sequence: Synthetic oligonucleotide
  Sense strand starting at position 1269 of SEQ ID NO: 1881912
aguguagcugugagucaga

SEQ ID NO: 2080553 - RNA, 19 nt, Artificial Sequence
  Description of Artificial Sequence: Synthetic oligonucleotide
  Antisense strand to SEQ ID NO: 2080552
ucugacucacagcuacacu

SEQ ID NO: 2080554 - RNA, 19 nt, Artificial Sequence
  Description of Artificial Sequence: Synthetic oligonucleotide
  Sense strand starting at position 1272 of SEQ ID NO: 1881912
guagcugugagucagaaga

SEQ ID NO: 2080555 - RNA, 19 nt, Artificial Sequence
  Description of Artificial Sequence: Synthetic oligonucleotide
  Antisense strand to SEQ ID NO: 2080554
ucuucugacucacagcuac

SEQ ID NO: 2080556 - RNA, 19 nt, Artificial Sequence
  Description of Artificial Sequence: Synthetic oligonucleotide
  Sense strand starting at position 1367 of SEQ ID NO: 1881912
uggugcugugugguaucua

SEQ ID NO: 2080557 - RNA, 19 nt, Artificial Sequence
  Description of Artificial Sequence: Synthetic oligonucleotide
  Antisense strand to SEQ ID NO: 2080556
uagauaccacacagcacca

SEQ ID NO: 2080558 - RNA, 19 nt, Artificial Sequence
  Description of Artificial Sequence: Synthetic oligonucleotide
  Sense strand starting at position 1498 of SEQ ID NO: 1881912
accaaauauugaguguuua

SEQ ID NO: 2080559 - RNA, 19 nt, Artificial Sequence
  Description of Artificial Sequence: Synthetic oligonucleotide
  Antisense strand to SEQ ID NO: 2080558
uaaacacucaauauuuggu

SEQ ID NO: 2080560 - RNA, 19 nt, Artificial Sequence
  Description of Artificial Sequence: Synthetic oligonucleotide
  Sense strand starting at position 1619 of SEQ ID NO: 1881912
auugauacagugugaauca

SEQ ID NO: 2080561 - RNA, 19 nt, Artificial Sequence
  Description of Artificial Sequence: Synthetic oligonucleotide
  Antisense strand to SEQ ID NO: 2080560
ugauucacacuguaucaau

SEQ ID NO: 2080562 - RNA, 19 nt, Artificial Sequence
  Description of Artificial Sequence: Synthetic oligonucleotide
  Sense strand starting at position 1786 of SEQ ID NO: 1881912
gcaggagugagcuaauaag

SEQ ID NO: 2080563 - RNA, 19 nt, Artificial Sequence
  Description of Artificial Sequence: Synthetic oligonucleotide
  Antisense strand to SEQ ID NO: 2080562
cuuauuagcucacuccugc

SEQ ID NO: 2080564 - RNA, 19 nt, Artificial Sequence
  Description of Artificial Sequence: Synthetic oligonucleotide
  Sense strand starting at position 1891 of SEQ ID NO: 1881912
cucuguaguaaaugaugga

SEQ ID NO: 2080565 - RNA, 19 nt, Artificial Sequence
  Description of Artificial Sequence: Synthetic oligonucleotide
  Antisense strand to SEQ ID NO: 2080564
uccaucauuuacuacagag

SEQ ID NO: 2080566 - RNA, 19 nt, Artificial Sequence
  Description of Artificial Sequence: Synthetic oligonucleotide
  Sense strand starting at position 2018 of SEQ ID NO: 1881912
gcuauaugaggucaguuaa

SEQ ID NO: 2080567 - RNA, 19 nt, Artificial Sequence
  Description of Artificial Sequence: Synthetic oligonucleotide
  Antisense strand to SEQ ID NO: 2080566
uuaacugaccucauauagc

SEQ ID NO: 2080568 - RNA, 19 nt, Artificial Sequence
  Description of Artificial Sequence: Synthetic oligonucleotide
  Sense strand starting at position 2025 of SEQ ID NO: 1881912
gaggucaguuaaucuccaa

SEQ ID NO: 2080569 - RNA, 19 nt, Artificial Sequence
  Description of Artificial Sequence: Synthetic oligonucleotide
  Antisense strand to SEQ ID NO: 2080568
uuggagauuaacugaccuc

SEQ ID NO: 2080570 - RNA, 19 nt, Artificial Sequence
  Description of Artificial Sequence: Synthetic oligonucleotide
  Sense strand starting at position 2029 of SEQ ID NO: 1881912
ucaguuaaucuccaaguuu

SEQ ID NO: 2080571 - RNA, 19 nt, Artificial Sequence
  Description of Artificial Sequence: Synthetic oligonucleotide
  Antisense strand to SEQ ID NO: 2080570
aaacuuggagauuaacuga

SEQ ID NO: 2080572 - RNA, 19 nt, Artificial Sequence
  Description of Artificial Sequence: Synthetic oligonucleotide
  Sense strand starting at position 2216 of SEQ ID NO: 1881912
ggguuagaugcccaucauc

SEQ ID NO: 2080573 - RNA, 19 nt, Artificial Sequence
  Description of Artificial Sequence: Synthetic oligonucleotide
  Antisense strand to SEQ ID NO: 2080572
gaugaugggcaucuaaccc

SEQ ID NO: 2080574 - RNA, 19 nt, Artificial Sequence
  Description of Artificial Sequence: Synthetic oligonucleotide
  Sense strand starting at position 2344 of SEQ ID NO: 1881912
guaguuucccaagggaaau

SEQ ID NO: 2080575 - RNA, 19 nt, Artificial Sequence
  Description of Artificial Sequence: Synthetic oligonucleotide
  Antisense strand to SEQ ID NO: 2080574
auuucccuugggaaacuac

SEQ ID NO: 2080576 - RNA, 19 nt, Artificial Sequence
  Description of Artificial Sequence: Synthetic oligonucleotide
  Sense strand starting at position 2394 of SEQ ID NO: 1881912
ggcaauaguguccacuaua

SEQ ID NO: 2080577 - RNA, 19 nt, Artificial Sequence
  Description of Artificial Sequence: Synthetic oligonucleotide
  Antisense strand to SEQ ID NO: 2080576
uauaguggacacuauugcc

SEQ ID NO: 2080578 - RNA, 19 nt, Artificial Sequence
  Description of Artificial Sequence: Synthetic oligonucleotide
  Sense strand starting at position 2606 of SEQ ID NO: 1881912
ugcaauacauuguugauaa

SEQ ID NO: 2080579 - RNA, 19 nt, Artificial Sequence
  Description of Artificial Sequence: Synthetic oligonucleotide
  Antisense strand to SEQ ID NO: 2080578
uuaucaacaauguauugca

SEQ ID NO: 2080580 - RNA, 19 nt, Artificial Sequence
  Description of Artificial Sequence: Synthetic oligonucleotide
  Sense strand starting at position 2904 of SEQ ID NO: 1881912
cuuauuauggcagaauagu

SEQ ID NO: 2080581 - RNA, 19 nt, Artificial Sequence
  Description of Artificial Sequence: Synthetic oligonucleotide
  Antisense strand to SEQ ID NO: 2080580
acuauucugccauaauaag

SEQ ID NO: 2080582 - RNA, 19 nt, Artificial Sequence
  Description of Artificial Sequence: Synthetic oligonucleotide
  Sense strand starting at position 2913 of SEQ ID NO: 1881912
gcagaauaguauuccauag

SEQ ID NO: 2080583 - RNA, 19 nt, Artificial Sequence
  Description of Artificial Sequence: Synthetic oligonucleotide
  Antisense strand to SEQ ID NO: 2080582
cuauggaauacuauucugc

SEQ ID NO: 2080584 - RNA, 19 nt, Artificial Sequence
  Description of Artificial Sequence: Synthetic oligonucleotide
  Sense strand starting at position 3147 of SEQ ID NO: 1881912
ucauauggauaguucuauu

SEQ ID NO: 2080585 - RNA, 19 nt, Artificial Sequence
  Description of Artificial Sequence: Synthetic oligonucleotide
  Antisense strand to SEQ ID NO: 2080584
aauagaacuauccauauga

SEQ ID NO: 2080586 - RNA, 19 nt, Artificial Sequence
  Description of Artificial Sequence: Synthetic oligonucleotide
  Sense strand starting at position 3223 of SEQ ID NO: 1881912
uccaauagugcacaagagu

SEQ ID NO: 2080587 - RNA, 19 nt, Artificial Sequence
  Description of Artificial Sequence: Synthetic oligonucleotide
  Antisense strand to SEQ ID NO: 2080586
acucuugugcacuauugga

SEQ ID NO: 2080588 - RNA, 19 nt, Artificial Sequence
  Description of Artificial Sequence: Synthetic oligonucleotide
  Sense strand starting at position 3229 of SEQ ID NO: 1881912
agugcacaagaguaguaaa

SEQ ID NO: 2080589 - RNA, 19 nt, Artificial Sequence
  Description of Artificial Sequence: Synthetic oligonucleotide
  Antisense strand to SEQ ID NO: 2080588
uuuacuacucuugugcacu

SEQ ID NO: 2080590 - RNA, 19 nt, Artificial Sequence
  Description of Artificial Sequence: Synthetic oligonucleotide
  Sense strand starting at position 3300 of SEQ ID NO: 1881912
gguuuauaagauggucuga

SEQ ID NO: 2080591 - RNA, 19 nt, Artificial Sequence
  Description of Artificial Sequence: Synthetic oligonucleotide
  Antisense strand to SEQ ID NO: 2080590
ucagaccaucuuauaaacc

SEQ ID NO: 2080592 - RNA, 19 nt, Artificial Sequence
  Description of Artificial Sequence: Synthetic oligonucleotide
  Sense strand starting at position 3302 of SEQ ID NO: 1881912
uuuauaagauggucugaua

SEQ ID NO: 2080593 - RNA, 19 nt, Artificial Sequence
  Description of Artificial Sequence: Synthetic oligonucleotide
  Antisense strand to SEQ ID NO: 2080592
uaucagaccaucuuauaaa

SEQ ID NO: 2080594 - RNA, 19 nt, Artificial Sequence
  Description of Artificial Sequence: Synthetic oligonucleotide
  Sense strand starting at position 3682 of SEQ ID NO: 1881912
ucucuagaucauggacgau

SEQ ID NO: 2080595 - RNA, 19 nt, Artificial Sequence
  Description of Artificial Sequence: Synthetic oligonucleotide
  Antisense strand to SEQ ID NO: 2080594
aucguccaugaucuagaga

SEQ ID NO: 2080596 - RNA, 19 nt, Artificial Sequence
  Description of Artificial Sequence: Synthetic oligonucleotide
  Sense strand starting at position 3685 of SEQ ID NO: 1881912
cuagaucauggacgauauu

SEQ ID NO: 2080597 - RNA, 19 nt, Artificial Sequence
  Description of Artificial Sequence: Synthetic oligonucleotide
  Antisense strand to SEQ ID NO: 2080596
aauaucguccaugaucuag

SEQ ID NO: 2080598 - RNA, 19 nt, Artificial Sequence
  Description of Artificial Sequence: Synthetic oligonucleotide
  Sense strand starting at position 3750 of SEQ ID NO: 1881912
guuuauucuccauagagca

SEQ ID NO: 2080599 - RNA, 19 nt, Artificial Sequence
  Description of Artificial Sequence: Synthetic oligonucleotide
  Antisense strand to SEQ ID NO: 2080598
ugcucuauggagaauaaac

SEQ ID NO: 2080600 - RNA, 19 nt, Artificial Sequence
  Description of Artificial Sequence: Synthetic oligonucleotide
  Sense strand starting at position 3771 of SEQ ID NO: 1881912
ccuggaagucccuaucaau

SEQ ID NO: 2080601 - RNA, 19 nt, Artificial Sequence
  Description of Artificial Sequence: Synthetic oligonucleotide
  Antisense strand to SEQ ID NO: 2080600
auugauagggacuuccagg

SEQ ID NO: 2080602 - RNA, 19 nt, Artificial Sequence
  Description of Artificial Sequence: Synthetic oligonucleotide
  Sense strand starting at position 3836 of SEQ ID NO: 1881912
gcaugaacacuggguauua

SEQ ID NO: 2080603 - RNA, 19 nt, Artificial Sequence
  Description of Artificial Sequence: Synthetic oligonucleotide
  Antisense strand to SEQ ID NO: 2080602
uaauacccaguguucaugc

SEQ ID NO: 2080604 - RNA, 19 nt, Artificial Sequence
  Description of Artificial Sequence: Synthetic oligonucleotide
  Sense strand starting at position 71 of SEQ ID NO: 1881913
aaacaagaugugugauacu

SEQ ID NO: 2080605 - RNA, 19 nt, Artificial Sequence
  Description of Artificial Sequence: Synthetic oligonucleotide
  Antisense strand to SEQ ID NO: 2080604
aguaucacacaucuuguuu

SEQ ID NO: 2080606 - RNA, 19 nt, Artificial Sequence
  Description of Artificial Sequence: Synthetic oligonucleotide
  Sense strand starting at position 320 of SEQ ID NO: 1881913
agggaccagcguuaucaca

SEQ ID NO: 2080607 - RNA, 19 nt, Artificial Sequence
  Description of Artificial Sequence: Synthetic oligonucleotide
  Antisense strand to SEQ ID NO: 2080606
ugugauaacgcuggucccu

SEQ ID NO: 2080608 - RNA, 19 nt, Artificial Sequence
  Description of Artificial Sequence: Synthetic oligonucleotide
  Sense strand starting at position 336 of SEQ ID NO: 1881913
acauuagugugccuggaca

SEQ ID NO: 2080609 - RNA, 19 nt, Artificial Sequence
  Description of Artificial Sequence: Synthetic oligonucleotide
  Antisense strand to SEQ ID NO: 2080608
uguccaggcacacuaaugu

SEQ ID NO: 2080610 - RNA, 19 nt, Artificial Sequence
  Description of Artificial Sequence: Synthetic oligonucleotide
  Sense strand starting at position 450 of SEQ ID NO: 1881913
aguaauuguuccucucaaa

SEQ ID NO: 2080611 - RNA, 19 nt, Artificial Sequence
  Description of Artificial Sequence: Synthetic oligonucleotide
  Antisense strand to SEQ ID NO: 2080610
uuugagaggaacaauuacu

SEQ ID NO: 2080612 - RNA, 19 nt, Artificial Sequence
  Description of Artificial Sequence: Synthetic oligonucleotide
  Sense strand starting at position 506 of SEQ ID NO: 1881913
gcuuuacuucuuuaaagga

SEQ ID NO: 2080613 - RNA, 19 nt, Artificial Sequence
  Description of Artificial Sequence: Synthetic oligonucleotide
  Antisense strand to SEQ ID NO: 2080612
uccuuuaaagaaguaaagc

SEQ ID NO: 2080614 - RNA, 19 nt, Artificial Sequence
  Description of Artificial Sequence: Synthetic oligonucleotide
  Sense strand starting at position 541 of SEQ ID NO: 1881913
agcuuuaaucaugagcaga

SEQ ID NO: 2080615 - RNA, 19 nt, Artificial Sequence
  Description of Artificial Sequence: Synthetic oligonucleotide
  Antisense strand to SEQ ID NO: 2080614
ucugcucaugauuaaagcu

SEQ ID NO: 2080616 - RNA, 19 nt, Artificial Sequence
  Description of Artificial Sequence: Synthetic oligonucleotide
  Sense strand starting at position 543 of SEQ ID NO: 1881913
cuuuaaucaugagcagaaa

SEQ ID NO: 2080617 - RNA, 19 nt, Artificial Sequence
  Description of Artificial Sequence: Synthetic oligonucleotide
  Antisense strand to SEQ ID NO: 2080616
uuucugcucaugauuaaag

SEQ ID NO: 2080618 - RNA, 19 nt, Artificial Sequence
  Description of Artificial Sequence: Synthetic oligonucleotide
  Sense strand starting at position 1005 of SEQ ID NO: 1881913
ccucauucugauugucaag

SEQ ID NO: 2080619 - RNA, 19 nt, Artificial Sequence
  Description of Artificial Sequence: Synthetic oligonucleotide
  Antisense strand to SEQ ID NO: 2080618
cuugacaaucagaaugagg

SEQ ID NO: 2080620 - RNA, 19 nt, Artificial Sequence
  Description of Artificial Sequence: Synthetic oligonucleotide
  Sense strand starting at position 1194 of SEQ ID NO: 1881913
cccaguggauucucacaga

SEQ ID NO: 2080621 - RNA, 19 nt, Artificial Sequence
  Description of Artificial Sequence: Synthetic oligonucleotide
  Antisense strand to SEQ ID NO: 2080620
ucugugagaauccacuggg

SEQ ID NO: 2080622 - RNA, 19 nt, Artificial Sequence
  Description of Artificial Sequence: Synthetic oligonucleotide
  Sense strand starting at position 1251 of SEQ ID NO: 1881913
auggaaauguugucuacga

SEQ ID NO: 2080623 - RNA, 19 nt, Artificial Sequence
  Description of Artificial Sequence: Synthetic oligonucleotide
  Antisense strand to SEQ ID NO: 2080622
ucguagacaacauuuccau

SEQ ID NO: 2080624 - RNA, 19 nt, Artificial Sequence
  Description of Artificial Sequence: Synthetic oligonucleotide
  Sense strand starting at position 1252 of SEQ ID NO: 1881913
uggaaauguugucuacgag

SEQ ID NO: 2080625 - RNA, 19 nt, Artificial Sequence
  Description of Artificial Sequence: Synthetic oligonucleotide
  Antisense strand to SEQ ID NO: 2080624
cucguagacaacauuucca

SEQ ID NO: 2080626 - RNA, 19 nt, Artificial Sequence
  Description of Artificial Sequence: Synthetic oligonucleotide
  Sense strand starting at position 1253 of SEQ ID NO: 1881913
ggaaauguugucuacgagg

SEQ ID NO: 2080627 - RNA, 19 nt, Artificial Sequence
  Description of Artificial Sequence: Synthetic oligonucleotide
  Antisense strand to SEQ ID NO: 2080626
ccucguagacaacauuucc

SEQ ID NO: 2080628 - RNA, 19 nt, Artificial Sequence
  Description of Artificial Sequence: Synthetic oligonucleotide
  Sense strand starting at position 1255 of SEQ ID NO: 1881913
aaauguugucuacgaggga

SEQ ID NO: 2080629 - RNA, 19 nt, Artificial Sequence
  Description of Artificial Sequence: Synthetic oligonucleotide
  Antisense strand to SEQ ID NO: 2080628
ucccucguagacaacauuu

SEQ ID NO: 2080630 - RNA, 19 nt, Artificial Sequence
  Description of Artificial Sequence: Synthetic oligonucleotide
  Sense strand starting at position 1354 of SEQ ID NO: 1881913
gucguacuccaagaagaaa

SEQ ID NO: 2080631 - RNA, 19 nt, Artificial Sequence
  Description of Artificial Sequence: Synthetic oligonucleotide
  Antisense strand to SEQ ID NO: 2080630
uuucuucuuggaguacgac

SEQ ID NO: 2080632 - RNA, 19 nt, Artificial Sequence
  Description of Artificial Sequence: Synthetic oligonucleotide
  Sense strand starting at position 1440 of SEQ ID NO: 1881913
guggaaaccuuccugaaau

SEQ ID NO: 2080633 - RNA, 19 nt, Artificial Sequence
  Description of Artificial Sequence: Synthetic oligonucleotide
  Antisense strand to SEQ ID NO: 2080632
auuucaggaagguuuccac

SEQ ID NO: 2080634 - RNA, 19 nt, Artificial Sequence
  Description of Artificial Sequence: Synthetic oligonucleotide
  Sense strand starting at position 1552 of SEQ ID NO: 1881913
augggaaacuuugcuguca

SEQ ID NO: 2080635 - RNA, 19 nt, Artificial Sequence
  Description of Artificial Sequence: Synthetic oligonucleotide
  Antisense strand to SEQ ID NO: 2080634
ugacagcaaaguuucccau

SEQ ID NO: 2080636 - RNA, 19 nt, Artificial Sequence
  Description of Artificial Sequence: Synthetic oligonucleotide
  Sense strand starting at position 1553 of SEQ ID NO: 1881913
ugggaaacuuugcugucau

SEQ ID NO: 2080637 - RNA, 19 nt, Artificial Sequence
  Description of Artificial Sequence: Synthetic oligonucleotide
  Antisense strand to SEQ ID NO: 2080636
augacagcaaaguuuccca

SEQ ID NO: 2080638 - RNA, 19 nt, Artificial Sequence
  Description of Artificial Sequence: Synthetic oligonucleotide
  Sense strand starting at position 2031 of SEQ ID NO: 1881913
acguuauggagagaagcuu

SEQ ID NO: 2080639 - RNA, 19 nt, Artificial Sequence
  Description of Artificial Sequence: Synthetic oligonucleotide
  Antisense strand to SEQ ID NO: 2080638
aagcuucucuccauaacgu

SEQ ID NO: 2080640 - RNA, 19 nt, Artificial Sequence
  Description of Artificial Sequence: Synthetic oligonucleotide
  Sense strand starting at position 2039 of SEQ ID NO: 1881913
gagagaagcuuugcuacac

SEQ ID NO: 2080641 - RNA, 19 nt, Artificial Sequence
  Description of Artificial Sequence: Synthetic oligonucleotide
  Antisense strand to SEQ ID NO: 2080640
guguagcaaagcuucucuc

SEQ ID NO: 2080642 - RNA, 19 nt, Artificial Sequence
  Description of Artificial Sequence: Synthetic oligonucleotide
  Sense strand starting at position 2040 of SEQ ID NO: 1881913
agagaagcuuugcuacacu

SEQ ID NO: 2080643 - RNA, 19 nt, Artificial Sequence
  Description of Artificial Sequence: Synthetic oligonucleotide
  Antisense strand to SEQ ID NO: 2080642
aguguagcaaagcuucucu

SEQ ID NO: 2080644 - RNA, 19 nt, Artificial Sequence
  Description of Artificial Sequence: Synthetic oligonucleotide
  Sense strand starting at position 2059 of SEQ ID NO: 1881913
acguucuguccguucuauu

SEQ ID NO: 2080645 - RNA, 19 nt, Artificial Sequence
  Description of Artificial Sequence: Synthetic oligonucleotide
  Antisense strand to SEQ ID NO: 2080644
aauagaacggacagaacgu

SEQ ID NO: 2080646 - RNA, 19 nt, Artificial Sequence
  Description of Artificial Sequence: Synthetic oligonucleotide
  Sense strand starting at position 2233 of SEQ ID NO: 1881913
caguguugccuguugccua

SEQ ID NO: 2080647 - RNA, 19 nt, Artificial Sequence
  Description of Artificial Sequence: Synthetic oligonucleotide
  Antisense strand to SEQ ID NO: 2080646
uaggcaacaggcaacacug

SEQ ID NO: 2080648 - RNA, 19 nt, Artificial Sequence
  Description of Artificial Sequence: Synthetic oligonucleotide
  Sense strand starting at position 2244 of SEQ ID NO: 1881913
guugccuauuuccuaauga

SEQ ID NO: 2080649 - RNA, 19 nt, Artificial Sequence
  Description of Artificial Sequence: Synthetic oligonucleotide
  Antisense strand to SEQ ID NO: 2080648
ucauuaggaaauaggcaac

SEQ ID NO: 2080650 - RNA, 19 nt, Artificial Sequence
  Description of Artificial Sequence: Synthetic oligonucleotide
  Sense strand starting at position 2312 of SEQ ID NO: 1881913
gugacuuagccacacucuu

SEQ ID NO: 2080651 - RNA, 19 nt, Artificial Sequence
  Description of Artificial Sequence: Synthetic oligonucleotide
  Antisense strand to SEQ ID NO: 2080650
aagaguguggcuaagucac

SEQ ID NO: 2080652 - RNA, 19 nt, Artificial Sequence
  Description of Artificial Sequence: Synthetic oligonucleotide
  Sense strand starting at position 2472 of SEQ ID NO: 1881913
aggcuaccuuaauugagaa

SEQ ID NO: 2080653 - RNA, 19 nt, Artificial Sequence
  Description of Artificial Sequence: Synthetic oligonucleotide
  Antisense strand to SEQ ID NO: 2080652
uucucaauuaagguagccu

SEQ ID NO: 2080654 - RNA, 19 nt, Artificial Sequence
  Description of Artificial Sequence: Synthetic oligonucleotide
  Sense strand starting at position 2499 of SEQ ID NO: 1881913
agaacucauuuguaaugau

SEQ ID NO: 2080655 - RNA, 19 nt, Artificial Sequence
  Description of Artificial Sequence: Synthetic oligonucleotide
  Antisense strand to SEQ ID NO: 2080654
aucauuacaaaugaguucu

SEQ ID NO: 2080656 - RNA, 19 nt, Artificial Sequence
  Description of Artificial Sequence: Synthetic oligonucleotide
  Sense strand starting at position 2508 of SEQ ID NO: 1881913
uuguaaugaucagcuaaag

SEQ ID NO: 2080657 - RNA, 19 nt, Artificial Sequence
  Description of Artificial Sequence: Synthetic oligonucleotide
  Antisense strand to SEQ ID NO: 2080656
cuuuagcugaucauuacaa

SEQ ID NO: 2080658 - RNA, 19 nt, Artificial Sequence
  Description of Artificial Sequence: Synthetic oligonucleotide
  Sense strand starting at position 2629 of SEQ ID NO: 1881913
uuagaagcucccuaggguu

SEQ ID NO: 2080659 - RNA, 19 nt, Artificial Sequence
  Description of Artificial Sequence: Synthetic oligonucleotide
  Antisense strand to SEQ ID NO: 2080658
aacccuagggagcuucuaa

SEQ ID NO: 2080660 - RNA, 19 nt, Artificial Sequence
  Description of Artificial Sequence: Synthetic oligonucleotide
  Sense strand starting at position 2637 of SEQ ID NO: 1881913
ucccuaggguuucuauaau

SEQ ID NO: 2080661 - RNA, 19 nt, Artificial Sequence
  Description of Artificial Sequence: Synthetic oligonucleotide
  Antisense strand to SEQ ID NO: 2080660
auuauagaaacccuaggga

SEQ ID NO: 2080662 - RNA, 19 nt, Artificial Sequence
  Description of Artificial Sequence: Synthetic oligonucleotide
  Sense strand starting at position 2858 of SEQ ID NO: 1881913
uucccugaucuccagugaa

SEQ ID NO: 2080663 - RNA, 19 nt, Artificial Sequence
  Description of Artificial Sequence: Synthetic oligonucleotide
  Antisense strand to SEQ ID NO: 2080662
uucacuggagaucagggaa

SEQ ID NO: 2080664 - RNA, 19 nt, Artificial Sequence
  Description of Artificial Sequence: Synthetic oligonucleotide
  Sense strand starting at position 2861 of SEQ ID NO: 1881913
ccugaucuccagugaacag

SEQ ID NO: 2080665 - RNA, 19 nt, Artificial Sequence
  Description of Artificial Sequence: Synthetic oligonucleotide
  Antisense strand to SEQ ID NO: 2080664
cuguucacuggagaucagg

SEQ ID NO: 2080666 - RNA, 19 nt, Artificial Sequence
  Description of Artificial Sequence: Synthetic oligonucleotide
  Sense strand starting at position 2892 of SEQ ID NO: 1881913
cccugaaauguaggaccau

SEQ ID NO: 2080667 - RNA, 19 nt, Artificial Sequence
  Description of Artificial Sequence: Synthetic oligonucleotide
  Antisense strand to SEQ ID NO: 2080666
augguccuacauuucaggg

SEQ ID NO: 2080668 - RNA, 19 nt, Artificial Sequence
  Description of Artificial Sequence: Synthetic oligonucleotide
  Sense strand starting at position 3222 of SEQ ID NO: 1881913
gaaucaacucuggguacau

SEQ ID NO: 2080669 - RNA, 19 nt, Artificial Sequence
  Description of Artificial Sequence: Synthetic oligonucleotide
  Antisense strand to SEQ ID NO: 2080668
auguacccagaguugauuc

SEQ ID NO: 2080670 - RNA, 19 nt, Artificial Sequence
  Description of Artificial Sequence: Synthetic oligonucleotide
  Sense strand starting at position 3233 of SEQ ID NO: 1881913
ggguacauuugcuuuacuu

SEQ ID NO: 2080671 - RNA, 19 nt, Artificial Sequence
  Description of Artificial Sequence: Synthetic oligonucleotide
  Antisense strand to SEQ ID NO: 2080670
aaguaaagcaaauguaccc

SEQ ID NO: 2080672 - RNA, 19 nt, Artificial Sequence
  Description of Artificial Sequence: Synthetic oligonucleotide
  Sense strand starting at position 3367 of SEQ ID NO: 1881913
uauaaauuaggcuggguuu

SEQ ID NO: 2080673 - RNA, 19 nt, Artificial Sequence
  Description of Artificial Sequence: Synthetic oligonucleotide
  Antisense strand to SEQ ID NO: 2080672
aaacccagccuaauuuaua

SEQ ID NO: 2080674 - RNA, 19 nt, Artificial Sequence
  Description of Artificial Sequence: Synthetic oligonucleotide
  Sense strand starting at position 3379 of SEQ ID NO: 1881913
uggguuugcauccaaaugu

SEQ ID NO: 2080675 - RNA, 19 nt, Artificial Sequence
  Description of Artificial Sequence: Synthetic oligonucleotide
  Antisense strand to SEQ ID NO: 2080674
acauuuggaugcaaaccca

SEQ ID NO: 2080676 - RNA, 19 nt, Artificial Sequence
  Description of Artificial Sequence: Synthetic oligonucleotide
  Sense strand starting at position 3421 of SEQ ID NO: 1881913
cuugacaugcauuauuagu

SEQ ID NO: 2080677 - RNA, 19 nt, Artificial Sequence
  Description of Artificial Sequence: Synthetic oligonucleotide
  Antisense strand to SEQ ID NO: 2080676
acuaauaaugcaugucaag

SEQ ID NO: 2080678 - RNA, 19 nt, Artificial Sequence
  Description of Artificial Sequence: Synthetic oligonucleotide
  Sense strand starting at position 3633 of SEQ ID NO: 1881913
gagagacuggcuugauggu

SEQ ID NO: 2080679 - RNA, 19 nt, Artificial Sequence
  Description of Artificial Sequence: Synthetic oligonucleotide
  Antisense strand to SEQ ID NO: 2080678
accaucaagccagucucuc

SEQ ID NO: 2080680 - RNA, 19 nt, Artificial Sequence
  Description of Artificial Sequence: Synthetic oligonucleotide
  Sense strand starting at position 3688 of SEQ ID NO: 1881913
gggugaaagucucuauucu

SEQ ID NO: 2080681 - RNA, 19 nt, Artificial Sequence
  Description of Artificial Sequence: Synthetic oligonucleotide
  Antisense strand to SEQ ID NO: 2080680
agaauagagacuuucaccc

SEQ ID NO: 2080682 - RNA, 19 nt, Artificial Sequence
  Description of Artificial Sequence: Synthetic oligonucleotide
  Sense strand starting at position 3689 of SEQ ID NO: 1881913
ggugaaagucucuauucuu

SEQ ID NO: 2080683 - RNA, 19 nt, Artificial Sequence
  Description of Artificial Sequence: Synthetic oligonucleotide
  Antisense strand to SEQ ID NO: 2080682
aagaauagagacuuucacc

SEQ ID NO: 2080684 - RNA, 19 nt, Artificial Sequence
  Description of Artificial Sequence: Synthetic oligonucleotide
  Sense strand starting at position 134 of SEQ ID NO: 1881914
agaggagaagucugggcuu

SEQ ID NO: 2080685 - RNA, 19 nt, Artificial Sequence
  Description of Artificial Sequence: Synthetic oligonucleotide
  Antisense strand to SEQ ID NO: 2080684
aagcccagacuucuccucu

SEQ ID NO: 2080686 - RNA, 19 nt, Artificial Sequence
  Description of Artificial Sequence: Synthetic oligonucleotide
  Sense strand starting at position 521 of SEQ ID NO: 1881914
aguauaaugucuguuauag

SEQ ID NO: 2080687 - RNA, 19 nt, Artificial Sequence
  Description of Artificial Sequence: Synthetic oligonucleotide
  Antisense strand to SEQ ID NO: 2080686
cuauaacagacauuauacu

SEQ ID NO: 2080688 - RNA, 19 nt, Artificial Sequence
  Description of Artificial Sequence: Synthetic oligonucleotide
  Sense strand starting at position 695 of SEQ ID NO: 1881914
gugcuugaauucuuaggac

SEQ ID NO: 2080689 - RNA, 19 nt, Artificial Sequence
  Description of Artificial Sequence: Synthetic oligonucleotide
  Antisense strand to SEQ ID NO: 2080688
guccuaagaauucaagcac

SEQ ID NO: 2080690 - RNA, 19 nt, Artificial Sequence
  Description of Artificial Sequence: Synthetic oligonucleotide
  Sense strand starting at position 723 of SEQ ID NO: 1881914
cugguaaagccauauuauu

SEQ ID NO: 2080691 - RNA, 19 nt, Artificial Sequence
  Description of Artificial Sequence: Synthetic oligonucleotide
  Antisense strand to SEQ ID NO: 2080690
aauaauauggcuuuaccag

SEQ ID NO: 2080692 - RNA, 19 nt, Artificial Sequence
  Description of Artificial Sequence: Synthetic oligonucleotide
  Sense strand starting at position 746 of SEQ ID NO: 1881914
guuauuuacuaugagauag

SEQ ID NO: 2080693 - RNA, 19 nt, Artificial Sequence
  Description of Artificial Sequence: Synthetic oligonucleotide
  Antisense strand to SEQ ID NO: 2080692
cuaucucauaguaaauaac

SEQ ID NO: 2080694 - RNA, 19 nt, Artificial Sequence
  Description of Artificial Sequence: Synthetic oligonucleotide
  Sense strand starting at position 976 of SEQ ID NO: 1881914
ucuuucuuucuugauagga

SEQ ID NO: 2080695 - RNA, 19 nt, Artificial Sequence
  Description of Artificial Sequence: Synthetic oligonucleotide
  Antisense strand to SEQ ID NO: 2080694
uccuaucaagaaagaaaga

SEQ ID NO: 2080696 - RNA, 19 nt, Artificial Sequence
  Description of Artificial Sequence: Synthetic oligonucleotide
  Sense strand starting at position 1068 of SEQ ID NO: 1881914
ggcuguugugcucuuaugu

SEQ ID NO: 2080697 - RNA, 19 nt, Artificial Sequence
  Description of Artificial Sequence: Synthetic oligonucleotide
  Antisense strand to SEQ ID NO: 2080696
acauaagagcacaacagcc

SEQ ID NO: 2080698 - RNA, 19 nt, Artificial Sequence
  Description of Artificial Sequence: Synthetic oligonucleotide
  Sense strand starting at position 1085 of SEQ ID NO: 1881914
gugaaaugcuucucaugac

SEQ ID NO: 2080699 - RNA, 19 nt, Artificial Sequence
  Description of Artificial Sequence: Synthetic oligonucleotide
  Antisense strand to SEQ ID NO: 2080698
gucaugagaagcauuucac

SEQ ID NO: 2080700 - RNA, 19 nt, Artificial Sequence
  Description of Artificial Sequence: Synthetic oligonucleotide
  Sense strand starting at position 1089 of SEQ ID NO: 1881914
aaugcuucucaugacguua

SEQ ID NO: 2080701 - RNA, 19 nt, Artificial Sequence
  Description of Artificial Sequence: Synthetic oligonucleotide
  Antisense strand to SEQ ID NO: 2080700
uaacgucaugagaagcauu

SEQ ID NO: 2080702 - RNA, 19 nt, Artificial Sequence
  Description of Artificial Sequence: Synthetic oligonucleotide
  Sense strand starting at position 1102 of SEQ ID NO: 1881914
acguuaugcauggacaaua

SEQ ID NO: 2080703 - RNA, 19 nt, Artificial Sequence
  Description of Artificial Sequence: Synthetic oligonucleotide
  Antisense strand to SEQ ID NO: 2080702
uauuguccaugcauaacgu

SEQ ID NO: 2080704 - RNA, 19 nt, Artificial Sequence
  Description of Artificial Sequence: Synthetic oligonucleotide
  Sense strand starting at position 1115 of SEQ ID NO: 1881914
acaauauugaagcgugaua

SEQ ID NO: 2080705 - RNA, 19 nt, Artificial Sequence
  Description of Artificial Sequence: Synthetic oligonucleotide
  Antisense strand to SEQ ID NO: 2080704
uaucacgcuucaauauugu

SEQ ID NO: 2080706 - RNA, 19 nt, Artificial Sequence
  Description of Artificial Sequence: Synthetic oligonucleotide
  Sense strand starting at position 1117 of SEQ ID NO: 1881914
aauauugaagcgugauaua

SEQ ID NO: 2080707 - RNA, 19 nt, Artificial Sequence
  Description of Artificial Sequence: Synthetic oligonucleotide
  Antisense strand to SEQ ID NO: 2080706
uauaucacgcuucaauauu

SEQ ID NO: 2080708 - RNA, 19 nt, Artificial Sequence
  Description of Artificial Sequence: Synthetic oligonucleotide
  Sense strand starting at position 1137 of SEQ ID NO: 1881914
uggcuuugggucuagucaa

SEQ ID NO: 2080709 - RNA, 19 nt, Artificial Sequence
  Description of Artificial Sequence: Synthetic oligonucleotide
  Antisense strand to SEQ ID NO: 2080708
uugacuagacccaaagcca

SEQ ID NO: 2080710 - RNA, 19 nt, Artificial Sequence
  Description of Artificial Sequence: Synthetic oligonucleotide
  Sense strand starting at position 1251 of SEQ ID NO: 1881914
gcacauuggauaugauugu

SEQ ID NO: 2080711 - RNA, 19 nt, Artificial Sequence
  Description of Artificial Sequence: Synthetic oligonucleotide
  Antisense strand to SEQ ID NO: 2080710
acaaucauauccaaugugc

SEQ ID NO: 2080712 - RNA, 19 nt, Artificial Sequence
  Description of Artificial Sequence: Synthetic oligonucleotide
  Sense strand starting at position 1255 of SEQ ID NO: 1881914
auuggauaugauuguuaga

SEQ ID NO: 2080713 - RNA, 19 nt, Artificial Sequence
  Description of Artificial Sequence: Synthetic oligonucleotide
  Antisense strand to SEQ ID NO: 2080712
ucuaacaaucauauccaau

SEQ ID NO: 2080714 - RNA, 19 nt, Artificial Sequence
  Description of Artificial Sequence: Synthetic oligonucleotide
  Sense strand starting at position 1257 of SEQ ID NO: 1881914
uggauaugauuguuagagc

SEQ ID NO: 2080715 - RNA, 19 nt, Artificial Sequence
  Description of Artificial Sequence: Synthetic oligonucleotide
  Antisense strand to SEQ ID NO: 2080714
gcucuaacaaucauaucca

SEQ ID NO: 2080716 - RNA, 19 nt, Artificial Sequence
  Description of Artificial Sequence: Synthetic oligonucleotide
  Sense strand starting at position 1293 of SEQ ID NO: 1881914
gccauaauaugaucuugaa

SEQ ID NO: 2080717 - RNA, 19 nt, Artificial Sequence
  Description of Artificial Sequence: Synthetic oligonucleotide
  Antisense strand to SEQ ID NO: 2080716
uucaagaucauauuauggc

SEQ ID NO: 2080718 - RNA, 19 nt, Artificial Sequence
  Description of Artificial Sequence: Synthetic oligonucleotide
  Sense strand starting at position 1354 of SEQ ID NO: 1881914
gaaccuggcugucugaaga

SEQ ID NO: 2080719 - RNA, 19 nt, Artificial Sequence
  Description of Artificial Sequence: Synthetic oligonucleotide
  Antisense strand to SEQ ID NO: 2080718
ucuucagacagccagguuc

SEQ ID NO: 2080720 - RNA, 19 nt, Artificial Sequence
  Description of Artificial Sequence: Synthetic oligonucleotide
  Sense strand starting at position 1389 of SEQ ID NO: 1881914
uggcaugccagccaugaaa

SEQ ID NO: 2080721 - RNA, 19 nt, Artificial Sequence
  Description of Artificial Sequence: Synthetic oligonucleotide
  Antisense strand to SEQ ID NO: 2080720
uuucauggcuggcaugcca

SEQ ID NO: 2080722 - RNA, 19 nt, Artificial Sequence
  Description of Artificial Sequence: Synthetic oligonucleotide
  Sense strand starting at position 1414 of SEQ ID NO: 1881914
uguguauuuguacguaaug

SEQ ID NO: 2080723 - RNA, 19 nt, Artificial Sequence
  Description of Artificial Sequence: Synthetic oligonucleotide
  Antisense strand to SEQ ID NO: 2080722
cauuacguacaaauacaca

SEQ ID NO: 2080724 - RNA, 19 nt, Artificial Sequence
  Description of Artificial Sequence: Synthetic oligonucleotide
  Sense strand starting at position 1415 of SEQ ID NO: 1881914
guguauuuguacguaauga

SEQ ID NO: 2080725 - RNA, 19 nt, Artificial Sequence
  Description of Artificial Sequence: Synthetic oligonucleotide
  Antisense strand to SEQ ID NO: 2080724
ucauuacguacaaauacac

SEQ ID NO: 2080726 - RNA, 19 nt, Artificial Sequence
  Description of Artificial Sequence: Synthetic oligonucleotide
  Sense strand starting at position 1476 of SEQ ID NO: 1881914
gcauauacagcugaaucua

SEQ ID NO: 2080727 - RNA, 19 nt, Artificial Sequence
  Description of Artificial Sequence: Synthetic oligonucleotide
  Antisense strand to SEQ ID NO: 2080726
uagauucagcuguauaugc

SEQ ID NO: 2080728 - RNA, 19 nt, Artificial Sequence
  Description of Artificial Sequence: Synthetic oligonucleotide
  Sense strand starting at position 1626 of SEQ ID NO: 1881914
uuuguuuccuucucaggaa

SEQ ID NO: 2080729 - RNA, 19 nt, Artificial Sequence
  Description of Artificial Sequence: Synthetic oligonucleotide
  Antisense strand to SEQ ID NO: 2080728
uuccugagaaggaaacaaa

SEQ ID NO: 2080730 - RNA, 19 nt, Artificial Sequence
  Description of Artificial Sequence: Synthetic oligonucleotide
  Sense strand starting at position 2066 of SEQ ID NO: 1881914
aaugaauggccuuggcaug

SEQ ID NO: 2080731 - RNA, 19 nt, Artificial Sequence
  Description of Artificial Sequence: Synthetic oligonucleotide
  Antisense strand to SEQ ID NO: 2080730
caugccaaggccauucauu

SEQ ID NO: 2080732 - RNA, 19 nt, Artificial Sequence
  Description of Artificial Sequence: Synthetic oligonucleotide
  Sense strand starting at position 2080 of SEQ ID NO: 1881914
gcaugaaucccaugaggga

SEQ ID NO: 2080733 - RNA, 19 nt, Artificial Sequence
  Description of Artificial Sequence: Synthetic oligonucleotide
  Antisense strand to SEQ ID NO: 2080732
ucccucaugggauucaugc

SEQ ID NO: 2080734 - RNA, 19 nt, Artificial Sequence
  Description of Artificial Sequence: Synthetic oligonucleotide
  Sense strand starting at position 2229 of SEQ ID NO: 1881914
gauaguagcaguggaacau

SEQ ID NO: 2080735 - RNA, 19 nt, Artificial Sequence
  Description of Artificial Sequence: Synthetic oligonucleotide
  Antisense strand to SEQ ID NO: 2080734
auguuccacugcuacuauc

SEQ ID NO: 2080736 - RNA, 19 nt, Artificial Sequence
  Description of Artificial Sequence: Synthetic oligonucleotide
  Sense strand starting at position 2252 of SEQ ID NO: 1881914
acauaaguaguguauuaca

SEQ ID NO: 2080737 - RNA, 19 nt, Artificial Sequence
  Description of Artificial Sequence: Synthetic oligonucleotide
  Antisense strand to SEQ ID NO: 2080736
uguaauacacuacuuaugu

SEQ ID NO: 2080738 - RNA, 19 nt, Artificial Sequence
  Description of Artificial Sequence: Synthetic oligonucleotide
  Sense strand starting at position 2262 of SEQ ID NO: 1881914
uguauuacacaugguauau

SEQ ID NO: 2080739 - RNA, 19 nt, Artificial Sequence
  Description of Artificial Sequence: Synthetic oligonucleotide
  Antisense strand to SEQ ID NO: 2080738
auauaccauguguaauaca

SEQ ID NO: 2080740 - RNA, 19 nt, Artificial Sequence
  Description of Artificial Sequence: Synthetic oligonucleotide
  Sense strand starting at position 2337 of SEQ ID NO: 1881914
cuaauuaucugguuauuag

SEQ ID NO: 2080741 - RNA, 19 nt, Artificial Sequence
  Description of Artificial Sequence: Synthetic oligonucleotide
  Antisense strand to SEQ ID NO: 2080740
cuaauaaccagauaauuag

SEQ ID NO: 2080742 - RNA, 19 nt, Artificial Sequence
  Description of Artificial Sequence: Synthetic oligonucleotide
  Sense strand starting at position 2368 of SEQ ID NO: 1881914
cuagauuacuuagugaauu

SEQ ID NO: 2080743 - RNA, 19 nt, Artificial Sequence
  Description of Artificial Sequence: Synthetic oligonucleotide
  Antisense strand to SEQ ID NO: 2080742
aauucacuaaguaaucuag

SEQ ID NO: 2080744 - RNA, 19 nt, Artificial Sequence
  Description of Artificial Sequence: Synthetic oligonucleotide
  Sense strand starting at position 2655 of SEQ ID NO: 1881914
auuugcaaguaugaaagau

SEQ ID NO: 2080745 - RNA, 19 nt, Artificial Sequence
  Description of Artificial Sequence: Synthetic oligonucleotide
  Antisense strand to SEQ ID NO: 2080744
aucuuucauacuugcaaau

SEQ ID NO: 2080746 - RNA, 19 nt, Artificial Sequence
  Description of Artificial Sequence: Synthetic oligonucleotide
  Sense strand starting at position 2924 of SEQ ID NO: 1881914
guugauuauguguauagug

SEQ ID NO: 2080747 - RNA, 19 nt, Artificial Sequence
  Description of Artificial Sequence: Synthetic oligonucleotide
  Antisense strand to SEQ ID NO: 2080746
cacuauacacauaaucaac

SEQ ID NO: 2080748 - RNA, 19 nt, Artificial Sequence
  Description of Artificial Sequence: Synthetic oligonucleotide
  Sense strand starting at position 2994 of SEQ ID NO: 1881914
uugucagagaggcaaaguu

SEQ ID NO: 2080749 - RNA, 19 nt, Artificial Sequence
  Description of Artificial Sequence: Synthetic oligonucleotide
  Antisense strand to SEQ ID NO: 2080748
aacuuugccucucugacaa

SEQ ID NO: 2080750 - RNA, 19 nt, Artificial Sequence
  Description of Artificial Sequence: Synthetic oligonucleotide
  Sense strand starting at position 3131 of SEQ ID NO: 1881914
acaagcuauuggguaaaga

SEQ ID NO: 2080751 - RNA, 19 nt, Artificial Sequence
  Description of Artificial Sequence: Synthetic oligonucleotide
  Antisense strand to SEQ ID NO: 2080750
ucuuuacccaauagcuugu

SEQ ID NO: 2080752 - RNA, 19 nt, Artificial Sequence
  Description of Artificial Sequence: Synthetic oligonucleotide
  Sense strand starting at position 3149 of SEQ ID NO: 1881914
agcuaagagaacugguaca

SEQ ID NO: 2080753 - RNA, 19 nt, Artificial Sequence
  Description of Artificial Sequence: Synthetic oligonucleotide
  Antisense strand to SEQ ID NO: 2080752
uguaccaguucucuuagcu

SEQ ID NO: 2080754 - RNA, 19 nt, Artificial Sequence
  Description of Artificial Sequence: Synthetic oligonucleotide
  Sense strand starting at position 3224 of SEQ ID NO: 1881914
ugaagauauuauguguaga

SEQ ID NO: 2080755 - RNA, 19 nt, Artificial Sequence
  Description of Artificial Sequence: Synthetic oligonucleotide
  Antisense strand to SEQ ID NO: 2080754
ucuacacauaauaucuuca

SEQ ID NO: 2080756 - RNA, 19 nt, Artificial Sequence
  Description of Artificial Sequence: Synthetic oligonucleotide
  Sense strand starting at position 3257 of SEQ ID NO: 1881914
aucuguuaaugcuuuaaga

SEQ ID NO: 2080757 - RNA, 19 nt, Artificial Sequence
  Description of Artificial Sequence: Synthetic oligonucleotide
  Antisense strand to SEQ ID NO: 2080756
ucuuaaagcauuaacagau

SEQ ID NO: 2080758 - RNA, 19 nt, Artificial Sequence
  Description of Artificial Sequence: Synthetic oligonucleotide
  Sense strand starting at position 3259 of SEQ ID NO: 1881914
cuguuaaugcuuuaagagu

SEQ ID NO: 2080759 - RNA, 19 nt, Artificial Sequence
  Description of Artificial Sequence: Synthetic oligonucleotide
  Antisense strand to SEQ ID NO: 2080758
acucuuaaagcauuaacag

SEQ ID NO: 2080760 - RNA, 19 nt, Artificial Sequence
  Description of Artificial Sequence: Synthetic oligonucleotide
  Sense strand starting at position 3739 of SEQ ID NO: 1881914
agauuaguacuagggcaaa

SEQ ID NO: 2080761 - RNA, 19 nt, Artificial Sequence
  Description of Artificial Sequence: Synthetic oligonucleotide
  Antisense strand to SEQ ID NO: 2080760
uuugcccuaguacuaaucu

SEQ ID NO: 2080762 - RNA, 19 nt, Artificial Sequence
  Description of Artificial Sequence: Synthetic oligonucleotide
  Sense strand starting at position 3878 of SEQ ID NO: 1881914
acaugacagucugcauuaa

SEQ ID NO: 2080763 - RNA, 19 nt, Artificial Sequence
  Description of Artificial Sequence: Synthetic oligonucleotide
  Antisense strand to SEQ ID NO: 2080762
uuaaugcagacugucaugu

SEQ ID NO: 2080764 - RNA, 19 nt, Artificial Sequence
  Description of Artificial Sequence: Synthetic oligonucleotide
  Sense strand starting at position 263 of SEQ ID NO: 1881915
guugguauuaucuagagau

SEQ ID NO: 2080765 - RNA, 19 nt, Artificial Sequence
  Description of Artificial Sequence: Synthetic oligonucleotide
  Antisense strand to SEQ ID NO: 2080764
aucucuagauaauaccaac

SEQ ID NO: 2080766 - RNA, 19 nt, Artificial Sequence
  Description of Artificial Sequence: Synthetic oligonucleotide
  Sense strand starting at position 284 of SEQ ID NO: 1881915
gagagcuaagcugaaaguu

SEQ ID NO: 2080767 - RNA, 19 nt, Artificial Sequence
  Description of Artificial Sequence: Synthetic oligonucleotide
  Antisense strand to SEQ ID NO: 2080766
aacuuucagcuuagcucuc

SEQ ID NO: 2080768 - RNA, 19 nt, Artificial Sequence
  Description of Artificial Sequence: Synthetic oligonucleotide
  Sense strand starting at position 293 of SEQ ID NO: 1881915
gcugaaaguuuaccaagga

SEQ ID NO: 2080769 - RNA, 19 nt, Artificial Sequence
  Description of Artificial Sequence: Synthetic oligonucleotide
  Antisense strand to SEQ ID NO: 2080768
uccuugguaaacuuucagc

SEQ ID NO: 2080770 - RNA, 19 nt, Artificial Sequence
  Description of Artificial Sequence: Synthetic oligonucleotide
  Sense strand starting at position 509 of SEQ ID NO: 1881915
uuuagaaguccaggauucu

SEQ ID NO: 2080771 - RNA, 19 nt, Artificial Sequence
  Description of Artificial Sequence: Synthetic oligonucleotide
  Antisense strand to SEQ ID NO: 2080770
agaauccuggacuucuaaa

SEQ ID NO: 2080772 - RNA, 19 nt, Artificial Sequence
  Description of Artificial Sequence: Synthetic oligonucleotide
  Sense strand starting at position 518 of SEQ ID NO: 1881915
ccaggauucuaguucugac

SEQ ID NO: 2080773 - RNA, 19 nt, Artificial Sequence
  Description of Artificial Sequence: Synthetic oligonucleotide
  Antisense strand to SEQ ID NO: 2080772
gucagaacuagaauccugg

SEQ ID NO: 2080774 - RNA, 19 nt, Artificial Sequence
  Description of Artificial Sequence: Synthetic oligonucleotide
  Sense strand starting at position 806 of SEQ ID NO: 1881915
ugcagaagauaaguagaua

SEQ ID NO: 2080775 - RNA, 19 nt, Artificial Sequence
  Description of Artificial Sequence: Synthetic oligonucleotide
  Antisense strand to SEQ ID NO: 2080774
uaucuacuuaucuucugca

SEQ ID NO: 2080776 - RNA, 19 nt, Artificial Sequence
  Description of Artificial Sequence: Synthetic oligonucleotide
  Sense strand starting at position 944 of SEQ ID NO: 1881915
ggaguccugguguauauua

SEQ ID NO: 2080777 - RNA, 19 nt, Artificial Sequence
  Description of Artificial Sequence: Synthetic oligonucleotide
  Antisense strand to SEQ ID NO: 2080776
uaauauacaccaggacucc

SEQ ID NO: 2080778 - RNA, 19 nt, Artificial Sequence
  Description of Artificial Sequence: Synthetic oligonucleotide
  Sense strand starting at position 952 of SEQ ID NO: 1881915
gguguauauuaaguagaaa

SEQ ID NO: 2080779 - RNA, 19 nt, Artificial Sequence
  Description of Artificial Sequence: Synthetic oligonucleotide
  Antisense strand to SEQ ID NO: 2080778
uuucuacuuaauauacacc

SEQ ID NO: 2080780 - RNA, 19 nt, Artificial Sequence
  Description of Artificial Sequence: Synthetic oligonucleotide
  Sense strand starting at position 1348 of SEQ ID NO: 1881915
aguaaaucuuuagugauag

SEQ ID NO: 2080781 - RNA, 19 nt, Artificial Sequence
  Description of Artificial Sequence: Synthetic oligonucleotide
  Antisense strand to SEQ ID NO: 2080780
cuaucacuaaagauuuacu

SEQ ID NO: 2080782 - RNA, 19 nt, Artificial Sequence
  Description of Artificial Sequence: Synthetic oligonucleotide
  Sense strand starting at position 1392 of SEQ ID NO: 1881915
auaaguaaacauggauguu

SEQ ID NO: 2080783 - RNA, 19 nt, Artificial Sequence
  Description of Artificial Sequence: Synthetic oligonucleotide
  Antisense strand to SEQ ID NO: 2080782
aacauccauguuuacuuau

SEQ ID NO: 2080784 - RNA, 19 nt, Artificial Sequence
  Description of Artificial Sequence: Synthetic oligonucleotide
  Sense strand starting at position 1411 of SEQ ID NO: 1881915
accaguuguuacucuagaa

SEQ ID NO: 2080785 - RNA, 19 nt, Artificial Sequence
  Description of Artificial Sequence: Synthetic oligonucleotide
  Antisense strand to SEQ ID NO: 2080784
uucuagaguaacaacuggu

SEQ ID NO: 2080786 - RNA, 19 nt, Artificial Sequence
  Description of Artificial Sequence: Synthetic oligonucleotide
  Sense strand starting at position 1567 of SEQ ID NO: 1881915
aggcaaucucguuaagaug

SEQ ID NO: 2080787 - RNA, 19 nt, Artificial Sequence
  Description of Artificial Sequence: Synthetic oligonucleotide
  Antisense strand to SEQ ID NO: 2080786
caucuuaacgagauugccu

SEQ ID NO: 2080788 - RNA, 19 nt, Artificial Sequence
  Description of Artificial Sequence: Synthetic oligonucleotide
  Sense strand starting at position 1583 of SEQ ID NO: 1881915
augucagaaucaucucaga

SEQ ID NO: 2080789 - RNA, 19 nt, Artificial Sequence
  Description of Artificial Sequence: Synthetic oligonucleotide
  Antisense strand to SEQ ID NO: 2080788
ucugagaugauucugacau

SEQ ID NO: 2080790 - RNA, 19 nt, Artificial Sequence
  Description of Artificial Sequence: Synthetic oligonucleotide
  Sense strand starting at position 1614 of SEQ ID NO: 1881915
uuauaucaggcucacagau

SEQ ID NO: 2080791 - RNA, 19 nt, Artificial Sequence
  Description of Artificial Sequence: Synthetic oligonucleotide
  Antisense strand to SEQ ID NO: 2080790
aucugugagccugauauaa

SEQ ID NO: 2080792 - RNA, 19 nt, Artificial Sequence
  Description of Artificial Sequence: Synthetic oligonucleotide
  Sense strand starting at position 1701 of SEQ ID NO: 1881915
ugccaaggacuuggugaua

SEQ ID NO: 2080793 - RNA, 19 nt, Artificial Sequence
  Description of Artificial Sequence: Synthetic oligonucleotide
  Antisense strand to SEQ ID NO: 2080792
uaucaccaaguccuuggca

SEQ ID NO: 2080794 - RNA, 19 nt, Artificial Sequence
  Description of Artificial Sequence: Synthetic oligonucleotide
  Sense strand starting at position 1770 of SEQ ID NO: 1881915
gcaggagacucuguggaau

SEQ ID NO: 2080795 - RNA, 19 nt, Artificial Sequence
  Description of Artificial Sequence: Synthetic oligonucleotide
  Antisense strand to SEQ ID NO: 2080794
auuccacagagucuccugc

SEQ ID NO: 2080796 - RNA, 19 nt, Artificial Sequence
  Description of Artificial Sequence: Synthetic oligonucleotide
  Sense strand starting at position 1912 of SEQ ID NO: 1881915
cugagacacuucccuuuga

SEQ ID NO: 2080797 - RNA, 19 nt, Artificial Sequence
  Description of Artificial Sequence: Synthetic oligonucleotide
  Antisense strand to SEQ ID NO: 2080796
ucaaagggaagugucucag

SEQ ID NO: 2080798 - RNA, 19 nt, Artificial Sequence
  Description of Artificial Sequence: Synthetic oligonucleotide
  Sense strand starting at position 1913 of SEQ ID NO: 1881915
ugagacacuucccuuugau

SEQ ID NO: 2080799 - RNA, 19 nt, Artificial Sequence
  Description of Artificial Sequence: Synthetic oligonucleotide
  Antisense strand to SEQ ID NO: 2080798
aucaaagggaagugucuca

SEQ ID NO: 2080800 - RNA, 19 nt, Artificial Sequence
  Description of Artificial Sequence: Synthetic oligonucleotide
  Sense strand starting at position 1927 of SEQ ID NO: 1881915
uugauuuguuguuugguga

SEQ ID NO: 2080801 - RNA, 19 nt, Artificial Sequence
  Description of Artificial Sequence: Synthetic oligonucleotide
  Antisense strand to SEQ ID NO: 2080800
ucaccaaacaacaaaucaa

SEQ ID NO: 2080802 - RNA, 19 nt, Artificial Sequence
  Description of Artificial Sequence: Synthetic oligonucleotide
  Sense strand starting at position 1928 of SEQ ID NO: 1881915
ugauuuguuguuuggugau

SEQ ID NO: 2080803 - RNA, 19 nt, Artificial Sequence
  Description of Artificial Sequence: Synthetic oligonucleotide
  Antisense strand to SEQ ID NO: 2080802
aucaccaaacaacaaauca

SEQ ID NO: 2080804 - RNA, 19 nt, Artificial Sequence
  Description of Artificial Sequence: Synthetic oligonucleotide
  Sense strand starting at position 2179 of SEQ ID NO: 1881915
uuucuuugucaucaaggau

SEQ ID NO: 2080805 - RNA, 19 nt, Artificial Sequence
  Description of Artificial Sequence: Synthetic oligonucleotide
  Antisense strand to SEQ ID NO: 2080804
auccuugaugacaaagaaa

SEQ ID NO: 2080806 - RNA, 19 nt, Artificial Sequence
  Description of Artificial Sequence: Synthetic oligonucleotide
  Sense strand starting at position 2182 of SEQ ID NO: 1881915
cuuugucaucaaggauaug

SEQ ID NO: 2080807 - RNA, 19 nt, Artificial Sequence
  Description of Artificial Sequence: Synthetic oligonucleotide
  Antisense strand to SEQ ID NO: 2080806
cauauccuugaugacaaag

SEQ ID NO: 2080808 - RNA, 19 nt, Artificial Sequence
  Description of Artificial Sequence: Synthetic oligonucleotide
  Sense strand starting at position 2301 of SEQ ID NO: 1881915
acagaagucacguaugaca

SEQ ID NO: 2080809 - RNA, 19 nt, Artificial Sequence
  Description of Artificial Sequence: Synthetic oligonucleotide
  Antisense strand to SEQ ID NO: 2080808
ugucauacgugacuucugu

SEQ ID NO: 2080810 - RNA, 19 nt, Artificial Sequence
  Description of Artificial Sequence: Synthetic oligonucleotide
  Sense strand starting at position 2303 of SEQ ID NO: 1881915
agaagucacguaugacaca

SEQ ID NO: 2080811 - RNA, 19 nt, Artificial Sequence
  Description of Artificial Sequence: Synthetic oligonucleotide
  Antisense strand to SEQ ID NO: 2080810
ugugucauacgugacuucu

SEQ ID NO: 2080812 - RNA, 19 nt, Artificial Sequence
  Description of Artificial Sequence: Synthetic oligonucleotide
  Sense strand starting at position 2475 of SEQ ID NO: 1881915
ggauguuuagagugugaga

SEQ ID NO: 2080813 - RNA, 19 nt, Artificial Sequence
  Description of Artificial Sequence: Synthetic oligonucleotide
  Antisense strand to SEQ ID NO: 2080812
ucucacacucuaaacaucc

SEQ ID NO: 2080814 - RNA, 19 nt, Artificial Sequence
  Description of Artificial Sequence: Synthetic oligonucleotide
  Sense strand starting at position 2846 of SEQ ID NO: 1881915
cuagaaccuccugguuuaa

SEQ ID NO: 2080815 - RNA, 19 nt, Artificial Sequence
  Description of Artificial Sequence: Synthetic oligonucleotide
  Antisense strand to SEQ ID NO: 2080814
uuaaaccaggagguucuag

SEQ ID NO: 2080816 - RNA, 19 nt, Artificial Sequence
  Description of Artificial Sequence: Synthetic oligonucleotide
  Sense strand starting at position 2848 of SEQ ID NO: 1881915
agaaccuccugguuuaauu

SEQ ID NO: 2080817 - RNA, 19 nt, Artificial Sequence
  Description of Artificial Sequence: Synthetic oligonucleotide
  Antisense strand to SEQ ID NO: 2080816
aauuaaaccaggagguucu

SEQ ID NO: 2080818 - RNA, 19 nt, Artificial Sequence
  Description of Artificial Sequence: Synthetic oligonucleotide
  Sense strand starting at position 3133 of SEQ ID NO: 1881915
augguccaauuccuugaaa

SEQ ID NO: 2080819 - RNA, 19 nt, Artificial Sequence
  Description of Artificial Sequence: Synthetic oligonucleotide
  Antisense strand to SEQ ID NO: 2080818
uuucaaggaauuggaccau

SEQ ID NO: 2080820 - RNA, 19 nt, Artificial Sequence
  Description of Artificial Sequence: Synthetic oligonucleotide
  Sense strand starting at position 3134 of SEQ ID NO: 1881915
ugguccaauuccuugaaau

SEQ ID NO: 2080821 - RNA, 19 nt, Artificial Sequence
  Description of Artificial Sequence: Synthetic oligonucleotide
  Antisense strand to SEQ ID NO: 2080820
auuucaaggaauuggacca

SEQ ID NO: 2080822 - RNA, 19 nt, Artificial Sequence
  Description of Artificial Sequence: Synthetic oligonucleotide
  Sense strand starting at position 3135 of SEQ ID NO: 1881915
gguccaauuccuugaaaua

SEQ ID NO: 2080823 - RNA, 19 nt, Artificial Sequence
  Description of Artificial Sequence: Synthetic oligonucleotide
  Antisense strand to SEQ ID NO: 2080822
uauuucaaggaauuggacc

SEQ ID NO: 2080824 - RNA, 19 nt, Artificial Sequence
  Description of Artificial Sequence: Synthetic oligonucleotide
  Sense strand starting at position 3508 of SEQ ID NO: 1881915
ucaugagcaauugagguuu

SEQ ID NO: 2080825 - RNA, 19 nt, Artificial Sequence
  Description of Artificial Sequence: Synthetic oligonucleotide
  Antisense strand to SEQ ID NO: 2080824
aaaccucaauugcucauga

SEQ ID NO: 2080826 - RNA, 19 nt, Artificial Sequence
  Description of Artificial Sequence: Synthetic oligonucleotide
  Sense strand starting at position 3514 of SEQ ID NO: 1881915
gcaauugagguuuacucua

SEQ ID NO: 2080827 - RNA, 19 nt, Artificial Sequence
  Description of Artificial Sequence: Synthetic oligonucleotide
  Antisense strand to SEQ ID NO: 2080826
uagaguaaaccucaauugc

SEQ ID NO: 2080828 - RNA, 19 nt, Artificial Sequence
  Description of Artificial Sequence: Synthetic oligonucleotide
  Sense strand starting at position 3516 of SEQ ID NO: 1881915
aauugagguuuacucuaga

SEQ ID NO: 2080829 - RNA, 19 nt, Artificial Sequence
  Description of Artificial Sequence: Synthetic oligonucleotide
  Antisense strand to SEQ ID NO: 2080828
ucuagaguaaaccucaauu

SEQ ID NO: 2080830 - RNA, 19 nt, Artificial Sequence
  Description of Artificial Sequence: Synthetic oligonucleotide
  Sense strand starting at position 3582 of SEQ ID NO: 1881915
caagguuguccagacaacu

SEQ ID NO: 2080831 - RNA, 19 nt, Artificial Sequence
  Description of Artificial Sequence: Synthetic oligonucleotide
  Antisense strand to SEQ ID NO: 2080830
aguugucuggacaaccuug

SEQ ID NO: 2080832 - RNA, 19 nt, Artificial Sequence
  Description of Artificial Sequence: Synthetic oligonucleotide
  Sense strand starting at position 3692 of SEQ ID NO: 1881915
ccaggauucucacuccuag

SEQ ID NO: 2080833 - RNA, 19 nt, Artificial Sequence
  Description of Artificial Sequence: Synthetic oligonucleotide
  Antisense strand to SEQ ID NO: 2080832
cuaggagugagaauccugg

SEQ ID NO: 2080834 - RNA, 19 nt, Artificial Sequence
  Description of Artificial Sequence: Synthetic oligonucleotide
  Sense strand starting at position 3944 of SEQ ID NO: 1881915
gagcuaucucgagcguugu

SEQ ID NO: 2080835 - RNA, 19 nt, Artificial Sequence
  Description of Artificial Sequence: Synthetic oligonucleotide
  Antisense strand to SEQ ID NO: 2080834
acaacgcucgagauagcuc

SEQ ID NO: 2080836 - RNA, 19 nt, Artificial Sequence
  Description of Artificial Sequence: Synthetic oligonucleotide
  Sense strand starting at position 3946 of SEQ ID NO: 1881915
gcuaucucgagcguuguaa

SEQ ID NO: 2080837 - RNA, 19 nt, Artificial Sequence
  Description of Artificial Sequence: Synthetic oligonucleotide
  Antisense strand to SEQ ID NO: 2080836
uuacaacgcucgagauagc

SEQ ID NO: 2080838 - RNA, 19 nt, Artificial Sequence
  Description of Artificial Sequence: Synthetic oligonucleotide
  Sense strand starting at position 3952 of SEQ ID NO: 1881915
ucgagcguuguaagguaua

SEQ ID NO: 2080839 - RNA, 19 nt, Artificial Sequence
  Description of Artificial Sequence: Synthetic oligonucleotide
  Antisense strand to SEQ ID NO: 2080838
uauaccuuacaacgcucga

SEQ ID NO: 2080840 - RNA, 19 nt, Artificial Sequence
  Description of Artificial Sequence: Synthetic oligonucleotide
  Sense strand starting at position 3955 of SEQ ID NO: 1881915
agcguuguaagguauauuu

SEQ ID NO: 2080841 - RNA, 19 nt, Artificial Sequence
  Description of Artificial Sequence: Synthetic oligonucleotide
  Antisense strand to SEQ ID NO: 2080840
aaauauaccuuacaacgcu

SEQ ID NO: 2080842 - RNA, 19 nt, Artificial Sequence
  Description of Artificial Sequence: Synthetic oligonucleotide
  Sense strand starting at position 3965 of SEQ ID NO: 1881915
gguauauuugcaggcauca

SEQ ID NO: 2080843 - RNA, 19 nt, Artificial Sequence
  Description of Artificial Sequence: Synthetic oligonucleotide
  Antisense strand to SEQ ID NO: 2080842
ugaugccugcaaauauacc

SEQ ID NO: 2080844 - RNA, 19 nt, Artificial Sequence
  Description of Artificial Sequence: Synthetic oligonucleotide
  Sense strand starting at position 44 of SEQ ID NO: 1881916
auaaauugcugggucauaa

SEQ ID NO: 2080845 - RNA, 19 nt, Artificial Sequence
  Description of Artificial Sequence: Synthetic oligonucleotide
  Antisense strand to SEQ ID NO: 2080844
uuaugacccagcaauuuau

SEQ ID NO: 2080846 - RNA, 19 nt, Artificial Sequence
  Description of Artificial Sequence: Synthetic oligonucleotide
  Sense strand starting at position 54 of SEQ ID NO: 1881916
gggucauaaguagauguaa

SEQ ID NO: 2080847 - RNA, 19 nt, Artificial Sequence
  Description of Artificial Sequence: Synthetic oligonucleotide
  Antisense strand to SEQ ID NO: 2080846
uuacaucuacuuaugaccc

SEQ ID NO: 2080848 - RNA, 19 nt, Artificial Sequence
  Description of Artificial Sequence: Synthetic oligonucleotide
  Sense strand starting at position 133 of SEQ ID NO: 1881916
auuggcaauguaugagaau

SEQ ID NO: 2080849 - RNA, 19 nt, Artificial Sequence
  Description of Artificial Sequence: Synthetic oligonucleotide
  Antisense strand to SEQ ID NO: 2080848
auucucauacauugccaau

SEQ ID NO: 2080850 - RNA, 19 nt, Artificial Sequence
  Description of Artificial Sequence: Synthetic oligonucleotide
  Sense strand starting at position 205 of SEQ ID NO: 1881916
uaaccauuccagugggaac

SEQ ID NO: 2080851 - RNA, 19 nt, Artificial Sequence
  Description of Artificial Sequence: Synthetic oligonucleotide
  Antisense strand to SEQ ID NO: 2080850
guucccacuggaaugguua

SEQ ID NO: 2080852 - RNA, 19 nt, Artificial Sequence
  Description of Artificial Sequence: Synthetic oligonucleotide
  Sense strand starting at position 232 of SEQ ID NO: 1881916
uugcauugugguuauaaca

SEQ ID NO: 2080853 - RNA, 19 nt, Artificial Sequence
  Description of Artificial Sequence: Synthetic oligonucleotide
  Antisense strand to SEQ ID NO: 2080852
uguuauaaccacaaugcaa

SEQ ID NO: 2080854 - RNA, 19 nt, Artificial Sequence
  Description of Artificial Sequence: Synthetic oligonucleotide
  Sense strand starting at position 407 of SEQ ID NO: 1881916
acuuguaaccuaugucauu

SEQ ID NO: 2080855 - RNA, 19 nt, Artificial Sequence
  Description of Artificial Sequence: Synthetic oligonucleotide
  Antisense strand to SEQ ID NO: 2080854
aaugacauagguuacaagu

SEQ ID NO: 2080856 - RNA, 19 nt, Artificial Sequence
  Description of Artificial Sequence: Synthetic oligonucleotide
  Sense strand starting at position 1121 of SEQ ID NO: 1881916
uuugaugugguugauaaau

SEQ ID NO: 2080857 - RNA, 19 nt, Artificial Sequence
  Description of Artificial Sequence: Synthetic oligonucleotide
  Antisense strand to SEQ ID NO: 2080856
auuuaucaaccacaucaaa

SEQ ID NO: 2080858 - RNA, 19 nt, Artificial Sequence
  Description of Artificial Sequence: Synthetic oligonucleotide
  Sense strand starting at position 1123 of SEQ ID NO: 1881916
ugaugugguugauaaauuu

SEQ ID NO: 2080859 - RNA, 19 nt, Artificial Sequence
  Description of Artificial Sequence: Synthetic oligonucleotide
  Antisense strand to SEQ ID NO: 2080858
aaauuuaucaaccacauca

SEQ ID NO: 2080860 - RNA, 19 nt, Artificial Sequence
  Description of Artificial Sequence: Synthetic oligonucleotide
  Sense strand starting at position 1235 of SEQ ID NO: 1881916
uuugcagagucuuucugau

SEQ ID NO: 2080861 - RNA, 19 nt, Artificial Sequence
  Description of Artificial Sequence: Synthetic oligonucleotide
  Antisense strand to SEQ ID NO: 2080860
aucagaaagacucugcaaa

SEQ ID NO: 2080862 - RNA, 19 nt, Artificial Sequence
  Description of Artificial Sequence: Synthetic oligonucleotide
  Sense strand starting at position 1750 of SEQ ID NO: 1881916
cuggauauugcaggaaacu

SEQ ID NO: 2080863 - RNA, 19 nt, Artificial Sequence
  Description of Artificial Sequence: Synthetic oligonucleotide
  Antisense strand to SEQ ID NO: 2080862
aguuuccugcaauauccag

SEQ ID NO: 2080864 - RNA, 19 nt, Artificial Sequence
  Description of Artificial Sequence: Synthetic oligonucleotide
  Sense strand starting at position 1947 of SEQ ID NO: 1881916
cugcaugaucuggacauau

SEQ ID NO: 2080865 - RNA, 19 nt, Artificial Sequence
  Description of Artificial Sequence: Synthetic oligonucleotide
  Antisense strand to SEQ ID NO: 2080864
auauguccagaucaugcag

SEQ ID NO: 2080866 - RNA, 19 nt, Artificial Sequence
  Description of Artificial Sequence: Synthetic oligonucleotide
  Sense strand starting at position 2024 of SEQ ID NO: 1881916
ggacuuuccugaccacacu

SEQ ID NO: 2080867 - RNA, 19 nt, Artificial Sequence
  Description of Artificial Sequence: Synthetic oligonucleotide
  Antisense strand to SEQ ID NO: 2080866
aguguggucaggaaagucc

SEQ ID NO: 2080868 - RNA, 19 nt, Artificial Sequence
  Description of Artificial Sequence: Synthetic oligonucleotide
  Sense strand starting at position 2173 of SEQ ID NO: 1881916
cucuguuggcacuagaaca

SEQ ID NO: 2080869 - RNA, 19 nt, Artificial Sequence
  Description of Artificial Sequence: Synthetic oligonucleotide
  Antisense strand to SEQ ID NO: 2080868
uguucuagugccaacagag

SEQ ID NO: 2080870 - RNA, 19 nt, Artificial Sequence
  Description of Artificial Sequence: Synthetic oligonucleotide
  Sense strand starting at position 2183 of SEQ ID NO: 1881916
acuagaacaugccuaguaa

SEQ ID NO: 2080871 - RNA, 19 nt, Artificial Sequence
  Description of Artificial Sequence: Synthetic oligonucleotide
  Antisense strand to SEQ ID NO: 2080870
uuacuaggcauguucuagu

SEQ ID NO: 2080872 - RNA, 19 nt, Artificial Sequence
  Description of Artificial Sequence: Synthetic oligonucleotide
  Sense strand starting at position 2184 of SEQ ID NO: 1881916
cuagaacaugccuaguaaa

SEQ ID NO: 2080873 - RNA, 19 nt, Artificial Sequence
  Description of Artificial Sequence: Synthetic oligonucleotide
  Antisense strand to SEQ ID NO: 2080872
uuuacuaggcauguucuag

SEQ ID NO: 2080874 - RNA, 19 nt, Artificial Sequence
  Description of Artificial Sequence: Synthetic oligonucleotide
  Sense strand starting at position 2198 of SEQ ID NO: 1881916
guaaacaaauacuucgaaa

SEQ ID NO: 2080875 - RNA, 19 nt, Artificial Sequence
  Description of Artificial Sequence: Synthetic oligonucleotide
  Antisense strand to SEQ ID NO: 2080874
uuucgaaguauuuguuuac

SEQ ID NO: 2080876 - RNA, 19 nt, Artificial Sequence
  Description of Artificial Sequence: Synthetic oligonucleotide
  Sense strand starting at position 2627 of SEQ ID NO: 1881916
auucuuucucccugacugu

SEQ ID NO: 2080877 - RNA, 19 nt, Artificial Sequence
  Description of Artificial Sequence: Synthetic oligonucleotide
  Antisense strand to SEQ ID NO: 2080876
acagucagggagaaagaau

SEQ ID NO: 2080878 - RNA, 19 nt, Artificial Sequence
  Description of Artificial Sequence: Synthetic oligonucleotide
  Sense strand starting at position 2628 of SEQ ID NO: 1881916
uucuuucucccugacugua

SEQ ID NO: 2080879 - RNA, 19 nt, Artificial Sequence
  Description of Artificial Sequence: Synthetic oligonucleotide
  Antisense strand to SEQ ID NO: 2080878
uacagucagggagaaagaa

SEQ ID NO: 2080880 - RNA, 19 nt, Artificial Sequence
  Description of Artificial Sequence: Synthetic oligonucleotide
  Sense strand starting at position 2655 of SEQ ID NO: 1881916
cccauuaacugggucuuua

SEQ ID NO: 2080881 - RNA, 19 nt, Artificial Sequence
  Description of Artificial Sequence: Synthetic oligonucleotide
  Antisense strand to SEQ ID NO: 2080880
uaaagacccaguuaauggg

SEQ ID NO: 2080882 - RNA, 19 nt, Artificial Sequence
  Description of Artificial Sequence: Synthetic oligonucleotide
  Sense strand starting at position 2817 of SEQ ID NO: 1881916
guauguguguauuucaaug

SEQ ID NO: 2080883 - RNA, 19 nt, Artificial Sequence
  Description of Artificial Sequence: Synthetic oligonucleotide
  Antisense strand to SEQ ID NO: 2080882
cauugaaauacacacauac

SEQ ID NO: 2080884 - RNA, 19 nt, Artificial Sequence
  Description of Artificial Sequence: Synthetic oligonucleotide
  Sense strand starting at position 3105 of SEQ ID NO: 1881916
acuuaaguauccuuuguuu

SEQ ID NO: 2080885 - RNA, 19 nt, Artificial Sequence
  Description of Artificial Sequence: Synthetic oligonucleotide
  Antisense strand to SEQ ID NO: 2080884
aaacaaaggauacuuaagu

SEQ ID NO: 2080886 - RNA, 19 nt, Artificial Sequence
  Description of Artificial Sequence: Synthetic oligonucleotide
  Sense strand starting at position 3238 of SEQ ID NO: 1881916
cagucaugugaaugacaga

SEQ ID NO: 2080887 - RNA, 19 nt, Artificial Sequence
  Description of Artificial Sequence: Synthetic oligonucleotide
  Antisense strand to SEQ ID NO: 2080886
ucugucauucacaugacug

SEQ ID NO: 2080888 - RNA, 19 nt, Artificial Sequence
  Description of Artificial Sequence: Synthetic oligonucleotide
  Sense strand starting at position 3334 of SEQ ID NO: 1881916
uaaggaauguuugugugau

SEQ ID NO: 2080889 - RNA, 19 nt, Artificial Sequence
  Description of Artificial Sequence: Synthetic oligonucleotide
  Antisense strand to SEQ ID NO: 2080888
aucacacaaacauuccuua

SEQ ID NO: 2080890 - RNA, 19 nt, Artificial Sequence
  Description of Artificial Sequence: Synthetic oligonucleotide
  Sense strand starting at position 3336 of SEQ ID NO: 1881916
aggaauguuugugugaucu

SEQ ID NO: 2080891 - RNA, 19 nt, Artificial Sequence
  Description of Artificial Sequence: Synthetic oligonucleotide
  Antisense strand to SEQ ID NO: 2080890
agaucacacaaacauuccu

SEQ ID NO: 2080892 - RNA, 19 nt, Artificial Sequence
  Description of Artificial Sequence: Synthetic oligonucleotide
  Sense strand starting at position 3349 of SEQ ID NO: 1881916
ugaucucuccaguguggaa

SEQ ID NO: 2080893 - RNA, 19 nt, Artificial Sequence
  Description of Artificial Sequence: Synthetic oligonucleotide
  Antisense strand to SEQ ID NO: 2080892
uuccacacuggagagauca

SEQ ID NO: 2080894 - RNA, 19 nt, Artificial Sequence
  Description of Artificial Sequence: Synthetic oligonucleotide
  Sense strand starting at position 3490 of SEQ ID NO: 1881916
uauugagagaaggguugua

SEQ ID NO: 2080895 - RNA, 19 nt, Artificial Sequence
  Description of Artificial Sequence: Synthetic oligonucleotide
  Antisense strand to SEQ ID NO: 2080894
uacaacccuucucucaaua

SEQ ID NO: 2080896 - RNA, 19 nt, Artificial Sequence
  Description of Artificial Sequence: Synthetic oligonucleotide
  Sense strand starting at position 3509 of SEQ ID NO: 1881916
auaucuccagccuggaaga

SEQ ID NO: 2080897 - RNA, 19 nt, Artificial Sequence
  Description of Artificial Sequence: Synthetic oligonucleotide
  Antisense strand to SEQ ID NO: 2080896
ucuuccaggcuggagauau

SEQ ID NO: 2080898 - RNA, 19 nt, Artificial Sequence
  Description of Artificial Sequence: Synthetic oligonucleotide
  Sense strand starting at position 3537 of SEQ ID NO: 1881916
uccuguggcucauuuacua

SEQ ID NO: 2080899 - RNA, 19 nt, Artificial Sequence
  Description of Artificial Sequence: Synthetic oligonucleotide
  Antisense strand to SEQ ID NO: 2080898
uaguaaaugagccacagga

SEQ ID NO: 2080900 - RNA, 19 nt, Artificial Sequence
  Description of Artificial Sequence: Synthetic oligonucleotide
  Sense strand starting at position 3600 of SEQ ID NO: 1881916
caggcaguugacugugaau

SEQ ID NO: 2080901 - RNA, 19 nt, Artificial Sequence
  Description of Artificial Sequence: Synthetic oligonucleotide
  Antisense strand to SEQ ID NO: 2080900
auucacagucaacugccug

SEQ ID NO: 2080902 - RNA, 19 nt, Artificial Sequence
  Description of Artificial Sequence: Synthetic oligonucleotide
  Sense strand starting at position 3602 of SEQ ID NO: 1881916
ggcaguugacugugaauuc

SEQ ID NO: 2080903 - RNA, 19 nt, Artificial Sequence
  Description of Artificial Sequence: Synthetic oligonucleotide
  Antisense strand to SEQ ID NO: 2080902
gaauucacagucaacugcc

SEQ ID NO: 2080904 - RNA, 19 nt, Artificial Sequence
  Description of Artificial Sequence: Synthetic oligonucleotide
  Sense strand starting at position 3612 of SEQ ID NO: 1881916
ugugaauucuagucuuaag

SEQ ID NO: 2080905 - RNA, 19 nt, Artificial Sequence
  Description of Artificial Sequence: Synthetic oligonucleotide
  Antisense strand to SEQ ID NO: 2080904
cuuaagacuagaauucaca

SEQ ID NO: 2080906 - RNA, 19 nt, Artificial Sequence
  Description of Artificial Sequence: Synthetic oligonucleotide
  Sense strand starting at position 3672 of SEQ ID NO: 1881916
gccuucguucccuagagaa

SEQ ID NO: 2080907 - RNA, 19 nt, Artificial Sequence
  Description of Artificial Sequence: Synthetic oligonucleotide
  Antisense strand to SEQ ID NO: 2080906
uucucuagggaacgaaggc

SEQ ID NO: 2080908 - RNA, 19 nt, Artificial Sequence
  Description of Artificial Sequence: Synthetic oligonucleotide
  Sense strand starting at position 3674 of SEQ ID NO: 1881916
cuucguucccuagagaaau

SEQ ID NO: 2080909 - RNA, 19 nt, Artificial Sequence
  Description of Artificial Sequence: Synthetic oligonucleotide
  Antisense strand to SEQ ID NO: 2080908
auuucucuagggaacgaag

SEQ ID NO: 2080910 - RNA, 19 nt, Artificial Sequence
  Description of Artificial Sequence: Synthetic oligonucleotide
  Sense strand starting at position 3687 of SEQ ID NO: 1881916
agaaauacugcccagcuau

SEQ ID NO: 2080911 - RNA, 19 nt, Artificial Sequence
  Description of Artificial Sequence: Synthetic oligonucleotide
  Antisense strand to SEQ ID NO: 2080910
auagcugggcaguauuucu

SEQ ID NO: 2080912 - RNA, 19 nt, Artificial Sequence
  Description of Artificial Sequence: Synthetic oligonucleotide
  Sense strand starting at position 3721 of SEQ ID NO: 1881916
gauuguuugccacggacaa

SEQ ID NO: 2080913 - RNA, 19 nt, Artificial Sequence
  Description of Artificial Sequence: Synthetic oligonucleotide
  Antisense strand to SEQ ID NO: 2080912
uuguccguggcaaacaauc

SEQ ID NO: 2080914 - RNA, 19 nt, Artificial Sequence
  Description of Artificial Sequence: Synthetic oligonucleotide
  Sense strand starting at position 3764 of SEQ ID NO: 1881916
uucuuagaacucugcuaag

SEQ ID NO: 2080915 - RNA, 19 nt, Artificial Sequence
  Description of Artificial Sequence: Synthetic oligonucleotide
  Antisense strand to SEQ ID NO: 2080914
cuuagcagaguucuaagaa

SEQ ID NO: 2080916 - RNA, 19 nt, Artificial Sequence
  Description of Artificial Sequence: Synthetic oligonucleotide
  Sense strand starting at position 3791 of SEQ ID NO: 1881916
aaggcaugaucaccuugua

SEQ ID NO: 2080917 - RNA, 19 nt, Artificial Sequence
  Description of Artificial Sequence: Synthetic oligonucleotide
  Antisense strand to SEQ ID NO: 2080916
uacaaggugaucaugccuu

SEQ ID NO: 2080918 - RNA, 19 nt, Artificial Sequence
  Description of Artificial Sequence: Synthetic oligonucleotide
  Sense strand starting at position 3794 of SEQ ID NO: 1881916
gcaugaucaccuuguagga

SEQ ID NO: 2080919 - RNA, 19 nt, Artificial Sequence
  Description of Artificial Sequence: Synthetic oligonucleotide
  Antisense strand to SEQ ID NO: 2080918
uccuacaaggugaucaugc

SEQ ID NO: 2080920 - RNA, 19 nt, Artificial Sequence
  Description of Artificial Sequence: Synthetic oligonucleotide
  Sense strand starting at position 3803 of SEQ ID NO: 1881916
ccuuguaggagcuaugaag

SEQ ID NO: 2080921 - RNA, 19 nt, Artificial Sequence
  Description of Artificial Sequence: Synthetic oligonucleotide
  Antisense strand to SEQ ID NO: 2080920
cuucauagcuccuacaagg

SEQ ID NO: 2080922 - RNA, 19 nt, Artificial Sequence
  Description of Artificial Sequence: Synthetic oligonucleotide
  Sense strand starting at position 3836 of SEQ ID NO: 1881916
cgaauccucagguagcaua

SEQ ID NO: 2080923 - RNA, 19 nt, Artificial Sequence
  Description of Artificial Sequence: Synthetic oligonucleotide
  Antisense strand to SEQ ID NO: 2080922
uaugcuaccugaggauucg

SEQ ID NO: 2080924 - RNA, 19 nt, Artificial Sequence
  Description of Artificial Sequence: Synthetic oligonucleotide
  Sense strand starting at position 109 of SEQ ID NO: 1881917
uccucucugagcuggagaa

SEQ ID NO: 2080925 - RNA, 19 nt, Artificial Sequence
  Description of Artificial Sequence: Synthetic oligonucleotide
  Antisense strand to SEQ ID NO: 2080924
uucuccagcucagagagga

SEQ ID NO: 2080926 - RNA, 19 nt, Artificial Sequence
  Description of Artificial Sequence: Synthetic oligonucleotide
  Sense strand starting at position 110 of SEQ ID NO: 1881917
ccucucugagcuggagaau

SEQ ID NO: 2080927 - RNA, 19 nt, Artificial Sequence
  Description of Artificial Sequence: Synthetic oligonucleotide
  Antisense strand to SEQ ID NO: 2080926
auucuccagcucagagagg

SEQ ID NO: 2080928 - RNA, 19 nt, Artificial Sequence
  Description of Artificial Sequence: Synthetic oligonucleotide
  Sense strand starting at position 177 of SEQ ID NO: 1881917
ggagcauaagguuaaguuu

SEQ ID NO: 2080929 - RNA, 19 nt, Artificial Sequence
  Description of Artificial Sequence: Synthetic oligonucleotide
  Antisense strand to SEQ ID NO: 2080928
aaacuuaaccuuaugcucc

SEQ ID NO: 2080930 - RNA, 19 nt, Artificial Sequence
  Description of Artificial Sequence: Synthetic oligonucleotide
  Sense strand starting at position 193 of SEQ ID NO: 1881917
uuuggagcuuuagaaaguu

SEQ ID NO: 2080931 - RNA, 19 nt, Artificial Sequence
  Description of Artificial Sequence: Synthetic oligonucleotide
  Antisense strand to SEQ ID NO: 2080930
aacuuucuaaagcuccaaa

SEQ ID NO: 2080932 - RNA, 19 nt, Artificial Sequence
  Description of Artificial Sequence: Synthetic oligonucleotide
  Sense strand starting at position 236 of SEQ ID NO: 1881917
gcauuuaaauacuauagag

SEQ ID NO: 2080933 - RNA, 19 nt, Artificial Sequence
  Description of Artificial Sequence: Synthetic oligonucleotide
  Antisense strand to SEQ ID NO: 2080932
cucuauaguauuuaaaugc

SEQ ID NO: 2080934 - RNA, 19 nt, Artificial Sequence
  Description of Artificial Sequence: Synthetic oligonucleotide
  Sense strand starting at position 316 of SEQ ID NO: 1881917
auacucuucuucgacauga

SEQ ID NO: 2080935 - RNA, 19 nt, Artificial Sequence
  Description of Artificial Sequence: Synthetic oligonucleotide
  Antisense strand to SEQ ID NO: 2080934
ucaugucgaagaagaguau

SEQ ID NO: 2080936 - RNA, 19 nt, Artificial Sequence
  Description of Artificial Sequence: Synthetic oligonucleotide
  Sense strand starting at position 318 of SEQ ID NO: 1881917
acucuucuucgacaugaac

SEQ ID NO: 2080937 - RNA, 19 nt, Artificial Sequence
  Description of Artificial Sequence: Synthetic oligonucleotide
  Antisense strand to SEQ ID NO: 2080936
guucaugucgaagaagagu

SEQ ID NO: 2080938 - RNA, 19 nt, Artificial Sequence
  Description of Artificial Sequence: Synthetic oligonucleotide
  Sense strand starting at position 327 of SEQ ID NO: 1881917
cgacaugaacgcuauguua

SEQ ID NO: 2080939 - RNA, 19 nt, Artificial Sequence
  Description of Artificial Sequence: Synthetic oligonucleotide
  Antisense strand to SEQ ID NO: 2080938
uaacauagcguucaugucg

SEQ ID NO: 2080940 - RNA, 19 nt, Artificial Sequence
  Description of Artificial Sequence: Synthetic oligonucleotide
  Sense strand starting at position 405 of SEQ ID NO: 1881917
ccuggaagagauggcauua

SEQ ID NO: 2080941 - RNA, 19 nt, Artificial Sequence
  Description of Artificial Sequence: Synthetic oligonucleotide
  Antisense strand to SEQ ID NO: 2080940
uaaugccaucucuuccagg

SEQ ID NO: 2080942 - RNA, 19 nt, Artificial Sequence
  Description of Artificial Sequence: Synthetic oligonucleotide
  Sense strand starting at position 439 of SEQ ID NO: 1881917
gaaagugcucagcacacaa

SEQ ID NO: 2080943 - RNA, 19 nt, Artificial Sequence
  Description of Artificial Sequence: Synthetic oligonucleotide
  Antisense strand to SEQ ID NO: 2080942
uugugugcugagcacuuuc

SEQ ID NO: 2080944 - RNA, 19 nt, Artificial Sequence
  Description of Artificial Sequence: Synthetic oligonucleotide
  Sense strand starting at position 504 of SEQ ID NO: 1881917
gagauaaagcaguguuuga

SEQ ID NO: 2080945 - RNA, 19 nt, Artificial Sequence
  Description of Artificial Sequence: Synthetic oligonucleotide
  Antisense strand to SEQ ID NO: 2080944
ucaaacacugcuuuaucuc

SEQ ID NO: 2080946 - RNA, 19 nt, Artificial Sequence
  Description of Artificial Sequence: Synthetic oligonucleotide
  Sense strand starting at position 723 of SEQ ID NO: 1881917
cuggauuucuggcagauaa

SEQ ID NO: 2080947 - RNA, 19 nt, Artificial Sequence
  Description of Artificial Sequence: Synthetic oligonucleotide
  Antisense strand to SEQ ID NO: 2080946
uuaucugccagaaauccag

SEQ ID NO: 2080948 - RNA, 19 nt, Artificial Sequence
  Description of Artificial Sequence: Synthetic oligonucleotide
  Sense strand starting at position 751 of SEQ ID NO: 1881917
aggaguccuuagcagauuu

SEQ ID NO: 2080949 - RNA, 19 nt, Artificial Sequence
  Description of Artificial Sequence: Synthetic oligonucleotide
  Antisense strand to SEQ ID NO: 2080948
aaaucugcuaaggacuccu

SEQ ID NO: 2080950 - RNA, 19 nt, Artificial Sequence
  Description of Artificial Sequence: Synthetic oligonucleotide
  Sense strand starting at position 781 of SEQ ID NO: 1881917
gggaguuccuuugagggca

SEQ ID NO: 2080951 - RNA, 19 nt, Artificial Sequence
  Description of Artificial Sequence: Synthetic oligonucleotide
  Antisense strand to SEQ ID NO: 2080950
ugcccucaaaggaacuccc

SEQ ID NO: 2080952 - RNA, 19 nt, Artificial Sequence
  Description of Artificial Sequence: Synthetic oligonucleotide
  Sense strand starting at position 813 of SEQ ID NO: 1881917
ucaccaugugcuuauuaga

SEQ ID NO: 2080953 - RNA, 19 nt, Artificial Sequence
  Description of Artificial Sequence: Synthetic oligonucleotide
  Antisense strand to SEQ ID NO: 2080952
ucuaauaagcacaugguga

SEQ ID NO: 2080954 - RNA, 19 nt, Artificial Sequence
  Description of Artificial Sequence: Synthetic oligonucleotide
  Sense strand starting at position 820 of SEQ ID NO: 1881917
gugcuuauuagagguuaca

SEQ ID NO: 2080955 - RNA, 19 nt, Artificial Sequence
  Description of Artificial Sequence: Synthetic oligonucleotide
  Antisense strand to SEQ ID NO: 2080954
uguaaccucuaauaagcac

SEQ ID NO: 2080956 - RNA, 19 nt, Artificial Sequence
  Description of Artificial Sequence: Synthetic oligonucleotide
  Sense strand starting at position 929 of SEQ ID NO: 1881917
gggagacaauuucguccuu

SEQ ID NO: 2080957 - RNA, 19 nt, Artificial Sequence
  Description of Artificial Sequence: Synthetic oligonucleotide
  Antisense strand to SEQ ID NO: 2080956
aaggacgaaauugucuccc

SEQ ID NO: 2080958 - RNA, 19 nt, Artificial Sequence
  Description of Artificial Sequence: Synthetic oligonucleotide
  Sense strand starting at position 1222 of SEQ ID NO: 1881917
gcuguugcuuugguaguua

SEQ ID NO: 2080959 - RNA, 19 nt, Artificial Sequence
  Description of Artificial Sequence: Synthetic oligonucleotide
  Antisense strand to SEQ ID NO: 2080958
uaacuaccaaagcaacagc

SEQ ID NO: 2080960 - RNA, 19 nt, Artificial Sequence
  Description of Artificial Sequence: Synthetic oligonucleotide
  Sense strand starting at position 1381 of SEQ ID NO: 1881917
gagaggugagcgugugagu

SEQ ID NO: 2080961 - RNA, 19 nt, Artificial Sequence
  Description of Artificial Sequence: Synthetic oligonucleotide
  Antisense strand to SEQ ID NO: 2080960
acucacacgcucaccucuc

SEQ ID NO: 2080962 - RNA, 19 nt, Artificial Sequence
  Description of Artificial Sequence: Synthetic oligonucleotide
  Sense strand starting at position 2066 of SEQ ID NO: 1881917
gaaagaugacguuaugcaa

SEQ ID NO: 2080963 - RNA, 19 nt, Artificial Sequence
  Description of Artificial Sequence: Synthetic oligonucleotide
  Antisense strand to SEQ ID NO: 2080962
uugcauaacgucaucuuuc

SEQ ID NO: 2080964 - RNA, 19 nt, Artificial Sequence
  Description of Artificial Sequence: Synthetic oligonucleotide
  Sense strand starting at position 2133 of SEQ ID NO: 1881917
guuagugugccuguguuua

SEQ ID NO: 2080965 - RNA, 19 nt, Artificial Sequence
  Description of Artificial Sequence: Synthetic oligonucleotide
  Antisense strand to SEQ ID NO: 2080964
uaaacacaggcacacuaac

SEQ ID NO: 2080966 - RNA, 19 nt, Artificial Sequence
  Description of Artificial Sequence: Synthetic oligonucleotide
  Sense strand starting at position 2336 of SEQ ID NO: 1881917
gguguaucugucuacggca

SEQ ID NO: 2080967 - RNA, 19 nt, Artificial Sequence
  Description of Artificial Sequence: Synthetic oligonucleotide
  Antisense strand to SEQ ID NO: 2080966
ugccguagacagauacacc

SEQ ID NO: 2080968 - RNA, 19 nt, Artificial Sequence
  Description of Artificial Sequence: Synthetic oligonucleotide
  Sense strand starting at position 2385 of SEQ ID NO: 1881917
aaagaaacaucuuugguug

SEQ ID NO: 2080969 - RNA, 19 nt, Artificial Sequence
  Description of Artificial Sequence: Synthetic oligonucleotide
  Antisense strand to SEQ ID NO: 2080968
caaccaaagauguuucuuu

SEQ ID NO: 2080970 - RNA, 19 nt, Artificial Sequence
  Description of Artificial Sequence: Synthetic oligonucleotide
  Sense strand starting at position 2388 of SEQ ID NO: 1881917
gaaacaucuuugguuggga

SEQ ID NO: 2080971 - RNA, 19 nt, Artificial Sequence
  Description of Artificial Sequence: Synthetic oligonucleotide
  Antisense strand to SEQ ID NO: 2080970
ucccaaccaaagauguuuc

SEQ ID NO: 2080972 - RNA, 19 nt, Artificial Sequence
  Description of Artificial Sequence: Synthetic oligonucleotide
  Sense strand starting at position 2390 of SEQ ID NO: 1881917
aacaucuuugguugggaga

SEQ ID NO: 2080973 - RNA, 19 nt, Artificial Sequence
  Description of Artificial Sequence: Synthetic oligonucleotide
  Antisense strand to SEQ ID NO: 2080972
ucucccaaccaaagauguu

SEQ ID NO: 2080974 - RNA, 19 nt, Artificial Sequence
  Description of Artificial Sequence: Synthetic oligonucleotide
  Sense strand starting at position 2392 of SEQ ID NO: 1881917
caucuuugguugggagaga

SEQ ID NO: 2080975 - RNA, 19 nt, Artificial Sequence
  Description of Artificial Sequence: Synthetic oligonucleotide
  Antisense strand to SEQ ID NO: 2080974
ucucucccaaccaaagaug

SEQ ID NO: 2080976 - RNA, 19 nt, Artificial Sequence
  Description of Artificial Sequence: Synthetic oligonucleotide
  Sense strand starting at position 2393 of SEQ ID NO: 1881917
aucuuugguugggagagaa

SEQ ID NO: 2080977 - RNA, 19 nt, Artificial Sequence
  Description of Artificial Sequence: Synthetic oligonucleotide
  Antisense strand to SEQ ID NO: 2080976
uucucucccaaccaaagau

SEQ ID NO: 2080978 - RNA, 19 nt, Artificial Sequence
  Description of Artificial Sequence: Synthetic oligonucleotide
  Sense strand starting at position 2489 of SEQ ID NO: 1881917
gcgcgaguugagucuauug

SEQ ID NO: 2080979 - RNA, 19 nt, Artificial Sequence
  Description of Artificial Sequence: Synthetic oligonucleotide
  Antisense strand to SEQ ID NO: 2080978
caauagacucaacucgcgc

SEQ ID NO: 2080980 - RNA, 19 nt, Artificial Sequence
  Description of Artificial Sequence: Synthetic oligonucleotide
  Sense strand starting at position 2491 of SEQ ID NO: 1881917
gcgaguugagucuauuguu

SEQ ID NO: 2080981 - RNA, 19 nt, Artificial Sequence
  Description of Artificial Sequence: Synthetic oligonucleotide
  Antisense strand to SEQ ID NO: 2080980
aacaauagacucaacucgc

SEQ ID NO: 2080982 - RNA, 19 nt, Artificial Sequence
  Description of Artificial Sequence: Synthetic oligonucleotide
  Sense strand starting at position 2496 of SEQ ID NO: 1881917
uugagucuauuguuucuua

SEQ ID NO: 2080983 - RNA, 19 nt, Artificial Sequence
  Description of Artificial Sequence: Synthetic oligonucleotide
  Antisense strand to SEQ ID NO: 2080982
uaagaaacaauagacucaa

SEQ ID NO: 2080984 - RNA, 19 nt, Artificial Sequence
  Description of Artificial Sequence: Synthetic oligonucleotide
  Sense strand starting at position 2497 of SEQ ID NO: 1881917
ugagucuauuguuucuuaa

SEQ ID NO: 2080985 - RNA, 19 nt, Artificial Sequence
  Description of Artificial Sequence: Synthetic oligonucleotide
  Antisense strand to SEQ ID NO: 2080984
uuaagaaacaauagacuca

SEQ ID NO: 2080986 - RNA, 19 nt, Artificial Sequence
  Description of Artificial Sequence: Synthetic oligonucleotide
  Sense strand starting at position 2512 of SEQ ID NO: 1881917
uuaaauugccaucaggguu

SEQ ID NO: 2080987 - RNA, 19 nt, Artificial Sequence
  Description of Artificial Sequence: Synthetic oligonucleotide
  Antisense strand to SEQ ID NO: 2080986
aacccugauggcaauuuaa

SEQ ID NO: 2080988 - RNA, 19 nt, Artificial Sequence
  Description of Artificial Sequence: Synthetic oligonucleotide
  Sense strand starting at position 2629 of SEQ ID NO: 1881917
ccggccugugaucauuaca

SEQ ID NO: 2080989 - RNA, 19 nt, Artificial Sequence
  Description of Artificial Sequence: Synthetic oligonucleotide
  Antisense strand to SEQ ID NO: 2080988
uguaaugaucacaggccgg

SEQ ID NO: 2080990 - RNA, 19 nt, Artificial Sequence
  Description of Artificial Sequence: Synthetic oligonucleotide
  Sense strand starting at position 2789 of SEQ ID NO: 1881917
ucggguuaucgcucaguuu

SEQ ID NO: 2080991 - RNA, 19 nt, Artificial Sequence
  Description of Artificial Sequence: Synthetic oligonucleotide
  Antisense strand to SEQ ID NO: 2080990
aaacugagcgauaacccga

SEQ ID NO: 2080992 - RNA, 19 nt, Artificial Sequence
  Description of Artificial Sequence: Synthetic oligonucleotide
  Sense strand starting at position 2848 of SEQ ID NO: 1881917
ccgccuugaucuucuaagu

SEQ ID NO: 2080993 - RNA, 19 nt, Artificial Sequence
  Description of Artificial Sequence: Synthetic oligonucleotide
  Antisense strand to SEQ ID NO: 2080992
acuuagaagaucaaggcgg

SEQ ID NO: 2080994 - RNA, 19 nt, Artificial Sequence
  Description of Artificial Sequence: Synthetic oligonucleotide
  Sense strand starting at position 2854 of SEQ ID NO: 1881917
ugaucuucuaagugcgagu

SEQ ID NO: 2080995 - RNA, 19 nt, Artificial Sequence
  Description of Artificial Sequence: Synthetic oligonucleotide
  Antisense strand to SEQ ID NO: 2080994
acucgcacuuagaagauca

SEQ ID NO: 2080996 - RNA, 19 nt, Artificial Sequence
  Description of Artificial Sequence: Synthetic oligonucleotide
  Sense strand starting at position 2865 of SEQ ID NO: 1881917
gugcgaguucaucgucuga

SEQ ID NO: 2080997 - RNA, 19 nt, Artificial Sequence
  Description of Artificial Sequence: Synthetic oligonucleotide
  Antisense strand to SEQ ID NO: 2080996
ucagacgaugaacucgcac

SEQ ID NO: 2080998 - RNA, 19 nt, Artificial Sequence
  Description of Artificial Sequence: Synthetic oligonucleotide
  Sense strand starting at position 2867 of SEQ ID NO: 1881917
gcgaguucaucgucugaga

SEQ ID NO: 2080999 - RNA, 19 nt, Artificial Sequence
  Description of Artificial Sequence: Synthetic oligonucleotide
  Antisense strand to SEQ ID NO: 2080998
ucucagacgaugaacucgc

SEQ ID NO: 2081000 - RNA, 19 nt, Artificial Sequence
  Description of Artificial Sequence: Synthetic oligonucleotide
  Sense strand starting at position 3463 of SEQ ID NO: 1881917
uuaugugauugcucuuucu

SEQ ID NO: 2081001 - RNA, 19 nt, Artificial Sequence
  Description of Artificial Sequence: Synthetic oligonucleotide
  Antisense strand to SEQ ID NO: 2081000
agaaagagcaaucacauaa

SEQ ID NO: 2081002 - RNA, 19 nt, Artificial Sequence
  Description of Artificial Sequence: Synthetic oligonucleotide
  Sense strand starting at position 3977 of SEQ ID NO: 1881917
cccugagucuucucuuauu

SEQ ID NO: 2081003 - RNA, 19 nt, Artificial Sequence
  Description of Artificial Sequence: Synthetic oligonucleotide
  Antisense strand to SEQ ID NO: 2081002
aauaagagaagacucaggg

SEQ ID NO: 2081004 - RNA, 19 nt, Artificial Sequence
  Description of Artificial Sequence: Synthetic oligonucleotide
  Sense strand starting at position 82 of SEQ ID NO: 1881918
agaucauccuaguuauuag

SEQ ID NO: 2081005 - RNA, 19 nt, Artificial Sequence
  Description of Artificial Sequence: Synthetic oligonucleotide
  Antisense strand to SEQ ID NO: 2081004
cuaauaacuaggaugaucu

SEQ ID NO: 2081006 - RNA, 19 nt, Artificial Sequence
  Description of Artificial Sequence: Synthetic oligonucleotide
  Sense strand starting at position 96 of SEQ ID NO: 1881918
auuagaguugcucacugga

SEQ ID NO: 2081007 - RNA, 19 nt, Artificial Sequence
  Description of Artificial Sequence: Synthetic oligonucleotide
  Antisense strand to SEQ ID NO: 2081006
uccagugagcaacucuaau

SEQ ID NO: 2081008 - RNA, 19 nt, Artificial Sequence
  Description of Artificial Sequence: Synthetic oligonucleotide
  Sense strand starting at position 98 of SEQ ID NO: 1881918
uagaguugcucacuggaaa

SEQ ID NO: 2081009 - RNA, 19 nt, Artificial Sequence
  Description of Artificial Sequence: Synthetic oligonucleotide
  Antisense strand to SEQ ID NO: 2081008
uuuccagugagcaacucua

SEQ ID NO: 2081010 - RNA, 19 nt, Artificial Sequence
  Description of Artificial Sequence: Synthetic oligonucleotide
  Sense strand starting at position 126 of SEQ ID NO: 1881918
aucccauugcaagaaguau

SEQ ID NO: 2081011 - RNA, 19 nt, Artificial Sequence
  Description of Artificial Sequence: Synthetic oligonucleotide
  Antisense strand to SEQ ID NO: 2081010
auacuucuugcaaugggau

SEQ ID NO: 2081012 - RNA, 19 nt, Artificial Sequence
  Description of Artificial Sequence: Synthetic oligonucleotide
  Sense strand starting at position 168 of SEQ ID NO: 1881918
cucuuagaauaguuguaga

SEQ ID NO: 2081013 - RNA, 19 nt, Artificial Sequence
  Description of Artificial Sequence: Synthetic oligonucleotide
  Antisense strand to SEQ ID NO: 2081012
ucuacaacuauucuaagag

SEQ ID NO: 2081014 - RNA, 19 nt, Artificial Sequence
  Description of Artificial Sequence: Synthetic oligonucleotide
  Sense strand starting at position 178 of SEQ ID NO: 1881918
aguuguagaagacauguuu

SEQ ID NO: 2081015 - RNA, 19 nt, Artificial Sequence
  Description of Artificial Sequence: Synthetic oligonucleotide
  Antisense strand to SEQ ID NO: 2081014
aaacaugucuucuacaacu

SEQ ID NO: 2081016 - RNA, 19 nt, Artificial Sequence
  Description of Artificial Sequence: Synthetic oligonucleotide
  Sense strand starting at position 204 of SEQ ID NO: 1881918
cuaggcaauuaguccagaa

SEQ ID NO: 2081017 - RNA, 19 nt, Artificial Sequence
  Description of Artificial Sequence: Synthetic oligonucleotide
  Antisense strand to SEQ ID NO: 2081016
uucuggacuaauugccuag

SEQ ID NO: 2081018 - RNA, 19 nt, Artificial Sequence
  Description of Artificial Sequence: Synthetic oligonucleotide
  Sense strand starting at position 272 of SEQ ID NO: 1881918
agugaacacuuccugacuu

SEQ ID NO: 2081019 - RNA, 19 nt, Artificial Sequence
  Description of Artificial Sequence: Synthetic oligonucleotide
  Antisense strand to SEQ ID NO: 2081018
aagucaggaaguguucacu

SEQ ID NO: 2081020 - RNA, 19 nt, Artificial Sequence
  Description of Artificial Sequence: Synthetic oligonucleotide
  Sense strand starting at position 442 of SEQ ID NO: 1881918
ggagaugauuuauguaaag

SEQ ID NO: 2081021 - RNA, 19 nt, Artificial Sequence
  Description of Artificial Sequence: Synthetic oligonucleotide
  Antisense strand to SEQ ID NO: 2081020
cuuuacauaaaucaucucc

SEQ ID NO: 2081022 - RNA, 19 nt, Artificial Sequence
  Description of Artificial Sequence: Synthetic oligonucleotide
  Sense strand starting at position 533 of SEQ ID NO: 1881918
auguuacugcuguaauaua

SEQ ID NO: 2081023 - RNA, 19 nt, Artificial Sequence
  Description of Artificial Sequence: Synthetic oligonucleotide
  Antisense strand to SEQ ID NO: 2081022
uauauuacagcaguaacau

SEQ ID NO: 2081024 - RNA, 19 nt, Artificial Sequence
  Description of Artificial Sequence: Synthetic oligonucleotide
  Sense strand starting at position 572 of SEQ ID NO: 1881918
ugggcuagacacuggauua

SEQ ID NO: 2081025 - RNA, 19 nt, Artificial Sequence
  Description of Artificial Sequence: Synthetic oligonucleotide
  Antisense strand to SEQ ID NO: 2081024
uaauccagugucuagccca

SEQ ID NO: 2081026 - RNA, 19 nt, Artificial Sequence
  Description of Artificial Sequence: Synthetic oligonucleotide
  Sense strand starting at position 582 of SEQ ID NO: 1881918
acuggauuaccaugguuaa

SEQ ID NO: 2081027 - RNA, 19 nt, Artificial Sequence
  Description of Artificial Sequence: Synthetic oligonucleotide
  Antisense strand to SEQ ID NO: 2081026
uuaaccaugguaauccagu

SEQ ID NO: 2081028 - RNA, 19 nt, Artificial Sequence
  Description of Artificial Sequence: Synthetic oligonucleotide
  Sense strand starting at position 583 of SEQ ID NO: 1881918
cuggauuaccaugguuaag

SEQ ID NO: 2081029 - RNA, 19 nt, Artificial Sequence
  Description of Artificial Sequence: Synthetic oligonucleotide
  Antisense strand to SEQ ID NO: 2081028
cuuaaccaugguaauccag

SEQ ID NO: 2081030 - RNA, 19 nt, Artificial Sequence
  Description of Artificial Sequence: Synthetic oligonucleotide
  Sense strand starting at position 630 of SEQ ID NO: 1881918
aguuuaaagucagccaaga

SEQ ID NO: 2081031 - RNA, 19 nt, Artificial Sequence
  Description of Artificial Sequence: Synthetic oligonucleotide
  Antisense strand to SEQ ID NO: 2081030
ucuuggcugacuuuaaacu

SEQ ID NO: 2081032 - RNA, 19 nt, Artificial Sequence
  Description of Artificial Sequence: Synthetic oligonucleotide
  Sense strand starting at position 771 of SEQ ID NO: 1881918
ucaucuagacucggaggua

SEQ ID NO: 2081033 - RNA, 19 nt, Artificial Sequence
  Description of Artificial Sequence: Synthetic oligonucleotide
  Antisense strand to SEQ ID NO: 2081032
uaccuccgagucuagauga

SEQ ID NO: 2081034 - RNA, 19 nt, Artificial Sequence
  Description of Artificial Sequence: Synthetic oligonucleotide
  Sense strand starting at position 852 of SEQ ID NO: 1881918
accagugauuuagaggagu

SEQ ID NO: 2081035 - RNA, 19 nt, Artificial Sequence
  Description of Artificial Sequence: Synthetic oligonucleotide
  Antisense strand to SEQ ID NO: 2081034
acuccucuaaaucacuggu

SEQ ID NO: 2081036 - RNA, 19 nt, Artificial Sequence
  Description of Artificial Sequence: Synthetic oligonucleotide
  Sense strand starting at position 1002 of SEQ ID NO: 1881918
gcucucuuugcuuuagcua

SEQ ID NO: 2081037 - RNA, 19 nt, Artificial Sequence
  Description of Artificial Sequence: Synthetic oligonucleotide
  Antisense strand to SEQ ID NO: 2081036
uagcuaaagcaaagagagc

SEQ ID NO: 2081038 - RNA, 19 nt, Artificial Sequence
  Description of Artificial Sequence: Synthetic oligonucleotide
  Sense strand starting at position 1188 of SEQ ID NO: 1881918
agugaagauacaugggagu

SEQ ID NO: 2081039 - RNA, 19 nt, Artificial Sequence
  Description of Artificial Sequence: Synthetic oligonucleotide
  Antisense strand to SEQ ID NO: 2081038
acucccauguaucuucacu

SEQ ID NO: 2081040 - RNA, 19 nt, Artificial Sequence
  Description of Artificial Sequence: Synthetic oligonucleotide
  Sense strand starting at position 1395 of SEQ ID NO: 1881918
gucauaaauagaggauagu

SEQ ID NO: 2081041 - RNA, 19 nt, Artificial Sequence
  Description of Artificial Sequence: Synthetic oligonucleotide
  Antisense strand to SEQ ID NO: 2081040
acuauccucuauuuaugac

SEQ ID NO: 2081042 - RNA, 19 nt, Artificial Sequence
  Description of Artificial Sequence: Synthetic oligonucleotide
  Sense strand starting at position 1438 of SEQ ID NO: 1881918
augagagacuguguuggaa

SEQ ID NO: 2081043 - RNA, 19 nt, Artificial Sequence
  Description of Artificial Sequence: Synthetic oligonucleotide
  Antisense strand to SEQ ID NO: 2081042
uuccaacacagucucucau

SEQ ID NO: 2081044 - RNA, 19 nt, Artificial Sequence
  Description of Artificial Sequence: Synthetic oligonucleotide
  Sense strand starting at position 1458 of SEQ ID NO: 1881918
augacacugucucucaaga

SEQ ID NO: 2081045 - RNA, 19 nt, Artificial Sequence
  Description of Artificial Sequence: Synthetic oligonucleotide
  Antisense strand to SEQ ID NO: 2081044
ucuugagagacagugucau

SEQ ID NO: 2081046 - RNA, 19 nt, Artificial Sequence
  Description of Artificial Sequence: Synthetic oligonucleotide
  Sense strand starting at position 1942 of SEQ ID NO: 1881918
uauauuggucucuaaggcu

SEQ ID NO: 2081047 - RNA, 19 nt, Artificial Sequence
  Description of Artificial Sequence: Synthetic oligonucleotide
  Antisense strand to SEQ ID NO: 2081046
agccuuagagaccaauaua

SEQ ID NO: 2081048 - RNA, 19 nt, Artificial Sequence
  Description of Artificial Sequence: Synthetic oligonucleotide
  Sense strand starting at position 1975 of SEQ ID NO: 1881918
ccacaaacucgaugacuua

SEQ ID NO: 2081049 - RNA, 19 nt, Artificial Sequence
  Description of Artificial Sequence: Synthetic oligonucleotide
  Antisense strand to SEQ ID NO: 2081048
uaagucaucgaguuugugg

SEQ ID NO: 2081050 - RNA, 19 nt, Artificial Sequence
  Description of Artificial Sequence: Synthetic oligonucleotide
  Sense strand starting at position 2200 of SEQ ID NO: 1881918
ggacaacacuccuugagcu

SEQ ID NO: 2081051 - RNA, 19 nt, Artificial Sequence
  Description of Artificial Sequence: Synthetic oligonucleotide
  Antisense strand to SEQ ID NO: 2081050
agcucaaggaguguugucc

SEQ ID NO: 2081052 - RNA, 19 nt, Artificial Sequence
  Description of Artificial Sequence: Synthetic oligonucleotide
  Sense strand starting at position 2330 of SEQ ID NO: 1881918
aggacuuagacguaucuuu

SEQ ID NO: 2081053 - RNA, 19 nt, Artificial Sequence
  Description of Artificial Sequence: Synthetic oligonucleotide
  Antisense strand to SEQ ID NO: 2081052
aaagauacgucuaaguccu

SEQ ID NO: 2081054 - RNA, 19 nt, Artificial Sequence
  Description of Artificial Sequence: Synthetic oligonucleotide
  Sense strand starting at position 2441 of SEQ ID NO: 1881918
uuugaaugacuuugagguu

SEQ ID NO: 2081055 - RNA, 19 nt, Artificial Sequence
  Description of Artificial Sequence: Synthetic oligonucleotide
  Antisense strand to SEQ ID NO: 2081054
aaccucaaagucauucaaa

SEQ ID NO: 2081056 - RNA, 19 nt, Artificial Sequence
  Description of Artificial Sequence: Synthetic oligonucleotide
  Sense strand starting at position 2447 of SEQ ID NO: 1881918
ugacuuugagguuauaguu

SEQ ID NO: 2081057 - RNA, 19 nt, Artificial Sequence
  Description of Artificial Sequence: Synthetic oligonucleotide
  Antisense strand to SEQ ID NO: 2081056
aacuauaaccucaaaguca

SEQ ID NO: 2081058 - RNA, 19 nt, Artificial Sequence
  Description of Artificial Sequence: Synthetic oligonucleotide
  Sense strand starting at position 2598 of SEQ ID NO: 1881918
agggauccugcaggacaau

SEQ ID NO: 2081059 - RNA, 19 nt, Artificial Sequence
  Description of Artificial Sequence: Synthetic oligonucleotide
  Antisense strand to SEQ ID NO: 2081058
auuguccugcaggaucccu

SEQ ID NO: 2081060 - RNA, 19 nt, Artificial Sequence
  Description of Artificial Sequence: Synthetic oligonucleotide
  Sense strand starting at position 2685 of SEQ ID NO: 1881918
ucauauccucuacaugagu

SEQ ID NO: 2081061 - RNA, 19 nt, Artificial Sequence
  Description of Artificial Sequence: Synthetic oligonucleotide
  Antisense strand to SEQ ID NO: 2081060
acucauguagaggauauga

SEQ ID NO: 2081062 - RNA, 19 nt, Artificial Sequence
  Description of Artificial Sequence: Synthetic oligonucleotide
  Sense strand starting at position 2692 of SEQ ID NO: 1881918
cucuacaugagugacgauu

SEQ ID NO: 2081063 - RNA, 19 nt, Artificial Sequence
  Description of Artificial Sequence: Synthetic oligonucleotide
  Antisense strand to SEQ ID NO: 2081062
aaucgucacucauguagag

SEQ ID NO: 2081064 - RNA, 19 nt, Artificial Sequence
  Description of Artificial Sequence: Synthetic oligonucleotide
  Sense strand starting at position 2701 of SEQ ID NO: 1881918
agugacgauuaaucaacua

SEQ ID NO: 2081065 - RNA, 19 nt, Artificial Sequence
  Description of Artificial Sequence: Synthetic oligonucleotide
  Antisense strand to SEQ ID NO: 2081064
uaguugauuaaucgucacu

SEQ ID NO: 2081066 - RNA, 19 nt, Artificial Sequence
  Description of Artificial Sequence: Synthetic oligonucleotide
  Sense strand starting at position 2860 of SEQ ID NO: 1881918
augagugcucuugcuugca

SEQ ID NO: 2081067 - RNA, 19 nt, Artificial Sequence
  Description of Artificial Sequence: Synthetic oligonucleotide
  Antisense strand to SEQ ID NO: 2081066
ugcaagcaagagcacucau

SEQ ID NO: 2081068 - RNA, 19 nt, Artificial Sequence
  Description of Artificial Sequence: Synthetic oligonucleotide
  Sense strand starting at position 2967 of SEQ ID NO: 1881918
uggccaaacucagcuagaa

SEQ ID NO: 2081069 - RNA, 19 nt, Artificial Sequence
  Description of Artificial Sequence: Synthetic oligonucleotide
  Antisense strand to SEQ ID NO: 2081068
uucuagcugaguuuggcca

SEQ ID NO: 2081070 - RNA, 19 nt, Artificial Sequence
  Description of Artificial Sequence: Synthetic oligonucleotide
  Sense strand starting at position 3023 of SEQ ID NO: 1881918
gagauaagaucccugugau

SEQ ID NO: 2081071 - RNA, 19 nt, Artificial Sequence
  Description of Artificial Sequence: Synthetic oligonucleotide
  Antisense strand to SEQ ID NO: 2081070
aucacagggaucuuaucuc

SEQ ID NO: 2081072 - RNA, 19 nt, Artificial Sequence
  Description of Artificial Sequence: Synthetic oligonucleotide
  Sense strand starting at position 3024 of SEQ ID NO: 1881918
agauaagaucccugugaua

SEQ ID NO: 2081073 - RNA, 19 nt, Artificial Sequence
  Description of Artificial Sequence: Synthetic oligonucleotide
  Antisense strand to SEQ ID NO: 2081072
uaucacagggaucuuaucu

SEQ ID NO: 2081074 - RNA, 19 nt, Artificial Sequence
  Description of Artificial Sequence: Synthetic oligonucleotide
  Sense strand starting at position 3026 of SEQ ID NO: 1881918
auaagaucccugugauaca

SEQ ID NO: 2081075 - RNA, 19 nt, Artificial Sequence
  Description of Artificial Sequence: Synthetic oligonucleotide
  Antisense strand to SEQ ID NO: 2081074
uguaucacagggaucuuau

SEQ ID NO: 2081076 - RNA, 19 nt, Artificial Sequence
  Description of Artificial Sequence: Synthetic oligonucleotide
  Sense strand starting at position 3202 of SEQ ID NO: 1881918
gaauccaggucugucugaa

SEQ ID NO: 2081077 - RNA, 19 nt, Artificial Sequence
  Description of Artificial Sequence: Synthetic oligonucleotide
  Antisense strand to SEQ ID NO: 2081076
uucagacagaccuggauuc

SEQ ID NO: 2081078 - RNA, 19 nt, Artificial Sequence
  Description of Artificial Sequence: Synthetic oligonucleotide
  Sense strand starting at position 3218 of SEQ ID NO: 1881918
gaaucauaagccugagguc

SEQ ID NO: 2081079 - RNA, 19 nt, Artificial Sequence
  Description of Artificial Sequence: Synthetic oligonucleotide
  Antisense strand to SEQ ID NO: 2081078
gaccucaggcuuaugauuc

SEQ ID NO: 2081080 - RNA, 19 nt, Artificial Sequence
  Description of Artificial Sequence: Synthetic oligonucleotide
  Sense strand starting at position 3294 of SEQ ID NO: 1881918
cugcuuggucaagagauag

SEQ ID NO: 2081081 - RNA, 19 nt, Artificial Sequence
  Description of Artificial Sequence: Synthetic oligonucleotide
  Antisense strand to SEQ ID NO: 2081080
cuaucucuugaccaagcag

SEQ ID NO: 2081082 - RNA, 19 nt, Artificial Sequence
  Description of Artificial Sequence: Synthetic oligonucleotide
  Sense strand starting at position 3893 of SEQ ID NO: 1881918
uuggguuuauacccaagau

SEQ ID NO: 2081083 - RNA, 19 nt, Artificial Sequence
  Description of Artificial Sequence: Synthetic oligonucleotide
  Antisense strand to SEQ ID NO: 2081082
aucuuggguauaaacccaa

SEQ ID NO: 2081084 - RNA, 19 nt, Artificial Sequence
  Description of Artificial Sequence: Synthetic oligonucleotide
  Sense strand starting at position 156 of SEQ ID NO: 1881919
ucaacauaggagugguuau

SEQ ID NO: 2081085 - RNA, 19 nt, Artificial Sequence
  Description of Artificial Sequence: Synthetic oligonucleotide
  Antisense strand to SEQ ID NO: 2081084
auaaccacuccuauguuga

SEQ ID NO: 2081086 - RNA, 19 nt, Artificial Sequence
  Description of Artificial Sequence: Synthetic oligonucleotide
  Sense strand starting at position 240 of SEQ ID NO: 1881919
agacuuuagauguguaagu

SEQ ID NO: 2081087 - RNA, 19 nt, Artificial Sequence
  Description of Artificial Sequence: Synthetic oligonucleotide
  Antisense strand to SEQ ID NO: 2081086
acuuacacaucuaaagucu

SEQ ID NO: 2081088 - RNA, 19 nt, Artificial Sequence
  Description of Artificial Sequence: Synthetic oligonucleotide
  Sense strand starting at position 241 of SEQ ID NO: 1881919
gacuuuagauguguaaguu

SEQ ID NO: 2081089 - RNA, 19 nt, Artificial Sequence
  Description of Artificial Sequence: Synthetic oligonucleotide
  Antisense strand to SEQ ID NO: 2081088
aacuuacacaucuaaaguc

SEQ ID NO: 2081090 - RNA, 19 nt, Artificial Sequence
  Description of Artificial Sequence: Synthetic oligonucleotide
  Sense strand starting at position 245 of SEQ ID NO: 1881919
uuagauguguaaguuaucu

SEQ ID NO: 2081091 - RNA, 19 nt, Artificial Sequence
  Description of Artificial Sequence: Synthetic oligonucleotide
  Antisense strand to SEQ ID NO: 2081090
agauaacuuacacaucuaa

SEQ ID NO: 2081092 - RNA, 19 nt, Artificial Sequence
  Description of Artificial Sequence: Synthetic oligonucleotide
  Sense strand starting at position 247 of SEQ ID NO: 1881919
agauguguaaguuaucuuu

SEQ ID NO: 2081093 - RNA, 19 nt, Artificial Sequence
  Description of Artificial Sequence: Synthetic oligonucleotide
  Antisense strand to SEQ ID NO: 2081092
aaagauaacuuacacaucu

SEQ ID NO: 2081094 - RNA, 19 nt, Artificial Sequence
  Description of Artificial Sequence: Synthetic oligonucleotide
  Sense strand starting at position 268 of SEQ ID NO: 1881919
uuugucuccagguagaaag

SEQ ID NO: 2081095 - RNA, 19 nt, Artificial Sequence
  Description of Artificial Sequence: Synthetic oligonucleotide
  Antisense strand to SEQ ID NO: 2081094
cuuucuaccuggagacaaa

SEQ ID NO: 2081096 - RNA, 19 nt, Artificial Sequence
  Description of Artificial Sequence: Synthetic oligonucleotide
  Sense strand starting at position 461 of SEQ ID NO: 1881919
guaggaauuugacaccauu

SEQ ID NO: 2081097 - RNA, 19 nt, Artificial Sequence
  Description of Artificial Sequence: Synthetic oligonucleotide
  Antisense strand to SEQ ID NO: 2081096
aauggugucaaauuccuac

SEQ ID NO: 2081098 - RNA, 19 nt, Artificial Sequence
  Description of Artificial Sequence: Synthetic oligonucleotide
  Sense strand starting at position 758 of SEQ ID NO: 1881919
uuggaauucuuaucuaguu

SEQ ID NO: 2081099 - RNA, 19 nt, Artificial Sequence
  Description of Artificial Sequence: Synthetic oligonucleotide
  Antisense strand to SEQ ID NO: 2081098
aacuagauaagaauuccaa

SEQ ID NO: 2081100 - RNA, 19 nt, Artificial Sequence
  Description of Artificial Sequence: Synthetic oligonucleotide
  Sense strand starting at position 766 of SEQ ID NO: 1881919
cuuaucuaguuguuaaaug

SEQ ID NO: 2081101 - RNA, 19 nt, Artificial Sequence
  Description of Artificial Sequence: Synthetic oligonucleotide
  Antisense strand to SEQ ID NO: 2081100
cauuuaacaacuagauaag

SEQ ID NO: 2081102 - RNA, 19 nt, Artificial Sequence
  Description of Artificial Sequence: Synthetic oligonucleotide
  Sense strand starting at position 854 of SEQ ID NO: 1881919
ugaugagucauagaugcuu

SEQ ID NO: 2081103 - RNA, 19 nt, Artificial Sequence
  Description of Artificial Sequence: Synthetic oligonucleotide
  Antisense strand to SEQ ID NO: 2081102
aagcaucuaugacucauca

SEQ ID NO: 2081104 - RNA, 19 nt, Artificial Sequence
  Description of Artificial Sequence: Synthetic oligonucleotide
  Sense strand starting at position 1417 of SEQ ID NO: 1881919
gcacccagcccagauaaau

SEQ ID NO: 2081105 - RNA, 19 nt, Artificial Sequence
  Description of Artificial Sequence: Synthetic oligonucleotide
  Antisense strand to SEQ ID NO: 2081104
auuuaucugggcugggugc

SEQ ID NO: 2081106 - RNA, 19 nt, Artificial Sequence
  Description of Artificial Sequence: Synthetic oligonucleotide
  Sense strand starting at position 1552 of SEQ ID NO: 1881919
gagucaagagcuuguagac

SEQ ID NO: 2081107 - RNA, 19 nt, Artificial Sequence
  Description of Artificial Sequence: Synthetic oligonucleotide
  Antisense strand to SEQ ID NO: 2081106
gucuacaagcucuugacuc

SEQ ID NO: 2081108 - RNA, 19 nt, Artificial Sequence
  Description of Artificial Sequence: Synthetic oligonucleotide
  Sense strand starting at position 1580 of SEQ ID NO: 1881919
guuucaguuggucaccgaa

SEQ ID NO: 2081109 - RNA, 19 nt, Artificial Sequence
  Description of Artificial Sequence: Synthetic oligonucleotide
  Antisense strand to SEQ ID NO: 2081108
uucggugaccaacugaaac

SEQ ID NO: 2081110 - RNA, 19 nt, Artificial Sequence
  Description of Artificial Sequence: Synthetic oligonucleotide
  Sense strand starting at position 1770 of SEQ ID NO: 1881919
cucauaauaugucuuguau

SEQ ID NO: 2081111 - RNA, 19 nt, Artificial Sequence
  Description of Artificial Sequence: Synthetic oligonucleotide
  Antisense strand to SEQ ID NO: 2081110
auacaagacauauuaugag

SEQ ID NO: 2081112 - RNA, 19 nt, Artificial Sequence
  Description of Artificial Sequence: Synthetic oligonucleotide
  Sense strand starting at position 2001 of SEQ ID NO: 1881919
ggcacauaccgguauuaug

SEQ ID NO: 2081113 - RNA, 19 nt, Artificial Sequence
  Description of Artificial Sequence: Synthetic oligonucleotide
  Antisense strand to SEQ ID NO: 2081112
cauaauaccgguaugugcc

SEQ ID NO: 2081114 - RNA, 19 nt, Artificial Sequence
  Description of Artificial Sequence: Synthetic oligonucleotide
  Sense strand starting at position 2009 of SEQ ID NO: 1881919
ccgguauuauggucauuuc

SEQ ID NO: 2081115 - RNA, 19 nt, Artificial Sequence
  Description of Artificial Sequence: Synthetic oligonucleotide
  Antisense strand to SEQ ID NO: 2081114
gaaaugaccauaauaccgg

SEQ ID NO: 2081116 - RNA, 19 nt, Artificial Sequence
  Description of Artificial Sequence: Synthetic oligonucleotide
  Sense strand starting at position 2099 of SEQ ID NO: 1881919
aggauuauguaucuuauca

SEQ ID NO: 2081117 - RNA, 19 nt, Artificial Sequence
  Description of Artificial Sequence: Synthetic oligonucleotide
  Antisense strand to SEQ ID NO: 2081116
ugauaagauacauaauccu

SEQ ID NO: 2081118 - RNA, 19 nt, Artificial Sequence
  Description of Artificial Sequence: Synthetic oligonucleotide
  Sense strand starting at position 2349 of SEQ ID NO: 1881919
gugcacagagaguaauaua

SEQ ID NO: 2081119 - RNA, 19 nt, Artificial Sequence
  Description of Artificial Sequence: Synthetic oligonucleotide
  Antisense strand to SEQ ID NO: 2081118
uauauuacucucugugcac

SEQ ID NO: 2081120 - RNA, 19 nt, Artificial Sequence
  Description of Artificial Sequence: Synthetic oligonucleotide
  Sense strand starting at position 2372 of SEQ ID NO: 1881919
uuaaauagacuugagcuuu

SEQ ID NO: 2081121 - RNA, 19 nt, Artificial Sequence
  Description of Artificial Sequence: Synthetic oligonucleotide
  Antisense strand to SEQ ID NO: 2081120
aaagcucaagucuauuuaa

SEQ ID NO: 2081122 - RNA, 19 nt, Artificial Sequence
  Description of Artificial Sequence: Synthetic oligonucleotide
  Sense strand starting at position 2378 of SEQ ID NO: 1881919
agacuugagcuuugcaauc

SEQ ID NO: 2081123 - RNA, 19 nt, Artificial Sequence
  Description of Artificial Sequence: Synthetic oligonucleotide
  Antisense strand to SEQ ID NO: 2081122
gauugcaaagcucaagucu

SEQ ID NO: 2081124 - RNA, 19 nt, Artificial Sequence
  Description of Artificial Sequence: Synthetic oligonucleotide
  Sense strand starting at position 2430 of SEQ ID NO: 1881919
gaggaaguuccauagccuu

SEQ ID NO: 2081125 - RNA, 19 nt, Artificial Sequence
  Description of Artificial Sequence: Synthetic oligonucleotide
  Antisense strand to SEQ ID NO: 2081124
aaggcuauggaacuuccuc

SEQ ID NO: 2081126 - RNA, 19 nt, Artificial Sequence
  Description of Artificial Sequence: Synthetic oligonucleotide
  Sense strand starting at position 2448 of SEQ ID NO: 1881919
ucauaagucucagugaccu

SEQ ID NO: 2081127 - RNA, 19 nt, Artificial Sequence
  Description of Artificial Sequence: Synthetic oligonucleotide
  Antisense strand to SEQ ID NO: 2081126
aggucacugagacuuauga

SEQ ID NO: 2081128 - RNA, 19 nt, Artificial Sequence
  Description of Artificial Sequence: Synthetic oligonucleotide
  Sense strand starting at position 2476 of SEQ ID NO: 1881919
gugagaauugacugacuac

SEQ ID NO: 2081129 - RNA, 19 nt, Artificial Sequence
  Description of Artificial Sequence: Synthetic oligonucleotide
  Antisense strand to SEQ ID NO: 2081128
guagucagucaauucucac

SEQ ID NO: 2081130 - RNA, 19 nt, Artificial Sequence
  Description of Artificial Sequence: Synthetic oligonucleotide
  Sense strand starting at position 2509 of SEQ ID NO: 1881919
guaacaauuaaguagugua

SEQ ID NO: 2081131 - RNA, 19 nt, Artificial Sequence
  Description of Artificial Sequence: Synthetic oligonucleotide
  Antisense strand to SEQ ID NO: 2081130
uacacuacuuaauuguuac

SEQ ID NO: 2081132 - RNA, 19 nt, Artificial Sequence
  Description of Artificial Sequence: Synthetic oligonucleotide
  Sense strand starting at position 2514 of SEQ ID NO: 1881919
aauuaaguaguguaaugca

SEQ ID NO: 2081133 - RNA, 19 nt, Artificial Sequence
  Description of Artificial Sequence: Synthetic oligonucleotide
  Antisense strand to SEQ ID NO: 2081132
ugcauuacacuacuuaauu

SEQ ID NO: 2081134 - RNA, 19 nt, Artificial Sequence
  Description of Artificial Sequence: Synthetic oligonucleotide
  Sense strand starting at position 2523 of SEQ ID NO: 1881919
guguaaugcauguagaacu

SEQ ID NO: 2081135 - RNA, 19 nt, Artificial Sequence
  Description of Artificial Sequence: Synthetic oligonucleotide
  Antisense strand to SEQ ID NO: 2081134
aguucuacaugcauuacac

SEQ ID NO: 2081136 - RNA, 19 nt, Artificial Sequence
  Description of Artificial Sequence: Synthetic oligonucleotide
  Sense strand starting at position 2533 of SEQ ID NO: 1881919
uguagaacuccuggcaaau

SEQ ID NO: 2081137 - RNA, 19 nt, Artificial Sequence
  Description of Artificial Sequence: Synthetic oligonucleotide
  Antisense strand to SEQ ID NO: 2081136
auuugccaggaguucuaca

SEQ ID NO: 2081138 - RNA, 19 nt, Artificial Sequence
  Description of Artificial Sequence: Synthetic oligonucleotide
  Sense strand starting at position 2544 of SEQ ID NO: 1881919
uggcaaauugacuagcaca

SEQ ID NO: 2081139 - RNA, 19 nt, Artificial Sequence
  Description of Artificial Sequence: Synthetic oligonucleotide
  Antisense strand to SEQ ID NO: 2081138
ugugcuagucaauuugcca

SEQ ID NO: 2081140 - RNA, 19 nt, Artificial Sequence
  Description of Artificial Sequence: Synthetic oligonucleotide
  Sense strand starting at position 2603 of SEQ ID NO: 1881919
aaggcaauuuaauaggaga

SEQ ID NO: 2081141 - RNA, 19 nt, Artificial Sequence
  Description of Artificial Sequence: Synthetic oligonucleotide
  Antisense strand to SEQ ID NO: 2081140
ucuccuauuaaauugccuu

SEQ ID NO: 2081142 - RNA, 19 nt, Artificial Sequence
  Description of Artificial Sequence: Synthetic oligonucleotide
  Sense strand starting at position 2708 of SEQ ID NO: 1881919
guagaauaccuuugauuac

SEQ ID NO: 2081143 - RNA, 19 nt, Artificial Sequence
  Description of Artificial Sequence: Synthetic oligonucleotide
  Antisense strand to SEQ ID NO: 2081142
guaaucaaagguauucuac

SEQ ID NO: 2081144 - RNA, 19 nt, Artificial Sequence
  Description of Artificial Sequence: Synthetic oligonucleotide
  Sense strand starting at position 2758 of SEQ ID NO: 1881919
cugugucaggguuagcaaa

SEQ ID NO: 2081145 - RNA, 19 nt, Artificial Sequence
  Description of Artificial Sequence: Synthetic oligonucleotide
  Antisense strand to SEQ ID NO: 2081144
uuugcuaacccugacacag

SEQ ID NO: 2081146 - RNA, 19 nt, Artificial Sequence
  Description of Artificial Sequence: Synthetic oligonucleotide
  Sense strand starting at position 2772 of SEQ ID NO: 1881919
gcaaacuuccucuguaagg

SEQ ID NO: 2081147 - RNA, 19 nt, Artificial Sequence
  Description of Artificial Sequence: Synthetic oligonucleotide
  Antisense strand to SEQ ID NO: 2081146
ccuuacagaggaaguuugc

SEQ ID NO: 2081148 - RNA, 19 nt, Artificial Sequence
  Description of Artificial Sequence: Synthetic oligonucleotide
  Sense strand starting at position 2810 of SEQ ID NO: 1881919
ggcucugugaacuauauga

SEQ ID NO: 2081149 - RNA, 19 nt, Artificial Sequence
  Description of Artificial Sequence: Synthetic oligonucleotide
  Antisense strand to SEQ ID NO: 2081148
ucauauaguucacagagcc

SEQ ID NO: 2081150 - RNA, 19 nt, Artificial Sequence
  Description of Artificial Sequence: Synthetic oligonucleotide
  Sense strand starting at position 3026 of SEQ ID NO: 1881919
uuguauauuugugcaauga

SEQ ID NO: 2081151 - RNA, 19 nt, Artificial Sequence
  Description of Artificial Sequence: Synthetic oligonucleotide
  Antisense strand to SEQ ID NO: 2081150
ucauugcacaaauauacaa

SEQ ID NO: 2081152 - RNA, 19 nt, Artificial Sequence
  Description of Artificial Sequence: Synthetic oligonucleotide
  Sense strand starting at position 3197 of SEQ ID NO: 1881919
aguugugaauucgcuauuu

SEQ ID NO: 2081153 - RNA, 19 nt, Artificial Sequence
  Description of Artificial Sequence: Synthetic oligonucleotide
  Antisense strand to SEQ ID NO: 2081152
aaauagcgaauucacaacu

SEQ ID NO: 2081154 - RNA, 19 nt, Artificial Sequence
  Description of Artificial Sequence: Synthetic oligonucleotide
  Sense strand starting at position 3241 of SEQ ID NO: 1881919
aguggccaugaguaaguua

SEQ ID NO: 2081155 - RNA, 19 nt, Artificial Sequence
  Description of Artificial Sequence: Synthetic oligonucleotide
  Antisense strand to SEQ ID NO: 2081154
uaacuuacucauggccacu

SEQ ID NO: 2081156 - RNA, 19 nt, Artificial Sequence
  Description of Artificial Sequence: Synthetic oligonucleotide
  Sense strand starting at position 3495 of SEQ ID NO: 1881919
agguaaguucuguaaugug

SEQ ID NO: 2081157 - RNA, 19 nt, Artificial Sequence
  Description of Artificial Sequence: Synthetic oligonucleotide
  Antisense strand to SEQ ID NO: 2081156
cacauuacagaacuuaccu

SEQ ID NO: 2081158 - RNA, 19 nt, Artificial Sequence
  Description of Artificial Sequence: Synthetic oligonucleotide
  Sense strand starting at position 3505 of SEQ ID NO: 1881919
uguaauguggcagaaauaa

SEQ ID NO: 2081159 - RNA, 19 nt, Artificial Sequence
  Description of Artificial Sequence: Synthetic oligonucleotide
  Antisense strand to SEQ ID NO: 2081158
uuauuucugccacauuaca

SEQ ID NO: 2081160 - RNA, 19 nt, Artificial Sequence
  Description of Artificial Sequence: Synthetic oligonucleotide
  Sense strand starting at position 3575 of SEQ ID NO: 1881919
gcacauuugcaaugucuga

SEQ ID NO: 2081161 - RNA, 19 nt, Artificial Sequence
  Description of Artificial Sequence: Synthetic oligonucleotide
  Antisense strand to SEQ ID NO: 2081160
ucagacauugcaaaugugc

SEQ ID NO: 2081162 - RNA, 19 nt, Artificial Sequence
  Description of Artificial Sequence: Synthetic oligonucleotide
  Sense strand starting at position 3971 of SEQ ID NO: 1881919
agaaauugugcuuaauauc

SEQ ID NO: 2081163 - RNA, 19 nt, Artificial Sequence
  Description of Artificial Sequence: Synthetic oligonucleotide
  Antisense strand to SEQ ID NO: 2081162
gauauuaagcacaauuucu

SEQ ID NO: 2081164 - RNA, 19 nt, Artificial Sequence
  Description of Artificial Sequence: Synthetic oligonucleotide
  Sense strand starting at position 193 of SEQ ID NO: 1881920
gcauaauaguuguaccuau

SEQ ID NO: 2081165 - RNA, 19 nt, Artificial Sequence
  Description of Artificial Sequence: Synthetic oligonucleotide
  Antisense strand to SEQ ID NO: 2081164
auagguacaacuauuaugc

SEQ ID NO: 2081166 - RNA, 19 nt, Artificial Sequence
  Description of Artificial Sequence: Synthetic oligonucleotide
  Sense strand starting at position 222 of SEQ ID NO: 1881920
cggguuauauuuggacaca

SEQ ID NO: 2081167 - RNA, 19 nt, Artificial Sequence
  Description of Artificial Sequence: Synthetic oligonucleotide
  Antisense strand to SEQ ID NO: 2081166
uguguccaaauauaacccg

SEQ ID NO: 2081168 - RNA, 19 nt, Artificial Sequence
  Description of Artificial Sequence: Synthetic oligonucleotide
  Sense strand starting at position 223 of SEQ ID NO: 1881920
ggguuauauuuggacacau

SEQ ID NO: 2081169 - RNA, 19 nt, Artificial Sequence
  Description of Artificial Sequence: Synthetic oligonucleotide
  Antisense strand to SEQ ID NO: 2081168
auguguccaaauauaaccc

SEQ ID NO: 2081170 - RNA, 19 nt, Artificial Sequence
  Description of Artificial Sequence: Synthetic oligonucleotide
  Sense strand starting at position 576 of SEQ ID NO: 1881920
acccgaugagcugggauua

SEQ ID NO: 2081171 - RNA, 19 nt, Artificial Sequence
  Description of Artificial Sequence: Synthetic oligonucleotide
  Antisense strand to SEQ ID NO: 2081170
uaaucccagcucaucgggu

SEQ ID NO: 2081172 - RNA, 19 nt, Artificial Sequence
  Description of Artificial Sequence: Synthetic oligonucleotide
  Sense strand starting at position 757 of SEQ ID NO: 1881920
uguauaucuuuguugugca

SEQ ID NO: 2081173 - RNA, 19 nt, Artificial Sequence
  Description of Artificial Sequence: Synthetic oligonucleotide
  Antisense strand to SEQ ID NO: 2081172
ugcacaacaaagauauaca

SEQ ID NO: 2081174 - RNA, 19 nt, Artificial Sequence
  Description of Artificial Sequence: Synthetic oligonucleotide
  Sense strand starting at position 1120 of SEQ ID NO: 1881920
gagugaucauggcucauuc

SEQ ID NO: 2081175 - RNA, 19 nt, Artificial Sequence
  Description of Artificial Sequence: Synthetic oligonucleotide
  Antisense strand to SEQ ID NO: 2081174
gaaugagccaugaucacuc

SEQ ID NO: 2081176 - RNA, 19 nt, Artificial Sequence
  Description of Artificial Sequence: Synthetic oligonucleotide
  Sense strand starting at position 1232 of SEQ ID NO: 1881920
ucugauuucugagacuuuc

SEQ ID NO: 2081177 - RNA, 19 nt, Artificial Sequence
  Description of Artificial Sequence: Synthetic oligonucleotide
  Antisense strand to SEQ ID NO: 2081176
gaaagucucagaaaucaga

SEQ ID NO: 2081178 - RNA, 19 nt, Artificial Sequence
  Description of Artificial Sequence: Synthetic oligonucleotide
  Sense strand starting at position 1612 of SEQ ID NO: 1881920
ccacuuggcuucccaguaa

SEQ ID NO: 2081179 - RNA, 19 nt, Artificial Sequence
  Description of Artificial Sequence: Synthetic oligonucleotide
  Antisense strand to SEQ ID NO: 2081178
uuacugggaagccaagugg

SEQ ID NO: 2081180 - RNA, 19 nt, Artificial Sequence
  Description of Artificial Sequence: Synthetic oligonucleotide
  Sense strand starting at position 1616 of SEQ ID NO: 1881920
uuggcuucccaguaaccau

SEQ ID NO: 2081181 - RNA, 19 nt, Artificial Sequence
  Description of Artificial Sequence: Synthetic oligonucleotide
  Antisense strand to SEQ ID NO: 2081180
augguuacugggaagccaa

SEQ ID NO: 2081182 - RNA, 19 nt, Artificial Sequence
  Description of Artificial Sequence: Synthetic oligonucleotide
  Sense strand starting at position 1668 of SEQ ID NO: 1881920
aucugagggacuugcaaau

SEQ ID NO: 2081183 - RNA, 19 nt, Artificial Sequence
  Description of Artificial Sequence: Synthetic oligonucleotide
  Antisense strand to SEQ ID NO: 2081182
auuugcaagucccucagau

SEQ ID NO: 2081184 - RNA, 19 nt, Artificial Sequence
  Description of Artificial Sequence: Synthetic oligonucleotide
  Sense strand starting at position 2459 of SEQ ID NO: 1881920
aagugugcucagugcaaga

SEQ ID NO: 2081185 - RNA, 19 nt, Artificial Sequence
  Description of Artificial Sequence: Synthetic oligonucleotide
  Antisense strand to SEQ ID NO: 2081184
ucuugcacugagcacacuu

SEQ ID NO: 2081186 - RNA, 19 nt, Artificial Sequence
  Description of Artificial Sequence: Synthetic oligonucleotide
  Sense strand starting at position 2511 of SEQ ID NO: 1881920
gugagcuagcccugucuaa

SEQ ID NO: 2081187 - RNA, 19 nt, Artificial Sequence
  Description of Artificial Sequence: Synthetic oligonucleotide
  Antisense strand to SEQ ID NO: 2081186
uuagacagggcuagcucac

SEQ ID NO: 2081188 - RNA, 19 nt, Artificial Sequence
  Description of Artificial Sequence: Synthetic oligonucleotide
  Sense strand starting at position 2518 of SEQ ID NO: 1881920
agcccugucuaauaaggaa

SEQ ID NO: 2081189 - RNA, 19 nt, Artificial Sequence
  Description of Artificial Sequence: Synthetic oligonucleotide
  Antisense strand to SEQ ID NO: 2081188
uuccuuauuagacagggcu

SEQ ID NO: 2081190 - RNA, 19 nt, Artificial Sequence
  Description of Artificial Sequence: Synthetic oligonucleotide
  Sense strand starting at position 2542 of SEQ ID NO: 1881920
ucagguuugcaguaaucaa

SEQ ID NO: 2081191 - RNA, 19 nt, Artificial Sequence
  Description of Artificial Sequence: Synthetic oligonucleotide
  Antisense strand to SEQ ID NO: 2081190
uugauuacugcaaaccuga

SEQ ID NO: 2081192 - RNA, 19 nt, Artificial Sequence
  Description of Artificial Sequence: Synthetic oligonucleotide
  Sense strand starting at position 2566 of SEQ ID NO: 1881920
gcuugaggcugucccaaau

SEQ ID NO: 2081193 - RNA, 19 nt, Artificial Sequence
  Description of Artificial Sequence: Synthetic oligonucleotide
  Antisense strand to SEQ ID NO: 2081192
auuugggacagccucaagc

SEQ ID NO: 2081194 - RNA, 19 nt, Artificial Sequence
  Description of Artificial Sequence: Synthetic oligonucleotide
  Sense strand starting at position 2575 of SEQ ID NO: 1881920
ugucccaaauagucagaua

SEQ ID NO: 2081195 - RNA, 19 nt, Artificial Sequence
  Description of Artificial Sequence: Synthetic oligonucleotide
  Antisense strand to SEQ ID NO: 2081194
uaucugacuauuugggaca

SEQ ID NO: 2081196 - RNA, 19 nt, Artificial Sequence
  Description of Artificial Sequence: Synthetic oligonucleotide
  Sense strand starting at position 2578 of SEQ ID NO: 1881920
cccaaauagucagauaaug

SEQ ID NO: 2081197 - RNA, 19 nt, Artificial Sequence
  Description of Artificial Sequence: Synthetic oligonucleotide
  Antisense strand to SEQ ID NO: 2081196
cauuaucugacuauuuggg

SEQ ID NO: 2081198 - RNA, 19 nt, Artificial Sequence
  Description of Artificial Sequence: Synthetic oligonucleotide
  Sense strand starting at position 2599 of SEQ ID NO: 1881920
agccaaaugucugcaacca

SEQ ID NO: 2081199 - RNA, 19 nt, Artificial Sequence
  Description of Artificial Sequence: Synthetic oligonucleotide
  Antisense strand to SEQ ID NO: 2081198
ugguugcagacauuuggcu

SEQ ID NO: 2081200 - RNA, 19 nt, Artificial Sequence
  Description of Artificial Sequence: Synthetic oligonucleotide
  Sense strand starting at position 2600 of SEQ ID NO: 1881920
gccaaaugucugcaaccau

SEQ ID NO: 2081201 - RNA, 19 nt, Artificial Sequence
  Description of Artificial Sequence: Synthetic oligonucleotide
  Antisense strand to SEQ ID NO: 2081200
augguugcagacauuuggc

SEQ ID NO: 2081202 - RNA, 19 nt, Artificial Sequence
  Description of Artificial Sequence: Synthetic oligonucleotide
  Sense strand starting at position 2735 of SEQ ID NO: 1881920
agguccucuggcuaaugaa

SEQ ID NO: 2081203 - RNA, 19 nt, Artificial Sequence
  Description of Artificial Sequence: Synthetic oligonucleotide
  Antisense strand to SEQ ID NO: 2081202
uucauuagccagaggaccu

SEQ ID NO: 2081204 - RNA, 19 nt, Artificial Sequence
  Description of Artificial Sequence: Synthetic oligonucleotide
  Sense strand starting at position 3398 of SEQ ID NO: 1881920
caaagugcugcugggauuu

SEQ ID NO: 2081205 - RNA, 19 nt, Artificial Sequence
  Description of Artificial Sequence: Synthetic oligonucleotide
  Antisense strand to SEQ ID NO: 2081204
aaaucccagcagcacuuug

SEQ ID NO: 2081206 - RNA, 19 nt, Artificial Sequence
  Description of Artificial Sequence: Synthetic oligonucleotide
  Sense strand starting at position 3470 of SEQ ID NO: 1881920
caugaagaauuucgugguu

SEQ ID NO: 2081207 - RNA, 19 nt, Artificial Sequence
  Description of Artificial Sequence: Synthetic oligonucleotide
  Antisense strand to SEQ ID NO: 2081206
aaccacgaaauucuucaug

SEQ ID NO: 2081208 - RNA, 19 nt, Artificial Sequence
  Description of Artificial Sequence: Synthetic oligonucleotide
  Sense strand starting at position 3507 of SEQ ID NO: 1881920
auguuuaggguuuggcuaa

SEQ ID NO: 2081209 - RNA, 19 nt, Artificial Sequence
  Description of Artificial Sequence: Synthetic oligonucleotide
  Antisense strand to SEQ ID NO: 2081208
uuagccaaacccuaaacau

SEQ ID NO: 2081210 - RNA, 19 nt, Artificial Sequence
  Description of Artificial Sequence: Synthetic oligonucleotide
  Sense strand starting at position 3520 of SEQ ID NO: 1881920
ggcuaagccuggcuuugaa

SEQ ID NO: 2081211 - RNA, 19 nt, Artificial Sequence
  Description of Artificial Sequence: Synthetic oligonucleotide
  Antisense strand to SEQ ID NO: 2081210
uucaaagccaggcuuagcc

SEQ ID NO: 2081212 - RNA, 19 nt, Artificial Sequence
  Description of Artificial Sequence: Synthetic oligonucleotide
  Sense strand starting at position 3530 of SEQ ID NO: 1881920
ggcuuugaaccugaugcua

SEQ ID NO: 2081213 - RNA, 19 nt, Artificial Sequence
  Description of Artificial Sequence: Synthetic oligonucleotide
  Antisense strand to SEQ ID NO: 2081212
uagcaucagguucaaagcc

SEQ ID NO: 2081214 - RNA, 19 nt, Artificial Sequence
  Description of Artificial Sequence: Synthetic oligonucleotide
  Sense strand starting at position 3532 of SEQ ID NO: 1881920
cuuugaaccugaugcuaau

SEQ ID NO: 2081215 - RNA, 19 nt, Artificial Sequence
  Description of Artificial Sequence: Synthetic oligonucleotide
  Antisense strand to SEQ ID NO: 2081214
auuagcaucagguucaaag

SEQ ID NO: 2081216 - RNA, 19 nt, Artificial Sequence
  Description of Artificial Sequence: Synthetic oligonucleotide
  Sense strand starting at position 3642 of SEQ ID NO: 1881920
acaucuaucggcuguguua

SEQ ID NO: 2081217 - RNA, 19 nt, Artificial Sequence
  Description of Artificial Sequence: Synthetic oligonucleotide
  Antisense strand to SEQ ID NO: 2081216
uaacacagccgauagaugu

SEQ ID NO: 2081218 - RNA, 19 nt, Artificial Sequence
  Description of Artificial Sequence: Synthetic oligonucleotide
  Sense strand starting at position 3733 of SEQ ID NO: 1881920
aggcgugguccucugcuaa

SEQ ID NO: 2081219 - RNA, 19 nt, Artificial Sequence
  Description of Artificial Sequence: Synthetic oligonucleotide
  Antisense strand to SEQ ID NO: 2081218
uuagcagaggaccacgccu

SEQ ID NO: 2081220 - RNA, 19 nt, Artificial Sequence
  Description of Artificial Sequence: Synthetic oligonucleotide
  Sense strand starting at position 3737 of SEQ ID NO: 1881920
gugguccucugcuaaggau

SEQ ID NO: 2081221 - RNA, 19 nt, Artificial Sequence
  Description of Artificial Sequence: Synthetic oligonucleotide
  Antisense strand to SEQ ID NO: 2081220
auccuuagcagaggaccac

SEQ ID NO: 2081222 - RNA, 19 nt, Artificial Sequence
  Description of Artificial Sequence: Synthetic oligonucleotide
  Sense strand starting at position 3744 of SEQ ID NO: 1881920
ucugcuaaggaugguuaaa

SEQ ID NO: 2081223 - RNA, 19 nt, Artificial Sequence
  Description of Artificial Sequence: Synthetic oligonucleotide
  Antisense strand to SEQ ID NO: 2081222
uuuaaccauccuuagcaga

SEQ ID NO: 2081224 - RNA, 19 nt, Artificial Sequence
  Description of Artificial Sequence: Synthetic oligonucleotide
  Sense strand starting at position 3746 of SEQ ID NO: 1881920
ugcuaaggaugguuaaauu

SEQ ID NO: 2081225 - RNA, 19 nt, Artificial Sequence
  Description of Artificial Sequence: Synthetic oligonucleotide
  Antisense strand to SEQ ID NO: 2081224
aauuuaaccauccuuagca

SEQ ID NO: 2081226 - RNA, 19 nt, Artificial Sequence
  Description of Artificial Sequence: Synthetic oligonucleotide
  Sense strand starting at position 3757 of SEQ ID NO: 1881920
guuaaauucugccaagcuc

SEQ ID NO: 2081227 - RNA, 19 nt, Artificial Sequence
  Description of Artificial Sequence: Synthetic oligonucleotide
  Antisense strand to SEQ ID NO: 2081226
gagcuuggcagaauuuaac

SEQ ID NO: 2081228 - RNA, 19 nt, Artificial Sequence
  Description of Artificial Sequence: Synthetic oligonucleotide
  Sense strand starting at position 3805 of SEQ ID NO: 1881920
ggacauuaugcauggugca

SEQ ID NO: 2081229 - RNA, 19 nt, Artificial Sequence
  Description of Artificial Sequence: Synthetic oligonucleotide
  Antisense strand to SEQ ID NO: 2081228
ugcaccaugcauaaugucc

SEQ ID NO: 2081230 - RNA, 19 nt, Artificial Sequence
  Description of Artificial Sequence: Synthetic oligonucleotide
  Sense strand starting at position 3837 of SEQ ID NO: 1881920
gguccucugucugaaccuu

SEQ ID NO: 2081231 - RNA, 19 nt, Artificial Sequence
  Description of Artificial Sequence: Synthetic oligonucleotide
  Antisense strand to SEQ ID NO: 2081230
aagguucagacagaggacc

SEQ ID NO: 2081232 - RNA, 19 nt, Artificial Sequence
  Description of Artificial Sequence: Synthetic oligonucleotide
  Sense strand starting at position 3843 of SEQ ID NO: 1881920
cugucugaaccuugagcau

SEQ ID NO: 2081233 - RNA, 19 nt, Artificial Sequence
  Description of Artificial Sequence: Synthetic oligonucleotide
  Antisense strand to SEQ ID NO: 2081232
augcucaagguucagacag

SEQ ID NO: 2081234 - RNA, 19 nt, Artificial Sequence
  Description of Artificial Sequence: Synthetic oligonucleotide
  Sense strand starting at position 3922 of SEQ ID NO: 1881920
ggcugucuuugcucggaaa

SEQ ID NO: 2081235 - RNA, 19 nt, Artificial Sequence
  Description of Artificial Sequence: Synthetic oligonucleotide
  Antisense strand to SEQ ID NO: 2081234
uuuccgagcaaagacagcc

SEQ ID NO: 2081236 - RNA, 19 nt, Artificial Sequence
  Description of Artificial Sequence: Synthetic oligonucleotide
  Sense strand starting at position 3923 of SEQ ID NO: 1881920
gcugucuuugcucggaaag

SEQ ID NO: 2081237 - RNA, 19 nt, Artificial Sequence
  Description of Artificial Sequence: Synthetic oligonucleotide
  Antisense strand to SEQ ID NO: 2081236
cuuuccgagcaaagacagc

SEQ ID NO: 2081238 - RNA, 19 nt, Artificial Sequence
  Description of Artificial Sequence: Synthetic oligonucleotide
  Sense strand starting at position 3924 of SEQ ID NO: 1881920
cugucuuugcucggaaagu

SEQ ID NO: 2081239 - RNA, 19 nt, Artificial Sequence
  Description of Artificial Sequence: Synthetic oligonucleotide
  Antisense strand to SEQ ID NO: 2081238
acuuuccgagcaaagacag

SEQ ID NO: 2081240 - RNA, 19 nt, Artificial Sequence
  Description of Artificial Sequence: Synthetic oligonucleotide
  Sense strand starting at position 3947 of SEQ ID NO: 1881920
gcucauuucugcucuguag

SEQ ID NO: 2081241 - RNA, 19 nt, Artificial Sequence
  Description of Artificial Sequence: Synthetic oligonucleotide
  Antisense strand to SEQ ID NO: 2081240
cuacagagcagaaaugagc

SEQ ID NO: 2081242 - RNA, 19 nt, Artificial Sequence
  Description of Artificial Sequence: Synthetic oligonucleotide
  Sense strand starting at position 3949 of SEQ ID NO: 1881920
ucauuucugcucuguagca

SEQ ID NO: 2081243 - RNA, 19 nt, Artificial Sequence
  Description of Artificial Sequence: Synthetic oligonucleotide
  Antisense strand to SEQ ID NO: 2081242
ugcuacagagcagaaauga

SEQ ID NO: 2081244 - RNA, 19 nt, Artificial Sequence
  Description of Artificial Sequence: Synthetic oligonucleotide
  Sense strand starting at position 107 of SEQ ID NO: 1881921
cguguaauccucuguccag

SEQ ID NO: 2081245 - RNA, 19 nt, Artificial Sequence
  Description of Artificial Sequence: Synthetic oligonucleotide
  Antisense strand to SEQ ID NO: 2081244
cuggacagaggauuacacg

SEQ ID NO: 2081246 - RNA, 19 nt, Artificial Sequence
  Description of Artificial Sequence: Synthetic oligonucleotide
  Sense strand starting at position 110 of SEQ ID NO: 1881921
guaauccucuguccagcau

SEQ ID NO: 2081247 - RNA, 19 nt, Artificial Sequence
  Description of Artificial Sequence: Synthetic oligonucleotide
  Antisense strand to SEQ ID NO: 2081246
augcuggacagaggauuac

SEQ ID NO: 2081248 - RNA, 19 nt, Artificial Sequence
  Description of Artificial Sequence: Synthetic oligonucleotide
  Sense strand starting at position 147 of SEQ ID NO: 1881921
uuaggaguugcgggagcuu

SEQ ID NO: 2081249 - RNA, 19 nt, Artificial Sequence
  Description of Artificial Sequence: Synthetic oligonucleotide
  Antisense strand to SEQ ID NO: 2081248
aagcucccgcaacuccuaa

SEQ ID NO: 2081250 - RNA, 19 nt, Artificial Sequence
  Description of Artificial Sequence: Synthetic oligonucleotide
  Sense strand starting at position 440 of SEQ ID NO: 1881921
gugucagcgagcucuuagu

SEQ ID NO: 2081251 - RNA, 19 nt, Artificial Sequence
  Description of Artificial Sequence: Synthetic oligonucleotide
  Antisense strand to SEQ ID NO: 2081250
acuaagagcucgcugacac

SEQ ID NO: 2081252 - RNA, 19 nt, Artificial Sequence
  Description of Artificial Sequence: Synthetic oligonucleotide
  Sense strand starting at position 442 of SEQ ID NO: 1881921
gucagcgagcucuuaguua

SEQ ID NO: 2081253 - RNA, 19 nt, Artificial Sequence
  Description of Artificial Sequence: Synthetic oligonucleotide
  Antisense strand to SEQ ID NO: 2081252
uaacuaagagcucgcugac

SEQ ID NO: 2081254 - RNA, 19 nt, Artificial Sequence
  Description of Artificial Sequence: Synthetic oligonucleotide
  Sense strand starting at position 848 of SEQ ID NO: 1881921
uugcccauuugugugauga

SEQ ID NO: 2081255 - RNA, 19 nt, Artificial Sequence
  Description of Artificial Sequence: Synthetic oligonucleotide
  Antisense strand to SEQ ID NO: 2081254
ucaucacacaaaugggcaa

SEQ ID NO: 2081256 - RNA, 19 nt, Artificial Sequence
  Description of Artificial Sequence: Synthetic oligonucleotide
  Sense strand starting at position 849 of SEQ ID NO: 1881921
ugcccauuugugugaugau

SEQ ID NO: 2081257 - RNA, 19 nt, Artificial Sequence
  Description of Artificial Sequence: Synthetic oligonucleotide
  Antisense strand to SEQ ID NO: 2081256
aucaucacacaaaugggca

SEQ ID NO: 2081258 - RNA, 19 nt, Artificial Sequence
  Description of Artificial Sequence: Synthetic oligonucleotide
  Sense strand starting at position 941 of SEQ ID NO: 1881921
cucaaaguggcuuaagcaa

SEQ ID NO: 2081259 - RNA, 19 nt, Artificial Sequence
  Description of Artificial Sequence: Synthetic oligonucleotide
  Antisense strand to SEQ ID NO: 2081258
uugcuuaagccacuuugag

SEQ ID NO: 2081260 - RNA, 19 nt, Artificial Sequence
  Description of Artificial Sequence: Synthetic oligonucleotide
  Sense strand starting at position 1059 of SEQ ID NO: 1881921
ggccaucuaucagaggaac

SEQ ID NO: 2081261 - RNA, 19 nt, Artificial Sequence
  Description of Artificial Sequence: Synthetic oligonucleotide
  Antisense strand to SEQ ID NO: 2081260
guuccucugauagauggcc

SEQ ID NO: 2081262 - RNA, 19 nt, Artificial Sequence
  Description of Artificial Sequence: Synthetic oligonucleotide
  Sense strand starting at position 1136 of SEQ ID NO: 1881921
aguacccaugccugacaua

SEQ ID NO: 2081263 - RNA, 19 nt, Artificial Sequence
  Description of Artificial Sequence: Synthetic oligonucleotide
  Antisense strand to SEQ ID NO: 2081262
uaugucaggcauggguacu

SEQ ID NO: 2081264 - RNA, 19 nt, Artificial Sequence
  Description of Artificial Sequence: Synthetic oligonucleotide
  Sense strand starting at position 1137 of SEQ ID NO: 1881921
guacccaugccugacauaa

SEQ ID NO: 2081265 - RNA, 19 nt, Artificial Sequence
  Description of Artificial Sequence: Synthetic oligonucleotide
  Antisense strand to SEQ ID NO: 2081264
uuaugucaggcauggguac

SEQ ID NO: 2081266 - RNA, 19 nt, Artificial Sequence
  Description of Artificial Sequence: Synthetic oligonucleotide
  Sense strand starting at position 1197 of SEQ ID NO: 1881921
ccuggucugcaccagaaau

SEQ ID NO: 2081267 - RNA, 19 nt, Artificial Sequence
  Description of Artificial Sequence: Synthetic oligonucleotide
  Antisense strand to SEQ ID NO: 2081266
auuucuggugcagaccagg

SEQ ID NO: 2081268 - RNA, 19 nt, Artificial Sequence
  Description of Artificial Sequence: Synthetic oligonucleotide
  Sense strand starting at position 1207 of SEQ ID NO: 1881921
accagaaauuuguagaguc

SEQ ID NO: 2081269 - RNA, 19 nt, Artificial Sequence
  Description of Artificial Sequence: Synthetic oligonucleotide
  Antisense strand to SEQ ID NO: 2081268
gacucuacaaauuucuggu

SEQ ID NO: 2081270 - RNA, 19 nt, Artificial Sequence
  Description of Artificial Sequence: Synthetic oligonucleotide
  Sense strand starting at position 2000 of SEQ ID NO: 1881921
gugguuggucucugaucuu

SEQ ID NO: 2081271 - RNA, 19 nt, Artificial Sequence
  Description of Artificial Sequence: Synthetic oligonucleotide
  Antisense strand to SEQ ID NO: 2081270
aagaucagagaccaaccac

SEQ ID NO: 2081272 - RNA, 19 nt, Artificial Sequence
  Description of Artificial Sequence: Synthetic oligonucleotide
  Sense strand starting at position 2003 of SEQ ID NO: 1881921
guuggucucugaucuuuaa

SEQ ID NO: 2081273 - RNA, 19 nt, Artificial Sequence
  Description of Artificial Sequence: Synthetic oligonucleotide
  Antisense strand to SEQ ID NO: 2081272
uuaaagaucagagaccaac

SEQ ID NO: 2081274 - RNA, 19 nt, Artificial Sequence
  Description of Artificial Sequence: Synthetic oligonucleotide
  Sense strand starting at position 2426 of SEQ ID NO: 1881921
gagugcugugggugucaca

SEQ ID NO: 2081275 - RNA, 19 nt, Artificial Sequence
  Description of Artificial Sequence: Synthetic oligonucleotide
  Antisense strand to SEQ ID NO: 2081274
ugugacacccacagcacuc

SEQ ID NO: 2081276 - RNA, 19 nt, Artificial Sequence
  Description of Artificial Sequence: Synthetic oligonucleotide
  Sense strand starting at position 2444 of SEQ ID NO: 1881921
agcaucagguguuugcaaa

SEQ ID NO: 2081277 - RNA, 19 nt, Artificial Sequence
  Description of Artificial Sequence: Synthetic oligonucleotide
  Antisense strand to SEQ ID NO: 2081276
uuugcaaacaccugaugcu

SEQ ID NO: 2081278 - RNA, 19 nt, Artificial Sequence
  Description of Artificial Sequence: Synthetic oligonucleotide
  Sense strand starting at position 2445 of SEQ ID NO: 1881921
gcaucagguguuugcaaac

SEQ ID NO: 2081279 - RNA, 19 nt, Artificial Sequence
  Description of Artificial Sequence: Synthetic oligonucleotide
  Antisense strand to SEQ ID NO: 2081278
guuugcaaacaccugaugc

SEQ ID NO: 2081280 - RNA, 19 nt, Artificial Sequence
  Description of Artificial Sequence: Synthetic oligonucleotide
  Sense strand starting at position 2527 of SEQ ID NO: 1881921
aagccuauaccggaugaca

SEQ ID NO: 2081281 - RNA, 19 nt, Artificial Sequence
  Description of Artificial Sequence: Synthetic oligonucleotide
  Antisense strand to SEQ ID NO: 2081280
ugucauccgguauaggcuu

SEQ ID NO: 2081282 - RNA, 19 nt, Artificial Sequence
  Description of Artificial Sequence: Synthetic oligonucleotide
  Sense strand starting at position 2529 of SEQ ID NO: 1881921
gccuauaccggaugacaga

SEQ ID NO: 2081283 - RNA, 19 nt, Artificial Sequence
  Description of Artificial Sequence: Synthetic oligonucleotide
  Antisense strand to SEQ ID NO: 2081282
ucugucauccgguauaggc

SEQ ID NO: 2081284 - RNA, 19 nt, Artificial Sequence
  Description of Artificial Sequence: Synthetic oligonucleotide
  Sense strand starting at position 2599 of SEQ ID NO: 1881921
guuucauuggcuugggaac

SEQ ID NO: 2081285 - RNA, 19 nt, Artificial Sequence
  Description of Artificial Sequence: Synthetic oligonucleotide
  Antisense strand to SEQ ID NO: 2081284
guucccaagccaaugaaac

SEQ ID NO: 2081286 - RNA, 19 nt, Artificial Sequence
  Description of Artificial Sequence: Synthetic oligonucleotide
  Sense strand starting at position 2632 of SEQ ID NO: 1881921
uaaauuguguuucccagag

SEQ ID NO: 2081287 - RNA, 19 nt, Artificial Sequence
  Description of Artificial Sequence: Synthetic oligonucleotide
  Antisense strand to SEQ ID NO: 2081286
cucugggaaacacaauuua

SEQ ID NO: 2081288 - RNA, 19 nt, Artificial Sequence
  Description of Artificial Sequence: Synthetic oligonucleotide
  Sense strand starting at position 2636 of SEQ ID NO: 1881921
uuguguuucccagaguucu

SEQ ID NO: 2081289 - RNA, 19 nt, Artificial Sequence
  Description of Artificial Sequence: Synthetic oligonucleotide
  Antisense strand to SEQ ID NO: 2081288
agaacucugggaaacacaa

SEQ ID NO: 2081290 - RNA, 19 nt, Artificial Sequence
  Description of Artificial Sequence: Synthetic oligonucleotide
  Sense strand starting at position 2642 of SEQ ID NO: 1881921
uucccagaguucuuguaug

SEQ ID NO: 2081291 - RNA, 19 nt, Artificial Sequence
  Description of Artificial Sequence: Synthetic oligonucleotide
  Antisense strand to SEQ ID NO: 2081290
cauacaagaacucugggaa

SEQ ID NO: 2081292 - RNA, 19 nt, Artificial Sequence
  Description of Artificial Sequence: Synthetic oligonucleotide
  Sense strand starting at position 2724 of SEQ ID NO: 1881921
ugucaaucugcuggccuau

SEQ ID NO: 2081293 - RNA, 19 nt, Artificial Sequence
  Description of Artificial Sequence: Synthetic oligonucleotide
  Antisense strand to SEQ ID NO: 2081292
auaggccagcagauugaca

SEQ ID NO: 2081294 - RNA, 19 nt, Artificial Sequence
  Description of Artificial Sequence: Synthetic oligonucleotide
  Sense strand starting at position 2781 of SEQ ID NO: 1881921
gccucccgaucuuuaguaa

SEQ ID NO: 2081295 - RNA, 19 nt, Artificial Sequence
  Description of Artificial Sequence: Synthetic oligonucleotide
  Antisense strand to SEQ ID NO: 2081294
uuacuaaagaucgggaggc

SEQ ID NO: 2081296 - RNA, 19 nt, Artificial Sequence
  Description of Artificial Sequence: Synthetic oligonucleotide
  Sense strand starting at position 2782 of SEQ ID NO: 1881921
ccucccgaucuuuaguaaa

SEQ ID NO: 2081297 - RNA, 19 nt, Artificial Sequence
  Description of Artificial Sequence: Synthetic oligonucleotide
  Antisense strand to SEQ ID NO: 2081296
uuuacuaaagaucgggagg

SEQ ID NO: 2081298 - RNA, 19 nt, Artificial Sequence
  Description of Artificial Sequence: Synthetic oligonucleotide
  Sense strand starting at position 2864 of SEQ ID NO: 1881921
cuguguuucccagagaccu

SEQ ID NO: 2081299 - RNA, 19 nt, Artificial Sequence
  Description of Artificial Sequence: Synthetic oligonucleotide
  Antisense strand to SEQ ID NO: 2081298
aggucucugggaaacacag

SEQ ID NO: 2081300 - RNA, 19 nt, Artificial Sequence
  Description of Artificial Sequence: Synthetic oligonucleotide
  Sense strand starting at position 2889 of SEQ ID NO: 1881921
uugucacugagaugagucu

SEQ ID NO: 2081301 - RNA, 19 nt, Artificial Sequence
  Description of Artificial Sequence: Synthetic oligonucleotide
  Antisense strand to SEQ ID NO: 2081300
agacucaucucagugacaa

SEQ ID NO: 2081302 - RNA, 19 nt, Artificial Sequence
  Description of Artificial Sequence: Synthetic oligonucleotide
  Sense strand starting at position 2898 of SEQ ID NO: 1881921
agaugagucuaaucugaug

SEQ ID NO: 2081303 - RNA, 19 nt, Artificial Sequence
  Description of Artificial Sequence: Synthetic oligonucleotide
  Antisense strand to SEQ ID NO: 2081302
caucagauuagacucaucu

SEQ ID NO: 2081304 - RNA, 19 nt, Artificial Sequence
  Description of Artificial Sequence: Synthetic oligonucleotide
  Sense strand starting at position 2901 of SEQ ID NO: 1881921
ugagucuaaucugaugaua

SEQ ID NO: 2081305 - RNA, 19 nt, Artificial Sequence
  Description of Artificial Sequence: Synthetic oligonucleotide
  Antisense strand to SEQ ID NO: 2081304
uaucaucagauuagacuca

SEQ ID NO: 2081306 - RNA, 19 nt, Artificial Sequence
  Description of Artificial Sequence: Synthetic oligonucleotide
  Sense strand starting at position 2904 of SEQ ID NO: 1881921
gucuaaucugaugauaguu

SEQ ID NO: 2081307 - RNA, 19 nt, Artificial Sequence
  Description of Artificial Sequence: Synthetic oligonucleotide
  Antisense strand to SEQ ID NO: 2081306
aacuaucaucagauuagac

SEQ ID NO: 2081308 - RNA, 19 nt, Artificial Sequence
  Description of Artificial Sequence: Synthetic oligonucleotide
  Sense strand starting at position 3599 of SEQ ID NO: 1881921
ugguuuaguucugccaauu

SEQ ID NO: 2081309 - RNA, 19 nt, Artificial Sequence
  Description of Artificial Sequence: Synthetic oligonucleotide
  Antisense strand to SEQ ID NO: 2081308
aauuggcagaacuaaacca

SEQ ID NO: 2081310 - RNA, 19 nt, Artificial Sequence
  Description of Artificial Sequence: Synthetic oligonucleotide
  Sense strand starting at position 3633 of SEQ ID NO: 1881921
ccugucucuuguguaaaca

SEQ ID NO: 2081311 - RNA, 19 nt, Artificial Sequence
  Description of Artificial Sequence: Synthetic oligonucleotide
  Antisense strand to SEQ ID NO: 2081310
uguuuacacaagagacagg

SEQ ID NO: 2081312 - RNA, 19 nt, Artificial Sequence
  Description of Artificial Sequence: Synthetic oligonucleotide
  Sense strand starting at position 3634 of SEQ ID NO: 1881921
cugucucuuguguaaacaa

SEQ ID NO: 2081313 - RNA, 19 nt, Artificial Sequence
  Description of Artificial Sequence: Synthetic oligonucleotide
  Antisense strand to SEQ ID NO: 2081312
uuguuuacacaagagacag

SEQ ID NO: 2081314 - RNA, 19 nt, Artificial Sequence
  Description of Artificial Sequence: Synthetic oligonucleotide
  Sense strand starting at position 3653 of SEQ ID NO: 1881921
aggaauuguucugacacug

SEQ ID NO: 2081315 - RNA, 19 nt, Artificial Sequence
  Description of Artificial Sequence: Synthetic oligonucleotide
  Antisense strand to SEQ ID NO: 2081314
cagugucagaacaauuccu

SEQ ID NO: 2081316 - RNA, 19 nt, Artificial Sequence
  Description of Artificial Sequence: Synthetic oligonucleotide
  Sense strand starting at position 3658 of SEQ ID NO: 1881921
uuguucugacacugaacaa

SEQ ID NO: 2081317 - RNA, 19 nt, Artificial Sequence
  Description of Artificial Sequence: Synthetic oligonucleotide
  Antisense strand to SEQ ID NO: 2081316
uuguucagugucagaacaa

SEQ ID NO: 2081318 - RNA, 19 nt, Artificial Sequence
  Description of Artificial Sequence: Synthetic oligonucleotide
  Sense strand starting at position 3897 of SEQ ID NO: 1881921
guguguucucgugccagau

SEQ ID NO: 2081319 - RNA, 19 nt, Artificial Sequence
  Description of Artificial Sequence: Synthetic oligonucleotide
  Antisense strand to SEQ ID NO: 2081318
aucuggcacgagaacacac

SEQ ID NO: 2081320 - RNA, 19 nt, Artificial Sequence
  Description of Artificial Sequence: Synthetic oligonucleotide
  Sense strand starting at position 3898 of SEQ ID NO: 1881921
uguguucucgugccagaug

SEQ ID NO: 2081321 - RNA, 19 nt, Artificial Sequence
  Description of Artificial Sequence: Synthetic oligonucleotide
  Antisense strand to SEQ ID NO: 2081320
caucuggcacgagaacaca

SEQ ID NO: 2081322 - RNA, 19 nt, Artificial Sequence
  Description of Artificial Sequence: Synthetic oligonucleotide
  Sense strand starting at position 3965 of SEQ ID NO: 1881921
gaggcaacucugggauugu

SEQ ID NO: 2081323 - RNA, 19 nt, Artificial Sequence
  Description of Artificial Sequence: Synthetic oligonucleotide
  Antisense strand to SEQ ID NO: 2081322
acaaucccagaguugccuc

SEQ ID NO: 2081324 - RNA, 19 nt, Artificial Sequence
  Description of Artificial Sequence: Synthetic oligonucleotide
  Sense strand starting at position 222 of SEQ ID NO: 1881922
acuacugugucccuccaaa

SEQ ID NO: 2081325 - RNA, 19 nt, Artificial Sequence
  Description of Artificial Sequence: Synthetic oligonucleotide
  Antisense strand to SEQ ID NO: 2081324
uuuggagggacacaguagu

SEQ ID NO: 2081326 - RNA, 19 nt, Artificial Sequence
  Description of Artificial Sequence: Synthetic oligonucleotide
  Sense strand starting at position 254 of SEQ ID NO: 1881922
caagauuccugauugguua

SEQ ID NO: 2081327 - RNA, 19 nt, Artificial Sequence
  Description of Artificial Sequence: Synthetic oligonucleotide
  Antisense strand to SEQ ID NO: 2081326
uaaccaaucaggaaucuug

SEQ ID NO: 2081328 - RNA, 19 nt, Artificial Sequence
  Description of Artificial Sequence: Synthetic oligonucleotide
  Sense strand starting at position 289 of SEQ ID NO: 1881922
acuagauugaagugagagu

SEQ ID NO: 2081329 - RNA, 19 nt, Artificial Sequence
  Description of Artificial Sequence: Synthetic oligonucleotide
  Antisense strand to SEQ ID NO: 2081328
acucucacuucaaucuagu

SEQ ID NO: 2081330 - RNA, 19 nt, Artificial Sequence
  Description of Artificial Sequence: Synthetic oligonucleotide
  Sense strand starting at position 478 of SEQ ID NO: 1881922
gcaugugcuggaugggaaa

SEQ ID NO: 2081331 - RNA, 19 nt, Artificial Sequence
  Description of Artificial Sequence: Synthetic oligonucleotide
  Antisense strand to SEQ ID NO: 2081330
uuucccauccagcacaugc

SEQ ID NO: 2081332 - RNA, 19 nt, Artificial Sequence
  Description of Artificial Sequence: Synthetic oligonucleotide
  Sense strand starting at position 697 of SEQ ID NO: 1881922
guaaguucuccucagaaag

SEQ ID NO: 2081333 - RNA, 19 nt, Artificial Sequence
  Description of Artificial Sequence: Synthetic oligonucleotide
  Antisense strand to SEQ ID NO: 2081332
cuuucugaggagaacuuac

SEQ ID NO: 2081334 - RNA, 19 nt, Artificial Sequence
  Description of Artificial Sequence: Synthetic oligonucleotide
  Sense strand starting at position 720 of SEQ ID NO: 1881922
auggaacguagagguaaau

SEQ ID NO: 2081335 - RNA, 19 nt, Artificial Sequence
  Description of Artificial Sequence: Synthetic oligonucleotide
  Antisense strand to SEQ ID NO: 2081334
auuuaccucuacguuccau

SEQ ID NO: 2081336 - RNA, 19 nt, Artificial Sequence
  Description of Artificial Sequence: Synthetic oligonucleotide
  Sense strand starting at position 854 of SEQ ID NO: 1881922
uccugagggacuugguauu

SEQ ID NO: 2081337 - RNA, 19 nt, Artificial Sequence
  Description of Artificial Sequence: Synthetic oligonucleotide
  Antisense strand to SEQ ID NO: 2081336
aauaccaagucccucagga

SEQ ID NO: 2081338 - RNA, 19 nt, Artificial Sequence
  Description of Artificial Sequence: Synthetic oligonucleotide
  Sense strand starting at position 970 of SEQ ID NO: 1881922
acuaguauggguggugauu

SEQ ID NO: 2081339 - RNA, 19 nt, Artificial Sequence
  Description of Artificial Sequence: Synthetic oligonucleotide
  Antisense strand to SEQ ID NO: 2081338
aaucaccacccauacuagu

SEQ ID NO: 2081340 - RNA, 19 nt, Artificial Sequence
  Description of Artificial Sequence: Synthetic oligonucleotide
  Sense strand starting at position 1074 of SEQ ID NO: 1881922
gugccauauuugcugcaua

SEQ ID NO: 2081341 - RNA, 19 nt, Artificial Sequence
  Description of Artificial Sequence: Synthetic oligonucleotide
  Antisense strand to SEQ ID NO: 2081340
uaugcagcaaauauggcac

SEQ ID NO: 2081342 - RNA, 19 nt, Artificial Sequence
  Description of Artificial Sequence: Synthetic oligonucleotide
  Sense strand starting at position 1086 of SEQ ID NO: 1881922
cugcauacccauugugaga

SEQ ID NO: 2081343 - RNA, 19 nt, Artificial Sequence
  Description of Artificial Sequence: Synthetic oligonucleotide
  Antisense strand to SEQ ID NO: 2081342
ucucacaauggguaugcag

SEQ ID NO: 2081344 - RNA, 19 nt, Artificial Sequence
  Description of Artificial Sequence: Synthetic oligonucleotide
  Sense strand starting at position 1358 of SEQ ID NO: 1881922
ccacuuaugcgguaaaguu

SEQ ID NO: 2081345 - RNA, 19 nt, Artificial Sequence
  Description of Artificial Sequence: Synthetic oligonucleotide
  Antisense strand to SEQ ID NO: 2081344
aacuuuaccgcauaagugg

SEQ ID NO: 2081346 - RNA, 19 nt, Artificial Sequence
  Description of Artificial Sequence: Synthetic oligonucleotide
  Sense strand starting at position 1366 of SEQ ID NO: 1881922
gcgguaaaguugacugugu

SEQ ID NO: 2081347 - RNA, 19 nt, Artificial Sequence
  Description of Artificial Sequence: Synthetic oligonucleotide
  Antisense strand to SEQ ID NO: 2081346
acacagucaacuuuaccgc

SEQ ID NO: 2081348 - RNA, 19 nt, Artificial Sequence
  Description of Artificial Sequence: Synthetic oligonucleotide
  Sense strand starting at position 1368 of SEQ ID NO: 1881922
gguaaaguugacugugucu

SEQ ID NO: 2081349 - RNA, 19 nt, Artificial Sequence
  Description of Artificial Sequence: Synthetic oligonucleotide
  Antisense strand to SEQ ID NO: 2081348
agacacagucaacuuuacc

SEQ ID NO: 2081350 - RNA, 19 nt, Artificial Sequence
  Description of Artificial Sequence: Synthetic oligonucleotide
  Sense strand starting at position 1411 of SEQ ID NO: 1881922
ugcucagcucugugggaaa

SEQ ID NO: 2081351 - RNA, 19 nt, Artificial Sequence
  Description of Artificial Sequence: Synthetic oligonucleotide
  Antisense strand to SEQ ID NO: 2081350
uuucccacagagcugagca

SEQ ID NO: 2081352 - RNA, 19 nt, Artificial Sequence
  Description of Artificial Sequence: Synthetic oligonucleotide
  Sense strand starting at position 1545 of SEQ ID NO: 1881922
cgcauaggagacugacaua

SEQ ID NO: 2081353 - RNA, 19 nt, Artificial Sequence
  Description of Artificial Sequence: Synthetic oligonucleotide
  Antisense strand to SEQ ID NO: 2081352
uaugucagucuccuaugcg

SEQ ID NO: 2081354 - RNA, 19 nt, Artificial Sequence
  Description of Artificial Sequence: Synthetic oligonucleotide
  Sense strand starting at position 1755 of SEQ ID NO: 1881922
ccauaaccacauugguaga

SEQ ID NO: 2081355 - RNA, 19 nt, Artificial Sequence
  Description of Artificial Sequence: Synthetic oligonucleotide
  Antisense strand to SEQ ID NO: 2081354
ucuaccaaugugguuaugg

SEQ ID NO: 2081356 - RNA, 19 nt, Artificial Sequence
  Description of Artificial Sequence: Synthetic oligonucleotide
  Sense strand starting at position 1758 of SEQ ID NO: 1881922
uaaccacauugguagagaa

SEQ ID NO: 2081357 - RNA, 19 nt, Artificial Sequence
  Description of Artificial Sequence: Synthetic oligonucleotide
  Antisense strand to SEQ ID NO: 2081356
uucucuaccaaugugguua

SEQ ID NO: 2081358 - RNA, 19 nt, Artificial Sequence
  Description of Artificial Sequence: Synthetic oligonucleotide
  Sense strand starting at position 1825 of SEQ ID NO: 1881922
gauagugaggucugucuga

SEQ ID NO: 2081359 - RNA, 19 nt, Artificial Sequence
  Description of Artificial Sequence: Synthetic oligonucleotide
  Antisense strand to SEQ ID NO: 2081358
ucagacagaccucacuauc

SEQ ID NO: 2081360 - RNA, 19 nt, Artificial Sequence
  Description of Artificial Sequence: Synthetic oligonucleotide
  Sense strand starting at position 1832 of SEQ ID NO: 1881922
aggucugucugacccgaau

SEQ ID NO: 2081361 - RNA, 19 nt, Artificial Sequence
  Description of Artificial Sequence: Synthetic oligonucleotide
  Antisense strand to SEQ ID NO: 2081360
auucgggucagacagaccu

SEQ ID NO: 2081362 - RNA, 19 nt, Artificial Sequence
  Description of Artificial Sequence: Synthetic oligonucleotide
  Sense strand starting at position 1995 of SEQ ID NO: 1881922
ucguguuuaccguugggau

SEQ ID NO: 2081363 - RNA, 19 nt, Artificial Sequence
  Description of Artificial Sequence: Synthetic oligonucleotide
  Antisense strand to SEQ ID NO: 2081362
aucccaacgguaaacacga

SEQ ID NO: 2081364 - RNA, 19 nt, Artificial Sequence
  Description of Artificial Sequence: Synthetic oligonucleotide
  Sense strand starting at position 1997 of SEQ ID NO: 1881922
guguuuaccguugggauau

SEQ ID NO: 2081365 - RNA, 19 nt, Artificial Sequence
  Description of Artificial Sequence: Synthetic oligonucleotide
  Antisense strand to SEQ ID NO: 2081364
auaucccaacgguaaacac

SEQ ID NO: 2081366 - RNA, 19 nt, Artificial Sequence
  Description of Artificial Sequence: Synthetic oligonucleotide
  Sense strand starting at position 2023 of SEQ ID NO: 1881922
caaaguugagcuugacagu

SEQ ID NO: 2081367 - RNA, 19 nt, Artificial Sequence
  Description of Artificial Sequence: Synthetic oligonucleotide
  Antisense strand to SEQ ID NO: 2081366
acugucaagcucaacuuug

SEQ ID NO: 2081368 - RNA, 19 nt, Artificial Sequence
  Description of Artificial Sequence: Synthetic oligonucleotide
  Sense strand starting at position 2060 of SEQ ID NO: 1881922
gugggugguccacagaaca

SEQ ID NO: 2081369 - RNA, 19 nt, Artificial Sequence
  Description of Artificial Sequence: Synthetic oligonucleotide
  Antisense strand to SEQ ID NO: 2081368
uguucuguggaccacccac

SEQ ID NO: 2081370 - RNA, 19 nt, Artificial Sequence
  Description of Artificial Sequence: Synthetic oligonucleotide
  Sense strand starting at position 2136 of SEQ ID NO: 1881922
ccaucugcuucugcagaua

SEQ ID NO: 2081371 - RNA, 19 nt, Artificial Sequence
  Description of Artificial Sequence: Synthetic oligonucleotide
  Antisense strand to SEQ ID NO: 2081370
uaucugcagaagcagaugg

SEQ ID NO: 2081372 - RNA, 19 nt, Artificial Sequence
  Description of Artificial Sequence: Synthetic oligonucleotide
  Sense strand starting at position 2147 of SEQ ID NO: 1881922
ugcagauagucagcuguua

SEQ ID NO: 2081373 - RNA, 19 nt, Artificial Sequence
  Description of Artificial Sequence: Synthetic oligonucleotide
  Antisense strand to SEQ ID NO: 2081372
uaacagcugacuaucugca

SEQ ID NO: 2081374 - RNA, 19 nt, Artificial Sequence
  Description of Artificial Sequence: Synthetic oligonucleotide
  Sense strand starting at position 2155 of SEQ ID NO: 1881922
gucagcuguuaccuguaaa

SEQ ID NO: 2081375 - RNA, 19 nt, Artificial Sequence
  Description of Artificial Sequence: Synthetic oligonucleotide
  Antisense strand to SEQ ID NO: 2081374
uuuacagguaacagcugac

SEQ ID NO: 2081376 - RNA, 19 nt, Artificial Sequence
  Description of Artificial Sequence: Synthetic oligonucleotide
  Sense strand starting at position 2178 of SEQ ID NO: 1881922
accuacuggccuggagauu

SEQ ID NO: 2081377 - RNA, 19 nt, Artificial Sequence
  Description of Artificial Sequence: Synthetic oligonucleotide
  Antisense strand to SEQ ID NO: 2081376
aaucuccaggccaguaggu

SEQ ID NO: 2081378 - RNA, 19 nt, Artificial Sequence
  Description of Artificial Sequence: Synthetic oligonucleotide
  Sense strand starting at position 2193 of SEQ ID NO: 1881922
gauugaacugcacagugua

SEQ ID NO: 2081379 - RNA, 19 nt, Artificial Sequence
  Description of Artificial Sequence: Synthetic oligonucleotide
  Antisense strand to SEQ ID NO: 2081378
uacacugugcaguucaauc

SEQ ID NO: 2081380 - RNA, 19 nt, Artificial Sequence
  Description of Artificial Sequence: Synthetic oligonucleotide
  Sense strand starting at position 2196 of SEQ ID NO: 1881922
ugaacugcacaguguaaua

SEQ ID NO: 2081381 - RNA, 19 nt, Artificial Sequence
  Description of Artificial Sequence: Synthetic oligonucleotide
  Antisense strand to SEQ ID NO: 2081380
uauuacacugugcaguuca

SEQ ID NO: 2081382 - RNA, 19 nt, Artificial Sequence
  Description of Artificial Sequence: Synthetic oligonucleotide
  Sense strand starting at position 2252 of SEQ ID NO: 1881922
gagcuaagauuccugagac

SEQ ID NO: 2081383 - RNA, 19 nt, Artificial Sequence
  Description of Artificial Sequence: Synthetic oligonucleotide
  Antisense strand to SEQ ID NO: 2081382
gucucaggaaucuuagcuc

SEQ ID NO: 2081384 - RNA, 19 nt, Artificial Sequence
  Description of Artificial Sequence: Synthetic oligonucleotide
  Sense strand starting at position 2391 of SEQ ID NO: 1881922
auagaauccuugccacuga

SEQ ID NO: 2081385 - RNA, 19 nt, Artificial Sequence
  Description of Artificial Sequence: Synthetic oligonucleotide
  Antisense strand to SEQ ID NO: 2081384
ucaguggcaaggauucuau

SEQ ID NO: 2081386 - RNA, 19 nt, Artificial Sequence
  Description of Artificial Sequence: Synthetic oligonucleotide
  Sense strand starting at position 2528 of SEQ ID NO: 1881922
agagauaguuuaucuagau

SEQ ID NO: 2081387 - RNA, 19 nt, Artificial Sequence
  Description of Artificial Sequence: Synthetic oligonucleotide
  Antisense strand to SEQ ID NO: 2081386
aucuagauaaacuaucucu

SEQ ID NO: 2081388 - RNA, 19 nt, Artificial Sequence
  Description of Artificial Sequence: Synthetic oligonucleotide
  Sense strand starting at position 2529 of SEQ ID NO: 1881922
gagauaguuuaucuagaug

SEQ ID NO: 2081389 - RNA, 19 nt, Artificial Sequence
  Description of Artificial Sequence: Synthetic oligonucleotide
  Antisense strand to SEQ ID NO: 2081388
caucuagauaaacuaucuc

SEQ ID NO: 2081390 - RNA, 19 nt, Artificial Sequence
  Description of Artificial Sequence: Synthetic oligonucleotide
  Sense strand starting at position 2974 of SEQ ID NO: 1881922
gccuuugaggaguauggaa

SEQ ID NO: 2081391 - RNA, 19 nt, Artificial Sequence
  Description of Artificial Sequence: Synthetic oligonucleotide
  Antisense strand to SEQ ID NO: 2081390
uuccauacuccucaaaggc

SEQ ID NO: 2081392 - RNA, 19 nt, Artificial Sequence
  Description of Artificial Sequence: Synthetic oligonucleotide
  Sense strand starting at position 3020 of SEQ ID NO: 1881922
cauagcuauuucugaggga

SEQ ID NO: 2081393 - RNA, 19 nt, Artificial Sequence
  Description of Artificial Sequence: Synthetic oligonucleotide
  Antisense strand to SEQ ID NO: 2081392
ucccucagaaauagcuaug

SEQ ID NO: 2081394 - RNA, 19 nt, Artificial Sequence
  Description of Artificial Sequence: Synthetic oligonucleotide
  Sense strand starting at position 3023 of SEQ ID NO: 1881922
agcuauuucugagggagau

SEQ ID NO: 2081395 - RNA, 19 nt, Artificial Sequence
  Description of Artificial Sequence: Synthetic oligonucleotide
  Antisense strand to SEQ ID NO: 2081394
aucucccucagaaauagcu

SEQ ID NO: 2081396 - RNA, 19 nt, Artificial Sequence
  Description of Artificial Sequence: Synthetic oligonucleotide
  Sense strand starting at position 3095 of SEQ ID NO: 1881922
uuuccuuaggcuugguaga

SEQ ID NO: 2081397 - RNA, 19 nt, Artificial Sequence
  Description of Artificial Sequence: Synthetic oligonucleotide
  Antisense strand to SEQ ID NO: 2081396
ucuaccaagccuaaggaaa

SEQ ID NO: 2081398 - RNA, 19 nt, Artificial Sequence
  Description of Artificial Sequence: Synthetic oligonucleotide
  Sense strand starting at position 3096 of SEQ ID NO: 1881922
uuccuuaggcuugguagaa

SEQ ID NO: 2081399 - RNA, 19 nt, Artificial Sequence
  Description of Artificial Sequence: Synthetic oligonucleotide
  Antisense strand to SEQ ID NO: 2081398
uucuaccaagccuaaggaa

SEQ ID NO: 2081400 - RNA, 19 nt, Artificial Sequence
  Description of Artificial Sequence: Synthetic oligonucleotide
  Sense strand starting at position 3097 of SEQ ID NO: 1881922
uccuuaggcuugguagaaa

SEQ ID NO: 2081401 - RNA, 19 nt, Artificial Sequence
  Description of Artificial Sequence: Synthetic oligonucleotide
  Antisense strand to SEQ ID NO: 2081400
uuucuaccaagccuaagga

SEQ ID NO: 2081402 - RNA, 19 nt, Artificial Sequence
  Description of Artificial Sequence: Synthetic oligonucleotide
  Sense strand starting at position 3156 of SEQ ID NO: 1881922
acgcuuauagacuguuaau

SEQ ID NO: 2081403 - RNA, 19 nt, Artificial Sequence
  Description of Artificial Sequence: Synthetic oligonucleotide
  Antisense strand to SEQ ID NO: 2081402
auuaacagucuauaagcgu

SEQ ID NO: 2081404 - RNA, 19 nt, Artificial Sequence
  Description of Artificial Sequence: Synthetic oligonucleotide
  Sense strand starting at position 273 of SEQ ID NO: 1881923
cccuuucuucucuagcgau

SEQ ID NO: 2081405 - RNA, 19 nt, Artificial Sequence
  Description of Artificial Sequence: Synthetic oligonucleotide
  Antisense strand to SEQ ID NO: 2081404
aucgcuagagaagaaaggg

SEQ ID NO: 2081406 - RNA, 19 nt, Artificial Sequence
  Description of Artificial Sequence: Synthetic oligonucleotide
  Sense strand starting at position 280 of SEQ ID NO: 1881923
uucucuagcgaucacaaga

SEQ ID NO: 2081407 - RNA, 19 nt, Artificial Sequence
  Description of Artificial Sequence: Synthetic oligonucleotide
  Antisense strand to SEQ ID NO: 2081406
ucuugugaucgcuagagaa

SEQ ID NO: 2081408 - RNA, 19 nt, Artificial Sequence
  Description of Artificial Sequence: Synthetic oligonucleotide
  Sense strand starting at position 432 of SEQ ID NO: 1881923
agguuuacaagugaaagca

SEQ ID NO: 2081409 - RNA, 19 nt, Artificial Sequence
  Description of Artificial Sequence: Synthetic oligonucleotide
  Antisense strand to SEQ ID NO: 2081408
ugcuuucacuuguaaaccu

SEQ ID NO: 2081410 - RNA, 19 nt, Artificial Sequence
  Description of Artificial Sequence: Synthetic oligonucleotide
  Sense strand starting at position 569 of SEQ ID NO: 1881923
agcugucaaguuuaaucaa

SEQ ID NO: 2081411 - RNA, 19 nt, Artificial Sequence
  Description of Artificial Sequence: Synthetic oligonucleotide
  Antisense strand to SEQ ID NO: 2081410
uugauuaaacuugacagcu

SEQ ID NO: 2081412 - RNA, 19 nt, Artificial Sequence
  Description of Artificial Sequence: Synthetic oligonucleotide
  Sense strand starting at position 1006 of SEQ ID NO: 1881923
ucaccaauuccaggagcau

SEQ ID NO: 2081413 - RNA, 19 nt, Artificial Sequence
  Description of Artificial Sequence: Synthetic oligonucleotide
  Antisense strand to SEQ ID NO: 2081412
augcuccuggaauugguga

SEQ ID NO: 2081414 - RNA, 19 nt, Artificial Sequence
  Description of Artificial Sequence: Synthetic oligonucleotide
  Sense strand starting at position 1031 of SEQ ID NO: 1881923
ggaauaacccagugcuaua

SEQ ID NO: 2081415 - RNA, 19 nt, Artificial Sequence
  Description of Artificial Sequence: Synthetic oligonucleotide
  Antisense strand to SEQ ID NO: 2081414
uauagcacuggguuauucc

SEQ ID NO: 2081416 - RNA, 19 nt, Artificial Sequence
  Description of Artificial Sequence: Synthetic oligonucleotide
  Sense strand starting at position 1415 of SEQ ID NO: 1881923
ucccgugguagguauuagu

SEQ ID NO: 2081417 - RNA, 19 nt, Artificial Sequence
  Description of Artificial Sequence: Synthetic oligonucleotide
  Antisense strand to SEQ ID NO: 2081416
acuaauaccuaccacggga

SEQ ID NO: 2081418 - RNA, 19 nt, Artificial Sequence
  Description of Artificial Sequence: Synthetic oligonucleotide
  Sense strand starting at position 1497 of SEQ ID NO: 1881923
ggccuaaauaaguggcaga

SEQ ID NO: 2081419 - RNA, 19 nt, Artificial Sequence
  Description of Artificial Sequence: Synthetic oligonucleotide
  Antisense strand to SEQ ID NO: 2081418
ucugccacuuauuuaggcc

SEQ ID NO: 2081420 - RNA, 19 nt, Artificial Sequence
  Description of Artificial Sequence: Synthetic oligonucleotide
  Sense strand starting at position 1519 of SEQ ID NO: 1881923
cgagucuuagcauaccuuu

SEQ ID NO: 2081421 - RNA, 19 nt, Artificial Sequence
  Description of Artificial Sequence: Synthetic oligonucleotide
  Antisense strand to SEQ ID NO: 2081420
aaagguaugcuaagacucg

SEQ ID NO: 2081422 - RNA, 19 nt, Artificial Sequence
  Description of Artificial Sequence: Synthetic oligonucleotide
  Sense strand starting at position 1558 of SEQ ID NO: 1881923
gagcacaggugccuuuaaa

SEQ ID NO: 2081423 - RNA, 19 nt, Artificial Sequence
  Description of Artificial Sequence: Synthetic oligonucleotide
  Antisense strand to SEQ ID NO: 2081422
uuuaaaggcaccugugcuc

SEQ ID NO: 2081424 - RNA, 19 nt, Artificial Sequence
  Description of Artificial Sequence: Synthetic oligonucleotide
  Sense strand starting at position 1578 of SEQ ID NO: 1881923
gagcuuaaagucugagugu

SEQ ID NO: 2081425 - RNA, 19 nt, Artificial Sequence
  Description of Artificial Sequence: Synthetic oligonucleotide
  Antisense strand to SEQ ID NO: 2081424
acacucagacuuuaagcuc

SEQ ID NO: 2081426 - RNA, 19 nt, Artificial Sequence
  Description of Artificial Sequence: Synthetic oligonucleotide
  Sense strand starting at position 1581 of SEQ ID NO: 1881923
cuuaaagucugaguguaag

SEQ ID NO: 2081427 - RNA, 19 nt, Artificial Sequence
  Description of Artificial Sequence: Synthetic oligonucleotide
  Antisense strand to SEQ ID NO: 2081426
cuuacacucagacuuuaag

SEQ ID NO: 2081428 - RNA, 19 nt, Artificial Sequence
  Description of Artificial Sequence: Synthetic oligonucleotide
  Sense strand starting at position 1584 of SEQ ID NO: 1881923
aaagucugaguguaaguga

SEQ ID NO: 2081429 - RNA, 19 nt, Artificial Sequence
  Description of Artificial Sequence: Synthetic oligonucleotide
  Antisense strand to SEQ ID NO: 2081428
ucacuuacacucagacuuu

SEQ ID NO: 2081430 - RNA, 19 nt, Artificial Sequence
  Description of Artificial Sequence: Synthetic oligonucleotide
  Sense strand starting at position 1587 of SEQ ID NO: 1881923
gucugaguguaagugaaca

SEQ ID NO: 2081431 - RNA, 19 nt, Artificial Sequence
  Description of Artificial Sequence: Synthetic oligonucleotide
  Antisense strand to SEQ ID NO: 2081430
uguucacuuacacucagac

SEQ ID NO: 2081432 - RNA, 19 nt, Artificial Sequence
  Description of Artificial Sequence: Synthetic oligonucleotide
  Sense strand starting at position 1598 of SEQ ID NO: 1881923
agugaacagcccuaugcaa

SEQ ID NO: 2081433 - RNA, 19 nt, Artificial Sequence
  Description of Artificial Sequence: Synthetic oligonucleotide
  Antisense strand to SEQ ID NO: 2081432
uugcauagggcuguucacu

SEQ ID NO: 2081434 - RNA, 19 nt, Artificial Sequence
  Description of Artificial Sequence: Synthetic oligonucleotide
  Sense strand starting at position 1605 of SEQ ID NO: 1881923
agcccuaugcaagagaauu

SEQ ID NO: 2081435 - RNA, 19 nt, Artificial Sequence
  Description of Artificial Sequence: Synthetic oligonucleotide
  Antisense strand to SEQ ID NO: 2081434
aauucucuugcauagggcu

SEQ ID NO: 2081436 - RNA, 19 nt, Artificial Sequence
  Description of Artificial Sequence: Synthetic oligonucleotide
  Sense strand starting at position 1624 of SEQ ID NO: 1881923
ucagguacguaagauuuga

SEQ ID NO: 2081437 - RNA, 19 nt, Artificial Sequence
  Description of Artificial Sequence: Synthetic oligonucleotide
  Antisense strand to SEQ ID NO: 2081436
ucaaaucuuacguaccuga

SEQ ID NO: 2081438 - RNA, 19 nt, Artificial Sequence
  Description of Artificial Sequence: Synthetic oligonucleotide
  Sense strand starting at position 1629 of SEQ ID NO: 1881923
uacguaagauuugaugaaa

SEQ ID NO: 2081439 - RNA, 19 nt, Artificial Sequence
  Description of Artificial Sequence: Synthetic oligonucleotide
  Antisense strand to SEQ ID NO: 2081438
uuucaucaaaucuuacgua

SEQ ID NO: 2081440 - RNA, 19 nt, Artificial Sequence
  Description of Artificial Sequence: Synthetic oligonucleotide
  Sense strand starting at position 1665 of SEQ ID NO: 1881923
uuuggaaucuaucagauuu

SEQ ID NO: 2081441 - RNA, 19 nt, Artificial Sequence
  Description of Artificial Sequence: Synthetic oligonucleotide
  Antisense strand to SEQ ID NO: 2081440
aaaucugauagauuccaaa

SEQ ID NO: 2081442 - RNA, 19 nt, Artificial Sequence
  Description of Artificial Sequence: Synthetic oligonucleotide
  Sense strand starting at position 1682 of SEQ ID NO: 1881923
uuugguccauuguauuuaa

SEQ ID NO: 2081443 - RNA, 19 nt, Artificial Sequence
  Description of Artificial Sequence: Synthetic oligonucleotide
  Antisense strand to SEQ ID NO: 2081442
uuaaauacaauggaccaaa

SEQ ID NO: 2081444 - RNA, 19 nt, Artificial Sequence
  Description of Artificial Sequence: Synthetic oligonucleotide
  Sense strand starting at position 1786 of SEQ ID NO: 1881923
uuugauguauaagaggaau

SEQ ID NO: 2081445 - RNA, 19 nt, Artificial Sequence
  Description of Artificial Sequence: Synthetic oligonucleotide
  Antisense strand to SEQ ID NO: 2081444
auuccucuuauacaucaaa

SEQ ID NO: 2081446 - RNA, 19 nt, Artificial Sequence
  Description of Artificial Sequence: Synthetic oligonucleotide
  Sense strand starting at position 2045 of SEQ ID NO: 1881923
aaugaugaauggcuucgua

SEQ ID NO: 2081447 - RNA, 19 nt, Artificial Sequence
  Description of Artificial Sequence: Synthetic oligonucleotide
  Antisense strand to SEQ ID NO: 2081446
uacgaagccauucaucauu

SEQ ID NO: 2081448 - RNA, 19 nt, Artificial Sequence
  Description of Artificial Sequence: Synthetic oligonucleotide
  Sense strand starting at position 2048 of SEQ ID NO: 1881923
gaugaauggcuucguaucu

SEQ ID NO: 2081449 - RNA, 19 nt, Artificial Sequence
  Description of Artificial Sequence: Synthetic oligonucleotide
  Antisense strand to SEQ ID NO: 2081448
agauacgaagccauucauc

SEQ ID NO: 2081450 - RNA, 19 nt, Artificial Sequence
  Description of Artificial Sequence: Synthetic oligonucleotide
  Sense strand starting at position 2730 of SEQ ID NO: 1881923
gguaguccuccauagacaa

SEQ ID NO: 2081451 - RNA, 19 nt, Artificial Sequence
  Description of Artificial Sequence: Synthetic oligonucleotide
  Antisense strand to SEQ ID NO: 2081450
uugucuauggaggacuacc

SEQ ID NO: 2081452 - RNA, 19 nt, Artificial Sequence
  Description of Artificial Sequence: Synthetic oligonucleotide
  Sense strand starting at position 2850 of SEQ ID NO: 1881923
agccuaugguauucuauua

SEQ ID NO: 2081453 - RNA, 19 nt, Artificial Sequence
  Description of Artificial Sequence: Synthetic oligonucleotide
  Antisense strand to SEQ ID NO: 2081452
uaauagaauaccauaggcu

SEQ ID NO: 2081454 - RNA, 19 nt, Artificial Sequence
  Description of Artificial Sequence: Synthetic oligonucleotide
  Sense strand starting at position 2890 of SEQ ID NO: 1881923
acaguaugguuuguagcua

SEQ ID NO: 2081455 - RNA, 19 nt, Artificial Sequence
  Description of Artificial Sequence: Synthetic oligonucleotide
  Antisense strand to SEQ ID NO: 2081454
uagcuacaaaccauacugu

SEQ ID NO: 2081456 - RNA, 19 nt, Artificial Sequence
  Description of Artificial Sequence: Synthetic oligonucleotide
  Sense strand starting at position 2903 of SEQ ID NO: 1881923
uagcuagucugugugauuu

SEQ ID NO: 2081457 - RNA, 19 nt, Artificial Sequence
  Description of Artificial Sequence: Synthetic oligonucleotide
  Antisense strand to SEQ ID NO: 2081456
aaaucacacagacuagcua

SEQ ID NO: 2081458 - RNA, 19 nt, Artificial Sequence
  Description of Artificial Sequence: Synthetic oligonucleotide
  Sense strand starting at position 3138 of SEQ ID NO: 1881923
gccugaacugugcauuauu

SEQ ID NO: 2081459 - RNA, 19 nt, Artificial Sequence
  Description of Artificial Sequence: Synthetic oligonucleotide
  Antisense strand to SEQ ID NO: 2081458
aauaaugcacaguucaggc

SEQ ID NO: 2081460 - RNA, 19 nt, Artificial Sequence
  Description of Artificial Sequence: Synthetic oligonucleotide
  Sense strand starting at position 3231 of SEQ ID NO: 1881923
gcaugauugaggcagcuga

SEQ ID NO: 2081461 - RNA, 19 nt, Artificial Sequence
  Description of Artificial Sequence: Synthetic oligonucleotide
  Antisense strand to SEQ ID NO: 2081460
ucagcugccucaaucaugc

SEQ ID NO: 2081462 - RNA, 19 nt, Artificial Sequence
  Description of Artificial Sequence: Synthetic oligonucleotide
  Sense strand starting at position 3293 of SEQ ID NO: 1881923
gucuucagugaucaucgua

SEQ ID NO: 2081463 - RNA, 19 nt, Artificial Sequence
  Description of Artificial Sequence: Synthetic oligonucleotide
  Antisense strand to SEQ ID NO: 2081462
uacgaugaucacugaagac

SEQ ID NO: 2081464 - RNA, 19 nt, Artificial Sequence
  Description of Artificial Sequence: Synthetic oligonucleotide
  Sense strand starting at position 3361 of SEQ ID NO: 1881923
uggguuauagcuugaccua

SEQ ID NO: 2081465 - RNA, 19 nt, Artificial Sequence
  Description of Artificial Sequence: Synthetic oligonucleotide
  Antisense strand to SEQ ID NO: 2081464
uaggucaagcuauaaccca

SEQ ID NO: 2081466 - RNA, 19 nt, Artificial Sequence
  Description of Artificial Sequence: Synthetic oligonucleotide
  Sense strand starting at position 3362 of SEQ ID NO: 1881923
ggguuauagcuugaccuac

SEQ ID NO: 2081467 - RNA, 19 nt, Artificial Sequence
  Description of Artificial Sequence: Synthetic oligonucleotide
  Antisense strand to SEQ ID NO: 2081466
guaggucaagcuauaaccc

SEQ ID NO: 2081468 - RNA, 19 nt, Artificial Sequence
  Description of Artificial Sequence: Synthetic oligonucleotide
  Sense strand starting at position 3364 of SEQ ID NO: 1881923
guuauagcuugaccuacuu

SEQ ID NO: 2081469 - RNA, 19 nt, Artificial Sequence
  Description of Artificial Sequence: Synthetic oligonucleotide
  Antisense strand to SEQ ID NO: 2081468
aaguaggucaagcuauaac

SEQ ID NO: 2081470 - RNA, 19 nt, Artificial Sequence
  Description of Artificial Sequence: Synthetic oligonucleotide
  Sense strand starting at position 3387 of SEQ ID NO: 1881923
gcaguucucucacuagaaa

SEQ ID NO: 2081471 - RNA, 19 nt, Artificial Sequence
  Description of Artificial Sequence: Synthetic oligonucleotide
  Antisense strand to SEQ ID NO: 2081470
uuucuagugagagaacugc

SEQ ID NO: 2081472 - RNA, 19 nt, Artificial Sequence
  Description of Artificial Sequence: Synthetic oligonucleotide
  Sense strand starting at position 3752 of SEQ ID NO: 1881923
uucuauguauugccucuua

SEQ ID NO: 2081473 - RNA, 19 nt, Artificial Sequence
  Description of Artificial Sequence: Synthetic oligonucleotide
  Antisense strand to SEQ ID NO: 2081472
uaagaggcaauacauagaa

SEQ ID NO: 2081474 - RNA, 19 nt, Artificial Sequence
  Description of Artificial Sequence: Synthetic oligonucleotide
  Sense strand starting at position 3764 of SEQ ID NO: 1881923
ccucuuaugcugcaagauu

SEQ ID NO: 2081475 - RNA, 19 nt, Artificial Sequence
  Description of Artificial Sequence: Synthetic oligonucleotide
  Antisense strand to SEQ ID NO: 2081474
aaucuugcagcauaagagg

SEQ ID NO: 2081476 - RNA, 19 nt, Artificial Sequence
  Description of Artificial Sequence: Synthetic oligonucleotide
  Sense strand starting at position 3896 of SEQ ID NO: 1881923
cacagauuugugugccuau

SEQ ID NO: 2081477 - RNA, 19 nt, Artificial Sequence
  Description of Artificial Sequence: Synthetic oligonucleotide
  Antisense strand to SEQ ID NO: 2081476
auaggcacacaaaucugug

SEQ ID NO: 2081478 - RNA, 19 nt, Artificial Sequence
  Description of Artificial Sequence: Synthetic oligonucleotide
  Sense strand starting at position 3897 of SEQ ID NO: 1881923
acagauuugugugccuauu

SEQ ID NO: 2081479 - RNA, 19 nt, Artificial Sequence
  Description of Artificial Sequence: Synthetic oligonucleotide
  Antisense strand to SEQ ID NO: 2081478
aauaggcacacaaaucugu

SEQ ID NO: 2081480 - RNA, 19 nt, Artificial Sequence
  Description of Artificial Sequence: Synthetic oligonucleotide
  Sense strand starting at position 3903 of SEQ ID NO: 1881923
uugugugccuauuugauau

SEQ ID NO: 2081481 - RNA, 19 nt, Artificial Sequence
  Description of Artificial Sequence: Synthetic oligonucleotide
  Antisense strand to SEQ ID NO: 2081480
auaucaaauaggcacacaa

SEQ ID NO: 2081482 - RNA, 19 nt, Artificial Sequence
  Description of Artificial Sequence: Synthetic oligonucleotide
  Sense strand starting at position 3916 of SEQ ID NO: 1881923
ugauauaucuaagaugaag

SEQ ID NO: 2081483 - RNA, 19 nt, Artificial Sequence
  Description of Artificial Sequence: Synthetic oligonucleotide
  Antisense strand to SEQ ID NO: 2081482
cuucaucuuagauauauca

SEQ ID NO: 2081484 - RNA, 19 nt, Artificial Sequence
  Description of Artificial Sequence: Synthetic oligonucleotide
  Sense strand starting at position 20 of SEQ ID NO: 1881924
cucuguauucuguaauuaa

SEQ ID NO: 2081485 - RNA, 19 nt, Artificial Sequence
  Description of Artificial Sequence: Synthetic oligonucleotide
  Antisense strand to SEQ ID NO: 2081484
uuaauuacagaauacagag

SEQ ID NO: 2081486 - RNA, 19 nt, Artificial Sequence
  Description of Artificial Sequence: Synthetic oligonucleotide
  Sense strand starting at position 474 of SEQ ID NO: 1881924
uaugacuuagucuggaaag

SEQ ID NO: 2081487 - RNA, 19 nt, Artificial Sequence
  Description of Artificial Sequence: Synthetic oligonucleotide
  Antisense strand to SEQ ID NO: 2081486
cuuuccagacuaagucaua

SEQ ID NO: 2081488 - RNA, 19 nt, Artificial Sequence
  Description of Artificial Sequence: Synthetic oligonucleotide
  Sense strand starting at position 476 of SEQ ID NO: 1881924
ugacuuagucuggaaagca

SEQ ID NO: 2081489 - RNA, 19 nt, Artificial Sequence
  Description of Artificial Sequence: Synthetic oligonucleotide
  Antisense strand to SEQ ID NO: 2081488
ugcuuuccagacuaaguca

SEQ ID NO: 2081490 - RNA, 19 nt, Artificial Sequence
  Description of Artificial Sequence: Synthetic oligonucleotide
  Sense strand starting at position 484 of SEQ ID NO: 1881924
ucuggaaagcaauguacua

SEQ ID NO: 2081491 - RNA, 19 nt, Artificial Sequence
  Description of Artificial Sequence: Synthetic oligonucleotide
  Antisense strand to SEQ ID NO: 2081490
uaguacauugcuuuccaga

SEQ ID NO: 2081492 - RNA, 19 nt, Artificial Sequence
  Description of Artificial Sequence: Synthetic oligonucleotide
  Sense strand starting at position 528 of SEQ ID NO: 1881924
ggaagcaagucauuaagua

SEQ ID NO: 2081493 - RNA, 19 nt, Artificial Sequence
  Description of Artificial Sequence: Synthetic oligonucleotide
  Antisense strand to SEQ ID NO: 2081492
uacuuaaugacuugcuucc

SEQ ID NO: 2081494 - RNA, 19 nt, Artificial Sequence
  Description of Artificial Sequence: Synthetic oligonucleotide
  Sense strand starting at position 529 of SEQ ID NO: 1881924
gaagcaagucauuaaguau

SEQ ID NO: 2081495 - RNA, 19 nt, Artificial Sequence
  Description of Artificial Sequence: Synthetic oligonucleotide
  Antisense strand to SEQ ID NO: 2081494
auacuuaaugacuugcuuc

SEQ ID NO: 2081496 - RNA, 19 nt, Artificial Sequence
  Description of Artificial Sequence: Synthetic oligonucleotide
  Sense strand starting at position 535 of SEQ ID NO: 1881924
agucauuaaguauaagcca

SEQ ID NO: 2081497 - RNA, 19 nt, Artificial Sequence
  Description of Artificial Sequence: Synthetic oligonucleotide
  Antisense strand to SEQ ID NO: 2081496
uggcuuauacuuaaugacu

SEQ ID NO: 2081498 - RNA, 19 nt, Artificial Sequence
  Description of Artificial Sequence: Synthetic oligonucleotide
  Sense strand starting at position 599 of SEQ ID NO: 1881924
uaucaaauaguuugggaca

SEQ ID NO: 2081499 - RNA, 19 nt, Artificial Sequence
  Description of Artificial Sequence: Synthetic oligonucleotide
  Antisense strand to SEQ ID NO: 2081498
ugucccaaacuauuugaua

SEQ ID NO: 2081500 - RNA, 19 nt, Artificial Sequence
  Description of Artificial Sequence: Synthetic oligonucleotide
  Sense strand starting at position 671 of SEQ ID NO: 1881924
guauaugaugcccaucaac

SEQ ID NO: 2081501 - RNA, 19 nt, Artificial Sequence
  Description of Artificial Sequence: Synthetic oligonucleotide
  Antisense strand to SEQ ID NO: 2081500
guugaugggcaucauauac

SEQ ID NO: 2081502 - RNA, 19 nt, Artificial Sequence
  Description of Artificial Sequence: Synthetic oligonucleotide
  Sense strand starting at position 787 of SEQ ID NO: 1881924
gagagugcacuuuauuaag

SEQ ID NO: 2081503 - RNA, 19 nt, Artificial Sequence
  Description of Artificial Sequence: Synthetic oligonucleotide
  Antisense strand to SEQ ID NO: 2081502
cuuaauaaagugcacucuc

SEQ ID NO: 2081504 - RNA, 19 nt, Artificial Sequence
  Description of Artificial Sequence: Synthetic oligonucleotide
  Sense strand starting at position 828 of SEQ ID NO: 1881924
gccuguuacguacccagua

SEQ ID NO: 2081505 - RNA, 19 nt, Artificial Sequence
  Description of Artificial Sequence: Synthetic oligonucleotide
  Antisense strand to SEQ ID NO: 2081504
uacuggguacguaacaggc

SEQ ID NO: 2081506 - RNA, 19 nt, Artificial Sequence
  Description of Artificial Sequence: Synthetic oligonucleotide
  Sense strand starting at position 970 of SEQ ID NO: 1881924
caucauauuggagguuuaa

SEQ ID NO: 2081507 - RNA, 19 nt, Artificial Sequence
  Description of Artificial Sequence: Synthetic oligonucleotide
  Antisense strand to SEQ ID NO: 2081506
uuaaaccuccaauaugaug

SEQ ID NO: 2081508 - RNA, 19 nt, Artificial Sequence
  Description of Artificial Sequence: Synthetic oligonucleotide
  Sense strand starting at position 1043 of SEQ ID NO: 1881924
uuaccaauuuccguuguau

SEQ ID NO: 2081509 - RNA, 19 nt, Artificial Sequence
  Description of Artificial Sequence: Synthetic oligonucleotide
  Antisense strand to SEQ ID NO: 2081508
auacaacggaaauugguaa

SEQ ID NO: 2081510 - RNA, 19 nt, Artificial Sequence
  Description of Artificial Sequence: Synthetic oligonucleotide
  Sense strand starting at position 1045 of SEQ ID NO: 1881924
accaauuuccguuguauaa

SEQ ID NO: 2081511 - RNA, 19 nt, Artificial Sequence
  Description of Artificial Sequence: Synthetic oligonucleotide
  Antisense strand to SEQ ID NO: 2081510
uuauacaacggaaauuggu

SEQ ID NO: 2081512 - RNA, 19 nt, Artificial Sequence
  Description of Artificial Sequence: Synthetic oligonucleotide
  Sense strand starting at position 1066 of SEQ ID NO: 1881924
ggcccuaauuuacagagaa

SEQ ID NO: 2081513 - RNA, 19 nt, Artificial Sequence
  Description of Artificial Sequence: Synthetic oligonucleotide
  Antisense strand to SEQ ID NO: 2081512
uucucuguaaauuagggcc

SEQ ID NO: 2081514 - RNA, 19 nt, Artificial Sequence
  Description of Artificial Sequence: Synthetic oligonucleotide
  Sense strand starting at position 1175 of SEQ ID NO: 1881924
agaguuugaacccaguguu

SEQ ID NO: 2081515 - RNA, 19 nt, Artificial Sequence
  Description of Artificial Sequence: Synthetic oligonucleotide
  Antisense strand to SEQ ID NO: 2081514
aacacuggguucaaacucu

SEQ ID NO: 2081516 - RNA, 19 nt, Artificial Sequence
  Description of Artificial Sequence: Synthetic oligonucleotide
  Sense strand starting at position 1331 of SEQ ID NO: 1881924
agcuaauuggcugaccauu

SEQ ID NO: 2081517 - RNA, 19 nt, Artificial Sequence
  Description of Artificial Sequence: Synthetic oligonucleotide
  Antisense strand to SEQ ID NO: 2081516
aauggucagccaauuagcu

SEQ ID NO: 2081518 - RNA, 19 nt, Artificial Sequence
  Description of Artificial Sequence: Synthetic oligonucleotide
  Sense strand starting at position 1347 of SEQ ID NO: 1881924
auuuaagguugggaaauaa

SEQ ID NO: 2081519 - RNA, 19 nt, Artificial Sequence
  Description of Artificial Sequence: Synthetic oligonucleotide
  Antisense strand to SEQ ID NO: 2081518
uuauuucccaaccuuaaau

SEQ ID NO: 2081520 - RNA, 19 nt, Artificial Sequence
  Description of Artificial Sequence: Synthetic oligonucleotide
  Sense strand starting at position 1479 of SEQ ID NO: 1881924
agaacuacagucuguuaaa

SEQ ID NO: 2081521 - RNA, 19 nt, Artificial Sequence
  Description of Artificial Sequence: Synthetic oligonucleotide
  Antisense strand to SEQ ID NO: 2081520
uuuaacagacuguaguucu

SEQ ID NO: 2081522 - RNA, 19 nt, Artificial Sequence
  Description of Artificial Sequence: Synthetic oligonucleotide
  Sense strand starting at position 1733 of SEQ ID NO: 1881924
cagaguuaugcagacuuau

SEQ ID NO: 2081523 - RNA, 19 nt, Artificial Sequence
  Description of Artificial Sequence: Synthetic oligonucleotide
  Antisense strand to SEQ ID NO: 2081522
auaagucugcauaacucug

SEQ ID NO: 2081524 - RNA, 19 nt, Artificial Sequence
  Description of Artificial Sequence: Synthetic oligonucleotide
  Sense strand starting at position 1804 of SEQ ID NO: 1881924
gcuagcaacauguagaaga

SEQ ID NO: 2081525 - RNA, 19 nt, Artificial Sequence
  Description of Artificial Sequence: Synthetic oligonucleotide
  Antisense strand to SEQ ID NO: 2081524
ucuucuacauguugcuagc

SEQ ID NO: 2081526 - RNA, 19 nt, Artificial Sequence
  Description of Artificial Sequence: Synthetic oligonucleotide
  Sense strand starting at position 1833 of SEQ ID NO: 1881924
agaugaaauuggcuucucu

SEQ ID NO: 2081527 - RNA, 19 nt, Artificial Sequence
  Description of Artificial Sequence: Synthetic oligonucleotide
  Antisense strand to SEQ ID NO: 2081526
agagaagccaauuucaucu

SEQ ID NO: 2081528 - RNA, 19 nt, Artificial Sequence
  Description of Artificial Sequence: Synthetic oligonucleotide
  Sense strand starting at position 1841 of SEQ ID NO: 1881924
uuggcuucucuggaacaau

SEQ ID NO: 2081529 - RNA, 19 nt, Artificial Sequence
  Description of Artificial Sequence: Synthetic oligonucleotide
  Antisense strand to SEQ ID NO: 2081528
auuguuccagagaagccaa

SEQ ID NO: 2081530 - RNA, 19 nt, Artificial Sequence
  Description of Artificial Sequence: Synthetic oligonucleotide
  Sense strand starting at position 1844 of SEQ ID NO: 1881924
gcuucucuggaacaauagu

SEQ ID NO: 2081531 - RNA, 19 nt, Artificial Sequence
  Description of Artificial Sequence: Synthetic oligonucleotide
  Antisense strand to SEQ ID NO: 2081530
acuauuguuccagagaagc

SEQ ID NO: 2081532 - RNA, 19 nt, Artificial Sequence
  Description of Artificial Sequence: Synthetic oligonucleotide
  Sense strand starting at position 2006 of SEQ ID NO: 1881924
uuagguuaccauggagaca

SEQ ID NO: 2081533 - RNA, 19 nt, Artificial Sequence
  Description of Artificial Sequence: Synthetic oligonucleotide
  Antisense strand to SEQ ID NO: 2081532
ugucuccaugguaaccuaa

SEQ ID NO: 2081534 - RNA, 19 nt, Artificial Sequence
  Description of Artificial Sequence: Synthetic oligonucleotide
  Sense strand starting at position 2117 of SEQ ID NO: 1881924
auuggcucagguuaucaaa

SEQ ID NO: 2081535 - RNA, 19 nt, Artificial Sequence
  Description of Artificial Sequence: Synthetic oligonucleotide
  Antisense strand to SEQ ID NO: 2081534
uuugauaaccugagccaau

SEQ ID NO: 2081536 - RNA, 19 nt, Artificial Sequence
  Description of Artificial Sequence: Synthetic oligonucleotide
  Sense strand starting at position 2478 of SEQ ID NO: 1881924
cucugucuaggugacagau

SEQ ID NO: 2081537 - RNA, 19 nt, Artificial Sequence
  Description of Artificial Sequence: Synthetic oligonucleotide
  Antisense strand to SEQ ID NO: 2081536
aucugucaccuagacagag

SEQ ID NO: 2081538 - RNA, 19 nt, Artificial Sequence
  Description of Artificial Sequence: Synthetic oligonucleotide
  Sense strand starting at position 2576 of SEQ ID NO: 1881924
acuaaaugguuagcuauga

SEQ ID NO: 2081539 - RNA, 19 nt, Artificial Sequence
  Description of Artificial Sequence: Synthetic oligonucleotide
  Antisense strand to SEQ ID NO: 2081538
ucauagcuaaccauuuagu

SEQ ID NO: 2081540 - RNA, 19 nt, Artificial Sequence
  Description of Artificial Sequence: Synthetic oligonucleotide
  Sense strand starting at position 3237 of SEQ ID NO: 1881924
ugaguaaauaccuggcaag

SEQ ID NO: 2081541 - RNA, 19 nt, Artificial Sequence
  Description of Artificial Sequence: Synthetic oligonucleotide
  Antisense strand to SEQ ID NO: 2081540
cuugccagguauuuacuca

SEQ ID NO: 2081542 - RNA, 19 nt, Artificial Sequence
  Description of Artificial Sequence: Synthetic oligonucleotide
  Sense strand starting at position 3257 of SEQ ID NO: 1881924
gagagagugagccauguaa

SEQ ID NO: 2081543 - RNA, 19 nt, Artificial Sequence
  Description of Artificial Sequence: Synthetic oligonucleotide
  Antisense strand to SEQ ID NO: 2081542
uuacauggcucacucucuc

SEQ ID NO: 2081544 - RNA, 19 nt, Artificial Sequence
  Description of Artificial Sequence: Synthetic oligonucleotide
  Sense strand starting at position 3351 of SEQ ID NO: 1881924
cuaugagaagagugucuga

SEQ ID NO: 2081545 - RNA, 19 nt, Artificial Sequence
  Description of Artificial Sequence: Synthetic oligonucleotide
  Antisense strand to SEQ ID NO: 2081544
ucagacacucuucucauag

SEQ ID NO: 2081546 - RNA, 19 nt, Artificial Sequence
  Description of Artificial Sequence: Synthetic oligonucleotide
  Sense strand starting at position 3354 of SEQ ID NO: 1881924
ugagaagagugucugauga

SEQ ID NO: 2081547 - RNA, 19 nt, Artificial Sequence
  Description of Artificial Sequence: Synthetic oligonucleotide
  Antisense strand to SEQ ID NO: 2081546
ucaucagacacucuucuca

SEQ ID NO: 2081548 - RNA, 19 nt, Artificial Sequence
  Description of Artificial Sequence: Synthetic oligonucleotide
  Sense strand starting at position 3376 of SEQ ID NO: 1881924
gcaggucagagacauugua

SEQ ID NO: 2081549 - RNA, 19 nt, Artificial Sequence
  Description of Artificial Sequence: Synthetic oligonucleotide
  Antisense strand to SEQ ID NO: 2081548
uacaaugucucugaccugc

SEQ ID NO: 2081550 - RNA, 19 nt, Artificial Sequence
  Description of Artificial Sequence: Synthetic oligonucleotide
  Sense strand starting at position 3475 of SEQ ID NO: 1881924
cggaaauuaccaugaguug

SEQ ID NO: 2081551 - RNA, 19 nt, Artificial Sequence
  Description of Artificial Sequence: Synthetic oligonucleotide
  Antisense strand to SEQ ID NO: 2081550
caacucaugguaauuuccg

SEQ ID NO: 2081552 - RNA, 19 nt, Artificial Sequence
  Description of Artificial Sequence: Synthetic oligonucleotide
  Sense strand starting at position 3594 of SEQ ID NO: 1881924
guauguacucaguauauaa

SEQ ID NO: 2081553 - RNA, 19 nt, Artificial Sequence
  Description of Artificial Sequence: Synthetic oligonucleotide
  Antisense strand to SEQ ID NO: 2081552
uuauauacugaguacauac

SEQ ID NO: 2081554 - RNA, 19 nt, Artificial Sequence
  Description of Artificial Sequence: Synthetic oligonucleotide
  Sense strand starting at position 3596 of SEQ ID NO: 1881924
auguacucaguauauaacu

SEQ ID NO: 2081555 - RNA, 19 nt, Artificial Sequence
  Description of Artificial Sequence: Synthetic oligonucleotide
  Antisense strand to SEQ ID NO: 2081554
aguuauauacugaguacau

SEQ ID NO: 2081556 - RNA, 19 nt, Artificial Sequence
  Description of Artificial Sequence: Synthetic oligonucleotide
  Sense strand starting at position 3761 of SEQ ID NO: 1881924
uucucuguuccuuaaugag

SEQ ID NO: 2081557 - RNA, 19 nt, Artificial Sequence
  Description of Artificial Sequence: Synthetic oligonucleotide
  Antisense strand to SEQ ID NO: 2081556
cucauuaaggaacagagaa

SEQ ID NO: 2081558 - RNA, 19 nt, Artificial Sequence
  Description of Artificial Sequence: Synthetic oligonucleotide
  Sense strand starting at position 3851 of SEQ ID NO: 1881924
acauaauucuuccuggagu

SEQ ID NO: 2081559 - RNA, 19 nt, Artificial Sequence
  Description of Artificial Sequence: Synthetic oligonucleotide
  Antisense strand to SEQ ID NO: 2081558
acuccaggaagaauuaugu

SEQ ID NO: 2081560 - RNA, 19 nt, Artificial Sequence
  Description of Artificial Sequence: Synthetic oligonucleotide
  Sense strand starting at position 3879 of SEQ ID NO: 1881924
aguuguauuccauacacau

SEQ ID NO: 2081561 - RNA, 19 nt, Artificial Sequence
  Description of Artificial Sequence: Synthetic oligonucleotide
  Antisense strand to SEQ ID NO: 2081560
auguguauggaauacaacu

SEQ ID NO: 2081562 - RNA, 19 nt, Artificial Sequence
  Description of Artificial Sequence: Synthetic oligonucleotide
  Sense strand starting at position 3935 of SEQ ID NO: 1881924
auguaacaugaaugaaagu

SEQ ID NO: 2081563 - RNA, 19 nt, Artificial Sequence
  Description of Artificial Sequence: Synthetic oligonucleotide
  Antisense strand to SEQ ID NO: 2081562
acuuucauucauguuacau

SEQ ID NO: 2081564 - RNA, 19 nt, Artificial Sequence
  Description of Artificial Sequence: Synthetic oligonucleotide
  Sense strand starting at position 64 of SEQ ID NO: 1881925
uugugauguuagcugguga

SEQ ID NO: 2081565 - RNA, 19 nt, Artificial Sequence
  Description of Artificial Sequence: Synthetic oligonucleotide
  Antisense strand to SEQ ID NO: 2081564
ucaccagcuaacaucacaa

SEQ ID NO: 2081566 - RNA, 19 nt, Artificial Sequence
  Description of Artificial Sequence: Synthetic oligonucleotide
  Sense strand starting at position 1370 of SEQ ID NO: 1881925
gucugacgguucucagauc

SEQ ID NO: 2081567 - RNA, 19 nt, Artificial Sequence
  Description of Artificial Sequence: Synthetic oligonucleotide
  Antisense strand to SEQ ID NO: 2081566
gaucugagaaccgucagac

SEQ ID NO: 2081568 - RNA, 19 nt, Artificial Sequence
  Description of Artificial Sequence: Synthetic oligonucleotide
  Sense strand starting at position 1441 of SEQ ID NO: 1881925
acauuuaagucgcagaggu

SEQ ID NO: 2081569 - RNA, 19 nt, Artificial Sequence
  Description of Artificial Sequence: Synthetic oligonucleotide
  Antisense strand to SEQ ID NO: 2081568
accucugcgacuuaaaugu

SEQ ID NO: 2081570 - RNA, 19 nt, Artificial Sequence
  Description of Artificial Sequence: Synthetic oligonucleotide
  Sense strand starting at position 2077 of SEQ ID NO: 1881925
uguaucucguaaucaauug

SEQ ID NO: 2081571 - RNA, 19 nt, Artificial Sequence
  Description of Artificial Sequence: Synthetic oligonucleotide
  Antisense strand to SEQ ID NO: 2081570
caauugauuacgagauaca

SEQ ID NO: 2081572 - RNA, 19 nt, Artificial Sequence
  Description of Artificial Sequence: Synthetic oligonucleotide
  Sense strand starting at position 2085 of SEQ ID NO: 1881925
guaaucaauugaugacauc

SEQ ID NO: 2081573 - RNA, 19 nt, Artificial Sequence
  Description of Artificial Sequence: Synthetic oligonucleotide
  Antisense strand to SEQ ID NO: 2081572
gaugucaucaauugauuac

SEQ ID NO: 2081574 - RNA, 19 nt, Artificial Sequence
  Description of Artificial Sequence: Synthetic oligonucleotide
  Sense strand starting at position 2288 of SEQ ID NO: 1881925
cuuauauugcauugaugcu

SEQ ID NO: 2081575 - RNA, 19 nt, Artificial Sequence
  Description of Artificial Sequence: Synthetic oligonucleotide
  Antisense strand to SEQ ID NO: 2081574
agcaucaaugcaauauaag

SEQ ID NO: 2081576 - RNA, 19 nt, Artificial Sequence
  Description of Artificial Sequence: Synthetic oligonucleotide
  Sense strand starting at position 2295 of SEQ ID NO: 1881925
ugcauugaugcuggagaaa

SEQ ID NO: 2081577 - RNA, 19 nt, Artificial Sequence
  Description of Artificial Sequence: Synthetic oligonucleotide
  Antisense strand to SEQ ID NO: 2081576
uuucuccagcaucaaugca

SEQ ID NO: 2081578 - RNA, 19 nt, Artificial Sequence
  Description of Artificial Sequence: Synthetic oligonucleotide
  Sense strand starting at position 2434 of SEQ ID NO: 1881925
aaagaaaucuuaguagguu

SEQ ID NO: 2081579 - RNA, 19 nt, Artificial Sequence
  Description of Artificial Sequence: Synthetic oligonucleotide
  Antisense strand to SEQ ID NO: 2081578
aaccuacuaagauuucuuu

SEQ ID NO: 2081580 - RNA, 19 nt, Artificial Sequence
  Description of Artificial Sequence: Synthetic oligonucleotide
  Sense strand starting at position 2435 of SEQ ID NO: 1881925
aagaaaucuuaguagguuu

SEQ ID NO: 2081581 - RNA, 19 nt, Artificial Sequence
  Description of Artificial Sequence: Synthetic oligonucleotide
  Antisense strand to SEQ ID NO: 2081580
aaaccuacuaagauuucuu

SEQ ID NO: 2081582 - RNA, 19 nt, Artificial Sequence
  Description of Artificial Sequence: Synthetic oligonucleotide
  Sense strand starting at position 2438 of SEQ ID NO: 1881925
aaaucuuaguagguuuagu

SEQ ID NO: 2081583 - RNA, 19 nt, Artificial Sequence
  Description of Artificial Sequence: Synthetic oligonucleotide
  Antisense strand to SEQ ID NO: 2081582
acuaaaccuacuaagauuu

SEQ ID NO: 2081584 - RNA, 19 nt, Artificial Sequence
  Description of Artificial Sequence: Synthetic oligonucleotide
  Sense strand starting at position 2757 of SEQ ID NO: 1881925
gccugaauguauucuuucu

SEQ ID NO: 2081585 - RNA, 19 nt, Artificial Sequence
  Description of Artificial Sequence: Synthetic oligonucleotide
  Antisense strand to SEQ ID NO: 2081584
agaaagaauacauucaggc

SEQ ID NO: 2081586 - RNA, 19 nt, Artificial Sequence
  Description of Artificial Sequence: Synthetic oligonucleotide
  Sense strand starting at position 2763 of SEQ ID NO: 1881925
auguauucuuucuaaggaa

SEQ ID NO: 2081587 - RNA, 19 nt, Artificial Sequence
  Description of Artificial Sequence: Synthetic oligonucleotide
  Antisense strand to SEQ ID NO: 2081586
uuccuuagaaagaauacau

SEQ ID NO: 2081588 - RNA, 19 nt, Artificial Sequence
  Description of Artificial Sequence: Synthetic oligonucleotide
  Sense strand starting at position 2887 of SEQ ID NO: 1881925
augauagugcugcauuaag

SEQ ID NO: 2081589 - RNA, 19 nt, Artificial Sequence
  Description of Artificial Sequence: Synthetic oligonucleotide
  Antisense strand to SEQ ID NO: 2081588
cuuaaugcagcacuaucau

SEQ ID NO: 2081590 - RNA, 19 nt, Artificial Sequence
  Description of Artificial Sequence: Synthetic oligonucleotide
  Sense strand starting at position 3017 of SEQ ID NO: 1881925
auaugaagaugugaugauu

SEQ ID NO: 2081591 - RNA, 19 nt, Artificial Sequence
  Description of Artificial Sequence: Synthetic oligonucleotide
  Antisense strand to SEQ ID NO: 2081590
aaucaucacaucuucauau

SEQ ID NO: 2081592 - RNA, 19 nt, Artificial Sequence
  Description of Artificial Sequence: Synthetic oligonucleotide
  Sense strand starting at position 3092 of SEQ ID NO: 1881925
auccaaguguugccaugaa

SEQ ID NO: 2081593 - RNA, 19 nt, Artificial Sequence
  Description of Artificial Sequence: Synthetic oligonucleotide
  Antisense strand to SEQ ID NO: 2081592
uucauggcaacacuuggau

SEQ ID NO: 2081594 - RNA, 19 nt, Artificial Sequence
  Description of Artificial Sequence: Synthetic oligonucleotide
  Sense strand starting at position 3096 of SEQ ID NO: 1881925
aaguguugccaugaaggca

SEQ ID NO: 2081595 - RNA, 19 nt, Artificial Sequence
  Description of Artificial Sequence: Synthetic oligonucleotide
  Antisense strand to SEQ ID NO: 2081594
ugccuucauggcaacacuu

SEQ ID NO: 2081596 - RNA, 19 nt, Artificial Sequence
  Description of Artificial Sequence: Synthetic oligonucleotide
  Sense strand starting at position 3123 of SEQ ID NO: 1881925
guuauuaaaguccacaauc

SEQ ID NO: 2081597 - RNA, 19 nt, Artificial Sequence
  Description of Artificial Sequence: Synthetic oligonucleotide
  Antisense strand to SEQ ID NO: 2081596
gauuguggacuuuaauaac

SEQ ID NO: 2081598 - RNA, 19 nt, Artificial Sequence
  Description of Artificial Sequence: Synthetic oligonucleotide
  Sense strand starting at position 3158 of SEQ ID NO: 1881925
gggagauuauacuacauaa

SEQ ID NO: 2081599 - RNA, 19 nt, Artificial Sequence
  Description of Artificial Sequence: Synthetic oligonucleotide
  Antisense strand to SEQ ID NO: 2081598
uuauguaguauaaucuccc

SEQ ID NO: 2081600 - RNA, 19 nt, Artificial Sequence
  Description of Artificial Sequence: Synthetic oligonucleotide
  Sense strand starting at position 3171 of SEQ ID NO: 1881925
acauaaucugagugggcuu

SEQ ID NO: 2081601 - RNA, 19 nt, Artificial Sequence
  Description of Artificial Sequence: Synthetic oligonucleotide
  Antisense strand to SEQ ID NO: 2081600
aagcccacucagauuaugu

SEQ ID NO: 2081602 - RNA, 19 nt, Artificial Sequence
  Description of Artificial Sequence: Synthetic oligonucleotide
  Sense strand starting at position 3174 of SEQ ID NO: 1881925
uaaucugagugggcuugau

SEQ ID NO: 2081603 - RNA, 19 nt, Artificial Sequence
  Description of Artificial Sequence: Synthetic oligonucleotide
  Antisense strand to SEQ ID NO: 2081602
aucaagcccacucagauua

SEQ ID NO: 2081604 - RNA, 19 nt, Artificial Sequence
  Description of Artificial Sequence: Synthetic oligonucleotide
  Sense strand starting at position 3249 of SEQ ID NO: 1881925
aagcaagcccuaugaggua

SEQ ID NO: 2081605 - RNA, 19 nt, Artificial Sequence
  Description of Artificial Sequence: Synthetic oligonucleotide
  Antisense strand to SEQ ID NO: 2081604
uaccucauagggcuugcuu

SEQ ID NO: 2081606 - RNA, 19 nt, Artificial Sequence
  Description of Artificial Sequence: Synthetic oligonucleotide
  Sense strand starting at position 3424 of SEQ ID NO: 1881925
uuaggucuauuucuugcaa

SEQ ID NO: 2081607 - RNA, 19 nt, Artificial Sequence
  Description of Artificial Sequence: Synthetic oligonucleotide
  Antisense strand to SEQ ID NO: 2081606
uugcaagaaauagaccuaa

SEQ ID NO: 2081608 - RNA, 19 nt, Artificial Sequence
  Description of Artificial Sequence: Synthetic oligonucleotide
  Sense strand starting at position 3426 of SEQ ID NO: 1881925
aggucuauuucuugcaaua

SEQ ID NO: 2081609 - RNA, 19 nt, Artificial Sequence
  Description of Artificial Sequence: Synthetic oligonucleotide
  Antisense strand to SEQ ID NO: 2081608
uauugcaagaaauagaccu

SEQ ID NO: 2081610 - RNA, 19 nt, Artificial Sequence
  Description of Artificial Sequence: Synthetic oligonucleotide
  Sense strand starting at position 3482 of SEQ ID NO: 1881925
cuaguugaacccugacuua

SEQ ID NO: 2081611 - RNA, 19 nt, Artificial Sequence
  Description of Artificial Sequence: Synthetic oligonucleotide
  Antisense strand to SEQ ID NO: 2081610
uaagucaggguucaacuag

SEQ ID NO: 2081612 - RNA, 19 nt, Artificial Sequence
  Description of Artificial Sequence: Synthetic oligonucleotide
  Sense strand starting at position 3485 of SEQ ID NO: 1881925
guugaacccugacuuaaua

SEQ ID NO: 2081613 - RNA, 19 nt, Artificial Sequence
  Description of Artificial Sequence: Synthetic oligonucleotide
  Antisense strand to SEQ ID NO: 2081612
uauuaagucaggguucaac

SEQ ID NO: 2081614 - RNA, 19 nt, Artificial Sequence
  Description of Artificial Sequence: Synthetic oligonucleotide
  Sense strand starting at position 3497 of SEQ ID NO: 1881925
cuuaauauaugagaagcaa

SEQ ID NO: 2081615 - RNA, 19 nt, Artificial Sequence
  Description of Artificial Sequence: Synthetic oligonucleotide
  Antisense strand to SEQ ID NO: 2081614
uugcuucucauauauuaag

SEQ ID NO: 2081616 - RNA, 19 nt, Artificial Sequence
  Description of Artificial Sequence: Synthetic oligonucleotide
  Sense strand starting at position 3547 of SEQ ID NO: 1881925
cuaccaauuguaugguuua

SEQ ID NO: 2081617 - RNA, 19 nt, Artificial Sequence
  Description of Artificial Sequence: Synthetic oligonucleotide
  Antisense strand to SEQ ID NO: 2081616
uaaaccauacaauugguag

SEQ ID NO: 2081618 - RNA, 19 nt, Artificial Sequence
  Description of Artificial Sequence: Synthetic oligonucleotide
  Sense strand starting at position 3557 of SEQ ID NO: 1881925
uaugguuuaguggaaaugu

SEQ ID NO: 2081619 - RNA, 19 nt, Artificial Sequence
  Description of Artificial Sequence: Synthetic oligonucleotide
  Antisense strand to SEQ ID NO: 2081618
acauuuccacuaaaccaua

SEQ ID NO: 2081620 - RNA, 19 nt, Artificial Sequence
  Description of Artificial Sequence: Synthetic oligonucleotide
  Sense strand starting at position 3579 of SEQ ID NO: 1881925
aggagaagcuaagugauua

SEQ ID NO: 2081621 - RNA, 19 nt, Artificial Sequence
  Description of Artificial Sequence: Synthetic oligonucleotide
  Antisense strand to SEQ ID NO: 2081620
uaaucacuuagcuucuccu

SEQ ID NO: 2081622 - RNA, 19 nt, Artificial Sequence
  Description of Artificial Sequence: Synthetic oligonucleotide
  Sense strand starting at position 3580 of SEQ ID NO: 1881925
ggagaagcuaagugauuac

SEQ ID NO: 2081623 - RNA, 19 nt, Artificial Sequence
  Description of Artificial Sequence: Synthetic oligonucleotide
  Antisense strand to SEQ ID NO: 2081622
guaaucacuuagcuucucc

SEQ ID NO: 2081624 - RNA, 19 nt, Artificial Sequence
  Description of Artificial Sequence: Synthetic oligonucleotide
  Sense strand starting at position 3583 of SEQ ID NO: 1881925
gaagcuaagugauuacaag

SEQ ID NO: 2081625 - RNA, 19 nt, Artificial Sequence
  Description of Artificial Sequence: Synthetic oligonucleotide
  Antisense strand to SEQ ID NO: 2081624
cuuguaaucacuuagcuuc

SEQ ID NO: 2081626 - RNA, 19 nt, Artificial Sequence
  Description of Artificial Sequence: Synthetic oligonucleotide
  Sense strand starting at position 3647 of SEQ ID NO: 1881925
gaguguuacgaguaagaaa

SEQ ID NO: 2081627 - RNA, 19 nt, Artificial Sequence
  Description of Artificial Sequence: Synthetic oligonucleotide
  Antisense strand to SEQ ID NO: 2081626
uuucuuacucguaacacuc

SEQ ID NO: 2081628 - RNA, 19 nt, Artificial Sequence
  Description of Artificial Sequence: Synthetic oligonucleotide
  Sense strand starting at position 3682 of SEQ ID NO: 1881925
gaaguuuaauuugagaguu

SEQ ID NO: 2081629 - RNA, 19 nt, Artificial Sequence
  Description of Artificial Sequence: Synthetic oligonucleotide
  Antisense strand to SEQ ID NO: 2081628
aacucucaaauuaaacuuc

SEQ ID NO: 2081630 - RNA, 19 nt, Artificial Sequence
  Description of Artificial Sequence: Synthetic oligonucleotide
  Sense strand starting at position 3684 of SEQ ID NO: 1881925
aguuuaauuugagaguuga

SEQ ID NO: 2081631 - RNA, 19 nt, Artificial Sequence
  Description of Artificial Sequence: Synthetic oligonucleotide
  Antisense strand to SEQ ID NO: 2081630
ucaacucucaaauuaaacu

SEQ ID NO: 2081632 - RNA, 19 nt, Artificial Sequence
  Description of Artificial Sequence: Synthetic oligonucleotide
  Sense strand starting at position 3755 of SEQ ID NO: 1881925
caggcaguacagugauaaa

SEQ ID NO: 2081633 - RNA, 19 nt, Artificial Sequence
  Description of Artificial Sequence: Synthetic oligonucleotide
  Antisense strand to SEQ ID NO: 2081632
uuuaucacuguacugccug

SEQ ID NO: 2081634 - RNA, 19 nt, Artificial Sequence
  Description of Artificial Sequence: Synthetic oligonucleotide
  Sense strand starting at position 3835 of SEQ ID NO: 1881925
auggaagacugguagaaac

SEQ ID NO: 2081635 - RNA, 19 nt, Artificial Sequence
  Description of Artificial Sequence: Synthetic oligonucleotide
  Antisense strand to SEQ ID NO: 2081634
guuucuaccagucuuccau

SEQ ID NO: 2081636 - RNA, 19 nt, Artificial Sequence
  Description of Artificial Sequence: Synthetic oligonucleotide
  Sense strand starting at position 3882 of SEQ ID NO: 1881925
agguggagugcugagagau

SEQ ID NO: 2081637 - RNA, 19 nt, Artificial Sequence
  Description of Artificial Sequence: Synthetic oligonucleotide
  Antisense strand to SEQ ID NO: 2081636
aucucucagcacuccaccu

SEQ ID NO: 2081638 - RNA, 19 nt, Artificial Sequence
  Description of Artificial Sequence: Synthetic oligonucleotide
  Sense strand starting at position 3922 of SEQ ID NO: 1881925
aagcuagaucaugaagucu

SEQ ID NO: 2081639 - RNA, 19 nt, Artificial Sequence
  Description of Artificial Sequence: Synthetic oligonucleotide
  Antisense strand to SEQ ID NO: 2081638
agacuucaugaucuagcuu

SEQ ID NO: 2081640 - RNA, 19 nt, Artificial Sequence
  Description of Artificial Sequence: Synthetic oligonucleotide
  Sense strand starting at position 3930 of SEQ ID NO: 1881925
ucaugaagucuugagaguc

SEQ ID NO: 2081641 - RNA, 19 nt, Artificial Sequence
  Description of Artificial Sequence: Synthetic oligonucleotide
  Antisense strand to SEQ ID NO: 2081640
gacucucaagacuucauga

SEQ ID NO: 2081642 - RNA, 19 nt, Artificial Sequence
  Description of Artificial Sequence: Synthetic oligonucleotide
  Sense strand starting at position 3936 of SEQ ID NO: 1881925
agucuugagagucauguca

SEQ ID NO: 2081643 - RNA, 19 nt, Artificial Sequence
  Description of Artificial Sequence: Synthetic oligonucleotide
  Antisense strand to SEQ ID NO: 2081642
ugacaugacucucaagacu

SEQ ID NO: 2081644 - RNA, 19 nt, Artificial Sequence
  Description of Artificial Sequence: Synthetic oligonucleotide
  Sense strand starting at position 12 of SEQ ID NO: 1881926
aggccuuugaaaggcauua

SEQ ID NO: 2081645 - RNA, 19 nt, Artificial Sequence
  Description of Artificial Sequence: Synthetic oligonucleotide
  Antisense strand to SEQ ID NO: 2081644
uaaugccuuucaaaggccu

SEQ ID NO: 2081646 - RNA, 19 nt, Artificial Sequence
  Description of Artificial Sequence: Synthetic oligonucleotide
  Sense strand starting at position 14 of SEQ ID NO: 1881926
gccuuugaaaggcauuaug

SEQ ID NO: 2081647 - RNA, 19 nt, Artificial Sequence
  Description of Artificial Sequence: Synthetic oligonucleotide
  Antisense strand to SEQ ID NO: 2081646
cauaaugccuuucaaaggc

SEQ ID NO: 2081648 - RNA, 19 nt, Artificial Sequence
  Description of Artificial Sequence: Synthetic oligonucleotide
  Sense strand starting at position 17 of SEQ ID NO: 1881926
uuugaaaggcauuaugcau

SEQ ID NO: 2081649 - RNA, 19 nt, Artificial Sequence
  Description of Artificial Sequence: Synthetic oligonucleotide
  Antisense strand to SEQ ID NO: 2081648
augcauaaugccuuucaaa

SEQ ID NO: 2081650 - RNA, 19 nt, Artificial Sequence
  Description of Artificial Sequence: Synthetic oligonucleotide
  Sense strand starting at position 23 of SEQ ID NO: 1881926
aggcauuaugcauggaaga

SEQ ID NO: 2081651 - RNA, 19 nt, Artificial Sequence
  Description of Artificial Sequence: Synthetic oligonucleotide
  Antisense strand to SEQ ID NO: 2081650
ucuuccaugcauaaugccu

SEQ ID NO: 2081652 - RNA, 19 nt, Artificial Sequence
  Description of Artificial Sequence: Synthetic oligonucleotide
  Sense strand starting at position 24 of SEQ ID NO: 1881926
ggcauuaugcauggaagaa

SEQ ID NO: 2081653 - RNA, 19 nt, Artificial Sequence
  Description of Artificial Sequence: Synthetic oligonucleotide
  Antisense strand to SEQ ID NO: 2081652
uucuuccaugcauaaugcc

SEQ ID NO: 2081654 - RNA, 19 nt, Artificial Sequence
  Description of Artificial Sequence: Synthetic oligonucleotide
  Sense strand starting at position 947 of SEQ ID NO: 1881926
ugugaaguguucccuaaua

SEQ ID NO: 2081655 - RNA, 19 nt, Artificial Sequence
  Description of Artificial Sequence: Synthetic oligonucleotide
  Antisense strand to SEQ ID NO: 2081654
uauuagggaacacuucaca

SEQ ID NO: 2081656 - RNA, 19 nt, Artificial Sequence
  Description of Artificial Sequence: Synthetic oligonucleotide
  Sense strand starting at position 949 of SEQ ID NO: 1881926
ugaaguguucccuaauagg

SEQ ID NO: 2081657 - RNA, 19 nt, Artificial Sequence
  Description of Artificial Sequence: Synthetic oligonucleotide
  Antisense strand to SEQ ID NO: 2081656
ccuauuagggaacacuuca

SEQ ID NO: 2081658 - RNA, 19 nt, Artificial Sequence
  Description of Artificial Sequence: Synthetic oligonucleotide
  Sense strand starting at position 1024 of SEQ ID NO: 1881926
ucuggauucugucucauag

SEQ ID NO: 2081659 - RNA, 19 nt, Artificial Sequence
  Description of Artificial Sequence: Synthetic oligonucleotide
  Antisense strand to SEQ ID NO: 2081658
cuaugagacagaauccaga

SEQ ID NO: 2081660 - RNA, 19 nt, Artificial Sequence
  Description of Artificial Sequence: Synthetic oligonucleotide
  Sense strand starting at position 1079 of SEQ ID NO: 1881926
ggcuguagcgcuucaucca

SEQ ID NO: 2081661 - RNA, 19 nt, Artificial Sequence
  Description of Artificial Sequence: Synthetic oligonucleotide
  Antisense strand to SEQ ID NO: 2081660
uggaugaagcgcuacagcc

SEQ ID NO: 2081662 - RNA, 19 nt, Artificial Sequence
  Description of Artificial Sequence: Synthetic oligonucleotide
  Sense strand starting at position 1601 of SEQ ID NO: 1881926
uugcucuuuccaggauaug

SEQ ID NO: 2081663 - RNA, 19 nt, Artificial Sequence
  Description of Artificial Sequence: Synthetic oligonucleotide
  Antisense strand to SEQ ID NO: 2081662
cauauccuggaaagagcaa

SEQ ID NO: 2081664 - RNA, 19 nt, Artificial Sequence
  Description of Artificial Sequence: Synthetic oligonucleotide
  Sense strand starting at position 1602 of SEQ ID NO: 1881926
ugcucuuuccaggauaugu

SEQ ID NO: 2081665 - RNA, 19 nt, Artificial Sequence
  Description of Artificial Sequence: Synthetic oligonucleotide
  Antisense strand to SEQ ID NO: 2081664
acauauccuggaaagagca

SEQ ID NO: 2081666 - RNA, 19 nt, Artificial Sequence
  Description of Artificial Sequence: Synthetic oligonucleotide
  Sense strand starting at position 1604 of SEQ ID NO: 1881926
cucuuuccaggauauguga

SEQ ID NO: 2081667 - RNA, 19 nt, Artificial Sequence
  Description of Artificial Sequence: Synthetic oligonucleotide
  Antisense strand to SEQ ID NO: 2081666
ucacauauccuggaaagag

SEQ ID NO: 2081668 - RNA, 19 nt, Artificial Sequence
  Description of Artificial Sequence: Synthetic oligonucleotide
  Sense strand starting at position 1663 of SEQ ID NO: 1881926
uggcuuaucccagaaaucu

SEQ ID NO: 2081669 - RNA, 19 nt, Artificial Sequence
  Description of Artificial Sequence: Synthetic oligonucleotide
  Antisense strand to SEQ ID NO: 2081668
agauuucugggauaagcca

SEQ ID NO: 2081670 - RNA, 19 nt, Artificial Sequence
  Description of Artificial Sequence: Synthetic oligonucleotide
  Sense strand starting at position 1671 of SEQ ID NO: 1881926
cccagaaaucugcaugguc

SEQ ID NO: 2081671 - RNA, 19 nt, Artificial Sequence
  Description of Artificial Sequence: Synthetic oligonucleotide
  Antisense strand to SEQ ID NO: 2081670
gaccaugcagauuucuggg

SEQ ID NO: 2081672 - RNA, 19 nt, Artificial Sequence
  Description of Artificial Sequence: Synthetic oligonucleotide
  Sense strand starting at position 2052 of SEQ ID NO: 1881926
uugcauuugugauuccauc

SEQ ID NO: 2081673 - RNA, 19 nt, Artificial Sequence
  Description of Artificial Sequence: Synthetic oligonucleotide
  Antisense strand to SEQ ID NO: 2081672
gauggaaucacaaaugcaa

SEQ ID NO: 2081674 - RNA, 19 nt, Artificial Sequence
  Description of Artificial Sequence: Synthetic oligonucleotide
  Sense strand starting at position 2063 of SEQ ID NO: 1881926
auuccaucucccuggaaug

SEQ ID NO: 2081675 - RNA, 19 nt, Artificial Sequence
  Description of Artificial Sequence: Synthetic oligonucleotide
  Antisense strand to SEQ ID NO: 2081674
cauuccagggagauggaau

SEQ ID NO: 2081676 - RNA, 19 nt, Artificial Sequence
  Description of Artificial Sequence: Synthetic oligonucleotide
  Sense strand starting at position 2138 of SEQ ID NO: 1881926
gacuuucuugaccaucgua

SEQ ID NO: 2081677 - RNA, 19 nt, Artificial Sequence
  Description of Artificial Sequence: Synthetic oligonucleotide
  Antisense strand to SEQ ID NO: 2081676
uacgauggucaagaaaguc

SEQ ID NO: 2081678 - RNA, 19 nt, Artificial Sequence
  Description of Artificial Sequence: Synthetic oligonucleotide
  Sense strand starting at position 2252 of SEQ ID NO: 1881926
cuguuauguguucuuagcu

SEQ ID NO: 2081679 - RNA, 19 nt, Artificial Sequence
  Description of Artificial Sequence: Synthetic oligonucleotide
  Antisense strand to SEQ ID NO: 2081678
agcuaagaacacauaacag

SEQ ID NO: 2081680 - RNA, 19 nt, Artificial Sequence
  Description of Artificial Sequence: Synthetic oligonucleotide
  Sense strand starting at position 2259 of SEQ ID NO: 1881926
guguucuuagcucccugua

SEQ ID NO: 2081681 - RNA, 19 nt, Artificial Sequence
  Description of Artificial Sequence: Synthetic oligonucleotide
  Antisense strand to SEQ ID NO: 2081680
uacagggagcuaagaacac

SEQ ID NO: 2081682 - RNA, 19 nt, Artificial Sequence
  Description of Artificial Sequence: Synthetic oligonucleotide
  Sense strand starting at position 2463 of SEQ ID NO: 1881926
cccgcauguaagcucgaua

SEQ ID NO: 2081683 - RNA, 19 nt, Artificial Sequence
  Description of Artificial Sequence: Synthetic oligonucleotide
  Antisense strand to SEQ ID NO: 2081682
uaucgagcuuacaugcggg

SEQ ID NO: 2081684 - RNA, 19 nt, Artificial Sequence
  Description of Artificial Sequence: Synthetic oligonucleotide
  Sense strand starting at position 2464 of SEQ ID NO: 1881926
ccgcauguaagcucgauau

SEQ ID NO: 2081685 - RNA, 19 nt, Artificial Sequence
  Description of Artificial Sequence: Synthetic oligonucleotide
  Antisense strand to SEQ ID NO: 2081684
auaucgagcuuacaugcgg

SEQ ID NO: 2081686 - RNA, 19 nt, Artificial Sequence
  Description of Artificial Sequence: Synthetic oligonucleotide
  Sense strand starting at position 2516 of SEQ ID NO: 1881926
gugggugcucaagaauagu

SEQ ID NO: 2081687 - RNA, 19 nt, Artificial Sequence
  Description of Artificial Sequence: Synthetic oligonucleotide
  Antisense strand to SEQ ID NO: 2081686
acuauucuugagcacccac

SEQ ID NO: 2081688 - RNA, 19 nt, Artificial Sequence
  Description of Artificial Sequence: Synthetic oligonucleotide
  Sense strand starting at position 2522 of SEQ ID NO: 1881926
gcucaagaauaguuguaga

SEQ ID NO: 2081689 - RNA, 19 nt, Artificial Sequence
  Description of Artificial Sequence: Synthetic oligonucleotide
  Antisense strand to SEQ ID NO: 2081688
ucuacaacuauucuugagc

SEQ ID NO: 2081690 - RNA, 19 nt, Artificial Sequence
  Description of Artificial Sequence: Synthetic oligonucleotide
  Sense strand starting at position 2555 of SEQ ID NO: 1881926
gauagaggccuuuggauau

SEQ ID NO: 2081691 - RNA, 19 nt, Artificial Sequence
  Description of Artificial Sequence: Synthetic oligonucleotide
  Antisense strand to SEQ ID NO: 2081690
auauccaaaggccucuauc

SEQ ID NO: 2081692 - RNA, 19 nt, Artificial Sequence
  Description of Artificial Sequence: Synthetic oligonucleotide
  Sense strand starting at position 2640 of SEQ ID NO: 1881926
guaugaauuggccagugag

SEQ ID NO: 2081693 - RNA, 19 nt, Artificial Sequence
  Description of Artificial Sequence: Synthetic oligonucleotide
  Antisense strand to SEQ ID NO: 2081692
cucacuggccaauucauac

SEQ ID NO: 2081694 - RNA, 19 nt, Artificial Sequence
  Description of Artificial Sequence: Synthetic oligonucleotide
  Sense strand starting at position 2643 of SEQ ID NO: 1881926
ugaauuggccagugaggaa

SEQ ID NO: 2081695 - RNA, 19 nt, Artificial Sequence
  Description of Artificial Sequence: Synthetic oligonucleotide
  Antisense strand to SEQ ID NO: 2081694
uuccucacuggccaauuca

SEQ ID NO: 2081696 - RNA, 19 nt, Artificial Sequence
  Description of Artificial Sequence: Synthetic oligonucleotide
  Sense strand starting at position 2659 of SEQ ID NO: 1881926
gaauuaucuuaugugaagu

SEQ ID NO: 2081697 - RNA, 19 nt, Artificial Sequence
  Description of Artificial Sequence: Synthetic oligonucleotide
  Antisense strand to SEQ ID NO: 2081696
acuucacauaagauaauuc

SEQ ID NO: 2081698 - RNA, 19 nt, Artificial Sequence
  Description of Artificial Sequence: Synthetic oligonucleotide
  Sense strand starting at position 2669 of SEQ ID NO: 1881926
augugaaguuuacugcuaa

SEQ ID NO: 2081699 - RNA, 19 nt, Artificial Sequence
  Description of Artificial Sequence: Synthetic oligonucleotide
  Antisense strand to SEQ ID NO: 2081698
uuagcaguaaacuucacau

SEQ ID NO: 2081700 - RNA, 19 nt, Artificial Sequence
  Description of Artificial Sequence: Synthetic oligonucleotide
  Sense strand starting at position 2738 of SEQ ID NO: 1881926
uguucuuagggucauaaug

SEQ ID NO: 2081701 - RNA, 19 nt, Artificial Sequence
  Description of Artificial Sequence: Synthetic oligonucleotide
  Antisense strand to SEQ ID NO: 2081700
cauuaugacccuaagaaca

SEQ ID NO: 2081702 - RNA, 19 nt, Artificial Sequence
  Description of Artificial Sequence: Synthetic oligonucleotide
  Sense strand starting at position 2879 of SEQ ID NO: 1881926
aagacuuccucugucugga

SEQ ID NO: 2081703 - RNA, 19 nt, Artificial Sequence
  Description of Artificial Sequence: Synthetic oligonucleotide
  Antisense strand to SEQ ID NO: 2081702
uccagacagaggaagucuu

SEQ ID NO: 2081704 - RNA, 19 nt, Artificial Sequence
  Description of Artificial Sequence: Synthetic oligonucleotide
  Sense strand starting at position 2950 of SEQ ID NO: 1881926
ccgcuaaagccucagaucu

SEQ ID NO: 2081705 - RNA, 19 nt, Artificial Sequence
  Description of Artificial Sequence: Synthetic oligonucleotide
  Antisense strand to SEQ ID NO: 2081704
agaucugaggcuuuagcgg

SEQ ID NO: 2081706 - RNA, 19 nt, Artificial Sequence
  Description of Artificial Sequence: Synthetic oligonucleotide
  Sense strand starting at position 2999 of SEQ ID NO: 1881926
agguuaaugugcccucaaa

SEQ ID NO: 2081707 - RNA, 19 nt, Artificial Sequence
  Description of Artificial Sequence: Synthetic oligonucleotide
  Antisense strand to SEQ ID NO: 2081706
uuugagggcacauuaaccu

SEQ ID NO: 2081708 - RNA, 19 nt, Artificial Sequence
  Description of Artificial Sequence: Synthetic oligonucleotide
  Sense strand starting at position 3050 of SEQ ID NO: 1881926
ccagguguggccuaacaug

SEQ ID NO: 2081709 - RNA, 19 nt, Artificial Sequence
  Description of Artificial Sequence: Synthetic oligonucleotide
  Antisense strand to SEQ ID NO: 2081708
cauguuaggccacaccugg

SEQ ID NO: 2081710 - RNA, 19 nt, Artificial Sequence
  Description of Artificial Sequence: Synthetic oligonucleotide
  Sense strand starting at position 3059 of SEQ ID NO: 1881926
gccuaacauguguuugugu

SEQ ID NO: 2081711 - RNA, 19 nt, Artificial Sequence
  Description of Artificial Sequence: Synthetic oligonucleotide
  Antisense strand to SEQ ID NO: 2081710
acacaaacacauguuaggc

SEQ ID NO: 2081712 - RNA, 19 nt, Artificial Sequence
  Description of Artificial Sequence: Synthetic oligonucleotide
  Sense strand starting at position 3548 of SEQ ID NO: 1881926
ucaaguuuaguguaaggca

SEQ ID NO: 2081713 - RNA, 19 nt, Artificial Sequence
  Description of Artificial Sequence: Synthetic oligonucleotide
  Antisense strand to SEQ ID NO: 2081712
ugccuuacacuaaacuuga

SEQ ID NO: 2081714 - RNA, 19 nt, Artificial Sequence
  Description of Artificial Sequence: Synthetic oligonucleotide
  Sense strand starting at position 3565 of SEQ ID NO: 1881926
cagugaagguaauuguuaa

SEQ ID NO: 2081715 - RNA, 19 nt, Artificial Sequence
  Description of Artificial Sequence: Synthetic oligonucleotide
  Antisense strand to SEQ ID NO: 2081714
uuaacaauuaccuucacug

SEQ ID NO: 2081716 - RNA, 19 nt, Artificial Sequence
  Description of Artificial Sequence: Synthetic oligonucleotide
  Sense strand starting at position 3566 of SEQ ID NO: 1881926
agugaagguaauuguuaaa

SEQ ID NO: 2081717 - RNA, 19 nt, Artificial Sequence
  Description of Artificial Sequence: Synthetic oligonucleotide
  Antisense strand to SEQ ID NO: 2081716
uuuaacaauuaccuucacu

SEQ ID NO: 2081718 - RNA, 19 nt, Artificial Sequence
  Description of Artificial Sequence: Synthetic oligonucleotide
  Sense strand starting at position 3643 of SEQ ID NO: 1881926
gaugcuguaguguagacaa

SEQ ID NO: 2081719 - RNA, 19 nt, Artificial Sequence
  Description of Artificial Sequence: Synthetic oligonucleotide
  Antisense strand to SEQ ID NO: 2081718
uugucuacacuacagcauc

SEQ ID NO: 2081720 - RNA, 19 nt, Artificial Sequence
  Description of Artificial Sequence: Synthetic oligonucleotide
  Sense strand starting at position 3747 of SEQ ID NO: 1881926
caggcaucaucguuauuug

SEQ ID NO: 2081721 - RNA, 19 nt, Artificial Sequence
  Description of Artificial Sequence: Synthetic oligonucleotide
  Antisense strand to SEQ ID NO: 2081720
caaauaacgaugaugccug

SEQ ID NO: 2081722 - RNA, 19 nt, Artificial Sequence
  Description of Artificial Sequence: Synthetic oligonucleotide
  Sense strand starting at position 3830 of SEQ ID NO: 1881926
acaacaucauguggaauuu

SEQ ID NO: 2081723 - RNA, 19 nt, Artificial Sequence
  Description of Artificial Sequence: Synthetic oligonucleotide
  Antisense strand to SEQ ID NO: 2081722
aaauuccacaugauguugu

SEQ ID NO: 2081724 - RNA, 19 nt, Artificial Sequence
  Description of Artificial Sequence: Synthetic oligonucleotide
  Sense strand starting at position 152 of SEQ ID NO: 1881927
acuguacagcuuuacuaga

SEQ ID NO: 2081725 - RNA, 19 nt, Artificial Sequence
  Description of Artificial Sequence: Synthetic oligonucleotide
  Antisense strand to SEQ ID NO: 2081724
ucuaguaaagcuguacagu

SEQ ID NO: 2081726 - RNA, 19 nt, Artificial Sequence
  Description of Artificial Sequence: Synthetic oligonucleotide
  Sense strand starting at position 325 of SEQ ID NO: 1881927
uucuaaugacucuggucau

SEQ ID NO: 2081727 - RNA, 19 nt, Artificial Sequence
  Description of Artificial Sequence: Synthetic oligonucleotide
  Antisense strand to SEQ ID NO: 2081726
augaccagagucauuagaa

SEQ ID NO: 2081728 - RNA, 19 nt, Artificial Sequence
  Description of Artificial Sequence: Synthetic oligonucleotide
  Sense strand starting at position 331 of SEQ ID NO: 1881927
ugacucuggucaucaaaug

SEQ ID NO: 2081729 - RNA, 19 nt, Artificial Sequence
  Description of Artificial Sequence: Synthetic oligonucleotide
  Antisense strand to SEQ ID NO: 2081728
cauuugaugaccagaguca

SEQ ID NO: 2081730 - RNA, 19 nt, Artificial Sequence
  Description of Artificial Sequence: Synthetic oligonucleotide
  Sense strand starting at position 339 of SEQ ID NO: 1881927
gucaucaaaugcuuuggau

SEQ ID NO: 2081731 - RNA, 19 nt, Artificial Sequence
  Description of Artificial Sequence: Synthetic oligonucleotide
  Antisense strand to SEQ ID NO: 2081730
auccaaagcauuugaugac

SEQ ID NO: 2081732 - RNA, 19 nt, Artificial Sequence
  Description of Artificial Sequence: Synthetic oligonucleotide
  Sense strand starting at position 394 of SEQ ID NO: 1881927
ucugaaaggucacugccau

SEQ ID NO: 2081733 - RNA, 19 nt, Artificial Sequence
  Description of Artificial Sequence: Synthetic oligonucleotide
  Antisense strand to SEQ ID NO: 2081732
auggcagugaccuuucaga

SEQ ID NO: 2081734 - RNA, 19 nt, Artificial Sequence
  Description of Artificial Sequence: Synthetic oligonucleotide
  Sense strand starting at position 395 of SEQ ID NO: 1881927
cugaaaggucacugccauu

SEQ ID NO: 2081735 - RNA, 19 nt, Artificial Sequence
  Description of Artificial Sequence: Synthetic oligonucleotide
  Antisense strand to SEQ ID NO: 2081734
aauggcagugaccuuucag

SEQ ID NO: 2081736 - RNA, 19 nt, Artificial Sequence
  Description of Artificial Sequence: Synthetic oligonucleotide
  Sense strand starting at position 454 of SEQ ID NO: 1881927
acaggagcucccuacuauu

SEQ ID NO: 2081737 - RNA, 19 nt, Artificial Sequence
  Description of Artificial Sequence: Synthetic oligonucleotide
  Antisense strand to SEQ ID NO: 2081736
aauaguagggagcuccugu

SEQ ID NO: 2081738 - RNA, 19 nt, Artificial Sequence
  Description of Artificial Sequence: Synthetic oligonucleotide
  Sense strand starting at position 775 of SEQ ID NO: 1881927
ggaaacaaaugagaggaua

SEQ ID NO: 2081739 - RNA, 19 nt, Artificial Sequence
  Description of Artificial Sequence: Synthetic oligonucleotide
  Antisense strand to SEQ ID NO: 2081738
uauccucucauuuguuucc

SEQ ID NO: 2081740 - RNA, 19 nt, Artificial Sequence
  Description of Artificial Sequence: Synthetic oligonucleotide
  Sense strand starting at position 860 of SEQ ID NO: 1881927
ucucacuguugaguuagaa

SEQ ID NO: 2081741 - RNA, 19 nt, Artificial Sequence
  Description of Artificial Sequence: Synthetic oligonucleotide
  Antisense strand to SEQ ID NO: 2081740
uucuaacucaacagugaga

SEQ ID NO: 2081742 - RNA, 19 nt, Artificial Sequence
  Description of Artificial Sequence: Synthetic oligonucleotide
  Sense strand starting at position 868 of SEQ ID NO: 1881927
uugaguuagaaguguaaua

SEQ ID NO: 2081743 - RNA, 19 nt, Artificial Sequence
  Description of Artificial Sequence: Synthetic oligonucleotide
  Antisense strand to SEQ ID NO: 2081742
uauuacacuucuaacucaa

SEQ ID NO: 2081744 - RNA, 19 nt, Artificial Sequence
  Description of Artificial Sequence: Synthetic oligonucleotide
  Sense strand starting at position 1246 of SEQ ID NO: 1881927
cccacagucucaguugaca

SEQ ID NO: 2081745 - RNA, 19 nt, Artificial Sequence
  Description of Artificial Sequence: Synthetic oligonucleotide
  Antisense strand to SEQ ID NO: 2081744
ugucaacugagacuguggg

SEQ ID NO: 2081746 - RNA, 19 nt, Artificial Sequence
  Description of Artificial Sequence: Synthetic oligonucleotide
  Sense strand starting at position 1412 of SEQ ID NO: 1881927
uguggucuucuuuaauuau

SEQ ID NO: 2081747 - RNA, 19 nt, Artificial Sequence
  Description of Artificial Sequence: Synthetic oligonucleotide
  Antisense strand to SEQ ID NO: 2081746
auaauuaaagaagaccaca

SEQ ID NO: 2081748 - RNA, 19 nt, Artificial Sequence
  Description of Artificial Sequence: Synthetic oligonucleotide
  Sense strand starting at position 1478 of SEQ ID NO: 1881927
gguugauauuagcuauuga

SEQ ID NO: 2081749 - RNA, 19 nt, Artificial Sequence
  Description of Artificial Sequence: Synthetic oligonucleotide
  Antisense strand to SEQ ID NO: 2081748
ucaauagcuaauaucaacc

SEQ ID NO: 2081750 - RNA, 19 nt, Artificial Sequence
  Description of Artificial Sequence: Synthetic oligonucleotide
  Sense strand starting at position 1563 of SEQ ID NO: 1881927
uuugacggcccuuaucaau

SEQ ID NO: 2081751 - RNA, 19 nt, Artificial Sequence
  Description of Artificial Sequence: Synthetic oligonucleotide
  Antisense strand to SEQ ID NO: 2081750
auugauaagggccgucaaa

SEQ ID NO: 2081752 - RNA, 19 nt, Artificial Sequence
  Description of Artificial Sequence: Synthetic oligonucleotide
  Sense strand starting at position 1636 of SEQ ID NO: 1881927
uggaauuggcucgauucuu

SEQ ID NO: 2081753 - RNA, 19 nt, Artificial Sequence
  Description of Artificial Sequence: Synthetic oligonucleotide
  Antisense strand to SEQ ID NO: 2081752
aagaaucgagccaauucca

SEQ ID NO: 2081754 - RNA, 19 nt, Artificial Sequence
  Description of Artificial Sequence: Synthetic oligonucleotide
  Sense strand starting at position 1707 of SEQ ID NO: 1881927
auuagugauccaugagaua

SEQ ID NO: 2081755 - RNA, 19 nt, Artificial Sequence
  Description of Artificial Sequence: Synthetic oligonucleotide
  Antisense strand to SEQ ID NO: 2081754
uaucucauggaucacuaau

SEQ ID NO: 2081756 - RNA, 19 nt, Artificial Sequence
  Description of Artificial Sequence: Synthetic oligonucleotide
  Sense strand starting at position 1790 of SEQ ID NO: 1881927
gguagaagguugaagaagu

SEQ ID NO: 2081757 - RNA, 19 nt, Artificial Sequence
  Description of Artificial Sequence: Synthetic oligonucleotide
  Antisense strand to SEQ ID NO: 2081756
acuucuucaaccuucuacc

SEQ ID NO: 2081758 - RNA, 19 nt, Artificial Sequence
  Description of Artificial Sequence: Synthetic oligonucleotide
  Sense strand starting at position 1873 of SEQ ID NO: 1881927
uuccaucguguuuaaagau

SEQ ID NO: 2081759 - RNA, 19 nt, Artificial Sequence
  Description of Artificial Sequence: Synthetic oligonucleotide
  Antisense strand to SEQ ID NO: 2081758
aucuuuaaacacgauggaa

SEQ ID NO: 2081760 - RNA, 19 nt, Artificial Sequence
  Description of Artificial Sequence: Synthetic oligonucleotide
  Sense strand starting at position 1917 of SEQ ID NO: 1881927
gaaugaaucuuaucuugug

SEQ ID NO: 2081761 - RNA, 19 nt, Artificial Sequence
  Description of Artificial Sequence: Synthetic oligonucleotide
  Antisense strand to SEQ ID NO: 2081760
cacaagauaagauucauuc

SEQ ID NO: 2081762 - RNA, 19 nt, Artificial Sequence
  Description of Artificial Sequence: Synthetic oligonucleotide
  Sense strand starting at position 2018 of SEQ ID NO: 1881927
caucuagguguggacauau

SEQ ID NO: 2081763 - RNA, 19 nt, Artificial Sequence
  Description of Artificial Sequence: Synthetic oligonucleotide
  Antisense strand to SEQ ID NO: 2081762
auauguccacaccuagaug

SEQ ID NO: 2081764 - RNA, 19 nt, Artificial Sequence
  Description of Artificial Sequence: Synthetic oligonucleotide
  Sense strand starting at position 2041 of SEQ ID NO: 1881927
aguacuuaccaauggaaug

SEQ ID NO: 2081765 - RNA, 19 nt, Artificial Sequence
  Description of Artificial Sequence: Synthetic oligonucleotide
  Antisense strand to SEQ ID NO: 2081764
cauuccauugguaaguacu

SEQ ID NO: 2081766 - RNA, 19 nt, Artificial Sequence
  Description of Artificial Sequence: Synthetic oligonucleotide
  Sense strand starting at position 2135 of SEQ ID NO: 1881927
uuacgcuggcuggauauaa

SEQ ID NO: 2081767 - RNA, 19 nt, Artificial Sequence
  Description of Artificial Sequence: Synthetic oligonucleotide
  Antisense strand to SEQ ID NO: 2081766
uuauauccagccagcguaa

SEQ ID NO: 2081768 - RNA, 19 nt, Artificial Sequence
  Description of Artificial Sequence: Synthetic oligonucleotide
  Sense strand starting at position 2143 of SEQ ID NO: 1881927
gcuggauauaagugacauc

SEQ ID NO: 2081769 - RNA, 19 nt, Artificial Sequence
  Description of Artificial Sequence: Synthetic oligonucleotide
  Antisense strand to SEQ ID NO: 2081768
gaugucacuuauauccagc

SEQ ID NO: 2081770 - RNA, 19 nt, Artificial Sequence
  Description of Artificial Sequence: Synthetic oligonucleotide
  Sense strand starting at position 2195 of SEQ ID NO: 1881927
aagaaagcuggaugucuga

SEQ ID NO: 2081771 - RNA, 19 nt, Artificial Sequence
  Description of Artificial Sequence: Synthetic oligonucleotide
  Antisense strand to SEQ ID NO: 2081770
ucagacauccagcuuucuu

SEQ ID NO: 2081772 - RNA, 19 nt, Artificial Sequence
  Description of Artificial Sequence: Synthetic oligonucleotide
  Sense strand starting at position 2204 of SEQ ID NO: 1881927
ggaugucugagucauggca

SEQ ID NO: 2081773 - RNA, 19 nt, Artificial Sequence
  Description of Artificial Sequence: Synthetic oligonucleotide
  Antisense strand to SEQ ID NO: 2081772
ugccaugacucagacaucc

SEQ ID NO: 2081774 - RNA, 19 nt, Artificial Sequence
  Description of Artificial Sequence: Synthetic oligonucleotide
  Sense strand starting at position 2394 of SEQ ID NO: 1881927
aggagaucauuacuaguuc

SEQ ID NO: 2081775 - RNA, 19 nt, Artificial Sequence
  Description of Artificial Sequence: Synthetic oligonucleotide
  Antisense strand to SEQ ID NO: 2081774
gaacuaguaaugaucuccu

SEQ ID NO: 2081776 - RNA, 19 nt, Artificial Sequence
  Description of Artificial Sequence: Synthetic oligonucleotide
  Sense strand starting at position 2490 of SEQ ID NO: 1881927
cuccaaggauuguucucau

SEQ ID NO: 2081777 - RNA, 19 nt, Artificial Sequence
  Description of Artificial Sequence: Synthetic oligonucleotide
  Antisense strand to SEQ ID NO: 2081776
augagaacaauccuuggag

SEQ ID NO: 2081778 - RNA, 19 nt, Artificial Sequence
  Description of Artificial Sequence: Synthetic oligonucleotide
  Sense strand starting at position 2694 of SEQ ID NO: 1881927
agagaaguuaaguacuugu

SEQ ID NO: 2081779 - RNA, 19 nt, Artificial Sequence
  Description of Artificial Sequence: Synthetic oligonucleotide
  Antisense strand to SEQ ID NO: 2081778
acaaguacuuaacuucucu

SEQ ID NO: 2081780 - RNA, 19 nt, Artificial Sequence
  Description of Artificial Sequence: Synthetic oligonucleotide
  Sense strand starting at position 2825 of SEQ ID NO: 1881927
cagcauggagccugauaca

SEQ ID NO: 2081781 - RNA, 19 nt, Artificial Sequence
  Description of Artificial Sequence: Synthetic oligonucleotide
  Antisense strand to SEQ ID NO: 2081780
uguaucaggcuccaugcug

SEQ ID NO: 2081782 - RNA, 19 nt, Artificial Sequence
  Description of Artificial Sequence: Synthetic oligonucleotide
  Sense strand starting at position 2902 of SEQ ID NO: 1881927
uacgaaaccuaaguguaaa

SEQ ID NO: 2081783 - RNA, 19 nt, Artificial Sequence
  Description of Artificial Sequence: Synthetic oligonucleotide
  Antisense strand to SEQ ID NO: 2081782
uuuacacuuagguuucgua

SEQ ID NO: 2081784 - RNA, 19 nt, Artificial Sequence
  Description of Artificial Sequence: Synthetic oligonucleotide
  Sense strand starting at position 3214 of SEQ ID NO: 1881927
auugaucugcugcaggaaa

SEQ ID NO: 2081785 - RNA, 19 nt, Artificial Sequence
  Description of Artificial Sequence: Synthetic oligonucleotide
  Antisense strand to SEQ ID NO: 2081784
uuuccugcagcagaucaau

SEQ ID NO: 2081786 - RNA, 19 nt, Artificial Sequence
  Description of Artificial Sequence: Synthetic oligonucleotide
  Sense strand starting at position 3415 of SEQ ID NO: 1881927
cuuuguauaccugaaguac

SEQ ID NO: 2081787 - RNA, 19 nt, Artificial Sequence
  Description of Artificial Sequence: Synthetic oligonucleotide
  Antisense strand to SEQ ID NO: 2081786
guacuucagguauacaaag

SEQ ID NO: 2081788 - RNA, 19 nt, Artificial Sequence
  Description of Artificial Sequence: Synthetic oligonucleotide
  Sense strand starting at position 3453 of SEQ ID NO: 1881927
ccauaaugggaaugcuagu

SEQ ID NO: 2081789 - RNA, 19 nt, Artificial Sequence
  Description of Artificial Sequence: Synthetic oligonucleotide
  Antisense strand to SEQ ID NO: 2081788
acuagcauucccauuaugg

SEQ ID NO: 2081790 - RNA, 19 nt, Artificial Sequence
  Description of Artificial Sequence: Synthetic oligonucleotide
  Sense strand starting at position 3570 of SEQ ID NO: 1881927
uugccauaccaagaguaau

SEQ ID NO: 2081791 - RNA, 19 nt, Artificial Sequence
  Description of Artificial Sequence: Synthetic oligonucleotide
  Antisense strand to SEQ ID NO: 2081790
auuacucuugguauggcaa

SEQ ID NO: 2081792 - RNA, 19 nt, Artificial Sequence
  Description of Artificial Sequence: Synthetic oligonucleotide
  Sense strand starting at position 3648 of SEQ ID NO: 1881927
aggcaauaugcuuaaucga

SEQ ID NO: 2081793 - RNA, 19 nt, Artificial Sequence
  Description of Artificial Sequence: Synthetic oligonucleotide
  Antisense strand to SEQ ID NO: 2081792
ucgauuaagcauauugccu

SEQ ID NO: 2081794 - RNA, 19 nt, Artificial Sequence
  Description of Artificial Sequence: Synthetic oligonucleotide
  Sense strand starting at position 3656 of SEQ ID NO: 1881927
ugcuuaaucgauguuugcu

SEQ ID NO: 2081795 - RNA, 19 nt, Artificial Sequence
  Description of Artificial Sequence: Synthetic oligonucleotide
  Antisense strand to SEQ ID NO: 2081794
agcaaacaucgauuaagca

SEQ ID NO: 2081796 - RNA, 19 nt, Artificial Sequence
  Description of Artificial Sequence: Synthetic oligonucleotide
  Sense strand starting at position 3674 of SEQ ID NO: 1881927
ugauguuuauggucuaaug

SEQ ID NO: 2081797 - RNA, 19 nt, Artificial Sequence
  Description of Artificial Sequence: Synthetic oligonucleotide
  Antisense strand to SEQ ID NO: 2081796
cauuagaccauaaacauca

SEQ ID NO: 2081798 - RNA, 19 nt, Artificial Sequence
  Description of Artificial Sequence: Synthetic oligonucleotide
  Sense strand starting at position 3883 of SEQ ID NO: 1881927
ggucuuauuuaugccacau

SEQ ID NO: 2081799 - RNA, 19 nt, Artificial Sequence
  Description of Artificial Sequence: Synthetic oligonucleotide
  Antisense strand to SEQ ID NO: 2081798
auguggcauaaauaagacc

SEQ ID NO: 2081800 - RNA, 19 nt, Artificial Sequence
  Description of Artificial Sequence: Synthetic oligonucleotide
  Sense strand starting at position 3945 of SEQ ID NO: 1881927
ucuccuuagugcuugauuu

SEQ ID NO: 2081801 - RNA, 19 nt, Artificial Sequence
  Description of Artificial Sequence: Synthetic oligonucleotide
  Antisense strand to SEQ ID NO: 2081800
aaaucaagcacuaaggaga

SEQ ID NO: 2081802 - RNA, 19 nt, Artificial Sequence
  Description of Artificial Sequence: Synthetic oligonucleotide
  Sense strand starting at position 3967 of SEQ ID NO: 1881927
uauucugguccaggaaaca

SEQ ID NO: 2081803 - RNA, 19 nt, Artificial Sequence
  Description of Artificial Sequence: Synthetic oligonucleotide
  Antisense strand to SEQ ID NO: 2081802
uguuuccuggaccagaaua

SEQ ID NO: 2081804 - RNA, 19 nt, Artificial Sequence
  Description of Artificial Sequence: Synthetic oligonucleotide
  Sense strand starting at position 12 of SEQ ID NO: 1881928
ugaggaauguuagcacuga

SEQ ID NO: 2081805 - RNA, 19 nt, Artificial Sequence
  Description of Artificial Sequence: Synthetic oligonucleotide
  Antisense strand to SEQ ID NO: 2081804
ucagugcuaacauuccuca

SEQ ID NO: 2081806 - RNA, 19 nt, Artificial Sequence
  Description of Artificial Sequence: Synthetic oligonucleotide
  Sense strand starting at position 16 of SEQ ID NO: 1881928
gaauguuagcacugauauc

SEQ ID NO: 2081807 - RNA, 19 nt, Artificial Sequence
  Description of Artificial Sequence: Synthetic oligonucleotide
  Antisense strand to SEQ ID NO: 2081806
gauaucagugcuaacauuc

SEQ ID NO: 2081808 - RNA, 19 nt, Artificial Sequence
  Description of Artificial Sequence: Synthetic oligonucleotide
  Sense strand starting at position 179 of SEQ ID NO: 1881928
auaagagauacuugggcuu

SEQ ID NO: 2081809 - RNA, 19 nt, Artificial Sequence
  Description of Artificial Sequence: Synthetic oligonucleotide
  Antisense strand to SEQ ID NO: 2081808
aagcccaaguaucucuuau

SEQ ID NO: 2081810 - RNA, 19 nt, Artificial Sequence
  Description of Artificial Sequence: Synthetic oligonucleotide
  Sense strand starting at position 192 of SEQ ID NO: 1881928
gggcuucugaaguauccau

SEQ ID NO: 2081811 - RNA, 19 nt, Artificial Sequence
  Description of Artificial Sequence: Synthetic oligonucleotide
  Antisense strand to SEQ ID NO: 2081810
auggauacuucagaagccc

SEQ ID NO: 2081812 - RNA, 19 nt, Artificial Sequence
  Description of Artificial Sequence: Synthetic oligonucleotide
  Sense strand starting at position 292 of SEQ ID NO: 1881928
ugacuuuagccuugaggaa

SEQ ID NO: 2081813 - RNA, 19 nt, Artificial Sequence
  Description of Artificial Sequence: Synthetic oligonucleotide
  Antisense strand to SEQ ID NO: 2081812
uuccucaaggcuaaaguca

SEQ ID NO: 2081814 - RNA, 19 nt, Artificial Sequence
  Description of Artificial Sequence: Synthetic oligonucleotide
  Sense strand starting at position 431 of SEQ ID NO: 1881928
uaugucugucagcauagua

SEQ ID NO: 2081815 - RNA, 19 nt, Artificial Sequence
  Description of Artificial Sequence: Synthetic oligonucleotide
  Antisense strand to SEQ ID NO: 2081814
uacuaugcugacagacaua

SEQ ID NO: 2081816 - RNA, 19 nt, Artificial Sequence
  Description of Artificial Sequence: Synthetic oligonucleotide
  Sense strand starting at position 439 of SEQ ID NO: 1881928
ucagcauaguauucucuua

SEQ ID NO: 2081817 - RNA, 19 nt, Artificial Sequence
  Description of Artificial Sequence: Synthetic oligonucleotide
  Antisense strand to SEQ ID NO: 2081816
uaagagaauacuaugcuga

SEQ ID NO: 2081818 - RNA, 19 nt, Artificial Sequence
  Description of Artificial Sequence: Synthetic oligonucleotide
  Sense strand starting at position 496 of SEQ ID NO: 1881928
guagacauugcgugaaagg

SEQ ID NO: 2081819 - RNA, 19 nt, Artificial Sequence
  Description of Artificial Sequence: Synthetic oligonucleotide
  Antisense strand to SEQ ID NO: 2081818
ccuuucacgcaaugucuac

SEQ ID NO: 2081820 - RNA, 19 nt, Artificial Sequence
  Description of Artificial Sequence: Synthetic oligonucleotide
  Sense strand starting at position 506 of SEQ ID NO: 1881928
cgugaaagggcuuauguau

SEQ ID NO: 2081821 - RNA, 19 nt, Artificial Sequence
  Description of Artificial Sequence: Synthetic oligonucleotide
  Antisense strand to SEQ ID NO: 2081820
auacauaagcccuuucacg

SEQ ID NO: 2081822 - RNA, 19 nt, Artificial Sequence
  Description of Artificial Sequence: Synthetic oligonucleotide
  Sense strand starting at position 612 of SEQ ID NO: 1881928
gauuuaaggucauaguaag

SEQ ID NO: 2081823 - RNA, 19 nt, Artificial Sequence
  Description of Artificial Sequence: Synthetic oligonucleotide
  Antisense strand to SEQ ID NO: 2081822
cuuacuaugaccuuaaauc

SEQ ID NO: 2081824 - RNA, 19 nt, Artificial Sequence
  Description of Artificial Sequence: Synthetic oligonucleotide
  Sense strand starting at position 700 of SEQ ID NO: 1881928
agccuuuaucuggagcagu

SEQ ID NO: 2081825 - RNA, 19 nt, Artificial Sequence
  Description of Artificial Sequence: Synthetic oligonucleotide
  Antisense strand to SEQ ID NO: 2081824
acugcuccagauaaaggcu

SEQ ID NO: 2081826 - RNA, 19 nt, Artificial Sequence
  Description of Artificial Sequence: Synthetic oligonucleotide
  Sense strand starting at position 758 of SEQ ID NO: 1881928
uuggcaauguccucagaca

SEQ ID NO: 2081827 - RNA, 19 nt, Artificial Sequence
  Description of Artificial Sequence: Synthetic oligonucleotide
  Antisense strand to SEQ ID NO: 2081826
ugucugaggacauugccaa

SEQ ID NO: 2081828 - RNA, 19 nt, Artificial Sequence
  Description of Artificial Sequence: Synthetic oligonucleotide
  Sense strand starting at position 759 of SEQ ID NO: 1881928
uggcaauguccucagacau

SEQ ID NO: 2081829 - RNA, 19 nt, Artificial Sequence
  Description of Artificial Sequence: Synthetic oligonucleotide
  Antisense strand to SEQ ID NO: 2081828
augucugaggacauugcca

SEQ ID NO: 2081830 - RNA, 19 nt, Artificial Sequence
  Description of Artificial Sequence: Synthetic oligonucleotide
  Sense strand starting at position 888 of SEQ ID NO: 1881928
agugcugaggucuagaaac

SEQ ID NO: 2081831 - RNA, 19 nt, Artificial Sequence
  Description of Artificial Sequence: Synthetic oligonucleotide
  Antisense strand to SEQ ID NO: 2081830
guuucuagaccucagcacu

SEQ ID NO: 2081832 - RNA, 19 nt, Artificial Sequence
  Description of Artificial Sequence: Synthetic oligonucleotide
  Sense strand starting at position 1005 of SEQ ID NO: 1881928
cuggaccaagcucauuaau

SEQ ID NO: 2081833 - RNA, 19 nt, Artificial Sequence
  Description of Artificial Sequence: Synthetic oligonucleotide
  Antisense strand to SEQ ID NO: 2081832
auuaaugagcuugguccag

SEQ ID NO: 2081834 - RNA, 19 nt, Artificial Sequence
  Description of Artificial Sequence: Synthetic oligonucleotide
  Sense strand starting at position 1007 of SEQ ID NO: 1881928
ggaccaagcucauuaauau

SEQ ID NO: 2081835 - RNA, 19 nt, Artificial Sequence
  Description of Artificial Sequence: Synthetic oligonucleotide
  Antisense strand to SEQ ID NO: 2081834
auauuaaugagcuuggucc

SEQ ID NO: 2081836 - RNA, 19 nt, Artificial Sequence
  Description of Artificial Sequence: Synthetic oligonucleotide
  Sense strand starting at position 1047 of SEQ ID NO: 1881928
uuuagugucccugaauguu

SEQ ID NO: 2081837 - RNA, 19 nt, Artificial Sequence
  Description of Artificial Sequence: Synthetic oligonucleotide
  Antisense strand to SEQ ID NO: 2081836
aacauucagggacacuaaa

SEQ ID NO: 2081838 - RNA, 19 nt, Artificial Sequence
  Description of Artificial Sequence: Synthetic oligonucleotide
  Sense strand starting at position 1053 of SEQ ID NO: 1881928
gucccugaauguuugggau

SEQ ID NO: 2081839 - RNA, 19 nt, Artificial Sequence
  Description of Artificial Sequence: Synthetic oligonucleotide
  Antisense strand to SEQ ID NO: 2081838
aucccaaacauucagggac

SEQ ID NO: 2081840 - RNA, 19 nt, Artificial Sequence
  Description of Artificial Sequence: Synthetic oligonucleotide
  Sense strand starting at position 1138 of SEQ ID NO: 1881928
uguggaggcucuguaagaa

SEQ ID NO: 2081841 - RNA, 19 nt, Artificial Sequence
  Description of Artificial Sequence: Synthetic oligonucleotide
  Antisense strand to SEQ ID NO: 2081840
uucuuacagagccuccaca

SEQ ID NO: 2081842 - RNA, 19 nt, Artificial Sequence
  Description of Artificial Sequence: Synthetic oligonucleotide
  Sense strand starting at position 1173 of SEQ ID NO: 1881928
auacgaaagccuuggacau

SEQ ID NO: 2081843 - RNA, 19 nt, Artificial Sequence
  Description of Artificial Sequence: Synthetic oligonucleotide
  Antisense strand to SEQ ID NO: 2081842
auguccaaggcuuucguau

SEQ ID NO: 2081844 - RNA, 19 nt, Artificial Sequence
  Description of Artificial Sequence: Synthetic oligonucleotide
  Sense strand starting at position 1231 of SEQ ID NO: 1881928
auauuaaugugggccacaa

SEQ ID NO: 2081845 - RNA, 19 nt, Artificial Sequence
  Description of Artificial Sequence: Synthetic oligonucleotide
  Antisense strand to SEQ ID NO: 2081844
uuguggcccacauuaauau

SEQ ID NO: 2081846 - RNA, 19 nt, Artificial Sequence
  Description of Artificial Sequence: Synthetic oligonucleotide
  Sense strand starting at position 1244 of SEQ ID NO: 1881928
ccacaagaauuagauaaag

SEQ ID NO: 2081847 - RNA, 19 nt, Artificial Sequence
  Description of Artificial Sequence: Synthetic oligonucleotide
  Antisense strand to SEQ ID NO: 2081846
cuuuaucuaauucuugugg

SEQ ID NO: 2081848 - RNA, 19 nt, Artificial Sequence
  Description of Artificial Sequence: Synthetic oligonucleotide
  Sense strand starting at position 1347 of SEQ ID NO: 1881928
uuuguaagcgaguuuguuc

SEQ ID NO: 2081849 - RNA, 19 nt, Artificial Sequence
  Description of Artificial Sequence: Synthetic oligonucleotide
  Antisense strand to SEQ ID NO: 2081848
gaacaaacucgcuuacaaa

SEQ ID NO: 2081850 - RNA, 19 nt, Artificial Sequence
  Description of Artificial Sequence: Synthetic oligonucleotide
  Sense strand starting at position 1356 of SEQ ID NO: 1881928
gaguuuguuccugguauuu

SEQ ID NO: 2081851 - RNA, 19 nt, Artificial Sequence
  Description of Artificial Sequence: Synthetic oligonucleotide
  Antisense strand to SEQ ID NO: 2081850
aaauaccaggaacaaacuc

SEQ ID NO: 2081852 - RNA, 19 nt, Artificial Sequence
  Description of Artificial Sequence: Synthetic oligonucleotide
  Sense strand starting at position 1730 of SEQ ID NO: 1881928
caccguggucauugaugga

SEQ ID NO: 2081853 - RNA, 19 nt, Artificial Sequence
  Description of Artificial Sequence: Synthetic oligonucleotide
  Antisense strand to SEQ ID NO: 2081852
uccaucaaugaccacggug

SEQ ID NO: 2081854 - RNA, 19 nt, Artificial Sequence
  Description of Artificial Sequence: Synthetic oligonucleotide
  Sense strand starting at position 2148 of SEQ ID NO: 1881928
ccaagcuguccagggacaa

SEQ ID NO: 2081855 - RNA, 19 nt, Artificial Sequence
  Description of Artificial Sequence: Synthetic oligonucleotide
  Antisense strand to SEQ ID NO: 2081854
uugucccuggacagcuugg

SEQ ID NO: 2081856 - RNA, 19 nt, Artificial Sequence
  Description of Artificial Sequence: Synthetic oligonucleotide
  Sense strand starting at position 3085 of SEQ ID NO: 1881928
cagguauuucuucguccuu

SEQ ID NO: 2081857 - RNA, 19 nt, Artificial Sequence
  Description of Artificial Sequence: Synthetic oligonucleotide
  Antisense strand to SEQ ID NO: 2081856
aaggacgaagaaauaccug

SEQ ID NO: 2081858 - RNA, 19 nt, Artificial Sequence
  Description of Artificial Sequence: Synthetic oligonucleotide
  Sense strand starting at position 3087 of SEQ ID NO: 1881928
gguauuucuucguccuugu

SEQ ID NO: 2081859 - RNA, 19 nt, Artificial Sequence
  Description of Artificial Sequence: Synthetic oligonucleotide
  Antisense strand to SEQ ID NO: 2081858
acaaggacgaagaaauacc

SEQ ID NO: 2081860 - RNA, 19 nt, Artificial Sequence
  Description of Artificial Sequence: Synthetic oligonucleotide
  Sense strand starting at position 3161 of SEQ ID NO: 1881928
uguggauaauaagacauuu

SEQ ID NO: 2081861 - RNA, 19 nt, Artificial Sequence
  Description of Artificial Sequence: Synthetic oligonucleotide
  Antisense strand to SEQ ID NO: 2081860
aaaugucuuauuauccaca

SEQ ID NO: 2081862 - RNA, 19 nt, Artificial Sequence
  Description of Artificial Sequence: Synthetic oligonucleotide
  Sense strand starting at position 3215 of SEQ ID NO: 1881928
aggagauacuuugucuaag

SEQ ID NO: 2081863 - RNA, 19 nt, Artificial Sequence
  Description of Artificial Sequence: Synthetic oligonucleotide
  Antisense strand to SEQ ID NO: 2081862
cuuagacaaaguaucuccu

SEQ ID NO: 2081864 - RNA, 19 nt, Artificial Sequence
  Description of Artificial Sequence: Synthetic oligonucleotide
  Sense strand starting at position 3216 of SEQ ID NO: 1881928
ggagauacuuugucuaagu

SEQ ID NO: 2081865 - RNA, 19 nt, Artificial Sequence
  Description of Artificial Sequence: Synthetic oligonucleotide
  Antisense strand to SEQ ID NO: 2081864
acuuagacaaaguaucucc

SEQ ID NO: 2081866 - RNA, 19 nt, Artificial Sequence
  Description of Artificial Sequence: Synthetic oligonucleotide
  Sense strand starting at position 3217 of SEQ ID NO: 1881928
gagauacuuugucuaaguc

SEQ ID NO: 2081867 - RNA, 19 nt, Artificial Sequence
  Description of Artificial Sequence: Synthetic oligonucleotide
  Antisense strand to SEQ ID NO: 2081866
gacuuagacaaaguaucuc

SEQ ID NO: 2081868 - RNA, 19 nt, Artificial Sequence
  Description of Artificial Sequence: Synthetic oligonucleotide
  Sense strand starting at position 3218 of SEQ ID NO: 1881928
agauacuuugucuaagucu

SEQ ID NO: 2081869 - RNA, 19 nt, Artificial Sequence
  Description of Artificial Sequence: Synthetic oligonucleotide
  Antisense strand to SEQ ID NO: 2081868
agacuuagacaaaguaucu

SEQ ID NO: 2081870 - RNA, 19 nt, Artificial Sequence
  Description of Artificial Sequence: Synthetic oligonucleotide
  Sense strand starting at position 3241 of SEQ ID NO: 1881928
cuuugaccugaucauguuu

SEQ ID NO: 2081871 - RNA, 19 nt, Artificial Sequence
  Description of Artificial Sequence: Synthetic oligonucleotide
  Antisense strand to SEQ ID NO: 2081870
aaacaugaucaggucaaag

SEQ ID NO: 2081872 - RNA, 19 nt, Artificial Sequence
  Description of Artificial Sequence: Synthetic oligonucleotide
  Sense strand starting at position 3336 of SEQ ID NO: 1881928
auuugaccuuuauaagaug

SEQ ID NO: 2081873 - RNA, 19 nt, Artificial Sequence
  Description of Artificial Sequence: Synthetic oligonucleotide
  Antisense strand to SEQ ID NO: 2081872
caucuuauaaaggucaaau

SEQ ID NO: 2081874 - RNA, 19 nt, Artificial Sequence
  Description of Artificial Sequence: Synthetic oligonucleotide
  Sense strand starting at position 3577 of SEQ ID NO: 1881928
uuccaagaguuugcugaca

SEQ ID NO: 2081875 - RNA, 19 nt, Artificial Sequence
  Description of Artificial Sequence: Synthetic oligonucleotide
  Antisense strand to SEQ ID NO: 2081874
ugucagcaaacucuuggaa

SEQ ID NO: 2081876 - RNA, 19 nt, Artificial Sequence
  Description of Artificial Sequence: Synthetic oligonucleotide
  Sense strand starting at position 3623 of SEQ ID NO: 1881928
ggaggcauuucucaccaca

SEQ ID NO: 2081877 - RNA, 19 nt, Artificial Sequence
  Description of Artificial Sequence: Synthetic oligonucleotide
  Antisense strand to SEQ ID NO: 2081876
uguggugagaaaugccucc

SEQ ID NO: 2081878 - RNA, 19 nt, Artificial Sequence
  Description of Artificial Sequence: Synthetic oligonucleotide
  Sense strand starting at position 3874 of SEQ ID NO: 1881928
ugguuauaccuguaacuuu

SEQ ID NO: 2081879 - RNA, 19 nt, Artificial Sequence
  Description of Artificial Sequence: Synthetic oligonucleotide
  Antisense strand to SEQ ID NO: 2081878
aaaguuacagguauaacca

SEQ ID NO: 2081880 - RNA, 19 nt, Artificial Sequence
  Description of Artificial Sequence: Synthetic oligonucleotide
  Sense strand starting at position 3895 of SEQ ID NO: 1881928
guaguauaaauguggauau

SEQ ID NO: 2081881 - RNA, 19 nt, Artificial Sequence
  Description of Artificial Sequence: Synthetic oligonucleotide
  Antisense strand to SEQ ID NO: 2081880
auauccacauuuauacuac

SEQ ID NO: 2081882 - RNA, 19 nt, Artificial Sequence
  Description of Artificial Sequence: Synthetic oligonucleotide
  Sense strand starting at position 3897 of SEQ ID NO: 1881928
aguauaaauguggauaugu

SEQ ID NO: 2081883 - RNA, 19 nt, Artificial Sequence
  Description of Artificial Sequence: Synthetic oligonucleotide
  Antisense strand to SEQ ID NO: 2081882
acauauccacauuuauacu

SEQ ID NO: 2081884 - RNA, 19 nt, Artificial Sequence
  Description of Artificial Sequence: Synthetic oligonucleotide
  Sense strand starting at position 3 of SEQ ID NO: 1881929
gggcacuuucuuggcaaca

SEQ ID NO: 2081885 - RNA, 19 nt, Artificial Sequence
  Description of Artificial Sequence: Synthetic oligonucleotide
  Antisense strand to SEQ ID NO: 2081884
uguugccaagaaagugccc

SEQ ID NO: 2081886 - RNA, 19 nt, Artificial Sequence
  Description of Artificial Sequence: Synthetic oligonucleotide
  Sense strand starting at position 4 of SEQ ID NO: 1881929
ggcacuuucuuggcaacau

SEQ ID NO: 2081887 - RNA, 19 nt, Artificial Sequence
  Description of Artificial Sequence: Synthetic oligonucleotide
  Antisense strand to SEQ ID NO: 2081886
auguugccaagaaagugcc

SEQ ID NO: 2081888 - RNA, 19 nt, Artificial Sequence
  Description of Artificial Sequence: Synthetic oligonucleotide
  Sense strand starting at position 23 of SEQ ID NO: 1881929
gggcccuguggccaugaau

SEQ ID NO: 2081889 - RNA, 19 nt, Artificial Sequence
  Description of Artificial Sequence: Synthetic oligonucleotide
  Antisense strand to SEQ ID NO: 2081888
auucauggccacagggccc

SEQ ID NO: 2081890 - RNA, 19 nt, Artificial Sequence
  Description of Artificial Sequence: Synthetic oligonucleotide
  Sense strand starting at position 115 of SEQ ID NO: 1881929
cagugugaccugcagacaa

SEQ ID NO: 2081891 - RNA, 19 nt, Artificial Sequence
  Description of Artificial Sequence: Synthetic oligonucleotide
  Antisense strand to SEQ ID NO: 2081890
uugucugcaggucacacug

SEQ ID NO: 2081892 - RNA, 19 nt, Artificial Sequence
  Description of Artificial Sequence: Synthetic oligonucleotide
  Sense strand starting at position 117 of SEQ ID NO: 1881929
gugugaccugcagacaauu

SEQ ID NO: 2081893 - RNA, 19 nt, Artificial Sequence
  Description of Artificial Sequence: Synthetic oligonucleotide
  Antisense strand to SEQ ID NO: 2081892
aauugucugcaggucacac

SEQ ID NO: 2081894 - RNA, 19 nt, Artificial Sequence
  Description of Artificial Sequence: Synthetic oligonucleotide
  Sense strand starting at position 199 of SEQ ID NO: 1881929
aagagauggccaggacuuu

SEQ ID NO: 2081895 - RNA, 19 nt, Artificial Sequence
  Description of Artificial Sequence: Synthetic oligonucleotide
  Antisense strand to SEQ ID NO: 2081894
aaaguccuggccaucucuu

SEQ ID NO: 2081896 - RNA, 19 nt, Artificial Sequence
  Description of Artificial Sequence: Synthetic oligonucleotide
  Sense strand starting at position 211 of SEQ ID NO: 1881929
ggacuuuggaaugggcaau

SEQ ID NO: 2081897 - RNA, 19 nt, Artificial Sequence
  Description of Artificial Sequence: Synthetic oligonucleotide
  Antisense strand to SEQ ID NO: 2081896
auugcccauuccaaagucc

SEQ ID NO: 2081898 - RNA, 19 nt, Artificial Sequence
  Description of Artificial Sequence: Synthetic oligonucleotide
  Sense strand starting at position 223 of SEQ ID NO: 1881929
gggcaauggguuuacugaa

SEQ ID NO: 2081899 - RNA, 19 nt, Artificial Sequence
  Description of Artificial Sequence: Synthetic oligonucleotide
  Antisense strand to SEQ ID NO: 2081898
uucaguaaacccauugccc

SEQ ID NO: 2081900 - RNA, 19 nt, Artificial Sequence
  Description of Artificial Sequence: Synthetic oligonucleotide
  Sense strand starting at position 239 of SEQ ID NO: 1881929
gaagaucacguccguggaa

SEQ ID NO: 2081901 - RNA, 19 nt, Artificial Sequence
  Description of Artificial Sequence: Synthetic oligonucleotide
  Antisense strand to SEQ ID NO: 2081900
uuccacggacgugaucuuc

SEQ ID NO: 2081902 - RNA, 19 nt, Artificial Sequence
  Description of Artificial Sequence: Synthetic oligonucleotide
  Sense strand starting at position 240 of SEQ ID NO: 1881929
aagaucacguccguggaau

SEQ ID NO: 2081903 - RNA, 19 nt, Artificial Sequence
  Description of Artificial Sequence: Synthetic oligonucleotide
  Antisense strand to SEQ ID NO: 2081902
auuccacggacgugaucuu

SEQ ID NO: 2081904 - RNA, 19 nt, Artificial Sequence
  Description of Artificial Sequence: Synthetic oligonucleotide
  Sense strand starting at position 370 of SEQ ID NO: 1881929
uccauagaauggcuuuagu

SEQ ID NO: 2081905 - RNA, 19 nt, Artificial Sequence
  Description of Artificial Sequence: Synthetic oligonucleotide
  Antisense strand to SEQ ID NO: 2081904
acuaaagccauucuaugga

SEQ ID NO: 2081906 - RNA, 19 nt, Artificial Sequence
  Description of Artificial Sequence: Synthetic oligonucleotide
  Sense strand starting at position 450 of SEQ ID NO: 1881929
cugacauuccugcacugua

SEQ ID NO: 2081907 - RNA, 19 nt, Artificial Sequence
  Description of Artificial Sequence: Synthetic oligonucleotide
  Antisense strand to SEQ ID NO: 2081906
uacagugcaggaaugucag

SEQ ID NO: 2081908 - RNA, 19 nt, Artificial Sequence
  Description of Artificial Sequence: Synthetic oligonucleotide
  Sense strand starting at position 453 of SEQ ID NO: 1881929
acauuccugcacuguagau

SEQ ID NO: 2081909 - RNA, 19 nt, Artificial Sequence
  Description of Artificial Sequence: Synthetic oligonucleotide
  Antisense strand to SEQ ID NO: 2081908
aucuacagugcaggaaugu

SEQ ID NO: 2081910 - RNA, 19 nt, Artificial Sequence
  Description of Artificial Sequence: Synthetic oligonucleotide
  Sense strand starting at position 455 of SEQ ID NO: 1881929
auuccugcacuguagauaa

SEQ ID NO: 2081911 - RNA, 19 nt, Artificial Sequence
  Description of Artificial Sequence: Synthetic oligonucleotide
  Antisense strand to SEQ ID NO: 2081910
uuaucuacagugcaggaau

SEQ ID NO: 2081912 - RNA, 19 nt, Artificial Sequence
  Description of Artificial Sequence: Synthetic oligonucleotide
  Sense strand starting at position 533 of SEQ ID NO: 1881929
ugguauucccuuuaaucug

SEQ ID NO: 2081913 - RNA, 19 nt, Artificial Sequence
  Description of Artificial Sequence: Synthetic oligonucleotide
  Antisense strand to SEQ ID NO: 2081912
cagauuaaagggaauacca

SEQ ID NO: 2081914 - RNA, 19 nt, Artificial Sequence
  Description of Artificial Sequence: Synthetic oligonucleotide
  Sense strand starting at position 566 of SEQ ID NO: 1881929
gauugacuuuggguguaca

SEQ ID NO: 2081915 - RNA, 19 nt, Artificial Sequence
  Description of Artificial Sequence: Synthetic oligonucleotide
  Antisense strand to SEQ ID NO: 2081914
uguacacccaaagucaauc

SEQ ID NO: 2081916 - RNA, 19 nt, Artificial Sequence
  Description of Artificial Sequence: Synthetic oligonucleotide
  Sense strand starting at position 984 of SEQ ID NO: 1881929
gacauuuggccaggcaguu

SEQ ID NO: 2081917 - RNA, 19 nt, Artificial Sequence
  Description of Artificial Sequence: Synthetic oligonucleotide
  Antisense strand to SEQ ID NO: 2081916
aacugccuggccaaauguc

SEQ ID NO: 2081918 - RNA, 19 nt, Artificial Sequence
  Description of Artificial Sequence: Synthetic oligonucleotide
  Sense strand starting at position 1155 of SEQ ID NO: 1881929
gugcgauguccuguacgug

SEQ ID NO: 2081919 - RNA, 19 nt, Artificial Sequence
  Description of Artificial Sequence: Synthetic oligonucleotide
  Antisense strand to SEQ ID NO: 2081918
cacguacaggacaucgcac

SEQ ID NO: 2081920 - RNA, 19 nt, Artificial Sequence
  Description of Artificial Sequence: Synthetic oligonucleotide
  Sense strand starting at position 1228 of SEQ ID NO: 1881929
ucagucaucccugagcaca

SEQ ID NO: 2081921 - RNA, 19 nt, Artificial Sequence
  Description of Artificial Sequence: Synthetic oligonucleotide
  Antisense strand to SEQ ID NO: 2081920
ugugcucagggaugacuga

SEQ ID NO: 2081922 - RNA, 19 nt, Artificial Sequence
  Description of Artificial Sequence: Synthetic oligonucleotide
  Sense strand starting at position 1230 of SEQ ID NO: 1881929
agucaucccugagcacaga

SEQ ID NO: 2081923 - RNA, 19 nt, Artificial Sequence
  Description of Artificial Sequence: Synthetic oligonucleotide
  Antisense strand to SEQ ID NO: 2081922
ucugugcucagggaugacu

SEQ ID NO: 2081924 - RNA, 19 nt, Artificial Sequence
  Description of Artificial Sequence: Synthetic oligonucleotide
  Sense strand starting at position 1270 of SEQ ID NO: 1881929
agccgucacgucgcuaaau

SEQ ID NO: 2081925 - RNA, 19 nt, Artificial Sequence
  Description of Artificial Sequence: Synthetic oligonucleotide
  Antisense strand to SEQ ID NO: 2081924
auuuagcgacgugacggcu

SEQ ID NO: 2081926 - RNA, 19 nt, Artificial Sequence
  Description of Artificial Sequence: Synthetic oligonucleotide
  Sense strand starting at position 1308 of SEQ ID NO: 1881929
gcgcaaauacaugauccuu

SEQ ID NO: 2081927 - RNA, 19 nt, Artificial Sequence
  Description of Artificial Sequence: Synthetic oligonucleotide
  Antisense strand to SEQ ID NO: 2081926
aaggaucauguauuugcgc

SEQ ID NO: 2081928 - RNA, 19 nt, Artificial Sequence
  Description of Artificial Sequence: Synthetic oligonucleotide
  Sense strand starting at position 1360 of SEQ ID NO: 1881929
cugugucagcuucggauuu

SEQ ID NO: 2081929 - RNA, 19 nt, Artificial Sequence
  Description of Artificial Sequence: Synthetic oligonucleotide
  Antisense strand to SEQ ID NO: 2081928
aaauccgaagcugacacag

SEQ ID NO: 2081930 - RNA, 19 nt, Artificial Sequence
  Description of Artificial Sequence: Synthetic oligonucleotide
  Sense strand starting at position 1372 of SEQ ID NO: 1881929
cggauuuaauuggugugua

SEQ ID NO: 2081931 - RNA, 19 nt, Artificial Sequence
  Description of Artificial Sequence: Synthetic oligonucleotide
  Antisense strand to SEQ ID NO: 2081930
uacacaccaauuaaauccg

SEQ ID NO: 2081932 - RNA, 19 nt, Artificial Sequence
  Description of Artificial Sequence: Synthetic oligonucleotide
  Sense strand starting at position 1403 of SEQ ID NO: 1881929
ugaauuacagcauguguaa

SEQ ID NO: 2081933 - RNA, 19 nt, Artificial Sequence
  Description of Artificial Sequence: Synthetic oligonucleotide
  Antisense strand to SEQ ID NO: 2081932
uuacacaugcuguaauuca

SEQ ID NO: 2081934 - RNA, 19 nt, Artificial Sequence
  Description of Artificial Sequence: Synthetic oligonucleotide
  Sense strand starting at position 1443 of SEQ ID NO: 1881929
accauuaacugagagagga

SEQ ID NO: 2081935 - RNA, 19 nt, Artificial Sequence
  Description of Artificial Sequence: Synthetic oligonucleotide
  Antisense strand to SEQ ID NO: 2081934
uccucucucaguuaauggu

SEQ ID NO: 2081936 - RNA, 19 nt, Artificial Sequence
  Description of Artificial Sequence: Synthetic oligonucleotide
  Sense strand starting at position 1542 of SEQ ID NO: 1881929
cuuccucuggccugagaaa

SEQ ID NO: 2081937 - RNA, 19 nt, Artificial Sequence
  Description of Artificial Sequence: Synthetic oligonucleotide
  Antisense strand to SEQ ID NO: 2081936
uuucucaggccagaggaag

SEQ ID NO: 2081938 - RNA, 19 nt, Artificial Sequence
  Description of Artificial Sequence: Synthetic oligonucleotide
  Sense strand starting at position 1554 of SEQ ID NO: 1881929
ugagaaagaucagaaagca

SEQ ID NO: 2081939 - RNA, 19 nt, Artificial Sequence
  Description of Artificial Sequence: Synthetic oligonucleotide
  Antisense strand to SEQ ID NO: 2081938
ugcuuucugaucuuucuca

SEQ ID NO: 2081940 - RNA, 19 nt, Artificial Sequence
  Description of Artificial Sequence: Synthetic oligonucleotide
  Sense strand starting at position 1949 of SEQ ID NO: 1881929
gcuggcuucccaugacauu

SEQ ID NO: 2081941 - RNA, 19 nt, Artificial Sequence
  Description of Artificial Sequence: Synthetic oligonucleotide
  Antisense strand to SEQ ID NO: 2081940
aaugucaugggaagccagc

SEQ ID NO: 2081942 - RNA, 19 nt, Artificial Sequence
  Description of Artificial Sequence: Synthetic oligonucleotide
  Sense strand starting at position 2818 of SEQ ID NO: 1881929
aaccgagcuccagagacau

SEQ ID NO: 2081943 - RNA, 19 nt, Artificial Sequence
  Description of Artificial Sequence: Synthetic oligonucleotide
  Antisense strand to SEQ ID NO: 2081942
augucucuggagcucgguu

SEQ ID NO: 2081944 - RNA, 19 nt, Artificial Sequence
  Description of Artificial Sequence: Synthetic oligonucleotide
  Sense strand starting at position 2928 of SEQ ID NO: 1881929
caaggacucgcgugaagaa

SEQ ID NO: 2081945 - RNA, 19 nt, Artificial Sequence
  Description of Artificial Sequence: Synthetic oligonucleotide
  Antisense strand to SEQ ID NO: 2081944
uucuucacgcgaguccuug

SEQ ID NO: 2081946 - RNA, 19 nt, Artificial Sequence
  Description of Artificial Sequence: Synthetic oligonucleotide
  Sense strand starting at position 3028 of SEQ ID NO: 1881929
ucagaucuucuguagaagu

SEQ ID NO: 2081947 - RNA, 19 nt, Artificial Sequence
  Description of Artificial Sequence: Synthetic oligonucleotide
  Antisense strand to SEQ ID NO: 2081946
acuucuacagaagaucuga

SEQ ID NO: 2081948 - RNA, 19 nt, Artificial Sequence
  Description of Artificial Sequence: Synthetic oligonucleotide
  Sense strand starting at position 3030 of SEQ ID NO: 1881929
agaucuucuguagaagugu

SEQ ID NO: 2081949 - RNA, 19 nt, Artificial Sequence
  Description of Artificial Sequence: Synthetic oligonucleotide
  Antisense strand to SEQ ID NO: 2081948
acacuucuacagaagaucu

SEQ ID NO: 2081950 - RNA, 19 nt, Artificial Sequence
  Description of Artificial Sequence: Synthetic oligonucleotide
  Sense strand starting at position 3039 of SEQ ID NO: 1881929
guagaagugucuguaguga

SEQ ID NO: 2081951 - RNA, 19 nt, Artificial Sequence
  Description of Artificial Sequence: Synthetic oligonucleotide
  Antisense strand to SEQ ID NO: 2081950
ucacuacagacacuucuac

SEQ ID NO: 2081952 - RNA, 19 nt, Artificial Sequence
  Description of Artificial Sequence: Synthetic oligonucleotide
  Sense strand starting at position 3047 of SEQ ID NO: 1881929
gucuguagugaccaucaga

SEQ ID NO: 2081953 - RNA, 19 nt, Artificial Sequence
  Description of Artificial Sequence: Synthetic oligonucleotide
  Antisense strand to SEQ ID NO: 2081952
ucugauggucacuacagac

SEQ ID NO: 2081954 - RNA, 19 nt, Artificial Sequence
  Description of Artificial Sequence: Synthetic oligonucleotide
  Sense strand starting at position 3112 of SEQ ID NO: 1881929
gcauuuauugcuggacauu

SEQ ID NO: 2081955 - RNA, 19 nt, Artificial Sequence
  Description of Artificial Sequence: Synthetic oligonucleotide
  Antisense strand to SEQ ID NO: 2081954
aauguccagcaauaaaugc

SEQ ID NO: 2081956 - RNA, 19 nt, Artificial Sequence
  Description of Artificial Sequence: Synthetic oligonucleotide
  Sense strand starting at position 3121 of SEQ ID NO: 1881929
gcuggacauuugucacggu

SEQ ID NO: 2081957 - RNA, 19 nt, Artificial Sequence
  Description of Artificial Sequence: Synthetic oligonucleotide
  Antisense strand to SEQ ID NO: 2081956
accgugacaaauguccagc

SEQ ID NO: 2081958 - RNA, 19 nt, Artificial Sequence
  Description of Artificial Sequence: Synthetic oligonucleotide
  Sense strand starting at position 3125 of SEQ ID NO: 1881929
gacauuugucacggucuga

SEQ ID NO: 2081959 - RNA, 19 nt, Artificial Sequence
  Description of Artificial Sequence: Synthetic oligonucleotide
  Antisense strand to SEQ ID NO: 2081958
ucagaccgugacaaauguc

SEQ ID NO: 2081960 - RNA, 19 nt, Artificial Sequence
  Description of Artificial Sequence: Synthetic oligonucleotide
  Sense strand starting at position 3213 of SEQ ID NO: 1881929
acgauuucucuccgaccga

SEQ ID NO: 2081961 - RNA, 19 nt, Artificial Sequence
  Description of Artificial Sequence: Synthetic oligonucleotide
  Antisense strand to SEQ ID NO: 2081960
ucggucggagagaaaucgu

SEQ ID NO: 2081962 - RNA, 19 nt, Artificial Sequence
  Description of Artificial Sequence: Synthetic oligonucleotide
  Sense strand starting at position 3963 of SEQ ID NO: 1881929
augggacucgcugacgaaa

SEQ ID NO: 2081963 - RNA, 19 nt, Artificial Sequence
  Description of Artificial Sequence: Synthetic oligonucleotide
  Antisense strand to SEQ ID NO: 2081962
uuucgucagcgagucccau

SEQ ID NO: 2081964 - RNA, 19 nt, Artificial Sequence
  Description of Artificial Sequence: Synthetic oligonucleotide
  Sense strand starting at position 83 of SEQ ID NO: 1881930
cauguuguugaugaugaua

SEQ ID NO: 2081965 - RNA, 19 nt, Artificial Sequence
  Description of Artificial Sequence: Synthetic oligonucleotide
  Antisense strand to SEQ ID NO: 2081964
uaucaucaucaacaacaug

SEQ ID NO: 2081966 - RNA, 19 nt, Artificial Sequence
  Description of Artificial Sequence: Synthetic oligonucleotide
  Sense strand starting at position 91 of SEQ ID NO: 1881930
ugaugaugauauguuuagu

SEQ ID NO: 2081967 - RNA, 19 nt, Artificial Sequence
  Description of Artificial Sequence: Synthetic oligonucleotide
  Antisense strand to SEQ ID NO: 2081966
acuaaacauaucaucauca

SEQ ID NO: 2081968 - RNA, 19 nt, Artificial Sequence
  Description of Artificial Sequence: Synthetic oligonucleotide
  Sense strand starting at position 478 of SEQ ID NO: 1881930
uagaaacaguuguuccagu

SEQ ID NO: 2081969 - RNA, 19 nt, Artificial Sequence
  Description of Artificial Sequence: Synthetic oligonucleotide
  Antisense strand to SEQ ID NO: 2081968
acuggaacaacuguuucua

SEQ ID NO: 2081970 - RNA, 19 nt, Artificial Sequence
  Description of Artificial Sequence: Synthetic oligonucleotide
  Sense strand starting at position 616 of SEQ ID NO: 1881930
guuggaccuucagugagaa

SEQ ID NO: 2081971 - RNA, 19 nt, Artificial Sequence
  Description of Artificial Sequence: Synthetic oligonucleotide
  Antisense strand to SEQ ID NO: 2081970
uucucacugaagguccaac

SEQ ID NO: 2081972 - RNA, 19 nt, Artificial Sequence
  Description of Artificial Sequence: Synthetic oligonucleotide
  Sense strand starting at position 1242 of SEQ ID NO: 1881930
gcaccuguaacaugugaga

SEQ ID NO: 2081973 - RNA, 19 nt, Artificial Sequence
  Description of Artificial Sequence: Synthetic oligonucleotide
  Antisense strand to SEQ ID NO: 2081972
ucucacauguuacaggugc

SEQ ID NO: 2081974 - RNA, 19 nt, Artificial Sequence
  Description of Artificial Sequence: Synthetic oligonucleotide
  Sense strand starting at position 1327 of SEQ ID NO: 1881930
uuacucugggccugaauua

SEQ ID NO: 2081975 - RNA, 19 nt, Artificial Sequence
  Description of Artificial Sequence: Synthetic oligonucleotide
  Antisense strand to SEQ ID NO: 2081974
uaauucaggcccagaguaa

SEQ ID NO: 2081976 - RNA, 19 nt, Artificial Sequence
  Description of Artificial Sequence: Synthetic oligonucleotide
  Sense strand starting at position 1420 of SEQ ID NO: 1881930
gucucugagaucggucaau

SEQ ID NO: 2081977 - RNA, 19 nt, Artificial Sequence
  Description of Artificial Sequence: Synthetic oligonucleotide
  Antisense strand to SEQ ID NO: 2081976
auugaccgaucucagagac

SEQ ID NO: 2081978 - RNA, 19 nt, Artificial Sequence
  Description of Artificial Sequence: Synthetic oligonucleotide
  Sense strand starting at position 1570 of SEQ ID NO: 1881930
acaggauccugacuuguca

SEQ ID NO: 2081979 - RNA, 19 nt, Artificial Sequence
  Description of Artificial Sequence: Synthetic oligonucleotide
  Antisense strand to SEQ ID NO: 2081978
ugacaagucaggauccugu

SEQ ID NO: 2081980 - RNA, 19 nt, Artificial Sequence
  Description of Artificial Sequence: Synthetic oligonucleotide
  Sense strand starting at position 1572 of SEQ ID NO: 1881930
aggauccugacuugucaga

SEQ ID NO: 2081981 - RNA, 19 nt, Artificial Sequence
  Description of Artificial Sequence: Synthetic oligonucleotide
  Antisense strand to SEQ ID NO: 2081980
ucugacaagucaggauccu

SEQ ID NO: 2081982 - RNA, 19 nt, Artificial Sequence
  Description of Artificial Sequence: Synthetic oligonucleotide
  Sense strand starting at position 1583 of SEQ ID NO: 1881930
uugucagagccacauuaua

SEQ ID NO: 2081983 - RNA, 19 nt, Artificial Sequence
  Description of Artificial Sequence: Synthetic oligonucleotide
  Antisense strand to SEQ ID NO: 2081982
uauaauguggcucugacaa

SEQ ID NO: 2081984 - RNA, 19 nt, Artificial Sequence
  Description of Artificial Sequence: Synthetic oligonucleotide
  Sense strand starting at position 1649 of SEQ ID NO: 1881930
gugggaaacuaauugucaa

SEQ ID NO: 2081985 - RNA, 19 nt, Artificial Sequence
  Description of Artificial Sequence: Synthetic oligonucleotide
  Antisense strand to SEQ ID NO: 2081984
uugacaauuaguuucccac

SEQ ID NO: 2081986 - RNA, 19 nt, Artificial Sequence
  Description of Artificial Sequence: Synthetic oligonucleotide
  Sense strand starting at position 1719 of SEQ ID NO: 1881930
acuguugagcgagagguuu

SEQ ID NO: 2081987 - RNA, 19 nt, Artificial Sequence
  Description of Artificial Sequence: Synthetic oligonucleotide
  Antisense strand to SEQ ID NO: 2081986
aaaccucucgcucaacagu

SEQ ID NO: 2081988 - RNA, 19 nt, Artificial Sequence
  Description of Artificial Sequence: Synthetic oligonucleotide
  Sense strand starting at position 1792 of SEQ ID NO: 1881930
auuaaauugguaugaucca

SEQ ID NO: 2081989 - RNA, 19 nt, Artificial Sequence
  Description of Artificial Sequence: Synthetic oligonucleotide
  Antisense strand to SEQ ID NO: 2081988
uggaucauaccaauuuaau

SEQ ID NO: 2081990 - RNA, 19 nt, Artificial Sequence
  Description of Artificial Sequence: Synthetic oligonucleotide
  Sense strand starting at position 1989 of SEQ ID NO: 1881930
gggcuugauggguaaaguc

SEQ ID NO: 2081991 - RNA, 19 nt, Artificial Sequence
  Description of Artificial Sequence: Synthetic oligonucleotide
  Antisense strand to SEQ ID NO: 2081990
gacuuuacccaucaagccc

SEQ ID NO: 2081992 - RNA, 19 nt, Artificial Sequence
  Description of Artificial Sequence: Synthetic oligonucleotide
  Sense strand starting at position 1997 of SEQ ID NO: 1881930
uggguaaagucuuuccaga

SEQ ID NO: 2081993 - RNA, 19 nt, Artificial Sequence
  Description of Artificial Sequence: Synthetic oligonucleotide
  Antisense strand to SEQ ID NO: 2081992
ucuggaaagacuuuaccca

SEQ ID NO: 2081994 - RNA, 19 nt, Artificial Sequence
  Description of Artificial Sequence: Synthetic oligonucleotide
  Sense strand starting at position 1999 of SEQ ID NO: 1881930
gguaaagucuuuccagaac

SEQ ID NO: 2081995 - RNA, 19 nt, Artificial Sequence
  Description of Artificial Sequence: Synthetic oligonucleotide
  Antisense strand to SEQ ID NO: 2081994
guucuggaaagacuuuacc

SEQ ID NO: 2081996 - RNA, 19 nt, Artificial Sequence
  Description of Artificial Sequence: Synthetic oligonucleotide
  Sense strand starting at position 2017 of SEQ ID NO: 1881930
cuuccaaucuggucagaac

SEQ ID NO: 2081997 - RNA, 19 nt, Artificial Sequence
  Description of Artificial Sequence: Synthetic oligonucleotide
  Antisense strand to SEQ ID NO: 2081996
guucugaccagauuggaag

SEQ ID NO: 2081998 - RNA, 19 nt, Artificial Sequence
  Description of Artificial Sequence: Synthetic oligonucleotide
  Sense strand starting at position 2018 of SEQ ID NO: 1881930
uuccaaucuggucagaacu

SEQ ID NO: 2081999 - RNA, 19 nt, Artificial Sequence
  Description of Artificial Sequence: Synthetic oligonucleotide
  Antisense strand to SEQ ID NO: 2081998
aguucugaccagauuggaa

SEQ ID NO: 2082000 - RNA, 19 nt, Artificial Sequence
  Description of Artificial Sequence: Synthetic oligonucleotide
  Sense strand starting at position 2026 of SEQ ID NO: 1881930
uggucagaacuuggaugau

SEQ ID NO: 2082001 - RNA, 19 nt, Artificial Sequence
  Description of Artificial Sequence: Synthetic oligonucleotide
  Antisense strand to SEQ ID NO: 2082000
aucauccaaguucugacca

SEQ ID NO: 2082002 - RNA, 19 nt, Artificial Sequence
  Description of Artificial Sequence: Synthetic oligonucleotide
  Sense strand starting at position 2029 of SEQ ID NO: 1881930
ucagaacuuggaugauucu

SEQ ID NO: 2082003 - RNA, 19 nt, Artificial Sequence
  Description of Artificial Sequence: Synthetic oligonucleotide
  Antisense strand to SEQ ID NO: 2082002
agaaucauccaaguucuga

SEQ ID NO: 2082004 - RNA, 19 nt, Artificial Sequence
  Description of Artificial Sequence: Synthetic oligonucleotide
  Sense strand starting at position 2125 of SEQ ID NO: 1881930
augauaaguuaugugacua

SEQ ID NO: 2082005 - RNA, 19 nt, Artificial Sequence
  Description of Artificial Sequence: Synthetic oligonucleotide
  Antisense strand to SEQ ID NO: 2082004
uagucacauaacuuaucau

SEQ ID NO: 2082006 - RNA, 19 nt, Artificial Sequence
  Description of Artificial Sequence: Synthetic oligonucleotide
  Sense strand starting at position 2136 of SEQ ID NO: 1881930
ugugacuauccuggcuaca

SEQ ID NO: 2082007 - RNA, 19 nt, Artificial Sequence
  Description of Artificial Sequence: Synthetic oligonucleotide
  Antisense strand to SEQ ID NO: 2082006
uguagccaggauagucaca

SEQ ID NO: 2082008 - RNA, 19 nt, Artificial Sequence
  Description of Artificial Sequence: Synthetic oligonucleotide
  Sense strand starting at position 2138 of SEQ ID NO: 1881930
ugacuauccuggcuacaaa

SEQ ID NO: 2082009 - RNA, 19 nt, Artificial Sequence
  Description of Artificial Sequence: Synthetic oligonucleotide
  Antisense strand to SEQ ID NO: 2082008
uuuguagccaggauaguca

SEQ ID NO: 2082010 - RNA, 19 nt, Artificial Sequence
  Description of Artificial Sequence: Synthetic oligonucleotide
  Sense strand starting at position 2160 of SEQ ID NO: 1881930
cagauaugagauugugggu

SEQ ID NO: 2082011 - RNA, 19 nt, Artificial Sequence
  Description of Artificial Sequence: Synthetic oligonucleotide
  Antisense strand to SEQ ID NO: 2082010
acccacaaucucauaucug

SEQ ID NO: 2082012 - RNA, 19 nt, Artificial Sequence
  Description of Artificial Sequence: Synthetic oligonucleotide
  Sense strand starting at position 2165 of SEQ ID NO: 1881930
augagauuguggguuacuc

SEQ ID NO: 2082013 - RNA, 19 nt, Artificial Sequence
  Description of Artificial Sequence: Synthetic oligonucleotide
  Antisense strand to SEQ ID NO: 2082012
gaguaacccacaaucucau

SEQ ID NO: 2082014 - RNA, 19 nt, Artificial Sequence
  Description of Artificial Sequence: Synthetic oligonucleotide
  Sense strand starting at position 2167 of SEQ ID NO: 1881930
gagauuguggguuacucau

SEQ ID NO: 2082015 - RNA, 19 nt, Artificial Sequence
  Description of Artificial Sequence: Synthetic oligonucleotide
  Antisense strand to SEQ ID NO: 2082014
augaguaacccacaaucuc

SEQ ID NO: 2082016 - RNA, 19 nt, Artificial Sequence
  Description of Artificial Sequence: Synthetic oligonucleotide
  Sense strand starting at position 2175 of SEQ ID NO: 1881930
ggguuacucauacgacaug

SEQ ID NO: 2082017 - RNA, 19 nt, Artificial Sequence
  Description of Artificial Sequence: Synthetic oligonucleotide
  Antisense strand to SEQ ID NO: 2082016
caugucguaugaguaaccc

SEQ ID NO: 2082018 - RNA, 19 nt, Artificial Sequence
  Description of Artificial Sequence: Synthetic oligonucleotide
  Sense strand starting at position 2267 of SEQ ID NO: 1881930
uuaugcucaaagugaggua

SEQ ID NO: 2082019 - RNA, 19 nt, Artificial Sequence
  Description of Artificial Sequence: Synthetic oligonucleotide
  Antisense strand to SEQ ID NO: 2082018
uaccucacuuugagcauaa

SEQ ID NO: 2082020 - RNA, 19 nt, Artificial Sequence
  Description of Artificial Sequence: Synthetic oligonucleotide
  Sense strand starting at position 2566 of SEQ ID NO: 1881930
agaacacaucucuguuuga

SEQ ID NO: 2082021 - RNA, 19 nt, Artificial Sequence
  Description of Artificial Sequence: Synthetic oligonucleotide
  Antisense strand to SEQ ID NO: 2082020
ucaaacagagauguguucu

SEQ ID NO: 2082022 - RNA, 19 nt, Artificial Sequence
  Description of Artificial Sequence: Synthetic oligonucleotide
  Sense strand starting at position 2577 of SEQ ID NO: 1881930
cuguuugagucuccaauga

SEQ ID NO: 2082023 - RNA, 19 nt, Artificial Sequence
  Description of Artificial Sequence: Synthetic oligonucleotide
  Antisense strand to SEQ ID NO: 2082022
ucauuggagacucaaacag

SEQ ID NO: 2082024 - RNA, 19 nt, Artificial Sequence
  Description of Artificial Sequence: Synthetic oligonucleotide
  Sense strand starting at position 2703 of SEQ ID NO: 1881930
caaacugugggaugucaca

SEQ ID NO: 2082025 - RNA, 19 nt, Artificial Sequence
  Description of Artificial Sequence: Synthetic oligonucleotide
  Antisense strand to SEQ ID NO: 2082024
ugugacaucccacaguuug

SEQ ID NO: 2082026 - RNA, 19 nt, Artificial Sequence
  Description of Artificial Sequence: Synthetic oligonucleotide
  Sense strand starting at position 2715 of SEQ ID NO: 1881930
ugucacacauucuugagua

SEQ ID NO: 2082027 - RNA, 19 nt, Artificial Sequence
  Description of Artificial Sequence: Synthetic oligonucleotide
  Antisense strand to SEQ ID NO: 2082026
uacucaagaaugugugaca

SEQ ID NO: 2082028 - RNA, 19 nt, Artificial Sequence
  Description of Artificial Sequence: Synthetic oligonucleotide
  Sense strand starting at position 2719 of SEQ ID NO: 1881930
acacauucuugaguaugaa

SEQ ID NO: 2082029 - RNA, 19 nt, Artificial Sequence
  Description of Artificial Sequence: Synthetic oligonucleotide
  Antisense strand to SEQ ID NO: 2082028
uucauacucaagaaugugu

SEQ ID NO: 2082030 - RNA, 19 nt, Artificial Sequence
  Description of Artificial Sequence: Synthetic oligonucleotide
  Sense strand starting at position 2784 of SEQ ID NO: 1881930
cccacaauguguuuauucu

SEQ ID NO: 2082031 - RNA, 19 nt, Artificial Sequence
  Description of Artificial Sequence: Synthetic oligonucleotide
  Antisense strand to SEQ ID NO: 2082030
agaauaaacacauuguggg

SEQ ID NO: 2082032 - RNA, 19 nt, Artificial Sequence
  Description of Artificial Sequence: Synthetic oligonucleotide
  Sense strand starting at position 2785 of SEQ ID NO: 1881930
ccacaauguguuuauucua

SEQ ID NO: 2082033 - RNA, 19 nt, Artificial Sequence
  Description of Artificial Sequence: Synthetic oligonucleotide
  Antisense strand to SEQ ID NO: 2082032
uagaauaaacacauugugg

SEQ ID NO: 2082034 - RNA, 19 nt, Artificial Sequence
  Description of Artificial Sequence: Synthetic oligonucleotide
  Sense strand starting at position 2872 of SEQ ID NO: 1881930
uguggaagaaucugauuau

SEQ ID NO: 2082035 - RNA, 19 nt, Artificial Sequence
  Description of Artificial Sequence: Synthetic oligonucleotide
  Antisense strand to SEQ ID NO: 2082034
auaaucagauucuuccaca

SEQ ID NO: 2082036 - RNA, 19 nt, Artificial Sequence
  Description of Artificial Sequence: Synthetic oligonucleotide
  Sense strand starting at position 2901 of SEQ ID NO: 1881930
gcauuuaauugagagaauu

SEQ ID NO: 2082037 - RNA, 19 nt, Artificial Sequence
  Description of Artificial Sequence: Synthetic oligonucleotide
  Antisense strand to SEQ ID NO: 2082036
aauucucucaauuaaaugc

SEQ ID NO: 2082038 - RNA, 19 nt, Artificial Sequence
  Description of Artificial Sequence: Synthetic oligonucleotide
  Sense strand starting at position 3221 of SEQ ID NO: 1881930
acaugugcucaauguggau

SEQ ID NO: 2082039 - RNA, 19 nt, Artificial Sequence
  Description of Artificial Sequence: Synthetic oligonucleotide
  Antisense strand to SEQ ID NO: 2082038
auccacauugagcacaugu

SEQ ID NO: 2082040 - RNA, 19 nt, Artificial Sequence
  Description of Artificial Sequence: Synthetic oligonucleotide
  Sense strand starting at position 3225 of SEQ ID NO: 1881930
gugcucaauguggauguua

SEQ ID NO: 2082041 - RNA, 19 nt, Artificial Sequence
  Description of Artificial Sequence: Synthetic oligonucleotide
  Antisense strand to SEQ ID NO: 2082040
uaacauccacauugagcac

SEQ ID NO: 2082042 - RNA, 19 nt, Artificial Sequence
  Description of Artificial Sequence: Synthetic oligonucleotide
  Sense strand starting at position 3227 of SEQ ID NO: 1881930
gcucaauguggauguuaau

SEQ ID NO: 2082043 - RNA, 19 nt, Artificial Sequence
  Description of Artificial Sequence: Synthetic oligonucleotide
  Antisense strand to SEQ ID NO: 2082042
auuaacauccacauugagc

SEQ ID NO: 2082044 - RNA, 19 nt, Artificial Sequence
  Description of Artificial Sequence: Synthetic oligonucleotide
  Sense strand starting at position 389 of SEQ ID NO: 1881931
cuggucuaccaguaaguuu

SEQ ID NO: 2082045 - RNA, 19 nt, Artificial Sequence
  Description of Artificial Sequence: Synthetic oligonucleotide
  Antisense strand to SEQ ID NO: 2082044
aaacuuacugguagaccag

SEQ ID NO: 2082046 - RNA, 19 nt, Artificial Sequence
  Description of Artificial Sequence: Synthetic oligonucleotide
  Sense strand starting at position 414 of SEQ ID NO: 1881931
aguugagaaagauguguaa

SEQ ID NO: 2082047 - RNA, 19 nt, Artificial Sequence
  Description of Artificial Sequence: Synthetic oligonucleotide
  Antisense strand to SEQ ID NO: 2082046
uuacacaucuuucucaacu

SEQ ID NO: 2082048 - RNA, 19 nt, Artificial Sequence
  Description of Artificial Sequence: Synthetic oligonucleotide
  Sense strand starting at position 417 of SEQ ID NO: 1881931
ugagaaagauguguaaagu

SEQ ID NO: 2082049 - RNA, 19 nt, Artificial Sequence
  Description of Artificial Sequence: Synthetic oligonucleotide
  Antisense strand to SEQ ID NO: 2082048
acuuuacacaucuuucuca

SEQ ID NO: 2082050 - RNA, 19 nt, Artificial Sequence
  Description of Artificial Sequence: Synthetic oligonucleotide
  Sense strand starting at position 569 of SEQ ID NO: 1881931
acuggagagucauugcuag

SEQ ID NO: 2082051 - RNA, 19 nt, Artificial Sequence
  Description of Artificial Sequence: Synthetic oligonucleotide
  Antisense strand to SEQ ID NO: 2082050
cuagcaaugacucuccagu

SEQ ID NO: 2082052 - RNA, 19 nt, Artificial Sequence
  Description of Artificial Sequence: Synthetic oligonucleotide
  Sense strand starting at position 595 of SEQ ID NO: 1881931
gaaguaagcaggugguuua

SEQ ID NO: 2082053 - RNA, 19 nt, Artificial Sequence
  Description of Artificial Sequence: Synthetic oligonucleotide
  Antisense strand to SEQ ID NO: 2082052
uaaaccaccugcuuacuuc

SEQ ID NO: 2082054 - RNA, 19 nt, Artificial Sequence
  Description of Artificial Sequence: Synthetic oligonucleotide
  Sense strand starting at position 608 of SEQ ID NO: 1881931
gguuuaaugaacuguagua

SEQ ID NO: 2082055 - RNA, 19 nt, Artificial Sequence
  Description of Artificial Sequence: Synthetic oligonucleotide
  Antisense strand to SEQ ID NO: 2082054
uacuacaguucauuaaacc

SEQ ID NO: 2082056 - RNA, 19 nt, Artificial Sequence
  Description of Artificial Sequence: Synthetic oligonucleotide
  Sense strand starting at position 683 of SEQ ID NO: 1881931
gcuuuauugcuauagagga

SEQ ID NO: 2082057 - RNA, 19 nt, Artificial Sequence
  Description of Artificial Sequence: Synthetic oligonucleotide
  Antisense strand to SEQ ID NO: 2082056
uccucuauagcaauaaagc

SEQ ID NO: 2082058 - RNA, 19 nt, Artificial Sequence
  Description of Artificial Sequence: Synthetic oligonucleotide
  Sense strand starting at position 861 of SEQ ID NO: 1881931
ucaugccucagagagugaa

SEQ ID NO: 2082059 - RNA, 19 nt, Artificial Sequence
  Description of Artificial Sequence: Synthetic oligonucleotide
  Antisense strand to SEQ ID NO: 2082058
uucacucucugaggcauga

SEQ ID NO: 2082060 - RNA, 19 nt, Artificial Sequence
  Description of Artificial Sequence: Synthetic oligonucleotide
  Sense strand starting at position 880 of SEQ ID NO: 1881931
ugaauacugccaggguaag

SEQ ID NO: 2082061 - RNA, 19 nt, Artificial Sequence
  Description of Artificial Sequence: Synthetic oligonucleotide
  Antisense strand to SEQ ID NO: 2082060
cuuacccuggcaguauuca

SEQ ID NO: 2082062 - RNA, 19 nt, Artificial Sequence
  Description of Artificial Sequence: Synthetic oligonucleotide
  Sense strand starting at position 944 of SEQ ID NO: 1881931
caggaaacgugacugaguu

SEQ ID NO: 2082063 - RNA, 19 nt, Artificial Sequence
  Description of Artificial Sequence: Synthetic oligonucleotide
  Antisense strand to SEQ ID NO: 2082062
aacucagucacguuuccug

SEQ ID NO: 2082064 - RNA, 19 nt, Artificial Sequence
  Description of Artificial Sequence: Synthetic oligonucleotide
  Sense strand starting at position 982 of SEQ ID NO: 1881931
cuugccauagcucauugaa

SEQ ID NO: 2082065 - RNA, 19 nt, Artificial Sequence
  Description of Artificial Sequence: Synthetic oligonucleotide
  Antisense strand to SEQ ID NO: 2082064
uucaaugagcuauggcaag

SEQ ID NO: 2082066 - RNA, 19 nt, Artificial Sequence
  Description of Artificial Sequence: Synthetic oligonucleotide
  Sense strand starting at position 984 of SEQ ID NO: 1881931
ugccauagcucauugaaau

SEQ ID NO: 2082067 - RNA, 19 nt, Artificial Sequence
  Description of Artificial Sequence: Synthetic oligonucleotide
  Antisense strand to SEQ ID NO: 2082066
auuucaaugagcuauggca

SEQ ID NO: 2082068 - RNA, 19 nt, Artificial Sequence
  Description of Artificial Sequence: Synthetic oligonucleotide
  Sense strand starting at position 985 of SEQ ID NO: 1881931
gccauagcucauugaaauc

SEQ ID NO: 2082069 - RNA, 19 nt, Artificial Sequence
  Description of Artificial Sequence: Synthetic oligonucleotide
  Antisense strand to SEQ ID NO: 2082068
gauuucaaugagcuauggc

SEQ ID NO: 2082070 - RNA, 19 nt, Artificial Sequence
  Description of Artificial Sequence: Synthetic oligonucleotide
  Sense strand starting at position 1125 of SEQ ID NO: 1881931
cguugaggucugcaggaaa

SEQ ID NO: 2082071 - RNA, 19 nt, Artificial Sequence
  Description of Artificial Sequence: Synthetic oligonucleotide
  Antisense strand to SEQ ID NO: 2082070
uuuccugcagaccucaacg

SEQ ID NO: 2082072 - RNA, 19 nt, Artificial Sequence
  Description of Artificial Sequence: Synthetic oligonucleotide
  Sense strand starting at position 1163 of SEQ ID NO: 1881931
cuccuaagucuagguaagu

SEQ ID NO: 2082073 - RNA, 19 nt, Artificial Sequence
  Description of Artificial Sequence: Synthetic oligonucleotide
  Antisense strand to SEQ ID NO: 2082072
acuuaccuagacuuaggag

SEQ ID NO: 2082074 - RNA, 19 nt, Artificial Sequence
  Description of Artificial Sequence: Synthetic oligonucleotide
  Sense strand starting at position 1232 of SEQ ID NO: 1881931
cccauaucaucugggauuu

SEQ ID NO: 2082075 - RNA, 19 nt, Artificial Sequence
  Description of Artificial Sequence: Synthetic oligonucleotide
  Antisense strand to SEQ ID NO: 2082074
aaaucccagaugauauggg

SEQ ID NO: 2082076 - RNA, 19 nt, Artificial Sequence
  Description of Artificial Sequence: Synthetic oligonucleotide
  Sense strand starting at position 1283 of SEQ ID NO: 1881931
agagaagacuggccaucuu

SEQ ID NO: 2082077 - RNA, 19 nt, Artificial Sequence
  Description of Artificial Sequence: Synthetic oligonucleotide
  Antisense strand to SEQ ID NO: 2082076
aagauggccagucuucucu

SEQ ID NO: 2082078 - RNA, 19 nt, Artificial Sequence
  Description of Artificial Sequence: Synthetic oligonucleotide
  Sense strand starting at position 1478 of SEQ ID NO: 1881931
gcaagaggcuugcuuagga

SEQ ID NO: 2082079 - RNA, 19 nt, Artificial Sequence
  Description of Artificial Sequence: Synthetic oligonucleotide
  Antisense strand to SEQ ID NO: 2082078
uccuaagcaagccucuugc

SEQ ID NO: 2082080 - RNA, 19 nt, Artificial Sequence
  Description of Artificial Sequence: Synthetic oligonucleotide
  Sense strand starting at position 2054 of SEQ ID NO: 1881931
cucccaaguguguaucuaa

SEQ ID NO: 2082081 - RNA, 19 nt, Artificial Sequence
  Description of Artificial Sequence: Synthetic oligonucleotide
  Antisense strand to SEQ ID NO: 2082080
uuagauacacacuugggag

SEQ ID NO: 2082082 - RNA, 19 nt, Artificial Sequence
  Description of Artificial Sequence: Synthetic oligonucleotide
  Sense strand starting at position 2100 of SEQ ID NO: 1881931
ccuccuauuggaugucuca

SEQ ID NO: 2082083 - RNA, 19 nt, Artificial Sequence
  Description of Artificial Sequence: Synthetic oligonucleotide
  Antisense strand to SEQ ID NO: 2082082
ugagacauccaauaggagg

SEQ ID NO: 2082084 - RNA, 19 nt, Artificial Sequence
  Description of Artificial Sequence: Synthetic oligonucleotide
  Sense strand starting at position 2446 of SEQ ID NO: 1881931
gcaguagacagauguguua

SEQ ID NO: 2082085 - RNA, 19 nt, Artificial Sequence
  Description of Artificial Sequence: Synthetic oligonucleotide
  Antisense strand to SEQ ID NO: 2082084
uaacacaucugucuacugc

SEQ ID NO: 2082086 - RNA, 19 nt, Artificial Sequence
  Description of Artificial Sequence: Synthetic oligonucleotide
  Sense strand starting at position 2470 of SEQ ID NO: 1881931
uaaguucgaccauaugauu

SEQ ID NO: 2082087 - RNA, 19 nt, Artificial Sequence
  Description of Artificial Sequence: Synthetic oligonucleotide
  Antisense strand to SEQ ID NO: 2082086
aaucauauggucgaacuua

SEQ ID NO: 2082088 - RNA, 19 nt, Artificial Sequence
  Description of Artificial Sequence: Synthetic oligonucleotide
  Sense strand starting at position 2473 of SEQ ID NO: 1881931
guucgaccauaugauuuau

SEQ ID NO: 2082089 - RNA, 19 nt, Artificial Sequence
  Description of Artificial Sequence: Synthetic oligonucleotide
  Antisense strand to SEQ ID NO: 2082088
auaaaucauauggucgaac

SEQ ID NO: 2082090 - RNA, 19 nt, Artificial Sequence
  Description of Artificial Sequence: Synthetic oligonucleotide
  Sense strand starting at position 2646 of SEQ ID NO: 1881931
gguugaucccucugucuga

SEQ ID NO: 2082091 - RNA, 19 nt, Artificial Sequence
  Description of Artificial Sequence: Synthetic oligonucleotide
  Antisense strand to SEQ ID NO: 2082090
ucagacagagggaucaacc

SEQ ID NO: 2082092 - RNA, 19 nt, Artificial Sequence
  Description of Artificial Sequence: Synthetic oligonucleotide
  Sense strand starting at position 2647 of SEQ ID NO: 1881931
guugaucccucugucugaa

SEQ ID NO: 2082093 - RNA, 19 nt, Artificial Sequence
  Description of Artificial Sequence: Synthetic oligonucleotide
  Antisense strand to SEQ ID NO: 2082092
uucagacagagggaucaac

SEQ ID NO: 2082094 - RNA, 19 nt, Artificial Sequence
  Description of Artificial Sequence: Synthetic oligonucleotide
  Sense strand starting at position 2649 of SEQ ID NO: 1881931
ugaucccucugucugaaau

SEQ ID NO: 2082095 - RNA, 19 nt, Artificial Sequence
  Description of Artificial Sequence: Synthetic oligonucleotide
  Antisense strand to SEQ ID NO: 2082094
auuucagacagagggauca

SEQ ID NO: 2082096 - RNA, 19 nt, Artificial Sequence
  Description of Artificial Sequence: Synthetic oligonucleotide
  Sense strand starting at position 2650 of SEQ ID NO: 1881931
gaucccucugucugaaaug

SEQ ID NO: 2082097 - RNA, 19 nt, Artificial Sequence
  Description of Artificial Sequence: Synthetic oligonucleotide
  Antisense strand to SEQ ID NO: 2082096
cauuucagacagagggauc

SEQ ID NO: 2082098 - RNA, 19 nt, Artificial Sequence
  Description of Artificial Sequence: Synthetic oligonucleotide
  Sense strand starting at position 2844 of SEQ ID NO: 1881931
guguguauuuaacuguuga

SEQ ID NO: 2082099 - RNA, 19 nt, Artificial Sequence
  Description of Artificial Sequence: Synthetic oligonucleotide
  Antisense strand to SEQ ID NO: 2082098
ucaacaguuaaauacacac

SEQ ID NO: 2082100 - RNA, 19 nt, Artificial Sequence
  Description of Artificial Sequence: Synthetic oligonucleotide
  Sense strand starting at position 2845 of SEQ ID NO: 1881931
uguguauuuaacuguugac

SEQ ID NO: 2082101 - RNA, 19 nt, Artificial Sequence
  Description of Artificial Sequence: Synthetic oligonucleotide
  Antisense strand to SEQ ID NO: 2082100
gucaacaguuaaauacaca

SEQ ID NO: 2082102 - RNA, 19 nt, Artificial Sequence
  Description of Artificial Sequence: Synthetic oligonucleotide
  Sense strand starting at position 2881 of SEQ ID NO: 1881931
uuccaugaucagggauuau

SEQ ID NO: 2082103 - RNA, 19 nt, Artificial Sequence
  Description of Artificial Sequence: Synthetic oligonucleotide
  Antisense strand to SEQ ID NO: 2082102
auaaucccugaucauggaa

SEQ ID NO: 2082104 - RNA, 19 nt, Artificial Sequence
  Description of Artificial Sequence: Synthetic oligonucleotide
  Sense strand starting at position 2891 of SEQ ID NO: 1881931
agggauuaugccugucuca

SEQ ID NO: 2082105 - RNA, 19 nt, Artificial Sequence
  Description of Artificial Sequence: Synthetic oligonucleotide
  Antisense strand to SEQ ID NO: 2082104
ugagacaggcauaaucccu

SEQ ID NO: 2082106 - RNA, 19 nt, Artificial Sequence
  Description of Artificial Sequence: Synthetic oligonucleotide
  Sense strand starting at position 2950 of SEQ ID NO: 1881931
cagugcucugucuuuaguu

SEQ ID NO: 2082107 - RNA, 19 nt, Artificial Sequence
  Description of Artificial Sequence: Synthetic oligonucleotide
  Antisense strand to SEQ ID NO: 2082106
aacuaaagacagagcacug

SEQ ID NO: 2082108 - RNA, 19 nt, Artificial Sequence
  Description of Artificial Sequence: Synthetic oligonucleotide
  Sense strand starting at position 2955 of SEQ ID NO: 1881931
cucugucuuuaguuaaaga

SEQ ID NO: 2082109 - RNA, 19 nt, Artificial Sequence
  Description of Artificial Sequence: Synthetic oligonucleotide
  Antisense strand to SEQ ID NO: 2082108
ucuuuaacuaaagacagag

SEQ ID NO: 2082110 - RNA, 19 nt, Artificial Sequence
  Description of Artificial Sequence: Synthetic oligonucleotide
  Sense strand starting at position 2974 of SEQ ID NO: 1881931
auguguacuagucagguca

SEQ ID NO: 2082111 - RNA, 19 nt, Artificial Sequence
  Description of Artificial Sequence: Synthetic oligonucleotide
  Antisense strand to SEQ ID NO: 2082110
ugaccugacuaguacacau

SEQ ID NO: 2082112 - RNA, 19 nt, Artificial Sequence
  Description of Artificial Sequence: Synthetic oligonucleotide
  Sense strand starting at position 3028 of SEQ ID NO: 1881931
ggaggcugucccuacaaau

SEQ ID NO: 2082113 - RNA, 19 nt, Artificial Sequence
  Description of Artificial Sequence: Synthetic oligonucleotide
  Antisense strand to SEQ ID NO: 2082112
auuuguagggacagccucc

SEQ ID NO: 2082114 - RNA, 19 nt, Artificial Sequence
  Description of Artificial Sequence: Synthetic oligonucleotide
  Sense strand starting at position 3457 of SEQ ID NO: 1881931
cagaguuugcaaugaggug

SEQ ID NO: 2082115 - RNA, 19 nt, Artificial Sequence
  Description of Artificial Sequence: Synthetic oligonucleotide
  Antisense strand to SEQ ID NO: 2082114
caccucauugcaaacucug

SEQ ID NO: 2082116 - RNA, 19 nt, Artificial Sequence
  Description of Artificial Sequence: Synthetic oligonucleotide
  Sense strand starting at position 3462 of SEQ ID NO: 1881931
uuugcaaugaggugagauc

SEQ ID NO: 2082117 - RNA, 19 nt, Artificial Sequence
  Description of Artificial Sequence: Synthetic oligonucleotide
  Antisense strand to SEQ ID NO: 2082116
gaucucaccucauugcaaa

SEQ ID NO: 2082118 - RNA, 19 nt, Artificial Sequence
  Description of Artificial Sequence: Synthetic oligonucleotide
  Sense strand starting at position 3618 of SEQ ID NO: 1881931
gcacuugcugagcaacuau

SEQ ID NO: 2082119 - RNA, 19 nt, Artificial Sequence
  Description of Artificial Sequence: Synthetic oligonucleotide
  Antisense strand to SEQ ID NO: 2082118
auaguugcucagcaagugc

SEQ ID NO: 2082120 - RNA, 19 nt, Artificial Sequence
  Description of Artificial Sequence: Synthetic oligonucleotide
  Sense strand starting at position 3874 of SEQ ID NO: 1881931
gcuccaauccuguauuugu

SEQ ID NO: 2082121 - RNA, 19 nt, Artificial Sequence
  Description of Artificial Sequence: Synthetic oligonucleotide
  Antisense strand to SEQ ID NO: 2082120
acaaauacaggauuggagc

SEQ ID NO: 2082122 - RNA, 19 nt, Artificial Sequence
  Description of Artificial Sequence: Synthetic oligonucleotide
  Sense strand starting at position 3937 of SEQ ID NO: 1881931
ucuucuguacaaugaagau

SEQ ID NO: 2082123 - RNA, 19 nt, Artificial Sequence
  Description of Artificial Sequence: Synthetic oligonucleotide
  Antisense strand to SEQ ID NO: 2082122
aucuucauuguacagaaga

SEQ ID NO: 2082124 - RNA, 19 nt, Artificial Sequence
  Description of Artificial Sequence: Synthetic oligonucleotide
  Sense strand starting at position 31 of SEQ ID NO: 1881932
cagggaucuucuuugcuuu

SEQ ID NO: 2082125 - RNA, 19 nt, Artificial Sequence
  Description of Artificial Sequence: Synthetic oligonucleotide
  Antisense strand to SEQ ID NO: 2082124
aaagcaaagaagaucccug

SEQ ID NO: 2082126 - RNA, 19 nt, Artificial Sequence
  Description of Artificial Sequence: Synthetic oligonucleotide
  Sense strand starting at position 97 of SEQ ID NO: 1881932
agauguugcaaacagguau

SEQ ID NO: 2082127 - RNA, 19 nt, Artificial Sequence
  Description of Artificial Sequence: Synthetic oligonucleotide
  Antisense strand to SEQ ID NO: 2082126
auaccuguuugcaacaucu

SEQ ID NO: 2082128 - RNA, 19 nt, Artificial Sequence
  Description of Artificial Sequence: Synthetic oligonucleotide
  Sense strand starting at position 193 of SEQ ID NO: 1881932
agaggaguuuccuucucaa

SEQ ID NO: 2082129 - RNA, 19 nt, Artificial Sequence
  Description of Artificial Sequence: Synthetic oligonucleotide
  Antisense strand to SEQ ID NO: 2082128
uugagaaggaaacuccucu

SEQ ID NO: 2082130 - RNA, 19 nt, Artificial Sequence
  Description of Artificial Sequence: Synthetic oligonucleotide
  Sense strand starting at position 232 of SEQ ID NO: 1881932
augacugcucauggcuaau

SEQ ID NO: 2082131 - RNA, 19 nt, Artificial Sequence
  Description of Artificial Sequence: Synthetic oligonucleotide
  Antisense strand to SEQ ID NO: 2082130
auuagccaugagcagucau

SEQ ID NO: 2082132 - RNA, 19 nt, Artificial Sequence
  Description of Artificial Sequence: Synthetic oligonucleotide
  Sense strand starting at position 431 of SEQ ID NO: 1881932
gguuuacaacucuguauaa

SEQ ID NO: 2082133 - RNA, 19 nt, Artificial Sequence
  Description of Artificial Sequence: Synthetic oligonucleotide
  Antisense strand to SEQ ID NO: 2082132
uuauacagaguuguaaacc

SEQ ID NO: 2082134 - RNA, 19 nt, Artificial Sequence
  Description of Artificial Sequence: Synthetic oligonucleotide
  Sense strand starting at position 432 of SEQ ID NO: 1881932
guuuacaacucuguauaaa

SEQ ID NO: 2082135 - RNA, 19 nt, Artificial Sequence
  Description of Artificial Sequence: Synthetic oligonucleotide
  Antisense strand to SEQ ID NO: 2082134
uuuauacagaguuguaaac

SEQ ID NO: 2082136 - RNA, 19 nt, Artificial Sequence
  Description of Artificial Sequence: Synthetic oligonucleotide
  Sense strand starting at position 475 of SEQ ID NO: 1881932
guggaauauaaacguagaa

SEQ ID NO: 2082137 - RNA, 19 nt, Artificial Sequence
  Description of Artificial Sequence: Synthetic oligonucleotide
  Antisense strand to SEQ ID NO: 2082136
uucuacguuuauauuccac

SEQ ID NO: 2082138 - RNA, 19 nt, Artificial Sequence
  Description of Artificial Sequence: Synthetic oligonucleotide
  Sense strand starting at position 534 of SEQ ID NO: 1881932
aaagacauucgcuaaguuu

SEQ ID NO: 2082139 - RNA, 19 nt, Artificial Sequence
  Description of Artificial Sequence: Synthetic oligonucleotide
  Antisense strand to SEQ ID NO: 2082138
aaacuuagcgaaugucuuu

SEQ ID NO: 2082140 - RNA, 19 nt, Artificial Sequence
  Description of Artificial Sequence: Synthetic oligonucleotide
  Sense strand starting at position 584 of SEQ ID NO: 1881932
cuuuacugucacuguggaa

SEQ ID NO: 2082141 - RNA, 19 nt, Artificial Sequence
  Description of Artificial Sequence: Synthetic oligonucleotide
  Antisense strand to SEQ ID NO: 2082140
uuccacagugacaguaaag

SEQ ID NO: 2082142 - RNA, 19 nt, Artificial Sequence
  Description of Artificial Sequence: Synthetic oligonucleotide
  Sense strand starting at position 680 of SEQ ID NO: 1881932
agaacauauugauuaugca

SEQ ID NO: 2082143 - RNA, 19 nt, Artificial Sequence
  Description of Artificial Sequence: Synthetic oligonucleotide
  Antisense strand to SEQ ID NO: 2082142
ugcauaaucaauauguucu

SEQ ID NO: 2082144 - RNA, 19 nt, Artificial Sequence
  Description of Artificial Sequence: Synthetic oligonucleotide
  Sense strand starting at position 719 of SEQ ID NO: 1881932
uaaagcagcucugugaaua

SEQ ID NO: 2082145 - RNA, 19 nt, Artificial Sequence
  Description of Artificial Sequence: Synthetic oligonucleotide
  Antisense strand to SEQ ID NO: 2082144
uauucacagagcugcuuua

SEQ ID NO: 2082146 - RNA, 19 nt, Artificial Sequence
  Description of Artificial Sequence: Synthetic oligonucleotide
  Sense strand starting at position 720 of SEQ ID NO: 1881932
aaagcagcucugugaauag

SEQ ID NO: 2082147 - RNA, 19 nt, Artificial Sequence
  Description of Artificial Sequence: Synthetic oligonucleotide
  Antisense strand to SEQ ID NO: 2082146
cuauucacagagcugcuuu

SEQ ID NO: 2082148 - RNA, 19 nt, Artificial Sequence
  Description of Artificial Sequence: Synthetic oligonucleotide
  Sense strand starting at position 732 of SEQ ID NO: 1881932
ugaauagagaccugccagu

SEQ ID NO: 2082149 - RNA, 19 nt, Artificial Sequence
  Description of Artificial Sequence: Synthetic oligonucleotide
  Antisense strand to SEQ ID NO: 2082148
acuggcaggucucuauuca

SEQ ID NO: 2082150 - RNA, 19 nt, Artificial Sequence
  Description of Artificial Sequence: Synthetic oligonucleotide
  Sense strand starting at position 809 of SEQ ID NO: 1881932
gccuaucuggaagagcuau

SEQ ID NO: 2082151 - RNA, 19 nt, Artificial Sequence
  Description of Artificial Sequence: Synthetic oligonucleotide
  Antisense strand to SEQ ID NO: 2082150
auagcucuuccagauaggc

SEQ ID NO: 2082152 - RNA, 19 nt, Artificial Sequence
  Description of Artificial Sequence: Synthetic oligonucleotide
  Sense strand starting at position 944 of SEQ ID NO: 1881932
augguuacguauuugcuaa

SEQ ID NO: 2082153 - RNA, 19 nt, Artificial Sequence
  Description of Artificial Sequence: Synthetic oligonucleotide
  Antisense strand to SEQ ID NO: 2082152
uuagcaaauacguaaccau

SEQ ID NO: 2082154 - RNA, 19 nt, Artificial Sequence
  Description of Artificial Sequence: Synthetic oligonucleotide
  Sense strand starting at position 945 of SEQ ID NO: 1881932
ugguuacguauuugcuaaa

SEQ ID NO: 2082155 - RNA, 19 nt, Artificial Sequence
  Description of Artificial Sequence: Synthetic oligonucleotide
  Antisense strand to SEQ ID NO: 2082154
uuuagcaaauacguaacca

SEQ ID NO: 2082156 - RNA, 19 nt, Artificial Sequence
  Description of Artificial Sequence: Synthetic oligonucleotide
  Sense strand starting at position 995 of SEQ ID NO: 1881932
ggcagauaugcgugggaaa

SEQ ID NO: 2082157 - RNA, 19 nt, Artificial Sequence
  Description of Artificial Sequence: Synthetic oligonucleotide
  Antisense strand to SEQ ID NO: 2082156
uuucccacgcauaucugcc

SEQ ID NO: 2082158 - RNA, 19 nt, Artificial Sequence
  Description of Artificial Sequence: Synthetic oligonucleotide
  Sense strand starting at position 996 of SEQ ID NO: 1881932
gcagauaugcgugggaaag

SEQ ID NO: 2082159 - RNA, 19 nt, Artificial Sequence
  Description of Artificial Sequence: Synthetic oligonucleotide
  Antisense strand to SEQ ID NO: 2082158
cuuucccacgcauaucugc

SEQ ID NO: 2082160 - RNA, 19 nt, Artificial Sequence
  Description of Artificial Sequence: Synthetic oligonucleotide
  Sense strand starting at position 997 of SEQ ID NO: 1881932
cagauaugcgugggaaagu

SEQ ID NO: 2082161 - RNA, 19 nt, Artificial Sequence
  Description of Artificial Sequence: Synthetic oligonucleotide
  Antisense strand to SEQ ID NO: 2082160
acuuucccacgcauaucug

SEQ ID NO: 2082162 - RNA, 19 nt, Artificial Sequence
  Description of Artificial Sequence: Synthetic oligonucleotide
  Sense strand starting at position 1068 of SEQ ID NO: 1881932
uuacauuguaguuguaaug

SEQ ID NO: 2082163 - RNA, 19 nt, Artificial Sequence
  Description of Artificial Sequence: Synthetic oligonucleotide
  Antisense strand to SEQ ID NO: 2082162
cauuacaacuacaauguaa

SEQ ID NO: 2082164 - RNA, 19 nt, Artificial Sequence
  Description of Artificial Sequence: Synthetic oligonucleotide
  Sense strand starting at position 1074 of SEQ ID NO: 1881932
uguaguuguaaugggaaca

SEQ ID NO: 2082165 - RNA, 19 nt, Artificial Sequence
  Description of Artificial Sequence: Synthetic oligonucleotide
  Antisense strand to SEQ ID NO: 2082164
uguucccauuacaacuaca

SEQ ID NO: 2082166 - RNA, 19 nt, Artificial Sequence
  Description of Artificial Sequence: Synthetic oligonucleotide
  Sense strand starting at position 1075 of SEQ ID NO: 1881932
guaguuguaaugggaacaa

SEQ ID NO: 2082167 - RNA, 19 nt, Artificial Sequence
  Description of Artificial Sequence: Synthetic oligonucleotide
  Antisense strand to SEQ ID NO: 2082166
uuguucccauuacaacuac

SEQ ID NO: 2082168 - RNA, 19 nt, Artificial Sequence
  Description of Artificial Sequence: Synthetic oligonucleotide
  Sense strand starting at position 1546 of SEQ ID NO: 1881932
guuguacaguuauccauuu

SEQ ID NO: 2082169 - RNA, 19 nt, Artificial Sequence
  Description of Artificial Sequence: Synthetic oligonucleotide
  Antisense strand to SEQ ID NO: 2082168
aaauggauaacuguacaac

SEQ ID NO: 2082170 - RNA, 19 nt, Artificial Sequence
  Description of Artificial Sequence: Synthetic oligonucleotide
  Sense strand starting at position 1831 of SEQ ID NO: 1881932
guuccauuucccugucuag

SEQ ID NO: 2082171 - RNA, 19 nt, Artificial Sequence
  Description of Artificial Sequence: Synthetic oligonucleotide
  Antisense strand to SEQ ID NO: 2082170
cuagacagggaaauggaac

SEQ ID NO: 2082172 - RNA, 19 nt, Artificial Sequence
  Description of Artificial Sequence: Synthetic oligonucleotide
  Sense strand starting at position 2306 of SEQ ID NO: 1881932
ugcggaauagauuaagcua

SEQ ID NO: 2082173 - RNA, 19 nt, Artificial Sequence
  Description of Artificial Sequence: Synthetic oligonucleotide
  Antisense strand to SEQ ID NO: 2082172
uagcuuaaucuauuccgca

SEQ ID NO: 2082174 - RNA, 19 nt, Artificial Sequence
  Description of Artificial Sequence: Synthetic oligonucleotide
  Sense strand starting at position 2355 of SEQ ID NO: 1881932
agcugagcugaguaaugau

SEQ ID NO: 2082175 - RNA, 19 nt, Artificial Sequence
  Description of Artificial Sequence: Synthetic oligonucleotide
  Antisense strand to SEQ ID NO: 2082174
aucauuacucagcucagcu

SEQ ID NO: 2082176 - RNA, 19 nt, Artificial Sequence
  Description of Artificial Sequence: Synthetic oligonucleotide
  Sense strand starting at position 2509 of SEQ ID NO: 1881932
gcggcaucggugaaacuuc

SEQ ID NO: 2082177 - RNA, 19 nt, Artificial Sequence
  Description of Artificial Sequence: Synthetic oligonucleotide
  Antisense strand to SEQ ID NO: 2082176
gaaguuucaccgaugccgc

SEQ ID NO: 2082178 - RNA, 19 nt, Artificial Sequence
  Description of Artificial Sequence: Synthetic oligonucleotide
  Sense strand starting at position 2603 of SEQ ID NO: 1881932
gagccaucuccagggaauc

SEQ ID NO: 2082179 - RNA, 19 nt, Artificial Sequence
  Description of Artificial Sequence: Synthetic oligonucleotide
  Antisense strand to SEQ ID NO: 2082178
gauucccuggagauggcuc

SEQ ID NO: 2082180 - RNA, 19 nt, Artificial Sequence
  Description of Artificial Sequence: Synthetic oligonucleotide
  Sense strand starting at position 2604 of SEQ ID NO: 1881932
agccaucuccagggaauca

SEQ ID NO: 2082181 - RNA, 19 nt, Artificial Sequence
  Description of Artificial Sequence: Synthetic oligonucleotide
  Antisense strand to SEQ ID NO: 2082180
ugauucccuggagauggcu

SEQ ID NO: 2082182 - RNA, 19 nt, Artificial Sequence
  Description of Artificial Sequence: Synthetic oligonucleotide
  Sense strand starting at position 2741 of SEQ ID NO: 1881932
gucuucugacagugaagua

SEQ ID NO: 2082183 - RNA, 19 nt, Artificial Sequence
  Description of Artificial Sequence: Synthetic oligonucleotide
  Antisense strand to SEQ ID NO: 2082182
uacuucacugucagaagac

SEQ ID NO: 2082184 - RNA, 19 nt, Artificial Sequence
  Description of Artificial Sequence: Synthetic oligonucleotide
  Sense strand starting at position 2805 of SEQ ID NO: 1881932
acgcgucuugauagcgauu

SEQ ID NO: 2082185 - RNA, 19 nt, Artificial Sequence
  Description of Artificial Sequence: Synthetic oligonucleotide
  Antisense strand to SEQ ID NO: 2082184
aaucgcuaucaagacgcgu

SEQ ID NO: 2082186 - RNA, 19 nt, Artificial Sequence
  Description of Artificial Sequence: Synthetic oligonucleotide
  Sense strand starting at position 3394 of SEQ ID NO: 1881932
uacauucuccgucacgaca

SEQ ID NO: 2082187 - RNA, 19 nt, Artificial Sequence
  Description of Artificial Sequence: Synthetic oligonucleotide
  Antisense strand to SEQ ID NO: 2082186
ugucgugacggagaaugua

SEQ ID NO: 2082188 - RNA, 19 nt, Artificial Sequence
  Description of Artificial Sequence: Synthetic oligonucleotide
  Sense strand starting at position 3403 of SEQ ID NO: 1881932
cgucacgacaacuaagaaa

SEQ ID NO: 2082189 - RNA, 19 nt, Artificial Sequence
  Description of Artificial Sequence: Synthetic oligonucleotide
  Antisense strand to SEQ ID NO: 2082188
uuucuuaguugucgugacg

SEQ ID NO: 2082190 - RNA, 19 nt, Artificial Sequence
  Description of Artificial Sequence: Synthetic oligonucleotide
  Sense strand starting at position 3525 of SEQ ID NO: 1881932
ucaaucuuugugggcucaa

SEQ ID NO: 2082191 - RNA, 19 nt, Artificial Sequence
  Description of Artificial Sequence: Synthetic oligonucleotide
  Antisense strand to SEQ ID NO: 2082190
uugagcccacaaagauuga

SEQ ID NO: 2082192 - RNA, 19 nt, Artificial Sequence
  Description of Artificial Sequence: Synthetic oligonucleotide
  Sense strand starting at position 3710 of SEQ ID NO: 1881932
cugggaucacaucgcuuua

SEQ ID NO: 2082193 - RNA, 19 nt, Artificial Sequence
  Description of Artificial Sequence: Synthetic oligonucleotide
  Antisense strand to SEQ ID NO: 2082192
uaaagcgaugugaucccag

SEQ ID NO: 2082194 - RNA, 19 nt, Artificial Sequence
  Description of Artificial Sequence: Synthetic oligonucleotide
  Sense strand starting at position 3712 of SEQ ID NO: 1881932
gggaucacaucgcuuuaua

SEQ ID NO: 2082195 - RNA, 19 nt, Artificial Sequence
  Description of Artificial Sequence: Synthetic oligonucleotide
  Antisense strand to SEQ ID NO: 2082194
uauaaagcgaugugauccc

SEQ ID NO: 2082196 - RNA, 19 nt, Artificial Sequence
  Description of Artificial Sequence: Synthetic oligonucleotide
  Sense strand starting at position 3783 of SEQ ID NO: 1881932
cuuuauaaucaacguuaug

SEQ ID NO: 2082197 - RNA, 19 nt, Artificial Sequence
  Description of Artificial Sequence: Synthetic oligonucleotide
  Antisense strand to SEQ ID NO: 2082196
cauaacguugauuauaaag

SEQ ID NO: 2082198 - RNA, 19 nt, Artificial Sequence
  Description of Artificial Sequence: Synthetic oligonucleotide
  Sense strand starting at position 3858 of SEQ ID NO: 1881932
gacagcugugguuggaaga

SEQ ID NO: 2082199 - RNA, 19 nt, Artificial Sequence
  Description of Artificial Sequence: Synthetic oligonucleotide
  Antisense strand to SEQ ID NO: 2082198
ucuuccaaccacagcuguc

SEQ ID NO: 2082200 - RNA, 19 nt, Artificial Sequence
  Description of Artificial Sequence: Synthetic oligonucleotide
  Sense strand starting at position 3859 of SEQ ID NO: 1881932
acagcugugguuggaagaa

SEQ ID NO: 2082201 - RNA, 19 nt, Artificial Sequence
  Description of Artificial Sequence: Synthetic oligonucleotide
  Antisense strand to SEQ ID NO: 2082200
uucuuccaaccacagcugu

SEQ ID NO: 2082202 - RNA, 19 nt, Artificial Sequence
  Description of Artificial Sequence: Synthetic oligonucleotide
  Sense strand starting at position 3899 of SEQ ID NO: 1881932
ugcauuguuguccauaaca

SEQ ID NO: 2082203 - RNA, 19 nt, Artificial Sequence
  Description of Artificial Sequence: Synthetic oligonucleotide
  Antisense strand to SEQ ID NO: 2082202
uguuauggacaacaaugca

SEQ ID NO: 2082204 - RNA, 19 nt, Artificial Sequence
  Description of Artificial Sequence: Synthetic oligonucleotide
  Sense strand starting at position 97 of SEQ ID NO: 1881933
aaaugaacccauugcguau

SEQ ID NO: 2082205 - RNA, 19 nt, Artificial Sequence
  Description of Artificial Sequence: Synthetic oligonucleotide
  Antisense strand to SEQ ID NO: 2082204
auacgcaauggguucauuu

SEQ ID NO: 2082206 - RNA, 19 nt, Artificial Sequence
  Description of Artificial Sequence: Synthetic oligonucleotide
  Sense strand starting at position 101 of SEQ ID NO: 1881933
gaacccauugcguauggaa

SEQ ID NO: 2082207 - RNA, 19 nt, Artificial Sequence
  Description of Artificial Sequence: Synthetic oligonucleotide
  Antisense strand to SEQ ID NO: 2082206
uuccauacgcaauggguuc

SEQ ID NO: 2082208 - RNA, 19 nt, Artificial Sequence
  Description of Artificial Sequence: Synthetic oligonucleotide
  Sense strand starting at position 194 of SEQ ID NO: 1881933
aaugguguguccguaauuu

SEQ ID NO: 2082209 - RNA, 19 nt, Artificial Sequence
  Description of Artificial Sequence: Synthetic oligonucleotide
  Antisense strand to SEQ ID NO: 2082208
aaauuacggacacaccauu

SEQ ID NO: 2082210 - RNA, 19 nt, Artificial Sequence
  Description of Artificial Sequence: Synthetic oligonucleotide
  Sense strand starting at position 231 of SEQ ID NO: 1881933
guucguagucuugcucacu

SEQ ID NO: 2082211 - RNA, 19 nt, Artificial Sequence
  Description of Artificial Sequence: Synthetic oligonucleotide
  Antisense strand to SEQ ID NO: 2082210
agugagcaagacuacgaac

SEQ ID NO: 2082212 - RNA, 19 nt, Artificial Sequence
  Description of Artificial Sequence: Synthetic oligonucleotide
  Sense strand starting at position 329 of SEQ ID NO: 1881933
uguggaauugucuggaauu

SEQ ID NO: 2082213 - RNA, 19 nt, Artificial Sequence
  Description of Artificial Sequence: Synthetic oligonucleotide
  Antisense strand to SEQ ID NO: 2082212
aauuccagacaauuccaca

SEQ ID NO: 2082214 - RNA, 19 nt, Artificial Sequence
  Description of Artificial Sequence: Synthetic oligonucleotide
  Sense strand starting at position 331 of SEQ ID NO: 1881933
uggaauugucuggaauugu

SEQ ID NO: 2082215 - RNA, 19 nt, Artificial Sequence
  Description of Artificial Sequence: Synthetic oligonucleotide
  Antisense strand to SEQ ID NO: 2082214
acaauuccagacaauucca

SEQ ID NO: 2082216 - RNA, 19 nt, Artificial Sequence
  Description of Artificial Sequence: Synthetic oligonucleotide
  Sense strand starting at position 369 of SEQ ID NO: 1881933
cguaguaaggguucguagu

SEQ ID NO: 2082217 - RNA, 19 nt, Artificial Sequence
  Description of Artificial Sequence: Synthetic oligonucleotide
  Antisense strand to SEQ ID NO: 2082216
acuacgaacccuuacuacg

SEQ ID NO: 2082218 - RNA, 19 nt, Artificial Sequence
  Description of Artificial Sequence: Synthetic oligonucleotide
  Sense strand starting at position 1038 of SEQ ID NO: 1881933
gagcuaguuccagacaauc

SEQ ID NO: 2082219 - RNA, 19 nt, Artificial Sequence
  Description of Artificial Sequence: Synthetic oligonucleotide
  Antisense strand to SEQ ID NO: 2082218
gauugucuggaacuagcuc

SEQ ID NO: 2082220 - RNA, 19 nt, Artificial Sequence
  Description of Artificial Sequence: Synthetic oligonucleotide
  Sense strand starting at position 1095 of SEQ ID NO: 1881933
ggcuaugguggccaacaau

SEQ ID NO: 2082221 - RNA, 19 nt, Artificial Sequence
  Description of Artificial Sequence: Synthetic oligonucleotide
  Antisense strand to SEQ ID NO: 2082220
auuguuggccaccauagcc

SEQ ID NO: 2082222 - RNA, 19 nt, Artificial Sequence
  Description of Artificial Sequence: Synthetic oligonucleotide
  Sense strand starting at position 1143 of SEQ ID NO: 1881933
gggauucagucuccgauca

SEQ ID NO: 2082223 - RNA, 19 nt, Artificial Sequence
  Description of Artificial Sequence: Synthetic oligonucleotide
  Antisense strand to SEQ ID NO: 2082222
ugaucggagacugaauccc

SEQ ID NO: 2082224 - RNA, 19 nt, Artificial Sequence
  Description of Artificial Sequence: Synthetic oligonucleotide
  Sense strand starting at position 1675 of SEQ ID NO: 1881933
gugugaggauuucaugaac

SEQ ID NO: 2082225 - RNA, 19 nt, Artificial Sequence
  Description of Artificial Sequence: Synthetic oligonucleotide
  Antisense strand to SEQ ID NO: 2082224
guucaugaaauccucacac

SEQ ID NO: 2082226 - RNA, 19 nt, Artificial Sequence
  Description of Artificial Sequence: Synthetic oligonucleotide
  Sense strand starting at position 1686 of SEQ ID NO: 1881933
ucaugaaccuguccugcau

SEQ ID NO: 2082227 - RNA, 19 nt, Artificial Sequence
  Description of Artificial Sequence: Synthetic oligonucleotide
  Antisense strand to SEQ ID NO: 2082226
augcaggacagguucauga

SEQ ID NO: 2082228 - RNA, 19 nt, Artificial Sequence
  Description of Artificial Sequence: Synthetic oligonucleotide
  Sense strand starting at position 1753 of SEQ ID NO: 1881933
gccuguacucgggcaguuu

SEQ ID NO: 2082229 - RNA, 19 nt, Artificial Sequence
  Description of Artificial Sequence: Synthetic oligonucleotide
  Antisense strand to SEQ ID NO: 2082228
aaacugcccgaguacaggc

SEQ ID NO: 2082230 - RNA, 19 nt, Artificial Sequence
  Description of Artificial Sequence: Synthetic oligonucleotide
  Sense strand starting at position 2012 of SEQ ID NO: 1881933
gagguuuccuuccugugau

SEQ ID NO: 2082231 - RNA, 19 nt, Artificial Sequence
  Description of Artificial Sequence: Synthetic oligonucleotide
  Antisense strand to SEQ ID NO: 2082230
aucacaggaaggaaaccuc

SEQ ID NO: 2082232 - RNA, 19 nt, Artificial Sequence
  Description of Artificial Sequence: Synthetic oligonucleotide
  Sense strand starting at position 2126 of SEQ ID NO: 1881933
uucuguucugcuggagaug

SEQ ID NO: 2082233 - RNA, 19 nt, Artificial Sequence
  Description of Artificial Sequence: Synthetic oligonucleotide
  Antisense strand to SEQ ID NO: 2082232
caucuccagcagaacagaa

SEQ ID NO: 2082234 - RNA, 19 nt, Artificial Sequence
  Description of Artificial Sequence: Synthetic oligonucleotide
  Sense strand starting at position 2127 of SEQ ID NO: 1881933
ucuguucugcuggagauga

SEQ ID NO: 2082235 - RNA, 19 nt, Artificial Sequence
  Description of Artificial Sequence: Synthetic oligonucleotide
  Antisense strand to SEQ ID NO: 2082234
ucaucuccagcagaacaga

SEQ ID NO: 2082236 - RNA, 19 nt, Artificial Sequence
  Description of Artificial Sequence: Synthetic oligonucleotide
  Sense strand starting at position 2222 of SEQ ID NO: 1881933
cgacauucagcuucguagu

SEQ ID NO: 2082237 - RNA, 19 nt, Artificial Sequence
  Description of Artificial Sequence: Synthetic oligonucleotide
  Antisense strand to SEQ ID NO: 2082236
acuacgaagcugaaugucg

SEQ ID NO: 2082238 - RNA, 19 nt, Artificial Sequence
  Description of Artificial Sequence: Synthetic oligonucleotide
  Sense strand starting at position 2300 of SEQ ID NO: 1881933
aagugauuccuguauacag

SEQ ID NO: 2082239 - RNA, 19 nt, Artificial Sequence
  Description of Artificial Sequence: Synthetic oligonucleotide
  Antisense strand to SEQ ID NO: 2082238
cuguauacaggaaucacuu

SEQ ID NO: 2082240 - RNA, 19 nt, Artificial Sequence
  Description of Artificial Sequence: Synthetic oligonucleotide
  Sense strand starting at position 2302 of SEQ ID NO: 1881933
gugauuccuguauacaguu

SEQ ID NO: 2082241 - RNA, 19 nt, Artificial Sequence
  Description of Artificial Sequence: Synthetic oligonucleotide
  Antisense strand to SEQ ID NO: 2082240
aacuguauacaggaaucac

SEQ ID NO: 2082242 - RNA, 19 nt, Artificial Sequence
  Description of Artificial Sequence: Synthetic oligonucleotide
  Sense strand starting at position 2436 of SEQ ID NO: 1881933
gguuuccgaauccagaaau

SEQ ID NO: 2082243 - RNA, 19 nt, Artificial Sequence
  Description of Artificial Sequence: Synthetic oligonucleotide
  Antisense strand to SEQ ID NO: 2082242
auuucuggauucggaaacc

SEQ ID NO: 2082244 - RNA, 19 nt, Artificial Sequence
  Description of Artificial Sequence: Synthetic oligonucleotide
  Sense strand starting at position 2464 of SEQ ID NO: 1881933
acuuaauugcuaggaaucu

SEQ ID NO: 2082245 - RNA, 19 nt, Artificial Sequence
  Description of Artificial Sequence: Synthetic oligonucleotide
  Antisense strand to SEQ ID NO: 2082244
agauuccuagcaauuaagu

SEQ ID NO: 2082246 - RNA, 19 nt, Artificial Sequence
  Description of Artificial Sequence: Synthetic oligonucleotide
  Sense strand starting at position 2520 of SEQ ID NO: 1881933
cuuauuuccuggcaauaag

SEQ ID NO: 2082247 - RNA, 19 nt, Artificial Sequence
  Description of Artificial Sequence: Synthetic oligonucleotide
  Antisense strand to SEQ ID NO: 2082246
cuuauugccaggaaauaag

SEQ ID NO: 2082248 - RNA, 19 nt, Artificial Sequence
  Description of Artificial Sequence: Synthetic oligonucleotide
  Sense strand starting at position 2538 of SEQ ID NO: 1881933
guaacaguuccugaaauuc

SEQ ID NO: 2082249 - RNA, 19 nt, Artificial Sequence
  Description of Artificial Sequence: Synthetic oligonucleotide
  Antisense strand to SEQ ID NO: 2082248
gaauuucaggaacuguuac

SEQ ID NO: 2082250 - RNA, 19 nt, Artificial Sequence
  Description of Artificial Sequence: Synthetic oligonucleotide
  Sense strand starting at position 3034 of SEQ ID NO: 1881933
ugguguccacucgaugaca

SEQ ID NO: 2082251 - RNA, 19 nt, Artificial Sequence
  Description of Artificial Sequence: Synthetic oligonucleotide
  Antisense strand to SEQ ID NO: 2082250
ugucaucgaguggacacca

SEQ ID NO: 2082252 - RNA, 19 nt, Artificial Sequence
  Description of Artificial Sequence: Synthetic oligonucleotide
  Sense strand starting at position 3036 of SEQ ID NO: 1881933
guguccacucgaugacaua

SEQ ID NO: 2082253 - RNA, 19 nt, Artificial Sequence
  Description of Artificial Sequence: Synthetic oligonucleotide
  Antisense strand to SEQ ID NO: 2082252
uaugucaucgaguggacac

SEQ ID NO: 2082254 - RNA, 19 nt, Artificial Sequence
  Description of Artificial Sequence: Synthetic oligonucleotide
  Sense strand starting at position 3063 of SEQ ID NO: 1881933
gggaucccuuguguaacaa

SEQ ID NO: 2082255 - RNA, 19 nt, Artificial Sequence
  Description of Artificial Sequence: Synthetic oligonucleotide
  Antisense strand to SEQ ID NO: 2082254
uuguuacacaagggauccc

SEQ ID NO: 2082256 - RNA, 19 nt, Artificial Sequence
  Description of Artificial Sequence: Synthetic oligonucleotide
  Sense strand starting at position 3064 of SEQ ID NO: 1881933
ggaucccuuguguaacaaa

SEQ ID NO: 2082257 - RNA, 19 nt, Artificial Sequence
  Description of Artificial Sequence: Synthetic oligonucleotide
  Antisense strand to SEQ ID NO: 2082256
uuuguuacacaagggaucc

SEQ ID NO: 2082258 - RNA, 19 nt, Artificial Sequence
  Description of Artificial Sequence: Synthetic oligonucleotide
  Sense strand starting at position 3160 of SEQ ID NO: 1881933
ccucuaguacgugaauaua

SEQ ID NO: 2082259 - RNA, 19 nt, Artificial Sequence
  Description of Artificial Sequence: Synthetic oligonucleotide
  Antisense strand to SEQ ID NO: 2082258
uauauucacguacuagagg

SEQ ID NO: 2082260 - RNA, 19 nt, Artificial Sequence
  Description of Artificial Sequence: Synthetic oligonucleotide
  Sense strand starting at position 3295 of SEQ ID NO: 1881933
gugugacuucugugacuaa

SEQ ID NO: 2082261 - RNA, 19 nt, Artificial Sequence
  Description of Artificial Sequence: Synthetic oligonucleotide
  Antisense strand to SEQ ID NO: 2082260
uuagucacagaagucacac

SEQ ID NO: 2082262 - RNA, 19 nt, Artificial Sequence
  Description of Artificial Sequence: Synthetic oligonucleotide
  Sense strand starting at position 3298 of SEQ ID NO: 1881933
ugacuucugugacuaaguu

SEQ ID NO: 2082263 - RNA, 19 nt, Artificial Sequence
  Description of Artificial Sequence: Synthetic oligonucleotide
  Antisense strand to SEQ ID NO: 2082262
aacuuagucacagaaguca

SEQ ID NO: 2082264 - RNA, 19 nt, Artificial Sequence
  Description of Artificial Sequence: Synthetic oligonucleotide
  Sense strand starting at position 3299 of SEQ ID NO: 1881933
gacuucugugacuaaguua

SEQ ID NO: 2082265 - RNA, 19 nt, Artificial Sequence
  Description of Artificial Sequence: Synthetic oligonucleotide
  Antisense strand to SEQ ID NO: 2082264
uaacuuagucacagaaguc

SEQ ID NO: 2082266 - RNA, 19 nt, Artificial Sequence
  Description of Artificial Sequence: Synthetic oligonucleotide
  Sense strand starting at position 3523 of SEQ ID NO: 1881933
ugaagaggccuugagaugu

SEQ ID NO: 2082267 - RNA, 19 nt, Artificial Sequence
  Description of Artificial Sequence: Synthetic oligonucleotide
  Antisense strand to SEQ ID NO: 2082266
acaucucaaggccucuuca

SEQ ID NO: 2082268 - RNA, 19 nt, Artificial Sequence
  Description of Artificial Sequence: Synthetic oligonucleotide
  Sense strand starting at position 3556 of SEQ ID NO: 1881933
ccagucuaccuguaacuga

SEQ ID NO: 2082269 - RNA, 19 nt, Artificial Sequence
  Description of Artificial Sequence: Synthetic oligonucleotide
  Antisense strand to SEQ ID NO: 2082268
ucaguuacagguagacugg

SEQ ID NO: 2082270 - RNA, 19 nt, Artificial Sequence
  Description of Artificial Sequence: Synthetic oligonucleotide
  Sense strand starting at position 3718 of SEQ ID NO: 1881933
gggagaauguguguuugag

SEQ ID NO: 2082271 - RNA, 19 nt, Artificial Sequence
  Description of Artificial Sequence: Synthetic oligonucleotide
  Antisense strand to SEQ ID NO: 2082270
cucaaacacacauucuccc

SEQ ID NO: 2082272 - RNA, 19 nt, Artificial Sequence
  Description of Artificial Sequence: Synthetic oligonucleotide
  Sense strand starting at position 3720 of SEQ ID NO: 1881933
gagaauguguguuugagaa

SEQ ID NO: 2082273 - RNA, 19 nt, Artificial Sequence
  Description of Artificial Sequence: Synthetic oligonucleotide
  Antisense strand to SEQ ID NO: 2082272
uucucaaacacacauucuc

SEQ ID NO: 2082274 - RNA, 19 nt, Artificial Sequence
  Description of Artificial Sequence: Synthetic oligonucleotide
  Sense strand starting at position 3874 of SEQ ID NO: 1881933
guauaauguguacauauac

SEQ ID NO: 2082275 - RNA, 19 nt, Artificial Sequence
  Description of Artificial Sequence: Synthetic oligonucleotide
  Antisense strand to SEQ ID NO: 2082274
guauauguacacauuauac

SEQ ID NO: 2082276 - RNA, 19 nt, Artificial Sequence
  Description of Artificial Sequence: Synthetic oligonucleotide
  Sense strand starting at position 3894 of SEQ ID NO: 1881933
ugucaaucaccugggucau

SEQ ID NO: 2082277 - RNA, 19 nt, Artificial Sequence
  Description of Artificial Sequence: Synthetic oligonucleotide
  Antisense strand to SEQ ID NO: 2082276
augacccaggugauugaca

SEQ ID NO: 2082278 - RNA, 19 nt, Artificial Sequence
  Description of Artificial Sequence: Synthetic oligonucleotide
  Sense strand starting at position 3895 of SEQ ID NO: 1881933
gucaaucaccugggucaua

SEQ ID NO: 2082279 - RNA, 19 nt, Artificial Sequence
  Description of Artificial Sequence: Synthetic oligonucleotide
  Antisense strand to SEQ ID NO: 2082278
uaugacccaggugauugac

SEQ ID NO: 2082280 - RNA, 19 nt, Artificial Sequence
  Description of Artificial Sequence: Synthetic oligonucleotide
  Sense strand starting at position 3896 of SEQ ID NO: 1881933
ucaaucaccugggucauaa

SEQ ID NO: 2082281 - RNA, 19 nt, Artificial Sequence
  Description of Artificial Sequence: Synthetic oligonucleotide
  Antisense strand to SEQ ID NO: 2082280
uuaugacccaggugauuga

SEQ ID NO: 2082282 - RNA, 19 nt, Artificial Sequence
  Description of Artificial Sequence: Synthetic oligonucleotide
  Sense strand starting at position 3960 of SEQ ID NO: 1881933
acguaaacuuucuugaaau

SEQ ID NO: 2082283 - RNA, 19 nt, Artificial Sequence
  Description of Artificial Sequence: Synthetic oligonucleotide
  Antisense strand to SEQ ID NO: 2082282
auuucaagaaaguuuacgu

SEQ ID NO: 2082284 - RNA, 19 nt, Artificial Sequence
  Description of Artificial Sequence: Synthetic oligonucleotide
  Sense strand starting at position 104 of SEQ ID NO: 1881934
ugagauuagcaugguagua

SEQ ID NO: 2082285 - RNA, 19 nt, Artificial Sequence
  Description of Artificial Sequence: Synthetic oligonucleotide
  Antisense strand to SEQ ID NO: 2082284
uacuaccaugcuaaucuca

SEQ ID NO: 2082286 - RNA, 19 nt, Artificial Sequence
  Description of Artificial Sequence: Synthetic oligonucleotide
  Sense strand starting at position 262 of SEQ ID NO: 1881934
ugcauuuacugagagaaga

SEQ ID NO: 2082287 - RNA, 19 nt, Artificial Sequence
  Description of Artificial Sequence: Synthetic oligonucleotide
  Antisense strand to SEQ ID NO: 2082286
ucuucucucaguaaaugca

SEQ ID NO: 2082288 - RNA, 19 nt, Artificial Sequence
  Description of Artificial Sequence: Synthetic oligonucleotide
  Sense strand starting at position 314 of SEQ ID NO: 1881934
gaaguucuacuccagguau

SEQ ID NO: 2082289 - RNA, 19 nt, Artificial Sequence
  Description of Artificial Sequence: Synthetic oligonucleotide
  Antisense strand to SEQ ID NO: 2082288
auaccuggaguagaacuuc

SEQ ID NO: 2082290 - RNA, 19 nt, Artificial Sequence
  Description of Artificial Sequence: Synthetic oligonucleotide
  Sense strand starting at position 326 of SEQ ID NO: 1881934
cagguauguuaaguuuaaa

SEQ ID NO: 2082291 - RNA, 19 nt, Artificial Sequence
  Description of Artificial Sequence: Synthetic oligonucleotide
  Antisense strand to SEQ ID NO: 2082290
uuuaaacuuaacauaccug

SEQ ID NO: 2082292 - RNA, 19 nt, Artificial Sequence
  Description of Artificial Sequence: Synthetic oligonucleotide
  Sense strand starting at position 363 of SEQ ID NO: 1881934
agcggaucuugacuacaaa

SEQ ID NO: 2082293 - RNA, 19 nt, Artificial Sequence
  Description of Artificial Sequence: Synthetic oligonucleotide
  Antisense strand to SEQ ID NO: 2082292
uuuguagucaagauccgcu

SEQ ID NO: 2082294 - RNA, 19 nt, Artificial Sequence
  Description of Artificial Sequence: Synthetic oligonucleotide
  Sense strand starting at position 411 of SEQ ID NO: 1881934
gugggcaaucagcauuauu

SEQ ID NO: 2082295 - RNA, 19 nt, Artificial Sequence
  Description of Artificial Sequence: Synthetic oligonucleotide
  Antisense strand to SEQ ID NO: 2082294
aauaaugcugauugcccac

SEQ ID NO: 2082296 - RNA, 19 nt, Artificial Sequence
  Description of Artificial Sequence: Synthetic oligonucleotide
  Sense strand starting at position 655 of SEQ ID NO: 1881934
ugacucauuuccguucuuu

SEQ ID NO: 2082297 - RNA, 19 nt, Artificial Sequence
  Description of Artificial Sequence: Synthetic oligonucleotide
  Antisense strand to SEQ ID NO: 2082296
aaagaacggaaaugaguca

SEQ ID NO: 2082298 - RNA, 19 nt, Artificial Sequence
  Description of Artificial Sequence: Synthetic oligonucleotide
  Sense strand starting at position 659 of SEQ ID NO: 1881934
ucauuuccguucuuuacua

SEQ ID NO: 2082299 - RNA, 19 nt, Artificial Sequence
  Description of Artificial Sequence: Synthetic oligonucleotide
  Antisense strand to SEQ ID NO: 2082298
uaguaaagaacggaaauga

SEQ ID NO: 2082300 - RNA, 19 nt, Artificial Sequence
  Description of Artificial Sequence: Synthetic oligonucleotide
  Sense strand starting at position 722 of SEQ ID NO: 1881934
ucugguaugcaguagaaac

SEQ ID NO: 2082301 - RNA, 19 nt, Artificial Sequence
  Description of Artificial Sequence: Synthetic oligonucleotide
  Antisense strand to SEQ ID NO: 2082300
guuucuacugcauaccaga

SEQ ID NO: 2082302 - RNA, 19 nt, Artificial Sequence
  Description of Artificial Sequence: Synthetic oligonucleotide
  Sense strand starting at position 724 of SEQ ID NO: 1881934
ugguaugcaguagaaacau

SEQ ID NO: 2082303 - RNA, 19 nt, Artificial Sequence
  Description of Artificial Sequence: Synthetic oligonucleotide
  Antisense strand to SEQ ID NO: 2082302
auguuucuacugcauacca

SEQ ID NO: 2082304 - RNA, 19 nt, Artificial Sequence
  Description of Artificial Sequence: Synthetic oligonucleotide
  Sense strand starting at position 752 of SEQ ID NO: 1881934
gacuuaguagccuggauau

SEQ ID NO: 2082305 - RNA, 19 nt, Artificial Sequence
  Description of Artificial Sequence: Synthetic oligonucleotide
  Antisense strand to SEQ ID NO: 2082304
auauccaggcuacuaaguc

SEQ ID NO: 2082306 - RNA, 19 nt, Artificial Sequence
  Description of Artificial Sequence: Synthetic oligonucleotide
  Sense strand starting at position 924 of SEQ ID NO: 1881934
ugaguuugugaugacuaau

SEQ ID NO: 2082307 - RNA, 19 nt, Artificial Sequence
  Description of Artificial Sequence: Synthetic oligonucleotide
  Antisense strand to SEQ ID NO: 2082306
auuagucaucacaaacuca

SEQ ID NO: 2082308 - RNA, 19 nt, Artificial Sequence
  Description of Artificial Sequence: Synthetic oligonucleotide
  Sense strand starting at position 997 of SEQ ID NO: 1881934
aauguuucugaguaauugg

SEQ ID NO: 2082309 - RNA, 19 nt, Artificial Sequence
  Description of Artificial Sequence: Synthetic oligonucleotide
  Antisense strand to SEQ ID NO: 2082308
ccaauuacucagaaacauu

SEQ ID NO: 2082310 - RNA, 19 nt, Artificial Sequence
  Description of Artificial Sequence: Synthetic oligonucleotide
  Sense strand starting at position 1005 of SEQ ID NO: 1881934
ugaguaauugguuauugca

SEQ ID NO: 2082311 - RNA, 19 nt, Artificial Sequence
  Description of Artificial Sequence: Synthetic oligonucleotide
  Antisense strand to SEQ ID NO: 2082310
ugcaauaaccaauuacuca

SEQ ID NO: 2082312 - RNA, 19 nt, Artificial Sequence
  Description of Artificial Sequence: Synthetic oligonucleotide
  Sense strand starting at position 1338 of SEQ ID NO: 1881934
uccaguuuguaucugaaug

SEQ ID NO: 2082313 - RNA, 19 nt, Artificial Sequence
  Description of Artificial Sequence: Synthetic oligonucleotide
  Antisense strand to SEQ ID NO: 2082312
cauucagauacaaacugga

SEQ ID NO: 2082314 - RNA, 19 nt, Artificial Sequence
  Description of Artificial Sequence: Synthetic oligonucleotide
  Sense strand starting at position 1343 of SEQ ID NO: 1881934
uuuguaucugaaugaugcu

SEQ ID NO: 2082315 - RNA, 19 nt, Artificial Sequence
  Description of Artificial Sequence: Synthetic oligonucleotide
  Antisense strand to SEQ ID NO: 2082314
agcaucauucagauacaaa

SEQ ID NO: 2082316 - RNA, 19 nt, Artificial Sequence
  Description of Artificial Sequence: Synthetic oligonucleotide
  Sense strand starting at position 1360 of SEQ ID NO: 1881934
cuaucaucacagugaguug

SEQ ID NO: 2082317 - RNA, 19 nt, Artificial Sequence
  Description of Artificial Sequence: Synthetic oligonucleotide
  Antisense strand to SEQ ID NO: 2082316
caacucacugugaugauag

SEQ ID NO: 2082318 - RNA, 19 nt, Artificial Sequence
  Description of Artificial Sequence: Synthetic oligonucleotide
  Sense strand starting at position 1386 of SEQ ID NO: 1881934
cucagauuacuguaugcua

SEQ ID NO: 2082319 - RNA, 19 nt, Artificial Sequence
  Description of Artificial Sequence: Synthetic oligonucleotide
  Antisense strand to SEQ ID NO: 2082318
uagcauacaguaaucugag

SEQ ID NO: 2082320 - RNA, 19 nt, Artificial Sequence
  Description of Artificial Sequence: Synthetic oligonucleotide
  Sense strand starting at position 1416 of SEQ ID NO: 1881934
ugguuuccugucuagugaa

SEQ ID NO: 2082321 - RNA, 19 nt, Artificial Sequence
  Description of Artificial Sequence: Synthetic oligonucleotide
  Antisense strand to SEQ ID NO: 2082320
uucacuagacaggaaacca

SEQ ID NO: 2082322 - RNA, 19 nt, Artificial Sequence
  Description of Artificial Sequence: Synthetic oligonucleotide
  Sense strand starting at position 1469 of SEQ ID NO: 1881934
agucaauuaggcuaggauu

SEQ ID NO: 2082323 - RNA, 19 nt, Artificial Sequence
  Description of Artificial Sequence: Synthetic oligonucleotide
  Antisense strand to SEQ ID NO: 2082322
aauccuagccuaauugacu

SEQ ID NO: 2082324 - RNA, 19 nt, Artificial Sequence
  Description of Artificial Sequence: Synthetic oligonucleotide
  Sense strand starting at position 1472 of SEQ ID NO: 1881934
caauuaggcuaggauuuga

SEQ ID NO: 2082325 - RNA, 19 nt, Artificial Sequence
  Description of Artificial Sequence: Synthetic oligonucleotide
  Antisense strand to SEQ ID NO: 2082324
ucaaauccuagccuaauug

SEQ ID NO: 2082326 - RNA, 19 nt, Artificial Sequence
  Description of Artificial Sequence: Synthetic oligonucleotide
  Sense strand starting at position 1503 of SEQ ID NO: 1881934
cuguucauuggcuggauga

SEQ ID NO: 2082327 - RNA, 19 nt, Artificial Sequence
  Description of Artificial Sequence: Synthetic oligonucleotide
  Antisense strand to SEQ ID NO: 2082326
ucauccagccaaugaacag

SEQ ID NO: 2082328 - RNA, 19 nt, Artificial Sequence
  Description of Artificial Sequence: Synthetic oligonucleotide
  Sense strand starting at position 1551 of SEQ ID NO: 1881934
ucgauuuccucaucugugu

SEQ ID NO: 2082329 - RNA, 19 nt, Artificial Sequence
  Description of Artificial Sequence: Synthetic oligonucleotide
  Antisense strand to SEQ ID NO: 2082328
acacagaugaggaaaucga

SEQ ID NO: 2082330 - RNA, 19 nt, Artificial Sequence
  Description of Artificial Sequence: Synthetic oligonucleotide
  Sense strand starting at position 1576 of SEQ ID NO: 1881934
gugagacuuaaaugagcua

SEQ ID NO: 2082331 - RNA, 19 nt, Artificial Sequence
  Description of Artificial Sequence: Synthetic oligonucleotide
  Antisense strand to SEQ ID NO: 2082330
uagcucauuuaagucucac

SEQ ID NO: 2082332 - RNA, 19 nt, Artificial Sequence
  Description of Artificial Sequence: Synthetic oligonucleotide
  Sense strand starting at position 1678 of SEQ ID NO: 1881934
uguucugagcucugggaua

SEQ ID NO: 2082333 - RNA, 19 nt, Artificial Sequence
  Description of Artificial Sequence: Synthetic oligonucleotide
  Antisense strand to SEQ ID NO: 2082332
uaucccagagcucagaaca

SEQ ID NO: 2082334 - RNA, 19 nt, Artificial Sequence
  Description of Artificial Sequence: Synthetic oligonucleotide
  Sense strand starting at position 1680 of SEQ ID NO: 1881934
uucugagcucugggauaaa

SEQ ID NO: 2082335 - RNA, 19 nt, Artificial Sequence
  Description of Artificial Sequence: Synthetic oligonucleotide
  Antisense strand to SEQ ID NO: 2082334
uuuaucccagagcucagaa

SEQ ID NO: 2082336 - RNA, 19 nt, Artificial Sequence
  Description of Artificial Sequence: Synthetic oligonucleotide
  Sense strand starting at position 1683 of SEQ ID NO: 1881934
ugagcucugggauaaagca

SEQ ID NO: 2082337 - RNA, 19 nt, Artificial Sequence
  Description of Artificial Sequence: Synthetic oligonucleotide
  Antisense strand to SEQ ID NO: 2082336
ugcuuuaucccagagcuca

SEQ ID NO: 2082338 - RNA, 19 nt, Artificial Sequence
  Description of Artificial Sequence: Synthetic oligonucleotide
  Sense strand starting at position 1789 of SEQ ID NO: 1881934
ccuggauggcucugagcaa

SEQ ID NO: 2082339 - RNA, 19 nt, Artificial Sequence
  Description of Artificial Sequence: Synthetic oligonucleotide
  Antisense strand to SEQ ID NO: 2082338
uugcucagagccauccagg

SEQ ID NO: 2082340 - RNA, 19 nt, Artificial Sequence
  Description of Artificial Sequence: Synthetic oligonucleotide
  Sense strand starting at position 1827 of SEQ ID NO: 1881934
augggcacuuuaucauauu

SEQ ID NO: 2082341 - RNA, 19 nt, Artificial Sequence
  Description of Artificial Sequence: Synthetic oligonucleotide
  Antisense strand to SEQ ID NO: 2082340
aauaugauaaagugcccau

SEQ ID NO: 2082342 - RNA, 19 nt, Artificial Sequence
  Description of Artificial Sequence: Synthetic oligonucleotide
  Sense strand starting at position 2084 of SEQ ID NO: 1881934
ucucgugagacuuacgaga

SEQ ID NO: 2082343 - RNA, 19 nt, Artificial Sequence
  Description of Artificial Sequence: Synthetic oligonucleotide
  Antisense strand to SEQ ID NO: 2082342
ucucguaagucucacgaga

SEQ ID NO: 2082344 - RNA, 19 nt, Artificial Sequence
  Description of Artificial Sequence: Synthetic oligonucleotide
  Sense strand starting at position 2420 of SEQ ID NO: 1881934
aguuucuaguaacuaguau

SEQ ID NO: 2082345 - RNA, 19 nt, Artificial Sequence
  Description of Artificial Sequence: Synthetic oligonucleotide
  Antisense strand to SEQ ID NO: 2082344
auacuaguuacuagaaacu

SEQ ID NO: 2082346 - RNA, 19 nt, Artificial Sequence
  Description of Artificial Sequence: Synthetic oligonucleotide
  Sense strand starting at position 2468 of SEQ ID NO: 1881934
uugcuuaguucccuagaaa

SEQ ID NO: 2082347 - RNA, 19 nt, Artificial Sequence
  Description of Artificial Sequence: Synthetic oligonucleotide
  Antisense strand to SEQ ID NO: 2082346
uuucuagggaacuaagcaa

SEQ ID NO: 2082348 - RNA, 19 nt, Artificial Sequence
  Description of Artificial Sequence: Synthetic oligonucleotide
  Sense strand starting at position 2469 of SEQ ID NO: 1881934
ugcuuaguucccuagaaau

SEQ ID NO: 2082349 - RNA, 19 nt, Artificial Sequence
  Description of Artificial Sequence: Synthetic oligonucleotide
  Antisense strand to SEQ ID NO: 2082348
auuucuagggaacuaagca

SEQ ID NO: 2082350 - RNA, 19 nt, Artificial Sequence
  Description of Artificial Sequence: Synthetic oligonucleotide
  Sense strand starting at position 2781 of SEQ ID NO: 1881934
gaaagaaaucuccguccuc

SEQ ID NO: 2082351 - RNA, 19 nt, Artificial Sequence
  Description of Artificial Sequence: Synthetic oligonucleotide
  Antisense strand to SEQ ID NO: 2082350
gaggacggagauuucuuuc

SEQ ID NO: 2082352 - RNA, 19 nt, Artificial Sequence
  Description of Artificial Sequence: Synthetic oligonucleotide
  Sense strand starting at position 2831 of SEQ ID NO: 1881934
uccacuuacugguuaucuu

SEQ ID NO: 2082353 - RNA, 19 nt, Artificial Sequence
  Description of Artificial Sequence: Synthetic oligonucleotide
  Antisense strand to SEQ ID NO: 2082352
aagauaaccaguaagugga

SEQ ID NO: 2082354 - RNA, 19 nt, Artificial Sequence
  Description of Artificial Sequence: Synthetic oligonucleotide
  Sense strand starting at position 2832 of SEQ ID NO: 1881934
ccacuuacugguuaucuuu

SEQ ID NO: 2082355 - RNA, 19 nt, Artificial Sequence
  Description of Artificial Sequence: Synthetic oligonucleotide
  Antisense strand to SEQ ID NO: 2082354
aaagauaaccaguaagugg

SEQ ID NO: 2082356 - RNA, 19 nt, Artificial Sequence
  Description of Artificial Sequence: Synthetic oligonucleotide
  Sense strand starting at position 3824 of SEQ ID NO: 1881934
uguggauacacugguuaau

SEQ ID NO: 2082357 - RNA, 19 nt, Artificial Sequence
  Description of Artificial Sequence: Synthetic oligonucleotide
  Antisense strand to SEQ ID NO: 2082356
auuaaccaguguauccaca

SEQ ID NO: 2082358 - RNA, 19 nt, Artificial Sequence
  Description of Artificial Sequence: Synthetic oligonucleotide
  Sense strand starting at position 3954 of SEQ ID NO: 1881934
auuuaagacucuuggacug

SEQ ID NO: 2082359 - RNA, 19 nt, Artificial Sequence
  Description of Artificial Sequence: Synthetic oligonucleotide
  Antisense strand to SEQ ID NO: 2082358
caguccaagagucuuaaau

SEQ ID NO: 2082360 - RNA, 19 nt, Artificial Sequence
  Description of Artificial Sequence: Synthetic oligonucleotide
  Sense strand starting at position 3959 of SEQ ID NO: 1881934
agacucuuggacugugaua

SEQ ID NO: 2082361 - RNA, 19 nt, Artificial Sequence
  Description of Artificial Sequence: Synthetic oligonucleotide
  Antisense strand to SEQ ID NO: 2082360
uaucacaguccaagagucu

SEQ ID NO: 2082362 - RNA, 19 nt, Artificial Sequence
  Description of Artificial Sequence: Synthetic oligonucleotide
  Sense strand starting at position 3961 of SEQ ID NO: 1881934
acucuuggacugugauacu

SEQ ID NO: 2082363 - RNA, 19 nt, Artificial Sequence
  Description of Artificial Sequence: Synthetic oligonucleotide
  Antisense strand to SEQ ID NO: 2082362
aguaucacaguccaagagu

SEQ ID NO: 2082364 - RNA, 19 nt, Artificial Sequence
  Description of Artificial Sequence: Synthetic oligonucleotide
  Sense strand starting at position 33 of SEQ ID NO: 1881935
gugcuugugggucccgaua

SEQ ID NO: 2082365 - RNA, 19 nt, Artificial Sequence
  Description of Artificial Sequence: Synthetic oligonucleotide
  Antisense strand to SEQ ID NO: 2082364
uaucgggacccacaagcac

SEQ ID NO: 2082366 - RNA, 19 nt, Artificial Sequence
  Description of Artificial Sequence: Synthetic oligonucleotide
  Sense strand starting at position 38 of SEQ ID NO: 1881935
ugugggucccgauaggaga

SEQ ID NO: 2082367 - RNA, 19 nt, Artificial Sequence
  Description of Artificial Sequence: Synthetic oligonucleotide
  Antisense strand to SEQ ID NO: 2082366
ucuccuaucgggacccaca

SEQ ID NO: 2082368 - RNA, 19 nt, Artificial Sequence
  Description of Artificial Sequence: Synthetic oligonucleotide
  Sense strand starting at position 52 of SEQ ID NO: 1881935
ggagagaugcugugauggu

SEQ ID NO: 2082369 - RNA, 19 nt, Artificial Sequence
  Description of Artificial Sequence: Synthetic oligonucleotide
  Antisense strand to SEQ ID NO: 2082368
accaucacagcaucucucc

SEQ ID NO: 2082370 - RNA, 19 nt, Artificial Sequence
  Description of Artificial Sequence: Synthetic oligonucleotide
  Sense strand starting at position 277 of SEQ ID NO: 1881935
uguauauuacaucagucuu

SEQ ID NO: 2082371 - RNA, 19 nt, Artificial Sequence
  Description of Artificial Sequence: Synthetic oligonucleotide
  Antisense strand to SEQ ID NO: 2082370
aagacugauguaauauaca

SEQ ID NO: 2082372 - RNA, 19 nt, Artificial Sequence
  Description of Artificial Sequence: Synthetic oligonucleotide
  Sense strand starting at position 326 of SEQ ID NO: 1881935
guaccauuaguuuaucagu

SEQ ID NO: 2082373 - RNA, 19 nt, Artificial Sequence
  Description of Artificial Sequence: Synthetic oligonucleotide
  Antisense strand to SEQ ID NO: 2082372
acugauaaacuaaugguac

SEQ ID NO: 2082374 - RNA, 19 nt, Artificial Sequence
  Description of Artificial Sequence: Synthetic oligonucleotide
  Sense strand starting at position 332 of SEQ ID NO: 1881935
uuaguuuaucaguacaggu

SEQ ID NO: 2082375 - RNA, 19 nt, Artificial Sequence
  Description of Artificial Sequence: Synthetic oligonucleotide
  Antisense strand to SEQ ID NO: 2082374
accuguacugauaaacuaa

SEQ ID NO: 2082376 - RNA, 19 nt, Artificial Sequence
  Description of Artificial Sequence: Synthetic oligonucleotide
  Sense strand starting at position 334 of SEQ ID NO: 1881935
aguuuaucaguacagguaa

SEQ ID NO: 2082377 - RNA, 19 nt, Artificial Sequence
  Description of Artificial Sequence: Synthetic oligonucleotide
  Antisense strand to SEQ ID NO: 2082376
uuaccuguacugauaaacu

SEQ ID NO: 2082378 - RNA, 19 nt, Artificial Sequence
  Description of Artificial Sequence: Synthetic oligonucleotide
  Sense strand starting at position 535 of SEQ ID NO: 1881935
gguggaagaugugugagaa

SEQ ID NO: 2082379 - RNA, 19 nt, Artificial Sequence
  Description of Artificial Sequence: Synthetic oligonucleotide
  Antisense strand to SEQ ID NO: 2082378
uucucacacaucuuccacc

SEQ ID NO: 2082380 - RNA, 19 nt, Artificial Sequence
  Description of Artificial Sequence: Synthetic oligonucleotide
  Sense strand starting at position 536 of SEQ ID NO: 1881935
guggaagaugugugagaag

SEQ ID NO: 2082381 - RNA, 19 nt, Artificial Sequence
  Description of Artificial Sequence: Synthetic oligonucleotide
  Antisense strand to SEQ ID NO: 2082380
cuucucacacaucuuccac

SEQ ID NO: 2082382 - RNA, 19 nt, Artificial Sequence
  Description of Artificial Sequence: Synthetic oligonucleotide
  Sense strand starting at position 590 of SEQ ID NO: 1881935
agucccaaagugugaaauu

SEQ ID NO: 2082383 - RNA, 19 nt, Artificial Sequence
  Description of Artificial Sequence: Synthetic oligonucleotide
  Antisense strand to SEQ ID NO: 2082382
aauuucacacuuugggacu

SEQ ID NO: 2082384 - RNA, 19 nt, Artificial Sequence
  Description of Artificial Sequence: Synthetic oligonucleotide
  Sense strand starting at position 619 of SEQ ID NO: 1881935
cugugagggucccuggaaa

SEQ ID NO: 2082385 - RNA, 19 nt, Artificial Sequence
  Description of Artificial Sequence: Synthetic oligonucleotide
  Antisense strand to SEQ ID NO: 2082384
uuuccagggacccucacag

SEQ ID NO: 2082386 - RNA, 19 nt, Artificial Sequence
  Description of Artificial Sequence: Synthetic oligonucleotide
  Sense strand starting at position 747 of SEQ ID NO: 1881935
ggaagacucaucgaugguu

SEQ ID NO: 2082387 - RNA, 19 nt, Artificial Sequence
  Description of Artificial Sequence: Synthetic oligonucleotide
  Antisense strand to SEQ ID NO: 2082386
aaccaucgaugagucuucc

SEQ ID NO: 2082388 - RNA, 19 nt, Artificial Sequence
  Description of Artificial Sequence: Synthetic oligonucleotide
  Sense strand starting at position 780 of SEQ ID NO: 1881935
gaaugaugggccuggcuca

SEQ ID NO: 2082389 - RNA, 19 nt, Artificial Sequence
  Description of Artificial Sequence: Synthetic oligonucleotide
  Antisense strand to SEQ ID NO: 2082388
ugagccaggcccaucauuc

SEQ ID NO: 2082390 - RNA, 19 nt, Artificial Sequence
  Description of Artificial Sequence: Synthetic oligonucleotide
  Sense strand starting at position 1025 of SEQ ID NO: 1881935
gcaagaggcagcuauguca

SEQ ID NO: 2082391 - RNA, 19 nt, Artificial Sequence
  Description of Artificial Sequence: Synthetic oligonucleotide
  Antisense strand to SEQ ID NO: 2082390
ugacauagcugccucuugc

SEQ ID NO: 2082392 - RNA, 19 nt, Artificial Sequence
  Description of Artificial Sequence: Synthetic oligonucleotide
  Sense strand starting at position 1075 of SEQ ID NO: 1881935
agaggauugcaucacuucu

SEQ ID NO: 2082393 - RNA, 19 nt, Artificial Sequence
  Description of Artificial Sequence: Synthetic oligonucleotide
  Antisense strand to SEQ ID NO: 2082392
agaagugaugcaauccucu

SEQ ID NO: 2082394 - RNA, 19 nt, Artificial Sequence
  Description of Artificial Sequence: Synthetic oligonucleotide
  Sense strand starting at position 1265 of SEQ ID NO: 1881935
guuccaagucgugucuuua

SEQ ID NO: 2082395 - RNA, 19 nt, Artificial Sequence
  Description of Artificial Sequence: Synthetic oligonucleotide
  Antisense strand to SEQ ID NO: 2082394
uaaagacacgacuuggaac

SEQ ID NO: 2082396 - RNA, 19 nt, Artificial Sequence
  Description of Artificial Sequence: Synthetic oligonucleotide
  Sense strand starting at position 1303 of SEQ ID NO: 1881935
ugucauuuaugccauauuu

SEQ ID NO: 2082397 - RNA, 19 nt, Artificial Sequence
  Description of Artificial Sequence: Synthetic oligonucleotide
  Antisense strand to SEQ ID NO: 2082396
aaauauggcauaaaugaca

SEQ ID NO: 2082398 - RNA, 19 nt, Artificial Sequence
  Description of Artificial Sequence: Synthetic oligonucleotide
  Sense strand starting at position 1326 of SEQ ID NO: 1881935
auaguugucuucuuauaga

SEQ ID NO: 2082399 - RNA, 19 nt, Artificial Sequence
  Description of Artificial Sequence: Synthetic oligonucleotide
  Antisense strand to SEQ ID NO: 2082398
ucuauaagaagacaacuau

SEQ ID NO: 2082400 - RNA, 19 nt, Artificial Sequence
  Description of Artificial Sequence: Synthetic oligonucleotide
  Sense strand starting at position 1347 of SEQ ID NO: 1881935
ccaugacuuuguuugacuu

SEQ ID NO: 2082401 - RNA, 19 nt, Artificial Sequence
  Description of Artificial Sequence: Synthetic oligonucleotide
  Antisense strand to SEQ ID NO: 2082400
aagucaaacaaagucaugg

SEQ ID NO: 2082402 - RNA, 19 nt, Artificial Sequence
  Description of Artificial Sequence: Synthetic oligonucleotide
  Sense strand starting at position 2025 of SEQ ID NO: 1881935
gagagcucugcucaugacu

SEQ ID NO: 2082403 - RNA, 19 nt, Artificial Sequence
  Description of Artificial Sequence: Synthetic oligonucleotide
  Antisense strand to SEQ ID NO: 2082402
agucaugagcagagcucuc

SEQ ID NO: 2082404 - RNA, 19 nt, Artificial Sequence
  Description of Artificial Sequence: Synthetic oligonucleotide
  Sense strand starting at position 2560 of SEQ ID NO: 1881935
agggcuccagcguaugaau

SEQ ID NO: 2082405 - RNA, 19 nt, Artificial Sequence
  Description of Artificial Sequence: Synthetic oligonucleotide
  Antisense strand to SEQ ID NO: 2082404
auucauacgcuggagcccu

SEQ ID NO: 2082406 - RNA, 19 nt, Artificial Sequence
  Description of Artificial Sequence: Synthetic oligonucleotide
  Sense strand starting at position 2562 of SEQ ID NO: 1881935
ggcuccagcguaugaauuu

SEQ ID NO: 2082407 - RNA, 19 nt, Artificial Sequence
  Description of Artificial Sequence: Synthetic oligonucleotide
  Antisense strand to SEQ ID NO: 2082406
aaauucauacgcuggagcc

SEQ ID NO: 2082408 - RNA, 19 nt, Artificial Sequence
  Description of Artificial Sequence: Synthetic oligonucleotide
  Sense strand starting at position 2684 of SEQ ID NO: 1881935
aguauugucgcagcuguuu

SEQ ID NO: 2082409 - RNA, 19 nt, Artificial Sequence
  Description of Artificial Sequence: Synthetic oligonucleotide
  Antisense strand to SEQ ID NO: 2082408
aaacagcugcgacaauacu

SEQ ID NO: 2082410 - RNA, 19 nt, Artificial Sequence
  Description of Artificial Sequence: Synthetic oligonucleotide
  Sense strand starting at position 3133 of SEQ ID NO: 1881935
ggcuauuagauuugugcuu

SEQ ID NO: 2082411 - RNA, 19 nt, Artificial Sequence
  Description of Artificial Sequence: Synthetic oligonucleotide
  Antisense strand to SEQ ID NO: 2082410
aagcacaaaucuaauagcc

SEQ ID NO: 2082412 - RNA, 19 nt, Artificial Sequence
  Description of Artificial Sequence: Synthetic oligonucleotide
  Sense strand starting at position 3134 of SEQ ID NO: 1881935
gcuauuagauuugugcuua

SEQ ID NO: 2082413 - RNA, 19 nt, Artificial Sequence
  Description of Artificial Sequence: Synthetic oligonucleotide
  Antisense strand to SEQ ID NO: 2082412
uaagcacaaaucuaauagc

SEQ ID NO: 2082414 - RNA, 19 nt, Artificial Sequence
  Description of Artificial Sequence: Synthetic oligonucleotide
  Sense strand starting at position 3138 of SEQ ID NO: 1881935
uuagauuugugcuuacacu

SEQ ID NO: 2082415 - RNA, 19 nt, Artificial Sequence
  Description of Artificial Sequence: Synthetic oligonucleotide
  Antisense strand to SEQ ID NO: 2082414
aguguaagcacaaaucuaa

SEQ ID NO: 2082416 - RNA, 19 nt, Artificial Sequence
  Description of Artificial Sequence: Synthetic oligonucleotide
  Sense strand starting at position 3212 of SEQ ID NO: 1881935
gagaaacucgcacaagcuu

SEQ ID NO: 2082417 - RNA, 19 nt, Artificial Sequence
  Description of Artificial Sequence: Synthetic oligonucleotide
  Antisense strand to SEQ ID NO: 2082416
aagcuugugcgaguuucuc

SEQ ID NO: 2082418 - RNA, 19 nt, Artificial Sequence
  Description of Artificial Sequence: Synthetic oligonucleotide
  Sense strand starting at position 3306 of SEQ ID NO: 1881935
gguguuagccaccaugaaa

SEQ ID NO: 2082419 - RNA, 19 nt, Artificial Sequence
  Description of Artificial Sequence: Synthetic oligonucleotide
  Antisense strand to SEQ ID NO: 2082418
uuucaugguggcuaacacc

SEQ ID NO: 2082420 - RNA, 19 nt, Artificial Sequence
  Description of Artificial Sequence: Synthetic oligonucleotide
  Sense strand starting at position 3418 of SEQ ID NO: 1881935
gcccaacagaggugaaauu

SEQ ID NO: 2082421 - RNA, 19 nt, Artificial Sequence
  Description of Artificial Sequence: Synthetic oligonucleotide
  Antisense strand to SEQ ID NO: 2082420
aauuucaccucuguugggc

SEQ ID NO: 2082422 - RNA, 19 nt, Artificial Sequence
  Description of Artificial Sequence: Synthetic oligonucleotide
  Sense strand starting at position 3591 of SEQ ID NO: 1881935
ggagcugaucaaggcugua

SEQ ID NO: 2082423 - RNA, 19 nt, Artificial Sequence
  Description of Artificial Sequence: Synthetic oligonucleotide
  Antisense strand to SEQ ID NO: 2082422
uacagccuugaucagcucc

SEQ ID NO: 2082424 - RNA, 19 nt, Artificial Sequence
  Description of Artificial Sequence: Synthetic oligonucleotide
  Sense strand starting at position 3636 of SEQ ID NO: 1881935
cugagucacccuugacauc

SEQ ID NO: 2082425 - RNA, 19 nt, Artificial Sequence
  Description of Artificial Sequence: Synthetic oligonucleotide
  Antisense strand to SEQ ID NO: 2082424
gaugucaagggugacucag

SEQ ID NO: 2082426 - RNA, 19 nt, Artificial Sequence
  Description of Artificial Sequence: Synthetic oligonucleotide
  Sense strand starting at position 3637 of SEQ ID NO: 1881935
ugagucacccuugacauca

SEQ ID NO: 2082427 - RNA, 19 nt, Artificial Sequence
  Description of Artificial Sequence: Synthetic oligonucleotide
  Antisense strand to SEQ ID NO: 2082426
ugaugucaagggugacuca

SEQ ID NO: 2082428 - RNA, 19 nt, Artificial Sequence
  Description of Artificial Sequence: Synthetic oligonucleotide
  Sense strand starting at position 3657 of SEQ ID NO: 1881935
agcugacaucccuaagucu

SEQ ID NO: 2082429 - RNA, 19 nt, Artificial Sequence
  Description of Artificial Sequence: Synthetic oligonucleotide
  Antisense strand to SEQ ID NO: 2082428
agacuuagggaugucagcu

SEQ ID NO: 2082430 - RNA, 19 nt, Artificial Sequence
  Description of Artificial Sequence: Synthetic oligonucleotide
  Sense strand starting at position 3671 of SEQ ID NO: 1881935
agucucuuuggcugggaca

SEQ ID NO: 2082431 - RNA, 19 nt, Artificial Sequence
  Description of Artificial Sequence: Synthetic oligonucleotide
  Antisense strand to SEQ ID NO: 2082430
ugucccagccaaagagacu

SEQ ID NO: 2082432 - RNA, 19 nt, Artificial Sequence
  Description of Artificial Sequence: Synthetic oligonucleotide
  Sense strand starting at position 3734 of SEQ ID NO: 1881935
cauguuugacaguaugauu

SEQ ID NO: 2082433 - RNA, 19 nt, Artificial Sequence
  Description of Artificial Sequence: Synthetic oligonucleotide
  Antisense strand to SEQ ID NO: 2082432
aaucauacugucaaacaug

SEQ ID NO: 2082434 - RNA, 19 nt, Artificial Sequence
  Description of Artificial Sequence: Synthetic oligonucleotide
  Sense strand starting at position 3742 of SEQ ID NO: 1881935
acaguaugauuugggagaa

SEQ ID NO: 2082435 - RNA, 19 nt, Artificial Sequence
  Description of Artificial Sequence: Synthetic oligonucleotide
  Antisense strand to SEQ ID NO: 2082434
uucucccaaaucauacugu

SEQ ID NO: 2082436 - RNA, 19 nt, Artificial Sequence
  Description of Artificial Sequence: Synthetic oligonucleotide
  Sense strand starting at position 3743 of SEQ ID NO: 1881935
caguaugauuugggagaaa

SEQ ID NO: 2082437 - RNA, 19 nt, Artificial Sequence
  Description of Artificial Sequence: Synthetic oligonucleotide
  Antisense strand to SEQ ID NO: 2082436
uuucucccaaaucauacug

SEQ ID NO: 2082438 - RNA, 19 nt, Artificial Sequence
  Description of Artificial Sequence: Synthetic oligonucleotide
  Sense strand starting at position 3836 of SEQ ID NO: 1881935
auuugaauuucuuguguac

SEQ ID NO: 2082439 - RNA, 19 nt, Artificial Sequence
  Description of Artificial Sequence: Synthetic oligonucleotide
  Antisense strand to SEQ ID NO: 2082438
guacacaagaaauucaaau

SEQ ID NO: 2082440 - RNA, 19 nt, Artificial Sequence
  Description of Artificial Sequence: Synthetic oligonucleotide
  Sense strand starting at position 3839 of SEQ ID NO: 1881935
ugaauuucuuguguacuuu

SEQ ID NO: 2082441 - RNA, 19 nt, Artificial Sequence
  Description of Artificial Sequence: Synthetic oligonucleotide
  Antisense strand to SEQ ID NO: 2082440
aaaguacacaagaaauuca

SEQ ID NO: 2082442 - RNA, 19 nt, Artificial Sequence
  Description of Artificial Sequence: Synthetic oligonucleotide
  Sense strand starting at position 3919 of SEQ ID NO: 1881935
uuaugaauugugcacauaa

SEQ ID NO: 2082443 - RNA, 19 nt, Artificial Sequence
  Description of Artificial Sequence: Synthetic oligonucleotide
  Antisense strand to SEQ ID NO: 2082442
uuaugugcacaauucauaa

SEQ ID NO: 2082444 - RNA, 19 nt, Artificial Sequence
  Description of Artificial Sequence: Synthetic oligonucleotide
  Sense strand starting at position 401 of SEQ ID NO: 1881936
gagcuuauggagcauaaua

SEQ ID NO: 2082445 - RNA, 19 nt, Artificial Sequence
  Description of Artificial Sequence: Synthetic oligonucleotide
  Antisense strand to SEQ ID NO: 2082444
uauuaugcuccauaagcuc

SEQ ID NO: 2082446 - RNA, 19 nt, Artificial Sequence
  Description of Artificial Sequence: Synthetic oligonucleotide
  Sense strand starting at position 403 of SEQ ID NO: 1881936
gcuuauggagcauaauaaa

SEQ ID NO: 2082447 - RNA, 19 nt, Artificial Sequence
  Description of Artificial Sequence: Synthetic oligonucleotide
  Antisense strand to SEQ ID NO: 2082446
uuuauuaugcuccauaagc

SEQ ID NO: 2082448 - RNA, 19 nt, Artificial Sequence
  Description of Artificial Sequence: Synthetic oligonucleotide
  Sense strand starting at position 436 of SEQ ID NO: 1881936
gcaucauggugauuccaga

SEQ ID NO: 2082449 - RNA, 19 nt, Artificial Sequence
  Description of Artificial Sequence: Synthetic oligonucleotide
  Antisense strand to SEQ ID NO: 2082448
ucuggaaucaccaugaugc

SEQ ID NO: 2082450 - RNA, 19 nt, Artificial Sequence
  Description of Artificial Sequence: Synthetic oligonucleotide
  Sense strand starting at position 549 of SEQ ID NO: 1881936
ccauguaaccuauaguauu

SEQ ID NO: 2082451 - RNA, 19 nt, Artificial Sequence
  Description of Artificial Sequence: Synthetic oligonucleotide
  Antisense strand to SEQ ID NO: 2082450
aauacuauagguuacaugg

SEQ ID NO: 2082452 - RNA, 19 nt, Artificial Sequence
  Description of Artificial Sequence: Synthetic oligonucleotide
  Sense strand starting at position 587 of SEQ ID NO: 1881936
agaagucuacaacgauaca

SEQ ID NO: 2082453 - RNA, 19 nt, Artificial Sequence
  Description of Artificial Sequence: Synthetic oligonucleotide
  Antisense strand to SEQ ID NO: 2082452
uguaucguuguagacuucu

SEQ ID NO: 2082454 - RNA, 19 nt, Artificial Sequence
  Description of Artificial Sequence: Synthetic oligonucleotide
  Sense strand starting at position 1045 of SEQ ID NO: 1881936
auguaaguugggcacuauu

SEQ ID NO: 2082455 - RNA, 19 nt, Artificial Sequence
  Description of Artificial Sequence: Synthetic oligonucleotide
  Antisense strand to SEQ ID NO: 2082454
aauagugcccaacuuacau

SEQ ID NO: 2082456 - RNA, 19 nt, Artificial Sequence
  Description of Artificial Sequence: Synthetic oligonucleotide
  Sense strand starting at position 1100 of SEQ ID NO: 1881936
aaauuaagccaugggaagu

SEQ ID NO: 2082457 - RNA, 19 nt, Artificial Sequence
  Description of Artificial Sequence: Synthetic oligonucleotide
  Antisense strand to SEQ ID NO: 2082456
acuucccauggcuuaauuu

SEQ ID NO: 2082458 - RNA, 19 nt, Artificial Sequence
  Description of Artificial Sequence: Synthetic oligonucleotide
  Sense strand starting at position 1201 of SEQ ID NO: 1881936
uguaaaucacgguagaauu

SEQ ID NO: 2082459 - RNA, 19 nt, Artificial Sequence
  Description of Artificial Sequence: Synthetic oligonucleotide
  Antisense strand to SEQ ID NO: 2082458
aauucuaccgugauuuaca

SEQ ID NO: 2082460 - RNA, 19 nt, Artificial Sequence
  Description of Artificial Sequence: Synthetic oligonucleotide
  Sense strand starting at position 1266 of SEQ ID NO: 1881936
uuugauaaauggccacaau

SEQ ID NO: 2082461 - RNA, 19 nt, Artificial Sequence
  Description of Artificial Sequence: Synthetic oligonucleotide
  Antisense strand to SEQ ID NO: 2082460
auuguggccauuuaucaaa

SEQ ID NO: 2082462 - RNA, 19 nt, Artificial Sequence
  Description of Artificial Sequence: Synthetic oligonucleotide
  Sense strand starting at position 1331 of SEQ ID NO: 1881936
cccauugagagaugguauc

SEQ ID NO: 2082463 - RNA, 19 nt, Artificial Sequence
  Description of Artificial Sequence: Synthetic oligonucleotide
  Antisense strand to SEQ ID NO: 2082462
gauaccaucucucaauggg

SEQ ID NO: 2082464 - RNA, 19 nt, Artificial Sequence
  Description of Artificial Sequence: Synthetic oligonucleotide
  Sense strand starting at position 1337 of SEQ ID NO: 1881936
gagagaugguaucucuguu

SEQ ID NO: 2082465 - RNA, 19 nt, Artificial Sequence
  Description of Artificial Sequence: Synthetic oligonucleotide
  Antisense strand to SEQ ID NO: 2082464
aacagagauaccaucucuc

SEQ ID NO: 2082466 - RNA, 19 nt, Artificial Sequence
  Description of Artificial Sequence: Synthetic oligonucleotide
  Sense strand starting at position 1363 of SEQ ID NO: 1881936
cuuguauaugggcagacuu

SEQ ID NO: 2082467 - RNA, 19 nt, Artificial Sequence
  Description of Artificial Sequence: Synthetic oligonucleotide
  Antisense strand to SEQ ID NO: 2082466
aagucugcccauauacaag

SEQ ID NO: 2082468 - RNA, 19 nt, Artificial Sequence
  Description of Artificial Sequence: Synthetic oligonucleotide
  Sense strand starting at position 1441 of SEQ ID NO: 1881936
ccugauucucuugagauuc

SEQ ID NO: 2082469 - RNA, 19 nt, Artificial Sequence
  Description of Artificial Sequence: Synthetic oligonucleotide
  Antisense strand to SEQ ID NO: 2082468
gaaucucaagagaaucagg

SEQ ID NO: 2082470 - RNA, 19 nt, Artificial Sequence
  Description of Artificial Sequence: Synthetic oligonucleotide
  Sense strand starting at position 1526 of SEQ ID NO: 1881936
uggagaggcccguauggaa

SEQ ID NO: 2082471 - RNA, 19 nt, Artificial Sequence
  Description of Artificial Sequence: Synthetic oligonucleotide
  Antisense strand to SEQ ID NO: 2082470
uuccauacgggccucucca

SEQ ID NO: 2082472 - RNA, 19 nt, Artificial Sequence
  Description of Artificial Sequence: Synthetic oligonucleotide
  Sense strand starting at position 1610 of SEQ ID NO: 1881936
aggugagccaccuggauaa

SEQ ID NO: 2082473 - RNA, 19 nt, Artificial Sequence
  Description of Artificial Sequence: Synthetic oligonucleotide
  Antisense strand to SEQ ID NO: 2082472
uuauccagguggcucaccu

SEQ ID NO: 2082474 - RNA, 19 nt, Artificial Sequence
  Description of Artificial Sequence: Synthetic oligonucleotide
  Sense strand starting at position 1739 of SEQ ID NO: 1881936
ggaugacucucuguuucua

SEQ ID NO: 2082475 - RNA, 19 nt, Artificial Sequence
  Description of Artificial Sequence: Synthetic oligonucleotide
  Antisense strand to SEQ ID NO: 2082474
uagaaacagagagucaucc

SEQ ID NO: 2082476 - RNA, 19 nt, Artificial Sequence
  Description of Artificial Sequence: Synthetic oligonucleotide
  Sense strand starting at position 1764 of SEQ ID NO: 1881936
aguaauuggcucuauuccu

SEQ ID NO: 2082477 - RNA, 19 nt, Artificial Sequence
  Description of Artificial Sequence: Synthetic oligonucleotide
  Antisense strand to SEQ ID NO: 2082476
aggaauagagccaauuacu

SEQ ID NO: 2082478 - RNA, 19 nt, Artificial Sequence
  Description of Artificial Sequence: Synthetic oligonucleotide
  Sense strand starting at position 1818 of SEQ ID NO: 1881936
ugguaugguaguuggaaga

SEQ ID NO: 2082479 - RNA, 19 nt, Artificial Sequence
  Description of Artificial Sequence: Synthetic oligonucleotide
  Antisense strand to SEQ ID NO: 2082478
ucuuccaacuaccauacca

SEQ ID NO: 2082480 - RNA, 19 nt, Artificial Sequence
  Description of Artificial Sequence: Synthetic oligonucleotide
  Sense strand starting at position 1843 of SEQ ID NO: 1881936
agggcugucaccugaugga

SEQ ID NO: 2082481 - RNA, 19 nt, Artificial Sequence
  Description of Artificial Sequence: Synthetic oligonucleotide
  Antisense strand to SEQ ID NO: 2082480
uccaucaggugacagcccu

SEQ ID NO: 2082482 - RNA, 19 nt, Artificial Sequence
  Description of Artificial Sequence: Synthetic oligonucleotide
  Sense strand starting at position 1856 of SEQ ID NO: 1881936
gauggaguauguuuggaau

SEQ ID NO: 2082483 - RNA, 19 nt, Artificial Sequence
  Description of Artificial Sequence: Synthetic oligonucleotide
  Antisense strand to SEQ ID NO: 2082482
auuccaaacauacuccauc

SEQ ID NO: 2082484 - RNA, 19 nt, Artificial Sequence
  Description of Artificial Sequence: Synthetic oligonucleotide
  Sense strand starting at position 1889 of SEQ ID NO: 1881936
cacugaagagugcauugua

SEQ ID NO: 2082485 - RNA, 19 nt, Artificial Sequence
  Description of Artificial Sequence: Synthetic oligonucleotide
  Antisense strand to SEQ ID NO: 2082484
uacaaugcacucuucagug

SEQ ID NO: 2082486 - RNA, 19 nt, Artificial Sequence
  Description of Artificial Sequence: Synthetic oligonucleotide
  Sense strand starting at position 2340 of SEQ ID NO: 1881936
ggagacuuugcagaguagu

SEQ ID NO: 2082487 - RNA, 19 nt, Artificial Sequence
  Description of Artificial Sequence: Synthetic oligonucleotide
  Antisense strand to SEQ ID NO: 2082486
acuacucugcaaagucucc

SEQ ID NO: 2082488 - RNA, 19 nt, Artificial Sequence
  Description of Artificial Sequence: Synthetic oligonucleotide
  Sense strand starting at position 2343 of SEQ ID NO: 1881936
gacuuugcagaguaguaga

SEQ ID NO: 2082489 - RNA, 19 nt, Artificial Sequence
  Description of Artificial Sequence: Synthetic oligonucleotide
  Antisense strand to SEQ ID NO: 2082488
ucuacuacucugcaaaguc

SEQ ID NO: 2082490 - RNA, 19 nt, Artificial Sequence
  Description of Artificial Sequence: Synthetic oligonucleotide
  Sense strand starting at position 2354 of SEQ ID NO: 1881936
guaguagaauccucccuag

SEQ ID NO: 2082491 - RNA, 19 nt, Artificial Sequence
  Description of Artificial Sequence: Synthetic oligonucleotide
  Antisense strand to SEQ ID NO: 2082490
cuagggaggauucuacuac

SEQ ID NO: 2082492 - RNA, 19 nt, Artificial Sequence
  Description of Artificial Sequence: Synthetic oligonucleotide
  Sense strand starting at position 2409 of SEQ ID NO: 1881936
ugaagcauacccugagagu

SEQ ID NO: 2082493 - RNA, 19 nt, Artificial Sequence
  Description of Artificial Sequence: Synthetic oligonucleotide
  Antisense strand to SEQ ID NO: 2082492
acucucaggguaugcuuca

SEQ ID NO: 2082494 - RNA, 19 nt, Artificial Sequence
  Description of Artificial Sequence: Synthetic oligonucleotide
  Sense strand starting at position 2442 of SEQ ID NO: 1881936
agaagacuguguguucaga

SEQ ID NO: 2082495 - RNA, 19 nt, Artificial Sequence
  Description of Artificial Sequence: Synthetic oligonucleotide
  Antisense strand to SEQ ID NO: 2082494
ucugaacacacagucuucu

SEQ ID NO: 2082496 - RNA, 19 nt, Artificial Sequence
  Description of Artificial Sequence: Synthetic oligonucleotide
  Sense strand starting at position 2716 of SEQ ID NO: 1881936
auguaagucuccucaauga

SEQ ID NO: 2082497 - RNA, 19 nt, Artificial Sequence
  Description of Artificial Sequence: Synthetic oligonucleotide
  Antisense strand to SEQ ID NO: 2082496
ucauugaggagacuuacau

SEQ ID NO: 2082498 - RNA, 19 nt, Artificial Sequence
  Description of Artificial Sequence: Synthetic oligonucleotide
  Sense strand starting at position 2786 of SEQ ID NO: 1881936
ugguaccaucucuaacgaa

SEQ ID NO: 2082499 - RNA, 19 nt, Artificial Sequence
  Description of Artificial Sequence: Synthetic oligonucleotide
  Antisense strand to SEQ ID NO: 2082498
uucguuagagaugguacca

SEQ ID NO: 2082500 - RNA, 19 nt, Artificial Sequence
  Description of Artificial Sequence: Synthetic oligonucleotide
  Sense strand starting at position 2854 of SEQ ID NO: 1881936
cuauuugugugguuccagu

SEQ ID NO: 2082501 - RNA, 19 nt, Artificial Sequence
  Description of Artificial Sequence: Synthetic oligonucleotide
  Antisense strand to SEQ ID NO: 2082500
acuggaaccacacaaauag

SEQ ID NO: 2082502 - RNA, 19 nt, Artificial Sequence
  Description of Artificial Sequence: Synthetic oligonucleotide
  Sense strand starting at position 2892 of SEQ ID NO: 1881936
ugugguaaucauugggaca

SEQ ID NO: 2082503 - RNA, 19 nt, Artificial Sequence
  Description of Artificial Sequence: Synthetic oligonucleotide
  Antisense strand to SEQ ID NO: 2082502
ugucccaaugauuaccaca

SEQ ID NO: 2082504 - RNA, 19 nt, Artificial Sequence
  Description of Artificial Sequence: Synthetic oligonucleotide
  Sense strand starting at position 2893 of SEQ ID NO: 1881936
gugguaaucauugggacac

SEQ ID NO: 2082505 - RNA, 19 nt, Artificial Sequence
  Description of Artificial Sequence: Synthetic oligonucleotide
  Antisense strand to SEQ ID NO: 2082504
gugucccaaugauuaccac

SEQ ID NO: 2082506 - RNA, 19 nt, Artificial Sequence
  Description of Artificial Sequence: Synthetic oligonucleotide
  Sense strand starting at position 2935 of SEQ ID NO: 1881936
uccuucugagcuuauaaag

SEQ ID NO: 2082507 - RNA, 19 nt, Artificial Sequence
  Description of Artificial Sequence: Synthetic oligonucleotide
  Antisense strand to SEQ ID NO: 2082506
cuuuauaagcucagaagga

SEQ ID NO: 2082508 - RNA, 19 nt, Artificial Sequence
  Description of Artificial Sequence: Synthetic oligonucleotide
  Sense strand starting at position 2965 of SEQ ID NO: 1881936
ggcccuguuaugcuuuagu

SEQ ID NO: 2082509 - RNA, 19 nt, Artificial Sequence
  Description of Artificial Sequence: Synthetic oligonucleotide
  Antisense strand to SEQ ID NO: 2082508
acuaaagcauaacagggcc

SEQ ID NO: 2082510 - RNA, 19 nt, Artificial Sequence
  Description of Artificial Sequence: Synthetic oligonucleotide
  Sense strand starting at position 3043 of SEQ ID NO: 1881936
uugcauccuccagaauguu

SEQ ID NO: 2082511 - RNA, 19 nt, Artificial Sequence
  Description of Artificial Sequence: Synthetic oligonucleotide
  Antisense strand to SEQ ID NO: 2082510
aacauucuggaggaugcaa

SEQ ID NO: 2082512 - RNA, 19 nt, Artificial Sequence
  Description of Artificial Sequence: Synthetic oligonucleotide
  Sense strand starting at position 3068 of SEQ ID NO: 1881936
ccuuucuggcaugaacaua

SEQ ID NO: 2082513 - RNA, 19 nt, Artificial Sequence
  Description of Artificial Sequence: Synthetic oligonucleotide
  Antisense strand to SEQ ID NO: 2082512
uauguucaugccagaaagg

SEQ ID NO: 2082514 - RNA, 19 nt, Artificial Sequence
  Description of Artificial Sequence: Synthetic oligonucleotide
  Sense strand starting at position 3129 of SEQ ID NO: 1881936
agccauuaugcagaaucaa

SEQ ID NO: 2082515 - RNA, 19 nt, Artificial Sequence
  Description of Artificial Sequence: Synthetic oligonucleotide
  Antisense strand to SEQ ID NO: 2082514
uugauucugcauaauggcu

SEQ ID NO: 2082516 - RNA, 19 nt, Artificial Sequence
  Description of Artificial Sequence: Synthetic oligonucleotide
  Sense strand starting at position 3339 of SEQ ID NO: 1881936
ucaaguuaugcccaggauu

SEQ ID NO: 2082517 - RNA, 19 nt, Artificial Sequence
  Description of Artificial Sequence: Synthetic oligonucleotide
  Antisense strand to SEQ ID NO: 2082516
aauccugggcauaacuuga

SEQ ID NO: 2082518 - RNA, 19 nt, Artificial Sequence
  Description of Artificial Sequence: Synthetic oligonucleotide
  Sense strand starting at position 3538 of SEQ ID NO: 1881936
ggaauuaauugacugcucu

SEQ ID NO: 2082519 - RNA, 19 nt, Artificial Sequence
  Description of Artificial Sequence: Synthetic oligonucleotide
  Antisense strand to SEQ ID NO: 2082518
agagcagucaauuaauucc

SEQ ID NO: 2082520 - RNA, 19 nt, Artificial Sequence
  Description of Artificial Sequence: Synthetic oligonucleotide
  Sense strand starting at position 3796 of SEQ ID NO: 1881936
ucaacauuauuggcagaau

SEQ ID NO: 2082521 - RNA, 19 nt, Artificial Sequence
  Description of Artificial Sequence: Synthetic oligonucleotide
  Antisense strand to SEQ ID NO: 2082520
auucugccaauaauguuga

SEQ ID NO: 2082522 - RNA, 19 nt, Artificial Sequence
  Description of Artificial Sequence: Synthetic oligonucleotide
  Sense strand starting at position 3952 of SEQ ID NO: 1881936
cauguaaaugcuuaagguu

SEQ ID NO: 2082523 - RNA, 19 nt, Artificial Sequence
  Description of Artificial Sequence: Synthetic oligonucleotide
  Antisense strand to SEQ ID NO: 2082522
aaccuuaagcauuuacaug

SEQ ID NO: 2082524 - RNA, 19 nt, Artificial Sequence
  Description of Artificial Sequence: Synthetic oligonucleotide
  Sense strand starting at position 287 of SEQ ID NO: 1881937
uccaucugaucaccgagau

SEQ ID NO: 2082525 - RNA, 19 nt, Artificial Sequence
  Description of Artificial Sequence: Synthetic oligonucleotide
  Antisense strand to SEQ ID NO: 2082524
aucucggugaucagaugga

SEQ ID NO: 2082526 - RNA, 19 nt, Artificial Sequence
  Description of Artificial Sequence: Synthetic oligonucleotide
  Sense strand starting at position 288 of SEQ ID NO: 1881937
ccaucugaucaccgagaug

SEQ ID NO: 2082527 - RNA, 19 nt, Artificial Sequence
  Description of Artificial Sequence: Synthetic oligonucleotide
  Antisense strand to SEQ ID NO: 2082526
caucucggugaucagaugg

SEQ ID NO: 2082528 - RNA, 19 nt, Artificial Sequence
  Description of Artificial Sequence: Synthetic oligonucleotide
  Sense strand starting at position 527 of SEQ ID NO: 1881937
ggagaaccaguguacaguu

SEQ ID NO: 2082529 - RNA, 19 nt, Artificial Sequence
  Description of Artificial Sequence: Synthetic oligonucleotide
  Antisense strand to SEQ ID NO: 2082528
aacuguacacugguucucc

SEQ ID NO: 2082530 - RNA, 19 nt, Artificial Sequence
  Description of Artificial Sequence: Synthetic oligonucleotide
  Sense strand starting at position 605 of SEQ ID NO: 1881937
gauacucaagucugugaua

SEQ ID NO: 2082531 - RNA, 19 nt, Artificial Sequence
  Description of Artificial Sequence: Synthetic oligonucleotide
  Antisense strand to SEQ ID NO: 2082530
uaucacagacuugaguauc

SEQ ID NO: 2082532 - RNA, 19 nt, Artificial Sequence
  Description of Artificial Sequence: Synthetic oligonucleotide
  Sense strand starting at position 606 of SEQ ID NO: 1881937
auacucaagucugugauau

SEQ ID NO: 2082533 - RNA, 19 nt, Artificial Sequence
  Description of Artificial Sequence: Synthetic oligonucleotide
  Antisense strand to SEQ ID NO: 2082532
auaucacagacuugaguau

SEQ ID NO: 2082534 - RNA, 19 nt, Artificial Sequence
  Description of Artificial Sequence: Synthetic oligonucleotide
  Sense strand starting at position 720 of SEQ ID NO: 1881937
cuauguaaauagucacuau

SEQ ID NO: 2082535 - RNA, 19 nt, Artificial Sequence
  Description of Artificial Sequence: Synthetic oligonucleotide
  Antisense strand to SEQ ID NO: 2082534
auagugacuauuuacauag

SEQ ID NO: 2082536 - RNA, 19 nt, Artificial Sequence
  Description of Artificial Sequence: Synthetic oligonucleotide
  Sense strand starting at position 724 of SEQ ID NO: 1881937
guaaauagucacuauacug

SEQ ID NO: 2082537 - RNA, 19 nt, Artificial Sequence
  Description of Artificial Sequence: Synthetic oligonucleotide
  Antisense strand to SEQ ID NO: 2082536
caguauagugacuauuuac

SEQ ID NO: 2082538 - RNA, 19 nt, Artificial Sequence
  Description of Artificial Sequence: Synthetic oligonucleotide
  Sense strand starting at position 740 of SEQ ID NO: 1881937
cuguauugacuagggaauc

SEQ ID NO: 2082539 - RNA, 19 nt, Artificial Sequence
  Description of Artificial Sequence: Synthetic oligonucleotide
  Antisense strand to SEQ ID NO: 2082538
gauucccuagucaauacag

SEQ ID NO: 2082540 - RNA, 19 nt, Artificial Sequence
  Description of Artificial Sequence: Synthetic oligonucleotide
  Sense strand starting at position 780 of SEQ ID NO: 1881937
guacauguugaguauggga

SEQ ID NO: 2082541 - RNA, 19 nt, Artificial Sequence
  Description of Artificial Sequence: Synthetic oligonucleotide
  Antisense strand to SEQ ID NO: 2082540
ucccauacucaacauguac

SEQ ID NO: 2082542 - RNA, 19 nt, Artificial Sequence
  Description of Artificial Sequence: Synthetic oligonucleotide
  Sense strand starting at position 972 of SEQ ID NO: 1881937
uugcauuucuaagaaagaa

SEQ ID NO: 2082543 - RNA, 19 nt, Artificial Sequence
  Description of Artificial Sequence: Synthetic oligonucleotide
  Antisense strand to SEQ ID NO: 2082542
uucuuucuuagaaaugcaa

SEQ ID NO: 2082544 - RNA, 19 nt, Artificial Sequence
  Description of Artificial Sequence: Synthetic oligonucleotide
  Sense strand starting at position 1282 of SEQ ID NO: 1881937
uguaaagaacccgauagua

SEQ ID NO: 2082545 - RNA, 19 nt, Artificial Sequence
  Description of Artificial Sequence: Synthetic oligonucleotide
  Antisense strand to SEQ ID NO: 2082544
uacuaucggguucuuuaca

SEQ ID NO: 2082546 - RNA, 19 nt, Artificial Sequence
  Description of Artificial Sequence: Synthetic oligonucleotide
  Sense strand starting at position 1494 of SEQ ID NO: 1881937
uggccuaguguccaggaau

SEQ ID NO: 2082547 - RNA, 19 nt, Artificial Sequence
  Description of Artificial Sequence: Synthetic oligonucleotide
  Antisense strand to SEQ ID NO: 2082546
auuccuggacacuaggcca

SEQ ID NO: 2082548 - RNA, 19 nt, Artificial Sequence
  Description of Artificial Sequence: Synthetic oligonucleotide
  Sense strand starting at position 1497 of SEQ ID NO: 1881937
ccuaguguccaggaaugga

SEQ ID NO: 2082549 - RNA, 19 nt, Artificial Sequence
  Description of Artificial Sequence: Synthetic oligonucleotide
  Antisense strand to SEQ ID NO: 2082548
uccauuccuggacacuagg

SEQ ID NO: 2082550 - RNA, 19 nt, Artificial Sequence
  Description of Artificial Sequence: Synthetic oligonucleotide
  Sense strand starting at position 1518 of SEQ ID NO: 1881937
ugggaucaacccugacuua

SEQ ID NO: 2082551 - RNA, 19 nt, Artificial Sequence
  Description of Artificial Sequence: Synthetic oligonucleotide
  Antisense strand to SEQ ID NO: 2082550
uaagucaggguugauccca

SEQ ID NO: 2082552 - RNA, 19 nt, Artificial Sequence
  Description of Artificial Sequence: Synthetic oligonucleotide
  Sense strand starting at position 1636 of SEQ ID NO: 1881937
aucugaagauucgagauuu

SEQ ID NO: 2082553 - RNA, 19 nt, Artificial Sequence
  Description of Artificial Sequence: Synthetic oligonucleotide
  Antisense strand to SEQ ID NO: 2082552
aaaucucgaaucuucagau

SEQ ID NO: 2082554 - RNA, 19 nt, Artificial Sequence
  Description of Artificial Sequence: Synthetic oligonucleotide
  Sense strand starting at position 1734 of SEQ ID NO: 1881937
gcacacuuacuaggauuga

SEQ ID NO: 2082555 - RNA, 19 nt, Artificial Sequence
  Description of Artificial Sequence: Synthetic oligonucleotide
  Antisense strand to SEQ ID NO: 2082554
ucaauccuaguaagugugc

SEQ ID NO: 2082556 - RNA, 19 nt, Artificial Sequence
  Description of Artificial Sequence: Synthetic oligonucleotide
  Sense strand starting at position 1840 of SEQ ID NO: 1881937
augagaagcucuuuauaaa

SEQ ID NO: 2082557 - RNA, 19 nt, Artificial Sequence
  Description of Artificial Sequence: Synthetic oligonucleotide
  Antisense strand to SEQ ID NO: 2082556
uuuauaaagagcuucucau

SEQ ID NO: 2082558 - RNA, 19 nt, Artificial Sequence
  Description of Artificial Sequence: Synthetic oligonucleotide
  Sense strand starting at position 1888 of SEQ ID NO: 1881937
agccuuaaauugguaauua

SEQ ID NO: 2082559 - RNA, 19 nt, Artificial Sequence
  Description of Artificial Sequence: Synthetic oligonucleotide
  Antisense strand to SEQ ID NO: 2082558
uaauuaccaauuuaaggcu

SEQ ID NO: 2082560 - RNA, 19 nt, Artificial Sequence
  Description of Artificial Sequence: Synthetic oligonucleotide
  Sense strand starting at position 1899 of SEQ ID NO: 1881937
gguaauuaaucauuguauc

SEQ ID NO: 2082561 - RNA, 19 nt, Artificial Sequence
  Description of Artificial Sequence: Synthetic oligonucleotide
  Antisense strand to SEQ ID NO: 2082560
gauacaaugauuaauuacc

SEQ ID NO: 2082562 - RNA, 19 nt, Artificial Sequence
  Description of Artificial Sequence: Synthetic oligonucleotide
  Sense strand starting at position 2007 of SEQ ID NO: 1881937
ccuagauaucucggauacu

SEQ ID NO: 2082563 - RNA, 19 nt, Artificial Sequence
  Description of Artificial Sequence: Synthetic oligonucleotide
  Antisense strand to SEQ ID NO: 2082562
aguauccgagauaucuagg

SEQ ID NO: 2082564 - RNA, 19 nt, Artificial Sequence
  Description of Artificial Sequence: Synthetic oligonucleotide
  Sense strand starting at position 2074 of SEQ ID NO: 1881937
gcaacaauugcauaguuac

SEQ ID NO: 2082565 - RNA, 19 nt, Artificial Sequence
  Description of Artificial Sequence: Synthetic oligonucleotide
  Antisense strand to SEQ ID NO: 2082564
guaacuaugcaauuguugc

SEQ ID NO: 2082566 - RNA, 19 nt, Artificial Sequence
  Description of Artificial Sequence: Synthetic oligonucleotide
  Sense strand starting at position 2232 of SEQ ID NO: 1881937
uaggaaugcuuaccugaga

SEQ ID NO: 2082567 - RNA, 19 nt, Artificial Sequence
  Description of Artificial Sequence: Synthetic oligonucleotide
  Antisense strand to SEQ ID NO: 2082566
ucucagguaagcauuccua

SEQ ID NO: 2082568 - RNA, 19 nt, Artificial Sequence
  Description of Artificial Sequence: Synthetic oligonucleotide
  Sense strand starting at position 2233 of SEQ ID NO: 1881937
aggaaugcuuaccugagaa

SEQ ID NO: 2082569 - RNA, 19 nt, Artificial Sequence
  Description of Artificial Sequence: Synthetic oligonucleotide
  Antisense strand to SEQ ID NO: 2082568
uucucagguaagcauuccu

SEQ ID NO: 2082570 - RNA, 19 nt, Artificial Sequence
  Description of Artificial Sequence: Synthetic oligonucleotide
  Sense strand starting at position 2269 of SEQ ID NO: 1881937
gauauacaugcaggacuuu

SEQ ID NO: 2082571 - RNA, 19 nt, Artificial Sequence
  Description of Artificial Sequence: Synthetic oligonucleotide
  Antisense strand to SEQ ID NO: 2082570
aaaguccugcauguauauc

SEQ ID NO: 2082572 - RNA, 19 nt, Artificial Sequence
  Description of Artificial Sequence: Synthetic oligonucleotide
  Sense strand starting at position 2406 of SEQ ID NO: 1881937
gucagaguugucuagacaa

SEQ ID NO: 2082573 - RNA, 19 nt, Artificial Sequence
  Description of Artificial Sequence: Synthetic oligonucleotide
  Antisense strand to SEQ ID NO: 2082572
uugucuagacaacucugac

SEQ ID NO: 2082574 - RNA, 19 nt, Artificial Sequence
  Description of Artificial Sequence: Synthetic oligonucleotide
  Sense strand starting at position 2586 of SEQ ID NO: 1881937
gaaugagugccugaguccu

SEQ ID NO: 2082575 - RNA, 19 nt, Artificial Sequence
  Description of Artificial Sequence: Synthetic oligonucleotide
  Antisense strand to SEQ ID NO: 2082574
aggacucaggcacucauuc

SEQ ID NO: 2082576 - RNA, 19 nt, Artificial Sequence
  Description of Artificial Sequence: Synthetic oligonucleotide
  Sense strand starting at position 2682 of SEQ ID NO: 1881937
gugucagauaggcauccau

SEQ ID NO: 2082577 - RNA, 19 nt, Artificial Sequence
  Description of Artificial Sequence: Synthetic oligonucleotide
  Antisense strand to SEQ ID NO: 2082576
auggaugccuaucugacac

SEQ ID NO: 2082578 - RNA, 19 nt, Artificial Sequence
  Description of Artificial Sequence: Synthetic oligonucleotide
  Sense strand starting at position 2723 of SEQ ID NO: 1881937
ccuaguuaccaggaauccu

SEQ ID NO: 2082579 - RNA, 19 nt, Artificial Sequence
  Description of Artificial Sequence: Synthetic oligonucleotide
  Antisense strand to SEQ ID NO: 2082578
aggauuccugguaacuagg

SEQ ID NO: 2082580 - RNA, 19 nt, Artificial Sequence
  Description of Artificial Sequence: Synthetic oligonucleotide
  Sense strand starting at position 2742 of SEQ ID NO: 1881937
gggagaagccuuggguuca

SEQ ID NO: 2082581 - RNA, 19 nt, Artificial Sequence
  Description of Artificial Sequence: Synthetic oligonucleotide
  Antisense strand to SEQ ID NO: 2082580
ugaacccaaggcuucuccc

SEQ ID NO: 2082582 - RNA, 19 nt, Artificial Sequence
  Description of Artificial Sequence: Synthetic oligonucleotide
  Sense strand starting at position 3227 of SEQ ID NO: 1881937
gugugugacauguacagau

SEQ ID NO: 2082583 - RNA, 19 nt, Artificial Sequence
  Description of Artificial Sequence: Synthetic oligonucleotide
  Antisense strand to SEQ ID NO: 2082582
aucuguacaugucacacac

SEQ ID NO: 2082584 - RNA, 19 nt, Artificial Sequence
  Description of Artificial Sequence: Synthetic oligonucleotide
  Sense strand starting at position 3236 of SEQ ID NO: 1881937
auguacagauguccaaaua

SEQ ID NO: 2082585 - RNA, 19 nt, Artificial Sequence
  Description of Artificial Sequence: Synthetic oligonucleotide
  Antisense strand to SEQ ID NO: 2082584
uauuuggacaucuguacau

SEQ ID NO: 2082586 - RNA, 19 nt, Artificial Sequence
  Description of Artificial Sequence: Synthetic oligonucleotide
  Sense strand starting at position 3275 of SEQ ID NO: 1881937
aagucagaauaauugugua

SEQ ID NO: 2082587 - RNA, 19 nt, Artificial Sequence
  Description of Artificial Sequence: Synthetic oligonucleotide
  Antisense strand to SEQ ID NO: 2082586
uacacaauuauucugacuu

SEQ ID NO: 2082588 - RNA, 19 nt, Artificial Sequence
  Description of Artificial Sequence: Synthetic oligonucleotide
  Sense strand starting at position 3279 of SEQ ID NO: 1881937
cagaauaauuguguaggua

SEQ ID NO: 2082589 - RNA, 19 nt, Artificial Sequence
  Description of Artificial Sequence: Synthetic oligonucleotide
  Antisense strand to SEQ ID NO: 2082588
uaccuacacaauuauucug

SEQ ID NO: 2082590 - RNA, 19 nt, Artificial Sequence
  Description of Artificial Sequence: Synthetic oligonucleotide
  Sense strand starting at position 3280 of SEQ ID NO: 1881937
agaauaauuguguagguag

SEQ ID NO: 2082591 - RNA, 19 nt, Artificial Sequence
  Description of Artificial Sequence: Synthetic oligonucleotide
  Antisense strand to SEQ ID NO: 2082590
cuaccuacacaauuauucu

SEQ ID NO: 2082592 - RNA, 19 nt, Artificial Sequence
  Description of Artificial Sequence: Synthetic oligonucleotide
  Sense strand starting at position 3420 of SEQ ID NO: 1881937
auuugaaauucugaugagu

SEQ ID NO: 2082593 - RNA, 19 nt, Artificial Sequence
  Description of Artificial Sequence: Synthetic oligonucleotide
  Antisense strand to SEQ ID NO: 2082592
acucaucagaauuucaaau

SEQ ID NO: 2082594 - RNA, 19 nt, Artificial Sequence
  Description of Artificial Sequence: Synthetic oligonucleotide
  Sense strand starting at position 3429 of SEQ ID NO: 1881937
ucugaugaguuccucagaa

SEQ ID NO: 2082595 - RNA, 19 nt, Artificial Sequence
  Description of Artificial Sequence: Synthetic oligonucleotide
  Antisense strand to SEQ ID NO: 2082594
uucugaggaacucaucaga

SEQ ID NO: 2082596 - RNA, 19 nt, Artificial Sequence
  Description of Artificial Sequence: Synthetic oligonucleotide
  Sense strand starting at position 3431 of SEQ ID NO: 1881937
ugaugaguuccucagaagu

SEQ ID NO: 2082597 - RNA, 19 nt, Artificial Sequence
  Description of Artificial Sequence: Synthetic oligonucleotide
  Antisense strand to SEQ ID NO: 2082596
acuucugaggaacucauca

SEQ ID NO: 2082598 - RNA, 19 nt, Artificial Sequence
  Description of Artificial Sequence: Synthetic oligonucleotide
  Sense strand starting at position 3540 of SEQ ID NO: 1881937
ugugaaauucuguaaguug

SEQ ID NO: 2082599 - RNA, 19 nt, Artificial Sequence
  Description of Artificial Sequence: Synthetic oligonucleotide
  Antisense strand to SEQ ID NO: 2082598
caacuuacagaauuucaca

SEQ ID NO: 2082600 - RNA, 19 nt, Artificial Sequence
  Description of Artificial Sequence: Synthetic oligonucleotide
  Sense strand starting at position 3707 of SEQ ID NO: 1881937
ucaggaaauuaggcucaua

SEQ ID NO: 2082601 - RNA, 19 nt, Artificial Sequence
  Description of Artificial Sequence: Synthetic oligonucleotide
  Antisense strand to SEQ ID NO: 2082600
uaugagccuaauuuccuga

SEQ ID NO: 2082602 - RNA, 19 nt, Artificial Sequence
  Description of Artificial Sequence: Synthetic oligonucleotide
  Sense strand starting at position 3710 of SEQ ID NO: 1881937
ggaaauuaggcucauagcu

SEQ ID NO: 2082603 - RNA, 19 nt, Artificial Sequence
  Description of Artificial Sequence: Synthetic oligonucleotide
  Antisense strand to SEQ ID NO: 2082602
agcuaugagccuaauuucc

SEQ ID NO: 2082604 - RNA, 19 nt, Artificial Sequence
  Description of Artificial Sequence: Synthetic oligonucleotide
  Sense strand starting at position 16 of SEQ ID NO: 1881938
ggccaaaccuugcuugaca

SEQ ID NO: 2082605 - RNA, 19 nt, Artificial Sequence
  Description of Artificial Sequence: Synthetic oligonucleotide
  Antisense strand to SEQ ID NO: 2082604
ugucaagcaagguuuggcc

SEQ ID NO: 2082606 - RNA, 19 nt, Artificial Sequence
  Description of Artificial Sequence: Synthetic oligonucleotide
  Sense strand starting at position 27 of SEQ ID NO: 1881938
gcuugacacgugcaaaguu

SEQ ID NO: 2082607 - RNA, 19 nt, Artificial Sequence
  Description of Artificial Sequence: Synthetic oligonucleotide
  Antisense strand to SEQ ID NO: 2082606
aacuuugcacgugucaagc

SEQ ID NO: 2082608 - RNA, 19 nt, Artificial Sequence
  Description of Artificial Sequence: Synthetic oligonucleotide
  Sense strand starting at position 87 of SEQ ID NO: 1881938
gugcacuucugagccagau

SEQ ID NO: 2082609 - RNA, 19 nt, Artificial Sequence
  Description of Artificial Sequence: Synthetic oligonucleotide
  Antisense strand to SEQ ID NO: 2082608
aucuggcucagaagugcac

SEQ ID NO: 2082610 - RNA, 19 nt, Artificial Sequence
  Description of Artificial Sequence: Synthetic oligonucleotide
  Sense strand starting at position 291 of SEQ ID NO: 1881938
guguuuccucccgugucaa

SEQ ID NO: 2082611 - RNA, 19 nt, Artificial Sequence
  Description of Artificial Sequence: Synthetic oligonucleotide
  Antisense strand to SEQ ID NO: 2082610
uugacacgggaggaaacac

SEQ ID NO: 2082612 - RNA, 19 nt, Artificial Sequence
  Description of Artificial Sequence: Synthetic oligonucleotide
  Sense strand starting at position 539 of SEQ ID NO: 1881938
guggcccuggcuugagaaa

SEQ ID NO: 2082613 - RNA, 19 nt, Artificial Sequence
  Description of Artificial Sequence: Synthetic oligonucleotide
  Antisense strand to SEQ ID NO: 2082612
uuucucaagccagggccac

SEQ ID NO: 2082614 - RNA, 19 nt, Artificial Sequence
  Description of Artificial Sequence: Synthetic oligonucleotide
  Sense strand starting at position 2025 of SEQ ID NO: 1881938
gcuauugagggcggagaaa

SEQ ID NO: 2082615 - RNA, 19 nt, Artificial Sequence
  Description of Artificial Sequence: Synthetic oligonucleotide
  Antisense strand to SEQ ID NO: 2082614
uuucuccgcccucaauagc

SEQ ID NO: 2082616 - RNA, 19 nt, Artificial Sequence
  Description of Artificial Sequence: Synthetic oligonucleotide
  Sense strand starting at position 2057 of SEQ ID NO: 1881938
ugcuaaguguccucauaac

SEQ ID NO: 2082617 - RNA, 19 nt, Artificial Sequence
  Description of Artificial Sequence: Synthetic oligonucleotide
  Antisense strand to SEQ ID NO: 2082616
guuaugaggacacuuagca

SEQ ID NO: 2082618 - RNA, 19 nt, Artificial Sequence
  Description of Artificial Sequence: Synthetic oligonucleotide
  Sense strand starting at position 2085 of SEQ ID NO: 1881938
cuacacagugcagaauaau

SEQ ID NO: 2082619 - RNA, 19 nt, Artificial Sequence
  Description of Artificial Sequence: Synthetic oligonucleotide
  Antisense strand to SEQ ID NO: 2082618
auuauucugcacuguguag

SEQ ID NO: 2082620 - RNA, 19 nt, Artificial Sequence
  Description of Artificial Sequence: Synthetic oligonucleotide
  Sense strand starting at position 2091 of SEQ ID NO: 1881938
agugcagaauaaucagacu

SEQ ID NO: 2082621 - RNA, 19 nt, Artificial Sequence
  Description of Artificial Sequence: Synthetic oligonucleotide
  Antisense strand to SEQ ID NO: 2082620
agucugauuauucugcacu

SEQ ID NO: 2082622 - RNA, 19 nt, Artificial Sequence
  Description of Artificial Sequence: Synthetic oligonucleotide
  Sense strand starting at position 2112 of SEQ ID NO: 1881938
gguaacagauaccuuguua

SEQ ID NO: 2082623 - RNA, 19 nt, Artificial Sequence
  Description of Artificial Sequence: Synthetic oligonucleotide
  Antisense strand to SEQ ID NO: 2082622
uaacaagguaucuguuacc

SEQ ID NO: 2082624 - RNA, 19 nt, Artificial Sequence
  Description of Artificial Sequence: Synthetic oligonucleotide
  Sense strand starting at position 2150 of SEQ ID NO: 1881938
ccuuaaaguugagaaauaa

SEQ ID NO: 2082625 - RNA, 19 nt, Artificial Sequence
  Description of Artificial Sequence: Synthetic oligonucleotide
  Antisense strand to SEQ ID NO: 2082624
uuauuucucaacuuuaagg

SEQ ID NO: 2082626 - RNA, 19 nt, Artificial Sequence
  Description of Artificial Sequence: Synthetic oligonucleotide
  Sense strand starting at position 2204 of SEQ ID NO: 1881938
agguuaacuugagcaagau

SEQ ID NO: 2082627 - RNA, 19 nt, Artificial Sequence
  Description of Artificial Sequence: Synthetic oligonucleotide
  Antisense strand to SEQ ID NO: 2082626
aucuugcucaaguuaaccu

SEQ ID NO: 2082628 - RNA, 19 nt, Artificial Sequence
  Description of Artificial Sequence: Synthetic oligonucleotide
  Sense strand starting at position 2231 of SEQ ID NO: 1881938
uccucagaucucugcuagu

SEQ ID NO: 2082629 - RNA, 19 nt, Artificial Sequence
  Description of Artificial Sequence: Synthetic oligonucleotide
  Antisense strand to SEQ ID NO: 2082628
acuagcagagaucugagga

SEQ ID NO: 2082630 - RNA, 19 nt, Artificial Sequence
  Description of Artificial Sequence: Synthetic oligonucleotide
  Sense strand starting at position 2283 of SEQ ID NO: 1881938
gucggaggucccugaaagu

SEQ ID NO: 2082631 - RNA, 19 nt, Artificial Sequence
  Description of Artificial Sequence: Synthetic oligonucleotide
  Antisense strand to SEQ ID NO: 2082630
acuuucagggaccuccgac

SEQ ID NO: 2082632 - RNA, 19 nt, Artificial Sequence
  Description of Artificial Sequence: Synthetic oligonucleotide
  Sense strand starting at position 2289 of SEQ ID NO: 1881938
ggucccugaaagugaauua

SEQ ID NO: 2082633 - RNA, 19 nt, Artificial Sequence
  Description of Artificial Sequence: Synthetic oligonucleotide
  Antisense strand to SEQ ID NO: 2082632
uaauucacuuucagggacc

SEQ ID NO: 2082634 - RNA, 19 nt, Artificial Sequence
  Description of Artificial Sequence: Synthetic oligonucleotide
  Sense strand starting at position 2300 of SEQ ID NO: 1881938
gugaauuaacuuuggaucu

SEQ ID NO: 2082635 - RNA, 19 nt, Artificial Sequence
  Description of Artificial Sequence: Synthetic oligonucleotide
  Antisense strand to SEQ ID NO: 2082634
agauccaaaguuaauucac

SEQ ID NO: 2082636 - RNA, 19 nt, Artificial Sequence
  Description of Artificial Sequence: Synthetic oligonucleotide
  Sense strand starting at position 2313 of SEQ ID NO: 1881938
ggaucucuuagguaucugu

SEQ ID NO: 2082637 - RNA, 19 nt, Artificial Sequence
  Description of Artificial Sequence: Synthetic oligonucleotide
  Antisense strand to SEQ ID NO: 2082636
acagauaccuaagagaucc

SEQ ID NO: 2082638 - RNA, 19 nt, Artificial Sequence
  Description of Artificial Sequence: Synthetic oligonucleotide
  Sense strand starting at position 2320 of SEQ ID NO: 1881938
uuagguaucuguguuugga

SEQ ID NO: 2082639 - RNA, 19 nt, Artificial Sequence
  Description of Artificial Sequence: Synthetic oligonucleotide
  Antisense strand to SEQ ID NO: 2082638
uccaaacacagauaccuaa

SEQ ID NO: 2082640 - RNA, 19 nt, Artificial Sequence
  Description of Artificial Sequence: Synthetic oligonucleotide
  Sense strand starting at position 2322 of SEQ ID NO: 1881938
agguaucuguguuuggaau

SEQ ID NO: 2082641 - RNA, 19 nt, Artificial Sequence
  Description of Artificial Sequence: Synthetic oligonucleotide
  Antisense strand to SEQ ID NO: 2082640
auuccaaacacagauaccu

SEQ ID NO: 2082642 - RNA, 19 nt, Artificial Sequence
  Description of Artificial Sequence: Synthetic oligonucleotide
  Sense strand starting at position 2323 of SEQ ID NO: 1881938
gguaucuguguuuggaaua

SEQ ID NO: 2082643 - RNA, 19 nt, Artificial Sequence
  Description of Artificial Sequence: Synthetic oligonucleotide
  Antisense strand to SEQ ID NO: 2082642
uauuccaaacacagauacc

SEQ ID NO: 2082644 - RNA, 19 nt, Artificial Sequence
  Description of Artificial Sequence: Synthetic oligonucleotide
  Sense strand starting at position 2328 of SEQ ID NO: 1881938
cuguguuuggaauagaguu

SEQ ID NO: 2082645 - RNA, 19 nt, Artificial Sequence
  Description of Artificial Sequence: Synthetic oligonucleotide
  Antisense strand to SEQ ID NO: 2082644
aacucuauuccaaacacag

SEQ ID NO: 2082646 - RNA, 19 nt, Artificial Sequence
  Description of Artificial Sequence: Synthetic oligonucleotide
  Sense strand starting at position 2330 of SEQ ID NO: 1881938
guguuuggaauagaguuua

SEQ ID NO: 2082647 - RNA, 19 nt, Artificial Sequence
  Description of Artificial Sequence: Synthetic oligonucleotide
  Antisense strand to SEQ ID NO: 2082646
uaaacucuauuccaaacac

SEQ ID NO: 2082648 - RNA, 19 nt, Artificial Sequence
  Description of Artificial Sequence: Synthetic oligonucleotide
  Sense strand starting at position 2371 of SEQ ID NO: 1881938
agugaaugcgagcacucaa

SEQ ID NO: 2082649 - RNA, 19 nt, Artificial Sequence
  Description of Artificial Sequence: Synthetic oligonucleotide
  Antisense strand to SEQ ID NO: 2082648
uugagugcucgcauucacu

SEQ ID NO: 2082650 - RNA, 19 nt, Artificial Sequence
  Description of Artificial Sequence: Synthetic oligonucleotide
  Sense strand starting at position 2409 of SEQ ID NO: 1881938
uuaugcuagauugggcaau

SEQ ID NO: 2082651 - RNA, 19 nt, Artificial Sequence
  Description of Artificial Sequence: Synthetic oligonucleotide
  Antisense strand to SEQ ID NO: 2082650
auugcccaaucuagcauaa

SEQ ID NO: 2082652 - RNA, 19 nt, Artificial Sequence
  Description of Artificial Sequence: Synthetic oligonucleotide
  Sense strand starting at position 2415 of SEQ ID NO: 1881938
uagauugggcaauagucua

SEQ ID NO: 2082653 - RNA, 19 nt, Artificial Sequence
  Description of Artificial Sequence: Synthetic oligonucleotide
  Antisense strand to SEQ ID NO: 2082652
uagacuauugcccaaucua

SEQ ID NO: 2082654 - RNA, 19 nt, Artificial Sequence
  Description of Artificial Sequence: Synthetic oligonucleotide
  Sense strand starting at position 2420 of SEQ ID NO: 1881938
ugggcaauagucuaauagu

SEQ ID NO: 2082655 - RNA, 19 nt, Artificial Sequence
  Description of Artificial Sequence: Synthetic oligonucleotide
  Antisense strand to SEQ ID NO: 2082654
acuauuagacuauugccca

SEQ ID NO: 2082656 - RNA, 19 nt, Artificial Sequence
  Description of Artificial Sequence: Synthetic oligonucleotide
  Sense strand starting at position 2980 of SEQ ID NO: 1881938
cugugucucuuuccagaua

SEQ ID NO: 2082657 - RNA, 19 nt, Artificial Sequence
  Description of Artificial Sequence: Synthetic oligonucleotide
  Antisense strand to SEQ ID NO: 2082656
uaucuggaaagagacacag

SEQ ID NO: 2082658 - RNA, 19 nt, Artificial Sequence
  Description of Artificial Sequence: Synthetic oligonucleotide
  Sense strand starting at position 2983 of SEQ ID NO: 1881938
ugucucuuuccagauagug

SEQ ID NO: 2082659 - RNA, 19 nt, Artificial Sequence
  Description of Artificial Sequence: Synthetic oligonucleotide
  Antisense strand to SEQ ID NO: 2082658
cacuaucuggaaagagaca

SEQ ID NO: 2082660 - RNA, 19 nt, Artificial Sequence
  Description of Artificial Sequence: Synthetic oligonucleotide
  Sense strand starting at position 3070 of SEQ ID NO: 1881938
guauuucuuggugauugcu

SEQ ID NO: 2082661 - RNA, 19 nt, Artificial Sequence
  Description of Artificial Sequence: Synthetic oligonucleotide
  Antisense strand to SEQ ID NO: 2082660
agcaaucaccaagaaauac

SEQ ID NO: 2082662 - RNA, 19 nt, Artificial Sequence
  Description of Artificial Sequence: Synthetic oligonucleotide
  Sense strand starting at position 3122 of SEQ ID NO: 1881938
uuguaaggaugucucaaau

SEQ ID NO: 2082663 - RNA, 19 nt, Artificial Sequence
  Description of Artificial Sequence: Synthetic oligonucleotide
  Antisense strand to SEQ ID NO: 2082662
auuugagacauccuuacaa

SEQ ID NO: 2082664 - RNA, 19 nt, Artificial Sequence
  Description of Artificial Sequence: Synthetic oligonucleotide
  Sense strand starting at position 3192 of SEQ ID NO: 1881938
ucagcauuauagcuaauga

SEQ ID NO: 2082665 - RNA, 19 nt, Artificial Sequence
  Description of Artificial Sequence: Synthetic oligonucleotide
  Antisense strand to SEQ ID NO: 2082664
ucauuagcuauaaugcuga

SEQ ID NO: 2082666 - RNA, 19 nt, Artificial Sequence
  Description of Artificial Sequence: Synthetic oligonucleotide
  Sense strand starting at position 3202 of SEQ ID NO: 1881938
agcuaaugacccuguacau

SEQ ID NO: 2082667 - RNA, 19 nt, Artificial Sequence
  Description of Artificial Sequence: Synthetic oligonucleotide
  Antisense strand to SEQ ID NO: 2082666
auguacagggucauuagcu

SEQ ID NO: 2082668 - RNA, 19 nt, Artificial Sequence
  Description of Artificial Sequence: Synthetic oligonucleotide
  Sense strand starting at position 3434 of SEQ ID NO: 1881938
gcaaaucugauaggugaaa

SEQ ID NO: 2082669 - RNA, 19 nt, Artificial Sequence
  Description of Artificial Sequence: Synthetic oligonucleotide
  Antisense strand to SEQ ID NO: 2082668
uuucaccuaucagauuugc

SEQ ID NO: 2082670 - RNA, 19 nt, Artificial Sequence
  Description of Artificial Sequence: Synthetic oligonucleotide
  Sense strand starting at position 3482 of SEQ ID NO: 1881938
aguucucugugauugagca

SEQ ID NO: 2082671 - RNA, 19 nt, Artificial Sequence
  Description of Artificial Sequence: Synthetic oligonucleotide
  Antisense strand to SEQ ID NO: 2082670
ugcucaaucacagagaacu

SEQ ID NO: 2082672 - RNA, 19 nt, Artificial Sequence
  Description of Artificial Sequence: Synthetic oligonucleotide
  Sense strand starting at position 3651 of SEQ ID NO: 1881938
ucuguaacaugaguugcaa

SEQ ID NO: 2082673 - RNA, 19 nt, Artificial Sequence
  Description of Artificial Sequence: Synthetic oligonucleotide
  Antisense strand to SEQ ID NO: 2082672
uugcaacucauguuacaga

SEQ ID NO: 2082674 - RNA, 19 nt, Artificial Sequence
  Description of Artificial Sequence: Synthetic oligonucleotide
  Sense strand starting at position 3736 of SEQ ID NO: 1881938
aaaggcauauuugauagua

SEQ ID NO: 2082675 - RNA, 19 nt, Artificial Sequence
  Description of Artificial Sequence: Synthetic oligonucleotide
  Antisense strand to SEQ ID NO: 2082674
uacuaucaaauaugccuuu

SEQ ID NO: 2082676 - RNA, 19 nt, Artificial Sequence
  Description of Artificial Sequence: Synthetic oligonucleotide
  Sense strand starting at position 3738 of SEQ ID NO: 1881938
aggcauauuugauaguauc

SEQ ID NO: 2082677 - RNA, 19 nt, Artificial Sequence
  Description of Artificial Sequence: Synthetic oligonucleotide
  Antisense strand to SEQ ID NO: 2082676
gauacuaucaaauaugccu

SEQ ID NO: 2082678 - RNA, 19 nt, Artificial Sequence
  Description of Artificial Sequence: Synthetic oligonucleotide
  Sense strand starting at position 3782 of SEQ ID NO: 1881938
uauuuauacugacggagag

SEQ ID NO: 2082679 - RNA, 19 nt, Artificial Sequence
  Description of Artificial Sequence: Synthetic oligonucleotide
  Antisense strand to SEQ ID NO: 2082678
cucuccgucaguauaaaua

SEQ ID NO: 2082680 - RNA, 19 nt, Artificial Sequence
  Description of Artificial Sequence: Synthetic oligonucleotide
  Sense strand starting at position 3879 of SEQ ID NO: 1881938
gcauuccaugcauguauuu

SEQ ID NO: 2082681 - RNA, 19 nt, Artificial Sequence
  Description of Artificial Sequence: Synthetic oligonucleotide
  Antisense strand to SEQ ID NO: 2082680
aaauacaugcauggaaugc

SEQ ID NO: 2082682 - RNA, 19 nt, Artificial Sequence
  Description of Artificial Sequence: Synthetic oligonucleotide
  Sense strand starting at position 3965 of SEQ ID NO: 1881938
auuggaauuuaugacccau

SEQ ID NO: 2082683 - RNA, 19 nt, Artificial Sequence
  Description of Artificial Sequence: Synthetic oligonucleotide
  Antisense strand to SEQ ID NO: 2082682
augggucauaaauuccaau

SEQ ID NO: 2082684 - RNA, 19 nt, Artificial Sequence
  Description of Artificial Sequence: Synthetic oligonucleotide
  Sense strand starting at position 1175 of SEQ ID NO: 1881939
uuaggaugaguuuguuaua

SEQ ID NO: 2082685 - RNA, 19 nt, Artificial Sequence
  Description of Artificial Sequence: Synthetic oligonucleotide
  Antisense strand to SEQ ID NO: 2082684
uauaacaaacucauccuaa

SEQ ID NO: 2082686 - RNA, 19 nt, Artificial Sequence
  Description of Artificial Sequence: Synthetic oligonucleotide
  Sense strand starting at position 1176 of SEQ ID NO: 1881939
uaggaugaguuuguuauau

SEQ ID NO: 2082687 - RNA, 19 nt, Artificial Sequence
  Description of Artificial Sequence: Synthetic oligonucleotide
  Antisense strand to SEQ ID NO: 2082686
auauaacaaacucauccua

SEQ ID NO: 2082688 - RNA, 19 nt, Artificial Sequence
  Description of Artificial Sequence: Synthetic oligonucleotide
  Sense strand starting at position 1227 of SEQ ID NO: 1881939
uguagaauauagccuguga

SEQ ID NO: 2082689 - RNA, 19 nt, Artificial Sequence
  Description of Artificial Sequence: Synthetic oligonucleotide
  Antisense strand to SEQ ID NO: 2082688
ucacaggcuauauucuaca

SEQ ID NO: 2082690 - RNA, 19 nt, Artificial Sequence
  Description of Artificial Sequence: Synthetic oligonucleotide
  Sense strand starting at position 1229 of SEQ ID NO: 1881939
uagaauauagccugugaaa

SEQ ID NO: 2082691 - RNA, 19 nt, Artificial Sequence
  Description of Artificial Sequence: Synthetic oligonucleotide
  Antisense strand to SEQ ID NO: 2082690
uuucacaggcuauauucua

SEQ ID NO: 2082692 - RNA, 19 nt, Artificial Sequence
  Description of Artificial Sequence: Synthetic oligonucleotide
  Sense strand starting at position 1436 of SEQ ID NO: 1881939
auuaacuugcauggaaauu

SEQ ID NO: 2082693 - RNA, 19 nt, Artificial Sequence
  Description of Artificial Sequence: Synthetic oligonucleotide
  Antisense strand to SEQ ID NO: 2082692
aauuuccaugcaaguuaau

SEQ ID NO: 2082694 - RNA, 19 nt, Artificial Sequence
  Description of Artificial Sequence: Synthetic oligonucleotide
  Sense strand starting at position 1447 of SEQ ID NO: 1881939
uggaaauuguagcuauuaa

SEQ ID NO: 2082695 - RNA, 19 nt, Artificial Sequence
  Description of Artificial Sequence: Synthetic oligonucleotide
  Antisense strand to SEQ ID NO: 2082694
uuaauagcuacaauuucca

SEQ ID NO: 2082696 - RNA, 19 nt, Artificial Sequence
  Description of Artificial Sequence: Synthetic oligonucleotide
  Sense strand starting at position 1455 of SEQ ID NO: 1881939
guagcuauuaaguggaaca

SEQ ID NO: 2082697 - RNA, 19 nt, Artificial Sequence
  Description of Artificial Sequence: Synthetic oligonucleotide
  Antisense strand to SEQ ID NO: 2082696
uguuccacuuaauagcuac

SEQ ID NO: 2082698 - RNA, 19 nt, Artificial Sequence
  Description of Artificial Sequence: Synthetic oligonucleotide
  Sense strand starting at position 2028 of SEQ ID NO: 1881939
gauggacaugcguagaacu

SEQ ID NO: 2082699 - RNA, 19 nt, Artificial Sequence
  Description of Artificial Sequence: Synthetic oligonucleotide
  Antisense strand to SEQ ID NO: 2082698
aguucuacgcauguccauc

SEQ ID NO: 2082700 - RNA, 19 nt, Artificial Sequence
  Description of Artificial Sequence: Synthetic oligonucleotide
  Sense strand starting at position 2527 of SEQ ID NO: 1881939
acaacuaaguguguaauau

SEQ ID NO: 2082701 - RNA, 19 nt, Artificial Sequence
  Description of Artificial Sequence: Synthetic oligonucleotide
  Antisense strand to SEQ ID NO: 2082700
auauuacacacuuaguugu

SEQ ID NO: 2082702 - RNA, 19 nt, Artificial Sequence
  Description of Artificial Sequence: Synthetic oligonucleotide
  Sense strand starting at position 2700 of SEQ ID NO: 1881939
guuacugaaguuugggauu

SEQ ID NO: 2082703 - RNA, 19 nt, Artificial Sequence
  Description of Artificial Sequence: Synthetic oligonucleotide
  Antisense strand to SEQ ID NO: 2082702
aaucccaaacuucaguaac

SEQ ID NO: 2082704 - RNA, 19 nt, Artificial Sequence
  Description of Artificial Sequence: Synthetic oligonucleotide
  Sense strand starting at position 2712 of SEQ ID NO: 1881939
ugggauuggcugugauaau

SEQ ID NO: 2082705 - RNA, 19 nt, Artificial Sequence
  Description of Artificial Sequence: Synthetic oligonucleotide
  Antisense strand to SEQ ID NO: 2082704
auuaucacagccaauccca

SEQ ID NO: 2082706 - RNA, 19 nt, Artificial Sequence
  Description of Artificial Sequence: Synthetic oligonucleotide
  Sense strand starting at position 2751 of SEQ ID NO: 1881939
uaggguuugccacagcaau

SEQ ID NO: 2082707 - RNA, 19 nt, Artificial Sequence
  Description of Artificial Sequence: Synthetic oligonucleotide
  Antisense strand to SEQ ID NO: 2082706
auugcuguggcaaacccua

SEQ ID NO: 2082708 - RNA, 19 nt, Artificial Sequence
  Description of Artificial Sequence: Synthetic oligonucleotide
  Sense strand starting at position 2920 of SEQ ID NO: 1881939
ccacaucuucggcaagacu

SEQ ID NO: 2082709 - RNA, 19 nt, Artificial Sequence
  Description of Artificial Sequence: Synthetic oligonucleotide
  Antisense strand to SEQ ID NO: 2082708
agucuugccgaagaugugg

SEQ ID NO: 2082710 - RNA, 19 nt, Artificial Sequence
  Description of Artificial Sequence: Synthetic oligonucleotide
  Sense strand starting at position 2949 of SEQ ID NO: 1881939
ucaggaagauacuuucuuu

SEQ ID NO: 2082711 - RNA, 19 nt, Artificial Sequence
  Description of Artificial Sequence: Synthetic oligonucleotide
  Antisense strand to SEQ ID NO: 2082710
aaagaaaguaucuuccuga

SEQ ID NO: 2082712 - RNA, 19 nt, Artificial Sequence
  Description of Artificial Sequence: Synthetic oligonucleotide
  Sense strand starting at position 2952 of SEQ ID NO: 1881939
ggaagauacuuucuuugcu

SEQ ID NO: 2082713 - RNA, 19 nt, Artificial Sequence
  Description of Artificial Sequence: Synthetic oligonucleotide
  Antisense strand to SEQ ID NO: 2082712
agcaaagaaaguaucuucc

SEQ ID NO: 2082714 - RNA, 19 nt, Artificial Sequence
  Description of Artificial Sequence: Synthetic oligonucleotide
  Sense strand starting at position 3006 of SEQ ID NO: 1881939
uuauuaugagaaugcagca

SEQ ID NO: 2082715 - RNA, 19 nt, Artificial Sequence
  Description of Artificial Sequence: Synthetic oligonucleotide
  Antisense strand to SEQ ID NO: 2082714
ugcugcauucucauaauaa

SEQ ID NO: 2082716 - RNA, 19 nt, Artificial Sequence
  Description of Artificial Sequence: Synthetic oligonucleotide
  Sense strand starting at position 3011 of SEQ ID NO: 1881939
augagaaugcagcaauucu

SEQ ID NO: 2082717 - RNA, 19 nt, Artificial Sequence
  Description of Artificial Sequence: Synthetic oligonucleotide
  Antisense strand to SEQ ID NO: 2082716
agaauugcugcauucucau

SEQ ID NO: 2082718 - RNA, 19 nt, Artificial Sequence
  Description of Artificial Sequence: Synthetic oligonucleotide
  Sense strand starting at position 3127 of SEQ ID NO: 1881939
uauccaugauaguugggau

SEQ ID NO: 2082719 - RNA, 19 nt, Artificial Sequence
  Description of Artificial Sequence: Synthetic oligonucleotide
  Antisense strand to SEQ ID NO: 2082718
aucccaacuaucauggaua

SEQ ID NO: 2082720 - RNA, 19 nt, Artificial Sequence
  Description of Artificial Sequence: Synthetic oligonucleotide
  Sense strand starting at position 3217 of SEQ ID NO: 1881939
cuagaauggugaucucuuu

SEQ ID NO: 2082721 - RNA, 19 nt, Artificial Sequence
  Description of Artificial Sequence: Synthetic oligonucleotide
  Antisense strand to SEQ ID NO: 2082720
aaagagaucaccauucuag

SEQ ID NO: 2082722 - RNA, 19 nt, Artificial Sequence
  Description of Artificial Sequence: Synthetic oligonucleotide
  Sense strand starting at position 3224 of SEQ ID NO: 1881939
ggugaucucuuuccagaag

SEQ ID NO: 2082723 - RNA, 19 nt, Artificial Sequence
  Description of Artificial Sequence: Synthetic oligonucleotide
  Antisense strand to SEQ ID NO: 2082722
cuucuggaaagagaucacc

SEQ ID NO: 2082724 - RNA, 19 nt, Artificial Sequence
  Description of Artificial Sequence: Synthetic oligonucleotide
  Sense strand starting at position 3235 of SEQ ID NO: 1881939
uccagaagaugcucaaugu

SEQ ID NO: 2082725 - RNA, 19 nt, Artificial Sequence
  Description of Artificial Sequence: Synthetic oligonucleotide
  Antisense strand to SEQ ID NO: 2082724
acauugagcaucuucugga

SEQ ID NO: 2082726 - RNA, 19 nt, Artificial Sequence
  Description of Artificial Sequence: Synthetic oligonucleotide
  Sense strand starting at position 3236 of SEQ ID NO: 1881939
ccagaagaugcucaaugua

SEQ ID NO: 2082727 - RNA, 19 nt, Artificial Sequence
  Description of Artificial Sequence: Synthetic oligonucleotide
  Antisense strand to SEQ ID NO: 2082726
uacauugagcaucuucugg

SEQ ID NO: 2082728 - RNA, 19 nt, Artificial Sequence
  Description of Artificial Sequence: Synthetic oligonucleotide
  Sense strand starting at position 3239 of SEQ ID NO: 1881939
gaagaugcucaauguacuu

SEQ ID NO: 2082729 - RNA, 19 nt, Artificial Sequence
  Description of Artificial Sequence: Synthetic oligonucleotide
  Antisense strand to SEQ ID NO: 2082728
aaguacauugagcaucuuc

SEQ ID NO: 2082730 - RNA, 19 nt, Artificial Sequence
  Description of Artificial Sequence: Synthetic oligonucleotide
  Sense strand starting at position 3356 of SEQ ID NO: 1881939
auccauuaggaaugaaugu

SEQ ID NO: 2082731 - RNA, 19 nt, Artificial Sequence
  Description of Artificial Sequence: Synthetic oligonucleotide
  Antisense strand to SEQ ID NO: 2082730
acauucauuccuaauggau

SEQ ID NO: 2082732 - RNA, 19 nt, Artificial Sequence
  Description of Artificial Sequence: Synthetic oligonucleotide
  Sense strand starting at position 3386 of SEQ ID NO: 1881939
gcauguaaacaauguuaau

SEQ ID NO: 2082733 - RNA, 19 nt, Artificial Sequence
  Description of Artificial Sequence: Synthetic oligonucleotide
  Antisense strand to SEQ ID NO: 2082732
auuaacauuguuuacaugc

SEQ ID NO: 2082734 - RNA, 19 nt, Artificial Sequence
  Description of Artificial Sequence: Synthetic oligonucleotide
  Sense strand starting at position 3406 of SEQ ID NO: 1881939
uccuuagauauuggaguga

SEQ ID NO: 2082735 - RNA, 19 nt, Artificial Sequence
  Description of Artificial Sequence: Synthetic oligonucleotide
  Antisense strand to SEQ ID NO: 2082734
ucacuccaauaucuaagga

SEQ ID NO: 2082736 - RNA, 19 nt, Artificial Sequence
  Description of Artificial Sequence: Synthetic oligonucleotide
  Sense strand starting at position 3417 of SEQ ID NO: 1881939
uggagugauugggugucaa

SEQ ID NO: 2082737 - RNA, 19 nt, Artificial Sequence
  Description of Artificial Sequence: Synthetic oligonucleotide
  Antisense strand to SEQ ID NO: 2082736
uugacacccaaucacucca

SEQ ID NO: 2082738 - RNA, 19 nt, Artificial Sequence
  Description of Artificial Sequence: Synthetic oligonucleotide
  Sense strand starting at position 3418 of SEQ ID NO: 1881939
ggagugauugggugucaag

SEQ ID NO: 2082739 - RNA, 19 nt, Artificial Sequence
  Description of Artificial Sequence: Synthetic oligonucleotide
  Antisense strand to SEQ ID NO: 2082738
cuugacacccaaucacucc

SEQ ID NO: 2082740 - RNA, 19 nt, Artificial Sequence
  Description of Artificial Sequence: Synthetic oligonucleotide
  Sense strand starting at position 3443 of SEQ ID NO: 1881939
gucagcaaacaguaauauu

SEQ ID NO: 2082741 - RNA, 19 nt, Artificial Sequence
  Description of Artificial Sequence: Synthetic oligonucleotide
  Antisense strand to SEQ ID NO: 2082740
aauauuacuguuugcugac

SEQ ID NO: 2082742 - RNA, 19 nt, Artificial Sequence
  Description of Artificial Sequence: Synthetic oligonucleotide
  Sense strand starting at position 3494 of SEQ ID NO: 1881939
gcaguagaucuuuacagug

SEQ ID NO: 2082743 - RNA, 19 nt, Artificial Sequence
  Description of Artificial Sequence: Synthetic oligonucleotide
  Antisense strand to SEQ ID NO: 2082742
cacuguaaagaucuacugc

SEQ ID NO: 2082744 - RNA, 19 nt, Artificial Sequence
  Description of Artificial Sequence: Synthetic oligonucleotide
  Sense strand starting at position 3502 of SEQ ID NO: 1881939
ucuuuacagugggcuuaaa

SEQ ID NO: 2082745 - RNA, 19 nt, Artificial Sequence
  Description of Artificial Sequence: Synthetic oligonucleotide
  Antisense strand to SEQ ID NO: 2082744
uuuaagcccacuguaaaga

SEQ ID NO: 2082746 - RNA, 19 nt, Artificial Sequence
  Description of Artificial Sequence: Synthetic oligonucleotide
  Sense strand starting at position 3612 of SEQ ID NO: 1881939
uucuuaaagcccuaggauu

SEQ ID NO: 2082747 - RNA, 19 nt, Artificial Sequence
  Description of Artificial Sequence: Synthetic oligonucleotide
  Antisense strand to SEQ ID NO: 2082746
aauccuagggcuuuaagaa

SEQ ID NO: 2082748 - RNA, 19 nt, Artificial Sequence
  Description of Artificial Sequence: Synthetic oligonucleotide
  Sense strand starting at position 3625 of SEQ ID NO: 1881939
aggauuuccugacagguaa

SEQ ID NO: 2082749 - RNA, 19 nt, Artificial Sequence
  Description of Artificial Sequence: Synthetic oligonucleotide
  Antisense strand to SEQ ID NO: 2082748
uuaccugucaggaaauccu

SEQ ID NO: 2082750 - RNA, 19 nt, Artificial Sequence
  Description of Artificial Sequence: Synthetic oligonucleotide
  Sense strand starting at position 3755 of SEQ ID NO: 1881939
agaagauggucaucuccuu

SEQ ID NO: 2082751 - RNA, 19 nt, Artificial Sequence
  Description of Artificial Sequence: Synthetic oligonucleotide
  Antisense strand to SEQ ID NO: 2082750
aaggagaugaccaucuucu

SEQ ID NO: 2082752 - RNA, 19 nt, Artificial Sequence
  Description of Artificial Sequence: Synthetic oligonucleotide
  Sense strand starting at position 3774 of SEQ ID NO: 1881939
ccauuagaaggcuguauaa

SEQ ID NO: 2082753 - RNA, 19 nt, Artificial Sequence
  Description of Artificial Sequence: Synthetic oligonucleotide
  Antisense strand to SEQ ID NO: 2082752
uuauacagccuucuaaugg

SEQ ID NO: 2082754 - RNA, 19 nt, Artificial Sequence
  Description of Artificial Sequence: Synthetic oligonucleotide
  Sense strand starting at position 3776 of SEQ ID NO: 1881939
auuagaaggcuguauaauc

SEQ ID NO: 2082755 - RNA, 19 nt, Artificial Sequence
  Description of Artificial Sequence: Synthetic oligonucleotide
  Antisense strand to SEQ ID NO: 2082754
gauuauacagccuucuaau

SEQ ID NO: 2082756 - RNA, 19 nt, Artificial Sequence
  Description of Artificial Sequence: Synthetic oligonucleotide
  Sense strand starting at position 3781 of SEQ ID NO: 1881939
aaggcuguauaaucuagau

SEQ ID NO: 2082757 - RNA, 19 nt, Artificial Sequence
  Description of Artificial Sequence: Synthetic oligonucleotide
  Antisense strand to SEQ ID NO: 2082756
aucuagauuauacagccuu

SEQ ID NO: 2082758 - RNA, 19 nt, Artificial Sequence
  Description of Artificial Sequence: Synthetic oligonucleotide
  Sense strand starting at position 3783 of SEQ ID NO: 1881939
ggcuguauaaucuagauug

SEQ ID NO: 2082759 - RNA, 19 nt, Artificial Sequence
  Description of Artificial Sequence: Synthetic oligonucleotide
  Antisense strand to SEQ ID NO: 2082758
caaucuagauuauacagcc

SEQ ID NO: 2082760 - RNA, 19 nt, Artificial Sequence
  Description of Artificial Sequence: Synthetic oligonucleotide
  Sense strand starting at position 3840 of SEQ ID NO: 1881939
cuaagucuucuggauaacu

SEQ ID NO: 2082761 - RNA, 19 nt, Artificial Sequence
  Description of Artificial Sequence: Synthetic oligonucleotide
  Antisense strand to SEQ ID NO: 2082760
aguuauccagaagacuuag

SEQ ID NO: 2082762 - RNA, 19 nt, Artificial Sequence
  Description of Artificial Sequence: Synthetic oligonucleotide
  Sense strand starting at position 3912 of SEQ ID NO: 1881939
ggagacugcuucuuuccau

SEQ ID NO: 2082763 - RNA, 19 nt, Artificial Sequence
  Description of Artificial Sequence: Synthetic oligonucleotide
  Antisense strand to SEQ ID NO: 2082762
auggaaagaagcagucucc

SEQ ID NO: 2082764 - RNA, 19 nt, Artificial Sequence
  Description of Artificial Sequence: Synthetic oligonucleotide
  Sense strand starting at position 11 of SEQ ID NO: 1881940
agaggauccuccuuccuuu

SEQ ID NO: 2082765 - RNA, 19 nt, Artificial Sequence
  Description of Artificial Sequence: Synthetic oligonucleotide
  Antisense strand to SEQ ID NO: 2082764
aaaggaaggaggauccucu

SEQ ID NO: 2082766 - RNA, 19 nt, Artificial Sequence
  Description of Artificial Sequence: Synthetic oligonucleotide
  Sense strand starting at position 87 of SEQ ID NO: 1881940
gucuuagagcauuagcagu

SEQ ID NO: 2082767 - RNA, 19 nt, Artificial Sequence
  Description of Artificial Sequence: Synthetic oligonucleotide
  Antisense strand to SEQ ID NO: 2082766
acugcuaaugcucuaagac

SEQ ID NO: 2082768 - RNA, 19 nt, Artificial Sequence
  Description of Artificial Sequence: Synthetic oligonucleotide
  Sense strand starting at position 333 of SEQ ID NO: 1881940
uuacucauucuuggacuga

SEQ ID NO: 2082769 - RNA, 19 nt, Artificial Sequence
  Description of Artificial Sequence: Synthetic oligonucleotide
  Antisense strand to SEQ ID NO: 2082768
ucaguccaagaaugaguaa

SEQ ID NO: 2082770 - RNA, 19 nt, Artificial Sequence
  Description of Artificial Sequence: Synthetic oligonucleotide
  Sense strand starting at position 337 of SEQ ID NO: 1881940
ucauucuuggacugacauc

SEQ ID NO: 2082771 - RNA, 19 nt, Artificial Sequence
  Description of Artificial Sequence: Synthetic oligonucleotide
  Antisense strand to SEQ ID NO: 2082770
gaugucaguccaagaauga

SEQ ID NO: 2082772 - RNA, 19 nt, Artificial Sequence
  Description of Artificial Sequence: Synthetic oligonucleotide
  Sense strand starting at position 346 of SEQ ID NO: 1881940
gacugacauccuggaccuu

SEQ ID NO: 2082773 - RNA, 19 nt, Artificial Sequence
  Description of Artificial Sequence: Synthetic oligonucleotide
  Antisense strand to SEQ ID NO: 2082772
aagguccaggaugucaguc

SEQ ID NO: 2082774 - RNA, 19 nt, Artificial Sequence
  Description of Artificial Sequence: Synthetic oligonucleotide
  Sense strand starting at position 1348 of SEQ ID NO: 1881940
gccuaugaauccuuguaaa

SEQ ID NO: 2082775 - RNA, 19 nt, Artificial Sequence
  Description of Artificial Sequence: Synthetic oligonucleotide
  Antisense strand to SEQ ID NO: 2082774
uuuacaaggauucauaggc

SEQ ID NO: 2082776 - RNA, 19 nt, Artificial Sequence
  Description of Artificial Sequence: Synthetic oligonucleotide
  Sense strand starting at position 1396 of SEQ ID NO: 1881940
aguuaauacuucuccuagu

SEQ ID NO: 2082777 - RNA, 19 nt, Artificial Sequence
  Description of Artificial Sequence: Synthetic oligonucleotide
  Antisense strand to SEQ ID NO: 2082776
acuaggagaaguauuaacu

SEQ ID NO: 2082778 - RNA, 19 nt, Artificial Sequence
  Description of Artificial Sequence: Synthetic oligonucleotide
  Sense strand starting at position 1397 of SEQ ID NO: 1881940
guuaauacuucuccuagua

SEQ ID NO: 2082779 - RNA, 19 nt, Artificial Sequence
  Description of Artificial Sequence: Synthetic oligonucleotide
  Antisense strand to SEQ ID NO: 2082778
uacuaggagaaguauuaac

SEQ ID NO: 2082780 - RNA, 19 nt, Artificial Sequence
  Description of Artificial Sequence: Synthetic oligonucleotide
  Sense strand starting at position 2015 of SEQ ID NO: 1881940
gcuacaagcagucagauga

SEQ ID NO: 2082781 - RNA, 19 nt, Artificial Sequence
  Description of Artificial Sequence: Synthetic oligonucleotide
  Antisense strand to SEQ ID NO: 2082780
ucaucugacugcuuguagc

SEQ ID NO: 2082782 - RNA, 19 nt, Artificial Sequence
  Description of Artificial Sequence: Synthetic oligonucleotide
  Sense strand starting at position 2060 of SEQ ID NO: 1881940
uauuaaaggccggaauguu

SEQ ID NO: 2082783 - RNA, 19 nt, Artificial Sequence
  Description of Artificial Sequence: Synthetic oligonucleotide
  Antisense strand to SEQ ID NO: 2082782
aacauuccggccuuuaaua

SEQ ID NO: 2082784 - RNA, 19 nt, Artificial Sequence
  Description of Artificial Sequence: Synthetic oligonucleotide
  Sense strand starting at position 2203 of SEQ ID NO: 1881940
acaguucuaggauacaguu

SEQ ID NO: 2082785 - RNA, 19 nt, Artificial Sequence
  Description of Artificial Sequence: Synthetic oligonucleotide
  Antisense strand to SEQ ID NO: 2082784
aacuguauccuagaacugu

SEQ ID NO: 2082786 - RNA, 19 nt, Artificial Sequence
  Description of Artificial Sequence: Synthetic oligonucleotide
  Sense strand starting at position 2340 of SEQ ID NO: 1881940
cccacagcagucuguaaau

SEQ ID NO: 2082787 - RNA, 19 nt, Artificial Sequence
  Description of Artificial Sequence: Synthetic oligonucleotide
  Antisense strand to SEQ ID NO: 2082786
auuuacagacugcuguggg

SEQ ID NO: 2082788 - RNA, 19 nt, Artificial Sequence
  Description of Artificial Sequence: Synthetic oligonucleotide
  Sense strand starting at position 2342 of SEQ ID NO: 1881940
cacagcagucuguaaauga

SEQ ID NO: 2082789 - RNA, 19 nt, Artificial Sequence
  Description of Artificial Sequence: Synthetic oligonucleotide
  Antisense strand to SEQ ID NO: 2082788
ucauuuacagacugcugug

SEQ ID NO: 2082790 - RNA, 19 nt, Artificial Sequence
  Description of Artificial Sequence: Synthetic oligonucleotide
  Sense strand starting at position 2901 of SEQ ID NO: 1881940
aguuaagaacuuggguuaa

SEQ ID NO: 2082791 - RNA, 19 nt, Artificial Sequence
  Description of Artificial Sequence: Synthetic oligonucleotide
  Antisense strand to SEQ ID NO: 2082790
uuaacccaaguucuuaacu

SEQ ID NO: 2082792 - RNA, 19 nt, Artificial Sequence
  Description of Artificial Sequence: Synthetic oligonucleotide
  Sense strand starting at position 2903 of SEQ ID NO: 1881940
uuaagaacuuggguuaaug

SEQ ID NO: 2082793 - RNA, 19 nt, Artificial Sequence
  Description of Artificial Sequence: Synthetic oligonucleotide
  Antisense strand to SEQ ID NO: 2082792
cauuaacccaaguucuuaa

SEQ ID NO: 2082794 - RNA, 19 nt, Artificial Sequence
  Description of Artificial Sequence: Synthetic oligonucleotide
  Sense strand starting at position 2913 of SEQ ID NO: 1881940
ggguuaaugaugcauguuu

SEQ ID NO: 2082795 - RNA, 19 nt, Artificial Sequence
  Description of Artificial Sequence: Synthetic oligonucleotide
  Antisense strand to SEQ ID NO: 2082794
aaacaugcaucauuaaccc

SEQ ID NO: 2082796 - RNA, 19 nt, Artificial Sequence
  Description of Artificial Sequence: Synthetic oligonucleotide
  Sense strand starting at position 2918 of SEQ ID NO: 1881940
aaugaugcauguuucugaa

SEQ ID NO: 2082797 - RNA, 19 nt, Artificial Sequence
  Description of Artificial Sequence: Synthetic oligonucleotide
  Antisense strand to SEQ ID NO: 2082796
uucagaaacaugcaucauu

SEQ ID NO: 2082798 - RNA, 19 nt, Artificial Sequence
  Description of Artificial Sequence: Synthetic oligonucleotide
  Sense strand starting at position 2920 of SEQ ID NO: 1881940
ugaugcauguuucugaaau

SEQ ID NO: 2082799 - RNA, 19 nt, Artificial Sequence
  Description of Artificial Sequence: Synthetic oligonucleotide
  Antisense strand to SEQ ID NO: 2082798
auuucagaaacaugcauca

SEQ ID NO: 2082800 - RNA, 19 nt, Artificial Sequence
  Description of Artificial Sequence: Synthetic oligonucleotide
  Sense strand starting at position 2937 of SEQ ID NO: 1881940
auaauucugccagagucag

SEQ ID NO: 2082801 - RNA, 19 nt, Artificial Sequence
  Description of Artificial Sequence: Synthetic oligonucleotide
  Antisense strand to SEQ ID NO: 2082800
cugacucuggcagaauuau

SEQ ID NO: 2082802 - RNA, 19 nt, Artificial Sequence
  Description of Artificial Sequence: Synthetic oligonucleotide
  Sense strand starting at position 2943 of SEQ ID NO: 1881940
cugccagagucagucuuau

SEQ ID NO: 2082803 - RNA, 19 nt, Artificial Sequence
  Description of Artificial Sequence: Synthetic oligonucleotide
  Antisense strand to SEQ ID NO: 2082802
auaagacugacucuggcag

SEQ ID NO: 2082804 - RNA, 19 nt, Artificial Sequence
  Description of Artificial Sequence: Synthetic oligonucleotide
  Sense strand starting at position 2949 of SEQ ID NO: 1881940
gagucagucuuauuucguc

SEQ ID NO: 2082805 - RNA, 19 nt, Artificial Sequence
  Description of Artificial Sequence: Synthetic oligonucleotide
  Antisense strand to SEQ ID NO: 2082804
gacgaaauaagacugacuc

SEQ ID NO: 2082806 - RNA, 19 nt, Artificial Sequence
  Description of Artificial Sequence: Synthetic oligonucleotide
  Sense strand starting at position 2956 of SEQ ID NO: 1881940
ucuuauuucgucuauggca

SEQ ID NO: 2082807 - RNA, 19 nt, Artificial Sequence
  Description of Artificial Sequence: Synthetic oligonucleotide
  Antisense strand to SEQ ID NO: 2082806
ugccauagacgaaauaaga

SEQ ID NO: 2082808 - RNA, 19 nt, Artificial Sequence
  Description of Artificial Sequence: Synthetic oligonucleotide
  Sense strand starting at position 2958 of SEQ ID NO: 1881940
uuauuucgucuauggcaca

SEQ ID NO: 2082809 - RNA, 19 nt, Artificial Sequence
  Description of Artificial Sequence: Synthetic oligonucleotide
  Antisense strand to SEQ ID NO: 2082808
ugugccauagacgaaauaa

SEQ ID NO: 2082810 - RNA, 19 nt, Artificial Sequence
  Description of Artificial Sequence: Synthetic oligonucleotide
  Sense strand starting at position 3102 of SEQ ID NO: 1881940
cuggacacauggcuuuaua

SEQ ID NO: 2082811 - RNA, 19 nt, Artificial Sequence
  Description of Artificial Sequence: Synthetic oligonucleotide
  Antisense strand to SEQ ID NO: 2082810
uauaaagccauguguccag

SEQ ID NO: 2082812 - RNA, 19 nt, Artificial Sequence
  Description of Artificial Sequence: Synthetic oligonucleotide
  Sense strand starting at position 3128 of SEQ ID NO: 1881940
uggaaauuauaggagugaa

SEQ ID NO: 2082813 - RNA, 19 nt, Artificial Sequence
  Description of Artificial Sequence: Synthetic oligonucleotide
  Antisense strand to SEQ ID NO: 2082812
uucacuccuauaauuucca

SEQ ID NO: 2082814 - RNA, 19 nt, Artificial Sequence
  Description of Artificial Sequence: Synthetic oligonucleotide
  Sense strand starting at position 3269 of SEQ ID NO: 1881940
augggucuuggaggacaau

SEQ ID NO: 2082815 - RNA, 19 nt, Artificial Sequence
  Description of Artificial Sequence: Synthetic oligonucleotide
  Antisense strand to SEQ ID NO: 2082814
auuguccuccaagacccau

SEQ ID NO: 2082816 - RNA, 19 nt, Artificial Sequence
  Description of Artificial Sequence: Synthetic oligonucleotide
  Sense strand starting at position 3407 of SEQ ID NO: 1881940
acucaaaguguuuacucaa

SEQ ID NO: 2082817 - RNA, 19 nt, Artificial Sequence
  Description of Artificial Sequence: Synthetic oligonucleotide
  Antisense strand to SEQ ID NO: 2082816
uugaguaaacacuuugagu

SEQ ID NO: 2082818 - RNA, 19 nt, Artificial Sequence
  Description of Artificial Sequence: Synthetic oligonucleotide
  Sense strand starting at position 3486 of SEQ ID NO: 1881940
ccaucaugcugucccagau

SEQ ID NO: 2082819 - RNA, 19 nt, Artificial Sequence
  Description of Artificial Sequence: Synthetic oligonucleotide
  Antisense strand to SEQ ID NO: 2082818
aucugggacagcaugaugg

SEQ ID NO: 2082820 - RNA, 19 nt, Artificial Sequence
  Description of Artificial Sequence: Synthetic oligonucleotide
  Sense strand starting at position 3538 of SEQ ID NO: 1881940
uuccaacagcugugaaauc

SEQ ID NO: 2082821 - RNA, 19 nt, Artificial Sequence
  Description of Artificial Sequence: Synthetic oligonucleotide
  Antisense strand to SEQ ID NO: 2082820
gauuucacagcuguuggaa

SEQ ID NO: 2082822 - RNA, 19 nt, Artificial Sequence
  Description of Artificial Sequence: Synthetic oligonucleotide
  Sense strand starting at position 3619 of SEQ ID NO: 1881940
aguggauucucauuacuug

SEQ ID NO: 2082823 - RNA, 19 nt, Artificial Sequence
  Description of Artificial Sequence: Synthetic oligonucleotide
  Antisense strand to SEQ ID NO: 2082822
caaguaaugagaauccacu

SEQ ID NO: 2082824 - RNA, 19 nt, Artificial Sequence
  Description of Artificial Sequence: Synthetic oligonucleotide
  Sense strand starting at position 3620 of SEQ ID NO: 1881940
guggauucucauuacuuga

SEQ ID NO: 2082825 - RNA, 19 nt, Artificial Sequence
  Description of Artificial Sequence: Synthetic oligonucleotide
  Antisense strand to SEQ ID NO: 2082824
ucaaguaaugagaauccac

SEQ ID NO: 2082826 - RNA, 19 nt, Artificial Sequence
  Description of Artificial Sequence: Synthetic oligonucleotide
  Sense strand starting at position 3676 of SEQ ID NO: 1881940
gcaguuguauaguugauau

SEQ ID NO: 2082827 - RNA, 19 nt, Artificial Sequence
  Description of Artificial Sequence: Synthetic oligonucleotide
  Antisense strand to SEQ ID NO: 2082826
auaucaacuauacaacugc

SEQ ID NO: 2082828 - RNA, 19 nt, Artificial Sequence
  Description of Artificial Sequence: Synthetic oligonucleotide
  Sense strand starting at position 3678 of SEQ ID NO: 1881940
aguuguauaguugauauag

SEQ ID NO: 2082829 - RNA, 19 nt, Artificial Sequence
  Description of Artificial Sequence: Synthetic oligonucleotide
  Antisense strand to SEQ ID NO: 2082828
cuauaucaacuauacaacu

SEQ ID NO: 2082830 - RNA, 19 nt, Artificial Sequence
  Description of Artificial Sequence: Synthetic oligonucleotide
  Sense strand starting at position 3699 of SEQ ID NO: 1881940
cagagcuuccucugugcaa

SEQ ID NO: 2082831 - RNA, 19 nt, Artificial Sequence
  Description of Artificial Sequence: Synthetic oligonucleotide
  Antisense strand to SEQ ID NO: 2082830
uugcacagaggaagcucug

SEQ ID NO: 2082832 - RNA, 19 nt, Artificial Sequence
  Description of Artificial Sequence: Synthetic oligonucleotide
  Sense strand starting at position 3700 of SEQ ID NO: 1881940
agagcuuccucugugcaaa

SEQ ID NO: 2082833 - RNA, 19 nt, Artificial Sequence
  Description of Artificial Sequence: Synthetic oligonucleotide
  Antisense strand to SEQ ID NO: 2082832
uuugcacagaggaagcucu

SEQ ID NO: 2082834 - RNA, 19 nt, Artificial Sequence
  Description of Artificial Sequence: Synthetic oligonucleotide
  Sense strand starting at position 3701 of SEQ ID NO: 1881940
gagcuuccucugugcaaau

SEQ ID NO: 2082835 - RNA, 19 nt, Artificial Sequence
  Description of Artificial Sequence: Synthetic oligonucleotide
  Antisense strand to SEQ ID NO: 2082834
auuugcacagaggaagcuc

SEQ ID NO: 2082836 - RNA, 19 nt, Artificial Sequence
  Description of Artificial Sequence: Synthetic oligonucleotide
  Sense strand starting at position 3702 of SEQ ID NO: 1881940
agcuuccucugugcaaaua

SEQ ID NO: 2082837 - RNA, 19 nt, Artificial Sequence
  Description of Artificial Sequence: Synthetic oligonucleotide
  Antisense strand to SEQ ID NO: 2082836
uauuugcacagaggaagcu

SEQ ID NO: 2082838 - RNA, 19 nt, Artificial Sequence
  Description of Artificial Sequence: Synthetic oligonucleotide
  Sense strand starting at position 3778 of SEQ ID NO: 1881940
gcugccugaaguggugaua

SEQ ID NO: 2082839 - RNA, 19 nt, Artificial Sequence
  Description of Artificial Sequence: Synthetic oligonucleotide
  Antisense strand to SEQ ID NO: 2082838
uaucaccacuucaggcagc

SEQ ID NO: 2082840 - RNA, 19 nt, Artificial Sequence
  Description of Artificial Sequence: Synthetic oligonucleotide
  Sense strand starting at position 3883 of SEQ ID NO: 1881940
ucacauguugcugguauuu

SEQ ID NO: 2082841 - RNA, 19 nt, Artificial Sequence
  Description of Artificial Sequence: Synthetic oligonucleotide
  Antisense strand to SEQ ID NO: 2082840
aaauaccagcaacauguga

SEQ ID NO: 2082842 - RNA, 19 nt, Artificial Sequence
  Description of Artificial Sequence: Synthetic oligonucleotide
  Sense strand starting at position 3924 of SEQ ID NO: 1881940
gagucaugugcauacucag

SEQ ID NO: 2082843 - RNA, 19 nt, Artificial Sequence
  Description of Artificial Sequence: Synthetic oligonucleotide
  Antisense strand to SEQ ID NO: 2082842
cugaguaugcacaugacuc

SEQ ID NO: 2082844 - RNA, 19 nt, Artificial Sequence
  Description of Artificial Sequence: Synthetic oligonucleotide
  Sense strand starting at position 313 of SEQ ID NO: 1881941
guggguuagcaacacaaga

SEQ ID NO: 2082845 - RNA, 19 nt, Artificial Sequence
  Description of Artificial Sequence: Synthetic oligonucleotide
  Antisense strand to SEQ ID NO: 2082844
ucuuguguugcuaacccac

SEQ ID NO: 2082846 - RNA, 19 nt, Artificial Sequence
  Description of Artificial Sequence: Synthetic oligonucleotide
  Sense strand starting at position 330 of SEQ ID NO: 1881941
gacagauggcgagggauua

SEQ ID NO: 2082847 - RNA, 19 nt, Artificial Sequence
  Description of Artificial Sequence: Synthetic oligonucleotide
  Antisense strand to SEQ ID NO: 2082846
uaaucccucgccaucuguc

SEQ ID NO: 2082848 - RNA, 19 nt, Artificial Sequence
  Description of Artificial Sequence: Synthetic oligonucleotide
  Sense strand starting at position 331 of SEQ ID NO: 1881941
acagauggcgagggauuau

SEQ ID NO: 2082849 - RNA, 19 nt, Artificial Sequence
  Description of Artificial Sequence: Synthetic oligonucleotide
  Antisense strand to SEQ ID NO: 2082848
auaaucccucgccaucugu

SEQ ID NO: 2082850 - RNA, 19 nt, Artificial Sequence
  Description of Artificial Sequence: Synthetic oligonucleotide
  Sense strand starting at position 342 of SEQ ID NO: 1881941
gggauuaucucagcuucuc

SEQ ID NO: 2082851 - RNA, 19 nt, Artificial Sequence
  Description of Artificial Sequence: Synthetic oligonucleotide
  Antisense strand to SEQ ID NO: 2082850
gagaagcugagauaauccc

SEQ ID NO: 2082852 - RNA, 19 nt, Artificial Sequence
  Description of Artificial Sequence: Synthetic oligonucleotide
  Sense strand starting at position 525 of SEQ ID NO: 1881941
agaugagauuaugagaauu

SEQ ID NO: 2082853 - RNA, 19 nt, Artificial Sequence
  Description of Artificial Sequence: Synthetic oligonucleotide
  Antisense strand to SEQ ID NO: 2082852
aauucucauaaucucaucu

SEQ ID NO: 2082854 - RNA, 19 nt, Artificial Sequence
  Description of Artificial Sequence: Synthetic oligonucleotide
  Sense strand starting at position 537 of SEQ ID NO: 1881941
gagaauuggugagaaccgu

SEQ ID NO: 2082855 - RNA, 19 nt, Artificial Sequence
  Description of Artificial Sequence: Synthetic oligonucleotide
  Antisense strand to SEQ ID NO: 2082854
acgguucucaccaauucuc

SEQ ID NO: 2082856 - RNA, 19 nt, Artificial Sequence
  Description of Artificial Sequence: Synthetic oligonucleotide
  Sense strand starting at position 544 of SEQ ID NO: 1881941
ggugagaaccgugggacuu

SEQ ID NO: 2082857 - RNA, 19 nt, Artificial Sequence
  Description of Artificial Sequence: Synthetic oligonucleotide
  Antisense strand to SEQ ID NO: 2082856
aagucccacgguucucacc

SEQ ID NO: 2082858 - RNA, 19 nt, Artificial Sequence
  Description of Artificial Sequence: Synthetic oligonucleotide
  Sense strand starting at position 641 of SEQ ID NO: 1881941
cugcuauugugauuucucu

SEQ ID NO: 2082859 - RNA, 19 nt, Artificial Sequence
  Description of Artificial Sequence: Synthetic oligonucleotide
  Antisense strand to SEQ ID NO: 2082858
agagaaaucacaauagcag

SEQ ID NO: 2082860 - RNA, 19 nt, Artificial Sequence
  Description of Artificial Sequence: Synthetic oligonucleotide
  Sense strand starting at position 647 of SEQ ID NO: 1881941
uugugauuucucugcagcu

SEQ ID NO: 2082861 - RNA, 19 nt, Artificial Sequence
  Description of Artificial Sequence: Synthetic oligonucleotide
  Antisense strand to SEQ ID NO: 2082860
agcugcagagaaaucacaa

SEQ ID NO: 2082862 - RNA, 19 nt, Artificial Sequence
  Description of Artificial Sequence: Synthetic oligonucleotide
  Sense strand starting at position 714 of SEQ ID NO: 1881941
guuugaggcccagagaugu

SEQ ID NO: 2082863 - RNA, 19 nt, Artificial Sequence
  Description of Artificial Sequence: Synthetic oligonucleotide
  Antisense strand to SEQ ID NO: 2082862
acaucucugggccucaaac

SEQ ID NO: 2082864 - RNA, 19 nt, Artificial Sequence
  Description of Artificial Sequence: Synthetic oligonucleotide
  Sense strand starting at position 765 of SEQ ID NO: 1881941
gguucauuagcaggguaag

SEQ ID NO: 2082865 - RNA, 19 nt, Artificial Sequence
  Description of Artificial Sequence: Synthetic oligonucleotide
  Antisense strand to SEQ ID NO: 2082864
cuuacccugcuaaugaacc

SEQ ID NO: 2082866 - RNA, 19 nt, Artificial Sequence
  Description of Artificial Sequence: Synthetic oligonucleotide
  Sense strand starting at position 766 of SEQ ID NO: 1881941
guucauuagcaggguaagu

SEQ ID NO: 2082867 - RNA, 19 nt, Artificial Sequence
  Description of Artificial Sequence: Synthetic oligonucleotide
  Antisense strand to SEQ ID NO: 2082866
acuuacccugcuaaugaac

SEQ ID NO: 2082868 - RNA, 19 nt, Artificial Sequence
  Description of Artificial Sequence: Synthetic oligonucleotide
  Sense strand starting at position 839 of SEQ ID NO: 1881941
guccuugggucuucugcaa

SEQ ID NO: 2082869 - RNA, 19 nt, Artificial Sequence
  Description of Artificial Sequence: Synthetic oligonucleotide
  Antisense strand to SEQ ID NO: 2082868
uugcagaagacccaaggac

SEQ ID NO: 2082870 - RNA, 19 nt, Artificial Sequence
  Description of Artificial Sequence: Synthetic oligonucleotide
  Sense strand starting at position 843 of SEQ ID NO: 1881941
uugggucuucugcaaacaa

SEQ ID NO: 2082871 - RNA, 19 nt, Artificial Sequence
  Description of Artificial Sequence: Synthetic oligonucleotide
  Antisense strand to SEQ ID NO: 2082870
uuguuugcagaagacccaa

SEQ ID NO: 2082872 - RNA, 19 nt, Artificial Sequence
  Description of Artificial Sequence: Synthetic oligonucleotide
  Sense strand starting at position 859 of SEQ ID NO: 1881941
caagguguuugcccuagca

SEQ ID NO: 2082873 - RNA, 19 nt, Artificial Sequence
  Description of Artificial Sequence: Synthetic oligonucleotide
  Antisense strand to SEQ ID NO: 2082872
ugcuagggcaaacaccuug

SEQ ID NO: 2082874 - RNA, 19 nt, Artificial Sequence
  Description of Artificial Sequence: Synthetic oligonucleotide
  Sense strand starting at position 861 of SEQ ID NO: 1881941
agguguuugcccuagcacu

SEQ ID NO: 2082875 - RNA, 19 nt, Artificial Sequence
  Description of Artificial Sequence: Synthetic oligonucleotide
  Antisense strand to SEQ ID NO: 2082874
agugcuagggcaaacaccu

SEQ ID NO: 2082876 - RNA, 19 nt, Artificial Sequence
  Description of Artificial Sequence: Synthetic oligonucleotide
  Sense strand starting at position 984 of SEQ ID NO: 1881941
gggugaaggcuauguagag

SEQ ID NO: 2082877 - RNA, 19 nt, Artificial Sequence
  Description of Artificial Sequence: Synthetic oligonucleotide
  Antisense strand to SEQ ID NO: 2082876
cucuacauagccuucaccc

SEQ ID NO: 2082878 - RNA, 19 nt, Artificial Sequence
  Description of Artificial Sequence: Synthetic oligonucleotide
  Sense strand starting at position 985 of SEQ ID NO: 1881941
ggugaaggcuauguagagu

SEQ ID NO: 2082879 - RNA, 19 nt, Artificial Sequence
  Description of Artificial Sequence: Synthetic oligonucleotide
  Antisense strand to SEQ ID NO: 2082878
acucuacauagccuucacc

SEQ ID NO: 2082880 - RNA, 19 nt, Artificial Sequence
  Description of Artificial Sequence: Synthetic oligonucleotide
  Sense strand starting at position 996 of SEQ ID NO: 1881941
uguagaguugagugacaga

SEQ ID NO: 2082881 - RNA, 19 nt, Artificial Sequence
  Description of Artificial Sequence: Synthetic oligonucleotide
  Antisense strand to SEQ ID NO: 2082880
ucugucacucaacucuaca

SEQ ID NO: 2082882 - RNA, 19 nt, Artificial Sequence
  Description of Artificial Sequence: Synthetic oligonucleotide
  Sense strand starting at position 1025 of SEQ ID NO: 1881941
caggcugugucacugugaa

SEQ ID NO: 2082883 - RNA, 19 nt, Artificial Sequence
  Description of Artificial Sequence: Synthetic oligonucleotide
  Antisense strand to SEQ ID NO: 2082882
uucacagugacacagccug

SEQ ID NO: 2082884 - RNA, 19 nt, Artificial Sequence
  Description of Artificial Sequence: Synthetic oligonucleotide
  Sense strand starting at position 1188 of SEQ ID NO: 1881941
acuccaaguccugagucau

SEQ ID NO: 2082885 - RNA, 19 nt, Artificial Sequence
  Description of Artificial Sequence: Synthetic oligonucleotide
  Antisense strand to SEQ ID NO: 2082884
augacucaggacuuggagu

SEQ ID NO: 2082886 - RNA, 19 nt, Artificial Sequence
  Description of Artificial Sequence: Synthetic oligonucleotide
  Sense strand starting at position 1198 of SEQ ID NO: 1881941
cugagucaucuaugcugag

SEQ ID NO: 2082887 - RNA, 19 nt, Artificial Sequence
  Description of Artificial Sequence: Synthetic oligonucleotide
  Antisense strand to SEQ ID NO: 2082886
cucagcauagaugacucag

SEQ ID NO: 2082888 - RNA, 19 nt, Artificial Sequence
  Description of Artificial Sequence: Synthetic oligonucleotide
  Sense strand starting at position 1199 of SEQ ID NO: 1881941
ugagucaucuaugcugagu

SEQ ID NO: 2082889 - RNA, 19 nt, Artificial Sequence
  Description of Artificial Sequence: Synthetic oligonucleotide
  Antisense strand to SEQ ID NO: 2082888
acucagcauagaugacuca

SEQ ID NO: 2082890 - RNA, 19 nt, Artificial Sequence
  Description of Artificial Sequence: Synthetic oligonucleotide
  Sense strand starting at position 1332 of SEQ ID NO: 1881941
gaggccuucugagagaacu

SEQ ID NO: 2082891 - RNA, 19 nt, Artificial Sequence
  Description of Artificial Sequence: Synthetic oligonucleotide
  Antisense strand to SEQ ID NO: 2082890
aguucucucagaaggccuc

SEQ ID NO: 2082892 - RNA, 19 nt, Artificial Sequence
  Description of Artificial Sequence: Synthetic oligonucleotide
  Sense strand starting at position 1334 of SEQ ID NO: 1881941
ggccuucugagagaacuuc

SEQ ID NO: 2082893 - RNA, 19 nt, Artificial Sequence
  Description of Artificial Sequence: Synthetic oligonucleotide
  Antisense strand to SEQ ID NO: 2082892
gaaguucucucagaaggcc

SEQ ID NO: 2082894 - RNA, 19 nt, Artificial Sequence
  Description of Artificial Sequence: Synthetic oligonucleotide
  Sense strand starting at position 1401 of SEQ ID NO: 1881941
gacucagugucugcuggau

SEQ ID NO: 2082895 - RNA, 19 nt, Artificial Sequence
  Description of Artificial Sequence: Synthetic oligonucleotide
  Antisense strand to SEQ ID NO: 2082894
auccagcagacacugaguc

SEQ ID NO: 2082896 - RNA, 19 nt, Artificial Sequence
  Description of Artificial Sequence: Synthetic oligonucleotide
  Sense strand starting at position 1779 of SEQ ID NO: 1881941
ugaccacacgucuagguau

SEQ ID NO: 2082897 - RNA, 19 nt, Artificial Sequence
  Description of Artificial Sequence: Synthetic oligonucleotide
  Antisense strand to SEQ ID NO: 2082896
auaccuagacgugugguca

SEQ ID NO: 2082898 - RNA, 19 nt, Artificial Sequence
  Description of Artificial Sequence: Synthetic oligonucleotide
  Sense strand starting at position 1969 of SEQ ID NO: 1881941
acaugaaaccuuggagcuu

SEQ ID NO: 2082899 - RNA, 19 nt, Artificial Sequence
  Description of Artificial Sequence: Synthetic oligonucleotide
  Antisense strand to SEQ ID NO: 2082898
aagcuccaagguuucaugu

SEQ ID NO: 2082900 - RNA, 19 nt, Artificial Sequence
  Description of Artificial Sequence: Synthetic oligonucleotide
  Sense strand starting at position 2144 of SEQ ID NO: 1881941
ucaucaacucagcgaagau

SEQ ID NO: 2082901 - RNA, 19 nt, Artificial Sequence
  Description of Artificial Sequence: Synthetic oligonucleotide
  Antisense strand to SEQ ID NO: 2082900
aucuucgcugaguugauga

SEQ ID NO: 2082902 - RNA, 19 nt, Artificial Sequence
  Description of Artificial Sequence: Synthetic oligonucleotide
  Sense strand starting at position 2313 of SEQ ID NO: 1881941
guuauucugguacagaauc

SEQ ID NO: 2082903 - RNA, 19 nt, Artificial Sequence
  Description of Artificial Sequence: Synthetic oligonucleotide
  Antisense strand to SEQ ID NO: 2082902
gauucuguaccagaauaac

SEQ ID NO: 2082904 - RNA, 19 nt, Artificial Sequence
  Description of Artificial Sequence: Synthetic oligonucleotide
  Sense strand starting at position 2432 of SEQ ID NO: 1881941
ucgauaucugcccgcugga

SEQ ID NO: 2082905 - RNA, 19 nt, Artificial Sequence
  Description of Artificial Sequence: Synthetic oligonucleotide
  Antisense strand to SEQ ID NO: 2082904
uccagcgggcagauaucga

SEQ ID NO: 2082906 - RNA, 19 nt, Artificial Sequence
  Description of Artificial Sequence: Synthetic oligonucleotide
  Sense strand starting at position 2482 of SEQ ID NO: 1881941
ggcuuugcggcagugugau

SEQ ID NO: 2082907 - RNA, 19 nt, Artificial Sequence
  Description of Artificial Sequence: Synthetic oligonucleotide
  Antisense strand to SEQ ID NO: 2082906
aucacacugccgcaaagcc

SEQ ID NO: 2082908 - RNA, 19 nt, Artificial Sequence
  Description of Artificial Sequence: Synthetic oligonucleotide
  Sense strand starting at position 2746 of SEQ ID NO: 1881941
gccugcauuucugccagua

SEQ ID NO: 2082909 - RNA, 19 nt, Artificial Sequence
  Description of Artificial Sequence: Synthetic oligonucleotide
  Antisense strand to SEQ ID NO: 2082908
uacuggcagaaaugcaggc

SEQ ID NO: 2082910 - RNA, 19 nt, Artificial Sequence
  Description of Artificial Sequence: Synthetic oligonucleotide
  Sense strand starting at position 3306 of SEQ ID NO: 1881941
ggcgccuucggcugaggaa

SEQ ID NO: 2082911 - RNA, 19 nt, Artificial Sequence
  Description of Artificial Sequence: Synthetic oligonucleotide
  Antisense strand to SEQ ID NO: 2082910
uuccucagccgaaggcgcc

SEQ ID NO: 2082912 - RNA, 19 nt, Artificial Sequence
  Description of Artificial Sequence: Synthetic oligonucleotide
  Sense strand starting at position 3472 of SEQ ID NO: 1881941
cgccgucagacccaauuua

SEQ ID NO: 2082913 - RNA, 19 nt, Artificial Sequence
  Description of Artificial Sequence: Synthetic oligonucleotide
  Antisense strand to SEQ ID NO: 2082912
uaaauugggucugacggcg

SEQ ID NO: 2082914 - RNA, 19 nt, Artificial Sequence
  Description of Artificial Sequence: Synthetic oligonucleotide
  Sense strand starting at position 3488 of SEQ ID NO: 1881941
uuaucucgccgccaaaguu

SEQ ID NO: 2082915 - RNA, 19 nt, Artificial Sequence
  Description of Artificial Sequence: Synthetic oligonucleotide
  Antisense strand to SEQ ID NO: 2082914
aacuuuggcggcgagauaa

SEQ ID NO: 2082916 - RNA, 19 nt, Artificial Sequence
  Description of Artificial Sequence: Synthetic oligonucleotide
  Sense strand starting at position 3698 of SEQ ID NO: 1881941
uuaagcgauugaucaggaa

SEQ ID NO: 2082917 - RNA, 19 nt, Artificial Sequence
  Description of Artificial Sequence: Synthetic oligonucleotide
  Antisense strand to SEQ ID NO: 2082916
uuccugaucaaucgcuuaa

SEQ ID NO: 2082918 - RNA, 19 nt, Artificial Sequence
  Description of Artificial Sequence: Synthetic oligonucleotide
  Sense strand starting at position 3702 of SEQ ID NO: 1881941
gcgauugaucaggaagcuc

SEQ ID NO: 2082919 - RNA, 19 nt, Artificial Sequence
  Description of Artificial Sequence: Synthetic oligonucleotide
  Antisense strand to SEQ ID NO: 2082918
gagcuuccugaucaaucgc

SEQ ID NO: 2082920 - RNA, 19 nt, Artificial Sequence
  Description of Artificial Sequence: Synthetic oligonucleotide
  Sense strand starting at position 3788 of SEQ ID NO: 1881941
gcgguaaugaggucaccgu

SEQ ID NO: 2082921 - RNA, 19 nt, Artificial Sequence
  Description of Artificial Sequence: Synthetic oligonucleotide
  Antisense strand to SEQ ID NO: 2082920
acggugaccucauuaccgc

SEQ ID NO: 2082922 - RNA, 19 nt, Artificial Sequence
  Description of Artificial Sequence: Synthetic oligonucleotide
  Sense strand starting at position 3933 of SEQ ID NO: 1881941
gcauuuggaucugagcuga

SEQ ID NO: 2082923 - RNA, 19 nt, Artificial Sequence
  Description of Artificial Sequence: Synthetic oligonucleotide
  Antisense strand to SEQ ID NO: 2082922
ucagcucagauccaaaugc

SEQ ID NO: 2082924 - RNA, 19 nt, Artificial Sequence
  Description of Artificial Sequence: Synthetic oligonucleotide
  Sense strand starting at position 3 of SEQ ID NO: 1881942
aguugagaguuauuaccaa

SEQ ID NO: 2082925 - RNA, 19 nt, Artificial Sequence
  Description of Artificial Sequence: Synthetic oligonucleotide
  Antisense strand to SEQ ID NO: 2082924
uugguaauaacucucaacu

SEQ ID NO: 2082926 - RNA, 19 nt, Artificial Sequence
  Description of Artificial Sequence: Synthetic oligonucleotide
  Sense strand starting at position 7 of SEQ ID NO: 1881942
gagaguuauuaccaauaga

SEQ ID NO: 2082927 - RNA, 19 nt, Artificial Sequence
  Description of Artificial Sequence: Synthetic oligonucleotide
  Antisense strand to SEQ ID NO: 2082926
ucuauugguaauaacucuc

SEQ ID NO: 2082928 - RNA, 19 nt, Artificial Sequence
  Description of Artificial Sequence: Synthetic oligonucleotide
  Sense strand starting at position 39 of SEQ ID NO: 1881942
guuauaagagguuguggag

SEQ ID NO: 2082929 - RNA, 19 nt, Artificial Sequence
  Description of Artificial Sequence: Synthetic oligonucleotide
  Antisense strand to SEQ ID NO: 2082928
cuccacaaccucuuauaac

SEQ ID NO: 2082930 - RNA, 19 nt, Artificial Sequence
  Description of Artificial Sequence: Synthetic oligonucleotide
  Sense strand starting at position 103 of SEQ ID NO: 1881942
gagagaauagaugguguuu

SEQ ID NO: 2082931 - RNA, 19 nt, Artificial Sequence
  Description of Artificial Sequence: Synthetic oligonucleotide
  Antisense strand to SEQ ID NO: 2082930
aaacaccaucuauucucuc

SEQ ID NO: 2082932 - RNA, 19 nt, Artificial Sequence
  Description of Artificial Sequence: Synthetic oligonucleotide
  Sense strand starting at position 108 of SEQ ID NO: 1881942
aauagaugguguuucucau

SEQ ID NO: 2082933 - RNA, 19 nt, Artificial Sequence
  Description of Artificial Sequence: Synthetic oligonucleotide
  Antisense strand to SEQ ID NO: 2082932
augagaaacaccaucuauu

SEQ ID NO: 2082934 - RNA, 19 nt, Artificial Sequence
  Description of Artificial Sequence: Synthetic oligonucleotide
  Sense strand starting at position 112 of SEQ ID NO: 1881942
gaugguguuucucauuaga

SEQ ID NO: 2082935 - RNA, 19 nt, Artificial Sequence
  Description of Artificial Sequence: Synthetic oligonucleotide
  Antisense strand to SEQ ID NO: 2082934
ucuaaugagaaacaccauc

SEQ ID NO: 2082936 - RNA, 19 nt, Artificial Sequence
  Description of Artificial Sequence: Synthetic oligonucleotide
  Sense strand starting at position 114 of SEQ ID NO: 1881942
ugguguuucucauuagacu

SEQ ID NO: 2082937 - RNA, 19 nt, Artificial Sequence
  Description of Artificial Sequence: Synthetic oligonucleotide
  Antisense strand to SEQ ID NO: 2082936
agucuaaugagaaacacca

SEQ ID NO: 2082938 - RNA, 19 nt, Artificial Sequence
  Description of Artificial Sequence: Synthetic oligonucleotide
  Sense strand starting at position 115 of SEQ ID NO: 1881942
gguguuucucauuagacuu

SEQ ID NO: 2082939 - RNA, 19 nt, Artificial Sequence
  Description of Artificial Sequence: Synthetic oligonucleotide
  Antisense strand to SEQ ID NO: 2082938
aagucuaaugagaaacacc

SEQ ID NO: 2082940 - RNA, 19 nt, Artificial Sequence
  Description of Artificial Sequence: Synthetic oligonucleotide
  Sense strand starting at position 140 of SEQ ID NO: 1881942
uguguuggcuuucccugaa

SEQ ID NO: 2082941 - RNA, 19 nt, Artificial Sequence
  Description of Artificial Sequence: Synthetic oligonucleotide
  Antisense strand to SEQ ID NO: 2082940
uucagggaaagccaacaca

SEQ ID NO: 2082942 - RNA, 19 nt, Artificial Sequence
  Description of Artificial Sequence: Synthetic oligonucleotide
  Sense strand starting at position 143 of SEQ ID NO: 1881942
guuggcuuucccugaauuc

SEQ ID NO: 2082943 - RNA, 19 nt, Artificial Sequence
  Description of Artificial Sequence: Synthetic oligonucleotide
  Antisense strand to SEQ ID NO: 2082942
gaauucagggaaagccaac

SEQ ID NO: 2082944 - RNA, 19 nt, Artificial Sequence
  Description of Artificial Sequence: Synthetic oligonucleotide
  Sense strand starting at position 397 of SEQ ID NO: 1881942
acauuaggugaaugccaaa

SEQ ID NO: 2082945 - RNA, 19 nt, Artificial Sequence
  Description of Artificial Sequence: Synthetic oligonucleotide
  Antisense strand to SEQ ID NO: 2082944
uuuggcauucaccuaaugu

SEQ ID NO: 2082946 - RNA, 19 nt, Artificial Sequence
  Description of Artificial Sequence: Synthetic oligonucleotide
  Sense strand starting at position 428 of SEQ ID NO: 1881942
cuaaauuucucugaggaau

SEQ ID NO: 2082947 - RNA, 19 nt, Artificial Sequence
  Description of Artificial Sequence: Synthetic oligonucleotide
  Antisense strand to SEQ ID NO: 2082946
auuccucagagaaauuuag

SEQ ID NO: 2082948 - RNA, 19 nt, Artificial Sequence
  Description of Artificial Sequence: Synthetic oligonucleotide
  Sense strand starting at position 459 of SEQ ID NO: 1881942
agguauaugccuuguggac

SEQ ID NO: 2082949 - RNA, 19 nt, Artificial Sequence
  Description of Artificial Sequence: Synthetic oligonucleotide
  Antisense strand to SEQ ID NO: 2082948
guccacaaggcauauaccu

SEQ ID NO: 2082950 - RNA, 19 nt, Artificial Sequence
  Description of Artificial Sequence: Synthetic oligonucleotide
  Sense strand starting at position 497 of SEQ ID NO: 1881942
gacagaggaugagauaguu

SEQ ID NO: 2082951 - RNA, 19 nt, Artificial Sequence
  Description of Artificial Sequence: Synthetic oligonucleotide
  Antisense strand to SEQ ID NO: 2082950
aacuaucucauccucuguc

SEQ ID NO: 2082952 - RNA, 19 nt, Artificial Sequence
  Description of Artificial Sequence: Synthetic oligonucleotide
  Sense strand starting at position 505 of SEQ ID NO: 1881942
augagauaguuuggagaau

SEQ ID NO: 2082953 - RNA, 19 nt, Artificial Sequence
  Description of Artificial Sequence: Synthetic oligonucleotide
  Antisense strand to SEQ ID NO: 2082952
auucuccaaacuaucucau

SEQ ID NO: 2082954 - RNA, 19 nt, Artificial Sequence
  Description of Artificial Sequence: Synthetic oligonucleotide
  Sense strand starting at position 506 of SEQ ID NO: 1881942
ugagauaguuuggagaaug

SEQ ID NO: 2082955 - RNA, 19 nt, Artificial Sequence
  Description of Artificial Sequence: Synthetic oligonucleotide
  Antisense strand to SEQ ID NO: 2082954
cauucuccaaacuaucuca

SEQ ID NO: 2082956 - RNA, 19 nt, Artificial Sequence
  Description of Artificial Sequence: Synthetic oligonucleotide
  Sense strand starting at position 522 of SEQ ID NO: 1881942
auggauagcugaucagauc

SEQ ID NO: 2082957 - RNA, 19 nt, Artificial Sequence
  Description of Artificial Sequence: Synthetic oligonucleotide
  Antisense strand to SEQ ID NO: 2082956
gaucugaucagcuauccau

SEQ ID NO: 2082958 - RNA, 19 nt, Artificial Sequence
  Description of Artificial Sequence: Synthetic oligonucleotide
  Sense strand starting at position 531 of SEQ ID NO: 1881942
ugaucagaucuguagcugu

SEQ ID NO: 2082959 - RNA, 19 nt, Artificial Sequence
  Description of Artificial Sequence: Synthetic oligonucleotide
  Antisense strand to SEQ ID NO: 2082958
acagcuacagaucugauca

SEQ ID NO: 2082960 - RNA, 19 nt, Artificial Sequence
  Description of Artificial Sequence: Synthetic oligonucleotide
  Sense strand starting at position 641 of SEQ ID NO: 1881942
ucaacaucuugguagacaa

SEQ ID NO: 2082961 - RNA, 19 nt, Artificial Sequence
  Description of Artificial Sequence: Synthetic oligonucleotide
  Antisense strand to SEQ ID NO: 2082960
uugucuaccaagauguuga

SEQ ID NO: 2082962 - RNA, 19 nt, Artificial Sequence
  Description of Artificial Sequence: Synthetic oligonucleotide
  Sense strand starting at position 676 of SEQ ID NO: 1881942
agacaacccuaggaaguau

SEQ ID NO: 2082963 - RNA, 19 nt, Artificial Sequence
  Description of Artificial Sequence: Synthetic oligonucleotide
  Antisense strand to SEQ ID NO: 2082962
auacuuccuaggguugucu

SEQ ID NO: 2082964 - RNA, 19 nt, Artificial Sequence
  Description of Artificial Sequence: Synthetic oligonucleotide
  Sense strand starting at position 685 of SEQ ID NO: 1881942
uaggaaguaugaggaugaa

SEQ ID NO: 2082965 - RNA, 19 nt, Artificial Sequence
  Description of Artificial Sequence: Synthetic oligonucleotide
  Antisense strand to SEQ ID NO: 2082964
uucauccucauacuuccua

SEQ ID NO: 2082966 - RNA, 19 nt, Artificial Sequence
  Description of Artificial Sequence: Synthetic oligonucleotide
  Sense strand starting at position 2085 of SEQ ID NO: 1881942
cccggaaguggugauaaug

SEQ ID NO: 2082967 - RNA, 19 nt, Artificial Sequence
  Description of Artificial Sequence: Synthetic oligonucleotide
  Antisense strand to SEQ ID NO: 2082966
cauuaucaccacuuccggg

SEQ ID NO: 2082968 - RNA, 19 nt, Artificial Sequence
  Description of Artificial Sequence: Synthetic oligonucleotide
  Sense strand starting at position 2725 of SEQ ID NO: 1881942
cugccugggcgcuguuaaa

SEQ ID NO: 2082969 - RNA, 19 nt, Artificial Sequence
  Description of Artificial Sequence: Synthetic oligonucleotide
  Antisense strand to SEQ ID NO: 2082968
uuuaacagcgcccaggcag

SEQ ID NO: 2082970 - RNA, 19 nt, Artificial Sequence
  Description of Artificial Sequence: Synthetic oligonucleotide
  Sense strand starting at position 2857 of SEQ ID NO: 1881942
gacugauggccagggaaug

SEQ ID NO: 2082971 - RNA, 19 nt, Artificial Sequence
  Description of Artificial Sequence: Synthetic oligonucleotide
  Antisense strand to SEQ ID NO: 2082970
cauucccuggccaucaguc

SEQ ID NO: 2082972 - RNA, 19 nt, Artificial Sequence
  Description of Artificial Sequence: Synthetic oligonucleotide
  Sense strand starting at position 2978 of SEQ ID NO: 1881942
ugaagaugauuguccucuu

SEQ ID NO: 2082973 - RNA, 19 nt, Artificial Sequence
  Description of Artificial Sequence: Synthetic oligonucleotide
  Antisense strand to SEQ ID NO: 2082972
aagaggacaaucaucuuca

SEQ ID NO: 2082974 - RNA, 19 nt, Artificial Sequence
  Description of Artificial Sequence: Synthetic oligonucleotide
  Sense strand starting at position 2979 of SEQ ID NO: 1881942
gaagaugauuguccucuua

SEQ ID NO: 2082975 - RNA, 19 nt, Artificial Sequence
  Description of Artificial Sequence: Synthetic oligonucleotide
  Antisense strand to SEQ ID NO: 2082974
uaagaggacaaucaucuuc

SEQ ID NO: 2082976 - RNA, 19 nt, Artificial Sequence
  Description of Artificial Sequence: Synthetic oligonucleotide
  Sense strand starting at position 3148 of SEQ ID NO: 1881942
uuucgaucgccagcuuauu

SEQ ID NO: 2082977 - RNA, 19 nt, Artificial Sequence
  Description of Artificial Sequence: Synthetic oligonucleotide
  Antisense strand to SEQ ID NO: 2082976
aauaagcuggcgaucgaaa

SEQ ID NO: 2082978 - RNA, 19 nt, Artificial Sequence
  Description of Artificial Sequence: Synthetic oligonucleotide
  Sense strand starting at position 3178 of SEQ ID NO: 1881942
auguuauagggucgauaaa

SEQ ID NO: 2082979 - RNA, 19 nt, Artificial Sequence
  Description of Artificial Sequence: Synthetic oligonucleotide
  Antisense strand to SEQ ID NO: 2082978
uuuaucgacccuauaacau

SEQ ID NO: 2082980 - RNA, 19 nt, Artificial Sequence
  Description of Artificial Sequence: Synthetic oligonucleotide
  Sense strand starting at position 3179 of SEQ ID NO: 1881942
uguuauagggucgauaaag

SEQ ID NO: 2082981 - RNA, 19 nt, Artificial Sequence
  Description of Artificial Sequence: Synthetic oligonucleotide
  Antisense strand to SEQ ID NO: 2082980
cuuuaucgacccuauaaca

SEQ ID NO: 2082982 - RNA, 19 nt, Artificial Sequence
  Description of Artificial Sequence: Synthetic oligonucleotide
  Sense strand starting at position 3311 of SEQ ID NO: 1881942
guggauaacuuucugaagu

SEQ ID NO: 2082983 - RNA, 19 nt, Artificial Sequence
  Description of Artificial Sequence: Synthetic oligonucleotide
  Antisense strand to SEQ ID NO: 2082982
acuucagaaaguuauccac

SEQ ID NO: 2082984 - RNA, 19 nt, Artificial Sequence
  Description of Artificial Sequence: Synthetic oligonucleotide
  Sense strand starting at position 3312 of SEQ ID NO: 1881942
uggauaacuuucugaaguu

SEQ ID NO: 2082985 - RNA, 19 nt, Artificial Sequence
  Description of Artificial Sequence: Synthetic oligonucleotide
  Antisense strand to SEQ ID NO: 2082984
aacuucagaaaguuaucca

SEQ ID NO: 2082986 - RNA, 19 nt, Artificial Sequence
  Description of Artificial Sequence: Synthetic oligonucleotide
  Sense strand starting at position 3313 of SEQ ID NO: 1881942
ggauaacuuucugaaguug

SEQ ID NO: 2082987 - RNA, 19 nt, Artificial Sequence
  Description of Artificial Sequence: Synthetic oligonucleotide
  Antisense strand to SEQ ID NO: 2082986
caacuucagaaaguuaucc

SEQ ID NO: 2082988 - RNA, 19 nt, Artificial Sequence
  Description of Artificial Sequence: Synthetic oligonucleotide
  Sense strand starting at position 3357 of SEQ ID NO: 1881942
aggacaaauuguuauuacu

SEQ ID NO: 2082989 - RNA, 19 nt, Artificial Sequence
  Description of Artificial Sequence: Synthetic oligonucleotide
  Antisense strand to SEQ ID NO: 2082988
aguaauaacaauuuguccu

SEQ ID NO: 2082990 - RNA, 19 nt, Artificial Sequence
  Description of Artificial Sequence: Synthetic oligonucleotide
  Sense strand starting at position 3367 of SEQ ID NO: 1881942
guuauuacugcuucguagu

SEQ ID NO: 2082991 - RNA, 19 nt, Artificial Sequence
  Description of Artificial Sequence: Synthetic oligonucleotide
  Antisense strand to SEQ ID NO: 2082990
acuacgaagcaguaauaac

SEQ ID NO: 2082992 - RNA, 19 nt, Artificial Sequence
  Description of Artificial Sequence: Synthetic oligonucleotide
  Sense strand starting at position 3528 of SEQ ID NO: 1881942
gaagcuuagcucuguacag

SEQ ID NO: 2082993 - RNA, 19 nt, Artificial Sequence
  Description of Artificial Sequence: Synthetic oligonucleotide
  Antisense strand to SEQ ID NO: 2082992
cuguacagagcuaagcuuc

SEQ ID NO: 2082994 - RNA, 19 nt, Artificial Sequence
  Description of Artificial Sequence: Synthetic oligonucleotide
  Sense strand starting at position 3681 of SEQ ID NO: 1881942
ugggaauguggcuguuaca

SEQ ID NO: 2082995 - RNA, 19 nt, Artificial Sequence
  Description of Artificial Sequence: Synthetic oligonucleotide
  Antisense strand to SEQ ID NO: 2082994
uguaacagccacauuccca

SEQ ID NO: 2082996 - RNA, 19 nt, Artificial Sequence
  Description of Artificial Sequence: Synthetic oligonucleotide
  Sense strand starting at position 3780 of SEQ ID NO: 1881942
uguucuuaucagugugcga

SEQ ID NO: 2082997 - RNA, 19 nt, Artificial Sequence
  Description of Artificial Sequence: Synthetic oligonucleotide
  Antisense strand to SEQ ID NO: 2082996
ucgcacacugauaagaaca

SEQ ID NO: 2082998 - RNA, 19 nt, Artificial Sequence
  Description of Artificial Sequence: Synthetic oligonucleotide
  Sense strand starting at position 3817 of SEQ ID NO: 1881942
gcgggaaauccggguccuu

SEQ ID NO: 2082999 - RNA, 19 nt, Artificial Sequence
  Description of Artificial Sequence: Synthetic oligonucleotide
  Antisense strand to SEQ ID NO: 2082998
aaggacccggauuucccgc

SEQ ID NO: 2083000 - RNA, 19 nt, Artificial Sequence
  Description of Artificial Sequence: Synthetic oligonucleotide
  Sense strand starting at position 3828 of SEQ ID NO: 1881942
ggguccuugcguguuguga

SEQ ID NO: 2083001 - RNA, 19 nt, Artificial Sequence
  Description of Artificial Sequence: Synthetic oligonucleotide
  Antisense strand to SEQ ID NO: 2083000
ucacaacacgcaaggaccc

SEQ ID NO: 2083002 - RNA, 19 nt, Artificial Sequence
  Description of Artificial Sequence: Synthetic oligonucleotide
  Sense strand starting at position 3841 of SEQ ID NO: 1881942
uugugagcucccuggaauu

SEQ ID NO: 2083003 - RNA, 19 nt, Artificial Sequence
  Description of Artificial Sequence: Synthetic oligonucleotide
  Antisense strand to SEQ ID NO: 2083002
aauuccagggagcucacaa

SEQ ID NO: 2083004 - RNA, 19 nt, Artificial Sequence
  Description of Artificial Sequence: Synthetic oligonucleotide
  Sense strand starting at position 129 of SEQ ID NO: 1881944
ccaaauuguugaucuuuag

SEQ ID NO: 2083005 - RNA, 19 nt, Artificial Sequence
  Description of Artificial Sequence: Synthetic oligonucleotide
  Antisense strand to SEQ ID NO: 2083004
cuaaagaucaacaauuugg

SEQ ID NO: 2083006 - RNA, 19 nt, Artificial Sequence
  Description of Artificial Sequence: Synthetic oligonucleotide
  Sense strand starting at position 172 of SEQ ID NO: 1881944
uuugguguugcuucugcua

SEQ ID NO: 2083007 - RNA, 19 nt, Artificial Sequence
  Description of Artificial Sequence: Synthetic oligonucleotide
  Antisense strand to SEQ ID NO: 2083006
uagcagaagcaacaccaaa

SEQ ID NO: 2083008 - RNA, 19 nt, Artificial Sequence
  Description of Artificial Sequence: Synthetic oligonucleotide
  Sense strand starting at position 217 of SEQ ID NO: 1881944
acgaauuccugacuuauga

SEQ ID NO: 2083009 - RNA, 19 nt, Artificial Sequence
  Description of Artificial Sequence: Synthetic oligonucleotide
  Antisense strand to SEQ ID NO: 2083008
ucauaagucaggaauucgu

SEQ ID NO: 2083010 - RNA, 19 nt, Artificial Sequence
  Description of Artificial Sequence: Synthetic oligonucleotide
  Sense strand starting at position 436 of SEQ ID NO: 1881944
gcagcccuucccuagagaa

SEQ ID NO: 2083011 - RNA, 19 nt, Artificial Sequence
  Description of Artificial Sequence: Synthetic oligonucleotide
  Antisense strand to SEQ ID NO: 2083010
uucucuagggaagggcugc

SEQ ID NO: 2083012 - RNA, 19 nt, Artificial Sequence
  Description of Artificial Sequence: Synthetic oligonucleotide
  Sense strand starting at position 438 of SEQ ID NO: 1881944
agcccuucccuagagaacu

SEQ ID NO: 2083013 - RNA, 19 nt, Artificial Sequence
  Description of Artificial Sequence: Synthetic oligonucleotide
  Antisense strand to SEQ ID NO: 2083012
aguucucuagggaagggcu

SEQ ID NO: 2083014 - RNA, 19 nt, Artificial Sequence
  Description of Artificial Sequence: Synthetic oligonucleotide
  Sense strand starting at position 548 of SEQ ID NO: 1881944
ucaggacuuugccugacau

SEQ ID NO: 2083015 - RNA, 19 nt, Artificial Sequence
  Description of Artificial Sequence: Synthetic oligonucleotide
  Antisense strand to SEQ ID NO: 2083014
augucaggcaaaguccuga

SEQ ID NO: 2083016 - RNA, 19 nt, Artificial Sequence
  Description of Artificial Sequence: Synthetic oligonucleotide
  Sense strand starting at position 550 of SEQ ID NO: 1881944
aggacuuugccugacauca

SEQ ID NO: 2083017 - RNA, 19 nt, Artificial Sequence
  Description of Artificial Sequence: Synthetic oligonucleotide
  Antisense strand to SEQ ID NO: 2083016
ugaugucaggcaaaguccu

SEQ ID NO: 2083018 - RNA, 19 nt, Artificial Sequence
  Description of Artificial Sequence: Synthetic oligonucleotide
  Sense strand starting at position 677 of SEQ ID NO: 1881944
ggucuacuucuggaagcuu

SEQ ID NO: 2083019 - RNA, 19 nt, Artificial Sequence
  Description of Artificial Sequence: Synthetic oligonucleotide
  Antisense strand to SEQ ID NO: 2083018
aagcuuccagaaguagacc

SEQ ID NO: 2083020 - RNA, 19 nt, Artificial Sequence
  Description of Artificial Sequence: Synthetic oligonucleotide
  Sense strand starting at position 716 of SEQ ID NO: 1881944
auccuugcucaaggagauu

SEQ ID NO: 2083021 - RNA, 19 nt, Artificial Sequence
  Description of Artificial Sequence: Synthetic oligonucleotide
  Antisense strand to SEQ ID NO: 2083020
aaucuccuugagcaaggau

SEQ ID NO: 2083022 - RNA, 19 nt, Artificial Sequence
  Description of Artificial Sequence: Synthetic oligonucleotide
  Sense strand starting at position 949 of SEQ ID NO: 1881944
ggcuauguugaauaucaug

SEQ ID NO: 2083023 - RNA, 19 nt, Artificial Sequence
  Description of Artificial Sequence: Synthetic oligonucleotide
  Antisense strand to SEQ ID NO: 2083022
caugauauucaacauagcc

SEQ ID NO: 2083024 - RNA, 19 nt, Artificial Sequence
  Description of Artificial Sequence: Synthetic oligonucleotide
  Sense strand starting at position 1015 of SEQ ID NO: 1881944
aguuacuaugagcaucauu

SEQ ID NO: 2083025 - RNA, 19 nt, Artificial Sequence
  Description of Artificial Sequence: Synthetic oligonucleotide
  Antisense strand to SEQ ID NO: 2083024
aaugaugcucauaguaacu

SEQ ID NO: 2083026 - RNA, 19 nt, Artificial Sequence
  Description of Artificial Sequence: Synthetic oligonucleotide
  Sense strand starting at position 1191 of SEQ ID NO: 1881944
ugaauaucaguauguccaa

SEQ ID NO: 2083027 - RNA, 19 nt, Artificial Sequence
  Description of Artificial Sequence: Synthetic oligonucleotide
  Antisense strand to SEQ ID NO: 2083026
uuggacauacugauauuca

SEQ ID NO: 2083028 - RNA, 19 nt, Artificial Sequence
  Description of Artificial Sequence: Synthetic oligonucleotide
  Sense strand starting at position 1194 of SEQ ID NO: 1881944
auaucaguauguccaauua

SEQ ID NO: 2083029 - RNA, 19 nt, Artificial Sequence
  Description of Artificial Sequence: Synthetic oligonucleotide
  Antisense strand to SEQ ID NO: 2083028
uaauuggacauacugauau

SEQ ID NO: 2083030 - RNA, 19 nt, Artificial Sequence
  Description of Artificial Sequence: Synthetic oligonucleotide
  Sense strand starting at position 1256 of SEQ ID NO: 1881944
gcaauaaguuaggcaaaug

SEQ ID NO: 2083031 - RNA, 19 nt, Artificial Sequence
  Description of Artificial Sequence: Synthetic oligonucleotide
  Antisense strand to SEQ ID NO: 2083030
cauuugccuaacuuauugc

SEQ ID NO: 2083032 - RNA, 19 nt, Artificial Sequence
  Description of Artificial Sequence: Synthetic oligonucleotide
  Sense strand starting at position 1376 of SEQ ID NO: 1881944
cuccuaagguuauugugaa

SEQ ID NO: 2083033 - RNA, 19 nt, Artificial Sequence
  Description of Artificial Sequence: Synthetic oligonucleotide
  Antisense strand to SEQ ID NO: 2083032
uucacaauaaccuuaggag

SEQ ID NO: 2083034 - RNA, 19 nt, Artificial Sequence
  Description of Artificial Sequence: Synthetic oligonucleotide
  Sense strand starting at position 1426 of SEQ ID NO: 1881944
agcuacucuuuauuaggaa

SEQ ID NO: 2083035 - RNA, 19 nt, Artificial Sequence
  Description of Artificial Sequence: Synthetic oligonucleotide
  Antisense strand to SEQ ID NO: 2083034
uuccuaauaaagaguagcu

SEQ ID NO: 2083036 - RNA, 19 nt, Artificial Sequence
  Description of Artificial Sequence: Synthetic oligonucleotide
  Sense strand starting at position 1512 of SEQ ID NO: 1881944
uuccauacaucacugggau

SEQ ID NO: 2083037 - RNA, 19 nt, Artificial Sequence
  Description of Artificial Sequence: Synthetic oligonucleotide
  Antisense strand to SEQ ID NO: 2083036
aucccagugauguauggaa

SEQ ID NO: 2083038 - RNA, 19 nt, Artificial Sequence
  Description of Artificial Sequence: Synthetic oligonucleotide
  Sense strand starting at position 1513 of SEQ ID NO: 1881944
uccauacaucacugggaua

SEQ ID NO: 2083039 - RNA, 19 nt, Artificial Sequence
  Description of Artificial Sequence: Synthetic oligonucleotide
  Antisense strand to SEQ ID NO: 2083038
uaucccagugauguaugga

SEQ ID NO: 2083040 - RNA, 19 nt, Artificial Sequence
  Description of Artificial Sequence: Synthetic oligonucleotide
  Sense strand starting at position 1526 of SEQ ID NO: 1881944
gggauaccuuuacccugau

SEQ ID NO: 2083041 - RNA, 19 nt, Artificial Sequence
  Description of Artificial Sequence: Synthetic oligonucleotide
  Antisense strand to SEQ ID NO: 2083040
aucaggguaaagguauccc

SEQ ID NO: 2083042 - RNA, 19 nt, Artificial Sequence
  Description of Artificial Sequence: Synthetic oligonucleotide
  Sense strand starting at position 1633 of SEQ ID NO: 1881944
gucaguuugcuagaaacca

SEQ ID NO: 2083043 - RNA, 19 nt, Artificial Sequence
  Description of Artificial Sequence: Synthetic oligonucleotide
  Antisense strand to SEQ ID NO: 2083042
ugguuucuagcaaacugac

SEQ ID NO: 2083044 - RNA, 19 nt, Artificial Sequence
  Description of Artificial Sequence: Synthetic oligonucleotide
  Sense strand starting at position 1736 of SEQ ID NO: 1881944
ucuuuacuaugguugauac

SEQ ID NO: 2083045 - RNA, 19 nt, Artificial Sequence
  Description of Artificial Sequence: Synthetic oligonucleotide
  Antisense strand to SEQ ID NO: 2083044
guaucaaccauaguaaaga

SEQ ID NO: 2083046 - RNA, 19 nt, Artificial Sequence
  Description of Artificial Sequence: Synthetic oligonucleotide
  Sense strand starting at position 1737 of SEQ ID NO: 1881944
cuuuacuaugguugauaca

SEQ ID NO: 2083047 - RNA, 19 nt, Artificial Sequence
  Description of Artificial Sequence: Synthetic oligonucleotide
  Antisense strand to SEQ ID NO: 2083046
uguaucaaccauaguaaag

SEQ ID NO: 2083048 - RNA, 19 nt, Artificial Sequence
  Description of Artificial Sequence: Synthetic oligonucleotide
  Sense strand starting at position 1823 of SEQ ID NO: 1881944
aguguuaacccgccagugu

SEQ ID NO: 2083049 - RNA, 19 nt, Artificial Sequence
  Description of Artificial Sequence: Synthetic oligonucleotide
  Antisense strand to SEQ ID NO: 2083048
acacuggcggguuaacacu

SEQ ID NO: 2083050 - RNA, 19 nt, Artificial Sequence
  Description of Artificial Sequence: Synthetic oligonucleotide
  Sense strand starting at position 2035 of SEQ ID NO: 1881944
cuucgaaggccucaguaaa

SEQ ID NO: 2083051 - RNA, 19 nt, Artificial Sequence
  Description of Artificial Sequence: Synthetic oligonucleotide
  Antisense strand to SEQ ID NO: 2083050
uuuacugaggccuucgaag

SEQ ID NO: 2083052 - RNA, 19 nt, Artificial Sequence
  Description of Artificial Sequence: Synthetic oligonucleotide
  Sense strand starting at position 2116 of SEQ ID NO: 1881944
gaucaaauagcaggauugu

SEQ ID NO: 2083053 - RNA, 19 nt, Artificial Sequence
  Description of Artificial Sequence: Synthetic oligonucleotide
  Antisense strand to SEQ ID NO: 2083052
acaauccugcuauuugauc

SEQ ID NO: 2083054 - RNA, 19 nt, Artificial Sequence
  Description of Artificial Sequence: Synthetic oligonucleotide
  Sense strand starting at position 2137 of SEQ ID NO: 1881944
uuccaugagcuagagaguu

SEQ ID NO: 2083055 - RNA, 19 nt, Artificial Sequence
  Description of Artificial Sequence: Synthetic oligonucleotide
  Antisense strand to SEQ ID NO: 2083054
aacucucuagcucauggaa

SEQ ID NO: 2083056 - RNA, 19 nt, Artificial Sequence
  Description of Artificial Sequence: Synthetic oligonucleotide
  Sense strand starting at position 2301 of SEQ ID NO: 1881944
uuucuuguucuacagagag

SEQ ID NO: 2083057 - RNA, 19 nt, Artificial Sequence
  Description of Artificial Sequence: Synthetic oligonucleotide
  Antisense strand to SEQ ID NO: 2083056
cucucuguagaacaagaaa

SEQ ID NO: 2083058 - RNA, 19 nt, Artificial Sequence
  Description of Artificial Sequence: Synthetic oligonucleotide
  Sense strand starting at position 2303 of SEQ ID NO: 1881944
ucuuguucuacagagaggu

SEQ ID NO: 2083059 - RNA, 19 nt, Artificial Sequence
  Description of Artificial Sequence: Synthetic oligonucleotide
  Antisense strand to SEQ ID NO: 2083058
accucucuguagaacaaga

SEQ ID NO: 2083060 - RNA, 19 nt, Artificial Sequence
  Description of Artificial Sequence: Synthetic oligonucleotide
  Sense strand starting at position 2363 of SEQ ID NO: 1881944
ugugaauggcccagugugu

SEQ ID NO: 2083061 - RNA, 19 nt, Artificial Sequence
  Description of Artificial Sequence: Synthetic oligonucleotide
  Antisense strand to SEQ ID NO: 2083060
acacacugggccauucaca

SEQ ID NO: 2083062 - RNA, 19 nt, Artificial Sequence
  Description of Artificial Sequence: Synthetic oligonucleotide
  Sense strand starting at position 2386 of SEQ ID NO: 1881944
ggccucaggauuuguguga

SEQ ID NO: 2083063 - RNA, 19 nt, Artificial Sequence
  Description of Artificial Sequence: Synthetic oligonucleotide
  Antisense strand to SEQ ID NO: 2083062
ucacacaaauccugaggcc

SEQ ID NO: 2083064 - RNA, 19 nt, Artificial Sequence
  Description of Artificial Sequence: Synthetic oligonucleotide
  Sense strand starting at position 2429 of SEQ ID NO: 1881944
uguccauaagcugaaauaa

SEQ ID NO: 2083065 - RNA, 19 nt, Artificial Sequence
  Description of Artificial Sequence: Synthetic oligonucleotide
  Antisense strand to SEQ ID NO: 2083064
uuauuucagcuuauggaca

SEQ ID NO: 2083066 - RNA, 19 nt, Artificial Sequence
  Description of Artificial Sequence: Synthetic oligonucleotide
  Sense strand starting at position 2557 of SEQ ID NO: 1881944
ggaagaguccaauguaaac

SEQ ID NO: 2083067 - RNA, 19 nt, Artificial Sequence
  Description of Artificial Sequence: Synthetic oligonucleotide
  Antisense strand to SEQ ID NO: 2083066
guuuacauuggacucuucc

SEQ ID NO: 2083068 - RNA, 19 nt, Artificial Sequence
  Description of Artificial Sequence: Synthetic oligonucleotide
  Sense strand starting at position 3064 of SEQ ID NO: 1881944
aggauucuauccucucuga

SEQ ID NO: 2083069 - RNA, 19 nt, Artificial Sequence
  Description of Artificial Sequence: Synthetic oligonucleotide
  Antisense strand to SEQ ID NO: 2083068
ucagagaggauagaauccu

SEQ ID NO: 2083070 - RNA, 19 nt, Artificial Sequence
  Description of Artificial Sequence: Synthetic oligonucleotide
  Sense strand starting at position 3091 of SEQ ID NO: 1881944
gacagagguccuuacccuu

SEQ ID NO: 2083071 - RNA, 19 nt, Artificial Sequence
  Description of Artificial Sequence: Synthetic oligonucleotide
  Antisense strand to SEQ ID NO: 2083070
aaggguaaggaccucuguc

SEQ ID NO: 2083072 - RNA, 19 nt, Artificial Sequence
  Description of Artificial Sequence: Synthetic oligonucleotide
  Sense strand starting at position 3349 of SEQ ID NO: 1881944
ggauguggccuugagguau

SEQ ID NO: 2083073 - RNA, 19 nt, Artificial Sequence
  Description of Artificial Sequence: Synthetic oligonucleotide
  Antisense strand to SEQ ID NO: 2083072
auaccucaaggccacaucc

SEQ ID NO: 2083074 - RNA, 19 nt, Artificial Sequence
  Description of Artificial Sequence: Synthetic oligonucleotide
  Sense strand starting at position 3353 of SEQ ID NO: 1881944
guggccuugagguauugga

SEQ ID NO: 2083075 - RNA, 19 nt, Artificial Sequence
  Description of Artificial Sequence: Synthetic oligonucleotide
  Antisense strand to SEQ ID NO: 2083074
uccaauaccucaaggccac

SEQ ID NO: 2083076 - RNA, 19 nt, Artificial Sequence
  Description of Artificial Sequence: Synthetic oligonucleotide
  Sense strand starting at position 3367 of SEQ ID NO: 1881944
uuggaaaccuuauuagcga

SEQ ID NO: 2083077 - RNA, 19 nt, Artificial Sequence
  Description of Artificial Sequence: Synthetic oligonucleotide
  Antisense strand to SEQ ID NO: 2083076
ucgcuaauaagguuuccaa

SEQ ID NO: 2083078 - RNA, 19 nt, Artificial Sequence
  Description of Artificial Sequence: Synthetic oligonucleotide
  Sense strand starting at position 3436 of SEQ ID NO: 1881944
agaagagccugacuagagu

SEQ ID NO: 2083079 - RNA, 19 nt, Artificial Sequence
  Description of Artificial Sequence: Synthetic oligonucleotide
  Antisense strand to SEQ ID NO: 2083078
acucuagucaggcucuucu

SEQ ID NO: 2083080 - RNA, 19 nt, Artificial Sequence
  Description of Artificial Sequence: Synthetic oligonucleotide
  Sense strand starting at position 3610 of SEQ ID NO: 1881944
aacgacugauguccuugaa

SEQ ID NO: 2083081 - RNA, 19 nt, Artificial Sequence
  Description of Artificial Sequence: Synthetic oligonucleotide
  Antisense strand to SEQ ID NO: 2083080
uucaaggacaucagucguu

SEQ ID NO: 2083082 - RNA, 19 nt, Artificial Sequence
  Description of Artificial Sequence: Synthetic oligonucleotide
  Sense strand starting at position 3613 of SEQ ID NO: 1881944
gacugauguccuugaagag

SEQ ID NO: 2083083 - RNA, 19 nt, Artificial Sequence
  Description of Artificial Sequence: Synthetic oligonucleotide
  Antisense strand to SEQ ID NO: 2083082
cucuucaaggacaucaguc

SEQ ID NO: 2083084 - RNA, 19 nt, Artificial Sequence
  Description of Artificial Sequence: Synthetic oligonucleotide
  Sense strand starting at position 2 of SEQ ID NO: 1881943
acuucuuaucccuggaaug

SEQ ID NO: 2083085 - RNA, 19 nt, Artificial Sequence
  Description of Artificial Sequence: Synthetic oligonucleotide
  Antisense strand to SEQ ID NO: 2083084
cauuccagggauaagaagu

SEQ ID NO: 2083086 - RNA, 19 nt, Artificial Sequence
  Description of Artificial Sequence: Synthetic oligonucleotide
  Sense strand starting at position 90 of SEQ ID NO: 1881943
gggcauagcuauuuccuca

SEQ ID NO: 2083087 - RNA, 19 nt, Artificial Sequence
  Description of Artificial Sequence: Synthetic oligonucleotide
  Antisense strand to SEQ ID NO: 2083086
ugaggaaauagcuaugccc

SEQ ID NO: 2083088 - RNA, 19 nt, Artificial Sequence
  Description of Artificial Sequence: Synthetic oligonucleotide
  Sense strand starting at position 156 of SEQ ID NO: 1881943
auuauagaucccggaagug

SEQ ID NO: 2083089 - RNA, 19 nt, Artificial Sequence
  Description of Artificial Sequence: Synthetic oligonucleotide
  Antisense strand to SEQ ID NO: 2083088
cacuuccgggaucuauaau

SEQ ID NO: 2083090 - RNA, 19 nt, Artificial Sequence
  Description of Artificial Sequence: Synthetic oligonucleotide
  Sense strand starting at position 193 of SEQ ID NO: 1881943
uauagaagaugcucaguau

SEQ ID NO: 2083091 - RNA, 19 nt, Artificial Sequence
  Description of Artificial Sequence: Synthetic oligonucleotide
  Antisense strand to SEQ ID NO: 2083090
auacugagcaucuucuaua

SEQ ID NO: 2083092 - RNA, 19 nt, Artificial Sequence
  Description of Artificial Sequence: Synthetic oligonucleotide
  Sense strand starting at position 194 of SEQ ID NO: 1881943
auagaagaugcucaguauu

SEQ ID NO: 2083093 - RNA, 19 nt, Artificial Sequence
  Description of Artificial Sequence: Synthetic oligonucleotide
  Antisense strand to SEQ ID NO: 2083092
aauacugagcaucuucuau

SEQ ID NO: 2083094 - RNA, 19 nt, Artificial Sequence
  Description of Artificial Sequence: Synthetic oligonucleotide
  Sense strand starting at position 204 of SEQ ID NO: 1881943
cucaguauuuguuugugau

SEQ ID NO: 2083095 - RNA, 19 nt, Artificial Sequence
  Description of Artificial Sequence: Synthetic oligonucleotide
  Antisense strand to SEQ ID NO: 2083094
aucacaaacaaauacugag

SEQ ID NO: 2083096 - RNA, 19 nt, Artificial Sequence
  Description of Artificial Sequence: Synthetic oligonucleotide
  Sense strand starting at position 205 of SEQ ID NO: 1881943
ucaguauuuguuugugaug

SEQ ID NO: 2083097 - RNA, 19 nt, Artificial Sequence
  Description of Artificial Sequence: Synthetic oligonucleotide
  Antisense strand to SEQ ID NO: 2083096
caucacaaacaaauacuga

SEQ ID NO: 2083098 - RNA, 19 nt, Artificial Sequence
  Description of Artificial Sequence: Synthetic oligonucleotide
  Sense strand starting at position 217 of SEQ ID NO: 1881943
ugugaugguaaugaugauu

SEQ ID NO: 2083099 - RNA, 19 nt, Artificial Sequence
  Description of Artificial Sequence: Synthetic oligonucleotide
  Antisense strand to SEQ ID NO: 2083098
aaucaucauuaccaucaca

SEQ ID NO: 2083100 - RNA, 19 nt, Artificial Sequence
  Description of Artificial Sequence: Synthetic oligonucleotide
  Sense strand starting at position 239 of SEQ ID NO: 1881943
guuugacuugggugacaaa

SEQ ID NO: 2083101 - RNA, 19 nt, Artificial Sequence
  Description of Artificial Sequence: Synthetic oligonucleotide
  Antisense strand to SEQ ID NO: 2083100
uuugucacccaagucaaac

SEQ ID NO: 2083102 - RNA, 19 nt, Artificial Sequence
  Description of Artificial Sequence: Synthetic oligonucleotide
  Sense strand starting at position 408 of SEQ ID NO: 1881943
agaacauugugagcagauu

SEQ ID NO: 2083103 - RNA, 19 nt, Artificial Sequence
  Description of Artificial Sequence: Synthetic oligonucleotide
  Antisense strand to SEQ ID NO: 2083102
aaucugcucacaauguucu

SEQ ID NO: 2083104 - RNA, 19 nt, Artificial Sequence
  Description of Artificial Sequence: Synthetic oligonucleotide
  Sense strand starting at position 420 of SEQ ID NO: 1881943
gcagauuauuucuuagccu

SEQ ID NO: 2083105 - RNA, 19 nt, Artificial Sequence
  Description of Artificial Sequence: Synthetic oligonucleotide
  Antisense strand to SEQ ID NO: 2083104
aggcuaagaaauaaucugc

SEQ ID NO: 2083106 - RNA, 19 nt, Artificial Sequence
  Description of Artificial Sequence: Synthetic oligonucleotide
  Sense strand starting at position 499 of SEQ ID NO: 1881943
gaagauaggcugugacuua

SEQ ID NO: 2083107 - RNA, 19 nt, Artificial Sequence
  Description of Artificial Sequence: Synthetic oligonucleotide
  Antisense strand to SEQ ID NO: 2083106
uaagucacagccuaucuuc

SEQ ID NO: 2083108 - RNA, 19 nt, Artificial Sequence
  Description of Artificial Sequence: Synthetic oligonucleotide
  Sense strand starting at position 700 of SEQ ID NO: 1881943
gugacccauucccugagau

SEQ ID NO: 2083109 - RNA, 19 nt, Artificial Sequence
  Description of Artificial Sequence: Synthetic oligonucleotide
  Antisense strand to SEQ ID NO: 2083108
aucucagggaaugggucac

SEQ ID NO: 2083110 - RNA, 19 nt, Artificial Sequence
  Description of Artificial Sequence: Synthetic oligonucleotide
  Sense strand starting at position 701 of SEQ ID NO: 1881943
ugacccauucccugagaug

SEQ ID NO: 2083111 - RNA, 19 nt, Artificial Sequence
  Description of Artificial Sequence: Synthetic oligonucleotide
  Antisense strand to SEQ ID NO: 2083110
caucucagggaauggguca

SEQ ID NO: 2083112 - RNA, 19 nt, Artificial Sequence
  Description of Artificial Sequence: Synthetic oligonucleotide
  Sense strand starting at position 743 of SEQ ID NO: 1881943
gcugucuuugaccauaaca

SEQ ID NO: 2083113 - RNA, 19 nt, Artificial Sequence
  Description of Artificial Sequence: Synthetic oligonucleotide
  Antisense strand to SEQ ID NO: 2083112
uguuauggucaaagacagc

SEQ ID NO: 2083114 - RNA, 19 nt, Artificial Sequence
  Description of Artificial Sequence: Synthetic oligonucleotide
  Sense strand starting at position 860 of SEQ ID NO: 1881943
aguauuacuuaccugauua

SEQ ID NO: 2083115 - RNA, 19 nt, Artificial Sequence
  Description of Artificial Sequence: Synthetic oligonucleotide
  Antisense strand to SEQ ID NO: 2083114
uaaucagguaaguaauacu

SEQ ID NO: 2083116 - RNA, 19 nt, Artificial Sequence
  Description of Artificial Sequence: Synthetic oligonucleotide
  Sense strand starting at position 898 of SEQ ID NO: 1881943
guccuuccagcucaaagau

SEQ ID NO: 2083117 - RNA, 19 nt, Artificial Sequence
  Description of Artificial Sequence: Synthetic oligonucleotide
  Antisense strand to SEQ ID NO: 2083116
aucuuugagcuggaaggac

SEQ ID NO: 2083118 - RNA, 19 nt, Artificial Sequence
  Description of Artificial Sequence: Synthetic oligonucleotide
  Sense strand starting at position 955 of SEQ ID NO: 1881943
ugaagaccugagugucaaa

SEQ ID NO: 2083119 - RNA, 19 nt, Artificial Sequence
  Description of Artificial Sequence: Synthetic oligonucleotide
  Antisense strand to SEQ ID NO: 2083118
uuugacacucaggucuuca

SEQ ID NO: 2083120 - RNA, 19 nt, Artificial Sequence
  Description of Artificial Sequence: Synthetic oligonucleotide
  Sense strand starting at position 1002 of SEQ ID NO: 1881943
gacuuugaguaagucacau

SEQ ID NO: 2083121 - RNA, 19 nt, Artificial Sequence
  Description of Artificial Sequence: Synthetic oligonucleotide
  Antisense strand to SEQ ID NO: 2083120
augugacuuacucaaaguc

SEQ ID NO: 2083122 - RNA, 19 nt, Artificial Sequence
  Description of Artificial Sequence: Synthetic oligonucleotide
  Sense strand starting at position 1095 of SEQ ID NO: 1881943
ccgagucucauugaggaca

SEQ ID NO: 2083123 - RNA, 19 nt, Artificial Sequence
  Description of Artificial Sequence: Synthetic oligonucleotide
  Antisense strand to SEQ ID NO: 2083122
uguccucaaugagacucgg

SEQ ID NO: 2083124 - RNA, 19 nt, Artificial Sequence
  Description of Artificial Sequence: Synthetic oligonucleotide
  Sense strand starting at position 1145 of SEQ ID NO: 1881943
guuagacauuaauugauag

SEQ ID NO: 2083125 - RNA, 19 nt, Artificial Sequence
  Description of Artificial Sequence: Synthetic oligonucleotide
  Antisense strand to SEQ ID NO: 2083124
cuaucaauuaaugucuaac

SEQ ID NO: 2083126 - RNA, 19 nt, Artificial Sequence
  Description of Artificial Sequence: Synthetic oligonucleotide
  Sense strand starting at position 1259 of SEQ ID NO: 1881943
guguuaguuccacagaaca

SEQ ID NO: 2083127 - RNA, 19 nt, Artificial Sequence
  Description of Artificial Sequence: Synthetic oligonucleotide
  Antisense strand to SEQ ID NO: 2083126
uguucuguggaacuaacac

SEQ ID NO: 2083128 - RNA, 19 nt, Artificial Sequence
  Description of Artificial Sequence: Synthetic oligonucleotide
  Sense strand starting at position 1292 of SEQ ID NO: 1881943
ggcaauagccaugacauaa

SEQ ID NO: 2083129 - RNA, 19 nt, Artificial Sequence
  Description of Artificial Sequence: Synthetic oligonucleotide
  Antisense strand to SEQ ID NO: 2083128
uuaugucauggcuauugcc

SEQ ID NO: 2083130 - RNA, 19 nt, Artificial Sequence
  Description of Artificial Sequence: Synthetic oligonucleotide
  Sense strand starting at position 1558 of SEQ ID NO: 1881943
caaauaccagguugguaaa

SEQ ID NO: 2083131 - RNA, 19 nt, Artificial Sequence
  Description of Artificial Sequence: Synthetic oligonucleotide
  Antisense strand to SEQ ID NO: 2083130
uuuaccaaccugguauuug

SEQ ID NO: 2083132 - RNA, 19 nt, Artificial Sequence
  Description of Artificial Sequence: Synthetic oligonucleotide
  Sense strand starting at position 1560 of SEQ ID NO: 1881943
aauaccagguugguaaaua

SEQ ID NO: 2083133 - RNA, 19 nt, Artificial Sequence
  Description of Artificial Sequence: Synthetic oligonucleotide
  Antisense strand to SEQ ID NO: 2083132
uauuuaccaaccugguauu

SEQ ID NO: 2083134 - RNA, 19 nt, Artificial Sequence
  Description of Artificial Sequence: Synthetic oligonucleotide
  Sense strand starting at position 1578 of SEQ ID NO: 1881943
auuuguuccucaucuguga

SEQ ID NO: 2083135 - RNA, 19 nt, Artificial Sequence
  Description of Artificial Sequence: Synthetic oligonucleotide
  Antisense strand to SEQ ID NO: 2083134
ucacagaugaggaacaaau

SEQ ID NO: 2083136 - RNA, 19 nt, Artificial Sequence
  Description of Artificial Sequence: Synthetic oligonucleotide
  Sense strand starting at position 1685 of SEQ ID NO: 1881943
guggaacguagugaacuua

SEQ ID NO: 2083137 - RNA, 19 nt, Artificial Sequence
  Description of Artificial Sequence: Synthetic oligonucleotide
  Antisense strand to SEQ ID NO: 2083136
uaaguucacuacguuccac

SEQ ID NO: 2083138 - RNA, 19 nt, Artificial Sequence
  Description of Artificial Sequence: Synthetic oligonucleotide
  Sense strand starting at position 1751 of SEQ ID NO: 1881943
cuaugcuuugaguaacauu

SEQ ID NO: 2083139 - RNA, 19 nt, Artificial Sequence
  Description of Artificial Sequence: Synthetic oligonucleotide
  Antisense strand to SEQ ID NO: 2083138
aauguuacucaaagcauag

SEQ ID NO: 2083140 - RNA, 19 nt, Artificial Sequence
  Description of Artificial Sequence: Synthetic oligonucleotide
  Sense strand starting at position 1860 of SEQ ID NO: 1881943
augugaagucuggaaguug

SEQ ID NO: 2083141 - RNA, 19 nt, Artificial Sequence
  Description of Artificial Sequence: Synthetic oligonucleotide
  Antisense strand to SEQ ID NO: 2083140
caacuuccagacuucacau

SEQ ID NO: 2083142 - RNA, 19 nt, Artificial Sequence
  Description of Artificial Sequence: Synthetic oligonucleotide
  Sense strand starting at position 2256 of SEQ ID NO: 1881943
aaagauguacuggguuaaa

SEQ ID NO: 2083143 - RNA, 19 nt, Artificial Sequence
  Description of Artificial Sequence: Synthetic oligonucleotide
  Antisense strand to SEQ ID NO: 2083142
uuuaacccaguacaucuuu

SEQ ID NO: 2083144 - RNA, 19 nt, Artificial Sequence
  Description of Artificial Sequence: Synthetic oligonucleotide
  Sense strand starting at position 2274 of SEQ ID NO: 1881943
aaggaauagugauuguuaa

SEQ ID NO: 2083145 - RNA, 19 nt, Artificial Sequence
  Description of Artificial Sequence: Synthetic oligonucleotide
  Antisense strand to SEQ ID NO: 2083144
uuaacaaucacuauuccuu

SEQ ID NO: 2083146 - RNA, 19 nt, Artificial Sequence
  Description of Artificial Sequence: Synthetic oligonucleotide
  Sense strand starting at position 2275 of SEQ ID NO: 1881943
aggaauagugauuguuaag

SEQ ID NO: 2083147 - RNA, 19 nt, Artificial Sequence
  Description of Artificial Sequence: Synthetic oligonucleotide
  Antisense strand to SEQ ID NO: 2083146
cuuaacaaucacuauuccu

SEQ ID NO: 2083148 - RNA, 19 nt, Artificial Sequence
  Description of Artificial Sequence: Synthetic oligonucleotide
  Sense strand starting at position 2524 of SEQ ID NO: 1881943
ugucgcuaugguccguaaa

SEQ ID NO: 2083149 - RNA, 19 nt, Artificial Sequence
  Description of Artificial Sequence: Synthetic oligonucleotide
  Antisense strand to SEQ ID NO: 2083148
uuuacggaccauagcgaca

SEQ ID NO: 2083150 - RNA, 19 nt, Artificial Sequence
  Description of Artificial Sequence: Synthetic oligonucleotide
  Sense strand starting at position 3160 of SEQ ID NO: 1881943
cauggauauuaaguguuua

SEQ ID NO: 2083151 - RNA, 19 nt, Artificial Sequence
  Description of Artificial Sequence: Synthetic oligonucleotide
  Antisense strand to SEQ ID NO: 2083150
uaaacacuuaauauccaug

SEQ ID NO: 2083152 - RNA, 19 nt, Artificial Sequence
  Description of Artificial Sequence: Synthetic oligonucleotide
  Sense strand starting at position 3231 of SEQ ID NO: 1881943
gugaaaugccuggauguga

SEQ ID NO: 2083153 - RNA, 19 nt, Artificial Sequence
  Description of Artificial Sequence: Synthetic oligonucleotide
  Antisense strand to SEQ ID NO: 2083152
ucacauccaggcauuucac

SEQ ID NO: 2083154 - RNA, 19 nt, Artificial Sequence
  Description of Artificial Sequence: Synthetic oligonucleotide
  Sense strand starting at position 3255 of SEQ ID NO: 1881943
ggaaauggcuaaguaauug

SEQ ID NO: 2083155 - RNA, 19 nt, Artificial Sequence
  Description of Artificial Sequence: Synthetic oligonucleotide
  Antisense strand to SEQ ID NO: 2083154
caauuacuuagccauuucc

SEQ ID NO: 2083156 - RNA, 19 nt, Artificial Sequence
  Description of Artificial Sequence: Synthetic oligonucleotide
  Sense strand starting at position 3297 of SEQ ID NO: 1881943
cacuuagagugggcauaau

SEQ ID NO: 2083157 - RNA, 19 nt, Artificial Sequence
  Description of Artificial Sequence: Synthetic oligonucleotide
  Antisense strand to SEQ ID NO: 2083156
auuaugcccacucuaagug

SEQ ID NO: 2083158 - RNA, 19 nt, Artificial Sequence
  Description of Artificial Sequence: Synthetic oligonucleotide
  Sense strand starting at position 3524 of SEQ ID NO: 1881943
ucaacaauugcuggaagau

SEQ ID NO: 2083159 - RNA, 19 nt, Artificial Sequence
  Description of Artificial Sequence: Synthetic oligonucleotide
  Antisense strand to SEQ ID NO: 2083158
aucuuccagcaauuguuga

SEQ ID NO: 2083160 - RNA, 19 nt, Artificial Sequence
  Description of Artificial Sequence: Synthetic oligonucleotide
  Sense strand starting at position 3848 of SEQ ID NO: 1881943
aacugacaauaguuugagu

SEQ ID NO: 2083161 - RNA, 19 nt, Artificial Sequence
  Description of Artificial Sequence: Synthetic oligonucleotide
  Antisense strand to SEQ ID NO: 2083160
acucaaacuauugucaguu

SEQ ID NO: 2083162 - RNA, 19 nt, Artificial Sequence
  Description of Artificial Sequence: Synthetic oligonucleotide
  Sense strand starting at position 3966 of SEQ ID NO: 1881943
uaguucgagcaagaaauua

SEQ ID NO: 2083163 - RNA, 19 nt, Artificial Sequence
  Description of Artificial Sequence: Synthetic oligonucleotide
  Antisense strand to SEQ ID NO: 2083162
uaauuucuugcucgaacua

SEQ ID NO: 2083164 - RNA, 19 nt, Artificial Sequence
  Description of Artificial Sequence: Synthetic oligonucleotide
  Sense strand starting at position 73 of SEQ ID NO: 1881945
caacgcuauguggacauua

SEQ ID NO: 2083165 - RNA, 19 nt, Artificial Sequence
  Description of Artificial Sequence: Synthetic oligonucleotide
  Antisense strand to SEQ ID NO: 2083164
uaauguccacauagcguug

SEQ ID NO: 2083166 - RNA, 19 nt, Artificial Sequence
  Description of Artificial Sequence: Synthetic oligonucleotide
  Sense strand starting at position 75 of SEQ ID NO: 1881945
acgcuauguggacauuaau

SEQ ID NO: 2083167 - RNA, 19 nt, Artificial Sequence
  Description of Artificial Sequence: Synthetic oligonucleotide
  Antisense strand to SEQ ID NO: 2083166
auuaauguccacauagcgu

SEQ ID NO: 2083168 - RNA, 19 nt, Artificial Sequence
  Description of Artificial Sequence: Synthetic oligonucleotide
  Sense strand starting at position 117 of SEQ ID NO: 1881945
cugagagauguuuguaacc

SEQ ID NO: 2083169 - RNA, 19 nt, Artificial Sequence
  Description of Artificial Sequence: Synthetic oligonucleotide
  Antisense strand to SEQ ID NO: 2083168
gguuacaaacaucucucag

SEQ ID NO: 2083170 - RNA, 19 nt, Artificial Sequence
  Description of Artificial Sequence: Synthetic oligonucleotide
  Sense strand starting at position 205 of SEQ ID NO: 1881945
uuccuuagaguuuggauca

SEQ ID NO: 2083171 - RNA, 19 nt, Artificial Sequence
  Description of Artificial Sequence: Synthetic oligonucleotide
  Antisense strand to SEQ ID NO: 2083170
ugauccaaacucuaaggaa

SEQ ID NO: 2083172 - RNA, 19 nt, Artificial Sequence
  Description of Artificial Sequence: Synthetic oligonucleotide
  Sense strand starting at position 344 of SEQ ID NO: 1881945
guacaucaacagugacaaa

SEQ ID NO: 2083173 - RNA, 19 nt, Artificial Sequence
  Description of Artificial Sequence: Synthetic oligonucleotide
  Antisense strand to SEQ ID NO: 2083172
uuugucacuguugauguac

SEQ ID NO: 2083174 - RNA, 19 nt, Artificial Sequence
  Description of Artificial Sequence: Synthetic oligonucleotide
  Sense strand starting at position 385 of SEQ ID NO: 1881945
acauuugagugggaguaau

SEQ ID NO: 2083175 - RNA, 19 nt, Artificial Sequence
  Description of Artificial Sequence: Synthetic oligonucleotide
  Antisense strand to SEQ ID NO: 2083174
auuacucccacucaaaugu

SEQ ID NO: 2083176 - RNA, 19 nt, Artificial Sequence
  Description of Artificial Sequence: Synthetic oligonucleotide
  Sense strand starting at position 1006 of SEQ ID NO: 1881945
ugaucaguguuacuaggaa

SEQ ID NO: 2083177 - RNA, 19 nt, Artificial Sequence
  Description of Artificial Sequence: Synthetic oligonucleotide
  Antisense strand to SEQ ID NO: 2083176
uuccuaguaacacugauca

SEQ ID NO: 2083178 - RNA, 19 nt, Artificial Sequence
  Description of Artificial Sequence: Synthetic oligonucleotide
  Sense strand starting at position 1018 of SEQ ID NO: 1881945
cuaggaagugauuggcauu

SEQ ID NO: 2083179 - RNA, 19 nt, Artificial Sequence
  Description of Artificial Sequence: Synthetic oligonucleotide
  Antisense strand to SEQ ID NO: 2083178
aaugccaaucacuuccuag

SEQ ID NO: 2083180 - RNA, 19 nt, Artificial Sequence
  Description of Artificial Sequence: Synthetic oligonucleotide
  Sense strand starting at position 1040 of SEQ ID NO: 1881945
augcgugaucuguuuguau

SEQ ID NO: 2083181 - RNA, 19 nt, Artificial Sequence
  Description of Artificial Sequence: Synthetic oligonucleotide
  Antisense strand to SEQ ID NO: 2083180
auacaaacagaucacgcau

SEQ ID NO: 2083182 - RNA, 19 nt, Artificial Sequence
  Description of Artificial Sequence: Synthetic oligonucleotide
  Sense strand starting at position 1108 of SEQ ID NO: 1881945
guagaaucuugagucuaau

SEQ ID NO: 2083183 - RNA, 19 nt, Artificial Sequence
  Description of Artificial Sequence: Synthetic oligonucleotide
  Antisense strand to SEQ ID NO: 2083182
auuagacucaagauucuac

SEQ ID NO: 2083184 - RNA, 19 nt, Artificial Sequence
  Description of Artificial Sequence: Synthetic oligonucleotide
  Sense strand starting at position 1159 of SEQ ID NO: 1881945
ucaucuguuccugggaaga

SEQ ID NO: 2083185 - RNA, 19 nt, Artificial Sequence
  Description of Artificial Sequence: Synthetic oligonucleotide
  Antisense strand to SEQ ID NO: 2083184
ucuucccaggaacagauga

SEQ ID NO: 2083186 - RNA, 19 nt, Artificial Sequence
  Description of Artificial Sequence: Synthetic oligonucleotide
  Sense strand starting at position 1214 of SEQ ID NO: 1881945
auuauuaagucccuggaaa

SEQ ID NO: 2083187 - RNA, 19 nt, Artificial Sequence
  Description of Artificial Sequence: Synthetic oligonucleotide
  Antisense strand to SEQ ID NO: 2083186
uuuccagggacuuaauaau

SEQ ID NO: 2083188 - RNA, 19 nt, Artificial Sequence
  Description of Artificial Sequence: Synthetic oligonucleotide
  Sense strand starting at position 1569 of SEQ ID NO: 1881945
uaaguauugcuugagagca

SEQ ID NO: 2083189 - RNA, 19 nt, Artificial Sequence
  Description of Artificial Sequence: Synthetic oligonucleotide
  Antisense strand to SEQ ID NO: 2083188
ugcucucaagcaauacuua

SEQ ID NO: 2083190 - RNA, 19 nt, Artificial Sequence
  Description of Artificial Sequence: Synthetic oligonucleotide
  Sense strand starting at position 1577 of SEQ ID NO: 1881945
gcuugagagcaauggacau

SEQ ID NO: 2083191 - RNA, 19 nt, Artificial Sequence
  Description of Artificial Sequence: Synthetic oligonucleotide
  Antisense strand to SEQ ID NO: 2083190
auguccauugcucucaagc

SEQ ID NO: 2083192 - RNA, 19 nt, Artificial Sequence
  Description of Artificial Sequence: Synthetic oligonucleotide
  Sense strand starting at position 1624 of SEQ ID NO: 1881945
auucuuauggcauggauau

SEQ ID NO: 2083193 - RNA, 19 nt, Artificial Sequence
  Description of Artificial Sequence: Synthetic oligonucleotide
  Antisense strand to SEQ ID NO: 2083192
auauccaugccauaagaau

SEQ ID NO: 2083194 - RNA, 19 nt, Artificial Sequence
  Description of Artificial Sequence: Synthetic oligonucleotide
  Sense strand starting at position 1625 of SEQ ID NO: 1881945
uucuuauggcauggauauu

SEQ ID NO: 2083195 - RNA, 19 nt, Artificial Sequence
  Description of Artificial Sequence: Synthetic oligonucleotide
  Antisense strand to SEQ ID NO: 2083194
aauauccaugccauaagaa

SEQ ID NO: 2083196 - RNA, 19 nt, Artificial Sequence
  Description of Artificial Sequence: Synthetic oligonucleotide
  Sense strand starting at position 1692 of SEQ ID NO: 1881945
gcauaaguacucugauaca

SEQ ID NO: 2083197 - RNA, 19 nt, Artificial Sequence
  Description of Artificial Sequence: Synthetic oligonucleotide
  Antisense strand to SEQ ID NO: 2083196
uguaucagaguacuuaugc

SEQ ID NO: 2083198 - RNA, 19 nt, Artificial Sequence
  Description of Artificial Sequence: Synthetic oligonucleotide
  Sense strand starting at position 1710 of SEQ ID NO: 1881945
agguauuagagaugguauc

SEQ ID NO: 2083199 - RNA, 19 nt, Artificial Sequence
  Description of Artificial Sequence: Synthetic oligonucleotide
  Antisense strand to SEQ ID NO: 2083198
gauaccaucucuaauaccu

SEQ ID NO: 2083200 - RNA, 19 nt, Artificial Sequence
  Description of Artificial Sequence: Synthetic oligonucleotide
  Sense strand starting at position 1711 of SEQ ID NO: 1881945
gguauuagagaugguaucu

SEQ ID NO: 2083201 - RNA, 19 nt, Artificial Sequence
  Description of Artificial Sequence: Synthetic oligonucleotide
  Antisense strand to SEQ ID NO: 2083200
agauaccaucucuaauacc

SEQ ID NO: 2083202 - RNA, 19 nt, Artificial Sequence
  Description of Artificial Sequence: Synthetic oligonucleotide
  Sense strand starting at position 1716 of SEQ ID NO: 1881945
uagagaugguaucuccaga

SEQ ID NO: 2083203 - RNA, 19 nt, Artificial Sequence
  Description of Artificial Sequence: Synthetic oligonucleotide
  Antisense strand to SEQ ID NO: 2083202
ucuggagauaccaucucua

SEQ ID NO: 2083204 - RNA, 19 nt, Artificial Sequence
  Description of Artificial Sequence: Synthetic oligonucleotide
  Sense strand starting at position 1723 of SEQ ID NO: 1881945
gguaucuccagauaugagu

SEQ ID NO: 2083205 - RNA, 19 nt, Artificial Sequence
  Description of Artificial Sequence: Synthetic oligonucleotide
  Antisense strand to SEQ ID NO: 2083204
acucauaucuggagauacc

SEQ ID NO: 2083206 - RNA, 19 nt, Artificial Sequence
  Description of Artificial Sequence: Synthetic oligonucleotide
  Sense strand starting at position 1732 of SEQ ID NO: 1881945
agauaugaguucuuuaugg

SEQ ID NO: 2083207 - RNA, 19 nt, Artificial Sequence
  Description of Artificial Sequence: Synthetic oligonucleotide
  Antisense strand to SEQ ID NO: 2083206
ccauaaagaacucauaucu

SEQ ID NO: 2083208 - RNA, 19 nt, Artificial Sequence
  Description of Artificial Sequence: Synthetic oligonucleotide
  Sense strand starting at position 1734 of SEQ ID NO: 1881945
auaugaguucuuuauggca

SEQ ID NO: 2083209 - RNA, 19 nt, Artificial Sequence
  Description of Artificial Sequence: Synthetic oligonucleotide
  Antisense strand to SEQ ID NO: 2083208
ugccauaaagaacucauau

SEQ ID NO: 2083210 - RNA, 19 nt, Artificial Sequence
  Description of Artificial Sequence: Synthetic oligonucleotide
  Sense strand starting at position 2315 of SEQ ID NO: 1881945
cuuucugaacuguaaugua

SEQ ID NO: 2083211 - RNA, 19 nt, Artificial Sequence
  Description of Artificial Sequence: Synthetic oligonucleotide
  Antisense strand to SEQ ID NO: 2083210
uacauuacaguucagaaag

SEQ ID NO: 2083212 - RNA, 19 nt, Artificial Sequence
  Description of Artificial Sequence: Synthetic oligonucleotide
  Sense strand starting at position 2407 of SEQ ID NO: 1881945
auaauauagugacugucau

SEQ ID NO: 2083213 - RNA, 19 nt, Artificial Sequence
  Description of Artificial Sequence: Synthetic oligonucleotide
  Antisense strand to SEQ ID NO: 2083212
augacagucacuauauuau

SEQ ID NO: 2083214 - RNA, 19 nt, Artificial Sequence
  Description of Artificial Sequence: Synthetic oligonucleotide
  Sense strand starting at position 2413 of SEQ ID NO: 1881945
uagugacugucauuggaag

SEQ ID NO: 2083215 - RNA, 19 nt, Artificial Sequence
  Description of Artificial Sequence: Synthetic oligonucleotide
  Antisense strand to SEQ ID NO: 2083214
cuuccaaugacagucacua

SEQ ID NO: 2083216 - RNA, 19 nt, Artificial Sequence
  Description of Artificial Sequence: Synthetic oligonucleotide
  Sense strand starting at position 2414 of SEQ ID NO: 1881945
agugacugucauuggaaga

SEQ ID NO: 2083217 - RNA, 19 nt, Artificial Sequence
  Description of Artificial Sequence: Synthetic oligonucleotide
  Antisense strand to SEQ ID NO: 2083216
ucuuccaaugacagucacu

SEQ ID NO: 2083218 - RNA, 19 nt, Artificial Sequence
  Description of Artificial Sequence: Synthetic oligonucleotide
  Sense strand starting at position 2415 of SEQ ID NO: 1881945
gugacugucauuggaagaa

SEQ ID NO: 2083219 - RNA, 19 nt, Artificial Sequence
  Description of Artificial Sequence: Synthetic oligonucleotide
  Antisense strand to SEQ ID NO: 2083218
uucuuccaaugacagucac

SEQ ID NO: 2083220 - RNA, 19 nt, Artificial Sequence
  Description of Artificial Sequence: Synthetic oligonucleotide
  Sense strand starting at position 2438 of SEQ ID NO: 1881945
augaaacaguaguuuagau

SEQ ID NO: 2083221 - RNA, 19 nt, Artificial Sequence
  Description of Artificial Sequence: Synthetic oligonucleotide
  Antisense strand to SEQ ID NO: 2083220
aucuaaacuacuguuucau

SEQ ID NO: 2083222 - RNA, 19 nt, Artificial Sequence
  Description of Artificial Sequence: Synthetic oligonucleotide
  Sense strand starting at position 2679 of SEQ ID NO: 1881945
aaguuauuauagguacaag

SEQ ID NO: 2083223 - RNA, 19 nt, Artificial Sequence
  Description of Artificial Sequence: Synthetic oligonucleotide
  Antisense strand to SEQ ID NO: 2083222
cuuguaccuauaauaacuu

SEQ ID NO: 2083224 - RNA, 19 nt, Artificial Sequence
  Description of Artificial Sequence: Synthetic oligonucleotide
  Sense strand starting at position 2706 of SEQ ID NO: 1881945
accucuccugaaugagaau

SEQ ID NO: 2083225 - RNA, 19 nt, Artificial Sequence
  Description of Artificial Sequence: Synthetic oligonucleotide
  Antisense strand to SEQ ID NO: 2083224
auucucauucaggagaggu

SEQ ID NO: 2083226 - RNA, 19 nt, Artificial Sequence
  Description of Artificial Sequence: Synthetic oligonucleotide
  Sense strand starting at position 2864 of SEQ ID NO: 1881945
ucaaguccucuguauaaug

SEQ ID NO: 2083227 - RNA, 19 nt, Artificial Sequence
  Description of Artificial Sequence: Synthetic oligonucleotide
  Antisense strand to SEQ ID NO: 2083226
cauuauacagaggacuuga

SEQ ID NO: 2083228 - RNA, 19 nt, Artificial Sequence
  Description of Artificial Sequence: Synthetic oligonucleotide
  Sense strand starting at position 2871 of SEQ ID NO: 1881945
cucuguauaaugcagggaa

SEQ ID NO: 2083229 - RNA, 19 nt, Artificial Sequence
  Description of Artificial Sequence: Synthetic oligonucleotide
  Antisense strand to SEQ ID NO: 2083228
uucccugcauuauacagag

SEQ ID NO: 2083230 - RNA, 19 nt, Artificial Sequence
  Description of Artificial Sequence: Synthetic oligonucleotide
  Sense strand starting at position 2873 of SEQ ID NO: 1881945
cuguauaaugcagggaaca

SEQ ID NO: 2083231 - RNA, 19 nt, Artificial Sequence
  Description of Artificial Sequence: Synthetic oligonucleotide
  Antisense strand to SEQ ID NO: 2083230
uguucccugcauuauacag

SEQ ID NO: 2083232 - RNA, 19 nt, Artificial Sequence
  Description of Artificial Sequence: Synthetic oligonucleotide
  Sense strand starting at position 3136 of SEQ ID NO: 1881945
gcaugagaagccuacuuug

SEQ ID NO: 2083233 - RNA, 19 nt, Artificial Sequence
  Description of Artificial Sequence: Synthetic oligonucleotide
  Antisense strand to SEQ ID NO: 2083232
caaaguaggcuucucaugc

SEQ ID NO: 2083234 - RNA, 19 nt, Artificial Sequence
  Description of Artificial Sequence: Synthetic oligonucleotide
  Sense strand starting at position 3199 of SEQ ID NO: 1881945
caacuuuccuagguggaaa

SEQ ID NO: 2083235 - RNA, 19 nt, Artificial Sequence
  Description of Artificial Sequence: Synthetic oligonucleotide
  Antisense strand to SEQ ID NO: 2083234
uuuccaccuaggaaaguug

SEQ ID NO: 2083236 - RNA, 19 nt, Artificial Sequence
  Description of Artificial Sequence: Synthetic oligonucleotide
  Sense strand starting at position 3579 of SEQ ID NO: 1881945
ccaggcauugucuauaucu

SEQ ID NO: 2083237 - RNA, 19 nt, Artificial Sequence
  Description of Artificial Sequence: Synthetic oligonucleotide
  Antisense strand to SEQ ID NO: 2083236
agauauagacaaugccugg

SEQ ID NO: 2083238 - RNA, 19 nt, Artificial Sequence
  Description of Artificial Sequence: Synthetic oligonucleotide
  Sense strand starting at position 3581 of SEQ ID NO: 1881945
aggcauugucuauaucuaa

SEQ ID NO: 2083239 - RNA, 19 nt, Artificial Sequence
  Description of Artificial Sequence: Synthetic oligonucleotide
  Antisense strand to SEQ ID NO: 2083238
uuagauauagacaaugccu

SEQ ID NO: 2083240 - RNA, 19 nt, Artificial Sequence
  Description of Artificial Sequence: Synthetic oligonucleotide
  Sense strand starting at position 3666 of SEQ ID NO: 1881945
ggaacuguuugaucacaaa

SEQ ID NO: 2083241 - RNA, 19 nt, Artificial Sequence
  Description of Artificial Sequence: Synthetic oligonucleotide
  Antisense strand to SEQ ID NO: 2083240
uuugugaucaaacaguucc

SEQ ID NO: 2083242 - RNA, 19 nt, Artificial Sequence
  Description of Artificial Sequence: Synthetic oligonucleotide
  Sense strand starting at position 3782 of SEQ ID NO: 1881945
gguucuugcccucauagaa

SEQ ID NO: 2083243 - RNA, 19 nt, Artificial Sequence
  Description of Artificial Sequence: Synthetic oligonucleotide
  Antisense strand to SEQ ID NO: 2083242
uucuaugagggcaagaacc

SEQ ID NO: 2083244 - RNA, 19 nt, Artificial Sequence
  Description of Artificial Sequence: Synthetic oligonucleotide
  Sense strand starting at position 48 of SEQ ID NO: 1881946
ccugguuuaguuuguggaa

SEQ ID NO: 2083245 - RNA, 19 nt, Artificial Sequence
  Description of Artificial Sequence: Synthetic oligonucleotide
  Antisense strand to SEQ ID NO: 2083244
uuccacaaacuaaaccagg

SEQ ID NO: 2083246 - RNA, 19 nt, Artificial Sequence
  Description of Artificial Sequence: Synthetic oligonucleotide
  Sense strand starting at position 60 of SEQ ID NO: 1881946
uguggaacgugcucuaauc

SEQ ID NO: 2083247 - RNA, 19 nt, Artificial Sequence
  Description of Artificial Sequence: Synthetic oligonucleotide
  Antisense strand to SEQ ID NO: 2083246
gauuagagcacguuccaca

SEQ ID NO: 2083248 - RNA, 19 nt, Artificial Sequence
  Description of Artificial Sequence: Synthetic oligonucleotide
  Sense strand starting at position 70 of SEQ ID NO: 1881946
gcucuaauccgucagcaca

SEQ ID NO: 2083249 - RNA, 19 nt, Artificial Sequence
  Description of Artificial Sequence: Synthetic oligonucleotide
  Antisense strand to SEQ ID NO: 2083248
ugugcugacggauuagagc

SEQ ID NO: 2083250 - RNA, 19 nt, Artificial Sequence
  Description of Artificial Sequence: Synthetic oligonucleotide
  Sense strand starting at position 200 of SEQ ID NO: 1881946
aaaugaauuugagagucua

SEQ ID NO: 2083251 - RNA, 19 nt, Artificial Sequence
  Description of Artificial Sequence: Synthetic oligonucleotide
  Antisense strand to SEQ ID NO: 2083250
uagacucucaaauucauuu

SEQ ID NO: 2083252 - RNA, 19 nt, Artificial Sequence
  Description of Artificial Sequence: Synthetic oligonucleotide
  Sense strand starting at position 234 of SEQ ID NO: 1881946
acauaauuugccgggugca

SEQ ID NO: 2083253 - RNA, 19 nt, Artificial Sequence
  Description of Artificial Sequence: Synthetic oligonucleotide
  Antisense strand to SEQ ID NO: 2083252
ugcacccggcaaauuaugu

SEQ ID NO: 2083254 - RNA, 19 nt, Artificial Sequence
  Description of Artificial Sequence: Synthetic oligonucleotide
  Sense strand starting at position 591 of SEQ ID NO: 1881946
gcagaucaaggcuaucaca

SEQ ID NO: 2083255 - RNA, 19 nt, Artificial Sequence
  Description of Artificial Sequence: Synthetic oligonucleotide
  Antisense strand to SEQ ID NO: 2083254
ugugauagccuugaucugc

SEQ ID NO: 2083256 - RNA, 19 nt, Artificial Sequence
  Description of Artificial Sequence: Synthetic oligonucleotide
  Sense strand starting at position 816 of SEQ ID NO: 1881946
gucccugucgcacacaaua

SEQ ID NO: 2083257 - RNA, 19 nt, Artificial Sequence
  Description of Artificial Sequence: Synthetic oligonucleotide
  Antisense strand to SEQ ID NO: 2083256
uauugugugcgacagggac

SEQ ID NO: 2083258 - RNA, 19 nt, Artificial Sequence
  Description of Artificial Sequence: Synthetic oligonucleotide
  Sense strand starting at position 873 of SEQ ID NO: 1881946
uagaaauggcuguaacugu

SEQ ID NO: 2083259 - RNA, 19 nt, Artificial Sequence
  Description of Artificial Sequence: Synthetic oligonucleotide
  Antisense strand to SEQ ID NO: 2083258
acaguuacagccauuucua

SEQ ID NO: 2083260 - RNA, 19 nt, Artificial Sequence
  Description of Artificial Sequence: Synthetic oligonucleotide
  Sense strand starting at position 880 of SEQ ID NO: 1881946
ggcuguaacugugcagaga

SEQ ID NO: 2083261 - RNA, 19 nt, Artificial Sequence
  Description of Artificial Sequence: Synthetic oligonucleotide
  Antisense strand to SEQ ID NO: 2083260
ucucugcacaguuacagcc

SEQ ID NO: 2083262 - RNA, 19 nt, Artificial Sequence
  Description of Artificial Sequence: Synthetic oligonucleotide
  Sense strand starting at position 881 of SEQ ID NO: 1881946
gcuguaacugugcagagaa

SEQ ID NO: 2083263 - RNA, 19 nt, Artificial Sequence
  Description of Artificial Sequence: Synthetic oligonucleotide
  Antisense strand to SEQ ID NO: 2083262
uucucugcacaguuacagc

SEQ ID NO: 2083264 - RNA, 19 nt, Artificial Sequence
  Description of Artificial Sequence: Synthetic oligonucleotide
  Sense strand starting at position 954 of SEQ ID NO: 1881946
uggauacugugauaagaaa

SEQ ID NO: 2083265 - RNA, 19 nt, Artificial Sequence
  Description of Artificial Sequence: Synthetic oligonucleotide
  Antisense strand to SEQ ID NO: 2083264
uuucuuaucacaguaucca

SEQ ID NO: 2083266 - RNA, 19 nt, Artificial Sequence
  Description of Artificial Sequence: Synthetic oligonucleotide
  Sense strand starting at position 1076 of SEQ ID NO: 1881946
gcggcauuccgacacagga

SEQ ID NO: 2083267 - RNA, 19 nt, Artificial Sequence
  Description of Artificial Sequence: Synthetic oligonucleotide
  Antisense strand to SEQ ID NO: 2083266
uccugugucggaaugccgc

SEQ ID NO: 2083268 - RNA, 19 nt, Artificial Sequence
  Description of Artificial Sequence: Synthetic oligonucleotide
  Sense strand starting at position 1126 of SEQ ID NO: 1881946
gcuucuuccuuccugggaa

SEQ ID NO: 2083269 - RNA, 19 nt, Artificial Sequence
  Description of Artificial Sequence: Synthetic oligonucleotide
  Antisense strand to SEQ ID NO: 2083268
uucccaggaaggaagaagc

SEQ ID NO: 2083270 - RNA, 19 nt, Artificial Sequence
  Description of Artificial Sequence: Synthetic oligonucleotide
  Sense strand starting at position 1253 of SEQ ID NO: 1881946
ccaaguuuccuuuggcaaa

SEQ ID NO: 2083271 - RNA, 19 nt, Artificial Sequence
  Description of Artificial Sequence: Synthetic oligonucleotide
  Antisense strand to SEQ ID NO: 2083270
uuugccaaaggaaacuugg

SEQ ID NO: 2083272 - RNA, 19 nt, Artificial Sequence
  Description of Artificial Sequence: Synthetic oligonucleotide
  Sense strand starting at position 1678 of SEQ ID NO: 1881946
gacagagcaccuuaacagu

SEQ ID NO: 2083273 - RNA, 19 nt, Artificial Sequence
  Description of Artificial Sequence: Synthetic oligonucleotide
  Antisense strand to SEQ ID NO: 2083272
acuguuaaggugcucuguc

SEQ ID NO: 2083274 - RNA, 19 nt, Artificial Sequence
  Description of Artificial Sequence: Synthetic oligonucleotide
  Sense strand starting at position 1921 of SEQ ID NO: 1881946
ucuugagagccuuggaaau

SEQ ID NO: 2083275 - RNA, 19 nt, Artificial Sequence
  Description of Artificial Sequence: Synthetic oligonucleotide
  Antisense strand to SEQ ID NO: 2083274
auuuccaaggcucucaaga

SEQ ID NO: 2083276 - RNA, 19 nt, Artificial Sequence
  Description of Artificial Sequence: Synthetic oligonucleotide
  Sense strand starting at position 2086 of SEQ ID NO: 1881946
ccaggauguccuugcucuu

SEQ ID NO: 2083277 - RNA, 19 nt, Artificial Sequence
  Description of Artificial Sequence: Synthetic oligonucleotide
  Antisense strand to SEQ ID NO: 2083276
aagagcaaggacauccugg

SEQ ID NO: 2083278 - RNA, 19 nt, Artificial Sequence
  Description of Artificial Sequence: Synthetic oligonucleotide
  Sense strand starting at position 2172 of SEQ ID NO: 1881946
guuuguauacucugcacca

SEQ ID NO: 2083279 - RNA, 19 nt, Artificial Sequence
  Description of Artificial Sequence: Synthetic oligonucleotide
  Antisense strand to SEQ ID NO: 2083278
uggugcagaguauacaaac

SEQ ID NO: 2083280 - RNA, 19 nt, Artificial Sequence
  Description of Artificial Sequence: Synthetic oligonucleotide
  Sense strand starting at position 2257 of SEQ ID NO: 1881946
ggcagaaucguggacccaa

SEQ ID NO: 2083281 - RNA, 19 nt, Artificial Sequence
  Description of Artificial Sequence: Synthetic oligonucleotide
  Antisense strand to SEQ ID NO: 2083280
uuggguccacgauucugcc

SEQ ID NO: 2083282 - RNA, 19 nt, Artificial Sequence
  Description of Artificial Sequence: Synthetic oligonucleotide
  Sense strand starting at position 2394 of SEQ ID NO: 1881946
augagauaguaccucuugu

SEQ ID NO: 2083283 - RNA, 19 nt, Artificial Sequence
  Description of Artificial Sequence: Synthetic oligonucleotide
  Antisense strand to SEQ ID NO: 2083282
acaagagguacuaucucau

SEQ ID NO: 2083284 - RNA, 19 nt, Artificial Sequence
  Description of Artificial Sequence: Synthetic oligonucleotide
  Sense strand starting at position 2416 of SEQ ID NO: 1881946
ggcacaaggucucugaguu

SEQ ID NO: 2083285 - RNA, 19 nt, Artificial Sequence
  Description of Artificial Sequence: Synthetic oligonucleotide
  Antisense strand to SEQ ID NO: 2083284
aacucagagaccuugugcc

SEQ ID NO: 2083286 - RNA, 19 nt, Artificial Sequence
  Description of Artificial Sequence: Synthetic oligonucleotide
  Sense strand starting at position 2417 of SEQ ID NO: 1881946
gcacaaggucucugaguug

SEQ ID NO: 2083287 - RNA, 19 nt, Artificial Sequence
  Description of Artificial Sequence: Synthetic oligonucleotide
  Antisense strand to SEQ ID NO: 2083286
caacucagagaccuugugc

SEQ ID NO: 2083288 - RNA, 19 nt, Artificial Sequence
  Description of Artificial Sequence: Synthetic oligonucleotide
  Sense strand starting at position 2420 of SEQ ID NO: 1881946
caaggucucugaguugacu

SEQ ID NO: 2083289 - RNA, 19 nt, Artificial Sequence
  Description of Artificial Sequence: Synthetic oligonucleotide
  Antisense strand to SEQ ID NO: 2083288
agucaacucagagaccuug

SEQ ID NO: 2083290 - RNA, 19 nt, Artificial Sequence
  Description of Artificial Sequence: Synthetic oligonucleotide
  Sense strand starting at position 2547 of SEQ ID NO: 1881946
gcauuagccuuacucagua

SEQ ID NO: 2083291 - RNA, 19 nt, Artificial Sequence
  Description of Artificial Sequence: Synthetic oligonucleotide
  Antisense strand to SEQ ID NO: 2083290
uacugaguaaggcuaaugc

SEQ ID NO: 2083292 - RNA, 19 nt, Artificial Sequence
  Description of Artificial Sequence: Synthetic oligonucleotide
  Sense strand starting at position 2552 of SEQ ID NO: 1881946
agccuuacucaguaaggcu

SEQ ID NO: 2083293 - RNA, 19 nt, Artificial Sequence
  Description of Artificial Sequence: Synthetic oligonucleotide
  Antisense strand to SEQ ID NO: 2083292
agccuuacugaguaaggcu

SEQ ID NO: 2083294 - RNA, 19 nt, Artificial Sequence
  Description of Artificial Sequence: Synthetic oligonucleotide
  Sense strand starting at position 2591 of SEQ ID NO: 1881946
uccagucagcuuugaugau

SEQ ID NO: 2083295 - RNA, 19 nt, Artificial Sequence
  Description of Artificial Sequence: Synthetic oligonucleotide
  Antisense strand to SEQ ID NO: 2083294
aucaucaaagcugacugga

SEQ ID NO: 2083296 - RNA, 19 nt, Artificial Sequence
  Description of Artificial Sequence: Synthetic oligonucleotide
  Sense strand starting at position 2715 of SEQ ID NO: 1881946
ucacuuugggccugaaaug

SEQ ID NO: 2083297 - RNA, 19 nt, Artificial Sequence
  Description of Artificial Sequence: Synthetic oligonucleotide
  Antisense strand to SEQ ID NO: 2083296
cauuucaggcccaaaguga

SEQ ID NO: 2083298 - RNA, 19 nt, Artificial Sequence
  Description of Artificial Sequence: Synthetic oligonucleotide
  Sense strand starting at position 2793 of SEQ ID NO: 1881946
uugcuacaguguuuccaga

SEQ ID NO: 2083299 - RNA, 19 nt, Artificial Sequence
  Description of Artificial Sequence: Synthetic oligonucleotide
  Antisense strand to SEQ ID NO: 2083298
ucuggaaacacuguagcaa

SEQ ID NO: 2083300 - RNA, 19 nt, Artificial Sequence
  Description of Artificial Sequence: Synthetic oligonucleotide
  Sense strand starting at position 2795 of SEQ ID NO: 1881946
gcuacaguguuuccagaaa

SEQ ID NO: 2083301 - RNA, 19 nt, Artificial Sequence
  Description of Artificial Sequence: Synthetic oligonucleotide
  Antisense strand to SEQ ID NO: 2083300
uuucuggaaacacuguagc

SEQ ID NO: 2083302 - RNA, 19 nt, Artificial Sequence
  Description of Artificial Sequence: Synthetic oligonucleotide
  Sense strand starting at position 2818 of SEQ ID NO: 1881946
gaaguagcaucuucuuaga

SEQ ID NO: 2083303 - RNA, 19 nt, Artificial Sequence
  Description of Artificial Sequence: Synthetic oligonucleotide
  Antisense strand to SEQ ID NO: 2083302
ucuaagaagaugcuacuuc

SEQ ID NO: 2083304 - RNA, 19 nt, Artificial Sequence
  Description of Artificial Sequence: Synthetic oligonucleotide
  Sense strand starting at position 2820 of SEQ ID NO: 1881946
aguagcaucuucuuagaaa

SEQ ID NO: 2083305 - RNA, 19 nt, Artificial Sequence
  Description of Artificial Sequence: Synthetic oligonucleotide
  Antisense strand to SEQ ID NO: 2083304
uuucuaagaagaugcuacu

SEQ ID NO: 2083306 - RNA, 19 nt, Artificial Sequence
  Description of Artificial Sequence: Synthetic oligonucleotide
  Sense strand starting at position 3157 of SEQ ID NO: 1881946
aguucuagauaacauagaa

SEQ ID NO: 2083307 - RNA, 19 nt, Artificial Sequence
  Description of Artificial Sequence: Synthetic oligonucleotide
  Antisense strand to SEQ ID NO: 2083306
uucuauguuaucuagaacu

SEQ ID NO: 2083308 - RNA, 19 nt, Artificial Sequence
  Description of Artificial Sequence: Synthetic oligonucleotide
  Sense strand starting at position 3307 of SEQ ID NO: 1881946
agcauugcugauuaucaga

SEQ ID NO: 2083309 - RNA, 19 nt, Artificial Sequence
  Description of Artificial Sequence: Synthetic oligonucleotide
  Antisense strand to SEQ ID NO: 2083308
ucugauaaucagcaaugcu

SEQ ID NO: 2083310 - RNA, 19 nt, Artificial Sequence
  Description of Artificial Sequence: Synthetic oligonucleotide
  Sense strand starting at position 3309 of SEQ ID NO: 1881946
cauugcugauuaucagaga

SEQ ID NO: 2083311 - RNA, 19 nt, Artificial Sequence
  Description of Artificial Sequence: Synthetic oligonucleotide
  Antisense strand to SEQ ID NO: 2083310
ucucugauaaucagcaaug

SEQ ID NO: 2083312 - RNA, 19 nt, Artificial Sequence
  Description of Artificial Sequence: Synthetic oligonucleotide
  Sense strand starting at position 3651 of SEQ ID NO: 1881946
cuagguguccgucaaugga

SEQ ID NO: 2083313 - RNA, 19 nt, Artificial Sequence
  Description of Artificial Sequence: Synthetic oligonucleotide
  Antisense strand to SEQ ID NO: 2083312
uccauugacggacaccuag

SEQ ID NO: 2083314 - RNA, 19 nt, Artificial Sequence
  Description of Artificial Sequence: Synthetic oligonucleotide
  Sense strand starting at position 3654 of SEQ ID NO: 1881946
gguguccgucaauggaaga

SEQ ID NO: 2083315 - RNA, 19 nt, Artificial Sequence
  Description of Artificial Sequence: Synthetic oligonucleotide
  Antisense strand to SEQ ID NO: 2083314
ucuuccauugacggacacc

SEQ ID NO: 2083316 - RNA, 19 nt, Artificial Sequence
  Description of Artificial Sequence: Synthetic oligonucleotide
  Sense strand starting at position 3665 of SEQ ID NO: 1881946
auggaagacugguacauau

SEQ ID NO: 2083317 - RNA, 19 nt, Artificial Sequence
  Description of Artificial Sequence: Synthetic oligonucleotide
  Antisense strand to SEQ ID NO: 2083316
auauguaccagucuuccau

SEQ ID NO: 2083318 - RNA, 19 nt, Artificial Sequence
  Description of Artificial Sequence: Synthetic oligonucleotide
  Sense strand starting at position 3717 of SEQ ID NO: 1881946
aggaaaucauguccuuugu

SEQ ID NO: 2083319 - RNA, 19 nt, Artificial Sequence
  Description of Artificial Sequence: Synthetic oligonucleotide
  Antisense strand to SEQ ID NO: 2083318
acaaaggacaugauuuccu

SEQ ID NO: 2083320 - RNA, 19 nt, Artificial Sequence
  Description of Artificial Sequence: Synthetic oligonucleotide
  Sense strand starting at position 3829 of SEQ ID NO: 1881946
gcuacauauuagguacaca

SEQ ID NO: 2083321 - RNA, 19 nt, Artificial Sequence
  Description of Artificial Sequence: Synthetic oligonucleotide
  Antisense strand to SEQ ID NO: 2083320
uguguaccuaauauguagc

SEQ ID NO: 2083322 - RNA, 19 nt, Artificial Sequence
  Description of Artificial Sequence: Synthetic oligonucleotide
  Sense strand starting at position 3969 of SEQ ID NO: 1881946
gcaucacauguauaucaca

SEQ ID NO: 2083323 - RNA, 19 nt, Artificial Sequence
  Description of Artificial Sequence: Synthetic oligonucleotide
  Antisense strand to SEQ ID NO: 2083322
ugugauauacaugugaugc

SEQ ID NO: 2083324 - RNA, 19 nt, Artificial Sequence
  Description of Artificial Sequence: Synthetic oligonucleotide
  Sense strand starting at position 195 of SEQ ID NO: 1881947
gggcgguuggaguaagaca

SEQ ID NO: 2083325 - RNA, 19 nt, Artificial Sequence
  Description of Artificial Sequence: Synthetic oligonucleotide
  Antisense strand to SEQ ID NO: 2083324
ugucuuacuccaaccgccc

SEQ ID NO: 2083326 - RNA, 19 nt, Artificial Sequence
  Description of Artificial Sequence: Synthetic oligonucleotide
  Sense strand starting at position 308 of SEQ ID NO: 1881947
cugaaacaguugguaagua

SEQ ID NO: 2083327 - RNA, 19 nt, Artificial Sequence
  Description of Artificial Sequence: Synthetic oligonucleotide
  Antisense strand to SEQ ID NO: 2083326
uacuuaccaacuguuucag

SEQ ID NO: 2083328 - RNA, 19 nt, Artificial Sequence
  Description of Artificial Sequence: Synthetic oligonucleotide
  Sense strand starting at position 317 of SEQ ID NO: 1881947
uugguaaguacauggagaa

SEQ ID NO: 2083329 - RNA, 19 nt, Artificial Sequence
  Description of Artificial Sequence: Synthetic oligonucleotide
  Antisense strand to SEQ ID NO: 2083328
uucuccauguacuuaccaa

SEQ ID NO: 2083330 - RNA, 19 nt, Artificial Sequence
  Description of Artificial Sequence: Synthetic oligonucleotide
  Sense strand starting at position 318 of SEQ ID NO: 1881947
ugguaaguacauggagaau

SEQ ID NO: 2083331 - RNA, 19 nt, Artificial Sequence
  Description of Artificial Sequence: Synthetic oligonucleotide
  Antisense strand to SEQ ID NO: 2083330
auucuccauguacuuacca

SEQ ID NO: 2083332 - RNA, 19 nt, Artificial Sequence
  Description of Artificial Sequence: Synthetic oligonucleotide
  Sense strand starting at position 330 of SEQ ID NO: 1881947
ggagaauaacaguguagug

SEQ ID NO: 2083333 - RNA, 19 nt, Artificial Sequence
  Description of Artificial Sequence: Synthetic oligonucleotide
  Antisense strand to SEQ ID NO: 2083332
cacuacacuguuauucucc

SEQ ID NO: 2083334 - RNA, 19 nt, Artificial Sequence
  Description of Artificial Sequence: Synthetic oligonucleotide
  Sense strand starting at position 366 of SEQ ID NO: 1881947
ggcacuuggcaggaugaau

SEQ ID NO: 2083335 - RNA, 19 nt, Artificial Sequence
  Description of Artificial Sequence: Synthetic oligonucleotide
  Antisense strand to SEQ ID NO: 2083334
auucauccugccaagugcc

SEQ ID NO: 2083336 - RNA, 19 nt, Artificial Sequence
  Description of Artificial Sequence: Synthetic oligonucleotide
  Sense strand starting at position 417 of SEQ ID NO: 1881947
ggaggauauaucugcucau

SEQ ID NO: 2083337 - RNA, 19 nt, Artificial Sequence
  Description of Artificial Sequence: Synthetic oligonucleotide
  Antisense strand to SEQ ID NO: 2083336
augagcagauauauccucc

SEQ ID NO: 2083338 - RNA, 19 nt, Artificial Sequence
  Description of Artificial Sequence: Synthetic oligonucleotide
  Sense strand starting at position 418 of SEQ ID NO: 1881947
gaggauauaucugcucauc

SEQ ID NO: 2083339 - RNA, 19 nt, Artificial Sequence
  Description of Artificial Sequence: Synthetic oligonucleotide
  Antisense strand to SEQ ID NO: 2083338
gaugagcagauauauccuc

SEQ ID NO: 2083340 - RNA, 19 nt, Artificial Sequence
  Description of Artificial Sequence: Synthetic oligonucleotide
  Sense strand starting at position 654 of SEQ ID NO: 1881947
gggcuaagaccuugacuau

SEQ ID NO: 2083341 - RNA, 19 nt, Artificial Sequence
  Description of Artificial Sequence: Synthetic oligonucleotide
  Antisense strand to SEQ ID NO: 2083340
auagucaaggucuuagccc

SEQ ID NO: 2083342 - RNA, 19 nt, Artificial Sequence
  Description of Artificial Sequence: Synthetic oligonucleotide
  Sense strand starting at position 655 of SEQ ID NO: 1881947
ggcuaagaccuugacuauc

SEQ ID NO: 2083343 - RNA, 19 nt, Artificial Sequence
  Description of Artificial Sequence: Synthetic oligonucleotide
  Antisense strand to SEQ ID NO: 2083342
gauagucaaggucuuagcc

SEQ ID NO: 2083344 - RNA, 19 nt, Artificial Sequence
  Description of Artificial Sequence: Synthetic oligonucleotide
  Sense strand starting at position 694 of SEQ ID NO: 1881947
auuccauauguguggagga

SEQ ID NO: 2083345 - RNA, 19 nt, Artificial Sequence
  Description of Artificial Sequence: Synthetic oligonucleotide
  Antisense strand to SEQ ID NO: 2083344
uccuccacacauauggaau

SEQ ID NO: 2083346 - RNA, 19 nt, Artificial Sequence
  Description of Artificial Sequence: Synthetic oligonucleotide
  Sense strand starting at position 793 of SEQ ID NO: 1881947
ucacgaguucuacaacauu

SEQ ID NO: 2083347 - RNA, 19 nt, Artificial Sequence
  Description of Artificial Sequence: Synthetic oligonucleotide
  Antisense strand to SEQ ID NO: 2083346
aauguuguagaacucguga

SEQ ID NO: 2083348 - RNA, 19 nt, Artificial Sequence
  Description of Artificial Sequence: Synthetic oligonucleotide
  Sense strand starting at position 826 of SEQ ID NO: 1881947
gcuguuauuugcuuaauag

SEQ ID NO: 2083349 - RNA, 19 nt, Artificial Sequence
  Description of Artificial Sequence: Synthetic oligonucleotide
  Antisense strand to SEQ ID NO: 2083348
cuauuaagcaaauaacagc

SEQ ID NO: 2083350 - RNA, 19 nt, Artificial Sequence
  Description of Artificial Sequence: Synthetic oligonucleotide
  Sense strand starting at position 876 of SEQ ID NO: 1881947
cauguucggcaauaauaua

SEQ ID NO: 2083351 - RNA, 19 nt, Artificial Sequence
  Description of Artificial Sequence: Synthetic oligonucleotide
  Antisense strand to SEQ ID NO: 2083350
uauauuauugccgaacaug

SEQ ID NO: 2083352 - RNA, 19 nt, Artificial Sequence
  Description of Artificial Sequence: Synthetic oligonucleotide
  Sense strand starting at position 883 of SEQ ID NO: 1881947
ggcaauaauauaggugaaa

SEQ ID NO: 2083353 - RNA, 19 nt, Artificial Sequence
  Description of Artificial Sequence: Synthetic oligonucleotide
  Antisense strand to SEQ ID NO: 2083352
uuucaccuauauuauugcc

SEQ ID NO: 2083354 - RNA, 19 nt, Artificial Sequence
  Description of Artificial Sequence: Synthetic oligonucleotide
  Sense strand starting at position 884 of SEQ ID NO: 1881947
gcaauaauauaggugaaau

SEQ ID NO: 2083355 - RNA, 19 nt, Artificial Sequence
  Description of Artificial Sequence: Synthetic oligonucleotide
  Antisense strand to SEQ ID NO: 2083354
auuucaccuauauuauugc

SEQ ID NO: 2083356 - RNA, 19 nt, Artificial Sequence
  Description of Artificial Sequence: Synthetic oligonucleotide
  Sense strand starting at position 894 of SEQ ID NO: 1881947
aggugaaauccuggguuau

SEQ ID NO: 2083357 - RNA, 19 nt, Artificial Sequence
  Description of Artificial Sequence: Synthetic oligonucleotide
  Antisense strand to SEQ ID NO: 2083356
auaacccaggauuucaccu

SEQ ID NO: 2083358 - RNA, 19 nt, Artificial Sequence
  Description of Artificial Sequence: Synthetic oligonucleotide
  Sense strand starting at position 895 of SEQ ID NO: 1881947
ggugaaauccuggguuaua

SEQ ID NO: 2083359 - RNA, 19 nt, Artificial Sequence
  Description of Artificial Sequence: Synthetic oligonucleotide
  Antisense strand to SEQ ID NO: 2083358
uauaacccaggauuucacc

SEQ ID NO: 2083360 - RNA, 19 nt, Artificial Sequence
  Description of Artificial Sequence: Synthetic oligonucleotide
  Sense strand starting at position 945 of SEQ ID NO: 1881947
ggaaauaucucaccuugca

SEQ ID NO: 2083361 - RNA, 19 nt, Artificial Sequence
  Description of Artificial Sequence: Synthetic oligonucleotide
  Antisense strand to SEQ ID NO: 2083360
ugcaaggugagauauuucc

SEQ ID NO: 2083362 - RNA, 19 nt, Artificial Sequence
  Description of Artificial Sequence: Synthetic oligonucleotide
  Sense strand starting at position 1115 of SEQ ID NO: 1881947
cuggcuuuagaaugacuau

SEQ ID NO: 2083363 - RNA, 19 nt, Artificial Sequence
  Description of Artificial Sequence: Synthetic oligonucleotide
  Antisense strand to SEQ ID NO: 2083362
auagucauucuaaagccag

SEQ ID NO: 2083364 - RNA, 19 nt, Artificial Sequence
  Description of Artificial Sequence: Synthetic oligonucleotide
  Sense strand starting at position 1118 of SEQ ID NO: 1881947
gcuuuagaaugacuauuag

SEQ ID NO: 2083365 - RNA, 19 nt, Artificial Sequence
  Description of Artificial Sequence: Synthetic oligonucleotide
  Antisense strand to SEQ ID NO: 2083364
cuaauagucauucuaaagc

SEQ ID NO: 2083366 - RNA, 19 nt, Artificial Sequence
  Description of Artificial Sequence: Synthetic oligonucleotide
  Sense strand starting at position 1127 of SEQ ID NO: 1881947
ugacuauuagacuggaagu

SEQ ID NO: 2083367 - RNA, 19 nt, Artificial Sequence
  Description of Artificial Sequence: Synthetic oligonucleotide
  Antisense strand to SEQ ID NO: 2083366
acuuccagucuaauaguca

SEQ ID NO: 2083368 - RNA, 19 nt, Artificial Sequence
  Description of Artificial Sequence: Synthetic oligonucleotide
  Sense strand starting at position 1156 of SEQ ID NO: 1881947
ccacaugcagaaugaugua

SEQ ID NO: 2083369 - RNA, 19 nt, Artificial Sequence
  Description of Artificial Sequence: Synthetic oligonucleotide
  Antisense strand to SEQ ID NO: 2083368
uacaucauucugcaugugg

SEQ ID NO: 2083370 - RNA, 19 nt, Artificial Sequence
  Description of Artificial Sequence: Synthetic oligonucleotide
  Sense strand starting at position 1161 of SEQ ID NO: 1881947
ugcagaaugauguacgaau

SEQ ID NO: 2083371 - RNA, 19 nt, Artificial Sequence
  Description of Artificial Sequence: Synthetic oligonucleotide
  Antisense strand to SEQ ID NO: 2083370
auucguacaucauucugca

SEQ ID NO: 2083372 - RNA, 19 nt, Artificial Sequence
  Description of Artificial Sequence: Synthetic oligonucleotide
  Sense strand starting at position 1163 of SEQ ID NO: 1881947
cagaaugauguacgaauua

SEQ ID NO: 2083373 - RNA, 19 nt, Artificial Sequence
  Description of Artificial Sequence: Synthetic oligonucleotide
  Antisense strand to SEQ ID NO: 2083372
uaauucguacaucauucug

SEQ ID NO: 2083374 - RNA, 19 nt, Artificial Sequence
  Description of Artificial Sequence: Synthetic oligonucleotide
  Sense strand starting at position 1168 of SEQ ID NO: 1881947
ugauguacgaauuaaguau

SEQ ID NO: 2083375 - RNA, 19 nt, Artificial Sequence
  Description of Artificial Sequence: Synthetic oligonucleotide
  Antisense strand to SEQ ID NO: 2083374
auacuuaauucguacauca

SEQ ID NO: 2083376 - RNA, 19 nt, Artificial Sequence
  Description of Artificial Sequence: Synthetic oligonucleotide
  Sense strand starting at position 1254 of SEQ ID NO: 1881947
aauugcuaggucugagaaa

SEQ ID NO: 2083377 - RNA, 19 nt, Artificial Sequence
  Description of Artificial Sequence: Synthetic oligonucleotide
  Antisense strand to SEQ ID NO: 2083376
uuucucagaccuagcaauu

SEQ ID NO: 2083378 - RNA, 19 nt, Artificial Sequence
  Description of Artificial Sequence: Synthetic oligonucleotide
  Sense strand starting at position 1750 of SEQ ID NO: 1881947
uguuucucugaagacuuaa

SEQ ID NO: 2083379 - RNA, 19 nt, Artificial Sequence
  Description of Artificial Sequence: Synthetic oligonucleotide
  Antisense strand to SEQ ID NO: 2083378
uuaagucuucagagaaaca

SEQ ID NO: 2083380 - RNA, 19 nt, Artificial Sequence
  Description of Artificial Sequence: Synthetic oligonucleotide
  Sense strand starting at position 1956 of SEQ ID NO: 1881947
ggcagagcucaucaauucu

SEQ ID NO: 2083381 - RNA, 19 nt, Artificial Sequence
  Description of Artificial Sequence: Synthetic oligonucleotide
  Antisense strand to SEQ ID NO: 2083380
agaauugaugagcucugcc

SEQ ID NO: 2083382 - RNA, 19 nt, Artificial Sequence
  Description of Artificial Sequence: Synthetic oligonucleotide
  Sense strand starting at position 2258 of SEQ ID NO: 1881947
uguuauccauuauuaagag

SEQ ID NO: 2083383 - RNA, 19 nt, Artificial Sequence
  Description of Artificial Sequence: Synthetic oligonucleotide
  Antisense strand to SEQ ID NO: 2083382
cucuuaauaauggauaaca

SEQ ID NO: 2083384 - RNA, 19 nt, Artificial Sequence
  Description of Artificial Sequence: Synthetic oligonucleotide
  Sense strand starting at position 2446 of SEQ ID NO: 1881947
ucgaaagauuuagaggaga

SEQ ID NO: 2083385 - RNA, 19 nt, Artificial Sequence
  Description of Artificial Sequence: Synthetic oligonucleotide
  Antisense strand to SEQ ID NO: 2083384
ucuccucuaaaucuuucga

SEQ ID NO: 2083386 - RNA, 19 nt, Artificial Sequence
  Description of Artificial Sequence: Synthetic oligonucleotide
  Sense strand starting at position 2737 of SEQ ID NO: 1881947
uagaauuaaucugucaggu

SEQ ID NO: 2083387 - RNA, 19 nt, Artificial Sequence
  Description of Artificial Sequence: Synthetic oligonucleotide
  Antisense strand to SEQ ID NO: 2083386
accugacagauuaauucua

SEQ ID NO: 2083388 - RNA, 19 nt, Artificial Sequence
  Description of Artificial Sequence: Synthetic oligonucleotide
  Sense strand starting at position 2977 of SEQ ID NO: 1881947
ucuaguaagaguugaagau

SEQ ID NO: 2083389 - RNA, 19 nt, Artificial Sequence
  Description of Artificial Sequence: Synthetic oligonucleotide
  Antisense strand to SEQ ID NO: 2083388
aucuucaacucuuacuaga

SEQ ID NO: 2083390 - RNA, 19 nt, Artificial Sequence
  Description of Artificial Sequence: Synthetic oligonucleotide
  Sense strand starting at position 3045 of SEQ ID NO: 1881947
aaacuuggucaguggauga

SEQ ID NO: 2083391 - RNA, 19 nt, Artificial Sequence
  Description of Artificial Sequence: Synthetic oligonucleotide
  Antisense strand to SEQ ID NO: 2083390
ucauccacugaccaaguuu

SEQ ID NO: 2083392 - RNA, 19 nt, Artificial Sequence
  Description of Artificial Sequence: Synthetic oligonucleotide
  Sense strand starting at position 3152 of SEQ ID NO: 1881947
gaaguuagaugacuuuaca

SEQ ID NO: 2083393 - RNA, 19 nt, Artificial Sequence
  Description of Artificial Sequence: Synthetic oligonucleotide
  Antisense strand to SEQ ID NO: 2083392
uguaaagucaucuaacuuc

SEQ ID NO: 2083394 - RNA, 19 nt, Artificial Sequence
  Description of Artificial Sequence: Synthetic oligonucleotide
  Sense strand starting at position 3187 of SEQ ID NO: 1881947
guugcuagcaacuaagaga

SEQ ID NO: 2083395 - RNA, 19 nt, Artificial Sequence
  Description of Artificial Sequence: Synthetic oligonucleotide
  Antisense strand to SEQ ID NO: 2083394
ucucuuaguugcuagcaac

SEQ ID NO: 2083396 - RNA, 19 nt, Artificial Sequence
  Description of Artificial Sequence: Synthetic oligonucleotide
  Sense strand starting at position 3470 of SEQ ID NO: 1881947
auaguaaguggucacugaa

SEQ ID NO: 2083397 - RNA, 19 nt, Artificial Sequence
  Description of Artificial Sequence: Synthetic oligonucleotide
  Antisense strand to SEQ ID NO: 2083396
uucagugaccacuuacuau

SEQ ID NO: 2083398 - RNA, 19 nt, Artificial Sequence
  Description of Artificial Sequence: Synthetic oligonucleotide
  Sense strand starting at position 3543 of SEQ ID NO: 1881947
aaguaacagcaagauugua

SEQ ID NO: 2083399 - RNA, 19 nt, Artificial Sequence
  Description of Artificial Sequence: Synthetic oligonucleotide
  Antisense strand to SEQ ID NO: 2083398
uacaaucuugcuguuacuu

SEQ ID NO: 2083400 - RNA, 19 nt, Artificial Sequence
  Description of Artificial Sequence: Synthetic oligonucleotide
  Sense strand starting at position 3603 of SEQ ID NO: 1881947
agauguuggccagaauauu

SEQ ID NO: 2083401 - RNA, 19 nt, Artificial Sequence
  Description of Artificial Sequence: Synthetic oligonucleotide
  Antisense strand to SEQ ID NO: 2083400
aauauucuggccaacaucu

SEQ ID NO: 2083402 - RNA, 19 nt, Artificial Sequence
  Description of Artificial Sequence: Synthetic oligonucleotide
  Sense strand starting at position 3961 of SEQ ID NO: 1881947
cuagcuugucaguugcauu

SEQ ID NO: 2083403 - RNA, 19 nt, Artificial Sequence
  Description of Artificial Sequence: Synthetic oligonucleotide
  Antisense strand to SEQ ID NO: 2083402
aaugcaacugacaagcuag

SEQ ID NO: 2083404 - RNA, 19 nt, Artificial Sequence
  Description of Artificial Sequence: Synthetic oligonucleotide
  Sense strand starting at position 406 of SEQ ID NO: 1881948
ugaagcauugccugaaaca

SEQ ID NO: 2083405 - RNA, 19 nt, Artificial Sequence
  Description of Artificial Sequence: Synthetic oligonucleotide
  Antisense strand to SEQ ID NO: 2083404
uguuucaggcaaugcuuca

SEQ ID NO: 2083406 - RNA, 19 nt, Artificial Sequence
  Description of Artificial Sequence: Synthetic oligonucleotide
  Sense strand starting at position 613 of SEQ ID NO: 1881948
aaugcaagguaucuaguau

SEQ ID NO: 2083407 - RNA, 19 nt, Artificial Sequence
  Description of Artificial Sequence: Synthetic oligonucleotide
  Antisense strand to SEQ ID NO: 2083406
auacuagauaccuugcauu

SEQ ID NO: 2083408 - RNA, 19 nt, Artificial Sequence
  Description of Artificial Sequence: Synthetic oligonucleotide
  Sense strand starting at position 625 of SEQ ID NO: 1881948
cuaguauaauaccuaaagu

SEQ ID NO: 2083409 - RNA, 19 nt, Artificial Sequence
  Description of Artificial Sequence: Synthetic oligonucleotide
  Antisense strand to SEQ ID NO: 2083408
acuuuagguauuauacuag

SEQ ID NO: 2083410 - RNA, 19 nt, Artificial Sequence
  Description of Artificial Sequence: Synthetic oligonucleotide
  Sense strand starting at position 734 of SEQ ID NO: 1881948
auaauuacugcaggucauu

SEQ ID NO: 2083411 - RNA, 19 nt, Artificial Sequence
  Description of Artificial Sequence: Synthetic oligonucleotide
  Antisense strand to SEQ ID NO: 2083410
aaugaccugcaguaauuau

SEQ ID NO: 2083412 - RNA, 19 nt, Artificial Sequence
  Description of Artificial Sequence: Synthetic oligonucleotide
  Sense strand starting at position 739 of SEQ ID NO: 1881948
uacugcaggucauuggaaa

SEQ ID NO: 2083413 - RNA, 19 nt, Artificial Sequence
  Description of Artificial Sequence: Synthetic oligonucleotide
  Antisense strand to SEQ ID NO: 2083412
uuuccaaugaccugcagua

SEQ ID NO: 2083414 - RNA, 19 nt, Artificial Sequence
  Description of Artificial Sequence: Synthetic oligonucleotide
  Sense strand starting at position 847 of SEQ ID NO: 1881948
agcaguaagacauggagua

SEQ ID NO: 2083415 - RNA, 19 nt, Artificial Sequence
  Description of Artificial Sequence: Synthetic oligonucleotide
  Antisense strand to SEQ ID NO: 2083414
uacuccaugucuuacugcu

SEQ ID NO: 2083416 - RNA, 19 nt, Artificial Sequence
  Description of Artificial Sequence: Synthetic oligonucleotide
  Sense strand starting at position 849 of SEQ ID NO: 1881948
caguaagacauggaguagu

SEQ ID NO: 2083417 - RNA, 19 nt, Artificial Sequence
  Description of Artificial Sequence: Synthetic oligonucleotide
  Antisense strand to SEQ ID NO: 2083416
acuacuccaugucuuacug

SEQ ID NO: 2083418 - RNA, 19 nt, Artificial Sequence
  Description of Artificial Sequence: Synthetic oligonucleotide
  Sense strand starting at position 860 of SEQ ID NO: 1881948
ggaguagucguuuaucuga

SEQ ID NO: 2083419 - RNA, 19 nt, Artificial Sequence
  Description of Artificial Sequence: Synthetic oligonucleotide
  Antisense strand to SEQ ID NO: 2083418
ucagauaaacgacuacucc

SEQ ID NO: 2083420 - RNA, 19 nt, Artificial Sequence
  Description of Artificial Sequence: Synthetic oligonucleotide
  Sense strand starting at position 906 of SEQ ID NO: 1881948
ugccuauuuacguaagguu

SEQ ID NO: 2083421 - RNA, 19 nt, Artificial Sequence
  Description of Artificial Sequence: Synthetic oligonucleotide
  Antisense strand to SEQ ID NO: 2083420
aaccuuacguaaauaggca

SEQ ID NO: 2083422 - RNA, 19 nt, Artificial Sequence
  Description of Artificial Sequence: Synthetic oligonucleotide
  Sense strand starting at position 957 of SEQ ID NO: 1881948
ccauaaugugaaugucuac

SEQ ID NO: 2083423 - RNA, 19 nt, Artificial Sequence
  Description of Artificial Sequence: Synthetic oligonucleotide
  Antisense strand to SEQ ID NO: 2083422
guagacauucacauuaugg

SEQ ID NO: 2083424 - RNA, 19 nt, Artificial Sequence
  Description of Artificial Sequence: Synthetic oligonucleotide
  Sense strand starting at position 1082 of SEQ ID NO: 1881948
cggaaagugaaauggcauu

SEQ ID NO: 2083425 - RNA, 19 nt, Artificial Sequence
  Description of Artificial Sequence: Synthetic oligonucleotide
  Antisense strand to SEQ ID NO: 2083424
aaugccauuucacuuuccg

SEQ ID NO: 2083426 - RNA, 19 nt, Artificial Sequence
  Description of Artificial Sequence: Synthetic oligonucleotide
  Sense strand starting at position 1374 of SEQ ID NO: 1881948
guuugugaaagucagaaag

SEQ ID NO: 2083427 - RNA, 19 nt, Artificial Sequence
  Description of Artificial Sequence: Synthetic oligonucleotide
  Antisense strand to SEQ ID NO: 2083426
cuuucugacuuucacaaac

SEQ ID NO: 2083428 - RNA, 19 nt, Artificial Sequence
  Description of Artificial Sequence: Synthetic oligonucleotide
  Sense strand starting at position 1608 of SEQ ID NO: 1881948
agcaaagucugaguacaac

SEQ ID NO: 2083429 - RNA, 19 nt, Artificial Sequence
  Description of Artificial Sequence: Synthetic oligonucleotide
  Antisense strand to SEQ ID NO: 2083428
guuguacucagacuuugcu

SEQ ID NO: 2083430 - RNA, 19 nt, Artificial Sequence
  Description of Artificial Sequence: Synthetic oligonucleotide
  Sense strand starting at position 1658 of SEQ ID NO: 1881948
cagggaauguaaguauuaa

SEQ ID NO: 2083431 - RNA, 19 nt, Artificial Sequence
  Description of Artificial Sequence: Synthetic oligonucleotide
  Antisense strand to SEQ ID NO: 2083430
uuaauacuuacauucccug

SEQ ID NO: 2083432 - RNA, 19 nt, Artificial Sequence
  Description of Artificial Sequence: Synthetic oligonucleotide
  Sense strand starting at position 1770 of SEQ ID NO: 1881948
ucccgaugcuggguaauuu

SEQ ID NO: 2083433 - RNA, 19 nt, Artificial Sequence
  Description of Artificial Sequence: Synthetic oligonucleotide
  Antisense strand to SEQ ID NO: 2083432
aaauuacccagcaucggga

SEQ ID NO: 2083434 - RNA, 19 nt, Artificial Sequence
  Description of Artificial Sequence: Synthetic oligonucleotide
  Sense strand starting at position 1868 of SEQ ID NO: 1881948
gaaggaaguuuaguugacu

SEQ ID NO: 2083435 - RNA, 19 nt, Artificial Sequence
  Description of Artificial Sequence: Synthetic oligonucleotide
  Antisense strand to SEQ ID NO: 2083434
agucaacuaaacuuccuuc

SEQ ID NO: 2083436 - RNA, 19 nt, Artificial Sequence
  Description of Artificial Sequence: Synthetic oligonucleotide
  Sense strand starting at position 2019 of SEQ ID NO: 1881948
gucagaucucgugagaaau

SEQ ID NO: 2083437 - RNA, 19 nt, Artificial Sequence
  Description of Artificial Sequence: Synthetic oligonucleotide
  Antisense strand to SEQ ID NO: 2083436
auuucucacgagaucugac

SEQ ID NO: 2083438 - RNA, 19 nt, Artificial Sequence
  Description of Artificial Sequence: Synthetic oligonucleotide
  Sense strand starting at position 2150 of SEQ ID NO: 1881948
agauuugaguaaggacaaa

SEQ ID NO: 2083439 - RNA, 19 nt, Artificial Sequence
  Description of Artificial Sequence: Synthetic oligonucleotide
  Antisense strand to SEQ ID NO: 2083438
uuuguccuuacucaaaucu

SEQ ID NO: 2083440 - RNA, 19 nt, Artificial Sequence
  Description of Artificial Sequence: Synthetic oligonucleotide
  Sense strand starting at position 2168 of SEQ ID NO: 1881948
agaaccaagccaugucaau

SEQ ID NO: 2083441 - RNA, 19 nt, Artificial Sequence
  Description of Artificial Sequence: Synthetic oligonucleotide
  Antisense strand to SEQ ID NO: 2083440
auugacauggcuugguucu

SEQ ID NO: 2083442 - RNA, 19 nt, Artificial Sequence
  Description of Artificial Sequence: Synthetic oligonucleotide
  Sense strand starting at position 2216 of SEQ ID NO: 1881948
cggaucgguauguauauca

SEQ ID NO: 2083443 - RNA, 19 nt, Artificial Sequence
  Description of Artificial Sequence: Synthetic oligonucleotide
  Antisense strand to SEQ ID NO: 2083442
ugauauacauaccgauccg

SEQ ID NO: 2083444 - RNA, 19 nt, Artificial Sequence
  Description of Artificial Sequence: Synthetic oligonucleotide
  Sense strand starting at position 2234 of SEQ ID NO: 1881948
auaaccucguguuuagaaa

SEQ ID NO: 2083445 - RNA, 19 nt, Artificial Sequence
  Description of Artificial Sequence: Synthetic oligonucleotide
  Antisense strand to SEQ ID NO: 2083444
uuucuaaacacgagguuau

SEQ ID NO: 2083446 - RNA, 19 nt, Artificial Sequence
  Description of Artificial Sequence: Synthetic oligonucleotide
  Sense strand starting at position 2263 of SEQ ID NO: 1881948
uauaaaucugcaugggaga

SEQ ID NO: 2083447 - RNA, 19 nt, Artificial Sequence
  Description of Artificial Sequence: Synthetic oligonucleotide
  Antisense strand to SEQ ID NO: 2083446
ucucccaugcagauuuaua

SEQ ID NO: 2083448 - RNA, 19 nt, Artificial Sequence
  Description of Artificial Sequence: Synthetic oligonucleotide
  Sense strand starting at position 2426 of SEQ ID NO: 1881948
uuuacaucagauuguagau

SEQ ID NO: 2083449 - RNA, 19 nt, Artificial Sequence
  Description of Artificial Sequence: Synthetic oligonucleotide
  Antisense strand to SEQ ID NO: 2083448
aucuacaaucugauguaaa

SEQ ID NO: 2083450 - RNA, 19 nt, Artificial Sequence
  Description of Artificial Sequence: Synthetic oligonucleotide
  Sense strand starting at position 2573 of SEQ ID NO: 1881948
gaauauggauuccuucguu

SEQ ID NO: 2083451 - RNA, 19 nt, Artificial Sequence
  Description of Artificial Sequence: Synthetic oligonucleotide
  Antisense strand to SEQ ID NO: 2083450
aacgaaggaauccauauuc

SEQ ID NO: 2083452 - RNA, 19 nt, Artificial Sequence
  Description of Artificial Sequence: Synthetic oligonucleotide
  Sense strand starting at position 2685 of SEQ ID NO: 1881948
ggccaucuugagggaaaug

SEQ ID NO: 2083453 - RNA, 19 nt, Artificial Sequence
  Description of Artificial Sequence: Synthetic oligonucleotide
  Antisense strand to SEQ ID NO: 2083452
cauuucccucaagauggcc

SEQ ID NO: 2083454 - RNA, 19 nt, Artificial Sequence
  Description of Artificial Sequence: Synthetic oligonucleotide
  Sense strand starting at position 2783 of SEQ ID NO: 1881948
ccagauauccgaugaaugc

SEQ ID NO: 2083455 - RNA, 19 nt, Artificial Sequence
  Description of Artificial Sequence: Synthetic oligonucleotide
  Antisense strand to SEQ ID NO: 2083454
gcauucaucggauaucugg

SEQ ID NO: 2083456 - RNA, 19 nt, Artificial Sequence
  Description of Artificial Sequence: Synthetic oligonucleotide
  Sense strand starting at position 2784 of SEQ ID NO: 1881948
cagauauccgaugaaugcu

SEQ ID NO: 2083457 - RNA, 19 nt, Artificial Sequence
  Description of Artificial Sequence: Synthetic oligonucleotide
  Antisense strand to SEQ ID NO: 2083456
agcauucaucggauaucug

SEQ ID NO: 2083458 - RNA, 19 nt, Artificial Sequence
  Description of Artificial Sequence: Synthetic oligonucleotide
  Sense strand starting at position 2787 of SEQ ID NO: 1881948
auauccgaugaaugcuaaa

SEQ ID NO: 2083459 - RNA, 19 nt, Artificial Sequence
  Description of Artificial Sequence: Synthetic oligonucleotide
  Antisense strand to SEQ ID NO: 2083458
uuuagcauucaucggauau

SEQ ID NO: 2083460 - RNA, 19 nt, Artificial Sequence
  Description of Artificial Sequence: Synthetic oligonucleotide
  Sense strand starting at position 2886 of SEQ ID NO: 1881948
uccaguaugccuuagagag

SEQ ID NO: 2083461 - RNA, 19 nt, Artificial Sequence
  Description of Artificial Sequence: Synthetic oligonucleotide
  Antisense strand to SEQ ID NO: 2083460
cucucuaaggcauacugga

SEQ ID NO: 2083462 - RNA, 19 nt, Artificial Sequence
  Description of Artificial Sequence: Synthetic oligonucleotide
  Sense strand starting at position 2970 of SEQ ID NO: 1881948
cucaacucugaaugguuua

SEQ ID NO: 2083463 - RNA, 19 nt, Artificial Sequence
  Description of Artificial Sequence: Synthetic oligonucleotide
  Antisense strand to SEQ ID NO: 2083462
uaaaccauucagaguugag

SEQ ID NO: 2083464 - RNA, 19 nt, Artificial Sequence
  Description of Artificial Sequence: Synthetic oligonucleotide
  Sense strand starting at position 2975 of SEQ ID NO: 1881948
cucugaaugguuuauguca

SEQ ID NO: 2083465 - RNA, 19 nt, Artificial Sequence
  Description of Artificial Sequence: Synthetic oligonucleotide
  Antisense strand to SEQ ID NO: 2083464
ugacauaaaccauucagag

SEQ ID NO: 2083466 - RNA, 19 nt, Artificial Sequence
  Description of Artificial Sequence: Synthetic oligonucleotide
  Sense strand starting at position 3001 of SEQ ID NO: 1881948
guaucaauggaacagugua

SEQ ID NO: 2083467 - RNA, 19 nt, Artificial Sequence
  Description of Artificial Sequence: Synthetic oligonucleotide
  Antisense strand to SEQ ID NO: 2083466
uacacuguuccauugauac

SEQ ID NO: 2083468 - RNA, 19 nt, Artificial Sequence
  Description of Artificial Sequence: Synthetic oligonucleotide
  Sense strand starting at position 3009 of SEQ ID NO: 1881948
ggaacaguguaaucauguc

SEQ ID NO: 2083469 - RNA, 19 nt, Artificial Sequence
  Description of Artificial Sequence: Synthetic oligonucleotide
  Antisense strand to SEQ ID NO: 2083468
gacaugauuacacuguucc

SEQ ID NO: 2083470 - RNA, 19 nt, Artificial Sequence
  Description of Artificial Sequence: Synthetic oligonucleotide
  Sense strand starting at position 3050 of SEQ ID NO: 1881948
caggguauugcuuacaugu

SEQ ID NO: 2083471 - RNA, 19 nt, Artificial Sequence
  Description of Artificial Sequence: Synthetic oligonucleotide
  Antisense strand to SEQ ID NO: 2083470
acauguaagcaauacccug

SEQ ID NO: 2083472 - RNA, 19 nt, Artificial Sequence
  Description of Artificial Sequence: Synthetic oligonucleotide
  Sense strand starting at position 3186 of SEQ ID NO: 1881948
guauuaaacgucuagcaau

SEQ ID NO: 2083473 - RNA, 19 nt, Artificial Sequence
  Description of Artificial Sequence: Synthetic oligonucleotide
  Antisense strand to SEQ ID NO: 2083472
auugcuagacguuuaauac

SEQ ID NO: 2083474 - RNA, 19 nt, Artificial Sequence
  Description of Artificial Sequence: Synthetic oligonucleotide
  Sense strand starting at position 3353 of SEQ ID NO: 1881948
agugacuuugugugaauuu

SEQ ID NO: 2083475 - RNA, 19 nt, Artificial Sequence
  Description of Artificial Sequence: Synthetic oligonucleotide
  Antisense strand to SEQ ID NO: 2083474
aaauucacacaaagucacu

SEQ ID NO: 2083476 - RNA, 19 nt, Artificial Sequence
  Description of Artificial Sequence: Synthetic oligonucleotide
  Sense strand starting at position 3495 of SEQ ID NO: 1881948
ccaaucucuccggaucagu

SEQ ID NO: 2083477 - RNA, 19 nt, Artificial Sequence
  Description of Artificial Sequence: Synthetic oligonucleotide
  Antisense strand to SEQ ID NO: 2083476
acugauccggagagauugg

SEQ ID NO: 2083478 - RNA, 19 nt, Artificial Sequence
  Description of Artificial Sequence: Synthetic oligonucleotide
  Sense strand starting at position 3513 of SEQ ID NO: 1881948
ugaagacgugucagugugu

SEQ ID NO: 2083479 - RNA, 19 nt, Artificial Sequence
  Description of Artificial Sequence: Synthetic oligonucleotide
  Antisense strand to SEQ ID NO: 2083478
acacacugacacgucuuca

SEQ ID NO: 2083480 - RNA, 19 nt, Artificial Sequence
  Description of Artificial Sequence: Synthetic oligonucleotide
  Sense strand starting at position 3722 of SEQ ID NO: 1881948
ggaaauuaaugacagaaac

SEQ ID NO: 2083481 - RNA, 19 nt, Artificial Sequence
  Description of Artificial Sequence: Synthetic oligonucleotide
  Antisense strand to SEQ ID NO: 2083480
guuucugucauuaauuucc

SEQ ID NO: 2083482 - RNA, 19 nt, Artificial Sequence
  Description of Artificial Sequence: Synthetic oligonucleotide
  Sense strand starting at position 3915 of SEQ ID NO: 1881948
aagggaaacuguuccauuc

SEQ ID NO: 2083483 - RNA, 19 nt, Artificial Sequence
  Description of Artificial Sequence: Synthetic oligonucleotide
  Antisense strand to SEQ ID NO: 2083482
gaauggaacaguuucccuu

SEQ ID NO: 2083484 - RNA, 19 nt, Artificial Sequence
  Description of Artificial Sequence: Synthetic oligonucleotide
  Sense strand starting at position 66 of SEQ ID NO: 1881949
uggugagucacaugaacaa

SEQ ID NO: 2083485 - RNA, 19 nt, Artificial Sequence
  Description of Artificial Sequence: Synthetic oligonucleotide
  Antisense strand to SEQ ID NO: 2083484
uuguucaugugacucacca

SEQ ID NO: 2083486 - RNA, 19 nt, Artificial Sequence
  Description of Artificial Sequence: Synthetic oligonucleotide
  Sense strand starting at position 94 of SEQ ID NO: 1881949
gaggcaauuucccaaggga

SEQ ID NO: 2083487 - RNA, 19 nt, Artificial Sequence
  Description of Artificial Sequence: Synthetic oligonucleotide
  Antisense strand to SEQ ID NO: 2083486
ucccuugggaaauugccuc

SEQ ID NO: 2083488 - RNA, 19 nt, Artificial Sequence
  Description of Artificial Sequence: Synthetic oligonucleotide
  Sense strand starting at position 140 of SEQ ID NO: 1881949
uguccuccacccuggaaua

SEQ ID NO: 2083489 - RNA, 19 nt, Artificial Sequence
  Description of Artificial Sequence: Synthetic oligonucleotide
  Antisense strand to SEQ ID NO: 2083488
uauuccaggguggaggaca

SEQ ID NO: 2083490 - RNA, 19 nt, Artificial Sequence
  Description of Artificial Sequence: Synthetic oligonucleotide
  Sense strand starting at position 205 of SEQ ID NO: 1881949
ucaauauaguugcugggua

SEQ ID NO: 2083491 - RNA, 19 nt, Artificial Sequence
  Description of Artificial Sequence: Synthetic oligonucleotide
  Antisense strand to SEQ ID NO: 2083490
uacccagcaacuauauuga

SEQ ID NO: 2083492 - RNA, 19 nt, Artificial Sequence
  Description of Artificial Sequence: Synthetic oligonucleotide
  Sense strand starting at position 207 of SEQ ID NO: 1881949
aauauaguugcuggguaaa

SEQ ID NO: 2083493 - RNA, 19 nt, Artificial Sequence
  Description of Artificial Sequence: Synthetic oligonucleotide
  Antisense strand to SEQ ID NO: 2083492
uuuacccagcaacuauauu

SEQ ID NO: 2083494 - RNA, 19 nt, Artificial Sequence
  Description of Artificial Sequence: Synthetic oligonucleotide
  Sense strand starting at position 408 of SEQ ID NO: 1881949
aagugacuuugaguuuacu

SEQ ID NO: 2083495 - RNA, 19 nt, Artificial Sequence
  Description of Artificial Sequence: Synthetic oligonucleotide
  Antisense strand to SEQ ID NO: 2083494
aguaaacucaaagucacuu

SEQ ID NO: 2083496 - RNA, 19 nt, Artificial Sequence
  Description of Artificial Sequence: Synthetic oligonucleotide
  Sense strand starting at position 411 of SEQ ID NO: 1881949
ugacuuugaguuuacuuau

SEQ ID NO: 2083497 - RNA, 19 nt, Artificial Sequence
  Description of Artificial Sequence: Synthetic oligonucleotide
  Antisense strand to SEQ ID NO: 2083496
auaaguaaacucaaaguca

SEQ ID NO: 2083498 - RNA, 19 nt, Artificial Sequence
  Description of Artificial Sequence: Synthetic oligonucleotide
  Sense strand starting at position 446 of SEQ ID NO: 1881949
ugucuuucuccuuacugga

SEQ ID NO: 2083499 - RNA, 19 nt, Artificial Sequence
  Description of Artificial Sequence: Synthetic oligonucleotide
  Antisense strand to SEQ ID NO: 2083498
uccaguaaggagaaagaca

SEQ ID NO: 2083500 - RNA, 19 nt, Artificial Sequence
  Description of Artificial Sequence: Synthetic oligonucleotide
  Sense strand starting at position 546 of SEQ ID NO: 1881949
uuuguugaccuauggaaug

SEQ ID NO: 2083501 - RNA, 19 nt, Artificial Sequence
  Description of Artificial Sequence: Synthetic oligonucleotide
  Antisense strand to SEQ ID NO: 2083500
cauuccauaggucaacaaa

SEQ ID NO: 2083502 - RNA, 19 nt, Artificial Sequence
  Description of Artificial Sequence: Synthetic oligonucleotide
  Sense strand starting at position 548 of SEQ ID NO: 1881949
uguugaccuauggaauguu

SEQ ID NO: 2083503 - RNA, 19 nt, Artificial Sequence
  Description of Artificial Sequence: Synthetic oligonucleotide
  Antisense strand to SEQ ID NO: 2083502
aacauuccauaggucaaca

SEQ ID NO: 2083504 - RNA, 19 nt, Artificial Sequence
  Description of Artificial Sequence: Synthetic oligonucleotide
  Sense strand starting at position 643 of SEQ ID NO: 1881949
ggugccacucacuaagaga

SEQ ID NO: 2083505 - RNA, 19 nt, Artificial Sequence
  Description of Artificial Sequence: Synthetic oligonucleotide
  Antisense strand to SEQ ID NO: 2083504
ucucuuagugaguggcacc

SEQ ID NO: 2083506 - RNA, 19 nt, Artificial Sequence
  Description of Artificial Sequence: Synthetic oligonucleotide
  Sense strand starting at position 680 of SEQ ID NO: 1881949
uaaguuuauggaugaaggu

SEQ ID NO: 2083507 - RNA, 19 nt, Artificial Sequence
  Description of Artificial Sequence: Synthetic oligonucleotide
  Antisense strand to SEQ ID NO: 2083506
accuucauccauaaacuua

SEQ ID NO: 2083508 - RNA, 19 nt, Artificial Sequence
  Description of Artificial Sequence: Synthetic oligonucleotide
  Sense strand starting at position 695 of SEQ ID NO: 1881949
agguuaugagauugucuga

SEQ ID NO: 2083509 - RNA, 19 nt, Artificial Sequence
  Description of Artificial Sequence: Synthetic oligonucleotide
  Antisense strand to SEQ ID NO: 2083508
ucagacaaucucauaaccu

SEQ ID NO: 2083510 - RNA, 19 nt, Artificial Sequence
  Description of Artificial Sequence: Synthetic oligonucleotide
  Sense strand starting at position 698 of SEQ ID NO: 1881949
uuaugagauugucugaaga

SEQ ID NO: 2083511 - RNA, 19 nt, Artificial Sequence
  Description of Artificial Sequence: Synthetic oligonucleotide
  Antisense strand to SEQ ID NO: 2083510
ucuucagacaaucucauaa

SEQ ID NO: 2083512 - RNA, 19 nt, Artificial Sequence
  Description of Artificial Sequence: Synthetic oligonucleotide
  Sense strand starting at position 1402 of SEQ ID NO: 1881949
aggugugugagauauaaac

SEQ ID NO: 2083513 - RNA, 19 nt, Artificial Sequence
  Description of Artificial Sequence: Synthetic oligonucleotide
  Antisense strand to SEQ ID NO: 2083512
guuuauaucucacacaccu

SEQ ID NO: 2083514 - RNA, 19 nt, Artificial Sequence
  Description of Artificial Sequence: Synthetic oligonucleotide
  Sense strand starting at position 1404 of SEQ ID NO: 1881949
gugugugagauauaaacug

SEQ ID NO: 2083515 - RNA, 19 nt, Artificial Sequence
  Description of Artificial Sequence: Synthetic oligonucleotide
  Antisense strand to SEQ ID NO: 2083514
caguuuauaucucacacac

SEQ ID NO: 2083516 - RNA, 19 nt, Artificial Sequence
  Description of Artificial Sequence: Synthetic oligonucleotide
  Sense strand starting at position 1438 of SEQ ID NO: 1881949
gcucacuuggcagaggauu

SEQ ID NO: 2083517 - RNA, 19 nt, Artificial Sequence
  Description of Artificial Sequence: Synthetic oligonucleotide
  Antisense strand to SEQ ID NO: 2083516
aauccucugccaagugagc

SEQ ID NO: 2083518 - RNA, 19 nt, Artificial Sequence
  Description of Artificial Sequence: Synthetic oligonucleotide
  Sense strand starting at position 1641 of SEQ ID NO: 1881949
ccuggauggcaaugacauu

SEQ ID NO: 2083519 - RNA, 19 nt, Artificial Sequence
  Description of Artificial Sequence: Synthetic oligonucleotide
  Antisense strand to SEQ ID NO: 2083518
aaugucauugccauccagg

SEQ ID NO: 2083520 - RNA, 19 nt, Artificial Sequence
  Description of Artificial Sequence: Synthetic oligonucleotide
  Sense strand starting at position 2059 of SEQ ID NO: 1881949
gcauaaagcuccuugacag

SEQ ID NO: 2083521 - RNA, 19 nt, Artificial Sequence
  Description of Artificial Sequence: Synthetic oligonucleotide
  Antisense strand to SEQ ID NO: 2083520
cugucaaggagcuuuaugc

SEQ ID NO: 2083522 - RNA, 19 nt, Artificial Sequence
  Description of Artificial Sequence: Synthetic oligonucleotide
  Sense strand starting at position 2131 of SEQ ID NO: 1881949
ggccauuagcaaggaguaa

SEQ ID NO: 2083523 - RNA, 19 nt, Artificial Sequence
  Description of Artificial Sequence: Synthetic oligonucleotide
  Antisense strand to SEQ ID NO: 2083522
uuacuccuugcuaauggcc

SEQ ID NO: 2083524 - RNA, 19 nt, Artificial Sequence
  Description of Artificial Sequence: Synthetic oligonucleotide
  Sense strand starting at position 2513 of SEQ ID NO: 1881949
agagguaucuuugcagaua

SEQ ID NO: 2083525 - RNA, 19 nt, Artificial Sequence
  Description of Artificial Sequence: Synthetic oligonucleotide
  Antisense strand to SEQ ID NO: 2083524
uaucugcaaagauaccucu

SEQ ID NO: 2083526 - RNA, 19 nt, Artificial Sequence
  Description of Artificial Sequence: Synthetic oligonucleotide
  Sense strand starting at position 2516 of SEQ ID NO: 1881949
gguaucuuugcagauaagc

SEQ ID NO: 2083527 - RNA, 19 nt, Artificial Sequence
  Description of Artificial Sequence: Synthetic oligonucleotide
  Antisense strand to SEQ ID NO: 2083526
gcuuaucugcaaagauacc

SEQ ID NO: 2083528 - RNA, 19 nt, Artificial Sequence
  Description of Artificial Sequence: Synthetic oligonucleotide
  Sense strand starting at position 2581 of SEQ ID NO: 1881949
gagagauacugggauacag

SEQ ID NO: 2083529 - RNA, 19 nt, Artificial Sequence
  Description of Artificial Sequence: Synthetic oligonucleotide
  Antisense strand to SEQ ID NO: 2083528
cuguaucccaguaucucuc

SEQ ID NO: 2083530 - RNA, 19 nt, Artificial Sequence
  Description of Artificial Sequence: Synthetic oligonucleotide
  Sense strand starting at position 2597 of SEQ ID NO: 1881949
cagagagaaugggaaucua

SEQ ID NO: 2083531 - RNA, 19 nt, Artificial Sequence
  Description of Artificial Sequence: Synthetic oligonucleotide
  Antisense strand to SEQ ID NO: 2083530
uagauucccauucucucug

SEQ ID NO: 2083532 - RNA, 19 nt, Artificial Sequence
  Description of Artificial Sequence: Synthetic oligonucleotide
  Sense strand starting at position 2741 of SEQ ID NO: 1881949
cauucugcucaagauggua

SEQ ID NO: 2083533 - RNA, 19 nt, Artificial Sequence
  Description of Artificial Sequence: Synthetic oligonucleotide
  Antisense strand to SEQ ID NO: 2083532
uaccaucuugagcagaaug

SEQ ID NO: 2083534 - RNA, 19 nt, Artificial Sequence
  Description of Artificial Sequence: Synthetic oligonucleotide
  Sense strand starting at position 2756 of SEQ ID NO: 1881949
gguagaagugcugggagaa

SEQ ID NO: 2083535 - RNA, 19 nt, Artificial Sequence
  Description of Artificial Sequence: Synthetic oligonucleotide
  Antisense strand to SEQ ID NO: 2083534
uucucccagcacuucuacc

SEQ ID NO: 2083536 - RNA, 19 nt, Artificial Sequence
  Description of Artificial Sequence: Synthetic oligonucleotide
  Sense strand starting at position 2757 of SEQ ID NO: 1881949
guagaagugcugggagaaa

SEQ ID NO: 2083537 - RNA, 19 nt, Artificial Sequence
  Description of Artificial Sequence: Synthetic oligonucleotide
  Antisense strand to SEQ ID NO: 2083536
uuucucccagcacuucuac

SEQ ID NO: 2083538 - RNA, 19 nt, Artificial Sequence
  Description of Artificial Sequence: Synthetic oligonucleotide
  Sense strand starting at position 2794 of SEQ ID NO: 1881949
ucaguuccacuuuggagaa

SEQ ID NO: 2083539 - RNA, 19 nt, Artificial Sequence
  Description of Artificial Sequence: Synthetic oligonucleotide
  Antisense strand to SEQ ID NO: 2083538
uucuccaaaguggaacuga

SEQ ID NO: 2083540 - RNA, 19 nt, Artificial Sequence
  Description of Artificial Sequence: Synthetic oligonucleotide
  Sense strand starting at position 3030 of SEQ ID NO: 1881949
uguauacagugguucuuaa

SEQ ID NO: 2083541 - RNA, 19 nt, Artificial Sequence
  Description of Artificial Sequence: Synthetic oligonucleotide
  Antisense strand to SEQ ID NO: 2083540
uuaagaaccacuguauaca

SEQ ID NO: 2083542 - RNA, 19 nt, Artificial Sequence
  Description of Artificial Sequence: Synthetic oligonucleotide
  Sense strand starting at position 3086 of SEQ ID NO: 1881949
ugacaaugucuggagguau

SEQ ID NO: 2083543 - RNA, 19 nt, Artificial Sequence
  Description of Artificial Sequence: Synthetic oligonucleotide
  Antisense strand to SEQ ID NO: 2083542
auaccuccagacauuguca

SEQ ID NO: 2083544 - RNA, 19 nt, Artificial Sequence
  Description of Artificial Sequence: Synthetic oligonucleotide
  Sense strand starting at position 3100 of SEQ ID NO: 1881949
gguauauuugguuguuaca

SEQ ID NO: 2083545 - RNA, 19 nt, Artificial Sequence
  Description of Artificial Sequence: Synthetic oligonucleotide
  Antisense strand to SEQ ID NO: 2083544
uguaacaaccaaauauacc

SEQ ID NO: 2083546 - RNA, 19 nt, Artificial Sequence
  Description of Artificial Sequence: Synthetic oligonucleotide
  Sense strand starting at position 3280 of SEQ ID NO: 1881949
gguaauacacuauagguuu

SEQ ID NO: 2083547 - RNA, 19 nt, Artificial Sequence
  Description of Artificial Sequence: Synthetic oligonucleotide
  Antisense strand to SEQ ID NO: 2083546
aaaccuauaguguauuacc

SEQ ID NO: 2083548 - RNA, 19 nt, Artificial Sequence
  Description of Artificial Sequence: Synthetic oligonucleotide
  Sense strand starting at position 3445 of SEQ ID NO: 1881949
ggauaccucuuagccuaaa

SEQ ID NO: 2083549 - RNA, 19 nt, Artificial Sequence
  Description of Artificial Sequence: Synthetic oligonucleotide
  Antisense strand to SEQ ID NO: 2083548
uuuaggcuaagagguaucc

SEQ ID NO: 2083550 - RNA, 19 nt, Artificial Sequence
  Description of Artificial Sequence: Synthetic oligonucleotide
  Sense strand starting at position 3510 of SEQ ID NO: 1881949
gaaguuuauuucuagaaga

SEQ ID NO: 2083551 - RNA, 19 nt, Artificial Sequence
  Description of Artificial Sequence: Synthetic oligonucleotide
  Antisense strand to SEQ ID NO: 2083550
ucuucuagaaauaaacuuc

SEQ ID NO: 2083552 - RNA, 19 nt, Artificial Sequence
  Description of Artificial Sequence: Synthetic oligonucleotide
  Sense strand starting at position 3531 of SEQ ID NO: 1881949
uuuggagcacgugaucaaa

SEQ ID NO: 2083553 - RNA, 19 nt, Artificial Sequence
  Description of Artificial Sequence: Synthetic oligonucleotide
  Antisense strand to SEQ ID NO: 2083552
uuugaucacgugcuccaaa

SEQ ID NO: 2083554 - RNA, 19 nt, Artificial Sequence
  Description of Artificial Sequence: Synthetic oligonucleotide
  Sense strand starting at position 3534 of SEQ ID NO: 1881949
ggagcacgugaucaaauga

SEQ ID NO: 2083555 - RNA, 19 nt, Artificial Sequence
  Description of Artificial Sequence: Synthetic oligonucleotide
  Antisense strand to SEQ ID NO: 2083554
ucauuugaucacgugcucc

SEQ ID NO: 2083556 - RNA, 19 nt, Artificial Sequence
  Description of Artificial Sequence: Synthetic oligonucleotide
  Sense strand starting at position 3601 of SEQ ID NO: 1881949
cagucaggaucguucccaa

SEQ ID NO: 2083557 - RNA, 19 nt, Artificial Sequence
  Description of Artificial Sequence: Synthetic oligonucleotide
  Antisense strand to SEQ ID NO: 2083556
uugggaacgauccugacug

SEQ ID NO: 2083558 - RNA, 19 nt, Artificial Sequence
  Description of Artificial Sequence: Synthetic oligonucleotide
  Sense strand starting at position 3828 of SEQ ID NO: 1881949
cugaaaucaggacguacuu

SEQ ID NO: 2083559 - RNA, 19 nt, Artificial Sequence
  Description of Artificial Sequence: Synthetic oligonucleotide
  Antisense strand to SEQ ID NO: 2083558
aaguacguccugauuucag

SEQ ID NO: 2083560 - RNA, 19 nt, Artificial Sequence
  Description of Artificial Sequence: Synthetic oligonucleotide
  Sense strand starting at position 3839 of SEQ ID NO: 1881949
acguacuuaugaccaauaa

SEQ ID NO: 2083561 - RNA, 19 nt, Artificial Sequence
  Description of Artificial Sequence: Synthetic oligonucleotide
  Antisense strand to SEQ ID NO: 2083560
uuauuggucauaaguacgu

SEQ ID NO: 2083562 - RNA, 19 nt, Artificial Sequence
  Description of Artificial Sequence: Synthetic oligonucleotide
  Sense strand starting at position 3840 of SEQ ID NO: 1881949
cguacuuaugaccaauaau

SEQ ID NO: 2083563 - RNA, 19 nt, Artificial Sequence
  Description of Artificial Sequence: Synthetic oligonucleotide
  Antisense strand to SEQ ID NO: 2083562
auuauuggucauaaguacg

SEQ ID NO: 2083564 - RNA, 19 nt, Artificial Sequence
  Description of Artificial Sequence: Synthetic oligonucleotide
  Sense strand starting at position 117 of SEQ ID NO: 1881950
agauaaauuugaggacuga

SEQ ID NO: 2083565 - RNA, 19 nt, Artificial Sequence
  Description of Artificial Sequence: Synthetic oligonucleotide
  Antisense strand to SEQ ID NO: 2083564
ucaguccucaaauuuaucu

SEQ ID NO: 2083566 - RNA, 19 nt, Artificial Sequence
  Description of Artificial Sequence: Synthetic oligonucleotide
  Sense strand starting at position 212 of SEQ ID NO: 1881950
gaagaccauguaugucuaa

SEQ ID NO: 2083567 - RNA, 19 nt, Artificial Sequence
  Description of Artificial Sequence: Synthetic oligonucleotide
  Antisense strand to SEQ ID NO: 2083566
uuagacauacauggucuuc

SEQ ID NO: 2083568 - RNA, 19 nt, Artificial Sequence
  Description of Artificial Sequence: Synthetic oligonucleotide
  Sense strand starting at position 215 of SEQ ID NO: 1881950
gaccauguaugucuaauga

SEQ ID NO: 2083569 - RNA, 19 nt, Artificial Sequence
  Description of Artificial Sequence: Synthetic oligonucleotide
  Antisense strand to SEQ ID NO: 2083568
ucauuagacauacaugguc

SEQ ID NO: 2083570 - RNA, 19 nt, Artificial Sequence
  Description of Artificial Sequence: Synthetic oligonucleotide
  Sense strand starting at position 568 of SEQ ID NO: 1881950
cugagaccuuacucagauc

SEQ ID NO: 2083571 - RNA, 19 nt, Artificial Sequence
  Description of Artificial Sequence: Synthetic oligonucleotide
  Antisense strand to SEQ ID NO: 2083570
gaucugaguaaggucucag

SEQ ID NO: 2083572 - RNA, 19 nt, Artificial Sequence
  Description of Artificial Sequence: Synthetic oligonucleotide
  Sense strand starting at position 676 of SEQ ID NO: 1881950
cuuccaucugugggacaca

SEQ ID NO: 2083573 - RNA, 19 nt, Artificial Sequence
  Description of Artificial Sequence: Synthetic oligonucleotide
  Antisense strand to SEQ ID NO: 2083572
ugugucccacagauggaag

SEQ ID NO: 2083574 - RNA, 19 nt, Artificial Sequence
  Description of Artificial Sequence: Synthetic oligonucleotide
  Sense strand starting at position 759 of SEQ ID NO: 1881950
gaaaguagauagcuccauu

SEQ ID NO: 2083575 - RNA, 19 nt, Artificial Sequence
  Description of Artificial Sequence: Synthetic oligonucleotide
  Antisense strand to SEQ ID NO: 2083574
aauggagcuaucuacuuuc

SEQ ID NO: 2083576 - RNA, 19 nt, Artificial Sequence
  Description of Artificial Sequence: Synthetic oligonucleotide
  Sense strand starting at position 823 of SEQ ID NO: 1881950
augcuuagugagcaucaga

SEQ ID NO: 2083577 - RNA, 19 nt, Artificial Sequence
  Description of Artificial Sequence: Synthetic oligonucleotide
  Antisense strand to SEQ ID NO: 2083576
ucugaugcucacuaagcau

SEQ ID NO: 2083578 - RNA, 19 nt, Artificial Sequence
  Description of Artificial Sequence: Synthetic oligonucleotide
  Sense strand starting at position 910 of SEQ ID NO: 1881950
gcagauucuugaccagaag

SEQ ID NO: 2083579 - RNA, 19 nt, Artificial Sequence
  Description of Artificial Sequence: Synthetic oligonucleotide
  Antisense strand to SEQ ID NO: 2083578
cuucuggucaagaaucugc

SEQ ID NO: 2083580 - RNA, 19 nt, Artificial Sequence
  Description of Artificial Sequence: Synthetic oligonucleotide
  Sense strand starting at position 1143 of SEQ ID NO: 1881950
uggguuucucugcauaaau

SEQ ID NO: 2083581 - RNA, 19 nt, Artificial Sequence
  Description of Artificial Sequence: Synthetic oligonucleotide
  Antisense strand to SEQ ID NO: 2083580
auuuaugcagagaaaccca

SEQ ID NO: 2083582 - RNA, 19 nt, Artificial Sequence
  Description of Artificial Sequence: Synthetic oligonucleotide
  Sense strand starting at position 1145 of SEQ ID NO: 1881950
gguuucucugcauaaauau

SEQ ID NO: 2083583 - RNA, 19 nt, Artificial Sequence
  Description of Artificial Sequence: Synthetic oligonucleotide
  Antisense strand to SEQ ID NO: 2083582
auauuuaugcagagaaacc

SEQ ID NO: 2083584 - RNA, 19 nt, Artificial Sequence
  Description of Artificial Sequence: Synthetic oligonucleotide
  Sense strand starting at position 1179 of SEQ ID NO: 1881950
cacagucuguauguuauuu

SEQ ID NO: 2083585 - RNA, 19 nt, Artificial Sequence
  Description of Artificial Sequence: Synthetic oligonucleotide
  Antisense strand to SEQ ID NO: 2083584
aaauaacauacagacugug

SEQ ID NO: 2083586 - RNA, 19 nt, Artificial Sequence
  Description of Artificial Sequence: Synthetic oligonucleotide
  Sense strand starting at position 1183 of SEQ ID NO: 1881950
gucuguauguuauuuguau

SEQ ID NO: 2083587 - RNA, 19 nt, Artificial Sequence
  Description of Artificial Sequence: Synthetic oligonucleotide
  Antisense strand to SEQ ID NO: 2083586
auacaaauaacauacagac

SEQ ID NO: 2083588 - RNA, 19 nt, Artificial Sequence
  Description of Artificial Sequence: Synthetic oligonucleotide
  Sense strand starting at position 1231 of SEQ ID NO: 1881950
uuaugcaucuuucuggaaa

SEQ ID NO: 2083589 - RNA, 19 nt, Artificial Sequence
  Description of Artificial Sequence: Synthetic oligonucleotide
  Antisense strand to SEQ ID NO: 2083588
uuuccagaaagaugcauaa

SEQ ID NO: 2083590 - RNA, 19 nt, Artificial Sequence
  Description of Artificial Sequence: Synthetic oligonucleotide
  Sense strand starting at position 1234 of SEQ ID NO: 1881950
ugcaucuuucuggaaagua

SEQ ID NO: 2083591 - RNA, 19 nt, Artificial Sequence
  Description of Artificial Sequence: Synthetic oligonucleotide
  Antisense strand to SEQ ID NO: 2083590
uacuuuccagaaagaugca

SEQ ID NO: 2083592 - RNA, 19 nt, Artificial Sequence
  Description of Artificial Sequence: Synthetic oligonucleotide
  Sense strand starting at position 1255 of SEQ ID NO: 1881950
accugaaucuaagucauga

SEQ ID NO: 2083593 - RNA, 19 nt, Artificial Sequence
  Description of Artificial Sequence: Synthetic oligonucleotide
  Antisense strand to SEQ ID NO: 2083592
ucaugacuuagauucaggu

SEQ ID NO: 2083594 - RNA, 19 nt, Artificial Sequence
  Description of Artificial Sequence: Synthetic oligonucleotide
  Sense strand starting at position 1411 of SEQ ID NO: 1881950
auuucuguguuucccugaa

SEQ ID NO: 2083595 - RNA, 19 nt, Artificial Sequence
  Description of Artificial Sequence: Synthetic oligonucleotide
  Antisense strand to SEQ ID NO: 2083594
uucagggaaacacagaaau

SEQ ID NO: 2083596 - RNA, 19 nt, Artificial Sequence
  Description of Artificial Sequence: Synthetic oligonucleotide
  Sense strand starting at position 1815 of SEQ ID NO: 1881950
augacuauugcuuauuagu

SEQ ID NO: 2083597 - RNA, 19 nt, Artificial Sequence
  Description of Artificial Sequence: Synthetic oligonucleotide
  Antisense strand to SEQ ID NO: 2083596
acuaauaagcaauagucau

SEQ ID NO: 2083598 - RNA, 19 nt, Artificial Sequence
  Description of Artificial Sequence: Synthetic oligonucleotide
  Sense strand starting at position 1834 of SEQ ID NO: 1881950
aacucauacugggugacua

SEQ ID NO: 2083599 - RNA, 19 nt, Artificial Sequence
  Description of Artificial Sequence: Synthetic oligonucleotide
  Antisense strand to SEQ ID NO: 2083598
uagucacccaguaugaguu

SEQ ID NO: 2083600 - RNA, 19 nt, Artificial Sequence
  Description of Artificial Sequence: Synthetic oligonucleotide
  Sense strand starting at position 1838 of SEQ ID NO: 1881950
cauacugggugacuagaau

SEQ ID NO: 2083601 - RNA, 19 nt, Artificial Sequence
  Description of Artificial Sequence: Synthetic oligonucleotide
  Antisense strand to SEQ ID NO: 2083600
auucuagucacccaguaug

SEQ ID NO: 2083602 - RNA, 19 nt, Artificial Sequence
  Description of Artificial Sequence: Synthetic oligonucleotide
  Sense strand starting at position 1850 of SEQ ID NO: 1881950
cuagaauccuagcuagauu

SEQ ID NO: 2083603 - RNA, 19 nt, Artificial Sequence
  Description of Artificial Sequence: Synthetic oligonucleotide
  Antisense strand to SEQ ID NO: 2083602
aaucuagcuaggauucuag

SEQ ID NO: 2083604 - RNA, 19 nt, Artificial Sequence
  Description of Artificial Sequence: Synthetic oligonucleotide
  Sense strand starting at position 2426 of SEQ ID NO: 1881950
cuacauauuguaugagacu

SEQ ID NO: 2083605 - RNA, 19 nt, Artificial Sequence
  Description of Artificial Sequence: Synthetic oligonucleotide
  Antisense strand to SEQ ID NO: 2083604
agucucauacaauauguag

SEQ ID NO: 2083606 - RNA, 19 nt, Artificial Sequence
  Description of Artificial Sequence: Synthetic oligonucleotide
  Sense strand starting at position 2438 of SEQ ID NO: 1881950
ugagacuauuuauaugaca

SEQ ID NO: 2083607 - RNA, 19 nt, Artificial Sequence
  Description of Artificial Sequence: Synthetic oligonucleotide
  Antisense strand to SEQ ID NO: 2083606
ugucauauaaauagucuca

SEQ ID NO: 2083608 - RNA, 19 nt, Artificial Sequence
  Description of Artificial Sequence: Synthetic oligonucleotide
  Sense strand starting at position 2621 of SEQ ID NO: 1881950
gugguuacaugacuacaca

SEQ ID NO: 2083609 - RNA, 19 nt, Artificial Sequence
  Description of Artificial Sequence: Synthetic oligonucleotide
  Antisense strand to SEQ ID NO: 2083608
uguguagucauguaaccac

SEQ ID NO: 2083610 - RNA, 19 nt, Artificial Sequence
  Description of Artificial Sequence: Synthetic oligonucleotide
  Sense strand starting at position 2731 of SEQ ID NO: 1881950
cuguuccguguccuauauu

SEQ ID NO: 2083611 - RNA, 19 nt, Artificial Sequence
  Description of Artificial Sequence: Synthetic oligonucleotide
  Antisense strand to SEQ ID NO: 2083610
aauauaggacacggaacag

SEQ ID NO: 2083612 - RNA, 19 nt, Artificial Sequence
  Description of Artificial Sequence: Synthetic oligonucleotide
  Sense strand starting at position 2753 of SEQ ID NO: 1881950
cuggcuagucaucacauua

SEQ ID NO: 2083613 - RNA, 19 nt, Artificial Sequence
  Description of Artificial Sequence: Synthetic oligonucleotide
  Antisense strand to SEQ ID NO: 2083612
uaaugugaugacuagccag

SEQ ID NO: 2083614 - RNA, 19 nt, Artificial Sequence
  Description of Artificial Sequence: Synthetic oligonucleotide
  Sense strand starting at position 2864 of SEQ ID NO: 1881950
uuaauaaagcagugaaucu

SEQ ID NO: 2083615 - RNA, 19 nt, Artificial Sequence
  Description of Artificial Sequence: Synthetic oligonucleotide
  Antisense strand to SEQ ID NO: 2083614
agauucacugcuuuauuaa

SEQ ID NO: 2083616 - RNA, 19 nt, Artificial Sequence
  Description of Artificial Sequence: Synthetic oligonucleotide
  Sense strand starting at position 2874 of SEQ ID NO: 1881950
agugaaucucaaugaaagu

SEQ ID NO: 2083617 - RNA, 19 nt, Artificial Sequence
  Description of Artificial Sequence: Synthetic oligonucleotide
  Antisense strand to SEQ ID NO: 2083616
acuuucauugagauucacu

SEQ ID NO: 2083618 - RNA, 19 nt, Artificial Sequence
  Description of Artificial Sequence: Synthetic oligonucleotide
  Sense strand starting at position 3346 of SEQ ID NO: 1881950
agccacaauccguauuaga

SEQ ID NO: 2083619 - RNA, 19 nt, Artificial Sequence
  Description of Artificial Sequence: Synthetic oligonucleotide
  Antisense strand to SEQ ID NO: 2083618
ucuaauacggauuguggcu

SEQ ID NO: 2083620 - RNA, 19 nt, Artificial Sequence
  Description of Artificial Sequence: Synthetic oligonucleotide
  Sense strand starting at position 3400 of SEQ ID NO: 1881950
uaggcugucaguuagagga

SEQ ID NO: 2083621 - RNA, 19 nt, Artificial Sequence
  Description of Artificial Sequence: Synthetic oligonucleotide
  Antisense strand to SEQ ID NO: 2083620
uccucuaacugacagccua

SEQ ID NO: 2083622 - RNA, 19 nt, Artificial Sequence
  Description of Artificial Sequence: Synthetic oligonucleotide
  Sense strand starting at position 3422 of SEQ ID NO: 1881950
gggaaaugggcaggcaaau

SEQ ID NO: 2083623 - RNA, 19 nt, Artificial Sequence
  Description of Artificial Sequence: Synthetic oligonucleotide
  Antisense strand to SEQ ID NO: 2083622
auuugccugcccauuuccc

SEQ ID NO: 2083624 - RNA, 19 nt, Artificial Sequence
  Description of Artificial Sequence: Synthetic oligonucleotide
  Sense strand starting at position 3450 of SEQ ID NO: 1881950
cauuauucccuagggaguu

SEQ ID NO: 2083625 - RNA, 19 nt, Artificial Sequence
  Description of Artificial Sequence: Synthetic oligonucleotide
  Antisense strand to SEQ ID NO: 2083624
aacucccuagggaauaaug

SEQ ID NO: 2083626 - RNA, 19 nt, Artificial Sequence
  Description of Artificial Sequence: Synthetic oligonucleotide
  Sense strand starting at position 3479 of SEQ ID NO: 1881950
uuugauaagcuguaaacuu

SEQ ID NO: 2083627 - RNA, 19 nt, Artificial Sequence
  Description of Artificial Sequence: Synthetic oligonucleotide
  Antisense strand to SEQ ID NO: 2083626
aaguuuacagcuuaucaaa

SEQ ID NO: 2083628 - RNA, 19 nt, Artificial Sequence
  Description of Artificial Sequence: Synthetic oligonucleotide
  Sense strand starting at position 3544 of SEQ ID NO: 1881950
aggucaacuuguccaggau

SEQ ID NO: 2083629 - RNA, 19 nt, Artificial Sequence
  Description of Artificial Sequence: Synthetic oligonucleotide
  Antisense strand to SEQ ID NO: 2083628
auccuggacaaguugaccu

SEQ ID NO: 2083630 - RNA, 19 nt, Artificial Sequence
  Description of Artificial Sequence: Synthetic oligonucleotide
  Sense strand starting at position 3545 of SEQ ID NO: 1881950
ggucaacuuguccaggaug

SEQ ID NO: 2083631 - RNA, 19 nt, Artificial Sequence
  Description of Artificial Sequence: Synthetic oligonucleotide
  Antisense strand to SEQ ID NO: 2083630
cauccuggacaaguugacc

SEQ ID NO: 2083632 - RNA, 19 nt, Artificial Sequence
  Description of Artificial Sequence: Synthetic oligonucleotide
  Sense strand starting at position 3666 of SEQ ID NO: 1881950
gaaugaugggugggagucu

SEQ ID NO: 2083633 - RNA, 19 nt, Artificial Sequence
  Description of Artificial Sequence: Synthetic oligonucleotide
  Antisense strand to SEQ ID NO: 2083632
agacucccacccaucauuc

SEQ ID NO: 2083634 - RNA, 19 nt, Artificial Sequence
  Description of Artificial Sequence: Synthetic oligonucleotide
  Sense strand starting at position 3677 of SEQ ID NO: 1881950
gggagucuguuacccaaac

SEQ ID NO: 2083635 - RNA, 19 nt, Artificial Sequence
  Description of Artificial Sequence: Synthetic oligonucleotide
  Antisense strand to SEQ ID NO: 2083634
guuuggguaacagacuccc

SEQ ID NO: 2083636 - RNA, 19 nt, Artificial Sequence
  Description of Artificial Sequence: Synthetic oligonucleotide
  Sense strand starting at position 3678 of SEQ ID NO: 1881950
ggagucuguuacccaaaca

SEQ ID NO: 2083637 - RNA, 19 nt, Artificial Sequence
  Description of Artificial Sequence: Synthetic oligonucleotide
  Antisense strand to SEQ ID NO: 2083636
uguuuggguaacagacucc

SEQ ID NO: 2083638 - RNA, 19 nt, Artificial Sequence
  Description of Artificial Sequence: Synthetic oligonucleotide
  Sense strand starting at position 3889 of SEQ ID NO: 1881950
agaauagcucugcaagaua

SEQ ID NO: 2083639 - RNA, 19 nt, Artificial Sequence
  Description of Artificial Sequence: Synthetic oligonucleotide
  Antisense strand to SEQ ID NO: 2083638
uaucuugcagagcuauucu

SEQ ID NO: 2083640 - RNA, 19 nt, Artificial Sequence
  Description of Artificial Sequence: Synthetic oligonucleotide
  Sense strand starting at position 3897 of SEQ ID NO: 1881950
ucugcaagauaguuaggau

SEQ ID NO: 2083641 - RNA, 19 nt, Artificial Sequence
  Description of Artificial Sequence: Synthetic oligonucleotide
  Antisense strand to SEQ ID NO: 2083640
auccuaacuaucuugcaga

SEQ ID NO: 2083642 - RNA, 19 nt, Artificial Sequence
  Description of Artificial Sequence: Synthetic oligonucleotide
  Sense strand starting at position 3898 of SEQ ID NO: 1881950
cugcaagauaguuaggauu

SEQ ID NO: 2083643 - RNA, 19 nt, Artificial Sequence
  Description of Artificial Sequence: Synthetic oligonucleotide
  Antisense strand to SEQ ID NO: 2083642
aauccuaacuaucuugcag

SEQ ID NO: 2083644 - RNA, 19 nt, Artificial Sequence
  Description of Artificial Sequence: Synthetic oligonucleotide
  Sense strand starting at position 208 of SEQ ID NO: 1881951
augugaugugauuauuaug

SEQ ID NO: 2083645 - RNA, 19 nt, Artificial Sequence
  Description of Artificial Sequence: Synthetic oligonucleotide
  Antisense strand to SEQ ID NO: 2083644
cauaauaaucacaucacau

SEQ ID NO: 2083646 - RNA, 19 nt, Artificial Sequence
  Description of Artificial Sequence: Synthetic oligonucleotide
  Sense strand starting at position 809 of SEQ ID NO: 1881951
aagacaaugugguccauau

SEQ ID NO: 2083647 - RNA, 19 nt, Artificial Sequence
  Description of Artificial Sequence: Synthetic oligonucleotide
  Antisense strand to SEQ ID NO: 2083646
auauggaccacauugucuu

SEQ ID NO: 2083648 - RNA, 19 nt, Artificial Sequence
  Description of Artificial Sequence: Synthetic oligonucleotide
  Sense strand starting at position 811 of SEQ ID NO: 1881951
gacaaugugguccauauac

SEQ ID NO: 2083649 - RNA, 19 nt, Artificial Sequence
  Description of Artificial Sequence: Synthetic oligonucleotide
  Antisense strand to SEQ ID NO: 2083648
guauauggaccacauuguc

SEQ ID NO: 2083650 - RNA, 19 nt, Artificial Sequence
  Description of Artificial Sequence: Synthetic oligonucleotide
  Sense strand starting at position 889 of SEQ ID NO: 1881951
augggacuugauugagguu

SEQ ID NO: 2083651 - RNA, 19 nt, Artificial Sequence
  Description of Artificial Sequence: Synthetic oligonucleotide
  Antisense strand to SEQ ID NO: 2083650
aaccucaaucaagucccau

SEQ ID NO: 2083652 - RNA, 19 nt, Artificial Sequence
  Description of Artificial Sequence: Synthetic oligonucleotide
  Sense strand starting at position 1031 of SEQ ID NO: 1881951
gggugugaagaguagugaa

SEQ ID NO: 2083653 - RNA, 19 nt, Artificial Sequence
  Description of Artificial Sequence: Synthetic oligonucleotide
  Antisense strand to SEQ ID NO: 2083652
uucacuacucuucacaccc

SEQ ID NO: 2083654 - RNA, 19 nt, Artificial Sequence
  Description of Artificial Sequence: Synthetic oligonucleotide
  Sense strand starting at position 1064 of SEQ ID NO: 1881951
gggcacugaaacgguuaau

SEQ ID NO: 2083655 - RNA, 19 nt, Artificial Sequence
  Description of Artificial Sequence: Synthetic oligonucleotide
  Antisense strand to SEQ ID NO: 2083654
auuaaccguuucagugccc

SEQ ID NO: 2083656 - RNA, 19 nt, Artificial Sequence
  Description of Artificial Sequence: Synthetic oligonucleotide
  Sense strand starting at position 1073 of SEQ ID NO: 1881951
aacgguuaauggguaugaa

SEQ ID NO: 2083657 - RNA, 19 nt, Artificial Sequence
  Description of Artificial Sequence: Synthetic oligonucleotide
  Antisense strand to SEQ ID NO: 2083656
uucauacccauuaaccguu

SEQ ID NO: 2083658 - RNA, 19 nt, Artificial Sequence
  Description of Artificial Sequence: Synthetic oligonucleotide
  Sense strand starting at position 1074 of SEQ ID NO: 1881951
acgguuaauggguaugaaa

SEQ ID NO: 2083659 - RNA, 19 nt, Artificial Sequence
  Description of Artificial Sequence: Synthetic oligonucleotide
  Antisense strand to SEQ ID NO: 2083658
uuucauacccauuaaccgu

SEQ ID NO: 2083660 - RNA, 19 nt, Artificial Sequence
  Description of Artificial Sequence: Synthetic oligonucleotide
  Sense strand starting at position 1318 of SEQ ID NO: 1881951
uguacuauguacccagaaa

SEQ ID NO: 2083661 - RNA, 19 nt, Artificial Sequence
  Description of Artificial Sequence: Synthetic oligonucleotide
  Antisense strand to SEQ ID NO: 2083660
uuucuggguacauaguaca

SEQ ID NO: 2083662 - RNA, 19 nt, Artificial Sequence
  Description of Artificial Sequence: Synthetic oligonucleotide
  Sense strand starting at position 1417 of SEQ ID NO: 1881951
cuaacucuguccucaguca

SEQ ID NO: 2083663 - RNA, 19 nt, Artificial Sequence
  Description of Artificial Sequence: Synthetic oligonucleotide
  Antisense strand to SEQ ID NO: 2083662
ugacugaggacagaguuag

SEQ ID NO: 2083664 - RNA, 19 nt, Artificial Sequence
  Description of Artificial Sequence: Synthetic oligonucleotide
  Sense strand starting at position 1468 of SEQ ID NO: 1881951
aauccaagucauugcagga

SEQ ID NO: 2083665 - RNA, 19 nt, Artificial Sequence
  Description of Artificial Sequence: Synthetic oligonucleotide
  Antisense strand to SEQ ID NO: 2083664
uccugcaaugacuuggauu

SEQ ID NO: 2083666 - RNA, 19 nt, Artificial Sequence
  Description of Artificial Sequence: Synthetic oligonucleotide
  Sense strand starting at position 1472 of SEQ ID NO: 1881951
caagucauugcaggagcaa

SEQ ID NO: 2083667 - RNA, 19 nt, Artificial Sequence
  Description of Artificial Sequence: Synthetic oligonucleotide
  Antisense strand to SEQ ID NO: 2083666
uugcuccugcaaugacuug

SEQ ID NO: 2083668 - RNA, 19 nt, Artificial Sequence
  Description of Artificial Sequence: Synthetic oligonucleotide
  Sense strand starting at position 1473 of SEQ ID NO: 1881951
aagucauugcaggagcaaa

SEQ ID NO: 2083669 - RNA, 19 nt, Artificial Sequence
  Description of Artificial Sequence: Synthetic oligonucleotide
  Antisense strand to SEQ ID NO: 2083668
uuugcuccugcaaugacuu

SEQ ID NO: 2083670 - RNA, 19 nt, Artificial Sequence
  Description of Artificial Sequence: Synthetic oligonucleotide
  Sense strand starting at position 1648 of SEQ ID NO: 1881951
gagguagcuuuauugauca

SEQ ID NO: 2083671 - RNA, 19 nt, Artificial Sequence
  Description of Artificial Sequence: Synthetic oligonucleotide
  Antisense strand to SEQ ID NO: 2083670
ugaucaauaaagcuaccuc

SEQ ID NO: 2083672 - RNA, 19 nt, Artificial Sequence
  Description of Artificial Sequence: Synthetic oligonucleotide
  Sense strand starting at position 1683 of SEQ ID NO: 1881951
ugacuugccuguuccacua

SEQ ID NO: 2083673 - RNA, 19 nt, Artificial Sequence
  Description of Artificial Sequence: Synthetic oligonucleotide
  Antisense strand to SEQ ID NO: 2083672
uaguggaacaggcaaguca

SEQ ID NO: 2083674 - RNA, 19 nt, Artificial Sequence
  Description of Artificial Sequence: Synthetic oligonucleotide
  Sense strand starting at position 1845 of SEQ ID NO: 1881951
ggucuuauauaauccugua

SEQ ID NO: 2083675 - RNA, 19 nt, Artificial Sequence
  Description of Artificial Sequence: Synthetic oligonucleotide
  Antisense strand to SEQ ID NO: 2083674
uacaggauuauauaagacc

SEQ ID NO: 2083676 - RNA, 19 nt, Artificial Sequence
  Description of Artificial Sequence: Synthetic oligonucleotide
  Sense strand starting at position 1859 of SEQ ID NO: 1881951
cuguaugcuagucacaguu

SEQ ID NO: 2083677 - RNA, 19 nt, Artificial Sequence
  Description of Artificial Sequence: Synthetic oligonucleotide
  Antisense strand to SEQ ID NO: 2083676
aacugugacuagcauacag

SEQ ID NO: 2083678 - RNA, 19 nt, Artificial Sequence
  Description of Artificial Sequence: Synthetic oligonucleotide
  Sense strand starting at position 1886 of SEQ ID NO: 1881951
agggaaacauuccagggaa

SEQ ID NO: 2083679 - RNA, 19 nt, Artificial Sequence
  Description of Artificial Sequence: Synthetic oligonucleotide
  Antisense strand to SEQ ID NO: 2083678
uucccuggaauguuucccu

SEQ ID NO: 2083680 - RNA, 19 nt, Artificial Sequence
  Description of Artificial Sequence: Synthetic oligonucleotide
  Sense strand starting at position 2209 of SEQ ID NO: 1881951
uuugaaaguguuuguuuac

SEQ ID NO: 2083681 - RNA, 19 nt, Artificial Sequence
  Description of Artificial Sequence: Synthetic oligonucleotide
  Antisense strand to SEQ ID NO: 2083680
guaaacaaacacuuucaaa

SEQ ID NO: 2083682 - RNA, 19 nt, Artificial Sequence
  Description of Artificial Sequence: Synthetic oligonucleotide
  Sense strand starting at position 2210 of SEQ ID NO: 1881951
uugaaaguguuuguuuacu

SEQ ID NO: 2083683 - RNA, 19 nt, Artificial Sequence
  Description of Artificial Sequence: Synthetic oligonucleotide
  Antisense strand to SEQ ID NO: 2083682
aguaaacaaacacuuucaa

SEQ ID NO: 2083684 - RNA, 19 nt, Artificial Sequence
  Description of Artificial Sequence: Synthetic oligonucleotide
  Sense strand starting at position 2440 of SEQ ID NO: 1881951
uauagaaauuaugggaaga

SEQ ID NO: 2083685 - RNA, 19 nt, Artificial Sequence
  Description of Artificial Sequence: Synthetic oligonucleotide
  Antisense strand to SEQ ID NO: 2083684
ucuucccauaauuucuaua

SEQ ID NO: 2083686 - RNA, 19 nt, Artificial Sequence
  Description of Artificial Sequence: Synthetic oligonucleotide
  Sense strand starting at position 2630 of SEQ ID NO: 1881951
ugaggcuccucuucuuaua

SEQ ID NO: 2083687 - RNA, 19 nt, Artificial Sequence
  Description of Artificial Sequence: Synthetic oligonucleotide
  Antisense strand to SEQ ID NO: 2083686
uauaagaagaggagccuca

SEQ ID NO: 2083688 - RNA, 19 nt, Artificial Sequence
  Description of Artificial Sequence: Synthetic oligonucleotide
  Sense strand starting at position 2753 of SEQ ID NO: 1881951
guugccagaguuuacugaa

SEQ ID NO: 2083689 - RNA, 19 nt, Artificial Sequence
  Description of Artificial Sequence: Synthetic oligonucleotide
  Antisense strand to SEQ ID NO: 2083688
uucaguaaacucuggcaac

SEQ ID NO: 2083690 - RNA, 19 nt, Artificial Sequence
  Description of Artificial Sequence: Synthetic oligonucleotide
  Sense strand starting at position 2768 of SEQ ID NO: 1881951
ugaagacucuauuacaaag

SEQ ID NO: 2083691 - RNA, 19 nt, Artificial Sequence
  Description of Artificial Sequence: Synthetic oligonucleotide
  Antisense strand to SEQ ID NO: 2083690
cuuuguaauagagucuuca

SEQ ID NO: 2083692 - RNA, 19 nt, Artificial Sequence
  Description of Artificial Sequence: Synthetic oligonucleotide
  Sense strand starting at position 2825 of SEQ ID NO: 1881951
gccuguugcccagaaacau

SEQ ID NO: 2083693 - RNA, 19 nt, Artificial Sequence
  Description of Artificial Sequence: Synthetic oligonucleotide
  Antisense strand to SEQ ID NO: 2083692
auguuucugggcaacaggc

SEQ ID NO: 2083694 - RNA, 19 nt, Artificial Sequence
  Description of Artificial Sequence: Synthetic oligonucleotide
  Sense strand starting at position 2897 of SEQ ID NO: 1881951
gcaugagugggucacaguu

SEQ ID NO: 2083695 - RNA, 19 nt, Artificial Sequence
  Description of Artificial Sequence: Synthetic oligonucleotide
  Antisense strand to SEQ ID NO: 2083694
aacugugacccacucaugc

SEQ ID NO: 2083696 - RNA, 19 nt, Artificial Sequence
  Description of Artificial Sequence: Synthetic oligonucleotide
  Sense strand starting at position 2922 of SEQ ID NO: 1881951
gcugcuauuccugaacuaa

SEQ ID NO: 2083697 - RNA, 19 nt, Artificial Sequence
  Description of Artificial Sequence: Synthetic oligonucleotide
  Antisense strand to SEQ ID NO: 2083696
uuaguucaggaauagcagc

SEQ ID NO: 2083698 - RNA, 19 nt, Artificial Sequence
  Description of Artificial Sequence: Synthetic oligonucleotide
  Sense strand starting at position 2986 of SEQ ID NO: 1881951
uguguaauugcugcaacgu

SEQ ID NO: 2083699 - RNA, 19 nt, Artificial Sequence
  Description of Artificial Sequence: Synthetic oligonucleotide
  Antisense strand to SEQ ID NO: 2083698
acguugcagcaauuacaca

SEQ ID NO: 2083700 - RNA, 19 nt, Artificial Sequence
  Description of Artificial Sequence: Synthetic oligonucleotide
  Sense strand starting at position 3030 of SEQ ID NO: 1881951
cucuccaagucuuuguuau

SEQ ID NO: 2083701 - RNA, 19 nt, Artificial Sequence
  Description of Artificial Sequence: Synthetic oligonucleotide
  Antisense strand to SEQ ID NO: 2083700
auaacaaagacuuggagag

SEQ ID NO: 2083702 - RNA, 19 nt, Artificial Sequence
  Description of Artificial Sequence: Synthetic oligonucleotide
  Sense strand starting at position 3032 of SEQ ID NO: 1881951
cuccaagucuuuguuauca

SEQ ID NO: 2083703 - RNA, 19 nt, Artificial Sequence
  Description of Artificial Sequence: Synthetic oligonucleotide
  Antisense strand to SEQ ID NO: 2083702
ugauaacaaagacuuggag

SEQ ID NO: 2083704 - RNA, 19 nt, Artificial Sequence
  Description of Artificial Sequence: Synthetic oligonucleotide
  Sense strand starting at position 3040 of SEQ ID NO: 1881951
cuuuguuaucaucaaguuc

SEQ ID NO: 2083705 - RNA, 19 nt, Artificial Sequence
  Description of Artificial Sequence: Synthetic oligonucleotide
  Antisense strand to SEQ ID NO: 2083704
gaacuugaugauaacaaag

SEQ ID NO: 2083706 - RNA, 19 nt, Artificial Sequence
  Description of Artificial Sequence: Synthetic oligonucleotide
  Sense strand starting at position 3057 of SEQ ID NO: 1881951
ucuucuuuccagugggaga

SEQ ID NO: 2083707 - RNA, 19 nt, Artificial Sequence
  Description of Artificial Sequence: Synthetic oligonucleotide
  Antisense strand to SEQ ID NO: 2083706
ucucccacuggaaagaaga

SEQ ID NO: 2083708 - RNA, 19 nt, Artificial Sequence
  Description of Artificial Sequence: Synthetic oligonucleotide
  Sense strand starting at position 3058 of SEQ ID NO: 1881951
cuucuuuccagugggagau

SEQ ID NO: 2083709 - RNA, 19 nt, Artificial Sequence
  Description of Artificial Sequence: Synthetic oligonucleotide
  Antisense strand to SEQ ID NO: 2083708
aucucccacuggaaagaag

SEQ ID NO: 2083710 - RNA, 19 nt, Artificial Sequence
  Description of Artificial Sequence: Synthetic oligonucleotide
  Sense strand starting at position 3078 of SEQ ID NO: 1881951
ggaacagcuugaguaagua

SEQ ID NO: 2083711 - RNA, 19 nt, Artificial Sequence
  Description of Artificial Sequence: Synthetic oligonucleotide
  Antisense strand to SEQ ID NO: 2083710
uacuuacucaagcuguucc

SEQ ID NO: 2083712 - RNA, 19 nt, Artificial Sequence
  Description of Artificial Sequence: Synthetic oligonucleotide
  Sense strand starting at position 3210 of SEQ ID NO: 1881951
uagacugaugcuggagaau

SEQ ID NO: 2083713 - RNA, 19 nt, Artificial Sequence
  Description of Artificial Sequence: Synthetic oligonucleotide
  Antisense strand to SEQ ID NO: 2083712
auucuccagcaucagucua

SEQ ID NO: 2083714 - RNA, 19 nt, Artificial Sequence
  Description of Artificial Sequence: Synthetic oligonucleotide
  Sense strand starting at position 3289 of SEQ ID NO: 1881951
ucauuuguuucucuagguu

SEQ ID NO: 2083715 - RNA, 19 nt, Artificial Sequence
  Description of Artificial Sequence: Synthetic oligonucleotide
  Antisense strand to SEQ ID NO: 2083714
aaccuagagaaacaaauga

SEQ ID NO: 2083716 - RNA, 19 nt, Artificial Sequence
  Description of Artificial Sequence: Synthetic oligonucleotide
  Sense strand starting at position 3348 of SEQ ID NO: 1881951
uuuagucuucuguauucuu

SEQ ID NO: 2083717 - RNA, 19 nt, Artificial Sequence
  Description of Artificial Sequence: Synthetic oligonucleotide
  Antisense strand to SEQ ID NO: 2083716
aagaauacagaagacuaaa

SEQ ID NO: 2083718 - RNA, 19 nt, Artificial Sequence
  Description of Artificial Sequence: Synthetic oligonucleotide
  Sense strand starting at position 3742 of SEQ ID NO: 1881951
uuuauugugauuggagaac

SEQ ID NO: 2083719 - RNA, 19 nt, Artificial Sequence
  Description of Artificial Sequence: Synthetic oligonucleotide
  Antisense strand to SEQ ID NO: 2083718
guucuccaaucacaauaaa

SEQ ID NO: 2083720 - RNA, 19 nt, Artificial Sequence
  Description of Artificial Sequence: Synthetic oligonucleotide
  Sense strand starting at position 3815 of SEQ ID NO: 1881951
guuuguacuagagaauggu

SEQ ID NO: 2083721 - RNA, 19 nt, Artificial Sequence
  Description of Artificial Sequence: Synthetic oligonucleotide
  Antisense strand to SEQ ID NO: 2083720
accauucucuaguacaaac

SEQ ID NO: 2083722 - RNA, 19 nt, Artificial Sequence
  Description of Artificial Sequence: Synthetic oligonucleotide
  Sense strand starting at position 3852 of SEQ ID NO: 1881951
aauagauauucugcuggag

SEQ ID NO: 2083723 - RNA, 19 nt, Artificial Sequence
  Description of Artificial Sequence: Synthetic oligonucleotide
  Antisense strand to SEQ ID NO: 2083722
cuccagcagaauaucuauu

SEQ ID NO: 2083724 - RNA, 19 nt, Artificial Sequence
  Description of Artificial Sequence: Synthetic oligonucleotide
  Sense strand starting at position 132 of SEQ ID NO: 1881952
gagguuucucuuggcugaa

SEQ ID NO: 2083725 - RNA, 19 nt, Artificial Sequence
  Description of Artificial Sequence: Synthetic oligonucleotide
  Antisense strand to SEQ ID NO: 2083724
uucagccaagagaaaccuc

SEQ ID NO: 2083726 - RNA, 19 nt, Artificial Sequence
  Description of Artificial Sequence: Synthetic oligonucleotide
  Sense strand starting at position 133 of SEQ ID NO: 1881952
agguuucucuuggcugaaa

SEQ ID NO: 2083727 - RNA, 19 nt, Artificial Sequence
  Description of Artificial Sequence: Synthetic oligonucleotide
  Antisense strand to SEQ ID NO: 2083726
uuucagccaagagaaaccu

SEQ ID NO: 2083728 - RNA, 19 nt, Artificial Sequence
  Description of Artificial Sequence: Synthetic oligonucleotide
  Sense strand starting at position 134 of SEQ ID NO: 1881952
gguuucucuuggcugaaac

SEQ ID NO: 2083729 - RNA, 19 nt, Artificial Sequence
  Description of Artificial Sequence: Synthetic oligonucleotide
  Antisense strand to SEQ ID NO: 2083728
guuucagccaagagaaacc

SEQ ID NO: 2083730 - RNA, 19 nt, Artificial Sequence
  Description of Artificial Sequence: Synthetic oligonucleotide
  Sense strand starting at position 136 of SEQ ID NO: 1881952
uuucucuuggcugaaacuu

SEQ ID NO: 2083731 - RNA, 19 nt, Artificial Sequence
  Description of Artificial Sequence: Synthetic oligonucleotide
  Antisense strand to SEQ ID NO: 2083730
aaguuucagccaagagaaa

SEQ ID NO: 2083732 - RNA, 19 nt, Artificial Sequence
  Description of Artificial Sequence: Synthetic oligonucleotide
  Sense strand starting at position 326 of SEQ ID NO: 1881952
ugaguaguagcacauucua

SEQ ID NO: 2083733 - RNA, 19 nt, Artificial Sequence
  Description of Artificial Sequence: Synthetic oligonucleotide
  Antisense strand to SEQ ID NO: 2083732
uagaaugugcuacuacuca

SEQ ID NO: 2083734 - RNA, 19 nt, Artificial Sequence
  Description of Artificial Sequence: Synthetic oligonucleotide
  Sense strand starting at position 424 of SEQ ID NO: 1881952
agaagcagagucugacauu

SEQ ID NO: 2083735 - RNA, 19 nt, Artificial Sequence
  Description of Artificial Sequence: Synthetic oligonucleotide
  Antisense strand to SEQ ID NO: 2083734
aaugucagacucugcuucu

SEQ ID NO: 2083736 - RNA, 19 nt, Artificial Sequence
  Description of Artificial Sequence: Synthetic oligonucleotide
  Sense strand starting at position 425 of SEQ ID NO: 1881952
gaagcagagucugacauuu

SEQ ID NO: 2083737 - RNA, 19 nt, Artificial Sequence
  Description of Artificial Sequence: Synthetic oligonucleotide
  Antisense strand to SEQ ID NO: 2083736
aaaugucagacucugcuuc

SEQ ID NO: 2083738 - RNA, 19 nt, Artificial Sequence
  Description of Artificial Sequence: Synthetic oligonucleotide
  Sense strand starting at position 427 of SEQ ID NO: 1881952
agcagagucugacauuuga

SEQ ID NO: 2083739 - RNA, 19 nt, Artificial Sequence
  Description of Artificial Sequence: Synthetic oligonucleotide
  Antisense strand to SEQ ID NO: 2083738
ucaaaugucagacucugcu

SEQ ID NO: 2083740 - RNA, 19 nt, Artificial Sequence
  Description of Artificial Sequence: Synthetic oligonucleotide
  Sense strand starting at position 438 of SEQ ID NO: 1881952
acauuugaguuauauccau

SEQ ID NO: 2083741 - RNA, 19 nt, Artificial Sequence
  Description of Artificial Sequence: Synthetic oligonucleotide
  Antisense strand to SEQ ID NO: 2083740
auggauauaacucaaaugu

SEQ ID NO: 2083742 - RNA, 19 nt, Artificial Sequence
  Description of Artificial Sequence: Synthetic oligonucleotide
  Sense strand starting at position 445 of SEQ ID NO: 1881952
aguuauauccauuggcaaa

SEQ ID NO: 2083743 - RNA, 19 nt, Artificial Sequence
  Description of Artificial Sequence: Synthetic oligonucleotide
  Antisense strand to SEQ ID NO: 2083742
uuugccaauggauauaacu

SEQ ID NO: 2083744 - RNA, 19 nt, Artificial Sequence
  Description of Artificial Sequence: Synthetic oligonucleotide
  Sense strand starting at position 580 of SEQ ID NO: 1881952
gcuggaguuugcaagagag

SEQ ID NO: 2083745 - RNA, 19 nt, Artificial Sequence
  Description of Artificial Sequence: Synthetic oligonucleotide
  Antisense strand to SEQ ID NO: 2083744
cucucuugcaaacuccagc

SEQ ID NO: 2083746 - RNA, 19 nt, Artificial Sequence
  Description of Artificial Sequence: Synthetic oligonucleotide
  Sense strand starting at position 757 of SEQ ID NO: 1881952
agucucauuugaggaauuu

SEQ ID NO: 2083747 - RNA, 19 nt, Artificial Sequence
  Description of Artificial Sequence: Synthetic oligonucleotide
  Antisense strand to SEQ ID NO: 2083746
aaauuccucaaaugagacu

SEQ ID NO: 2083748 - RNA, 19 nt, Artificial Sequence
  Description of Artificial Sequence: Synthetic oligonucleotide
  Sense strand starting at position 769 of SEQ ID NO: 1881952
ggaauuuguuugucuugcu

SEQ ID NO: 2083749 - RNA, 19 nt, Artificial Sequence
  Description of Artificial Sequence: Synthetic oligonucleotide
  Antisense strand to SEQ ID NO: 2083748
agcaagacaaacaaauucc

SEQ ID NO: 2083750 - RNA, 19 nt, Artificial Sequence
  Description of Artificial Sequence: Synthetic oligonucleotide
  Sense strand starting at position 848 of SEQ ID NO: 1881952
ggcuaaacccagggugaaa

SEQ ID NO: 2083751 - RNA, 19 nt, Artificial Sequence
  Description of Artificial Sequence: Synthetic oligonucleotide
  Antisense strand to SEQ ID NO: 2083750
uuucacccuggguuuagcc

SEQ ID NO: 2083752 - RNA, 19 nt, Artificial Sequence
  Description of Artificial Sequence: Synthetic oligonucleotide
  Sense strand starting at position 1715 of SEQ ID NO: 1881952
gcaugaaacuaucccuguu

SEQ ID NO: 2083753 - RNA, 19 nt, Artificial Sequence
  Description of Artificial Sequence: Synthetic oligonucleotide
  Antisense strand to SEQ ID NO: 2083752
aacagggauaguuucaugc

SEQ ID NO: 2083754 - RNA, 19 nt, Artificial Sequence
  Description of Artificial Sequence: Synthetic oligonucleotide
  Sense strand starting at position 1757 of SEQ ID NO: 1881952
cgaagaggauuaguaaugu

SEQ ID NO: 2083755 - RNA, 19 nt, Artificial Sequence
  Description of Artificial Sequence: Synthetic oligonucleotide
  Antisense strand to SEQ ID NO: 2083754
acauuacuaauccucuucg

SEQ ID NO: 2083756 - RNA, 19 nt, Artificial Sequence
  Description of Artificial Sequence: Synthetic oligonucleotide
  Sense strand starting at position 1763 of SEQ ID NO: 1881952
ggauuaguaauguggcuaa

SEQ ID NO: 2083757 - RNA, 19 nt, Artificial Sequence
  Description of Artificial Sequence: Synthetic oligonucleotide
  Antisense strand to SEQ ID NO: 2083756
uuagccacauuacuaaucc

SEQ ID NO: 2083758 - RNA, 19 nt, Artificial Sequence
  Description of Artificial Sequence: Synthetic oligonucleotide
  Sense strand starting at position 1861 of SEQ ID NO: 1881952
cgccuuaaggcucacugau

SEQ ID NO: 2083759 - RNA, 19 nt, Artificial Sequence
  Description of Artificial Sequence: Synthetic oligonucleotide
  Antisense strand to SEQ ID NO: 2083758
aucagugagccuuaaggcg

SEQ ID NO: 2083760 - RNA, 19 nt, Artificial Sequence
  Description of Artificial Sequence: Synthetic oligonucleotide
  Sense strand starting at position 1867 of SEQ ID NO: 1881952
aaggcucacugauugaagu

SEQ ID NO: 2083761 - RNA, 19 nt, Artificial Sequence
  Description of Artificial Sequence: Synthetic oligonucleotide
  Antisense strand to SEQ ID NO: 2083760
acuucaaucagugagccuu

SEQ ID NO: 2083762 - RNA, 19 nt, Artificial Sequence
  Description of Artificial Sequence: Synthetic oligonucleotide
  Sense strand starting at position 1884 of SEQ ID NO: 1881952
gugugaacucugcagugag

SEQ ID NO: 2083763 - RNA, 19 nt, Artificial Sequence
  Description of Artificial Sequence: Synthetic oligonucleotide
  Antisense strand to SEQ ID NO: 2083762
cucacugcagaguucacac

SEQ ID NO: 2083764 - RNA, 19 nt, Artificial Sequence
  Description of Artificial Sequence: Synthetic oligonucleotide
  Sense strand starting at position 1985 of SEQ ID NO: 1881952
gccuguagaguucaggcaa

SEQ ID NO: 2083765 - RNA, 19 nt, Artificial Sequence
  Description of Artificial Sequence: Synthetic oligonucleotide
  Antisense strand to SEQ ID NO: 2083764
uugccugaacucuacaggc

SEQ ID NO: 2083766 - RNA, 19 nt, Artificial Sequence
  Description of Artificial Sequence: Synthetic oligonucleotide
  Sense strand starting at position 2020 of SEQ ID NO: 1881952
ucuuccuugcagugagaau

SEQ ID NO: 2083767 - RNA, 19 nt, Artificial Sequence
  Description of Artificial Sequence: Synthetic oligonucleotide
  Antisense strand to SEQ ID NO: 2083766
auucucacugcaaggaaga

SEQ ID NO: 2083768 - RNA, 19 nt, Artificial Sequence
  Description of Artificial Sequence: Synthetic oligonucleotide
  Sense strand starting at position 2062 of SEQ ID NO: 1881952
gcacaaaccugacuuugua

SEQ ID NO: 2083769 - RNA, 19 nt, Artificial Sequence
  Description of Artificial Sequence: Synthetic oligonucleotide
  Antisense strand to SEQ ID NO: 2083768
uacaaagucagguuugugc

SEQ ID NO: 2083770 - RNA, 19 nt, Artificial Sequence
  Description of Artificial Sequence: Synthetic oligonucleotide
  Sense strand starting at position 2163 of SEQ ID NO: 1881952
cgagcugaagcucaaagua

SEQ ID NO: 2083771 - RNA, 19 nt, Artificial Sequence
  Description of Artificial Sequence: Synthetic oligonucleotide
  Antisense strand to SEQ ID NO: 2083770
uacuuugagcuucagcucg

SEQ ID NO: 2083772 - RNA, 19 nt, Artificial Sequence
  Description of Artificial Sequence: Synthetic oligonucleotide
  Sense strand starting at position 2188 of SEQ ID NO: 1881952
ugaagagccuauucuauca

SEQ ID NO: 2083773 - RNA, 19 nt, Artificial Sequence
  Description of Artificial Sequence: Synthetic oligonucleotide
  Antisense strand to SEQ ID NO: 2083772
ugauagaauaggcucuuca

SEQ ID NO: 2083774 - RNA, 19 nt, Artificial Sequence
  Description of Artificial Sequence: Synthetic oligonucleotide
  Sense strand starting at position 2319 of SEQ ID NO: 1881952
ccauuaguauucucacuga

SEQ ID NO: 2083775 - RNA, 19 nt, Artificial Sequence
  Description of Artificial Sequence: Synthetic oligonucleotide
  Antisense strand to SEQ ID NO: 2083774
ucagugagaauacuaaugg

SEQ ID NO: 2083776 - RNA, 19 nt, Artificial Sequence
  Description of Artificial Sequence: Synthetic oligonucleotide
  Sense strand starting at position 2609 of SEQ ID NO: 1881952
ggcacuuaccuauaagguu

SEQ ID NO: 2083777 - RNA, 19 nt, Artificial Sequence
  Description of Artificial Sequence: Synthetic oligonucleotide
  Antisense strand to SEQ ID NO: 2083776
aaccuuauagguaagugcc

SEQ ID NO: 2083778 - RNA, 19 nt, Artificial Sequence
  Description of Artificial Sequence: Synthetic oligonucleotide
  Sense strand starting at position 2647 of SEQ ID NO: 1881952
caggguaguggcuaaacaa

SEQ ID NO: 2083779 - RNA, 19 nt, Artificial Sequence
  Description of Artificial Sequence: Synthetic oligonucleotide
  Antisense strand to SEQ ID NO: 2083778
uuguuuagccacuacccug

SEQ ID NO: 2083780 - RNA, 19 nt, Artificial Sequence
  Description of Artificial Sequence: Synthetic oligonucleotide
  Sense strand starting at position 2833 of SEQ ID NO: 1881952
auggguguacgugaauaua

SEQ ID NO: 2083781 - RNA, 19 nt, Artificial Sequence
  Description of Artificial Sequence: Synthetic oligonucleotide
  Antisense strand to SEQ ID NO: 2083780
uauauucacguacacccau

SEQ ID NO: 2083782 - RNA, 19 nt, Artificial Sequence
  Description of Artificial Sequence: Synthetic oligonucleotide
  Sense strand starting at position 2836 of SEQ ID NO: 1881952
gguguacgugaauauaaca

SEQ ID NO: 2083783 - RNA, 19 nt, Artificial Sequence
  Description of Artificial Sequence: Synthetic oligonucleotide
  Antisense strand to SEQ ID NO: 2083782
uguuauauucacguacacc

SEQ ID NO: 2083784 - RNA, 19 nt, Artificial Sequence
  Description of Artificial Sequence: Synthetic oligonucleotide
  Sense strand starting at position 3152 of SEQ ID NO: 1881952
aaauguaagugucucuaga

SEQ ID NO: 2083785 - RNA, 19 nt, Artificial Sequence
  Description of Artificial Sequence: Synthetic oligonucleotide
  Antisense strand to SEQ ID NO: 2083784
ucuagagacacuuacauuu

SEQ ID NO: 2083786 - RNA, 19 nt, Artificial Sequence
  Description of Artificial Sequence: Synthetic oligonucleotide
  Sense strand starting at position 3154 of SEQ ID NO: 1881952
auguaagugucucuagacu

SEQ ID NO: 2083787 - RNA, 19 nt, Artificial Sequence
  Description of Artificial Sequence: Synthetic oligonucleotide
  Antisense strand to SEQ ID NO: 2083786
agucuagagacacuuacau

SEQ ID NO: 2083788 - RNA, 19 nt, Artificial Sequence
  Description of Artificial Sequence: Synthetic oligonucleotide
  Sense strand starting at position 3186 of SEQ ID NO: 1881952
agcucaccuccugguagaa

SEQ ID NO: 2083789 - RNA, 19 nt, Artificial Sequence
  Description of Artificial Sequence: Synthetic oligonucleotide
  Antisense strand to SEQ ID NO: 2083788
uucuaccaggaggugagcu

SEQ ID NO: 2083790 - RNA, 19 nt, Artificial Sequence
  Description of Artificial Sequence: Synthetic oligonucleotide
  Sense strand starting at position 3203 of SEQ ID NO: 1881952
aauguaaaugagugacagu

SEQ ID NO: 2083791 - RNA, 19 nt, Artificial Sequence
  Description of Artificial Sequence: Synthetic oligonucleotide
  Antisense strand to SEQ ID NO: 2083790
acugucacucauuuacauu

SEQ ID NO: 2083792 - RNA, 19 nt, Artificial Sequence
  Description of Artificial Sequence: Synthetic oligonucleotide
  Sense strand starting at position 3216 of SEQ ID NO: 1881952
gacaguguuuccuugagau

SEQ ID NO: 2083793 - RNA, 19 nt, Artificial Sequence
  Description of Artificial Sequence: Synthetic oligonucleotide
  Antisense strand to SEQ ID NO: 2083792
aucucaaggaaacacuguc

SEQ ID NO: 2083794 - RNA, 19 nt, Artificial Sequence
  Description of Artificial Sequence: Synthetic oligonucleotide
  Sense strand starting at position 3218 of SEQ ID NO: 1881952
caguguuuccuugagauga

SEQ ID NO: 2083795 - RNA, 19 nt, Artificial Sequence
  Description of Artificial Sequence: Synthetic oligonucleotide
  Antisense strand to SEQ ID NO: 2083794
ucaucucaaggaaacacug

SEQ ID NO: 2083796 - RNA, 19 nt, Artificial Sequence
  Description of Artificial Sequence: Synthetic oligonucleotide
  Sense strand starting at position 3222 of SEQ ID NO: 1881952
guuuccuugagaugaaguu

SEQ ID NO: 2083797 - RNA, 19 nt, Artificial Sequence
  Description of Artificial Sequence: Synthetic oligonucleotide
  Antisense strand to SEQ ID NO: 2083796
aacuucaucucaaggaaac

SEQ ID NO: 2083798 - RNA, 19 nt, Artificial Sequence
  Description of Artificial Sequence: Synthetic oligonucleotide
  Sense strand starting at position 3836 of SEQ ID NO: 1881952
cacugcagcggugagaaua

SEQ ID NO: 2083799 - RNA, 19 nt, Artificial Sequence
  Description of Artificial Sequence: Synthetic oligonucleotide
  Antisense strand to SEQ ID NO: 2083798
uauucucaccgcugcagug

SEQ ID NO: 2083800 - RNA, 19 nt, Artificial Sequence
  Description of Artificial Sequence: Synthetic oligonucleotide
  Sense strand starting at position 3844 of SEQ ID NO: 1881952
cggugagaauaugucucau

SEQ ID NO: 2083801 - RNA, 19 nt, Artificial Sequence
  Description of Artificial Sequence: Synthetic oligonucleotide
  Antisense strand to SEQ ID NO: 2083800
augagacauauucucaccg

SEQ ID NO: 2083802 - RNA, 19 nt, Artificial Sequence
  Description of Artificial Sequence: Synthetic oligonucleotide
  Sense strand starting at position 3846 of SEQ ID NO: 1881952
gugagaauaugucucauua

SEQ ID NO: 2083803 - RNA, 19 nt, Artificial Sequence
  Description of Artificial Sequence: Synthetic oligonucleotide
  Antisense strand to SEQ ID NO: 2083802
uaaugagacauauucucac

SEQ ID NO: 2083804 - RNA, 19 nt, Artificial Sequence
  Description of Artificial Sequence: Synthetic oligonucleotide
  Sense strand starting at position 89 of SEQ ID NO: 1881953
guugaaauugagcaauggu

SEQ ID NO: 2083805 - RNA, 19 nt, Artificial Sequence
  Description of Artificial Sequence: Synthetic oligonucleotide
  Antisense strand to SEQ ID NO: 2083804
accauugcucaauuucaac

SEQ ID NO: 2083806 - RNA, 19 nt, Artificial Sequence
  Description of Artificial Sequence: Synthetic oligonucleotide
  Sense strand starting at position 92 of SEQ ID NO: 1881953
gaaauugagcaauggugaa

SEQ ID NO: 2083807 - RNA, 19 nt, Artificial Sequence
  Description of Artificial Sequence: Synthetic oligonucleotide
  Antisense strand to SEQ ID NO: 2083806
uucaccauugcucaauuuc

SEQ ID NO: 2083808 - RNA, 19 nt, Artificial Sequence
  Description of Artificial Sequence: Synthetic oligonucleotide
  Sense strand starting at position 207 of SEQ ID NO: 1881953
aggacauauggcuacugua

SEQ ID NO: 2083809 - RNA, 19 nt, Artificial Sequence
  Description of Artificial Sequence: Synthetic oligonucleotide
  Antisense strand to SEQ ID NO: 2083808
uacaguagccauauguccu

SEQ ID NO: 2083810 - RNA, 19 nt, Artificial Sequence
  Description of Artificial Sequence: Synthetic oligonucleotide
  Sense strand starting at position 242 of SEQ ID NO: 1881953
ugacuuaaauggccacuaa

SEQ ID NO: 2083811 - RNA, 19 nt, Artificial Sequence
  Description of Artificial Sequence: Synthetic oligonucleotide
  Antisense strand to SEQ ID NO: 2083810
uuaguggccauuuaaguca

SEQ ID NO: 2083812 - RNA, 19 nt, Artificial Sequence
  Description of Artificial Sequence: Synthetic oligonucleotide
  Sense strand starting at position 432 of SEQ ID NO: 1881953
cccguauacuauuugguga

SEQ ID NO: 2083813 - RNA, 19 nt, Artificial Sequence
  Description of Artificial Sequence: Synthetic oligonucleotide
  Antisense strand to SEQ ID NO: 2083812
ucaccaaauaguauacggg

SEQ ID NO: 2083814 - RNA, 19 nt, Artificial Sequence
  Description of Artificial Sequence: Synthetic oligonucleotide
  Sense strand starting at position 576 of SEQ ID NO: 1881953
cugaaagcugcagauaaua

SEQ ID NO: 2083815 - RNA, 19 nt, Artificial Sequence
  Description of Artificial Sequence: Synthetic oligonucleotide
  Antisense strand to SEQ ID NO: 2083814
uauuaucugcagcuuucag

SEQ ID NO: 2083816 - RNA, 19 nt, Artificial Sequence
  Description of Artificial Sequence: Synthetic oligonucleotide
  Sense strand starting at position 655 of SEQ ID NO: 1881953
gcaacagugaacugauaug

SEQ ID NO: 2083817 - RNA, 19 nt, Artificial Sequence
  Description of Artificial Sequence: Synthetic oligonucleotide
  Antisense strand to SEQ ID NO: 2083816
cauaucaguucacuguugc

SEQ ID NO: 2083818 - RNA, 19 nt, Artificial Sequence
  Description of Artificial Sequence: Synthetic oligonucleotide
  Sense strand starting at position 743 of SEQ ID NO: 1881953
auggcuuagaguuggagaa

SEQ ID NO: 2083819 - RNA, 19 nt, Artificial Sequence
  Description of Artificial Sequence: Synthetic oligonucleotide
  Antisense strand to SEQ ID NO: 2083818
uucuccaacucuaagccau

SEQ ID NO: 2083820 - RNA, 19 nt, Artificial Sequence
  Description of Artificial Sequence: Synthetic oligonucleotide
  Sense strand starting at position 744 of SEQ ID NO: 1881953
uggcuuagaguuggagaaa

SEQ ID NO: 2083821 - RNA, 19 nt, Artificial Sequence
  Description of Artificial Sequence: Synthetic oligonucleotide
  Antisense strand to SEQ ID NO: 2083820
uuucuccaacucuaagcca

SEQ ID NO: 2083822 - RNA, 19 nt, Artificial Sequence
  Description of Artificial Sequence: Synthetic oligonucleotide
  Sense strand starting at position 922 of SEQ ID NO: 1881953
gccagaaucgaauacuuaa

SEQ ID NO: 2083823 - RNA, 19 nt, Artificial Sequence
  Description of Artificial Sequence: Synthetic oligonucleotide
  Antisense strand to SEQ ID NO: 2083822
uuaaguauucgauucuggc

SEQ ID NO: 2083824 - RNA, 19 nt, Artificial Sequence
  Description of Artificial Sequence: Synthetic oligonucleotide
  Sense strand starting at position 925 of SEQ ID NO: 1881953
agaaucgaauacuuaaguu

SEQ ID NO: 2083825 - RNA, 19 nt, Artificial Sequence
  Description of Artificial Sequence: Synthetic oligonucleotide
  Antisense strand to SEQ ID NO: 2083824
aacuuaaguauucgauucu

SEQ ID NO: 2083826 - RNA, 19 nt, Artificial Sequence
  Description of Artificial Sequence: Synthetic oligonucleotide
  Sense strand starting at position 981 of SEQ ID NO: 1881953
ucaguagaauagcuagaaa

SEQ ID NO: 2083827 - RNA, 19 nt, Artificial Sequence
  Description of Artificial Sequence: Synthetic oligonucleotide
  Antisense strand to SEQ ID NO: 2083826
uuucuagcuauucuacuga

SEQ ID NO: 2083828 - RNA, 19 nt, Artificial Sequence
  Description of Artificial Sequence: Synthetic oligonucleotide
  Sense strand starting at position 1067 of SEQ ID NO: 1881953
guagaagaaucaccugcaa

SEQ ID NO: 2083829 - RNA, 19 nt, Artificial Sequence
  Description of Artificial Sequence: Synthetic oligonucleotide
  Antisense strand to SEQ ID NO: 2083828
uugcaggugauucuucuac

SEQ ID NO: 2083830 - RNA, 19 nt, Artificial Sequence
  Description of Artificial Sequence: Synthetic oligonucleotide
  Sense strand starting at position 1110 of SEQ ID NO: 1881953
guggaaauuccuggauacc

SEQ ID NO: 2083831 - RNA, 19 nt, Artificial Sequence
  Description of Artificial Sequence: Synthetic oligonucleotide
  Antisense strand to SEQ ID NO: 2083830
gguauccaggaauuuccac

SEQ ID NO: 2083832 - RNA, 19 nt, Artificial Sequence
  Description of Artificial Sequence: Synthetic oligonucleotide
  Sense strand starting at position 1157 of SEQ ID NO: 1881953
aaggaagaggccugguaau

SEQ ID NO: 2083833 - RNA, 19 nt, Artificial Sequence
  Description of Artificial Sequence: Synthetic oligonucleotide
  Antisense strand to SEQ ID NO: 2083832
auuaccaggccucuuccuu

SEQ ID NO: 2083834 - RNA, 19 nt, Artificial Sequence
  Description of Artificial Sequence: Synthetic oligonucleotide
  Sense strand starting at position 1281 of SEQ ID NO: 1881953
acagauuagauucgucaga

SEQ ID NO: 2083835 - RNA, 19 nt, Artificial Sequence
  Description of Artificial Sequence: Synthetic oligonucleotide
  Antisense strand to SEQ ID NO: 2083834
ucugacgaaucuaaucugu

SEQ ID NO: 2083836 - RNA, 19 nt, Artificial Sequence
  Description of Artificial Sequence: Synthetic oligonucleotide
  Sense strand starting at position 1282 of SEQ ID NO: 1881953
cagauuagauucgucagag

SEQ ID NO: 2083837 - RNA, 19 nt, Artificial Sequence
  Description of Artificial Sequence: Synthetic oligonucleotide
  Antisense strand to SEQ ID NO: 2083836
cucugacgaaucuaaucug

SEQ ID NO: 2083838 - RNA, 19 nt, Artificial Sequence
  Description of Artificial Sequence: Synthetic oligonucleotide
  Sense strand starting at position 1283 of SEQ ID NO: 1881953
agauuagauucgucagaga

SEQ ID NO: 2083839 - RNA, 19 nt, Artificial Sequence
  Description of Artificial Sequence: Synthetic oligonucleotide
  Antisense strand to SEQ ID NO: 2083838
ucucugacgaaucuaaucu

SEQ ID NO: 2083840 - RNA, 19 nt, Artificial Sequence
  Description of Artificial Sequence: Synthetic oligonucleotide
  Sense strand starting at position 1349 of SEQ ID NO: 1881953
gccaauuucuggcccaauu

SEQ ID NO: 2083841 - RNA, 19 nt, Artificial Sequence
  Description of Artificial Sequence: Synthetic oligonucleotide
  Antisense strand to SEQ ID NO: 2083840
aauugggccagaaauuggc

SEQ ID NO: 2083842 - RNA, 19 nt, Artificial Sequence
  Description of Artificial Sequence: Synthetic oligonucleotide
  Sense strand starting at position 1394 of SEQ ID NO: 1881953
aguaacacucuguaacacu

SEQ ID NO: 2083843 - RNA, 19 nt, Artificial Sequence
  Description of Artificial Sequence: Synthetic oligonucleotide
  Antisense strand to SEQ ID NO: 2083842
aguguuacagaguguuacu

SEQ ID NO: 2083844 - RNA, 19 nt, Artificial Sequence
  Description of Artificial Sequence: Synthetic oligonucleotide
  Sense strand starting at position 2157 of SEQ ID NO: 1881953
gguuccuuccuugauacau

SEQ ID NO: 2083845 - RNA, 19 nt, Artificial Sequence
  Description of Artificial Sequence: Synthetic oligonucleotide
  Antisense strand to SEQ ID NO: 2083844
auguaucaaggaaggaacc

SEQ ID NO: 2083846 - RNA, 19 nt, Artificial Sequence
  Description of Artificial Sequence: Synthetic oligonucleotide
  Sense strand starting at position 2302 of SEQ ID NO: 1881953
acaaucuaucaguaaggca

SEQ ID NO: 2083847 - RNA, 19 nt, Artificial Sequence
  Description of Artificial Sequence: Synthetic oligonucleotide
  Antisense strand to SEQ ID NO: 2083846
ugccuuacugauagauugu

SEQ ID NO: 2083848 - RNA, 19 nt, Artificial Sequence
  Description of Artificial Sequence: Synthetic oligonucleotide
  Sense strand starting at position 2310 of SEQ ID NO: 1881953
ucaguaaggcauuaucauu

SEQ ID NO: 2083849 - RNA, 19 nt, Artificial Sequence
  Description of Artificial Sequence: Synthetic oligonucleotide
  Antisense strand to SEQ ID NO: 2083848
aaugauaaugccuuacuga

SEQ ID NO: 2083850 - RNA, 19 nt, Artificial Sequence
  Description of Artificial Sequence: Synthetic oligonucleotide
  Sense strand starting at position 2367 of SEQ ID NO: 1881953
ugaagaauuugggauagua

SEQ ID NO: 2083851 - RNA, 19 nt, Artificial Sequence
  Description of Artificial Sequence: Synthetic oligonucleotide
  Antisense strand to SEQ ID NO: 2083850
uacuaucccaaauucuuca

SEQ ID NO: 2083852 - RNA, 19 nt, Artificial Sequence
  Description of Artificial Sequence: Synthetic oligonucleotide
  Sense strand starting at position 2377 of SEQ ID NO: 1881953
gggauaguaucaucuauaa

SEQ ID NO: 2083853 - RNA, 19 nt, Artificial Sequence
  Description of Artificial Sequence: Synthetic oligonucleotide
  Antisense strand to SEQ ID NO: 2083852
uuauagaugauacuauccc

SEQ ID NO: 2083854 - RNA, 19 nt, Artificial Sequence
  Description of Artificial Sequence: Synthetic oligonucleotide
  Sense strand starting at position 2534 of SEQ ID NO: 1881953
uacagacauccuggugaga

SEQ ID NO: 2083855 - RNA, 19 nt, Artificial Sequence
  Description of Artificial Sequence: Synthetic oligonucleotide
  Antisense strand to SEQ ID NO: 2083854
ucucaccaggaugucugua

SEQ ID NO: 2083856 - RNA, 19 nt, Artificial Sequence
  Description of Artificial Sequence: Synthetic oligonucleotide
  Sense strand starting at position 2838 of SEQ ID NO: 1881953
gugaauauauggguaugau

SEQ ID NO: 2083857 - RNA, 19 nt, Artificial Sequence
  Description of Artificial Sequence: Synthetic oligonucleotide
  Antisense strand to SEQ ID NO: 2083856
aucauacccauauauucac

SEQ ID NO: 2083858 - RNA, 19 nt, Artificial Sequence
  Description of Artificial Sequence: Synthetic oligonucleotide
  Sense strand starting at position 2841 of SEQ ID NO: 1881953
aauauauggguaugaugca

SEQ ID NO: 2083859 - RNA, 19 nt, Artificial Sequence
  Description of Artificial Sequence: Synthetic oligonucleotide
  Antisense strand to SEQ ID NO: 2083858
ugcaucauacccauauauu

SEQ ID NO: 2083860 - RNA, 19 nt, Artificial Sequence
  Description of Artificial Sequence: Synthetic oligonucleotide
  Sense strand starting at position 2913 of SEQ ID NO: 1881953
auguauugagggugaaauu

SEQ ID NO: 2083861 - RNA, 19 nt, Artificial Sequence
  Description of Artificial Sequence: Synthetic oligonucleotide
  Antisense strand to SEQ ID NO: 2083860
aauuucacccucaauacau

SEQ ID NO: 2083862 - RNA, 19 nt, Artificial Sequence
  Description of Artificial Sequence: Synthetic oligonucleotide
  Sense strand starting at position 3026 of SEQ ID NO: 1881953
uuccucuugaugggaauga

SEQ ID NO: 2083863 - RNA, 19 nt, Artificial Sequence
  Description of Artificial Sequence: Synthetic oligonucleotide
  Antisense strand to SEQ ID NO: 2083862
ucauucccaucaagaggaa

SEQ ID NO: 2083864 - RNA, 19 nt, Artificial Sequence
  Description of Artificial Sequence: Synthetic oligonucleotide
  Sense strand starting at position 3103 of SEQ ID NO: 1881953
ccaauagguguguaauaau

SEQ ID NO: 2083865 - RNA, 19 nt, Artificial Sequence
  Description of Artificial Sequence: Synthetic oligonucleotide
  Antisense strand to SEQ ID NO: 2083864
auuauuacacaccuauugg

SEQ ID NO: 2083866 - RNA, 19 nt, Artificial Sequence
  Description of Artificial Sequence: Synthetic oligonucleotide
  Sense strand starting at position 3153 of SEQ ID NO: 1881953
guuaaugcuccugaugaaa

SEQ ID NO: 2083867 - RNA, 19 nt, Artificial Sequence
  Description of Artificial Sequence: Synthetic oligonucleotide
  Antisense strand to SEQ ID NO: 2083866
uuucaucaggagcauuaac

SEQ ID NO: 2083868 - RNA, 19 nt, Artificial Sequence
  Description of Artificial Sequence: Synthetic oligonucleotide
  Sense strand starting at position 3182 of SEQ ID NO: 1881953
ugaucuagauucuuuagag

SEQ ID NO: 2083869 - RNA, 19 nt, Artificial Sequence
  Description of Artificial Sequence: Synthetic oligonucleotide
  Antisense strand to SEQ ID NO: 2083868
cucuaaagaaucuagauca

SEQ ID NO: 2083870 - RNA, 19 nt, Artificial Sequence
  Description of Artificial Sequence: Synthetic oligonucleotide
  Sense strand starting at position 3188 of SEQ ID NO: 1881953
agauucuuuagagaguguu

SEQ ID NO: 2083871 - RNA, 19 nt, Artificial Sequence
  Description of Artificial Sequence: Synthetic oligonucleotide
  Antisense strand to SEQ ID NO: 2083870
aacacucucuaaagaaucu

SEQ ID NO: 2083872 - RNA, 19 nt, Artificial Sequence
  Description of Artificial Sequence: Synthetic oligonucleotide
  Sense strand starting at position 3342 of SEQ ID NO: 1881953
uacagaggguguuuaagaa

SEQ ID NO: 2083873 - RNA, 19 nt, Artificial Sequence
  Description of Artificial Sequence: Synthetic oligonucleotide
  Antisense strand to SEQ ID NO: 2083872
uucuuaaacacccucugua

SEQ ID NO: 2083874 - RNA, 19 nt, Artificial Sequence
  Description of Artificial Sequence: Synthetic oligonucleotide
  Sense strand starting at position 3439 of SEQ ID NO: 1881953
agcuguacccaacauagaa

SEQ ID NO: 2083875 - RNA, 19 nt, Artificial Sequence
  Description of Artificial Sequence: Synthetic oligonucleotide
  Antisense strand to SEQ ID NO: 2083874
uucuauguuggguacagcu

SEQ ID NO: 2083876 - RNA, 19 nt, Artificial Sequence
  Description of Artificial Sequence: Synthetic oligonucleotide
  Sense strand starting at position 3738 of SEQ ID NO: 1881953
ccaauuugguuguaauuug

SEQ ID NO: 2083877 - RNA, 19 nt, Artificial Sequence
  Description of Artificial Sequence: Synthetic oligonucleotide
  Antisense strand to SEQ ID NO: 2083876
caaauuacaaccaaauugg

SEQ ID NO: 2083878 - RNA, 19 nt, Artificial Sequence
  Description of Artificial Sequence: Synthetic oligonucleotide
  Sense strand starting at position 3818 of SEQ ID NO: 1881953
aagaguuaccagugauaac

SEQ ID NO: 2083879 - RNA, 19 nt, Artificial Sequence
  Description of Artificial Sequence: Synthetic oligonucleotide
  Antisense strand to SEQ ID NO: 2083878
guuaucacugguaacucuu

SEQ ID NO: 2083880 - RNA, 19 nt, Artificial Sequence
  Description of Artificial Sequence: Synthetic oligonucleotide
  Sense strand starting at position 3877 of SEQ ID NO: 1881953
augaguccugggcagacua

SEQ ID NO: 2083881 - RNA, 19 nt, Artificial Sequence
  Description of Artificial Sequence: Synthetic oligonucleotide
  Antisense strand to SEQ ID NO: 2083880
uagucugcccaggacucau

SEQ ID NO: 2083882 - RNA, 19 nt, Artificial Sequence
  Description of Artificial Sequence: Synthetic oligonucleotide
  Sense strand starting at position 3879 of SEQ ID NO: 1881953
gaguccugggcagacuauu

SEQ ID NO: 2083883 - RNA, 19 nt, Artificial Sequence
  Description of Artificial Sequence: Synthetic oligonucleotide
  Antisense strand to SEQ ID NO: 2083882
aauagucugcccaggacuc

SEQ ID NO: 2083884 - RNA, 19 nt, Artificial Sequence
  Description of Artificial Sequence: Synthetic oligonucleotide
  Sense strand starting at position 26 of SEQ ID NO: 1881954
aagcaucacugggcaagaa

SEQ ID NO: 2083885 - RNA, 19 nt, Artificial Sequence
  Description of Artificial Sequence: Synthetic oligonucleotide
  Antisense strand to SEQ ID NO: 2083884
uucuugcccagugaugcuu

SEQ ID NO: 2083886 - RNA, 19 nt, Artificial Sequence
  Description of Artificial Sequence: Synthetic oligonucleotide
  Sense strand starting at position 166 of SEQ ID NO: 1881954
aguuauugaguguauagua

SEQ ID NO: 2083887 - RNA, 19 nt, Artificial Sequence
  Description of Artificial Sequence: Synthetic oligonucleotide
  Antisense strand to SEQ ID NO: 2083886
uacuauacacucaauaacu

SEQ ID NO: 2083888 - RNA, 19 nt, Artificial Sequence
  Description of Artificial Sequence: Synthetic oligonucleotide
  Sense strand starting at position 238 of SEQ ID NO: 1881954
ggagaauauuucuaggagu

SEQ ID NO: 2083889 - RNA, 19 nt, Artificial Sequence
  Description of Artificial Sequence: Synthetic oligonucleotide
  Antisense strand to SEQ ID NO: 2083888
acuccuagaaauauucucc

SEQ ID NO: 2083890 - RNA, 19 nt, Artificial Sequence
  Description of Artificial Sequence: Synthetic oligonucleotide
  Sense strand starting at position 241 of SEQ ID NO: 1881954
gaauauuucuaggagugau

SEQ ID NO: 2083891 - RNA, 19 nt, Artificial Sequence
  Description of Artificial Sequence: Synthetic oligonucleotide
  Antisense strand to SEQ ID NO: 2083890
aucacuccuagaaauauuc

SEQ ID NO: 2083892 - RNA, 19 nt, Artificial Sequence
  Description of Artificial Sequence: Synthetic oligonucleotide
  Sense strand starting at position 357 of SEQ ID NO: 1881954
agaagaggguauucaugua

SEQ ID NO: 2083893 - RNA, 19 nt, Artificial Sequence
  Description of Artificial Sequence: Synthetic oligonucleotide
  Antisense strand to SEQ ID NO: 2083892
uacaugaauacccucuucu

SEQ ID NO: 2083894 - RNA, 19 nt, Artificial Sequence
  Description of Artificial Sequence: Synthetic oligonucleotide
  Sense strand starting at position 393 of SEQ ID NO: 1881954
uugggucacacguaacuau

SEQ ID NO: 2083895 - RNA, 19 nt, Artificial Sequence
  Description of Artificial Sequence: Synthetic oligonucleotide
  Antisense strand to SEQ ID NO: 2083894
auaguuacgugugacccaa

SEQ ID NO: 2083896 - RNA, 19 nt, Artificial Sequence
  Description of Artificial Sequence: Synthetic oligonucleotide
  Sense strand starting at position 513 of SEQ ID NO: 1881954
agaaauguguuaucuaucu

SEQ ID NO: 2083897 - RNA, 19 nt, Artificial Sequence
  Description of Artificial Sequence: Synthetic oligonucleotide
  Antisense strand to SEQ ID NO: 2083896
agauagauaacacauuucu

SEQ ID NO: 2083898 - RNA, 19 nt, Artificial Sequence
  Description of Artificial Sequence: Synthetic oligonucleotide
  Sense strand starting at position 595 of SEQ ID NO: 1881954
gugagugacagucauugac

SEQ ID NO: 2083899 - RNA, 19 nt, Artificial Sequence
  Description of Artificial Sequence: Synthetic oligonucleotide
  Antisense strand to SEQ ID NO: 2083898
gucaaugacugucacucac

SEQ ID NO: 2083900 - RNA, 19 nt, Artificial Sequence
  Description of Artificial Sequence: Synthetic oligonucleotide
  Sense strand starting at position 597 of SEQ ID NO: 1881954
gagugacagucauugacaa

SEQ ID NO: 2083901 - RNA, 19 nt, Artificial Sequence
  Description of Artificial Sequence: Synthetic oligonucleotide
  Antisense strand to SEQ ID NO: 2083900
uugucaaugacugucacuc

SEQ ID NO: 2083902 - RNA, 19 nt, Artificial Sequence
  Description of Artificial Sequence: Synthetic oligonucleotide
  Sense strand starting at position 598 of SEQ ID NO: 1881954
agugacagucauugacaaa

SEQ ID NO: 2083903 - RNA, 19 nt, Artificial Sequence
  Description of Artificial Sequence: Synthetic oligonucleotide
  Antisense strand to SEQ ID NO: 2083902
uuugucaaugacugucacu

SEQ ID NO: 2083904 - RNA, 19 nt, Artificial Sequence
  Description of Artificial Sequence: Synthetic oligonucleotide
  Sense strand starting at position 677 of SEQ ID NO: 1881954
uugauuguugcagaugaaa

SEQ ID NO: 2083905 - RNA, 19 nt, Artificial Sequence
  Description of Artificial Sequence: Synthetic oligonucleotide
  Antisense strand to SEQ ID NO: 2083904
uuucaucugcaacaaucaa

SEQ ID NO: 2083906 - RNA, 19 nt, Artificial Sequence
  Description of Artificial Sequence: Synthetic oligonucleotide
  Sense strand starting at position 679 of SEQ ID NO: 1881954
gauuguugcagaugaaagg

SEQ ID NO: 2083907 - RNA, 19 nt, Artificial Sequence
  Description of Artificial Sequence: Synthetic oligonucleotide
  Antisense strand to SEQ ID NO: 2083906
ccuuucaucugcaacaauc

SEQ ID NO: 2083908 - RNA, 19 nt, Artificial Sequence
  Description of Artificial Sequence: Synthetic oligonucleotide
  Sense strand starting at position 778 of SEQ ID NO: 1881954
ucuuccaaggaggguuaua

SEQ ID NO: 2083909 - RNA, 19 nt, Artificial Sequence
  Description of Artificial Sequence: Synthetic oligonucleotide
  Antisense strand to SEQ ID NO: 2083908
uauaacccuccuuggaaga

SEQ ID NO: 2083910 - RNA, 19 nt, Artificial Sequence
  Description of Artificial Sequence: Synthetic oligonucleotide
  Sense strand starting at position 789 of SEQ ID NO: 1881954
ggguuauauagaggcuaaa

SEQ ID NO: 2083911 - RNA, 19 nt, Artificial Sequence
  Description of Artificial Sequence: Synthetic oligonucleotide
  Antisense strand to SEQ ID NO: 2083910
uuuagccucuauauaaccc

SEQ ID NO: 2083912 - RNA, 19 nt, Artificial Sequence
  Description of Artificial Sequence: Synthetic oligonucleotide
  Sense strand starting at position 792 of SEQ ID NO: 1881954
uuauauagaggcuaaaguu

SEQ ID NO: 2083913 - RNA, 19 nt, Artificial Sequence
  Description of Artificial Sequence: Synthetic oligonucleotide
  Antisense strand to SEQ ID NO: 2083912
aacuuuagccucuauauaa

SEQ ID NO: 2083914 - RNA, 19 nt, Artificial Sequence
  Description of Artificial Sequence: Synthetic oligonucleotide
  Sense strand starting at position 805 of SEQ ID NO: 1881954
aaaguugcuggugaugaaa

SEQ ID NO: 2083915 - RNA, 19 nt, Artificial Sequence
  Description of Artificial Sequence: Synthetic oligonucleotide
  Antisense strand to SEQ ID NO: 2083914
uuucaucaccagcaacuuu

SEQ ID NO: 2083916 - RNA, 19 nt, Artificial Sequence
  Description of Artificial Sequence: Synthetic oligonucleotide
  Sense strand starting at position 808 of SEQ ID NO: 1881954
guugcuggugaugaaacau

SEQ ID NO: 2083917 - RNA, 19 nt, Artificial Sequence
  Description of Artificial Sequence: Synthetic oligonucleotide
  Antisense strand to SEQ ID NO: 2083916
auguuucaucaccagcaac

SEQ ID NO: 2083918 - RNA, 19 nt, Artificial Sequence
  Description of Artificial Sequence: Synthetic oligonucleotide
  Sense strand starting at position 907 of SEQ ID NO: 1881954
gguuauuuccaauguuccu

SEQ ID NO: 2083919 - RNA, 19 nt, Artificial Sequence
  Description of Artificial Sequence: Synthetic oligonucleotide
  Antisense strand to SEQ ID NO: 2083918
aggaacauuggaaauaacc

SEQ ID NO: 2083920 - RNA, 19 nt, Artificial Sequence
  Description of Artificial Sequence: Synthetic oligonucleotide
  Sense strand starting at position 920 of SEQ ID NO: 1881954
guuccucuucuggaagaug

SEQ ID NO: 2083921 - RNA, 19 nt, Artificial Sequence
  Description of Artificial Sequence: Synthetic oligonucleotide
  Antisense strand to SEQ ID NO: 2083920
caucuuccagaagaggaac

SEQ ID NO: 2083922 - RNA, 19 nt, Artificial Sequence
  Description of Artificial Sequence: Synthetic oligonucleotide
  Sense strand starting at position 935 of SEQ ID NO: 1881954
gauggugcucaugggaaga

SEQ ID NO: 2083923 - RNA, 19 nt, Artificial Sequence
  Description of Artificial Sequence: Synthetic oligonucleotide
  Antisense strand to SEQ ID NO: 2083922
ucuucccaugagcaccauc

SEQ ID NO: 2083924 - RNA, 19 nt, Artificial Sequence
  Description of Artificial Sequence: Synthetic oligonucleotide
  Sense strand starting at position 1010 of SEQ ID NO: 1881954
caguuuauccucugaaagg

SEQ ID NO: 2083925 - RNA, 19 nt, Artificial Sequence
  Description of Artificial Sequence: Synthetic oligonucleotide
  Antisense strand to SEQ ID NO: 2083924
ccuuucagaggauaaacug

SEQ ID NO: 2083926 - RNA, 19 nt, Artificial Sequence
  Description of Artificial Sequence: Synthetic oligonucleotide
  Sense strand starting at position 1019 of SEQ ID NO: 1881954
cucugaaaggauugcuuua

SEQ ID NO: 2083927 - RNA, 19 nt, Artificial Sequence
  Description of Artificial Sequence: Synthetic oligonucleotide
  Antisense strand to SEQ ID NO: 2083926
uaaagcaauccuuucagag

SEQ ID NO: 2083928 - RNA, 19 nt, Artificial Sequence
  Description of Artificial Sequence: Synthetic oligonucleotide
  Sense strand starting at position 1021 of SEQ ID NO: 1881954
cugaaaggauugcuuuaua

SEQ ID NO: 2083929 - RNA, 19 nt, Artificial Sequence
  Description of Artificial Sequence: Synthetic oligonucleotide
  Antisense strand to SEQ ID NO: 2083928
uauaaagcaauccuuucag

SEQ ID NO: 2083930 - RNA, 19 nt, Artificial Sequence
  Description of Artificial Sequence: Synthetic oligonucleotide
  Sense strand starting at position 1126 of SEQ ID NO: 1881954
aagguauaccucugggauc

SEQ ID NO: 2083931 - RNA, 19 nt, Artificial Sequence
  Description of Artificial Sequence: Synthetic oligonucleotide
  Antisense strand to SEQ ID NO: 2083930
gaucccagagguauaccuu

SEQ ID NO: 2083932 - RNA, 19 nt, Artificial Sequence
  Description of Artificial Sequence: Synthetic oligonucleotide
  Sense strand starting at position 1128 of SEQ ID NO: 1881954
gguauaccucugggaucag

SEQ ID NO: 2083933 - RNA, 19 nt, Artificial Sequence
  Description of Artificial Sequence: Synthetic oligonucleotide
  Antisense strand to SEQ ID NO: 2083932
cugaucccagagguauacc

SEQ ID NO: 2083934 - RNA, 19 nt, Artificial Sequence
  Description of Artificial Sequence: Synthetic oligonucleotide
  Sense strand starting at position 1270 of SEQ ID NO: 1881954
aguuaauaauaacucgagu

SEQ ID NO: 2083935 - RNA, 19 nt, Artificial Sequence
  Description of Artificial Sequence: Synthetic oligonucleotide
  Antisense strand to SEQ ID NO: 2083934
acucgaguuauuauuaacu

SEQ ID NO: 2083936 - RNA, 19 nt, Artificial Sequence
  Description of Artificial Sequence: Synthetic oligonucleotide
  Sense strand starting at position 1281 of SEQ ID NO: 1881954
acucgaguugcauaucuaa

SEQ ID NO: 2083937 - RNA, 19 nt, Artificial Sequence
  Description of Artificial Sequence: Synthetic oligonucleotide
  Antisense strand to SEQ ID NO: 2083936
uuagauaugcaacucgagu

SEQ ID NO: 2083938 - RNA, 19 nt, Artificial Sequence
  Description of Artificial Sequence: Synthetic oligonucleotide
  Sense strand starting at position 1487 of SEQ ID NO: 1881954
gugaucauagagugauuau

SEQ ID NO: 2083939 - RNA, 19 nt, Artificial Sequence
  Description of Artificial Sequence: Synthetic oligonucleotide
  Antisense strand to SEQ ID NO: 2083938
auaaucacucuaugaucac

SEQ ID NO: 2083940 - RNA, 19 nt, Artificial Sequence
  Description of Artificial Sequence: Synthetic oligonucleotide
  Sense strand starting at position 1490 of SEQ ID NO: 1881954
aucauagagugauuaucau

SEQ ID NO: 2083941 - RNA, 19 nt, Artificial Sequence
  Description of Artificial Sequence: Synthetic oligonucleotide
  Antisense strand to SEQ ID NO: 2083940
augauaaucacucuaugau

SEQ ID NO: 2083942 - RNA, 19 nt, Artificial Sequence
  Description of Artificial Sequence: Synthetic oligonucleotide
  Sense strand starting at position 1517 of SEQ ID NO: 1881954
cuaggcuaauucccaagau

SEQ ID NO: 2083943 - RNA, 19 nt, Artificial Sequence
  Description of Artificial Sequence: Synthetic oligonucleotide
  Antisense strand to SEQ ID NO: 2083942
aucuugggaauuagccuag

SEQ ID NO: 2083944 - RNA, 19 nt, Artificial Sequence
  Description of Artificial Sequence: Synthetic oligonucleotide
  Sense strand starting at position 1551 of SEQ ID NO: 1881954
augcuauauguuggauaaa

SEQ ID NO: 2083945 - RNA, 19 nt, Artificial Sequence
  Description of Artificial Sequence: Synthetic oligonucleotide
  Antisense strand to SEQ ID NO: 2083944
uuuauccaacauauagcau

SEQ ID NO: 2083946 - RNA, 19 nt, Artificial Sequence
  Description of Artificial Sequence: Synthetic oligonucleotide
  Sense strand starting at position 1685 of SEQ ID NO: 1881954
guuguauacagagacguua

SEQ ID NO: 2083947 - RNA, 19 nt, Artificial Sequence
  Description of Artificial Sequence: Synthetic oligonucleotide
  Antisense strand to SEQ ID NO: 2083946
uaacgucucuguauacaac

SEQ ID NO: 2083948 - RNA, 19 nt, Artificial Sequence
  Description of Artificial Sequence: Synthetic oligonucleotide
  Sense strand starting at position 1852 of SEQ ID NO: 1881954
augucagaauguucugaug

SEQ ID NO: 2083949 - RNA, 19 nt, Artificial Sequence
  Description of Artificial Sequence: Synthetic oligonucleotide
  Antisense strand to SEQ ID NO: 2083948
caucagaacauucugacau

SEQ ID NO: 2083950 - RNA, 19 nt, Artificial Sequence
  Description of Artificial Sequence: Synthetic oligonucleotide
  Sense strand starting at position 2048 of SEQ ID NO: 1881954
gaacuuucugaguacugug

SEQ ID NO: 2083951 - RNA, 19 nt, Artificial Sequence
  Description of Artificial Sequence: Synthetic oligonucleotide
  Antisense strand to SEQ ID NO: 2083950
cacaguacucagaaaguuc

SEQ ID NO: 2083952 - RNA, 19 nt, Artificial Sequence
  Description of Artificial Sequence: Synthetic oligonucleotide
  Sense strand starting at position 2453 of SEQ ID NO: 1881954
agaaaugagcaaugguacu

SEQ ID NO: 2083953 - RNA, 19 nt, Artificial Sequence
  Description of Artificial Sequence: Synthetic oligonucleotide
  Antisense strand to SEQ ID NO: 2083952
aguaccauugcucauuucu

SEQ ID NO: 2083954 - RNA, 19 nt, Artificial Sequence
  Description of Artificial Sequence: Synthetic oligonucleotide
  Sense strand starting at position 3165 of SEQ ID NO: 1881954
aggugagaguuucucauug

SEQ ID NO: 2083955 - RNA, 19 nt, Artificial Sequence
  Description of Artificial Sequence: Synthetic oligonucleotide
  Antisense strand to SEQ ID NO: 2083954
caaugagaaacucucaccu

SEQ ID NO: 2083956 - RNA, 19 nt, Artificial Sequence
  Description of Artificial Sequence: Synthetic oligonucleotide
  Sense strand starting at position 3538 of SEQ ID NO: 1881954
uggcuugugauauagaaau

SEQ ID NO: 2083957 - RNA, 19 nt, Artificial Sequence
  Description of Artificial Sequence: Synthetic oligonucleotide
  Antisense strand to SEQ ID NO: 2083956
auuucuauaucacaagcca

SEQ ID NO: 2083958 - RNA, 19 nt, Artificial Sequence
  Description of Artificial Sequence: Synthetic oligonucleotide
  Sense strand starting at position 3801 of SEQ ID NO: 1881954
gcgccaugcccuguucuua

SEQ ID NO: 2083959 - RNA, 19 nt, Artificial Sequence
  Description of Artificial Sequence: Synthetic oligonucleotide
  Antisense strand to SEQ ID NO: 2083958
uaagaacagggcauggcgc

SEQ ID NO: 2083960 - RNA, 19 nt, Artificial Sequence
  Description of Artificial Sequence: Synthetic oligonucleotide
  Sense strand starting at position 3802 of SEQ ID NO: 1881954
cgccaugcccuguucuuaa

SEQ ID NO: 2083961 - RNA, 19 nt, Artificial Sequence
  Description of Artificial Sequence: Synthetic oligonucleotide
  Antisense strand to SEQ ID NO: 2083960
uuaagaacagggcauggcg

SEQ ID NO: 2083962 - RNA, 19 nt, Artificial Sequence
  Description of Artificial Sequence: Synthetic oligonucleotide
  Sense strand starting at position 3941 of SEQ ID NO: 1881954
cuuucucaaggaugccaaa

SEQ ID NO: 2083963 - RNA, 19 nt, Artificial Sequence
  Description of Artificial Sequence: Synthetic oligonucleotide
  Antisense strand to SEQ ID NO: 2083962
uuuggcauccuugagaaag

SEQ ID NO: 2083964 - RNA, 19 nt, Artificial Sequence
  Description of Artificial Sequence: Synthetic oligonucleotide
  Sense strand starting at position 110 of SEQ ID NO: 1881955
ugagcauauucuccuguuu

SEQ ID NO: 2083965 - RNA, 19 nt, Artificial Sequence
  Description of Artificial Sequence: Synthetic oligonucleotide
  Antisense strand to SEQ ID NO: 2083964
aaacaggagaauaugcuca

SEQ ID NO: 2083966 - RNA, 19 nt, Artificial Sequence
  Description of Artificial Sequence: Synthetic oligonucleotide
  Sense strand starting at position 318 of SEQ ID NO: 1881955
ggcauuucuuuaugaaaua

SEQ ID NO: 2083967 - RNA, 19 nt, Artificial Sequence
  Description of Artificial Sequence: Synthetic oligonucleotide
  Antisense strand to SEQ ID NO: 2083966
uauuucauaaagaaaugcc

SEQ ID NO: 2083968 - RNA, 19 nt, Artificial Sequence
  Description of Artificial Sequence: Synthetic oligonucleotide
  Sense strand starting at position 341 of SEQ ID NO: 1881955
auggauucugcaggaagau

SEQ ID NO: 2083969 - RNA, 19 nt, Artificial Sequence
  Description of Artificial Sequence: Synthetic oligonucleotide
  Antisense strand to SEQ ID NO: 2083968
aucuuccugcagaauccau

SEQ ID NO: 2083970 - RNA, 19 nt, Artificial Sequence
  Description of Artificial Sequence: Synthetic oligonucleotide
  Sense strand starting at position 367 of SEQ ID NO: 1881955
uccuaaagguaucuaagua

SEQ ID NO: 2083971 - RNA, 19 nt, Artificial Sequence
  Description of Artificial Sequence: Synthetic oligonucleotide
  Antisense strand to SEQ ID NO: 2083970
uacuuagauaccuuuagga

SEQ ID NO: 2083972 - RNA, 19 nt, Artificial Sequence
  Description of Artificial Sequence: Synthetic oligonucleotide
  Sense strand starting at position 678 of SEQ ID NO: 1881955
augauugaaucauaaagag

SEQ ID NO: 2083973 - RNA, 19 nt, Artificial Sequence
  Description of Artificial Sequence: Synthetic oligonucleotide
  Antisense strand to SEQ ID NO: 2083972
cucuuuaugauucaaucau

SEQ ID NO: 2083974 - RNA, 19 nt, Artificial Sequence
  Description of Artificial Sequence: Synthetic oligonucleotide
  Sense strand starting at position 864 of SEQ ID NO: 1881955
agaauuaaguaagacauga

SEQ ID NO: 2083975 - RNA, 19 nt, Artificial Sequence
  Description of Artificial Sequence: Synthetic oligonucleotide
  Antisense strand to SEQ ID NO: 2083974
ucaugucuuacuuaauucu

SEQ ID NO: 2083976 - RNA, 19 nt, Artificial Sequence
  Description of Artificial Sequence: Synthetic oligonucleotide
  Sense strand starting at position 913 of SEQ ID NO: 1881955
auauauaccuugccuguau

SEQ ID NO: 2083977 - RNA, 19 nt, Artificial Sequence
  Description of Artificial Sequence: Synthetic oligonucleotide
  Antisense strand to SEQ ID NO: 2083976
auacaggcaagguauauau

SEQ ID NO: 2083978 - RNA, 19 nt, Artificial Sequence
  Description of Artificial Sequence: Synthetic oligonucleotide
  Sense strand starting at position 915 of SEQ ID NO: 1881955
auauaccuugccuguauau

SEQ ID NO: 2083979 - RNA, 19 nt, Artificial Sequence
  Description of Artificial Sequence: Synthetic oligonucleotide
  Antisense strand to SEQ ID NO: 2083978
auauacaggcaagguauau

SEQ ID NO: 2083980 - RNA, 19 nt, Artificial Sequence
  Description of Artificial Sequence: Synthetic oligonucleotide
  Sense strand starting at position 950 of SEQ ID NO: 1881955
ugaauaucaugucuuuaag

SEQ ID NO: 2083981 - RNA, 19 nt, Artificial Sequence
  Description of Artificial Sequence: Synthetic oligonucleotide
  Antisense strand to SEQ ID NO: 2083980
cuuaaagacaugauauuca

SEQ ID NO: 2083982 - RNA, 19 nt, Artificial Sequence
  Description of Artificial Sequence: Synthetic oligonucleotide
  Sense strand starting at position 1212 of SEQ ID NO: 1881955
augaauaauuucuauggca

SEQ ID NO: 2083983 - RNA, 19 nt, Artificial Sequence
  Description of Artificial Sequence: Synthetic oligonucleotide
  Antisense strand to SEQ ID NO: 2083982
ugccauagaaauuauucau

SEQ ID NO: 2083984 - RNA, 19 nt, Artificial Sequence
  Description of Artificial Sequence: Synthetic oligonucleotide
  Sense strand starting at position 1324 of SEQ ID NO: 1881955
uguguagagcuuuaugucu

SEQ ID NO: 2083985 - RNA, 19 nt, Artificial Sequence
  Description of Artificial Sequence: Synthetic oligonucleotide
  Antisense strand to SEQ ID NO: 2083984
agacauaaagcucuacaca

SEQ ID NO: 2083986 - RNA, 19 nt, Artificial Sequence
  Description of Artificial Sequence: Synthetic oligonucleotide
  Sense strand starting at position 1329 of SEQ ID NO: 1881955
agagcuuuaugucuauuaa

SEQ ID NO: 2083987 - RNA, 19 nt, Artificial Sequence
  Description of Artificial Sequence: Synthetic oligonucleotide
  Antisense strand to SEQ ID NO: 2083986
uuaauagacauaaagcucu

SEQ ID NO: 2083988 - RNA, 19 nt, Artificial Sequence
  Description of Artificial Sequence: Synthetic oligonucleotide
  Sense strand starting at position 1349 of SEQ ID NO: 1881955
gaaauugaaucugcaagug

SEQ ID NO: 2083989 - RNA, 19 nt, Artificial Sequence
  Description of Artificial Sequence: Synthetic oligonucleotide
  Antisense strand to SEQ ID NO: 2083988
cacuugcagauucaauuuc

SEQ ID NO: 2083990 - RNA, 19 nt, Artificial Sequence
  Description of Artificial Sequence: Synthetic oligonucleotide
  Sense strand starting at position 1598 of SEQ ID NO: 1881955
ccaauugcucaguaaugua

SEQ ID NO: 2083991 - RNA, 19 nt, Artificial Sequence
  Description of Artificial Sequence: Synthetic oligonucleotide
  Antisense strand to SEQ ID NO: 2083990
uacauuacugagcaauugg

SEQ ID NO: 2083992 - RNA, 19 nt, Artificial Sequence
  Description of Artificial Sequence: Synthetic oligonucleotide
  Sense strand starting at position 1628 of SEQ ID NO: 1881955
auagaucacggcuaaguuu

SEQ ID NO: 2083993 - RNA, 19 nt, Artificial Sequence
  Description of Artificial Sequence: Synthetic oligonucleotide
  Antisense strand to SEQ ID NO: 2083992
aaacuuagccgugaucuau

SEQ ID NO: 2083994 - RNA, 19 nt, Artificial Sequence
  Description of Artificial Sequence: Synthetic oligonucleotide
  Sense strand starting at position 1910 of SEQ ID NO: 1881955
aauugaucagcuuggagau

SEQ ID NO: 2083995 - RNA, 19 nt, Artificial Sequence
  Description of Artificial Sequence: Synthetic oligonucleotide
  Antisense strand to SEQ ID NO: 2083994
aucuccaagcugaucaauu

SEQ ID NO: 2083996 - RNA, 19 nt, Artificial Sequence
  Description of Artificial Sequence: Synthetic oligonucleotide
  Sense strand starting at position 1911 of SEQ ID NO: 1881955
auugaucagcuuggagaua

SEQ ID NO: 2083997 - RNA, 19 nt, Artificial Sequence
  Description of Artificial Sequence: Synthetic oligonucleotide
  Antisense strand to SEQ ID NO: 2083996
uaucuccaagcugaucaau

SEQ ID NO: 2083998 - RNA, 19 nt, Artificial Sequence
  Description of Artificial Sequence: Synthetic oligonucleotide
  Sense strand starting at position 2127 of SEQ ID NO: 1881955
acgugaggaauaugggaau

SEQ ID NO: 2083999 - RNA, 19 nt, Artificial Sequence
  Description of Artificial Sequence: Synthetic oligonucleotide
  Antisense strand to SEQ ID NO: 2083998
auucccauauuccucacgu

SEQ ID NO: 2084000 - RNA, 19 nt, Artificial Sequence
  Description of Artificial Sequence: Synthetic oligonucleotide
  Sense strand starting at position 2294 of SEQ ID NO: 1881955
uggcuuaagccacauaucu

SEQ ID NO: 2084001 - RNA, 19 nt, Artificial Sequence
  Description of Artificial Sequence: Synthetic oligonucleotide
  Antisense strand to SEQ ID NO: 2084000
agauauguggcuuaagcca

SEQ ID NO: 2084002 - RNA, 19 nt, Artificial Sequence
  Description of Artificial Sequence: Synthetic oligonucleotide
  Sense strand starting at position 2478 of SEQ ID NO: 1881955
auugguuacugaguuaacu

SEQ ID NO: 2084003 - RNA, 19 nt, Artificial Sequence
  Description of Artificial Sequence: Synthetic oligonucleotide
  Antisense strand to SEQ ID NO: 2084002
aguuaacucaguaaccaau

SEQ ID NO: 2084004 - RNA, 19 nt, Artificial Sequence
  Description of Artificial Sequence: Synthetic oligonucleotide
  Sense strand starting at position 2528 of SEQ ID NO: 1881955
ucaauuuagucccauugga

SEQ ID NO: 2084005 - RNA, 19 nt, Artificial Sequence
  Description of Artificial Sequence: Synthetic oligonucleotide
  Antisense strand to SEQ ID NO: 2084004
uccaaugggacuaaauuga

SEQ ID NO: 2084006 - RNA, 19 nt, Artificial Sequence
  Description of Artificial Sequence: Synthetic oligonucleotide
  Sense strand starting at position 2594 of SEQ ID NO: 1881955
cauugaugagaaugcuaga

SEQ ID NO: 2084007 - RNA, 19 nt, Artificial Sequence
  Description of Artificial Sequence: Synthetic oligonucleotide
  Antisense strand to SEQ ID NO: 2084006
ucuagcauucucaucaaug

SEQ ID NO: 2084008 - RNA, 19 nt, Artificial Sequence
  Description of Artificial Sequence: Synthetic oligonucleotide
  Sense strand starting at position 2608 of SEQ ID NO: 1881955
cuagaagguguauguuauu

SEQ ID NO: 2084009 - RNA, 19 nt, Artificial Sequence
  Description of Artificial Sequence: Synthetic oligonucleotide
  Antisense strand to SEQ ID NO: 2084008
aauaacauacaccuucuag

SEQ ID NO: 2084010 - RNA, 19 nt, Artificial Sequence
  Description of Artificial Sequence: Synthetic oligonucleotide
  Sense strand starting at position 2630 of SEQ ID NO: 1881955
cauccagugccugauguua

SEQ ID NO: 2084011 - RNA, 19 nt, Artificial Sequence
  Description of Artificial Sequence: Synthetic oligonucleotide
  Antisense strand to SEQ ID NO: 2084010
uaacaucaggcacuggaug

SEQ ID NO: 2084012 - RNA, 19 nt, Artificial Sequence
  Description of Artificial Sequence: Synthetic oligonucleotide
  Sense strand starting at position 2642 of SEQ ID NO: 1881955
gauguuaggucacuuauaa

SEQ ID NO: 2084013 - RNA, 19 nt, Artificial Sequence
  Description of Artificial Sequence: Synthetic oligonucleotide
  Antisense strand to SEQ ID NO: 2084012
uuauaagugaccuaacauc

SEQ ID NO: 2084014 - RNA, 19 nt, Artificial Sequence
  Description of Artificial Sequence: Synthetic oligonucleotide
  Sense strand starting at position 2759 of SEQ ID NO: 1881955
cgaauacuucuugagcucu

SEQ ID NO: 2084015 - RNA, 19 nt, Artificial Sequence
  Description of Artificial Sequence: Synthetic oligonucleotide
  Antisense strand to SEQ ID NO: 2084014
agagcucaagaaguauucg

SEQ ID NO: 2084016 - RNA, 19 nt, Artificial Sequence
  Description of Artificial Sequence: Synthetic oligonucleotide
  Sense strand starting at position 2904 of SEQ ID NO: 1881955
acaguaauaugugucaauc

SEQ ID NO: 2084017 - RNA, 19 nt, Artificial Sequence
  Description of Artificial Sequence: Synthetic oligonucleotide
  Antisense strand to SEQ ID NO: 2084016
gauugacacauauuacugu

SEQ ID NO: 2084018 - RNA, 19 nt, Artificial Sequence
  Description of Artificial Sequence: Synthetic oligonucleotide
  Sense strand starting at position 2912 of SEQ ID NO: 1881955
augugucaaucugcuauga

SEQ ID NO: 2084019 - RNA, 19 nt, Artificial Sequence
  Description of Artificial Sequence: Synthetic oligonucleotide
  Antisense strand to SEQ ID NO: 2084018
ucauagcagauugacacau

SEQ ID NO: 2084020 - RNA, 19 nt, Artificial Sequence
  Description of Artificial Sequence: Synthetic oligonucleotide
  Sense strand starting at position 2916 of SEQ ID NO: 1881955
gucaaucugcuaugaaugu

SEQ ID NO: 2084021 - RNA, 19 nt, Artificial Sequence
  Description of Artificial Sequence: Synthetic oligonucleotide
  Antisense strand to SEQ ID NO: 2084020
acauucauagcagauugac

SEQ ID NO: 2084022 - RNA, 19 nt, Artificial Sequence
  Description of Artificial Sequence: Synthetic oligonucleotide
  Sense strand starting at position 3224 of SEQ ID NO: 1881955
uguuaacuggcacauuagu

SEQ ID NO: 2084023 - RNA, 19 nt, Artificial Sequence
  Description of Artificial Sequence: Synthetic oligonucleotide
  Antisense strand to SEQ ID NO: 2084022
acuaaugugccaguuaaca

SEQ ID NO: 2084024 - RNA, 19 nt, Artificial Sequence
  Description of Artificial Sequence: Synthetic oligonucleotide
  Sense strand starting at position 3339 of SEQ ID NO: 1881955
caaguuugucuuggugaau

SEQ ID NO: 2084025 - RNA, 19 nt, Artificial Sequence
  Description of Artificial Sequence: Synthetic oligonucleotide
  Antisense strand to SEQ ID NO: 2084024
auucaccaagacaaacuug

SEQ ID NO: 2084026 - RNA, 19 nt, Artificial Sequence
  Description of Artificial Sequence: Synthetic oligonucleotide
  Sense strand starting at position 3340 of SEQ ID NO: 1881955
aaguuugucuuggugaauu

SEQ ID NO: 2084027 - RNA, 19 nt, Artificial Sequence
  Description of Artificial Sequence: Synthetic oligonucleotide
  Antisense strand to SEQ ID NO: 2084026
aauucaccaagacaaacuu

SEQ ID NO: 2084028 - RNA, 19 nt, Artificial Sequence
  Description of Artificial Sequence: Synthetic oligonucleotide
  Sense strand starting at position 3342 of SEQ ID NO: 1881955
guuugucuuggugaauuaa

SEQ ID NO: 2084029 - RNA, 19 nt, Artificial Sequence
  Description of Artificial Sequence: Synthetic oligonucleotide
  Antisense strand to SEQ ID NO: 2084028
uuaauucaccaagacaaac

SEQ ID NO: 2084030 - RNA, 19 nt, Artificial Sequence
  Description of Artificial Sequence: Synthetic oligonucleotide
  Sense strand starting at position 3425 of SEQ ID NO: 1881955
uggcauucucaugaaguau

SEQ ID NO: 2084031 - RNA, 19 nt, Artificial Sequence
  Description of Artificial Sequence: Synthetic oligonucleotide
  Antisense strand to SEQ ID NO: 2084030
auacuucaugagaaugcca

SEQ ID NO: 2084032 - RNA, 19 nt, Artificial Sequence
  Description of Artificial Sequence: Synthetic oligonucleotide
  Sense strand starting at position 3469 of SEQ ID NO: 1881955
gccauugugccagaaucau

SEQ ID NO: 2084033 - RNA, 19 nt, Artificial Sequence
  Description of Artificial Sequence: Synthetic oligonucleotide
  Antisense strand to SEQ ID NO: 2084032
augauucuggcacaauggc

SEQ ID NO: 2084034 - RNA, 19 nt, Artificial Sequence
  Description of Artificial Sequence: Synthetic oligonucleotide
  Sense strand starting at position 3589 of SEQ ID NO: 1881955
cagucauacuugcuuagga

SEQ ID NO: 2084035 - RNA, 19 nt, Artificial Sequence
  Description of Artificial Sequence: Synthetic oligonucleotide
  Antisense strand to SEQ ID NO: 2084034
uccuaagcaaguaugacug

SEQ ID NO: 2084036 - RNA, 19 nt, Artificial Sequence
  Description of Artificial Sequence: Synthetic oligonucleotide
  Sense strand starting at position 3591 of SEQ ID NO: 1881955
gucauacuugcuuaggaac

SEQ ID NO: 2084037 - RNA, 19 nt, Artificial Sequence
  Description of Artificial Sequence: Synthetic oligonucleotide
  Antisense strand to SEQ ID NO: 2084036
guuccuaagcaaguaugac

SEQ ID NO: 2084038 - RNA, 19 nt, Artificial Sequence
  Description of Artificial Sequence: Synthetic oligonucleotide
  Sense strand starting at position 3602 of SEQ ID NO: 1881955
uuaggaacuugguuuccua

SEQ ID NO: 2084039 - RNA, 19 nt, Artificial Sequence
  Description of Artificial Sequence: Synthetic oligonucleotide
  Antisense strand to SEQ ID NO: 2084038
uaggaaaccaaguuccuaa

SEQ ID NO: 2084040 - RNA, 19 nt, Artificial Sequence
  Description of Artificial Sequence: Synthetic oligonucleotide
  Sense strand starting at position 3767 of SEQ ID NO: 1881955
uagucuaauguaggauaua

SEQ ID NO: 2084041 - RNA, 19 nt, Artificial Sequence
  Description of Artificial Sequence: Synthetic oligonucleotide
  Antisense strand to SEQ ID NO: 2084040
uauauccuacauuagacua

SEQ ID NO: 2084042 - RNA, 19 nt, Artificial Sequence
  Description of Artificial Sequence: Synthetic oligonucleotide
  Sense strand starting at position 3804 of SEQ ID NO: 1881955
uugcauuguguguaugacu

SEQ ID NO: 2084043 - RNA, 19 nt, Artificial Sequence
  Description of Artificial Sequence: Synthetic oligonucleotide
  Antisense strand to SEQ ID NO: 2084042
agucauacacacaaugcaa

SEQ ID NO: 2084044 - RNA, 19 nt, Artificial Sequence
  Description of Artificial Sequence: Synthetic oligonucleotide
  Sense strand starting at position 73 of SEQ ID NO: 1881956
agcuacaguugucuuauuu

SEQ ID NO: 2084045 - RNA, 19 nt, Artificial Sequence
  Description of Artificial Sequence: Synthetic oligonucleotide
  Antisense strand to SEQ ID NO: 2084044
aaauaagacaacuguagcu

SEQ ID NO: 2084046 - RNA, 19 nt, Artificial Sequence
  Description of Artificial Sequence: Synthetic oligonucleotide
  Sense strand starting at position 188 of SEQ ID NO: 1881956
cacauucuggucuggugau

SEQ ID NO: 2084047 - RNA, 19 nt, Artificial Sequence
  Description of Artificial Sequence: Synthetic oligonucleotide
  Antisense strand to SEQ ID NO: 2084046
aucaccagaccagaaugug

SEQ ID NO: 2084048 - RNA, 19 nt, Artificial Sequence
  Description of Artificial Sequence: Synthetic oligonucleotide
  Sense strand starting at position 573 of SEQ ID NO: 1881956
agggcugaguuugcacaaa

SEQ ID NO: 2084049 - RNA, 19 nt, Artificial Sequence
  Description of Artificial Sequence: Synthetic oligonucleotide
  Antisense strand to SEQ ID NO: 2084048
uuugugcaaacucagcccu

SEQ ID NO: 2084050 - RNA, 19 nt, Artificial Sequence
  Description of Artificial Sequence: Synthetic oligonucleotide
  Sense strand starting at position 834 of SEQ ID NO: 1881956
gcugcaaacugguuaagaa

SEQ ID NO: 2084051 - RNA, 19 nt, Artificial Sequence
  Description of Artificial Sequence: Synthetic oligonucleotide
  Antisense strand to SEQ ID NO: 2084050
uucuuaaccaguuugcagc

SEQ ID NO: 2084052 - RNA, 19 nt, Artificial Sequence
  Description of Artificial Sequence: Synthetic oligonucleotide
  Sense strand starting at position 1179 of SEQ ID NO: 1881956
guauguaaaguccauauga

SEQ ID NO: 2084053 - RNA, 19 nt, Artificial Sequence
  Description of Artificial Sequence: Synthetic oligonucleotide
  Antisense strand to SEQ ID NO: 2084052
ucauauggacuuuacauac

SEQ ID NO: 2084054 - RNA, 19 nt, Artificial Sequence
  Description of Artificial Sequence: Synthetic oligonucleotide
  Sense strand starting at position 1311 of SEQ ID NO: 1881956
uggugccaucucuacuaau

SEQ ID NO: 2084055 - RNA, 19 nt, Artificial Sequence
  Description of Artificial Sequence: Synthetic oligonucleotide
  Antisense strand to SEQ ID NO: 2084054
auuaguagagauggcacca

SEQ ID NO: 2084056 - RNA, 19 nt, Artificial Sequence
  Description of Artificial Sequence: Synthetic oligonucleotide
  Sense strand starting at position 1518 of SEQ ID NO: 1881956
aagucaaauuagguguuau

SEQ ID NO: 2084057 - RNA, 19 nt, Artificial Sequence
  Description of Artificial Sequence: Synthetic oligonucleotide
  Antisense strand to SEQ ID NO: 2084056
auaacaccuaauuugacuu

SEQ ID NO: 2084058 - RNA, 19 nt, Artificial Sequence
  Description of Artificial Sequence: Synthetic oligonucleotide
  Sense strand starting at position 1519 of SEQ ID NO: 1881956
agucaaauuagguguuauc

SEQ ID NO: 2084059 - RNA, 19 nt, Artificial Sequence
  Description of Artificial Sequence: Synthetic oligonucleotide
  Antisense strand to SEQ ID NO: 2084058
gauaacaccuaauuugacu

SEQ ID NO: 2084060 - RNA, 19 nt, Artificial Sequence
  Description of Artificial Sequence: Synthetic oligonucleotide
  Sense strand starting at position 1669 of SEQ ID NO: 1881956
gcaaguuuguauccaauaa

SEQ ID NO: 2084061 - RNA, 19 nt, Artificial Sequence
  Description of Artificial Sequence: Synthetic oligonucleotide
  Antisense strand to SEQ ID NO: 2084060
uuauuggauacaaacuugc

SEQ ID NO: 2084062 - RNA, 19 nt, Artificial Sequence
  Description of Artificial Sequence: Synthetic oligonucleotide
  Sense strand starting at position 1673 of SEQ ID NO: 1881956
guuuguauccaauaacauu

SEQ ID NO: 2084063 - RNA, 19 nt, Artificial Sequence
  Description of Artificial Sequence: Synthetic oligonucleotide
  Antisense strand to SEQ ID NO: 2084062
aauguuauuggauacaaac

SEQ ID NO: 2084064 - RNA, 19 nt, Artificial Sequence
  Description of Artificial Sequence: Synthetic oligonucleotide
  Sense strand starting at position 1846 of SEQ ID NO: 1881956
cucugagaucuugggaugu

SEQ ID NO: 2084065 - RNA, 19 nt, Artificial Sequence
  Description of Artificial Sequence: Synthetic oligonucleotide
  Antisense strand to SEQ ID NO: 2084064
acaucccaagaucucagag

SEQ ID NO: 2084066 - RNA, 19 nt, Artificial Sequence
  Description of Artificial Sequence: Synthetic oligonucleotide
  Sense strand starting at position 1850 of SEQ ID NO: 1881956
gagaucuugggauguucuu

SEQ ID NO: 2084067 - RNA, 19 nt, Artificial Sequence
  Description of Artificial Sequence: Synthetic oligonucleotide
  Antisense strand to SEQ ID NO: 2084066
aagaacaucccaagaucuc

SEQ ID NO: 2084068 - RNA, 19 nt, Artificial Sequence
  Description of Artificial Sequence: Synthetic oligonucleotide
  Sense strand starting at position 1996 of SEQ ID NO: 1881956
gaccaaggccugugacuua

SEQ ID NO: 2084069 - RNA, 19 nt, Artificial Sequence
  Description of Artificial Sequence: Synthetic oligonucleotide
  Antisense strand to SEQ ID NO: 2084068
uaagucacaggccuugguc

SEQ ID NO: 2084070 - RNA, 19 nt, Artificial Sequence
  Description of Artificial Sequence: Synthetic oligonucleotide
  Sense strand starting at position 2003 of SEQ ID NO: 1881956
gccugugacuuauuuauuc

SEQ ID NO: 2084071 - RNA, 19 nt, Artificial Sequence
  Description of Artificial Sequence: Synthetic oligonucleotide
  Antisense strand to SEQ ID NO: 2084070
gaauaaauaagucacaggc

SEQ ID NO: 2084072 - RNA, 19 nt, Artificial Sequence
  Description of Artificial Sequence: Synthetic oligonucleotide
  Sense strand starting at position 2056 of SEQ ID NO: 1881956
ugugcaacaggugaucaaa

SEQ ID NO: 2084073 - RNA, 19 nt, Artificial Sequence
  Description of Artificial Sequence: Synthetic oligonucleotide
  Antisense strand to SEQ ID NO: 2084072
uuugaucaccuguugcaca

SEQ ID NO: 2084074 - RNA, 19 nt, Artificial Sequence
  Description of Artificial Sequence: Synthetic oligonucleotide
  Sense strand starting at position 2121 of SEQ ID NO: 1881956
agcugugcauuucuaauau

SEQ ID NO: 2084075 - RNA, 19 nt, Artificial Sequence
  Description of Artificial Sequence: Synthetic oligonucleotide
  Antisense strand to SEQ ID NO: 2084074
auauuagaaaugcacagcu

SEQ ID NO: 2084076 - RNA, 19 nt, Artificial Sequence
  Description of Artificial Sequence: Synthetic oligonucleotide
  Sense strand starting at position 2140 of SEQ ID NO: 1881956
gcaauaugucucuucgcuu

SEQ ID NO: 2084077 - RNA, 19 nt, Artificial Sequence
  Description of Artificial Sequence: Synthetic oligonucleotide
  Antisense strand to SEQ ID NO: 2084076
aagcgaagagacauauugc

SEQ ID NO: 2084078 - RNA, 19 nt, Artificial Sequence
  Description of Artificial Sequence: Synthetic oligonucleotide
  Sense strand starting at position 2522 of SEQ ID NO: 1881956
ugagguucuuaauuaagaa

SEQ ID NO: 2084079 - RNA, 19 nt, Artificial Sequence
  Description of Artificial Sequence: Synthetic oligonucleotide
  Antisense strand to SEQ ID NO: 2084078
uucuuaauuaagaaccuca

SEQ ID NO: 2084080 - RNA, 19 nt, Artificial Sequence
  Description of Artificial Sequence: Synthetic oligonucleotide
  Sense strand starting at position 2542 of SEQ ID NO: 1881956
cagaaaucacgucagcuga

SEQ ID NO: 2084081 - RNA, 19 nt, Artificial Sequence
  Description of Artificial Sequence: Synthetic oligonucleotide
  Antisense strand to SEQ ID NO: 2084080
ucagcugacgugauuucug

SEQ ID NO: 2084082 - RNA, 19 nt, Artificial Sequence
  Description of Artificial Sequence: Synthetic oligonucleotide
  Sense strand starting at position 2558 of SEQ ID NO: 1881956
ugaugugaggcuuacggaa

SEQ ID NO: 2084083 - RNA, 19 nt, Artificial Sequence
  Description of Artificial Sequence: Synthetic oligonucleotide
  Antisense strand to SEQ ID NO: 2084082
uuccguaagccucacauca

SEQ ID NO: 2084084 - RNA, 19 nt, Artificial Sequence
  Description of Artificial Sequence: Synthetic oligonucleotide
  Sense strand starting at position 2782 of SEQ ID NO: 1881956
ugccaaauacuaugcugaa

SEQ ID NO: 2084085 - RNA, 19 nt, Artificial Sequence
  Description of Artificial Sequence: Synthetic oligonucleotide
  Antisense strand to SEQ ID NO: 2084084
uucagcauaguauuuggca

SEQ ID NO: 2084086 - RNA, 19 nt, Artificial Sequence
  Description of Artificial Sequence: Synthetic oligonucleotide
  Sense strand starting at position 2783 of SEQ ID NO: 1881956
gccaaauacuaugcugaau

SEQ ID NO: 2084087 - RNA, 19 nt, Artificial Sequence
  Description of Artificial Sequence: Synthetic oligonucleotide
  Antisense strand to SEQ ID NO: 2084086
auucagcauaguauuuggc

SEQ ID NO: 2084088 - RNA, 19 nt, Artificial Sequence
  Description of Artificial Sequence: Synthetic oligonucleotide
  Sense strand starting at position 2823 of SEQ ID NO: 1881956
uucugaagaaagugguaua

SEQ ID NO: 2084089 - RNA, 19 nt, Artificial Sequence
  Description of Artificial Sequence: Synthetic oligonucleotide
  Antisense strand to SEQ ID NO: 2084088
uauaccacuuucuucagaa

SEQ ID NO: 2084090 - RNA, 19 nt, Artificial Sequence
  Description of Artificial Sequence: Synthetic oligonucleotide
  Sense strand starting at position 2824 of SEQ ID NO: 1881956
ucugaagaaagugguauau

SEQ ID NO: 2084091 - RNA, 19 nt, Artificial Sequence
  Description of Artificial Sequence: Synthetic oligonucleotide
  Antisense strand to SEQ ID NO: 2084090
auauaccacuuucuucaga

SEQ ID NO: 2084092 - RNA, 19 nt, Artificial Sequence
  Description of Artificial Sequence: Synthetic oligonucleotide
  Sense strand starting at position 2834 of SEQ ID NO: 1881956
gugguauauaucuagugca

SEQ ID NO: 2084093 - RNA, 19 nt, Artificial Sequence
  Description of Artificial Sequence: Synthetic oligonucleotide
  Antisense strand to SEQ ID NO: 2084092
ugcacuagauauauaccac

SEQ ID NO: 2084094 - RNA, 19 nt, Artificial Sequence
  Description of Artificial Sequence: Synthetic oligonucleotide
  Sense strand starting at position 2906 of SEQ ID NO: 1881956
uauggcaugguguaaauaa

SEQ ID NO: 2084095 - RNA, 19 nt, Artificial Sequence
  Description of Artificial Sequence: Synthetic oligonucleotide
  Antisense strand to SEQ ID NO: 2084094
uuauuuacaccaugccaua

SEQ ID NO: 2084096 - RNA, 19 nt, Artificial Sequence
  Description of Artificial Sequence: Synthetic oligonucleotide
  Sense strand starting at position 2970 of SEQ ID NO: 1881956
auuccaaagucaguacaaa

SEQ ID NO: 2084097 - RNA, 19 nt, Artificial Sequence
  Description of Artificial Sequence: Synthetic oligonucleotide
  Antisense strand to SEQ ID NO: 2084096
uuuguacugacuuuggaau

SEQ ID NO: 2084098 - RNA, 19 nt, Artificial Sequence
  Description of Artificial Sequence: Synthetic oligonucleotide
  Sense strand starting at position 3055 of SEQ ID NO: 1881956
guauaaagcuaaguaggau

SEQ ID NO: 2084099 - RNA, 19 nt, Artificial Sequence
  Description of Artificial Sequence: Synthetic oligonucleotide
  Antisense strand to SEQ ID NO: 2084098
auccuacuuagcuuuauac

SEQ ID NO: 2084100 - RNA, 19 nt, Artificial Sequence
  Description of Artificial Sequence: Synthetic oligonucleotide
  Sense strand starting at position 3120 of SEQ ID NO: 1881956
gugcacguguguauguaaa

SEQ ID NO: 2084101 - RNA, 19 nt, Artificial Sequence
  Description of Artificial Sequence: Synthetic oligonucleotide
  Antisense strand to SEQ ID NO: 2084100
uuuacauacacacgugcac

SEQ ID NO: 2084102 - RNA, 19 nt, Artificial Sequence
  Description of Artificial Sequence: Synthetic oligonucleotide
  Sense strand starting at position 3127 of SEQ ID NO: 1881956
uguguauguaaagauugaa

SEQ ID NO: 2084103 - RNA, 19 nt, Artificial Sequence
  Description of Artificial Sequence: Synthetic oligonucleotide
  Antisense strand to SEQ ID NO: 2084102
uucaaucuuuacauacaca

SEQ ID NO: 2084104 - RNA, 19 nt, Artificial Sequence
  Description of Artificial Sequence: Synthetic oligonucleotide
  Sense strand starting at position 3187 of SEQ ID NO: 1881956
ugggacuuauaauuacuuu

SEQ ID NO: 2084105 - RNA, 19 nt, Artificial Sequence
  Description of Artificial Sequence: Synthetic oligonucleotide
  Antisense strand to SEQ ID NO: 2084104
aaaguaauuauaaguccca

SEQ ID NO: 2084106 - RNA, 19 nt, Artificial Sequence
  Description of Artificial Sequence: Synthetic oligonucleotide
  Sense strand starting at position 3311 of SEQ ID NO: 1881956
ugaaauagagugcgacauu

SEQ ID NO: 2084107 - RNA, 19 nt, Artificial Sequence
  Description of Artificial Sequence: Synthetic oligonucleotide
  Antisense strand to SEQ ID NO: 2084106
aaugucgcacucuauuuca

SEQ ID NO: 2084108 - RNA, 19 nt, Artificial Sequence
  Description of Artificial Sequence: Synthetic oligonucleotide
  Sense strand starting at position 3430 of SEQ ID NO: 1881956
gcaagaguagaauagugua

SEQ ID NO: 2084109 - RNA, 19 nt, Artificial Sequence
  Description of Artificial Sequence: Synthetic oligonucleotide
  Antisense strand to SEQ ID NO: 2084108
uacacuauucuacucuugc

SEQ ID NO: 2084110 - RNA, 19 nt, Artificial Sequence
  Description of Artificial Sequence: Synthetic oligonucleotide
  Sense strand starting at position 3435 of SEQ ID NO: 1881956
aguagaauaguguauugag

SEQ ID NO: 2084111 - RNA, 19 nt, Artificial Sequence
  Description of Artificial Sequence: Synthetic oligonucleotide
  Antisense strand to SEQ ID NO: 2084110
cucaauacacuauucuacu

SEQ ID NO: 2084112 - RNA, 19 nt, Artificial Sequence
  Description of Artificial Sequence: Synthetic oligonucleotide
  Sense strand starting at position 3484 of SEQ ID NO: 1881956
gccaucaucguuucguuua

SEQ ID NO: 2084113 - RNA, 19 nt, Artificial Sequence
  Description of Artificial Sequence: Synthetic oligonucleotide
  Antisense strand to SEQ ID NO: 2084112
uaaacgaaacgaugauggc

SEQ ID NO: 2084114 - RNA, 19 nt, Artificial Sequence
  Description of Artificial Sequence: Synthetic oligonucleotide
  Sense strand starting at position 3487 of SEQ ID NO: 1881956
aucaucguuucguuuauuu

SEQ ID NO: 2084115 - RNA, 19 nt, Artificial Sequence
  Description of Artificial Sequence: Synthetic oligonucleotide
  Antisense strand to SEQ ID NO: 2084114
aaauaaacgaaacgaugau

SEQ ID NO: 2084116 - RNA, 19 nt, Artificial Sequence
  Description of Artificial Sequence: Synthetic oligonucleotide
  Sense strand starting at position 3646 of SEQ ID NO: 1881956
uuuagagagccucaaagcu

SEQ ID NO: 2084117 - RNA, 19 nt, Artificial Sequence
  Description of Artificial Sequence: Synthetic oligonucleotide
  Antisense strand to SEQ ID NO: 2084116
agcuuugaggcucucuaaa

SEQ ID NO: 2084118 - RNA, 19 nt, Artificial Sequence
  Description of Artificial Sequence: Synthetic oligonucleotide
  Sense strand starting at position 3677 of SEQ ID NO: 1881956
caucuugguucugcaagga

SEQ ID NO: 2084119 - RNA, 19 nt, Artificial Sequence
  Description of Artificial Sequence: Synthetic oligonucleotide
  Antisense strand to SEQ ID NO: 2084118
uccuugcagaaccaagaug

SEQ ID NO: 2084120 - RNA, 19 nt, Artificial Sequence
  Description of Artificial Sequence: Synthetic oligonucleotide
  Sense strand starting at position 3752 of SEQ ID NO: 1881956
ugaagucuccgugaacaaa

SEQ ID NO: 2084121 - RNA, 19 nt, Artificial Sequence
  Description of Artificial Sequence: Synthetic oligonucleotide
  Antisense strand to SEQ ID NO: 2084120
uuuguucacggagacuuca

SEQ ID NO: 2084122 - RNA, 19 nt, Artificial Sequence
  Description of Artificial Sequence: Synthetic oligonucleotide
  Sense strand starting at position 3788 of SEQ ID NO: 1881956
gcgauaugguauuuacuca

SEQ ID NO: 2084123 - RNA, 19 nt, Artificial Sequence
  Description of Artificial Sequence: Synthetic oligonucleotide
  Antisense strand to SEQ ID NO: 2084122
ugaguaaauaccauaucgc

SEQ ID NO: 2084124 - RNA, 19 nt, Artificial Sequence
  Description of Artificial Sequence: Synthetic oligonucleotide
  Sense strand starting at position 487 of SEQ ID NO: 1881957
cucucauugggaugaucug

SEQ ID NO: 2084125 - RNA, 19 nt, Artificial Sequence
  Description of Artificial Sequence: Synthetic oligonucleotide
  Antisense strand to SEQ ID NO: 2084124
cagaucaucccaaugagag

SEQ ID NO: 2084126 - RNA, 19 nt, Artificial Sequence
  Description of Artificial Sequence: Synthetic oligonucleotide
  Sense strand starting at position 493 of SEQ ID NO: 1881957
uugggaugaucuguaucau

SEQ ID NO: 2084127 - RNA, 19 nt, Artificial Sequence
  Description of Artificial Sequence: Synthetic oligonucleotide
  Antisense strand to SEQ ID NO: 2084126
augauacagaucaucccaa

SEQ ID NO: 2084128 - RNA, 19 nt, Artificial Sequence
  Description of Artificial Sequence: Synthetic oligonucleotide
  Sense strand starting at position 539 of SEQ ID NO: 1881957
ugagacauggcuuggagaa

SEQ ID NO: 2084129 - RNA, 19 nt, Artificial Sequence
  Description of Artificial Sequence: Synthetic oligonucleotide
  Antisense strand to SEQ ID NO: 2084128
uucuccaagccaugucuca

SEQ ID NO: 2084130 - RNA, 19 nt, Artificial Sequence
  Description of Artificial Sequence: Synthetic oligonucleotide
  Sense strand starting at position 587 of SEQ ID NO: 1881957
gagguaaaugcucacagcu

SEQ ID NO: 2084131 - RNA, 19 nt, Artificial Sequence
  Description of Artificial Sequence: Synthetic oligonucleotide
  Antisense strand to SEQ ID NO: 2084130
agcugugagcauuuaccuc

SEQ ID NO: 2084132 - RNA, 19 nt, Artificial Sequence
  Description of Artificial Sequence: Synthetic oligonucleotide
  Sense strand starting at position 769 of SEQ ID NO: 1881957
agcugcugggaguauuaga

SEQ ID NO: 2084133 - RNA, 19 nt, Artificial Sequence
  Description of Artificial Sequence: Synthetic oligonucleotide
  Antisense strand to SEQ ID NO: 2084132
ucuaauacucccagcagcu

SEQ ID NO: 2084134 - RNA, 19 nt, Artificial Sequence
  Description of Artificial Sequence: Synthetic oligonucleotide
  Sense strand starting at position 1134 of SEQ ID NO: 1881957
aaagaauucuggccaguac

SEQ ID NO: 2084135 - RNA, 19 nt, Artificial Sequence
  Description of Artificial Sequence: Synthetic oligonucleotide
  Antisense strand to SEQ ID NO: 2084134
guacuggccagaauucuuu

SEQ ID NO: 2084136 - RNA, 19 nt, Artificial Sequence
  Description of Artificial Sequence: Synthetic oligonucleotide
  Sense strand starting at position 1147 of SEQ ID NO: 1881957
caguacugugggugaggaa

SEQ ID NO: 2084137 - RNA, 19 nt, Artificial Sequence
  Description of Artificial Sequence: Synthetic oligonucleotide
  Antisense strand to SEQ ID NO: 2084136
uuccucacccacaguacug

SEQ ID NO: 2084138 - RNA, 19 nt, Artificial Sequence
  Description of Artificial Sequence: Synthetic oligonucleotide
  Sense strand starting at position 1148 of SEQ ID NO: 1881957
aguacugugggugaggaau

SEQ ID NO: 2084139 - RNA, 19 nt, Artificial Sequence
  Description of Artificial Sequence: Synthetic oligonucleotide
  Antisense strand to SEQ ID NO: 2084138
auuccucacccacaguacu

SEQ ID NO: 2084140 - RNA, 19 nt, Artificial Sequence
  Description of Artificial Sequence: Synthetic oligonucleotide
  Sense strand starting at position 1251 of SEQ ID NO: 1881957
cuuguaacugcugaccaaa

SEQ ID NO: 2084141 - RNA, 19 nt, Artificial Sequence
  Description of Artificial Sequence: Synthetic oligonucleotide
  Antisense strand to SEQ ID NO: 2084140
uuuggucagcaguuacaag

SEQ ID NO: 2084142 - RNA, 19 nt, Artificial Sequence
  Description of Artificial Sequence: Synthetic oligonucleotide
  Sense strand starting at position 1262 of SEQ ID NO: 1881957
ugaccaaaggcucaaguau

SEQ ID NO: 2084143 - RNA, 19 nt, Artificial Sequence
  Description of Artificial Sequence: Synthetic oligonucleotide
  Antisense strand to SEQ ID NO: 2084142
auacuugagccuuugguca

SEQ ID NO: 2084144 - RNA, 19 nt, Artificial Sequence
  Description of Artificial Sequence: Synthetic oligonucleotide
  Sense strand starting at position 1297 of SEQ ID NO: 1881957
acuuguuaccucugaggag

SEQ ID NO: 2084145 - RNA, 19 nt, Artificial Sequence
  Description of Artificial Sequence: Synthetic oligonucleotide
  Antisense strand to SEQ ID NO: 2084144
cuccucagagguaacaagu

SEQ ID NO: 2084146 - RNA, 19 nt, Artificial Sequence
  Description of Artificial Sequence: Synthetic oligonucleotide
  Sense strand starting at position 1301 of SEQ ID NO: 1881957
guuaccucugaggaguaca

SEQ ID NO: 2084147 - RNA, 19 nt, Artificial Sequence
  Description of Artificial Sequence: Synthetic oligonucleotide
  Antisense strand to SEQ ID NO: 2084146
uguacuccucagagguaac

SEQ ID NO: 2084148 - RNA, 19 nt, Artificial Sequence
  Description of Artificial Sequence: Synthetic oligonucleotide
  Sense strand starting at position 1488 of SEQ ID NO: 1881957
cuguuaaagaggcaauagu

SEQ ID NO: 2084149 - RNA, 19 nt, Artificial Sequence
  Description of Artificial Sequence: Synthetic oligonucleotide
  Antisense strand to SEQ ID NO: 2084148
acuauugccucuuuaacag

SEQ ID NO: 2084150 - RNA, 19 nt, Artificial Sequence
  Description of Artificial Sequence: Synthetic oligonucleotide
  Sense strand starting at position 1559 of SEQ ID NO: 1881957
uaaguaccuggugacuuau

SEQ ID NO: 2084151 - RNA, 19 nt, Artificial Sequence
  Description of Artificial Sequence: Synthetic oligonucleotide
  Antisense strand to SEQ ID NO: 2084150
auaagucaccagguacuua

SEQ ID NO: 2084152 - RNA, 19 nt, Artificial Sequence
  Description of Artificial Sequence: Synthetic oligonucleotide
  Sense strand starting at position 1616 of SEQ ID NO: 1881957
uuaacugcaugguuagaaa

SEQ ID NO: 2084153 - RNA, 19 nt, Artificial Sequence
  Description of Artificial Sequence: Synthetic oligonucleotide
  Antisense strand to SEQ ID NO: 2084152
uuucuaaccaugcaguuaa

SEQ ID NO: 2084154 - RNA, 19 nt, Artificial Sequence
  Description of Artificial Sequence: Synthetic oligonucleotide
  Sense strand starting at position 1728 of SEQ ID NO: 1881957
agacaaaggucuuccuaga

SEQ ID NO: 2084155 - RNA, 19 nt, Artificial Sequence
  Description of Artificial Sequence: Synthetic oligonucleotide
  Antisense strand to SEQ ID NO: 2084154
ucuaggaagaccuuugucu

SEQ ID NO: 2084156 - RNA, 19 nt, Artificial Sequence
  Description of Artificial Sequence: Synthetic oligonucleotide
  Sense strand starting at position 1741 of SEQ ID NO: 1881957
ccuagacauuggccaagau

SEQ ID NO: 2084157 - RNA, 19 nt, Artificial Sequence
  Description of Artificial Sequence: Synthetic oligonucleotide
  Antisense strand to SEQ ID NO: 2084156
aucuuggccaaugucuagg

SEQ ID NO: 2084158 - RNA, 19 nt, Artificial Sequence
  Description of Artificial Sequence: Synthetic oligonucleotide
  Sense strand starting at position 1969 of SEQ ID NO: 1881957
ugacuuugggcagaccauu

SEQ ID NO: 2084159 - RNA, 19 nt, Artificial Sequence
  Description of Artificial Sequence: Synthetic oligonucleotide
  Antisense strand to SEQ ID NO: 2084158
aauggucugcccaaaguca

SEQ ID NO: 2084160 - RNA, 19 nt, Artificial Sequence
  Description of Artificial Sequence: Synthetic oligonucleotide
  Sense strand starting at position 2053 of SEQ ID NO: 1881957
gaguguugagcugauuaaa

SEQ ID NO: 2084161 - RNA, 19 nt, Artificial Sequence
  Description of Artificial Sequence: Synthetic oligonucleotide
  Antisense strand to SEQ ID NO: 2084160
uuuaaucagcucaacacuc

SEQ ID NO: 2084162 - RNA, 19 nt, Artificial Sequence
  Description of Artificial Sequence: Synthetic oligonucleotide
  Sense strand starting at position 2056 of SEQ ID NO: 1881957
uguugagcugauuaaauga

SEQ ID NO: 2084163 - RNA, 19 nt, Artificial Sequence
  Description of Artificial Sequence: Synthetic oligonucleotide
  Antisense strand to SEQ ID NO: 2084162
ucauuuaaucagcucaaca

SEQ ID NO: 2084164 - RNA, 19 nt, Artificial Sequence
  Description of Artificial Sequence: Synthetic oligonucleotide
  Sense strand starting at position 2086 of SEQ ID NO: 1881957
uuaaguauuuaucagagag

SEQ ID NO: 2084165 - RNA, 19 nt, Artificial Sequence
  Description of Artificial Sequence: Synthetic oligonucleotide
  Antisense strand to SEQ ID NO: 2084164
cucucugauaaauacuuaa

SEQ ID NO: 2084166 - RNA, 19 nt, Artificial Sequence
  Description of Artificial Sequence: Synthetic oligonucleotide
  Sense strand starting at position 2112 of SEQ ID NO: 1881957
aagaguaaguacucaguga

SEQ ID NO: 2084167 - RNA, 19 nt, Artificial Sequence
  Description of Artificial Sequence: Synthetic oligonucleotide
  Antisense strand to SEQ ID NO: 2084166
ucacugaguacuuacucuu

SEQ ID NO: 2084168 - RNA, 19 nt, Artificial Sequence
  Description of Artificial Sequence: Synthetic oligonucleotide
  Sense strand starting at position 2232 of SEQ ID NO: 1881957
aggguugcagauugaauaa

SEQ ID NO: 2084169 - RNA, 19 nt, Artificial Sequence
  Description of Artificial Sequence: Synthetic oligonucleotide
  Antisense strand to SEQ ID NO: 2084168
uuauucaaucugcaacccu

SEQ ID NO: 2084170 - RNA, 19 nt, Artificial Sequence
  Description of Artificial Sequence: Synthetic oligonucleotide
  Sense strand starting at position 2257 of SEQ ID NO: 1881957
auggauuucucauaaaggu

SEQ ID NO: 2084171 - RNA, 19 nt, Artificial Sequence
  Description of Artificial Sequence: Synthetic oligonucleotide
  Antisense strand to SEQ ID NO: 2084170
accuuuaugagaaauccau

SEQ ID NO: 2084172 - RNA, 19 nt, Artificial Sequence
  Description of Artificial Sequence: Synthetic oligonucleotide
  Sense strand starting at position 2285 of SEQ ID NO: 1881957
uugugagcacucuacuaau

SEQ ID NO: 2084173 - RNA, 19 nt, Artificial Sequence
  Description of Artificial Sequence: Synthetic oligonucleotide
  Antisense strand to SEQ ID NO: 2084172
auuaguagagugcucacaa

SEQ ID NO: 2084174 - RNA, 19 nt, Artificial Sequence
  Description of Artificial Sequence: Synthetic oligonucleotide
  Sense strand starting at position 2357 of SEQ ID NO: 1881957
acacuuaauugugugaauu

SEQ ID NO: 2084175 - RNA, 19 nt, Artificial Sequence
  Description of Artificial Sequence: Synthetic oligonucleotide
  Antisense strand to SEQ ID NO: 2084174
aauucacacaauuaagugu

SEQ ID NO: 2084176 - RNA, 19 nt, Artificial Sequence
  Description of Artificial Sequence: Synthetic oligonucleotide
  Sense strand starting at position 2440 of SEQ ID NO: 1881957
acaguaagcauaugaggaa

SEQ ID NO: 2084177 - RNA, 19 nt, Artificial Sequence
  Description of Artificial Sequence: Synthetic oligonucleotide
  Antisense strand to SEQ ID NO: 2084176
uuccucauaugcuuacugu

SEQ ID NO: 2084178 - RNA, 19 nt, Artificial Sequence
  Description of Artificial Sequence: Synthetic oligonucleotide
  Sense strand starting at position 2501 of SEQ ID NO: 1881957
auuaaugaaugucuugagu

SEQ ID NO: 2084179 - RNA, 19 nt, Artificial Sequence
  Description of Artificial Sequence: Synthetic oligonucleotide
  Antisense strand to SEQ ID NO: 2084178
acucaagacauucauuaau

SEQ ID NO: 2084180 - RNA, 19 nt, Artificial Sequence
  Description of Artificial Sequence: Synthetic oligonucleotide
  Sense strand starting at position 2504 of SEQ ID NO: 1881957
aaugaaugucuugaguuug

SEQ ID NO: 2084181 - RNA, 19 nt, Artificial Sequence
  Description of Artificial Sequence: Synthetic oligonucleotide
  Antisense strand to SEQ ID NO: 2084180
caaacucaagacauucauu

SEQ ID NO: 2084182 - RNA, 19 nt, Artificial Sequence
  Description of Artificial Sequence: Synthetic oligonucleotide
  Sense strand starting at position 2516 of SEQ ID NO: 1881957
gaguuugaacauuaaguuc

SEQ ID NO: 2084183 - RNA, 19 nt, Artificial Sequence
  Description of Artificial Sequence: Synthetic oligonucleotide
  Antisense strand to SEQ ID NO: 2084182
gaacuuaauguucaaacuc

SEQ ID NO: 2084184 - RNA, 19 nt, Artificial Sequence
  Description of Artificial Sequence: Synthetic oligonucleotide
  Sense strand starting at position 2561 of SEQ ID NO: 1881957
acuucuugauguuuaggga

SEQ ID NO: 2084185 - RNA, 19 nt, Artificial Sequence
  Description of Artificial Sequence: Synthetic oligonucleotide
  Antisense strand to SEQ ID NO: 2084184
ucccuaaacaucaagaagu

SEQ ID NO: 2084186 - RNA, 19 nt, Artificial Sequence
  Description of Artificial Sequence: Synthetic oligonucleotide
  Sense strand starting at position 2724 of SEQ ID NO: 1881957
cagguaugaugacuccaaa

SEQ ID NO: 2084187 - RNA, 19 nt, Artificial Sequence
  Description of Artificial Sequence: Synthetic oligonucleotide
  Antisense strand to SEQ ID NO: 2084186
uuuggagucaucauaccug

SEQ ID NO: 2084188 - RNA, 19 nt, Artificial Sequence
  Description of Artificial Sequence: Synthetic oligonucleotide
  Sense strand starting at position 2727 of SEQ ID NO: 1881957
guaugaugacuccaaagca

SEQ ID NO: 2084189 - RNA, 19 nt, Artificial Sequence
  Description of Artificial Sequence: Synthetic oligonucleotide
  Antisense strand to SEQ ID NO: 2084188
ugcuuuggagucaucauac

SEQ ID NO: 2084190 - RNA, 19 nt, Artificial Sequence
  Description of Artificial Sequence: Synthetic oligonucleotide
  Sense strand starting at position 2805 of SEQ ID NO: 1881957
uguccucaggcuuauagga

SEQ ID NO: 2084191 - RNA, 19 nt, Artificial Sequence
  Description of Artificial Sequence: Synthetic oligonucleotide
  Antisense strand to SEQ ID NO: 2084190
uccuauaagccugaggaca

SEQ ID NO: 2084192 - RNA, 19 nt, Artificial Sequence
  Description of Artificial Sequence: Synthetic oligonucleotide
  Sense strand starting at position 2849 of SEQ ID NO: 1881957
uugaguguucuaggaacag

SEQ ID NO: 2084193 - RNA, 19 nt, Artificial Sequence
  Description of Artificial Sequence: Synthetic oligonucleotide
  Antisense strand to SEQ ID NO: 2084192
cuguuccuagaacacucaa

SEQ ID NO: 2084194 - RNA, 19 nt, Artificial Sequence
  Description of Artificial Sequence: Synthetic oligonucleotide
  Sense strand starting at position 3265 of SEQ ID NO: 1881957
guaagagcugaguaaauau

SEQ ID NO: 2084195 - RNA, 19 nt, Artificial Sequence
  Description of Artificial Sequence: Synthetic oligonucleotide
  Antisense strand to SEQ ID NO: 2084194
auauuuacucagcucuuac

SEQ ID NO: 2084196 - RNA, 19 nt, Artificial Sequence
  Description of Artificial Sequence: Synthetic oligonucleotide
  Sense strand starting at position 3604 of SEQ ID NO: 1881957
acuagaugcccacagaagu

SEQ ID NO: 2084197 - RNA, 19 nt, Artificial Sequence
  Description of Artificial Sequence: Synthetic oligonucleotide
  Antisense strand to SEQ ID NO: 2084196
acuucugugggcaucuagu

SEQ ID NO: 2084198 - RNA, 19 nt, Artificial Sequence
  Description of Artificial Sequence: Synthetic oligonucleotide
  Sense strand starting at position 3622 of SEQ ID NO: 1881957
uuaagaaucuuguccaaag

SEQ ID NO: 2084199 - RNA, 19 nt, Artificial Sequence
  Description of Artificial Sequence: Synthetic oligonucleotide
  Antisense strand to SEQ ID NO: 2084198
cuuuggacaagauucuuaa

SEQ ID NO: 2084200 - RNA, 19 nt, Artificial Sequence
  Description of Artificial Sequence: Synthetic oligonucleotide
  Sense strand starting at position 3749 of SEQ ID NO: 1881957
ugugauugccuggaaacag

SEQ ID NO: 2084201 - RNA, 19 nt, Artificial Sequence
  Description of Artificial Sequence: Synthetic oligonucleotide
  Antisense strand to SEQ ID NO: 2084200
cuguuuccaggcaaucaca

SEQ ID NO: 2084202 - RNA, 19 nt, Artificial Sequence
  Description of Artificial Sequence: Synthetic oligonucleotide
  Sense strand starting at position 3896 of SEQ ID NO: 1881957
uuuaguagcauuggagaga

SEQ ID NO: 2084203 - RNA, 19 nt, Artificial Sequence
  Description of Artificial Sequence: Synthetic oligonucleotide
  Antisense strand to SEQ ID NO: 2084202
ucucuccaaugcuacuaaa

SEQ ID NO: 2084204 - RNA, 19 nt, Artificial Sequence
  Description of Artificial Sequence: Synthetic oligonucleotide
  Sense strand starting at position 66 of SEQ ID NO: 1881958
guggccuaaagauaguaua

SEQ ID NO: 2084205 - RNA, 19 nt, Artificial Sequence
  Description of Artificial Sequence: Synthetic oligonucleotide
  Antisense strand to SEQ ID NO: 2084204
uauacuaucuuuaggccac

SEQ ID NO: 2084206 - RNA, 19 nt, Artificial Sequence
  Description of Artificial Sequence: Synthetic oligonucleotide
  Sense strand starting at position 381 of SEQ ID NO: 1881958
gaacuauuagguuguguaa

SEQ ID NO: 2084207 - RNA, 19 nt, Artificial Sequence
  Description of Artificial Sequence: Synthetic oligonucleotide
  Antisense strand to SEQ ID NO: 2084206
uuacacaaccuaauaguuc

SEQ ID NO: 2084208 - RNA, 19 nt, Artificial Sequence
  Description of Artificial Sequence: Synthetic oligonucleotide
  Sense strand starting at position 384 of SEQ ID NO: 1881958
cuauuagguuguguaagac

SEQ ID NO: 2084209 - RNA, 19 nt, Artificial Sequence
  Description of Artificial Sequence: Synthetic oligonucleotide
  Antisense strand to SEQ ID NO: 2084208
gucuuacacaaccuaauag

SEQ ID NO: 2084210 - RNA, 19 nt, Artificial Sequence
  Description of Artificial Sequence: Synthetic oligonucleotide
  Sense strand starting at position 400 of SEQ ID NO: 1881958
gacuuugauuuggaaggca

SEQ ID NO: 2084211 - RNA, 19 nt, Artificial Sequence
  Description of Artificial Sequence: Synthetic oligonucleotide
  Antisense strand to SEQ ID NO: 2084210
ugccuuccaaaucaaaguc

SEQ ID NO: 2084212 - RNA, 19 nt, Artificial Sequence
  Description of Artificial Sequence: Synthetic oligonucleotide
  Sense strand starting at position 428 of SEQ ID NO: 1881958
ugaacaugguaucuugaga

SEQ ID NO: 2084213 - RNA, 19 nt, Artificial Sequence
  Description of Artificial Sequence: Synthetic oligonucleotide
  Antisense strand to SEQ ID NO: 2084212
ucucaagauaccauguuca

SEQ ID NO: 2084214 - RNA, 19 nt, Artificial Sequence
  Description of Artificial Sequence: Synthetic oligonucleotide
  Sense strand starting at position 583 of SEQ ID NO: 1881958
ugagaagccuuucuggcuu

SEQ ID NO: 2084215 - RNA, 19 nt, Artificial Sequence
  Description of Artificial Sequence: Synthetic oligonucleotide
  Antisense strand to SEQ ID NO: 2084214
aagccagaaaggcuucuca

SEQ ID NO: 2084216 - RNA, 19 nt, Artificial Sequence
  Description of Artificial Sequence: Synthetic oligonucleotide
  Sense strand starting at position 686 of SEQ ID NO: 1881958
aacagaagcucuguguuua

SEQ ID NO: 2084217 - RNA, 19 nt, Artificial Sequence
  Description of Artificial Sequence: Synthetic oligonucleotide
  Antisense strand to SEQ ID NO: 2084216
uaaacacagagcuucuguu

SEQ ID NO: 2084218 - RNA, 19 nt, Artificial Sequence
  Description of Artificial Sequence: Synthetic oligonucleotide
  Sense strand starting at position 690 of SEQ ID NO: 1881958
gaagcucuguguuuauaau

SEQ ID NO: 2084219 - RNA, 19 nt, Artificial Sequence
  Description of Artificial Sequence: Synthetic oligonucleotide
  Antisense strand to SEQ ID NO: 2084218
auuauaaacacagagcuuc

SEQ ID NO: 2084220 - RNA, 19 nt, Artificial Sequence
  Description of Artificial Sequence: Synthetic oligonucleotide
  Sense strand starting at position 874 of SEQ ID NO: 1881958
acacgugaaugaucccgaa

SEQ ID NO: 2084221 - RNA, 19 nt, Artificial Sequence
  Description of Artificial Sequence: Synthetic oligonucleotide
  Antisense strand to SEQ ID NO: 2084220
uucgggaucauucacgugu

SEQ ID NO: 2084222 - RNA, 19 nt, Artificial Sequence
  Description of Artificial Sequence: Synthetic oligonucleotide
  Sense strand starting at position 1070 of SEQ ID NO: 1881958
acaagaaugugggcucuga

SEQ ID NO: 2084223 - RNA, 19 nt, Artificial Sequence
  Description of Artificial Sequence: Synthetic oligonucleotide
  Antisense strand to SEQ ID NO: 2084222
ucagagcccacauucuugu

SEQ ID NO: 2084224 - RNA, 19 nt, Artificial Sequence
  Description of Artificial Sequence: Synthetic oligonucleotide
  Sense strand starting at position 1124 of SEQ ID NO: 1881958
auaauuuccuagcaaagug

SEQ ID NO: 2084225 - RNA, 19 nt, Artificial Sequence
  Description of Artificial Sequence: Synthetic oligonucleotide
  Antisense strand to SEQ ID NO: 2084224
cacuuugcuaggaaauuau

SEQ ID NO: 2084226 - RNA, 19 nt, Artificial Sequence
  Description of Artificial Sequence: Synthetic oligonucleotide
  Sense strand starting at position 1134 of SEQ ID NO: 1881958
agcaaagugucucucugaa

SEQ ID NO: 2084227 - RNA, 19 nt, Artificial Sequence
  Description of Artificial Sequence: Synthetic oligonucleotide
  Antisense strand to SEQ ID NO: 2084226
uucagagagacacuuugcu

SEQ ID NO: 2084228 - RNA, 19 nt, Artificial Sequence
  Description of Artificial Sequence: Synthetic oligonucleotide
  Sense strand starting at position 1273 of SEQ ID NO: 1881958
ggugaguguccaggagaga

SEQ ID NO: 2084229 - RNA, 19 nt, Artificial Sequence
  Description of Artificial Sequence: Synthetic oligonucleotide
  Antisense strand to SEQ ID NO: 2084228
ucucuccuggacacucacc

SEQ ID NO: 2084230 - RNA, 19 nt, Artificial Sequence
  Description of Artificial Sequence: Synthetic oligonucleotide
  Sense strand starting at position 1430 of SEQ ID NO: 1881958
ucaggaaagucccugaauu

SEQ ID NO: 2084231 - RNA, 19 nt, Artificial Sequence
  Description of Artificial Sequence: Synthetic oligonucleotide
  Antisense strand to SEQ ID NO: 2084230
aauucagggacuuuccuga

SEQ ID NO: 2084232 - RNA, 19 nt, Artificial Sequence
  Description of Artificial Sequence: Synthetic oligonucleotide
  Sense strand starting at position 1529 of SEQ ID NO: 1881958
guggcugggcaggauuauu

SEQ ID NO: 2084233 - RNA, 19 nt, Artificial Sequence
  Description of Artificial Sequence: Synthetic oligonucleotide
  Antisense strand to SEQ ID NO: 2084232
aauaauccugcccagccac

SEQ ID NO: 2084234 - RNA, 19 nt, Artificial Sequence
  Description of Artificial Sequence: Synthetic oligonucleotide
  Sense strand starting at position 1537 of SEQ ID NO: 1881958
gcaggauuauugcuuacaa

SEQ ID NO: 2084235 - RNA, 19 nt, Artificial Sequence
  Description of Artificial Sequence: Synthetic oligonucleotide
  Antisense strand to SEQ ID NO: 2084234
uuguaagcaauaauccugc

SEQ ID NO: 2084236 - RNA, 19 nt, Artificial Sequence
  Description of Artificial Sequence: Synthetic oligonucleotide
  Sense strand starting at position 2169 of SEQ ID NO: 1881958
gcugcuuuagccgugaaag

SEQ ID NO: 2084237 - RNA, 19 nt, Artificial Sequence
  Description of Artificial Sequence: Synthetic oligonucleotide
  Antisense strand to SEQ ID NO: 2084236
cuuucacggcuaaagcagc

SEQ ID NO: 2084238 - RNA, 19 nt, Artificial Sequence
  Description of Artificial Sequence: Synthetic oligonucleotide
  Sense strand starting at position 2410 of SEQ ID NO: 1881958
accuauuugugcuuccuau

SEQ ID NO: 2084239 - RNA, 19 nt, Artificial Sequence
  Description of Artificial Sequence: Synthetic oligonucleotide
  Antisense strand to SEQ ID NO: 2084238
auaggaagcacaaauaggu

SEQ ID NO: 2084240 - RNA, 19 nt, Artificial Sequence
  Description of Artificial Sequence: Synthetic oligonucleotide
  Sense strand starting at position 2493 of SEQ ID NO: 1881958
guuuguuuacuacaguaac

SEQ ID NO: 2084241 - RNA, 19 nt, Artificial Sequence
  Description of Artificial Sequence: Synthetic oligonucleotide
  Antisense strand to SEQ ID NO: 2084240
guuacuguaguaaacaaac

SEQ ID NO: 2084242 - RNA, 19 nt, Artificial Sequence
  Description of Artificial Sequence: Synthetic oligonucleotide
  Sense strand starting at position 2496 of SEQ ID NO: 1881958
uguuuacuacaguaaccau

SEQ ID NO: 2084243 - RNA, 19 nt, Artificial Sequence
  Description of Artificial Sequence: Synthetic oligonucleotide
  Antisense strand to SEQ ID NO: 2084242
augguuacuguaguaaaca

SEQ ID NO: 2084244 - RNA, 19 nt, Artificial Sequence
  Description of Artificial Sequence: Synthetic oligonucleotide
  Sense strand starting at position 2508 of SEQ ID NO: 1881958
uaaccaugacgcuggaaga

SEQ ID NO: 2084245 - RNA, 19 nt, Artificial Sequence
  Description of Artificial Sequence: Synthetic oligonucleotide
  Antisense strand to SEQ ID NO: 2084244
ucuuccagcgucaugguua

SEQ ID NO: 2084246 - RNA, 19 nt, Artificial Sequence
  Description of Artificial Sequence: Synthetic oligonucleotide
  Sense strand starting at position 2547 of SEQ ID NO: 1881958
ccaggaagggagcgauuaa

SEQ ID NO: 2084247 - RNA, 19 nt, Artificial Sequence
  Description of Artificial Sequence: Synthetic oligonucleotide
  Antisense strand to SEQ ID NO: 2084246
uuaaucgcucccuuccugg

SEQ ID NO: 2084248 - RNA, 19 nt, Artificial Sequence
  Description of Artificial Sequence: Synthetic oligonucleotide
  Sense strand starting at position 2673 of SEQ ID NO: 1881958
uuuggagcauuuguuaagu

SEQ ID NO: 2084249 - RNA, 19 nt, Artificial Sequence
  Description of Artificial Sequence: Synthetic oligonucleotide
  Antisense strand to SEQ ID NO: 2084248
acuuaacaaaugcuccaaa

SEQ ID NO: 2084250 - RNA, 19 nt, Artificial Sequence
  Description of Artificial Sequence: Synthetic oligonucleotide
  Sense strand starting at position 2781 of SEQ ID NO: 1881958
uguuacaaacauuguucua

SEQ ID NO: 2084251 - RNA, 19 nt, Artificial Sequence
  Description of Artificial Sequence: Synthetic oligonucleotide
  Antisense strand to SEQ ID NO: 2084250
uagaacaauguuuguaaca

SEQ ID NO: 2084252 - RNA, 19 nt, Artificial Sequence
  Description of Artificial Sequence: Synthetic oligonucleotide
  Sense strand starting at position 2886 of SEQ ID NO: 1881958
uacauauuggaagguaauu

SEQ ID NO: 2084253 - RNA, 19 nt, Artificial Sequence
  Description of Artificial Sequence: Synthetic oligonucleotide
  Antisense strand to SEQ ID NO: 2084252
aauuaccuuccaauaugua

SEQ ID NO: 2084254 - RNA, 19 nt, Artificial Sequence
  Description of Artificial Sequence: Synthetic oligonucleotide
  Sense strand starting at position 3050 of SEQ ID NO: 1881958
cuuccuugugcucauacau

SEQ ID NO: 2084255 - RNA, 19 nt, Artificial Sequence
  Description of Artificial Sequence: Synthetic oligonucleotide
  Antisense strand to SEQ ID NO: 2084254
auguaugagcacaaggaag

SEQ ID NO: 2084256 - RNA, 19 nt, Artificial Sequence
  Description of Artificial Sequence: Synthetic oligonucleotide
  Sense strand starting at position 3059 of SEQ ID NO: 1881958
gcucauacaugugcauaga

SEQ ID NO: 2084257 - RNA, 19 nt, Artificial Sequence
  Description of Artificial Sequence: Synthetic oligonucleotide
  Antisense strand to SEQ ID NO: 2084256
ucuaugcacauguaugagc

SEQ ID NO: 2084258 - RNA, 19 nt, Artificial Sequence
  Description of Artificial Sequence: Synthetic oligonucleotide
  Sense strand starting at position 3375 of SEQ ID NO: 1881958
ucuacuagucaagggacau

SEQ ID NO: 2084259 - RNA, 19 nt, Artificial Sequence
  Description of Artificial Sequence: Synthetic oligonucleotide
  Antisense strand to SEQ ID NO: 2084258
augucccuugacuaguaga

SEQ ID NO: 2084260 - RNA, 19 nt, Artificial Sequence
  Description of Artificial Sequence: Synthetic oligonucleotide
  Sense strand starting at position 3418 of SEQ ID NO: 1881958
uugcaaucagguugauaau

SEQ ID NO: 2084261 - RNA, 19 nt, Artificial Sequence
  Description of Artificial Sequence: Synthetic oligonucleotide
  Antisense strand to SEQ ID NO: 2084260
auuaucaaccugauugcaa

SEQ ID NO: 2084262 - RNA, 19 nt, Artificial Sequence
  Description of Artificial Sequence: Synthetic oligonucleotide
  Sense strand starting at position 3419 of SEQ ID NO: 1881958
ugcaaucagguugauaaua

SEQ ID NO: 2084263 - RNA, 19 nt, Artificial Sequence
  Description of Artificial Sequence: Synthetic oligonucleotide
  Antisense strand to SEQ ID NO: 2084262
uauuaucaaccugauugca

SEQ ID NO: 2084264 - RNA, 19 nt, Artificial Sequence
  Description of Artificial Sequence: Synthetic oligonucleotide
  Sense strand starting at position 3472 of SEQ ID NO: 1881958
gaguacuuacuagguaaca

SEQ ID NO: 2084265 - RNA, 19 nt, Artificial Sequence
  Description of Artificial Sequence: Synthetic oligonucleotide
  Antisense strand to SEQ ID NO: 2084264
uguuaccuaguaaguacuc

SEQ ID NO: 2084266 - RNA, 19 nt, Artificial Sequence
  Description of Artificial Sequence: Synthetic oligonucleotide
  Sense strand starting at position 3488 of SEQ ID NO: 1881958
acagguaucgugcauaggu

SEQ ID NO: 2084267 - RNA, 19 nt, Artificial Sequence
  Description of Artificial Sequence: Synthetic oligonucleotide
  Antisense strand to SEQ ID NO: 2084266
accuaugcacgauaccugu

SEQ ID NO: 2084268 - RNA, 19 nt, Artificial Sequence
  Description of Artificial Sequence: Synthetic oligonucleotide
  Sense strand starting at position 3546 of SEQ ID NO: 1881958
ucauguaagcuccaugaga

SEQ ID NO: 2084269 - RNA, 19 nt, Artificial Sequence
  Description of Artificial Sequence: Synthetic oligonucleotide
  Antisense strand to SEQ ID NO: 2084268
ucucauggagcuuacauga

SEQ ID NO: 2084270 - RNA, 19 nt, Artificial Sequence
  Description of Artificial Sequence: Synthetic oligonucleotide
  Sense strand starting at position 3636 of SEQ ID NO: 1881958
augaaugaaugauugcauu

SEQ ID NO: 2084271 - RNA, 19 nt, Artificial Sequence
  Description of Artificial Sequence: Synthetic oligonucleotide
  Antisense strand to SEQ ID NO: 2084270
aaugcaaucauucauucau

SEQ ID NO: 2084272 - RNA, 19 nt, Artificial Sequence
  Description of Artificial Sequence: Synthetic oligonucleotide
  Sense strand starting at position 3772 of SEQ ID NO: 1881958
auuguugacugcucuauag

SEQ ID NO: 2084273 - RNA, 19 nt, Artificial Sequence
  Description of Artificial Sequence: Synthetic oligonucleotide
  Antisense strand to SEQ ID NO: 2084272
cuauagagcagucaacaau

SEQ ID NO: 2084274 - RNA, 19 nt, Artificial Sequence
  Description of Artificial Sequence: Synthetic oligonucleotide
  Sense strand starting at position 3774 of SEQ ID NO: 1881958
uguugacugcucuauagau

SEQ ID NO: 2084275 - RNA, 19 nt, Artificial Sequence
  Description of Artificial Sequence: Synthetic oligonucleotide
  Antisense strand to SEQ ID NO: 2084274
aucuauagagcagucaaca

SEQ ID NO: 2084276 - RNA, 19 nt, Artificial Sequence
  Description of Artificial Sequence: Synthetic oligonucleotide
  Sense strand starting at position 3776 of SEQ ID NO: 1881958
uugacugcucuauagauac

SEQ ID NO: 2084277 - RNA, 19 nt, Artificial Sequence
  Description of Artificial Sequence: Synthetic oligonucleotide
  Antisense strand to SEQ ID NO: 2084276
guaucuauagagcagucaa

SEQ ID NO: 2084278 - RNA, 19 nt, Artificial Sequence
  Description of Artificial Sequence: Synthetic oligonucleotide
  Sense strand starting at position 3792 of SEQ ID NO: 1881958
uacuccaggcauuguuaga

SEQ ID NO: 2084279 - RNA, 19 nt, Artificial Sequence
  Description of Artificial Sequence: Synthetic oligonucleotide
  Antisense strand to SEQ ID NO: 2084278
ucuaacaaugccuggagua

SEQ ID NO: 2084280 - RNA, 19 nt, Artificial Sequence
  Description of Artificial Sequence: Synthetic oligonucleotide
  Sense strand starting at position 3801 of SEQ ID NO: 1881958
cauuguuagagggacaguu

SEQ ID NO: 2084281 - RNA, 19 nt, Artificial Sequence
  Description of Artificial Sequence: Synthetic oligonucleotide
  Antisense strand to SEQ ID NO: 2084280
aacugucccucuaacaaug

SEQ ID NO: 2084282 - RNA, 19 nt, Artificial Sequence
  Description of Artificial Sequence: Synthetic oligonucleotide
  Sense strand starting at position 3811 of SEQ ID NO: 1881958
gggacaguuucuucucuuu

SEQ ID NO: 2084283 - RNA, 19 nt, Artificial Sequence
  Description of Artificial Sequence: Synthetic oligonucleotide
  Antisense strand to SEQ ID NO: 2084282
aaagagaagaaacuguccc

SEQ ID NO: 2084284 - RNA, 19 nt, Artificial Sequence
  Description of Artificial Sequence: Synthetic oligonucleotide
  Sense strand starting at position 7 of SEQ ID NO: 1881959
uuguaugaauucuugacaa

SEQ ID NO: 2084285 - RNA, 19 nt, Artificial Sequence
  Description of Artificial Sequence: Synthetic oligonucleotide
  Antisense strand to SEQ ID NO: 2084284
uugucaagaauucauacaa

SEQ ID NO: 2084286 - RNA, 19 nt, Artificial Sequence
  Description of Artificial Sequence: Synthetic oligonucleotide
  Sense strand starting at position 174 of SEQ ID NO: 1881959
gcuucuggcuaccuauuua

SEQ ID NO: 2084287 - RNA, 19 nt, Artificial Sequence
  Description of Artificial Sequence: Synthetic oligonucleotide
  Antisense strand to SEQ ID NO: 2084286
uaaauagguagccagaagc

SEQ ID NO: 2084288 - RNA, 19 nt, Artificial Sequence
  Description of Artificial Sequence: Synthetic oligonucleotide
  Sense strand starting at position 451 of SEQ ID NO: 1881959
gcaaauaaauaugccaaga

SEQ ID NO: 2084289 - RNA, 19 nt, Artificial Sequence
  Description of Artificial Sequence: Synthetic oligonucleotide
  Antisense strand to SEQ ID NO: 2084288
ucuuggcauauuuauuugc

SEQ ID NO: 2084290 - RNA, 19 nt, Artificial Sequence
  Description of Artificial Sequence: Synthetic oligonucleotide
  Sense strand starting at position 516 of SEQ ID NO: 1881959
ccugguauaccaugaccaa

SEQ ID NO: 2084291 - RNA, 19 nt, Artificial Sequence
  Description of Artificial Sequence: Synthetic oligonucleotide
  Antisense strand to SEQ ID NO: 2084290
uuggucaugguauaccagg

SEQ ID NO: 2084292 - RNA, 19 nt, Artificial Sequence
  Description of Artificial Sequence: Synthetic oligonucleotide
  Sense strand starting at position 769 of SEQ ID NO: 1881959
aaauaaagucuguaggcau

SEQ ID NO: 2084293 - RNA, 19 nt, Artificial Sequence
  Description of Artificial Sequence: Synthetic oligonucleotide
  Antisense strand to SEQ ID NO: 2084292
augccuacagacuuuauuu

SEQ ID NO: 2084294 - RNA, 19 nt, Artificial Sequence
  Description of Artificial Sequence: Synthetic oligonucleotide
  Sense strand starting at position 988 of SEQ ID NO: 1881959
guuacuuugguggaugagu

SEQ ID NO: 2084295 - RNA, 19 nt, Artificial Sequence
  Description of Artificial Sequence: Synthetic oligonucleotide
  Antisense strand to SEQ ID NO: 2084294
acucauccaccaaaguaac

SEQ ID NO: 2084296 - RNA, 19 nt, Artificial Sequence
  Description of Artificial Sequence: Synthetic oligonucleotide
  Sense strand starting at position 990 of SEQ ID NO: 1881959
uacuuugguggaugaguaa

SEQ ID NO: 2084297 - RNA, 19 nt, Artificial Sequence
  Description of Artificial Sequence: Synthetic oligonucleotide
  Antisense strand to SEQ ID NO: 2084296
uuacucauccaccaaagua

SEQ ID NO: 2084298 - RNA, 19 nt, Artificial Sequence
  Description of Artificial Sequence: Synthetic oligonucleotide
  Sense strand starting at position 1113 of SEQ ID NO: 1881959
ugguguagcacugaauaga

SEQ ID NO: 2084299 - RNA, 19 nt, Artificial Sequence
  Description of Artificial Sequence: Synthetic oligonucleotide
  Antisense strand to SEQ ID NO: 2084298
ucuauucagugcuacacca

SEQ ID NO: 2084300 - RNA, 19 nt, Artificial Sequence
  Description of Artificial Sequence: Synthetic oligonucleotide
  Sense strand starting at position 1130 of SEQ ID NO: 1881959
gaggguuuaccagauuguu

SEQ ID NO: 2084301 - RNA, 19 nt, Artificial Sequence
  Description of Artificial Sequence: Synthetic oligonucleotide
  Antisense strand to SEQ ID NO: 2084300
aacaaucugguaaacccuc

SEQ ID NO: 2084302 - RNA, 19 nt, Artificial Sequence
  Description of Artificial Sequence: Synthetic oligonucleotide
  Sense strand starting at position 1142 of SEQ ID NO: 1881959
gauuguuggcacuggauaa

SEQ ID NO: 2084303 - RNA, 19 nt, Artificial Sequence
  Description of Artificial Sequence: Synthetic oligonucleotide
  Antisense strand to SEQ ID NO: 2084302
uuauccagugccaacaauc

SEQ ID NO: 2084304 - RNA, 19 nt, Artificial Sequence
  Description of Artificial Sequence: Synthetic oligonucleotide
  Sense strand starting at position 1197 of SEQ ID NO: 1881959
gagggaaguuuccuuuccu

SEQ ID NO: 2084305 - RNA, 19 nt, Artificial Sequence
  Description of Artificial Sequence: Synthetic oligonucleotide
  Antisense strand to SEQ ID NO: 2084304
aggaaaggaaacuucccuc

SEQ ID NO: 2084306 - RNA, 19 nt, Artificial Sequence
  Description of Artificial Sequence: Synthetic oligonucleotide
  Sense strand starting at position 1198 of SEQ ID NO: 1881959
agggaaguuuccuuuccua

SEQ ID NO: 2084307 - RNA, 19 nt, Artificial Sequence
  Description of Artificial Sequence: Synthetic oligonucleotide
  Antisense strand to SEQ ID NO: 2084306
uaggaaaggaaacuucccu

SEQ ID NO: 2084308 - RNA, 19 nt, Artificial Sequence
  Description of Artificial Sequence: Synthetic oligonucleotide
  Sense strand starting at position 1201 of SEQ ID NO: 1881959
gaaguuuccuuuccuagga

SEQ ID NO: 2084309 - RNA, 19 nt, Artificial Sequence
  Description of Artificial Sequence: Synthetic oligonucleotide
  Antisense strand to SEQ ID NO: 2084308
uccuaggaaaggaaacuuc

SEQ ID NO: 2084310 - RNA, 19 nt, Artificial Sequence
  Description of Artificial Sequence: Synthetic oligonucleotide
  Sense strand starting at position 1222 of SEQ ID NO: 1881959
gagagagcuggcugacuua

SEQ ID NO: 2084311 - RNA, 19 nt, Artificial Sequence
  Description of Artificial Sequence: Synthetic oligonucleotide
  Antisense strand to SEQ ID NO: 2084310
uaagucagccagcucucuc

SEQ ID NO: 2084312 - RNA, 19 nt, Artificial Sequence
  Description of Artificial Sequence: Synthetic oligonucleotide
  Sense strand starting at position 1279 of SEQ ID NO: 1881959
uggccauaucugcaaacua

SEQ ID NO: 2084313 - RNA, 19 nt, Artificial Sequence
  Description of Artificial Sequence: Synthetic oligonucleotide
  Antisense strand to SEQ ID NO: 2084312
uaguuugcagauauggcca

SEQ ID NO: 2084314 - RNA, 19 nt, Artificial Sequence
  Description of Artificial Sequence: Synthetic oligonucleotide
  Sense strand starting at position 1408 of SEQ ID NO: 1881959
agugaaacguuaguuauuu

SEQ ID NO: 2084315 - RNA, 19 nt, Artificial Sequence
  Description of Artificial Sequence: Synthetic oligonucleotide
  Antisense strand to SEQ ID NO: 2084314
aaauaacuaacguuucacu

SEQ ID NO: 2084316 - RNA, 19 nt, Artificial Sequence
  Description of Artificial Sequence: Synthetic oligonucleotide
  Sense strand starting at position 1409 of SEQ ID NO: 1881959
gugaaacguuaguuauuug

SEQ ID NO: 2084317 - RNA, 19 nt, Artificial Sequence
  Description of Artificial Sequence: Synthetic oligonucleotide
  Antisense strand to SEQ ID NO: 2084316
caaauaacuaacguuucac

SEQ ID NO: 2084318 - RNA, 19 nt, Artificial Sequence
  Description of Artificial Sequence: Synthetic oligonucleotide
  Sense strand starting at position 2164 of SEQ ID NO: 1881959
acauuuagaugacagcaua

SEQ ID NO: 2084319 - RNA, 19 nt, Artificial Sequence
  Description of Artificial Sequence: Synthetic oligonucleotide
  Antisense strand to SEQ ID NO: 2084318
uaugcugucaucuaaaugu

SEQ ID NO: 2084320 - RNA, 19 nt, Artificial Sequence
  Description of Artificial Sequence: Synthetic oligonucleotide
  Sense strand starting at position 2248 of SEQ ID NO: 1881959
ugaauaaaucaauguggca

SEQ ID NO: 2084321 - RNA, 19 nt, Artificial Sequence
  Description of Artificial Sequence: Synthetic oligonucleotide
  Antisense strand to SEQ ID NO: 2084320
ugccacauugauuuauuca

SEQ ID NO: 2084322 - RNA, 19 nt, Artificial Sequence
  Description of Artificial Sequence: Synthetic oligonucleotide
  Sense strand starting at position 2260 of SEQ ID NO: 1881959
uguggcaauauugaugauu

SEQ ID NO: 2084323 - RNA, 19 nt, Artificial Sequence
  Description of Artificial Sequence: Synthetic oligonucleotide
  Antisense strand to SEQ ID NO: 2084322
aaucaucaauauugccaca

SEQ ID NO: 2084324 - RNA, 19 nt, Artificial Sequence
  Description of Artificial Sequence: Synthetic oligonucleotide
  Sense strand starting at position 2601 of SEQ ID NO: 1881959
auauacuugugauucuaag

SEQ ID NO: 2084325 - RNA, 19 nt, Artificial Sequence
  Description of Artificial Sequence: Synthetic oligonucleotide
  Antisense strand to SEQ ID NO: 2084324
cuuagaaucacaaguauau

SEQ ID NO: 2084326 - RNA, 19 nt, Artificial Sequence
  Description of Artificial Sequence: Synthetic oligonucleotide
  Sense strand starting at position 2683 of SEQ ID NO: 1881959
guucccugugcgcucuaaa

SEQ ID NO: 2084327 - RNA, 19 nt, Artificial Sequence
  Description of Artificial Sequence: Synthetic oligonucleotide
  Antisense strand to SEQ ID NO: 2084326
uuuagagcgcacagggaac

SEQ ID NO: 2084328 - RNA, 19 nt, Artificial Sequence
  Description of Artificial Sequence: Synthetic oligonucleotide
  Sense strand starting at position 2736 of SEQ ID NO: 1881959
auacaucuagacuguuacu

SEQ ID NO: 2084329 - RNA, 19 nt, Artificial Sequence
  Description of Artificial Sequence: Synthetic oligonucleotide
  Antisense strand to SEQ ID NO: 2084328
aguaacagucuagauguau

SEQ ID NO: 2084330 - RNA, 19 nt, Artificial Sequence
  Description of Artificial Sequence: Synthetic oligonucleotide
  Sense strand starting at position 2959 of SEQ ID NO: 1881959
aaagauugguuugugugga

SEQ ID NO: 2084331 - RNA, 19 nt, Artificial Sequence
  Description of Artificial Sequence: Synthetic oligonucleotide
  Antisense strand to SEQ ID NO: 2084330
uccacacaaaccaaucuuu

SEQ ID NO: 2084332 - RNA, 19 nt, Artificial Sequence
  Description of Artificial Sequence: Synthetic oligonucleotide
  Sense strand starting at position 3030 of SEQ ID NO: 1881959
guuguacauguguuuguuu

SEQ ID NO: 2084333 - RNA, 19 nt, Artificial Sequence
  Description of Artificial Sequence: Synthetic oligonucleotide
  Antisense strand to SEQ ID NO: 2084332
aaacaaacacauguacaac

SEQ ID NO: 2084334 - RNA, 19 nt, Artificial Sequence
  Description of Artificial Sequence: Synthetic oligonucleotide
  Sense strand starting at position 3110 of SEQ ID NO: 1881959
agggucagauaucucuuua

SEQ ID NO: 2084335 - RNA, 19 nt, Artificial Sequence
  Description of Artificial Sequence: Synthetic oligonucleotide
  Antisense strand to SEQ ID NO: 2084334
uaaagagauaucugacccu

SEQ ID NO: 2084336 - RNA, 19 nt, Artificial Sequence
  Description of Artificial Sequence: Synthetic oligonucleotide
  Sense strand starting at position 3114 of SEQ ID NO: 1881959
ucagauaucucuuuaugga

SEQ ID NO: 2084337 - RNA, 19 nt, Artificial Sequence
  Description of Artificial Sequence: Synthetic oligonucleotide
  Antisense strand to SEQ ID NO: 2084336
uccauaaagagauaucuga

SEQ ID NO: 2084338 - RNA, 19 nt, Artificial Sequence
  Description of Artificial Sequence: Synthetic oligonucleotide
  Sense strand starting at position 3177 of SEQ ID NO: 1881959
agaguauaauucuugggua

SEQ ID NO: 2084339 - RNA, 19 nt, Artificial Sequence
  Description of Artificial Sequence: Synthetic oligonucleotide
  Antisense strand to SEQ ID NO: 2084338
uacccaagaauuauacucu

SEQ ID NO: 2084340 - RNA, 19 nt, Artificial Sequence
  Description of Artificial Sequence: Synthetic oligonucleotide
  Sense strand starting at position 3179 of SEQ ID NO: 1881959
aguauaauucuuggguaau

SEQ ID NO: 2084341 - RNA, 19 nt, Artificial Sequence
  Description of Artificial Sequence: Synthetic oligonucleotide
  Antisense strand to SEQ ID NO: 2084340
auuacccaagaauuauacu

SEQ ID NO: 2084342 - RNA, 19 nt, Artificial Sequence
  Description of Artificial Sequence: Synthetic oligonucleotide
  Sense strand starting at position 3189 of SEQ ID NO: 1881959
uuggguaaucugucguugu

SEQ ID NO: 2084343 - RNA, 19 nt, Artificial Sequence
  Description of Artificial Sequence: Synthetic oligonucleotide
  Antisense strand to SEQ ID NO: 2084342
acaacgacagauuacccaa

SEQ ID NO: 2084344 - RNA, 19 nt, Artificial Sequence
  Description of Artificial Sequence: Synthetic oligonucleotide
  Sense strand starting at position 3305 of SEQ ID NO: 1881959
acuuaauacuaugcugaga

SEQ ID NO: 2084345 - RNA, 19 nt, Artificial Sequence
  Description of Artificial Sequence: Synthetic oligonucleotide
  Antisense strand to SEQ ID NO: 2084344
ucucagcauaguauuaagu

SEQ ID NO: 2084346 - RNA, 19 nt, Artificial Sequence
  Description of Artificial Sequence: Synthetic oligonucleotide
  Sense strand starting at position 3331 of SEQ ID NO: 1881959
ugagaacucucuguaucca

SEQ ID NO: 2084347 - RNA, 19 nt, Artificial Sequence
  Description of Artificial Sequence: Synthetic oligonucleotide
  Antisense strand to SEQ ID NO: 2084346
uggauacagagaguucuca

SEQ ID NO: 2084348 - RNA, 19 nt, Artificial Sequence
  Description of Artificial Sequence: Synthetic oligonucleotide
  Sense strand starting at position 3382 of SEQ ID NO: 1881959
cuguauauucuggagcauu

SEQ ID NO: 2084349 - RNA, 19 nt, Artificial Sequence
  Description of Artificial Sequence: Synthetic oligonucleotide
  Antisense strand to SEQ ID NO: 2084348
aaugcuccagaauauacag

SEQ ID NO: 2084350 - RNA, 19 nt, Artificial Sequence
  Description of Artificial Sequence: Synthetic oligonucleotide
  Sense strand starting at position 3416 of SEQ ID NO: 1881959
ccauuuaguuaucuugcuu

SEQ ID NO: 2084351 - RNA, 19 nt, Artificial Sequence
  Description of Artificial Sequence: Synthetic oligonucleotide
  Antisense strand to SEQ ID NO: 2084350
aagcaagauaacuaaaugg

SEQ ID NO: 2084352 - RNA, 19 nt, Artificial Sequence
  Description of Artificial Sequence: Synthetic oligonucleotide
  Sense strand starting at position 3721 of SEQ ID NO: 1881959
uggaaauaguuacucauca

SEQ ID NO: 2084353 - RNA, 19 nt, Artificial Sequence
  Description of Artificial Sequence: Synthetic oligonucleotide
  Antisense strand to SEQ ID NO: 2084352
ugaugaguaacuauuucca

SEQ ID NO: 2084354 - RNA, 19 nt, Artificial Sequence
  Description of Artificial Sequence: Synthetic oligonucleotide
  Sense strand starting at position 3722 of SEQ ID NO: 1881959
ggaaauaguuacucaucag

SEQ ID NO: 2084355 - RNA, 19 nt, Artificial Sequence
  Description of Artificial Sequence: Synthetic oligonucleotide
  Antisense strand to SEQ ID NO: 2084354
cugaugaguaacuauuucc

SEQ ID NO: 2084356 - RNA, 19 nt, Artificial Sequence
  Description of Artificial Sequence: Synthetic oligonucleotide
  Sense strand starting at position 3726 of SEQ ID NO: 1881959
auaguuacucaucagagca

SEQ ID NO: 2084357 - RNA, 19 nt, Artificial Sequence
  Description of Artificial Sequence: Synthetic oligonucleotide
  Antisense strand to SEQ ID NO: 2084356
ugcucugaugaguaacuau

SEQ ID NO: 2084358 - RNA, 19 nt, Artificial Sequence
  Description of Artificial Sequence: Synthetic oligonucleotide
  Sense strand starting at position 3915 of SEQ ID NO: 1881959
uagcuaugugcugauaaua

SEQ ID NO: 2084359 - RNA, 19 nt, Artificial Sequence
  Description of Artificial Sequence: Synthetic oligonucleotide
  Antisense strand to SEQ ID NO: 2084358
uauuaucagcacauagcua

SEQ ID NO: 2084360 - RNA, 19 nt, Artificial Sequence
  Description of Artificial Sequence: Synthetic oligonucleotide
  Sense strand starting at position 3925 of SEQ ID NO: 1881959
cugauaauauuaucugguu

SEQ ID NO: 2084361 - RNA, 19 nt, Artificial Sequence
  Description of Artificial Sequence: Synthetic oligonucleotide
  Antisense strand to SEQ ID NO: 2084360
aaccagauaauauuaucag

SEQ ID NO: 2084362 - RNA, 19 nt, Artificial Sequence
  Description of Artificial Sequence: Synthetic oligonucleotide
  Sense strand starting at position 3954 of SEQ ID NO: 1881959
gccuuagguuaauuggaaa

SEQ ID NO: 2084363 - RNA, 19 nt, Artificial Sequence
  Description of Artificial Sequence: Synthetic oligonucleotide
  Antisense strand to SEQ ID NO: 2084362
uuuccaauuaaccuaaggc

SEQ ID NO: 2084364 - RNA, 19 nt, Artificial Sequence
  Description of Artificial Sequence: Synthetic oligonucleotide
  Sense strand starting at position 63 of SEQ ID NO: 1881960
gcagauuggauguggagau

SEQ ID NO: 2084365 - RNA, 19 nt, Artificial Sequence
  Description of Artificial Sequence: Synthetic oligonucleotide
  Antisense strand to SEQ ID NO: 2084364
aucuccacauccaaucugc

SEQ ID NO: 2084366 - RNA, 19 nt, Artificial Sequence
  Description of Artificial Sequence: Synthetic oligonucleotide
  Sense strand starting at position 73 of SEQ ID NO: 1881960
uguggagaucaguagcuuu

SEQ ID NO: 2084367 - RNA, 19 nt, Artificial Sequence
  Description of Artificial Sequence: Synthetic oligonucleotide
  Antisense strand to SEQ ID NO: 2084366
aaagcuacugaucuccaca

SEQ ID NO: 2084368 - RNA, 19 nt, Artificial Sequence
  Description of Artificial Sequence: Synthetic oligonucleotide
  Sense strand starting at position 107 of SEQ ID NO: 1881960
guuugagguguuuauaauc

SEQ ID NO: 2084369 - RNA, 19 nt, Artificial Sequence
  Description of Artificial Sequence: Synthetic oligonucleotide
  Antisense strand to SEQ ID NO: 2084368
gauuauaaacaccucaaac

SEQ ID NO: 2084370 - RNA, 19 nt, Artificial Sequence
  Description of Artificial Sequence: Synthetic oligonucleotide
  Sense strand starting at position 112 of SEQ ID NO: 1881960
agguguuuauaauccacaa

SEQ ID NO: 2084371 - RNA, 19 nt, Artificial Sequence
  Description of Artificial Sequence: Synthetic oligonucleotide
  Antisense strand to SEQ ID NO: 2084370
uuguggauuauaaacaccu

SEQ ID NO: 2084372 - RNA, 19 nt, Artificial Sequence
  Description of Artificial Sequence: Synthetic oligonucleotide
  Sense strand starting at position 149 of SEQ ID NO: 1881960
guaaguuugauauauaggu

SEQ ID NO: 2084373 - RNA, 19 nt, Artificial Sequence
  Description of Artificial Sequence: Synthetic oligonucleotide
  Antisense strand to SEQ ID NO: 2084372
accuauauaucaaacuuac

SEQ ID NO: 2084374 - RNA, 19 nt, Artificial Sequence
  Description of Artificial Sequence: Synthetic oligonucleotide
  Sense strand starting at position 153 of SEQ ID NO: 1881960
guuugauauauaggucaag

SEQ ID NO: 2084375 - RNA, 19 nt, Artificial Sequence
  Description of Artificial Sequence: Synthetic oligonucleotide
  Antisense strand to SEQ ID NO: 2084374
cuugaccuauauaucaaac

SEQ ID NO: 2084376 - RNA, 19 nt, Artificial Sequence
  Description of Artificial Sequence: Synthetic oligonucleotide
  Sense strand starting at position 154 of SEQ ID NO: 1881960
uuugauauauaggucaaga

SEQ ID NO: 2084377 - RNA, 19 nt, Artificial Sequence
  Description of Artificial Sequence: Synthetic oligonucleotide
  Antisense strand to SEQ ID NO: 2084376
ucuugaccuauauaucaaa

SEQ ID NO: 2084378 - RNA, 19 nt, Artificial Sequence
  Description of Artificial Sequence: Synthetic oligonucleotide
  Sense strand starting at position 182 of SEQ ID NO: 1881960
ggagaucugagcuggaaac

SEQ ID NO: 2084379 - RNA, 19 nt, Artificial Sequence
  Description of Artificial Sequence: Synthetic oligonucleotide
  Antisense strand to SEQ ID NO: 2084378
guuuccagcucagaucucc

SEQ ID NO: 2084380 - RNA, 19 nt, Artificial Sequence
  Description of Artificial Sequence: Synthetic oligonucleotide
  Sense strand starting at position 350 of SEQ ID NO: 1881960
ugacacaguucugucaaua

SEQ ID NO: 2084381 - RNA, 19 nt, Artificial Sequence
  Description of Artificial Sequence: Synthetic oligonucleotide
  Antisense strand to SEQ ID NO: 2084380
uauugacagaacuguguca

SEQ ID NO: 2084382 - RNA, 19 nt, Artificial Sequence
  Description of Artificial Sequence: Synthetic oligonucleotide
  Sense strand starting at position 380 of SEQ ID NO: 1881960
guaauugugagguaauucu

SEQ ID NO: 2084383 - RNA, 19 nt, Artificial Sequence
  Description of Artificial Sequence: Synthetic oligonucleotide
  Antisense strand to SEQ ID NO: 2084382
agaauuaccucacaauuac

SEQ ID NO: 2084384 - RNA, 19 nt, Artificial Sequence
  Description of Artificial Sequence: Synthetic oligonucleotide
  Sense strand starting at position 467 of SEQ ID NO: 1881960
ugauguaucuaacuuguga

SEQ ID NO: 2084385 - RNA, 19 nt, Artificial Sequence
  Description of Artificial Sequence: Synthetic oligonucleotide
  Antisense strand to SEQ ID NO: 2084384
ucacaaguuagauacauca

SEQ ID NO: 2084386 - RNA, 19 nt, Artificial Sequence
  Description of Artificial Sequence: Synthetic oligonucleotide
  Sense strand starting at position 580 of SEQ ID NO: 1881960
aaugucaucuuucuggaga

SEQ ID NO: 2084387 - RNA, 19 nt, Artificial Sequence
  Description of Artificial Sequence: Synthetic oligonucleotide
  Antisense strand to SEQ ID NO: 2084386
ucuccagaaagaugacauu

SEQ ID NO: 2084388 - RNA, 19 nt, Artificial Sequence
  Description of Artificial Sequence: Synthetic oligonucleotide
  Sense strand starting at position 672 of SEQ ID NO: 1881960
acugauacagagugucauu

SEQ ID NO: 2084389 - RNA, 19 nt, Artificial Sequence
  Description of Artificial Sequence: Synthetic oligonucleotide
  Antisense strand to SEQ ID NO: 2084388
aaugacacucuguaucagu

SEQ ID NO: 2084390 - RNA, 19 nt, Artificial Sequence
  Description of Artificial Sequence: Synthetic oligonucleotide
  Sense strand starting at position 683 of SEQ ID NO: 1881960
gugucauuagcauauagau

SEQ ID NO: 2084391 - RNA, 19 nt, Artificial Sequence
  Description of Artificial Sequence: Synthetic oligonucleotide
  Antisense strand to SEQ ID NO: 2084390
aucuauaugcuaaugacac

SEQ ID NO: 2084392 - RNA, 19 nt, Artificial Sequence
  Description of Artificial Sequence: Synthetic oligonucleotide
  Sense strand starting at position 870 of SEQ ID NO: 1881960
acagacucccgagauuagu

SEQ ID NO: 2084393 - RNA, 19 nt, Artificial Sequence
  Description of Artificial Sequence: Synthetic oligonucleotide
  Antisense strand to SEQ ID NO: 2084392
acuaaucucgggagucugu

SEQ ID NO: 2084394 - RNA, 19 nt, Artificial Sequence
  Description of Artificial Sequence: Synthetic oligonucleotide
  Sense strand starting at position 910 of SEQ ID NO: 1881960
acaugcugggacugaugua

SEQ ID NO: 2084395 - RNA, 19 nt, Artificial Sequence
  Description of Artificial Sequence: Synthetic oligonucleotide
  Antisense strand to SEQ ID NO: 2084394
uacaucagucccagcaugu

SEQ ID NO: 2084396 - RNA, 19 nt, Artificial Sequence
  Description of Artificial Sequence: Synthetic oligonucleotide
  Sense strand starting at position 931 of SEQ ID NO: 1881960
uuguuaauuucugcucagu

SEQ ID NO: 2084397 - RNA, 19 nt, Artificial Sequence
  Description of Artificial Sequence: Synthetic oligonucleotide
  Antisense strand to SEQ ID NO: 2084396
acugagcagaaauuaacaa

SEQ ID NO: 2084398 - RNA, 19 nt, Artificial Sequence
  Description of Artificial Sequence: Synthetic oligonucleotide
  Sense strand starting at position 933 of SEQ ID NO: 1881960
guuaauuucugcucaguca

SEQ ID NO: 2084399 - RNA, 19 nt, Artificial Sequence
  Description of Artificial Sequence: Synthetic oligonucleotide
  Antisense strand to SEQ ID NO: 2084398
ugacugagcagaaauuaac

SEQ ID NO: 2084400 - RNA, 19 nt, Artificial Sequence
  Description of Artificial Sequence: Synthetic oligonucleotide
  Sense strand starting at position 1066 of SEQ ID NO: 1881960
uugaaugaaucauugucuu

SEQ ID NO: 2084401 - RNA, 19 nt, Artificial Sequence
  Description of Artificial Sequence: Synthetic oligonucleotide
  Antisense strand to SEQ ID NO: 2084400
aagacaaugauucauucaa

SEQ ID NO: 2084402 - RNA, 19 nt, Artificial Sequence
  Description of Artificial Sequence: Synthetic oligonucleotide
  Sense strand starting at position 1070 of SEQ ID NO: 1881960
augaaucauugucuugauc

SEQ ID NO: 2084403 - RNA, 19 nt, Artificial Sequence
  Description of Artificial Sequence: Synthetic oligonucleotide
  Antisense strand to SEQ ID NO: 2084402
gaucaagacaaugauucau

SEQ ID NO: 2084404 - RNA, 19 nt, Artificial Sequence
  Description of Artificial Sequence: Synthetic oligonucleotide
  Sense strand starting at position 1123 of SEQ ID NO: 1881960
agauuauccuuacugagua

SEQ ID NO: 2084405 - RNA, 19 nt, Artificial Sequence
  Description of Artificial Sequence: Synthetic oligonucleotide
  Antisense strand to SEQ ID NO: 2084404
uacucaguaaggauaaucu

SEQ ID NO: 2084406 - RNA, 19 nt, Artificial Sequence
  Description of Artificial Sequence: Synthetic oligonucleotide
  Sense strand starting at position 1209 of SEQ ID NO: 1881960
gaaaguuugggauaggugu

SEQ ID NO: 2084407 - RNA, 19 nt, Artificial Sequence
  Description of Artificial Sequence: Synthetic oligonucleotide
  Antisense strand to SEQ ID NO: 2084406
acaccuaucccaaacuuuc

SEQ ID NO: 2084408 - RNA, 19 nt, Artificial Sequence
  Description of Artificial Sequence: Synthetic oligonucleotide
  Sense strand starting at position 1442 of SEQ ID NO: 1881960
uuguauuaaggcuaagaua

SEQ ID NO: 2084409 - RNA, 19 nt, Artificial Sequence
  Description of Artificial Sequence: Synthetic oligonucleotide
  Antisense strand to SEQ ID NO: 2084408
uaucuuagccuuaauacaa

SEQ ID NO: 2084410 - RNA, 19 nt, Artificial Sequence
  Description of Artificial Sequence: Synthetic oligonucleotide
  Sense strand starting at position 1664 of SEQ ID NO: 1881960
ugcucuuuggaauaaauuc

SEQ ID NO: 2084411 - RNA, 19 nt, Artificial Sequence
  Description of Artificial Sequence: Synthetic oligonucleotide
  Antisense strand to SEQ ID NO: 2084410
gaauuuauuccaaagagca

SEQ ID NO: 2084412 - RNA, 19 nt, Artificial Sequence
  Description of Artificial Sequence: Synthetic oligonucleotide
  Sense strand starting at position 2100 of SEQ ID NO: 1881960
ugggcuaguggacaucaau

SEQ ID NO: 2084413 - RNA, 19 nt, Artificial Sequence
  Description of Artificial Sequence: Synthetic oligonucleotide
  Antisense strand to SEQ ID NO: 2084412
auugauguccacuagccca

SEQ ID NO: 2084414 - RNA, 19 nt, Artificial Sequence
  Description of Artificial Sequence: Synthetic oligonucleotide
  Sense strand starting at position 2103 of SEQ ID NO: 1881960
gcuaguggacaucaauaug

SEQ ID NO: 2084415 - RNA, 19 nt, Artificial Sequence
  Description of Artificial Sequence: Synthetic oligonucleotide
  Antisense strand to SEQ ID NO: 2084414
cauauugauguccacuagc

SEQ ID NO: 2084416 - RNA, 19 nt, Artificial Sequence
  Description of Artificial Sequence: Synthetic oligonucleotide
  Sense strand starting at position 2109 of SEQ ID NO: 1881960
ggacaucaauauguuguau

SEQ ID NO: 2084417 - RNA, 19 nt, Artificial Sequence
  Description of Artificial Sequence: Synthetic oligonucleotide
  Antisense strand to SEQ ID NO: 2084416
auacaacauauugaugucc

SEQ ID NO: 2084418 - RNA, 19 nt, Artificial Sequence
  Description of Artificial Sequence: Synthetic oligonucleotide
  Sense strand starting at position 2137 of SEQ ID NO: 1881960
ggcagagaauccuuaauug

SEQ ID NO: 2084419 - RNA, 19 nt, Artificial Sequence
  Description of Artificial Sequence: Synthetic oligonucleotide
  Antisense strand to SEQ ID NO: 2084418
caauuaaggauucucugcc

SEQ ID NO: 2084420 - RNA, 19 nt, Artificial Sequence
  Description of Artificial Sequence: Synthetic oligonucleotide
  Sense strand starting at position 2380 of SEQ ID NO: 1881960
uguugauggccuuaagaag

SEQ ID NO: 2084421 - RNA, 19 nt, Artificial Sequence
  Description of Artificial Sequence: Synthetic oligonucleotide
  Antisense strand to SEQ ID NO: 2084420
cuucuuaaggccaucaaca

SEQ ID NO: 2084422 - RNA, 19 nt, Artificial Sequence
  Description of Artificial Sequence: Synthetic oligonucleotide
  Sense strand starting at position 2456 of SEQ ID NO: 1881960
ggcauauugacagaguuuc

SEQ ID NO: 2084423 - RNA, 19 nt, Artificial Sequence
  Description of Artificial Sequence: Synthetic oligonucleotide
  Antisense strand to SEQ ID NO: 2084422
gaaacucugucaauaugcc

SEQ ID NO: 2084424 - RNA, 19 nt, Artificial Sequence
  Description of Artificial Sequence: Synthetic oligonucleotide
  Sense strand starting at position 2733 of SEQ ID NO: 1881960
ggcuaaucagacuagaguc

SEQ ID NO: 2084425 - RNA, 19 nt, Artificial Sequence
  Description of Artificial Sequence: Synthetic oligonucleotide
  Antisense strand to SEQ ID NO: 2084424
gacucuagucugauuagcc

SEQ ID NO: 2084426 - RNA, 19 nt, Artificial Sequence
  Description of Artificial Sequence: Synthetic oligonucleotide
  Sense strand starting at position 2768 of SEQ ID NO: 1881960
gugauucaggguuauaugu

SEQ ID NO: 2084427 - RNA, 19 nt, Artificial Sequence
  Description of Artificial Sequence: Synthetic oligonucleotide
  Antisense strand to SEQ ID NO: 2084426
acauauaacccugaaucac

SEQ ID NO: 2084428 - RNA, 19 nt, Artificial Sequence
  Description of Artificial Sequence: Synthetic oligonucleotide
  Sense strand starting at position 2781 of SEQ ID NO: 1881960
auauguggcagccaagaua

SEQ ID NO: 2084429 - RNA, 19 nt, Artificial Sequence
  Description of Artificial Sequence: Synthetic oligonucleotide
  Antisense strand to SEQ ID NO: 2084428
uaucuuggcugccacauau

SEQ ID NO: 2084430 - RNA, 19 nt, Artificial Sequence
  Description of Artificial Sequence: Synthetic oligonucleotide
  Sense strand starting at position 2824 of SEQ ID NO: 1881960
gauuaugauccuggagcug

SEQ ID NO: 2084431 - RNA, 19 nt, Artificial Sequence
  Description of Artificial Sequence: Synthetic oligonucleotide
  Antisense strand to SEQ ID NO: 2084430
cagcuccaggaucauaauc

SEQ ID NO: 2084432 - RNA, 19 nt, Artificial Sequence
  Description of Artificial Sequence: Synthetic oligonucleotide
  Sense strand starting at position 3250 of SEQ ID NO: 1881960
uuugaugcuguuuagaaau

SEQ ID NO: 2084433 - RNA, 19 nt, Artificial Sequence
  Description of Artificial Sequence: Synthetic oligonucleotide
  Antisense strand to SEQ ID NO: 2084432
auuucuaaacagcaucaaa

SEQ ID NO: 2084434 - RNA, 19 nt, Artificial Sequence
  Description of Artificial Sequence: Synthetic oligonucleotide
  Sense strand starting at position 3331 of SEQ ID NO: 1881960
gugccauaucaauagugau

SEQ ID NO: 2084435 - RNA, 19 nt, Artificial Sequence
  Description of Artificial Sequence: Synthetic oligonucleotide
  Antisense strand to SEQ ID NO: 2084434
aucacuauugauauggcac

SEQ ID NO: 2084436 - RNA, 19 nt, Artificial Sequence
  Description of Artificial Sequence: Synthetic oligonucleotide
  Sense strand starting at position 3375 of SEQ ID NO: 1881960
guaagauuuacuugugucc

SEQ ID NO: 2084437 - RNA, 19 nt, Artificial Sequence
  Description of Artificial Sequence: Synthetic oligonucleotide
  Antisense strand to SEQ ID NO: 2084436
ggacacaaguaaaucuuac

SEQ ID NO: 2084438 - RNA, 19 nt, Artificial Sequence
  Description of Artificial Sequence: Synthetic oligonucleotide
  Sense strand starting at position 3381 of SEQ ID NO: 1881960
uuuacuuguguccaacaau

SEQ ID NO: 2084439 - RNA, 19 nt, Artificial Sequence
  Description of Artificial Sequence: Synthetic oligonucleotide
  Antisense strand to SEQ ID NO: 2084438
auuguuggacacaaguaaa

SEQ ID NO: 2084440 - RNA, 19 nt, Artificial Sequence
  Description of Artificial Sequence: Synthetic oligonucleotide
  Sense strand starting at position 3384 of SEQ ID NO: 1881960
acuuguguccaacaauaua

SEQ ID NO: 2084441 - RNA, 19 nt, Artificial Sequence
  Description of Artificial Sequence: Synthetic oligonucleotide
  Antisense strand to SEQ ID NO: 2084440
uauauuguuggacacaagu

SEQ ID NO: 2084442 - RNA, 19 nt, Artificial Sequence
  Description of Artificial Sequence: Synthetic oligonucleotide
  Sense strand starting at position 3983 of SEQ ID NO: 1881960
uauccagucgaucauggau

SEQ ID NO: 2084443 - RNA, 19 nt, Artificial Sequence
  Description of Artificial Sequence: Synthetic oligonucleotide
  Antisense strand to SEQ ID NO: 2084442
auccaugaucgacuggaua

SEQ ID NO: 2084444 - RNA, 19 nt, Artificial Sequence
  Description of Artificial Sequence: Synthetic oligonucleotide
  Sense strand starting at position 39 of SEQ ID NO: 1881961
cacguuuaaccagaaguuc

SEQ ID NO: 2084445 - RNA, 19 nt, Artificial Sequence
  Description of Artificial Sequence: Synthetic oligonucleotide
  Antisense strand to SEQ ID NO: 2084444
gaacuucugguuaaacgug

SEQ ID NO: 2084446 - RNA, 19 nt, Artificial Sequence
  Description of Artificial Sequence: Synthetic oligonucleotide
  Sense strand starting at position 50 of SEQ ID NO: 1881961
agaaguucuuucguguaag

SEQ ID NO: 2084447 - RNA, 19 nt, Artificial Sequence
  Description of Artificial Sequence: Synthetic oligonucleotide
  Antisense strand to SEQ ID NO: 2084446
cuuacacgaaagaacuucu

SEQ ID NO: 2084448 - RNA, 19 nt, Artificial Sequence
  Description of Artificial Sequence: Synthetic oligonucleotide
  Sense strand starting at position 154 of SEQ ID NO: 1881961
ugcuuugugguagauguuu

SEQ ID NO: 2084449 - RNA, 19 nt, Artificial Sequence
  Description of Artificial Sequence: Synthetic oligonucleotide
  Antisense strand to SEQ ID NO: 2084448
aaacaucuaccacaaagca

SEQ ID NO: 2084450 - RNA, 19 nt, Artificial Sequence
  Description of Artificial Sequence: Synthetic oligonucleotide
  Sense strand starting at position 159 of SEQ ID NO: 1881961
ugugguagauguuucuuua

SEQ ID NO: 2084451 - RNA, 19 nt, Artificial Sequence
  Description of Artificial Sequence: Synthetic oligonucleotide
  Antisense strand to SEQ ID NO: 2084450
uaaagaaacaucuaccaca

SEQ ID NO: 2084452 - RNA, 19 nt, Artificial Sequence
  Description of Artificial Sequence: Synthetic oligonucleotide
  Sense strand starting at position 162 of SEQ ID NO: 1881961
gguagauguuucuuuaugg

SEQ ID NO: 2084453 - RNA, 19 nt, Artificial Sequence
  Description of Artificial Sequence: Synthetic oligonucleotide
  Antisense strand to SEQ ID NO: 2084452
ccauaaagaaacaucuacc

SEQ ID NO: 2084454 - RNA, 19 nt, Artificial Sequence
  Description of Artificial Sequence: Synthetic oligonucleotide
  Sense strand starting at position 688 of SEQ ID NO: 1881961
ccaucuccugugcaugaau

SEQ ID NO: 2084455 - RNA, 19 nt, Artificial Sequence
  Description of Artificial Sequence: Synthetic oligonucleotide
  Antisense strand to SEQ ID NO: 2084454
auucaugcacaggagaugg

SEQ ID NO: 2084456 - RNA, 19 nt, Artificial Sequence
  Description of Artificial Sequence: Synthetic oligonucleotide
  Sense strand starting at position 690 of SEQ ID NO: 1881961
aucuccugugcaugaauaa

SEQ ID NO: 2084457 - RNA, 19 nt, Artificial Sequence
  Description of Artificial Sequence: Synthetic oligonucleotide
  Antisense strand to SEQ ID NO: 2084456
uuauucaugcacaggagau

SEQ ID NO: 2084458 - RNA, 19 nt, Artificial Sequence
  Description of Artificial Sequence: Synthetic oligonucleotide
  Sense strand starting at position 691 of SEQ ID NO: 1881961
ucuccugugcaugaauaaa

SEQ ID NO: 2084459 - RNA, 19 nt, Artificial Sequence
  Description of Artificial Sequence: Synthetic oligonucleotide
  Antisense strand to SEQ ID NO: 2084458
uuuauucaugcacaggaga

SEQ ID NO: 2084460 - RNA, 19 nt, Artificial Sequence
  Description of Artificial Sequence: Synthetic oligonucleotide
  Sense strand starting at position 767 of SEQ ID NO: 1881961
cuacucuccuguguugaca

SEQ ID NO: 2084461 - RNA, 19 nt, Artificial Sequence
  Description of Artificial Sequence: Synthetic oligonucleotide
  Antisense strand to SEQ ID NO: 2084460
ugucaacacaggagaguag

SEQ ID NO: 2084462 - RNA, 19 nt, Artificial Sequence
  Description of Artificial Sequence: Synthetic oligonucleotide
  Sense strand starting at position 874 of SEQ ID NO: 1881961
cucucaaauuaugaggaca

SEQ ID NO: 2084463 - RNA, 19 nt, Artificial Sequence
  Description of Artificial Sequence: Synthetic oligonucleotide
  Antisense strand to SEQ ID NO: 2084462
uguccucauaauuugagag

SEQ ID NO: 2084464 - RNA, 19 nt, Artificial Sequence
  Description of Artificial Sequence: Synthetic oligonucleotide
  Sense strand starting at position 897 of SEQ ID NO: 1881961
agcagucauuccucuuaua

SEQ ID NO: 2084465 - RNA, 19 nt, Artificial Sequence
  Description of Artificial Sequence: Synthetic oligonucleotide
  Antisense strand to SEQ ID NO: 2084464
uauaagaggaaugacugcu

SEQ ID NO: 2084466 - RNA, 19 nt, Artificial Sequence
  Description of Artificial Sequence: Synthetic oligonucleotide
  Sense strand starting at position 962 of SEQ ID NO: 1881961
uccacugugcccugauaca

SEQ ID NO: 2084467 - RNA, 19 nt, Artificial Sequence
  Description of Artificial Sequence: Synthetic oligonucleotide
  Antisense strand to SEQ ID NO: 2084466
uguaucagggcacagugga

SEQ ID NO: 2084468 - RNA, 19 nt, Artificial Sequence
  Description of Artificial Sequence: Synthetic oligonucleotide
  Sense strand starting at position 1035 of SEQ ID NO: 1881961
aaaguuagcagacgaguga

SEQ ID NO: 2084469 - RNA, 19 nt, Artificial Sequence
  Description of Artificial Sequence: Synthetic oligonucleotide
  Antisense strand to SEQ ID NO: 2084468
ucacucgucugcuaacuuu

SEQ ID NO: 2084470 - RNA, 19 nt, Artificial Sequence
  Description of Artificial Sequence: Synthetic oligonucleotide
  Sense strand starting at position 1084 of SEQ ID NO: 1881961
acaccaaggucuuuggauu

SEQ ID NO: 2084471 - RNA, 19 nt, Artificial Sequence
  Description of Artificial Sequence: Synthetic oligonucleotide
  Antisense strand to SEQ ID NO: 2084470
aauccaaagaccuuggugu

SEQ ID NO: 2084472 - RNA, 19 nt, Artificial Sequence
  Description of Artificial Sequence: Synthetic oligonucleotide
  Sense strand starting at position 1686 of SEQ ID NO: 1881961
aguugauagcuguagcuca

SEQ ID NO: 2084473 - RNA, 19 nt, Artificial Sequence
  Description of Artificial Sequence: Synthetic oligonucleotide
  Antisense strand to SEQ ID NO: 2084472
ugagcuacagcuaucaacu

SEQ ID NO: 2084474 - RNA, 19 nt, Artificial Sequence
  Description of Artificial Sequence: Synthetic oligonucleotide
  Sense strand starting at position 2169 of SEQ ID NO: 1881961
ugcagaggucauugugaca

SEQ ID NO: 2084475 - RNA, 19 nt, Artificial Sequence
  Description of Artificial Sequence: Synthetic oligonucleotide
  Antisense strand to SEQ ID NO: 2084474
ugucacaaugaccucugca

SEQ ID NO: 2084476 - RNA, 19 nt, Artificial Sequence
  Description of Artificial Sequence: Synthetic oligonucleotide
  Sense strand starting at position 2396 of SEQ ID NO: 1881961
aaaucagauuugggagaug

SEQ ID NO: 2084477 - RNA, 19 nt, Artificial Sequence
  Description of Artificial Sequence: Synthetic oligonucleotide
  Antisense strand to SEQ ID NO: 2084476
caucucccaaaucugauuu

SEQ ID NO: 2084478 - RNA, 19 nt, Artificial Sequence
  Description of Artificial Sequence: Synthetic oligonucleotide
  Sense strand starting at position 2421 of SEQ ID NO: 1881961
ugggacauuccaggugaca

SEQ ID NO: 2084479 - RNA, 19 nt, Artificial Sequence
  Description of Artificial Sequence: Synthetic oligonucleotide
  Antisense strand to SEQ ID NO: 2084478
ugucaccuggaauguccca

SEQ ID NO: 2084480 - RNA, 19 nt, Artificial Sequence
  Description of Artificial Sequence: Synthetic oligonucleotide
  Sense strand starting at position 2460 of SEQ ID NO: 1881961
gauggugaaucugugagca

SEQ ID NO: 2084481 - RNA, 19 nt, Artificial Sequence
  Description of Artificial Sequence: Synthetic oligonucleotide
  Antisense strand to SEQ ID NO: 2084480
ugcucacagauucaccauc

SEQ ID NO: 2084482 - RNA, 19 nt, Artificial Sequence
  Description of Artificial Sequence: Synthetic oligonucleotide
  Sense strand starting at position 2489 of SEQ ID NO: 1881961
acuuacagucauggaguau

SEQ ID NO: 2084483 - RNA, 19 nt, Artificial Sequence
  Description of Artificial Sequence: Synthetic oligonucleotide
  Antisense strand to SEQ ID NO: 2084482
auacuccaugacuguaagu

SEQ ID NO: 2084484 - RNA, 19 nt, Artificial Sequence
  Description of Artificial Sequence: Synthetic oligonucleotide
  Sense strand starting at position 2490 of SEQ ID NO: 1881961
cuuacagucauggaguaug

SEQ ID NO: 2084485 - RNA, 19 nt, Artificial Sequence
  Description of Artificial Sequence: Synthetic oligonucleotide
  Antisense strand to SEQ ID NO: 2084484
cauacuccaugacuguaag

SEQ ID NO: 2084486 - RNA, 19 nt, Artificial Sequence
  Description of Artificial Sequence: Synthetic oligonucleotide
  Sense strand starting at position 2495 of SEQ ID NO: 1881961
agucauggaguauguggaa

SEQ ID NO: 2084487 - RNA, 19 nt, Artificial Sequence
  Description of Artificial Sequence: Synthetic oligonucleotide
  Antisense strand to SEQ ID NO: 2084486
uuccacauacuccaugacu

SEQ ID NO: 2084488 - RNA, 19 nt, Artificial Sequence
  Description of Artificial Sequence: Synthetic oligonucleotide
  Sense strand starting at position 2548 of SEQ ID NO: 1881961
caaagauacguaggcacau

SEQ ID NO: 2084489 - RNA, 19 nt, Artificial Sequence
  Description of Artificial Sequence: Synthetic oligonucleotide
  Antisense strand to SEQ ID NO: 2084488
augugccuacguaucuuug

SEQ ID NO: 2084490 - RNA, 19 nt, Artificial Sequence
  Description of Artificial Sequence: Synthetic oligonucleotide
  Sense strand starting at position 2600 of SEQ ID NO: 1881961
gucagaaaggcuggugauu

SEQ ID NO: 2084491 - RNA, 19 nt, Artificial Sequence
  Description of Artificial Sequence: Synthetic oligonucleotide
  Antisense strand to SEQ ID NO: 2084490
aaucaccagccuuucugac

SEQ ID NO: 2084492 - RNA, 19 nt, Artificial Sequence
  Description of Artificial Sequence: Synthetic oligonucleotide
  Sense strand starting at position 2621 of SEQ ID NO: 1881961
gagacugggcucuguaauc

SEQ ID NO: 2084493 - RNA, 19 nt, Artificial Sequence
  Description of Artificial Sequence: Synthetic oligonucleotide
  Antisense strand to SEQ ID NO: 2084492
gauuacagagcccagucuc

SEQ ID NO: 2084494 - RNA, 19 nt, Artificial Sequence
  Description of Artificial Sequence: Synthetic oligonucleotide
  Sense strand starting at position 2735 of SEQ ID NO: 1881961
gccagcaguuaacucaaua

SEQ ID NO: 2084495 - RNA, 19 nt, Artificial Sequence
  Description of Artificial Sequence: Synthetic oligonucleotide
  Antisense strand to SEQ ID NO: 2084494
uauugaguuaacugcuggc

SEQ ID NO: 2084496 - RNA, 19 nt, Artificial Sequence
  Description of Artificial Sequence: Synthetic oligonucleotide
  Sense strand starting at position 2761 of SEQ ID NO: 1881961
guggugacucgaugagaug

SEQ ID NO: 2084497 - RNA, 19 nt, Artificial Sequence
  Description of Artificial Sequence: Synthetic oligonucleotide
  Antisense strand to SEQ ID NO: 2084496
caucucaucgagucaccac

SEQ ID NO: 2084498 - RNA, 19 nt, Artificial Sequence
  Description of Artificial Sequence: Synthetic oligonucleotide
  Sense strand starting at position 2830 of SEQ ID NO: 1881961
ggaagcucuaaggguaaua

SEQ ID NO: 2084499 - RNA, 19 nt, Artificial Sequence
  Description of Artificial Sequence: Synthetic oligonucleotide
  Antisense strand to SEQ ID NO: 2084498
uauuacccuuagagcuucc

SEQ ID NO: 2084500 - RNA, 19 nt, Artificial Sequence
  Description of Artificial Sequence: Synthetic oligonucleotide
  Sense strand starting at position 3061 of SEQ ID NO: 1881961
aguagcugagcuuacagau

SEQ ID NO: 2084501 - RNA, 19 nt, Artificial Sequence
  Description of Artificial Sequence: Synthetic oligonucleotide
  Antisense strand to SEQ ID NO: 2084500
aucuguaagcucagcuacu

SEQ ID NO: 2084502 - RNA, 19 nt, Artificial Sequence
  Description of Artificial Sequence: Synthetic oligonucleotide
  Sense strand starting at position 3287 of SEQ ID NO: 1881961
guguguuuggugaguccuu

SEQ ID NO: 2084503 - RNA, 19 nt, Artificial Sequence
  Description of Artificial Sequence: Synthetic oligonucleotide
  Antisense strand to SEQ ID NO: 2084502
aaggacucaccaaacacac

SEQ ID NO: 2084504 - RNA, 19 nt, Artificial Sequence
  Description of Artificial Sequence: Synthetic oligonucleotide
  Sense strand starting at position 3353 of SEQ ID NO: 1881961
ugcauuuaauuggagagga

SEQ ID NO: 2084505 - RNA, 19 nt, Artificial Sequence
  Description of Artificial Sequence: Synthetic oligonucleotide
  Antisense strand to SEQ ID NO: 2084504
uccucuccaauuaaaugca

SEQ ID NO: 2084506 - RNA, 19 nt, Artificial Sequence
  Description of Artificial Sequence: Synthetic oligonucleotide
  Sense strand starting at position 3371 of SEQ ID NO: 1881961
agcacagagaccugagauu

SEQ ID NO: 2084507 - RNA, 19 nt, Artificial Sequence
  Description of Artificial Sequence: Synthetic oligonucleotide
  Antisense strand to SEQ ID NO: 2084506
aaucucaggucucugugcu

SEQ ID NO: 2084508 - RNA, 19 nt, Artificial Sequence
  Description of Artificial Sequence: Synthetic oligonucleotide
  Sense strand starting at position 3397 of SEQ ID NO: 1881961
ugacgucuuaaaugucaag

SEQ ID NO: 2084509 - RNA, 19 nt, Artificial Sequence
  Description of Artificial Sequence: Synthetic oligonucleotide
  Antisense strand to SEQ ID NO: 2084508
cuugacauuuaagacguca

SEQ ID NO: 2084510 - RNA, 19 nt, Artificial Sequence
  Description of Artificial Sequence: Synthetic oligonucleotide
  Sense strand starting at position 3524 of SEQ ID NO: 1881961
gggaaaucugagugacagu

SEQ ID NO: 2084511 - RNA, 19 nt, Artificial Sequence
  Description of Artificial Sequence: Synthetic oligonucleotide
  Antisense strand to SEQ ID NO: 2084510
acugucacucagauuuccc

SEQ ID NO: 2084512 - RNA, 19 nt, Artificial Sequence
  Description of Artificial Sequence: Synthetic oligonucleotide
  Sense strand starting at position 3604 of SEQ ID NO: 1881961
gugaguugaugaucugcua

SEQ ID NO: 2084513 - RNA, 19 nt, Artificial Sequence
  Description of Artificial Sequence: Synthetic oligonucleotide
  Antisense strand to SEQ ID NO: 2084512
uagcagaucaucaacucac

SEQ ID NO: 2084514 - RNA, 19 nt, Artificial Sequence
  Description of Artificial Sequence: Synthetic oligonucleotide
  Sense strand starting at position 3660 of SEQ ID NO: 1881961
augugagucuggguggaaa

SEQ ID NO: 2084515 - RNA, 19 nt, Artificial Sequence
  Description of Artificial Sequence: Synthetic oligonucleotide
  Antisense strand to SEQ ID NO: 2084514
uuuccacccagacucacau

SEQ ID NO: 2084516 - RNA, 19 nt, Artificial Sequence
  Description of Artificial Sequence: Synthetic oligonucleotide
  Sense strand starting at position 3673 of SEQ ID NO: 1881961
uggaaaugaugccuucgca

SEQ ID NO: 2084517 - RNA, 19 nt, Artificial Sequence
  Description of Artificial Sequence: Synthetic oligonucleotide
  Antisense strand to SEQ ID NO: 2084516
ugcgaaggcaucauuucca

SEQ ID NO: 2084518 - RNA, 19 nt, Artificial Sequence
  Description of Artificial Sequence: Synthetic oligonucleotide
  Sense strand starting at position 3676 of SEQ ID NO: 1881961
aaaugaugccuucgcagag

SEQ ID NO: 2084519 - RNA, 19 nt, Artificial Sequence
  Description of Artificial Sequence: Synthetic oligonucleotide
  Antisense strand to SEQ ID NO: 2084518
cucugcgaaggcaucauuu

SEQ ID NO: 2084520 - RNA, 19 nt, Artificial Sequence
  Description of Artificial Sequence: Synthetic oligonucleotide
  Sense strand starting at position 3840 of SEQ ID NO: 1881961
auguguuugggcaggaugu

SEQ ID NO: 2084521 - RNA, 19 nt, Artificial Sequence
  Description of Artificial Sequence: Synthetic oligonucleotide
  Antisense strand to SEQ ID NO: 2084520
acauccugcccaaacacau

SEQ ID NO: 2084522 - RNA, 19 nt, Artificial Sequence
  Description of Artificial Sequence: Synthetic oligonucleotide
  Sense strand starting at position 3868 of SEQ ID NO: 1881961
ccgguucuacccugacaag

SEQ ID NO: 2084523 - RNA, 19 nt, Artificial Sequence
  Description of Artificial Sequence: Synthetic oligonucleotide
  Antisense strand to SEQ ID NO: 2084522
cuugucaggguagaaccgg

SEQ ID NO: 2084524 - RNA, 19 nt, Artificial Sequence
  Description of Artificial Sequence: Synthetic oligonucleotide
  Sense strand starting at position 5 of SEQ ID NO: 1881962
ugcauugcugacuacuaaa

SEQ ID NO: 2084525 - RNA, 19 nt, Artificial Sequence
  Description of Artificial Sequence: Synthetic oligonucleotide
  Antisense strand to SEQ ID NO: 2084524
uuuaguagucagcaaugca

SEQ ID NO: 2084526 - RNA, 19 nt, Artificial Sequence
  Description of Artificial Sequence: Synthetic oligonucleotide
  Sense strand starting at position 129 of SEQ ID NO: 1881962
caagucuaaggguaguuaa

SEQ ID NO: 2084527 - RNA, 19 nt, Artificial Sequence
  Description of Artificial Sequence: Synthetic oligonucleotide
  Antisense strand to SEQ ID NO: 2084526
uuaacuacccuuagacuug

SEQ ID NO: 2084528 - RNA, 19 nt, Artificial Sequence
  Description of Artificial Sequence: Synthetic oligonucleotide
  Sense strand starting at position 132 of SEQ ID NO: 1881962
gucuaaggguaguuaagaa

SEQ ID NO: 2084529 - RNA, 19 nt, Artificial Sequence
  Description of Artificial Sequence: Synthetic oligonucleotide
  Antisense strand to SEQ ID NO: 2084528
uucuuaacuacccuuagac

SEQ ID NO: 2084530 - RNA, 19 nt, Artificial Sequence
  Description of Artificial Sequence: Synthetic oligonucleotide
  Sense strand starting at position 139 of SEQ ID NO: 1881962
gguaguuaagaauagccuu

SEQ ID NO: 2084531 - RNA, 19 nt, Artificial Sequence
  Description of Artificial Sequence: Synthetic oligonucleotide
  Antisense strand to SEQ ID NO: 2084530
aaggcuauucuuaacuacc

SEQ ID NO: 2084532 - RNA, 19 nt, Artificial Sequence
  Description of Artificial Sequence: Synthetic oligonucleotide
  Sense strand starting at position 142 of SEQ ID NO: 1881962
aguuaagaauagccuugau

SEQ ID NO: 2084533 - RNA, 19 nt, Artificial Sequence
  Description of Artificial Sequence: Synthetic oligonucleotide
  Antisense strand to SEQ ID NO: 2084532
aucaaggcuauucuuaacu

SEQ ID NO: 2084534 - RNA, 19 nt, Artificial Sequence
  Description of Artificial Sequence: Synthetic oligonucleotide
  Sense strand starting at position 196 of SEQ ID NO: 1881962
gcuccauagccauaugaac

SEQ ID NO: 2084535 - RNA, 19 nt, Artificial Sequence
  Description of Artificial Sequence: Synthetic oligonucleotide
  Antisense strand to SEQ ID NO: 2084534
guucauauggcuauggagc

SEQ ID NO: 2084536 - RNA, 19 nt, Artificial Sequence
  Description of Artificial Sequence: Synthetic oligonucleotide
  Sense strand starting at position 210 of SEQ ID NO: 1881962
ugaaccuguccugagcaaa

SEQ ID NO: 2084537 - RNA, 19 nt, Artificial Sequence
  Description of Artificial Sequence: Synthetic oligonucleotide
  Antisense strand to SEQ ID NO: 2084536
uuugcucaggacagguuca

SEQ ID NO: 2084538 - RNA, 19 nt, Artificial Sequence
  Description of Artificial Sequence: Synthetic oligonucleotide
  Sense strand starting at position 253 of SEQ ID NO: 1881962
acuucucuugaguauuagu

SEQ ID NO: 2084539 - RNA, 19 nt, Artificial Sequence
  Description of Artificial Sequence: Synthetic oligonucleotide
  Antisense strand to SEQ ID NO: 2084538
acuaauacucaagagaagu

SEQ ID NO: 2084540 - RNA, 19 nt, Artificial Sequence
  Description of Artificial Sequence: Synthetic oligonucleotide
  Sense strand starting at position 530 of SEQ ID NO: 1881962
cuguaacaucaagguacaa

SEQ ID NO: 2084541 - RNA, 19 nt, Artificial Sequence
  Description of Artificial Sequence: Synthetic oligonucleotide
  Antisense strand to SEQ ID NO: 2084540
uuguaccuugauguuacag

SEQ ID NO: 2084542 - RNA, 19 nt, Artificial Sequence
  Description of Artificial Sequence: Synthetic oligonucleotide
  Sense strand starting at position 632 of SEQ ID NO: 1881962
cacucauagcagugagaaa

SEQ ID NO: 2084543 - RNA, 19 nt, Artificial Sequence
  Description of Artificial Sequence: Synthetic oligonucleotide
  Antisense strand to SEQ ID NO: 2084542
uuucucacugcuaugagug

SEQ ID NO: 2084544 - RNA, 19 nt, Artificial Sequence
  Description of Artificial Sequence: Synthetic oligonucleotide
  Sense strand starting at position 671 of SEQ ID NO: 1881962
aaugauuugugguaggaaa

SEQ ID NO: 2084545 - RNA, 19 nt, Artificial Sequence
  Description of Artificial Sequence: Synthetic oligonucleotide
  Antisense strand to SEQ ID NO: 2084544
uuuccuaccacaaaucauu

SEQ ID NO: 2084546 - RNA, 19 nt, Artificial Sequence
  Description of Artificial Sequence: Synthetic oligonucleotide
  Sense strand starting at position 715 of SEQ ID NO: 1881962
uuucuuacucaugaguauu

SEQ ID NO: 2084547 - RNA, 19 nt, Artificial Sequence
  Description of Artificial Sequence: Synthetic oligonucleotide
  Antisense strand to SEQ ID NO: 2084546
aauacucaugaguaagaaa

SEQ ID NO: 2084548 - RNA, 19 nt, Artificial Sequence
  Description of Artificial Sequence: Synthetic oligonucleotide
  Sense strand starting at position 819 of SEQ ID NO: 1881962
gccaauugugcugaaauaa

SEQ ID NO: 2084549 - RNA, 19 nt, Artificial Sequence
  Description of Artificial Sequence: Synthetic oligonucleotide
  Antisense strand to SEQ ID NO: 2084548
uuauuucagcacaauuggc

SEQ ID NO: 2084550 - RNA, 19 nt, Artificial Sequence
  Description of Artificial Sequence: Synthetic oligonucleotide
  Sense strand starting at position 1117 of SEQ ID NO: 1881962
acagauauaugguuugaca

SEQ ID NO: 2084551 - RNA, 19 nt, Artificial Sequence
  Description of Artificial Sequence: Synthetic oligonucleotide
  Antisense strand to SEQ ID NO: 2084550
ugucaaaccauauaucugu

SEQ ID NO: 2084552 - RNA, 19 nt, Artificial Sequence
  Description of Artificial Sequence: Synthetic oligonucleotide
  Sense strand starting at position 1119 of SEQ ID NO: 1881962
agauauaugguuugacaua

SEQ ID NO: 2084553 - RNA, 19 nt, Artificial Sequence
  Description of Artificial Sequence: Synthetic oligonucleotide
  Antisense strand to SEQ ID NO: 2084552
uaugucaaaccauauaucu

SEQ ID NO: 2084554 - RNA, 19 nt, Artificial Sequence
  Description of Artificial Sequence: Synthetic oligonucleotide
  Sense strand starting at position 1299 of SEQ ID NO: 1881962
agcagaauagccuagucaa

SEQ ID NO: 2084555 - RNA, 19 nt, Artificial Sequence
  Description of Artificial Sequence: Synthetic oligonucleotide
  Antisense strand to SEQ ID NO: 2084554
uugacuaggcuauucugcu

SEQ ID NO: 2084556 - RNA, 19 nt, Artificial Sequence
  Description of Artificial Sequence: Synthetic oligonucleotide
  Sense strand starting at position 1551 of SEQ ID NO: 1881962
ggugauuaaguugauccuu

SEQ ID NO: 2084557 - RNA, 19 nt, Artificial Sequence
  Description of Artificial Sequence: Synthetic oligonucleotide
  Antisense strand to SEQ ID NO: 2084556
aaggaucaacuuaaucacc

SEQ ID NO: 2084558 - RNA, 19 nt, Artificial Sequence
  Description of Artificial Sequence: Synthetic oligonucleotide
  Sense strand starting at position 1610 of SEQ ID NO: 1881962
augugaaauuccuuuggac

SEQ ID NO: 2084559 - RNA, 19 nt, Artificial Sequence
  Description of Artificial Sequence: Synthetic oligonucleotide
  Antisense strand to SEQ ID NO: 2084558
guccaaaggaauuucacau

SEQ ID NO: 2084560 - RNA, 19 nt, Artificial Sequence
  Description of Artificial Sequence: Synthetic oligonucleotide
  Sense strand starting at position 1612 of SEQ ID NO: 1881962
gugaaauuccuuuggacug

SEQ ID NO: 2084561 - RNA, 19 nt, Artificial Sequence
  Description of Artificial Sequence: Synthetic oligonucleotide
  Antisense strand to SEQ ID NO: 2084560
caguccaaaggaauuucac

SEQ ID NO: 2084562 - RNA, 19 nt, Artificial Sequence
  Description of Artificial Sequence: Synthetic oligonucleotide
  Sense strand starting at position 1640 of SEQ ID NO: 1881962
auuacuuacgugcaaagau

SEQ ID NO: 2084563 - RNA, 19 nt, Artificial Sequence
  Description of Artificial Sequence: Synthetic oligonucleotide
  Antisense strand to SEQ ID NO: 2084562
aucuuugcacguaaguaau

SEQ ID NO: 2084564 - RNA, 19 nt, Artificial Sequence
  Description of Artificial Sequence: Synthetic oligonucleotide
  Sense strand starting at position 1808 of SEQ ID NO: 1881962
aggcgagguccagagacuu

SEQ ID NO: 2084565 - RNA, 19 nt, Artificial Sequence
  Description of Artificial Sequence: Synthetic oligonucleotide
  Antisense strand to SEQ ID NO: 2084564
aagucucuggaccucgccu

SEQ ID NO: 2084566 - RNA, 19 nt, Artificial Sequence
  Description of Artificial Sequence: Synthetic oligonucleotide
  Sense strand starting at position 2327 of SEQ ID NO: 1881962
ccuagagcuccuugagaga

SEQ ID NO: 2084567 - RNA, 19 nt, Artificial Sequence
  Description of Artificial Sequence: Synthetic oligonucleotide
  Antisense strand to SEQ ID NO: 2084566
ucucucaaggagcucuagg

SEQ ID NO: 2084568 - RNA, 19 nt, Artificial Sequence
  Description of Artificial Sequence: Synthetic oligonucleotide
  Sense strand starting at position 2463 of SEQ ID NO: 1881962
caaugaaaugggugagggu

SEQ ID NO: 2084569 - RNA, 19 nt, Artificial Sequence
  Description of Artificial Sequence: Synthetic oligonucleotide
  Antisense strand to SEQ ID NO: 2084568
acccucacccauuucauug

SEQ ID NO: 2084570 - RNA, 19 nt, Artificial Sequence
  Description of Artificial Sequence: Synthetic oligonucleotide
  Sense strand starting at position 2554 of SEQ ID NO: 1881962
gguguuucggccaguaaag

SEQ ID NO: 2084571 - RNA, 19 nt, Artificial Sequence
  Description of Artificial Sequence: Synthetic oligonucleotide
  Antisense strand to SEQ ID NO: 2084570
cuuuacuggccgaaacacc

SEQ ID NO: 2084572 - RNA, 19 nt, Artificial Sequence
  Description of Artificial Sequence: Synthetic oligonucleotide
  Sense strand starting at position 2555 of SEQ ID NO: 1881962
guguuucggccaguaaagu

SEQ ID NO: 2084573 - RNA, 19 nt, Artificial Sequence
  Description of Artificial Sequence: Synthetic oligonucleotide
  Antisense strand to SEQ ID NO: 2084572
acuuuacuggccgaaacac

SEQ ID NO: 2084574 - RNA, 19 nt, Artificial Sequence
  Description of Artificial Sequence: Synthetic oligonucleotide
  Sense strand starting at position 2600 of SEQ ID NO: 1881962
aggagaugucccugagcag

SEQ ID NO: 2084575 - RNA, 19 nt, Artificial Sequence
  Description of Artificial Sequence: Synthetic oligonucleotide
  Antisense strand to SEQ ID NO: 2084574
cugcucagggacaucuccu

SEQ ID NO: 2084576 - RNA, 19 nt, Artificial Sequence
  Description of Artificial Sequence: Synthetic oligonucleotide
  Sense strand starting at position 2603 of SEQ ID NO: 1881962
agaugucccugagcaggaa

SEQ ID NO: 2084577 - RNA, 19 nt, Artificial Sequence
  Description of Artificial Sequence: Synthetic oligonucleotide
  Antisense strand to SEQ ID NO: 2084576
uuccugcucagggacaucu

SEQ ID NO: 2084578 - RNA, 19 nt, Artificial Sequence
  Description of Artificial Sequence: Synthetic oligonucleotide
  Sense strand starting at position 2868 of SEQ ID NO: 1881962
gaauuugacuaagagaugu

SEQ ID NO: 2084579 - RNA, 19 nt, Artificial Sequence
  Description of Artificial Sequence: Synthetic oligonucleotide
  Antisense strand to SEQ ID NO: 2084578
acaucucuuagucaaauuc

SEQ ID NO: 2084580 - RNA, 19 nt, Artificial Sequence
  Description of Artificial Sequence: Synthetic oligonucleotide
  Sense strand starting at position 2955 of SEQ ID NO: 1881962
augagaagcucuguccaga

SEQ ID NO: 2084581 - RNA, 19 nt, Artificial Sequence
  Description of Artificial Sequence: Synthetic oligonucleotide
  Antisense strand to SEQ ID NO: 2084580
ucuggacagagcuucucau

SEQ ID NO: 2084582 - RNA, 19 nt, Artificial Sequence
  Description of Artificial Sequence: Synthetic oligonucleotide
  Sense strand starting at position 3260 of SEQ ID NO: 1881962
uguauuacauaggcauaga

SEQ ID NO: 2084583 - RNA, 19 nt, Artificial Sequence
  Description of Artificial Sequence: Synthetic oligonucleotide
  Antisense strand to SEQ ID NO: 2084582
ucuaugccuauguaauaca

SEQ ID NO: 2084584 - RNA, 19 nt, Artificial Sequence
  Description of Artificial Sequence: Synthetic oligonucleotide
  Sense strand starting at position 3330 of SEQ ID NO: 1881962
uuagauuaucuguaagccu

SEQ ID NO: 2084585 - RNA, 19 nt, Artificial Sequence
  Description of Artificial Sequence: Synthetic oligonucleotide
  Antisense strand to SEQ ID NO: 2084584
aggcuuacagauaaucuaa

SEQ ID NO: 2084586 - RNA, 19 nt, Artificial Sequence
  Description of Artificial Sequence: Synthetic oligonucleotide
  Sense strand starting at position 3389 of SEQ ID NO: 1881962
guccuccuuggguaaagaa

SEQ ID NO: 2084587 - RNA, 19 nt, Artificial Sequence
  Description of Artificial Sequence: Synthetic oligonucleotide
  Antisense strand to SEQ ID NO: 2084586
uucuuuacccaaggaggac

SEQ ID NO: 2084588 - RNA, 19 nt, Artificial Sequence
  Description of Artificial Sequence: Synthetic oligonucleotide
  Sense strand starting at position 3439 of SEQ ID NO: 1881962
ggcugugugcccagaggua

SEQ ID NO: 2084589 - RNA, 19 nt, Artificial Sequence
  Description of Artificial Sequence: Synthetic oligonucleotide
  Antisense strand to SEQ ID NO: 2084588
uaccucugggcacacagcc

SEQ ID NO: 2084590 - RNA, 19 nt, Artificial Sequence
  Description of Artificial Sequence: Synthetic oligonucleotide
  Sense strand starting at position 3713 of SEQ ID NO: 1881962
aaggguugagcuggaugau

SEQ ID NO: 2084591 - RNA, 19 nt, Artificial Sequence
  Description of Artificial Sequence: Synthetic oligonucleotide
  Antisense strand to SEQ ID NO: 2084590
aucauccagcucaacccuu

SEQ ID NO: 2084592 - RNA, 19 nt, Artificial Sequence
  Description of Artificial Sequence: Synthetic oligonucleotide
  Sense strand starting at position 3714 of SEQ ID NO: 1881962
aggguugagcuggaugauu

SEQ ID NO: 2084593 - RNA, 19 nt, Artificial Sequence
  Description of Artificial Sequence: Synthetic oligonucleotide
  Antisense strand to SEQ ID NO: 2084592
aaucauccagcucaacccu

SEQ ID NO: 2084594 - RNA, 19 nt, Artificial Sequence
  Description of Artificial Sequence: Synthetic oligonucleotide
  Sense strand starting at position 3906 of SEQ ID NO: 1881962
aggucaaauuaagugauau

SEQ ID NO: 2084595 - RNA, 19 nt, Artificial Sequence
  Description of Artificial Sequence: Synthetic oligonucleotide
  Antisense strand to SEQ ID NO: 2084594
auaucacuuaauuugaccu

SEQ ID NO: 2084596 - RNA, 19 nt, Artificial Sequence
  Description of Artificial Sequence: Synthetic oligonucleotide
  Sense strand starting at position 3907 of SEQ ID NO: 1881962
ggucaaauuaagugauaug

SEQ ID NO: 2084597 - RNA, 19 nt, Artificial Sequence
  Description of Artificial Sequence: Synthetic oligonucleotide
  Antisense strand to SEQ ID NO: 2084596
cauaucacuuaauuugacc

SEQ ID NO: 2084598 - RNA, 19 nt, Artificial Sequence
  Description of Artificial Sequence: Synthetic oligonucleotide
  Sense strand starting at position 3917 of SEQ ID NO: 1881962
agugauaugcaagauuacu

SEQ ID NO: 2084599 - RNA, 19 nt, Artificial Sequence
  Description of Artificial Sequence: Synthetic oligonucleotide
  Antisense strand to SEQ ID NO: 2084598
aguaaucuugcauaucacu

SEQ ID NO: 2084600 - RNA, 19 nt, Artificial Sequence
  Description of Artificial Sequence: Synthetic oligonucleotide
  Sense strand starting at position 3923 of SEQ ID NO: 1881962
augcaagauuacuuugaua

SEQ ID NO: 2084601 - RNA, 19 nt, Artificial Sequence
  Description of Artificial Sequence: Synthetic oligonucleotide
  Antisense strand to SEQ ID NO: 2084600
uaucaaaguaaucuugcau

SEQ ID NO: 2084602 - RNA, 19 nt, Artificial Sequence
  Description of Artificial Sequence: Synthetic oligonucleotide
  Sense strand starting at position 3925 of SEQ ID NO: 1881962
gcaagauuacuuugauaug

SEQ ID NO: 2084603 - RNA, 19 nt, Artificial Sequence
  Description of Artificial Sequence: Synthetic oligonucleotide
  Antisense strand to SEQ ID NO: 2084602
cauaucaaaguaaucuugc

SEQ ID NO: 2084604 - RNA, 19 nt, Artificial Sequence
  Description of Artificial Sequence: Synthetic oligonucleotide
  Sense strand starting at position 517 of SEQ ID NO: 1881963
ugagcuuuguuccuacaau

SEQ ID NO: 2084605 - RNA, 19 nt, Artificial Sequence
  Description of Artificial Sequence: Synthetic oligonucleotide
  Antisense strand to SEQ ID NO: 2084604
auuguaggaacaaagcuca

SEQ ID NO: 2084606 - RNA, 19 nt, Artificial Sequence
  Description of Artificial Sequence: Synthetic oligonucleotide
  Sense strand starting at position 849 of SEQ ID NO: 1881963
ggcccaguuggauaaucuu

SEQ ID NO: 2084607 - RNA, 19 nt, Artificial Sequence
  Description of Artificial Sequence: Synthetic oligonucleotide
  Antisense strand to SEQ ID NO: 2084606
aagauuauccaacugggcc

SEQ ID NO: 2084608 - RNA, 19 nt, Artificial Sequence
  Description of Artificial Sequence: Synthetic oligonucleotide
  Sense strand starting at position 858 of SEQ ID NO: 1881963
ggauaaucuugagccucua

SEQ ID NO: 2084609 - RNA, 19 nt, Artificial Sequence
  Description of Artificial Sequence: Synthetic oligonucleotide
  Antisense strand to SEQ ID NO: 2084608
uagaggcucaagauuaucc

SEQ ID NO: 2084610 - RNA, 19 nt, Artificial Sequence
  Description of Artificial Sequence: Synthetic oligonucleotide
  Sense strand starting at position 872 of SEQ ID NO: 1881963
cucuaaagguccuuaggaa

SEQ ID NO: 2084611 - RNA, 19 nt, Artificial Sequence
  Description of Artificial Sequence: Synthetic oligonucleotide
  Antisense strand to SEQ ID NO: 2084610
uuccuaaggaccuuuagag

SEQ ID NO: 2084612 - RNA, 19 nt, Artificial Sequence
  Description of Artificial Sequence: Synthetic oligonucleotide
  Sense strand starting at position 931 of SEQ ID NO: 1881963
ccgggugaucugcauccuu

SEQ ID NO: 2084613 - RNA, 19 nt, Artificial Sequence
  Description of Artificial Sequence: Synthetic oligonucleotide
  Antisense strand to SEQ ID NO: 2084612
aaggaugcagaucacccgg

SEQ ID NO: 2084614 - RNA, 19 nt, Artificial Sequence
  Description of Artificial Sequence: Synthetic oligonucleotide
  Sense strand starting at position 936 of SEQ ID NO: 1881963
ugaucugcauccuuacaag

SEQ ID NO: 2084615 - RNA, 19 nt, Artificial Sequence
  Description of Artificial Sequence: Synthetic oligonucleotide
  Antisense strand to SEQ ID NO: 2084614
cuuguaaggaugcagauca

SEQ ID NO: 2084616 - RNA, 19 nt, Artificial Sequence
  Description of Artificial Sequence: Synthetic oligonucleotide
  Sense strand starting at position 1057 of SEQ ID NO: 1881963
agccuaggcucucauuaac

SEQ ID NO: 2084617 - RNA, 19 nt, Artificial Sequence
  Description of Artificial Sequence: Synthetic oligonucleotide
  Antisense strand to SEQ ID NO: 2084616
guuaaugagagccuaggcu

SEQ ID NO: 2084618 - RNA, 19 nt, Artificial Sequence
  Description of Artificial Sequence: Synthetic oligonucleotide
  Sense strand starting at position 1115 of SEQ ID NO: 1881963
aucuguuuaacgggaacaa

SEQ ID NO: 2084619 - RNA, 19 nt, Artificial Sequence
  Description of Artificial Sequence: Synthetic oligonucleotide
  Antisense strand to SEQ ID NO: 2084618
uuguucccguuaaacagau

SEQ ID NO: 2084620 - RNA, 19 nt, Artificial Sequence
  Description of Artificial Sequence: Synthetic oligonucleotide
  Sense strand starting at position 1153 of SEQ ID NO: 1881963
uuugcagaguccuugggau

SEQ ID NO: 2084621 - RNA, 19 nt, Artificial Sequence
  Description of Artificial Sequence: Synthetic oligonucleotide
  Antisense strand to SEQ ID NO: 2084620
aucccaaggacucugcaaa

SEQ ID NO: 2084622 - RNA, 19 nt, Artificial Sequence
  Description of Artificial Sequence: Synthetic oligonucleotide
  Sense strand starting at position 1155 of SEQ ID NO: 1881963
ugcagaguccuugggauag

SEQ ID NO: 2084623 - RNA, 19 nt, Artificial Sequence
  Description of Artificial Sequence: Synthetic oligonucleotide
  Antisense strand to SEQ ID NO: 2084622
cuaucccaaggacucugca

SEQ ID NO: 2084624 - RNA, 19 nt, Artificial Sequence
  Description of Artificial Sequence: Synthetic oligonucleotide
  Sense strand starting at position 1266 of SEQ ID NO: 1881963
agaggauucugcugggaac

SEQ ID NO: 2084625 - RNA, 19 nt, Artificial Sequence
  Description of Artificial Sequence: Synthetic oligonucleotide
  Antisense strand to SEQ ID NO: 2084624
guucccagcagaauccucu

SEQ ID NO: 2084626 - RNA, 19 nt, Artificial Sequence
  Description of Artificial Sequence: Synthetic oligonucleotide
  Sense strand starting at position 1267 of SEQ ID NO: 1881963
gaggauucugcugggaaca

SEQ ID NO: 2084627 - RNA, 19 nt, Artificial Sequence
  Description of Artificial Sequence: Synthetic oligonucleotide
  Antisense strand to SEQ ID NO: 2084626
uguucccagcagaauccuc

SEQ ID NO: 2084628 - RNA, 19 nt, Artificial Sequence
  Description of Artificial Sequence: Synthetic oligonucleotide
  Sense strand starting at position 1280 of SEQ ID NO: 1881963
ggaacaacuuguugggaaa

SEQ ID NO: 2084629 - RNA, 19 nt, Artificial Sequence
  Description of Artificial Sequence: Synthetic oligonucleotide
  Antisense strand to SEQ ID NO: 2084628
uuucccaacaaguuguucc

SEQ ID NO: 2084630 - RNA, 19 nt, Artificial Sequence
  Description of Artificial Sequence: Synthetic oligonucleotide
  Sense strand starting at position 1282 of SEQ ID NO: 1881963
aacaacuuguugggaaaga

SEQ ID NO: 2084631 - RNA, 19 nt, Artificial Sequence
  Description of Artificial Sequence: Synthetic oligonucleotide
  Antisense strand to SEQ ID NO: 2084630
ucuuucccaacaaguuguu

SEQ ID NO: 2084632 - RNA, 19 nt, Artificial Sequence
  Description of Artificial Sequence: Synthetic oligonucleotide
  Sense strand starting at position 1283 of SEQ ID NO: 1881963
acaacuuguugggaaagau

SEQ ID NO: 2084633 - RNA, 19 nt, Artificial Sequence
  Description of Artificial Sequence: Synthetic oligonucleotide
  Antisense strand to SEQ ID NO: 2084632
aucuuucccaacaaguugu

SEQ ID NO: 2084634 - RNA, 19 nt, Artificial Sequence
  Description of Artificial Sequence: Synthetic oligonucleotide
  Sense strand starting at position 1413 of SEQ ID NO: 1881963
gggucauucuggcagagca

SEQ ID NO: 2084635 - RNA, 19 nt, Artificial Sequence
  Description of Artificial Sequence: Synthetic oligonucleotide
  Antisense strand to SEQ ID NO: 2084634
ugcucugccagaaugaccc

SEQ ID NO: 2084636 - RNA, 19 nt, Artificial Sequence
  Description of Artificial Sequence: Synthetic oligonucleotide
  Sense strand starting at position 1558 of SEQ ID NO: 1881963
gggucuuugucucccacau

SEQ ID NO: 2084637 - RNA, 19 nt, Artificial Sequence
  Description of Artificial Sequence: Synthetic oligonucleotide
  Antisense strand to SEQ ID NO: 2084636
augugggagacaaagaccc

SEQ ID NO: 2084638 - RNA, 19 nt, Artificial Sequence
  Description of Artificial Sequence: Synthetic oligonucleotide
  Sense strand starting at position 1624 of SEQ ID NO: 1881963
ccgaauaacuuguugguuu

SEQ ID NO: 2084639 - RNA, 19 nt, Artificial Sequence
  Description of Artificial Sequence: Synthetic oligonucleotide
  Antisense strand to SEQ ID NO: 2084638
aaaccaacaaguuauucgg

SEQ ID NO: 2084640 - RNA, 19 nt, Artificial Sequence
  Description of Artificial Sequence: Synthetic oligonucleotide
  Sense strand starting at position 1827 of SEQ ID NO: 1881963
ggagaauccggguggaagu

SEQ ID NO: 2084641 - RNA, 19 nt, Artificial Sequence
  Description of Artificial Sequence: Synthetic oligonucleotide
  Antisense strand to SEQ ID NO: 2084640
acuuccacccggauucucc

SEQ ID NO: 2084642 - RNA, 19 nt, Artificial Sequence
  Description of Artificial Sequence: Synthetic oligonucleotide
  Sense strand starting at position 1835 of SEQ ID NO: 1881963
cggguggaagucgagaaau

SEQ ID NO: 2084643 - RNA, 19 nt, Artificial Sequence
  Description of Artificial Sequence: Synthetic oligonucleotide
  Antisense strand to SEQ ID NO: 2084642
auuucucgacuuccacccg

SEQ ID NO: 2084644 - RNA, 19 nt, Artificial Sequence
  Description of Artificial Sequence: Synthetic oligonucleotide
  Sense strand starting at position 2653 of SEQ ID NO: 1881963
gcuguaggucacggauaau

SEQ ID NO: 2084645 - RNA, 19 nt, Artificial Sequence
  Description of Artificial Sequence: Synthetic oligonucleotide
  Antisense strand to SEQ ID NO: 2084644
auuauccgugaccuacagc

SEQ ID NO: 2084646 - RNA, 19 nt, Artificial Sequence
  Description of Artificial Sequence: Synthetic oligonucleotide
  Sense strand starting at position 2664 of SEQ ID NO: 1881963
cggauaaugucacucacga

SEQ ID NO: 2084647 - RNA, 19 nt, Artificial Sequence
  Description of Artificial Sequence: Synthetic oligonucleotide
  Antisense strand to SEQ ID NO: 2084646
ucgugagugacauuauccg

SEQ ID NO: 2084648 - RNA, 19 nt, Artificial Sequence
  Description of Artificial Sequence: Synthetic oligonucleotide
  Sense strand starting at position 2668 of SEQ ID NO: 1881963
uaaugucacucacgaggaa

SEQ ID NO: 2084649 - RNA, 19 nt, Artificial Sequence
  Description of Artificial Sequence: Synthetic oligonucleotide
  Antisense strand to SEQ ID NO: 2084648
uuccucgugagugacauua

SEQ ID NO: 2084650 - RNA, 19 nt, Artificial Sequence
  Description of Artificial Sequence: Synthetic oligonucleotide
  Sense strand starting at position 2854 of SEQ ID NO: 1881963
gcaagaaguucucccuuug

SEQ ID NO: 2084651 - RNA, 19 nt, Artificial Sequence
  Description of Artificial Sequence: Synthetic oligonucleotide
  Antisense strand to SEQ ID NO: 2084650
caaagggagaacuucuugc

SEQ ID NO: 2084652 - RNA, 19 nt, Artificial Sequence
  Description of Artificial Sequence: Synthetic oligonucleotide
  Sense strand starting at position 3126 of SEQ ID NO: 1881963
ggcuguuugucaguuucca

SEQ ID NO: 2084653 - RNA, 19 nt, Artificial Sequence
  Description of Artificial Sequence: Synthetic oligonucleotide
  Antisense strand to SEQ ID NO: 2084652
uggaaacugacaaacagcc

SEQ ID NO: 2084654 - RNA, 19 nt, Artificial Sequence
  Description of Artificial Sequence: Synthetic oligonucleotide
  Sense strand starting at position 3135 of SEQ ID NO: 1881963
ucaguuuccagcgguguga

SEQ ID NO: 2084655 - RNA, 19 nt, Artificial Sequence
  Description of Artificial Sequence: Synthetic oligonucleotide
  Antisense strand to SEQ ID NO: 2084654
ucacaccgcuggaaacuga

SEQ ID NO: 2084656 - RNA, 19 nt, Artificial Sequence
  Description of Artificial Sequence: Synthetic oligonucleotide
  Sense strand starting at position 3213 of SEQ ID NO: 1881963
aaugguauuugcuagaaug

SEQ ID NO: 2084657 - RNA, 19 nt, Artificial Sequence
  Description of Artificial Sequence: Synthetic oligonucleotide
  Antisense strand to SEQ ID NO: 2084656
cauucuagcaaauaccauu

SEQ ID NO: 2084658 - RNA, 19 nt, Artificial Sequence
  Description of Artificial Sequence: Synthetic oligonucleotide
  Sense strand starting at position 3238 of SEQ ID NO: 1881963
agaggagugugugguauuu

SEQ ID NO: 2084659 - RNA, 19 nt, Artificial Sequence
  Description of Artificial Sequence: Synthetic oligonucleotide
  Antisense strand to SEQ ID NO: 2084658
aaauaccacacacuccucu

SEQ ID NO: 2084660 - RNA, 19 nt, Artificial Sequence
  Description of Artificial Sequence: Synthetic oligonucleotide
  Sense strand starting at position 3240 of SEQ ID NO: 1881963
aggagugugugguauuuca

SEQ ID NO: 2084661 - RNA, 19 nt, Artificial Sequence
  Description of Artificial Sequence: Synthetic oligonucleotide
  Antisense strand to SEQ ID NO: 2084660
ugaaauaccacacacuccu

SEQ ID NO: 2084662 - RNA, 19 nt, Artificial Sequence
  Description of Artificial Sequence: Synthetic oligonucleotide
  Sense strand starting at position 3264 of SEQ ID NO: 1881963
uggugucaugcuuauauuc

SEQ ID NO: 2084663 - RNA, 19 nt, Artificial Sequence
  Description of Artificial Sequence: Synthetic oligonucleotide
  Antisense strand to SEQ ID NO: 2084662
gaauauaagcaugacacca

SEQ ID NO: 2084664 - RNA, 19 nt, Artificial Sequence
  Description of Artificial Sequence: Synthetic oligonucleotide
  Sense strand starting at position 3295 of SEQ ID NO: 1881963
ucacguuuacuguguguua

SEQ ID NO: 2084665 - RNA, 19 nt, Artificial Sequence
  Description of Artificial Sequence: Synthetic oligonucleotide
  Antisense strand to SEQ ID NO: 2084664
uaacacacaguaaacguga

SEQ ID NO: 2084666 - RNA, 19 nt, Artificial Sequence
  Description of Artificial Sequence: Synthetic oligonucleotide
  Sense strand starting at position 3409 of SEQ ID NO: 1881963
caggguuguaaaggucaca

SEQ ID NO: 2084667 - RNA, 19 nt, Artificial Sequence
  Description of Artificial Sequence: Synthetic oligonucleotide
  Antisense strand to SEQ ID NO: 2084666
ugugaccuuuacaacccug

SEQ ID NO: 2084668 - RNA, 19 nt, Artificial Sequence
  Description of Artificial Sequence: Synthetic oligonucleotide
  Sense strand starting at position 3483 of SEQ ID NO: 1881963
gccacagaucucuagagug

SEQ ID NO: 2084669 - RNA, 19 nt, Artificial Sequence
  Description of Artificial Sequence: Synthetic oligonucleotide
  Antisense strand to SEQ ID NO: 2084668
cacucuagagaucuguggc

SEQ ID NO: 2084670 - RNA, 19 nt, Artificial Sequence
  Description of Artificial Sequence: Synthetic oligonucleotide
  Sense strand starting at position 3653 of SEQ ID NO: 1881963
ccugguacuuguuccaagu

SEQ ID NO: 2084671 - RNA, 19 nt, Artificial Sequence
  Description of Artificial Sequence: Synthetic oligonucleotide
  Antisense strand to SEQ ID NO: 2084670
acuuggaacaaguaccagg

SEQ ID NO: 2084672 - RNA, 19 nt, Artificial Sequence
  Description of Artificial Sequence: Synthetic oligonucleotide
  Sense strand starting at position 3655 of SEQ ID NO: 1881963
ugguacuuguuccaaguga

SEQ ID NO: 2084673 - RNA, 19 nt, Artificial Sequence
  Description of Artificial Sequence: Synthetic oligonucleotide
  Antisense strand to SEQ ID NO: 2084672
ucacuuggaacaaguacca

SEQ ID NO: 2084674 - RNA, 19 nt, Artificial Sequence
  Description of Artificial Sequence: Synthetic oligonucleotide
  Sense strand starting at position 3659 of SEQ ID NO: 1881963
acuuguuccaagugagguc

SEQ ID NO: 2084675 - RNA, 19 nt, Artificial Sequence
  Description of Artificial Sequence: Synthetic oligonucleotide
  Antisense strand to SEQ ID NO: 2084674
gaccucacuuggaacaagu

SEQ ID NO: 2084676 - RNA, 19 nt, Artificial Sequence
  Description of Artificial Sequence: Synthetic oligonucleotide
  Sense strand starting at position 3741 of SEQ ID NO: 1881963
ccuggaacuccguaauggu

SEQ ID NO: 2084677 - RNA, 19 nt, Artificial Sequence
  Description of Artificial Sequence: Synthetic oligonucleotide
  Antisense strand to SEQ ID NO: 2084676
accauuacggaguuccagg

SEQ ID NO: 2084678 - RNA, 19 nt, Artificial Sequence
  Description of Artificial Sequence: Synthetic oligonucleotide
  Sense strand starting at position 3844 of SEQ ID NO: 1881963
gcugguggcuuugucaaca

SEQ ID NO: 2084679 - RNA, 19 nt, Artificial Sequence
  Description of Artificial Sequence: Synthetic oligonucleotide
  Antisense strand to SEQ ID NO: 2084678
uguugacaaagccaccagc

SEQ ID NO: 2084680 - RNA, 19 nt, Artificial Sequence
  Description of Artificial Sequence: Synthetic oligonucleotide
  Sense strand starting at position 3956 of SEQ ID NO: 1881963
ggguguucuuguguaacuu

SEQ ID NO: 2084681 - RNA, 19 nt, Artificial Sequence
  Description of Artificial Sequence: Synthetic oligonucleotide
  Antisense strand to SEQ ID NO: 2084680
aaguuacacaagaacaccc

SEQ ID NO: 2084682 - RNA, 19 nt, Artificial Sequence
  Description of Artificial Sequence: Synthetic oligonucleotide
  Sense strand starting at position 3957 of SEQ ID NO: 1881963
gguguucuuguguaacuug

SEQ ID NO: 2084683 - RNA, 19 nt, Artificial Sequence
  Description of Artificial Sequence: Synthetic oligonucleotide
  Antisense strand to SEQ ID NO: 2084682
caaguuacacaagaacacc

SEQ ID NO: 2084684 - RNA, 19 nt, Artificial Sequence
  Description of Artificial Sequence: Synthetic oligonucleotide
  Sense strand starting at position 297 of SEQ ID NO: 1881964
gugugcaggcaagagaaau

SEQ ID NO: 2084685 - RNA, 19 nt, Artificial Sequence
  Description of Artificial Sequence: Synthetic oligonucleotide
  Antisense strand to SEQ ID NO: 2084684
auuucucuugccugcacac

SEQ ID NO: 2084686 - RNA, 19 nt, Artificial Sequence
  Description of Artificial Sequence: Synthetic oligonucleotide
  Sense strand starting at position 303 of SEQ ID NO: 1881964
aggcaagagaaaugucuua

SEQ ID NO: 2084687 - RNA, 19 nt, Artificial Sequence
  Description of Artificial Sequence: Synthetic oligonucleotide
  Antisense strand to SEQ ID NO: 2084686
uaagacauuucucuugccu

SEQ ID NO: 2084688 - RNA, 19 nt, Artificial Sequence
  Description of Artificial Sequence: Synthetic oligonucleotide
  Sense strand starting at position 470 of SEQ ID NO: 1881964
guaaauuuaguggguuguu

SEQ ID NO: 2084689 - RNA, 19 nt, Artificial Sequence
  Description of Artificial Sequence: Synthetic oligonucleotide
  Antisense strand to SEQ ID NO: 2084688
aacaacccacuaaauuuac

SEQ ID NO: 2084690 - RNA, 19 nt, Artificial Sequence
  Description of Artificial Sequence: Synthetic oligonucleotide
  Sense strand starting at position 473 of SEQ ID NO: 1881964
aauuuaguggguuguuauc

SEQ ID NO: 2084691 - RNA, 19 nt, Artificial Sequence
  Description of Artificial Sequence: Synthetic oligonucleotide
  Antisense strand to SEQ ID NO: 2084690
gauaacaacccacuaaauu

SEQ ID NO: 2084692 - RNA, 19 nt, Artificial Sequence
  Description of Artificial Sequence: Synthetic oligonucleotide
  Sense strand starting at position 486 of SEQ ID NO: 1881964
guuaucuuacuugagcuaa

SEQ ID NO: 2084693 - RNA, 19 nt, Artificial Sequence
  Description of Artificial Sequence: Synthetic oligonucleotide
  Antisense strand to SEQ ID NO: 2084692
uuagcucaaguaagauaac

SEQ ID NO: 2084694 - RNA, 19 nt, Artificial Sequence
  Description of Artificial Sequence: Synthetic oligonucleotide
  Sense strand starting at position 517 of SEQ ID NO: 1881964
uguguuacucaagaauugu

SEQ ID NO: 2084695 - RNA, 19 nt, Artificial Sequence
  Description of Artificial Sequence: Synthetic oligonucleotide
  Antisense strand to SEQ ID NO: 2084694
acaauucuugaguaacaca

SEQ ID NO: 2084696 - RNA, 19 nt, Artificial Sequence
  Description of Artificial Sequence: Synthetic oligonucleotide
  Sense strand starting at position 545 of SEQ ID NO: 1881964
gcauuagaacuuugaccca

SEQ ID NO: 2084697 - RNA, 19 nt, Artificial Sequence
  Description of Artificial Sequence: Synthetic oligonucleotide
  Antisense strand to SEQ ID NO: 2084696
ugggucaaaguucuaaugc

SEQ ID NO: 2084698 - RNA, 19 nt, Artificial Sequence
  Description of Artificial Sequence: Synthetic oligonucleotide
  Sense strand starting at position 548 of SEQ ID NO: 1881964
uuagaacuuugacccaagu

SEQ ID NO: 2084699 - RNA, 19 nt, Artificial Sequence
  Description of Artificial Sequence: Synthetic oligonucleotide
  Antisense strand to SEQ ID NO: 2084698
acuugggucaaaguucuaa

SEQ ID NO: 2084700 - RNA, 19 nt, Artificial Sequence
  Description of Artificial Sequence: Synthetic oligonucleotide
  Sense strand starting at position 581 of SEQ ID NO: 1881964
uagcaauggcuagaaugau

SEQ ID NO: 2084701 - RNA, 19 nt, Artificial Sequence
  Description of Artificial Sequence: Synthetic oligonucleotide
  Antisense strand to SEQ ID NO: 2084700
aucauucuagccauugcua

SEQ ID NO: 2084702 - RNA, 19 nt, Artificial Sequence
  Description of Artificial Sequence: Synthetic oligonucleotide
  Sense strand starting at position 850 of SEQ ID NO: 1881964
gcccaucaggauggagaua

SEQ ID NO: 2084703 - RNA, 19 nt, Artificial Sequence
  Description of Artificial Sequence: Synthetic oligonucleotide
  Antisense strand to SEQ ID NO: 2084702
uaucuccauccugaugggc

SEQ ID NO: 2084704 - RNA, 19 nt, Artificial Sequence
  Description of Artificial Sequence: Synthetic oligonucleotide
  Sense strand starting at position 936 of SEQ ID NO: 1881964
agcuuacagaaauggguaa

SEQ ID NO: 2084705 - RNA, 19 nt, Artificial Sequence
  Description of Artificial Sequence: Synthetic oligonucleotide
  Antisense strand to SEQ ID NO: 2084704
uuacccauuucuguaagcu

SEQ ID NO: 2084706 - RNA, 19 nt, Artificial Sequence
  Description of Artificial Sequence: Synthetic oligonucleotide
  Sense strand starting at position 937 of SEQ ID NO: 1881964
gcuuacagaaauggguaaa

SEQ ID NO: 2084707 - RNA, 19 nt, Artificial Sequence
  Description of Artificial Sequence: Synthetic oligonucleotide
  Antisense strand to SEQ ID NO: 2084706
uuuacccauuucuguaagc

SEQ ID NO: 2084708 - RNA, 19 nt, Artificial Sequence
  Description of Artificial Sequence: Synthetic oligonucleotide
  Sense strand starting at position 983 of SEQ ID NO: 1881964
gcaauaugccguuugagca

SEQ ID NO: 2084709 - RNA, 19 nt, Artificial Sequence
  Description of Artificial Sequence: Synthetic oligonucleotide
  Antisense strand to SEQ ID NO: 2084708
ugcucaaacggcauauugc

SEQ ID NO: 2084710 - RNA, 19 nt, Artificial Sequence
  Description of Artificial Sequence: Synthetic oligonucleotide
  Sense strand starting at position 1063 of SEQ ID NO: 1881964
gaggcagauauguaagugu

SEQ ID NO: 2084711 - RNA, 19 nt, Artificial Sequence
  Description of Artificial Sequence: Synthetic oligonucleotide
  Antisense strand to SEQ ID NO: 2084710
acacuuacauaucugccuc

SEQ ID NO: 2084712 - RNA, 19 nt, Artificial Sequence
  Description of Artificial Sequence: Synthetic oligonucleotide
  Sense strand starting at position 1228 of SEQ ID NO: 1881964
cucuguacugucuaacaac

SEQ ID NO: 2084713 - RNA, 19 nt, Artificial Sequence
  Description of Artificial Sequence: Synthetic oligonucleotide
  Antisense strand to SEQ ID NO: 2084712
guuguuagacaguacagag

SEQ ID NO: 2084714 - RNA, 19 nt, Artificial Sequence
  Description of Artificial Sequence: Synthetic oligonucleotide
  Sense strand starting at position 1355 of SEQ ID NO: 1881964
gugguaguuguuuccaguu

SEQ ID NO: 2084715 - RNA, 19 nt, Artificial Sequence
  Description of Artificial Sequence: Synthetic oligonucleotide
  Antisense strand to SEQ ID NO: 2084714
aacuggaaacaacuaccac

SEQ ID NO: 2084716 - RNA, 19 nt, Artificial Sequence
  Description of Artificial Sequence: Synthetic oligonucleotide
  Sense strand starting at position 1426 of SEQ ID NO: 1881964
auagacauauguuuccauu

SEQ ID NO: 2084717 - RNA, 19 nt, Artificial Sequence
  Description of Artificial Sequence: Synthetic oligonucleotide
  Antisense strand to SEQ ID NO: 2084716
aauggaaacauaugucuau

SEQ ID NO: 2084718 - RNA, 19 nt, Artificial Sequence
  Description of Artificial Sequence: Synthetic oligonucleotide
  Sense strand starting at position 1464 of SEQ ID NO: 1881964
gaaguagaauuguccuaug

SEQ ID NO: 2084719 - RNA, 19 nt, Artificial Sequence
  Description of Artificial Sequence: Synthetic oligonucleotide
  Antisense strand to SEQ ID NO: 2084718
cauaggacaauucuacuuc

SEQ ID NO: 2084720 - RNA, 19 nt, Artificial Sequence
  Description of Artificial Sequence: Synthetic oligonucleotide
  Sense strand starting at position 1469 of SEQ ID NO: 1881964
agaauuguccuaugguagg

SEQ ID NO: 2084721 - RNA, 19 nt, Artificial Sequence
  Description of Artificial Sequence: Synthetic oligonucleotide
  Antisense strand to SEQ ID NO: 2084720
ccuaccauaggacaauucu

SEQ ID NO: 2084722 - RNA, 19 nt, Artificial Sequence
  Description of Artificial Sequence: Synthetic oligonucleotide
  Sense strand starting at position 1580 of SEQ ID NO: 1881964
ucauuccuugauggaauua

SEQ ID NO: 2084723 - RNA, 19 nt, Artificial Sequence
  Description of Artificial Sequence: Synthetic oligonucleotide
  Antisense strand to SEQ ID NO: 2084722
uaauuccaucaaggaauga

SEQ ID NO: 2084724 - RNA, 19 nt, Artificial Sequence
  Description of Artificial Sequence: Synthetic oligonucleotide
  Sense strand starting at position 1656 of SEQ ID NO: 1881964
acucauaugcagugaccaa

SEQ ID NO: 2084725 - RNA, 19 nt, Artificial Sequence
  Description of Artificial Sequence: Synthetic oligonucleotide
  Antisense strand to SEQ ID NO: 2084724
uuggucacugcauaugagu

SEQ ID NO: 2084726 - RNA, 19 nt, Artificial Sequence
  Description of Artificial Sequence: Synthetic oligonucleotide
  Sense strand starting at position 2087 of SEQ ID NO: 1881964
gcaaauuaugauuagugca

SEQ ID NO: 2084727 - RNA, 19 nt, Artificial Sequence
  Description of Artificial Sequence: Synthetic oligonucleotide
  Antisense strand to SEQ ID NO: 2084726
ugcacuaaucauaauuugc

SEQ ID NO: 2084728 - RNA, 19 nt, Artificial Sequence
  Description of Artificial Sequence: Synthetic oligonucleotide
  Sense strand starting at position 2165 of SEQ ID NO: 1881964
augaaacaucguuguaaug

SEQ ID NO: 2084729 - RNA, 19 nt, Artificial Sequence
  Description of Artificial Sequence: Synthetic oligonucleotide
  Antisense strand to SEQ ID NO: 2084728
cauuacaacgauguuucau

SEQ ID NO: 2084730 - RNA, 19 nt, Artificial Sequence
  Description of Artificial Sequence: Synthetic oligonucleotide
  Sense strand starting at position 2382 of SEQ ID NO: 1881964
uugauuaaguugucauuga

SEQ ID NO: 2084731 - RNA, 19 nt, Artificial Sequence
  Description of Artificial Sequence: Synthetic oligonucleotide
  Antisense strand to SEQ ID NO: 2084730
ucaaugacaacuuaaucaa

SEQ ID NO: 2084732 - RNA, 19 nt, Artificial Sequence
  Description of Artificial Sequence: Synthetic oligonucleotide
  Sense strand starting at position 2757 of SEQ ID NO: 1881964
cugcuaaaccuuuagagca

SEQ ID NO: 2084733 - RNA, 19 nt, Artificial Sequence
  Description of Artificial Sequence: Synthetic oligonucleotide
  Antisense strand to SEQ ID NO: 2084732
ugcucuaaagguuuagcag

SEQ ID NO: 2084734 - RNA, 19 nt, Artificial Sequence
  Description of Artificial Sequence: Synthetic oligonucleotide
  Sense strand starting at position 2765 of SEQ ID NO: 1881964
ccuuuagagcacuauguga

SEQ ID NO: 2084735 - RNA, 19 nt, Artificial Sequence
  Description of Artificial Sequence: Synthetic oligonucleotide
  Antisense strand to SEQ ID NO: 2084734
ucacauagugcucuaaagg

SEQ ID NO: 2084736 - RNA, 19 nt, Artificial Sequence
  Description of Artificial Sequence: Synthetic oligonucleotide
  Sense strand starting at position 2866 of SEQ ID NO: 1881964
agggauuguccuggguauu

SEQ ID NO: 2084737 - RNA, 19 nt, Artificial Sequence
  Description of Artificial Sequence: Synthetic oligonucleotide
  Antisense strand to SEQ ID NO: 2084736
aauacccaggacaaucccu

SEQ ID NO: 2084738 - RNA, 19 nt, Artificial Sequence
  Description of Artificial Sequence: Synthetic oligonucleotide
  Sense strand starting at position 2885 of SEQ ID NO: 1881964
guaagauauuaagcacaau

SEQ ID NO: 2084739 - RNA, 19 nt, Artificial Sequence
  Description of Artificial Sequence: Synthetic oligonucleotide
  Antisense strand to SEQ ID NO: 2084738
auugugcuuaauaucuuac

SEQ ID NO: 2084740 - RNA, 19 nt, Artificial Sequence
  Description of Artificial Sequence: Synthetic oligonucleotide
  Sense strand starting at position 2908 of SEQ ID NO: 1881964
ggccucuacuuauuagaaa

SEQ ID NO: 2084741 - RNA, 19 nt, Artificial Sequence
  Description of Artificial Sequence: Synthetic oligonucleotide
  Antisense strand to SEQ ID NO: 2084740
uuucuaauaaguagaggcc

SEQ ID NO: 2084742 - RNA, 19 nt, Artificial Sequence
  Description of Artificial Sequence: Synthetic oligonucleotide
  Sense strand starting at position 3439 of SEQ ID NO: 1881964
auugaaagcccaggaucuu

SEQ ID NO: 2084743 - RNA, 19 nt, Artificial Sequence
  Description of Artificial Sequence: Synthetic oligonucleotide
  Antisense strand to SEQ ID NO: 2084742
aagauccugggcuuucaau

SEQ ID NO: 2084744 - RNA, 19 nt, Artificial Sequence
  Description of Artificial Sequence: Synthetic oligonucleotide
  Sense strand starting at position 3440 of SEQ ID NO: 1881964
uugaaagcccaggaucuuu

SEQ ID NO: 2084745 - RNA, 19 nt, Artificial Sequence
  Description of Artificial Sequence: Synthetic oligonucleotide
  Antisense strand to SEQ ID NO: 2084744
aaagauccugggcuuucaa

SEQ ID NO: 2084746 - RNA, 19 nt, Artificial Sequence
  Description of Artificial Sequence: Synthetic oligonucleotide
  Sense strand starting at position 3451 of SEQ ID NO: 1881964
ggaucuuugcauuaauuga

SEQ ID NO: 2084747 - RNA, 19 nt, Artificial Sequence
  Description of Artificial Sequence: Synthetic oligonucleotide
  Antisense strand to SEQ ID NO: 2084746
ucaauuaaugcaaagaucc

SEQ ID NO: 2084748 - RNA, 19 nt, Artificial Sequence
  Description of Artificial Sequence: Synthetic oligonucleotide
  Sense strand starting at position 3467 of SEQ ID NO: 1881964
ugauaaugucuccaguuga

SEQ ID NO: 2084749 - RNA, 19 nt, Artificial Sequence
  Description of Artificial Sequence: Synthetic oligonucleotide
  Antisense strand to SEQ ID NO: 2084748
ucaacuggagacauuauca

SEQ ID NO: 2084750 - RNA, 19 nt, Artificial Sequence
  Description of Artificial Sequence: Synthetic oligonucleotide
  Sense strand starting at position 3503 of SEQ ID NO: 1881964
uagaauugugucuaguuac

SEQ ID NO: 2084751 - RNA, 19 nt, Artificial Sequence
  Description of Artificial Sequence: Synthetic oligonucleotide
  Antisense strand to SEQ ID NO: 2084750
guaacuagacacaauucua

SEQ ID NO: 2084752 - RNA, 19 nt, Artificial Sequence
  Description of Artificial Sequence: Synthetic oligonucleotide
  Sense strand starting at position 3654 of SEQ ID NO: 1881964
gucauugguaaauagcgaa

SEQ ID NO: 2084753 - RNA, 19 nt, Artificial Sequence
  Description of Artificial Sequence: Synthetic oligonucleotide
  Antisense strand to SEQ ID NO: 2084752
uucgcuauuuaccaaugac

SEQ ID NO: 2084754 - RNA, 19 nt, Artificial Sequence
  Description of Artificial Sequence: Synthetic oligonucleotide
  Sense strand starting at position 3714 of SEQ ID NO: 1881964
gccuuuaaagauggaaaua

SEQ ID NO: 2084755 - RNA, 19 nt, Artificial Sequence
  Description of Artificial Sequence: Synthetic oligonucleotide
  Antisense strand to SEQ ID NO: 2084754
uauuuccaucuuuaaaggc

SEQ ID NO: 2084756 - RNA, 19 nt, Artificial Sequence
  Description of Artificial Sequence: Synthetic oligonucleotide
  Sense strand starting at position 3830 of SEQ ID NO: 1881964
ggcaucauugcacaaauau

SEQ ID NO: 2084757 - RNA, 19 nt, Artificial Sequence
  Description of Artificial Sequence: Synthetic oligonucleotide
  Antisense strand to SEQ ID NO: 2084756
auauuugugcaaugaugcc

SEQ ID NO: 2084758 - RNA, 19 nt, Artificial Sequence
  Description of Artificial Sequence: Synthetic oligonucleotide
  Sense strand starting at position 3890 of SEQ ID NO: 1881964
gagaaaguguauccauuau

SEQ ID NO: 2084759 - RNA, 19 nt, Artificial Sequence
  Description of Artificial Sequence: Synthetic oligonucleotide
  Antisense strand to SEQ ID NO: 2084758
auaauggauacacuuucuc

SEQ ID NO: 2084760 - RNA, 19 nt, Artificial Sequence
  Description of Artificial Sequence: Synthetic oligonucleotide
  Sense strand starting at position 3910 of SEQ ID NO: 1881964
guacaauaauuggcaaauc

SEQ ID NO: 2084761 - RNA, 19 nt, Artificial Sequence
  Description of Artificial Sequence: Synthetic oligonucleotide
  Antisense strand to SEQ ID NO: 2084760
gauuugccaauuauuguac

SEQ ID NO: 2084762 - RNA, 19 nt, Artificial Sequence
  Description of Artificial Sequence: Synthetic oligonucleotide
  Sense strand starting at position 3977 of SEQ ID NO: 1881964
ugcucauuuguguaugugu

SEQ ID NO: 2084763 - RNA, 19 nt, Artificial Sequence
  Description of Artificial Sequence: Synthetic oligonucleotide
  Antisense strand to SEQ ID NO: 2084762
acacauacacaaaugagca

SEQ ID NO: 2084764 - RNA, 19 nt, Artificial Sequence
  Description of Artificial Sequence: Synthetic oligonucleotide
  Sense strand starting at position 352 of SEQ ID NO: 1881965
cugucucuucgaugauuau

SEQ ID NO: 2084765 - RNA, 19 nt, Artificial Sequence
  Description of Artificial Sequence: Synthetic oligonucleotide
  Antisense strand to SEQ ID NO: 2084764
auaaucaucgaagagacag

SEQ ID NO: 2084766 - RNA, 19 nt, Artificial Sequence
  Description of Artificial Sequence: Synthetic oligonucleotide
  Sense strand starting at position 353 of SEQ ID NO: 1881965
ugucucuucgaugauuaug

SEQ ID NO: 2084767 - RNA, 19 nt, Artificial Sequence
  Description of Artificial Sequence: Synthetic oligonucleotide
  Antisense strand to SEQ ID NO: 2084766
cauaaucaucgaagagaca

SEQ ID NO: 2084768 - RNA, 19 nt, Artificial Sequence
  Description of Artificial Sequence: Synthetic oligonucleotide
  Sense strand starting at position 430 of SEQ ID NO: 1881965
gcuuucgucgggaggguau

SEQ ID NO: 2084769 - RNA, 19 nt, Artificial Sequence
  Description of Artificial Sequence: Synthetic oligonucleotide
  Antisense strand to SEQ ID NO: 2084768
auacccucccgacgaaagc

SEQ ID NO: 2084770 - RNA, 19 nt, Artificial Sequence
  Description of Artificial Sequence: Synthetic oligonucleotide
  Sense strand starting at position 837 of SEQ ID NO: 1881965
uggaguggucccgguauaa

SEQ ID NO: 2084771 - RNA, 19 nt, Artificial Sequence
  Description of Artificial Sequence: Synthetic oligonucleotide
  Antisense strand to SEQ ID NO: 2084770
uuauaccgggaccacucca

SEQ ID NO: 2084772 - RNA, 19 nt, Artificial Sequence
  Description of Artificial Sequence: Synthetic oligonucleotide
  Sense strand starting at position 1105 of SEQ ID NO: 1881965
uuccguuaacagcaagaau

SEQ ID NO: 2084773 - RNA, 19 nt, Artificial Sequence
  Description of Artificial Sequence: Synthetic oligonucleotide
  Antisense strand to SEQ ID NO: 2084772
auucuugcuguuaacggaa

SEQ ID NO: 2084774 - RNA, 19 nt, Artificial Sequence
  Description of Artificial Sequence: Synthetic oligonucleotide
  Sense strand starting at position 1138 of SEQ ID NO: 1881965
gccagcauaccuuaguuau

SEQ ID NO: 2084775 - RNA, 19 nt, Artificial Sequence
  Description of Artificial Sequence: Synthetic oligonucleotide
  Antisense strand to SEQ ID NO: 2084774
auaacuaagguaugcuggc

SEQ ID NO: 2084776 - RNA, 19 nt, Artificial Sequence
  Description of Artificial Sequence: Synthetic oligonucleotide
  Sense strand starting at position 1141 of SEQ ID NO: 1881965
agcauaccuuaguuauaua

SEQ ID NO: 2084777 - RNA, 19 nt, Artificial Sequence
  Description of Artificial Sequence: Synthetic oligonucleotide
  Antisense strand to SEQ ID NO: 2084776
uauauaacuaagguaugcu

SEQ ID NO: 2084778 - RNA, 19 nt, Artificial Sequence
  Description of Artificial Sequence: Synthetic oligonucleotide
  Sense strand starting at position 1193 of SEQ ID NO: 1881965
gcugaaagcgaaugugaca

SEQ ID NO: 2084779 - RNA, 19 nt, Artificial Sequence
  Description of Artificial Sequence: Synthetic oligonucleotide
  Antisense strand to SEQ ID NO: 2084778
ugucacauucgcuuucagc

SEQ ID NO: 2084780 - RNA, 19 nt, Artificial Sequence
  Description of Artificial Sequence: Synthetic oligonucleotide
  Sense strand starting at position 1259 of SEQ ID NO: 1881965
ccguguuaacuccacagga

SEQ ID NO: 2084781 - RNA, 19 nt, Artificial Sequence
  Description of Artificial Sequence: Synthetic oligonucleotide
  Antisense strand to SEQ ID NO: 2084780
uccuguggaguuaacacgg

SEQ ID NO: 2084782 - RNA, 19 nt, Artificial Sequence
  Description of Artificial Sequence: Synthetic oligonucleotide
  Sense strand starting at position 1604 of SEQ ID NO: 1881965
gggucugacucuucaagag

SEQ ID NO: 2084783 - RNA, 19 nt, Artificial Sequence
  Description of Artificial Sequence: Synthetic oligonucleotide
  Antisense strand to SEQ ID NO: 2084782
cucuugaagagucagaccc

SEQ ID NO: 2084784 - RNA, 19 nt, Artificial Sequence
  Description of Artificial Sequence: Synthetic oligonucleotide
  Sense strand starting at position 1650 of SEQ ID NO: 1881965
gcgcgguggguaucuuaga

SEQ ID NO: 2084785 - RNA, 19 nt, Artificial Sequence
  Description of Artificial Sequence: Synthetic oligonucleotide
  Antisense strand to SEQ ID NO: 2084784
ucuaagauacccaccgcgc

SEQ ID NO: 2084786 - RNA, 19 nt, Artificial Sequence
  Description of Artificial Sequence: Synthetic oligonucleotide
  Sense strand starting at position 2561 of SEQ ID NO: 1881965
gagggcucagccuggcaaa

SEQ ID NO: 2084787 - RNA, 19 nt, Artificial Sequence
  Description of Artificial Sequence: Synthetic oligonucleotide
  Antisense strand to SEQ ID NO: 2084786
uuugccaggcugagcccuc

SEQ ID NO: 2084788 - RNA, 19 nt, Artificial Sequence
  Description of Artificial Sequence: Synthetic oligonucleotide
  Sense strand starting at position 2585 of SEQ ID NO: 1881965
gaaagugguggguguagga

SEQ ID NO: 2084789 - RNA, 19 nt, Artificial Sequence
  Description of Artificial Sequence: Synthetic oligonucleotide
  Antisense strand to SEQ ID NO: 2084788
uccuacacccaccacuuuc

SEQ ID NO: 2084790 - RNA, 19 nt, Artificial Sequence
  Description of Artificial Sequence: Synthetic oligonucleotide
  Sense strand starting at position 2773 of SEQ ID NO: 1881965
cuaggacugauggguugaa

SEQ ID NO: 2084791 - RNA, 19 nt, Artificial Sequence
  Description of Artificial Sequence: Synthetic oligonucleotide
  Antisense strand to SEQ ID NO: 2084790
uucaacccaucaguccuag

SEQ ID NO: 2084792 - RNA, 19 nt, Artificial Sequence
  Description of Artificial Sequence: Synthetic oligonucleotide
  Sense strand starting at position 2829 of SEQ ID NO: 1881965
cccagaggucccuagaguu

SEQ ID NO: 2084793 - RNA, 19 nt, Artificial Sequence
  Description of Artificial Sequence: Synthetic oligonucleotide
  Antisense strand to SEQ ID NO: 2084792
aacucuagggaccucuggg

SEQ ID NO: 2084794 - RNA, 19 nt, Artificial Sequence
  Description of Artificial Sequence: Synthetic oligonucleotide
  Sense strand starting at position 2844 of SEQ ID NO: 1881965
aguuuaugaugcccagagu

SEQ ID NO: 2084795 - RNA, 19 nt, Artificial Sequence
  Description of Artificial Sequence: Synthetic oligonucleotide
  Antisense strand to SEQ ID NO: 2084794
acucugggcaucauaaacu

SEQ ID NO: 2084796 - RNA, 19 nt, Artificial Sequence
  Description of Artificial Sequence: Synthetic oligonucleotide
  Sense strand starting at position 2847 of SEQ ID NO: 1881965
uuaugaugcccagagucua

SEQ ID NO: 2084797 - RNA, 19 nt, Artificial Sequence
  Description of Artificial Sequence: Synthetic oligonucleotide
  Antisense strand to SEQ ID NO: 2084796
uagacucugggcaucauaa

SEQ ID NO: 2084798 - RNA, 19 nt, Artificial Sequence
  Description of Artificial Sequence: Synthetic oligonucleotide
  Sense strand starting at position 3062 of SEQ ID NO: 1881965
gauugcacucauggacaca

SEQ ID NO: 2084799 - RNA, 19 nt, Artificial Sequence
  Description of Artificial Sequence: Synthetic oligonucleotide
  Antisense strand to SEQ ID NO: 2084798
uguguccaugagugcaauc

SEQ ID NO: 2084800 - RNA, 19 nt, Artificial Sequence
  Description of Artificial Sequence: Synthetic oligonucleotide
  Sense strand starting at position 3161 of SEQ ID NO: 1881965
cuuucugggaccuguaaug

SEQ ID NO: 2084801 - RNA, 19 nt, Artificial Sequence
  Description of Artificial Sequence: Synthetic oligonucleotide
  Antisense strand to SEQ ID NO: 2084800
cauuacaggucccagaaag

SEQ ID NO: 2084802 - RNA, 19 nt, Artificial Sequence
  Description of Artificial Sequence: Synthetic oligonucleotide
  Sense strand starting at position 3218 of SEQ ID NO: 1881965
agggaauuaugauacuuaa

SEQ ID NO: 2084803 - RNA, 19 nt, Artificial Sequence
  Description of Artificial Sequence: Synthetic oligonucleotide
  Antisense strand to SEQ ID NO: 2084802
uuaaguaucauaauucccu

SEQ ID NO: 2084804 - RNA, 19 nt, Artificial Sequence
  Description of Artificial Sequence: Synthetic oligonucleotide
  Sense strand starting at position 3266 of SEQ ID NO: 1881965
aaggcuuaacgguaacaau

SEQ ID NO: 2084805 - RNA, 19 nt, Artificial Sequence
  Description of Artificial Sequence: Synthetic oligonucleotide
  Antisense strand to SEQ ID NO: 2084804
auuguuaccguuaagccuu

SEQ ID NO: 2084806 - RNA, 19 nt, Artificial Sequence
  Description of Artificial Sequence: Synthetic oligonucleotide
  Sense strand starting at position 3274 of SEQ ID NO: 1881965
acgguaacaauaggugauu

SEQ ID NO: 2084807 - RNA, 19 nt, Artificial Sequence
  Description of Artificial Sequence: Synthetic oligonucleotide
  Antisense strand to SEQ ID NO: 2084806
aaucaccuauuguuaccgu

SEQ ID NO: 2084808 - RNA, 19 nt, Artificial Sequence
  Description of Artificial Sequence: Synthetic oligonucleotide
  Sense strand starting at position 3283 of SEQ ID NO: 1881965
auaggugauucaguuagga

SEQ ID NO: 2084809 - RNA, 19 nt, Artificial Sequence
  Description of Artificial Sequence: Synthetic oligonucleotide
  Antisense strand to SEQ ID NO: 2084808
uccuaacugaaucaccuau

SEQ ID NO: 2084810 - RNA, 19 nt, Artificial Sequence
  Description of Artificial Sequence: Synthetic oligonucleotide
  Sense strand starting at position 3303 of SEQ ID NO: 1881965
auuaauguuagagaucggu

SEQ ID NO: 2084811 - RNA, 19 nt, Artificial Sequence
  Description of Artificial Sequence: Synthetic oligonucleotide
  Antisense strand to SEQ ID NO: 2084810
accgaucucuaacauuaau

SEQ ID NO: 2084812 - RNA, 19 nt, Artificial Sequence
  Description of Artificial Sequence: Synthetic oligonucleotide
  Sense strand starting at position 3328 of SEQ ID NO: 1881965
uguggaaaucagugguauu

SEQ ID NO: 2084813 - RNA, 19 nt, Artificial Sequence
  Description of Artificial Sequence: Synthetic oligonucleotide
  Antisense strand to SEQ ID NO: 2084812
aauaccacugauuuccaca

SEQ ID NO: 2084814 - RNA, 19 nt, Artificial Sequence
  Description of Artificial Sequence: Synthetic oligonucleotide
  Sense strand starting at position 3329 of SEQ ID NO: 1881965
guggaaaucagugguauuc

SEQ ID NO: 2084815 - RNA, 19 nt, Artificial Sequence
  Description of Artificial Sequence: Synthetic oligonucleotide
  Antisense strand to SEQ ID NO: 2084814
gaauaccacugauuuccac

SEQ ID NO: 2084816 - RNA, 19 nt, Artificial Sequence
  Description of Artificial Sequence: Synthetic oligonucleotide
  Sense strand starting at position 3375 of SEQ ID NO: 1881965
agagcugcucuccauguau

SEQ ID NO: 2084817 - RNA, 19 nt, Artificial Sequence
  Description of Artificial Sequence: Synthetic oligonucleotide
  Antisense strand to SEQ ID NO: 2084816
auacauggagagcagcucu

SEQ ID NO: 2084818 - RNA, 19 nt, Artificial Sequence
  Description of Artificial Sequence: Synthetic oligonucleotide
  Sense strand starting at position 3387 of SEQ ID NO: 1881965
cauguaugagcaggacaua

SEQ ID NO: 2084819 - RNA, 19 nt, Artificial Sequence
  Description of Artificial Sequence: Synthetic oligonucleotide
  Antisense strand to SEQ ID NO: 2084818
uauguccugcucauacaug

SEQ ID NO: 2084820 - RNA, 19 nt, Artificial Sequence
  Description of Artificial Sequence: Synthetic oligonucleotide
  Sense strand starting at position 3505 of SEQ ID NO: 1881965
ugggccugccucugggaua

SEQ ID NO: 2084821 - RNA, 19 nt, Artificial Sequence
  Description of Artificial Sequence: Synthetic oligonucleotide
  Antisense strand to SEQ ID NO: 2084820
uaucccagaggcaggccca

SEQ ID NO: 2084822 - RNA, 19 nt, Artificial Sequence
  Description of Artificial Sequence: Synthetic oligonucleotide
  Sense strand starting at position 3540 of SEQ ID NO: 1881965
acgagaacccuauaugcca

SEQ ID NO: 2084823 - RNA, 19 nt, Artificial Sequence
  Description of Artificial Sequence: Synthetic oligonucleotide
  Antisense strand to SEQ ID NO: 2084822
uggcauauaggguucucgu

SEQ ID NO: 2084824 - RNA, 19 nt, Artificial Sequence
  Description of Artificial Sequence: Synthetic oligonucleotide
  Sense strand starting at position 3653 of SEQ ID NO: 1881965
aaauaacuugugugggaca

SEQ ID NO: 2084825 - RNA, 19 nt, Artificial Sequence
  Description of Artificial Sequence: Synthetic oligonucleotide
  Antisense strand to SEQ ID NO: 2084824
ugucccacacaaguuauuu

SEQ ID NO: 2084826 - RNA, 19 nt, Artificial Sequence
  Description of Artificial Sequence: Synthetic oligonucleotide
  Sense strand starting at position 3655 of SEQ ID NO: 1881965
auaacuugugugggacaga

SEQ ID NO: 2084827 - RNA, 19 nt, Artificial Sequence
  Description of Artificial Sequence: Synthetic oligonucleotide
  Antisense strand to SEQ ID NO: 2084826
ucugucccacacaaguuau

SEQ ID NO: 2084828 - RNA, 19 nt, Artificial Sequence
  Description of Artificial Sequence: Synthetic oligonucleotide
  Sense strand starting at position 3658 of SEQ ID NO: 1881965
acuugugugggacagaauu

SEQ ID NO: 2084829 - RNA, 19 nt, Artificial Sequence
  Description of Artificial Sequence: Synthetic oligonucleotide
  Antisense strand to SEQ ID NO: 2084828
aauucugucccacacaagu

SEQ ID NO: 2084830 - RNA, 19 nt, Artificial Sequence
  Description of Artificial Sequence: Synthetic oligonucleotide
  Sense strand starting at position 3670 of SEQ ID NO: 1881965
cagaauuagguccgagucu

SEQ ID NO: 2084831 - RNA, 19 nt, Artificial Sequence
  Description of Artificial Sequence: Synthetic oligonucleotide
  Antisense strand to SEQ ID NO: 2084830
agacucggaccuaauucug

SEQ ID NO: 2084832 - RNA, 19 nt, Artificial Sequence
  Description of Artificial Sequence: Synthetic oligonucleotide
  Sense strand starting at position 3738 of SEQ ID NO: 1881965
guggcccuugucuaaauau

SEQ ID NO: 2084833 - RNA, 19 nt, Artificial Sequence
  Description of Artificial Sequence: Synthetic oligonucleotide
  Antisense strand to SEQ ID NO: 2084832
auauuuagacaagggccac

SEQ ID NO: 2084834 - RNA, 19 nt, Artificial Sequence
  Description of Artificial Sequence: Synthetic oligonucleotide
  Sense strand starting at position 3750 of SEQ ID NO: 1881965
uaaauaugagguggucagu

SEQ ID NO: 2084835 - RNA, 19 nt, Artificial Sequence
  Description of Artificial Sequence: Synthetic oligonucleotide
  Antisense strand to SEQ ID NO: 2084834
acugaccaccucauauuua

SEQ ID NO: 2084836 - RNA, 19 nt, Artificial Sequence
  Description of Artificial Sequence: Synthetic oligonucleotide
  Sense strand starting at position 3753 of SEQ ID NO: 1881965
auaugagguggucaguauu

SEQ ID NO: 2084837 - RNA, 19 nt, Artificial Sequence
  Description of Artificial Sequence: Synthetic oligonucleotide
  Antisense strand to SEQ ID NO: 2084836
aauacugaccaccucauau

SEQ ID NO: 2084838 - RNA, 19 nt, Artificial Sequence
  Description of Artificial Sequence: Synthetic oligonucleotide
  Sense strand starting at position 3813 of SEQ ID NO: 1881965
gucuguuugcaacaccuga

SEQ ID NO: 2084839 - RNA, 19 nt, Artificial Sequence
  Description of Artificial Sequence: Synthetic oligonucleotide
  Antisense strand to SEQ ID NO: 2084838
ucagguguugcaaacagac

SEQ ID NO: 2084840 - RNA, 19 nt, Artificial Sequence
  Description of Artificial Sequence: Synthetic oligonucleotide
  Sense strand starting at position 3884 of SEQ ID NO: 1881965
caagaaaggugagauacaa

SEQ ID NO: 2084841 - RNA, 19 nt, Artificial Sequence
  Description of Artificial Sequence: Synthetic oligonucleotide
  Antisense strand to SEQ ID NO: 2084840
uuguaucucaccuuucuug

SEQ ID NO: 2084842 - RNA, 19 nt, Artificial Sequence
  Description of Artificial Sequence: Synthetic oligonucleotide
  Sense strand starting at position 3978 of SEQ ID NO: 1881965
cacucagaucuagggagua

SEQ ID NO: 2084843 - RNA, 19 nt, Artificial Sequence
  Description of Artificial Sequence: Synthetic oligonucleotide
  Antisense strand to SEQ ID NO: 2084842
uacucccuagaucugagug

SEQ ID NO: 2084844 - RNA, 19 nt, Artificial Sequence
  Description of Artificial Sequence: Synthetic oligonucleotide
  Sense strand starting at position 2233 of SEQ ID NO: 1881966
cugcgauaucuaggccgua

SEQ ID NO: 2084845 - RNA, 19 nt, Artificial Sequence
  Description of Artificial Sequence: Synthetic oligonucleotide
  Antisense strand to SEQ ID NO: 2084844
uacggccuagauaucgcag

SEQ ID NO: 2084846 - RNA, 19 nt, Artificial Sequence
  Description of Artificial Sequence: Synthetic oligonucleotide
  Sense strand starting at position 2288 of SEQ ID NO: 1881966
cccugugacucguugguca

SEQ ID NO: 2084847 - RNA, 19 nt, Artificial Sequence
  Description of Artificial Sequence: Synthetic oligonucleotide
  Antisense strand to SEQ ID NO: 2084846
ugaccaacgagucacaggg

SEQ ID NO: 2084848 - RNA, 19 nt, Artificial Sequence
  Description of Artificial Sequence: Synthetic oligonucleotide
  Sense strand starting at position 2396 of SEQ ID NO: 1881966
cgguuuccuacugguaaga

SEQ ID NO: 2084849 - RNA, 19 nt, Artificial Sequence
  Description of Artificial Sequence: Synthetic oligonucleotide
  Antisense strand to SEQ ID NO: 2084848
ucuuaccaguaggaaaccg

SEQ ID NO: 2084850 - RNA, 19 nt, Artificial Sequence
  Description of Artificial Sequence: Synthetic oligonucleotide
  Sense strand starting at position 2418 of SEQ ID NO: 1881966
gcuuuagcugcgcaggaaa

SEQ ID NO: 2084851 - RNA, 19 nt, Artificial Sequence
  Description of Artificial Sequence: Synthetic oligonucleotide
  Antisense strand to SEQ ID NO: 2084850
uuuccugcgcagcuaaagc

SEQ ID NO: 2084852 - RNA, 19 nt, Artificial Sequence
  Description of Artificial Sequence: Synthetic oligonucleotide
  Sense strand starting at position 2425 of SEQ ID NO: 1881966
cugcgcaggaaauguuuaa

SEQ ID NO: 2084853 - RNA, 19 nt, Artificial Sequence
  Description of Artificial Sequence: Synthetic oligonucleotide
  Antisense strand to SEQ ID NO: 2084852
uuaaacauuuccugcgcag

SEQ ID NO: 2084854 - RNA, 19 nt, Artificial Sequence
  Description of Artificial Sequence: Synthetic oligonucleotide
  Sense strand starting at position 2432 of SEQ ID NO: 1881966
ggaaauguuuaacuccugu

SEQ ID NO: 2084855 - RNA, 19 nt, Artificial Sequence
  Description of Artificial Sequence: Synthetic oligonucleotide
  Antisense strand to SEQ ID NO: 2084854
acaggaguuaaacauuucc

SEQ ID NO: 2084856 - RNA, 19 nt, Artificial Sequence
  Description of Artificial Sequence: Synthetic oligonucleotide
  Sense strand starting at position 2438 of SEQ ID NO: 1881966
guuuaacuccuguggaaau

SEQ ID NO: 2084857 - RNA, 19 nt, Artificial Sequence
  Description of Artificial Sequence: Synthetic oligonucleotide
  Antisense strand to SEQ ID NO: 2084856
auuuccacaggaguuaaac

SEQ ID NO: 2084858 - RNA, 19 nt, Artificial Sequence
  Description of Artificial Sequence: Synthetic oligonucleotide
  Sense strand starting at position 2448 of SEQ ID NO: 1881966
uguggaaaucuggguacca

SEQ ID NO: 2084859 - RNA, 19 nt, Artificial Sequence
  Description of Artificial Sequence: Synthetic oligonucleotide
  Antisense strand to SEQ ID NO: 2084858
ugguacccagauuuccaca

SEQ ID NO: 2084860 - RNA, 19 nt, Artificial Sequence
  Description of Artificial Sequence: Synthetic oligonucleotide
  Sense strand starting at position 2449 of SEQ ID NO: 1881966
guggaaaucuggguaccag

SEQ ID NO: 2084861 - RNA, 19 nt, Artificial Sequence
  Description of Artificial Sequence: Synthetic oligonucleotide
  Antisense strand to SEQ ID NO: 2084860
cugguacccagauuuccac

SEQ ID NO: 2084862 - RNA, 19 nt, Artificial Sequence
  Description of Artificial Sequence: Synthetic oligonucleotide
  Sense strand starting at position 2537 of SEQ ID NO: 1881966
aaguuugguuucgcaauau

SEQ ID NO: 2084863 - RNA, 19 nt, Artificial Sequence
  Description of Artificial Sequence: Synthetic oligonucleotide
  Antisense strand to SEQ ID NO: 2084862
auauugcgaaaccaaacuu

SEQ ID NO: 2084864 - RNA, 19 nt, Artificial Sequence
  Description of Artificial Sequence: Synthetic oligonucleotide
  Sense strand starting at position 2547 of SEQ ID NO: 1881966
ucgcaauaucgaguccugu

SEQ ID NO: 2084865 - RNA, 19 nt, Artificial Sequence
  Description of Artificial Sequence: Synthetic oligonucleotide
  Antisense strand to SEQ ID NO: 2084864
acaggacucgauauugcga

SEQ ID NO: 2084866 - RNA, 19 nt, Artificial Sequence
  Description of Artificial Sequence: Synthetic oligonucleotide
  Sense strand starting at position 2567 of SEQ ID NO: 1881966
uuagcuaugcuuguguguu

SEQ ID NO: 2084867 - RNA, 19 nt, Artificial Sequence
  Description of Artificial Sequence: Synthetic oligonucleotide
  Antisense strand to SEQ ID NO: 2084866
aacacacaagcauagcuaa

SEQ ID NO: 2084868 - RNA, 19 nt, Artificial Sequence
  Description of Artificial Sequence: Synthetic oligonucleotide
  Sense strand starting at position 2620 of SEQ ID NO: 1881966
gaucgcgaugucucaguuu

SEQ ID NO: 2084869 - RNA, 19 nt, Artificial Sequence
  Description of Artificial Sequence: Synthetic oligonucleotide
  Antisense strand to SEQ ID NO: 2084868
aaacugagacaucgcgauc

SEQ ID NO: 2084870 - RNA, 19 nt, Artificial Sequence
  Description of Artificial Sequence: Synthetic oligonucleotide
  Sense strand starting at position 2735 of SEQ ID NO: 1881966
cguagcuaaacacguuuaa

SEQ ID NO: 2084871 - RNA, 19 nt, Artificial Sequence
  Description of Artificial Sequence: Synthetic oligonucleotide
  Antisense strand to SEQ ID NO: 2084870
uuaaacguguuuagcuacg

SEQ ID NO: 2084872 - RNA, 19 nt, Artificial Sequence
  Description of Artificial Sequence: Synthetic oligonucleotide
  Sense strand starting at position 2745 of SEQ ID NO: 1881966
cacguuuaaccguggauau

SEQ ID NO: 2084873 - RNA, 19 nt, Artificial Sequence
  Description of Artificial Sequence: Synthetic oligonucleotide
  Antisense strand to SEQ ID NO: 2084872
auauccacgguuaaacgug

SEQ ID NO: 2084874 - RNA, 19 nt, Artificial Sequence
  Description of Artificial Sequence: Synthetic oligonucleotide
  Sense strand starting at position 2746 of SEQ ID NO: 1881966
acguuuaaccguggauauu

SEQ ID NO: 2084875 - RNA, 19 nt, Artificial Sequence
  Description of Artificial Sequence: Synthetic oligonucleotide
  Antisense strand to SEQ ID NO: 2084874
aauauccacgguuaaacgu

SEQ ID NO: 2084876 - RNA, 19 nt, Artificial Sequence
  Description of Artificial Sequence: Synthetic oligonucleotide
  Sense strand starting at position 2780 of SEQ ID NO: 1881966
guaggaaauuaugacagga

SEQ ID NO: 2084877 - RNA, 19 nt, Artificial Sequence
  Description of Artificial Sequence: Synthetic oligonucleotide
  Antisense strand to SEQ ID NO: 2084876
uccugucauaauuuccuac

SEQ ID NO: 2084878 - RNA, 19 nt, Artificial Sequence
  Description of Artificial Sequence: Synthetic oligonucleotide
  Sense strand starting at position 2810 of SEQ ID NO: 1881966
ggguuuagaucugacagaa

SEQ ID NO: 2084879 - RNA, 19 nt, Artificial Sequence
  Description of Artificial Sequence: Synthetic oligonucleotide
  Antisense strand to SEQ ID NO: 2084878
uucugucagaucuaaaccc

SEQ ID NO: 2084880 - RNA, 19 nt, Artificial Sequence
  Description of Artificial Sequence: Synthetic oligonucleotide
  Sense strand starting at position 2823 of SEQ ID NO: 1881966
acagaaauauucuaauggu

SEQ ID NO: 2084881 - RNA, 19 nt, Artificial Sequence
  Description of Artificial Sequence: Synthetic oligonucleotide
  Antisense strand to SEQ ID NO: 2084880
accauuagaauauuucugu

SEQ ID NO: 2084882 - RNA, 19 nt, Artificial Sequence
  Description of Artificial Sequence: Synthetic oligonucleotide
  Sense strand starting at position 2826 of SEQ ID NO: 1881966
gaaauauucuaaugguagg

SEQ ID NO: 2084883 - RNA, 19 nt, Artificial Sequence
  Description of Artificial Sequence: Synthetic oligonucleotide
  Antisense strand to SEQ ID NO: 2084882
ccuaccauuagaauauuuc

SEQ ID NO: 2084884 - RNA, 19 nt, Artificial Sequence
  Description of Artificial Sequence: Synthetic oligonucleotide
  Sense strand starting at position 2840 of SEQ ID NO: 1881966
guaggcauugcaucgcuua

SEQ ID NO: 2084885 - RNA, 19 nt, Artificial Sequence
  Description of Artificial Sequence: Synthetic oligonucleotide
  Antisense strand to SEQ ID NO: 2084884
uaagcgaugcaaugccuac

SEQ ID NO: 2084886 - RNA, 19 nt, Artificial Sequence
  Description of Artificial Sequence: Synthetic oligonucleotide
  Sense strand starting at position 2851 of SEQ ID NO: 1881966
aucgcuuagccauauuugu

SEQ ID NO: 2084887 - RNA, 19 nt, Artificial Sequence
  Description of Artificial Sequence: Synthetic oligonucleotide
  Antisense strand to SEQ ID NO: 2084886
acaaauauggcuaagcgau

SEQ ID NO: 2084888 - RNA, 19 nt, Artificial Sequence
  Description of Artificial Sequence: Synthetic oligonucleotide
  Sense strand starting at position 2883 of SEQ ID NO: 1881966
uaggguugguucucuguaa

SEQ ID NO: 2084889 - RNA, 19 nt, Artificial Sequence
  Description of Artificial Sequence: Synthetic oligonucleotide
  Antisense strand to SEQ ID NO: 2084888
uuacagagaaccaacccua

SEQ ID NO: 2084890 - RNA, 19 nt, Artificial Sequence
  Description of Artificial Sequence: Synthetic oligonucleotide
  Sense strand starting at position 2887 of SEQ ID NO: 1881966
guugguucucuguaacuuu

SEQ ID NO: 2084891 - RNA, 19 nt, Artificial Sequence
  Description of Artificial Sequence: Synthetic oligonucleotide
  Antisense strand to SEQ ID NO: 2084890
aaaguuacagagaaccaac

SEQ ID NO: 2084892 - RNA, 19 nt, Artificial Sequence
  Description of Artificial Sequence: Synthetic oligonucleotide
  Sense strand starting at position 2943 of SEQ ID NO: 1881966
gacaauguuaccgaugugu

SEQ ID NO: 2084893 - RNA, 19 nt, Artificial Sequence
  Description of Artificial Sequence: Synthetic oligonucleotide
  Antisense strand to SEQ ID NO: 2084892
acacaucgguaacauuguc

SEQ ID NO: 2084894 - RNA, 19 nt, Artificial Sequence
  Description of Artificial Sequence: Synthetic oligonucleotide
  Sense strand starting at position 2945 of SEQ ID NO: 1881966
caauguuaccgauguguuu

SEQ ID NO: 2084895 - RNA, 19 nt, Artificial Sequence
  Description of Artificial Sequence: Synthetic oligonucleotide
  Antisense strand to SEQ ID NO: 2084894
aaacacaucgguaacauug

SEQ ID NO: 2084896 - RNA, 19 nt, Artificial Sequence
  Description of Artificial Sequence: Synthetic oligonucleotide
  Sense strand starting at position 3038 of SEQ ID NO: 1881966
ucagauucgugcuucuuga

SEQ ID NO: 2084897 - RNA, 19 nt, Artificial Sequence
  Description of Artificial Sequence: Synthetic oligonucleotide
  Antisense strand to SEQ ID NO: 2084896
ucaagaagcacgaaucuga

SEQ ID NO: 2084898 - RNA, 19 nt, Artificial Sequence
  Description of Artificial Sequence: Synthetic oligonucleotide
  Sense strand starting at position 3091 of SEQ ID NO: 1881966
ggucuuagccucgcuggua

SEQ ID NO: 2084899 - RNA, 19 nt, Artificial Sequence
  Description of Artificial Sequence: Synthetic oligonucleotide
  Antisense strand to SEQ ID NO: 2084898
uaccagcgaggcuaagacc

SEQ ID NO: 2084900 - RNA, 19 nt, Artificial Sequence
  Description of Artificial Sequence: Synthetic oligonucleotide
  Sense strand starting at position 3351 of SEQ ID NO: 1881966
cgcuguucgcacuaguaau

SEQ ID NO: 2084901 - RNA, 19 nt, Artificial Sequence
  Description of Artificial Sequence: Synthetic oligonucleotide
  Antisense strand to SEQ ID NO: 2084900
auuacuagugcgaacagcg

SEQ ID NO: 2084902 - RNA, 19 nt, Artificial Sequence
  Description of Artificial Sequence: Synthetic oligonucleotide
  Sense strand starting at position 3564 of SEQ ID NO: 1881966
guucuaagagcaugcuguu

SEQ ID NO: 2084903 - RNA, 19 nt, Artificial Sequence
  Description of Artificial Sequence: Synthetic oligonucleotide
  Antisense strand to SEQ ID NO: 2084902
aacagcaugcucuuagaac

SEQ ID NO: 2084904 - RNA, 19 nt, Artificial Sequence
  Description of Artificial Sequence: Synthetic oligonucleotide
  Sense strand starting at position 3615 of SEQ ID NO: 1881966
cggauauuuguuuggcaau

SEQ ID NO: 2084905 - RNA, 19 nt, Artificial Sequence
  Description of Artificial Sequence: Synthetic oligonucleotide
  Antisense strand to SEQ ID NO: 2084904
auugccaaacaaauauccg

SEQ ID NO: 2084906 - RNA, 19 nt, Artificial Sequence
  Description of Artificial Sequence: Synthetic oligonucleotide
  Sense strand starting at position 3616 of SEQ ID NO: 1881966
ggauauuuguuuggcaaua

SEQ ID NO: 2084907 - RNA, 19 nt, Artificial Sequence
  Description of Artificial Sequence: Synthetic oligonucleotide
  Antisense strand to SEQ ID NO: 2084906
uauugccaaacaaauaucc

SEQ ID NO: 2084908 - RNA, 19 nt, Artificial Sequence
  Description of Artificial Sequence: Synthetic oligonucleotide
  Sense strand starting at position 3773 of SEQ ID NO: 1881966
gcccuugcgcgcucuugaa

SEQ ID NO: 2084909 - RNA, 19 nt, Artificial Sequence
  Description of Artificial Sequence: Synthetic oligonucleotide
  Antisense strand to SEQ ID NO: 2084908
uucaagagcgcgcaagggc

SEQ ID NO: 2084910 - RNA, 19 nt, Artificial Sequence
  Description of Artificial Sequence: Synthetic oligonucleotide
  Sense strand starting at position 3775 of SEQ ID NO: 1881966
ccuugcgcgcucuugaaua

SEQ ID NO: 2084911 - RNA, 19 nt, Artificial Sequence
  Description of Artificial Sequence: Synthetic oligonucleotide
  Antisense strand to SEQ ID NO: 2084910
uauucaagagcgcgcaagg

SEQ ID NO: 2084912 - RNA, 19 nt, Artificial Sequence
  Description of Artificial Sequence: Synthetic oligonucleotide
  Sense strand starting at position 3822 of SEQ ID NO: 1881966
aagauuugcuuagugucau

SEQ ID NO: 2084913 - RNA, 19 nt, Artificial Sequence
  Description of Artificial Sequence: Synthetic oligonucleotide
  Antisense strand to SEQ ID NO: 2084912
augacacuaagcaaaucuu

SEQ ID NO: 2084914 - RNA, 19 nt, Artificial Sequence
  Description of Artificial Sequence: Synthetic oligonucleotide
  Sense strand starting at position 3875 of SEQ ID NO: 1881966
gucggaauuacgguucguu

SEQ ID NO: 2084915 - RNA, 19 nt, Artificial Sequence
  Description of Artificial Sequence: Synthetic oligonucleotide
  Antisense strand to SEQ ID NO: 2084914
aacgaaccguaauuccgac

SEQ ID NO: 2084916 - RNA, 19 nt, Artificial Sequence
  Description of Artificial Sequence: Synthetic oligonucleotide
  Sense strand starting at position 3896 of SEQ ID NO: 1881966
gguucuauguacucucuaa

SEQ ID NO: 2084917 - RNA, 19 nt, Artificial Sequence
  Description of Artificial Sequence: Synthetic oligonucleotide
  Antisense strand to SEQ ID NO: 2084916
uuagagaguacauagaacc

SEQ ID NO: 2084918 - RNA, 19 nt, Artificial Sequence
  Description of Artificial Sequence: Synthetic oligonucleotide
  Sense strand starting at position 3945 of SEQ ID NO: 1881966
uuucgugcauuuguuacua

SEQ ID NO: 2084919 - RNA, 19 nt, Artificial Sequence
  Description of Artificial Sequence: Synthetic oligonucleotide
  Antisense strand to SEQ ID NO: 2084918
uaguaacaaaugcacgaaa

SEQ ID NO: 2084920 - RNA, 19 nt, Artificial Sequence
  Description of Artificial Sequence: Synthetic oligonucleotide
  Sense strand starting at position 3949 of SEQ ID NO: 1881966
gugcauuuguuacuacuga

SEQ ID NO: 2084921 - RNA, 19 nt, Artificial Sequence
  Description of Artificial Sequence: Synthetic oligonucleotide
  Antisense strand to SEQ ID NO: 2084920
ucaguaguaacaaaugcac

SEQ ID NO: 2084922 - RNA, 19 nt, Artificial Sequence
  Description of Artificial Sequence: Synthetic oligonucleotide
  Sense strand starting at position 3953 of SEQ ID NO: 1881966
auuuguuacuacugaguuu

SEQ ID NO: 2084923 - RNA, 19 nt, Artificial Sequence
  Description of Artificial Sequence: Synthetic oligonucleotide
  Antisense strand to SEQ ID NO: 2084922
aaacucaguaguaacaaau

SEQ ID NO: 2084924 - RNA, 19 nt, Artificial Sequence
  Description of Artificial Sequence: Synthetic oligonucleotide
  Sense strand starting at position 224 of SEQ ID NO: 1881967
uuugcaugauugccaaaua

SEQ ID NO: 2084925 - RNA, 19 nt, Artificial Sequence
  Description of Artificial Sequence: Synthetic oligonucleotide
  Antisense strand to SEQ ID NO: 2084924
uauuuggcaaucaugcaaa

SEQ ID NO: 2084926 - RNA, 19 nt, Artificial Sequence
  Description of Artificial Sequence: Synthetic oligonucleotide
  Sense strand starting at position 470 of SEQ ID NO: 1881967
aucuauuauguccgauaca

SEQ ID NO: 2084927 - RNA, 19 nt, Artificial Sequence
  Description of Artificial Sequence: Synthetic oligonucleotide
  Antisense strand to SEQ ID NO: 2084926
uguaucggacauaauagau

SEQ ID NO: 2084928 - RNA, 19 nt, Artificial Sequence
  Description of Artificial Sequence: Synthetic oligonucleotide
  Sense strand starting at position 493 of SEQ ID NO: 1881967
gccacagcccuagauauau

SEQ ID NO: 2084929 - RNA, 19 nt, Artificial Sequence
  Description of Artificial Sequence: Synthetic oligonucleotide
  Antisense strand to SEQ ID NO: 2084928
auauaucuagggcuguggc

SEQ ID NO: 2084930 - RNA, 19 nt, Artificial Sequence
  Description of Artificial Sequence: Synthetic oligonucleotide
  Sense strand starting at position 568 of SEQ ID NO: 1881967
ucaugagcugccuaacuca

SEQ ID NO: 2084931 - RNA, 19 nt, Artificial Sequence
  Description of Artificial Sequence: Synthetic oligonucleotide
  Antisense strand to SEQ ID NO: 2084930
ugaguuaggcagcucauga

SEQ ID NO: 2084932 - RNA, 19 nt, Artificial Sequence
  Description of Artificial Sequence: Synthetic oligonucleotide
  Sense strand starting at position 667 of SEQ ID NO: 1881967
auucuauagugaucaucua

SEQ ID NO: 2084933 - RNA, 19 nt, Artificial Sequence
  Description of Artificial Sequence: Synthetic oligonucleotide
  Antisense strand to SEQ ID NO: 2084932
uagaugaucacuauagaau

SEQ ID NO: 2084934 - RNA, 19 nt, Artificial Sequence
  Description of Artificial Sequence: Synthetic oligonucleotide
  Sense strand starting at position 729 of SEQ ID NO: 1881967
agguuuagggacuguaaac

SEQ ID NO: 2084935 - RNA, 19 nt, Artificial Sequence
  Description of Artificial Sequence: Synthetic oligonucleotide
  Antisense strand to SEQ ID NO: 2084934
guuuacagucccuaaaccu

SEQ ID NO: 2084936 - RNA, 19 nt, Artificial Sequence
  Description of Artificial Sequence: Synthetic oligonucleotide
  Sense strand starting at position 783 of SEQ ID NO: 1881967
aaacgucuugaacgaguau

SEQ ID NO: 2084937 - RNA, 19 nt, Artificial Sequence
  Description of Artificial Sequence: Synthetic oligonucleotide
  Antisense strand to SEQ ID NO: 2084936
auacucguucaagacguuu

SEQ ID NO: 2084938 - RNA, 19 nt, Artificial Sequence
  Description of Artificial Sequence: Synthetic oligonucleotide
  Sense strand starting at position 784 of SEQ ID NO: 1881967
aacgucuugaacgaguauu

SEQ ID NO: 2084939 - RNA, 19 nt, Artificial Sequence
  Description of Artificial Sequence: Synthetic oligonucleotide
  Antisense strand to SEQ ID NO: 2084938
aauacucguucaagacguu

SEQ ID NO: 2084940 - RNA, 19 nt, Artificial Sequence
  Description of Artificial Sequence: Synthetic oligonucleotide
  Sense strand starting at position 814 of SEQ ID NO: 1881967
caugguaaacuguaugauc

SEQ ID NO: 2084941 - RNA, 19 nt, Artificial Sequence
  Description of Artificial Sequence: Synthetic oligonucleotide
  Antisense strand to SEQ ID NO: 2084940
gaucauacaguuuaccaug

SEQ ID NO: 2084942 - RNA, 19 nt, Artificial Sequence
  Description of Artificial Sequence: Synthetic oligonucleotide
  Sense strand starting at position 816 of SEQ ID NO: 1881967
ugguaaacuguaugaucua

SEQ ID NO: 2084943 - RNA, 19 nt, Artificial Sequence
  Description of Artificial Sequence: Synthetic oligonucleotide
  Antisense strand to SEQ ID NO: 2084942
uagaucauacaguuuacca

SEQ ID NO: 2084944 - RNA, 19 nt, Artificial Sequence
  Description of Artificial Sequence: Synthetic oligonucleotide
  Sense strand starting at position 940 of SEQ ID NO: 1881967
uugaguagguccucaacaa

SEQ ID NO: 2084945 - RNA, 19 nt, Artificial Sequence
  Description of Artificial Sequence: Synthetic oligonucleotide
  Antisense strand to SEQ ID NO: 2084944
uuguugaggaccuacucaa

SEQ ID NO: 2084946 - RNA, 19 nt, Artificial Sequence
  Description of Artificial Sequence: Synthetic oligonucleotide
  Sense strand starting at position 941 of SEQ ID NO: 1881967
ugaguagguccucaacaac

SEQ ID NO: 2084947 - RNA, 19 nt, Artificial Sequence
  Description of Artificial Sequence: Synthetic oligonucleotide
  Antisense strand to SEQ ID NO: 2084946
guuguugaggaccuacuca

SEQ ID NO: 2084948 - RNA, 19 nt, Artificial Sequence
  Description of Artificial Sequence: Synthetic oligonucleotide
  Sense strand starting at position 999 of SEQ ID NO: 1881967
uuguguucgccguuguauc

SEQ ID NO: 2084949 - RNA, 19 nt, Artificial Sequence
  Description of Artificial Sequence: Synthetic oligonucleotide
  Antisense strand to SEQ ID NO: 2084948
gauacaacggcgaacacaa

SEQ ID NO: 2084950 - RNA, 19 nt, Artificial Sequence
  Description of Artificial Sequence: Synthetic oligonucleotide
  Sense strand starting at position 1065 of SEQ ID NO: 1881967
gaugcaggauucucgaaag

SEQ ID NO: 2084951 - RNA, 19 nt, Artificial Sequence
  Description of Artificial Sequence: Synthetic oligonucleotide
  Antisense strand to SEQ ID NO: 2084950
cuuucgagaauccugcauc

SEQ ID NO: 2084952 - RNA, 19 nt, Artificial Sequence
  Description of Artificial Sequence: Synthetic oligonucleotide
  Sense strand starting at position 1071 of SEQ ID NO: 1881967
ggauucucgaaaggcagau

SEQ ID NO: 2084953 - RNA, 19 nt, Artificial Sequence
  Description of Artificial Sequence: Synthetic oligonucleotide
  Antisense strand to SEQ ID NO: 2084952
aucugccuuucgagaaucc

SEQ ID NO: 2084954 - RNA, 19 nt, Artificial Sequence
  Description of Artificial Sequence: Synthetic oligonucleotide
  Sense strand starting at position 1075 of SEQ ID NO: 1881967
ucucgaaaggcagauaauu

SEQ ID NO: 2084955 - RNA, 19 nt, Artificial Sequence
  Description of Artificial Sequence: Synthetic oligonucleotide
  Antisense strand to SEQ ID NO: 2084954
aauuaucugccuuucgaga

SEQ ID NO: 2084956 - RNA, 19 nt, Artificial Sequence
  Description of Artificial Sequence: Synthetic oligonucleotide
  Sense strand starting at position 1839 of SEQ ID NO: 1881967
cgcugucguccgagaucac

SEQ ID NO: 2084957 - RNA, 19 nt, Artificial Sequence
  Description of Artificial Sequence: Synthetic oligonucleotide
  Antisense strand to SEQ ID NO: 2084956
gugaucucggacgacagcg

SEQ ID NO: 2084958 - RNA, 19 nt, Artificial Sequence
  Description of Artificial Sequence: Synthetic oligonucleotide
  Sense strand starting at position 1846 of SEQ ID NO: 1881967
guccgagaucacgauguaa

SEQ ID NO: 2084959 - RNA, 19 nt, Artificial Sequence
  Description of Artificial Sequence: Synthetic oligonucleotide
  Antisense strand to SEQ ID NO: 2084958
uuacaucgugaucucggac

SEQ ID NO: 2084960 - RNA, 19 nt, Artificial Sequence
  Description of Artificial Sequence: Synthetic oligonucleotide
  Sense strand starting at position 1848 of SEQ ID NO: 1881967
ccgagaucacgauguaauc

SEQ ID NO: 2084961 - RNA, 19 nt, Artificial Sequence
  Description of Artificial Sequence: Synthetic oligonucleotide
  Antisense strand to SEQ ID NO: 2084960
gauuacaucgugaucucgg

SEQ ID NO: 2084962 - RNA, 19 nt, Artificial Sequence
  Description of Artificial Sequence: Synthetic oligonucleotide
  Sense strand starting at position 1858 of SEQ ID NO: 1881967
gauguaauccuccauggcu

SEQ ID NO: 2084963 - RNA, 19 nt, Artificial Sequence
  Description of Artificial Sequence: Synthetic oligonucleotide
  Antisense strand to SEQ ID NO: 2084962
agccauggaggauuacauc

SEQ ID NO: 2084964 - RNA, 19 nt, Artificial Sequence
  Description of Artificial Sequence: Synthetic oligonucleotide
  Sense strand starting at position 2223 of SEQ ID NO: 1881967
cgacgaaagcgugaaguga

SEQ ID NO: 2084965 - RNA, 19 nt, Artificial Sequence
  Description of Artificial Sequence: Synthetic oligonucleotide
  Antisense strand to SEQ ID NO: 2084964
ucacuucacgcuuucgucg

SEQ ID NO: 2084966 - RNA, 19 nt, Artificial Sequence
  Description of Artificial Sequence: Synthetic oligonucleotide
  Sense strand starting at position 2329 of SEQ ID NO: 1881967
cccugagugaccgaggaua

SEQ ID NO: 2084967 - RNA, 19 nt, Artificial Sequence
  Description of Artificial Sequence: Synthetic oligonucleotide
  Antisense strand to SEQ ID NO: 2084966
uauccucggucacucaggg

SEQ ID NO: 2084968 - RNA, 19 nt, Artificial Sequence
  Description of Artificial Sequence: Synthetic oligonucleotide
  Sense strand starting at position 2410 of SEQ ID NO: 1881967
ccauguguaucuguaggau

SEQ ID NO: 2084969 - RNA, 19 nt, Artificial Sequence
  Description of Artificial Sequence: Synthetic oligonucleotide
  Antisense strand to SEQ ID NO: 2084968
auccuacagauacacaugg

SEQ ID NO: 2084970 - RNA, 19 nt, Artificial Sequence
  Description of Artificial Sequence: Synthetic oligonucleotide
  Sense strand starting at position 2413 of SEQ ID NO: 1881967
uguguaucuguaggauaaa

SEQ ID NO: 2084971 - RNA, 19 nt, Artificial Sequence
  Description of Artificial Sequence: Synthetic oligonucleotide
  Antisense strand to SEQ ID NO: 2084970
uuuauccuacagauacaca

SEQ ID NO: 2084972 - RNA, 19 nt, Artificial Sequence
  Description of Artificial Sequence: Synthetic oligonucleotide
  Sense strand starting at position 2535 of SEQ ID NO: 1881967
caauaugugucucucagga

SEQ ID NO: 2084973 - RNA, 19 nt, Artificial Sequence
  Description of Artificial Sequence: Synthetic oligonucleotide
  Antisense strand to SEQ ID NO: 2084972
uccugagagacacauauug

SEQ ID NO: 2084974 - RNA, 19 nt, Artificial Sequence
  Description of Artificial Sequence: Synthetic oligonucleotide
  Sense strand starting at position 2553 of SEQ ID NO: 1881967
aguuuaaacugagauuuag

SEQ ID NO: 2084975 - RNA, 19 nt, Artificial Sequence
  Description of Artificial Sequence: Synthetic oligonucleotide
  Antisense strand to SEQ ID NO: 2084974
cuaaaucucaguuuaaacu

SEQ ID NO: 2084976 - RNA, 19 nt, Artificial Sequence
  Description of Artificial Sequence: Synthetic oligonucleotide
  Sense strand starting at position 2707 of SEQ ID NO: 1881967
guuaaacaaguuugacgua

SEQ ID NO: 2084977 - RNA, 19 nt, Artificial Sequence
  Description of Artificial Sequence: Synthetic oligonucleotide
  Antisense strand to SEQ ID NO: 2084976
uacgucaaacuuguuuaac

SEQ ID NO: 2084978 - RNA, 19 nt, Artificial Sequence
  Description of Artificial Sequence: Synthetic oligonucleotide
  Sense strand starting at position 2712 of SEQ ID NO: 1881967
acaaguuugacguagacag

SEQ ID NO: 2084979 - RNA, 19 nt, Artificial Sequence
  Description of Artificial Sequence: Synthetic oligonucleotide
  Antisense strand to SEQ ID NO: 2084978
cugucuacgucaaacuugu

SEQ ID NO: 2084980 - RNA, 19 nt, Artificial Sequence
  Description of Artificial Sequence: Synthetic oligonucleotide
  Sense strand starting at position 2714 of SEQ ID NO: 1881967
aaguuugacguagacaguu

SEQ ID NO: 2084981 - RNA, 19 nt, Artificial Sequence
  Description of Artificial Sequence: Synthetic oligonucleotide
  Antisense strand to SEQ ID NO: 2084980
aacugucuacgucaaacuu

SEQ ID NO: 2084982 - RNA, 19 nt, Artificial Sequence
  Description of Artificial Sequence: Synthetic oligonucleotide
  Sense strand starting at position 2795 of SEQ ID NO: 1881967
ggccaugaauaauuagaug

SEQ ID NO: 2084983 - RNA, 19 nt, Artificial Sequence
  Description of Artificial Sequence: Synthetic oligonucleotide
  Antisense strand to SEQ ID NO: 2084982
caucuaauuauucauggcc

SEQ ID NO: 2084984 - RNA, 19 nt, Artificial Sequence
  Description of Artificial Sequence: Synthetic oligonucleotide
  Sense strand starting at position 2800 of SEQ ID NO: 1881967
ugaauaauuagauguugug

SEQ ID NO: 2084985 - RNA, 19 nt, Artificial Sequence
  Description of Artificial Sequence: Synthetic oligonucleotide
  Antisense strand to SEQ ID NO: 2084984
cacaacaucuaauuauuca

SEQ ID NO: 2084986 - RNA, 19 nt, Artificial Sequence
  Description of Artificial Sequence: Synthetic oligonucleotide
  Sense strand starting at position 2815 of SEQ ID NO: 1881967
ugugaauaagcagaaguua

SEQ ID NO: 2084987 - RNA, 19 nt, Artificial Sequence
  Description of Artificial Sequence: Synthetic oligonucleotide
  Antisense strand to SEQ ID NO: 2084986
uaacuucugcuuauucaca

SEQ ID NO: 2084988 - RNA, 19 nt, Artificial Sequence
  Description of Artificial Sequence: Synthetic oligonucleotide
  Sense strand starting at position 2860 of SEQ ID NO: 1881967
agaggaaucgguggguagu

SEQ ID NO: 2084989 - RNA, 19 nt, Artificial Sequence
  Description of Artificial Sequence: Synthetic oligonucleotide
  Antisense strand to SEQ ID NO: 2084988
acuacccaccgauuccucu

SEQ ID NO: 2084990 - RNA, 19 nt, Artificial Sequence
  Description of Artificial Sequence: Synthetic oligonucleotide
  Sense strand starting at position 2861 of SEQ ID NO: 1881967
gaggaaucgguggguaguu

SEQ ID NO: 2084991 - RNA, 19 nt, Artificial Sequence
  Description of Artificial Sequence: Synthetic oligonucleotide
  Antisense strand to SEQ ID NO: 2084990
aacuacccaccgauuccuc

SEQ ID NO: 2084992 - RNA, 19 nt, Artificial Sequence
  Description of Artificial Sequence: Synthetic oligonucleotide
  Sense strand starting at position 3035 of SEQ ID NO: 1881967
ggaauuuguuccuaaagga

SEQ ID NO: 2084993 - RNA, 19 nt, Artificial Sequence
  Description of Artificial Sequence: Synthetic oligonucleotide
  Antisense strand to SEQ ID NO: 2084992
uccuuuaggaacaaauucc

SEQ ID NO: 2084994 - RNA, 19 nt, Artificial Sequence
  Description of Artificial Sequence: Synthetic oligonucleotide
  Sense strand starting at position 3043 of SEQ ID NO: 1881967
uuccuaaaggaaugguuau

SEQ ID NO: 2084995 - RNA, 19 nt, Artificial Sequence
  Description of Artificial Sequence: Synthetic oligonucleotide
  Antisense strand to SEQ ID NO: 2084994
auaaccauuccuuuaggaa

SEQ ID NO: 2084996 - RNA, 19 nt, Artificial Sequence
  Description of Artificial Sequence: Synthetic oligonucleotide
  Sense strand starting at position 3101 of SEQ ID NO: 1881967
cacuuuggugagcaucaga

SEQ ID NO: 2084997 - RNA, 19 nt, Artificial Sequence
  Description of Artificial Sequence: Synthetic oligonucleotide
  Antisense strand to SEQ ID NO: 2084996
ucugaugcucaccaaagug

SEQ ID NO: 2084998 - RNA, 19 nt, Artificial Sequence
  Description of Artificial Sequence: Synthetic oligonucleotide
  Sense strand starting at position 3124 of SEQ ID NO: 1881967
ccuagaguguuuguuaaga

SEQ ID NO: 2084999 - RNA, 19 nt, Artificial Sequence
  Description of Artificial Sequence: Synthetic oligonucleotide
  Antisense strand to SEQ ID NO: 2084998
ucuuaacaaacacucuagg

SEQ ID NO: 2085000 - RNA, 19 nt, Artificial Sequence
  Description of Artificial Sequence: Synthetic oligonucleotide
  Sense strand starting at position 3706 of SEQ ID NO: 1881967
uucgccuuccgucuugaua

SEQ ID NO: 2085001 - RNA, 19 nt, Artificial Sequence
  Description of Artificial Sequence: Synthetic oligonucleotide
  Antisense strand to SEQ ID NO: 2085000
uaucaagacggaaggcgaa

SEQ ID NO: 2085002 - RNA, 19 nt, Artificial Sequence
  Description of Artificial Sequence: Synthetic oligonucleotide
  Sense strand starting at position 3722 of SEQ ID NO: 1881967
auaguaagguuccugagac

SEQ ID NO: 2085003 - RNA, 19 nt, Artificial Sequence
  Description of Artificial Sequence: Synthetic oligonucleotide
  Antisense strand to SEQ ID NO: 2085002
gucucaggaaccuuacuau

SEQ ID NO: 2085004 - RNA, 19 nt, Artificial Sequence
  Description of Artificial Sequence: Synthetic oligonucleotide
  Sense strand starting at position 105 of SEQ ID NO: 1881968
gcaucugucagcgugugua

SEQ ID NO: 2085005 - RNA, 19 nt, Artificial Sequence
  Description of Artificial Sequence: Synthetic oligonucleotide
  Antisense strand to SEQ ID NO: 2085004
uacacacgcugacagaugc

SEQ ID NO: 2085006 - RNA, 19 nt, Artificial Sequence
  Description of Artificial Sequence: Synthetic oligonucleotide
  Sense strand starting at position 281 of SEQ ID NO: 1881968
gagaaacguaugggaagua

SEQ ID NO: 2085007 - RNA, 19 nt, Artificial Sequence
  Description of Artificial Sequence: Synthetic oligonucleotide
  Antisense strand to SEQ ID NO: 2085006
uacuucccauacguuucuc

SEQ ID NO: 2085008 - RNA, 19 nt, Artificial Sequence
  Description of Artificial Sequence: Synthetic oligonucleotide
  Sense strand starting at position 341 of SEQ ID NO: 1881968
guggcaaugugaucagaga

SEQ ID NO: 2085009 - RNA, 19 nt, Artificial Sequence
  Description of Artificial Sequence: Synthetic oligonucleotide
  Antisense strand to SEQ ID NO: 2085008
ucucugaucacauugccac

SEQ ID NO: 2085010 - RNA, 19 nt, Artificial Sequence
  Description of Artificial Sequence: Synthetic oligonucleotide
  Sense strand starting at position 473 of SEQ ID NO: 1881968
uguccuaguagucauggga

SEQ ID NO: 2085011 - RNA, 19 nt, Artificial Sequence
  Description of Artificial Sequence: Synthetic oligonucleotide
  Antisense strand to SEQ ID NO: 2085010
ucccaugacuacuaggaca

SEQ ID NO: 2085012 - RNA, 19 nt, Artificial Sequence
  Description of Artificial Sequence: Synthetic oligonucleotide
  Sense strand starting at position 476 of SEQ ID NO: 1881968
ccuaguagucaugggagaa

SEQ ID NO: 2085013 - RNA, 19 nt, Artificial Sequence
  Description of Artificial Sequence: Synthetic oligonucleotide
  Antisense strand to SEQ ID NO: 2085012
uucucccaugacuacuagg

SEQ ID NO: 2085014 - RNA, 19 nt, Artificial Sequence
  Description of Artificial Sequence: Synthetic oligonucleotide
  Sense strand starting at position 477 of SEQ ID NO: 1881968
cuaguagucaugggagaac

SEQ ID NO: 2085015 - RNA, 19 nt, Artificial Sequence
  Description of Artificial Sequence: Synthetic oligonucleotide
  Antisense strand to SEQ ID NO: 2085014
guucucccaugacuacuag

SEQ ID NO: 2085016 - RNA, 19 nt, Artificial Sequence
  Description of Artificial Sequence: Synthetic oligonucleotide
  Sense strand starting at position 510 of SEQ ID NO: 1881968
auguaucagaaacgugauu

SEQ ID NO: 2085017 - RNA, 19 nt, Artificial Sequence
  Description of Artificial Sequence: Synthetic oligonucleotide
  Antisense strand to SEQ ID NO: 2085016
aaucacguuucugauacau

SEQ ID NO: 2085018 - RNA, 19 nt, Artificial Sequence
  Description of Artificial Sequence: Synthetic oligonucleotide
  Sense strand starting at position 515 of SEQ ID NO: 1881968
ucagaaacgugauucuucu

SEQ ID NO: 2085019 - RNA, 19 nt, Artificial Sequence
  Description of Artificial Sequence: Synthetic oligonucleotide
  Antisense strand to SEQ ID NO: 2085018
agaagaaucacguuucuga

SEQ ID NO: 2085020 - RNA, 19 nt, Artificial Sequence
  Description of Artificial Sequence: Synthetic oligonucleotide
  Sense strand starting at position 773 of SEQ ID NO: 1881968
ggagcagugcuucagagac

SEQ ID NO: 2085021 - RNA, 19 nt, Artificial Sequence
  Description of Artificial Sequence: Synthetic oligonucleotide
  Antisense strand to SEQ ID NO: 2085020
gucucugaagcacugcucc

SEQ ID NO: 2085022 - RNA, 19 nt, Artificial Sequence
  Description of Artificial Sequence: Synthetic oligonucleotide
  Sense strand starting at position 834 of SEQ ID NO: 1881968
guggauacuccugaucucu

SEQ ID NO: 2085023 - RNA, 19 nt, Artificial Sequence
  Description of Artificial Sequence: Synthetic oligonucleotide
  Antisense strand to SEQ ID NO: 2085022
agagaucaggaguauccac

SEQ ID NO: 2085024 - RNA, 19 nt, Artificial Sequence
  Description of Artificial Sequence: Synthetic oligonucleotide
  Sense strand starting at position 947 of SEQ ID NO: 1881968
uggugauacugaccucaag

SEQ ID NO: 2085025 - RNA, 19 nt, Artificial Sequence
  Description of Artificial Sequence: Synthetic oligonucleotide
  Antisense strand to SEQ ID NO: 2085024
cuugaggucaguaucacca

SEQ ID NO: 2085026 - RNA, 19 nt, Artificial Sequence
  Description of Artificial Sequence: Synthetic oligonucleotide
  Sense strand starting at position 1058 of SEQ ID NO: 1881968
accacuuugcucuagucau

SEQ ID NO: 2085027 - RNA, 19 nt, Artificial Sequence
  Description of Artificial Sequence: Synthetic oligonucleotide
  Antisense strand to SEQ ID NO: 2085026
augacuagagcaaaguggu

SEQ ID NO: 2085028 - RNA, 19 nt, Artificial Sequence
  Description of Artificial Sequence: Synthetic oligonucleotide
  Sense strand starting at position 1065 of SEQ ID NO: 1881968
ugcucuagucaugaaggaa

SEQ ID NO: 2085029 - RNA, 19 nt, Artificial Sequence
  Description of Artificial Sequence: Synthetic oligonucleotide
  Antisense strand to SEQ ID NO: 2085028
uuccuucaugacuagagca

SEQ ID NO: 2085030 - RNA, 19 nt, Artificial Sequence
  Description of Artificial Sequence: Synthetic oligonucleotide
  Sense strand starting at position 1081 of SEQ ID NO: 1881968
gaaacauugggugagcagu

SEQ ID NO: 2085031 - RNA, 19 nt, Artificial Sequence
  Description of Artificial Sequence: Synthetic oligonucleotide
  Antisense strand to SEQ ID NO: 2085030
acugcucacccaauguuuc

SEQ ID NO: 2085032 - RNA, 19 nt, Artificial Sequence
  Description of Artificial Sequence: Synthetic oligonucleotide
  Sense strand starting at position 1181 of SEQ ID NO: 1881968
gcaagaucucaugggaggu

SEQ ID NO: 2085033 - RNA, 19 nt, Artificial Sequence
  Description of Artificial Sequence: Synthetic oligonucleotide
  Antisense strand to SEQ ID NO: 2085032
accucccaugagaucuugc

SEQ ID NO: 2085034 - RNA, 19 nt, Artificial Sequence
  Description of Artificial Sequence: Synthetic oligonucleotide
  Sense strand starting at position 1261 of SEQ ID NO: 1881968
gaaagagguuagucuugug

SEQ ID NO: 2085035 - RNA, 19 nt, Artificial Sequence
  Description of Artificial Sequence: Synthetic oligonucleotide
  Antisense strand to SEQ ID NO: 2085034
cacaagacuaaccucuuuc

SEQ ID NO: 2085036 - RNA, 19 nt, Artificial Sequence
  Description of Artificial Sequence: Synthetic oligonucleotide
  Sense strand starting at position 1292 of SEQ ID NO: 1881968
cuugcauaccuguagacuu

SEQ ID NO: 2085037 - RNA, 19 nt, Artificial Sequence
  Description of Artificial Sequence: Synthetic oligonucleotide
  Antisense strand to SEQ ID NO: 2085036
aagucuacagguaugcaag

SEQ ID NO: 2085038 - RNA, 19 nt, Artificial Sequence
  Description of Artificial Sequence: Synthetic oligonucleotide
  Sense strand starting at position 1397 of SEQ ID NO: 1881968
cuauguauuguguaaugaa

SEQ ID NO: 2085039 - RNA, 19 nt, Artificial Sequence
  Description of Artificial Sequence: Synthetic oligonucleotide
  Antisense strand to SEQ ID NO: 2085038
uucauuacacaauacauag

SEQ ID NO: 2085040 - RNA, 19 nt, Artificial Sequence
  Description of Artificial Sequence: Synthetic oligonucleotide
  Sense strand starting at position 2527 of SEQ ID NO: 1881968
gagcaaagccuggaagcau

SEQ ID NO: 2085041 - RNA, 19 nt, Artificial Sequence
  Description of Artificial Sequence: Synthetic oligonucleotide
  Antisense strand to SEQ ID NO: 2085040
augcuuccaggcuuugcuc

SEQ ID NO: 2085042 - RNA, 19 nt, Artificial Sequence
  Description of Artificial Sequence: Synthetic oligonucleotide
  Sense strand starting at position 2572 of SEQ ID NO: 1881968
ugaguuuacucugucagga

SEQ ID NO: 2085043 - RNA, 19 nt, Artificial Sequence
  Description of Artificial Sequence: Synthetic oligonucleotide
  Antisense strand to SEQ ID NO: 2085042
uccugacagaguaaacuca

SEQ ID NO: 2085044 - RNA, 19 nt, Artificial Sequence
  Description of Artificial Sequence: Synthetic oligonucleotide
  Sense strand starting at position 2806 of SEQ ID NO: 1881968
uacagagugauuugugugu

SEQ ID NO: 2085045 - RNA, 19 nt, Artificial Sequence
  Description of Artificial Sequence: Synthetic oligonucleotide
  Antisense strand to SEQ ID NO: 2085044
acacacaaaucacucugua

SEQ ID NO: 2085046 - RNA, 19 nt, Artificial Sequence
  Description of Artificial Sequence: Synthetic oligonucleotide
  Sense strand starting at position 2835 of SEQ ID NO: 1881968
gugagugugugcaucaagu

SEQ ID NO: 2085047 - RNA, 19 nt, Artificial Sequence
  Description of Artificial Sequence: Synthetic oligonucleotide
  Antisense strand to SEQ ID NO: 2085046
acuugaugcacacacucac

SEQ ID NO: 2085048 - RNA, 19 nt, Artificial Sequence
  Description of Artificial Sequence: Synthetic oligonucleotide
  Sense strand starting at position 2886 of SEQ ID NO: 1881968
ugucaacucaugggagagu

SEQ ID NO: 2085049 - RNA, 19 nt, Artificial Sequence
  Description of Artificial Sequence: Synthetic oligonucleotide
  Antisense strand to SEQ ID NO: 2085048
acucucccaugaguugaca

SEQ ID NO: 2085050 - RNA, 19 nt, Artificial Sequence
  Description of Artificial Sequence: Synthetic oligonucleotide
  Sense strand starting at position 2954 of SEQ ID NO: 1881968
ugggauaugucaguuccag

SEQ ID NO: 2085051 - RNA, 19 nt, Artificial Sequence
  Description of Artificial Sequence: Synthetic oligonucleotide
  Antisense strand to SEQ ID NO: 2085050
cuggaacugacauauccca

SEQ ID NO: 2085052 - RNA, 19 nt, Artificial Sequence
  Description of Artificial Sequence: Synthetic oligonucleotide
  Sense strand starting at position 2986 of SEQ ID NO: 1881968
guuggucucccugaagcaa

SEQ ID NO: 2085053 - RNA, 19 nt, Artificial Sequence
  Description of Artificial Sequence: Synthetic oligonucleotide
  Antisense strand to SEQ ID NO: 2085052
uugcuucagggagaccaac

SEQ ID NO: 2085054 - RNA, 19 nt, Artificial Sequence
  Description of Artificial Sequence: Synthetic oligonucleotide
  Sense strand starting at position 3060 of SEQ ID NO: 1881968
gguguuuaucaggaugagu

SEQ ID NO: 2085055 - RNA, 19 nt, Artificial Sequence
  Description of Artificial Sequence: Synthetic oligonucleotide
  Antisense strand to SEQ ID NO: 2085054
acucauccugauaaacacc

SEQ ID NO: 2085056 - RNA, 19 nt, Artificial Sequence
  Description of Artificial Sequence: Synthetic oligonucleotide
  Sense strand starting at position 3288 of SEQ ID NO: 1881968
augacuugggcuuguagaa

SEQ ID NO: 2085057 - RNA, 19 nt, Artificial Sequence
  Description of Artificial Sequence: Synthetic oligonucleotide
  Antisense strand to SEQ ID NO: 2085056
uucuacaagcccaagucau

SEQ ID NO: 2085058 - RNA, 19 nt, Artificial Sequence
  Description of Artificial Sequence: Synthetic oligonucleotide
  Sense strand starting at position 3307 of SEQ ID NO: 1881968
ggcacuugaggucauuaaa

SEQ ID NO: 2085059 - RNA, 19 nt, Artificial Sequence
  Description of Artificial Sequence: Synthetic oligonucleotide
  Antisense strand to SEQ ID NO: 2085058
uuuaaugaccucaagugcc

SEQ ID NO: 2085060 - RNA, 19 nt, Artificial Sequence
  Description of Artificial Sequence: Synthetic oligonucleotide
  Sense strand starting at position 3359 of SEQ ID NO: 1881968
gcuugaagucuugaucuag

SEQ ID NO: 2085061 - RNA, 19 nt, Artificial Sequence
  Description of Artificial Sequence: Synthetic oligonucleotide
  Antisense strand to SEQ ID NO: 2085060
cuagaucaagacuucaagc

SEQ ID NO: 2085062 - RNA, 19 nt, Artificial Sequence
  Description of Artificial Sequence: Synthetic oligonucleotide
  Sense strand starting at position 3438 of SEQ ID NO: 1881968
cgacuuuagcuaugaacaa

SEQ ID NO: 2085063 - RNA, 19 nt, Artificial Sequence
  Description of Artificial Sequence: Synthetic oligonucleotide
  Antisense strand to SEQ ID NO: 2085062
uuguucauagcuaaagucg

SEQ ID NO: 2085064 - RNA, 19 nt, Artificial Sequence
  Description of Artificial Sequence: Synthetic oligonucleotide
  Sense strand starting at position 3458 of SEQ ID NO: 1881968
uucgcuucuccagauuucu

SEQ ID NO: 2085065 - RNA, 19 nt, Artificial Sequence
  Description of Artificial Sequence: Synthetic oligonucleotide
  Antisense strand to SEQ ID NO: 2085064
agaaaucuggagaagcgaa

SEQ ID NO: 2085066 - RNA, 19 nt, Artificial Sequence
  Description of Artificial Sequence: Synthetic oligonucleotide
  Sense strand starting at position 3467 of SEQ ID NO: 1881968
ccagauuucucagauguaa

SEQ ID NO: 2085067 - RNA, 19 nt, Artificial Sequence
  Description of Artificial Sequence: Synthetic oligonucleotide
  Antisense strand to SEQ ID NO: 2085066
uuacaucugagaaaucugg

SEQ ID NO: 2085068 - RNA, 19 nt, Artificial Sequence
  Description of Artificial Sequence: Synthetic oligonucleotide
  Sense strand starting at position 3585 of SEQ ID NO: 1881968
ggguucuagaucugacuuc

SEQ ID NO: 2085069 - RNA, 19 nt, Artificial Sequence
  Description of Artificial Sequence: Synthetic oligonucleotide
  Antisense strand to SEQ ID NO: 2085068
gaagucagaucuagaaccc

SEQ ID NO: 2085070 - RNA, 19 nt, Artificial Sequence
  Description of Artificial Sequence: Synthetic oligonucleotide
  Sense strand starting at position 3655 of SEQ ID NO: 1881968
ggccaaagugucuggauuu

SEQ ID NO: 2085071 - RNA, 19 nt, Artificial Sequence
  Description of Artificial Sequence: Synthetic oligonucleotide
  Antisense strand to SEQ ID NO: 2085070
aaauccagacacuuuggcc

SEQ ID NO: 2085072 - RNA, 19 nt, Artificial Sequence
  Description of Artificial Sequence: Synthetic oligonucleotide
  Sense strand starting at position 3772 of SEQ ID NO: 1881968
agagcugugguggagauua

SEQ ID NO: 2085073 - RNA, 19 nt, Artificial Sequence
  Description of Artificial Sequence: Synthetic oligonucleotide
  Antisense strand to SEQ ID NO: 2085072
uaaucuccaccacagcucu

SEQ ID NO: 2085074 - RNA, 19 nt, Artificial Sequence
  Description of Artificial Sequence: Synthetic oligonucleotide
  Sense strand starting at position 3780 of SEQ ID NO: 1881968
gguggagauuaagucuaca

SEQ ID NO: 2085075 - RNA, 19 nt, Artificial Sequence
  Description of Artificial Sequence: Synthetic oligonucleotide
  Antisense strand to SEQ ID NO: 2085074
uguagacuuaaucuccacc

SEQ ID NO: 2085076 - RNA, 19 nt, Artificial Sequence
  Description of Artificial Sequence: Synthetic oligonucleotide
  Sense strand starting at position 3794 of SEQ ID NO: 1881968
cuacaugugaaauggugaa

SEQ ID NO: 2085077 - RNA, 19 nt, Artificial Sequence
  Description of Artificial Sequence: Synthetic oligonucleotide
  Antisense strand to SEQ ID NO: 2085076
uucaccauuucacauguag

SEQ ID NO: 2085078 - RNA, 19 nt, Artificial Sequence
  Description of Artificial Sequence: Synthetic oligonucleotide
  Sense strand starting at position 3825 of SEQ ID NO: 1881968
acaguuaguugagcacaau

SEQ ID NO: 2085079 - RNA, 19 nt, Artificial Sequence
  Description of Artificial Sequence: Synthetic oligonucleotide
  Antisense strand to SEQ ID NO: 2085078
auugugcucaacuaacugu

SEQ ID NO: 2085080 - RNA, 19 nt, Artificial Sequence
  Description of Artificial Sequence: Synthetic oligonucleotide
  Sense strand starting at position 3826 of SEQ ID NO: 1881968
caguuaguugagcacaaua

SEQ ID NO: 2085081 - RNA, 19 nt, Artificial Sequence
  Description of Artificial Sequence: Synthetic oligonucleotide
  Antisense strand to SEQ ID NO: 2085080
uauugugcucaacuaacug

SEQ ID NO: 2085082 - RNA, 19 nt, Artificial Sequence
  Description of Artificial Sequence: Synthetic oligonucleotide
  Sense strand starting at position 3828 of SEQ ID NO: 1881968
guuaguugagcacaauaaa

SEQ ID NO: 2085083 - RNA, 19 nt, Artificial Sequence
  Description of Artificial Sequence: Synthetic oligonucleotide
  Antisense strand to SEQ ID NO: 2085082
uuuauugugcucaacuaac

SEQ ID NO: 2085084 - RNA, 19 nt, Artificial Sequence
  Description of Artificial Sequence: Synthetic oligonucleotide
  Sense strand starting at position 403 of SEQ ID NO: 1881969
accuuuauugcugaguuau

SEQ ID NO: 2085085 - RNA, 19 nt, Artificial Sequence
  Description of Artificial Sequence: Synthetic oligonucleotide
  Antisense strand to SEQ ID NO: 2085084
auaacucagcaauaaaggu

SEQ ID NO: 2085086 - RNA, 19 nt, Artificial Sequence
  Description of Artificial Sequence: Synthetic oligonucleotide
  Sense strand starting at position 405 of SEQ ID NO: 1881969
cuuuauugcugaguuauuu

SEQ ID NO: 2085087 - RNA, 19 nt, Artificial Sequence
  Description of Artificial Sequence: Synthetic oligonucleotide
  Antisense strand to SEQ ID NO: 2085086
aaauaacucagcaauaaag

SEQ ID NO: 2085088 - RNA, 19 nt, Artificial Sequence
  Description of Artificial Sequence: Synthetic oligonucleotide
  Sense strand starting at position 409 of SEQ ID NO: 1881969
auugcugaguuauuuacuu

SEQ ID NO: 2085089 - RNA, 19 nt, Artificial Sequence
  Description of Artificial Sequence: Synthetic oligonucleotide
  Antisense strand to SEQ ID NO: 2085088
aaguaaauaacucagcaau

SEQ ID NO: 2085090 - RNA, 19 nt, Artificial Sequence
  Description of Artificial Sequence: Synthetic oligonucleotide
  Sense strand starting at position 435 of SEQ ID NO: 1881969
ucuugauugaguggacuuu

SEQ ID NO: 2085091 - RNA, 19 nt, Artificial Sequence
  Description of Artificial Sequence: Synthetic oligonucleotide
  Antisense strand to SEQ ID NO: 2085090
aaaguccacucaaucaaga

SEQ ID NO: 2085092 - RNA, 19 nt, Artificial Sequence
  Description of Artificial Sequence: Synthetic oligonucleotide
  Sense strand starting at position 472 of SEQ ID NO: 1881969
uaagaaggguucuugggua

SEQ ID NO: 2085093 - RNA, 19 nt, Artificial Sequence
  Description of Artificial Sequence: Synthetic oligonucleotide
  Antisense strand to SEQ ID NO: 2085092
uacccaagaacccuucuua

SEQ ID NO: 2085094 - RNA, 19 nt, Artificial Sequence
  Description of Artificial Sequence: Synthetic oligonucleotide
  Sense strand starting at position 549 of SEQ ID NO: 1881969
auauuaugggaucaugcuu

SEQ ID NO: 2085095 - RNA, 19 nt, Artificial Sequence
  Description of Artificial Sequence: Synthetic oligonucleotide
  Antisense strand to SEQ ID NO: 2085094
aagcaugaucccauaauau

SEQ ID NO: 2085096 - RNA, 19 nt, Artificial Sequence
  Description of Artificial Sequence: Synthetic oligonucleotide
  Sense strand starting at position 693 of SEQ ID NO: 1881969
gcaacuuuaccaggauaca

SEQ ID NO: 2085097 - RNA, 19 nt, Artificial Sequence
  Description of Artificial Sequence: Synthetic oligonucleotide
  Antisense strand to SEQ ID NO: 2085096
uguauccugguaaaguugc

SEQ ID NO: 2085098 - RNA, 19 nt, Artificial Sequence
  Description of Artificial Sequence: Synthetic oligonucleotide
  Sense strand starting at position 703 of SEQ ID NO: 1881969
caggauacacauugguauu

SEQ ID NO: 2085099 - RNA, 19 nt, Artificial Sequence
  Description of Artificial Sequence: Synthetic oligonucleotide
  Antisense strand to SEQ ID NO: 2085098
aauaccaauguguauccug

SEQ ID NO: 2085100 - RNA, 19 nt, Artificial Sequence
  Description of Artificial Sequence: Synthetic oligonucleotide
  Sense strand starting at position 853 of SEQ ID NO: 1881969
guggcuugucagaggcaag

SEQ ID NO: 2085101 - RNA, 19 nt, Artificial Sequence
  Description of Artificial Sequence: Synthetic oligonucleotide
  Antisense strand to SEQ ID NO: 2085100
cuugccucugacaagccac

SEQ ID NO: 2085102 - RNA, 19 nt, Artificial Sequence
  Description of Artificial Sequence: Synthetic oligonucleotide
  Sense strand starting at position 860 of SEQ ID NO: 1881969
gucagaggcaagugaaauu

SEQ ID NO: 2085103 - RNA, 19 nt, Artificial Sequence
  Description of Artificial Sequence: Synthetic oligonucleotide
  Antisense strand to SEQ ID NO: 2085102
aauuucacuugccucugac

SEQ ID NO: 2085104 - RNA, 19 nt, Artificial Sequence
  Description of Artificial Sequence: Synthetic oligonucleotide
  Sense strand starting at position 870 of SEQ ID NO: 1881969
agugaaauuucuucgugcu

SEQ ID NO: 2085105 - RNA, 19 nt, Artificial Sequence
  Description of Artificial Sequence: Synthetic oligonucleotide
  Antisense strand to SEQ ID NO: 2085104
agcacgaagaaauuucacu

SEQ ID NO: 2085106 - RNA, 19 nt, Artificial Sequence
  Description of Artificial Sequence: Synthetic oligonucleotide
  Sense strand starting at position 871 of SEQ ID NO: 1881969
gugaaauuucuucgugcuc

SEQ ID NO: 2085107 - RNA, 19 nt, Artificial Sequence
  Description of Artificial Sequence: Synthetic oligonucleotide
  Antisense strand to SEQ ID NO: 2085106
gagcacgaagaaauuucac

SEQ ID NO: 2085108 - RNA, 19 nt, Artificial Sequence
  Description of Artificial Sequence: Synthetic oligonucleotide
  Sense strand starting at position 872 of SEQ ID NO: 1881969
ugaaauuucuucgugcucu

SEQ ID NO: 2085109 - RNA, 19 nt, Artificial Sequence
  Description of Artificial Sequence: Synthetic oligonucleotide
  Antisense strand to SEQ ID NO: 2085108
agagcacgaagaaauuuca

SEQ ID NO: 2085110 - RNA, 19 nt, Artificial Sequence
  Description of Artificial Sequence: Synthetic oligonucleotide
  Sense strand starting at position 1009 of SEQ ID NO: 1881969
uuaguauuacagggaauua

SEQ ID NO: 2085111 - RNA, 19 nt, Artificial Sequence
  Description of Artificial Sequence: Synthetic oligonucleotide
  Antisense strand to SEQ ID NO: 2085110
uaauucccuguaauacuaa

SEQ ID NO: 2085112 - RNA, 19 nt, Artificial Sequence
  Description of Artificial Sequence: Synthetic oligonucleotide
  Sense strand starting at position 1071 of SEQ ID NO: 1881969
aggaaagggacguguaacu

SEQ ID NO: 2085113 - RNA, 19 nt, Artificial Sequence
  Description of Artificial Sequence: Synthetic oligonucleotide
  Antisense strand to SEQ ID NO: 2085112
aguuacacgucccuuuccu

SEQ ID NO: 2085114 - RNA, 19 nt, Artificial Sequence
  Description of Artificial Sequence: Synthetic oligonucleotide
  Sense strand starting at position 1134 of SEQ ID NO: 1881969
guuggcaagaauugggaaa

SEQ ID NO: 2085115 - RNA, 19 nt, Artificial Sequence
  Description of Artificial Sequence: Synthetic oligonucleotide
  Antisense strand to SEQ ID NO: 2085114
uuucccaauucuugccaac

SEQ ID NO: 2085116 - RNA, 19 nt, Artificial Sequence
  Description of Artificial Sequence: Synthetic oligonucleotide
  Sense strand starting at position 1228 of SEQ ID NO: 1881969
cggauauucugucuuuaag

SEQ ID NO: 2085117 - RNA, 19 nt, Artificial Sequence
  Description of Artificial Sequence: Synthetic oligonucleotide
  Antisense strand to SEQ ID NO: 2085116
cuuaaagacagaauauccg

SEQ ID NO: 2085118 - RNA, 19 nt, Artificial Sequence
  Description of Artificial Sequence: Synthetic oligonucleotide
  Sense strand starting at position 1300 of SEQ ID NO: 1881969
ggaauuacucagggcaaau

SEQ ID NO: 2085119 - RNA, 19 nt, Artificial Sequence
  Description of Artificial Sequence: Synthetic oligonucleotide
  Antisense strand to SEQ ID NO: 2085118
auuugcccugaguaauucc

SEQ ID NO: 2085120 - RNA, 19 nt, Artificial Sequence
  Description of Artificial Sequence: Synthetic oligonucleotide
  Sense strand starting at position 1486 of SEQ ID NO: 1881969
gccuuucuggaaggaacua

SEQ ID NO: 2085121 - RNA, 19 nt, Artificial Sequence
  Description of Artificial Sequence: Synthetic oligonucleotide
  Antisense strand to SEQ ID NO: 2085120
uaguuccuuccagaaaggc

SEQ ID NO: 2085122 - RNA, 19 nt, Artificial Sequence
  Description of Artificial Sequence: Synthetic oligonucleotide
  Sense strand starting at position 2344 of SEQ ID NO: 1881969
gguccucuccgagaacucu

SEQ ID NO: 2085123 - RNA, 19 nt, Artificial Sequence
  Description of Artificial Sequence: Synthetic oligonucleotide
  Antisense strand to SEQ ID NO: 2085122
agaguucucggagaggacc

SEQ ID NO: 2085124 - RNA, 19 nt, Artificial Sequence
  Description of Artificial Sequence: Synthetic oligonucleotide
  Sense strand starting at position 2485 of SEQ ID NO: 1881969
cauggagaauucuugugaa

SEQ ID NO: 2085125 - RNA, 19 nt, Artificial Sequence
  Description of Artificial Sequence: Synthetic oligonucleotide
  Antisense strand to SEQ ID NO: 2085124
uucacaagaauucuccaug

SEQ ID NO: 2085126 - RNA, 19 nt, Artificial Sequence
  Description of Artificial Sequence: Synthetic oligonucleotide
  Sense strand starting at position 2569 of SEQ ID NO: 1881969
agaguuguuugcacggagu

SEQ ID NO: 2085127 - RNA, 19 nt, Artificial Sequence
  Description of Artificial Sequence: Synthetic oligonucleotide
  Antisense strand to SEQ ID NO: 2085126
acuccgugcaaacaacucu

SEQ ID NO: 2085128 - RNA, 19 nt, Artificial Sequence
  Description of Artificial Sequence: Synthetic oligonucleotide
  Sense strand starting at position 2663 of SEQ ID NO: 1881969
gucugucguguguuucaaa

SEQ ID NO: 2085129 - RNA, 19 nt, Artificial Sequence
  Description of Artificial Sequence: Synthetic oligonucleotide
  Antisense strand to SEQ ID NO: 2085128
uuugaaacacacgacagac

SEQ ID NO: 2085130 - RNA, 19 nt, Artificial Sequence
  Description of Artificial Sequence: Synthetic oligonucleotide
  Sense strand starting at position 2746 of SEQ ID NO: 1881969
cgauguuauacagaccgga

SEQ ID NO: 2085131 - RNA, 19 nt, Artificial Sequence
  Description of Artificial Sequence: Synthetic oligonucleotide
  Antisense strand to SEQ ID NO: 2085130
uccggucuguauaacaucg

SEQ ID NO: 2085132 - RNA, 19 nt, Artificial Sequence
  Description of Artificial Sequence: Synthetic oligonucleotide
  Sense strand starting at position 2854 of SEQ ID NO: 1881969
auuuguucuuugcuuacau

SEQ ID NO: 2085133 - RNA, 19 nt, Artificial Sequence
  Description of Artificial Sequence: Synthetic oligonucleotide
  Antisense strand to SEQ ID NO: 2085132
auguaagcaaagaacaaau

SEQ ID NO: 2085134 - RNA, 19 nt, Artificial Sequence
  Description of Artificial Sequence: Synthetic oligonucleotide
  Sense strand starting at position 2900 of SEQ ID NO: 1881969
ucaauuaaggcaggcuuaa

SEQ ID NO: 2085135 - RNA, 19 nt, Artificial Sequence
  Description of Artificial Sequence: Synthetic oligonucleotide
  Antisense strand to SEQ ID NO: 2085134
uuaagccugccuuaauuga

SEQ ID NO: 2085136 - RNA, 19 nt, Artificial Sequence
  Description of Artificial Sequence: Synthetic oligonucleotide
  Sense strand starting at position 2990 of SEQ ID NO: 1881969
uccagaaauuagucugaau

SEQ ID NO: 2085137 - RNA, 19 nt, Artificial Sequence
  Description of Artificial Sequence: Synthetic oligonucleotide
  Antisense strand to SEQ ID NO: 2085136
auucagacuaauuucugga

SEQ ID NO: 2085138 - RNA, 19 nt, Artificial Sequence
  Description of Artificial Sequence: Synthetic oligonucleotide
  Sense strand starting at position 2992 of SEQ ID NO: 1881969
cagaaauuagucugaauug

SEQ ID NO: 2085139 - RNA, 19 nt, Artificial Sequence
  Description of Artificial Sequence: Synthetic oligonucleotide
  Antisense strand to SEQ ID NO: 2085138
caauucagacuaauuucug

SEQ ID NO: 2085140 - RNA, 19 nt, Artificial Sequence
  Description of Artificial Sequence: Synthetic oligonucleotide
  Sense strand starting at position 3093 of SEQ ID NO: 1881969
uuugucuuugauuaaagca

SEQ ID NO: 2085141 - RNA, 19 nt, Artificial Sequence
  Description of Artificial Sequence: Synthetic oligonucleotide
  Antisense strand to SEQ ID NO: 2085140
ugcuuuaaucaaagacaaa

SEQ ID NO: 2085142 - RNA, 19 nt, Artificial Sequence
  Description of Artificial Sequence: Synthetic oligonucleotide
  Sense strand starting at position 3156 of SEQ ID NO: 1881969
aaacgaguaugaguuguua

SEQ ID NO: 2085143 - RNA, 19 nt, Artificial Sequence
  Description of Artificial Sequence: Synthetic oligonucleotide
  Antisense strand to SEQ ID NO: 2085142
uaacaacucauacucguuu

SEQ ID NO: 2085144 - RNA, 19 nt, Artificial Sequence
  Description of Artificial Sequence: Synthetic oligonucleotide
  Sense strand starting at position 3160 of SEQ ID NO: 1881969
gaguaugaguuguuauuaa

SEQ ID NO: 2085145 - RNA, 19 nt, Artificial Sequence
  Description of Artificial Sequence: Synthetic oligonucleotide
  Antisense strand to SEQ ID NO: 2085144
uuaauaacaacucauacuc

SEQ ID NO: 2085146 - RNA, 19 nt, Artificial Sequence
  Description of Artificial Sequence: Synthetic oligonucleotide
  Sense strand starting at position 3252 of SEQ ID NO: 1881969
agaccauuucugugccuca

SEQ ID NO: 2085147 - RNA, 19 nt, Artificial Sequence
  Description of Artificial Sequence: Synthetic oligonucleotide
  Antisense strand to SEQ ID NO: 2085146
ugaggcacagaaauggucu

SEQ ID NO: 2085148 - RNA, 19 nt, Artificial Sequence
  Description of Artificial Sequence: Synthetic oligonucleotide
  Sense strand starting at position 3255 of SEQ ID NO: 1881969
ccauuucugugccucaaga

SEQ ID NO: 2085149 - RNA, 19 nt, Artificial Sequence
  Description of Artificial Sequence: Synthetic oligonucleotide
  Antisense strand to SEQ ID NO: 2085148
ucuugaggcacagaaaugg

SEQ ID NO: 2085150 - RNA, 19 nt, Artificial Sequence
  Description of Artificial Sequence: Synthetic oligonucleotide
  Sense strand starting at position 3311 of SEQ ID NO: 1881969
cgacauccuggguaguuaa

SEQ ID NO: 2085151 - RNA, 19 nt, Artificial Sequence
  Description of Artificial Sequence: Synthetic oligonucleotide
  Antisense strand to SEQ ID NO: 2085150
uuaacuacccaggaugucg

SEQ ID NO: 2085152 - RNA, 19 nt, Artificial Sequence
  Description of Artificial Sequence: Synthetic oligonucleotide
  Sense strand starting at position 3336 of SEQ ID NO: 1881969
guagaaugcauaugaguaa

SEQ ID NO: 2085153 - RNA, 19 nt, Artificial Sequence
  Description of Artificial Sequence: Synthetic oligonucleotide
  Antisense strand to SEQ ID NO: 2085152
uuacucauaugcauucuac

SEQ ID NO: 2085154 - RNA, 19 nt, Artificial Sequence
  Description of Artificial Sequence: Synthetic oligonucleotide
  Sense strand starting at position 3430 of SEQ ID NO: 1881969
agaaucguuaguuguauuu

SEQ ID NO: 2085155 - RNA, 19 nt, Artificial Sequence
  Description of Artificial Sequence: Synthetic oligonucleotide
  Antisense strand to SEQ ID NO: 2085154
aaauacaacuaacgauucu

SEQ ID NO: 2085156 - RNA, 19 nt, Artificial Sequence
  Description of Artificial Sequence: Synthetic oligonucleotide
  Sense strand starting at position 3471 of SEQ ID NO: 1881969
cuaaaugugcaccguauuu

SEQ ID NO: 2085157 - RNA, 19 nt, Artificial Sequence
  Description of Artificial Sequence: Synthetic oligonucleotide
  Antisense strand to SEQ ID NO: 2085156
aaauacggugcacauuuag

SEQ ID NO: 2085158 - RNA, 19 nt, Artificial Sequence
  Description of Artificial Sequence: Synthetic oligonucleotide
  Sense strand starting at position 3531 of SEQ ID NO: 1881969
cgcagagggacaugauuau

SEQ ID NO: 2085159 - RNA, 19 nt, Artificial Sequence
  Description of Artificial Sequence: Synthetic oligonucleotide
  Antisense strand to SEQ ID NO: 2085158
auaaucaugucccucugcg

SEQ ID NO: 2085160 - RNA, 19 nt, Artificial Sequence
  Description of Artificial Sequence: Synthetic oligonucleotide
  Sense strand starting at position 3901 of SEQ ID NO: 1881969
agguguuuaaccuggaagu

SEQ ID NO: 2085161 - RNA, 19 nt, Artificial Sequence
  Description of Artificial Sequence: Synthetic oligonucleotide
  Antisense strand to SEQ ID NO: 2085160
acuuccagguuaaacaccu

SEQ ID NO: 2085162 - RNA, 19 nt, Artificial Sequence
  Description of Artificial Sequence: Synthetic oligonucleotide
  Sense strand starting at position 3940 of SEQ ID NO: 1881969
acuccauaauaaguguuua

SEQ ID NO: 2085163 - RNA, 19 nt, Artificial Sequence
  Description of Artificial Sequence: Synthetic oligonucleotide
  Antisense strand to SEQ ID NO: 2085162
uaaacacuuauuauggagu

SEQ ID NO: 2085164 - RNA, 19 nt, Artificial Sequence
  Description of Artificial Sequence: Synthetic oligonucleotide
  Sense strand starting at position 1409 of SEQ ID NO: 1881970
aaggaaagaucagggauaa

SEQ ID NO: 2085165 - RNA, 19 nt, Artificial Sequence
  Description of Artificial Sequence: Synthetic oligonucleotide
  Antisense strand to SEQ ID NO: 2085164
uuaucccugaucuuuccuu

SEQ ID NO: 2085166 - RNA, 19 nt, Artificial Sequence
  Description of Artificial Sequence: Synthetic oligonucleotide
  Sense strand starting at position 1433 of SEQ ID NO: 1881970
gcaaguuagcucugaagau

SEQ ID NO: 2085167 - RNA, 19 nt, Artificial Sequence
  Description of Artificial Sequence: Synthetic oligonucleotide
  Antisense strand to SEQ ID NO: 2085166
aucuucagagcuaacuugc

SEQ ID NO: 2085168 - RNA, 19 nt, Artificial Sequence
  Description of Artificial Sequence: Synthetic oligonucleotide
  Sense strand starting at position 1445 of SEQ ID NO: 1881970
ugaagauggucauuccagu

SEQ ID NO: 2085169 - RNA, 19 nt, Artificial Sequence
  Description of Artificial Sequence: Synthetic oligonucleotide
  Antisense strand to SEQ ID NO: 2085168
acuggaaugaccaucuuca

SEQ ID NO: 2085170 - RNA, 19 nt, Artificial Sequence
  Description of Artificial Sequence: Synthetic oligonucleotide
  Sense strand starting at position 1476 of SEQ ID NO: 1881970
guaacaauuugagaaccuu

SEQ ID NO: 2085171 - RNA, 19 nt, Artificial Sequence
  Description of Artificial Sequence: Synthetic oligonucleotide
  Antisense strand to SEQ ID NO: 2085170
aagguucucaaauuguuac

SEQ ID NO: 2085172 - RNA, 19 nt, Artificial Sequence
  Description of Artificial Sequence: Synthetic oligonucleotide
  Sense strand starting at position 1490 of SEQ ID NO: 1881970
accuuuacauguccaguaa

SEQ ID NO: 2085173 - RNA, 19 nt, Artificial Sequence
  Description of Artificial Sequence: Synthetic oligonucleotide
  Antisense strand to SEQ ID NO: 2085172
uuacuggacauguaaaggu

SEQ ID NO: 2085174 - RNA, 19 nt, Artificial Sequence
  Description of Artificial Sequence: Synthetic oligonucleotide
  Sense strand starting at position 1491 of SEQ ID NO: 1881970
ccuuuacauguccaguaau

SEQ ID NO: 2085175 - RNA, 19 nt, Artificial Sequence
  Description of Artificial Sequence: Synthetic oligonucleotide
  Antisense strand to SEQ ID NO: 2085174
auuacuggacauguaaagg

SEQ ID NO: 2085176 - RNA, 19 nt, Artificial Sequence
  Description of Artificial Sequence: Synthetic oligonucleotide
  Sense strand starting at position 1494 of SEQ ID NO: 1881970
uuacauguccaguaauagc

SEQ ID NO: 2085177 - RNA, 19 nt, Artificial Sequence
  Description of Artificial Sequence: Synthetic oligonucleotide
  Antisense strand to SEQ ID NO: 2085176
gcuauuacuggacauguaa

SEQ ID NO: 2085178 - RNA, 19 nt, Artificial Sequence
  Description of Artificial Sequence: Synthetic oligonucleotide
  Sense strand starting at position 1502 of SEQ ID NO: 1881970
ccaguaauagcgcauugga

SEQ ID NO: 2085179 - RNA, 19 nt, Artificial Sequence
  Description of Artificial Sequence: Synthetic oligonucleotide
  Antisense strand to SEQ ID NO: 2085178
uccaaugcgcuauuacugg

SEQ ID NO: 2085180 - RNA, 19 nt, Artificial Sequence
  Description of Artificial Sequence: Synthetic oligonucleotide
  Sense strand starting at position 1638 of SEQ ID NO: 1881970
uguccaguauuauuccauu

SEQ ID NO: 2085181 - RNA, 19 nt, Artificial Sequence
  Description of Artificial Sequence: Synthetic oligonucleotide
  Antisense strand to SEQ ID NO: 2085180
aauggaauaauacuggaca

SEQ ID NO: 2085182 - RNA, 19 nt, Artificial Sequence
  Description of Artificial Sequence: Synthetic oligonucleotide
  Sense strand starting at position 1740 of SEQ ID NO: 1881970
ggguaaucuuuacugucuu

SEQ ID NO: 2085183 - RNA, 19 nt, Artificial Sequence
  Description of Artificial Sequence: Synthetic oligonucleotide
  Antisense strand to SEQ ID NO: 2085182
aagacaguaaagauuaccc

SEQ ID NO: 2085184 - RNA, 19 nt, Artificial Sequence
  Description of Artificial Sequence: Synthetic oligonucleotide
  Sense strand starting at position 2007 of SEQ ID NO: 1881970
caguguuaccaguagaaua

SEQ ID NO: 2085185 - RNA, 19 nt, Artificial Sequence
  Description of Artificial Sequence: Synthetic oligonucleotide
  Antisense strand to SEQ ID NO: 2085184
uauucuacugguaacacug

SEQ ID NO: 2085186 - RNA, 19 nt, Artificial Sequence
  Description of Artificial Sequence: Synthetic oligonucleotide
  Sense strand starting at position 2009 of SEQ ID NO: 1881970
guguuaccaguagaauacu

SEQ ID NO: 2085187 - RNA, 19 nt, Artificial Sequence
  Description of Artificial Sequence: Synthetic oligonucleotide
  Antisense strand to SEQ ID NO: 2085186
aguauucuacugguaacac

SEQ ID NO: 2085188 - RNA, 19 nt, Artificial Sequence
  Description of Artificial Sequence: Synthetic oligonucleotide
  Sense strand starting at position 2017 of SEQ ID NO: 1881970
aguagaauacugcagaagu

SEQ ID NO: 2085189 - RNA, 19 nt, Artificial Sequence
  Description of Artificial Sequence: Synthetic oligonucleotide
  Antisense strand to SEQ ID NO: 2085188
acuucugcaguauucuacu

SEQ ID NO: 2085190 - RNA, 19 nt, Artificial Sequence
  Description of Artificial Sequence: Synthetic oligonucleotide
  Sense strand starting at position 2032 of SEQ ID NO: 1881970
aagugauggugugucacau

SEQ ID NO: 2085191 - RNA, 19 nt, Artificial Sequence
  Description of Artificial Sequence: Synthetic oligonucleotide
  Antisense strand to SEQ ID NO: 2085190
augugacacaccaucacuu

SEQ ID NO: 2085192 - RNA, 19 nt, Artificial Sequence
  Description of Artificial Sequence: Synthetic oligonucleotide
  Sense strand starting at position 2062 of SEQ ID NO: 1881970
ucauaagggcauugugacu

SEQ ID NO: 2085193 - RNA, 19 nt, Artificial Sequence
  Description of Artificial Sequence: Synthetic oligonucleotide
  Antisense strand to SEQ ID NO: 2085192
agucacaaugcccuuauga

SEQ ID NO: 2085194 - RNA, 19 nt, Artificial Sequence
  Description of Artificial Sequence: Synthetic oligonucleotide
  Sense strand starting at position 2426 of SEQ ID NO: 1881970
aacaguagauagcugauau

SEQ ID NO: 2085195 - RNA, 19 nt, Artificial Sequence
  Description of Artificial Sequence: Synthetic oligonucleotide
  Antisense strand to SEQ ID NO: 2085194
auaucagcuaucuacuguu

SEQ ID NO: 2085196 - RNA, 19 nt, Artificial Sequence
  Description of Artificial Sequence: Synthetic oligonucleotide
  Sense strand starting at position 2539 of SEQ ID NO: 1881970
cuuugaagaaagugucaga

SEQ ID NO: 2085197 - RNA, 19 nt, Artificial Sequence
  Description of Artificial Sequence: Synthetic oligonucleotide
  Antisense strand to SEQ ID NO: 2085196
ucugacacuuucuucaaag

SEQ ID NO: 2085198 - RNA, 19 nt, Artificial Sequence
  Description of Artificial Sequence: Synthetic oligonucleotide
  Sense strand starting at position 2544 of SEQ ID NO: 1881970
aagaaagugucagagaaag

SEQ ID NO: 2085199 - RNA, 19 nt, Artificial Sequence
  Description of Artificial Sequence: Synthetic oligonucleotide
  Antisense strand to SEQ ID NO: 2085198
cuuucucugacacuuucuu

SEQ ID NO: 2085200 - RNA, 19 nt, Artificial Sequence
  Description of Artificial Sequence: Synthetic oligonucleotide
  Sense strand starting at position 2583 of SEQ ID NO: 1881970
ccaguagugggaggagaau

SEQ ID NO: 2085201 - RNA, 19 nt, Artificial Sequence
  Description of Artificial Sequence: Synthetic oligonucleotide
  Antisense strand to SEQ ID NO: 2085200
auucuccucccacuacugg

SEQ ID NO: 2085202 - RNA, 19 nt, Artificial Sequence
  Description of Artificial Sequence: Synthetic oligonucleotide
  Sense strand starting at position 2596 of SEQ ID NO: 1881970
gagaauguuggugaggguu

SEQ ID NO: 2085203 - RNA, 19 nt, Artificial Sequence
  Description of Artificial Sequence: Synthetic oligonucleotide
  Antisense strand to SEQ ID NO: 2085202
aacccucaccaacauucuc

SEQ ID NO: 2085204 - RNA, 19 nt, Artificial Sequence
  Description of Artificial Sequence: Synthetic oligonucleotide
  Sense strand starting at position 2599 of SEQ ID NO: 1881970
aauguuggugaggguuuau

SEQ ID NO: 2085205 - RNA, 19 nt, Artificial Sequence
  Description of Artificial Sequence: Synthetic oligonucleotide
  Antisense strand to SEQ ID NO: 2085204
auaaacccucaccaacauu

SEQ ID NO: 2085206 - RNA, 19 nt, Artificial Sequence
  Description of Artificial Sequence: Synthetic oligonucleotide
  Sense strand starting at position 2616 of SEQ ID NO: 1881970
auaggaaagugagaacaau

SEQ ID NO: 2085207 - RNA, 19 nt, Artificial Sequence
  Description of Artificial Sequence: Synthetic oligonucleotide
  Antisense strand to SEQ ID NO: 2085206
auuguucucacuuuccuau

SEQ ID NO: 2085208 - RNA, 19 nt, Artificial Sequence
  Description of Artificial Sequence: Synthetic oligonucleotide
  Sense strand starting at position 2648 of SEQ ID NO: 1881970
gaagaaaggugauucuugu

SEQ ID NO: 2085209 - RNA, 19 nt, Artificial Sequence
  Description of Artificial Sequence: Synthetic oligonucleotide
  Antisense strand to SEQ ID NO: 2085208
acaagaaucaccuuucuuc

SEQ ID NO: 2085210 - RNA, 19 nt, Artificial Sequence
  Description of Artificial Sequence: Synthetic oligonucleotide
  Sense strand starting at position 2663 of SEQ ID NO: 1881970
uuguuauggagaggcagaa

SEQ ID NO: 2085211 - RNA, 19 nt, Artificial Sequence
  Description of Artificial Sequence: Synthetic oligonucleotide
  Antisense strand to SEQ ID NO: 2085210
uucugccucuccauaacaa

SEQ ID NO: 2085212 - RNA, 19 nt, Artificial Sequence
  Description of Artificial Sequence: Synthetic oligonucleotide
  Sense strand starting at position 2763 of SEQ ID NO: 1881970
gggcucuuccacuaagagu

SEQ ID NO: 2085213 - RNA, 19 nt, Artificial Sequence
  Description of Artificial Sequence: Synthetic oligonucleotide
  Antisense strand to SEQ ID NO: 2085212
acucuuaguggaagagccc

SEQ ID NO: 2085214 - RNA, 19 nt, Artificial Sequence
  Description of Artificial Sequence: Synthetic oligonucleotide
  Sense strand starting at position 2927 of SEQ ID NO: 1881970
gcugguucccaggaugguu

SEQ ID NO: 2085215 - RNA, 19 nt, Artificial Sequence
  Description of Artificial Sequence: Synthetic oligonucleotide
  Antisense strand to SEQ ID NO: 2085214
aaccauccugggaaccagc

SEQ ID NO: 2085216 - RNA, 19 nt, Artificial Sequence
  Description of Artificial Sequence: Synthetic oligonucleotide
  Sense strand starting at position 2935 of SEQ ID NO: 1881970
ccaggaugguucucagaaa

SEQ ID NO: 2085217 - RNA, 19 nt, Artificial Sequence
  Description of Artificial Sequence: Synthetic oligonucleotide
  Antisense strand to SEQ ID NO: 2085216
uuucugagaaccauccugg

SEQ ID NO: 2085218 - RNA, 19 nt, Artificial Sequence
  Description of Artificial Sequence: Synthetic oligonucleotide
  Sense strand starting at position 2981 of SEQ ID NO: 1881970
guguuccucccagaguaua

SEQ ID NO: 2085219 - RNA, 19 nt, Artificial Sequence
  Description of Artificial Sequence: Synthetic oligonucleotide
  Antisense strand to SEQ ID NO: 2085218
uauacucugggaggaacac

SEQ ID NO: 2085220 - RNA, 19 nt, Artificial Sequence
  Description of Artificial Sequence: Synthetic oligonucleotide
  Sense strand starting at position 3005 of SEQ ID NO: 1881970
guuagacucucgguacauu

SEQ ID NO: 2085221 - RNA, 19 nt, Artificial Sequence
  Description of Artificial Sequence: Synthetic oligonucleotide
  Antisense strand to SEQ ID NO: 2085220
aauguaccgagagucuaac

SEQ ID NO: 2085222 - RNA, 19 nt, Artificial Sequence
  Description of Artificial Sequence: Synthetic oligonucleotide
  Sense strand starting at position 3157 of SEQ ID NO: 1881970
ugaucauauuuaggguaua

SEQ ID NO: 2085223 - RNA, 19 nt, Artificial Sequence
  Description of Artificial Sequence: Synthetic oligonucleotide
  Antisense strand to SEQ ID NO: 2085222
uauacccuaaauaugauca

SEQ ID NO: 2085224 - RNA, 19 nt, Artificial Sequence
  Description of Artificial Sequence: Synthetic oligonucleotide
  Sense strand starting at position 3158 of SEQ ID NO: 1881970
gaucauauuuaggguauac

SEQ ID NO: 2085225 - RNA, 19 nt, Artificial Sequence
  Description of Artificial Sequence: Synthetic oligonucleotide
  Antisense strand to SEQ ID NO: 2085224
guauacccuaaauaugauc

SEQ ID NO: 2085226 - RNA, 19 nt, Artificial Sequence
  Description of Artificial Sequence: Synthetic oligonucleotide
  Sense strand starting at position 3334 of SEQ ID NO: 1881970
cggucugagcuuuaaagua

SEQ ID NO: 2085227 - RNA, 19 nt, Artificial Sequence
  Description of Artificial Sequence: Synthetic oligonucleotide
  Antisense strand to SEQ ID NO: 2085226
uacuuuaaagcucagaccg

SEQ ID NO: 2085228 - RNA, 19 nt, Artificial Sequence
  Description of Artificial Sequence: Synthetic oligonucleotide
  Sense strand starting at position 3475 of SEQ ID NO: 1881970
cucuauuucucagacagga

SEQ ID NO: 2085229 - RNA, 19 nt, Artificial Sequence
  Description of Artificial Sequence: Synthetic oligonucleotide
  Antisense strand to SEQ ID NO: 2085228
uccugucugagaaauagag

SEQ ID NO: 2085230 - RNA, 19 nt, Artificial Sequence
  Description of Artificial Sequence: Synthetic oligonucleotide
  Sense strand starting at position 3691 of SEQ ID NO: 1881970
acguuugggccauauucua

SEQ ID NO: 2085231 - RNA, 19 nt, Artificial Sequence
  Description of Artificial Sequence: Synthetic oligonucleotide
  Antisense strand to SEQ ID NO: 2085230
uagaauauggcccaaacgu

SEQ ID NO: 2085232 - RNA, 19 nt, Artificial Sequence
  Description of Artificial Sequence: Synthetic oligonucleotide
  Sense strand starting at position 3749 of SEQ ID NO: 1881970
ccaaguagccagugauaaa

SEQ ID NO: 2085233 - RNA, 19 nt, Artificial Sequence
  Description of Artificial Sequence: Synthetic oligonucleotide
  Antisense strand to SEQ ID NO: 2085232
uuuaucacuggcuacuugg

SEQ ID NO: 2085234 - RNA, 19 nt, Artificial Sequence
  Description of Artificial Sequence: Synthetic oligonucleotide
  Sense strand starting at position 3859 of SEQ ID NO: 1881970
ggagacauuuggugugaua

SEQ ID NO: 2085235 - RNA, 19 nt, Artificial Sequence
  Description of Artificial Sequence: Synthetic oligonucleotide
  Antisense strand to SEQ ID NO: 2085234
uaucacaccaaaugucucc

SEQ ID NO: 2085236 - RNA, 19 nt, Artificial Sequence
  Description of Artificial Sequence: Synthetic oligonucleotide
  Sense strand starting at position 3862 of SEQ ID NO: 1881970
gacauuuggugugauauau

SEQ ID NO: 2085237 - RNA, 19 nt, Artificial Sequence
  Description of Artificial Sequence: Synthetic oligonucleotide
  Antisense strand to SEQ ID NO: 2085236
auauaucacaccaaauguc

SEQ ID NO: 2085238 - RNA, 19 nt, Artificial Sequence
  Description of Artificial Sequence: Synthetic oligonucleotide
  Sense strand starting at position 3885 of SEQ ID NO: 1881970
gcaacuuugggacgaauuc

SEQ ID NO: 2085239 - RNA, 19 nt, Artificial Sequence
  Description of Artificial Sequence: Synthetic oligonucleotide
  Antisense strand to SEQ ID NO: 2085238
gaauucgucccaaaguugc

SEQ ID NO: 2085240 - RNA, 19 nt, Artificial Sequence
  Description of Artificial Sequence: Synthetic oligonucleotide
  Sense strand starting at position 3938 of SEQ ID NO: 1881970
ccagauaccucuucgggua

SEQ ID NO: 2085241 - RNA, 19 nt, Artificial Sequence
  Description of Artificial Sequence: Synthetic oligonucleotide
  Antisense strand to SEQ ID NO: 2085240
uacccgaagagguaucugg

SEQ ID NO: 2085242 - RNA, 19 nt, Artificial Sequence
  Description of Artificial Sequence: Synthetic oligonucleotide
  Sense strand starting at position 3939 of SEQ ID NO: 1881970
cagauaccucuucggguaa

SEQ ID NO: 2085243 - RNA, 19 nt, Artificial Sequence
  Description of Artificial Sequence: Synthetic oligonucleotide
  Antisense strand to SEQ ID NO: 2085242
uuacccgaagagguaucug

SEQ ID NO: 2085244 - RNA, 19 nt, Artificial Sequence
  Description of Artificial Sequence: Synthetic oligonucleotide
  Sense strand starting at position 207 of SEQ ID NO: 1881971
uggauugugaagugggaca

SEQ ID NO: 2085245 - RNA, 19 nt, Artificial Sequence
  Description of Artificial Sequence: Synthetic oligonucleotide
  Antisense strand to SEQ ID NO: 2085244
ugucccacuucacaaucca

SEQ ID NO: 2085246 - RNA, 19 nt, Artificial Sequence
  Description of Artificial Sequence: Synthetic oligonucleotide
  Sense strand starting at position 214 of SEQ ID NO: 1881971
ugaagugggacauguugau

SEQ ID NO: 2085247 - RNA, 19 nt, Artificial Sequence
  Description of Artificial Sequence: Synthetic oligonucleotide
  Antisense strand to SEQ ID NO: 2085246
aucaacaugucccacuuca

SEQ ID NO: 2085248 - RNA, 19 nt, Artificial Sequence
  Description of Artificial Sequence: Synthetic oligonucleotide
  Sense strand starting at position 247 of SEQ ID NO: 1881971
aaauuaggucaaugggcau

SEQ ID NO: 2085249 - RNA, 19 nt, Artificial Sequence
  Description of Artificial Sequence: Synthetic oligonucleotide
  Antisense strand to SEQ ID NO: 2085248
augcccauugaccuaauuu

SEQ ID NO: 2085250 - RNA, 19 nt, Artificial Sequence
  Description of Artificial Sequence: Synthetic oligonucleotide
  Sense strand starting at position 267 of SEQ ID NO: 1881971
uggcucauauuaccagaau

SEQ ID NO: 2085251 - RNA, 19 nt, Artificial Sequence
  Description of Artificial Sequence: Synthetic oligonucleotide
  Antisense strand to SEQ ID NO: 2085250
auucugguaauaugagcca

SEQ ID NO: 2085252 - RNA, 19 nt, Artificial Sequence
  Description of Artificial Sequence: Synthetic oligonucleotide
  Sense strand starting at position 459 of SEQ ID NO: 1881971
uuguuacaugcagauaaag

SEQ ID NO: 2085253 - RNA, 19 nt, Artificial Sequence
  Description of Artificial Sequence: Synthetic oligonucleotide
  Antisense strand to SEQ ID NO: 2085252
cuuuaucugcauguaacaa

SEQ ID NO: 2085254 - RNA, 19 nt, Artificial Sequence
  Description of Artificial Sequence: Synthetic oligonucleotide
  Sense strand starting at position 902 of SEQ ID NO: 1881971
aggcuuaacgaagguaagu

SEQ ID NO: 2085255 - RNA, 19 nt, Artificial Sequence
  Description of Artificial Sequence: Synthetic oligonucleotide
  Antisense strand to SEQ ID NO: 2085254
acuuaccuucguuaagccu

SEQ ID NO: 2085256 - RNA, 19 nt, Artificial Sequence
  Description of Artificial Sequence: Synthetic oligonucleotide
  Sense strand starting at position 979 of SEQ ID NO: 1881971
auuacuugucccuggugga

SEQ ID NO: 2085257 - RNA, 19 nt, Artificial Sequence
  Description of Artificial Sequence: Synthetic oligonucleotide
  Antisense strand to SEQ ID NO: 2085256
uccaccagggacaaguaau

SEQ ID NO: 2085258 - RNA, 19 nt, Artificial Sequence
  Description of Artificial Sequence: Synthetic oligonucleotide
  Sense strand starting at position 1117 of SEQ ID NO: 1881971
gagacuuuacguuacaguu

SEQ ID NO: 2085259 - RNA, 19 nt, Artificial Sequence
  Description of Artificial Sequence: Synthetic oligonucleotide
  Antisense strand to SEQ ID NO: 2085258
aacuguaacguaaagucuc

SEQ ID NO: 2085260 - RNA, 19 nt, Artificial Sequence
  Description of Artificial Sequence: Synthetic oligonucleotide
  Sense strand starting at position 1317 of SEQ ID NO: 1881971
guacacuuuagugauggau

SEQ ID NO: 2085261 - RNA, 19 nt, Artificial Sequence
  Description of Artificial Sequence: Synthetic oligonucleotide
  Antisense strand to SEQ ID NO: 2085260
auccaucacuaaaguguac

SEQ ID NO: 2085262 - RNA, 19 nt, Artificial Sequence
  Description of Artificial Sequence: Synthetic oligonucleotide
  Sense strand starting at position 1321 of SEQ ID NO: 1881971
acuuuagugauggaucgga

SEQ ID NO: 2085263 - RNA, 19 nt, Artificial Sequence
  Description of Artificial Sequence: Synthetic oligonucleotide
  Antisense strand to SEQ ID NO: 2085262
uccgauccaucacuaaagu

SEQ ID NO: 2085264 - RNA, 19 nt, Artificial Sequence
  Description of Artificial Sequence: Synthetic oligonucleotide
  Sense strand starting at position 1325 of SEQ ID NO: 1881971
uagugauggaucggaggaa

SEQ ID NO: 2085265 - RNA, 19 nt, Artificial Sequence
  Description of Artificial Sequence: Synthetic oligonucleotide
  Antisense strand to SEQ ID NO: 2085264
uuccuccgauccaucacua

SEQ ID NO: 2085266 - RNA, 19 nt, Artificial Sequence
  Description of Artificial Sequence: Synthetic oligonucleotide
  Sense strand starting at position 1381 of SEQ ID NO: 1881971
uuacauaugccucagagau

SEQ ID NO: 2085267 - RNA, 19 nt, Artificial Sequence
  Description of Artificial Sequence: Synthetic oligonucleotide
  Antisense strand to SEQ ID NO: 2085266
aucucugaggcauauguaa

SEQ ID NO: 2085268 - RNA, 19 nt, Artificial Sequence
  Description of Artificial Sequence: Synthetic oligonucleotide
  Sense strand starting at position 2206 of SEQ ID NO: 1881971
ggccauagauuugugugca

SEQ ID NO: 2085269 - RNA, 19 nt, Artificial Sequence
  Description of Artificial Sequence: Synthetic oligonucleotide
  Antisense strand to SEQ ID NO: 2085268
ugcacacaaaucuauggcc

SEQ ID NO: 2085270 - RNA, 19 nt, Artificial Sequence
  Description of Artificial Sequence: Synthetic oligonucleotide
  Sense strand starting at position 2220 of SEQ ID NO: 1881971
gugcaaaugaaaugaggau

SEQ ID NO: 2085271 - RNA, 19 nt, Artificial Sequence
  Description of Artificial Sequence: Synthetic oligonucleotide
  Antisense strand to SEQ ID NO: 2085270
auccucauuucauuugcac

SEQ ID NO: 2085272 - RNA, 19 nt, Artificial Sequence
  Description of Artificial Sequence: Synthetic oligonucleotide
  Sense strand starting at position 2283 of SEQ ID NO: 1881971
guaugccucccugagggua

SEQ ID NO: 2085273 - RNA, 19 nt, Artificial Sequence
  Description of Artificial Sequence: Synthetic oligonucleotide
  Antisense strand to SEQ ID NO: 2085272
uacccucagggaggcauac

SEQ ID NO: 2085274 - RNA, 19 nt, Artificial Sequence
  Description of Artificial Sequence: Synthetic oligonucleotide
  Sense strand starting at position 2419 of SEQ ID NO: 1881971
guaugaaaugugcaugggu

SEQ ID NO: 2085275 - RNA, 19 nt, Artificial Sequence
  Description of Artificial Sequence: Synthetic oligonucleotide
  Antisense strand to SEQ ID NO: 2085274
acccaugcacauuucauac

SEQ ID NO: 2085276 - RNA, 19 nt, Artificial Sequence
  Description of Artificial Sequence: Synthetic oligonucleotide
  Sense strand starting at position 2491 of SEQ ID NO: 1881971
agccaagaugggugguaaa

SEQ ID NO: 2085277 - RNA, 19 nt, Artificial Sequence
  Description of Artificial Sequence: Synthetic oligonucleotide
  Antisense strand to SEQ ID NO: 2085276
uuuaccacccaucuuggcu

SEQ ID NO: 2085278 - RNA, 19 nt, Artificial Sequence
  Description of Artificial Sequence: Synthetic oligonucleotide
  Sense strand starting at position 2588 of SEQ ID NO: 1881971
ccucucugacuugggaaga

SEQ ID NO: 2085279 - RNA, 19 nt, Artificial Sequence
  Description of Artificial Sequence: Synthetic oligonucleotide
  Antisense strand to SEQ ID NO: 2085278
ucuucccaagucagagagg

SEQ ID NO: 2085280 - RNA, 19 nt, Artificial Sequence
  Description of Artificial Sequence: Synthetic oligonucleotide
  Sense strand starting at position 2644 of SEQ ID NO: 1881971
guuccaucccgacaugaac

SEQ ID NO: 2085281 - RNA, 19 nt, Artificial Sequence
  Description of Artificial Sequence: Synthetic oligonucleotide
  Antisense strand to SEQ ID NO: 2085280
guucaugucgggauggaac

SEQ ID NO: 2085282 - RNA, 19 nt, Artificial Sequence
  Description of Artificial Sequence: Synthetic oligonucleotide
  Sense strand starting at position 2719 of SEQ ID NO: 1881971
agggaaucugccuagugcu

SEQ ID NO: 2085283 - RNA, 19 nt, Artificial Sequence
  Description of Artificial Sequence: Synthetic oligonucleotide
  Antisense strand to SEQ ID NO: 2085282
agcacuaggcagauucccu

SEQ ID NO: 2085284 - RNA, 19 nt, Artificial Sequence
  Description of Artificial Sequence: Synthetic oligonucleotide
  Sense strand starting at position 2727 of SEQ ID NO: 1881971
ugccuagugcugucuccaa

SEQ ID NO: 2085285 - RNA, 19 nt, Artificial Sequence
  Description of Artificial Sequence: Synthetic oligonucleotide
  Antisense strand to SEQ ID NO: 2085284
uuggagacagcacuaggca

SEQ ID NO: 2085286 - RNA, 19 nt, Artificial Sequence
  Description of Artificial Sequence: Synthetic oligonucleotide
  Sense strand starting at position 2747 of SEQ ID NO: 1881971
caccuuggccaugauguaa

SEQ ID NO: 2085287 - RNA, 19 nt, Artificial Sequence
  Description of Artificial Sequence: Synthetic oligonucleotide
  Antisense strand to SEQ ID NO: 2085286
uuacaucauggccaaggug

SEQ ID NO: 2085288 - RNA, 19 nt, Artificial Sequence
  Description of Artificial Sequence: Synthetic oligonucleotide
  Sense strand starting at position 3194 of SEQ ID NO: 1881971
gguggauuccuggaagcau

SEQ ID NO: 2085289 - RNA, 19 nt, Artificial Sequence
  Description of Artificial Sequence: Synthetic oligonucleotide
  Antisense strand to SEQ ID NO: 2085288
augcuuccaggaauccacc

SEQ ID NO: 2085290 - RNA, 19 nt, Artificial Sequence
  Description of Artificial Sequence: Synthetic oligonucleotide
  Sense strand starting at position 3220 of SEQ ID NO: 1881971
gagucaucugcuggaacau

SEQ ID NO: 2085291 - RNA, 19 nt, Artificial Sequence
  Description of Artificial Sequence: Synthetic oligonucleotide
  Antisense strand to SEQ ID NO: 2085290
auguuccagcagaugacuc

SEQ ID NO: 2085292 - RNA, 19 nt, Artificial Sequence
  Description of Artificial Sequence: Synthetic oligonucleotide
  Sense strand starting at position 3221 of SEQ ID NO: 1881971
agucaucugcuggaacauu

SEQ ID NO: 2085293 - RNA, 19 nt, Artificial Sequence
  Description of Artificial Sequence: Synthetic oligonucleotide
  Antisense strand to SEQ ID NO: 2085292
aauguuccagcagaugacu

SEQ ID NO: 2085294 - RNA, 19 nt, Artificial Sequence
  Description of Artificial Sequence: Synthetic oligonucleotide
  Sense strand starting at position 3313 of SEQ ID NO: 1881971
aagaucuguguguaugcau

SEQ ID NO: 2085295 - RNA, 19 nt, Artificial Sequence
  Description of Artificial Sequence: Synthetic oligonucleotide
  Antisense strand to SEQ ID NO: 2085294
augcauacacacagaucuu

SEQ ID NO: 2085296 - RNA, 19 nt, Artificial Sequence
  Description of Artificial Sequence: Synthetic oligonucleotide
  Sense strand starting at position 3325 of SEQ ID NO: 1881971
uaugcauaguuuguggaaa

SEQ ID NO: 2085297 - RNA, 19 nt, Artificial Sequence
  Description of Artificial Sequence: Synthetic oligonucleotide
  Antisense strand to SEQ ID NO: 2085296
uuuccacaaacuaugcaua

SEQ ID NO: 2085298 - RNA, 19 nt, Artificial Sequence
  Description of Artificial Sequence: Synthetic oligonucleotide
  Sense strand starting at position 3363 of SEQ ID NO: 1881971
ugaagugguguguauugau

SEQ ID NO: 2085299 - RNA, 19 nt, Artificial Sequence
  Description of Artificial Sequence: Synthetic oligonucleotide
  Antisense strand to SEQ ID NO: 2085298
aucaauacacaccacuuca

SEQ ID NO: 2085300 - RNA, 19 nt, Artificial Sequence
  Description of Artificial Sequence: Synthetic oligonucleotide
  Sense strand starting at position 3404 of SEQ ID NO: 1881971
guuaaugcccaucaguuaa

SEQ ID NO: 2085301 - RNA, 19 nt, Artificial Sequence
  Description of Artificial Sequence: Synthetic oligonucleotide
  Antisense strand to SEQ ID NO: 2085300
uuaacugaugggcauuaac

SEQ ID NO: 2085302 - RNA, 19 nt, Artificial Sequence
  Description of Artificial Sequence: Synthetic oligonucleotide
  Sense strand starting at position 3416 of SEQ ID NO: 1881971
caguuaaaggauuguauag

SEQ ID NO: 2085303 - RNA, 19 nt, Artificial Sequence
  Description of Artificial Sequence: Synthetic oligonucleotide
  Antisense strand to SEQ ID NO: 2085302
cuauacaauccuuuaacug

SEQ ID NO: 2085304 - RNA, 19 nt, Artificial Sequence
  Description of Artificial Sequence: Synthetic oligonucleotide
  Sense strand starting at position 3426 of SEQ ID NO: 1881971
auuguauagagcuaaagug

SEQ ID NO: 2085305 - RNA, 19 nt, Artificial Sequence
  Description of Artificial Sequence: Synthetic oligonucleotide
  Antisense strand to SEQ ID NO: 2085304
cacuuuagcucuauacaau

SEQ ID NO: 2085306 - RNA, 19 nt, Artificial Sequence
  Description of Artificial Sequence: Synthetic oligonucleotide
  Sense strand starting at position 3480 of SEQ ID NO: 1881971
gccuuucgugcauuccuua

SEQ ID NO: 2085307 - RNA, 19 nt, Artificial Sequence
  Description of Artificial Sequence: Synthetic oligonucleotide
  Antisense strand to SEQ ID NO: 2085306
uaaggaaugcacgaaaggc

SEQ ID NO: 2085308 - RNA, 19 nt, Artificial Sequence
  Description of Artificial Sequence: Synthetic oligonucleotide
  Sense strand starting at position 3493 of SEQ ID NO: 1881971
uccuuaaaguaauuggauu

SEQ ID NO: 2085309 - RNA, 19 nt, Artificial Sequence
  Description of Artificial Sequence: Synthetic oligonucleotide
  Antisense strand to SEQ ID NO: 2085308
aauccaauuacuuuaagga

SEQ ID NO: 2085310 - RNA, 19 nt, Artificial Sequence
  Description of Artificial Sequence: Synthetic oligonucleotide
  Sense strand starting at position 3563 of SEQ ID NO: 1881971
cuuggucgucaguugugau

SEQ ID NO: 2085311 - RNA, 19 nt, Artificial Sequence
  Description of Artificial Sequence: Synthetic oligonucleotide
  Antisense strand to SEQ ID NO: 2085310
aucacaacugacgaccaag

SEQ ID NO: 2085312 - RNA, 19 nt, Artificial Sequence
  Description of Artificial Sequence: Synthetic oligonucleotide
  Sense strand starting at position 3826 of SEQ ID NO: 1881971
gaauguggguaaccucuua

SEQ ID NO: 2085313 - RNA, 19 nt, Artificial Sequence
  Description of Artificial Sequence: Synthetic oligonucleotide
  Antisense strand to SEQ ID NO: 2085312
uaagagguuacccacauuc

SEQ ID NO: 2085314 - RNA, 19 nt, Artificial Sequence
  Description of Artificial Sequence: Synthetic oligonucleotide
  Sense strand starting at position 3838 of SEQ ID NO: 1881971
ccucuuagaguuuaguuua

SEQ ID NO: 2085315 - RNA, 19 nt, Artificial Sequence
  Description of Artificial Sequence: Synthetic oligonucleotide
  Antisense strand to SEQ ID NO: 2085314
uaaacuaaacucuaagagg

SEQ ID NO: 2085316 - RNA, 19 nt, Artificial Sequence
  Description of Artificial Sequence: Synthetic oligonucleotide
  Sense strand starting at position 3843 of SEQ ID NO: 1881971
uagaguuuaguuuacugga

SEQ ID NO: 2085317 - RNA, 19 nt, Artificial Sequence
  Description of Artificial Sequence: Synthetic oligonucleotide
  Antisense strand to SEQ ID NO: 2085316
uccaguaaacuaaacucua

SEQ ID NO: 2085318 - RNA, 19 nt, Artificial Sequence
  Description of Artificial Sequence: Synthetic oligonucleotide
  Sense strand starting at position 3845 of SEQ ID NO: 1881971
gaguuuaguuuacuggaau

SEQ ID NO: 2085319 - RNA, 19 nt, Artificial Sequence
  Description of Artificial Sequence: Synthetic oligonucleotide
  Antisense strand to SEQ ID NO: 2085318
auuccaguaaacuaaacuc

SEQ ID NO: 2085320 - RNA, 19 nt, Artificial Sequence
  Description of Artificial Sequence: Synthetic oligonucleotide
  Sense strand starting at position 3869 of SEQ ID NO: 1881971
auuguaugauuuccguaca

SEQ ID NO: 2085321 - RNA, 19 nt, Artificial Sequence
  Description of Artificial Sequence: Synthetic oligonucleotide
  Antisense strand to SEQ ID NO: 2085320
uguacggaaaucauacaau

SEQ ID NO: 2085322 - RNA, 19 nt, Artificial Sequence
  Description of Artificial Sequence: Synthetic oligonucleotide
  Sense strand starting at position 3959 of SEQ ID NO: 1881971
agacaugauccauggcaua

SEQ ID NO: 2085323 - RNA, 19 nt, Artificial Sequence
  Description of Artificial Sequence: Synthetic oligonucleotide
  Antisense strand to SEQ ID NO: 2085322
uaugccauggaucaugucu

SEQ ID NO: 2085324 - RNA, 19 nt, Artificial Sequence
  Description of Artificial Sequence: Synthetic oligonucleotide
  Sense strand starting at position 94 of SEQ ID NO: 1881972
gagcuauaaugacuggguu

SEQ ID NO: 2085325 - RNA, 19 nt, Artificial Sequence
  Description of Artificial Sequence: Synthetic oligonucleotide
  Antisense strand to SEQ ID NO: 2085324
aacccagucauuauagcuc

SEQ ID NO: 2085326 - RNA, 19 nt, Artificial Sequence
  Description of Artificial Sequence: Synthetic oligonucleotide
  Sense strand starting at position 139 of SEQ ID NO: 1881972
acugaugaccuuugaauca

SEQ ID NO: 2085327 - RNA, 19 nt, Artificial Sequence
  Description of Artificial Sequence: Synthetic oligonucleotide
  Antisense strand to SEQ ID NO: 2085326
ugauucaaaggucaucagu

SEQ ID NO: 2085328 - RNA, 19 nt, Artificial Sequence
  Description of Artificial Sequence: Synthetic oligonucleotide
  Sense strand starting at position 301 of SEQ ID NO: 1881972
ucugauaugagguauguua

SEQ ID NO: 2085329 - RNA, 19 nt, Artificial Sequence
  Description of Artificial Sequence: Synthetic oligonucleotide
  Antisense strand to SEQ ID NO: 2085328
uaacauaccucauaucaga

SEQ ID NO: 2085330 - RNA, 19 nt, Artificial Sequence
  Description of Artificial Sequence: Synthetic oligonucleotide
  Sense strand starting at position 303 of SEQ ID NO: 1881972
ugauaugagguauguuaug

SEQ ID NO: 2085331 - RNA, 19 nt, Artificial Sequence
  Description of Artificial Sequence: Synthetic oligonucleotide
  Antisense strand to SEQ ID NO: 2085330
cauaacauaccucauauca

SEQ ID NO: 2085332 - RNA, 19 nt, Artificial Sequence
  Description of Artificial Sequence: Synthetic oligonucleotide
  Sense strand starting at position 939 of SEQ ID NO: 1881972
acaggagugauauguggua

SEQ ID NO: 2085333 - RNA, 19 nt, Artificial Sequence
  Description of Artificial Sequence: Synthetic oligonucleotide
  Antisense strand to SEQ ID NO: 2085332
uaccacauaucacuccugu

SEQ ID NO: 2085334 - RNA, 19 nt, Artificial Sequence
  Description of Artificial Sequence: Synthetic oligonucleotide
  Sense strand starting at position 941 of SEQ ID NO: 1881972
aggagugauaugugguaua

SEQ ID NO: 2085335 - RNA, 19 nt, Artificial Sequence
  Description of Artificial Sequence: Synthetic oligonucleotide
  Antisense strand to SEQ ID NO: 2085334
uauaccacauaucacuccu

SEQ ID NO: 2085336 - RNA, 19 nt, Artificial Sequence
  Description of Artificial Sequence: Synthetic oligonucleotide
  Sense strand starting at position 1115 of SEQ ID NO: 1881972
aauguaauggugcaucuca

SEQ ID NO: 2085337 - RNA, 19 nt, Artificial Sequence
  Description of Artificial Sequence: Synthetic oligonucleotide
  Antisense strand to SEQ ID NO: 2085336
ugagaugcaccauuacauu

SEQ ID NO: 2085338 - RNA, 19 nt, Artificial Sequence
  Description of Artificial Sequence: Synthetic oligonucleotide
  Sense strand starting at position 1153 of SEQ ID NO: 1881972
ugagaagaaauguggcaua

SEQ ID NO: 2085339 - RNA, 19 nt, Artificial Sequence
  Description of Artificial Sequence: Synthetic oligonucleotide
  Antisense strand to SEQ ID NO: 2085338
uaugccacauuucuucuca

SEQ ID NO: 2085340 - RNA, 19 nt, Artificial Sequence
  Description of Artificial Sequence: Synthetic oligonucleotide
  Sense strand starting at position 1223 of SEQ ID NO: 1881972
gcuuaauaacauuguuaag

SEQ ID NO: 2085341 - RNA, 19 nt, Artificial Sequence
  Description of Artificial Sequence: Synthetic oligonucleotide
  Antisense strand to SEQ ID NO: 2085340
cuuaacaauguuauuaagc

SEQ ID NO: 2085342 - RNA, 19 nt, Artificial Sequence
  Description of Artificial Sequence: Synthetic oligonucleotide
  Sense strand starting at position 1325 of SEQ ID NO: 1881972
ggaagucuugacuaugagu

SEQ ID NO: 2085343 - RNA, 19 nt, Artificial Sequence
  Description of Artificial Sequence: Synthetic oligonucleotide
  Antisense strand to SEQ ID NO: 2085342
acucauagucaagacuucc

SEQ ID NO: 2085344 - RNA, 19 nt, Artificial Sequence
  Description of Artificial Sequence: Synthetic oligonucleotide
  Sense strand starting at position 1327 of SEQ ID NO: 1881972
aagucuugacuaugaguug

SEQ ID NO: 2085345 - RNA, 19 nt, Artificial Sequence
  Description of Artificial Sequence: Synthetic oligonucleotide
  Antisense strand to SEQ ID NO: 2085344
caacucauagucaagacuu

SEQ ID NO: 2085346 - RNA, 19 nt, Artificial Sequence
  Description of Artificial Sequence: Synthetic oligonucleotide
  Sense strand starting at position 1441 of SEQ ID NO: 1881972
guauauuccauagaguguu

SEQ ID NO: 2085347 - RNA, 19 nt, Artificial Sequence
  Description of Artificial Sequence: Synthetic oligonucleotide
  Antisense strand to SEQ ID NO: 2085346
aacacucuauggaauauac

SEQ ID NO: 2085348 - RNA, 19 nt, Artificial Sequence
  Description of Artificial Sequence: Synthetic oligonucleotide
  Sense strand starting at position 1455 of SEQ ID NO: 1881972
guguuugugggcuugagca

SEQ ID NO: 2085349 - RNA, 19 nt, Artificial Sequence
  Description of Artificial Sequence: Synthetic oligonucleotide
  Antisense strand to SEQ ID NO: 2085348
ugcucaagcccacaaacac

SEQ ID NO: 2085350 - RNA, 19 nt, Artificial Sequence
  Description of Artificial Sequence: Synthetic oligonucleotide
  Sense strand starting at position 1558 of SEQ ID NO: 1881972
uugguuaaacccuaugcga

SEQ ID NO: 2085351 - RNA, 19 nt, Artificial Sequence
  Description of Artificial Sequence: Synthetic oligonucleotide
  Antisense strand to SEQ ID NO: 2085350
ucgcauaggguuuaaccaa

SEQ ID NO: 2085352 - RNA, 19 nt, Artificial Sequence
  Description of Artificial Sequence: Synthetic oligonucleotide
  Sense strand starting at position 1566 of SEQ ID NO: 1881972
acccuaugcgaaugaagaa

SEQ ID NO: 2085353 - RNA, 19 nt, Artificial Sequence
  Description of Artificial Sequence: Synthetic oligonucleotide
  Antisense strand to SEQ ID NO: 2085352
uucuucauucgcauagggu

SEQ ID NO: 2085354 - RNA, 19 nt, Artificial Sequence
  Description of Artificial Sequence: Synthetic oligonucleotide
  Sense strand starting at position 1579 of SEQ ID NO: 1881972
gaagaauuggccugugacc

SEQ ID NO: 2085355 - RNA, 19 nt, Artificial Sequence
  Description of Artificial Sequence: Synthetic oligonucleotide
  Antisense strand to SEQ ID NO: 2085354
ggucacaggccaauucuuc

SEQ ID NO: 2085356 - RNA, 19 nt, Artificial Sequence
  Description of Artificial Sequence: Synthetic oligonucleotide
  Sense strand starting at position 1581 of SEQ ID NO: 1881972
agaauuggccugugaccaa

SEQ ID NO: 2085357 - RNA, 19 nt, Artificial Sequence
  Description of Artificial Sequence: Synthetic oligonucleotide
  Antisense strand to SEQ ID NO: 2085356
uuggucacaggccaauucu

SEQ ID NO: 2085358 - RNA, 19 nt, Artificial Sequence
  Description of Artificial Sequence: Synthetic oligonucleotide
  Sense strand starting at position 1593 of SEQ ID NO: 1881972
ugaccaaucagaggcuaga

SEQ ID NO: 2085359 - RNA, 19 nt, Artificial Sequence
  Description of Artificial Sequence: Synthetic oligonucleotide
  Antisense strand to SEQ ID NO: 2085358
ucuagccucugauugguca

SEQ ID NO: 2085360 - RNA, 19 nt, Artificial Sequence
  Description of Artificial Sequence: Synthetic oligonucleotide
  Sense strand starting at position 1684 of SEQ ID NO: 1881972
agaggcauuuccuauuugu

SEQ ID NO: 2085361 - RNA, 19 nt, Artificial Sequence
  Description of Artificial Sequence: Synthetic oligonucleotide
  Antisense strand to SEQ ID NO: 2085360
acaaauaggaaaugccucu

SEQ ID NO: 2085362 - RNA, 19 nt, Artificial Sequence
  Description of Artificial Sequence: Synthetic oligonucleotide
  Sense strand starting at position 1795 of SEQ ID NO: 1881972
agaagagagccaugaguug

SEQ ID NO: 2085363 - RNA, 19 nt, Artificial Sequence
  Description of Artificial Sequence: Synthetic oligonucleotide
  Antisense strand to SEQ ID NO: 2085362
caacucauggcucucuucu

SEQ ID NO: 2085364 - RNA, 19 nt, Artificial Sequence
  Description of Artificial Sequence: Synthetic oligonucleotide
  Sense strand starting at position 2026 of SEQ ID NO: 1881972
gaccaaugcgaaugggauu

SEQ ID NO: 2085365 - RNA, 19 nt, Artificial Sequence
  Description of Artificial Sequence: Synthetic oligonucleotide
  Antisense strand to SEQ ID NO: 2085364
aaucccauucgcauugguc

SEQ ID NO: 2085366 - RNA, 19 nt, Artificial Sequence
  Description of Artificial Sequence: Synthetic oligonucleotide
  Sense strand starting at position 2032 of SEQ ID NO: 1881972
ugcgaaugggauuaccauu

SEQ ID NO: 2085367 - RNA, 19 nt, Artificial Sequence
  Description of Artificial Sequence: Synthetic oligonucleotide
  Antisense strand to SEQ ID NO: 2085366
aaugguaaucccauucgca

SEQ ID NO: 2085368 - RNA, 19 nt, Artificial Sequence
  Description of Artificial Sequence: Synthetic oligonucleotide
  Sense strand starting at position 2038 of SEQ ID NO: 1881972
ugggauuaccauugacuua

SEQ ID NO: 2085369 - RNA, 19 nt, Artificial Sequence
  Description of Artificial Sequence: Synthetic oligonucleotide
  Antisense strand to SEQ ID NO: 2085368
uaagucaaugguaauccca

SEQ ID NO: 2085370 - RNA, 19 nt, Artificial Sequence
  Description of Artificial Sequence: Synthetic oligonucleotide
  Sense strand starting at position 2162 of SEQ ID NO: 1881972
gaaugacuaucaguuaguc

SEQ ID NO: 2085371 - RNA, 19 nt, Artificial Sequence
  Description of Artificial Sequence: Synthetic oligonucleotide
  Antisense strand to SEQ ID NO: 2085370
gacuaacugauagucauuc

SEQ ID NO: 2085372 - RNA, 19 nt, Artificial Sequence
  Description of Artificial Sequence: Synthetic oligonucleotide
  Sense strand starting at position 2167 of SEQ ID NO: 1881972
acuaucaguuagucaauca

SEQ ID NO: 2085373 - RNA, 19 nt, Artificial Sequence
  Description of Artificial Sequence: Synthetic oligonucleotide
  Antisense strand to SEQ ID NO: 2085372
ugauugacuaacugauagu

SEQ ID NO: 2085374 - RNA, 19 nt, Artificial Sequence
  Description of Artificial Sequence: Synthetic oligonucleotide
  Sense strand starting at position 2704 of SEQ ID NO: 1881972
gggcucaagagauguuuag

SEQ ID NO: 2085375 - RNA, 19 nt, Artificial Sequence
  Description of Artificial Sequence: Synthetic oligonucleotide
  Antisense strand to SEQ ID NO: 2085374
cuaaacaucucuugagccc

SEQ ID NO: 2085376 - RNA, 19 nt, Artificial Sequence
  Description of Artificial Sequence: Synthetic oligonucleotide
  Sense strand starting at position 2708 of SEQ ID NO: 1881972
ucaagagauguuuagcauu

SEQ ID NO: 2085377 - RNA, 19 nt, Artificial Sequence
  Description of Artificial Sequence: Synthetic oligonucleotide
  Antisense strand to SEQ ID NO: 2085376
aaugcuaaacaucucuuga

SEQ ID NO: 2085378 - RNA, 19 nt, Artificial Sequence
  Description of Artificial Sequence: Synthetic oligonucleotide
  Sense strand starting at position 2710 of SEQ ID NO: 1881972
aagagauguuuagcauuga

SEQ ID NO: 2085379 - RNA, 19 nt, Artificial Sequence
  Description of Artificial Sequence: Synthetic oligonucleotide
  Antisense strand to SEQ ID NO: 2085378
ucaaugcuaaacaucucuu

SEQ ID NO: 2085380 - RNA, 19 nt, Artificial Sequence
  Description of Artificial Sequence: Synthetic oligonucleotide
  Sense strand starting at position 2714 of SEQ ID NO: 1881972
gauguuuagcauugauuga

SEQ ID NO: 2085381 - RNA, 19 nt, Artificial Sequence
  Description of Artificial Sequence: Synthetic oligonucleotide
  Antisense strand to SEQ ID NO: 2085380
ucaaucaaugcuaaacauc

SEQ ID NO: 2085382 - RNA, 19 nt, Artificial Sequence
  Description of Artificial Sequence: Synthetic oligonucleotide
  Sense strand starting at position 2718 of SEQ ID NO: 1881972
uuuagcauugauugauacu

SEQ ID NO: 2085383 - RNA, 19 nt, Artificial Sequence
  Description of Artificial Sequence: Synthetic oligonucleotide
  Antisense strand to SEQ ID NO: 2085382
aguaucaaucaaugcuaaa

SEQ ID NO: 2085384 - RNA, 19 nt, Artificial Sequence
  Description of Artificial Sequence: Synthetic oligonucleotide
  Sense strand starting at position 2855 of SEQ ID NO: 1881972
auagucguuggucaacaga

SEQ ID NO: 2085385 - RNA, 19 nt, Artificial Sequence
  Description of Artificial Sequence: Synthetic oligonucleotide
  Antisense strand to SEQ ID NO: 2085384
ucuguugaccaacgacuau

SEQ ID NO: 2085386 - RNA, 19 nt, Artificial Sequence
  Description of Artificial Sequence: Synthetic oligonucleotide
  Sense strand starting at position 3348 of SEQ ID NO: 1881972
ugaauaaaggaauguguuu

SEQ ID NO: 2085387 - RNA, 19 nt, Artificial Sequence
  Description of Artificial Sequence: Synthetic oligonucleotide
  Antisense strand to SEQ ID NO: 2085386
aaacacauuccuuuauuca

SEQ ID NO: 2085388 - RNA, 19 nt, Artificial Sequence
  Description of Artificial Sequence: Synthetic oligonucleotide
  Sense strand starting at position 3381 of SEQ ID NO: 1881972
ucuguuguaagugacagau

SEQ ID NO: 2085389 - RNA, 19 nt, Artificial Sequence
  Description of Artificial Sequence: Synthetic oligonucleotide
  Antisense strand to SEQ ID NO: 2085388
aucugucacuuacaacaga

SEQ ID NO: 2085390 - RNA, 19 nt, Artificial Sequence
  Description of Artificial Sequence: Synthetic oligonucleotide
  Sense strand starting at position 3734 of SEQ ID NO: 1881972
cggaguacguguacgguaa

SEQ ID NO: 2085391 - RNA, 19 nt, Artificial Sequence
  Description of Artificial Sequence: Synthetic oligonucleotide
  Antisense strand to SEQ ID NO: 2085390
uuaccguacacguacuccg

SEQ ID NO: 2085392 - RNA, 19 nt, Artificial Sequence
  Description of Artificial Sequence: Synthetic oligonucleotide
  Sense strand starting at position 3753 of SEQ ID NO: 1881972
ccuuacauguuaccugaga

SEQ ID NO: 2085393 - RNA, 19 nt, Artificial Sequence
  Description of Artificial Sequence: Synthetic oligonucleotide
  Antisense strand to SEQ ID NO: 2085392
ucucagguaacauguaagg

SEQ ID NO: 2085394 - RNA, 19 nt, Artificial Sequence
  Description of Artificial Sequence: Synthetic oligonucleotide
  Sense strand starting at position 3782 of SEQ ID NO: 1881972
uagugacucccagggauaa

SEQ ID NO: 2085395 - RNA, 19 nt, Artificial Sequence
  Description of Artificial Sequence: Synthetic oligonucleotide
  Antisense strand to SEQ ID NO: 2085394
uuaucccugggagucacua

SEQ ID NO: 2085396 - RNA, 19 nt, Artificial Sequence
  Description of Artificial Sequence: Synthetic oligonucleotide
  Sense strand starting at position 3784 of SEQ ID NO: 1881972
gugacucccagggauaagu

SEQ ID NO: 2085397 - RNA, 19 nt, Artificial Sequence
  Description of Artificial Sequence: Synthetic oligonucleotide
  Antisense strand to SEQ ID NO: 2085396
acuuaucccugggagucac

SEQ ID NO: 2085398 - RNA, 19 nt, Artificial Sequence
  Description of Artificial Sequence: Synthetic oligonucleotide
  Sense strand starting at position 3886 of SEQ ID NO: 1881972
cauacaggaccaugugaua

SEQ ID NO: 2085399 - RNA, 19 nt, Artificial Sequence
  Description of Artificial Sequence: Synthetic oligonucleotide
  Antisense strand to SEQ ID NO: 2085398
uaucacaugguccuguaug

SEQ ID NO: 2085400 - RNA, 19 nt, Artificial Sequence
  Description of Artificial Sequence: Synthetic oligonucleotide
  Sense strand starting at position 3927 of SEQ ID NO: 1881972
uccugcagaauuuguggua

SEQ ID NO: 2085401 - RNA, 19 nt, Artificial Sequence
  Description of Artificial Sequence: Synthetic oligonucleotide
  Antisense strand to SEQ ID NO: 2085400
uaccacaaauucugcagga

SEQ ID NO: 2085402 - RNA, 19 nt, Artificial Sequence
  Description of Artificial Sequence: Synthetic oligonucleotide
  Sense strand starting at position 3932 of SEQ ID NO: 1881972
cagaauuugugguaggaua

SEQ ID NO: 2085403 - RNA, 19 nt, Artificial Sequence
  Description of Artificial Sequence: Synthetic oligonucleotide
  Antisense strand to SEQ ID NO: 2085402
uauccuaccacaaauucug

SEQ ID NO: 2085404 - RNA, 19 nt, Artificial Sequence
  Description of Artificial Sequence: Synthetic oligonucleotide
  Sense strand starting at position 55 of SEQ ID NO: 1881973
uacacuuggugucugaauu

SEQ ID NO: 2085405 - RNA, 19 nt, Artificial Sequence
  Description of Artificial Sequence: Synthetic oligonucleotide
  Antisense strand to SEQ ID NO: 2085404
aauucagacaccaagugua

SEQ ID NO: 2085406 - RNA, 19 nt, Artificial Sequence
  Description of Artificial Sequence: Synthetic oligonucleotide
  Sense strand starting at position 56 of SEQ ID NO: 1881973
acacuuggugucugaauuc

SEQ ID NO: 2085407 - RNA, 19 nt, Artificial Sequence
  Description of Artificial Sequence: Synthetic oligonucleotide
  Antisense strand to SEQ ID NO: 2085406
gaauucagacaccaagugu

SEQ ID NO: 2085408 - RNA, 19 nt, Artificial Sequence
  Description of Artificial Sequence: Synthetic oligonucleotide
  Sense strand starting at position 118 of SEQ ID NO: 1881973
ccuagaauguauucuggaa

SEQ ID NO: 2085409 - RNA, 19 nt, Artificial Sequence
  Description of Artificial Sequence: Synthetic oligonucleotide
  Antisense strand to SEQ ID NO: 2085408
uuccagaauacauucuagg

SEQ ID NO: 2085410 - RNA, 19 nt, Artificial Sequence
  Description of Artificial Sequence: Synthetic oligonucleotide
  Sense strand starting at position 125 of SEQ ID NO: 1881973
uguauucuggaaugggaga

SEQ ID NO: 2085411 - RNA, 19 nt, Artificial Sequence
  Description of Artificial Sequence: Synthetic oligonucleotide
  Antisense strand to SEQ ID NO: 2085410
ucucccauuccagaauaca

SEQ ID NO: 2085412 - RNA, 19 nt, Artificial Sequence
  Description of Artificial Sequence: Synthetic oligonucleotide
  Sense strand starting at position 245 of SEQ ID NO: 1881973
cagguuugccgggaaacuu

SEQ ID NO: 2085413 - RNA, 19 nt, Artificial Sequence
  Description of Artificial Sequence: Synthetic oligonucleotide
  Antisense strand to SEQ ID NO: 2085412
aaguuucccggcaaaccug

SEQ ID NO: 2085414 - RNA, 19 nt, Artificial Sequence
  Description of Artificial Sequence: Synthetic oligonucleotide
  Sense strand starting at position 253 of SEQ ID NO: 1881973
ccgggaaacuucuccaggu

SEQ ID NO: 2085415 - RNA, 19 nt, Artificial Sequence
  Description of Artificial Sequence: Synthetic oligonucleotide
  Antisense strand to SEQ ID NO: 2085414
accuggagaaguuucccgg

SEQ ID NO: 2085416 - RNA, 19 nt, Artificial Sequence
  Description of Artificial Sequence: Synthetic oligonucleotide
  Sense strand starting at position 254 of SEQ ID NO: 1881973
cgggaaacuucuccagguu

SEQ ID NO: 2085417 - RNA, 19 nt, Artificial Sequence
  Description of Artificial Sequence: Synthetic oligonucleotide
  Antisense strand to SEQ ID NO: 2085416
aaccuggagaaguuucccg

SEQ ID NO: 2085418 - RNA, 19 nt, Artificial Sequence
  Description of Artificial Sequence: Synthetic oligonucleotide
  Sense strand starting at position 345 of SEQ ID NO: 1881973
guggaucccuaauuccaua

SEQ ID NO: 2085419 - RNA, 19 nt, Artificial Sequence
  Description of Artificial Sequence: Synthetic oligonucleotide
  Antisense strand to SEQ ID NO: 2085418
uauggaauuagggauccac

SEQ ID NO: 2085420 - RNA, 19 nt, Artificial Sequence
  Description of Artificial Sequence: Synthetic oligonucleotide
  Sense strand starting at position 361 of SEQ ID NO: 1881973
auauguagccuccagucau

SEQ ID NO: 2085421 - RNA, 19 nt, Artificial Sequence
  Description of Artificial Sequence: Synthetic oligonucleotide
  Antisense strand to SEQ ID NO: 2085420
augacuggaggcuacauau

SEQ ID NO: 2085422 - RNA, 19 nt, Artificial Sequence
  Description of Artificial Sequence: Synthetic oligonucleotide
  Sense strand starting at position 461 of SEQ ID NO: 1881973
aguagucuuugagcugaaa

SEQ ID NO: 2085423 - RNA, 19 nt, Artificial Sequence
  Description of Artificial Sequence: Synthetic oligonucleotide
  Antisense strand to SEQ ID NO: 2085422
uuucagcucaaagacuacu

SEQ ID NO: 2085424 - RNA, 19 nt, Artificial Sequence
  Description of Artificial Sequence: Synthetic oligonucleotide
  Sense strand starting at position 474 of SEQ ID NO: 1881973
cugaaaugccuggguggga

SEQ ID NO: 2085425 - RNA, 19 nt, Artificial Sequence
  Description of Artificial Sequence: Synthetic oligonucleotide
  Antisense strand to SEQ ID NO: 2085424
ucccacccaggcauuucag

SEQ ID NO: 2085426 - RNA, 19 nt, Artificial Sequence
  Description of Artificial Sequence: Synthetic oligonucleotide
  Sense strand starting at position 550 of SEQ ID NO: 1881973
agagauaacugucuccaga

SEQ ID NO: 2085427 - RNA, 19 nt, Artificial Sequence
  Description of Artificial Sequence: Synthetic oligonucleotide
  Antisense strand to SEQ ID NO: 2085426
ucuggagacaguuaucucu

SEQ ID NO: 2085428 - RNA, 19 nt, Artificial Sequence
  Description of Artificial Sequence: Synthetic oligonucleotide
  Sense strand starting at position 585 of SEQ ID NO: 1881973
auugucugcuuaucgauuu

SEQ ID NO: 2085429 - RNA, 19 nt, Artificial Sequence
  Description of Artificial Sequence: Synthetic oligonucleotide
  Antisense strand to SEQ ID NO: 2085428
aaaucgauaagcagacaau

SEQ ID NO: 2085430 - RNA, 19 nt, Artificial Sequence
  Description of Artificial Sequence: Synthetic oligonucleotide
  Sense strand starting at position 771 of SEQ ID NO: 1881973
ccaccauaacaguggucau

SEQ ID NO: 2085431 - RNA, 19 nt, Artificial Sequence
  Description of Artificial Sequence: Synthetic oligonucleotide
  Antisense strand to SEQ ID NO: 2085430
augaccacuguuauggugg

SEQ ID NO: 2085432 - RNA, 19 nt, Artificial Sequence
  Description of Artificial Sequence: Synthetic oligonucleotide
  Sense strand starting at position 1002 of SEQ ID NO: 1881973
uugaguauuucuucggcau

SEQ ID NO: 2085433 - RNA, 19 nt, Artificial Sequence
  Description of Artificial Sequence: Synthetic oligonucleotide
  Antisense strand to SEQ ID NO: 2085432
augccgaagaaauacucaa

SEQ ID NO: 2085434 - RNA, 19 nt, Artificial Sequence
  Description of Artificial Sequence: Synthetic oligonucleotide
  Sense strand starting at position 1003 of SEQ ID NO: 1881973
ugaguauuucuucggcauu

SEQ ID NO: 2085435 - RNA, 19 nt, Artificial Sequence
  Description of Artificial Sequence: Synthetic oligonucleotide
  Antisense strand to SEQ ID NO: 2085434
aaugccgaagaaauacuca

SEQ ID NO: 2085436 - RNA, 19 nt, Artificial Sequence
  Description of Artificial Sequence: Synthetic oligonucleotide
  Sense strand starting at position 1005 of SEQ ID NO: 1881973
aguauuucuucggcauuga

SEQ ID NO: 2085437 - RNA, 19 nt, Artificial Sequence
  Description of Artificial Sequence: Synthetic oligonucleotide
  Antisense strand to SEQ ID NO: 2085436
ucaaugccgaagaaauacu

SEQ ID NO: 2085438 - RNA, 19 nt, Artificial Sequence
  Description of Artificial Sequence: Synthetic oligonucleotide
  Sense strand starting at position 1240 of SEQ ID NO: 1881973
ggagacacugcuugccuaa

SEQ ID NO: 2085439 - RNA, 19 nt, Artificial Sequence
  Description of Artificial Sequence: Synthetic oligonucleotide
  Antisense strand to SEQ ID NO: 2085438
uuaggcaagcagugucucc

SEQ ID NO: 2085440 - RNA, 19 nt, Artificial Sequence
  Description of Artificial Sequence: Synthetic oligonucleotide
  Sense strand starting at position 1276 of SEQ ID NO: 1881973
ggguauaggcaguauauaa

SEQ ID NO: 2085441 - RNA, 19 nt, Artificial Sequence
  Description of Artificial Sequence: Synthetic oligonucleotide
  Antisense strand to SEQ ID NO: 2085440
uuauauacugccuauaccc

SEQ ID NO: 2085442 - RNA, 19 nt, Artificial Sequence
  Description of Artificial Sequence: Synthetic oligonucleotide
  Sense strand starting at position 1973 of SEQ ID NO: 1881973
gaacguaagccauauauac

SEQ ID NO: 2085443 - RNA, 19 nt, Artificial Sequence
  Description of Artificial Sequence: Synthetic oligonucleotide
  Antisense strand to SEQ ID NO: 2085442
guauauauggcuuacguuc

SEQ ID NO: 2085444 - RNA, 19 nt, Artificial Sequence
  Description of Artificial Sequence: Synthetic oligonucleotide
  Sense strand starting at position 2125 of SEQ ID NO: 1881973
uccaaagcugcugagucau

SEQ ID NO: 2085445 - RNA, 19 nt, Artificial Sequence
  Description of Artificial Sequence: Synthetic oligonucleotide
  Antisense strand to SEQ ID NO: 2085444
augacucagcagcuuugga

SEQ ID NO: 2085446 - RNA, 19 nt, Artificial Sequence
  Description of Artificial Sequence: Synthetic oligonucleotide
  Sense strand starting at position 2136 of SEQ ID NO: 1881973
ugagucaugcugcaccaaa

SEQ ID NO: 2085447 - RNA, 19 nt, Artificial Sequence
  Description of Artificial Sequence: Synthetic oligonucleotide
  Antisense strand to SEQ ID NO: 2085446
uuuggugcagcaugacuca

SEQ ID NO: 2085448 - RNA, 19 nt, Artificial Sequence
  Description of Artificial Sequence: Synthetic oligonucleotide
  Sense strand starting at position 2164 of SEQ ID NO: 1881973
uggccuacuccugacggaa

SEQ ID NO: 2085449 - RNA, 19 nt, Artificial Sequence
  Description of Artificial Sequence: Synthetic oligonucleotide
  Antisense strand to SEQ ID NO: 2085448
uuccgucaggaguaggcca

SEQ ID NO: 2085450 - RNA, 19 nt, Artificial Sequence
  Description of Artificial Sequence: Synthetic oligonucleotide
  Sense strand starting at position 2398 of SEQ ID NO: 1881973
gugggaaaccacugaccuu

SEQ ID NO: 2085451 - RNA, 19 nt, Artificial Sequence
  Description of Artificial Sequence: Synthetic oligonucleotide
  Antisense strand to SEQ ID NO: 2085450
aaggucagugguuucccac

SEQ ID NO: 2085452 - RNA, 19 nt, Artificial Sequence
  Description of Artificial Sequence: Synthetic oligonucleotide
  Sense strand starting at position 2433 of SEQ ID NO: 1881973
cucuuuagugguuaacuga

SEQ ID NO: 2085453 - RNA, 19 nt, Artificial Sequence
  Description of Artificial Sequence: Synthetic oligonucleotide
  Antisense strand to SEQ ID NO: 2085452
ucaguuaaccacuaaagag

SEQ ID NO: 2085454 - RNA, 19 nt, Artificial Sequence
  Description of Artificial Sequence: Synthetic oligonucleotide
  Sense strand starting at position 2436 of SEQ ID NO: 1881973
uuuagugguuaacugaaua

SEQ ID NO: 2085455 - RNA, 19 nt, Artificial Sequence
  Description of Artificial Sequence: Synthetic oligonucleotide
  Antisense strand to SEQ ID NO: 2085454
uauucaguuaaccacuaaa

SEQ ID NO: 2085456 - RNA, 19 nt, Artificial Sequence
  Description of Artificial Sequence: Synthetic oligonucleotide
  Sense strand starting at position 2592 of SEQ ID NO: 1881973
gugaauacaucucuaaaug

SEQ ID NO: 2085457 - RNA, 19 nt, Artificial Sequence
  Description of Artificial Sequence: Synthetic oligonucleotide
  Antisense strand to SEQ ID NO: 2085456
cauuuagagauguauucac

SEQ ID NO: 2085458 - RNA, 19 nt, Artificial Sequence
  Description of Artificial Sequence: Synthetic oligonucleotide
  Sense strand starting at position 2737 of SEQ ID NO: 1881973
cugauuuccuacuauugga

SEQ ID NO: 2085459 - RNA, 19 nt, Artificial Sequence
  Description of Artificial Sequence: Synthetic oligonucleotide
  Antisense strand to SEQ ID NO: 2085458
uccaauaguaggaaaucag

SEQ ID NO: 2085460 - RNA, 19 nt, Artificial Sequence
  Description of Artificial Sequence: Synthetic oligonucleotide
  Sense strand starting at position 2914 of SEQ ID NO: 1881973
agaguuguagccgaucaca

SEQ ID NO: 2085461 - RNA, 19 nt, Artificial Sequence
  Description of Artificial Sequence: Synthetic oligonucleotide
  Antisense strand to SEQ ID NO: 2085460
ugugaucggcuacaacucu

SEQ ID NO: 2085462 - RNA, 19 nt, Artificial Sequence
  Description of Artificial Sequence: Synthetic oligonucleotide
  Sense strand starting at position 2950 of SEQ ID NO: 1881973
auuugccagcucugauuau

SEQ ID NO: 2085463 - RNA, 19 nt, Artificial Sequence
  Description of Artificial Sequence: Synthetic oligonucleotide
  Antisense strand to SEQ ID NO: 2085462
auaaucagagcuggcaaau

SEQ ID NO: 2085464 - RNA, 19 nt, Artificial Sequence
  Description of Artificial Sequence: Synthetic oligonucleotide
  Sense strand starting at position 2954 of SEQ ID NO: 1881973
gccagcucugauuauaauu

SEQ ID NO: 2085465 - RNA, 19 nt, Artificial Sequence
  Description of Artificial Sequence: Synthetic oligonucleotide
  Antisense strand to SEQ ID NO: 2085464
aauuauaaucagagcuggc

SEQ ID NO: 2085466 - RNA, 19 nt, Artificial Sequence
  Description of Artificial Sequence: Synthetic oligonucleotide
  Sense strand starting at position 3203 of SEQ ID NO: 1881973
uucggcuuucuacaagacu

SEQ ID NO: 2085467 - RNA, 19 nt, Artificial Sequence
  Description of Artificial Sequence: Synthetic oligonucleotide
  Antisense strand to SEQ ID NO: 2085466
agucuuguagaaagccgaa

SEQ ID NO: 2085468 - RNA, 19 nt, Artificial Sequence
  Description of Artificial Sequence: Synthetic oligonucleotide
  Sense strand starting at position 3206 of SEQ ID NO: 1881973
ggcuuucuacaagacucuu

SEQ ID NO: 2085469 - RNA, 19 nt, Artificial Sequence
  Description of Artificial Sequence: Synthetic oligonucleotide
  Antisense strand to SEQ ID NO: 2085468
aagagucuuguagaaagcc

SEQ ID NO: 2085470 - RNA, 19 nt, Artificial Sequence
  Description of Artificial Sequence: Synthetic oligonucleotide
  Sense strand starting at position 3295 of SEQ ID NO: 1881973
ccgcaauguggugagauga

SEQ ID NO: 2085471 - RNA, 19 nt, Artificial Sequence
  Description of Artificial Sequence: Synthetic oligonucleotide
  Antisense strand to SEQ ID NO: 2085470
ucaucucaccacauugcgg

SEQ ID NO: 2085472 - RNA, 19 nt, Artificial Sequence
  Description of Artificial Sequence: Synthetic oligonucleotide
  Sense strand starting at position 3349 of SEQ ID NO: 1881973
ggugcucuccugugauuua

SEQ ID NO: 2085473 - RNA, 19 nt, Artificial Sequence
  Description of Artificial Sequence: Synthetic oligonucleotide
  Antisense strand to SEQ ID NO: 2085472
uaaaucacaggagagcacc

SEQ ID NO: 2085474 - RNA, 19 nt, Artificial Sequence
  Description of Artificial Sequence: Synthetic oligonucleotide
  Sense strand starting at position 3352 of SEQ ID NO: 1881973
gcucuccugugauuuaacu

SEQ ID NO: 2085475 - RNA, 19 nt, Artificial Sequence
  Description of Artificial Sequence: Synthetic oligonucleotide
  Antisense strand to SEQ ID NO: 2085474
aguuaaaucacaggagagc

SEQ ID NO: 2085476 - RNA, 19 nt, Artificial Sequence
  Description of Artificial Sequence: Synthetic oligonucleotide
  Sense strand starting at position 3410 of SEQ ID NO: 1881973
uguuaugguccauaaauau

SEQ ID NO: 2085477 - RNA, 19 nt, Artificial Sequence
  Description of Artificial Sequence: Synthetic oligonucleotide
  Antisense strand to SEQ ID NO: 2085476
auauuuauggaccauaaca

SEQ ID NO: 2085478 - RNA, 19 nt, Artificial Sequence
  Description of Artificial Sequence: Synthetic oligonucleotide
  Sense strand starting at position 3491 of SEQ ID NO: 1881973
ggaugacucaacuguggag

SEQ ID NO: 2085479 - RNA, 19 nt, Artificial Sequence
  Description of Artificial Sequence: Synthetic oligonucleotide
  Antisense strand to SEQ ID NO: 2085478
cuccacaguugagucaucc

SEQ ID NO: 2085480 - RNA, 19 nt, Artificial Sequence
  Description of Artificial Sequence: Synthetic oligonucleotide
  Sense strand starting at position 3505 of SEQ ID NO: 1881973
uggagccuuguauacagau

SEQ ID NO: 2085481 - RNA, 19 nt, Artificial Sequence
  Description of Artificial Sequence: Synthetic oligonucleotide
  Antisense strand to SEQ ID NO: 2085480
aucuguauacaaggcucca

SEQ ID NO: 2085482 - RNA, 19 nt, Artificial Sequence
  Description of Artificial Sequence: Synthetic oligonucleotide
  Sense strand starting at position 3542 of SEQ ID NO: 1881973
agaccaaagucaucacgaa

SEQ ID NO: 2085483 - RNA, 19 nt, Artificial Sequence
  Description of Artificial Sequence: Synthetic oligonucleotide
  Antisense strand to SEQ ID NO: 2085482
uucgugaugacuuuggucu

SEQ ID NO: 2085484 - RNA, 19 nt, Artificial Sequence
  Description of Artificial Sequence: Synthetic oligonucleotide
  Sense strand starting at position 189 of SEQ ID NO: 1881974
uuccauuacucuuugaugu

SEQ ID NO: 2085485 - RNA, 19 nt, Artificial Sequence
  Description of Artificial Sequence: Synthetic oligonucleotide
  Antisense strand to SEQ ID NO: 2085484
acaucaaagaguaauggaa

SEQ ID NO: 2085486 - RNA, 19 nt, Artificial Sequence
  Description of Artificial Sequence: Synthetic oligonucleotide
  Sense strand starting at position 209 of SEQ ID NO: 1881974
acgucugucccucagauau

SEQ ID NO: 2085487 - RNA, 19 nt, Artificial Sequence
  Description of Artificial Sequence: Synthetic oligonucleotide
  Antisense strand to SEQ ID NO: 2085486
auaucugagggacagacgu

SEQ ID NO: 2085488 - RNA, 19 nt, Artificial Sequence
  Description of Artificial Sequence: Synthetic oligonucleotide
  Sense strand starting at position 219 of SEQ ID NO: 1881974
cucagauaucacgggcaaa

SEQ ID NO: 2085489 - RNA, 19 nt, Artificial Sequence
  Description of Artificial Sequence: Synthetic oligonucleotide
  Antisense strand to SEQ ID NO: 2085488
uuugcccgugauaucugag

SEQ ID NO: 2085490 - RNA, 19 nt, Artificial Sequence
  Description of Artificial Sequence: Synthetic oligonucleotide
  Sense strand starting at position 220 of SEQ ID NO: 1881974
ucagauaucacgggcaaag

SEQ ID NO: 2085491 - RNA, 19 nt, Artificial Sequence
  Description of Artificial Sequence: Synthetic oligonucleotide
  Antisense strand to SEQ ID NO: 2085490
cuuugcccgugauaucuga

SEQ ID NO: 2085492 - RNA, 19 nt, Artificial Sequence
  Description of Artificial Sequence: Synthetic oligonucleotide
  Sense strand starting at position 289 of SEQ ID NO: 1881974
cuauuauagcuguauagcu

SEQ ID NO: 2085493 - RNA, 19 nt, Artificial Sequence
  Description of Artificial Sequence: Synthetic oligonucleotide
  Antisense strand to SEQ ID NO: 2085492
agcuauacagcuauaauag

SEQ ID NO: 2085494 - RNA, 19 nt, Artificial Sequence
  Description of Artificial Sequence: Synthetic oligonucleotide
  Sense strand starting at position 309 of SEQ ID NO: 1881974
uuaaacauagugugucauu

SEQ ID NO: 2085495 - RNA, 19 nt, Artificial Sequence
  Description of Artificial Sequence: Synthetic oligonucleotide
  Antisense strand to SEQ ID NO: 2085494
aaugacacacuauguuuaa

SEQ ID NO: 2085496 - RNA, 19 nt, Artificial Sequence
  Description of Artificial Sequence: Synthetic oligonucleotide
  Sense strand starting at position 314 of SEQ ID NO: 1881974
cauagugugucauugaaua

SEQ ID NO: 2085497 - RNA, 19 nt, Artificial Sequence
  Description of Artificial Sequence: Synthetic oligonucleotide
  Antisense strand to SEQ ID NO: 2085496
uauucaaugacacacuaug

SEQ ID NO: 2085498 - RNA, 19 nt, Artificial Sequence
  Description of Artificial Sequence: Synthetic oligonucleotide
  Sense strand starting at position 355 of SEQ ID NO: 1881974
acuaaagaccugugagguu

SEQ ID NO: 2085499 - RNA, 19 nt, Artificial Sequence
  Description of Artificial Sequence: Synthetic oligonucleotide
  Antisense strand to SEQ ID NO: 2085498
aaccucacaggucuuuagu

SEQ ID NO: 2085500 - RNA, 19 nt, Artificial Sequence
  Description of Artificial Sequence: Synthetic oligonucleotide
  Sense strand starting at position 426 of SEQ ID NO: 1881974
gcuauugaggcauacauga

SEQ ID NO: 2085501 - RNA, 19 nt, Artificial Sequence
  Description of Artificial Sequence: Synthetic oligonucleotide
  Antisense strand to SEQ ID NO: 2085500
ucauguaugccucaauagc

SEQ ID NO: 2085502 - RNA, 19 nt, Artificial Sequence
  Description of Artificial Sequence: Synthetic oligonucleotide
  Sense strand starting at position 471 of SEQ ID NO: 1881974
ggacauguucuagaauguu

SEQ ID NO: 2085503 - RNA, 19 nt, Artificial Sequence
  Description of Artificial Sequence: Synthetic oligonucleotide
  Antisense strand to SEQ ID NO: 2085502
aacauucuagaacaugucc

SEQ ID NO: 2085504 - RNA, 19 nt, Artificial Sequence
  Description of Artificial Sequence: Synthetic oligonucleotide
  Sense strand starting at position 538 of SEQ ID NO: 1881974
gaagcagaaucccuguaga

SEQ ID NO: 2085505 - RNA, 19 nt, Artificial Sequence
  Description of Artificial Sequence: Synthetic oligonucleotide
  Antisense strand to SEQ ID NO: 2085504
ucuacagggauucugcuuc

SEQ ID NO: 2085506 - RNA, 19 nt, Artificial Sequence
  Description of Artificial Sequence: Synthetic oligonucleotide
  Sense strand starting at position 541 of SEQ ID NO: 1881974
gcagaaucccuguagagca

SEQ ID NO: 2085507 - RNA, 19 nt, Artificial Sequence
  Description of Artificial Sequence: Synthetic oligonucleotide
  Antisense strand to SEQ ID NO: 2085506
ugcucuacagggauucugc

SEQ ID NO: 2085508 - RNA, 19 nt, Artificial Sequence
  Description of Artificial Sequence: Synthetic oligonucleotide
  Sense strand starting at position 605 of SEQ ID NO: 1881974
gccagcaacccaugagaua

SEQ ID NO: 2085509 - RNA, 19 nt, Artificial Sequence
  Description of Artificial Sequence: Synthetic oligonucleotide
  Antisense strand to SEQ ID NO: 2085508
uaucucauggguugcuggc

SEQ ID NO: 2085510 - RNA, 19 nt, Artificial Sequence
  Description of Artificial Sequence: Synthetic oligonucleotide
  Sense strand starting at position 1217 of SEQ ID NO: 1881974
ugaauaaugggucauccgu

SEQ ID NO: 2085511 - RNA, 19 nt, Artificial Sequence
  Description of Artificial Sequence: Synthetic oligonucleotide
  Antisense strand to SEQ ID NO: 2085510
acggaugacccauuauuca

SEQ ID NO: 2085512 - RNA, 19 nt, Artificial Sequence
  Description of Artificial Sequence: Synthetic oligonucleotide
  Sense strand starting at position 1300 of SEQ ID NO: 1881974
acaguugaguuacuauuga

SEQ ID NO: 2085513 - RNA, 19 nt, Artificial Sequence
  Description of Artificial Sequence: Synthetic oligonucleotide
  Antisense strand to SEQ ID NO: 2085512
ucaauaguaacucaacugu

SEQ ID NO: 2085514 - RNA, 19 nt, Artificial Sequence
  Description of Artificial Sequence: Synthetic oligonucleotide
  Sense strand starting at position 1337 of SEQ ID NO: 1881974
gcuaucaaacaguagguau

SEQ ID NO: 2085515 - RNA, 19 nt, Artificial Sequence
  Description of Artificial Sequence: Synthetic oligonucleotide
  Antisense strand to SEQ ID NO: 2085514
auaccuacuguuugauagc

SEQ ID NO: 2085516 - RNA, 19 nt, Artificial Sequence
  Description of Artificial Sequence: Synthetic oligonucleotide
  Sense strand starting at position 1723 of SEQ ID NO: 1881974
uccuacugaugagugagaa

SEQ ID NO: 2085517 - RNA, 19 nt, Artificial Sequence
  Description of Artificial Sequence: Synthetic oligonucleotide
  Antisense strand to SEQ ID NO: 2085516
uucucacucaucaguagga

SEQ ID NO: 2085518 - RNA, 19 nt, Artificial Sequence
  Description of Artificial Sequence: Synthetic oligonucleotide
  Sense strand starting at position 1727 of SEQ ID NO: 1881974
acugaugagugagaacaga

SEQ ID NO: 2085519 - RNA, 19 nt, Artificial Sequence
  Description of Artificial Sequence: Synthetic oligonucleotide
  Antisense strand to SEQ ID NO: 2085518
ucuguucucacucaucagu

SEQ ID NO: 2085520 - RNA, 19 nt, Artificial Sequence
  Description of Artificial Sequence: Synthetic oligonucleotide
  Sense strand starting at position 1821 of SEQ ID NO: 1881974
ugggcugguacuggagaau

SEQ ID NO: 2085521 - RNA, 19 nt, Artificial Sequence
  Description of Artificial Sequence: Synthetic oligonucleotide
  Antisense strand to SEQ ID NO: 2085520
auucuccaguaccagccca

SEQ ID NO: 2085522 - RNA, 19 nt, Artificial Sequence
  Description of Artificial Sequence: Synthetic oligonucleotide
  Sense strand starting at position 1926 of SEQ ID NO: 1881974
ggacucugcaagggucauu

SEQ ID NO: 2085523 - RNA, 19 nt, Artificial Sequence
  Description of Artificial Sequence: Synthetic oligonucleotide
  Antisense strand to SEQ ID NO: 2085522
aaugacccuugcagagucc

SEQ ID NO: 2085524 - RNA, 19 nt, Artificial Sequence
  Description of Artificial Sequence: Synthetic oligonucleotide
  Sense strand starting at position 1931 of SEQ ID NO: 1881974
cugcaagggucauugguua

SEQ ID NO: 2085525 - RNA, 19 nt, Artificial Sequence
  Description of Artificial Sequence: Synthetic oligonucleotide
  Antisense strand to SEQ ID NO: 2085524
uaaccaaugacccuugcag

SEQ ID NO: 2085526 - RNA, 19 nt, Artificial Sequence
  Description of Artificial Sequence: Synthetic oligonucleotide
  Sense strand starting at position 1935 of SEQ ID NO: 1881974
aagggucauugguuauauu

SEQ ID NO: 2085527 - RNA, 19 nt, Artificial Sequence
  Description of Artificial Sequence: Synthetic oligonucleotide
  Antisense strand to SEQ ID NO: 2085526
aauauaaccaaugacccuu

SEQ ID NO: 2085528 - RNA, 19 nt, Artificial Sequence
  Description of Artificial Sequence: Synthetic oligonucleotide
  Sense strand starting at position 2445 of SEQ ID NO: 1881974
cuguccaucugagugguaa

SEQ ID NO: 2085529 - RNA, 19 nt, Artificial Sequence
  Description of Artificial Sequence: Synthetic oligonucleotide
  Antisense strand to SEQ ID NO: 2085528
uuaccacucagauggacag

SEQ ID NO: 2085530 - RNA, 19 nt, Artificial Sequence
  Description of Artificial Sequence: Synthetic oligonucleotide
  Sense strand starting at position 2446 of SEQ ID NO: 1881974
uguccaucugagugguaac

SEQ ID NO: 2085531 - RNA, 19 nt, Artificial Sequence
  Description of Artificial Sequence: Synthetic oligonucleotide
  Antisense strand to SEQ ID NO: 2085530
guuaccacucagauggaca

SEQ ID NO: 2085532 - RNA, 19 nt, Artificial Sequence
  Description of Artificial Sequence: Synthetic oligonucleotide
  Sense strand starting at position 2447 of SEQ ID NO: 1881974
guccaucugagugguaacu

SEQ ID NO: 2085533 - RNA, 19 nt, Artificial Sequence
  Description of Artificial Sequence: Synthetic oligonucleotide
  Antisense strand to SEQ ID NO: 2085532
aguuaccacucagauggac

SEQ ID NO: 2085534 - RNA, 19 nt, Artificial Sequence
  Description of Artificial Sequence: Synthetic oligonucleotide
  Sense strand starting at position 2529 of SEQ ID NO: 1881974
acaagcucugacugcaaga

SEQ ID NO: 2085535 - RNA, 19 nt, Artificial Sequence
  Description of Artificial Sequence: Synthetic oligonucleotide
  Antisense strand to SEQ ID NO: 2085534
ucuugcagucagagcuugu

SEQ ID NO: 2085536 - RNA, 19 nt, Artificial Sequence
  Description of Artificial Sequence: Synthetic oligonucleotide
  Sense strand starting at position 2582 of SEQ ID NO: 1881974
uguaucagagccuaauuga

SEQ ID NO: 2085537 - RNA, 19 nt, Artificial Sequence
  Description of Artificial Sequence: Synthetic oligonucleotide
  Antisense strand to SEQ ID NO: 2085536
ucaauuaggcucugauaca

SEQ ID NO: 2085538 - RNA, 19 nt, Artificial Sequence
  Description of Artificial Sequence: Synthetic oligonucleotide
  Sense strand starting at position 2591 of SEQ ID NO: 1881974
gccuaauugaccugaugga

SEQ ID NO: 2085539 - RNA, 19 nt, Artificial Sequence
  Description of Artificial Sequence: Synthetic oligonucleotide
  Antisense strand to SEQ ID NO: 2085538
uccaucaggucaauuaggc

SEQ ID NO: 2085540 - RNA, 19 nt, Artificial Sequence
  Description of Artificial Sequence: Synthetic oligonucleotide
  Sense strand starting at position 3005 of SEQ ID NO: 1881974
guaagcagauaucuagaaa

SEQ ID NO: 2085541 - RNA, 19 nt, Artificial Sequence
  Description of Artificial Sequence: Synthetic oligonucleotide
  Antisense strand to SEQ ID NO: 2085540
uuucuagauaucugcuuac

SEQ ID NO: 2085542 - RNA, 19 nt, Artificial Sequence
  Description of Artificial Sequence: Synthetic oligonucleotide
  Sense strand starting at position 3088 of SEQ ID NO: 1881974
uuugauggcucauuaguag

SEQ ID NO: 2085543 - RNA, 19 nt, Artificial Sequence
  Description of Artificial Sequence: Synthetic oligonucleotide
  Antisense strand to SEQ ID NO: 2085542
cuacuaaugagccaucaaa

SEQ ID NO: 2085544 - RNA, 19 nt, Artificial Sequence
  Description of Artificial Sequence: Synthetic oligonucleotide
  Sense strand starting at position 3236 of SEQ ID NO: 1881974
cuaugaaagguguacaugu

SEQ ID NO: 2085545 - RNA, 19 nt, Artificial Sequence
  Description of Artificial Sequence: Synthetic oligonucleotide
  Antisense strand to SEQ ID NO: 2085544
acauguacaccuuucauag

SEQ ID NO: 2085546 - RNA, 19 nt, Artificial Sequence
  Description of Artificial Sequence: Synthetic oligonucleotide
  Sense strand starting at position 3425 of SEQ ID NO: 1881974
gucauauguaaauggcaga

SEQ ID NO: 2085547 - RNA, 19 nt, Artificial Sequence
  Description of Artificial Sequence: Synthetic oligonucleotide
  Antisense strand to SEQ ID NO: 2085546
ucugccauuuacauaugac

SEQ ID NO: 2085548 - RNA, 19 nt, Artificial Sequence
  Description of Artificial Sequence: Synthetic oligonucleotide
  Sense strand starting at position 3543 of SEQ ID NO: 1881974
gaagccauauagguaagaa

SEQ ID NO: 2085549 - RNA, 19 nt, Artificial Sequence
  Description of Artificial Sequence: Synthetic oligonucleotide
  Antisense strand to SEQ ID NO: 2085548
uucuuaccuauauggcuuc

SEQ ID NO: 2085550 - RNA, 19 nt, Artificial Sequence
  Description of Artificial Sequence: Synthetic oligonucleotide
  Sense strand starting at position 3613 of SEQ ID NO: 1881974
aacuuuguacucugcgaaa

SEQ ID NO: 2085551 - RNA, 19 nt, Artificial Sequence
  Description of Artificial Sequence: Synthetic oligonucleotide
  Antisense strand to SEQ ID NO: 2085550
uuucgcagaguacaaaguu

SEQ ID NO: 2085552 - RNA, 19 nt, Artificial Sequence
  Description of Artificial Sequence: Synthetic oligonucleotide
  Sense strand starting at position 3686 of SEQ ID NO: 1881974
gagggaauuugcuaccagu

SEQ ID NO: 2085553 - RNA, 19 nt, Artificial Sequence
  Description of Artificial Sequence: Synthetic oligonucleotide
  Antisense strand to SEQ ID NO: 2085552
acugguagcaaauucccuc

SEQ ID NO: 2085554 - RNA, 19 nt, Artificial Sequence
  Description of Artificial Sequence: Synthetic oligonucleotide
  Sense strand starting at position 3823 of SEQ ID NO: 1881974
ugugaaauguauucaggag

SEQ ID NO: 2085555 - RNA, 19 nt, Artificial Sequence
  Description of Artificial Sequence: Synthetic oligonucleotide
  Antisense strand to SEQ ID NO: 2085554
cuccugaauacauuucaca

SEQ ID NO: 2085556 - RNA, 19 nt, Artificial Sequence
  Description of Artificial Sequence: Synthetic oligonucleotide
  Sense strand starting at position 3853 of SEQ ID NO: 1881974
uacugaaccuggucaguuu

SEQ ID NO: 2085557 - RNA, 19 nt, Artificial Sequence
  Description of Artificial Sequence: Synthetic oligonucleotide
  Antisense strand to SEQ ID NO: 2085556
aaacugaccagguucagua

SEQ ID NO: 2085558 - RNA, 19 nt, Artificial Sequence
  Description of Artificial Sequence: Synthetic oligonucleotide
  Sense strand starting at position 3888 of SEQ ID NO: 1881974
ugaauuguacugcaucuua

SEQ ID NO: 2085559 - RNA, 19 nt, Artificial Sequence
  Description of Artificial Sequence: Synthetic oligonucleotide
  Antisense strand to SEQ ID NO: 2085558
uaagaugcaguacaauuca

SEQ ID NO: 2085560 - RNA, 19 nt, Artificial Sequence
  Description of Artificial Sequence: Synthetic oligonucleotide
  Sense strand starting at position 3899 of SEQ ID NO: 1881974
gcaucuuaacaguauguau

SEQ ID NO: 2085561 - RNA, 19 nt, Artificial Sequence
  Description of Artificial Sequence: Synthetic oligonucleotide
  Antisense strand to SEQ ID NO: 2085560
auacauacuguuaagaugc

SEQ ID NO: 2085562 - RNA, 19 nt, Artificial Sequence
  Description of Artificial Sequence: Synthetic oligonucleotide
  Sense strand starting at position 3914 of SEQ ID NO: 1881974
guauuaggauucuugcagu

SEQ ID NO: 2085563 - RNA, 19 nt, Artificial Sequence
  Description of Artificial Sequence: Synthetic oligonucleotide
  Antisense strand to SEQ ID NO: 2085562
acugcaagaauccuaauac

SEQ ID NO: 2085564 - RNA, 19 nt, Artificial Sequence
  Description of Artificial Sequence: Synthetic oligonucleotide
  Sense strand starting at position 20 of SEQ ID NO: 1881975
aaauguagcucagugguuu

SEQ ID NO: 2085565 - RNA, 19 nt, Artificial Sequence
  Description of Artificial Sequence: Synthetic oligonucleotide
  Antisense strand to SEQ ID NO: 2085564
aaaccacugagcuacauuu

SEQ ID NO: 2085566 - RNA, 19 nt, Artificial Sequence
  Description of Artificial Sequence: Synthetic oligonucleotide
  Sense strand starting at position 65 of SEQ ID NO: 1881975
ggagacauuuggcgauauc

SEQ ID NO: 2085567 - RNA, 19 nt, Artificial Sequence
  Description of Artificial Sequence: Synthetic oligonucleotide
  Antisense strand to SEQ ID NO: 2085566
gauaucgccaaaugucucc

SEQ ID NO: 2085568 - RNA, 19 nt, Artificial Sequence
  Description of Artificial Sequence: Synthetic oligonucleotide
  Sense strand starting at position 164 of SEQ ID NO: 1881975
agcaaugaaugccagacau

SEQ ID NO: 2085569 - RNA, 19 nt, Artificial Sequence
  Description of Artificial Sequence: Synthetic oligonucleotide
  Antisense strand to SEQ ID NO: 2085568
augucuggcauucauugcu

SEQ ID NO: 2085570 - RNA, 19 nt, Artificial Sequence
  Description of Artificial Sequence: Synthetic oligonucleotide
  Sense strand starting at position 340 of SEQ ID NO: 1881975
guaauuugcuucccuggua

SEQ ID NO: 2085571 - RNA, 19 nt, Artificial Sequence
  Description of Artificial Sequence: Synthetic oligonucleotide
  Antisense strand to SEQ ID NO: 2085570
uaccagggaagcaaauuac

SEQ ID NO: 2085572 - RNA, 19 nt, Artificial Sequence
  Description of Artificial Sequence: Synthetic oligonucleotide
  Sense strand starting at position 468 of SEQ ID NO: 1881975
gcuggcaugcauuaaucua

SEQ ID NO: 2085573 - RNA, 19 nt, Artificial Sequence
  Description of Artificial Sequence: Synthetic oligonucleotide
  Antisense strand to SEQ ID NO: 2085572
uagauuaaugcaugccagc

SEQ ID NO: 2085574 - RNA, 19 nt, Artificial Sequence
  Description of Artificial Sequence: Synthetic oligonucleotide
  Sense strand starting at position 500 of SEQ ID NO: 1881975
uccuaugaccuguaaaugu

SEQ ID NO: 2085575 - RNA, 19 nt, Artificial Sequence
  Description of Artificial Sequence: Synthetic oligonucleotide
  Antisense strand to SEQ ID NO: 2085574
acauuuacaggucauagga

SEQ ID NO: 2085576 - RNA, 19 nt, Artificial Sequence
  Description of Artificial Sequence: Synthetic oligonucleotide
  Sense strand starting at position 508 of SEQ ID NO: 1881975
ccuguaaauguguacagua

SEQ ID NO: 2085577 - RNA, 19 nt, Artificial Sequence
  Description of Artificial Sequence: Synthetic oligonucleotide
  Antisense strand to SEQ ID NO: 2085576
uacuguacacauuuacagg

SEQ ID NO: 2085578 - RNA, 19 nt, Artificial Sequence
  Description of Artificial Sequence: Synthetic oligonucleotide
  Sense strand starting at position 554 of SEQ ID NO: 1881975
ucgcuagugcaguugagua

SEQ ID NO: 2085579 - RNA, 19 nt, Artificial Sequence
  Description of Artificial Sequence: Synthetic oligonucleotide
  Antisense strand to SEQ ID NO: 2085578
uacucaacugcacuagcga

SEQ ID NO: 2085580 - RNA, 19 nt, Artificial Sequence
  Description of Artificial Sequence: Synthetic oligonucleotide
  Sense strand starting at position 556 of SEQ ID NO: 1881975
gcuagugcaguugaguaaa

SEQ ID NO: 2085581 - RNA, 19 nt, Artificial Sequence
  Description of Artificial Sequence: Synthetic oligonucleotide
  Antisense strand to SEQ ID NO: 2085580
uuuacucaacugcacuagc

SEQ ID NO: 2085582 - RNA, 19 nt, Artificial Sequence
  Description of Artificial Sequence: Synthetic oligonucleotide
  Sense strand starting at position 558 of SEQ ID NO: 1881975
uagugcaguugaguaaaua

SEQ ID NO: 2085583 - RNA, 19 nt, Artificial Sequence
  Description of Artificial Sequence: Synthetic oligonucleotide
  Antisense strand to SEQ ID NO: 2085582
uauuuacucaacugcacua

SEQ ID NO: 2085584 - RNA, 19 nt, Artificial Sequence
  Description of Artificial Sequence: Synthetic oligonucleotide
  Sense strand starting at position 559 of SEQ ID NO: 1881975
agugcaguugaguaaauau

SEQ ID NO: 2085585 - RNA, 19 nt, Artificial Sequence
  Description of Artificial Sequence: Synthetic oligonucleotide
  Antisense strand to SEQ ID NO: 2085584
auauuuacucaacugcacu

SEQ ID NO: 2085586 - RNA, 19 nt, Artificial Sequence
  Description of Artificial Sequence: Synthetic oligonucleotide
  Sense strand starting at position 594 of SEQ ID NO: 1881975
ucaaauauguacguuaaag

SEQ ID NO: 2085587 - RNA, 19 nt, Artificial Sequence
  Description of Artificial Sequence: Synthetic oligonucleotide
  Antisense strand to SEQ ID NO: 2085586
cuuuaacguacauauuuga

SEQ ID NO: 2085588 - RNA, 19 nt, Artificial Sequence
  Description of Artificial Sequence: Synthetic oligonucleotide
  Sense strand starting at position 602 of SEQ ID NO: 1881975
guacguuaaaguuacgaua

SEQ ID NO: 2085589 - RNA, 19 nt, Artificial Sequence
  Description of Artificial Sequence: Synthetic oligonucleotide
  Antisense strand to SEQ ID NO: 2085588
uaucguaacuuuaacguac

SEQ ID NO: 2085590 - RNA, 19 nt, Artificial Sequence
  Description of Artificial Sequence: Synthetic oligonucleotide
  Sense strand starting at position 604 of SEQ ID NO: 1881975
acguuaaaguuacgauaag

SEQ ID NO: 2085591 - RNA, 19 nt, Artificial Sequence
  Description of Artificial Sequence: Synthetic oligonucleotide
  Antisense strand to SEQ ID NO: 2085590
cuuaucguaacuuuaacgu

SEQ ID NO: 2085592 - RNA, 19 nt, Artificial Sequence
  Description of Artificial Sequence: Synthetic oligonucleotide
  Sense strand starting at position 690 of SEQ ID NO: 1881975
acgucugccucccuaagua

SEQ ID NO: 2085593 - RNA, 19 nt, Artificial Sequence
  Description of Artificial Sequence: Synthetic oligonucleotide
  Antisense strand to SEQ ID NO: 2085592
uacuuagggaggcagacgu

SEQ ID NO: 2085594 - RNA, 19 nt, Artificial Sequence
  Description of Artificial Sequence: Synthetic oligonucleotide
  Sense strand starting at position 698 of SEQ ID NO: 1881975
cucccuaaguaugguuaca

SEQ ID NO: 2085595 - RNA, 19 nt, Artificial Sequence
  Description of Artificial Sequence: Synthetic oligonucleotide
  Antisense strand to SEQ ID NO: 2085594
uguaaccauacuuagggag

SEQ ID NO: 2085596 - RNA, 19 nt, Artificial Sequence
  Description of Artificial Sequence: Synthetic oligonucleotide
  Sense strand starting at position 700 of SEQ ID NO: 1881975
cccuaaguaugguuacagu

SEQ ID NO: 2085597 - RNA, 19 nt, Artificial Sequence
  Description of Artificial Sequence: Synthetic oligonucleotide
  Antisense strand to SEQ ID NO: 2085596
acuguaaccauacuuaggg

SEQ ID NO: 2085598 - RNA, 19 nt, Artificial Sequence
  Description of Artificial Sequence: Synthetic oligonucleotide
  Sense strand starting at position 950 of SEQ ID NO: 1881975
aagagcuaccguugucaac

SEQ ID NO: 2085599 - RNA, 19 nt, Artificial Sequence
  Description of Artificial Sequence: Synthetic oligonucleotide
  Antisense strand to SEQ ID NO: 2085598
guugacaacgguagcucuu

SEQ ID NO: 2085600 - RNA, 19 nt, Artificial Sequence
  Description of Artificial Sequence: Synthetic oligonucleotide
  Sense strand starting at position 952 of SEQ ID NO: 1881975
gagcuaccguugucaacga

SEQ ID NO: 2085601 - RNA, 19 nt, Artificial Sequence
  Description of Artificial Sequence: Synthetic oligonucleotide
  Antisense strand to SEQ ID NO: 2085600
ucguugacaacgguagcuc

SEQ ID NO: 2085602 - RNA, 19 nt, Artificial Sequence
  Description of Artificial Sequence: Synthetic oligonucleotide
  Sense strand starting at position 965 of SEQ ID NO: 1881975
caacgaugucacguuacgu

SEQ ID NO: 2085603 - RNA, 19 nt, Artificial Sequence
  Description of Artificial Sequence: Synthetic oligonucleotide
  Antisense strand to SEQ ID NO: 2085602
acguaacgugacaucguug

SEQ ID NO: 2085604 - RNA, 19 nt, Artificial Sequence
  Description of Artificial Sequence: Synthetic oligonucleotide
  Sense strand starting at position 966 of SEQ ID NO: 1881975
aacgaugucacguuacguu

SEQ ID NO: 2085605 - RNA, 19 nt, Artificial Sequence
  Description of Artificial Sequence: Synthetic oligonucleotide
  Antisense strand to SEQ ID NO: 2085604
aacguaacgugacaucguu

SEQ ID NO: 2085606 - RNA, 19 nt, Artificial Sequence
  Description of Artificial Sequence: Synthetic oligonucleotide
  Sense strand starting at position 1050 of SEQ ID NO: 1881975
uucugugucccggugcuaa

SEQ ID NO: 2085607 - RNA, 19 nt, Artificial Sequence
  Description of Artificial Sequence: Synthetic oligonucleotide
  Antisense strand to SEQ ID NO: 2085606
uuagcaccgggacacagaa

SEQ ID NO: 2085608 - RNA, 19 nt, Artificial Sequence
  Description of Artificial Sequence: Synthetic oligonucleotide
  Sense strand starting at position 1171 of SEQ ID NO: 1881975
ccgucuucucaauauuggu

SEQ ID NO: 2085609 - RNA, 19 nt, Artificial Sequence
  Description of Artificial Sequence: Synthetic oligonucleotide
  Antisense strand to SEQ ID NO: 2085608
accaauauugagaagacgg

SEQ ID NO: 2085610 - RNA, 19 nt, Artificial Sequence
  Description of Artificial Sequence: Synthetic oligonucleotide
  Sense strand starting at position 1184 of SEQ ID NO: 1881975
auugguggccuccauuaaa

SEQ ID NO: 2085611 - RNA, 19 nt, Artificial Sequence
  Description of Artificial Sequence: Synthetic oligonucleotide
  Antisense strand to SEQ ID NO: 2085610
uuuaauggaggccaccaau

SEQ ID NO: 2085612 - RNA, 19 nt, Artificial Sequence
  Description of Artificial Sequence: Synthetic oligonucleotide
  Sense strand starting at position 1592 of SEQ ID NO: 1881975
ccgagcacuucuuauccaa

SEQ ID NO: 2085613 - RNA, 19 nt, Artificial Sequence
  Description of Artificial Sequence: Synthetic oligonucleotide
  Antisense strand to SEQ ID NO: 2085612
uuggauaagaagugcucgg

SEQ ID NO: 2085614 - RNA, 19 nt, Artificial Sequence
  Description of Artificial Sequence: Synthetic oligonucleotide
  Sense strand starting at position 1605 of SEQ ID NO: 1881975
auccaacgguuccaaauaa

SEQ ID NO: 2085615 - RNA, 19 nt, Artificial Sequence
  Description of Artificial Sequence: Synthetic oligonucleotide
  Antisense strand to SEQ ID NO: 2085614
uuauuuggaaccguuggau

SEQ ID NO: 2085616 - RNA, 19 nt, Artificial Sequence
  Description of Artificial Sequence: Synthetic oligonucleotide
  Sense strand starting at position 2707 of SEQ ID NO: 1881975
ggaauugccgaaugcgaaa

SEQ ID NO: 2085617 - RNA, 19 nt, Artificial Sequence
  Description of Artificial Sequence: Synthetic oligonucleotide
  Antisense strand to SEQ ID NO: 2085616
uuucgcauucggcaauucc

SEQ ID NO: 2085618 - RNA, 19 nt, Artificial Sequence
  Description of Artificial Sequence: Synthetic oligonucleotide
  Sense strand starting at position 2753 of SEQ ID NO: 1881975
gacgguucugugggcugaa

SEQ ID NO: 2085619 - RNA, 19 nt, Artificial Sequence
  Description of Artificial Sequence: Synthetic oligonucleotide
  Antisense strand to SEQ ID NO: 2085618
uucagcccacagaaccguc

SEQ ID NO: 2085620 - RNA, 19 nt, Artificial Sequence
  Description of Artificial Sequence: Synthetic oligonucleotide
  Sense strand starting at position 2774 of SEQ ID NO: 1881975
gagcgcuuccgucaucgga

SEQ ID NO: 2085621 - RNA, 19 nt, Artificial Sequence
  Description of Artificial Sequence: Synthetic oligonucleotide
  Antisense strand to SEQ ID NO: 2085620
uccgaugacggaagcgcuc

SEQ ID NO: 2085622 - RNA, 19 nt, Artificial Sequence
  Description of Artificial Sequence: Synthetic oligonucleotide
  Sense strand starting at position 2896 of SEQ ID NO: 1881975
ggaaucuggcccgaucaga

SEQ ID NO: 2085623 - RNA, 19 nt, Artificial Sequence
  Description of Artificial Sequence: Synthetic oligonucleotide
  Antisense strand to SEQ ID NO: 2085622
ucugaucgggccagauucc

SEQ ID NO: 2085624 - RNA, 19 nt, Artificial Sequence
  Description of Artificial Sequence: Synthetic oligonucleotide
  Sense strand starting at position 3070 of SEQ ID NO: 1881975
ggaauugccuuccuacgaa

SEQ ID NO: 2085625 - RNA, 19 nt, Artificial Sequence
  Description of Artificial Sequence: Synthetic oligonucleotide
  Antisense strand to SEQ ID NO: 2085624
uucguaggaaggcaauucc

SEQ ID NO: 2085626 - RNA, 19 nt, Artificial Sequence
  Description of Artificial Sequence: Synthetic oligonucleotide
  Sense strand starting at position 3123 of SEQ ID NO: 1881975
agccuuugguuccaagaau

SEQ ID NO: 2085627 - RNA, 19 nt, Artificial Sequence
  Description of Artificial Sequence: Synthetic oligonucleotide
  Antisense strand to SEQ ID NO: 2085626
auucuuggaaccaaaggcu

SEQ ID NO: 2085628 - RNA, 19 nt, Artificial Sequence
  Description of Artificial Sequence: Synthetic oligonucleotide
  Sense strand starting at position 3358 of SEQ ID NO: 1881975
ugcggaauccuggauccga

SEQ ID NO: 2085629 - RNA, 19 nt, Artificial Sequence
  Description of Artificial Sequence: Synthetic oligonucleotide
  Antisense strand to SEQ ID NO: 2085628
ucggauccaggauuccgca

SEQ ID NO: 2085630 - RNA, 19 nt, Artificial Sequence
  Description of Artificial Sequence: Synthetic oligonucleotide
  Sense strand starting at position 3497 of SEQ ID NO: 1881975
agcccuugcccauguaauu

SEQ ID NO: 2085631 - RNA, 19 nt, Artificial Sequence
  Description of Artificial Sequence: Synthetic oligonucleotide
  Antisense strand to SEQ ID NO: 2085630
aauuacaugggcaagggcu

SEQ ID NO: 2085632 - RNA, 19 nt, Artificial Sequence
  Description of Artificial Sequence: Synthetic oligonucleotide
  Sense strand starting at position 3649 of SEQ ID NO: 1881975
ggccuucugcuauaggguu

SEQ ID NO: 2085633 - RNA, 19 nt, Artificial Sequence
  Description of Artificial Sequence: Synthetic oligonucleotide
  Antisense strand to SEQ ID NO: 2085632
aacccuauagcagaaggcc

SEQ ID NO: 2085634 - RNA, 19 nt, Artificial Sequence
  Description of Artificial Sequence: Synthetic oligonucleotide
  Sense strand starting at position 3746 of SEQ ID NO: 1881975
augaaucgggacuguaauu

SEQ ID NO: 2085635 - RNA, 19 nt, Artificial Sequence
  Description of Artificial Sequence: Synthetic oligonucleotide
  Antisense strand to SEQ ID NO: 2085634
aauuacagucccgauucau

SEQ ID NO: 2085636 - RNA, 19 nt, Artificial Sequence
  Description of Artificial Sequence: Synthetic oligonucleotide
  Sense strand starting at position 3751 of SEQ ID NO: 1881975
ucgggacuguaauuaccua

SEQ ID NO: 2085637 - RNA, 19 nt, Artificial Sequence
  Description of Artificial Sequence: Synthetic oligonucleotide
  Antisense strand to SEQ ID NO: 2085636
uagguaauuacagucccga

SEQ ID NO: 2085638 - RNA, 19 nt, Artificial Sequence
  Description of Artificial Sequence: Synthetic oligonucleotide
  Sense strand starting at position 3880 of SEQ ID NO: 1881975
aaaggcguuugcccuaaau

SEQ ID NO: 2085639 - RNA, 19 nt, Artificial Sequence
  Description of Artificial Sequence: Synthetic oligonucleotide
  Antisense strand to SEQ ID NO: 2085638
auuuagggcaaacgccuuu

SEQ ID NO: 2085640 - RNA, 19 nt, Artificial Sequence
  Description of Artificial Sequence: Synthetic oligonucleotide
  Sense strand starting at position 3882 of SEQ ID NO: 1881975
aggcguuugcccuaaaugu

SEQ ID NO: 2085641 - RNA, 19 nt, Artificial Sequence
  Description of Artificial Sequence: Synthetic oligonucleotide
  Antisense strand to SEQ ID NO: 2085640
acauuuagggcaaacgccu

SEQ ID NO: 2085642 - RNA, 19 nt, Artificial Sequence
  Description of Artificial Sequence: Synthetic oligonucleotide
  Sense strand starting at position 3980 of SEQ ID NO: 1881975
uuugcuuucuugcugauuu

SEQ ID NO: 2085643 - RNA, 19 nt, Artificial Sequence
  Description of Artificial Sequence: Synthetic oligonucleotide
  Antisense strand to SEQ ID NO: 2085642
aaaucagcaagaaagcaaa

SEQ ID NO: 2085644 - RNA, 19 nt, Artificial Sequence
  Description of Artificial Sequence: Synthetic oligonucleotide
  Sense strand starting at position 20 of SEQ ID NO: 1881976
auuugagucccgugugaau

SEQ ID NO: 2085645 - RNA, 19 nt, Artificial Sequence
  Description of Artificial Sequence: Synthetic oligonucleotide
  Antisense strand to SEQ ID NO: 2085644
auucacacgggacucaaau

SEQ ID NO: 2085646 - RNA, 19 nt, Artificial Sequence
  Description of Artificial Sequence: Synthetic oligonucleotide
  Sense strand starting at position 48 of SEQ ID NO: 1881976
gcaucauuacuguagaaga

SEQ ID NO: 2085647 - RNA, 19 nt, Artificial Sequence
  Description of Artificial Sequence: Synthetic oligonucleotide
  Antisense strand to SEQ ID NO: 2085646
ucuucuacaguaaugaugc

SEQ ID NO: 2085648 - RNA, 19 nt, Artificial Sequence
  Description of Artificial Sequence: Synthetic oligonucleotide
  Sense strand starting at position 387 of SEQ ID NO: 1881976
gagaauagauauguauucu

SEQ ID NO: 2085649 - RNA, 19 nt, Artificial Sequence
  Description of Artificial Sequence: Synthetic oligonucleotide
  Antisense strand to SEQ ID NO: 2085648
agaauacauaucuauucuc

SEQ ID NO: 2085650 - RNA, 19 nt, Artificial Sequence
  Description of Artificial Sequence: Synthetic oligonucleotide
  Sense strand starting at position 395 of SEQ ID NO: 1881976
auauguauucuagaaaucg

SEQ ID NO: 2085651 - RNA, 19 nt, Artificial Sequence
  Description of Artificial Sequence: Synthetic oligonucleotide
  Antisense strand to SEQ ID NO: 2085650
cgauuucuagaauacauau

SEQ ID NO: 2085652 - RNA, 19 nt, Artificial Sequence
  Description of Artificial Sequence: Synthetic oligonucleotide
  Sense strand starting at position 542 of SEQ ID NO: 1881976
aguggugcaauggauuaau

SEQ ID NO: 2085653 - RNA, 19 nt, Artificial Sequence
  Description of Artificial Sequence: Synthetic oligonucleotide
  Antisense strand to SEQ ID NO: 2085652
auuaauccauugcaccacu

SEQ ID NO: 2085654 - RNA, 19 nt, Artificial Sequence
  Description of Artificial Sequence: Synthetic oligonucleotide
  Sense strand starting at position 796 of SEQ ID NO: 1881976
agaguuacaucucuuacua

SEQ ID NO: 2085655 - RNA, 19 nt, Artificial Sequence
  Description of Artificial Sequence: Synthetic oligonucleotide
  Antisense strand to SEQ ID NO: 2085654
uaguaagagauguaacucu

SEQ ID NO: 2085656 - RNA, 19 nt, Artificial Sequence
  Description of Artificial Sequence: Synthetic oligonucleotide
  Sense strand starting at position 824 of SEQ ID NO: 1881976
guaaucuaugcacagaauu

SEQ ID NO: 2085657 - RNA, 19 nt, Artificial Sequence
  Description of Artificial Sequence: Synthetic oligonucleotide
  Antisense strand to SEQ ID NO: 2085656
aauucugugcauagauuac

SEQ ID NO: 2085658 - RNA, 19 nt, Artificial Sequence
  Description of Artificial Sequence: Synthetic oligonucleotide
  Sense strand starting at position 985 of SEQ ID NO: 1881976
ggaaguagggccuaaugca

SEQ ID NO: 2085659 - RNA, 19 nt, Artificial Sequence
  Description of Artificial Sequence: Synthetic oligonucleotide
  Antisense strand to SEQ ID NO: 2085658
ugcauuaggcccuacuucc

SEQ ID NO: 2085660 - RNA, 19 nt, Artificial Sequence
  Description of Artificial Sequence: Synthetic oligonucleotide
  Sense strand starting at position 1015 of SEQ ID NO: 1881976
ucaugaggccuccaccuua

SEQ ID NO: 2085661 - RNA, 19 nt, Artificial Sequence
  Description of Artificial Sequence: Synthetic oligonucleotide
  Antisense strand to SEQ ID NO: 2085660
uaagguggaggccucauga

SEQ ID NO: 2085662 - RNA, 19 nt, Artificial Sequence
  Description of Artificial Sequence: Synthetic oligonucleotide
  Sense strand starting at position 1026 of SEQ ID NO: 1881976
ccaccuuaaugaguagauu

SEQ ID NO: 2085663 - RNA, 19 nt, Artificial Sequence
  Description of Artificial Sequence: Synthetic oligonucleotide
  Antisense strand to SEQ ID NO: 2085662
aaucuacucauuaaggugg

SEQ ID NO: 2085664 - RNA, 19 nt, Artificial Sequence
  Description of Artificial Sequence: Synthetic oligonucleotide
  Sense strand starting at position 1267 of SEQ ID NO: 1881976
guuauaacugcauaaacag

SEQ ID NO: 2085665 - RNA, 19 nt, Artificial Sequence
  Description of Artificial Sequence: Synthetic oligonucleotide
  Antisense strand to SEQ ID NO: 2085664
cuguuuaugcaguuauaac

SEQ ID NO: 2085666 - RNA, 19 nt, Artificial Sequence
  Description of Artificial Sequence: Synthetic oligonucleotide
  Sense strand starting at position 1351 of SEQ ID NO: 1881976
uccugauuaccacgggaug

SEQ ID NO: 2085667 - RNA, 19 nt, Artificial Sequence
  Description of Artificial Sequence: Synthetic oligonucleotide
  Antisense strand to SEQ ID NO: 2085666
caucccgugguaaucagga

SEQ ID NO: 2085668 - RNA, 19 nt, Artificial Sequence
  Description of Artificial Sequence: Synthetic oligonucleotide
  Sense strand starting at position 1352 of SEQ ID NO: 1881976
ccugauuaccacgggauga

SEQ ID NO: 2085669 - RNA, 19 nt, Artificial Sequence
  Description of Artificial Sequence: Synthetic oligonucleotide
  Antisense strand to SEQ ID NO: 2085668
ucaucccgugguaaucagg

SEQ ID NO: 2085670 - RNA, 19 nt, Artificial Sequence
  Description of Artificial Sequence: Synthetic oligonucleotide
  Sense strand starting at position 1353 of SEQ ID NO: 1881976
cugauuaccacgggaugau

SEQ ID NO: 2085671 - RNA, 19 nt, Artificial Sequence
  Description of Artificial Sequence: Synthetic oligonucleotide
  Antisense strand to SEQ ID NO: 2085670
aucaucccgugguaaucag

SEQ ID NO: 2085672 - RNA, 19 nt, Artificial Sequence
  Description of Artificial Sequence: Synthetic oligonucleotide
  Sense strand starting at position 1483 of SEQ ID NO: 1881976
aaauauaggcaggguaauu

SEQ ID NO: 2085673 - RNA, 19 nt, Artificial Sequence
  Description of Artificial Sequence: Synthetic oligonucleotide
  Antisense strand to SEQ ID NO: 2085672
aauuacccugccuauauuu

SEQ ID NO: 2085674 - RNA, 19 nt, Artificial Sequence
  Description of Artificial Sequence: Synthetic oligonucleotide
  Sense strand starting at position 1563 of SEQ ID NO: 1881976
ugcugaaguccugacuaag

SEQ ID NO: 2085675 - RNA, 19 nt, Artificial Sequence
  Description of Artificial Sequence: Synthetic oligonucleotide
  Antisense strand to SEQ ID NO: 2085674
cuuagucaggacuucagca

SEQ ID NO: 2085676 - RNA, 19 nt, Artificial Sequence
  Description of Artificial Sequence: Synthetic oligonucleotide
  Sense strand starting at position 1566 of SEQ ID NO: 1881976
ugaaguccugacuaagcau

SEQ ID NO: 2085677 - RNA, 19 nt, Artificial Sequence
  Description of Artificial Sequence: Synthetic oligonucleotide
  Antisense strand to SEQ ID NO: 2085676
augcuuagucaggacuuca

SEQ ID NO: 2085678 - RNA, 19 nt, Artificial Sequence
  Description of Artificial Sequence: Synthetic oligonucleotide
  Sense strand starting at position 1593 of SEQ ID NO: 1881976
acagauugguuaguagaag

SEQ ID NO: 2085679 - RNA, 19 nt, Artificial Sequence
  Description of Artificial Sequence: Synthetic oligonucleotide
  Antisense strand to SEQ ID NO: 2085678
cuucuacuaaccaaucugu

SEQ ID NO: 2085680 - RNA, 19 nt, Artificial Sequence
  Description of Artificial Sequence: Synthetic oligonucleotide
  Sense strand starting at position 1781 of SEQ ID NO: 1881976
auaagcuuccuuuggaaga

SEQ ID NO: 2085681 - RNA, 19 nt, Artificial Sequence
  Description of Artificial Sequence: Synthetic oligonucleotide
  Antisense strand to SEQ ID NO: 2085680
ucuuccaaaggaagcuuau

SEQ ID NO: 2085682 - RNA, 19 nt, Artificial Sequence
  Description of Artificial Sequence: Synthetic oligonucleotide
  Sense strand starting at position 1864 of SEQ ID NO: 1881976
ggaauaucucauugacagc

SEQ ID NO: 2085683 - RNA, 19 nt, Artificial Sequence
  Description of Artificial Sequence: Synthetic oligonucleotide
  Antisense strand to SEQ ID NO: 2085682
gcugucaaugagauauucc

SEQ ID NO: 2085684 - RNA, 19 nt, Artificial Sequence
  Description of Artificial Sequence: Synthetic oligonucleotide
  Sense strand starting at position 1971 of SEQ ID NO: 1881976
aggguucucauagggaaug

SEQ ID NO: 2085685 - RNA, 19 nt, Artificial Sequence
  Description of Artificial Sequence: Synthetic oligonucleotide
  Antisense strand to SEQ ID NO: 2085684
cauucccuaugagaacccu

SEQ ID NO: 2085686 - RNA, 19 nt, Artificial Sequence
  Description of Artificial Sequence: Synthetic oligonucleotide
  Sense strand starting at position 1973 of SEQ ID NO: 1881976
gguucucauagggaauguu

SEQ ID NO: 2085687 - RNA, 19 nt, Artificial Sequence
  Description of Artificial Sequence: Synthetic oligonucleotide
  Antisense strand to SEQ ID NO: 2085686
aacauucccuaugagaacc

SEQ ID NO: 2085688 - RNA, 19 nt, Artificial Sequence
  Description of Artificial Sequence: Synthetic oligonucleotide
  Sense strand starting at position 2214 of SEQ ID NO: 1881976
cggguuacuagguacaaua

SEQ ID NO: 2085689 - RNA, 19 nt, Artificial Sequence
  Description of Artificial Sequence: Synthetic oligonucleotide
  Antisense strand to SEQ ID NO: 2085688
uauuguaccuaguaacccg

SEQ ID NO: 2085690 - RNA, 19 nt, Artificial Sequence
  Description of Artificial Sequence: Synthetic oligonucleotide
  Sense strand starting at position 2243 of SEQ ID NO: 1881976
gcuggauuucugggcccau

SEQ ID NO: 2085691 - RNA, 19 nt, Artificial Sequence
  Description of Artificial Sequence: Synthetic oligonucleotide
  Antisense strand to SEQ ID NO: 2085690
augggcccagaaauccagc

SEQ ID NO: 2085692 - RNA, 19 nt, Artificial Sequence
  Description of Artificial Sequence: Synthetic oligonucleotide
  Sense strand starting at position 2259 of SEQ ID NO: 1881976
cauguauuacggcaaugga

SEQ ID NO: 2085693 - RNA, 19 nt, Artificial Sequence
  Description of Artificial Sequence: Synthetic oligonucleotide
  Antisense strand to SEQ ID NO: 2085692
uccauugccguaauacaug

SEQ ID NO: 2085694 - RNA, 19 nt, Artificial Sequence
  Description of Artificial Sequence: Synthetic oligonucleotide
  Sense strand starting at position 2390 of SEQ ID NO: 1881976
agucgauuccaauauucua

SEQ ID NO: 2085695 - RNA, 19 nt, Artificial Sequence
  Description of Artificial Sequence: Synthetic oligonucleotide
  Antisense strand to SEQ ID NO: 2085694
uagaauauuggaaucgacu

SEQ ID NO: 2085696 - RNA, 19 nt, Artificial Sequence
  Description of Artificial Sequence: Synthetic oligonucleotide
  Sense strand starting at position 2405 of SEQ ID NO: 1881976
ucuauaaggccagacgauu

SEQ ID NO: 2085697 - RNA, 19 nt, Artificial Sequence
  Description of Artificial Sequence: Synthetic oligonucleotide
  Antisense strand to SEQ ID NO: 2085696
aaucgucuggccuuauaga

SEQ ID NO: 2085698 - RNA, 19 nt, Artificial Sequence
  Description of Artificial Sequence: Synthetic oligonucleotide
  Sense strand starting at position 2427 of SEQ ID NO: 1881976
ggacauaggguuuguauca

SEQ ID NO: 2085699 - RNA, 19 nt, Artificial Sequence
  Description of Artificial Sequence: Synthetic oligonucleotide
  Antisense strand to SEQ ID NO: 2085698
ugauacaaacccuaugucc

SEQ ID NO: 2085700 - RNA, 19 nt, Artificial Sequence
  Description of Artificial Sequence: Synthetic oligonucleotide
  Sense strand starting at position 2450 of SEQ ID NO: 1881976
ggguucagucagggaagga

SEQ ID NO: 2085701 - RNA, 19 nt, Artificial Sequence
  Description of Artificial Sequence: Synthetic oligonucleotide
  Antisense strand to SEQ ID NO: 2085700
uccuucccugacugaaccc

SEQ ID NO: 2085702 - RNA, 19 nt, Artificial Sequence
  Description of Artificial Sequence: Synthetic oligonucleotide
  Sense strand starting at position 2591 of SEQ ID NO: 1881976
guuguuauagguuacagac

SEQ ID NO: 2085703 - RNA, 19 nt, Artificial Sequence
  Description of Artificial Sequence: Synthetic oligonucleotide
  Antisense strand to SEQ ID NO: 2085702
gucuguaaccuauaacaac

SEQ ID NO: 2085704 - RNA, 19 nt, Artificial Sequence
  Description of Artificial Sequence: Synthetic oligonucleotide
  Sense strand starting at position 2760 of SEQ ID NO: 1881976
gucaguugacuuuacauaa

SEQ ID NO: 2085705 - RNA, 19 nt, Artificial Sequence
  Description of Artificial Sequence: Synthetic oligonucleotide
  Antisense strand to SEQ ID NO: 2085704
uuauguaaagucaacugac

SEQ ID NO: 2085706 - RNA, 19 nt, Artificial Sequence
  Description of Artificial Sequence: Synthetic oligonucleotide
  Sense strand starting at position 2909 of SEQ ID NO: 1881976
ccaguucuuccacauagac

SEQ ID NO: 2085707 - RNA, 19 nt, Artificial Sequence
  Description of Artificial Sequence: Synthetic oligonucleotide
  Antisense strand to SEQ ID NO: 2085706
gucuauguggaagaacugg

SEQ ID NO: 2085708 - RNA, 19 nt, Artificial Sequence
  Description of Artificial Sequence: Synthetic oligonucleotide
  Sense strand starting at position 3186 of SEQ ID NO: 1881976
aagcgaauccgagaucuau

SEQ ID NO: 2085709 - RNA, 19 nt, Artificial Sequence
  Description of Artificial Sequence: Synthetic oligonucleotide
  Antisense strand to SEQ ID NO: 2085708
auagaucucggauucgcuu

SEQ ID NO: 2085710 - RNA, 19 nt, Artificial Sequence
  Description of Artificial Sequence: Synthetic oligonucleotide
  Sense strand starting at position 3192 of SEQ ID NO: 1881976
auccgagaucuauaaagca

SEQ ID NO: 2085711 - RNA, 19 nt, Artificial Sequence
  Description of Artificial Sequence: Synthetic oligonucleotide
  Antisense strand to SEQ ID NO: 2085710
ugcuuuauagaucucggau

SEQ ID NO: 2085712 - RNA, 19 nt, Artificial Sequence
  Description of Artificial Sequence: Synthetic oligonucleotide
  Sense strand starting at position 3445 of SEQ ID NO: 1881976
aaaguuaaguagcuagaaa

SEQ ID NO: 2085713 - RNA, 19 nt, Artificial Sequence
  Description of Artificial Sequence: Synthetic oligonucleotide
  Antisense strand to SEQ ID NO: 2085712
uuucuagcuacuuaacuuu

SEQ ID NO: 2085714 - RNA, 19 nt, Artificial Sequence
  Description of Artificial Sequence: Synthetic oligonucleotide
  Sense strand starting at position 3531 of SEQ ID NO: 1881976
uuugucuaucgcgucuaau

SEQ ID NO: 2085715 - RNA, 19 nt, Artificial Sequence
  Description of Artificial Sequence: Synthetic oligonucleotide
  Antisense strand to SEQ ID NO: 2085714
auuagacgcgauagacaaa

SEQ ID NO: 2085716 - RNA, 19 nt, Artificial Sequence
  Description of Artificial Sequence: Synthetic oligonucleotide
  Sense strand starting at position 3532 of SEQ ID NO: 1881976
uugucuaucgcgucuaauu

SEQ ID NO: 2085717 - RNA, 19 nt, Artificial Sequence
  Description of Artificial Sequence: Synthetic oligonucleotide
  Antisense strand to SEQ ID NO: 2085716
aauuagacgcgauagacaa

SEQ ID NO: 2085718 - RNA, 19 nt, Artificial Sequence
  Description of Artificial Sequence: Synthetic oligonucleotide
  Sense strand starting at position 3533 of SEQ ID NO: 1881976
ugucuaucgcgucuaauuc

SEQ ID NO: 2085719 - RNA, 19 nt, Artificial Sequence
  Description of Artificial Sequence: Synthetic oligonucleotide
  Antisense strand to SEQ ID NO: 2085718
gaauuagacgcgauagaca

SEQ ID NO: 2085720 - RNA, 19 nt, Artificial Sequence
  Description of Artificial Sequence: Synthetic oligonucleotide
  Sense strand starting at position 3568 of SEQ ID NO: 1881976
uggauuguaucuuccagag

SEQ ID NO: 2085721 - RNA, 19 nt, Artificial Sequence
  Description of Artificial Sequence: Synthetic oligonucleotide
  Antisense strand to SEQ ID NO: 2085720
cucuggaagauacaaucca

SEQ ID NO: 2085722 - RNA, 19 nt, Artificial Sequence
  Description of Artificial Sequence: Synthetic oligonucleotide
  Sense strand starting at position 3583 of SEQ ID NO: 1881976
agaguuugccaagaaaguc

SEQ ID NO: 2085723 - RNA, 19 nt, Artificial Sequence
  Description of Artificial Sequence: Synthetic oligonucleotide
  Antisense strand to SEQ ID NO: 2085722
gacuuucuuggcaaacucu

SEQ ID NO: 2085724 - RNA, 19 nt, Artificial Sequence
  Description of Artificial Sequence: Synthetic oligonucleotide
  Sense strand starting at position 178 of SEQ ID NO: 1881977
gaaacuuuggucugucaag

SEQ ID NO: 2085725 - RNA, 19 nt, Artificial Sequence
  Description of Artificial Sequence: Synthetic oligonucleotide
  Antisense strand to SEQ ID NO: 2085724
cuugacagaccaaaguuuc

SEQ ID NO: 2085726 - RNA, 19 nt, Artificial Sequence
  Description of Artificial Sequence: Synthetic oligonucleotide
  Sense strand starting at position 179 of SEQ ID NO: 1881977
aaacuuuggucugucaaga

SEQ ID NO: 2085727 - RNA, 19 nt, Artificial Sequence
  Description of Artificial Sequence: Synthetic oligonucleotide
  Antisense strand to SEQ ID NO: 2085726
ucuugacagaccaaaguuu

SEQ ID NO: 2085728 - RNA, 19 nt, Artificial Sequence
  Description of Artificial Sequence: Synthetic oligonucleotide
  Sense strand starting at position 206 of SEQ ID NO: 1881977
ugugcauuaguauaggacu

SEQ ID NO: 2085729 - RNA, 19 nt, Artificial Sequence
  Description of Artificial Sequence: Synthetic oligonucleotide
  Antisense strand to SEQ ID NO: 2085728
aguccuauacuaaugcaca

SEQ ID NO: 2085730 - RNA, 19 nt, Artificial Sequence
  Description of Artificial Sequence: Synthetic oligonucleotide
  Sense strand starting at position 330 of SEQ ID NO: 1881977
gaacgcuugugguuuauuu

SEQ ID NO: 2085731 - RNA, 19 nt, Artificial Sequence
  Description of Artificial Sequence: Synthetic oligonucleotide
  Antisense strand to SEQ ID NO: 2085730
aaauaaaccacaagcguuc

SEQ ID NO: 2085732 - RNA, 19 nt, Artificial Sequence
  Description of Artificial Sequence: Synthetic oligonucleotide
  Sense strand starting at position 361 of SEQ ID NO: 1881977
agcaguugucaauagauga

SEQ ID NO: 2085733 - RNA, 19 nt, Artificial Sequence
  Description of Artificial Sequence: Synthetic oligonucleotide
  Antisense strand to SEQ ID NO: 2085732
ucaucuauugacaacugcu

SEQ ID NO: 2085734 - RNA, 19 nt, Artificial Sequence
  Description of Artificial Sequence: Synthetic oligonucleotide
  Sense strand starting at position 541 of SEQ ID NO: 1881977
ggaguagaagcuuauucuu

SEQ ID NO: 2085735 - RNA, 19 nt, Artificial Sequence
  Description of Artificial Sequence: Synthetic oligonucleotide
  Antisense strand to SEQ ID NO: 2085734
aagaauaagcuucuacucc

SEQ ID NO: 2085736 - RNA, 19 nt, Artificial Sequence
  Description of Artificial Sequence: Synthetic oligonucleotide
  Sense strand starting at position 546 of SEQ ID NO: 1881977
agaagcuuauucuuugaaa

SEQ ID NO: 2085737 - RNA, 19 nt, Artificial Sequence
  Description of Artificial Sequence: Synthetic oligonucleotide
  Antisense strand to SEQ ID NO: 2085736
uuucaaagaauaagcuucu

SEQ ID NO: 2085738 - RNA, 19 nt, Artificial Sequence
  Description of Artificial Sequence: Synthetic oligonucleotide
  Sense strand starting at position 660 of SEQ ID NO: 1881977
uccugaaagcugugggaau

SEQ ID NO: 2085739 - RNA, 19 nt, Artificial Sequence
  Description of Artificial Sequence: Synthetic oligonucleotide
  Antisense strand to SEQ ID NO: 2085738
auucccacagcuuucagga

SEQ ID NO: 2085740 - RNA, 19 nt, Artificial Sequence
  Description of Artificial Sequence: Synthetic oligonucleotide
  Sense strand starting at position 843 of SEQ ID NO: 1881977
auuauaaagagugggugua

SEQ ID NO: 2085741 - RNA, 19 nt, Artificial Sequence
  Description of Artificial Sequence: Synthetic oligonucleotide
  Antisense strand to SEQ ID NO: 2085740
uacacccacucuuuauaau

SEQ ID NO: 2085742 - RNA, 19 nt, Artificial Sequence
  Description of Artificial Sequence: Synthetic oligonucleotide
  Sense strand starting at position 844 of SEQ ID NO: 1881977
uuauaaagaguggguguaa

SEQ ID NO: 2085743 - RNA, 19 nt, Artificial Sequence
  Description of Artificial Sequence: Synthetic oligonucleotide
  Antisense strand to SEQ ID NO: 2085742
uuacacccacucuuuauaa

SEQ ID NO: 2085744 - RNA, 19 nt, Artificial Sequence
  Description of Artificial Sequence: Synthetic oligonucleotide
  Sense strand starting at position 845 of SEQ ID NO: 1881977
uauaaagaguggguguaaa

SEQ ID NO: 2085745 - RNA, 19 nt, Artificial Sequence
  Description of Artificial Sequence: Synthetic oligonucleotide
  Antisense strand to SEQ ID NO: 2085744
uuuacacccacucuuuaua

SEQ ID NO: 2085746 - RNA, 19 nt, Artificial Sequence
  Description of Artificial Sequence: Synthetic oligonucleotide
  Sense strand starting at position 855 of SEQ ID NO: 1881977
ggguguaaaccuuacauac

SEQ ID NO: 2085747 - RNA, 19 nt, Artificial Sequence
  Description of Artificial Sequence: Synthetic oligonucleotide
  Antisense strand to SEQ ID NO: 2085746
guauguaagguuuacaccc

SEQ ID NO: 2085748 - RNA, 19 nt, Artificial Sequence
  Description of Artificial Sequence: Synthetic oligonucleotide
  Sense strand starting at position 894 of SEQ ID NO: 1881977
cucugauaagauuguuacu

SEQ ID NO: 2085749 - RNA, 19 nt, Artificial Sequence
  Description of Artificial Sequence: Synthetic oligonucleotide
  Antisense strand to SEQ ID NO: 2085748
aguaacaaucuuaucagag

SEQ ID NO: 2085750 - RNA, 19 nt, Artificial Sequence
  Description of Artificial Sequence: Synthetic oligonucleotide
  Sense strand starting at position 896 of SEQ ID NO: 1881977
cugauaagauuguuacuau

SEQ ID NO: 2085751 - RNA, 19 nt, Artificial Sequence
  Description of Artificial Sequence: Synthetic oligonucleotide
  Antisense strand to SEQ ID NO: 2085750
auaguaacaaucuuaucag

SEQ ID NO: 2085752 - RNA, 19 nt, Artificial Sequence
  Description of Artificial Sequence: Synthetic oligonucleotide
  Sense strand starting at position 1013 of SEQ ID NO: 1881977
uuaauaaguuccuuugagg

SEQ ID NO: 2085753 - RNA, 19 nt, Artificial Sequence
  Description of Artificial Sequence: Synthetic oligonucleotide
  Antisense strand to SEQ ID NO: 2085752
ccucaaaggaacuuauuaa

SEQ ID NO: 2085754 - RNA, 19 nt, Artificial Sequence
  Description of Artificial Sequence: Synthetic oligonucleotide
  Sense strand starting at position 1256 of SEQ ID NO: 1881977
cugugugaaagaugacaga

SEQ ID NO: 2085755 - RNA, 19 nt, Artificial Sequence
  Description of Artificial Sequence: Synthetic oligonucleotide
  Antisense strand to SEQ ID NO: 2085754
ucugucaucuuucacacag

SEQ ID NO: 2085756 - RNA, 19 nt, Artificial Sequence
  Description of Artificial Sequence: Synthetic oligonucleotide
  Sense strand starting at position 1492 of SEQ ID NO: 1881977
ggaagcaguuucucaaaga

SEQ ID NO: 2085757 - RNA, 19 nt, Artificial Sequence
  Description of Artificial Sequence: Synthetic oligonucleotide
  Antisense strand to SEQ ID NO: 2085756
ucuuugagaaacugcuucc

SEQ ID NO: 2085758 - RNA, 19 nt, Artificial Sequence
  Description of Artificial Sequence: Synthetic oligonucleotide
  Sense strand starting at position 1523 of SEQ ID NO: 1881977
gcaaaugaucagcaagucu

SEQ ID NO: 2085759 - RNA, 19 nt, Artificial Sequence
  Description of Artificial Sequence: Synthetic oligonucleotide
  Antisense strand to SEQ ID NO: 2085758
agacuugcugaucauuugc

SEQ ID NO: 2085760 - RNA, 19 nt, Artificial Sequence
  Description of Artificial Sequence: Synthetic oligonucleotide
  Sense strand starting at position 1815 of SEQ ID NO: 1881977
cucucauagggcuacuuua

SEQ ID NO: 2085761 - RNA, 19 nt, Artificial Sequence
  Description of Artificial Sequence: Synthetic oligonucleotide
  Antisense strand to SEQ ID NO: 2085760
uaaaguagcccuaugagag

SEQ ID NO: 2085762 - RNA, 19 nt, Artificial Sequence
  Description of Artificial Sequence: Synthetic oligonucleotide
  Sense strand starting at position 2091 of SEQ ID NO: 1881977
aggucaguuucauuaggag

SEQ ID NO: 2085763 - RNA, 19 nt, Artificial Sequence
  Description of Artificial Sequence: Synthetic oligonucleotide
  Antisense strand to SEQ ID NO: 2085762
cuccuaaugaaacugaccu

SEQ ID NO: 2085764 - RNA, 19 nt, Artificial Sequence
  Description of Artificial Sequence: Synthetic oligonucleotide
  Sense strand starting at position 2234 of SEQ ID NO: 1881977
uuuauaugucagcaugauc

SEQ ID NO: 2085765 - RNA, 19 nt, Artificial Sequence
  Description of Artificial Sequence: Synthetic oligonucleotide
  Antisense strand to SEQ ID NO: 2085764
gaucaugcugacauauaaa

SEQ ID NO: 2085766 - RNA, 19 nt, Artificial Sequence
  Description of Artificial Sequence: Synthetic oligonucleotide
  Sense strand starting at position 2242 of SEQ ID NO: 1881977
ucagcaugaucaucagauu

SEQ ID NO: 2085767 - RNA, 19 nt, Artificial Sequence
  Description of Artificial Sequence: Synthetic oligonucleotide
  Antisense strand to SEQ ID NO: 2085766
aaucugaugaucaugcuga

SEQ ID NO: 2085768 - RNA, 19 nt, Artificial Sequence
  Description of Artificial Sequence: Synthetic oligonucleotide
  Sense strand starting at position 2248 of SEQ ID NO: 1881977
ugaucaucagauugaaggu

SEQ ID NO: 2085769 - RNA, 19 nt, Artificial Sequence
  Description of Artificial Sequence: Synthetic oligonucleotide
  Antisense strand to SEQ ID NO: 2085768
accuucaaucugaugauca

SEQ ID NO: 2085770 - RNA, 19 nt, Artificial Sequence
  Description of Artificial Sequence: Synthetic oligonucleotide
  Sense strand starting at position 2395 of SEQ ID NO: 1881977
auugcaaauggcuaucaua

SEQ ID NO: 2085771 - RNA, 19 nt, Artificial Sequence
  Description of Artificial Sequence: Synthetic oligonucleotide
  Antisense strand to SEQ ID NO: 2085770
uaugauagccauuugcaau

SEQ ID NO: 2085772 - RNA, 19 nt, Artificial Sequence
  Description of Artificial Sequence: Synthetic oligonucleotide
  Sense strand starting at position 2406 of SEQ ID NO: 1881977
cuaucauaugucuaauagu

SEQ ID NO: 2085773 - RNA, 19 nt, Artificial Sequence
  Description of Artificial Sequence: Synthetic oligonucleotide
  Antisense strand to SEQ ID NO: 2085772
acuauuagacauaugauag

SEQ ID NO: 2085774 - RNA, 19 nt, Artificial Sequence
  Description of Artificial Sequence: Synthetic oligonucleotide
  Sense strand starting at position 2584 of SEQ ID NO: 1881977
guggacagagccuauauua

SEQ ID NO: 2085775 - RNA, 19 nt, Artificial Sequence
  Description of Artificial Sequence: Synthetic oligonucleotide
  Antisense strand to SEQ ID NO: 2085774
uaauauaggcucuguccac

SEQ ID NO: 2085776 - RNA, 19 nt, Artificial Sequence
  Description of Artificial Sequence: Synthetic oligonucleotide
  Sense strand starting at position 2680 of SEQ ID NO: 1881977
ugcucuauauuuguuuaga

SEQ ID NO: 2085777 - RNA, 19 nt, Artificial Sequence
  Description of Artificial Sequence: Synthetic oligonucleotide
  Antisense strand to SEQ ID NO: 2085776
ucuaaacaaauauagagca

SEQ ID NO: 2085778 - RNA, 19 nt, Artificial Sequence
  Description of Artificial Sequence: Synthetic oligonucleotide
  Sense strand starting at position 2681 of SEQ ID NO: 1881977
gcucuauauuuguuuagau

SEQ ID NO: 2085779 - RNA, 19 nt, Artificial Sequence
  Description of Artificial Sequence: Synthetic oligonucleotide
  Antisense strand to SEQ ID NO: 2085778
aucuaaacaaauauagagc

SEQ ID NO: 2085780 - RNA, 19 nt, Artificial Sequence
  Description of Artificial Sequence: Synthetic oligonucleotide
  Sense strand starting at position 2709 of SEQ ID NO: 1881977
cuaacuauggugugaagag

SEQ ID NO: 2085781 - RNA, 19 nt, Artificial Sequence
  Description of Artificial Sequence: Synthetic oligonucleotide
  Antisense strand to SEQ ID NO: 2085780
cucuucacaccauaguuag

SEQ ID NO: 2085782 - RNA, 19 nt, Artificial Sequence
  Description of Artificial Sequence: Synthetic oligonucleotide
  Sense strand starting at position 2789 of SEQ ID NO: 1881977
cuuaguauuuguccuuuau

SEQ ID NO: 2085783 - RNA, 19 nt, Artificial Sequence
  Description of Artificial Sequence: Synthetic oligonucleotide
  Antisense strand to SEQ ID NO: 2085782
auaaaggacaaauacuaag

SEQ ID NO: 2085784 - RNA, 19 nt, Artificial Sequence
  Description of Artificial Sequence: Synthetic oligonucleotide
  Sense strand starting at position 2852 of SEQ ID NO: 1881977
gaaaccgugaugugcauuu

SEQ ID NO: 2085785 - RNA, 19 nt, Artificial Sequence
  Description of Artificial Sequence: Synthetic oligonucleotide
  Antisense strand to SEQ ID NO: 2085784
aaaugcacaucacgguuuc

SEQ ID NO: 2085786 - RNA, 19 nt, Artificial Sequence
  Description of Artificial Sequence: Synthetic oligonucleotide
  Sense strand starting at position 2863 of SEQ ID NO: 1881977
gugcauuuacccuguacaa

SEQ ID NO: 2085787 - RNA, 19 nt, Artificial Sequence
  Description of Artificial Sequence: Synthetic oligonucleotide
  Antisense strand to SEQ ID NO: 2085786
uuguacaggguaaaugcac

SEQ ID NO: 2085788 - RNA, 19 nt, Artificial Sequence
  Description of Artificial Sequence: Synthetic oligonucleotide
  Sense strand starting at position 3160 of SEQ ID NO: 1881977
cucaaauuucgcugccuca

SEQ ID NO: 2085789 - RNA, 19 nt, Artificial Sequence
  Description of Artificial Sequence: Synthetic oligonucleotide
  Antisense strand to SEQ ID NO: 2085788
ugaggcagcgaaauuugag

SEQ ID NO: 2085790 - RNA, 19 nt, Artificial Sequence
  Description of Artificial Sequence: Synthetic oligonucleotide
  Sense strand starting at position 3390 of SEQ ID NO: 1881977
cugagugaccuuuacaucu

SEQ ID NO: 2085791 - RNA, 19 nt, Artificial Sequence
  Description of Artificial Sequence: Synthetic oligonucleotide
  Antisense strand to SEQ ID NO: 2085790
agauguaaaggucacucag

SEQ ID NO: 2085792 - RNA, 19 nt, Artificial Sequence
  Description of Artificial Sequence: Synthetic oligonucleotide
  Sense strand starting at position 3585 of SEQ ID NO: 1881977
uuaggcaauugacuugaaa

SEQ ID NO: 2085793 - RNA, 19 nt, Artificial Sequence
  Description of Artificial Sequence: Synthetic oligonucleotide
  Antisense strand to SEQ ID NO: 2085792
uuucaagucaauugccuaa

SEQ ID NO: 2085794 - RNA, 19 nt, Artificial Sequence
  Description of Artificial Sequence: Synthetic oligonucleotide
  Sense strand starting at position 3765 of SEQ ID NO: 1881977
gccuuaauaucugugauuu

SEQ ID NO: 2085795 - RNA, 19 nt, Artificial Sequence
  Description of Artificial Sequence: Synthetic oligonucleotide
  Antisense strand to SEQ ID NO: 2085794
aaaucacagauauuaaggc

SEQ ID NO: 2085796 - RNA, 19 nt, Artificial Sequence
  Description of Artificial Sequence: Synthetic oligonucleotide
  Sense strand starting at position 3904 of SEQ ID NO: 1881977
cuaugaaucuucuuggauc

SEQ ID NO: 2085797 - RNA, 19 nt, Artificial Sequence
  Description of Artificial Sequence: Synthetic oligonucleotide
  Antisense strand to SEQ ID NO: 2085796
gauccaagaagauucauag

SEQ ID NO: 2085798 - RNA, 19 nt, Artificial Sequence
  Description of Artificial Sequence: Synthetic oligonucleotide
  Sense strand starting at position 3906 of SEQ ID NO: 1881977
augaaucuucuuggaucca

SEQ ID NO: 2085799 - RNA, 19 nt, Artificial Sequence
  Description of Artificial Sequence: Synthetic oligonucleotide
  Antisense strand to SEQ ID NO: 2085798
uggauccaagaagauucau

SEQ ID NO: 2085800 - RNA, 19 nt, Artificial Sequence
  Description of Artificial Sequence: Synthetic oligonucleotide
  Sense strand starting at position 3915 of SEQ ID NO: 1881977
cuuggauccacaugaaggu

SEQ ID NO: 2085801 - RNA, 19 nt, Artificial Sequence
  Description of Artificial Sequence: Synthetic oligonucleotide
  Antisense strand to SEQ ID NO: 2085800
accuucauguggauccaag

SEQ ID NO: 2085802 - RNA, 19 nt, Artificial Sequence
  Description of Artificial Sequence: Synthetic oligonucleotide
  Sense strand starting at position 3970 of SEQ ID NO: 1881977
cagagugugcaucagauaa

SEQ ID NO: 2085803 - RNA, 19 nt, Artificial Sequence
  Description of Artificial Sequence: Synthetic oligonucleotide
  Antisense strand to SEQ ID NO: 2085802
uuaucugaugcacacucug

SEQ ID NO: 2085804 - RNA, 19 nt, Artificial Sequence
  Description of Artificial Sequence: Synthetic oligonucleotide
  Sense strand starting at position 124 of SEQ ID NO: 1881978
agucacagucuuuagcuau

SEQ ID NO: 2085805 - RNA, 19 nt, Artificial Sequence
  Description of Artificial Sequence: Synthetic oligonucleotide
  Antisense strand to SEQ ID NO: 2085804
auagcuaaagacugugacu

SEQ ID NO: 2085806 - RNA, 19 nt, Artificial Sequence
  Description of Artificial Sequence: Synthetic oligonucleotide
  Sense strand starting at position 131 of SEQ ID NO: 1881978
gucuuuagcuauccaaagu

SEQ ID NO: 2085807 - RNA, 19 nt, Artificial Sequence
  Description of Artificial Sequence: Synthetic oligonucleotide
  Antisense strand to SEQ ID NO: 2085806
acuuuggauagcuaaagac

SEQ ID NO: 2085808 - RNA, 19 nt, Artificial Sequence
  Description of Artificial Sequence: Synthetic oligonucleotide
  Sense strand starting at position 331 of SEQ ID NO: 1881978
gugauauugucaccucaau

SEQ ID NO: 2085809 - RNA, 19 nt, Artificial Sequence
  Description of Artificial Sequence: Synthetic oligonucleotide
  Antisense strand to SEQ ID NO: 2085808
auugaggugacaauaucac

SEQ ID NO: 2085810 - RNA, 19 nt, Artificial Sequence
  Description of Artificial Sequence: Synthetic oligonucleotide
  Sense strand starting at position 572 of SEQ ID NO: 1881978
gauagagaauuacagugaa

SEQ ID NO: 2085811 - RNA, 19 nt, Artificial Sequence
  Description of Artificial Sequence: Synthetic oligonucleotide
  Antisense strand to SEQ ID NO: 2085810
uucacuguaauucucuauc

SEQ ID NO: 2085812 - RNA, 19 nt, Artificial Sequence
  Description of Artificial Sequence: Synthetic oligonucleotide
  Sense strand starting at position 585 of SEQ ID NO: 1881978
agugaagauuuacaguaau

SEQ ID NO: 2085813 - RNA, 19 nt, Artificial Sequence
  Description of Artificial Sequence: Synthetic oligonucleotide
  Antisense strand to SEQ ID NO: 2085812
auuacuguaaaucuucacu

SEQ ID NO: 2085814 - RNA, 19 nt, Artificial Sequence
  Description of Artificial Sequence: Synthetic oligonucleotide
  Sense strand starting at position 694 of SEQ ID NO: 1881978
ugccgucauuuggccauau

SEQ ID NO: 2085815 - RNA, 19 nt, Artificial Sequence
  Description of Artificial Sequence: Synthetic oligonucleotide
  Antisense strand to SEQ ID NO: 2085814
auauggccaaaugacggca

SEQ ID NO: 2085816 - RNA, 19 nt, Artificial Sequence
  Description of Artificial Sequence: Synthetic oligonucleotide
  Sense strand starting at position 695 of SEQ ID NO: 1881978
gccgucauuuggccauauu

SEQ ID NO: 2085817 - RNA, 19 nt, Artificial Sequence
  Description of Artificial Sequence: Synthetic oligonucleotide
  Antisense strand to SEQ ID NO: 2085816
aauauggccaaaugacggc

SEQ ID NO: 2085818 - RNA, 19 nt, Artificial Sequence
  Description of Artificial Sequence: Synthetic oligonucleotide
  Sense strand starting at position 946 of SEQ ID NO: 1881978
ugcuguauccgggaugaga

SEQ ID NO: 2085819 - RNA, 19 nt, Artificial Sequence
  Description of Artificial Sequence: Synthetic oligonucleotide
  Antisense strand to SEQ ID NO: 2085818
ucucaucccggauacagca

SEQ ID NO: 2085820 - RNA, 19 nt, Artificial Sequence
  Description of Artificial Sequence: Synthetic oligonucleotide
  Sense strand starting at position 948 of SEQ ID NO: 1881978
cuguauccgggaugagaaa

SEQ ID NO: 2085821 - RNA, 19 nt, Artificial Sequence
  Description of Artificial Sequence: Synthetic oligonucleotide
  Antisense strand to SEQ ID NO: 2085820
uuucucaucccggauacag

SEQ ID NO: 2085822 - RNA, 19 nt, Artificial Sequence
  Description of Artificial Sequence: Synthetic oligonucleotide
  Sense strand starting at position 998 of SEQ ID NO: 1881978
aggaaucccucagugaugu

SEQ ID NO: 2085823 - RNA, 19 nt, Artificial Sequence
  Description of Artificial Sequence: Synthetic oligonucleotide
  Antisense strand to SEQ ID NO: 2085822
acaucacugagggauuccu

SEQ ID NO: 2085824 - RNA, 19 nt, Artificial Sequence
  Description of Artificial Sequence: Synthetic oligonucleotide
  Sense strand starting at position 1056 of SEQ ID NO: 1881978
uuaugcgucucauuauuua

SEQ ID NO: 2085825 - RNA, 19 nt, Artificial Sequence
  Description of Artificial Sequence: Synthetic oligonucleotide
  Antisense strand to SEQ ID NO: 2085824
uaaauaaugagacgcauaa

SEQ ID NO: 2085826 - RNA, 19 nt, Artificial Sequence
  Description of Artificial Sequence: Synthetic oligonucleotide
  Sense strand starting at position 1059 of SEQ ID NO: 1881978
ugcgucucauuauuuaauu

SEQ ID NO: 2085827 - RNA, 19 nt, Artificial Sequence
  Description of Artificial Sequence: Synthetic oligonucleotide
  Antisense strand to SEQ ID NO: 2085826
aauuaaauaaugagacgca

SEQ ID NO: 2085828 - RNA, 19 nt, Artificial Sequence
  Description of Artificial Sequence: Synthetic oligonucleotide
  Sense strand starting at position 1060 of SEQ ID NO: 1881978
gcgucucauuauuuaauug

SEQ ID NO: 2085829 - RNA, 19 nt, Artificial Sequence
  Description of Artificial Sequence: Synthetic oligonucleotide
  Antisense strand to SEQ ID NO: 2085828
caauuaaauaaugagacgc

SEQ ID NO: 2085830 - RNA, 19 nt, Artificial Sequence
  Description of Artificial Sequence: Synthetic oligonucleotide
  Sense strand starting at position 1152 of SEQ ID NO: 1881978
cccaguuguggcugagacu

SEQ ID NO: 2085831 - RNA, 19 nt, Artificial Sequence
  Description of Artificial Sequence: Synthetic oligonucleotide
  Antisense strand to SEQ ID NO: 2085830
agucucagccacaacuggg

SEQ ID NO: 2085832 - RNA, 19 nt, Artificial Sequence
  Description of Artificial Sequence: Synthetic oligonucleotide
  Sense strand starting at position 1163 of SEQ ID NO: 1881978
cugagacugcuauguguua

SEQ ID NO: 2085833 - RNA, 19 nt, Artificial Sequence
  Description of Artificial Sequence: Synthetic oligonucleotide
  Antisense strand to SEQ ID NO: 2085832
uaacacauagcagucucag

SEQ ID NO: 2085834 - RNA, 19 nt, Artificial Sequence
  Description of Artificial Sequence: Synthetic oligonucleotide
  Sense strand starting at position 1165 of SEQ ID NO: 1881978
gagacugcuauguguuagu

SEQ ID NO: 2085835 - RNA, 19 nt, Artificial Sequence
  Description of Artificial Sequence: Synthetic oligonucleotide
  Antisense strand to SEQ ID NO: 2085834
acuaacacauagcagucuc

SEQ ID NO: 2085836 - RNA, 19 nt, Artificial Sequence
  Description of Artificial Sequence: Synthetic oligonucleotide
  Sense strand starting at position 1172 of SEQ ID NO: 1881978
cuauguguuagucaaguuc

SEQ ID NO: 2085837 - RNA, 19 nt, Artificial Sequence
  Description of Artificial Sequence: Synthetic oligonucleotide
  Antisense strand to SEQ ID NO: 2085836
gaacuugacuaacacauag

SEQ ID NO: 2085838 - RNA, 19 nt, Artificial Sequence
  Description of Artificial Sequence: Synthetic oligonucleotide
  Sense strand starting at position 1179 of SEQ ID NO: 1881978
uuagucaaguuccaaauuu

SEQ ID NO: 2085839 - RNA, 19 nt, Artificial Sequence
  Description of Artificial Sequence: Synthetic oligonucleotide
  Antisense strand to SEQ ID NO: 2085838
aaauuuggaacuugacuaa

SEQ ID NO: 2085840 - RNA, 19 nt, Artificial Sequence
  Description of Artificial Sequence: Synthetic oligonucleotide
  Sense strand starting at position 1401 of SEQ ID NO: 1881978
ggcucaucgggcugaucua

SEQ ID NO: 2085841 - RNA, 19 nt, Artificial Sequence
  Description of Artificial Sequence: Synthetic oligonucleotide
  Antisense strand to SEQ ID NO: 2085840
uagaucagcccgaugagcc

SEQ ID NO: 2085842 - RNA, 19 nt, Artificial Sequence
  Description of Artificial Sequence: Synthetic oligonucleotide
  Sense strand starting at position 1420 of SEQ ID NO: 1881978
gcauaaucuccuggucuua

SEQ ID NO: 2085843 - RNA, 19 nt, Artificial Sequence
  Description of Artificial Sequence: Synthetic oligonucleotide
  Antisense strand to SEQ ID NO: 2085842
uaagaccaggagauuaugc

SEQ ID NO: 2085844 - RNA, 19 nt, Artificial Sequence
  Description of Artificial Sequence: Synthetic oligonucleotide
  Sense strand starting at position 1432 of SEQ ID NO: 1881978
ggucuuaaaggucaucuua

SEQ ID NO: 2085845 - RNA, 19 nt, Artificial Sequence
  Description of Artificial Sequence: Synthetic oligonucleotide
  Antisense strand to SEQ ID NO: 2085844
uaagaugaccuuuaagacc

SEQ ID NO: 2085846 - RNA, 19 nt, Artificial Sequence
  Description of Artificial Sequence: Synthetic oligonucleotide
  Sense strand starting at position 1619 of SEQ ID NO: 1881978
ucaccuaagcucugguaau

SEQ ID NO: 2085847 - RNA, 19 nt, Artificial Sequence
  Description of Artificial Sequence: Synthetic oligonucleotide
  Antisense strand to SEQ ID NO: 2085846
auuaccagagcuuagguga

SEQ ID NO: 2085848 - RNA, 19 nt, Artificial Sequence
  Description of Artificial Sequence: Synthetic oligonucleotide
  Sense strand starting at position 2296 of SEQ ID NO: 1881978
guuaguauucuguaggcau

SEQ ID NO: 2085849 - RNA, 19 nt, Artificial Sequence
  Description of Artificial Sequence: Synthetic oligonucleotide
  Antisense strand to SEQ ID NO: 2085848
augccuacagaauacuaac

SEQ ID NO: 2085850 - RNA, 19 nt, Artificial Sequence
  Description of Artificial Sequence: Synthetic oligonucleotide
  Sense strand starting at position 2307 of SEQ ID NO: 1881978
guaggcauagccugaguua

SEQ ID NO: 2085851 - RNA, 19 nt, Artificial Sequence
  Description of Artificial Sequence: Synthetic oligonucleotide
  Antisense strand to SEQ ID NO: 2085850
uaacucaggcuaugccuac

SEQ ID NO: 2085852 - RNA, 19 nt, Artificial Sequence
  Description of Artificial Sequence: Synthetic oligonucleotide
  Sense strand starting at position 2310 of SEQ ID NO: 1881978
ggcauagccugaguuagaa

SEQ ID NO: 2085853 - RNA, 19 nt, Artificial Sequence
  Description of Artificial Sequence: Synthetic oligonucleotide
  Antisense strand to SEQ ID NO: 2085852
uucuaacucaggcuaugcc

SEQ ID NO: 2085854 - RNA, 19 nt, Artificial Sequence
  Description of Artificial Sequence: Synthetic oligonucleotide
  Sense strand starting at position 2322 of SEQ ID NO: 1881978
guuagaagauauguuacuu

SEQ ID NO: 2085855 - RNA, 19 nt, Artificial Sequence
  Description of Artificial Sequence: Synthetic oligonucleotide
  Antisense strand to SEQ ID NO: 2085854
aaguaacauaucuucuaac

SEQ ID NO: 2085856 - RNA, 19 nt, Artificial Sequence
  Description of Artificial Sequence: Synthetic oligonucleotide
  Sense strand starting at position 2351 of SEQ ID NO: 1881978
gcuguaacgaauugccaca

SEQ ID NO: 2085857 - RNA, 19 nt, Artificial Sequence
  Description of Artificial Sequence: Synthetic oligonucleotide
  Antisense strand to SEQ ID NO: 2085856
uguggcaauucguuacagc

SEQ ID NO: 2085858 - RNA, 19 nt, Artificial Sequence
  Description of Artificial Sequence: Synthetic oligonucleotide
  Sense strand starting at position 2404 of SEQ ID NO: 1881978
cuugcaguucugcaaguca

SEQ ID NO: 2085859 - RNA, 19 nt, Artificial Sequence
  Description of Artificial Sequence: Synthetic oligonucleotide
  Antisense strand to SEQ ID NO: 2085858
ugacuugcagaacugcaag

SEQ ID NO: 2085860 - RNA, 19 nt, Artificial Sequence
  Description of Artificial Sequence: Synthetic oligonucleotide
  Sense strand starting at position 2680 of SEQ ID NO: 1881978
gcauaaucucccggucuua

SEQ ID NO: 2085861 - RNA, 19 nt, Artificial Sequence
  Description of Artificial Sequence: Synthetic oligonucleotide
  Antisense strand to SEQ ID NO: 2085860
uaagaccgggagauuaugc

SEQ ID NO: 2085862 - RNA, 19 nt, Artificial Sequence
  Description of Artificial Sequence: Synthetic oligonucleotide
  Sense strand starting at position 2700 of SEQ ID NO: 1881978
aggucaucuuaauuagaga

SEQ ID NO: 2085863 - RNA, 19 nt, Artificial Sequence
  Description of Artificial Sequence: Synthetic oligonucleotide
  Antisense strand to SEQ ID NO: 2085862
ucucuaauuaagaugaccu

SEQ ID NO: 2085864 - RNA, 19 nt, Artificial Sequence
  Description of Artificial Sequence: Synthetic oligonucleotide
  Sense strand starting at position 2737 of SEQ ID NO: 1881978
gcuuaaugcuuauuugcca

SEQ ID NO: 2085865 - RNA, 19 nt, Artificial Sequence
  Description of Artificial Sequence: Synthetic oligonucleotide
  Antisense strand to SEQ ID NO: 2085864
uggcaaauaagcauuaagc

SEQ ID NO: 2085866 - RNA, 19 nt, Artificial Sequence
  Description of Artificial Sequence: Synthetic oligonucleotide
  Sense strand starting at position 2876 of SEQ ID NO: 1881978
gguggaaucuaaccuuaaa

SEQ ID NO: 2085867 - RNA, 19 nt, Artificial Sequence
  Description of Artificial Sequence: Synthetic oligonucleotide
  Antisense strand to SEQ ID NO: 2085866
uuuaagguuagauuccacc

SEQ ID NO: 2085868 - RNA, 19 nt, Artificial Sequence
  Description of Artificial Sequence: Synthetic oligonucleotide
  Sense strand starting at position 3060 of SEQ ID NO: 1881978
uuuguacauucuuuagagu

SEQ ID NO: 2085869 - RNA, 19 nt, Artificial Sequence
  Description of Artificial Sequence: Synthetic oligonucleotide
  Antisense strand to SEQ ID NO: 2085868
acucuaaagaauguacaaa

SEQ ID NO: 2085870 - RNA, 19 nt, Artificial Sequence
  Description of Artificial Sequence: Synthetic oligonucleotide
  Sense strand starting at position 3157 of SEQ ID NO: 1881978
aaaguaauggugcaaacau

SEQ ID NO: 2085871 - RNA, 19 nt, Artificial Sequence
  Description of Artificial Sequence: Synthetic oligonucleotide
  Antisense strand to SEQ ID NO: 2085870
auguuugcaccauuacuuu

SEQ ID NO: 2085872 - RNA, 19 nt, Artificial Sequence
  Description of Artificial Sequence: Synthetic oligonucleotide
  Sense strand starting at position 3202 of SEQ ID NO: 1881978
gagagucagucuuugcauc

SEQ ID NO: 2085873 - RNA, 19 nt, Artificial Sequence
  Description of Artificial Sequence: Synthetic oligonucleotide
  Antisense strand to SEQ ID NO: 2085872
gaugcaaagacugacucuc

SEQ ID NO: 2085874 - RNA, 19 nt, Artificial Sequence
  Description of Artificial Sequence: Synthetic oligonucleotide
  Sense strand starting at position 3203 of SEQ ID NO: 1881978
agagucagucuuugcaucu

SEQ ID NO: 2085875 - RNA, 19 nt, Artificial Sequence
  Description of Artificial Sequence: Synthetic oligonucleotide
  Antisense strand to SEQ ID NO: 2085874
agaugcaaagacugacucu

SEQ ID NO: 2085876 - RNA, 19 nt, Artificial Sequence
  Description of Artificial Sequence: Synthetic oligonucleotide
  Sense strand starting at position 3204 of SEQ ID NO: 1881978
gagucagucuuugcaucuu

SEQ ID NO: 2085877 - RNA, 19 nt, Artificial Sequence
  Description of Artificial Sequence: Synthetic oligonucleotide
  Antisense strand to SEQ ID NO: 2085876
aagaugcaaagacugacuc

SEQ ID NO: 2085878 - RNA, 19 nt, Artificial Sequence
  Description of Artificial Sequence: Synthetic oligonucleotide
  Sense strand starting at position 3625 of SEQ ID NO: 1881978
gaacuucuacuauguguag

SEQ ID NO: 2085879 - RNA, 19 nt, Artificial Sequence
  Description of Artificial Sequence: Synthetic oligonucleotide
  Antisense strand to SEQ ID NO: 2085878
cuacacauaguagaaguuc

SEQ ID NO: 2085880 - RNA, 19 nt, Artificial Sequence
  Description of Artificial Sequence: Synthetic oligonucleotide
  Sense strand starting at position 3949 of SEQ ID NO: 1881978
cuacuauguguguaugcau

SEQ ID NO: 2085881 - RNA, 19 nt, Artificial Sequence
  Description of Artificial Sequence: Synthetic oligonucleotide
  Antisense strand to SEQ ID NO: 2085880
augcauacacacauaguag

SEQ ID NO: 2085882 - RNA, 19 nt, Artificial Sequence
  Description of Artificial Sequence: Synthetic oligonucleotide
  Sense strand starting at position 3952 of SEQ ID NO: 1881978
cuauguguguaugcauaca

SEQ ID NO: 2085883 - RNA, 19 nt, Artificial Sequence
  Description of Artificial Sequence: Synthetic oligonucleotide
  Antisense strand to SEQ ID NO: 2085882
uguaugcauacacacauag

SEQ ID NO: 2085884 - RNA, 19 nt, Artificial Sequence
  Description of Artificial Sequence: Synthetic oligonucleotide
  Sense strand starting at position 62 of SEQ ID NO: 1881979
agcccuguuaaugggaauu

SEQ ID NO: 2085885 - RNA, 19 nt, Artificial Sequence
  Description of Artificial Sequence: Synthetic oligonucleotide
  Antisense strand to SEQ ID NO: 2085884
aauucccauuaacagggcu

SEQ ID NO: 2085886 - RNA, 19 nt, Artificial Sequence
  Description of Artificial Sequence: Synthetic oligonucleotide
  Sense strand starting at position 64 of SEQ ID NO: 1881979
cccuguuaaugggaauuua

SEQ ID NO: 2085887 - RNA, 19 nt, Artificial Sequence
  Description of Artificial Sequence: Synthetic oligonucleotide
  Antisense strand to SEQ ID NO: 2085886
uaaauucccauuaacaggg

SEQ ID NO: 2085888 - RNA, 19 nt, Artificial Sequence
  Description of Artificial Sequence: Synthetic oligonucleotide
  Sense strand starting at position 143 of SEQ ID NO: 1881979
gaaguaauugaccgacccu

SEQ ID NO: 2085889 - RNA, 19 nt, Artificial Sequence
  Description of Artificial Sequence: Synthetic oligonucleotide
  Antisense strand to SEQ ID NO: 2085888
agggucggucaauuacuuc

SEQ ID NO: 2085890 - RNA, 19 nt, Artificial Sequence
  Description of Artificial Sequence: Synthetic oligonucleotide
  Sense strand starting at position 306 of SEQ ID NO: 1881979
aggucuaauugggugaguu

SEQ ID NO: 2085891 - RNA, 19 nt, Artificial Sequence
  Description of Artificial Sequence: Synthetic oligonucleotide
  Antisense strand to SEQ ID NO: 2085890
aacucacccaauuagaccu

SEQ ID NO: 2085892 - RNA, 19 nt, Artificial Sequence
  Description of Artificial Sequence: Synthetic oligonucleotide
  Sense strand starting at position 307 of SEQ ID NO: 1881979
ggucuaauugggugaguuu

SEQ ID NO: 2085893 - RNA, 19 nt, Artificial Sequence
  Description of Artificial Sequence: Synthetic oligonucleotide
  Antisense strand to SEQ ID NO: 2085892
aaacucacccaauuagacc

SEQ ID NO: 2085894 - RNA, 19 nt, Artificial Sequence
  Description of Artificial Sequence: Synthetic oligonucleotide
  Sense strand starting at position 719 of SEQ ID NO: 1881979
gccgucuuucaggaagguu

SEQ ID NO: 2085895 - RNA, 19 nt, Artificial Sequence
  Description of Artificial Sequence: Synthetic oligonucleotide
  Antisense strand to SEQ ID NO: 2085894
aaccuuccugaaagacggc

SEQ ID NO: 2085896 - RNA, 19 nt, Artificial Sequence
  Description of Artificial Sequence: Synthetic oligonucleotide
  Sense strand starting at position 1397 of SEQ ID NO: 1881979
ucacuuggccuggagcaua

SEQ ID NO: 2085897 - RNA, 19 nt, Artificial Sequence
  Description of Artificial Sequence: Synthetic oligonucleotide
  Antisense strand to SEQ ID NO: 2085896
uaugcuccaggccaaguga

SEQ ID NO: 2085898 - RNA, 19 nt, Artificial Sequence
  Description of Artificial Sequence: Synthetic oligonucleotide
  Sense strand starting at position 1668 of SEQ ID NO: 1881979
ucgccuuucggcuuuacaa

SEQ ID NO: 2085899 - RNA, 19 nt, Artificial Sequence
  Description of Artificial Sequence: Synthetic oligonucleotide
  Antisense strand to SEQ ID NO: 2085898
uuguaaagccgaaaggcga

SEQ ID NO: 2085900 - RNA, 19 nt, Artificial Sequence
  Description of Artificial Sequence: Synthetic oligonucleotide
  Sense strand starting at position 1670 of SEQ ID NO: 1881979
gccuuucggcuuuacaaca

SEQ ID NO: 2085901 - RNA, 19 nt, Artificial Sequence
  Description of Artificial Sequence: Synthetic oligonucleotide
  Antisense strand to SEQ ID NO: 2085900
uguuguaaagccgaaaggc

SEQ ID NO: 2085902 - RNA, 19 nt, Artificial Sequence
  Description of Artificial Sequence: Synthetic oligonucleotide
  Sense strand starting at position 2231 of SEQ ID NO: 1881979
guuacagaccuaugaacag

SEQ ID NO: 2085903 - RNA, 19 nt, Artificial Sequence
  Description of Artificial Sequence: Synthetic oligonucleotide
  Antisense strand to SEQ ID NO: 2085902
cuguucauaggucuguaac

SEQ ID NO: 2085904 - RNA, 19 nt, Artificial Sequence
  Description of Artificial Sequence: Synthetic oligonucleotide
  Sense strand starting at position 2266 of SEQ ID NO: 1881979
gggacaaaccguugaggua

SEQ ID NO: 2085905 - RNA, 19 nt, Artificial Sequence
  Description of Artificial Sequence: Synthetic oligonucleotide
  Antisense strand to SEQ ID NO: 2085904
uaccucaacgguuuguccc

SEQ ID NO: 2085906 - RNA, 19 nt, Artificial Sequence
  Description of Artificial Sequence: Synthetic oligonucleotide
  Sense strand starting at position 2267 of SEQ ID NO: 1881979
ggacaaaccguugagguaa

SEQ ID NO: 2085907 - RNA, 19 nt, Artificial Sequence
  Description of Artificial Sequence: Synthetic oligonucleotide
  Antisense strand to SEQ ID NO: 2085906
uuaccucaacgguuugucc

SEQ ID NO: 2085908 - RNA, 19 nt, Artificial Sequence
  Description of Artificial Sequence: Synthetic oligonucleotide
  Sense strand starting at position 2533 of SEQ ID NO: 1881979
caccgugugcaagaauguu

SEQ ID NO: 2085909 - RNA, 19 nt, Artificial Sequence
  Description of Artificial Sequence: Synthetic oligonucleotide
  Antisense strand to SEQ ID NO: 2085908
aacauucuugcacacggug

SEQ ID NO: 2085910 - RNA, 19 nt, Artificial Sequence
  Description of Artificial Sequence: Synthetic oligonucleotide
  Sense strand starting at position 2667 of SEQ ID NO: 1881979
ugugcaaucaguuggauug

SEQ ID NO: 2085911 - RNA, 19 nt, Artificial Sequence
  Description of Artificial Sequence: Synthetic oligonucleotide
  Antisense strand to SEQ ID NO: 2085910
caauccaacugauugcaca

SEQ ID NO: 2085912 - RNA, 19 nt, Artificial Sequence
  Description of Artificial Sequence: Synthetic oligonucleotide
  Sense strand starting at position 2668 of SEQ ID NO: 1881979
gugcaaucaguuggauuga

SEQ ID NO: 2085913 - RNA, 19 nt, Artificial Sequence
  Description of Artificial Sequence: Synthetic oligonucleotide
  Antisense strand to SEQ ID NO: 2085912
ucaauccaacugauugcac

SEQ ID NO: 2085914 - RNA, 19 nt, Artificial Sequence
  Description of Artificial Sequence: Synthetic oligonucleotide
  Sense strand starting at position 2691 of SEQ ID NO: 1881979
ggaggugucuccuuuccca

SEQ ID NO: 2085915 - RNA, 19 nt, Artificial Sequence
  Description of Artificial Sequence: Synthetic oligonucleotide
  Antisense strand to SEQ ID NO: 2085914
ugggaaaggagacaccucc

SEQ ID NO: 2085916 - RNA, 19 nt, Artificial Sequence
  Description of Artificial Sequence: Synthetic oligonucleotide
  Sense strand starting at position 2732 of SEQ ID NO: 1881979
ucugcaaagucuuccagga

SEQ ID NO: 2085917 - RNA, 19 nt, Artificial Sequence
  Description of Artificial Sequence: Synthetic oligonucleotide
  Antisense strand to SEQ ID NO: 2085916
uccuggaagacuuugcaga

SEQ ID NO: 2085918 - RNA, 19 nt, Artificial Sequence
  Description of Artificial Sequence: Synthetic oligonucleotide
  Sense strand starting at position 2823 of SEQ ID NO: 1881979
ucaccucuggccugucauu

SEQ ID NO: 2085919 - RNA, 19 nt, Artificial Sequence
  Description of Artificial Sequence: Synthetic oligonucleotide
  Antisense strand to SEQ ID NO: 2085918
aaugacaggccagagguga

SEQ ID NO: 2085920 - RNA, 19 nt, Artificial Sequence
  Description of Artificial Sequence: Synthetic oligonucleotide
  Sense strand starting at position 2871 of SEQ ID NO: 1881979
gggugagaagucuagagca

SEQ ID NO: 2085921 - RNA, 19 nt, Artificial Sequence
  Description of Artificial Sequence: Synthetic oligonucleotide
  Antisense strand to SEQ ID NO: 2085920
ugcucuagacuucucaccc

SEQ ID NO: 2085922 - RNA, 19 nt, Artificial Sequence
  Description of Artificial Sequence: Synthetic oligonucleotide
  Sense strand starting at position 2873 of SEQ ID NO: 1881979
gugagaagucuagagcaca

SEQ ID NO: 2085923 - RNA, 19 nt, Artificial Sequence
  Description of Artificial Sequence: Synthetic oligonucleotide
  Antisense strand to SEQ ID NO: 2085922
ugugcucuagacuucucac

SEQ ID NO: 2085924 - RNA, 19 nt, Artificial Sequence
  Description of Artificial Sequence: Synthetic oligonucleotide
  Sense strand starting at position 3001 of SEQ ID NO: 1881979
guugucugcucauuuguca

SEQ ID NO: 2085925 - RNA, 19 nt, Artificial Sequence
  Description of Artificial Sequence: Synthetic oligonucleotide
  Antisense strand to SEQ ID NO: 2085924
ugacaaaugagcagacaac

SEQ ID NO: 2085926 - RNA, 19 nt, Artificial Sequence
  Description of Artificial Sequence: Synthetic oligonucleotide
  Sense strand starting at position 3112 of SEQ ID NO: 1881979
ggugacauuggcugagaga

SEQ ID NO: 2085927 - RNA, 19 nt, Artificial Sequence
  Description of Artificial Sequence: Synthetic oligonucleotide
  Antisense strand to SEQ ID NO: 2085926
ucucucagccaaugucacc

SEQ ID NO: 2085928 - RNA, 19 nt, Artificial Sequence
  Description of Artificial Sequence: Synthetic oligonucleotide
  Sense strand starting at position 3135 of SEQ ID NO: 1881979
guagaaagaugaguuaguu

SEQ ID NO: 2085929 - RNA, 19 nt, Artificial Sequence
  Description of Artificial Sequence: Synthetic oligonucleotide
  Antisense strand to SEQ ID NO: 2085928
aacuaacucaucuuucuac

SEQ ID NO: 2085930 - RNA, 19 nt, Artificial Sequence
  Description of Artificial Sequence: Synthetic oligonucleotide
  Sense strand starting at position 3144 of SEQ ID NO: 1881979
ugaguuaguuauucucucu

SEQ ID NO: 2085931 - RNA, 19 nt, Artificial Sequence
  Description of Artificial Sequence: Synthetic oligonucleotide
  Antisense strand to SEQ ID NO: 2085930
agagagaauaacuaacuca

SEQ ID NO: 2085932 - RNA, 19 nt, Artificial Sequence
  Description of Artificial Sequence: Synthetic oligonucleotide
  Sense strand starting at position 3200 of SEQ ID NO: 1881979
gaacaaucagggugugcaa

SEQ ID NO: 2085933 - RNA, 19 nt, Artificial Sequence
  Description of Artificial Sequence: Synthetic oligonucleotide
  Antisense strand to SEQ ID NO: 2085932
uugcacacccugauuguuc

SEQ ID NO: 2085934 - RNA, 19 nt, Artificial Sequence
  Description of Artificial Sequence: Synthetic oligonucleotide
  Sense strand starting at position 3293 of SEQ ID NO: 1881979
cgaaguugaaacugugguu

SEQ ID NO: 2085935 - RNA, 19 nt, Artificial Sequence
  Description of Artificial Sequence: Synthetic oligonucleotide
  Antisense strand to SEQ ID NO: 2085934
aaccacaguuucaacuucg

SEQ ID NO: 2085936 - RNA, 19 nt, Artificial Sequence
  Description of Artificial Sequence: Synthetic oligonucleotide
  Sense strand starting at position 3309 of SEQ ID NO: 1881979
guuccaaguccugacucua

SEQ ID NO: 2085937 - RNA, 19 nt, Artificial Sequence
  Description of Artificial Sequence: Synthetic oligonucleotide
  Antisense strand to SEQ ID NO: 2085936
uagagucaggacuuggaac

SEQ ID NO: 2085938 - RNA, 19 nt, Artificial Sequence
  Description of Artificial Sequence: Synthetic oligonucleotide
  Sense strand starting at position 3322 of SEQ ID NO: 1881979
acucuacaguguuugccaa

SEQ ID NO: 2085939 - RNA, 19 nt, Artificial Sequence
  Description of Artificial Sequence: Synthetic oligonucleotide
  Antisense strand to SEQ ID NO: 2085938
uuggcaaacacuguagagu

SEQ ID NO: 2085940 - RNA, 19 nt, Artificial Sequence
  Description of Artificial Sequence: Synthetic oligonucleotide
  Sense strand starting at position 3323 of SEQ ID NO: 1881979
cucuacaguguuugccaaa

SEQ ID NO: 2085941 - RNA, 19 nt, Artificial Sequence
  Description of Artificial Sequence: Synthetic oligonucleotide
  Antisense strand to SEQ ID NO: 2085940
uuuggcaaacacuguagag

SEQ ID NO: 2085942 - RNA, 19 nt, Artificial Sequence
  Description of Artificial Sequence: Synthetic oligonucleotide
  Sense strand starting at position 3324 of SEQ ID NO: 1881979
ucuacaguguuugccaaau

SEQ ID NO: 2085943 - RNA, 19 nt, Artificial Sequence
  Description of Artificial Sequence: Synthetic oligonucleotide
  Antisense strand to SEQ ID NO: 2085942
auuuggcaaacacuguaga

SEQ ID NO: 2085944 - RNA, 19 nt, Artificial Sequence
  Description of Artificial Sequence: Synthetic oligonucleotide
  Sense strand starting at position 3330 of SEQ ID NO: 1881979
guguuugccaaaugaggua

SEQ ID NO: 2085945 - RNA, 19 nt, Artificial Sequence
  Description of Artificial Sequence: Synthetic oligonucleotide
  Antisense strand to SEQ ID NO: 2085944
uaccucauuuggcaaacac

SEQ ID NO: 2085946 - RNA, 19 nt, Artificial Sequence
  Description of Artificial Sequence: Synthetic oligonucleotide
  Sense strand starting at position 3587 of SEQ ID NO: 1881979
gggcuuauccguguuagca

SEQ ID NO: 2085947 - RNA, 19 nt, Artificial Sequence
  Description of Artificial Sequence: Synthetic oligonucleotide
  Antisense strand to SEQ ID NO: 2085946
ugcuaacacggauaagccc

SEQ ID NO: 2085948 - RNA, 19 nt, Artificial Sequence
  Description of Artificial Sequence: Synthetic oligonucleotide
  Sense strand starting at position 3588 of SEQ ID NO: 1881979
ggcuuauccguguuagcac

SEQ ID NO: 2085949 - RNA, 19 nt, Artificial Sequence
  Description of Artificial Sequence: Synthetic oligonucleotide
  Antisense strand to SEQ ID NO: 2085948
gugcuaacacggauaagcc

SEQ ID NO: 2085950 - RNA, 19 nt, Artificial Sequence
  Description of Artificial Sequence: Synthetic oligonucleotide
  Sense strand starting at position 3627 of SEQ ID NO: 1881979
gugauauagcagcagcagu

SEQ ID NO: 2085951 - RNA, 19 nt, Artificial Sequence
  Description of Artificial Sequence: Synthetic oligonucleotide
  Antisense strand to SEQ ID NO: 2085950
acugcugcugcuauaucac
